(19) United States
(12) Patent Application Publication
(10) Pub. No.: US 2022/0267777 A1
(43) Pub. Date: Aug. 25, 2022

(54) DIFFERENTIAL KNOCKOUT OF A HETEROZYGOUS ALLELE OF RPE65

(71) Applicants: David Baram, Tel Aviv (IL); Lior Izhar, Tel Aviv (IL); Asael Herman, Ness-Ziona (IL); Rafi Emmanuel, Ramla (IL); Michal Golan Mashiach, Ness-Ziona (IL); Joseph Georgeson, Rehovot (IL)

(72) Inventors: David Baram, Tel Aviv (IL); Lior Izhar, Tel Aviv (IL); Asael Herman, Ness-Ziona (IL); Rafi Emmanuel, Ramla (IL); Michal Golan Mashiach, Ness-Ziona (IL); Joseph Georgeson, Rehovot (IL)

(73) Assignee: EmendoBio Inc., Wilmington, DE (US)

(21) Appl. No.: 17/625,290

(22) PCT Filed: Jul. 10, 2020
(86) PCT No.: PCT/US2020/041569

§ 371 Date: Jan. 6, 2022

Related U.S. Application Data
(60) Provisional application No. 62/872,514, filed on Jul. 10, 2019.

(51) Int. Cl. C12N 15/113

(52) U.S. Cl. CPC C12N 15/1137; C12N 2320/34; C12N 2310/20; C12Y 301/01064

(57) ABSTRACT

RNA molecules comprising a guide sequence portion having 17-25 contiguous nucleotides in the sequence set forth in any one of SEQ ID NOs: 1-49516 and compositions, methods, and uses thereof.

[0001] This application claims the benefit of U.S. Provisional Application No. 62/872,514, filed Jul. 10, 2019, the contents of which are hereby incorporated by reference.

[0002] Throughout this application, various publications are referenced, including referenced in parenthesis. The disclosures of all publications mentioned in this application in their entireties are hereby incorporated by reference into this application in order to provide additional description of the art to which this invention pertains and of the features in the art which can be employed with this invention.

### REFERENCE TO SEQUENCE LISTING

[0003] This application incorporates-by-reference nucleotide sequences which are present in the file named “200710_91034-A-PCT_Sequence_Listing_AWG.txt”, which is 9,361 kilobytes in size, and which was created on Jul. 6, 2020 in the IBM-PC machine format, having an operating system compatibility with MS-Windows, which is contained in the text file filed Jul. 10, 2020 as part of this application.

### BACKGROUND OF INVENTION

[0004] There are several classes of DNA variation in the human genome, including insertions and deletions, differences in the copy number of repeated sequences, and single nucleotide polymorphisms (SNPs). A SNP is a DNA sequence variation occurring when a single nucleotide (adenine (A), thymine (T), cytosine (C), or guanine (G)) in the genome differs between human subjects or paired chromosomes in an individual. Over the years, the different types of DNA variations have been the focus of the research community either as markers in studies to pinpoint traits or disease causation or as potential causes of genetic disorders.

[0005] A genetic disorder is caused by one or more abnormalities in the genome. Genetic disorders may be regarded as either “dominant” or “recessive.” Recessive genetic disorders are those which require two copies (i.e., two alleles) of the abnormal/defective gene to be present. In contrast, a dominant genetic disorder involves a gene or genes which exhibit(s) dominance over a normal (functional/healthy) gene or genes. As such, in dominant genetic disorders only a single copy (i.e., allele) of an abnormal gene is required to cause or contribute to the symptoms of a particular genetic disorder. Such mutations include, for example, gain-of-function mutations in which the altered gene product possesses a new molecular function or a new pattern of gene expression. Other examples include dominant negative mutations, which have a gene product that acts antagonistically to the wild-type allele.

### Dominant RPE65 Mutation Related Disorder

[0006] Most of the mutations in the retinal pigment epithelium-specific 65 kDa protein gene (RPE65) are recessive. However, an Asp477Gly in Exon 13 was shown to be a dominant RPE65 mutation resulting in retinitis pigmentosa (Sara J. Bowne et al. 2011). Yet another mutation originally characterized to be semidominant in mice (Wright et al. 2013) was identified in humans as well (R44X_rs368088025_G>A).

### SUMMARY OF THE INVENTION

[0007] Disclosed is an approach for knocking out the expression of a dominant-mutated RPE65 allele by disrupting the dominant-mutated allele or degrading the resulting mRNA.

[0008] The present disclosure provides a method for utilizing at least one naturally occurring nucleotide difference or polymorphism (e.g., single nucleotide polymorphism (SNP)) for distinguishing/discriminating between two alleles of a gene, one allele bearing a mutation such that it encodes a mutated protein causing a disease phenotype (“mutated allele”) and a particular sequence in a SNP position (REF/SNP), and the other allele encoding for a functional protein (“functional allele”). In some embodiments, the SNP position is utilized for distinguishing/discriminating between two alleles of a gene bearing one or more disease associated mutations, such as to target one of the alleles bearing both the particular sequence in the SNP position (SNP/REF) and a disease associated mutation. In some embodiments, the disease-associated mutation is targeted. In some embodiments, the method further comprises the step of knocking out expression of the mutated protein and allowing expression of the functional protein.

[0009] The present disclosure also provides a method for modifying in a cell a mutant allele of the retinal pigment epithelium-specific 65 kDa protein gene (RPE65) gene having a mutation associated with a dominant RPE65 gene disorder, the method comprising
[0010] introducing to the cell a composition comprising:
   [0011] a CRISPR nuclease or a sequence encoding the CRISPR nuclease; and
   [0012] a first RNA molecule comprising a guide sequence portion having 17-25 nucleotides or a nucleotide sequence encoding the same,
[0013] wherein a complex of the CRISPR nuclease and the first RNA molecule affects a double strand break in the mutant allele of the RPE65 gene.

[0014] According to embodiments of the present invention, there is provided a first RNA molecule comprising a guide sequence portion having 17-25 contiguous nucleotides containing nucleotides in the sequence set forth in any one of SEQ ID Nos: 1-49516.

[0015] According to some embodiments of the present invention, there is provided a composition comprising an RNA molecule comprising a guide sequence portion having 17-25 contiguous nucleotides containing nucleotides in the sequence set forth in any one of SEQ ID NOs: 1-49516 and a CRISPR nuclease.

[0016] According to some embodiments of the present invention, there is provided a method for inactivating a mutant RPE65 allele in a cell, the method comprising delivering to the cell a composition comprising an RNA molecule comprising a guide sequence portion having 17-25 contiguous nucleotides containing nucleotides in the sequence set forth in any one of SEQ ID NOs: 1-49516 and a CRISPR nuclease. In some embodiments, the cell is a stem cell. In some embodiments, the stem cell is an autologous pluripotent stem cell or an induced pluripotent stem cell (iPSC). In some embodiments, the stem cell is differentiated into a retinal pigment epithelium cell. In some embodiments, the cell is a retinal pigment epithelium cell. In some embodiments, the delivering to the cell is performed in vitro, ex vivo, or in vivo. In some embodiments, the method is performed ex-vivo and the cell is provided/explanted from an individual patient. In some embodiments, the method further comprises the step of introducing the resulting cell, with the modified/knocked out mutant RPE65 allele, into the individual patient (e.g. autologous transplantation).

[0017] According to some embodiments of the present invention, there is provided a method for treating a dominant RPE65 gene disorder, the method comprising delivering to a cell of a subject having a dominant RPE65 gene disorder a composition comprising an RNA molecule comprising a guide sequence portion having 17-25 contiguous nucleotides containing nucleotides in the sequence set forth in any one of SEQ ID NOs: 1-49516 and a CRISPR nuclease.

[0018] According to some embodiments of the present invention, there is provided use of a composition comprising an RNA molecule comprising a guide sequence portion having 17-25 contiguous nucleotides containing nucleotides in the sequence set forth in any one of SEQ ID NOs: 1-49516 and a CRISPR nuclease for inactivating a mutant RPE65 allele in a cell, comprising delivering to the cell the composition comprising an RNA molecule comprising a guide sequence portion having 17-25 contiguous nucleotides containing nucleotides in the sequence set forth in any one of SEQ ID NOs: 1-49516 and a CRISPR nuclease.

[0019] According to embodiments of the present invention, there is provided a medicament comprising an RNA molecule comprising a guide sequence portion having 17-25 contiguous nucleotides containing nucleotides in the sequence set forth in any one of SEQ ID NOs: 1-49516 and a CRISPR nuclease for use in inactivating a mutant RPE65 allele in a cell, wherein the medicament is administered by delivering to the cell the composition comprising an RNA molecule comprising a guide sequence portion having 17-25 contiguous nucleotides containing nucleotides in the sequence set forth in any one of SEQ ID NOs: 1-49516 and a CRISPR nuclease.

[0020] According to some embodiments of the present invention, there is provided use of a composition comprising an RNA molecule comprising a guide sequence portion having 17-25 contiguous nucleotides containing nucleotides in the sequence set forth in any one of SEQ ID NOs: 1-49516 and a CRISPR nuclease for treating ameliorating or preventing a dominant RPE65 gene disorder, comprising delivering to a cell of a subject having or at risk of having a dominant RPE65 gene disorder the composition of comprising an RNA molecule comprising a guide sequence portion having 17-25 contiguous nucleotides containing nucleotides in the sequence set forth in any one of SEQ ID NOs: 1-49516 and a CRISPR nuclease. In some embodiments, the method is performed ex vivo and the cell is provided/explanted from the subject. In some embodiments, the method further comprises the step of introducing the resulting cell, with the modified/knocked out mutant RPE65 allele, into the subject (e.g. autologous transplantation).

[0021] According to some embodiments of the present invention, there is provided a medicament comprising the composition comprising an RNA molecule comprising a guide sequence portion having 17-25 contiguous nucleotides containing nucleotides in the sequence set forth in any one of SEQ ID NOs: 1-49516 and a CRISPR nuclease for use in treating ameliorating or preventing a dominant RPE65 gene disorder, wherein the medicament is administered by delivering to a cell of a subject having or at risk of having a dominant RPE65 gene disorder the composition comprising an RNA molecule comprising a guide sequence portion having 17-25 contiguous nucleotides containing nucleotides in the sequence set forth in any one of SEQ ID NOs: 1-49516 and a CRISPR nuclease.

[0022] According to some embodiments of the present invention, there is provided a kit for inactivating a mutant RPE65 allele in a cell, comprising an RNA molecule comprising a guide sequence portion having 17-25 contiguous nucleotides containing nucleotides in the sequence set forth in any one of SEQ ID NOs: 1-49516, a CRISPR nuclease, and/or a tracrRNA molecule; and instructions for delivering the RNA molecule; CRISPR nuclease, and/or the tracrRNA to the cell.

[0023] According to some embodiments of the present invention, there is provided a kit for treating a dominant RPE65 gene disorder in a subject, comprising an RNA molecule comprising a guide sequence portion having 17-25 contiguous nucleotides containing nucleotides in the sequence set forth in any one of SEQ ID NOs: 1-49516, a CRISPR nuclease, and/or a tracrRNA molecule; and instructions for delivering the RNA molecule; CRISPR nuclease, and/or the tracrRNA to a cell of a subject having or at risk of having a dominant RPE65 gene disorder.

### BRIEF DESCRIPTION OF THE DRAWINGS

[0024] FIGS. 1A-B: Activity of guides targeting the p.Asp477Gly (c.1430A>G) mutation of RPE65 in patient-derived iPSCs. RNPs complexed with SpCas9 (FIG. 1A) or OMNI-50 (FIG. 1B). The nuclease and specific guide were electroporated into iPSCs to determine their activity. Cells were harvested 72 h post DNA electroporation, genomic was DNA extracted, and the region of the mutation was amplified and analyzed by capillary electrophoreses. The graphs represent the % editing ±STDV of two independent electroporation trials.

### DETAILED DESCRIPTION

[0025] Unless otherwise defined, all technical and/or scientific terms used herein have the same meaning as commonly understood by one of ordinary skill in the art to which the invention pertains. Although methods and materials similar or equivalent to those described herein can be used in the practice or testing of embodiments of the invention, exemplary methods and/or materials are described below. In case of conflict, the patent specification, including definitions, will control. In addition, the materials, methods, and examples are illustrative only and are not intended to be necessarily limiting.

[0026] It should be understood that the terms “a” and “an” as used above and elsewhere herein refer to “one or more” of the enumerated components. It will be clear to one of ordinary skill in the art that the use of the singular includes the plural unless specifically stated otherwise. Therefore, the terms “a,” “an” and “at least one” are used interchangeably in this application.

[0027] For purposes of better understanding the present teachings and in no way limiting the scope of the teachings, unless otherwise indicated, all numbers expressing quantities, percentages or proportions, and other numerical values used in the specification and claims, are to be understood as being modified in all instances by the term “about.” Accordingly, unless indicated to the contrary, the numerical parameters set forth in the following specification and attached claims are approximations that may vary depending upon the desired properties sought to be obtained. At the very least, each numerical parameter should at least be construed in light of the number of reported significant digits and by applying ordinary rounding techniques.

[0028] Unless otherwise stated, adjectives such as “substantially” and “about” modifying a condition or relationship characteristic of a feature or features of an embodiment of the invention, are understood to mean that the condition or characteristic is defined to within tolerances that are acceptable for operation of the embodiment for an application for which it is intended. Unless otherwise indicated, the word “or” in the specification and claims is considered to be the inclusive “or” rather than the exclusive or, and indicates at least one of, or any combination of items it conjoins.

[0029] In the description and claims of the present application, each of the verbs, “comprise,” “include” and “have” and conjugates thereof, are used to indicate that the object or objects of the verb are not necessarily a complete listing of components, elements or parts of the subject or subjects of the verb. Other terms as used herein are meant to be defined by their well-known meanings in the art.

[0030] The terms “nucleic acid template” and “donor”, refer to a nucleotide sequence that is inserted or copied into a genome. The nucleic acid template comprises a nucleotide sequence, e.g., of one or more nucleotides, that will be added to or will template a change in the target nucleic acid or may be used to modify the target sequence. A nucleic acid template sequence may be of any length, for example between 2 and 10,000 nucleotides in length, preferably between about 100 and 1,000 nucleotides in length, more preferably between about 200 and 500 nucleotides in length. A nucleic acid template may be a single stranded nucleic acid, a double stranded nucleic acid. In some embodiments, the nucleic acid template comprises a nucleotide sequence, e.g., of one or more nucleotides, that corresponds to wild type sequence of the target nucleic acid, e.g., of the target position. In some embodiments, the nucleic acid template comprises a nucleotide sequence, e.g., of one or more ribonucleotides, that corresponds to wild type sequence of the target nucleic acid, e.g., of the target position. In some embodiments, the nucleic acid template comprises modified nucleotides.

[0031] Insertion of an exogenous sequence (also called a “donor sequence,” donor template,” “donor molecule” or “donor”) can also be carried out. For example, a donor sequence can contain a non-homologous sequence flanked by two regions of homology to allow for efficient HDR at the location of interest. Additionally, donor sequences can comprise a vector molecule containing sequences that are not homologous to the region of interest in cellular chromatin. A donor molecule can contain several, discontinuous regions of homology to cellular chromatin. For example, for targeted insertion of sequences not normally present in a region of interest, said sequences can be present in a donor nucleic acid molecule and flanked by regions of homology to sequence in the region of interest. A donor molecule may be any length, for example ranging from several bases e.g. 10-20 bases to multiple kilobases in length.

[0032] The donor polynucleotide can be DNA or RNA, single-stranded and/or double-stranded and can be introduced into a cell in linear or circular form. See, e.g., U.S. Patent Publication Nos. 2010/0047805; 2011/0281361; 2011/0207221; and 2019/0330620. If introduced in linear form, the ends of the donor sequence can be protected (e.g., from exonucleolytic degradation) by methods known to those of skill in the art. For example, one or more dideoxynucleotide residues are added to the 3′ terminus of a linear molecule and/or self-complementary oligonucleotides are ligated to one or both ends. See, for example, Chang et al. (1987) and Nehls et al. (1996). Additional methods for protecting exogenous polynucleotides from degradation include, but are not limited to, addition of terminal amino group(s) and the use of modified internucleotide linkages such as, for example, phosphorothioates, phosphoramidates, and O-methyl ribose or deoxyribose residues.

[0033] A donor sequence may be an oligonucleotide and be used for targeted alteration of an endogenous sequence. The oligonucleotide may be introduced to the cell on a vector, may be electroporated into the cell, or may be introduced via other methods known in the art. Donor polynucleotides can be introduced as naked nucleic acid, as nucleic acid complexed with an agent such as a liposome or poloxamer, or can be delivered by viruses (e.g., adenovirus, AAV, herpesvirus, retrovirus, lentivirus and integrase defective lentivirus (IDLV)).

[0034] As used herein, the term “modified cells” refers to cells in which a double strand break is affected by a complex of an RNA molecule and the CRISPR nuclease as a result of hybridization with the target sequence, i.e. on-target hybridization. The term “modified cells” may further encompass cells in which a repair or correction of a mutation was affected following the double strand break.

[0035] This invention provides a modified cell or cells obtained by use of any of the methods described herein. In an embodiment these modified cell or cells are capable of giving rise to progeny cells. In an embodiment these modified cell or cells are capable of giving rise to progeny cells after engraftment. As a non-limiting example, the modified cells may be stem cells, or any cell suitable for an allogenic cell transplant or autologous cell transplant. As a non-limiting example, the modified cell may be a stem cell. In a non-limiting example, the stem cell is an autologous pluripotent stem cell or an induced pluripotent stem cell (iPSC). As another non-limiting example, the stem cell is differentiated into a retinal pigment epithelium cell. In yet another non-limiting example, the modified cell is a retinal pigment epithelium cell.

[0036] This invention also provides a composition comprising these modified cells and a pharmaceutically acceptable carrier. Also provided is an in vitro or ex vivo method of preparing this, comprising mixing the cells with the pharmaceutically acceptable carrier.

[0037] As used herein, the term “targeting sequence” or “targeting molecule” refers a nucleotide sequence or molecule comprising a nucleotide sequence that is capable of hybridizing to a specific target sequence, e.g., the targeting sequence has a nucleotide sequence which is at least partially complementary to the sequence being targeted along the length of the targeting sequence. The targeting sequence or targeting molecule may be part of an RNA molecule that can form a complex with a CRISPR nuclease with the targeting sequence serving as the targeting portion of the CRISPR complex. When the molecule having the targeting sequence is present contemporaneously with the CRISPR molecule the RNA molecule is capable of targeting the CRISPR nuclease to the specific target sequence. Each possibility represents a separate embodiment. An RNA molecule can be custom designed to target any desired sequence.

[0038] The term “targets” as used herein, refers to a targeting sequence or targeting molecule's preferential hybridization to a nucleic acid having a targeted nucleotide sequence. It is understood that the term “targets” encompasses variable hybridization efficiencies, such that there is preferential targeting of the nucleic acid having the targeted nucleotide sequence, but unintentional off-target hybridization in addition to on-target hybridization might also occur. It is understood that where an RNA molecule targets a sequence, a complex of the RNA molecule and a CRISPR nuclease molecule targets the sequence for nuclease activity.

[0039] The “guide sequence portion” of an RNA molecule refers to a nucleotide sequence that is capable of hybridizing to a specific target DNA sequence, e.g., the guide sequence portion has a nucleotide sequence which is fully complementary to the DNA sequence being targeted along the length of the guide sequence portion. In some embodiments, the guide sequence portion is 17, 18, 19, 20, 21, 22, 23, 24, or 25 nucleotides in length, or approximately 17-25, 17-24, 17-22, 17-21, 18-25, 18-24, 18-23, 18-22, 18-21, 19-25, 19-24, 19-23, 19-22, 19-21, 19-20, 20-22, 18-20, 20-21, 21-22, or 17-20 nucleotides in length. The entire length of the guide sequence portion is fully complementary to the DNA sequence being targeted along the length of the guide sequence portion. The guide sequence portion may be part of an RNA molecule that can form a complex with a CRISPR nuclease with the guide sequence portion serving as the DNA targeting portion of the CRISPR complex. When the DNA molecule having the guide sequence portion is present contemporaneously with the CRISPR molecule the RNA molecule is capable of targeting the CRISPR nuclease to the specific target DNA sequence. Each possibility represents a separate embodiment. An RNA molecule can be custom designed to target any desired sequence.

[0040] The term “non-discriminatory” as used herein refers to a guide sequence portion of an RNA molecule that targets a specific DNA sequence that is common both a mutant and functional allele of a gene.

[0041] In embodiments of the present invention, an RNA molecule comprises a guide sequence portion having 17-25 contiguous nucleotides containing nucleotides in the sequence set forth in any one of SEQ ID NOs: 1-49516.

[0042] The RNA molecule and or the guide sequence portion of the RNA molecule may contain modified nucleotides. Exemplary modifications to nucleotides or polynucleotides may be synthetic and encompass polynucleotides which contain nucleotides comprising bases other than the naturally occurring adenine, cytosine, thymine, uracil, or guanine bases. Modifications to polynucleotides include polynucleotides which contain synthetic, non-naturally occurring nucleosides e.g., locked nucleic acids. Modifications to polynucleotides may be utilized to increase or decrease stability of an RNA. An example of a modified polynucleotide is an mRNA containing 1-methyl pseudo-uridine. For examples of modified polynucleotides and their uses, see U.S. Pat. No. 8,278,036, PCT International Publication No. WO/2015/006747, and Weissman and Kariko (2015), hereby incorporated by reference.

[0043] As used herein, “contiguous nucleotides” set forth in a SEQ ID NO refers to nucleotides in a sequence of nucleotides in the order set forth in the SEQ ID NO without any intervening nucleotides.

[0044] In embodiments of the present invention, the guide sequence portion may be at least 25 nucleotides in length and contain 20-22 contiguous nucleotides in the sequence set forth in any one of SEQ ID NOs: 1-49516. In embodiments of the present invention, the guide sequence portion may be less than 22 nucleotides in length. For example, in embodiments of the present invention the guide sequence portion may be 17, 18, 19, 20, or 21 nucleotides in length. In such embodiments the guide sequence portion may consist of 17, 18, 19, 20, or 21 nucleotides, respectively, in the sequence of 17-22 contiguous nucleotides set forth in any one of SEQ ID NOs: 1-49516. For example, a guide sequence portion having 17 nucleotides in the sequence of 17 contiguous nucleotides set forth in SEQ ID NO: 49517 may consist of any one of the following nucleotide sequences (nucleotides excluded from the contiguous sequence are marked in strike-through):

(SEQ ID NO: 49517)
AAAAAAAUGUACUUGGUUCC
17 nucleotide guide sequence 1:
(SEQ ID NO: 49518) [symbol]
AAAAUGUACUUGGUUCC
17 nucleotide guide sequence 2:
(SEQ ID NO: 49519) [symbol]
AAAAAUGUACUUGGUU [symbol]
17 nucleotide guide sequence 3:
(SEQ ID NO: 49520) [symbol]
AAAAAAUGUACUUGGUU [symbol]
17 nucleotide guide sequence 4:
(SEQ ID NO: 49521)
AAAAAAAUGUACUUGGU

[symbol]

[0045] In embodiments of the present invention, the guide sequence portion may be greater than 20 nucleotides in length. For example, in embodiments of the present invention the guide sequence portion may be 21, 22, 23, 24 or 25 nucleotides in length. In such embodiments the guide sequence portion comprises 17-25 nucleotides containing the sequence of 20, 21 or 22 contiguous nucleotides set forth in any one of SEQ ID NOs: 1-49516 and additional nucleotides fully complimentary to a nucleotide or sequence of nucleotides adjacent to the 3′ end of the target sequence, 5′ end of the target sequence, or both.

[0046] In embodiments of the present invention a CRISPR nuclease and an RNA molecule comprising a guide sequence portion form a CRISPR complex that binds to a target DNA sequence to effect cleavage of the target DNA sequence. CRISPR nucleases, e.g. Cpf1, may form a CRISPR complex comprising a CRISPR nuclease and RNA molecule without a further tracrRNA molecule. Alternatively, CRISPR nucleases, e.g. Cas9, may form a CRISPR complex between the CRISPR nuclease, an RNA molecule, and a tracrRNA molecule.

[0047] In embodiments of the present invention, the RNA molecule may further comprise the sequence of a tracrRNA molecule. Such embodiments may be designed as a synthetic fusion of the guide portion of the RNA molecule and the trans-activating crRNA (tracrRNA). (See Jinek et al., 2012). Embodiments of the present invention may also form CRISPR complexes utilizing a separate tracrRNA molecule and a separate RNA molecule comprising a guide sequence portion. In such embodiments the tracrRNA molecule may hybridize with the RNA molecule via basepairing and may be advantageous in certain applications of the invention described herein.

[0048] The term “tracr mate sequence” refers to a sequence sufficiently complementary to a tracrRNA molecule so as to hybridize to the tracrRNA via basepairing and promote the formation of a CRISPR complex. (See U.S. Pat. No. 8,906,616). In embodiments of the present invention, the RNA molecule may further comprise a portion having a tracr mate sequence.

[0049] A “gene,” for the purposes of the present disclosure, includes a DNA region encoding a gene product, as well as all DNA regions which regulate the production of the gene product, whether or not such regulatory sequences are adjacent to coding and/or transcribed sequences. Accordingly, a gene includes, but is not necessarily limited to, promoter sequences, terminators, translational regulatory sequences such as ribosome binding sites and internal ribosome entry sites, enhancers, silencers, insulators, boundary elements, replication origins, matrix attachment sites and locus control regions.

[0050] “Eukaryotic” cells include, but are not limited to, fungal cells (such as yeast), plant cells, animal cells, mammalian cells and human cells.

[0051] The term “nuclease” as used herein refers to an enzyme capable of cleaving the phosphodiester bonds between the nucleotide subunits of nucleic acid. A nuclease may be isolated or derived from a natural source. The natural source may be any living organism. Alternatively, a nuclease may be a modified or a synthetic protein which retains the phosphodiester bond cleaving activity. Gene modification can be achieved using a nuclease, for example a CRISPR nuclease.

[0052] As used herein, “progenitor cell” refers to a lineage cell that is derived from stem cell and retains mitotic capacity and multipotency (e.g., can differentiate or develop into more than one but not all types of mature lineage of cell).

[0053] The term “single nucleotide polymorphism (SNP) position”, as used herein, refers to a position in which a single nucleotide DNA sequence variation occurs between members of a species, or between paired chromosomes in an individual. In the case that a SNP position exists at paired chromosomes in an individual, a SNP on one of the chromosomes is a “heterozygous SNP.” The term SNP position refers to the particular nucleic acid position where a specific variation occurs and encompasses both a sequence including the variation from the most frequently occurring base at the particular nucleic acid position (also referred to as “SNP” or alternative “ALT”) and a sequence including the most frequently occurring base at the particular nucleic acid position (also referred to as reference, or “REF”). Accordingly, the sequence of a SNP position may reflect a SNP (i.e. an alternative sequence variant relative to a consensus reference sequence within a population), or the reference sequence itself.

[0054] According to embodiments of the present invention, there is provided a method for modifying in a cell a mutant allele of the retinal pigment epithelium-specific 65 kDa protein gene (RPE65) gene having a mutation associated with a dominant RPE65 gene disorder, the method comprising
[0055] introducing to the cell a composition comprising:
   [0056] at least one CRISPR nuclease or a sequence encoding a CRISPR nuclease; and
   [0057] a first RNA molecule comprising a guide sequence portion having 17-25 nucleotides or a nucleotide sequence encoding the same,
[0058] wherein a complex of the CRISPR nuclease and the first RNA molecule affects a double strand break in the mutant allele of the RPE65 gene.

[0059] In some embodiments, the first RNA molecule targets the CRISPR nuclease to the mutation associated with a dominant RPE65 gene disorder.

[0060] In some embodiments, the mutation associated with a dominant RPE65 gene disorder is any one of 1:68431085_T_C and 1:68446825_G_A.

[0061] In some embodiments, the guide sequence portion of the first RNA molecule comprises 17-25 contiguous nucleotides containing nucleotides in the sequence set forth in any one of SEQ ID NOs: 1-49516 that targets a mutation associated with a dominant RPE65 gene disorder.

[0062] In some embodiments, the first RNA molecule targets the CRISPR nuclease to a SNP position of the mutant allele.

[0063] In some embodiments, the SNP position is any one of rs60701104, rs9436400, rs868541802, rs3125890, rs75159457, rs1205919238, rs11209300, rs4264030, rs2419988, rs3118415, rs3118416, rs149739986, rs2182315, rs3118418, rs932783, rs12124063, rs77585943, rs1886906, rs3125891, rs11581095, rs12030710, rs1003041423, rs3118419, rs5774935, rs150459448, rs1555845, rs1555846, rs11269074, rs3790469, rs3125894, rs3125895, rs3125896, rs3125897, rs3125898, rs17130688, rs938759267, rs34194247, rs3125900, rs79716012, rs75711879, rs12145904, rs3125902, rs3118420, rs12138573, rs1925955, rs17130691, rs3125904, rs78507000, rs150774295, rs3125905, rs2038900, rs2038901, rs147665807, rs17130694, rs12408546, rs12077372, rs3790472, rs3790473, rs147893529, rs2012235, rs3118423, rs2986125, rs2986124, rs72926973, rs2277874, rs3125906, rs3118426, rs3125907, rs382422, rs3118427, rs3125908, rs12759602, rs2477974, rs3125909, rs3118428, rs12407140, rs72674322, rs72674323, rs3125910, and rs1318744874.

[0064] In some embodiments, the guide sequence portion of the first RNA molecule comprises 17-25 contiguous nucleotides containing nucleotides in the sequence set forth in any one of SEQ ID NOs: 1-49516 that targets a SNP position of the mutant allele.

[0065] In some embodiments, the SNP position is in an exon or intron of the RPE65 mutant allele.

[0066] In some embodiments, the SNP position contains a heterozygous SNP.

[0067] In some embodiments, the method further comprises introducing to the cell a second RNA molecule comprising a guide sequence portion having 17-25 nucleotides or a nucleotide sequence encoding the same, wherein a complex of the second RNA molecule and a CRISPR nuclease affects a second double strand break in the RPE65 gene.

[0068] In some embodiments, the guide sequence portion of the second RNA molecule comprises 17-25 contiguous nucleotides containing nucleotides in the sequence set forth in any one of SEQ ID NOs: 1-49516 other than the sequence of the first RNA molecule.

[0069] In some embodiments, the second RNA molecule comprises a non-discriminatory guide portion that targets both functional and mutated RPE65 alleles.

[0070] In some embodiments, the second RNA molecule comprises a non-discriminatory guide portion that targets any one of Intron 1 of RPE65, Intron 2 of RPE65, a 3′ untranslated region (3′ UTR) of RPE65, and an intergenic region downstream of RPE65.

[0071] In some embodiments, the second RNA molecule comprises a non-discriminatory guide portion that targets a sequence that is located within a genomic range selected from any one of 1:68450655-1:68451154, 1:68428322-1:68428821, 1:68437687-1:68438186, 1:68431586-1:68432085, 1:68431377-1:68431469, 1:68431177-1:68431281, 1:68430565-1:68431064, 1:68429928-1:68430427, 1:68448707-1:68449206, 1:68449395-1:68449894, 1:68448124-1:68448623, 1:68446861-1:68447360, 1:68446210-1:68446709, 1:68444884-1:68445383, 1:68444673-1:68444775, 1:68444031-1:68444530, 1:68441001-1:68441500, 1:68440353-1:68440852, 1:68439643-1:68440142, 1:68439324-1:68439560, 1:68439082-1:68439190, and 1:68438317-1:68438941.

[0072] In some embodiments, the second RNA molecule comprises a non-discriminatory guide portion that targets a sequence that is located up to 500 base pairs from an exon that is excised by the first and second RNA molecules.

[0073] In some embodiments, a portion of an exon is excised from the mutant allele of the RPE65 gene.

[0074] In some embodiments, the first RNA molecule targets a SNP position in the 3′ UTR of the mutated allele, and the second RNA molecule comprises a non-discriminatory guide portion that targets downstream of a polyadenylation signal sequence that is common to both a functional allele and the mutant allele of the RPE65 gene.

[0075] In some embodiments, the first RNA molecule targets a SNP position downstream of a polyadenylation signal of the mutated allele, and the second RNA molecule comprises a non-discriminatory guide portion that targets a sequence upstream of a polyadenylation signal that is common to both a functional allele and the mutant allele of the RPE65 gene.

[0076] In some embodiments, the polyadenylation signal is excised from the mutant allele of the RPE65 gene.

[0077] According to embodiments of the present invention, there is provided a modified cell obtained by the method of any one of the embodiments presented herein.

[0078] According to embodiments of the present invention, there is provided a first RNA molecule comprising a guide sequence portion having 17-25 contiguous nucleotides containing nucleotides in the sequence set forth in any one of SEQ ID NOs: 1-49516.

[0079] According to embodiments of the present invention, there is provided a composition comprising the first RNA molecule and at least one CRISPR nuclease.

[0080] In some embodiments, the composition further comprises a second RNA molecule comprising a guide sequence portion having 17-25 contiguous nucleotides, wherein the second RNA molecule targets a RPE65 allele, and wherein the guide sequence portion of the second RNA molecule is a different sequence from the sequence of the guide sequence portion of the first RNA molecule.

[0081] In some embodiments, the guide sequence portion of the second RNA molecule comprises 17-25 contiguous nucleotides containing nucleotides in the sequence set forth in any one of SEQ ID NOs: 1-49516 other than the sequence of the first RNA molecule.

[0082] According to embodiments of the present invention, there is provided a method for inactivating a mutant RPE65 allele in a cell, the method comprising delivering to the cell the composition of any one of the embodiments presented herein.

[0083] According to embodiments of the present invention, there is provided a method for treating a dominant RPE65 gene disorder, the method comprising delivering to a cell of a subject having a dominant RPE65 gene disorder the composition of any one of the embodiments presented herein.

[0084] According to embodiments of the present invention, there is provided use of any one of the compositions presented herein for inactivating a mutant RPE65 allele in a cell, comprising delivering to the cell the composition of any one of the embodiments presented herein.

[0085] According to embodiments of the present invention, there is provided a medicament comprising the composition of any one of the embodiments presented herein for use in inactivating a mutant RPE65 allele in a cell, wherein the medicament is administered by delivering to the cell the composition of any one of the embodiments presented herein.

[0086] According to embodiments of the present invention, there is provided use of the composition of any one of the embodiments presented herein for treating ameliorating or preventing a dominant RPE65 gene disorder, comprising delivering to a cell of a subject having or at risk of having a dominant RPE65 gene disorder the composition of any one of the embodiments presented herein.

[0087] According to embodiments of the present invention, there is provided a medicament comprising the composition of any one of the embodiments presented herein for use in treating ameliorating or preventing a dominant RPE65 gene disorder, wherein the medicament is administered by delivering to a cell of a subject having or at risk of having a dominant RPE65 gene disorder the composition of any one of the embodiments presented herein.

[0088] According to embodiments of the present invention, there is provided a kit for inactivating a mutant RPE65 allele in a cell, comprising an RNA molecule of any one of the embodiments presented herein, a CRISPR nuclease, and/or a tracrRNA molecule; and instructions for delivering the RNA molecule; CRISPR nuclease, and/or the tracrRNA to the cell.

[0089] According to embodiments of the present invention, there is provided a kit for treating a dominant RPE65 gene disorder in a subject, comprising an RNA molecule of any one of the embodiments presented herein, a CRISPR nuclease, and/or a tracrRNA molecule; and instructions for delivering the RNA molecule; CRISPR nuclease, and/or the tracrRNA to a cell of a subject having or at risk of having a dominant RPE65 gene disorder.

[0090] According to embodiments of the present invention, there is provided a gene editing composition comprising an RNA molecule comprising a guide sequence portion having 17-25 contiguous nucleotides containing nucleotides in the sequence set forth in any one of SEQ ID NOs: 1-49516. In some embodiments, the RNA molecule further comprises a portion having a sequence which binds to a CRISPR nuclease. In some embodiments, the sequence which binds to a CRISPR nuclease is a tracrRNA sequence.

[0091] In some embodiments, the RNA molecule further comprises a portion having a tracr mate sequence.

[0092] In some embodiments, the RNA molecule may further comprise one or more linker portions.

[0093] According to embodiments of the present invention, an RNA molecule may be up to 300, 290, 280, 270, 260, 250, 240, 230, 220, 210, 200, 190, 180, 170, 160, 150, 140, 130, 120, 110, or 100 nucleotides in length. Each possibility represents a separate embodiment. In embodiments of the present invention, the RNA molecule may be 17 up to 300 nucleotides in length, 100 up to 300 nucleotides in length, 150 up to 300 nucleotides in length, 200 up to 300 nucleotides in length, 100 to 200 nucleotides in length, or 150 up to 250 nucleotides in length. Each possibility represents a separate embodiment.

[0094] According to some embodiments of the present invention, the composition further comprises a tracrRNA molecule.

[0095] The present disclosure provides a method for utilizing at least one naturally occurring nucleotide difference or polymorphism (e.g., single nucleotide polymorphism (SNP)) for distinguishing/discriminating between two alleles of a gene, one allele bearing a mutation such that it encodes a mutated protein causing a disease phenotype (“mutated allele”) and a particular sequence in a SNP position (SNP/REF), and the other allele encoding for a functional protein (“functional allele”). The method further comprises the step of knocking out expression of the mutated protein and allowing expression of the functional protein. In some embodiments, the method is for treating, ameliorating, or preventing a dominant negative genetic disorder.

[0096] According to some embodiments of the present invention, there is provided a method for inactivating a mutant RPE65 allele in a cell, the method comprising delivering to the cell a composition comprising an RNA molecule comprising a guide sequence portion having 17-25 contiguous nucleotides containing nucleotides in the sequence set forth in any one of SEQ ID NOs: 1-49516 and a CRISPR nuclease.

[0097] According to some embodiments of the present invention, there is provided a method for treating a dominant RPE65 gene disorder, the method comprising delivering to a cell of a subject having a dominant RPE65 gene disorder a composition comprising an RNA molecule comprising a guide sequence portion having 17-25 contiguous nucleotides containing nucleotides in the sequence set forth in any one of SEQ ID NOs: 1-49516 and a CRISPR nuclease.

[0098] According to embodiments of the present invention, the composition comprises a second RNA molecule comprising a guide sequence portion having 17-25 contiguous nucleotides containing nucleotides in the sequence set forth in any one of SEQ ID NOs: 1-49516. In some embodiments, the 17-25 nucleotides of the guide sequence portion of the second RNA molecule are in a different sequence from the sequence of the guide sequence portion of the first RNA molecule.

[0099] According to embodiments of the present invention, at least one CRISPR nuclease and the RNA molecule or RNA molecules are delivered to the subject and/or cells substantially at the same time or at different times.

[0100] In some embodiments, a tracrRNA molecule is delivered to the subject and/or cells substantially at the same time or at different times as the CRISPR nuclease and RNA molecule or RNA molecules.

[0101] According to embodiments of the present invention, the first RNA molecule targets a SNP or disease-causing mutation in the exon or promoter of a mutated allele, and the second RNA molecule targets a SNP in an exon of the mutated allele, a SNP in an intron, or a sequence present in both the mutated or functional allele.

[0102] According to embodiments of the present invention, the first RNA molecule or the first and the second RNA molecules target a SNP in the promoter region, the start codon, or an untranslated region (UTR) of a mutated allele.

[0103] According to embodiments of the present invention, the first RNA molecule or the first and the second RNA molecules targets at least a portion of the promoter and/or the start codon and/or a portion of a UTR of a mutated allele.

[0104] According to embodiments of the present invention, the first RNA molecule targets a portion of the promoter, a first SNP in the promoter, or a SNP upstream to the promoter of a mutated allele and the second RNA molecule is targets a second SNP, which is downstream of the first SNP, and is in the promoter, in a UTR, or in an intron or in an exon of a mutated allele.

[0105] According to embodiments of the present invention, the first RNA molecule targets a SNP in the promoter, upstream of the promoter, or a UTR of a mutated allele and the second RNA molecule is designed to target a sequence which is present in an intron of both the mutated allele and the functional allele.

[0106] According to embodiments of the present invention, the first RNA molecule targets a SNP in an intron of a mutated allele, and wherein the second RNA molecule targets a SNP in an intron of the mutated allele, or a sequence in an intron present in both the mutated and functional allele.

[0107] According to embodiments of the present invention, the first RNA molecule targets a sequence upstream of the promotor which is present in both a mutated and functional allele and the second RNA molecule targets a SNP or disease-causing mutation in any location of the gene.

[0108] According to embodiments of the present invention, there is provided a method comprising removing an exon containing a disease-causing mutation from a mutated allele, wherein the first RNA molecule or the first and the second RNA molecules target regions flanking an entire exon or a portion of the exon.

[0109] According to embodiments of the present invention, there is provided a method comprising removing an exon or a portion thereof from a mutant RPE65 allele, the entire open reading frame of a mutant RPE65 allele, or removing the entire mutant RPE65 allele.

[0110] According to embodiments of the present invention, the first RNA molecule targets a SNP or disease-causing mutation in an exon or promoter of a mutated allele, and wherein the second RNA molecule targets a SNP in the same exon of the mutated allele, a SNP in an intron, or a sequence in an intron present in both the mutated and functional allele.

[0111] According to embodiments of the present invention, the first RNA molecule or the first and the second RNA molecules target an alternative splicing signal sequence between an exon and an intron of a mutant RPE65 allele.

[0112] According to embodiments of the present invention, the second RNA molecule is non-discriminatory targets a sequence present in both a mutated allele and a functional allele.

[0113] The compositions and methods of the present disclosure may be utilized for treating, preventing, ameliorating, or slowing progression of an autosomal dominant genetic disorder, such as a dominant RPE65 gene disorder.

[0114] In some embodiments, a mutated allele is deactivated by delivering to a cell an RNA molecule which targets a SNP in the promoter region, the start codon, or an untranslated region (UTR) of the mutated allele.

[0115] In some embodiments, a mutated allele is inactivated by removing at least a portion of the promoter, and/or removing the start codon, and/or a portion of the UTR, and/or a polyadenylation signal. In such embodiments one RNA molecule may be designed for targeting a first SNP in the promoter or upstream to the promoter and another RNA molecule is designed to target a second SNP, which is downstream of the first SNP, and is in the promoter, in the UTR, in an intron, or in an exon. Alternatively, one RNA molecule may be designed for targeting a SNP in the promoter, upstream of the promoter, or the UTR, and another RNA molecule is designed to target a sequence which is present in an intron of both the mutated allele and the functional allele.

[0116] Alternatively, one RNA molecule may be designed for targeting a sequence upstream of the promotor which is present in both the mutated and functional allele and the other guide is designed to target a SNP or disease-causing mutation in any location of the gene e.g., in an exon, intron, UTR, or downstream of the promoter.

[0117] In some embodiments, the method of deactivating a mutated allele comprises an exon skipping step comprising removing an exon containing a disease-causing mutation from the mutated allele. Removing an exon containing a disease-causing mutation in the mutated allele requires two RNA molecules which target regions flanking the entire exon or a portion of the exon. Removal of an exon containing the disease-causing mutation may be designed to eliminate the disease-causing action of the protein while allowing for expression of the remaining protein product which retains some or all of the wild-type activity. The entire open reading frame or the entire gene can be excised using two RNA molecules flanking the region desired to be excised.

[0118] In some embodiments, the method of deactivating a mutated allele comprises delivering two RNA molecules to a cell, wherein one RNA molecule targets a SNP or disease-causing mutation in an exon or promoter of the mutated allele, and wherein the other RNA molecule targets a SNP in the same of the mutated allele, a SNP in an intron, or a sequence in an intron present in both the mutated or functional allele.

[0119] Any one of, or combination of, the above-mentioned strategies for deactivating a mutant allele may be used in the context of the invention.

[0120] In embodiments of the present invention, an RNA molecule is used to direct a CRISPR nuclease to an exon or a splice site of a mutated allele in order to create a double-stranded break (DSB), leading to insertion or deletion of nucleotides by inducing an error-prone non-homologous end-joining (NHEJ) mechanism and formation of a frameshift mutation in the mutated allele. The frameshift mutation may result in, for example, inactivation or knockout of the mutated allele by generation of an early stop codon in the mutated allele and to generation of a truncated protein or to nonsense-mediated mRNA decay of the transcript of the mutant allele. In further embodiments, one RNA molecule is used to direct a CRISPR nuclease to a promotor of a mutated allele.

[0121] In some embodiments, the method of deactivating a mutated allele further comprises enhancing activity of the functional protein such as by providing a protein/peptide, a nucleic acid encoding a protein/peptide, or a small molecule such as a chemical compound, capable of activating/enhancing activity of the functional protein.

[0122] According to some embodiments, the present disclosure provides an RNA sequence (also referred to as an ‘RNA molecule’) which binds to or associates with and/or directs an RNA-guided DNA nuclease e.g., a CRISPR nuclease, to a target sequence comprising at least one nucleotide which differs between a mutated allele and a functional allele (e.g., SNP) of a gene of interest (i.e., a sequence of the mutated allele which is not present in the functional allele).

[0123] In some embodiments, the method comprises contacting a mutated allele of a gene of interest with an allele-specific RNA molecule and a CRISPR nuclease e.g., a Cas9 protein, wherein the allele-specific RNA molecule and the CRISPR nuclease associate with a nucleotide sequence of the mutated allele of the gene of interest which differs by at least one nucleotide from a nucleotide sequence of a functional allele of the gene of interest, thereby modifying or knocking-out the mutated allele.

[0124] In some embodiments, the allele-specific RNA molecule and a CRISPR nuclease is introduced to a cell encoding the gene of interest. In some embodiments, the cell encoding the gene of interest is in a mammalian subject. In some embodiments, the cell encoding the gene of interest is in a plant.

[0125] In some embodiments, the mutated allele is an allele of RPE65 gene. In some embodiments, the RNA molecule targets a SNP which co-exists with or is genetically linked to the mutated sequence associated with a dominant RPE65 gene disorder genetic disorder. In some embodiments, the RNA molecule targets a SNP which is highly prevalent in the population and exists in the mutated allele having the mutated sequence associated with a dominant RPE65 gene disorder genetic disorder and not in the functional allele of an individual subject to be treated. In some embodiments, a disease-causing mutation within a mutated RPE65 allele is targeted.

[0126] In some embodiments, the SNP is within an exon of the gene of interest. In such embodiments, a guide sequence portion of an RNA molecule is designed to associate with a sequence of an exon of the gene of interest.

[0127] In some embodiments, SNP is within an intron or the exon of the gene of interest. In some embodiments, the SNP is in close proximity to the splice site between an intron and an exon. In some embodiments, the close proximity to a splice site is 1, 2, 3, 4, 5, 6, 7, 8, 9, 10, 11, 12, 13, 14, 15, 16, 17, 18, 19, or 20 nucleotides upstream or downstream to the splice site. Each possibility represents a separate embodiment of the present invention. In such embodiments, a guide sequence portion of an RNA molecule may be designed to associate with a sequence of the gene of interest which comprises the splice site.

[0128] In some embodiments, the method is utilized for treating a subject having a disease phenotype resulting from the heterozygote RPE65 gene. In such embodiments, the method results in improvement, amelioration or prevention of the disease phenotype.

[0129] Embodiments of compositions described herein include at least one CRISPR nuclease, RNA molecule(s), and a tracrRNA molecule, being effective in a subject or cells at the same time. The at least one CRISPR nuclease, RNA molecule(s), and tracrRNA may be delivered substantially at the same time or can be delivered at different times but have effect at the same time. For example, this includes delivering the CRISPR nuclease to the subject or cells before the RNA molecule and/or tracrRNA is substantially extant in the subject or cells.

[0130] In some embodiments, the cell is a stem cell. In some embodiments, the stem cell is an autologous pluripotent stem cell or an induced pluripotent stem cell (iPSC). In some embodiments, the stem cell is differentiated into a retinal pigment epithelium cell. In some embodiments, the cell is a retinal pigment epithelium cell.

### Dominant Genetic Disorders

[0131] One of skill in the art will appreciate that all subjects with any type of heterozygote genetic disorder (e.g., dominant genetic disorder) may be subjected to the methods described herein. In one embodiment, the present invention may be used to target a gene involved in, associated with, or causative of dominant genetic disorders such as, for example, a dominant RPE65 gene disorder. In some embodiments, the dominant genetic disorder is a dominant RPE65 gene disorder. In some embodiments, the target gene is the RPE65 gene. Non-limiting examples of mutations characterized as gain of function mutations associated with a dominant RPE65 gene disorder phenotype include chr:1:68431085(hg398) T to C (c.1430A>G; p.D477G) and chr1:68446825(hg38) G to A (c.130C>T; p.R44X).

[0132] RPE65 editing strategies include, but are not limited to, (1) truncation, for example, by targeting a RPE65 mutation or SNP position with one guide RNA molecule to induce a frameshift or nonsense-mediated decay; and (2) allele specific excision using two guide RNA molecules, for example, excision of at least one exon or a portion thereof, knockout of a large portion of the allele or the entire allele, or excision of the polyadenylation signal.

[0133] Truncation may be achieved by several approaches. For example, truncation may be achieved by targeting a SNP within a coding exon of a mutant RPE65 allele using a single guide RNA molecule (e.g. a single guide RNA molecule or “sgRNA”). Alternatively, excision may be achieved by targeting the mutant RPE65 allele with two different RNA molecules, with at least one RNA molecule preferably being allele-specific.

[0134] In another editing strategy, expression of a mutated RPE65 allele may be inhibited. An example of this strategy includes excising the polyadenylation signal in the 3′UTR region, which leads to an unstable transcript.

### CRISPR Nucleases and PAM Recognition

[0135] In some embodiments, the sequence specific nuclease is selected from CRISPR nucleases, or a functional variant thereof. In some embodiments, the sequence specific nuclease is an RNA guided DNA nuclease. In such embodiments, the RNA sequence which guides the RNA guided DNA nuclease (e.g., Cpf1) binds to and/or directs the RNA guided DNA nuclease to the sequence comprising at least one nucleotide which differs between a mutated allele and its counterpart functional allele (e.g., SNP). In some embodiments, the CRISPR complex does not further comprise a tracrRNA. In a non-limiting example, in which the RNA guided DNA nuclease is a CRISPR protein, the at least one nucleotide which differs between the dominant mutated allele and the functional allele may be within the PAM site and/or proximal to the PAM site within the region that the RNA molecule is designed to hybridize to. A skilled artisan will appreciate that RNA molecules can be engineered to bind to a target of choice in a genome by commonly known methods in the art.

[0136] In embodiments of the present invention, a type II CRISPR system utilizes a mature crRNA:tracrRNA complex directs a CRISPR nuclease, e.g. Cas9, to the target DNA via Watson-Crick base-pairing between the crRNA and the protospacer on the target DNA next to the protospacer adjacent motif (PAM), an additional requirement for target recognition. The CRISPR nuclease then mediates cleavage of target DNA to create a double-stranded break within the protospacer. A skilled artisan will appreciate that each of the engineered RNA molecule of the present invention is further designed such as to associate with a target genomic DNA sequence of interest next to a protospacer adjacent motif (PAM), e.g., a PAM matching the sequence relevant for the type of CRISPR nuclease utilized, such as for a non-limiting example, NGG or NAG, wherein “N” is any nucleobase, for Streptococcus pyogenes Cas9 WT (SpCAS9); NNGRRT for Staphylococcus aureus (SaCas9); NNNVRYM for Jejuni Cas9 WT; NGAN or NGNG for SpCas9-VQR variant; NGCG for SpCas9-VRER variant; NGAG for SpCas9-EQR variant; NNNNGATT for Neisseria meningitidis (NmCas9); or TTV for Cpf1. RNA molecules of the present invention are each designed to form complexes in conjunction with one or more different CRISPR nucleases and designed to target polynucleotide sequences of interest utilizing one or more different PAM sequences respective to the CRISPR nuclease utilized.

[0137] In some embodiments, an RNA-guided DNA nuclease e.g., a CRISPR nuclease, may be used to cause a DNA break, either double or single-stranded in nature, at a desired location in the genome of a cell. The most commonly used RNA-guided DNA nucleases are derived from CRISPR systems, however, other RNA-guided DNA nucleases are also contemplated for use in the genome editing compositions and methods described herein. For instance, see U.S. Patent Publication No. 2015/0211023, incorporated herein by reference.

[0138] CRISPR systems that may be used in the practice of the invention vary greatly. CRISPR systems can be a type I, a type II, or a type III system. Non-limiting examples of suitable CRISPR proteins include Cas3, Cas4, Cas5, Cas5e (or CasD), Cas6, Cas6e, Cas6f, Cas7, Cas8a1, Cas8a2, Cas8b, Cas8c, Cas9, Casl0, Casl Od, CasF, CasG, CasH, Csy1, Csy2, Csy3, Cse1 (or CasA), Cse2 (or CasB), Cse3 (or CasE), Cse4 (or CasC), Csc1, Csc2, Csa5, Csn2, Csm2, Csm3, Csm4, Csm5, Csm6, Cmr1, Cmr3, Cmr4, Cmr5, Cmr6, Csb1, Csb2, Csb3,Csxl7, Csxl4, Csxl0, Csxl6, CsaX, Csx3, Cszl, Csxl5, Csfl, Csf2, Csf3, Csf4, and Cul966.

[0139] In some embodiments, the RNA-guided DNA nuclease is a CRISPR nuclease derived from a type II CRISPR system (e.g., Cas9). The CRISPR nuclease may be derived from Streptococcus pyogenes, Streptococcus thermophilus, Streptococcus sp., Staphylococcus aureus. Neisseria meningitidis, Treponema denticola, Nocardiopsis dassonvillei, Streptomyces pristinaespiralis, Streptomyces viridochromogenes, Streptomyces viridochromogenes, Streptosporangium roseum, Streptosporangium roseum, Alicyclobacillus acidocaldarius, Bacillus pseudomycoides, Bacillus selenitireducens, Exiguobacterium sibiricum, Lactobacillus delbrueckii, Lactobacillus salivarius, Microscilla marina, Burkholderiales bacterium, Polaromonas naphthalenivorans, Polaromonas sp., Crocosphaera watsonii, Cyanothece sp., Microcystis aeruginosa, Synechococcus sp., Acetohalobium arabaticum, Ammonmfex degensii, Caldicelulosiruptor becscii, Candidatus Desulforudis, Clostridium botulinum, Clostridium difjicile, Finegoldia magna, Natranaerobius thermophilus, Pelotomaculumthermopropionicum. Acidithiobacillus caldus, Acidithiobacillus ferrooxidans, Allochromatium vinosum, Marinobacter sp., Nitrosococcus halophilus, Nitrosococcus watsoni, Pseudoalteromonas haloplanktis, Ktedonobacter racemifer, Methanohalobium evestigatum, Anabaena variabilis, Nodularia spumigena, Nostoc sp., Arthrospira maxima, Arthrospira platensis, Arthrospira sp., Lyngbya sp., Microcoleus chthonoplastes, Oscillatoria sp., Petrotoga mobilis, Thermosipho africanus, Acaryochloris marina, or any species which encodes a CRISPR nuclease with a known PAM sequence. CRISPR nucleases encoded by uncultured bacteria may also be used in the context of the invention. (See Burstein et al. Nature, 2017). Variants of CRIPSR proteins having known PAM sequences e.g., SpCas9 D1135E variant, SpCas9 VQR variant, SpCas9 EQR variant, or SpCas9 VRER variant may also be used in the context of the invention.

[0140] Thus, an RNA guided DNA nuclease of a CRISPR system, such as a Cas9 protein or modified Cas9 or homolog or ortholog of Cas9, or other RNA guided DNA nucleases belonging to other types of CRISPR systems, such as Cpf1 and its homologs and orthologs, may be used in the compositions of the present invention.

[0141] In certain embodiments, the CRIPSR nuclease may be a “functional derivative” of a naturally occurring Cas protein. A “functional derivative” of a native sequence polypeptide is a compound having a qualitative biological property in common with a native sequence polypeptide. “Functional derivatives” include, but are not limited to, fragments of a native sequence and derivatives of a native sequence polypeptide and its fragments, provided that they have a biological activity in common with a corresponding native sequence polypeptide. A biological activity contemplated herein is the ability of the functional derivative to hydrolyze a DNA substrate into fragments. The term “derivative” encompasses both amino acid sequence variants of polypeptide, covalent modifications, and fusions thereof. Suitable derivatives of a Cas polypeptide or a fragment thereof include but are not limited to mutants, fusions, covalent modifications of Cas protein or a fragment thereof. Cas protein, which includes Cas protein or a fragment thereof, as well as derivatives of Cas protein or a fragment thereof, may be obtainable from a cell or synthesized chemically or by a combination of these two procedures. The cell may be a cell that naturally produces Cas protein, or a cell that naturally produces Cas protein and is genetically engineered to produce the endogenous Cas protein at a higher expression level or to produce a Cas protein from an exogenously introduced nucleic acid, which nucleic acid encodes a Cas that is same or different from the endogenous Cas. In some cases, the cell does not naturally produce Cas protein and is genetically engineered to produce a Cas protein.

[0142] In some embodiments, the CRISPR nuclease is Cpf1. Cpf1 is a single RNA-guided endonuclease which utilizes a T-rich protospacer-adjacent motif. Cpf1 cleaves DNA via a staggered DNA double-stranded break. Two Cpf1 enzymes from Acidaminococcus and Lachnospiraceae have been shown to carry out efficient genome-editing activity in human cells. (See Zetsche et al., 2015).

[0143] Thus, an RNA guided DNA nuclease of a Type II CRISPR System, such as a Cas9 protein or modified Cas9 or homologs, orthologues, or variants of Cas9, or other RNA guided DNA nucleases belonging to other types of CRISPR systems, such as Cpf1 and its homologs, orthologues, or variants, may be used in the present invention.

[0144] In some embodiments, the guide molecule comprises one or more chemical modifications which imparts a new or improved property (e.g., improved stability from degradation, improved hybridization energetics, or improved binding properties with an RNA guided DNA nuclease). Suitable chemical modifications include, but are not limited to: modified bases, modified sugar moieties, or modified inter-nucleoside linkages. Non-limiting examples of suitable chemical modifications include: 4-acetylcytidine, 5-(carboxyhydroxymethyl)uridine, 2′-O-methylcytidine, 5-carboxymethylaminomethyl-2-thiouridine, 5-carboxymethylaminomethyluridine, dihydrouridine, 2′-O-methylpseudouridine, “beta, D-galactosylqueuosine”, 2′-O-methylguanosine, inosine, N6-isopentenyladenosine, 1-methyladenosine, 1-methylpseudouridine, 1-methylguanosine, 1-methylinosine, “2,2-dimethylguanosine”, 2-methyladenosine, 2-methylguanosine, 3-methylcytidine, 5-methylcytidine, N6-methyladenosine, 7-methylguanosine, 5-methylaminomethyluridine, 5-methoxyaminomethyl-2-thiouridine, “beta, D-mannosylqueuosine”, 5-methoxycarbonylmethyl-2-thiouridine, 5-methoxycarbonylmethyluridine, 5-methoxyuridine, 2-methylthio-N6-isopentenyladenosine, N-((9-beta-D-ribofuranosyl-2-methylthiopurine-6-yl)carbamoyl)threonine, N-((9-beta-D-ribofuranosylpurine-6-yl)N-methylcarbamoyl)threonine, uridine-5-oxyacetic acid-methylester, uridine-5-oxyacetic acid, wybutoxosine, queuosine, 2-thiocytidine, 5-methyl-2-thiouridine, 2-thiouridine, 4-thiouridine, 5-methyluridine, N-((9-beta-D-ribofuranosylpurine-6-yl)-carbamoyl)threonine, 2′-O-methyl-5-methyluridine, 2′-O-methyluridine, wybutosine, “3-(3-amino-3-carboxy-propyl)uridine, (acp3)u”, 2′-0-methyl (M), 3′-phosphorothioate (MS), 3-thioPACE (MSP), pseudouridine, or 1-methyl pseudo-uridine. Each possibility represents a separate embodiment of the present invention.

Guide Sequences which Specifically Target a Mutant Allele

[0145] A given gene may contain thousands of SNPs. Utilizing a twenty-five base pair target window for targeting each SNP in a gene would require hundreds of thousands of guide sequences. Any given guide sequence when utilized to target a SNP may result in degradation of the guide sequence, limited activity, no activity, or off-target effects. Accordingly, suitable guide sequences are necessary for targeting a given gene. By the present invention, a novel set of guide sequences have been identified for knocking out expression of a mutated RPE65 protein, inactivating a mutant RPE65 gene allele, and treating a dominant RPE65 gene disorder.

[0146] The present disclosure provides guide sequences capable of specifically targeting a mutated allele for inactivation while leaving the functional allele unmodified. The guide sequences of the present invention are designed to, and are most likely to, specifically differentiate between a mutated allele and a functional allele. Of all possible guide sequences which target a mutated allele desired to be inactivated, the specific guide sequences disclosed herein are specifically effective to function with the disclosed embodiments.

[0147] Briefly, the guide sequences may have properties as follows: (1) target SNP/insertion/deletion/indel with a high prevalence in the general population, in a specific ethnic population or in a patient population is above 1% and the SNP/insertion/deletion/indel heterozygosity rate in the same population is above 1%; (2) target a location of a SNP/insertion/deletion/indel proximal to a portion of the gene e.g., within 5 k bases of any portion of the gene, for example, a promoter, a UTR, an exon or an intron; and (3) target a mutant allele using an RNA molecule which targets a founder or common pathogenic mutations for the disease/gene. In some embodiments, the prevalence of the SNP/insertion/deletion/indel in the general population, in a specific ethnic population or in a patient population is above 1%, 2%, 3%, 4%, 5%, 6%, 7%, 8%, 9%, 10%, 11%, 12%, 13%, 14%, or 15% and the SNP/insertion/deletion/indel heterozygosity rate in the same population is above 1%, 2%, 3%, 4%, 5%, 6%, 7%, 8%, 9%, 10%, 11%, 12%, 13%, 14%, or 15%. Each possibility represents a separate embodiment and may be combined at will.

[0148] For each gene, according to SNP/insertion/deletion/indel any one of the following strategies may be used to deactivate the mutated allele: (1) Knockout strategy using one RNA molecule—one RNA molecule is utilized to direct a CRISPR nuclease to a mutated allele and create a double-strand break (DSB) leading to formation of a frameshift mutation in an exon or in a splice site region of the mutated allele; and (2) Excision of at least one coding exon or a complete knockout of a mutant RPE65 allele using two RNA molecules, for example, a first RNA molecule targets a SNP position of an Intron 1 of the mutant RPE65 allele and a second, non-discriminatory RNA molecule targets a sequence in Intron 2 of the RPE65 gene.

[0149] Based on the locations of identified SNPs/insertions/deletions/indels for each mutant allele, any one of, or a combination of, the above-mentioned methods to deactivate the mutant allele may be utilized.

[0150] In some embodiments of the present invention, an RNA molecule is used to target a pathogenic mutation within a mutant RPE65 allele. In some embodiments of the present invention, an RNA molecule is used to target a SNP position.

[0151] Guide sequences of the present invention may: (1) target a heterozygous SNP for the targeted gene; (2) target a heterozygous SNP upstream or downstream of the gene; (3) target a SNP with a prevalence of the SNP/insertion/deletion/indel in the general population, in a specific ethnic population, or in a patient population above 1%; (4) have a guanine-cytosine content of greater than 30% and less than 85%; (5) have no repeat of seven or more guanine, cytosine, uracil, or adenine; and (6) have low or no off-targeting identified by off-target analysis. Guide sequences of the present invention may satisfy any one of the above criteria and are most likely to differentiate between a mutated allele from its corresponding functional allele.

[0152] In some embodiments of the present invention, at least one nucleotide which differs between the mutated allele and the functional allele is upstream, downstream or within the sequence of the disease-causing mutation of the gene of interest. The at least one nucleotide which differs between the mutated allele and the functional allele may be within an exon or within an intron of the gene of interest. In some embodiments, the at least one nucleotide which differs between the mutated allele and the functional allele is within an exon of the gene of interest. In some embodiments, the at least one nucleotide which differs between the mutated allele and the functional allele is within an intron or the exon of the gene of interest, in close proximity to the splice site between the intron and the exon e.g., 1, 2, 3, 4, 5, 6, 7, 8, 9, 10, 11, 12, 13, 14, 15, 16, 17, 18, 19, or 20 nucleotides upstream or downstream to the splice site.

[0153] In some embodiments, the at least one nucleotide is a single nucleotide polymorphism (SNP). In some embodiments, each of the nucleotide variants of the SNP may be expressed in the mutated allele. In some embodiments, the SNP may be a founder or common pathogenic mutation.

[0154] Guide sequences may target a SNP which has both (1) a high prevalence in the general population e.g., above 1% in the population; and (2) a high heterozygosity rate in the population, e.g., above 1%. Guide sequences may target a SNP that is globally distributed. A SNP may be a founder or common pathogenic mutation. In some embodiments, the prevalence in the general population is above 1%, 2%, 3%, 4%, 5%, 6%, 7%, 8%, 9%, 10%, 11%, 12%, 13%, 14%, or 15%. Each possibility represents a separate embodiment. In some embodiments, the heterozygosity rate in the population is above 1%, 2%, 3%, 4%, 5%, 6%, 7%, 8%, 9%, 10%, 11%, 12%, 13%, 14%, or 15%. Each possibility represents a separate embodiment.

[0155] In some embodiments, the at least one nucleotide which differs between the mutated allele and the functional allele is linked to/co-exists with the disease-causing mutation in high prevalence in a population. In such embodiments, “high prevalence” refers to at least 92%, 93%, 94%, 95%, 96%, 97%, 98%, 99%, or 100%. Each possibility represents a separate embodiment of the present invention. In one embodiment, the at least one nucleotide which differs between the mutated allele and the functional allele, is a disease-associated mutation. In some embodiments, the SNP is highly prevalent in the population. In such embodiments, “highly prevalent” refers to at least 10%, 11%, 12%, 13%, 14%, 15%, 20%, 30%, 40%, 50%, 60%, or 70% of a population. Each possibility represents a separate embodiment of the present invention.

### Delivery to Cells

[0156] The compositions described herein may be delivered to a target cell by any suitable means. Compositions of the present invention may be targeted to any cell which contains and/or expresses a mutated allele, including any mammalian cell, for example a retinal pigment epithelium (RPE) cell. For example, in one embodiment an RNA molecule of the present invention that specifically targets a mutated RPE65 allele is delivered to a target cell and the target cell is a stem cell or a retinal pigment epithelium cell. The delivery to the cell may be performed in-vitro, ex-vivo, or in-vivo. Further, the compositions described herein may comprise any one or more of a DNA molecule, an RNA molecule, a ribonucleoprotein (RNP), a nucleic acid vector, or any combination thereof. In some embodiments, the composition is a naked DNA plasmid. In some embodiments, the composition is a naked RNA. In some embodiments, the composition is an RNP. An RNP composition may be conjugated to a cell-penetrating peptide (CPP), an antibody, a targeting moiety, or any combination thereof.

[0157] In some embodiments, the composition is packaged into an adeno-associated virus (AAV). In some embodiments, the composition is packaged into a lentivirus, such as a non-integrating lentivirus or a lentivirus lacking reverse transcription capability. In some embodiments, the composition is packaged into liposomes, extracellular vesicles, or exosomes, which may be pseudotyped with vesicular stomatitis glycoprotein (VSVG) or conjugated to a cell-penetrating peptide, an antibody, a targeting moiety, or any combination thereof.

[0158] In preferred embodiments, the composition is delivered in-vivo to retinal pigment epithelium cells within the eye of a subject. The in-vivo delivery to an eye of a subject my occur by subretinal injection, suprachoroidal injection, or injection to the interior chamber of the eye. The injected composition may be packaged in adeno-associated virus (AAV), lentivirus, preferably a non-integrating lentivirus, liposomes, extracellular vesicles, or exosomes. In some embodiments, the injected exosome may be pseudotyped with vesicular stomatitis glycoprotein (VSVG) or conjugated to a cell-penetrating peptide, an antibody, a targeting moiety, or any combination thereof.

[0159] In other embodiments, the composition is delivered to a cell ex-vivo. In some embodiments, the cell is a stem cell. In some embodiments, the stem cell is an autologous pluripotent stem cell or an induced pluripotent stem cell (iPSC). In some embodiments, the stem cell is differentiated into a retinal pigment epithelium cell. In some embodiments, the cell is a retinal pigment epithelium cell. The composition may be delivered to the cell by any known ex-vivo delivery method, including but not limited to, electroporation, viral transduction, nanoparticle delivery, liposomes, exosomes etc. Upon ex-vivo delivery of the composition to a cell, the cell may be introduced into the eye of a subject. In one example, the composition is delivered ex-vivo to iPSCs or IPSC-derived retinal pigment epithelium cells expanded into a patch or a tissue that is to be surgically reintroduced to the eye (See Sharma et al. 2019). Additional detailed delivery methods are described throughout this section.

[0160] In some embodiments, the RNA molecule comprises a chemical modification. Non-limiting examples of suitable chemical modifications include 2′-O-methyl (M). 2′-O-methyl. 3′phosphorothioate (MS) or 2′-O-methyl, 3′thioPACE (MSP), pseudouridine, and 1-methyl pseudo-uridine. Each possibility represents a separate embodiment of the present invention.

[0161] Any suitable viral vector system may be used to deliver nucleic acid compositions e.g., the compositions of the subject invention. Conventional viral and non-viral based gene transfer methods can be used to introduce nucleic acids and target tissues. In certain embodiments, nucleic acids are administered for in vivo or ex vivo gene therapy uses. Non-viral vector delivery systems include naked nucleic acid, and nucleic acid complexed with a delivery vehicle such as a liposome or poloxamer. For a review of gene therapy procedures, see Anderson (1992); Nabel & Felgner (1993); Mitani & Caskey (1993); Dillon (1993); Miller (1992); Van Brunt (1988); Vigne (1995); Kremer & Perricaudet (1995); Haddada et al. (1995); and Yu et al. (1994).

[0162] Methods of non-viral delivery of nucleic acids and/or proteins include electroporation, lipofection, microinjection, biolistics, particle gun acceleration, virosomes, liposomes, immunoliposomes, lipid nanoparticles (LNPs), polycation or lipid:nucleic acid conjugates, artificial virions, and agent-enhanced uptake of nucleic acids or can be delivered to plant cells by bacteria or viruses (e.g., Agrobacterium, Rhizobium sp. NGR234, Sinorhizoboiummeliloti, Mesorhizobium loti, tobacco mosaic virus, potato virus X, cauliflower mosaic virus and cassava vein mosaic virus). (See, e.g., Chung et al., 2006). Sonoporation using, e.g., the Sonitron 2000 system (Rich-Mar), can also be used for delivery of nucleic acids. Cationic-lipid mediated delivery of proteins and/or nucleic acids is also contemplated as an in vivo, ex vivo, or in vitro delivery method. (See Zuris et al. (2015); see also Coelho et al. (2013); Judge et al. (2006); and Basha et al. (2011)).

[0163] Additional exemplary nucleic acid delivery systems include those provided by Amaxa® Biosystems (Cologne, Germany), Maxcyte, Inc. (Rockville, Md.), BTX Molecular Delivery Systems (Holliston, Mass.) and Copernicus Therapeutics Inc., (see, e.g., U.S. Pat. No. 6,008,336). Lipofection is described in e.g., U.S. Pat. Nos. 5,049,386, 4,946,787; and 4,897,355, and lipofection reagents are sold commercially (e.g., Transfectam™, Lipofectin™ and Lipofectamine™ RNAiMAX). Cationic and neutral lipids that are suitable for efficient receptor-recognition lipofection of polynucleotides include those disclosed in PCT International Publication Nos. WO/1991/017424 and WO/1991/016024. Delivery can be to cells (ex vivo administration) or target tissues (in vivo administration).

[0164] The preparation of lipid:nucleic acid complexes, including targeted liposomes such as immunolipid complexes, is well known to one of skill in the art (see, e.g., Crystal, Science (1995); Blaese et al., (1995); Behr et al., (1994); Remy et al. (1994); Gao and Huang (1995); Ahmad and Allen (1992); U.S. Pat. Nos. 4,186,183; 4,217,344; 4,235,871; 4,261,975; 4,485,054; 4,501,728; 4,774,085; 4,837,028; and 4,946,787).

[0165] Additional methods of delivery include the use of packaging the nucleic acids to be delivered into EnGeneIC delivery vehicles (EDVs). These EDVs are specifically delivered to target tissues using bispecific antibodies where one arm of the antibody has specificity for the target tissue and the other has specificity for the EDV. The antibody brings the EDVs to the target cell surface and then the EDV is brought into the cell by endocytosis. Once in the cell, the contents are released (See MacDiarmid et al., 2009).

[0166] The use of RNA or DNA viral based systems for viral mediated delivery of nucleic acids take advantage of highly evolved processes for targeting a virus to specific cells in the body and trafficking the viral payload to the nucleus. Viral vectors can be administered directly to patients (in vivo) or they can be used to treat cells in vitro and the modified cells are administered to patients (ex vivo). Conventional viral based systems for the delivery of nucleic acids include, but are not limited to, retroviral, lentivirus, adenoviral, adeno-associated, vaccinia and herpes simplex virus vectors for gene transfer.

[0167] The tropism of a retrovirus can be altered by incorporating foreign envelope proteins, expanding the potential target population of target cells. Lentiviral vectors are retroviral vectors that are able to transduce or infect non-dividing cells and typically produce high viral titers. Selection of a retroviral gene transfer system depends on the target tissue. Retroviral vectors are comprised of cis-acting long terminal repeats with packaging capacity for up to 6-10 kb of foreign sequence. The minimum cis-acting LTRs are sufficient for replication and packaging of the vectors, which are then used to integrate the therapeutic gene into the target cell to provide permanent transgene expression. Widely used retroviral vectors include those based upon murine leukemia virus (MuLV), gibbon ape leukemia virus (GaLV), Simian Immunodeficiency virus (SIV), human immunodeficiency virus (HIV), and combinations thereof (See, e.g., Buchschacher et al. (1992); Johann et al. (1992); Sommerfelt et al. (1990); Wilson et al. (1989); Miller et al. (1991); PCT International Publication No. WO/1994/026877A1).

[0168] At least six viral vector approaches are currently available for gene transfer in clinical trials, which utilize approaches that involve complementation of defective vectors by genes inserted into helper cell lines to generate the transducing agent.

[0169] pLASN and MFG-S are examples of retroviral vectors that have been used in clinical trials (See Dunbar et al., 1995; Kohn et al., 1995; Malech et al., 1997). PA317/pLASN was the first therapeutic vector used in a gene therapy trial (Blaese et al., 1995). Transduction efficiencies of 50% or greater have been observed for MFG-S packaged vectors. (Ellem et al., (1997); Dranoff et al., 1997).

[0170] Packaging cells are used to form virus particles that are capable of infecting a host cell. Such cells include 293 cells, which package adenovirus, AAV, and Psi-2 cells or PA317 cells, which package retrovirus. Viral vectors used in gene therapy are usually generated by a producer cell line that packages a nucleic acid vector into a viral particle. The vectors typically contain the minimal viral sequences required for packaging and subsequent integration into a host (if applicable), other viral sequences being replaced by an expression cassette encoding the protein to be expressed. The missing viral functions are supplied in trans by the packaging cell line. For example, AAV vectors used in gene therapy typically only possess inverted terminal repeat (ITR) sequences from the AAV genome which are required for packaging and integration into the host genome. Viral DNA is packaged in a cell line, which contains a helper plasmid encoding the other AAV genes, namely rep and cap, but lacking ITR sequences. The cell line is also infected with adenovirus as a helper. The helper virus promotes replication of the AAV vector and expression of AAV genes from the helper plasmid. The helper plasmid is not packaged in significant amounts due to a lack of ITR sequences. Contamination with adenovirus can be reduced by, e.g., heat treatment to which adenovirus is more sensitive than AAV. Additionally, AAV can be produced at clinical scale using baculovirus systems (see U.S. Pat. No. 7,479,554).

[0171] In many gene therapy applications, it is desirable that the gene therapy vector be delivered with a high degree of specificity to a particular tissue type. Accordingly, a viral vector can be modified to have specificity for a given cell type by expressing a ligand as a fusion protein with a viral coat protein on the outer surface of the virus. The ligand is chosen to have affinity for a receptor known to be present on the cell type of interest. For example, Han et al. (1995) reported that Moloney murine leukemia virus can be modified to express human heregulin fused to gp70, and the recombinant virus infects certain human breast cancer cells expressing human epidermal growth factor receptor. This principle can be extended to other virus-target cell pairs, in which the target cell expresses a receptor and the virus expresses a fusion protein comprising a ligand for the cell-surface receptor. For example, filamentous phage can be engineered to display antibody fragments (e.g., FAB or Fv) having specific binding affinity for virtually any chosen cellular receptor. Although the above description applies primarily to viral vectors, the same principles can be applied to nonviral vectors. Such vectors can be engineered to contain specific uptake sequences which favor uptake by specific target cells.

[0172] Gene therapy vectors can be delivered in vivo by administration to an individual patient, typically by systemic administration (e.g., intravitreal, intravenous, intraperitoneal, intramuscular, subdermal, or intracranial infusion) or topical application, as described below. Alternatively, vectors can be delivered to cells ex vivo, such as cells explanted from an individual patient (e.g., lymphocytes, bone marrow aspirates, tissue biopsy) or universal donor hematopoietic stem cells, followed by reimplantation of the cells into a patient, optionally after selection for cells which have incorporated the vector. A non-limiting exemplary ex vivo approach may involve removal of tissue (e.g., peripheral blood, bone marrow, and spleen) from a patient for culture, nucleic acid transfer to the cultured cells (e.g., hematopoietic stem cells), followed by grafting the cells to a target tissue (e.g., bone marrow, and spleen) of the patient. In some embodiments, the stem cell or hematopoietic stem cell may be further treated with a viability enhancer.

[0173] Ex-vivo cell transfection for diagnostics, research, or for gene therapy (e.g., via re-infusion of the transfected cells into the host organism) is well known to those of skill in the art. In a preferred embodiment, cells are isolated from the subject organism, transfected with a nucleic acid composition, and re-infused back into the subject organism (e.g., patient). Various cell types suitable for ex vivo transfection are well known to those of skill in the art (See, e.g., Freshney, “Culture of Animal Cells, A Manual of Basic Technique and Specialized Applications (6th edition, 2010) and the references cited therein for a discussion of how to isolate and culture cells from patients).

[0174] Suitable cells include, but are not limited to, eukaryotic cells and/or cell lines. Non-limiting examples of such cells or cell lines generated from such cells include COS, CHO (e.g., CHO—S, CHO-K1, CHO-DG44, CHO-DUXB11, CHO-DUKX, CHOKISV), VERO, MDCK, WI38, V79, B14AF28-G3, BHK, HaK, NSO, SP2/0-Ag14, HeLa, HEK293 (e.g., HEK293-F, HEK293-H, HEK293-T), perC6 cells, any plant cell (differentiated or undifferentiated), as well as insect cells such as Spodopterafugiperda (Sf), or fungal cells such as Saccharomyces, Pichia and Schizosaccharomyces. In certain embodiments, the cell line is a CHO-K1, MDCK or HEK293 cell line. Additionally, primary cells may be isolated and used ex vivo for reintroduction into the subject to be treated following treatment with a guided nuclease system (e.g. CRISPR/Cas). Suitable primary cells include peripheral blood mononuclear cells (PBMC), and other blood cell subsets such as, but not limited to, CD4+ T cells or CD8+ T cells. Suitable cells also include stem cells such as, by way of example, embryonic stem cells, induced pluripotent stem cells, hematopoietic stem cells (CD34+), neuronal stem cells and mesenchymal stem cells.

[0175] In one embodiment, stem cells are used in ex vivo procedures for cell transfection and gene therapy. The advantage to using stem cells is that they can be differentiated into other cell types in vitro, or can be introduced into a mammal (such as the donor of the cells) where they will engraft in the bone marrow. Methods for differentiating CD34+ cells in vitro into clinically important immune cell types using cytokines such a GM-CSF, IFN-gamma, and TNF-alpha are known (as a non-limiting example see, Inaba et al., 1992).

[0176] Stem cells are isolated for transduction and differentiation using known methods. For example, stem cells are isolated from bone marrow cells by panning the bone marrow cells with antibodies which bind unwanted cells, such as CD4+ and CD8+ (T cells), CD45+ (panB cells), GR-1 (granulocytes), and lad (differentiated antigen presenting cells) (as a non-limiting example, see Inaba et al., 1992). Stem cells that have been modified may also be used in some embodiments.

[0177] Vectors (e.g., retroviruses, liposomes, etc.) containing therapeutic nucleic acid compositions can also be administered directly to an organism for transduction of cells in vivo. Administration is by any of the routes normally used for introducing a molecule into ultimate contact with blood or tissue cells including, but not limited to, injection, infusion, topical application (e.g., eye drops and cream) and electroporation. Suitable methods of administering such nucleic acids are available and well known to those of skill in the art, and, although more than one route can be used to administer a particular composition, a particular route can often provide a more immediate and more effective reaction than another route. According to some embodiments, the composition is delivered via IV injection.

[0178] Vectors suitable for introduction of transgenes into immune cells (e.g., T-cells) include non-integrating lentivirus vectors. See, e.g., U.S. Patent Publication No. 2009/0117617.

[0179] Pharmaceutically acceptable carriers are determined in part by the particular composition being administered, as well as by the particular method used to administer the composition. Accordingly, there is a wide variety of suitable formulations of pharmaceutical compositions available, as described below (See, e.g., Remington's Pharmaceutical Sciences, 17th ed., 1989).

[0180] In accordance with some embodiments, there is provided an RNA molecule which binds to/associates with and/or directs the RNA guided DNA nuclease to a sequence comprising at least one nucleotide which differs between a mutated allele and a functional allele (e.g., SNP) of a gene of interest (i.e., a sequence of the mutated allele which is not present in the functional allele). The sequence may be within the disease associated mutation. The sequence may be upstream or downstream to the disease associated mutation. Any sequence difference between the mutated allele and the functional allele may be targeted by an RNA molecule of the present invention to inactivate the mutant allele, or otherwise disable its dominant disease-causing effects, while preserving the activity of the functional allele.

[0181] The disclosed compositions and methods may also be used in the manufacture of a medicament for treating dominant genetic disorders in a patient.

### Mechanisms of Action for RPE65 Knockout Methods

[0182] Without being bound by any theory or mechanism, the instant invention may be utilized to apply a CRISPR nuclease to process a mutated pathogenic RPE65 allele and not a functional RPE65 allele, such as to prevent expression of the mutated pathogenic allele or to produce a truncated non-pathogenic peptide from the mutated pathogenic allele, in order to prevent or treat a dominant RPE65 gene disorder. A specific guide sequence may be selected from Table 1 based on the targeted SNP position and the type of CRISPR nuclease used (e.g. according to a required PAM sequence).

[0183] The RPE65 gene is located in chromosome 1 and encodes the retinal pigment epithelium-specific 65 kDa protein. Editing strategies for RPE65 include (1) truncation strategies requiring only one guide; (2) truncation strategies using two guides; (3) knockout strategies using two guides; and (4) two guide strategies using a first RNA guide specifically targeting a pathogenic mutation in Exon 13 (i.e. one which leads to Asp477Gly) and a second, non-discriminatory RNA guide.

[0184] An example of a truncation strategy requiring only one guide RNA molecule includes targeting a pathogenic mutation in order to mediate truncation or nonsense mediated decay (NMD) of an RPE65 mutant allele. As a non-limiting example, a frameshift in a mutated RPE65 allele may be introduced by utilizing one RNA molecule to target a pathogenic mutation in a coding exon of the mutated RPE65 allele in order to mediate a double-strand break, which leads to generation of a frameshift mutation and expression of a truncated protein or nonsense mediated decay (NMD) of its transcripts.

[0185] An example of a truncation strategy using two guides includes excision of any one of Exons 5, 6, 9, or 10 by targeting RNA molecules to flanking regions of the exons. One of the two guides must specifically target a mutated RPE65 allele over a functional RPE65 allele, for example, by targeting a SNP position.

[0186] Examples of a knockout strategy using two guides include multiple approaches. In one approach, knockout of an RPE65 mutant allele may be achieved by excision of Exon 1 (including the 5′UTR and ORF). Exon 1 may be excised by utilizing SNP positions in Intron 1 or upstream to the promoter region. Only one of the two guides needs to be a discriminatory guide. For example, Exon 1 may be excised by targeting a first RNA molecule to a SNP position in Intron 1 and a second, non-discriminatory RNA molecule targeting a region upstream to the promoter region. Alternatively, Exon 1 may be excised by targeting a first RNA molecule to a SNP position in a region upstream to the promoter region and a second, non-discriminatory RNA molecule targeting Intron 1.

[0187] In another approach using two guides, knockout of an RPE65 mutant may be achieved by excision of Exon 2. Exon 2 may be excised by utilizing SNP positions in Intron 1 or Intron 2, however only one of the two guides needs to be a discriminatory guide. Exon 2 excision in this manner generates a peptide of only 23 amino acids.

[0188] In yet another approach using two guides, knockout of an RPE65 mutant may be achieved by excision of Exon 14. Exon 14 may be excised by utilizing a SNP position downstream of Exon 14 or in Intron 13. However only one of the two guides needs to be a discriminatory guide. Exon 14 excision in this manner would eliminate the 3′UTR and thereby destabilize the transcript.

[0189] Examples of two-guide strategies using a first RNA guide specifically targeting a pathogenic mutation in Exon 13 of RPE65 (i.e. one which leads to Asp477Gly) and a second, non-discriminatory RNA guide include multiple approaches.

[0190] For example, in one approach excision from Exon 11 to a pathogenic mutation in Exon 13 is carried out. To facilitate the excision, an allele specific cut is mediated by targeting a first RNA molecule to a pathogenic mutation in Exon 13, and a biallelic cut is mediated by targeting a second, non-discriminatory RNA molecule to Intron 10. Intron 10 is preferably targeted since Intron 11 and Intron 12 are very short and therefore targeting them might cause legions that would be deleterious to a functional RPE65 allele, as well.

[0191] In another approach, excision from a pathogenic mutation in Exon 13 to Intron 13 is carried out. To facilitate the excision, an allele specific cut is mediated by targeting a first RNA molecule to a pathogenic mutation in Exon 13, and a biallelic cut is mediated by targeting a second, non-discriminatory RNA molecule to Intron 13. This approach would lead to the elimination of the splice donor at the end of Exon 13. This approach would lead to nonsense-mediated decay (NMD) or to the extension of Exon 13, which would contain stop codons and result in expression of a truncated protein.

[0192] In yet another approach, excision from a pathogenic mutation in Exon 13 to the 3′UTR is carried out. To facilitate the excision, an allele specific cut is mediated by targeting a first RNA molecule to a pathogenic mutation in Exon 13, and a biallelic cut is mediated by targeting a second, non-discriminatory RNA downstream to the 3′UTR in Exon 14. An excision performed using this approach would destabilize the transcript of the mutant RPE65 allele.

### Examples of RNA Guide Sequences which Specifically Target Mutated Alleles of RPE65 Gene

[0193] Although a large number of guide sequences can be designed to target a mutated allele, the nucleotide sequences described in Table 1 identified by SEQ ID NOs: 1-49516 below were specifically selected to effectively implement the methods set forth herein and to effectively discriminate between alleles.

[0194] Table 1 shows guide sequences designed for use as described in the embodiments above to associate with different SNPs or pathogenic mutations within a sequence of a mutated RPE65 allele. Each engineered guide molecule is further designed such as to associate with a target genomic DNA sequence of interest that lies next to a protospacer adjacent motif (PAM), e.g., a PAM matching the sequence NGG or NAG, where “N” is any nucleobase. The guide sequences were designed to work in conjunction with one or more different CRISPR nucleases, including, but not limited to, e.g. SpCas9WT (PAM SEQ: NGG), SpCas9.VQR.1 (PAM SEQ: NGAN), SpCas9.VQR2 (PAM SEQ: NGNG), SpCas9.EQR (PAM SEQ: NGAG), SpCas9.VRER (PAM SEQ: NGCG), SaCas9WT (PAM SEQ: NNGRRT), NmCas9WT (PAM SEQ: NNNNGATT), Cpf1 (PAM SEQ: TITV), or JeCas9WT (PAM SEQ: NNNVRYM). RNA molecules of the present invention are each designed to form complexes in conjunction with one or more different CRISPR nucleases and designed to target polynucleotide sequences of interest utilizing one or more different PAM sequences respective to the CRISPR nuclease utilized.

TABLE 1
Guide sequences designed to associate with specific RPE65 gene targets

| | SEQ ID NOs: | SEQ ID NOs: | SEQ ID NOs: |
|---|---|---|---|
| | of 20 base | of 21 base | of 22 base |
| Target | guides | guides | guides |
| 1:68431085_T_C | 1-46 | 47-94 | 95-144 |
| 1:68446825_G_A | 145-190 | 191-238 | 239-288 |
| 1:68425933_C_CAT | 289-302 | 303-311 | 312-324 |
| rs60701104_REF | | | |
| 1:68426291_T_C | | 325-326 | 327-330 |
| rs9436400_SNP | | | |
| 1:68426379_TA_T | 331-347 | 348-364 | 365-381 |
| rs868541802_REF | | | |
| 1:68426406_C_T | 382-389 | 390-393 | 394-399 |
| rs3125890_REF | | | |
| 1:68426406_C_T | 400-401 | | |
| rs3125890_SNP | | | |
| 1:68426632_A_G | 402-414 | 415-432 | 433-456 |
| rs75159457_REF | | | |
| 1:68426632_A_G | 403 405 407 | 417-418 420 | 435 437-438 |
| rs75159457_SNP | 411 457-488 | 428-429 489- | 441 452-453 |
| | | 523 | 524-561 |
| 1:68427338_GT_G | 562-574 | 575-587 | 588-602 |
| rs1205919238_REF | | | |
| 1:68427338_GT_G | 603 | | 604 |
| rs1205919238_SNP | | | |
| 1:68427665_T_A | 605-608 | 609-612 | 613-619 |
| rs11209300_REF | | | |
| 1:68427665_T_A | 605-608 | 609-612 | 613-618 620 |
| rs11209300_SNP | | | |
| 1:68428071_G_A | 621-666 | 667-714 | 715-764 |
| rs4264030_REF | | | |
| 1:68428071_G_A | 627 632 636 | 673 678 682 | 721 726 730 |
| rs4264030_SNP | 640 648 653 | 686 695 703 | 732 735 737 |
| | 656 662 765- | 709 711 800- | 753 761 831- |
| | 799 | 830 | 870 |
| 1:68428149_T_C | 871-914 | 915-957 | 958-1003 |
| rs2419988_REF | | | |
| 1:68428149_T_C | 875 885 891- | 919 921 935 | 964 973 979- |
| rs2419988_SNP | 892 894 914 | 938 1042-1081 | 980 983 1082- |
| | 1004-1041 | | 1123 |
| 1:68428613_T_C | 1124-1132 | 1133-1134 | 1135-1140 |
| rs3118415_REF | | | |
| 1:68428613_T_C | 1124-1125 1127 | 1133 1160-1170 | 1139 1171-1185 |
| rs3118415_SNP | 1130 1141-1159 | | |
| 1:68428861_G_C | 1186-1208 | 1209-1216 | 1217-1226 |
| rs3118416_REF | | | |
| 1:68428861_G_C | 1227-1249 | 1250-1257 | 1258-1267 |
| rs3118416_SNP | | | |
| 1:68429047_G_GCT | 1268-1279 | | |
| rs149739986_SNP | | | |
| 1:68429165_C_T | 1280-1294 | 1295-1307 | 1308-1322 |
| rs2182315_REF | | | |
| 1:68429165_C_T | 1281-1282 | 1295 1301-1302 | 1309 1315 1320 |
| rs2182315_SNP | 1288-1289 | 1306 1330-1336 | 1322 1337-1345 |
| | 1323-1329 | | |
| 1:68429245_T_C | 1346-1372 | 1373-1393 | 1394-1418 |
| rs3118418_REF | | | |
| 1:68429245_T_C | 1358 1361 1364 | 1382 1385 | 1408 1415 |
| rs3118418_SNP | 1370 1419-1447 | 1392-1393 | 1417-1418 |
| | | 1448-1472 | 1473-1501 |
| 1:68430961_G_A | 1502-1529 | 1530-1543 | 1544-1561 |
| rs932783_REF | | | |
| 1:68430961_G_A | 1517 1562-1571 | 1572-1575 | 1576-1581 |
| rs932783_SNP | | | |
| 1:68432081_G_A | 1582-1600 | 1601-1619 | 1620-1638 |
| rs12124063_REF | | | |
| 1:68432081_G_A | 1592 1595 | 1611 1613 1615 | 1628 1630 1634 |
| rs12124063_SNP | 1599-1600 | 1618 1654-1668 | 1637 1669-1683 |
| | 1639-1653 | | |
| 1:68432262_C_G | 1684-1729 | 1730-1777 | 1778-1827 |
| rs77585943_REF | | | |
| 1:68432262_C_G | 1685 1687 | 1731 1733 1736 | 1781 1784 1792 |
| rs77585943_SNP | 1695-1696 1703 | 1743 1750 1755 | 1797 1800 1805 |
| | 1708 1712 1725 | 1759 1765 | 1809 1815 |
| | 1828-1865 | 1866-1905 | 1906-1947 |
| 1:68433374_G_A | 1948-1993 | 1994-2041 | 2042-2091 |
| rs1886906_REF | | | |
| 1:68433374_G_A | 1956-1957 1971 | 2002-2003 2010 | 2048 2051-2052 |
| rs1886906_SNP | 1975 1977 1980 | 2019 2023 2025 | 2059 2068 2074 |
| | 1982 1992 | 2030 2040 | 2079 2082 |
| | 2092-2129 | 2130-2169 | 2170-2211 |
| 1:68433703_A_G | 2212-2248 | 2249-2275 | 2276-2308 |
| rs3125891_REF | | | |
| 1:68433703_A_G | 2217-2218 2225 | 2251 2256 2264 | 2276 2280 |
| rs3125891_SNP | 2236 2243 2245 | 2271 2274-2275 | 2284-2285 2304 |
| | 2248 2309-2346 | 2347-2382 | 2307-2308 |
| | | | 2383-2424 |
| 1:68433977_G_A | 2425-2470 | 2471-2518 | 2519-2568 |
| rs11581095_REF | | | |
| 1:68433977_G_A | 2426 2431-2432 | 2472 2474 | 2519 2521 2523 |
| rs11581095_SNP | 2435 2437-2438 | 2478-2479 2482 | 2527 2531 2534 |
| | 2457 2464 | 2485 2504-2505 | 2553 2563 |
| | 2569-2606 | 2607-2646 | 2647-2688 |
| 1:68434079_G_A | 2689-2734 | 2735-2781 | 2782-2829 |
| rs12030710_REF | | | |
| 1:68434079_G_A | 2694 2696-2697 | 2740 2742-2743 | 2787 2789-2790 |
| rs12030710_SNP | 2717 2720 | 2764 2767 | 2814 2816-2817 |
| | 2722-2723 2731 | 2769-2770 | 2908-2949 |
| | 2830-2867 | 2868-2907 | |
| 1:68434091_GAT_G | 2689 2691 2693 | 2735 2737 2739 | 2782 2784 2786 |
| rs1003041423_REF | 2696-2700 2702 | 2741 2743-2747 | 2788 2790-2794 |
| | 2708 2712 2714 | 2749 2755 2759 | 2796 2802 2806 |
| | 2716 2718 | 2761 2763 2765 | 2808 2810 2812 |
| | 2722-2726 2728 | 2769-2773 2775 | 2815 2817-2821 |
| | 2730 2733 | 2777 2780 | 2823 2825 2828 |
| | 2950-2954 | 2955-2958 | 2959-2961 |
| 1:68434556_T_C | 2962-3007 | 3008-3055 | 3056-3105 |
| rs3118419_REF | | | |
| 1:68434556_T_C | 2962-2964 | 3008 3010 | 3056 3061 3065 |
| rs3118419_SNP | 2970-2971 2981 | 3016-3017 3032 | 3081 3084 |
| | 2986 2991 | 3035 3038-3039 | 3087-3088 3101 |
| | 3106-3143 | 3144-3183 | 3184-3225 |
| 1:68434669_A_AT | 3226-3236 | | |
| rs5774935_REF | | | |
| 1:68434669_A_AT | 3232 3234 | | |
| rs5774935_SNP | | | |
| 1:68434719_C_CTGTT | 3237-3246 | 3247 | 3248-3251 |
| rs150459448_REF | | | |
| 1:68434729_G_T | 3237-3243 | 3247 | 3248-3251 |
| rs1555845_REF | 3245-3246 | | |
| 1:68434877_C_T | | 3252-3253 | 3254-3260 |
| rs1555846_REF | | | |
| 1:68434877_C_T | 3261-3270 | 3271-3282 | 3283-3298 |
| rs1555846_SNP | | | |
| 1:68435174_GCTCTTGTTTC- | 3299-3344 | 3345-3392 | 3393-3442 |
| TTTTTCTGGCTT_G | | | |
| rs11269074_REF | | | |
| 1:68435749_T_G | 3443-3483 | 3484-3524 | 3525-3567 |
| rs3790469_REF | | | |
| 1:68435749_T_G | 3449 3459 3469 | 3490 3500 3505 | 3530 3542 3547 |
| rs3790469_SNP | 3474 3568-3605 | 3515 3606-3644 | 3558 3645-3685 |
| 1:68435988_T_C | 3686-3708 | 3709-3731 | 3732-3756 |
| rs3125894_REF | | | |
| 1:68435988_T_C | 3686 3688 3692 | 3709 3711 3714 | 3732 3734 3739 |
| rs3125894_SNP | 3698 3757-3787 | 3722 3788-3808 | 3747 3809-3831 |
| 1:68436052_C_A | 3832-3875 | 3876-3918 | 3919-3963 |
| rs3125895_REF | | | |
| 1:68436052_C_A | 3840 3864 3866 | 3884 3915 3917 | 3921 3928 3962 |
| rs3125895_SNP | 3871 3873-3874 | 4002-4041 | 4042-4083 |
| | 3964-4001 | | |
| 1:68436153_G_A | 4084-4097 | | 4098-4099 |
| rs3125896_REF | | | |
| 1:68436153_G_A | 4085 4090 | | |
| rs3125896_SNP | | | |
| 1:68436172_G_A | 4085 4090 | 4132-4151 | 4099 4152-4175 |
| rs3125897_REF | 4100-4131 | | |
| 1:68436172_G_A | 4176-4191 | 4192-4199 | 4200-4211 |
| rs3125897_SNP | | | |
| 1:68436228_T_C | 4212-4257 | 4258-4305 | 4306-4355 |
| rs3125898_REF | | | |
| 1:68436228_T_C | 4218-4219 4222 | 4264-4265 4268 | 4312 4314 4320 |
| rs3125898_SNP | 4227-4228 4243 | 4271 4274-4275 | 4323-4324 4330 |
| | 4245 4256 | 4290 4293 | 4340 4343 |
| | 4356-4393 | 4394-4433 | 4434-4475 |
| 1:68436309_T_C | 4476-4521 | 4522-4569 | 4570-4619 |
| rs17130688_REF | | | |
| 1:68436309_T_C | 4482 4485 4490 | 4526 4535 4538 | 4574 4583 4588 |
| rs17130688_SNP | 4493 4495 4505 | 4541 4543 4553 | 4590 4592 |
| | 4510 4520 | 4558 4568 | 4607-4608 4618 |
| | 4620-4657 | 4658-4697 | 4698-4739 |
| 1:68436444_CTATTTATT_C | 4740-4758 | 4759-4777 | 4778-4798 |
| rs938759267_REF | | | |
| 1:68436444_CTATT_C | 4740-4758 | 4759-4777 | 4778-4798 |
| rs938759267_REF | | | |
| 1:68436702_G_A | 4799-4831 | 4832-4866 | 4867-4903 |
| rs34194247_REF | | | |
| 1:68436715_G_A | 4799 4801 | 4832 4834 | 4867 4869-4873 |
| rs3125900_REF | 4803-4805 | 4836-4838 | 4875-4880 |
| | 4807-4812 4815 | 4840-4845 | 4882-4883 |
| | 4817-4818 | 4847-4848 | 4886-4887 |
| | 4820-4823 | 4851-4852 | 4889-4894 |
| | 4827-4828 4904 | 4854-4858 | 4898-4899 4906 |
| | | 4862-4863 4905 | |
| 1:68436715_G_A | 4805 4807-4808 | 4840-4841 4847 | 4870 4876 4882 |
| rs3125900_SNP | 4827 4907-4927 | 4862 4928-4952 | 4898 4953-4981 |
| 1:68436720_G_A | 4801 4803 | 4832 4834 4836 | 4867 4869 4871 |
| rs79716012_REF | 4809-4810 4812 | 4842-4843 4845 | 4873 4877-4878 |
| | 4815 4817 4820 | 4848 4851 4854 | 4880 4883 4886 |
| | 4822 4828 4904 | 4856-4857 4863 | 4889 4891-4892 |
| | | 4905 | 4894 4899 4906 |
| 1:68436720_G_A | 4801 4810 4815 | 4832 4834 4843 | 4867 4869 4873 |
| rs79716012_SNP | 4828 4982-4992 | 4848 4993-5007 | 4878 5008-5026 |
| 1:68437256_C_G | 5027-5072 | 5073-5119 | 5120-5169 |
| rs75711879_REF | | | |
| 1:68437256_C_G | 5037 5040 5042 | 5086 5088 5095 | 5135 5143 |
| rs75711879_SNP | 5049 5051-5052 | 5097-5098 | 5145-5146 5151 |
| | 5064-5065 | 5111-5112 | 5160-5161 5165 |
| | 5170-5207 | 5208-5247 | 5248-5289 |
| 1:68438259_C_T | 5290-5312 | 5313-5335 | 5336-5358 |
| rs12145904_REF | | | |
| 1:68438259_C_T | 5291 5296 5306 | 5314 5318-5319 | 5336 5340-5341 |
| rs12145904_SNP | 5308 5359-5377 | 5331 5378-5396 | 5343 5397-5415 |
| 1:68438583_T_C | 5416-5461 | 5462-5509 | 5510-5559 |
| rs3125902_REF | | | |
| 1:68438583_T_C | 5416 5420 5423 | 5462 5466 5469 | 5510 5517 5525 |
| rs3125902_SNP | 5429-5431 | 5477 5479 | 5527 5532-5533 |
| | 5436-5437 | 5483-5485 | 5541 5549 |
| | 5560-5597 | 5598-5637 | 5638-5679 |
| 1:68438672_G_T | 5680-5722 | 5723-5766 | 5767-5814 |
| rs3118420_REF | | | |
| 1:68438672_G_T | 5688 5693 5704 | 5726 5732 5737 | 5771 5777 5779 |
| rs3118420_SNP | 5710 5718 | 5748 5754 | 5794 5796 5802 |
| | 5815-5849 | 5850-5882 | 5883-5919 |
| 1:68438830_A_G | 5920-5964 | 5965-5999 | 6000-6041 |
| rs12138573_REF | | | |
| 1:68438830_A_G | 5926 5932 5934 | 5971 5977 5980 | 6006 6012 6016 |
| rs12138573_SNP | 5937 5939 5942 | 5982 5992 | 6018 6023 |
| | 5944 6042-6079 | 6080-6119 | 6033-6034 |
| | | | 6120-6161 |
| 1:68439675_G_C | 6162-6196 | 6197-6231 | 6232-6266 |
| rs1925955_REF | | | |
| 1:68439675_G_C | 6174 6184-6185 | 6205 6210 6220 | 6237 6241 6246 |
| rs1925955_SNP | 6191 6267-6297 | 6226 6298-6328 | 6256 6329-6359 |
| 1:68440298_T_A | 6360-6380 | 6381-6399 | 6400-6422 |
| rs17130691_REF | | | |
| 1:68440298_T_A | 6367 6374 6377 | 6386 6390 6396 | 6407 6411 6418 |
| rs17130691_SNP | 6380 6423-6439 | 6399 6440-6454 | 6422 6455-6473 |
| 1:68440407_G_A | 6474-6499 | 6500-6503 | 6504-6514 |
| rs3125904_REF | | | |
| 1:68440407_G_A | 6515-6516 | | 6507 |
| rs3125904_SNP | | | |
| 1:68441530_T_C | 6517-6552 | 6553-6583 | 6584-6616 |
| rs78507000_REF | | | |
| 1:68441530_T_C | 6519 6522 6545 | 6555 6577 | 6609 6614 |
| rs78507000_SNP | 6617-6651 | 6652-6686 | 6687-6723 |
| 1:68441814_GA_G | 6724-6732 | | |
| rs150774295_REF | | | |
| 1:68441814_GA_G | 6727 6733-6740 | | |
| rs150774295_SNP | | | |
| 1:68441844_A_C | 6741-6758 | 6759-6775 | 6776-6794 |
| rs3125905_REF | | | |
| 1:68441844_A_C | 6741-6742 6756 | 6759 6773 | 6791 6794 |
| rs3125905_SNP | 6795-6814 | 6815-6831 | 6832-6854 |
| 1:68442800_G_A | 6855-6900 | 6901-6948 | 6949-6998 |
| rs2038900_REF | | | |
| 1:68442800_G_A | 6859 6862 6866 | 6902 6906 6909 | 6950 6954 6957 |
| rs2038900_SNP | 6868-6869 6873 | 6915-6917 6921 | 6963 6965 6972 |
| | 6876 6900 | 6924 7037-7075 | 6981 6985 |
| | 6999-7036 | | 7076-7117 |
| 1:68442818_T_C | 6856 6859-6860 | 6901-6903 | 6949-6951 |
| rs2038901_REF | 6863 6866 | 6906-6907 6910 | 6954-6955 6958 |
| | 6868-6869 6874 | 6913 6916-6917 | 6961 6964-6965 |
| | 6877 6887 | 6922 6925 6935 | 6970 6973 |
| | 7118-7153 | 7154-7189 | 6980-6981 6984 |
| | | | 7190-7225 |
| 1:68442818_T_C | 6856 6863 6874 | 6901 6903 6910 | 6949 6951 6958 |
| rs2038901_SNP | 6877 7125 7143 | 6925 7160 7178 | 6980 7211 7214 |
| | 7150-7151 | 7186 7189 | 7222 7225 |
| | 7226-7263 | 7264-7303 | 7304-7345 |
| 1:68443118_CA_C | 7346-7391 | 7392-7433 | 7434-7482 |
| rs147665807_REF | | | |
| 1:68443118_CA_C | 7353 7364 7374 | 7408 7410 7420 | 7440 7442 7451 |
| rs147665807_SNP | 7377 7384 7387 | 7427 7431 | 7463 7474 7479 |
| | 7389 7483-7520 | 7521-7560 | 7561-7602 |
| 1:68443430_C_T | 7603-7648 | 7649-7696 | 7697-7746 |
| rs17130694_REF | | | |
| 1:68443430_C_T | 7604 7607 7615 | 7650 7653 7669 | 7701 7717 7720 |
| rs17130694_SNP | 7625-7626 7630 | 7672-7673 7677 | 7725 7729-7730 |
| | 7636 7639 | 7681 7684 | 7733 7742 |
| | 7747-7784 | 7785-7824 | 7825-7866 |
| 1:68443445_A_G | 7605 7607-7610 | 7651 7653-7656 | 7697 7699 |
| rs12408546_REF | 7617 7622-7623 | 7659 7663 7668 | 7701-7704 7707 |
| | 7626 7628-7631 | 7670 7673 | 7711 7716 7718 |
| | 7637 7639 7642 | 7675-7678 7681 | 7721 7723-7726 |
| | 7867-7896 | 7685 7687 7690 | 7730 7734 7736 |
| | | 7897-7926 | 7739 7742 |
| | | | 7927-7956 |
| 1:68443445_A_G | 7605 7623 7628 | 7651 7659 7670 | 7697 7699 7707 |
| rs12408546_SNP | 7637 7869 | 7685 7899 7903 | 7734 7933 7944 |
| | 7873-7874 7884 | 7914 7916 | 7946 7949 |
| | 7957-7994 | 7995-8034 | 8035-8076 |
| 1:68443820_G_A | 8077-8107 | 8108-8130 | 8131-8157 |
| rs12077372_REF | | | |
| 1:68443820_G_A | 8079 8084 8088 | 8110 8114 8117 | 8133 8140 8144 |
| rs12077372_SNP | 8102 8158-8168 | 8128 8169-8177 | 8152 8178-8192 |
| 1:68445316_C_A | 8193-8228 | 8229-8260 | 8261-8298 |
| rs3790472_REF | | | |
| 1:68445316_C_A | 8195 8197 8202 | 8229 8232 8234 | 8261-8262 8265 |
| rs3790472_SNP | 8204 8207 8209 | 8238 8243 8245 | 8267 8272 8279 |
| | 8216 8219 | 8248 8251 | 8281 8284 |
| | 8299-8314 | 8315-8325 | 8326-8341 |
| 1:68445430_A_G | 8342-8387 | 8388-8433 | 8434-8483 |
| rs3790473_REF | | | |
| 1:68445430_A_G | 8351 8353 8358 | 8391 8398 8405 | 8435 8438 8445 |
| rs3790473_SNP | 8362 8368 8372 | 8415 8419 8425 | 8460 8463 8467 |
| | 8379 8384 | 8429 8433 | 8479 8483 |
| | 8484-8521 | 8522-8561 | 8562-8603 |
| 1:68446330_T_TGCTA | 8604-8648 | 8649-8693 | 8694-8740 |
| rs147893529_REF | | | |
| 1:68446330_T_TGCTA | 8605 8612 8620 | 8657 8665 8680 | 8702 8726 8729 |
| rs147893529_SNP | 8638 8741-8771 | 8683 8772-8804 | 8737 8805-8839 |
| 1:68447072_T_C | 8840-8885 | 8886-8933 | 8934-8983 |
| rs2012235_REF | | | |
| 1:68447072_T_C | 8843 8848 8853 | 8892 8895 8897 | 8940 8945 8952 |
| rs2012235_SNP | 8859 8862 8872 | 8901 8907 8910 | 8956 8959 |
| | 8877 8879 | 8925 8927 | 8974-8975 8977 |
| | 8984-9021 | 9022-9061 | 9062-9103 |
| 1:68447254_T_G | 9104-9148 | 9149-9191 | 9192-9237 |
| rs3118423_REF | | | |
| 1:68447254_T_G | 9112 9135-9136 | 9180 9188 | 9204 9207 9234 |
| rs3118423_SNP | 9144-9145 | 9190-9191 | 9236-9237 |
| | 9147-9148 | 9276-9315 | 9316-9357 |
| | 9238-9275 | | |
| 1:68447776_T_G | 9358-9386 | 9387-9417 | 9418-9450 |
| rs2986125_REF | | | |
| 1:68447894_C_A | 9451-9467 | 9468-9484 | 9485-9501 |
| rs2986124_REF | | | |
| 1:68447894_C_A | 9456 9462-9463 | 9478-9479 | 9496 9499-9501 |
| rs2986124_SNP | 9467 9502-9512 | 9483-9484 | 9524-9534 |
| | | 9513-9523 | |
| 1:68448323_C_T | 9535-9577 | 9578-9616 | 9617-9658 |
| rs72926973_REF | | | |
| 1:68448323_C_T | 9550 9554 9562 | 9589 9593 9607 | 9629 9633 9648 |
| rs72926973_SNP | 9575 9577 | 9616 9688-9710 | 9657 9711-9741 |
| | 9659-9687 | | |
| 1:68448987_A_G | 9742-9783 | 9784-9817 | 9818-9861 |
| rs2277874_REF | | | |
| 1:68448987_A_G | 9746 9750 9752 | 9786-9787 9790 | 9822-9823 |
| rs2277874_SNP | 9758-9759 | 9792 9797-9798 | 9826-9827 |
| | 9768-9769 9778 | 9803 9806 | 9835-9836 |
| | 9862-9899 | 9900-9939 | 9844-9845 |
| | | | 9940-9981 |
| 1:68449261_A_G | 9982-9998 | 9999-10010 | 10011-10025 |
| rs3125906_REF | | | |
| 1:68449261_A_G | 9983 9985 9990 | 9999 10001 | 10011-10012 |
| rs3125906_SNP | 9996 10026- | 10005 10009 | 10016 10024 |
| | 10049 | 10050-10064 | 10065-10081 |
| 1:68449382_C_A | 10082-10126 | 10127-10168 | 10169-10216 |
| rs3118426_REF | | | |
| 1:68449382_C_A | 10103 10108 | 10151 10163 | 10187 10191 |
| rs3118426_SNP | 10111 10118 | 10165 10167 | 10196 10208 |
| | 10121 10124- | 10249-10275 | 10214-10215 |
| | 10125 10217- | | 10276-10306 |
| | 10248 | | |
| 1:68449796_A_T | 10307-10350 | 10351-10392 | 10393-10442 |
| rs3125907_REF | | | |
| 1:68449796_A_T | 10308 10313 | 10351 10353 | 10393 10395 |
| rs3125907_SNP | 10316-10317 | 10355 10359 | 10397 10401 |
| | 10322 10331 | 10362-10363 | 10405 10412 |
| | 10333 10347 | 10367 10376 | 10421 10424 |
| | 10443-10478 | 10479-10512 | 10513-10554 |
| 1:68450440_G_C | 10555-10577 | 10578-10581 | 10582-10592 |
| rs382422_REF | | | |
| 1:68450440_G_C | 10564 10570 | 10580-10581 | 10583 10586 |
| rs382422_SNP | 10572-10573 | 10612-10613 | 10589-10590 |
| | 10593-10611 | | 10614-10620 |
| 1:68450870_T_C | 10621-10661 | 10662-10702 | 10703-10745 |
| rs3118427_REF | | | |
| 1:68450870_T_C | 10622 10626 | 10663 10667- | 10704-10705 |
| rs3118427_SNP | 10641-10642 | 10668 10682 | 10709 10724 |
| | 10746-10783 | 10784-10822 | 10823-10863 |
| 1:68450986_G_A | 10864-10909 | 10910-10957 | 10958-11007 |
| rs3125908_REF | | | |
| 1:68450986_G_A | 10866 10870 | 10911 10913 | 10959-10960 |
| rs3125908_SNP | 10874-10875 | 10917 10921- | 10962 10966 |
| | 10884 10898 | 10922 10925 | 10970-10971 |
| | 10904 10908 | 10932 10946 | 10974 10999 |
| | 11008-11045 | 11046-11085 | 11086-11127 |
| 1:68451167_G_T | 11128-11156 | 11157-11181 | 11182-11208 |
| rs12759602_REF | | | |
| 1:68451167_G_T | 11132 11151 | 11169 11176 | 11195-11196 |
| rs12759602_SNP | 11155-11156 | 11180-11181 | 11207-11208 |
| | 11209-11227 | 11228-11244 | 11245-11263 |
| 1:68451599_A_G | 11264-11290 | 11291-11307 | 11308-11333 |
| rs2477974_REF | | | |
| 1:68451599_A_G | 11266 11272 | 11293 11297 | 11312 11314 |
| rs2477974_SNP | 11281 11288 | 11300 11306 | 11318 11322 |
| | 11334-11371 | 11372-11402 | 11325 11403- |
| | | | 11439 |
| 1:68451602_C_A | 11264-11265 | 11291-11292 | 11308-11311 |
| rs3125909_REF | 11267-11271 | 11294-11296 | 11313 11315- |
| | 11273-11282 | 11298-11299 | 11316 11318- |
| | 11284-11287 | 11301-11307 | 11321 11323- |
| | 11289-11290 | | 11333 |
| 1:68451602_C_A | 11278 11281 | 11302 11306 | 11318 11326 |
| rs3125909_SNP | 11440-11450 | 11451 | 11330 11452- |
| | | | 11453 |
| 1:68451671_T_C | 11454-11499 | 11500-11547 | 11548-11597 |
| rs3118428_REF | | | |
| 1:68451671_T_C | 11454-11455 | 11500 11502 | 11548 11550 |
| rs3118428_SNP | 11460-11461 | 11507-11508 | 11556 11562 |
| | 11475-11476 | 11523 11533 | 11572 11583 |
| | 11486 11497 | 11544 11547 | 11594 11597 |
| | 11598-11635 | 11636-11675 | 11676-11717 |
| 1:68452065_G_A | | | 11718-11721 |
| rs12407140_REF | | | |
| 1:68452441_G_A | 11722-11765 | 11766-11798 | 11799-11838 |
| rs72674322_REF | | | |
| 1:68452441_G_A | 11735-11736 | 11774 11778 | 11809 11813 |
| rs72674322_SNP | 11741 11757 | 11792 11797- | 11817 11823 |
| | 11761 11763- | 11798 11863- | 11836 11838 |
| | 11765 11839- | 11884 | 11885-11910 |
| | 11862 | | |
| 1:68452444_T_C | 11722-11731 | 11766-11772 | 11799-11805 |
| rs72674323_REF | 11733-11735 | 11775-11777 | 11807-11808 |
| | 11737-11746 | 11779-11784 | 11810-11812 |
| | 11748-11757 | 11786-11792 | 11814-11821 |
| | 11759-11763 | 11794-11797 | 11824-11831 |
| | 11911-11916 | 11917-11921 | 11833-11838 |
| | | | 11922-11926 |
| 1:68452444_T_C | 11728 11735 | 11771 11789 | 11817 11828 |
| rs72674323_SNP | 11749 11753 | 11795 11797 | 11834 11837- |
| | 11761 11913- | 11918-11919 | 11838 11923- |
| | 11914 11916 | 11921 11965- | 11924 11926 |
| | 11927-11964 | 12004 | 12005-12046 |
| 1:68452650_C_T | 12047-12089 | 12090-12133 | 12134-12179 |
| rs3125910_REF | | | |
| 1:68452650_C_T | 12056-12057 | 12100 12128 | 12173 12175 |
| rs3125910_SNP | 12073 12085 | 12130 12132 | 12177 12179 |
| | 12087 12180- | 12218-12256 | 12257-12297 |
| | 12217 | | |
| 1:68452696_CGT_C | 12298-12323 | 12324-12348 | 12349-12374 |
| rs1318744874_REF | | | |
| 1:68452696_C_CGT | 12298-12323 | 12324-12348 | 12349-12374 |
| rs1318744874_REF | | | |
| 1:68450655-1:68451154 | 10621-10634 | 10662-10676 | 10703-10718 |
| 700-1200 bps Upstream to | 10637-10661 | 10678-10702 | 10720-10745 |
| Transcriptional Start Site | 10864-10909 | 10910-10957 | 10958-11007 |
| | 12375-13051 | 13052-13753 | 13754-14477 |
| 1:68428322-1:68428821 | 1127-1128 | 1133-1134 | 1135 1137-1139 |
| Intergenic_500 bp Downstream to | 14478-14901 | 14902-15379 | 15380-15897 |
| Exon 14 | | | |
| 1:68437687-1:68438186 | 15898-16401 | 16402-16955 | 16956-17545 |
| Intron 10_500 bp Downstream to | | | |
| Exon 10 | | | |
| 1:68431586-1:68432085 | 17546-18205 | 18206-18885 | 18886-19585 |
| Intron 10_500 bp Upstream to | | | |
| Exon 11 | | | |
| 1:68431377-1:68431469 | 19586-19681 | 19682-19785 | 19786-19893 |
| Intron 11 | | | |
| 1:68431177-1:68431281 | 19894-19965 | 19966-20055 | 20056-20167 |
| Intron 12 | | | |
| 1:68430565-1:68431064 | 1502 1505 1510 | 1530 1532-1535 | 1544 1546 |
| Intron 13_500 bp Downstream to | 1512-1513 1516 | 1537-1538 1541 | 1549-1552 |
| Exon 13 | 1518 1521 1526 | 1543 20822- | 1554-1555 |
| | 1529 20168- | 21518 | 1558-1561 |
| | 20821 | | 21519-22246 |
| Intron13_500 bp upstream to | 22247-22790 | 22791-23404 | 23405-24080 |
| exon14_chr | | | |
| 1:68429928-1:68430427 | | | |
| 1:68448707-1:68449206 | 9742-9748 | 9784-9816 | 9818-9861 |
| Intron 1_500 bp Upstream to | 9750-9775 | 24984-25898 | 25899-26796 |
| Exon 2 | 9778-9781 | | |
| | 24081-24983 | | |
| 1:68449395-1:68449894 | 10307-10347 | 10351-10392 | 10393-10442 |
| Intron 1 | 26797-27377 | 27378-28025 | 28026-28727 |
| 1:68448124-1:68448623 | 9535-9536 | 9578-9616 | 9617-9658 |
| Intron 2_500 bp Downstream to | 9538-9541 | 29541-30385 | 30386-31251 |
| Exon 2 | 9543-9558 | | |
| | 9560-9561 | | |
| | 9563-9577 | | |
| | 28728-29540 | | |
| 1:68446861-1:68447360 | 8840-8885 | 8886-8933 | 8934-8983 |
| Intron 2_500 bp Upstream to | 9105-9109 | 9150-9154 | 9193-9197 |
| Exon 3 | 9111-9128 | 9156-9173 | 9199-9237 |
| | 9130-9135 | 9175-9191 | 32583-33248 |
| | 9137-9144 | 31917-32582 | |
| | 9146-9147 | | |
| | 31252-31916 | | |
| 1:68446210-1:68446709 | 8604-8648 | 8649-8693 | 8694-8740 |
| Intron 3_500 bp Downstream to | 33249-33901 | 33902-34570 | 34571-35257 |
| Exon 3 | | | |
| 1:68444884-1:68445383 | 8193-8200 | 8229-8260 | 8261-8298 |
| Intron 3_500 bp Upstream to | 8202-8211 | 36000-36777 | 36778-37575 |
| Exon 4 | 8214-8216 | | |
| | 8218-8223 8225 | | |
| | 8227-8228 | | |
| | 35258-35999 | | |
| 1:68444673-1:68444775 | 37576-37649 | 37650-37731 | 37732-37829 |
| Intron 4 | | | |
| 1:68444031-1:68444530 | 37830-38491 | 38492-39211 | 39212-39971 |
| Intron 5_500 bp Downstream to | | | |
| Exon 5 | | | |
| 1:68441001-1:68441500 | 39972-40665 | 40666-41395 | 41396-42151 |
| Intron 5_500 bp Upstream to | | | |
| Exon 6 | | | |
| 1:68440353-1:68440852 | 42152-42581 | 6501-6502 | 6504 6506-6510 |
| Intron 6_500 bp Downstream to | | 42582-43091 | 6512 6514 |
| Exon 6 | | | 43092-43657 |
| 1:68439643-1:68440142 | 6162-6180 | 6197-6212 | 6232-6248 |
| Intron 6_500 bp Upstream to | 6182-6189 | 6214-6224 | 6250-6251 |
| Exon 7 | 6191-6192 6194 | 6226-6227 6229 | 6253-6262 6264 |
| | 6196 43658- | 6231 44317- | 6266 45014- |
| | 44316 | 45013 | 45738 |
| 1:68439324-1:68439560 | 45739-46010 | 46011-46300 | 46301-46608 |
| Intron 7 | | | |
| 1:68439082-1:68439190 | 46609-46634 | 46635-46662 | 46663-46692 |
| Intron 8 | | | |
| 1:68438317-1:68438941 | 5416-5461 | 5462-5509 | 5510-5559 |
| Intron 9 | 5680-5722 | 5723-5766 | 5767-5814 |
| | 5920-5922 | 5965-5988 | 6000-6010 |
| | 5924-5930 5932 | 5990-5999 | 6012-6015 |
| | 5936 5938-5950 | 47602-48545 | 6017-6029 |
| | 5952 5955-5958 | | 6031-6041 |
| | 5961-5964 | | 48546-49516 |
| | 46693-47601 | | |

The indicated locations listed in column 1 of Table 1 are based on gnomAD v3 database and UCSC Genome Browser assembly ID: hg38, Sequencing/Assembly provider ID: Genome Reference Consortium Human GRCh38.p12 (GCA_000001405.27). Assembly date: December 2013 initial release; December 2017 patch release 12.
The SNP details are indicated by the listed SNP ID Nos. (“rs numbers”), which are based on the NCBI 2018 database of Single Nucleotide Polymorphisms (dbSNP)). The indicated DNA mutations are associated with Transcript Consequence NM 000329 as obtained from NCBI RefSeq genes.

[0195] Examples are provided below to facilitate a more complete understanding of the invention. The following examples illustrate the exemplary modes of making and practicing the invention. However, the scope of the invention is not limited to specific embodiments disclosed in these Examples, which are for purposes of illustration only.

### EXPERIMENTAL DETAILS

### Example 1: On-Target Screening Activity

[0196] In order to choose optimal RNA guides for editing strategies of an RPE65 Asp477Gly mutation causing autosomal dominant retinitis pigmentosa, three different guides targeting the mutation were screened for high on-target activity in patient derived-iPSCs that harbor the pathogenic mutation. Briefly, 2.5×10⁵ iPSCs were mixed with pre-assembled RNPs composed of either (1) 105 pmole of SpCas9 protein and 120 pmole of 20 bp sgRNA or (2) 105 pmole of OMNI-50 protein and 120 pmole of 22 bp sgRNA. The sgRNAs target the mutated allele and are listed in Table 2. The RNP mix was combined with 100 pmole of electroporation enhancer (IDT-1075916) and electroporated using P3 Primary Cell 4D-nucleofector X Kit S (V4XP-3032, Lonza) by applying the CA-137 program. A fraction of cells were harvested 72 h post-nucleofection, genomic DNA was extracted, the region of the mutation was amplified, and the level of editing was analyzed by performing capillary electrophoreses. Edited amplicons, which contain indels, are distinguished from unedited amplicons according to their size. The graphs in FIG. 1A and FIG. 1B represent the average of % editing f STDV of two independent electroporation trials. According to capillary electrophoreses analysis, both SpCas9 (FIG. 1A) and OMNI-50 (FIG. 1B) guides displayed activity.

TABLE 2
SpCas9 and OMNI-50 sgRNA sequences targeting the
RPE65 mutation p.Asp477Gly (c.1430A > G).

| Guide name | Guide sequence | PAM |
|---|---|---|
| sg3_spCas | CAUCUUCUUCCAAGGCACCU (SEQ ID NO: 16) | GGG |
| sg4_spCas | UCAUCUUCUUCCAAGGCACC (SEQ ID NO: 34) | TGG |
| sg7_spCas | CCCAUCUUUGUUUCUCACCC (SEQ ID NO: 23) | AGG |
| sg3_OMNI50 | AUCAUCUUCUUCCAAGGCACCU (SEQ ID NO: | GGG |
| | 103) | |
| sg4_OMNI50 | CAUCAUCUUCUUCCAAGGCACC (SEQ ID NO: | TGG |
| | 111) | |
| sg7_OMNI50 | AACCCAUCUUUGUUUCUCACCC (SEQ ID NO: | AGG |
| | 95) | |

### REFERENCES

[0197] 1. Ahmad and Allen (1992) “Antibody-mediated Specific Binging and Cytotoxicity of Lipsome-entrapped Doxorubicin to Lung Cancer Cells in Vitro”, Cancer Research 52:4817-20.
[0198] 2. Anderson (1992) “Human gene therapy”, Science 256:808-13.
[0199] 3. Basha et al. (2011) “Influence of Cationic Lipid Composition on Gene Silencing Properties of Lipid Nanoparticle Formulations of siRNA in Antigen-Presenting Cells”, Mol. Iher. 19(12):2186-200.
[0200] 4. Behr (1994) Gene transfer with synthetic cationic amphiphiles: Prospects for gene therapy”, Bioconjuage Chem 5:382-89.
[0201] 5. Blaese (1995) “Vectors in cancer therapy: how will they deliver”, Cancer Gene Ther. 2:291-97.
[0202] 6. Blaese et al. (1995) “T lympocyte-directed gene therapy for ADA-SCID: initial trial results after 4 years”, Science 270(5235):475-80.
[0203] 7. Browne et al. (2011) “A dominant mutation in RPE65 identified by whole-exome sequencing causes retinitis pigmentosa with choroidal involvement”, Eur. J. Hum. Genet. 19(10):1074-81.
[0204] 8. Buchschacher and Panganiban (1992) “Human immunodeficiency virus vectors for inducible expression of foreign genes”, J. Virol. 66:2731-39.
[0205] 9. Burstein et al. (2017) “New CRISPR-Cas systems from uncultivated microbes”, Nature 542:237-41.
[0206] 10. Chang and Wilson (1987) “Modification of DNA ends can decrease end-joining relative to homologous recombination in mammalian cells”, Proc. Natl. Acad. Sci. USA 84:4959-4963.
[0207] 11. Chung et al. (2006) “Agrobacterium is not alone: gene transfer to plants by viruses and other bacteria”, Trends Plant Sci. 11(1):1-4.
[0208] 12. Coelho et al. (2013) “Safety and efficacy of RNAi therapy for transthyretin amyloidosis” N. Engl. J. Med. 369, 819-829.
[0209] 13. Crystal (1995) “Transfer of genes to humans: early lessons and obstacles to success”, Science 270(5235):404-10.
[0210] 14. Dillon (1993) “Regulation gene expression in gene therapy” Trends in Biotechnology 11(5):167-173.
[0211] 15. Dranoff et al. (1997) “A phase I study of vaccination with autologous, irradiated melanoma cells engineered to secrete human granulocyte macrophage colony stimulating factor”, Hum. Gene Ther. 8(1):111-23.
[0212] 16. Dunbar et al. (1995) “Retrovirally marked CD34-enriched peripheral blood and bone marrow cells contribute to long-term engraftment after autologous transplantation”, Blood 85:3048-57.
[0213] 17. Ellem et al. (1997) “A case report: immune responses and clinical course of the first human use of ganulocyte/macrophage-colony-stimulating-factor-transduced autologous melanoma cells for immunotherapy”, Cancer Immunol Immunother 44:10-20.
[0214] 18. Gao and Huang (1995) “Cationic liposome-mediated gene transfer” Gene Ther. 2(10):710-22.
[0215] 19. Haddada et al. (1995) “Gene Therapy Using Adenovirus Vectors”, in: The Molecular Repertoire of Adenoviruses III: Biology and Pathogenesis, ed. Doerfler and Bohm, pp. 297-306.
[0216] 20. Han et al. (1995) “Ligand-directed retro-viral targeting of human breast cancer cells”, Proc Natl Acad Sci U.S.A. 92(21):9747-51.
[0217] 21. Inaba et al. (1992) “Generation of large numbers of dendritic cells from mouse bone marrow cultures supplemented with granulocyte/macrophage colony-stimulating factor”, J Exp Med. 176(6):1693-702.
[0218] 22. Jinek et al. (2012) “A programmable dual-RNA-guided DNA endonuclease in adaptive bacterial immunity,” Science 337(6096):816-21.
[0219] 23. Johan et al. (1992) “GLVR1, a receptor for gibbon ape leukemia virus, is homologous to a phosphate permease of Neurospora crassa and is expressed at high levels in the brain and thymus”, J Virol 66(3):1635-40.
[0220] 24. Judge et al. (2006) “Design of noninflammatory synthetic siRNA mediating potent gene silencing in vivo”, Mol Ther. 13(3):494-505.
[0221] 25. Kohn et al. (1995) “Engraftment of gene-modified umbilical cord blood cells in neonates with adnosine deaminase deficiency”, Nature Medicine 1:1017-23.
[0222] 26. Kremer and Perricaudet (1995) “Adenovirus and adeno-associated virus mediated gene transfer”, Br. Med. Bull. 51(1):31-44.
[0223] 27. Macdiarmid et al. (2009) “Sequential treatment of drug-resistant tumors with targeted minicells containing siRNA or a cytotoxic drug”, Nat Biotehcnol. 27(7):643-51.
[0224] 28. Malech et al. (1997) “Prolonged production of NADPH oxidase-corrected granulocyes after gene therapy of chronic granulomatous disease”, PNAS 94(22):12133-38.
[0225] 29. Miller et al. (1991) “Construction and properties of retrovirus packaging cells based on gibbon ape leukemia virus”, J Virol. 65(5):2220-24.
[0226] 30. Miller (1992) “Human gene therapy comes of age”, Nature 357:455-60.
[0227] 31. Mitani and Caskey (1993) “Delivering therapeutic genes—matching approach and application”, Trends in Biotechnology 11(5):162-66.
[0228] 32. Nabel and Felgner (1993) “Direct gene transfer for immunotherapy and immunization”, Trends in Biotechnology 11(5):211-15.
[0229] 33. Remy et al. (1994) “Gene Transfer with a Series of Lipphilic DNA-Binding Molecules”, Bioconjugate Chem. 5(6):647-54.
[0230] 34. Sentmanat et al. (2018) “A Survey of Validation Strategies for CRISPR-Cas9 Editing”, Scientific Reports 8:888, doi:10.1038/s41598-018-19441-8.
[0231] 35. Sharma et al. (2019) “Clinical-grade stem cell-derived retinal pigment epithelium patch rescues retinal degeneration in rodents and pigs.” Sci. Transl. Med. 11(475):eaat5580.
[0232] 36. Sommerfelt et al. (1990) “Localization of the receptor gene for type D simian retroviruses on human chromosome 19”, J. Virol. 64(12):6214-20.
[0233] 37. Van Brunt (1988) “Molecular framing: transgenic animals as bioactors” Biotechnology 6:1149-54.
[0234] 38. Vigne et al. (1995) “Third-generation adenovectors for gene therapy”, Restorative Neurology and Neuroscience 8(1,2): 35-36.
[0235] 39. Weissman and Kariko (2015) “mRNA:Fulfilling the promise of gene therapy”, Molecular Therapy (9):1416-7.
[0236] 40. Wilson et al. (1989) “Formation of infectious hybrid virion with gibbon ape leukemia virus and human T-cell leukemia virus retroviral envelope glycoproteins and the gag and pol proteins of Moloney murine leukemia virus”, J. Virol. 63:2374-78.
[0237] 41. Wright et al. (2013) “Complementation test of Rpe65 Knockout and tvrm148”, Invest Ophthalmol Vis Sci. 54(7):5111-22.
[0238] 42. Yu et al. (1994) “Progress towards gene therapy for HIV infection”, Gene Ther. 1(1):13-26.
[0239] 43. Zetsche et al. (2015) “Cpf1 is a single RNA-guided endonuclease of a class 2 CRIPSR-Cas system” Cell 163(3):759-71.
[0240] 44. Zuris et al. (2015) “Cationic lipid-mediated delivery of proteins enables efficient protein based genome editing in vitro and in vivo” Nat Biotechnol. 33(1):73-80.

The application's sequence listing, which the Patent Office published only in electronic form, follows.

SEQUENCE LISTING (49521 sequences)

SEQ ID NO: 1 - RNA, 20 nt, Artificial Sequence
  RPE65 RNA guide
aaggcaccugggugagaaac

SEQ ID NO: 2 - RNA, 20 nt, Artificial Sequence
  RPE65 RNA guide
accaucaucuucuuccaagg

SEQ ID NO: 3 - RNA, 20 nt, Artificial Sequence
  RPE65 RNA guide
acccaggugccuuggaagaa

SEQ ID NO: 4 - RNA, 20 nt, Artificial Sequence
  RPE65 RNA guide
acccaucuuuguuucucacc

SEQ ID NO: 5 - RNA, 20 nt, Artificial Sequence
  RPE65 RNA guide
accugggugagaaacaaaga

SEQ ID NO: 6 - RNA, 20 nt, Artificial Sequence
  RPE65 RNA guide
aggcaccugggugagaaaca

SEQ ID NO: 7 - RNA, 20 nt, Artificial Sequence
  RPE65 RNA guide
aggugccuuggaagaagaug

SEQ ID NO: 8 - RNA, 20 nt, Artificial Sequence
  RPE65 RNA guide
aucaucuucuuccaaggcac

SEQ ID NO: 9 - RNA, 20 nt, Artificial Sequence
  RPE65 RNA guide
aucuucuuccaaggcaccug

SEQ ID NO: 10 - RNA, 20 nt, Artificial Sequence
  RPE65 RNA guide
aucuuuguuucucacccagg

SEQ ID NO: 11 - RNA, 20 nt, Artificial Sequence
  RPE65 RNA guide
caaggcaccugggugagaaa

SEQ ID NO: 12 - RNA, 20 nt, Artificial Sequence
  RPE65 RNA guide
cacccaggugccuuggaaga

SEQ ID NO: 13 - RNA, 20 nt, Artificial Sequence
  RPE65 RNA guide
caccugggugagaaacaaag

SEQ ID NO: 14 - RNA, 20 nt, Artificial Sequence
  RPE65 RNA guide
caggugccuuggaagaagau

SEQ ID NO: 15 - RNA, 20 nt, Artificial Sequence
  RPE65 RNA guide
caucaucuucuuccaaggca

SEQ ID NO: 16 - RNA, 20 nt, Artificial Sequence
  RPE65 RNA guide
caucuucuuccaaggcaccu

SEQ ID NO: 17 - RNA, 20 nt, Artificial Sequence
  RPE65 RNA guide
caucuuuguuucucacccag

SEQ ID NO: 18 - RNA, 20 nt, Artificial Sequence
  RPE65 RNA guide
ccaaggcaccugggugagaa

SEQ ID NO: 19 - RNA, 20 nt, Artificial Sequence
  RPE65 RNA guide
ccaggugccuuggaagaaga

SEQ ID NO: 20 - RNA, 20 nt, Artificial Sequence
  RPE65 RNA guide
ccaucaucuucuuccaaggc

SEQ ID NO: 21 - RNA, 20 nt, Artificial Sequence
  RPE65 RNA guide
ccaucuuuguuucucaccca

SEQ ID NO: 22 - RNA, 20 nt, Artificial Sequence
  RPE65 RNA guide
cccaggugccuuggaagaag

SEQ ID NO: 23 - RNA, 20 nt, Artificial Sequence
  RPE65 RNA guide
cccaucuuuguuucucaccc

SEQ ID NO: 24 - RNA, 20 nt, Artificial Sequence
  RPE65 RNA guide
cucacccaggugccuuggaa

SEQ ID NO: 25 - RNA, 20 nt, Artificial Sequence
  RPE65 RNA guide
cuuccaaggcaccuggguga

SEQ ID NO: 26 - RNA, 20 nt, Artificial Sequence
  RPE65 RNA guide
cuucuuccaaggcaccuggg

SEQ ID NO: 27 - RNA, 20 nt, Artificial Sequence
  RPE65 RNA guide
cuuuguuucucacccaggug

SEQ ID NO: 28 - RNA, 20 nt, Artificial Sequence
  RPE65 RNA guide
gcaccugggugagaaacaaa

SEQ ID NO: 29 - RNA, 20 nt, Artificial Sequence
  RPE65 RNA guide
ggcaccugggugagaaacaa

SEQ ID NO: 30 - RNA, 20 nt, Artificial Sequence
  RPE65 RNA guide
ggugccuuggaagaagauga

SEQ ID NO: 31 - RNA, 20 nt, Artificial Sequence
  RPE65 RNA guide
guuucucacccaggugccuu

SEQ ID NO: 32 - RNA, 20 nt, Artificial Sequence
  RPE65 RNA guide
uaccaucaucuucuuccaag

SEQ ID NO: 33 - RNA, 20 nt, Artificial Sequence
  RPE65 RNA guide
ucacccaggugccuuggaag

SEQ ID NO: 34 - RNA, 20 nt, Artificial Sequence
  RPE65 RNA guide
ucaucuucuuccaaggcacc

SEQ ID NO: 35 - RNA, 20 nt, Artificial Sequence
  RPE65 RNA guide
uccaaggcaccugggugaga

SEQ ID NO: 36 - RNA, 20 nt, Artificial Sequence
  RPE65 RNA guide
ucucacccaggugccuugga

SEQ ID NO: 37 - RNA, 20 nt, Artificial Sequence
  RPE65 RNA guide
ucuuccaaggcaccugggug

SEQ ID NO: 38 - RNA, 20 nt, Artificial Sequence
  RPE65 RNA guide
ucuucuuccaaggcaccugg

SEQ ID NO: 39 - RNA, 20 nt, Artificial Sequence
  RPE65 RNA guide
ucuuuguuucucacccaggu

SEQ ID NO: 40 - RNA, 20 nt, Artificial Sequence
  RPE65 RNA guide
uguuucucacccaggugccu

SEQ ID NO: 41 - RNA, 20 nt, Artificial Sequence
  RPE65 RNA guide
uuccaaggcaccugggugag

SEQ ID NO: 42 - RNA, 20 nt, Artificial Sequence
  RPE65 RNA guide
uucucacccaggugccuugg

SEQ ID NO: 43 - RNA, 20 nt, Artificial Sequence
  RPE65 RNA guide
uucuuccaaggcaccugggu

SEQ ID NO: 44 - RNA, 20 nt, Artificial Sequence
  RPE65 RNA guide
uuguuucucacccaggugcc

SEQ ID NO: 45 - RNA, 20 nt, Artificial Sequence
  RPE65 RNA guide
uuucucacccaggugccuug

SEQ ID NO: 46 - RNA, 20 nt, Artificial Sequence
  RPE65 RNA guide
uuuguuucucacccaggugc

SEQ ID NO: 47 - RNA, 21 nt, Artificial Sequence
  RPE65 RNA guide
aacccaucuuuguuucucacc

SEQ ID NO: 48 - RNA, 21 nt, Artificial Sequence
  RPE65 RNA guide
aaggcaccugggugagaaaca

SEQ ID NO: 49 - RNA, 21 nt, Artificial Sequence
  RPE65 RNA guide
accaucaucuucuuccaaggc

SEQ ID NO: 50 - RNA, 21 nt, Artificial Sequence
  RPE65 RNA guide
acccaggugccuuggaagaag

SEQ ID NO: 51 - RNA, 21 nt, Artificial Sequence
  RPE65 RNA guide
acccaucuuuguuucucaccc

SEQ ID NO: 52 - RNA, 21 nt, Artificial Sequence
  RPE65 RNA guide
accugggugagaaacaaagau

SEQ ID NO: 53 - RNA, 21 nt, Artificial Sequence
  RPE65 RNA guide
aggcaccugggugagaaacaa

SEQ ID NO: 54 - RNA, 21 nt, Artificial Sequence
  RPE65 RNA guide
aggugccuuggaagaagauga

SEQ ID NO: 55 - RNA, 21 nt, Artificial Sequence
  RPE65 RNA guide
aucaucuucuuccaaggcacc

SEQ ID NO: 56 - RNA, 21 nt, Artificial Sequence
  RPE65 RNA guide
aucuucuuccaaggcaccugg

SEQ ID NO: 57 - RNA, 21 nt, Artificial Sequence
  RPE65 RNA guide
aucuuuguuucucacccaggu

SEQ ID NO: 58 - RNA, 21 nt, Artificial Sequence
  RPE65 RNA guide
caaggcaccugggugagaaac

SEQ ID NO: 59 - RNA, 21 nt, Artificial Sequence
  RPE65 RNA guide
cacccaggugccuuggaagaa

SEQ ID NO: 60 - RNA, 21 nt, Artificial Sequence
  RPE65 RNA guide
caccugggugagaaacaaaga

SEQ ID NO: 61 - RNA, 21 nt, Artificial Sequence
  RPE65 RNA guide
caggugccuuggaagaagaug

SEQ ID NO: 62 - RNA, 21 nt, Artificial Sequence
  RPE65 RNA guide
caucaucuucuuccaaggcac

SEQ ID NO: 63 - RNA, 21 nt, Artificial Sequence
  RPE65 RNA guide
caucuucuuccaaggcaccug

SEQ ID NO: 64 - RNA, 21 nt, Artificial Sequence
  RPE65 RNA guide
caucuuuguuucucacccagg

SEQ ID NO: 65 - RNA, 21 nt, Artificial Sequence
  RPE65 RNA guide
ccaaggcaccugggugagaaa

SEQ ID NO: 66 - RNA, 21 nt, Artificial Sequence
  RPE65 RNA guide
ccaggugccuuggaagaagau

SEQ ID NO: 67 - RNA, 21 nt, Artificial Sequence
  RPE65 RNA guide
ccaucaucuucuuccaaggca

SEQ ID NO: 68 - RNA, 21 nt, Artificial Sequence
  RPE65 RNA guide
ccaucuuuguuucucacccag

SEQ ID NO: 69 - RNA, 21 nt, Artificial Sequence
  RPE65 RNA guide
cccaggugccuuggaagaaga

SEQ ID NO: 70 - RNA, 21 nt, Artificial Sequence
  RPE65 RNA guide
cccaucuuuguuucucaccca

SEQ ID NO: 71 - RNA, 21 nt, Artificial Sequence
  RPE65 RNA guide
cucacccaggugccuuggaag

SEQ ID NO: 72 - RNA, 21 nt, Artificial Sequence
  RPE65 RNA guide
cuuccaaggcaccugggugag

SEQ ID NO: 73 - RNA, 21 nt, Artificial Sequence
  RPE65 RNA guide
cuucuuccaaggcaccugggu

SEQ ID NO: 74 - RNA, 21 nt, Artificial Sequence
  RPE65 RNA guide
cuuuguuucucacccaggugc

SEQ ID NO: 75 - RNA, 21 nt, Artificial Sequence
  RPE65 RNA guide
gcaccugggugagaaacaaag

SEQ ID NO: 76 - RNA, 21 nt, Artificial Sequence
  RPE65 RNA guide
ggcaccugggugagaaacaaa

SEQ ID NO: 77 - RNA, 21 nt, Artificial Sequence
  RPE65 RNA guide
ggugccuuggaagaagaugau

SEQ ID NO: 78 - RNA, 21 nt, Artificial Sequence
  RPE65 RNA guide
guuucucacccaggugccuug

SEQ ID NO: 79 - RNA, 21 nt, Artificial Sequence
  RPE65 RNA guide
uaccaucaucuucuuccaagg

SEQ ID NO: 80 - RNA, 21 nt, Artificial Sequence
  RPE65 RNA guide
ucacccaggugccuuggaaga

SEQ ID NO: 81 - RNA, 21 nt, Artificial Sequence
  RPE65 RNA guide
ucaucuucuuccaaggcaccu

SEQ ID NO: 82 - RNA, 21 nt, Artificial Sequence
  RPE65 RNA guide
uccaaggcaccugggugagaa

SEQ ID NO: 83 - RNA, 21 nt, Artificial Sequence
  RPE65 RNA guide
ucucacccaggugccuuggaa

SEQ ID NO: 84 - RNA, 21 nt, Artificial Sequence
  RPE65 RNA guide
ucuuccaaggcaccuggguga

SEQ ID NO: 85 - RNA, 21 nt, Artificial Sequence
  RPE65 RNA guide
ucuucuuccaaggcaccuggg

SEQ ID NO: 86 - RNA, 21 nt, Artificial Sequence
  RPE65 RNA guide
ucuuuguuucucacccaggug

SEQ ID NO: 87 - RNA, 21 nt, Artificial Sequence
  RPE65 RNA guide
uguuucucacccaggugccuu

SEQ ID NO: 88 - RNA, 21 nt, Artificial Sequence
  RPE65 RNA guide
uuaccaucaucuucuuccaag

SEQ ID NO: 89 - RNA, 21 nt, Artificial Sequence
  RPE65 RNA guide
uuccaaggcaccugggugaga

SEQ ID NO: 90 - RNA, 21 nt, Artificial Sequence
  RPE65 RNA guide
uucucacccaggugccuugga

SEQ ID NO: 91 - RNA, 21 nt, Artificial Sequence
  RPE65 RNA guide
uucuuccaaggcaccugggug

SEQ ID NO: 92 - RNA, 21 nt, Artificial Sequence
  RPE65 RNA guide
uuguuucucacccaggugccu

SEQ ID NO: 93 - RNA, 21 nt, Artificial Sequence
  RPE65 RNA guide
uuucucacccaggugccuugg

SEQ ID NO: 94 - RNA, 21 nt, Artificial Sequence
  RPE65 RNA guide
uuuguuucucacccaggugcc

SEQ ID NO: 95 - RNA, 22 nt, Artificial Sequence
  RPE65 RNA guide
aacccaucuuuguuucucaccc

SEQ ID NO: 96 - RNA, 22 nt, Artificial Sequence
  RPE65 RNA guide
aaggcaccugggugagaaacaa

SEQ ID NO: 97 - RNA, 22 nt, Artificial Sequence
  RPE65 RNA guide
accaucaucuucuuccaaggca

SEQ ID NO: 98 - RNA, 22 nt, Artificial Sequence
  RPE65 RNA guide
acccaggugccuuggaagaaga

SEQ ID NO: 99 - RNA, 22 nt, Artificial Sequence
  RPE65 RNA guide
acccaucuuuguuucucaccca

SEQ ID NO: 100 - RNA, 22 nt, Artificial Sequence
  RPE65 RNA guide
accugggugagaaacaaagaug

SEQ ID NO: 101 - RNA, 22 nt, Artificial Sequence
  RPE65 RNA guide
aggcaccugggugagaaacaaa

SEQ ID NO: 102 - RNA, 22 nt, Artificial Sequence
  RPE65 RNA guide
aggugccuuggaagaagaugau

SEQ ID NO: 103 - RNA, 22 nt, Artificial Sequence
  RPE65 RNA guide
aucaucuucuuccaaggcaccu

SEQ ID NO: 104 - RNA, 22 nt, Artificial Sequence
  RPE65 RNA guide
aucuucuuccaaggcaccuggg

SEQ ID NO: 105 - RNA, 22 nt, Artificial Sequence
  RPE65 RNA guide
aucuuuguuucucacccaggug

SEQ ID NO: 106 - RNA, 22 nt, Artificial Sequence
  RPE65 RNA guide
auuaccaucaucuucuuccaag

SEQ ID NO: 107 - RNA, 22 nt, Artificial Sequence
  RPE65 RNA guide
caaggcaccugggugagaaaca

SEQ ID NO: 108 - RNA, 22 nt, Artificial Sequence
  RPE65 RNA guide
cacccaggugccuuggaagaag

SEQ ID NO: 109 - RNA, 22 nt, Artificial Sequence
  RPE65 RNA guide
caccugggugagaaacaaagau

SEQ ID NO: 110 - RNA, 22 nt, Artificial Sequence
  RPE65 RNA guide
caggugccuuggaagaagauga

SEQ ID NO: 111 - RNA, 22 nt, Artificial Sequence
  RPE65 RNA guide
caucaucuucuuccaaggcacc

SEQ ID NO: 112 - RNA, 22 nt, Artificial Sequence
  RPE65 RNA guide
caucuucuuccaaggcaccugg

SEQ ID NO: 113 - RNA, 22 nt, Artificial Sequence
  RPE65 RNA guide
caucuuuguuucucacccaggu

SEQ ID NO: 114 - RNA, 22 nt, Artificial Sequence
  RPE65 RNA guide
ccaaggcaccugggugagaaac

SEQ ID NO: 115 - RNA, 22 nt, Artificial Sequence
  RPE65 RNA guide
ccaggugccuuggaagaagaug

SEQ ID NO: 116 - RNA, 22 nt, Artificial Sequence
  RPE65 RNA guide
ccaucaucuucuuccaaggcac

SEQ ID NO: 117 - RNA, 22 nt, Artificial Sequence
  RPE65 RNA guide
ccaucuuuguuucucacccagg

SEQ ID NO: 118 - RNA, 22 nt, Artificial Sequence
  RPE65 RNA guide
cccaggugccuuggaagaagau

SEQ ID NO: 119 - RNA, 22 nt, Artificial Sequence
  RPE65 RNA guide
cccaucuuuguuucucacccag

SEQ ID NO: 120 - RNA, 22 nt, Artificial Sequence
  RPE65 RNA guide
cucacccaggugccuuggaaga

SEQ ID NO: 121 - RNA, 22 nt, Artificial Sequence
  RPE65 RNA guide
cuuccaaggcaccugggugaga

SEQ ID NO: 122 - RNA, 22 nt, Artificial Sequence
  RPE65 RNA guide
cuucuuccaaggcaccugggug

SEQ ID NO: 123 - RNA, 22 nt, Artificial Sequence
  RPE65 RNA guide
cuuuguuucucacccaggugcc

SEQ ID NO: 124 - RNA, 22 nt, Artificial Sequence
  RPE65 RNA guide
gaacccaucuuuguuucucacc

SEQ ID NO: 125 - RNA, 22 nt, Artificial Sequence
  RPE65 RNA guide
gcaccugggugagaaacaaaga

SEQ ID NO: 126 - RNA, 22 nt, Artificial Sequence
  RPE65 RNA guide
ggcaccugggugagaaacaaag

SEQ ID NO: 127 - RNA, 22 nt, Artificial Sequence
  RPE65 RNA guide
ggugccuuggaagaagaugaug

SEQ ID NO: 128 - RNA, 22 nt, Artificial Sequence
  RPE65 RNA guide
guuucucacccaggugccuugg

SEQ ID NO: 129 - RNA, 22 nt, Artificial Sequence
  RPE65 RNA guide
uaccaucaucuucuuccaaggc

SEQ ID NO: 130 - RNA, 22 nt, Artificial Sequence
  RPE65 RNA guide
ucacccaggugccuuggaagaa

SEQ ID NO: 131 - RNA, 22 nt, Artificial Sequence
  RPE65 RNA guide
ucaucuucuuccaaggcaccug

SEQ ID NO: 132 - RNA, 22 nt, Artificial Sequence
  RPE65 RNA guide
uccaaggcaccugggugagaaa

SEQ ID NO: 133 - RNA, 22 nt, Artificial Sequence
  RPE65 RNA guide
ucucacccaggugccuuggaag

SEQ ID NO: 134 - RNA, 22 nt, Artificial Sequence
  RPE65 RNA guide
ucuuccaaggcaccugggugag

SEQ ID NO: 135 - RNA, 22 nt, Artificial Sequence
  RPE65 RNA guide
ucuucuuccaaggcaccugggu

SEQ ID NO: 136 - RNA, 22 nt, Artificial Sequence
  RPE65 RNA guide
ucuuuguuucucacccaggugc

SEQ ID NO: 137 - RNA, 22 nt, Artificial Sequence
  RPE65 RNA guide
uguuucucacccaggugccuug

SEQ ID NO: 138 - RNA, 22 nt, Artificial Sequence
  RPE65 RNA guide
uuaccaucaucuucuuccaagg

SEQ ID NO: 139 - RNA, 22 nt, Artificial Sequence
  RPE65 RNA guide
uuccaaggcaccugggugagaa

SEQ ID NO: 140 - RNA, 22 nt, Artificial Sequence
  RPE65 RNA guide
uucucacccaggugccuuggaa

SEQ ID NO: 141 - RNA, 22 nt, Artificial Sequence
  RPE65 RNA guide
uucuuccaaggcaccuggguga

SEQ ID NO: 142 - RNA, 22 nt, Artificial Sequence
  RPE65 RNA guide
uuguuucucacccaggugccuu

SEQ ID NO: 143 - RNA, 22 nt, Artificial Sequence
  RPE65 RNA guide
uuucucacccaggugccuugga

SEQ ID NO: 144 - RNA, 22 nt, Artificial Sequence
  RPE65 RNA guide
uuuguuucucacccaggugccu

SEQ ID NO: 145 - RNA, 20 nt, Artificial Sequence
  RPE65 RNA guide
aaagaguccuggcccacauc

SEQ ID NO: 146 - RNA, 20 nt, Artificial Sequence
  RPE65 RNA guide
aagaguccuggcccacauca

SEQ ID NO: 147 - RNA, 20 nt, Artificial Sequence
  RPE65 RNA guide
acaucaaaggagacugccgg

SEQ ID NO: 148 - RNA, 20 nt, Artificial Sequence
  RPE65 RNA guide
accggcagucuccuuugaug

SEQ ID NO: 149 - RNA, 20 nt, Artificial Sequence
  RPE65 RNA guide
agaguccuggcccacaucaa

SEQ ID NO: 150 - RNA, 20 nt, Artificial Sequence
  RPE65 RNA guide
aguccuggcccacaucaaag

SEQ ID NO: 151 - RNA, 20 nt, Artificial Sequence
  RPE65 RNA guide
agucuccuuugaugugggcc

SEQ ID NO: 152 - RNA, 20 nt, Artificial Sequence
  RPE65 RNA guide
aucaaaggagacugccggug

SEQ ID NO: 153 - RNA, 20 nt, Artificial Sequence
  RPE65 RNA guide
caaagaguccuggcccacau

SEQ ID NO: 154 - RNA, 20 nt, Artificial Sequence
  RPE65 RNA guide
caaaggagacugccggugag

SEQ ID NO: 155 - RNA, 20 nt, Artificial Sequence
  RPE65 RNA guide
cacaucaaaggagacugccg

SEQ ID NO: 156 - RNA, 20 nt, Artificial Sequence
  RPE65 RNA guide
caccggcagucuccuuugau

SEQ ID NO: 157 - RNA, 20 nt, Artificial Sequence
  RPE65 RNA guide
cagucuccuuugaugugggc

SEQ ID NO: 158 - RNA, 20 nt, Artificial Sequence
  RPE65 RNA guide
caucaaaggagacugccggu

SEQ ID NO: 159 - RNA, 20 nt, Artificial Sequence
  RPE65 RNA guide
ccacaucaaaggagacugcc

SEQ ID NO: 160 - RNA, 20 nt, Artificial Sequence
  RPE65 RNA guide
cccacaucaaaggagacugc

SEQ ID NO: 161 - RNA, 20 nt, Artificial Sequence
  RPE65 RNA guide
ccggcagucuccuuugaugu

SEQ ID NO: 162 - RNA, 20 nt, Artificial Sequence
  RPE65 RNA guide
ccuggcccacaucaaaggag

SEQ ID NO: 163 - RNA, 20 nt, Artificial Sequence
  RPE65 RNA guide
ccuuugaugugggccaggac

SEQ ID NO: 164 - RNA, 20 nt, Artificial Sequence
  RPE65 RNA guide
cggcagucuccuuugaugug

SEQ ID NO: 165 - RNA, 20 nt, Artificial Sequence
  RPE65 RNA guide
cucaccggcagucuccuuug

SEQ ID NO: 166 - RNA, 20 nt, Artificial Sequence
  RPE65 RNA guide
cuccuuugaugugggccagg

SEQ ID NO: 167 - RNA, 20 nt, Artificial Sequence
  RPE65 RNA guide
cuggcccacaucaaaggaga

SEQ ID NO: 168 - RNA, 20 nt, Artificial Sequence
  RPE65 RNA guide
cuggcucaccggcagucucc

SEQ ID NO: 169 - RNA, 20 nt, Artificial Sequence
  RPE65 RNA guide
cuuugaugugggccaggacu

SEQ ID NO: 170 - RNA, 20 nt, Artificial Sequence
  RPE65 RNA guide
gaguccuggcccacaucaaa

SEQ ID NO: 171 - RNA, 20 nt, Artificial Sequence
  RPE65 RNA guide
gcagucuccuuugauguggg

SEQ ID NO: 172 - RNA, 20 nt, Artificial Sequence
  RPE65 RNA guide
gcccacaucaaaggagacug

SEQ ID NO: 173 - RNA, 20 nt, Artificial Sequence
  RPE65 RNA guide
gcucaccggcagucuccuuu

SEQ ID NO: 174 - RNA, 20 nt, Artificial Sequence
  RPE65 RNA guide
ggcagucuccuuugaugugg

SEQ ID NO: 175 - RNA, 20 nt, Artificial Sequence
  RPE65 RNA guide
ggcccacaucaaaggagacu

SEQ ID NO: 176 - RNA, 20 nt, Artificial Sequence
  RPE65 RNA guide
ggcucaccggcagucuccuu

SEQ ID NO: 177 - RNA, 20 nt, Artificial Sequence
  RPE65 RNA guide
guccuggcccacaucaaagg

SEQ ID NO: 178 - RNA, 20 nt, Artificial Sequence
  RPE65 RNA guide
gucuccuuugaugugggcca

SEQ ID NO: 179 - RNA, 20 nt, Artificial Sequence
  RPE65 RNA guide
ucaaagaguccuggcccaca

SEQ ID NO: 180 - RNA, 20 nt, Artificial Sequence
  RPE65 RNA guide
ucaaaggagacugccgguga

SEQ ID NO: 181 - RNA, 20 nt, Artificial Sequence
  RPE65 RNA guide
ucaccggcagucuccuuuga

SEQ ID NO: 182 - RNA, 20 nt, Artificial Sequence
  RPE65 RNA guide
uccuggcccacaucaaagga

SEQ ID NO: 183 - RNA, 20 nt, Artificial Sequence
  RPE65 RNA guide
uccuuugaugugggccagga

SEQ ID NO: 184 - RNA, 20 nt, Artificial Sequence
  RPE65 RNA guide
ucuccuuugaugugggccag

SEQ ID NO: 185 - RNA, 20 nt, Artificial Sequence
  RPE65 RNA guide
ucuggcucaccggcagucuc

SEQ ID NO: 186 - RNA, 20 nt, Artificial Sequence
  RPE65 RNA guide
uggcccacaucaaaggagac

SEQ ID NO: 187 - RNA, 20 nt, Artificial Sequence
  RPE65 RNA guide
uggcucaccggcagucuccu

SEQ ID NO: 188 - RNA, 20 nt, Artificial Sequence
  RPE65 RNA guide
uucaaagaguccuggcccac

SEQ ID NO: 189 - RNA, 20 nt, Artificial Sequence
  RPE65 RNA guide
uugaugugggccaggacucu

SEQ ID NO: 190 - RNA, 20 nt, Artificial Sequence
  RPE65 RNA guide
uuugaugugggccaggacuc

SEQ ID NO: 191 - RNA, 21 nt, Artificial Sequence
  RPE65 RNA guide
aaagaguccuggcccacauca

SEQ ID NO: 192 - RNA, 21 nt, Artificial Sequence
  RPE65 RNA guide
aagaguccuggcccacaucaa

SEQ ID NO: 193 - RNA, 21 nt, Artificial Sequence
  RPE65 RNA guide
acaucaaaggagacugccggu

SEQ ID NO: 194 - RNA, 21 nt, Artificial Sequence
  RPE65 RNA guide
accggcagucuccuuugaugu

SEQ ID NO: 195 - RNA, 21 nt, Artificial Sequence
  RPE65 RNA guide
agaguccuggcccacaucaaa

SEQ ID NO: 196 - RNA, 21 nt, Artificial Sequence
  RPE65 RNA guide
aguccuggcccacaucaaagg

SEQ ID NO: 197 - RNA, 21 nt, Artificial Sequence
  RPE65 RNA guide
agucuccuuugaugugggcca

SEQ ID NO: 198 - RNA, 21 nt, Artificial Sequence
  RPE65 RNA guide
aucaaaggagacugccgguga

SEQ ID NO: 199 - RNA, 21 nt, Artificial Sequence
  RPE65 RNA guide
caaagaguccuggcccacauc

SEQ ID NO: 200 - RNA, 21 nt, Artificial Sequence
  RPE65 RNA guide
caaaggagacugccggugagc

SEQ ID NO: 201 - RNA, 21 nt, Artificial Sequence
  RPE65 RNA guide
cacaucaaaggagacugccgg

SEQ ID NO: 202 - RNA, 21 nt, Artificial Sequence
  RPE65 RNA guide
caccggcagucuccuuugaug

SEQ ID NO: 203 - RNA, 21 nt, Artificial Sequence
  RPE65 RNA guide
cagucuccuuugaugugggcc

SEQ ID NO: 204 - RNA, 21 nt, Artificial Sequence
  RPE65 RNA guide
caucaaaggagacugccggug

SEQ ID NO: 205 - RNA, 21 nt, Artificial Sequence
  RPE65 RNA guide
ccacaucaaaggagacugccg

SEQ ID NO: 206 - RNA, 21 nt, Artificial Sequence
  RPE65 RNA guide
cccacaucaaaggagacugcc

SEQ ID NO: 207 - RNA, 21 nt, Artificial Sequence
  RPE65 RNA guide
ccggcagucuccuuugaugug

SEQ ID NO: 208 - RNA, 21 nt, Artificial Sequence
  RPE65 RNA guide
ccuggcccacaucaaaggaga

SEQ ID NO: 209 - RNA, 21 nt, Artificial Sequence
  RPE65 RNA guide
ccuuugaugugggccaggacu

SEQ ID NO: 210 - RNA, 21 nt, Artificial Sequence
  RPE65 RNA guide
cggcagucuccuuugaugugg

SEQ ID NO: 211 - RNA, 21 nt, Artificial Sequence
  RPE65 RNA guide
cucaccggcagucuccuuuga

SEQ ID NO: 212 - RNA, 21 nt, Artificial Sequence
  RPE65 RNA guide
cuccuuugaugugggccagga

SEQ ID NO: 213 - RNA, 21 nt, Artificial Sequence
  RPE65 RNA guide
cucuggcucaccggcagucuc

SEQ ID NO: 214 - RNA, 21 nt, Artificial Sequence
  RPE65 RNA guide
cuggcccacaucaaaggagac

SEQ ID NO: 215 - RNA, 21 nt, Artificial Sequence
  RPE65 RNA guide
cuggcucaccggcagucuccu

SEQ ID NO: 216 - RNA, 21 nt, Artificial Sequence
  RPE65 RNA guide
cuucaaagaguccuggcccac

SEQ ID NO: 217 - RNA, 21 nt, Artificial Sequence
  RPE65 RNA guide
cuuugaugugggccaggacuc

SEQ ID NO: 218 - RNA, 21 nt, Artificial Sequence
  RPE65 RNA guide
gaguccuggcccacaucaaag

SEQ ID NO: 219 - RNA, 21 nt, Artificial Sequence
  RPE65 RNA guide
gcagucuccuuugaugugggc

SEQ ID NO: 220 - RNA, 21 nt, Artificial Sequence
  RPE65 RNA guide
gcccacaucaaaggagacugc

SEQ ID NO: 221 - RNA, 21 nt, Artificial Sequence
  RPE65 RNA guide
gcucaccggcagucuccuuug

SEQ ID NO: 222 - RNA, 21 nt, Artificial Sequence
  RPE65 RNA guide
ggcagucuccuuugauguggg

SEQ ID NO: 223 - RNA, 21 nt, Artificial Sequence
  RPE65 RNA guide
ggcccacaucaaaggagacug

SEQ ID NO: 224 - RNA, 21 nt, Artificial Sequence
  RPE65 RNA guide
ggcucaccggcagucuccuuu

SEQ ID NO: 225 - RNA, 21 nt, Artificial Sequence
  RPE65 RNA guide
guccuggcccacaucaaagga

SEQ ID NO: 226 - RNA, 21 nt, Artificial Sequence
  RPE65 RNA guide
gucuccuuugaugugggccag

SEQ ID NO: 227 - RNA, 21 nt, Artificial Sequence
  RPE65 RNA guide
ucaaagaguccuggcccacau

SEQ ID NO: 228 - RNA, 21 nt, Artificial Sequence
  RPE65 RNA guide
ucaaaggagacugccggugag

SEQ ID NO: 229 - RNA, 21 nt, Artificial Sequence
  RPE65 RNA guide
ucaccggcagucuccuuugau

SEQ ID NO: 230 - RNA, 21 nt, Artificial Sequence
  RPE65 RNA guide
uccuggcccacaucaaaggag

SEQ ID NO: 231 - RNA, 21 nt, Artificial Sequence
  RPE65 RNA guide
uccuuugaugugggccaggac

SEQ ID NO: 232 - RNA, 21 nt, Artificial Sequence
  RPE65 RNA guide
ucuccuuugaugugggccagg

SEQ ID NO: 233 - RNA, 21 nt, Artificial Sequence
  RPE65 RNA guide
ucuggcucaccggcagucucc

SEQ ID NO: 234 - RNA, 21 nt, Artificial Sequence
  RPE65 RNA guide
uggcccacaucaaaggagacu

SEQ ID NO: 235 - RNA, 21 nt, Artificial Sequence
  RPE65 RNA guide
uggcucaccggcagucuccuu

SEQ ID NO: 236 - RNA, 21 nt, Artificial Sequence
  RPE65 RNA guide
uucaaagaguccuggcccaca

SEQ ID NO: 237 - RNA, 21 nt, Artificial Sequence
  RPE65 RNA guide
uugaugugggccaggacucuu

SEQ ID NO: 238 - RNA, 21 nt, Artificial Sequence
  RPE65 RNA guide
uuugaugugggccaggacucu

SEQ ID NO: 239 - RNA, 22 nt, Artificial Sequence
  RPE65 RNA guide
aaagaguccuggcccacaucaa

SEQ ID NO: 240 - RNA, 22 nt, Artificial Sequence
  RPE65 RNA guide
aagaguccuggcccacaucaaa

SEQ ID NO: 241 - RNA, 22 nt, Artificial Sequence
  RPE65 RNA guide
acaucaaaggagacugccggug

SEQ ID NO: 242 - RNA, 22 nt, Artificial Sequence
  RPE65 RNA guide
accggcagucuccuuugaugug

SEQ ID NO: 243 - RNA, 22 nt, Artificial Sequence
  RPE65 RNA guide
acuucaaagaguccuggcccac

SEQ ID NO: 244 - RNA, 22 nt, Artificial Sequence
  RPE65 RNA guide
agaguccuggcccacaucaaag

SEQ ID NO: 245 - RNA, 22 nt, Artificial Sequence
  RPE65 RNA guide
aguccuggcccacaucaaagga

SEQ ID NO: 246 - RNA, 22 nt, Artificial Sequence
  RPE65 RNA guide
agucuccuuugaugugggccag

SEQ ID NO: 247 - RNA, 22 nt, Artificial Sequence
  RPE65 RNA guide
aucaaaggagacugccggugag

SEQ ID NO: 248 - RNA, 22 nt, Artificial Sequence
  RPE65 RNA guide
caaagaguccuggcccacauca

SEQ ID NO: 249 - RNA, 22 nt, Artificial Sequence
  RPE65 RNA guide
caaaggagacugccggugagcc

SEQ ID NO: 250 - RNA, 22 nt, Artificial Sequence
  RPE65 RNA guide
cacaucaaaggagacugccggu

SEQ ID NO: 251 - RNA, 22 nt, Artificial Sequence
  RPE65 RNA guide
caccggcagucuccuuugaugu

SEQ ID NO: 252 - RNA, 22 nt, Artificial Sequence
  RPE65 RNA guide
cagucuccuuugaugugggcca

SEQ ID NO: 253 - RNA, 22 nt, Artificial Sequence
  RPE65 RNA guide
caucaaaggagacugccgguga

SEQ ID NO: 254 - RNA, 22 nt, Artificial Sequence
  RPE65 RNA guide
ccacaucaaaggagacugccgg

SEQ ID NO: 255 - RNA, 22 nt, Artificial Sequence
  RPE65 RNA guide
cccacaucaaaggagacugccg

SEQ ID NO: 256 - RNA, 22 nt, Artificial Sequence
  RPE65 RNA guide
ccggcagucuccuuugaugugg

SEQ ID NO: 257 - RNA, 22 nt, Artificial Sequence
  RPE65 RNA guide
ccucuggcucaccggcagucuc

SEQ ID NO: 258 - RNA, 22 nt, Artificial Sequence
  RPE65 RNA guide
ccuggcccacaucaaaggagac

SEQ ID NO: 259 - RNA, 22 nt, Artificial Sequence
  RPE65 RNA guide
ccuuugaugugggccaggacuc

SEQ ID NO: 260 - RNA, 22 nt, Artificial Sequence
  RPE65 RNA guide
cggcagucuccuuugauguggg

SEQ ID NO: 261 - RNA, 22 nt, Artificial Sequence
  RPE65 RNA guide
cucaccggcagucuccuuugau

SEQ ID NO: 262 - RNA, 22 nt, Artificial Sequence
  RPE65 RNA guide
cuccuuugaugugggccaggac

SEQ ID NO: 263 - RNA, 22 nt, Artificial Sequence
  RPE65 RNA guide
cucuggcucaccggcagucucc

SEQ ID NO: 264 - RNA, 22 nt, Artificial Sequence
  RPE65 RNA guide
cuggcccacaucaaaggagacu

SEQ ID NO: 265 - RNA, 22 nt, Artificial Sequence
  RPE65 RNA guide
cuggcucaccggcagucuccuu

SEQ ID NO: 266 - RNA, 22 nt, Artificial Sequence
  RPE65 RNA guide
cuucaaagaguccuggcccaca

SEQ ID NO: 267 - RNA, 22 nt, Artificial Sequence
  RPE65 RNA guide
cuuugaugugggccaggacucu

SEQ ID NO: 268 - RNA, 22 nt, Artificial Sequence
  RPE65 RNA guide
gaguccuggcccacaucaaagg

SEQ ID NO: 269 - RNA, 22 nt, Artificial Sequence
  RPE65 RNA guide
gcagucuccuuugaugugggcc

SEQ ID NO: 270 - RNA, 22 nt, Artificial Sequence
  RPE65 RNA guide
gcccacaucaaaggagacugcc

SEQ ID NO: 271 - RNA, 22 nt, Artificial Sequence
  RPE65 RNA guide
gcucaccggcagucuccuuuga

SEQ ID NO: 272 - RNA, 22 nt, Artificial Sequence
  RPE65 RNA guide
ggcagucuccuuugaugugggc

SEQ ID NO: 273 - RNA, 22 nt, Artificial Sequence
  RPE65 RNA guide
ggcccacaucaaaggagacugc

SEQ ID NO: 274 - RNA, 22 nt, Artificial Sequence
  RPE65 RNA guide
ggcucaccggcagucuccuuug

SEQ ID NO: 275 - RNA, 22 nt, Artificial Sequence
  RPE65 RNA guide
guccuggcccacaucaaaggag

SEQ ID NO: 276 - RNA, 22 nt, Artificial Sequence
  RPE65 RNA guide
gucuccuuugaugugggccagg

SEQ ID NO: 277 - RNA, 22 nt, Artificial Sequence
  RPE65 RNA guide
ucaaagaguccuggcccacauc

SEQ ID NO: 278 - RNA, 22 nt, Artificial Sequence
  RPE65 RNA guide
ucaaaggagacugccggugagc

SEQ ID NO: 279 - RNA, 22 nt, Artificial Sequence
  RPE65 RNA guide
ucaccggcagucuccuuugaug

SEQ ID NO: 280 - RNA, 22 nt, Artificial Sequence
  RPE65 RNA guide
uccuggcccacaucaaaggaga

SEQ ID NO: 281 - RNA, 22 nt, Artificial Sequence
  RPE65 RNA guide
uccuuugaugugggccaggacu

SEQ ID NO: 282 - RNA, 22 nt, Artificial Sequence
  RPE65 RNA guide
ucuccuuugaugugggccagga

SEQ ID NO: 283 - RNA, 22 nt, Artificial Sequence
  RPE65 RNA guide
ucuggcucaccggcagucuccu

SEQ ID NO: 284 - RNA, 22 nt, Artificial Sequence
  RPE65 RNA guide
uggcccacaucaaaggagacug

SEQ ID NO: 285 - RNA, 22 nt, Artificial Sequence
  RPE65 RNA guide
uggcucaccggcagucuccuuu

SEQ ID NO: 286 - RNA, 22 nt, Artificial Sequence
  RPE65 RNA guide
uucaaagaguccuggcccacau

SEQ ID NO: 287 - RNA, 22 nt, Artificial Sequence
  RPE65 RNA guide
uugaugugggccaggacucuuu

SEQ ID NO: 288 - RNA, 22 nt, Artificial Sequence
  RPE65 RNA guide
uuugaugugggccaggacucuu

SEQ ID NO: 289 - RNA, 20 nt, Artificial Sequence
  RPE65 RNA guide
acuguuguucauaguauucc

SEQ ID NO: 290 - RNA, 20 nt, Artificial Sequence
  RPE65 RNA guide
auaugggaauacuaugaaca

SEQ ID NO: 291 - RNA, 20 nt, Artificial Sequence
  RPE65 RNA guide
augggaauacuaugaacaac

SEQ ID NO: 292 - RNA, 20 nt, Artificial Sequence
  RPE65 RNA guide
cauacuguuguucauaguau

SEQ ID NO: 293 - RNA, 20 nt, Artificial Sequence
  RPE65 RNA guide
cuguuguucauaguauuccc

SEQ ID NO: 294 - RNA, 20 nt, Artificial Sequence
  RPE65 RNA guide
guucauaguauucccauaua

SEQ ID NO: 295 - RNA, 20 nt, Artificial Sequence
  RPE65 RNA guide
guuguucauaguauucccau

SEQ ID NO: 296 - RNA, 20 nt, Artificial Sequence
  RPE65 RNA guide
uacuguuguucauaguauuc

SEQ ID NO: 297 - RNA, 20 nt, Artificial Sequence
  RPE65 RNA guide
uauaugggaauacuaugaac

SEQ ID NO: 298 - RNA, 20 nt, Artificial Sequence
  RPE65 RNA guide
uaugggaauacuaugaacaa

SEQ ID NO: 299 - RNA, 20 nt, Artificial Sequence
  RPE65 RNA guide
ugggaauacuaugaacaaca

SEQ ID NO: 300 - RNA, 20 nt, Artificial Sequence
  RPE65 RNA guide
uguucauaguauucccauau

SEQ ID NO: 301 - RNA, 20 nt, Artificial Sequence
  RPE65 RNA guide
uguuguucauaguauuccca

SEQ ID NO: 302 - RNA, 20 nt, Artificial Sequence
  RPE65 RNA guide
uuguucauaguauucccaua

SEQ ID NO: 303 - RNA, 21 nt, Artificial Sequence
  RPE65 RNA guide
acuguuguucauaguauuccc

SEQ ID NO: 304 - RNA, 21 nt, Artificial Sequence
  RPE65 RNA guide
augggaauacuaugaacaaca

SEQ ID NO: 305 - RNA, 21 nt, Artificial Sequence
  RPE65 RNA guide
cuguuguucauaguauuccca

SEQ ID NO: 306 - RNA, 21 nt, Artificial Sequence
  RPE65 RNA guide
gcauacuguuguucauaguau

SEQ ID NO: 307 - RNA, 21 nt, Artificial Sequence
  RPE65 RNA guide
guuguucauaguauucccaua

SEQ ID NO: 308 - RNA, 21 nt, Artificial Sequence
  RPE65 RNA guide
uacuguuguucauaguauucc

SEQ ID NO: 309 - RNA, 21 nt, Artificial Sequence
  RPE65 RNA guide
uaugggaauacuaugaacaac

SEQ ID NO: 310 - RNA, 21 nt, Artificial Sequence
  RPE65 RNA guide
ugggaauacuaugaacaacag

SEQ ID NO: 311 - RNA, 21 nt, Artificial Sequence
  RPE65 RNA guide
uguuguucauaguauucccau

SEQ ID NO: 312 - RNA, 22 nt, Artificial Sequence
  RPE65 RNA guide
acuguuguucauaguauuccca

SEQ ID NO: 313 - RNA, 22 nt, Artificial Sequence
  RPE65 RNA guide
auacuguuguucauaguauucc

SEQ ID NO: 314 - RNA, 22 nt, Artificial Sequence
  RPE65 RNA guide
auaugggaauacuaugaacaac

SEQ ID NO: 315 - RNA, 22 nt, Artificial Sequence
  RPE65 RNA guide
augggaauacuaugaacaacag

SEQ ID NO: 316 - RNA, 22 nt, Artificial Sequence
  RPE65 RNA guide
cauacuguuguucauaguauuc

SEQ ID NO: 317 - RNA, 22 nt, Artificial Sequence
  RPE65 RNA guide
cuguuguucauaguauucccau

SEQ ID NO: 318 - RNA, 22 nt, Artificial Sequence
  RPE65 RNA guide
gcauacuguuguucauaguauu

SEQ ID NO: 319 - RNA, 22 nt, Artificial Sequence
  RPE65 RNA guide
ggcauacuguuguucauaguau

SEQ ID NO: 320 - RNA, 22 nt, Artificial Sequence
  RPE65 RNA guide
guuguucauaguauucccauau

SEQ ID NO: 321 - RNA, 22 nt, Artificial Sequence
  RPE65 RNA guide
uacuguuguucauaguauuccc

SEQ ID NO: 322 - RNA, 22 nt, Artificial Sequence
  RPE65 RNA guide
uaugggaauacuaugaacaaca

SEQ ID NO: 323 - RNA, 22 nt, Artificial Sequence
  RPE65 RNA guide
ugggaauacuaugaacaacagu

SEQ ID NO: 324 - RNA, 22 nt, Artificial Sequence
  RPE65 RNA guide
uguuguucauaguauucccaua

SEQ ID NO: 325 - RNA, 21 nt, Artificial Sequence
  RPE65 RNA guide
caccguguuggccaggcgggu

SEQ ID NO: 326 - RNA, 21 nt, Artificial Sequence
  RPE65 RNA guide
cgagacccgccuggccaacac

SEQ ID NO: 327 - RNA, 22 nt, Artificial Sequence
  RPE65 RNA guide
caccguguuggccaggcggguc

SEQ ID NO: 328 - RNA, 22 nt, Artificial Sequence
  RPE65 RNA guide
cgagacccgccuggccaacacg

SEQ ID NO: 329 - RNA, 22 nt, Artificial Sequence
  RPE65 RNA guide
ucaccguguuggccaggcgggu

SEQ ID NO: 330 - RNA, 22 nt, Artificial Sequence
  RPE65 RNA guide
ucgagacccgccuggccaacac

SEQ ID NO: 331 - RNA, 20 nt, Artificial Sequence
  RPE65 RNA guide
accgugcccacccugauauu

SEQ ID NO: 332 - RNA, 20 nt, Artificial Sequence
  RPE65 RNA guide
caccgugcccacccugauau

SEQ ID NO: 333 - RNA, 20 nt, Artificial Sequence
  RPE65 RNA guide
ccacccugauauuuaaaaaa

SEQ ID NO: 334 - RNA, 20 nt, Artificial Sequence
  RPE65 RNA guide
ccaccgugcccacccugaua

SEQ ID NO: 335 - RNA, 20 nt, Artificial Sequence
  RPE65 RNA guide
cccacccugauauuuaaaaa

SEQ ID NO: 336 - RNA, 20 nt, Artificial Sequence
  RPE65 RNA guide
ccgugcccacccugauauuu

SEQ ID NO: 337 - RNA, 20 nt, Artificial Sequence
  RPE65 RNA guide
cgugcccacccugauauuua

SEQ ID NO: 338 - RNA, 20 nt, Artificial Sequence
  RPE65 RNA guide
gccaccgugcccacccugau

SEQ ID NO: 339 - RNA, 20 nt, Artificial Sequence
  RPE65 RNA guide
gcccacccugauauuuaaaa

SEQ ID NO: 340 - RNA, 20 nt, Artificial Sequence
  RPE65 RNA guide
gugcccacccugauauuuaa

SEQ ID NO: 341 - RNA, 20 nt, Artificial Sequence
  RPE65 RNA guide
uaaauaucagggugggcacg

SEQ ID NO: 342 - RNA, 20 nt, Artificial Sequence
  RPE65 RNA guide
ugcccacccugauauuuaaa

SEQ ID NO: 343 - RNA, 20 nt, Artificial Sequence
  RPE65 RNA guide
uuaaauaucagggugggcac

SEQ ID NO: 344 - RNA, 20 nt, Artificial Sequence
  RPE65 RNA guide
uuuaaauaucagggugggca

SEQ ID NO: 345 - RNA, 20 nt, Artificial Sequence
  RPE65 RNA guide
uuuuaaauaucagggugggc

SEQ ID NO: 346 - RNA, 20 nt, Artificial Sequence
  RPE65 RNA guide
uuuuuaaauaucaggguggg

SEQ ID NO: 347 - RNA, 20 nt, Artificial Sequence
  RPE65 RNA guide
uuuuuuaaauaucagggugg

SEQ ID NO: 348 - RNA, 21 nt, Artificial Sequence
  RPE65 RNA guide
accgugcccacccugauauuu

SEQ ID NO: 349 - RNA, 21 nt, Artificial Sequence
  RPE65 RNA guide
agccaccgugcccacccugau

SEQ ID NO: 350 - RNA, 21 nt, Artificial Sequence
  RPE65 RNA guide
caccgugcccacccugauauu

SEQ ID NO: 351 - RNA, 21 nt, Artificial Sequence
  RPE65 RNA guide
ccaccgugcccacccugauau

SEQ ID NO: 352 - RNA, 21 nt, Artificial Sequence
  RPE65 RNA guide
cccacccugauauuuaaaaaa

SEQ ID NO: 353 - RNA, 21 nt, Artificial Sequence
  RPE65 RNA guide
ccgugcccacccugauauuua

SEQ ID NO: 354 - RNA, 21 nt, Artificial Sequence
  RPE65 RNA guide
cgugcccacccugauauuuaa

SEQ ID NO: 355 - RNA, 21 nt, Artificial Sequence
  RPE65 RNA guide
gccaccgugcccacccugaua

SEQ ID NO: 356 - RNA, 21 nt, Artificial Sequence
  RPE65 RNA guide
gcccacccugauauuuaaaaa

SEQ ID NO: 357 - RNA, 21 nt, Artificial Sequence
  RPE65 RNA guide
gugcccacccugauauuuaaa

SEQ ID NO: 358 - RNA, 21 nt, Artificial Sequence
  RPE65 RNA guide
uaaauaucagggugggcacgg

SEQ ID NO: 359 - RNA, 21 nt, Artificial Sequence
  RPE65 RNA guide
ugcccacccugauauuuaaaa

SEQ ID NO: 360 - RNA, 21 nt, Artificial Sequence
  RPE65 RNA guide
uuaaauaucagggugggcacg

SEQ ID NO: 361 - RNA, 21 nt, Artificial Sequence
  RPE65 RNA guide
uuuaaauaucagggugggcac

SEQ ID NO: 362 - RNA, 21 nt, Artificial Sequence
  RPE65 RNA guide
uuuuaaauaucagggugggca

SEQ ID NO: 363 - RNA, 21 nt, Artificial Sequence
  RPE65 RNA guide
uuuuuaaauaucagggugggc

SEQ ID NO: 364 - RNA, 21 nt, Artificial Sequence
  RPE65 RNA guide
uuuuuuaaauaucaggguggg

SEQ ID NO: 365 - RNA, 22 nt, Artificial Sequence
  RPE65 RNA guide
accgugcccacccugauauuua

SEQ ID NO: 366 - RNA, 22 nt, Artificial Sequence
  RPE65 RNA guide
agccaccgugcccacccugaua

SEQ ID NO: 367 - RNA, 22 nt, Artificial Sequence
  RPE65 RNA guide
caccgugcccacccugauauuu

SEQ ID NO: 368 - RNA, 22 nt, Artificial Sequence
  RPE65 RNA guide
ccaccgugcccacccugauauu

SEQ ID NO: 369 - RNA, 22 nt, Artificial Sequence
  RPE65 RNA guide
ccgugcccacccugauauuuaa

SEQ ID NO: 370 - RNA, 22 nt, Artificial Sequence
  RPE65 RNA guide
cgugcccacccugauauuuaaa

SEQ ID NO: 371 - RNA, 22 nt, Artificial Sequence
  RPE65 RNA guide
gagccaccgugcccacccugau

SEQ ID NO: 372 - RNA, 22 nt, Artificial Sequence
  RPE65 RNA guide
gccaccgugcccacccugauau

SEQ ID NO: 373 - RNA, 22 nt, Artificial Sequence
  RPE65 RNA guide
gcccacccugauauuuaaaaaa

SEQ ID NO: 374 - RNA, 22 nt, Artificial Sequence
  RPE65 RNA guide
gugcccacccugauauuuaaaa

SEQ ID NO: 375 - RNA, 22 nt, Artificial Sequence
  RPE65 RNA guide
uaaauaucagggugggcacggu

SEQ ID NO: 376 - RNA, 22 nt, Artificial Sequence
  RPE65 RNA guide
ugcccacccugauauuuaaaaa

SEQ ID NO: 377 - RNA, 22 nt, Artificial Sequence
  RPE65 RNA guide
uuaaauaucagggugggcacgg

SEQ ID NO: 378 - RNA, 22 nt, Artificial Sequence
  RPE65 RNA guide
uuuaaauaucagggugggcacg

SEQ ID NO: 379 - RNA, 22 nt, Artificial Sequence
  RPE65 RNA guide
uuuuaaauaucagggugggcac

SEQ ID NO: 380 - RNA, 22 nt, Artificial Sequence
  RPE65 RNA guide
uuuuuaaauaucagggugggca

SEQ ID NO: 381 - RNA, 22 nt, Artificial Sequence
  RPE65 RNA guide
uuuuuuaaauaucagggugggc

SEQ ID NO: 382 - RNA, 20 nt, Artificial Sequence
  RPE65 RNA guide
agagaagauuaauaaagcca

SEQ ID NO: 383 - RNA, 20 nt, Artificial Sequence
  RPE65 RNA guide
agagagaagauuaauaaagc

SEQ ID NO: 384 - RNA, 20 nt, Artificial Sequence
  RPE65 RNA guide
gagaagauuaauaaagccaa

SEQ ID NO: 385 - RNA, 20 nt, Artificial Sequence
  RPE65 RNA guide
gagagaagauuaauaaagcc

SEQ ID NO: 386 - RNA, 20 nt, Artificial Sequence
  RPE65 RNA guide
gcuuuauuaaucuucucucu

SEQ ID NO: 387 - RNA, 20 nt, Artificial Sequence
  RPE65 RNA guide
ggcuuuauuaaucuucucuc

SEQ ID NO: 388 - RNA, 20 nt, Artificial Sequence
  RPE65 RNA guide
uggcuuuauuaaucuucucu

SEQ ID NO: 389 - RNA, 20 nt, Artificial Sequence
  RPE65 RNA guide
uuggcuuuauuaaucuucuc

SEQ ID NO: 390 - RNA, 21 nt, Artificial Sequence
  RPE65 RNA guide
agagagaagauuaauaaagcc

SEQ ID NO: 391 - RNA, 21 nt, Artificial Sequence
  RPE65 RNA guide
gagagaagauuaauaaagcca

SEQ ID NO: 392 - RNA, 21 nt, Artificial Sequence
  RPE65 RNA guide
ggcuuuauuaaucuucucucu

SEQ ID NO: 393 - RNA, 21 nt, Artificial Sequence
  RPE65 RNA guide
uggcuuuauuaaucuucucuc

SEQ ID NO: 394 - RNA, 22 nt, Artificial Sequence
  RPE65 RNA guide
aagagagaagauuaauaaagcc

SEQ ID NO: 395 - RNA, 22 nt, Artificial Sequence
  RPE65 RNA guide
agagagaagauuaauaaagcca

SEQ ID NO: 396 - RNA, 22 nt, Artificial Sequence
  RPE65 RNA guide
gagagaagauuaauaaagccaa

SEQ ID NO: 397 - RNA, 22 nt, Artificial Sequence
  RPE65 RNA guide
ggcuuuauuaaucuucucucuu

SEQ ID NO: 398 - RNA, 22 nt, Artificial Sequence
  RPE65 RNA guide
uggcuuuauuaaucuucucucu

SEQ ID NO: 399 - RNA, 22 nt, Artificial Sequence
  RPE65 RNA guide
uuggcuuuauuaaucuucucuc

SEQ ID NO: 400 - RNA, 20 nt, Artificial Sequence
  RPE65 RNA guide
gagagaagauuaauaaaacc

SEQ ID NO: 401 - RNA, 20 nt, Artificial Sequence
  RPE65 RNA guide
gguuuuauuaaucuucucuc

SEQ ID NO: 402 - RNA, 20 nt, Artificial Sequence
  RPE65 RNA guide
aacuuauggaaugcagcuaa

SEQ ID NO: 403 - RNA, 20 nt, Artificial Sequence
  RPE65 RNA guide
aagcccugcauuagcugcau

SEQ ID NO: 404 - RNA, 20 nt, Artificial Sequence
  RPE65 RNA guide
acuuauggaaugcagcuaau

SEQ ID NO: 405 - RNA, 20 nt, Artificial Sequence
  RPE65 RNA guide
agcccugcauuagcugcauu

SEQ ID NO: 406 - RNA, 20 nt, Artificial Sequence
  RPE65 RNA guide
auggaaugcagcuaaugcag

SEQ ID NO: 407 - RNA, 20 nt, Artificial Sequence
  RPE65 RNA guide
cccugcauuagcugcauucc

SEQ ID NO: 408 - RNA, 20 nt, Artificial Sequence
  RPE65 RNA guide
ccugcauuagcugcauucca

SEQ ID NO: 409 - RNA, 20 nt, Artificial Sequence
  RPE65 RNA guide
cugcauuagcugcauuccau

SEQ ID NO: 410 - RNA, 20 nt, Artificial Sequence
  RPE65 RNA guide
cuuauggaaugcagcuaaug

SEQ ID NO: 411 - RNA, 20 nt, Artificial Sequence
  RPE65 RNA guide
gcccugcauuagcugcauuc

SEQ ID NO: 412 - RNA, 20 nt, Artificial Sequence
  RPE65 RNA guide
uauggaaugcagcuaaugca

SEQ ID NO: 413 - RNA, 20 nt, Artificial Sequence
  RPE65 RNA guide
ugcauuagcugcauuccaua

SEQ ID NO: 414 - RNA, 20 nt, Artificial Sequence
  RPE65 RNA guide
uuauggaaugcagcuaaugc

SEQ ID NO: 415 - RNA, 21 nt, Artificial Sequence
  RPE65 RNA guide
aaacuuauggaaugcagcuaa

SEQ ID NO: 416 - RNA, 21 nt, Artificial Sequence
  RPE65 RNA guide
aacuuauggaaugcagcuaau

SEQ ID NO: 417 - RNA, 21 nt, Artificial Sequence
  RPE65 RNA guide
aagcccugcauuagcugcauu

SEQ ID NO: 418 - RNA, 21 nt, Artificial Sequence
  RPE65 RNA guide
acaaacacaacauaccaaaac

SEQ ID NO: 419 - RNA, 21 nt, Artificial Sequence
  RPE65 RNA guide
acuuauggaaugcagcuaaug

SEQ ID NO: 420 - RNA, 21 nt, Artificial Sequence
  RPE65 RNA guide
agcccugcauuagcugcauuc

SEQ ID NO: 421 - RNA, 21 nt, Artificial Sequence
  RPE65 RNA guide
auggaaugcagcuaaugcagg

SEQ ID NO: 422 - RNA, 21 nt, Artificial Sequence
  RPE65 RNA guide
auuagcugcauuccauaaguu

SEQ ID NO: 423 - RNA, 21 nt, Artificial Sequence
  RPE65 RNA guide
ccaaaacuuauggaaugcagc

SEQ ID NO: 424 - RNA, 21 nt, Artificial Sequence
  RPE65 RNA guide
cccugcauuagcugcauucca

SEQ ID NO: 425 - RNA, 21 nt, Artificial Sequence
  RPE65 RNA guide
ccugcauuagcugcauuccau

SEQ ID NO: 426 - RNA, 21 nt, Artificial Sequence
  RPE65 RNA guide
cugcauuagcugcauuccaua

SEQ ID NO: 427 - RNA, 21 nt, Artificial Sequence
  RPE65 RNA guide
cuuauggaaugcagcuaaugc

SEQ ID NO: 428 - RNA, 21 nt, Artificial Sequence
  RPE65 RNA guide
gcccugcauuagcugcauucc

SEQ ID NO: 429 - RNA, 21 nt, Artificial Sequence
  RPE65 RNA guide
uaagcccugcauuagcugcau

SEQ ID NO: 430 - RNA, 21 nt, Artificial Sequence
  RPE65 RNA guide
uauggaaugcagcuaaugcag

SEQ ID NO: 431 - RNA, 21 nt, Artificial Sequence
  RPE65 RNA guide
ugcauuagcugcauuccauaa

SEQ ID NO: 432 - RNA, 21 nt, Artificial Sequence
  RPE65 RNA guide
uuauggaaugcagcuaaugca

SEQ ID NO: 433 - RNA, 22 nt, Artificial Sequence
  RPE65 RNA guide
aaaacuuauggaaugcagcuaa

SEQ ID NO: 434 - RNA, 22 nt, Artificial Sequence
  RPE65 RNA guide
aaacuuauggaaugcagcuaau

SEQ ID NO: 435 - RNA, 22 nt, Artificial Sequence
  RPE65 RNA guide
aacaaacacaacauaccaaaac

SEQ ID NO: 436 - RNA, 22 nt, Artificial Sequence
  RPE65 RNA guide
aacuuauggaaugcagcuaaug

SEQ ID NO: 437 - RNA, 22 nt, Artificial Sequence
  RPE65 RNA guide
aagcccugcauuagcugcauuc

SEQ ID NO: 438 - RNA, 22 nt, Artificial Sequence
  RPE65 RNA guide
acaaacacaacauaccaaaacu

SEQ ID NO: 439 - RNA, 22 nt, Artificial Sequence
  RPE65 RNA guide
accaaaacuuauggaaugcagc

SEQ ID NO: 440 - RNA, 22 nt, Artificial Sequence
  RPE65 RNA guide
acuuauggaaugcagcuaaugc

SEQ ID NO: 441 - RNA, 22 nt, Artificial Sequence
  RPE65 RNA guide
agcccugcauuagcugcauucc

SEQ ID NO: 442 - RNA, 22 nt, Artificial Sequence
  RPE65 RNA guide
auggaaugcagcuaaugcaggg

SEQ ID NO: 443 - RNA, 22 nt, Artificial Sequence
  RPE65 RNA guide
auuagcugcauuccauaaguuu

SEQ ID NO: 444 - RNA, 22 nt, Artificial Sequence
  RPE65 RNA guide
cauaaguuuugguauguugugu

SEQ ID NO: 445 - RNA, 22 nt, Artificial Sequence
  RPE65 RNA guide
cauuagcugcauuccauaaguu

SEQ ID NO: 446 - RNA, 22 nt, Artificial Sequence
  RPE65 RNA guide
ccaaaacuuauggaaugcagcu

SEQ ID NO: 447 - RNA, 22 nt, Artificial Sequence
  RPE65 RNA guide
cccugcauuagcugcauuccau

SEQ ID NO: 448 - RNA, 22 nt, Artificial Sequence
  RPE65 RNA guide
ccugcauuagcugcauuccaua

SEQ ID NO: 449 - RNA, 22 nt, Artificial Sequence
  RPE65 RNA guide
cugcauuagcugcauuccauaa

SEQ ID NO: 450 - RNA, 22 nt, Artificial Sequence
  RPE65 RNA guide
cuuauggaaugcagcuaaugca

SEQ ID NO: 451 - RNA, 22 nt, Artificial Sequence
  RPE65 RNA guide
gcccugcauuagcugcauucca

SEQ ID NO: 452 - RNA, 22 nt, Artificial Sequence
  RPE65 RNA guide
guaagcccugcauuagcugcau

SEQ ID NO: 453 - RNA, 22 nt, Artificial Sequence
  RPE65 RNA guide
uaagcccugcauuagcugcauu

SEQ ID NO: 454 - RNA, 22 nt, Artificial Sequence
  RPE65 RNA guide
uauggaaugcagcuaaugcagg

SEQ ID NO: 455 - RNA, 22 nt, Artificial Sequence
  RPE65 RNA guide
ugcauuagcugcauuccauaag

SEQ ID NO: 456 - RNA, 22 nt, Artificial Sequence
  RPE65 RNA guide
uuauggaaugcagcuaaugcag

SEQ ID NO: 457 - RNA, 20 nt, Artificial Sequence
  RPE65 RNA guide
aaaacuuacggaaugcagcu

SEQ ID NO: 458 - RNA, 20 nt, Artificial Sequence
  RPE65 RNA guide
aaacuuacggaaugcagcua

SEQ ID NO: 459 - RNA, 20 nt, Artificial Sequence
  RPE65 RNA guide
aacauaccaaaacuuacgga

SEQ ID NO: 460 - RNA, 20 nt, Artificial Sequence
  RPE65 RNA guide
aacuuacggaaugcagcuaa

SEQ ID NO: 461 - RNA, 20 nt, Artificial Sequence
  RPE65 RNA guide
acauaccaaaacuuacggaa

SEQ ID NO: 462 - RNA, 20 nt, Artificial Sequence
  RPE65 RNA guide
accaaaacuuacggaaugca

SEQ ID NO: 463 - RNA, 20 nt, Artificial Sequence
  RPE65 RNA guide
acggaaugcagcuaaugcag

SEQ ID NO: 464 - RNA, 20 nt, Artificial Sequence
  RPE65 RNA guide
acuuacggaaugcagcuaau

SEQ ID NO: 465 - RNA, 20 nt, Artificial Sequence
  RPE65 RNA guide
agcugcauuccguaaguuuu

SEQ ID NO: 466 - RNA, 20 nt, Artificial Sequence
  RPE65 RNA guide
auaccaaaacuuacggaaug

SEQ ID NO: 467 - RNA, 20 nt, Artificial Sequence
  RPE65 RNA guide
auuagcugcauuccguaagu

SEQ ID NO: 468 - RNA, 20 nt, Artificial Sequence
  RPE65 RNA guide
caaaacuuacggaaugcagc

SEQ ID NO: 469 - RNA, 20 nt, Artificial Sequence
  RPE65 RNA guide
caaacacaacauaccaaaac

SEQ ID NO: 470 - RNA, 20 nt, Artificial Sequence
  RPE65 RNA guide
caacauaccaaaacuuacgg

SEQ ID NO: 471 - RNA, 20 nt, Artificial Sequence
  RPE65 RNA guide
cauaccaaaacuuacggaau

SEQ ID NO: 472 - RNA, 20 nt, Artificial Sequence
  RPE65 RNA guide
cauuagcugcauuccguaag

SEQ ID NO: 473 - RNA, 20 nt, Artificial Sequence
  RPE65 RNA guide
cauuccguaaguuuugguau

SEQ ID NO: 474 - RNA, 20 nt, Artificial Sequence
  RPE65 RNA guide
ccaaaacuuacggaaugcag

SEQ ID NO: 475 - RNA, 20 nt, Artificial Sequence
  RPE65 RNA guide
ccugcauuagcugcauuccg

SEQ ID NO: 476 - RNA, 20 nt, Artificial Sequence
  RPE65 RNA guide
cugcauuagcugcauuccgu

SEQ ID NO: 477 - RNA, 20 nt, Artificial Sequence
  RPE65 RNA guide
cugcauuccguaaguuuugg

SEQ ID NO: 478 - RNA, 20 nt, Artificial Sequence
  RPE65 RNA guide
cuuacggaaugcagcuaaug

SEQ ID NO: 479 - RNA, 20 nt, Artificial Sequence
  RPE65 RNA guide
gcauuagcugcauuccguaa

SEQ ID NO: 480 - RNA, 20 nt, Artificial Sequence
  RPE65 RNA guide
gcauuccguaaguuuuggua

SEQ ID NO: 481 - RNA, 20 nt, Artificial Sequence
  RPE65 RNA guide
gcugcauuccguaaguuuug

SEQ ID NO: 482 - RNA, 20 nt, Artificial Sequence
  RPE65 RNA guide
uaccaaaacuuacggaaugc

SEQ ID NO: 483 - RNA, 20 nt, Artificial Sequence
  RPE65 RNA guide
uacggaaugcagcuaaugca

SEQ ID NO: 484 - RNA, 20 nt, Artificial Sequence
  RPE65 RNA guide
uagcugcauuccguaaguuu

SEQ ID NO: 485 - RNA, 20 nt, Artificial Sequence
  RPE65 RNA guide
ugcauuagcugcauuccgua

SEQ ID NO: 486 - RNA, 20 nt, Artificial Sequence
  RPE65 RNA guide
ugcauuccguaaguuuuggu

SEQ ID NO: 487 - RNA, 20 nt, Artificial Sequence
  RPE65 RNA guide
uuacggaaugcagcuaaugc

SEQ ID NO: 488 - RNA, 20 nt, Artificial Sequence
  RPE65 RNA guide
uuagcugcauuccguaaguu

SEQ ID NO: 489 - RNA, 21 nt, Artificial Sequence
  RPE65 RNA guide
aaaacuuacggaaugcagcua

SEQ ID NO: 490 - RNA, 21 nt, Artificial Sequence
  RPE65 RNA guide
aaacuuacggaaugcagcuaa

SEQ ID NO: 491 - RNA, 21 nt, Artificial Sequence
  RPE65 RNA guide
aacauaccaaaacuuacggaa

SEQ ID NO: 492 - RNA, 21 nt, Artificial Sequence
  RPE65 RNA guide
aacuuacggaaugcagcuaau

SEQ ID NO: 493 - RNA, 21 nt, Artificial Sequence
  RPE65 RNA guide
acaacauaccaaaacuuacgg

SEQ ID NO: 494 - RNA, 21 nt, Artificial Sequence
  RPE65 RNA guide
acauaccaaaacuuacggaau

SEQ ID NO: 495 - RNA, 21 nt, Artificial Sequence
  RPE65 RNA guide
accaaaacuuacggaaugcag

SEQ ID NO: 496 - RNA, 21 nt, Artificial Sequence
  RPE65 RNA guide
acggaaugcagcuaaugcagg

SEQ ID NO: 497 - RNA, 21 nt, Artificial Sequence
  RPE65 RNA guide
acuuacggaaugcagcuaaug

SEQ ID NO: 498 - RNA, 21 nt, Artificial Sequence
  RPE65 RNA guide
agcugcauuccguaaguuuug

SEQ ID NO: 499 - RNA, 21 nt, Artificial Sequence
  RPE65 RNA guide
auaccaaaacuuacggaaugc

SEQ ID NO: 500 - RNA, 21 nt, Artificial Sequence
  RPE65 RNA guide
auuagcugcauuccguaaguu

SEQ ID NO: 501 - RNA, 21 nt, Artificial Sequence
  RPE65 RNA guide
caaaacuuacggaaugcagcu

SEQ ID NO: 502 - RNA, 21 nt, Artificial Sequence
  RPE65 RNA guide
caaacacaacauaccaaaacu

SEQ ID NO: 503 - RNA, 21 nt, Artificial Sequence
  RPE65 RNA guide
caacauaccaaaacuuacgga

SEQ ID NO: 504 - RNA, 21 nt, Artificial Sequence
  RPE65 RNA guide
cauaccaaaacuuacggaaug

SEQ ID NO: 505 - RNA, 21 nt, Artificial Sequence
  RPE65 RNA guide
cauuagcugcauuccguaagu

SEQ ID NO: 506 - RNA, 21 nt, Artificial Sequence
  RPE65 RNA guide
cauuccguaaguuuugguaug

SEQ ID NO: 507 - RNA, 21 nt, Artificial Sequence
  RPE65 RNA guide
ccaaaacuuacggaaugcagc

SEQ ID NO: 508 - RNA, 21 nt, Artificial Sequence
  RPE65 RNA guide
cccugcauuagcugcauuccg

SEQ ID NO: 509 - RNA, 21 nt, Artificial Sequence
  RPE65 RNA guide
ccugcauuagcugcauuccgu

SEQ ID NO: 510 - RNA, 21 nt, Artificial Sequence
  RPE65 RNA guide
cguaaguuuugguauguugug

SEQ ID NO: 511 - RNA, 21 nt, Artificial Sequence
  RPE65 RNA guide
cugcauuagcugcauuccgua

SEQ ID NO: 512 - RNA, 21 nt, Artificial Sequence
  RPE65 RNA guide
cugcauuccguaaguuuuggu

SEQ ID NO: 513 - RNA, 21 nt, Artificial Sequence
  RPE65 RNA guide
cuuacggaaugcagcuaaugc

SEQ ID NO: 514 - RNA, 21 nt, Artificial Sequence
  RPE65 RNA guide
gcauuagcugcauuccguaag

SEQ ID NO: 515 - RNA, 21 nt, Artificial Sequence
  RPE65 RNA guide
gcauuccguaaguuuugguau

SEQ ID NO: 516 - RNA, 21 nt, Artificial Sequence
  RPE65 RNA guide
gcugcauuccguaaguuuugg

SEQ ID NO: 517 - RNA, 21 nt, Artificial Sequence
  RPE65 RNA guide
uaccaaaacuuacggaaugca

SEQ ID NO: 518 - RNA, 21 nt, Artificial Sequence
  RPE65 RNA guide
uacggaaugcagcuaaugcag

SEQ ID NO: 519 - RNA, 21 nt, Artificial Sequence
  RPE65 RNA guide
uagcugcauuccguaaguuuu

SEQ ID NO: 520 - RNA, 21 nt, Artificial Sequence
  RPE65 RNA guide
ugcauuagcugcauuccguaa

SEQ ID NO: 521 - RNA, 21 nt, Artificial Sequence
  RPE65 RNA guide
ugcauuccguaaguuuuggua

SEQ ID NO: 522 - RNA, 21 nt, Artificial Sequence
  RPE65 RNA guide
uuacggaaugcagcuaaugca

SEQ ID NO: 523 - RNA, 21 nt, Artificial Sequence
  RPE65 RNA guide
uuagcugcauuccguaaguuu

SEQ ID NO: 524 - RNA, 22 nt, Artificial Sequence
  RPE65 RNA guide
aaaacuuacggaaugcagcuaa

SEQ ID NO: 525 - RNA, 22 nt, Artificial Sequence
  RPE65 RNA guide
aaacuuacggaaugcagcuaau

SEQ ID NO: 526 - RNA, 22 nt, Artificial Sequence
  RPE65 RNA guide
aacauaccaaaacuuacggaau

SEQ ID NO: 527 - RNA, 22 nt, Artificial Sequence
  RPE65 RNA guide
aacuuacggaaugcagcuaaug

SEQ ID NO: 528 - RNA, 22 nt, Artificial Sequence
  RPE65 RNA guide
acaacauaccaaaacuuacgga

SEQ ID NO: 529 - RNA, 22 nt, Artificial Sequence
  RPE65 RNA guide
acauaccaaaacuuacggaaug

SEQ ID NO: 530 - RNA, 22 nt, Artificial Sequence
  RPE65 RNA guide
accaaaacuuacggaaugcagc

SEQ ID NO: 531 - RNA, 22 nt, Artificial Sequence
  RPE65 RNA guide
acggaaugcagcuaaugcaggg

SEQ ID NO: 532 - RNA, 22 nt, Artificial Sequence
  RPE65 RNA guide
acuuacggaaugcagcuaaugc

SEQ ID NO: 533 - RNA, 22 nt, Artificial Sequence
  RPE65 RNA guide
agcugcauuccguaaguuuugg

SEQ ID NO: 534 - RNA, 22 nt, Artificial Sequence
  RPE65 RNA guide
auaccaaaacuuacggaaugca

SEQ ID NO: 535 - RNA, 22 nt, Artificial Sequence
  RPE65 RNA guide
auuagcugcauuccguaaguuu

SEQ ID NO: 536 - RNA, 22 nt, Artificial Sequence
  RPE65 RNA guide
caaaacuuacggaaugcagcua

SEQ ID NO: 537 - RNA, 22 nt, Artificial Sequence
  RPE65 RNA guide
caaacacaacauaccaaaacuu

SEQ ID NO: 538 - RNA, 22 nt, Artificial Sequence
  RPE65 RNA guide
caacauaccaaaacuuacggaa

SEQ ID NO: 539 - RNA, 22 nt, Artificial Sequence
  RPE65 RNA guide
cacaacauaccaaaacuuacgg

SEQ ID NO: 540 - RNA, 22 nt, Artificial Sequence
  RPE65 RNA guide
cauaccaaaacuuacggaaugc

SEQ ID NO: 541 - RNA, 22 nt, Artificial Sequence
  RPE65 RNA guide
cauuagcugcauuccguaaguu

SEQ ID NO: 542 - RNA, 22 nt, Artificial Sequence
  RPE65 RNA guide
cauuccguaaguuuugguaugu

SEQ ID NO: 543 - RNA, 22 nt, Artificial Sequence
  RPE65 RNA guide
ccaaaacuuacggaaugcagcu

SEQ ID NO: 544 - RNA, 22 nt, Artificial Sequence
  RPE65 RNA guide
cccugcauuagcugcauuccgu

SEQ ID NO: 545 - RNA, 22 nt, Artificial Sequence
  RPE65 RNA guide
ccguaaguuuugguauguugug

SEQ ID NO: 546 - RNA, 22 nt, Artificial Sequence
  RPE65 RNA guide
ccugcauuagcugcauuccgua

SEQ ID NO: 547 - RNA, 22 nt, Artificial Sequence
  RPE65 RNA guide
cguaaguuuugguauguugugu

SEQ ID NO: 548 - RNA, 22 nt, Artificial Sequence
  RPE65 RNA guide
cugcauuagcugcauuccguaa

SEQ ID NO: 549 - RNA, 22 nt, Artificial Sequence
  RPE65 RNA guide
cugcauuccguaaguuuuggua

SEQ ID NO: 550 - RNA, 22 nt, Artificial Sequence
  RPE65 RNA guide
cuuacggaaugcagcuaaugca

SEQ ID NO: 551 - RNA, 22 nt, Artificial Sequence
  RPE65 RNA guide
gcauuagcugcauuccguaagu

SEQ ID NO: 552 - RNA, 22 nt, Artificial Sequence
  RPE65 RNA guide
gcauuccguaaguuuugguaug

SEQ ID NO: 553 - RNA, 22 nt, Artificial Sequence
  RPE65 RNA guide
gcccugcauuagcugcauuccg

SEQ ID NO: 554 - RNA, 22 nt, Artificial Sequence
  RPE65 RNA guide
gcugcauuccguaaguuuuggu

SEQ ID NO: 555 - RNA, 22 nt, Artificial Sequence
  RPE65 RNA guide
uaccaaaacuuacggaaugcag

SEQ ID NO: 556 - RNA, 22 nt, Artificial Sequence
  RPE65 RNA guide
uacggaaugcagcuaaugcagg

SEQ ID NO: 557 - RNA, 22 nt, Artificial Sequence
  RPE65 RNA guide
uagcugcauuccguaaguuuug

SEQ ID NO: 558 - RNA, 22 nt, Artificial Sequence
  RPE65 RNA guide
ugcauuagcugcauuccguaag

SEQ ID NO: 559 - RNA, 22 nt, Artificial Sequence
  RPE65 RNA guide
ugcauuccguaaguuuugguau

SEQ ID NO: 560 - RNA, 22 nt, Artificial Sequence
  RPE65 RNA guide
uuacggaaugcagcuaaugcag

SEQ ID NO: 561 - RNA, 22 nt, Artificial Sequence
  RPE65 RNA guide
uuagcugcauuccguaaguuuu

SEQ ID NO: 562 - RNA, 20 nt, Artificial Sequence
  RPE65 RNA guide
aaaaccuuauuuaucgagug

SEQ ID NO: 563 - RNA, 20 nt, Artificial Sequence
  RPE65 RNA guide
aaaccuuauuuaucgagugc

SEQ ID NO: 564 - RNA, 20 nt, Artificial Sequence
  RPE65 RNA guide
aaccuuauuuaucgagugcc

SEQ ID NO: 565 - RNA, 20 nt, Artificial Sequence
  RPE65 RNA guide
accuuauuuaucgagugccu

SEQ ID NO: 566 - RNA, 20 nt, Artificial Sequence
  RPE65 RNA guide
aggcacucgauaaauaaggu

SEQ ID NO: 567 - RNA, 20 nt, Artificial Sequence
  RPE65 RNA guide
aguaggcacucgauaaauaa

SEQ ID NO: 568 - RNA, 20 nt, Artificial Sequence
  RPE65 RNA guide
auaguaggcacucgauaaau

SEQ ID NO: 569 - RNA, 20 nt, Artificial Sequence
  RPE65 RNA guide
cacucgauaaauaagguuuu

SEQ ID NO: 570 - RNA, 20 nt, Artificial Sequence
  RPE65 RNA guide
gcacucgauaaauaagguuu

SEQ ID NO: 571 - RNA, 20 nt, Artificial Sequence
  RPE65 RNA guide
ggcacucgauaaauaagguu

SEQ ID NO: 572 - RNA, 20 nt, Artificial Sequence
  RPE65 RNA guide
guaggcacucgauaaauaag

SEQ ID NO: 573 - RNA, 20 nt, Artificial Sequence
  RPE65 RNA guide
uaggcacucgauaaauaagg

SEQ ID NO: 574 - RNA, 20 nt, Artificial Sequence
  RPE65 RNA guide
uaguaggcacucgauaaaua

SEQ ID NO: 575 - RNA, 21 nt, Artificial Sequence
  RPE65 RNA guide
aaaaccuuauuuaucgagugc

SEQ ID NO: 576 - RNA, 21 nt, Artificial Sequence
  RPE65 RNA guide
aaaccuuauuuaucgagugcc

SEQ ID NO: 577 - RNA, 21 nt, Artificial Sequence
  RPE65 RNA guide
aaccuuauuuaucgagugccu

SEQ ID NO: 578 - RNA, 21 nt, Artificial Sequence
  RPE65 RNA guide
aauaguaggcacucgauaaau

SEQ ID NO: 579 - RNA, 21 nt, Artificial Sequence
  RPE65 RNA guide
accuuauuuaucgagugccua

SEQ ID NO: 580 - RNA, 21 nt, Artificial Sequence
  RPE65 RNA guide
aggcacucgauaaauaagguu

SEQ ID NO: 581 - RNA, 21 nt, Artificial Sequence
  RPE65 RNA guide
aguaggcacucgauaaauaag

SEQ ID NO: 582 - RNA, 21 nt, Artificial Sequence
  RPE65 RNA guide
auaguaggcacucgauaaaua

SEQ ID NO: 583 - RNA, 21 nt, Artificial Sequence
  RPE65 RNA guide
gcacucgauaaauaagguuuu

SEQ ID NO: 584 - RNA, 21 nt, Artificial Sequence
  RPE65 RNA guide
ggcacucgauaaauaagguuu

SEQ ID NO: 585 - RNA, 21 nt, Artificial Sequence
  RPE65 RNA guide
guaggcacucgauaaauaagg

SEQ ID NO: 586 - RNA, 21 nt, Artificial Sequence
  RPE65 RNA guide
uaggcacucgauaaauaaggu

SEQ ID NO: 587 - RNA, 21 nt, Artificial Sequence
  RPE65 RNA guide
uaguaggcacucgauaaauaa

SEQ ID NO: 588 - RNA, 22 nt, Artificial Sequence
  RPE65 RNA guide
aaaaaccuuauuuaucgagugc

SEQ ID NO: 589 - RNA, 22 nt, Artificial Sequence
  RPE65 RNA guide
aaaaccuuauuuaucgagugcc

SEQ ID NO: 590 - RNA, 22 nt, Artificial Sequence
  RPE65 RNA guide
aaaccuuauuuaucgagugccu

SEQ ID NO: 591 - RNA, 22 nt, Artificial Sequence
  RPE65 RNA guide
aaauaguaggcacucgauaaau

SEQ ID NO: 592 - RNA, 22 nt, Artificial Sequence
  RPE65 RNA guide
aaccuuauuuaucgagugccua

SEQ ID NO: 593 - RNA, 22 nt, Artificial Sequence
  RPE65 RNA guide
aauaguaggcacucgauaaaua

SEQ ID NO: 594 - RNA, 22 nt, Artificial Sequence
  RPE65 RNA guide
accuuauuuaucgagugccuac

SEQ ID NO: 595 - RNA, 22 nt, Artificial Sequence
  RPE65 RNA guide
aggcacucgauaaauaagguuu

SEQ ID NO: 596 - RNA, 22 nt, Artificial Sequence
  RPE65 RNA guide
aguaggcacucgauaaauaagg

SEQ ID NO: 597 - RNA, 22 nt, Artificial Sequence
  RPE65 RNA guide
auaguaggcacucgauaaauaa

SEQ ID NO: 598 - RNA, 22 nt, Artificial Sequence
  RPE65 RNA guide
gcacucgauaaauaagguuuuu

SEQ ID NO: 599 - RNA, 22 nt, Artificial Sequence
  RPE65 RNA guide
ggcacucgauaaauaagguuuu

SEQ ID NO: 600 - RNA, 22 nt, Artificial Sequence
  RPE65 RNA guide
guaggcacucgauaaauaaggu

SEQ ID NO: 601 - RNA, 22 nt, Artificial Sequence
  RPE65 RNA guide
uaggcacucgauaaauaagguu

SEQ ID NO: 602 - RNA, 22 nt, Artificial Sequence
  RPE65 RNA guide
uaguaggcacucgauaaauaag

SEQ ID NO: 603 - RNA, 20 nt, Artificial Sequence
  RPE65 RNA guide
cugaaagacaagagaaaaaa

SEQ ID NO: 604 - RNA, 22 nt, Artificial Sequence
  RPE65 RNA guide
cucugaaagacaagagaaaaaa

SEQ ID NO: 605 - RNA, 20 nt, Artificial Sequence
  RPE65 RNA guide
agccaagacgaaaagauaau

SEQ ID NO: 606 - RNA, 20 nt, Artificial Sequence
  RPE65 RNA guide
cagccaagacgaaaagauaa

SEQ ID NO: 607 - RNA, 20 nt, Artificial Sequence
  RPE65 RNA guide
ccaagacgaaaagauaauaa

SEQ ID NO: 608 - RNA, 20 nt, Artificial Sequence
  RPE65 RNA guide
gccaagacgaaaagauaaua

SEQ ID NO: 609 - RNA, 21 nt, Artificial Sequence
  RPE65 RNA guide
acagccaagacgaaaagauaa

SEQ ID NO: 610 - RNA, 21 nt, Artificial Sequence
  RPE65 RNA guide
agccaagacgaaaagauaaua

SEQ ID NO: 611 - RNA, 21 nt, Artificial Sequence
  RPE65 RNA guide
cagccaagacgaaaagauaau

SEQ ID NO: 612 - RNA, 21 nt, Artificial Sequence
  RPE65 RNA guide
gccaagacgaaaagauaauaa

SEQ ID NO: 613 - RNA, 22 nt, Artificial Sequence
  RPE65 RNA guide
acagccaagacgaaaagauaau

SEQ ID NO: 614 - RNA, 22 nt, Artificial Sequence
  RPE65 RNA guide
agccaagacgaaaagauaauaa

SEQ ID NO: 615 - RNA, 22 nt, Artificial Sequence
  RPE65 RNA guide
cacagccaagacgaaaagauaa

SEQ ID NO: 616 - RNA, 22 nt, Artificial Sequence
  RPE65 RNA guide
cagccaagacgaaaagauaaua

SEQ ID NO: 617 - RNA, 22 nt, Artificial Sequence
  RPE65 RNA guide
cccuugaugauauuaugucaaa

SEQ ID NO: 618 - RNA, 22 nt, Artificial Sequence
  RPE65 RNA guide
ccuugaugauauuaugucaaag

SEQ ID NO: 619 - RNA, 22 nt, Artificial Sequence
  RPE65 RNA guide
gccaagacgaaaagauaauaaa

SEQ ID NO: 620 - RNA, 22 nt, Artificial Sequence
  RPE65 RNA guide
gccaagacgaaaagauaauaau

SEQ ID NO: 621 - RNA, 20 nt, Artificial Sequence
  RPE65 RNA guide
aaagaggcaaaucuacgaua

SEQ ID NO: 622 - RNA, 20 nt, Artificial Sequence
  RPE65 RNA guide
aaaggaaagaggcaaaucua

SEQ ID NO: 623 - RNA, 20 nt, Artificial Sequence
  RPE65 RNA guide
aaauguuaucguagauuugc

SEQ ID NO: 624 - RNA, 20 nt, Artificial Sequence
  RPE65 RNA guide
aagaaaggaaagaggcaaau

SEQ ID NO: 625 - RNA, 20 nt, Artificial Sequence
  RPE65 RNA guide
aagaggcaaaucuacgauaa

SEQ ID NO: 626 - RNA, 20 nt, Artificial Sequence
  RPE65 RNA guide
aaggaaagaggcaaaucuac

SEQ ID NO: 627 - RNA, 20 nt, Artificial Sequence
  RPE65 RNA guide
aaugugugaagaaaggaaag

SEQ ID NO: 628 - RNA, 20 nt, Artificial Sequence
  RPE65 RNA guide
aauguuaucguagauuugcc

SEQ ID NO: 629 - RNA, 20 nt, Artificial Sequence
  RPE65 RNA guide
agaaaggaaagaggcaaauc

SEQ ID NO: 630 - RNA, 20 nt, Artificial Sequence
  RPE65 RNA guide
agaggcaaaucuacgauaac

SEQ ID NO: 631 - RNA, 20 nt, Artificial Sequence
  RPE65 RNA guide
agauuugccucuuuccuuuc

SEQ ID NO: 632 - RNA, 20 nt, Artificial Sequence
  RPE65 RNA guide
agccaaauguuaucguagau

SEQ ID NO: 633 - RNA, 20 nt, Artificial Sequence
  RPE65 RNA guide
aggaaagaggcaaaucuacg

SEQ ID NO: 634 - RNA, 20 nt, Artificial Sequence
  RPE65 RNA guide
aggcaaaucuacgauaacau

SEQ ID NO: 635 - RNA, 20 nt, Artificial Sequence
  RPE65 RNA guide
aucguagauuugccucuuuc

SEQ ID NO: 636 - RNA, 20 nt, Artificial Sequence
  RPE65 RNA guide
augugugaagaaaggaaaga

SEQ ID NO: 637 - RNA, 20 nt, Artificial Sequence
  RPE65 RNA guide
auguuaucguagauuugccu

SEQ ID NO: 638 - RNA, 20 nt, Artificial Sequence
  RPE65 RNA guide
auuugccucuuuccuuucuu

SEQ ID NO: 639 - RNA, 20 nt, Artificial Sequence
  RPE65 RNA guide
caaauguuaucguagauuug

SEQ ID NO: 640 - RNA, 20 nt, Artificial Sequence
  RPE65 RNA guide
ccaaauguuaucguagauuu

SEQ ID NO: 641 - RNA, 20 nt, Artificial Sequence
  RPE65 RNA guide
cguagauuugccucuuuccu

SEQ ID NO: 642 - RNA, 20 nt, Artificial Sequence
  RPE65 RNA guide
gaaagaggcaaaucuacgau

SEQ ID NO: 643 - RNA, 20 nt, Artificial Sequence
  RPE65 RNA guide
gaaaggaaagaggcaaaucu

SEQ ID NO: 644 - RNA, 20 nt, Artificial Sequence
  RPE65 RNA guide
gaagaaaggaaagaggcaaa

SEQ ID NO: 645 - RNA, 20 nt, Artificial Sequence
  RPE65 RNA guide
gaggcaaaucuacgauaaca

SEQ ID NO: 646 - RNA, 20 nt, Artificial Sequence
  RPE65 RNA guide
gauuugccucuuuccuuucu

SEQ ID NO: 647 - RNA, 20 nt, Artificial Sequence
  RPE65 RNA guide
gcaaaucuacgauaacauuu

SEQ ID NO: 648 - RNA, 20 nt, Artificial Sequence
  RPE65 RNA guide
gccaaauguuaucguagauu

SEQ ID NO: 649 - RNA, 20 nt, Artificial Sequence
  RPE65 RNA guide
ggaaagaggcaaaucuacga

SEQ ID NO: 650 - RNA, 20 nt, Artificial Sequence
  RPE65 RNA guide
ggcaaaucuacgauaacauu

SEQ ID NO: 651 - RNA, 20 nt, Artificial Sequence
  RPE65 RNA guide
guagauuugccucuuuccuu

SEQ ID NO: 652 - RNA, 20 nt, Artificial Sequence
  RPE65 RNA guide
gugaagaaaggaaagaggca

SEQ ID NO: 653 - RNA, 20 nt, Artificial Sequence
  RPE65 RNA guide
gugugaagaaaggaaagagg

SEQ ID NO: 654 - RNA, 20 nt, Artificial Sequence
  RPE65 RNA guide
guuaucguagauuugccucu

SEQ ID NO: 655 - RNA, 20 nt, Artificial Sequence
  RPE65 RNA guide
uagauuugccucuuuccuuu

SEQ ID NO: 656 - RNA, 20 nt, Artificial Sequence
  RPE65 RNA guide
uagccaaauguuaucguaga

SEQ ID NO: 657 - RNA, 20 nt, Artificial Sequence
  RPE65 RNA guide
uaucguagauuugccucuuu

SEQ ID NO: 658 - RNA, 20 nt, Artificial Sequence
  RPE65 RNA guide
ucguagauuugccucuuucc

SEQ ID NO: 659 - RNA, 20 nt, Artificial Sequence
  RPE65 RNA guide
ugaagaaaggaaagaggcaa

SEQ ID NO: 660 - RNA, 20 nt, Artificial Sequence
  RPE65 RNA guide
ugccucuuuccuuucuucac

SEQ ID NO: 661 - RNA, 20 nt, Artificial Sequence
  RPE65 RNA guide
ugugaagaaaggaaagaggc

SEQ ID NO: 662 - RNA, 20 nt, Artificial Sequence
  RPE65 RNA guide
ugugugaagaaaggaaagag

SEQ ID NO: 663 - RNA, 20 nt, Artificial Sequence
  RPE65 RNA guide
uguuaucguagauuugccuc

SEQ ID NO: 664 - RNA, 20 nt, Artificial Sequence
  RPE65 RNA guide
uuaucguagauuugccucuu

SEQ ID NO: 665 - RNA, 20 nt, Artificial Sequence
  RPE65 RNA guide
uugccucuuuccuuucuuca

SEQ ID NO: 666 - RNA, 20 nt, Artificial Sequence
  RPE65 RNA guide
uuugccucuuuccuuucuuc

SEQ ID NO: 667 - RNA, 21 nt, Artificial Sequence
  RPE65 RNA guide
aaagaggcaaaucuacgauaa

SEQ ID NO: 668 - RNA, 21 nt, Artificial Sequence
  RPE65 RNA guide
aaaggaaagaggcaaaucuac

SEQ ID NO: 669 - RNA, 21 nt, Artificial Sequence
  RPE65 RNA guide
aaauguuaucguagauuugcc

SEQ ID NO: 670 - RNA, 21 nt, Artificial Sequence
  RPE65 RNA guide
aagaaaggaaagaggcaaauc

SEQ ID NO: 671 - RNA, 21 nt, Artificial Sequence
  RPE65 RNA guide
aagaggcaaaucuacgauaac

SEQ ID NO: 672 - RNA, 21 nt, Artificial Sequence
  RPE65 RNA guide
aaggaaagaggcaaaucuacg

SEQ ID NO: 673 - RNA, 21 nt, Artificial Sequence
  RPE65 RNA guide
aaugugugaagaaaggaaaga

SEQ ID NO: 674 - RNA, 21 nt, Artificial Sequence
  RPE65 RNA guide
aauguuaucguagauuugccu

SEQ ID NO: 675 - RNA, 21 nt, Artificial Sequence
  RPE65 RNA guide
agaaaggaaagaggcaaaucu

SEQ ID NO: 676 - RNA, 21 nt, Artificial Sequence
  RPE65 RNA guide
agaggcaaaucuacgauaaca

SEQ ID NO: 677 - RNA, 21 nt, Artificial Sequence
  RPE65 RNA guide
agauuugccucuuuccuuucu

SEQ ID NO: 678 - RNA, 21 nt, Artificial Sequence
  RPE65 RNA guide
agccaaauguuaucguagauu

SEQ ID NO: 679 - RNA, 21 nt, Artificial Sequence
  RPE65 RNA guide
aggaaagaggcaaaucuacga

SEQ ID NO: 680 - RNA, 21 nt, Artificial Sequence
  RPE65 RNA guide
aggcaaaucuacgauaacauu

SEQ ID NO: 681 - RNA, 21 nt, Artificial Sequence
  RPE65 RNA guide
aucguagauuugccucuuucc

SEQ ID NO: 682 - RNA, 21 nt, Artificial Sequence
  RPE65 RNA guide
augugugaagaaaggaaagag

SEQ ID NO: 683 - RNA, 21 nt, Artificial Sequence
  RPE65 RNA guide
auguuaucguagauuugccuc

SEQ ID NO: 684 - RNA, 21 nt, Artificial Sequence
  RPE65 RNA guide
auuugccucuuuccuuucuuc

SEQ ID NO: 685 - RNA, 21 nt, Artificial Sequence
  RPE65 RNA guide
caaauguuaucguagauuugc

SEQ ID NO: 686 - RNA, 21 nt, Artificial Sequence
  RPE65 RNA guide
caaugugugaagaaaggaaag

SEQ ID NO: 687 - RNA, 21 nt, Artificial Sequence
  RPE65 RNA guide
ccaaauguuaucguagauuug

SEQ ID NO: 688 - RNA, 21 nt, Artificial Sequence
  RPE65 RNA guide
cguagauuugccucuuuccuu

SEQ ID NO: 689 - RNA, 21 nt, Artificial Sequence
  RPE65 RNA guide
gaaagaggcaaaucuacgaua

SEQ ID NO: 690 - RNA, 21 nt, Artificial Sequence
  RPE65 RNA guide
gaaaggaaagaggcaaaucua

SEQ ID NO: 691 - RNA, 21 nt, Artificial Sequence
  RPE65 RNA guide
gaagaaaggaaagaggcaaau

SEQ ID NO: 692 - RNA, 21 nt, Artificial Sequence
  RPE65 RNA guide
gaggcaaaucuacgauaacau

SEQ ID NO: 693 - RNA, 21 nt, Artificial Sequence
  RPE65 RNA guide
gauuugccucuuuccuuucuu

SEQ ID NO: 694 - RNA, 21 nt, Artificial Sequence
  RPE65 RNA guide
gcaaaucuacgauaacauuug

SEQ ID NO: 695 - RNA, 21 nt, Artificial Sequence
  RPE65 RNA guide
gccaaauguuaucguagauuu

SEQ ID NO: 696 - RNA, 21 nt, Artificial Sequence
  RPE65 RNA guide
ggaaagaggcaaaucuacgau

SEQ ID NO: 697 - RNA, 21 nt, Artificial Sequence
  RPE65 RNA guide
ggcaaaucuacgauaacauuu

SEQ ID NO: 698 - RNA, 21 nt, Artificial Sequence
  RPE65 RNA guide
guagauuugccucuuuccuuu

SEQ ID NO: 699 - RNA, 21 nt, Artificial Sequence
  RPE65 RNA guide
gugaagaaaggaaagaggcaa

SEQ ID NO: 700 - RNA, 21 nt, Artificial Sequence
  RPE65 RNA guide
gugugaagaaaggaaagaggc

SEQ ID NO: 701 - RNA, 21 nt, Artificial Sequence
  RPE65 RNA guide
guuaucguagauuugccucuu

SEQ ID NO: 702 - RNA, 21 nt, Artificial Sequence
  RPE65 RNA guide
uagauuugccucuuuccuuuc

SEQ ID NO: 703 - RNA, 21 nt, Artificial Sequence
  RPE65 RNA guide
uagccaaauguuaucguagau

SEQ ID NO: 704 - RNA, 21 nt, Artificial Sequence
  RPE65 RNA guide
uaucguagauuugccucuuuc

SEQ ID NO: 705 - RNA, 21 nt, Artificial Sequence
  RPE65 RNA guide
ucguagauuugccucuuuccu

SEQ ID NO: 706 - RNA, 21 nt, Artificial Sequence
  RPE65 RNA guide
ugaagaaaggaaagaggcaaa

SEQ ID NO: 707 - RNA, 21 nt, Artificial Sequence
  RPE65 RNA guide
ugccucuuuccuuucuucaca

SEQ ID NO: 708 - RNA, 21 nt, Artificial Sequence
  RPE65 RNA guide
ugugaagaaaggaaagaggca

SEQ ID NO: 709 - RNA, 21 nt, Artificial Sequence
  RPE65 RNA guide
ugugugaagaaaggaaagagg

SEQ ID NO: 710 - RNA, 21 nt, Artificial Sequence
  RPE65 RNA guide
uguuaucguagauuugccucu

SEQ ID NO: 711 - RNA, 21 nt, Artificial Sequence
  RPE65 RNA guide
uuagccaaauguuaucguaga

SEQ ID NO: 712 - RNA, 21 nt, Artificial Sequence
  RPE65 RNA guide
uuaucguagauuugccucuuu

SEQ ID NO: 713 - RNA, 21 nt, Artificial Sequence
  RPE65 RNA guide
uugccucuuuccuuucuucac

SEQ ID NO: 714 - RNA, 21 nt, Artificial Sequence
  RPE65 RNA guide
uuugccucuuuccuuucuuca

SEQ ID NO: 715 - RNA, 22 nt, Artificial Sequence
  RPE65 RNA guide
aaagaggcaaaucuacgauaac

SEQ ID NO: 716 - RNA, 22 nt, Artificial Sequence
  RPE65 RNA guide
aaaggaaagaggcaaaucuacg

SEQ ID NO: 717 - RNA, 22 nt, Artificial Sequence
  RPE65 RNA guide
aaauguuaucguagauuugccu

SEQ ID NO: 718 - RNA, 22 nt, Artificial Sequence
  RPE65 RNA guide
aagaaaggaaagaggcaaaucu

SEQ ID NO: 719 - RNA, 22 nt, Artificial Sequence
  RPE65 RNA guide
aagaggcaaaucuacgauaaca

SEQ ID NO: 720 - RNA, 22 nt, Artificial Sequence
  RPE65 RNA guide
aaggaaagaggcaaaucuacga

SEQ ID NO: 721 - RNA, 22 nt, Artificial Sequence
  RPE65 RNA guide
aaugugugaagaaaggaaagag

SEQ ID NO: 722 - RNA, 22 nt, Artificial Sequence
  RPE65 RNA guide
aauguuaucguagauuugccuc

SEQ ID NO: 723 - RNA, 22 nt, Artificial Sequence
  RPE65 RNA guide
agaaaggaaagaggcaaaucua

SEQ ID NO: 724 - RNA, 22 nt, Artificial Sequence
  RPE65 RNA guide
agaggcaaaucuacgauaacau

SEQ ID NO: 725 - RNA, 22 nt, Artificial Sequence
  RPE65 RNA guide
agauuugccucuuuccuuucuu

SEQ ID NO: 726 - RNA, 22 nt, Artificial Sequence
  RPE65 RNA guide
agccaaauguuaucguagauuu

SEQ ID NO: 727 - RNA, 22 nt, Artificial Sequence
  RPE65 RNA guide
aggaaagaggcaaaucuacgau

SEQ ID NO: 728 - RNA, 22 nt, Artificial Sequence
  RPE65 RNA guide
aggcaaaucuacgauaacauuu

SEQ ID NO: 729 - RNA, 22 nt, Artificial Sequence
  RPE65 RNA guide
aucguagauuugccucuuuccu

SEQ ID NO: 730 - RNA, 22 nt, Artificial Sequence
  RPE65 RNA guide
augugugaagaaaggaaagagg

SEQ ID NO: 731 - RNA, 22 nt, Artificial Sequence
  RPE65 RNA guide
auguuaucguagauuugccucu

SEQ ID NO: 732 - RNA, 22 nt, Artificial Sequence
  RPE65 RNA guide
auuagccaaauguuaucguaga

SEQ ID NO: 733 - RNA, 22 nt, Artificial Sequence
  RPE65 RNA guide
auuugccucuuuccuuucuuca

SEQ ID NO: 734 - RNA, 22 nt, Artificial Sequence
  RPE65 RNA guide
caaauguuaucguagauuugcc

SEQ ID NO: 735 - RNA, 22 nt, Artificial Sequence
  RPE65 RNA guide
caaugugugaagaaaggaaaga

SEQ ID NO: 736 - RNA, 22 nt, Artificial Sequence
  RPE65 RNA guide
ccaaauguuaucguagauuugc

SEQ ID NO: 737 - RNA, 22 nt, Artificial Sequence
  RPE65 RNA guide
ccaaugugugaagaaaggaaag

SEQ ID NO: 738 - RNA, 22 nt, Artificial Sequence
  RPE65 RNA guide
cguagauuugccucuuuccuuu

SEQ ID NO: 739 - RNA, 22 nt, Artificial Sequence
  RPE65 RNA guide
gaaagaggcaaaucuacgauaa

SEQ ID NO: 740 - RNA, 22 nt, Artificial Sequence
  RPE65 RNA guide
gaaaggaaagaggcaaaucuac

SEQ ID NO: 741 - RNA, 22 nt, Artificial Sequence
  RPE65 RNA guide
gaagaaaggaaagaggcaaauc

SEQ ID NO: 742 - RNA, 22 nt, Artificial Sequence
  RPE65 RNA guide
gaggcaaaucuacgauaacauu

SEQ ID NO: 743 - RNA, 22 nt, Artificial Sequence
  RPE65 RNA guide
gauuugccucuuuccuuucuuc

SEQ ID NO: 744 - RNA, 22 nt, Artificial Sequence
  RPE65 RNA guide
gcaaaucuacgauaacauuugg

SEQ ID NO: 745 - RNA, 22 nt, Artificial Sequence
  RPE65 RNA guide
gccaaauguuaucguagauuug

SEQ ID NO: 746 - RNA, 22 nt, Artificial Sequence
  RPE65 RNA guide
ggaaagaggcaaaucuacgaua

SEQ ID NO: 747 - RNA, 22 nt, Artificial Sequence
  RPE65 RNA guide
ggcaaaucuacgauaacauuug

SEQ ID NO: 748 - RNA, 22 nt, Artificial Sequence
  RPE65 RNA guide
guagauuugccucuuuccuuuc

SEQ ID NO: 749 - RNA, 22 nt, Artificial Sequence
  RPE65 RNA guide
gugaagaaaggaaagaggcaaa

SEQ ID NO: 750 - RNA, 22 nt, Artificial Sequence
  RPE65 RNA guide
gugugaagaaaggaaagaggca

SEQ ID NO: 751 - RNA, 22 nt, Artificial Sequence
  RPE65 RNA guide
guuaucguagauuugccucuuu

SEQ ID NO: 752 - RNA, 22 nt, Artificial Sequence
  RPE65 RNA guide
uagauuugccucuuuccuuucu

SEQ ID NO: 753 - RNA, 22 nt, Artificial Sequence
  RPE65 RNA guide
uagccaaauguuaucguagauu

SEQ ID NO: 754 - RNA, 22 nt, Artificial Sequence
  RPE65 RNA guide
uaucguagauuugccucuuucc

SEQ ID NO: 755 - RNA, 22 nt, Artificial Sequence
  RPE65 RNA guide
ucguagauuugccucuuuccuu

SEQ ID NO: 756 - RNA, 22 nt, Artificial Sequence
  RPE65 RNA guide
ugaagaaaggaaagaggcaaau

SEQ ID NO: 757 - RNA, 22 nt, Artificial Sequence
  RPE65 RNA guide
ugccucuuuccuuucuucacac

SEQ ID NO: 758 - RNA, 22 nt, Artificial Sequence
  RPE65 RNA guide
ugugaagaaaggaaagaggcaa

SEQ ID NO: 759 - RNA, 22 nt, Artificial Sequence
  RPE65 RNA guide
ugugugaagaaaggaaagaggc

SEQ ID NO: 760 - RNA, 22 nt, Artificial Sequence
  RPE65 RNA guide
uguuaucguagauuugccucuu

SEQ ID NO: 761 - RNA, 22 nt, Artificial Sequence
  RPE65 RNA guide
uuagccaaauguuaucguagau

SEQ ID NO: 762 - RNA, 22 nt, Artificial Sequence
  RPE65 RNA guide
uuaucguagauuugccucuuuc

SEQ ID NO: 763 - RNA, 22 nt, Artificial Sequence
  RPE65 RNA guide
uugccucuuuccuuucuucaca

SEQ ID NO: 764 - RNA, 22 nt, Artificial Sequence
  RPE65 RNA guide
uuugccucuuuccuuucuucac

SEQ ID NO: 765 - RNA, 20 nt, Artificial Sequence
  RPE65 RNA guide
aaagagguaaaucuacgaua

SEQ ID NO: 766 - RNA, 20 nt, Artificial Sequence
  RPE65 RNA guide
aaaggaaagagguaaaucua

SEQ ID NO: 767 - RNA, 20 nt, Artificial Sequence
  RPE65 RNA guide
aagaaaggaaagagguaaau

SEQ ID NO: 768 - RNA, 20 nt, Artificial Sequence
  RPE65 RNA guide
aagagguaaaucuacgauaa

SEQ ID NO: 769 - RNA, 20 nt, Artificial Sequence
  RPE65 RNA guide
aaggaaagagguaaaucuac

SEQ ID NO: 770 - RNA, 20 nt, Artificial Sequence
  RPE65 RNA guide
aauguuaucguagauuuacc

SEQ ID NO: 771 - RNA, 20 nt, Artificial Sequence
  RPE65 RNA guide
agaaaggaaagagguaaauc

SEQ ID NO: 772 - RNA, 20 nt, Artificial Sequence
  RPE65 RNA guide
agagguaaaucuacgauaac

SEQ ID NO: 773 - RNA, 20 nt, Artificial Sequence
  RPE65 RNA guide
agauuuaccucuuuccuuuc

SEQ ID NO: 774 - RNA, 20 nt, Artificial Sequence
  RPE65 RNA guide
aggaaagagguaaaucuacg

SEQ ID NO: 775 - RNA, 20 nt, Artificial Sequence
  RPE65 RNA guide
agguaaaucuacgauaacau

SEQ ID NO: 776 - RNA, 20 nt, Artificial Sequence
  RPE65 RNA guide
aucguagauuuaccucuuuc

SEQ ID NO: 777 - RNA, 20 nt, Artificial Sequence
  RPE65 RNA guide
auguuaucguagauuuaccu

SEQ ID NO: 778 - RNA, 20 nt, Artificial Sequence
  RPE65 RNA guide
auuuaccucuuuccuuucuu

SEQ ID NO: 779 - RNA, 20 nt, Artificial Sequence
  RPE65 RNA guide
cguagauuuaccucuuuccu

SEQ ID NO: 780 - RNA, 20 nt, Artificial Sequence
  RPE65 RNA guide
gaaagagguaaaucuacgau

SEQ ID NO: 781 - RNA, 20 nt, Artificial Sequence
  RPE65 RNA guide
gaaaggaaagagguaaaucu

SEQ ID NO: 782 - RNA, 20 nt, Artificial Sequence
  RPE65 RNA guide
gaagaaaggaaagagguaaa

SEQ ID NO: 783 - RNA, 20 nt, Artificial Sequence
  RPE65 RNA guide
gagguaaaucuacgauaaca

SEQ ID NO: 784 - RNA, 20 nt, Artificial Sequence
  RPE65 RNA guide
gauuuaccucuuuccuuucu

SEQ ID NO: 785 - RNA, 20 nt, Artificial Sequence
  RPE65 RNA guide
ggaaagagguaaaucuacga

SEQ ID NO: 786 - RNA, 20 nt, Artificial Sequence
  RPE65 RNA guide
gguaaaucuacgauaacauu

SEQ ID NO: 787 - RNA, 20 nt, Artificial Sequence
  RPE65 RNA guide
guagauuuaccucuuuccuu

SEQ ID NO: 788 - RNA, 20 nt, Artificial Sequence
  RPE65 RNA guide
gugaagaaaggaaagaggua

SEQ ID NO: 789 - RNA, 20 nt, Artificial Sequence
  RPE65 RNA guide
guuaucguagauuuaccucu

SEQ ID NO: 790 - RNA, 20 nt, Artificial Sequence
  RPE65 RNA guide
uaccucuuuccuuucuucac

SEQ ID NO: 791 - RNA, 20 nt, Artificial Sequence
  RPE65 RNA guide
uagauuuaccucuuuccuuu

SEQ ID NO: 792 - RNA, 20 nt, Artificial Sequence
  RPE65 RNA guide
uaucguagauuuaccucuuu

SEQ ID NO: 793 - RNA, 20 nt, Artificial Sequence
  RPE65 RNA guide
ucguagauuuaccucuuucc

SEQ ID NO: 794 - RNA, 20 nt, Artificial Sequence
  RPE65 RNA guide
ugaagaaaggaaagagguaa

SEQ ID NO: 795 - RNA, 20 nt, Artificial Sequence
  RPE65 RNA guide
ugugaagaaaggaaagaggu

SEQ ID NO: 796 - RNA, 20 nt, Artificial Sequence
  RPE65 RNA guide
uguuaucguagauuuaccuc

SEQ ID NO: 797 - RNA, 20 nt, Artificial Sequence
  RPE65 RNA guide
uuaccucuuuccuuucuuca

SEQ ID NO: 798 - RNA, 20 nt, Artificial Sequence
  RPE65 RNA guide
uuaucguagauuuaccucuu

SEQ ID NO: 799 - RNA, 20 nt, Artificial Sequence
  RPE65 RNA guide
uuuaccucuuuccuuucuuc

SEQ ID NO: 800 - RNA, 21 nt, Artificial Sequence
  RPE65 RNA guide
aaaggaaagagguaaaucuac

SEQ ID NO: 801 - RNA, 21 nt, Artificial Sequence
  RPE65 RNA guide
aagaaaggaaagagguaaauc

SEQ ID NO: 802 - RNA, 21 nt, Artificial Sequence
  RPE65 RNA guide
aagagguaaaucuacgauaac

SEQ ID NO: 803 - RNA, 21 nt, Artificial Sequence
  RPE65 RNA guide
aaggaaagagguaaaucuacg

SEQ ID NO: 804 - RNA, 21 nt, Artificial Sequence
  RPE65 RNA guide
agaaaggaaagagguaaaucu

SEQ ID NO: 805 - RNA, 21 nt, Artificial Sequence
  RPE65 RNA guide
agagguaaaucuacgauaaca

SEQ ID NO: 806 - RNA, 21 nt, Artificial Sequence
  RPE65 RNA guide
agauuuaccucuuuccuuucu

SEQ ID NO: 807 - RNA, 21 nt, Artificial Sequence
  RPE65 RNA guide
aggaaagagguaaaucuacga

SEQ ID NO: 808 - RNA, 21 nt, Artificial Sequence
  RPE65 RNA guide
aucguagauuuaccucuuucc

SEQ ID NO: 809 - RNA, 21 nt, Artificial Sequence
  RPE65 RNA guide
auguuaucguagauuuaccuc

SEQ ID NO: 810 - RNA, 21 nt, Artificial Sequence
  RPE65 RNA guide
auuuaccucuuuccuuucuuc

SEQ ID NO: 811 - RNA, 21 nt, Artificial Sequence
  RPE65 RNA guide
cguagauuuaccucuuuccuu

SEQ ID NO: 812 - RNA, 21 nt, Artificial Sequence
  RPE65 RNA guide
gaaagagguaaaucuacgaua

SEQ ID NO: 813 - RNA, 21 nt, Artificial Sequence
  RPE65 RNA guide
gaaaggaaagagguaaaucua

SEQ ID NO: 814 - RNA, 21 nt, Artificial Sequence
  RPE65 RNA guide
gaagaaaggaaagagguaaau

SEQ ID NO: 815 - RNA, 21 nt, Artificial Sequence
  RPE65 RNA guide
gagguaaaucuacgauaacau

SEQ ID NO: 816 - RNA, 21 nt, Artificial Sequence
  RPE65 RNA guide
gauuuaccucuuuccuuucuu

SEQ ID NO: 817 - RNA, 21 nt, Artificial Sequence
  RPE65 RNA guide
ggaaagagguaaaucuacgau

SEQ ID NO: 818 - RNA, 21 nt, Artificial Sequence
  RPE65 RNA guide
guagauuuaccucuuuccuuu

SEQ ID NO: 819 - RNA, 21 nt, Artificial Sequence
  RPE65 RNA guide
gugaagaaaggaaagagguaa

SEQ ID NO: 820 - RNA, 21 nt, Artificial Sequence
  RPE65 RNA guide
gugugaagaaaggaaagaggu

SEQ ID NO: 821 - RNA, 21 nt, Artificial Sequence
  RPE65 RNA guide
guuaucguagauuuaccucuu

SEQ ID NO: 822 - RNA, 21 nt, Artificial Sequence
  RPE65 RNA guide
uaccucuuuccuuucuucaca

SEQ ID NO: 823 - RNA, 21 nt, Artificial Sequence
  RPE65 RNA guide
uagauuuaccucuuuccuuuc

SEQ ID NO: 824 - RNA, 21 nt, Artificial Sequence
  RPE65 RNA guide
uaucguagauuuaccucuuuc

SEQ ID NO: 825 - RNA, 21 nt, Artificial Sequence
  RPE65 RNA guide
ucguagauuuaccucuuuccu

SEQ ID NO: 826 - RNA, 21 nt, Artificial Sequence
  RPE65 RNA guide
ugaagaaaggaaagagguaaa

SEQ ID NO: 827 - RNA, 21 nt, Artificial Sequence
  RPE65 RNA guide
ugugaagaaaggaaagaggua

SEQ ID NO: 828 - RNA, 21 nt, Artificial Sequence
  RPE65 RNA guide
uguuaucguagauuuaccucu

SEQ ID NO: 829 - RNA, 21 nt, Artificial Sequence
  RPE65 RNA guide
uuaccucuuuccuuucuucac

SEQ ID NO: 830 - RNA, 21 nt, Artificial Sequence
  RPE65 RNA guide
uuuaccucuuuccuuucuuca

SEQ ID NO: 831 - RNA, 22 nt, Artificial Sequence
  RPE65 RNA guide
aaagagguaaaucuacgauaac

SEQ ID NO: 832 - RNA, 22 nt, Artificial Sequence
  RPE65 RNA guide
aaaggaaagagguaaaucuacg

SEQ ID NO: 833 - RNA, 22 nt, Artificial Sequence
  RPE65 RNA guide
aagaaaggaaagagguaaaucu

SEQ ID NO: 834 - RNA, 22 nt, Artificial Sequence
  RPE65 RNA guide
aagagguaaaucuacgauaaca

SEQ ID NO: 835 - RNA, 22 nt, Artificial Sequence
  RPE65 RNA guide
aaggaaagagguaaaucuacga

SEQ ID NO: 836 - RNA, 22 nt, Artificial Sequence
  RPE65 RNA guide
aauguuaucguagauuuaccuc

SEQ ID NO: 837 - RNA, 22 nt, Artificial Sequence
  RPE65 RNA guide
agaaaggaaagagguaaaucua

SEQ ID NO: 838 - RNA, 22 nt, Artificial Sequence
  RPE65 RNA guide
agagguaaaucuacgauaacau

SEQ ID NO: 839 - RNA, 22 nt, Artificial Sequence
  RPE65 RNA guide
agauuuaccucuuuccuuucuu

SEQ ID NO: 840 - RNA, 22 nt, Artificial Sequence
  RPE65 RNA guide
aggaaagagguaaaucuacgau

SEQ ID NO: 841 - RNA, 22 nt, Artificial Sequence
  RPE65 RNA guide
aucguagauuuaccucuuuccu

SEQ ID NO: 842 - RNA, 22 nt, Artificial Sequence
  RPE65 RNA guide
auguuaucguagauuuaccucu

SEQ ID NO: 843 - RNA, 22 nt, Artificial Sequence
  RPE65 RNA guide
auuuaccucuuuccuuucuuca

SEQ ID NO: 844 - RNA, 22 nt, Artificial Sequence
  RPE65 RNA guide
caaauguuaucguagauuuacc

SEQ ID NO: 845 - RNA, 22 nt, Artificial Sequence
  RPE65 RNA guide
ccaaauguuaucguagauuuac

SEQ ID NO: 846 - RNA, 22 nt, Artificial Sequence
  RPE65 RNA guide
cguagauuuaccucuuuccuuu

SEQ ID NO: 847 - RNA, 22 nt, Artificial Sequence
  RPE65 RNA guide
gaaagagguaaaucuacgauaa

SEQ ID NO: 848 - RNA, 22 nt, Artificial Sequence
  RPE65 RNA guide
gaaaggaaagagguaaaucuac

SEQ ID NO: 849 - RNA, 22 nt, Artificial Sequence
  RPE65 RNA guide
gaagaaaggaaagagguaaauc

SEQ ID NO: 850 - RNA, 22 nt, Artificial Sequence
  RPE65 RNA guide
gagguaaaucuacgauaacauu

SEQ ID NO: 851 - RNA, 22 nt, Artificial Sequence
  RPE65 RNA guide
gauuuaccucuuuccuuucuuc

SEQ ID NO: 852 - RNA, 22 nt, Artificial Sequence
  RPE65 RNA guide
gccaaauguuaucguagauuua

SEQ ID NO: 853 - RNA, 22 nt, Artificial Sequence
  RPE65 RNA guide
ggaaagagguaaaucuacgaua

SEQ ID NO: 854 - RNA, 22 nt, Artificial Sequence
  RPE65 RNA guide
gguaaaucuacgauaacauuug

SEQ ID NO: 855 - RNA, 22 nt, Artificial Sequence
  RPE65 RNA guide
guaaaucuacgauaacauuugg

SEQ ID NO: 856 - RNA, 22 nt, Artificial Sequence
  RPE65 RNA guide
guagauuuaccucuuuccuuuc

SEQ ID NO: 857 - RNA, 22 nt, Artificial Sequence
  RPE65 RNA guide
gugaagaaaggaaagagguaaa

SEQ ID NO: 858 - RNA, 22 nt, Artificial Sequence
  RPE65 RNA guide
gugugaagaaaggaaagaggua

SEQ ID NO: 859 - RNA, 22 nt, Artificial Sequence
  RPE65 RNA guide
guuaucguagauuuaccucuuu

SEQ ID NO: 860 - RNA, 22 nt, Artificial Sequence
  RPE65 RNA guide
uaccucuuuccuuucuucacac

SEQ ID NO: 861 - RNA, 22 nt, Artificial Sequence
  RPE65 RNA guide
uagauuuaccucuuuccuuucu

SEQ ID NO: 862 - RNA, 22 nt, Artificial Sequence
  RPE65 RNA guide
uaucguagauuuaccucuuucc

SEQ ID NO: 863 - RNA, 22 nt, Artificial Sequence
  RPE65 RNA guide
ucguagauuuaccucuuuccuu

SEQ ID NO: 864 - RNA, 22 nt, Artificial Sequence
  RPE65 RNA guide
ugaagaaaggaaagagguaaau

SEQ ID NO: 865 - RNA, 22 nt, Artificial Sequence
  RPE65 RNA guide
ugugaagaaaggaaagagguaa

SEQ ID NO: 866 - RNA, 22 nt, Artificial Sequence
  RPE65 RNA guide
ugugugaagaaaggaaagaggu

SEQ ID NO: 867 - RNA, 22 nt, Artificial Sequence
  RPE65 RNA guide
uguuaucguagauuuaccucuu

SEQ ID NO: 868 - RNA, 22 nt, Artificial Sequence
  RPE65 RNA guide
uuaccucuuuccuuucuucaca

SEQ ID NO: 869 - RNA, 22 nt, Artificial Sequence
  RPE65 RNA guide
uuaucguagauuuaccucuuuc

SEQ ID NO: 870 - RNA, 22 nt, Artificial Sequence
  RPE65 RNA guide
uuuaccucuuuccuuucuucac

SEQ ID NO: 871 - RNA, 20 nt, Artificial Sequence
  RPE65 RNA guide
aagcaagucucacaauucaa

SEQ ID NO: 872 - RNA, 20 nt, Artificial Sequence
  RPE65 RNA guide
aagucucacaauucaaggug

SEQ ID NO: 873 - RNA, 20 nt, Artificial Sequence
  RPE65 RNA guide
aauugugagacuugcuucau

SEQ ID NO: 874 - RNA, 20 nt, Artificial Sequence
  RPE65 RNA guide
accuugaauugugagacuug

SEQ ID NO: 875 - RNA, 20 nt, Artificial Sequence
  RPE65 RNA guide
agauauggucaccuugaauu

SEQ ID NO: 876 - RNA, 20 nt, Artificial Sequence
  RPE65 RNA guide
agcaagucucacaauucaag

SEQ ID NO: 877 - RNA, 20 nt, Artificial Sequence
  RPE65 RNA guide
agucucacaauucaagguga

SEQ ID NO: 878 - RNA, 20 nt, Artificial Sequence
  RPE65 RNA guide
auauggucaccuugaauugu

SEQ ID NO: 879 - RNA, 20 nt, Artificial Sequence
  RPE65 RNA guide
augaagcaagucucacaauu

SEQ ID NO: 880 - RNA, 20 nt, Artificial Sequence
  RPE65 RNA guide
auggucaccuugaauuguga

SEQ ID NO: 881 - RNA, 20 nt, Artificial Sequence
  RPE65 RNA guide
auugugagacuugcuucaua

SEQ ID NO: 882 - RNA, 20 nt, Artificial Sequence
  RPE65 RNA guide
caagucucacaauucaaggu

SEQ ID NO: 883 - RNA, 20 nt, Artificial Sequence
  RPE65 RNA guide
cacaauucaaggugaccaua

SEQ ID NO: 884 - RNA, 20 nt, Artificial Sequence
  RPE65 RNA guide
caccuugaauugugagacuu

SEQ ID NO: 885 - RNA, 20 nt, Artificial Sequence
  RPE65 RNA guide
cauuuuuuaugaagcaaguc

SEQ ID NO: 886 - RNA, 20 nt, Artificial Sequence
  RPE65 RNA guide
ccuugaauugugagacuugc

SEQ ID NO: 887 - RNA, 20 nt, Artificial Sequence
  RPE65 RNA guide
cucacaauucaaggugacca

SEQ ID NO: 888 - RNA, 20 nt, Artificial Sequence
  RPE65 RNA guide
cuugaauugugagacuugcu

SEQ ID NO: 889 - RNA, 20 nt, Artificial Sequence
  RPE65 RNA guide
gaagcaagucucacaauuca

SEQ ID NO: 890 - RNA, 20 nt, Artificial Sequence
  RPE65 RNA guide
gaauugugagacuugcuuca

SEQ ID NO: 891 - RNA, 20 nt, Artificial Sequence
  RPE65 RNA guide
gagauauggucaccuugaau

SEQ ID NO: 892 - RNA, 20 nt, Artificial Sequence
  RPE65 RNA guide
gauauggucaccuugaauug

SEQ ID NO: 893 - RNA, 20 nt, Artificial Sequence
  RPE65 RNA guide
gcaagucucacaauucaagg

SEQ ID NO: 894 - RNA, 20 nt, Artificial Sequence
  RPE65 RNA guide
ggagauauggucaccuugaa

SEQ ID NO: 895 - RNA, 20 nt, Artificial Sequence
  RPE65 RNA guide
ggucaccuugaauugugaga

SEQ ID NO: 896 - RNA, 20 nt, Artificial Sequence
  RPE65 RNA guide
gucaccuugaauugugagac

SEQ ID NO: 897 - RNA, 20 nt, Artificial Sequence
  RPE65 RNA guide
gucucacaauucaaggugac

SEQ ID NO: 898 - RNA, 20 nt, Artificial Sequence
  RPE65 RNA guide
gugagacuugcuucauaaaa

SEQ ID NO: 899 - RNA, 20 nt, Artificial Sequence
  RPE65 RNA guide
uaugaagcaagucucacaau

SEQ ID NO: 900 - RNA, 20 nt, Artificial Sequence
  RPE65 RNA guide
uauggucaccuugaauugug

SEQ ID NO: 901 - RNA, 20 nt, Artificial Sequence
  RPE65 RNA guide
ucacaauucaaggugaccau

SEQ ID NO: 902 - RNA, 20 nt, Artificial Sequence
  RPE65 RNA guide
ucaccuugaauugugagacu

SEQ ID NO: 903 - RNA, 20 nt, Artificial Sequence
  RPE65 RNA guide
ucucacaauucaaggugacc

SEQ ID NO: 904 - RNA, 20 nt, Artificial Sequence
  RPE65 RNA guide
ugaagcaagucucacaauuc

SEQ ID NO: 905 - RNA, 20 nt, Artificial Sequence
  RPE65 RNA guide
ugaauugugagacuugcuuc

SEQ ID NO: 906 - RNA, 20 nt, Artificial Sequence
  RPE65 RNA guide
uggucaccuugaauugugag

SEQ ID NO: 907 - RNA, 20 nt, Artificial Sequence
  RPE65 RNA guide
ugugagacuugcuucauaaa

SEQ ID NO: 908 - RNA, 20 nt, Artificial Sequence
  RPE65 RNA guide
uuaugaagcaagucucacaa

SEQ ID NO: 909 - RNA, 20 nt, Artificial Sequence
  RPE65 RNA guide
uugaauugugagacuugcuu

SEQ ID NO: 910 - RNA, 20 nt, Artificial Sequence
  RPE65 RNA guide
uugugagacuugcuucauaa

SEQ ID NO: 911 - RNA, 20 nt, Artificial Sequence
  RPE65 RNA guide
uuuaugaagcaagucucaca

SEQ ID NO: 912 - RNA, 20 nt, Artificial Sequence
  RPE65 RNA guide
uuuuaugaagcaagucucac

SEQ ID NO: 913 - RNA, 20 nt, Artificial Sequence
  RPE65 RNA guide
uuuuuaugaagcaagucuca

SEQ ID NO: 914 - RNA, 20 nt, Artificial Sequence
  RPE65 RNA guide
uuuuuuaugaagcaagucuc

SEQ ID NO: 915 - RNA, 21 nt, Artificial Sequence
  RPE65 RNA guide
aagcaagucucacaauucaag

SEQ ID NO: 916 - RNA, 21 nt, Artificial Sequence
  RPE65 RNA guide
aagucucacaauucaagguga

SEQ ID NO: 917 - RNA, 21 nt, Artificial Sequence
  RPE65 RNA guide
aauugugagacuugcuucaua

SEQ ID NO: 918 - RNA, 21 nt, Artificial Sequence
  RPE65 RNA guide
accuugaauugugagacuugc

SEQ ID NO: 919 - RNA, 21 nt, Artificial Sequence
  RPE65 RNA guide
agauauggucaccuugaauug

SEQ ID NO: 920 - RNA, 21 nt, Artificial Sequence
  RPE65 RNA guide
agcaagucucacaauucaagg

SEQ ID NO: 921 - RNA, 21 nt, Artificial Sequence
  RPE65 RNA guide
aggagauauggucaccuugaa

SEQ ID NO: 922 - RNA, 21 nt, Artificial Sequence
  RPE65 RNA guide
agucucacaauucaaggugac

SEQ ID NO: 923 - RNA, 21 nt, Artificial Sequence
  RPE65 RNA guide
auauggucaccuugaauugug

SEQ ID NO: 924 - RNA, 21 nt, Artificial Sequence
  RPE65 RNA guide
augaagcaagucucacaauuc

SEQ ID NO: 925 - RNA, 21 nt, Artificial Sequence
  RPE65 RNA guide
auggucaccuugaauugugag

SEQ ID NO: 926 - RNA, 21 nt, Artificial Sequence
  RPE65 RNA guide
auugugagacuugcuucauaa

SEQ ID NO: 927 - RNA, 21 nt, Artificial Sequence
  RPE65 RNA guide
caagucucacaauucaaggug

SEQ ID NO: 928 - RNA, 21 nt, Artificial Sequence
  RPE65 RNA guide
cacaauucaaggugaccauau

SEQ ID NO: 929 - RNA, 21 nt, Artificial Sequence
  RPE65 RNA guide
caccuugaauugugagacuug

SEQ ID NO: 930 - RNA, 21 nt, Artificial Sequence
  RPE65 RNA guide
ccuugaauugugagacuugcu

SEQ ID NO: 931 - RNA, 21 nt, Artificial Sequence
  RPE65 RNA guide
cucacaauucaaggugaccau

SEQ ID NO: 932 - RNA, 21 nt, Artificial Sequence
  RPE65 RNA guide
cuugaauugugagacuugcuu

SEQ ID NO: 933 - RNA, 21 nt, Artificial Sequence
  RPE65 RNA guide
gaagcaagucucacaauucaa

SEQ ID NO: 934 - RNA, 21 nt, Artificial Sequence
  RPE65 RNA guide
gaauugugagacuugcuucau

SEQ ID NO: 935 - RNA, 21 nt, Artificial Sequence
  RPE65 RNA guide
gagauauggucaccuugaauu

SEQ ID NO: 936 - RNA, 21 nt, Artificial Sequence
  RPE65 RNA guide
gauauggucaccuugaauugu

SEQ ID NO: 937 - RNA, 21 nt, Artificial Sequence
  RPE65 RNA guide
gcaagucucacaauucaaggu

SEQ ID NO: 938 - RNA, 21 nt, Artificial Sequence
  RPE65 RNA guide
ggagauauggucaccuugaau

SEQ ID NO: 939 - RNA, 21 nt, Artificial Sequence
  RPE65 RNA guide
ggucaccuugaauugugagac

SEQ ID NO: 940 - RNA, 21 nt, Artificial Sequence
  RPE65 RNA guide
gucaccuugaauugugagacu

SEQ ID NO: 941 - RNA, 21 nt, Artificial Sequence
  RPE65 RNA guide
gucucacaauucaaggugacc

SEQ ID NO: 942 - RNA, 21 nt, Artificial Sequence
  RPE65 RNA guide
gugagacuugcuucauaaaaa

SEQ ID NO: 943 - RNA, 21 nt, Artificial Sequence
  RPE65 RNA guide
uaugaagcaagucucacaauu

SEQ ID NO: 944 - RNA, 21 nt, Artificial Sequence
  RPE65 RNA guide
uauggucaccuugaauuguga

SEQ ID NO: 945 - RNA, 21 nt, Artificial Sequence
  RPE65 RNA guide
ucacaauucaaggugaccaua

SEQ ID NO: 946 - RNA, 21 nt, Artificial Sequence
  RPE65 RNA guide
ucaccuugaauugugagacuu

SEQ ID NO: 947 - RNA, 21 nt, Artificial Sequence
  RPE65 RNA guide
ucucacaauucaaggugacca

SEQ ID NO: 948 - RNA, 21 nt, Artificial Sequence
  RPE65 RNA guide
ugaagcaagucucacaauuca

SEQ ID NO: 949 - RNA, 21 nt, Artificial Sequence
  RPE65 RNA guide
ugaauugugagacuugcuuca

SEQ ID NO: 950 - RNA, 21 nt, Artificial Sequence
  RPE65 RNA guide
uggucaccuugaauugugaga

SEQ ID NO: 951 - RNA, 21 nt, Artificial Sequence
  RPE65 RNA guide
ugugagacuugcuucauaaaa

SEQ ID NO: 952 - RNA, 21 nt, Artificial Sequence
  RPE65 RNA guide
uuaugaagcaagucucacaau

SEQ ID NO: 953 - RNA, 21 nt, Artificial Sequence
  RPE65 RNA guide
uugaauugugagacuugcuuc

SEQ ID NO: 954 - RNA, 21 nt, Artificial Sequence
  RPE65 RNA guide
uugugagacuugcuucauaaa

SEQ ID NO: 955 - RNA, 21 nt, Artificial Sequence
  RPE65 RNA guide
uuuaugaagcaagucucacaa

SEQ ID NO: 956 - RNA, 21 nt, Artificial Sequence
  RPE65 RNA guide
uuuuaugaagcaagucucaca

SEQ ID NO: 957 - RNA, 21 nt, Artificial Sequence
  RPE65 RNA guide
uuuuuaugaagcaagucucac

SEQ ID NO: 958 - RNA, 22 nt, Artificial Sequence
  RPE65 RNA guide
aagcaagucucacaauucaagg

SEQ ID NO: 959 - RNA, 22 nt, Artificial Sequence
  RPE65 RNA guide
aagucucacaauucaaggugac

SEQ ID NO: 960 - RNA, 22 nt, Artificial Sequence
  RPE65 RNA guide
aauugugagacuugcuucauaa

SEQ ID NO: 961 - RNA, 22 nt, Artificial Sequence
  RPE65 RNA guide
accuugaauugugagacuugcu

SEQ ID NO: 962 - RNA, 22 nt, Artificial Sequence
  RPE65 RNA guide
agauauggucaccuugaauugu

SEQ ID NO: 963 - RNA, 22 nt, Artificial Sequence
  RPE65 RNA guide
agcaagucucacaauucaaggu

SEQ ID NO: 964 - RNA, 22 nt, Artificial Sequence
  RPE65 RNA guide
aggagauauggucaccuugaau

SEQ ID NO: 965 - RNA, 22 nt, Artificial Sequence
  RPE65 RNA guide
agucucacaauucaaggugacc

SEQ ID NO: 966 - RNA, 22 nt, Artificial Sequence
  RPE65 RNA guide
auauggucaccuugaauuguga

SEQ ID NO: 967 - RNA, 22 nt, Artificial Sequence
  RPE65 RNA guide
augaagcaagucucacaauuca

SEQ ID NO: 968 - RNA, 22 nt, Artificial Sequence
  RPE65 RNA guide
auggucaccuugaauugugaga

SEQ ID NO: 969 - RNA, 22 nt, Artificial Sequence
  RPE65 RNA guide
auugugagacuugcuucauaaa

SEQ ID NO: 970 - RNA, 22 nt, Artificial Sequence
  RPE65 RNA guide
caagucucacaauucaagguga

SEQ ID NO: 971 - RNA, 22 nt, Artificial Sequence
  RPE65 RNA guide
cacaauucaaggugaccauauc

SEQ ID NO: 972 - RNA, 22 nt, Artificial Sequence
  RPE65 RNA guide
caccuugaauugugagacuugc

SEQ ID NO: 973 - RNA, 22 nt, Artificial Sequence
  RPE65 RNA guide
cauuuuuuaugaagcaagucuc

SEQ ID NO: 974 - RNA, 22 nt, Artificial Sequence
  RPE65 RNA guide
ccuugaauugugagacuugcuu

SEQ ID NO: 975 - RNA, 22 nt, Artificial Sequence
  RPE65 RNA guide
cucacaauucaaggugaccaua

SEQ ID NO: 976 - RNA, 22 nt, Artificial Sequence
  RPE65 RNA guide
cuugaauugugagacuugcuuc

SEQ ID NO: 977 - RNA, 22 nt, Artificial Sequence
  RPE65 RNA guide
gaagcaagucucacaauucaag

SEQ ID NO: 978 - RNA, 22 nt, Artificial Sequence
  RPE65 RNA guide
gaauugugagacuugcuucaua

SEQ ID NO: 979 - RNA, 22 nt, Artificial Sequence
  RPE65 RNA guide
gagauauggucaccuugaauug

SEQ ID NO: 980 - RNA, 22 nt, Artificial Sequence
  RPE65 RNA guide
gaggagauauggucaccuugaa

SEQ ID NO: 981 - RNA, 22 nt, Artificial Sequence
  RPE65 RNA guide
gauauggucaccuugaauugug

SEQ ID NO: 982 - RNA, 22 nt, Artificial Sequence
  RPE65 RNA guide
gcaagucucacaauucaaggug

SEQ ID NO: 983 - RNA, 22 nt, Artificial Sequence
  RPE65 RNA guide
ggagauauggucaccuugaauu

SEQ ID NO: 984 - RNA, 22 nt, Artificial Sequence
  RPE65 RNA guide
ggucaccuugaauugugagacu

SEQ ID NO: 985 - RNA, 22 nt, Artificial Sequence
  RPE65 RNA guide
gucaccuugaauugugagacuu

SEQ ID NO: 986 - RNA, 22 nt, Artificial Sequence
  RPE65 RNA guide
gucucacaauucaaggugacca

SEQ ID NO: 987 - RNA, 22 nt, Artificial Sequence
  RPE65 RNA guide
gugagacuugcuucauaaaaaa

SEQ ID NO: 988 - RNA, 22 nt, Artificial Sequence
  RPE65 RNA guide
uaugaagcaagucucacaauuc

SEQ ID NO: 989 - RNA, 22 nt, Artificial Sequence
  RPE65 RNA guide
uauggucaccuugaauugugag

SEQ ID NO: 990 - RNA, 22 nt, Artificial Sequence
  RPE65 RNA guide
ucacaauucaaggugaccauau

SEQ ID NO: 991 - RNA, 22 nt, Artificial Sequence
  RPE65 RNA guide
ucaccuugaauugugagacuug

SEQ ID NO: 992 - RNA, 22 nt, Artificial Sequence
  RPE65 RNA guide
ucucacaauucaaggugaccau

SEQ ID NO: 993 - RNA, 22 nt, Artificial Sequence
  RPE65 RNA guide
ugaagcaagucucacaauucaa

SEQ ID NO: 994 - RNA, 22 nt, Artificial Sequence
  RPE65 RNA guide
ugaauugugagacuugcuucau

SEQ ID NO: 995 - RNA, 22 nt, Artificial Sequence
  RPE65 RNA guide
uggucaccuugaauugugagac

SEQ ID NO: 996 - RNA, 22 nt, Artificial Sequence
  RPE65 RNA guide
ugugagacuugcuucauaaaaa

SEQ ID NO: 997 - RNA, 22 nt, Artificial Sequence
  RPE65 RNA guide
uuaugaagcaagucucacaauu

SEQ ID NO: 998 - RNA, 22 nt, Artificial Sequence
  RPE65 RNA guide
uugaauugugagacuugcuuca

SEQ ID NO: 999 - RNA, 22 nt, Artificial Sequence
  RPE65 RNA guide
uugugagacuugcuucauaaaa

SEQ ID NO: 1000 - RNA, 22 nt, Artificial Sequence
  RPE65 RNA guide
uuuaugaagcaagucucacaau

SEQ ID NO: 1001 - RNA, 22 nt, Artificial Sequence
  RPE65 RNA guide
uuuuaugaagcaagucucacaa

SEQ ID NO: 1002 - RNA, 22 nt, Artificial Sequence
  RPE65 RNA guide
uuuuuaugaagcaagucucaca

SEQ ID NO: 1003 - RNA, 22 nt, Artificial Sequence
  RPE65 RNA guide
uuuuuuaugaagcaagucucac

SEQ ID NO: 1004 - RNA, 20 nt, Artificial Sequence
  RPE65 RNA guide
aagcaagucucgcaauucaa

SEQ ID NO: 1005 - RNA, 20 nt, Artificial Sequence
  RPE65 RNA guide
aagucucgcaauucaaggug

SEQ ID NO: 1006 - RNA, 20 nt, Artificial Sequence
  RPE65 RNA guide
aauugcgagacuugcuucau

SEQ ID NO: 1007 - RNA, 20 nt, Artificial Sequence
  RPE65 RNA guide
accuugaauugcgagacuug

SEQ ID NO: 1008 - RNA, 20 nt, Artificial Sequence
  RPE65 RNA guide
agcaagucucgcaauucaag

SEQ ID NO: 1009 - RNA, 20 nt, Artificial Sequence
  RPE65 RNA guide
agucucgcaauucaagguga

SEQ ID NO: 1010 - RNA, 20 nt, Artificial Sequence
  RPE65 RNA guide
auauggucaccuugaauugc

SEQ ID NO: 1011 - RNA, 20 nt, Artificial Sequence
  RPE65 RNA guide
augaagcaagucucgcaauu

SEQ ID NO: 1012 - RNA, 20 nt, Artificial Sequence
  RPE65 RNA guide
auggucaccuugaauugcga

SEQ ID NO: 1013 - RNA, 20 nt, Artificial Sequence
  RPE65 RNA guide
auugcgagacuugcuucaua

SEQ ID NO: 1014 - RNA, 20 nt, Artificial Sequence
  RPE65 RNA guide
caagucucgcaauucaaggu

SEQ ID NO: 1015 - RNA, 20 nt, Artificial Sequence
  RPE65 RNA guide
caccuugaauugcgagacuu

SEQ ID NO: 1016 - RNA, 20 nt, Artificial Sequence
  RPE65 RNA guide
ccuugaauugcgagacuugc

SEQ ID NO: 1017 - RNA, 20 nt, Artificial Sequence
  RPE65 RNA guide
cgcaauucaaggugaccaua

SEQ ID NO: 1018 - RNA, 20 nt, Artificial Sequence
  RPE65 RNA guide
cucgcaauucaaggugacca

SEQ ID NO: 1019 - RNA, 20 nt, Artificial Sequence
  RPE65 RNA guide
cuugaauugcgagacuugcu

SEQ ID NO: 1020 - RNA, 20 nt, Artificial Sequence
  RPE65 RNA guide
gaagcaagucucgcaauuca

SEQ ID NO: 1021 - RNA, 20 nt, Artificial Sequence
  RPE65 RNA guide
gaauugcgagacuugcuuca

SEQ ID NO: 1022 - RNA, 20 nt, Artificial Sequence
  RPE65 RNA guide
gcaagucucgcaauucaagg

SEQ ID NO: 1023 - RNA, 20 nt, Artificial Sequence
  RPE65 RNA guide
gcgagacuugcuucauaaaa

SEQ ID NO: 1024 - RNA, 20 nt, Artificial Sequence
  RPE65 RNA guide
ggucaccuugaauugcgaga

SEQ ID NO: 1025 - RNA, 20 nt, Artificial Sequence
  RPE65 RNA guide
gucaccuugaauugcgagac

SEQ ID NO: 1026 - RNA, 20 nt, Artificial Sequence
  RPE65 RNA guide
gucucgcaauucaaggugac

SEQ ID NO: 1027 - RNA, 20 nt, Artificial Sequence
  RPE65 RNA guide
uaugaagcaagucucgcaau

SEQ ID NO: 1028 - RNA, 20 nt, Artificial Sequence
  RPE65 RNA guide
uauggucaccuugaauugcg

SEQ ID NO: 1029 - RNA, 20 nt, Artificial Sequence
  RPE65 RNA guide
ucaccuugaauugcgagacu

SEQ ID NO: 1030 - RNA, 20 nt, Artificial Sequence
  RPE65 RNA guide
ucgcaauucaaggugaccau

SEQ ID NO: 1031 - RNA, 20 nt, Artificial Sequence
  RPE65 RNA guide
ucucgcaauucaaggugacc

SEQ ID NO: 1032 - RNA, 20 nt, Artificial Sequence
  RPE65 RNA guide
ugaagcaagucucgcaauuc

SEQ ID NO: 1033 - RNA, 20 nt, Artificial Sequence
  RPE65 RNA guide
ugaauugcgagacuugcuuc

SEQ ID NO: 1034 - RNA, 20 nt, Artificial Sequence
  RPE65 RNA guide
ugcgagacuugcuucauaaa

SEQ ID NO: 1035 - RNA, 20 nt, Artificial Sequence
  RPE65 RNA guide
uggucaccuugaauugcgag

SEQ ID NO: 1036 - RNA, 20 nt, Artificial Sequence
  RPE65 RNA guide
uuaugaagcaagucucgcaa

SEQ ID NO: 1037 - RNA, 20 nt, Artificial Sequence
  RPE65 RNA guide
uugaauugcgagacuugcuu

SEQ ID NO: 1038 - RNA, 20 nt, Artificial Sequence
  RPE65 RNA guide
uugcgagacuugcuucauaa

SEQ ID NO: 1039 - RNA, 20 nt, Artificial Sequence
  RPE65 RNA guide
uuuaugaagcaagucucgca

SEQ ID NO: 1040 - RNA, 20 nt, Artificial Sequence
  RPE65 RNA guide
uuuuaugaagcaagucucgc

SEQ ID NO: 1041 - RNA, 20 nt, Artificial Sequence
  RPE65 RNA guide
uuuuuaugaagcaagucucg

SEQ ID NO: 1042 - RNA, 21 nt, Artificial Sequence
  RPE65 RNA guide
aagcaagucucgcaauucaag

SEQ ID NO: 1043 - RNA, 21 nt, Artificial Sequence
  RPE65 RNA guide
aagucucgcaauucaagguga

SEQ ID NO: 1044 - RNA, 21 nt, Artificial Sequence
  RPE65 RNA guide
aauugcgagacuugcuucaua

SEQ ID NO: 1045 - RNA, 21 nt, Artificial Sequence
  RPE65 RNA guide
accuugaauugcgagacuugc

SEQ ID NO: 1046 - RNA, 21 nt, Artificial Sequence
  RPE65 RNA guide
agcaagucucgcaauucaagg

SEQ ID NO: 1047 - RNA, 21 nt, Artificial Sequence
  RPE65 RNA guide
agucucgcaauucaaggugac

SEQ ID NO: 1048 - RNA, 21 nt, Artificial Sequence
  RPE65 RNA guide
auauggucaccuugaauugcg

SEQ ID NO: 1049 - RNA, 21 nt, Artificial Sequence
  RPE65 RNA guide
augaagcaagucucgcaauuc

SEQ ID NO: 1050 - RNA, 21 nt, Artificial Sequence
  RPE65 RNA guide
auggucaccuugaauugcgag

SEQ ID NO: 1051 - RNA, 21 nt, Artificial Sequence
  RPE65 RNA guide
auugcgagacuugcuucauaa

SEQ ID NO: 1052 - RNA, 21 nt, Artificial Sequence
  RPE65 RNA guide
caagucucgcaauucaaggug

SEQ ID NO: 1053 - RNA, 21 nt, Artificial Sequence
  RPE65 RNA guide
caccuugaauugcgagacuug

SEQ ID NO: 1054 - RNA, 21 nt, Artificial Sequence
  RPE65 RNA guide
ccuugaauugcgagacuugcu

SEQ ID NO: 1055 - RNA, 21 nt, Artificial Sequence
  RPE65 RNA guide
cgcaauucaaggugaccauau

SEQ ID NO: 1056 - RNA, 21 nt, Artificial Sequence
  RPE65 RNA guide
cucgcaauucaaggugaccau

SEQ ID NO: 1057 - RNA, 21 nt, Artificial Sequence
  RPE65 RNA guide
cuugaauugcgagacuugcuu

SEQ ID NO: 1058 - RNA, 21 nt, Artificial Sequence
  RPE65 RNA guide
gaagcaagucucgcaauucaa

SEQ ID NO: 1059 - RNA, 21 nt, Artificial Sequence
  RPE65 RNA guide
gaauugcgagacuugcuucau

SEQ ID NO: 1060 - RNA, 21 nt, Artificial Sequence
  RPE65 RNA guide
gauauggucaccuugaauugc

SEQ ID NO: 1061 - RNA, 21 nt, Artificial Sequence
  RPE65 RNA guide
gcaagucucgcaauucaaggu

SEQ ID NO: 1062 - RNA, 21 nt, Artificial Sequence
  RPE65 RNA guide
gcgagacuugcuucauaaaaa

SEQ ID NO: 1063 - RNA, 21 nt, Artificial Sequence
  RPE65 RNA guide
ggucaccuugaauugcgagac

SEQ ID NO: 1064 - RNA, 21 nt, Artificial Sequence
  RPE65 RNA guide
gucaccuugaauugcgagacu

SEQ ID NO: 1065 - RNA, 21 nt, Artificial Sequence
  RPE65 RNA guide
gucucgcaauucaaggugacc

SEQ ID NO: 1066 - RNA, 21 nt, Artificial Sequence
  RPE65 RNA guide
uaugaagcaagucucgcaauu

SEQ ID NO: 1067 - RNA, 21 nt, Artificial Sequence
  RPE65 RNA guide
uauggucaccuugaauugcga

SEQ ID NO: 1068 - RNA, 21 nt, Artificial Sequence
  RPE65 RNA guide
ucaccuugaauugcgagacuu

SEQ ID NO: 1069 - RNA, 21 nt, Artificial Sequence
  RPE65 RNA guide
ucgcaauucaaggugaccaua

SEQ ID NO: 1070 - RNA, 21 nt, Artificial Sequence
  RPE65 RNA guide
ucucgcaauucaaggugacca

SEQ ID NO: 1071 - RNA, 21 nt, Artificial Sequence
  RPE65 RNA guide
ugaagcaagucucgcaauuca

SEQ ID NO: 1072 - RNA, 21 nt, Artificial Sequence
  RPE65 RNA guide
ugaauugcgagacuugcuuca

SEQ ID NO: 1073 - RNA, 21 nt, Artificial Sequence
  RPE65 RNA guide
ugcgagacuugcuucauaaaa

SEQ ID NO: 1074 - RNA, 21 nt, Artificial Sequence
  RPE65 RNA guide
uggucaccuugaauugcgaga

SEQ ID NO: 1075 - RNA, 21 nt, Artificial Sequence
  RPE65 RNA guide
uuaugaagcaagucucgcaau

SEQ ID NO: 1076 - RNA, 21 nt, Artificial Sequence
  RPE65 RNA guide
uugaauugcgagacuugcuuc

SEQ ID NO: 1077 - RNA, 21 nt, Artificial Sequence
  RPE65 RNA guide
uugcgagacuugcuucauaaa

SEQ ID NO: 1078 - RNA, 21 nt, Artificial Sequence
  RPE65 RNA guide
uuuaugaagcaagucucgcaa

SEQ ID NO: 1079 - RNA, 21 nt, Artificial Sequence
  RPE65 RNA guide
uuuuaugaagcaagucucgca

SEQ ID NO: 1080 - RNA, 21 nt, Artificial Sequence
  RPE65 RNA guide
uuuuuaugaagcaagucucgc

SEQ ID NO: 1081 - RNA, 21 nt, Artificial Sequence
  RPE65 RNA guide
uuuuuuaugaagcaagucucg

SEQ ID NO: 1082 - RNA, 22 nt, Artificial Sequence
  RPE65 RNA guide
aagcaagucucgcaauucaagg

SEQ ID NO: 1083 - RNA, 22 nt, Artificial Sequence
  RPE65 RNA guide
aagucucgcaauucaaggugac

SEQ ID NO: 1084 - RNA, 22 nt, Artificial Sequence
  RPE65 RNA guide
aauugcgagacuugcuucauaa

SEQ ID NO: 1085 - RNA, 22 nt, Artificial Sequence
  RPE65 RNA guide
accuugaauugcgagacuugcu

SEQ ID NO: 1086 - RNA, 22 nt, Artificial Sequence
  RPE65 RNA guide
agauauggucaccuugaauugc

SEQ ID NO: 1087 - RNA, 22 nt, Artificial Sequence
  RPE65 RNA guide
agcaagucucgcaauucaaggu

SEQ ID NO: 1088 - RNA, 22 nt, Artificial Sequence
  RPE65 RNA guide
agucucgcaauucaaggugacc

SEQ ID NO: 1089 - RNA, 22 nt, Artificial Sequence
  RPE65 RNA guide
auauggucaccuugaauugcga

SEQ ID NO: 1090 - RNA, 22 nt, Artificial Sequence
  RPE65 RNA guide
augaagcaagucucgcaauuca

SEQ ID NO: 1091 - RNA, 22 nt, Artificial Sequence
  RPE65 RNA guide
auggucaccuugaauugcgaga

SEQ ID NO: 1092 - RNA, 22 nt, Artificial Sequence
  RPE65 RNA guide
auugcgagacuugcuucauaaa

SEQ ID NO: 1093 - RNA, 22 nt, Artificial Sequence
  RPE65 RNA guide
auuuuuuaugaagcaagucucg

SEQ ID NO: 1094 - RNA, 22 nt, Artificial Sequence
  RPE65 RNA guide
caagucucgcaauucaagguga

SEQ ID NO: 1095 - RNA, 22 nt, Artificial Sequence
  RPE65 RNA guide
caccuugaauugcgagacuugc

SEQ ID NO: 1096 - RNA, 22 nt, Artificial Sequence
  RPE65 RNA guide
ccuugaauugcgagacuugcuu

SEQ ID NO: 1097 - RNA, 22 nt, Artificial Sequence
  RPE65 RNA guide
cgcaauucaaggugaccauauc

SEQ ID NO: 1098 - RNA, 22 nt, Artificial Sequence
  RPE65 RNA guide
cucgcaauucaaggugaccaua

SEQ ID NO: 1099 - RNA, 22 nt, Artificial Sequence
  RPE65 RNA guide
cuugaauugcgagacuugcuuc

SEQ ID NO: 1100 - RNA, 22 nt, Artificial Sequence
  RPE65 RNA guide
gaagcaagucucgcaauucaag

SEQ ID NO: 1101 - RNA, 22 nt, Artificial Sequence
  RPE65 RNA guide
gaauugcgagacuugcuucaua

SEQ ID NO: 1102 - RNA, 22 nt, Artificial Sequence
  RPE65 RNA guide
gauauggucaccuugaauugcg

SEQ ID NO: 1103 - RNA, 22 nt, Artificial Sequence
  RPE65 RNA guide
gcaagucucgcaauucaaggug

SEQ ID NO: 1104 - RNA, 22 nt, Artificial Sequence
  RPE65 RNA guide
gcgagacuugcuucauaaaaaa

SEQ ID NO: 1105 - RNA, 22 nt, Artificial Sequence
  RPE65 RNA guide
ggucaccuugaauugcgagacu

SEQ ID NO: 1106 - RNA, 22 nt, Artificial Sequence
  RPE65 RNA guide
gucaccuugaauugcgagacuu

SEQ ID NO: 1107 - RNA, 22 nt, Artificial Sequence
  RPE65 RNA guide
gucucgcaauucaaggugacca

SEQ ID NO: 1108 - RNA, 22 nt, Artificial Sequence
  RPE65 RNA guide
uaugaagcaagucucgcaauuc

SEQ ID NO: 1109 - RNA, 22 nt, Artificial Sequence
  RPE65 RNA guide
uauggucaccuugaauugcgag

SEQ ID NO: 1110 - RNA, 22 nt, Artificial Sequence
  RPE65 RNA guide
ucaccuugaauugcgagacuug

SEQ ID NO: 1111 - RNA, 22 nt, Artificial Sequence
  RPE65 RNA guide
ucgcaauucaaggugaccauau

SEQ ID NO: 1112 - RNA, 22 nt, Artificial Sequence
  RPE65 RNA guide
ucucgcaauucaaggugaccau

SEQ ID NO: 1113 - RNA, 22 nt, Artificial Sequence
  RPE65 RNA guide
ugaagcaagucucgcaauucaa

SEQ ID NO: 1114 - RNA, 22 nt, Artificial Sequence
  RPE65 RNA guide
ugaauugcgagacuugcuucau

SEQ ID NO: 1115 - RNA, 22 nt, Artificial Sequence
  RPE65 RNA guide
ugcgagacuugcuucauaaaaa

SEQ ID NO: 1116 - RNA, 22 nt, Artificial Sequence
  RPE65 RNA guide
uggucaccuugaauugcgagac

SEQ ID NO: 1117 - RNA, 22 nt, Artificial Sequence
  RPE65 RNA guide
uuaugaagcaagucucgcaauu

SEQ ID NO: 1118 - RNA, 22 nt, Artificial Sequence
  RPE65 RNA guide
uugaauugcgagacuugcuuca

SEQ ID NO: 1119 - RNA, 22 nt, Artificial Sequence
  RPE65 RNA guide
uugcgagacuugcuucauaaaa

SEQ ID NO: 1120 - RNA, 22 nt, Artificial Sequence
  RPE65 RNA guide
uuuaugaagcaagucucgcaau

SEQ ID NO: 1121 - RNA, 22 nt, Artificial Sequence
  RPE65 RNA guide
uuuuaugaagcaagucucgcaa

SEQ ID NO: 1122 - RNA, 22 nt, Artificial Sequence
  RPE65 RNA guide
uuuuuaugaagcaagucucgca

SEQ ID NO: 1123 - RNA, 22 nt, Artificial Sequence
  RPE65 RNA guide
uuuuuuaugaagcaagucucgc

SEQ ID NO: 1124 - RNA, 20 nt, Artificial Sequence
  RPE65 RNA guide
acucaguaaagcauacuuuu

SEQ ID NO: 1125 - RNA, 20 nt, Artificial Sequence
  RPE65 RNA guide
auacucaguaaagcauacuu

SEQ ID NO: 1126 - RNA, 20 nt, Artificial Sequence
  RPE65 RNA guide
caguaaagcauacuuuucaa

SEQ ID NO: 1127 - RNA, 20 nt, Artificial Sequence
  RPE65 RNA guide
cucaguaaagcauacuuuuc

SEQ ID NO: 1128 - RNA, 20 nt, Artificial Sequence
  RPE65 RNA guide
cuuugaaaaguaugcuuuac

SEQ ID NO: 1129 - RNA, 20 nt, Artificial Sequence
  RPE65 RNA guide
guaaagcauacuuuucaaag

SEQ ID NO: 1130 - RNA, 20 nt, Artificial Sequence
  RPE65 RNA guide
uacucaguaaagcauacuuu

SEQ ID NO: 1131 - RNA, 20 nt, Artificial Sequence
  RPE65 RNA guide
ucaguaaagcauacuuuuca

SEQ ID NO: 1132 - RNA, 20 nt, Artificial Sequence
  RPE65 RNA guide
uugaaaaguaugcuuuacug

SEQ ID NO: 1133 - RNA, 21 nt, Artificial Sequence
  RPE65 RNA guide
acucaguaaagcauacuuuuc

SEQ ID NO: 1134 - RNA, 21 nt, Artificial Sequence
  RPE65 RNA guide
cucaguaaagcauacuuuuca

SEQ ID NO: 1135 - RNA, 22 nt, Artificial Sequence
  RPE65 RNA guide
acucaguaaagcauacuuuuca

SEQ ID NO: 1136 - RNA, 22 nt, Artificial Sequence
  RPE65 RNA guide
caguaaagcauacuuuucaaag

SEQ ID NO: 1137 - RNA, 22 nt, Artificial Sequence
  RPE65 RNA guide
cucaguaaagcauacuuuucaa

SEQ ID NO: 1138 - RNA, 22 nt, Artificial Sequence
  RPE65 RNA guide
cuuugaaaaguaugcuuuacug

SEQ ID NO: 1139 - RNA, 22 nt, Artificial Sequence
  RPE65 RNA guide
uacucaguaaagcauacuuuuc

SEQ ID NO: 1140 - RNA, 22 nt, Artificial Sequence
  RPE65 RNA guide
uugaaaaguaugcuuuacugag

SEQ ID NO: 1141 - RNA, 20 nt, Artificial Sequence
  RPE65 RNA guide
aaagcauacuuuucgaagaa

SEQ ID NO: 1142 - RNA, 20 nt, Artificial Sequence
  RPE65 RNA guide
aagcauacuuuucgaagaau

SEQ ID NO: 1143 - RNA, 20 nt, Artificial Sequence
  RPE65 RNA guide
agcauacuuuucgaagaaua

SEQ ID NO: 1144 - RNA, 20 nt, Artificial Sequence
  RPE65 RNA guide
aguaaagcauacuuuucgaa

SEQ ID NO: 1145 - RNA, 20 nt, Artificial Sequence
  RPE65 RNA guide
auucuucgaaaaguaugcuu

SEQ ID NO: 1146 - RNA, 20 nt, Artificial Sequence
  RPE65 RNA guide
caguaaagcauacuuuucga

SEQ ID NO: 1147 - RNA, 20 nt, Artificial Sequence
  RPE65 RNA guide
cauacuuuucgaagaauaac

SEQ ID NO: 1148 - RNA, 20 nt, Artificial Sequence
  RPE65 RNA guide
cuucgaaaaguaugcuuuac

SEQ ID NO: 1149 - RNA, 20 nt, Artificial Sequence
  RPE65 RNA guide
gcauacuuuucgaagaauaa

SEQ ID NO: 1150 - RNA, 20 nt, Artificial Sequence
  RPE65 RNA guide
guaaagcauacuuuucgaag

SEQ ID NO: 1151 - RNA, 20 nt, Artificial Sequence
  RPE65 RNA guide
guuauucuucgaaaaguaug

SEQ ID NO: 1152 - RNA, 20 nt, Artificial Sequence
  RPE65 RNA guide
uaaagcauacuuuucgaaga

SEQ ID NO: 1153 - RNA, 20 nt, Artificial Sequence
  RPE65 RNA guide
uauucuucgaaaaguaugcu

SEQ ID NO: 1154 - RNA, 20 nt, Artificial Sequence
  RPE65 RNA guide
ucaguaaagcauacuuuucg

SEQ ID NO: 1155 - RNA, 20 nt, Artificial Sequence
  RPE65 RNA guide
ucgaaaaguaugcuuuacug

SEQ ID NO: 1156 - RNA, 20 nt, Artificial Sequence
  RPE65 RNA guide
ucuucgaaaaguaugcuuua

SEQ ID NO: 1157 - RNA, 20 nt, Artificial Sequence
  RPE65 RNA guide
uuauucuucgaaaaguaugc

SEQ ID NO: 1158 - RNA, 20 nt, Artificial Sequence
  RPE65 RNA guide
uucgaaaaguaugcuuuacu

SEQ ID NO: 1159 - RNA, 20 nt, Artificial Sequence
  RPE65 RNA guide
uucuucgaaaaguaugcuuu

SEQ ID NO: 1160 - RNA, 21 nt, Artificial Sequence
  RPE65 RNA guide
aguaaagcauacuuuucgaag

SEQ ID NO: 1161 - RNA, 21 nt, Artificial Sequence
  RPE65 RNA guide
caguaaagcauacuuuucgaa

SEQ ID NO: 1162 - RNA, 21 nt, Artificial Sequence
  RPE65 RNA guide
cucaguaaagcauacuuuucg

SEQ ID NO: 1163 - RNA, 21 nt, Artificial Sequence
  RPE65 RNA guide
cuucgaaaaguaugcuuuacu

SEQ ID NO: 1164 - RNA, 21 nt, Artificial Sequence
  RPE65 RNA guide
gcauacuuuucgaagaauaac

SEQ ID NO: 1165 - RNA, 21 nt, Artificial Sequence
  RPE65 RNA guide
guaaagcauacuuuucgaaga

SEQ ID NO: 1166 - RNA, 21 nt, Artificial Sequence
  RPE65 RNA guide
guuauucuucgaaaaguaugc

SEQ ID NO: 1167 - RNA, 21 nt, Artificial Sequence
  RPE65 RNA guide
ucaguaaagcauacuuuucga

SEQ ID NO: 1168 - RNA, 21 nt, Artificial Sequence
  RPE65 RNA guide
ucgaaaaguaugcuuuacuga

SEQ ID NO: 1169 - RNA, 21 nt, Artificial Sequence
  RPE65 RNA guide
ucuucgaaaaguaugcuuuac

SEQ ID NO: 1170 - RNA, 21 nt, Artificial Sequence
  RPE65 RNA guide
uucgaaaaguaugcuuuacug

SEQ ID NO: 1171 - RNA, 22 nt, Artificial Sequence
  RPE65 RNA guide
acucaguaaagcauacuuuucg

SEQ ID NO: 1172 - RNA, 22 nt, Artificial Sequence
  RPE65 RNA guide
agcauacuuuucgaagaauaac

SEQ ID NO: 1173 - RNA, 22 nt, Artificial Sequence
  RPE65 RNA guide
aguaaagcauacuuuucgaaga

SEQ ID NO: 1174 - RNA, 22 nt, Artificial Sequence
  RPE65 RNA guide
aguuauucuucgaaaaguaugc

SEQ ID NO: 1175 - RNA, 22 nt, Artificial Sequence
  RPE65 RNA guide
caguaaagcauacuuuucgaag

SEQ ID NO: 1176 - RNA, 22 nt, Artificial Sequence
  RPE65 RNA guide
cucaguaaagcauacuuuucga

SEQ ID NO: 1177 - RNA, 22 nt, Artificial Sequence
  RPE65 RNA guide
cuucgaaaaguaugcuuuacug

SEQ ID NO: 1178 - RNA, 22 nt, Artificial Sequence
  RPE65 RNA guide
gcauacuuuucgaagaauaacu

SEQ ID NO: 1179 - RNA, 22 nt, Artificial Sequence
  RPE65 RNA guide
guaaagcauacuuuucgaagaa

SEQ ID NO: 1180 - RNA, 22 nt, Artificial Sequence
  RPE65 RNA guide
guuauucuucgaaaaguaugcu

SEQ ID NO: 1181 - RNA, 22 nt, Artificial Sequence
  RPE65 RNA guide
ucaguaaagcauacuuuucgaa

SEQ ID NO: 1182 - RNA, 22 nt, Artificial Sequence
  RPE65 RNA guide
ucgaaaaguaugcuuuacugag

SEQ ID NO: 1183 - RNA, 22 nt, Artificial Sequence
  RPE65 RNA guide
ucuucgaaaaguaugcuuuacu

SEQ ID NO: 1184 - RNA, 22 nt, Artificial Sequence
  RPE65 RNA guide
uucgaaaaguaugcuuuacuga

SEQ ID NO: 1185 - RNA, 22 nt, Artificial Sequence
  RPE65 RNA guide
uucuucgaaaaguaugcuuuac

SEQ ID NO: 1186 - RNA, 20 nt, Artificial Sequence
  RPE65 RNA guide
aaacaaucucuggaagaaaa

SEQ ID NO: 1187 - RNA, 20 nt, Artificial Sequence
  RPE65 RNA guide
aaauuucuuuucuuccagag

SEQ ID NO: 1188 - RNA, 20 nt, Artificial Sequence
  RPE65 RNA guide
aacaaucucuggaagaaaag

SEQ ID NO: 1189 - RNA, 20 nt, Artificial Sequence
  RPE65 RNA guide
aaucucuggaagaaaagaaa

SEQ ID NO: 1190 - RNA, 20 nt, Artificial Sequence
  RPE65 RNA guide
aauuucuuuucuuccagaga

SEQ ID NO: 1191 - RNA, 20 nt, Artificial Sequence
  RPE65 RNA guide
acaaucucuggaagaaaaga

SEQ ID NO: 1192 - RNA, 20 nt, Artificial Sequence
  RPE65 RNA guide
aucucuggaagaaaagaaau

SEQ ID NO: 1193 - RNA, 20 nt, Artificial Sequence
  RPE65 RNA guide
auuucuuuucuuccagagau

SEQ ID NO: 1194 - RNA, 20 nt, Artificial Sequence
  RPE65 RNA guide
caaucucuggaagaaaagaa

SEQ ID NO: 1195 - RNA, 20 nt, Artificial Sequence
  RPE65 RNA guide
cucuggaagaaaagaaauuu

SEQ ID NO: 1196 - RNA, 20 nt, Artificial Sequence
  RPE65 RNA guide
cuuuucuuccagagauuguu

SEQ ID NO: 1197 - RNA, 20 nt, Artificial Sequence
  RPE65 RNA guide
uaaacaaucucuggaagaaa

SEQ ID NO: 1198 - RNA, 20 nt, Artificial Sequence
  RPE65 RNA guide
ucucuggaagaaaagaaauu

SEQ ID NO: 1199 - RNA, 20 nt, Artificial Sequence
  RPE65 RNA guide
ucuuccagagauuguuuaaa

SEQ ID NO: 1200 - RNA, 20 nt, Artificial Sequence
  RPE65 RNA guide
ucuuuucuuccagagauugu

SEQ ID NO: 1201 - RNA, 20 nt, Artificial Sequence
  RPE65 RNA guide
uuaaacaaucucuggaagaa

SEQ ID NO: 1202 - RNA, 20 nt, Artificial Sequence
  RPE65 RNA guide
uucuuccagagauuguuuaa

SEQ ID NO: 1203 - RNA, 20 nt, Artificial Sequence
  RPE65 RNA guide
uucuuuucuuccagagauug

SEQ ID NO: 1204 - RNA, 20 nt, Artificial Sequence
  RPE65 RNA guide
uuuaaacaaucucuggaaga

SEQ ID NO: 1205 - RNA, 20 nt, Artificial Sequence
  RPE65 RNA guide
uuucuuccagagauuguuua

SEQ ID NO: 1206 - RNA, 20 nt, Artificial Sequence
  RPE65 RNA guide
uuucuuuucuuccagagauu

SEQ ID NO: 1207 - RNA, 20 nt, Artificial Sequence
  RPE65 RNA guide
uuuuaaacaaucucuggaag

SEQ ID NO: 1208 - RNA, 20 nt, Artificial Sequence
  RPE65 RNA guide
uuuucuuccagagauuguuu

SEQ ID NO: 1209 - RNA, 21 nt, Artificial Sequence
  RPE65 RNA guide
aaacaaucucuggaagaaaag

SEQ ID NO: 1210 - RNA, 21 nt, Artificial Sequence
  RPE65 RNA guide
aacaaucucuggaagaaaaga

SEQ ID NO: 1211 - RNA, 21 nt, Artificial Sequence
  RPE65 RNA guide
acaaucucuggaagaaaagaa

SEQ ID NO: 1212 - RNA, 21 nt, Artificial Sequence
  RPE65 RNA guide
caaucucuggaagaaaagaaa

SEQ ID NO: 1213 - RNA, 21 nt, Artificial Sequence
  RPE65 RNA guide
cuuuucuuccagagauuguuu

SEQ ID NO: 1214 - RNA, 21 nt, Artificial Sequence
  RPE65 RNA guide
ucuuuucuuccagagauuguu

SEQ ID NO: 1215 - RNA, 21 nt, Artificial Sequence
  RPE65 RNA guide
uucuuuucuuccagagauugu

SEQ ID NO: 1216 - RNA, 21 nt, Artificial Sequence
  RPE65 RNA guide
uuucuuuucuuccagagauug

SEQ ID NO: 1217 - RNA, 22 nt, Artificial Sequence
  RPE65 RNA guide
aaacaaucucuggaagaaaaga

SEQ ID NO: 1218 - RNA, 22 nt, Artificial Sequence
  RPE65 RNA guide
aacaaucucuggaagaaaagaa

SEQ ID NO: 1219 - RNA, 22 nt, Artificial Sequence
  RPE65 RNA guide
acaaucucuggaagaaaagaaa

SEQ ID NO: 1220 - RNA, 22 nt, Artificial Sequence
  RPE65 RNA guide
auuucuuuucuuccagagauug

SEQ ID NO: 1221 - RNA, 22 nt, Artificial Sequence
  RPE65 RNA guide
caaucucuggaagaaaagaaau

SEQ ID NO: 1222 - RNA, 22 nt, Artificial Sequence
  RPE65 RNA guide
cuuuucuuccagagauuguuua

SEQ ID NO: 1223 - RNA, 22 nt, Artificial Sequence
  RPE65 RNA guide
uaaacaaucucuggaagaaaag

SEQ ID NO: 1224 - RNA, 22 nt, Artificial Sequence
  RPE65 RNA guide
ucuuuucuuccagagauuguuu

SEQ ID NO: 1225 - RNA, 22 nt, Artificial Sequence
  RPE65 RNA guide
uucuuuucuuccagagauuguu

SEQ ID NO: 1226 - RNA, 22 nt, Artificial Sequence
  RPE65 RNA guide
uuucuuuucuuccagagauugu

SEQ ID NO: 1227 - RNA, 20 nt, Artificial Sequence
  RPE65 RNA guide
aaacaaucucuggaacaaaa

SEQ ID NO: 1228 - RNA, 20 nt, Artificial Sequence
  RPE65 RNA guide
aaauuucuuuuguuccagag

SEQ ID NO: 1229 - RNA, 20 nt, Artificial Sequence
  RPE65 RNA guide
aacaaucucuggaacaaaag

SEQ ID NO: 1230 - RNA, 20 nt, Artificial Sequence
  RPE65 RNA guide
aaucucuggaacaaaagaaa

SEQ ID NO: 1231 - RNA, 20 nt, Artificial Sequence
  RPE65 RNA guide
aauuucuuuuguuccagaga

SEQ ID NO: 1232 - RNA, 20 nt, Artificial Sequence
  RPE65 RNA guide
acaaucucuggaacaaaaga

SEQ ID NO: 1233 - RNA, 20 nt, Artificial Sequence
  RPE65 RNA guide
aucucuggaacaaaagaaau

SEQ ID NO: 1234 - RNA, 20 nt, Artificial Sequence
  RPE65 RNA guide
auuucuuuuguuccagagau

SEQ ID NO: 1235 - RNA, 20 nt, Artificial Sequence
  RPE65 RNA guide
caaucucuggaacaaaagaa

SEQ ID NO: 1236 - RNA, 20 nt, Artificial Sequence
  RPE65 RNA guide
cucuggaacaaaagaaauuu

SEQ ID NO: 1237 - RNA, 20 nt, Artificial Sequence
  RPE65 RNA guide
cuuuuguuccagagauuguu

SEQ ID NO: 1238 - RNA, 20 nt, Artificial Sequence
  RPE65 RNA guide
uaaacaaucucuggaacaaa

SEQ ID NO: 1239 - RNA, 20 nt, Artificial Sequence
  RPE65 RNA guide
ucucuggaacaaaagaaauu

SEQ ID NO: 1240 - RNA, 20 nt, Artificial Sequence
  RPE65 RNA guide
ucuuuuguuccagagauugu

SEQ ID NO: 1241 - RNA, 20 nt, Artificial Sequence
  RPE65 RNA guide
uguuccagagauuguuuaaa

SEQ ID NO: 1242 - RNA, 20 nt, Artificial Sequence
  RPE65 RNA guide
uuaaacaaucucuggaacaa

SEQ ID NO: 1243 - RNA, 20 nt, Artificial Sequence
  RPE65 RNA guide
uucuuuuguuccagagauug

SEQ ID NO: 1244 - RNA, 20 nt, Artificial Sequence
  RPE65 RNA guide
uuguuccagagauuguuuaa

SEQ ID NO: 1245 - RNA, 20 nt, Artificial Sequence
  RPE65 RNA guide
uuuaaacaaucucuggaaca

SEQ ID NO: 1246 - RNA, 20 nt, Artificial Sequence
  RPE65 RNA guide
uuucuuuuguuccagagauu

SEQ ID NO: 1247 - RNA, 20 nt, Artificial Sequence
  RPE65 RNA guide
uuuguuccagagauuguuua

SEQ ID NO: 1248 - RNA, 20 nt, Artificial Sequence
  RPE65 RNA guide
uuuuaaacaaucucuggaac

SEQ ID NO: 1249 - RNA, 20 nt, Artificial Sequence
  RPE65 RNA guide
uuuuguuccagagauuguuu

SEQ ID NO: 1250 - RNA, 21 nt, Artificial Sequence
  RPE65 RNA guide
aaacaaucucuggaacaaaag

SEQ ID NO: 1251 - RNA, 21 nt, Artificial Sequence
  RPE65 RNA guide
aacaaucucuggaacaaaaga

SEQ ID NO: 1252 - RNA, 21 nt, Artificial Sequence
  RPE65 RNA guide
acaaucucuggaacaaaagaa

SEQ ID NO: 1253 - RNA, 21 nt, Artificial Sequence
  RPE65 RNA guide
caaucucuggaacaaaagaaa

SEQ ID NO: 1254 - RNA, 21 nt, Artificial Sequence
  RPE65 RNA guide
cuuuuguuccagagauuguuu

SEQ ID NO: 1255 - RNA, 21 nt, Artificial Sequence
  RPE65 RNA guide
ucuuuuguuccagagauuguu

SEQ ID NO: 1256 - RNA, 21 nt, Artificial Sequence
  RPE65 RNA guide
uucuuuuguuccagagauugu

SEQ ID NO: 1257 - RNA, 21 nt, Artificial Sequence
  RPE65 RNA guide
uuucuuuuguuccagagauug

SEQ ID NO: 1258 - RNA, 22 nt, Artificial Sequence
  RPE65 RNA guide
aaacaaucucuggaacaaaaga

SEQ ID NO: 1259 - RNA, 22 nt, Artificial Sequence
  RPE65 RNA guide
aacaaucucuggaacaaaagaa

SEQ ID NO: 1260 - RNA, 22 nt, Artificial Sequence
  RPE65 RNA guide
acaaucucuggaacaaaagaaa

SEQ ID NO: 1261 - RNA, 22 nt, Artificial Sequence
  RPE65 RNA guide
auuucuuuuguuccagagauug

SEQ ID NO: 1262 - RNA, 22 nt, Artificial Sequence
  RPE65 RNA guide
caaucucuggaacaaaagaaau

SEQ ID NO: 1263 - RNA, 22 nt, Artificial Sequence
  RPE65 RNA guide
cuuuuguuccagagauuguuua

SEQ ID NO: 1264 - RNA, 22 nt, Artificial Sequence
  RPE65 RNA guide
uaaacaaucucuggaacaaaag

SEQ ID NO: 1265 - RNA, 22 nt, Artificial Sequence
  RPE65 RNA guide
ucuuuuguuccagagauuguuu

SEQ ID NO: 1266 - RNA, 22 nt, Artificial Sequence
  RPE65 RNA guide
uucuuuuguuccagagauuguu

SEQ ID NO: 1267 - RNA, 22 nt, Artificial Sequence
  RPE65 RNA guide
uuucuuuuguuccagagauugu

SEQ ID NO: 1268 - RNA, 20 nt, Artificial Sequence
  RPE65 RNA guide
aaaaacagagcauaaaaugc

SEQ ID NO: 1269 - RNA, 20 nt, Artificial Sequence
  RPE65 RNA guide
aaaacagagcauaaaaugcu

SEQ ID NO: 1270 - RNA, 20 nt, Artificial Sequence
  RPE65 RNA guide
aaacagagcauaaaaugcuu

SEQ ID NO: 1271 - RNA, 20 nt, Artificial Sequence
  RPE65 RNA guide
aacagagcauaaaaugcuua

SEQ ID NO: 1272 - RNA, 20 nt, Artificial Sequence
  RPE65 RNA guide
aagcauuuuaugcucuguuu

SEQ ID NO: 1273 - RNA, 20 nt, Artificial Sequence
  RPE65 RNA guide
acagagcauaaaaugcuuaa

SEQ ID NO: 1274 - RNA, 20 nt, Artificial Sequence
  RPE65 RNA guide
agcauuuuaugcucuguuuu

SEQ ID NO: 1275 - RNA, 20 nt, Artificial Sequence
  RPE65 RNA guide
cagagcauaaaaugcuuaaa

SEQ ID NO: 1276 - RNA, 20 nt, Artificial Sequence
  RPE65 RNA guide
gcauuuuaugcucuguuuuu

SEQ ID NO: 1277 - RNA, 20 nt, Artificial Sequence
  RPE65 RNA guide
uaagcauuuuaugcucuguu

SEQ ID NO: 1278 - RNA, 20 nt, Artificial Sequence
  RPE65 RNA guide
uuaagcauuuuaugcucugu

SEQ ID NO: 1279 - RNA, 20 nt, Artificial Sequence
  RPE65 RNA guide
uuuaagcauuuuaugcucug

SEQ ID NO: 1280 - RNA, 20 nt, Artificial Sequence
  RPE65 RNA guide
aaucuguguuuaaucaacug

SEQ ID NO: 1281 - RNA, 20 nt, Artificial Sequence
  RPE65 RNA guide
agaggccucaguugauuaaa

SEQ ID NO: 1282 - RNA, 20 nt, Artificial Sequence
  RPE65 RNA guide
aggccucaguugauuaaaca

SEQ ID NO: 1283 - RNA, 20 nt, Artificial Sequence
  RPE65 RNA guide
aucuguguuuaaucaacuga

SEQ ID NO: 1284 - RNA, 20 nt, Artificial Sequence
  RPE65 RNA guide
caguugauuaaacacagauu

SEQ ID NO: 1285 - RNA, 20 nt, Artificial Sequence
  RPE65 RNA guide
ccucaguugauuaaacacag

SEQ ID NO: 1286 - RNA, 20 nt, Artificial Sequence
  RPE65 RNA guide
cucaguugauuaaacacaga

SEQ ID NO: 1287 - RNA, 20 nt, Artificial Sequence
  RPE65 RNA guide
cuguguuuaaucaacugagg

SEQ ID NO: 1288 - RNA, 20 nt, Artificial Sequence
  RPE65 RNA guide
gagaggccucaguugauuaa

SEQ ID NO: 1289 - RNA, 20 nt, Artificial Sequence
  RPE65 RNA guide
gaggccucaguugauuaaac

SEQ ID NO: 1290 - RNA, 20 nt, Artificial Sequence
  RPE65 RNA guide
gccucaguugauuaaacaca

SEQ ID NO: 1291 - RNA, 20 nt, Artificial Sequence
  RPE65 RNA guide
ggccucaguugauuaaacac

SEQ ID NO: 1292 - RNA, 20 nt, Artificial Sequence
  RPE65 RNA guide
ucaguugauuaaacacagau

SEQ ID NO: 1293 - RNA, 20 nt, Artificial Sequence
  RPE65 RNA guide
ucuguguuuaaucaacugag

SEQ ID NO: 1294 - RNA, 20 nt, Artificial Sequence
  RPE65 RNA guide
uguguuuaaucaacugaggc

SEQ ID NO: 1295 - RNA, 21 nt, Artificial Sequence
  RPE65 RNA guide
agaggccucaguugauuaaac

SEQ ID NO: 1296 - RNA, 21 nt, Artificial Sequence
  RPE65 RNA guide
aggccucaguugauuaaacac

SEQ ID NO: 1297 - RNA, 21 nt, Artificial Sequence
  RPE65 RNA guide
aucuguguuuaaucaacugag

SEQ ID NO: 1298 - RNA, 21 nt, Artificial Sequence
  RPE65 RNA guide
ccucaguugauuaaacacaga

SEQ ID NO: 1299 - RNA, 21 nt, Artificial Sequence
  RPE65 RNA guide
cucaguugauuaaacacagau

SEQ ID NO: 1300 - RNA, 21 nt, Artificial Sequence
  RPE65 RNA guide
cuguguuuaaucaacugaggc

SEQ ID NO: 1301 - RNA, 21 nt, Artificial Sequence
  RPE65 RNA guide
gagaggccucaguugauuaaa

SEQ ID NO: 1302 - RNA, 21 nt, Artificial Sequence
  RPE65 RNA guide
gaggccucaguugauuaaaca

SEQ ID NO: 1303 - RNA, 21 nt, Artificial Sequence
  RPE65 RNA guide
gccucaguugauuaaacacag

SEQ ID NO: 1304 - RNA, 21 nt, Artificial Sequence
  RPE65 RNA guide
ggccucaguugauuaaacaca

SEQ ID NO: 1305 - RNA, 21 nt, Artificial Sequence
  RPE65 RNA guide
ucuguguuuaaucaacugagg

SEQ ID NO: 1306 - RNA, 21 nt, Artificial Sequence
  RPE65 RNA guide
ugagaggccucaguugauuaa

SEQ ID NO: 1307 - RNA, 21 nt, Artificial Sequence
  RPE65 RNA guide
uguguuuaaucaacugaggcc

SEQ ID NO: 1308 - RNA, 22 nt, Artificial Sequence
  RPE65 RNA guide
aaucuguguuuaaucaacugag

SEQ ID NO: 1309 - RNA, 22 nt, Artificial Sequence
  RPE65 RNA guide
agaggccucaguugauuaaaca

SEQ ID NO: 1310 - RNA, 22 nt, Artificial Sequence
  RPE65 RNA guide
aggccucaguugauuaaacaca

SEQ ID NO: 1311 - RNA, 22 nt, Artificial Sequence
  RPE65 RNA guide
aucuguguuuaaucaacugagg

SEQ ID NO: 1312 - RNA, 22 nt, Artificial Sequence
  RPE65 RNA guide
ccucaguugauuaaacacagau

SEQ ID NO: 1313 - RNA, 22 nt, Artificial Sequence
  RPE65 RNA guide
cucaguugauuaaacacagauu

SEQ ID NO: 1314 - RNA, 22 nt, Artificial Sequence
  RPE65 RNA guide
cuguguuuaaucaacugaggcc

SEQ ID NO: 1315 - RNA, 22 nt, Artificial Sequence
  RPE65 RNA guide
gagaggccucaguugauuaaac

SEQ ID NO: 1316 - RNA, 22 nt, Artificial Sequence
  RPE65 RNA guide
gaggccucaguugauuaaacac

SEQ ID NO: 1317 - RNA, 22 nt, Artificial Sequence
  RPE65 RNA guide
gccucaguugauuaaacacaga

SEQ ID NO: 1318 - RNA, 22 nt, Artificial Sequence
  RPE65 RNA guide
ggccucaguugauuaaacacag

SEQ ID NO: 1319 - RNA, 22 nt, Artificial Sequence
  RPE65 RNA guide
ucuguguuuaaucaacugaggc

SEQ ID NO: 1320 - RNA, 22 nt, Artificial Sequence
  RPE65 RNA guide
ugagaggccucaguugauuaaa

SEQ ID NO: 1321 - RNA, 22 nt, Artificial Sequence
  RPE65 RNA guide
uguguuuaaucaacugaggccu

SEQ ID NO: 1322 - RNA, 22 nt, Artificial Sequence
  RPE65 RNA guide
uugagaggccucaguugauuaa

SEQ ID NO: 1323 - RNA, 20 nt, Artificial Sequence
  RPE65 RNA guide
ccucaguugauuaaacauag

SEQ ID NO: 1324 - RNA, 20 nt, Artificial Sequence
  RPE65 RNA guide
cuauguuuaaucaacugagg

SEQ ID NO: 1325 - RNA, 20 nt, Artificial Sequence
  RPE65 RNA guide
cucaguugauuaaacauaga

SEQ ID NO: 1326 - RNA, 20 nt, Artificial Sequence
  RPE65 RNA guide
gccucaguugauuaaacaua

SEQ ID NO: 1327 - RNA, 20 nt, Artificial Sequence
  RPE65 RNA guide
ggccucaguugauuaaacau

SEQ ID NO: 1328 - RNA, 20 nt, Artificial Sequence
  RPE65 RNA guide
uauguuuaaucaacugaggc

SEQ ID NO: 1329 - RNA, 20 nt, Artificial Sequence
  RPE65 RNA guide
ucuauguuuaaucaacugag

SEQ ID NO: 1330 - RNA, 21 nt, Artificial Sequence
  RPE65 RNA guide
aggccucaguugauuaaacau

SEQ ID NO: 1331 - RNA, 21 nt, Artificial Sequence
  RPE65 RNA guide
ccucaguugauuaaacauaga

SEQ ID NO: 1332 - RNA, 21 nt, Artificial Sequence
  RPE65 RNA guide
cuauguuuaaucaacugaggc

SEQ ID NO: 1333 - RNA, 21 nt, Artificial Sequence
  RPE65 RNA guide
gccucaguugauuaaacauag

SEQ ID NO: 1334 - RNA, 21 nt, Artificial Sequence
  RPE65 RNA guide
ggccucaguugauuaaacaua

SEQ ID NO: 1335 - RNA, 21 nt, Artificial Sequence
  RPE65 RNA guide
uauguuuaaucaacugaggcc

SEQ ID NO: 1336 - RNA, 21 nt, Artificial Sequence
  RPE65 RNA guide
ucuauguuuaaucaacugagg

SEQ ID NO: 1337 - RNA, 22 nt, Artificial Sequence
  RPE65 RNA guide
aggccucaguugauuaaacaua

SEQ ID NO: 1338 - RNA, 22 nt, Artificial Sequence
  RPE65 RNA guide
aucuauguuuaaucaacugagg

SEQ ID NO: 1339 - RNA, 22 nt, Artificial Sequence
  RPE65 RNA guide
ccucaguugauuaaacauagau

SEQ ID NO: 1340 - RNA, 22 nt, Artificial Sequence
  RPE65 RNA guide
cuauguuuaaucaacugaggcc

SEQ ID NO: 1341 - RNA, 22 nt, Artificial Sequence
  RPE65 RNA guide
gaggccucaguugauuaaacau

SEQ ID NO: 1342 - RNA, 22 nt, Artificial Sequence
  RPE65 RNA guide
gccucaguugauuaaacauaga

SEQ ID NO: 1343 - RNA, 22 nt, Artificial Sequence
  RPE65 RNA guide
ggccucaguugauuaaacauag

SEQ ID NO: 1344 - RNA, 22 nt, Artificial Sequence
  RPE65 RNA guide
uauguuuaaucaacugaggccu

SEQ ID NO: 1345 - RNA, 22 nt, Artificial Sequence
  RPE65 RNA guide
ucuauguuuaaucaacugaggc

SEQ ID NO: 1346 - RNA, 20 nt, Artificial Sequence
  RPE65 RNA guide
aacugcucaaagauuaugaa

SEQ ID NO: 1347 - RNA, 20 nt, Artificial Sequence
  RPE65 RNA guide
aagauucauaaucuuugagc

SEQ ID NO: 1348 - RNA, 20 nt, Artificial Sequence
  RPE65 RNA guide
aaucuuugagcaguuacgua

SEQ ID NO: 1349 - RNA, 20 nt, Artificial Sequence
  RPE65 RNA guide
acguaacugcucaaagauua

SEQ ID NO: 1350 - RNA, 20 nt, Artificial Sequence
  RPE65 RNA guide
acugcucaaagauuaugaau

SEQ ID NO: 1351 - RNA, 20 nt, Artificial Sequence
  RPE65 RNA guide
agauucauaaucuuugagca

SEQ ID NO: 1352 - RNA, 20 nt, Artificial Sequence
  RPE65 RNA guide
auaaucuuugagcaguuacg

SEQ ID NO: 1353 - RNA, 20 nt, Artificial Sequence
  RPE65 RNA guide
auacguaacugcucaaagau

SEQ ID NO: 1354 - RNA, 20 nt, Artificial Sequence
  RPE65 RNA guide
aucuuugagcaguuacguau

SEQ ID NO: 1355 - RNA, 20 nt, Artificial Sequence
  RPE65 RNA guide
auucauaaucuuugagcagu

SEQ ID NO: 1356 - RNA, 20 nt, Artificial Sequence
  RPE65 RNA guide
cauaaucuuugagcaguuac

SEQ ID NO: 1357 - RNA, 20 nt, Artificial Sequence
  RPE65 RNA guide
cguaacugcucaaagauuau

SEQ ID NO: 1358 - RNA, 20 nt, Artificial Sequence
  RPE65 RNA guide
cguauacguaacugcucaaa

SEQ ID NO: 1359 - RNA, 20 nt, Artificial Sequence
  RPE65 RNA guide
cugcucaaagauuaugaauc

SEQ ID NO: 1360 - RNA, 20 nt, Artificial Sequence
  RPE65 RNA guide
gauucauaaucuuugagcag

SEQ ID NO: 1361 - RNA, 20 nt, Artificial Sequence
  RPE65 RNA guide
gcguauacguaacugcucaa

SEQ ID NO: 1362 - RNA, 20 nt, Artificial Sequence
  RPE65 RNA guide
gcucaaagauuaugaaucuu

SEQ ID NO: 1363 - RNA, 20 nt, Artificial Sequence
  RPE65 RNA guide
guaacugcucaaagauuaug

SEQ ID NO: 1364 - RNA, 20 nt, Artificial Sequence
  RPE65 RNA guide
guauacguaacugcucaaag

SEQ ID NO: 1365 - RNA, 20 nt, Artificial Sequence
  RPE65 RNA guide
uaacugcucaaagauuauga

SEQ ID NO: 1366 - RNA, 20 nt, Artificial Sequence
  RPE65 RNA guide
uaaucuuugagcaguuacgu

SEQ ID NO: 1367 - RNA, 20 nt, Artificial Sequence
  RPE65 RNA guide
uacguaacugcucaaagauu

SEQ ID NO: 1368 - RNA, 20 nt, Artificial Sequence
  RPE65 RNA guide
uauacguaacugcucaaaga

SEQ ID NO: 1369 - RNA, 20 nt, Artificial Sequence
  RPE65 RNA guide
ucauaaucuuugagcaguua

SEQ ID NO: 1370 - RNA, 20 nt, Artificial Sequence
  RPE65 RNA guide
ugcguauacguaacugcuca

SEQ ID NO: 1371 - RNA, 20 nt, Artificial Sequence
  RPE65 RNA guide
ugcucaaagauuaugaaucu

SEQ ID NO: 1372 - RNA, 20 nt, Artificial Sequence
  RPE65 RNA guide
uucauaaucuuugagcaguu

SEQ ID NO: 1373 - RNA, 21 nt, Artificial Sequence
  RPE65 RNA guide
aaucuuugagcaguuacguau

SEQ ID NO: 1374 - RNA, 21 nt, Artificial Sequence
  RPE65 RNA guide
acguaacugcucaaagauuau

SEQ ID NO: 1375 - RNA, 21 nt, Artificial Sequence
  RPE65 RNA guide
acugcucaaagauuaugaauc

SEQ ID NO: 1376 - RNA, 21 nt, Artificial Sequence
  RPE65 RNA guide
agauucauaaucuuugagcag

SEQ ID NO: 1377 - RNA, 21 nt, Artificial Sequence
  RPE65 RNA guide
auaaucuuugagcaguuacgu

SEQ ID NO: 1378 - RNA, 21 nt, Artificial Sequence
  RPE65 RNA guide
auacguaacugcucaaagauu

SEQ ID NO: 1379 - RNA, 21 nt, Artificial Sequence
  RPE65 RNA guide
aucuuugagcaguuacguaua

SEQ ID NO: 1380 - RNA, 21 nt, Artificial Sequence
  RPE65 RNA guide
cauaaucuuugagcaguuacg

SEQ ID NO: 1381 - RNA, 21 nt, Artificial Sequence
  RPE65 RNA guide
cguaacugcucaaagauuaug

SEQ ID NO: 1382 - RNA, 21 nt, Artificial Sequence
  RPE65 RNA guide
cguauacguaacugcucaaag

SEQ ID NO: 1383 - RNA, 21 nt, Artificial Sequence
  RPE65 RNA guide
cugcucaaagauuaugaaucu

SEQ ID NO: 1384 - RNA, 21 nt, Artificial Sequence
  RPE65 RNA guide
gauucauaaucuuugagcagu

SEQ ID NO: 1385 - RNA, 21 nt, Artificial Sequence
  RPE65 RNA guide
gcguauacguaacugcucaaa

SEQ ID NO: 1386 - RNA, 21 nt, Artificial Sequence
  RPE65 RNA guide
guaacugcucaaagauuauga

SEQ ID NO: 1387 - RNA, 21 nt, Artificial Sequence
  RPE65 RNA guide
guauacguaacugcucaaaga

SEQ ID NO: 1388 - RNA, 21 nt, Artificial Sequence
  RPE65 RNA guide
uaaucuuugagcaguuacgua

SEQ ID NO: 1389 - RNA, 21 nt, Artificial Sequence
  RPE65 RNA guide
uacguaacugcucaaagauua

SEQ ID NO: 1390 - RNA, 21 nt, Artificial Sequence
  RPE65 RNA guide
uauacguaacugcucaaagau

SEQ ID NO: 1391 - RNA, 21 nt, Artificial Sequence
  RPE65 RNA guide
ucauaaucuuugagcaguuac

SEQ ID NO: 1392 - RNA, 21 nt, Artificial Sequence
  RPE65 RNA guide
ugcguauacguaacugcucaa

SEQ ID NO: 1393 - RNA, 21 nt, Artificial Sequence
  RPE65 RNA guide
uugcguauacguaacugcuca

SEQ ID NO: 1394 - RNA, 22 nt, Artificial Sequence
  RPE65 RNA guide
aacugcucaaagauuaugaauc

SEQ ID NO: 1395 - RNA, 22 nt, Artificial Sequence
  RPE65 RNA guide
aagauucauaaucuuugagcag

SEQ ID NO: 1396 - RNA, 22 nt, Artificial Sequence
  RPE65 RNA guide
aaucuuugagcaguuacguaua

SEQ ID NO: 1397 - RNA, 22 nt, Artificial Sequence
  RPE65 RNA guide
acguaacugcucaaagauuaug

SEQ ID NO: 1398 - RNA, 22 nt, Artificial Sequence
  RPE65 RNA guide
acugcucaaagauuaugaaucu

SEQ ID NO: 1399 - RNA, 22 nt, Artificial Sequence
  RPE65 RNA guide
agauucauaaucuuugagcagu

SEQ ID NO: 1400 - RNA, 22 nt, Artificial Sequence
  RPE65 RNA guide
auaaucuuugagcaguuacgua

SEQ ID NO: 1401 - RNA, 22 nt, Artificial Sequence
  RPE65 RNA guide
auacguaacugcucaaagauua

SEQ ID NO: 1402 - RNA, 22 nt, Artificial Sequence
  RPE65 RNA guide
aucuuugagcaguuacguauac

SEQ ID NO: 1403 - RNA, 22 nt, Artificial Sequence
  RPE65 RNA guide
cauaaucuuugagcaguuacgu

SEQ ID NO: 1404 - RNA, 22 nt, Artificial Sequence
  RPE65 RNA guide
cguaacugcucaaagauuauga

SEQ ID NO: 1405 - RNA, 22 nt, Artificial Sequence
  RPE65 RNA guide
cguauacguaacugcucaaaga

SEQ ID NO: 1406 - RNA, 22 nt, Artificial Sequence
  RPE65 RNA guide
cugcucaaagauuaugaaucuu

SEQ ID NO: 1407 - RNA, 22 nt, Artificial Sequence
  RPE65 RNA guide
gauucauaaucuuugagcaguu

SEQ ID NO: 1408 - RNA, 22 nt, Artificial Sequence
  RPE65 RNA guide
gcguauacguaacugcucaaag

SEQ ID NO: 1409 - RNA, 22 nt, Artificial Sequence
  RPE65 RNA guide
guaacugcucaaagauuaugaa

SEQ ID NO: 1410 - RNA, 22 nt, Artificial Sequence
  RPE65 RNA guide
guauacguaacugcucaaagau

SEQ ID NO: 1411 - RNA, 22 nt, Artificial Sequence
  RPE65 RNA guide
uaaucuuugagcaguuacguau

SEQ ID NO: 1412 - RNA, 22 nt, Artificial Sequence
  RPE65 RNA guide
uacguaacugcucaaagauuau

SEQ ID NO: 1413 - RNA, 22 nt, Artificial Sequence
  RPE65 RNA guide
uauacguaacugcucaaagauu

SEQ ID NO: 1414 - RNA, 22 nt, Artificial Sequence
  RPE65 RNA guide
ucauaaucuuugagcaguuacg

SEQ ID NO: 1415 - RNA, 22 nt, Artificial Sequence
  RPE65 RNA guide
ugcguauacguaacugcucaaa

SEQ ID NO: 1416 - RNA, 22 nt, Artificial Sequence
  RPE65 RNA guide
uucauaaucuuugagcaguuac

SEQ ID NO: 1417 - RNA, 22 nt, Artificial Sequence
  RPE65 RNA guide
uugcguauacguaacugcucaa

SEQ ID NO: 1418 - RNA, 22 nt, Artificial Sequence
  RPE65 RNA guide
uuugcguauacguaacugcuca

SEQ ID NO: 1419 - RNA, 20 nt, Artificial Sequence
  RPE65 RNA guide
aaccuuugagcaguuacgua

SEQ ID NO: 1420 - RNA, 20 nt, Artificial Sequence
  RPE65 RNA guide
aacugcucaaagguuaugaa

SEQ ID NO: 1421 - RNA, 20 nt, Artificial Sequence
  RPE65 RNA guide
aagauucauaaccuuugagc

SEQ ID NO: 1422 - RNA, 20 nt, Artificial Sequence
  RPE65 RNA guide
accuuugagcaguuacguau

SEQ ID NO: 1423 - RNA, 20 nt, Artificial Sequence
  RPE65 RNA guide
acguaacugcucaaagguua

SEQ ID NO: 1424 - RNA, 20 nt, Artificial Sequence
  RPE65 RNA guide
acugcucaaagguuaugaau

SEQ ID NO: 1425 - RNA, 20 nt, Artificial Sequence
  RPE65 RNA guide
agauucauaaccuuugagca

SEQ ID NO: 1426 - RNA, 20 nt, Artificial Sequence
  RPE65 RNA guide
auaaccuuugagcaguuacg

SEQ ID NO: 1427 - RNA, 20 nt, Artificial Sequence
  RPE65 RNA guide
auacguaacugcucaaaggu

SEQ ID NO: 1428 - RNA, 20 nt, Artificial Sequence
  RPE65 RNA guide
auucauaaccuuugagcagu

SEQ ID NO: 1429 - RNA, 20 nt, Artificial Sequence
  RPE65 RNA guide
caaagguuaugaaucuuaug

SEQ ID NO: 1430 - RNA, 20 nt, Artificial Sequence
  RPE65 RNA guide
cauaaccuuugagcaguuac

SEQ ID NO: 1431 - RNA, 20 nt, Artificial Sequence
  RPE65 RNA guide
cauaagauucauaaccuuug

SEQ ID NO: 1432 - RNA, 20 nt, Artificial Sequence
  RPE65 RNA guide
cauucauaagauucauaacc

SEQ ID NO: 1433 - RNA, 20 nt, Artificial Sequence
  RPE65 RNA guide
cguaacugcucaaagguuau

SEQ ID NO: 1434 - RNA, 20 nt, Artificial Sequence
  RPE65 RNA guide
cucaaagguuaugaaucuua

SEQ ID NO: 1435 - RNA, 20 nt, Artificial Sequence
  RPE65 RNA guide
cugcucaaagguuaugaauc

SEQ ID NO: 1436 - RNA, 20 nt, Artificial Sequence
  RPE65 RNA guide
gauucauaaccuuugagcag

SEQ ID NO: 1437 - RNA, 20 nt, Artificial Sequence
  RPE65 RNA guide
gcucaaagguuaugaaucuu

SEQ ID NO: 1438 - RNA, 20 nt, Artificial Sequence
  RPE65 RNA guide
gguuaugaaucuuaugaaug

SEQ ID NO: 1439 - RNA, 20 nt, Artificial Sequence
  RPE65 RNA guide
guaacugcucaaagguuaug

SEQ ID NO: 1440 - RNA, 20 nt, Artificial Sequence
  RPE65 RNA guide
uaaccuuugagcaguuacgu

SEQ ID NO: 1441 - RNA, 20 nt, Artificial Sequence
  RPE65 RNA guide
uaacugcucaaagguuauga

SEQ ID NO: 1442 - RNA, 20 nt, Artificial Sequence
  RPE65 RNA guide
uaagauucauaaccuuugag

SEQ ID NO: 1443 - RNA, 20 nt, Artificial Sequence
  RPE65 RNA guide
uacguaacugcucaaagguu

SEQ ID NO: 1444 - RNA, 20 nt, Artificial Sequence
  RPE65 RNA guide
uauacguaacugcucaaagg

SEQ ID NO: 1445 - RNA, 20 nt, Artificial Sequence
  RPE65 RNA guide
ucauaaccuuugagcaguua

SEQ ID NO: 1446 - RNA, 20 nt, Artificial Sequence
  RPE65 RNA guide
ugcucaaagguuaugaaucu

SEQ ID NO: 1447 - RNA, 20 nt, Artificial Sequence
  RPE65 RNA guide
uucauaaccuuugagcaguu

SEQ ID NO: 1448 - RNA, 21 nt, Artificial Sequence
  RPE65 RNA guide
aaccuuugagcaguuacguau

SEQ ID NO: 1449 - RNA, 21 nt, Artificial Sequence
  RPE65 RNA guide
aacugcucaaagguuaugaau

SEQ ID NO: 1450 - RNA, 21 nt, Artificial Sequence
  RPE65 RNA guide
aagauucauaaccuuugagca

SEQ ID NO: 1451 - RNA, 21 nt, Artificial Sequence
  RPE65 RNA guide
accuuugagcaguuacguaua

SEQ ID NO: 1452 - RNA, 21 nt, Artificial Sequence
  RPE65 RNA guide
acguaacugcucaaagguuau

SEQ ID NO: 1453 - RNA, 21 nt, Artificial Sequence
  RPE65 RNA guide
acugcucaaagguuaugaauc

SEQ ID NO: 1454 - RNA, 21 nt, Artificial Sequence
  RPE65 RNA guide
agauucauaaccuuugagcag

SEQ ID NO: 1455 - RNA, 21 nt, Artificial Sequence
  RPE65 RNA guide
auaaccuuugagcaguuacgu

SEQ ID NO: 1456 - RNA, 21 nt, Artificial Sequence
  RPE65 RNA guide
auacguaacugcucaaagguu

SEQ ID NO: 1457 - RNA, 21 nt, Artificial Sequence
  RPE65 RNA guide
auucauaaccuuugagcaguu

SEQ ID NO: 1458 - RNA, 21 nt, Artificial Sequence
  RPE65 RNA guide
cauaaccuuugagcaguuacg

SEQ ID NO: 1459 - RNA, 21 nt, Artificial Sequence
  RPE65 RNA guide
cguaacugcucaaagguuaug

SEQ ID NO: 1460 - RNA, 21 nt, Artificial Sequence
  RPE65 RNA guide
cugcucaaagguuaugaaucu

SEQ ID NO: 1461 - RNA, 21 nt, Artificial Sequence
  RPE65 RNA guide
gauucauaaccuuugagcagu

SEQ ID NO: 1462 - RNA, 21 nt, Artificial Sequence
  RPE65 RNA guide
gcucaaagguuaugaaucuua

SEQ ID NO: 1463 - RNA, 21 nt, Artificial Sequence
  RPE65 RNA guide
guaacugcucaaagguuauga

SEQ ID NO: 1464 - RNA, 21 nt, Artificial Sequence
  RPE65 RNA guide
guauacguaacugcucaaagg

SEQ ID NO: 1465 - RNA, 21 nt, Artificial Sequence
  RPE65 RNA guide
uaaccuuugagcaguuacgua

SEQ ID NO: 1466 - RNA, 21 nt, Artificial Sequence
  RPE65 RNA guide
uaacugcucaaagguuaugaa

SEQ ID NO: 1467 - RNA, 21 nt, Artificial Sequence
  RPE65 RNA guide
uaagauucauaaccuuugagc

SEQ ID NO: 1468 - RNA, 21 nt, Artificial Sequence
  RPE65 RNA guide
uacguaacugcucaaagguua

SEQ ID NO: 1469 - RNA, 21 nt, Artificial Sequence
  RPE65 RNA guide
uauacguaacugcucaaaggu

SEQ ID NO: 1470 - RNA, 21 nt, Artificial Sequence
  RPE65 RNA guide
ucauaaccuuugagcaguuac

SEQ ID NO: 1471 - RNA, 21 nt, Artificial Sequence
  RPE65 RNA guide
ugcucaaagguuaugaaucuu

SEQ ID NO: 1472 - RNA, 21 nt, Artificial Sequence
  RPE65 RNA guide
uucauaaccuuugagcaguua

SEQ ID NO: 1473 - RNA, 22 nt, Artificial Sequence
  RPE65 RNA guide
aaccuuugagcaguuacguaua

SEQ ID NO: 1474 - RNA, 22 nt, Artificial Sequence
  RPE65 RNA guide
aacugcucaaagguuaugaauc

SEQ ID NO: 1475 - RNA, 22 nt, Artificial Sequence
  RPE65 RNA guide
aagauucauaaccuuugagcag

SEQ ID NO: 1476 - RNA, 22 nt, Artificial Sequence
  RPE65 RNA guide
accuuugagcaguuacguauac

SEQ ID NO: 1477 - RNA, 22 nt, Artificial Sequence
  RPE65 RNA guide
acguaacugcucaaagguuaug

SEQ ID NO: 1478 - RNA, 22 nt, Artificial Sequence
  RPE65 RNA guide
acugcucaaagguuaugaaucu

SEQ ID NO: 1479 - RNA, 22 nt, Artificial Sequence
  RPE65 RNA guide
agauucauaaccuuugagcagu

SEQ ID NO: 1480 - RNA, 22 nt, Artificial Sequence
  RPE65 RNA guide
auaaccuuugagcaguuacgua

SEQ ID NO: 1481 - RNA, 22 nt, Artificial Sequence
  RPE65 RNA guide
auaagauucauaaccuuugagc

SEQ ID NO: 1482 - RNA, 22 nt, Artificial Sequence
  RPE65 RNA guide
auacguaacugcucaaagguua

SEQ ID NO: 1483 - RNA, 22 nt, Artificial Sequence
  RPE65 RNA guide
auucauaaccuuugagcaguua

SEQ ID NO: 1484 - RNA, 22 nt, Artificial Sequence
  RPE65 RNA guide
cauaaccuuugagcaguuacgu

SEQ ID NO: 1485 - RNA, 22 nt, Artificial Sequence
  RPE65 RNA guide
cauaagauucauaaccuuugag

SEQ ID NO: 1486 - RNA, 22 nt, Artificial Sequence
  RPE65 RNA guide
cguaacugcucaaagguuauga

SEQ ID NO: 1487 - RNA, 22 nt, Artificial Sequence
  RPE65 RNA guide
cguauacguaacugcucaaagg

SEQ ID NO: 1488 - RNA, 22 nt, Artificial Sequence
  RPE65 RNA guide
cucaaagguuaugaaucuuaug

SEQ ID NO: 1489 - RNA, 22 nt, Artificial Sequence
  RPE65 RNA guide
cugcucaaagguuaugaaucuu

SEQ ID NO: 1490 - RNA, 22 nt, Artificial Sequence
  RPE65 RNA guide
gauucauaaccuuugagcaguu

SEQ ID NO: 1491 - RNA, 22 nt, Artificial Sequence
  RPE65 RNA guide
gcucaaagguuaugaaucuuau

SEQ ID NO: 1492 - RNA, 22 nt, Artificial Sequence
  RPE65 RNA guide
guaacugcucaaagguuaugaa

SEQ ID NO: 1493 - RNA, 22 nt, Artificial Sequence
  RPE65 RNA guide
guauacguaacugcucaaaggu

SEQ ID NO: 1494 - RNA, 22 nt, Artificial Sequence
  RPE65 RNA guide
uaaccuuugagcaguuacguau

SEQ ID NO: 1495 - RNA, 22 nt, Artificial Sequence
  RPE65 RNA guide
uaacugcucaaagguuaugaau

SEQ ID NO: 1496 - RNA, 22 nt, Artificial Sequence
  RPE65 RNA guide
uaagauucauaaccuuugagca

SEQ ID NO: 1497 - RNA, 22 nt, Artificial Sequence
  RPE65 RNA guide
uacguaacugcucaaagguuau

SEQ ID NO: 1498 - RNA, 22 nt, Artificial Sequence
  RPE65 RNA guide
uauacguaacugcucaaagguu

SEQ ID NO: 1499 - RNA, 22 nt, Artificial Sequence
  RPE65 RNA guide
ucauaaccuuugagcaguuacg

SEQ ID NO: 1500 - RNA, 22 nt, Artificial Sequence
  RPE65 RNA guide
ugcucaaagguuaugaaucuua

SEQ ID NO: 1501 - RNA, 22 nt, Artificial Sequence
  RPE65 RNA guide
uucauaaccuuugagcaguuac

SEQ ID NO: 1502 - RNA, 20 nt, Artificial Sequence
  RPE65 RNA guide
aaggaucguuuuugaguauu

SEQ ID NO: 1503 - RNA, 20 nt, Artificial Sequence
  RPE65 RNA guide
aauacucaaaaacgauccuu

SEQ ID NO: 1504 - RNA, 20 nt, Artificial Sequence
  RPE65 RNA guide
acucaaaaacgauccuuaau

SEQ ID NO: 1505 - RNA, 20 nt, Artificial Sequence
  RPE65 RNA guide
aggaucguuuuugaguauua

SEQ ID NO: 1506 - RNA, 20 nt, Artificial Sequence
  RPE65 RNA guide
aguauuaaggaucguuuuug

SEQ ID NO: 1507 - RNA, 20 nt, Artificial Sequence
  RPE65 RNA guide
auacucaaaaacgauccuua

SEQ ID NO: 1508 - RNA, 20 nt, Artificial Sequence
  RPE65 RNA guide
aucguuuuugaguauuacgg

SEQ ID NO: 1509 - RNA, 20 nt, Artificial Sequence
  RPE65 RNA guide
auuaaggaucguuuuugagu

SEQ ID NO: 1510 - RNA, 20 nt, Artificial Sequence
  RPE65 RNA guide
auuccguaauacucaaaaac

SEQ ID NO: 1511 - RNA, 20 nt, Artificial Sequence
  RPE65 RNA guide
caaaaacgauccuuaauacu

SEQ ID NO: 1512 - RNA, 20 nt, Artificial Sequence
  RPE65 RNA guide
ccguaauacucaaaaacgau

SEQ ID NO: 1513 - RNA, 20 nt, Artificial Sequence
  RPE65 RNA guide
cguaauacucaaaaacgauc

SEQ ID NO: 1514 - RNA, 20 nt, Artificial Sequence
  RPE65 RNA guide
cguuuuugaguauuacggaa

SEQ ID NO: 1515 - RNA, 20 nt, Artificial Sequence
  RPE65 RNA guide
cucaaaaacgauccuuaaua

SEQ ID NO: 1516 - RNA, 20 nt, Artificial Sequence
  RPE65 RNA guide
gaucguuuuugaguauuacg

SEQ ID NO: 1517 - RNA, 20 nt, Artificial Sequence
  RPE65 RNA guide
gauuauuccguaauacucaa

SEQ ID NO: 1518 - RNA, 20 nt, Artificial Sequence
  RPE65 RNA guide
ggaucguuuuugaguauuac

SEQ ID NO: 1519 - RNA, 20 nt, Artificial Sequence
  RPE65 RNA guide
guaauacucaaaaacgaucc

SEQ ID NO: 1520 - RNA, 20 nt, Artificial Sequence
  RPE65 RNA guide
guauuaaggaucguuuuuga

SEQ ID NO: 1521 - RNA, 20 nt, Artificial Sequence
  RPE65 RNA guide
uaaggaucguuuuugaguau

SEQ ID NO: 1522 - RNA, 20 nt, Artificial Sequence
  RPE65 RNA guide
uaauacucaaaaacgauccu

SEQ ID NO: 1523 - RNA, 20 nt, Artificial Sequence
  RPE65 RNA guide
uacucaaaaacgauccuuaa

SEQ ID NO: 1524 - RNA, 20 nt, Artificial Sequence
  RPE65 RNA guide
uauuaaggaucguuuuugag

SEQ ID NO: 1525 - RNA, 20 nt, Artificial Sequence
  RPE65 RNA guide
ucaaaaacgauccuuaauac

SEQ ID NO: 1526 - RNA, 20 nt, Artificial Sequence
  RPE65 RNA guide
uccguaauacucaaaaacga

SEQ ID NO: 1527 - RNA, 20 nt, Artificial Sequence
  RPE65 RNA guide
ucguuuuugaguauuacgga

SEQ ID NO: 1528 - RNA, 20 nt, Artificial Sequence
  RPE65 RNA guide
uuaaggaucguuuuugagua

SEQ ID NO: 1529 - RNA, 20 nt, Artificial Sequence
  RPE65 RNA guide
uuccguaauacucaaaaacg

SEQ ID NO: 1530 - RNA, 21 nt, Artificial Sequence
  RPE65 RNA guide
aggaucguuuuugaguauuac

SEQ ID NO: 1531 - RNA, 21 nt, Artificial Sequence
  RPE65 RNA guide
aucguuuuugaguauuacgga

SEQ ID NO: 1532 - RNA, 21 nt, Artificial Sequence
  RPE65 RNA guide
auuccguaauacucaaaaacg

SEQ ID NO: 1533 - RNA, 21 nt, Artificial Sequence
  RPE65 RNA guide
ccguaauacucaaaaacgauc

SEQ ID NO: 1534 - RNA, 21 nt, Artificial Sequence
  RPE65 RNA guide
cguaauacucaaaaacgaucc

SEQ ID NO: 1535 - RNA, 21 nt, Artificial Sequence
  RPE65 RNA guide
cguuuuugaguauuacggaau

SEQ ID NO: 1536 - RNA, 21 nt, Artificial Sequence
  RPE65 RNA guide
cucaaaaacgauccuuaauac

SEQ ID NO: 1537 - RNA, 21 nt, Artificial Sequence
  RPE65 RNA guide
gaucguuuuugaguauuacgg

SEQ ID NO: 1538 - RNA, 21 nt, Artificial Sequence
  RPE65 RNA guide
ggaucguuuuugaguauuacg

SEQ ID NO: 1539 - RNA, 21 nt, Artificial Sequence
  RPE65 RNA guide
guaauacucaaaaacgauccu

SEQ ID NO: 1540 - RNA, 21 nt, Artificial Sequence
  RPE65 RNA guide
guauuaaggaucguuuuugag

SEQ ID NO: 1541 - RNA, 21 nt, Artificial Sequence
  RPE65 RNA guide
uccguaauacucaaaaacgau

SEQ ID NO: 1542 - RNA, 21 nt, Artificial Sequence
  RPE65 RNA guide
ucguuuuugaguauuacggaa

SEQ ID NO: 1543 - RNA, 21 nt, Artificial Sequence
  RPE65 RNA guide
uuccguaauacucaaaaacga

SEQ ID NO: 1544 - RNA, 22 nt, Artificial Sequence
  RPE65 RNA guide
aaggaucguuuuugaguauuac

SEQ ID NO: 1545 - RNA, 22 nt, Artificial Sequence
  RPE65 RNA guide
acucaaaaacgauccuuaauac

SEQ ID NO: 1546 - RNA, 22 nt, Artificial Sequence
  RPE65 RNA guide
aggaucguuuuugaguauuacg

SEQ ID NO: 1547 - RNA, 22 nt, Artificial Sequence
  RPE65 RNA guide
aguauuaaggaucguuuuugag

SEQ ID NO: 1548 - RNA, 22 nt, Artificial Sequence
  RPE65 RNA guide
aucguuuuugaguauuacggaa

SEQ ID NO: 1549 - RNA, 22 nt, Artificial Sequence
  RPE65 RNA guide
auuccguaauacucaaaaacga

SEQ ID NO: 1550 - RNA, 22 nt, Artificial Sequence
  RPE65 RNA guide
ccguaauacucaaaaacgaucc

SEQ ID NO: 1551 - RNA, 22 nt, Artificial Sequence
  RPE65 RNA guide
cguaauacucaaaaacgauccu

SEQ ID NO: 1552 - RNA, 22 nt, Artificial Sequence
  RPE65 RNA guide
cguuuuugaguauuacggaaua

SEQ ID NO: 1553 - RNA, 22 nt, Artificial Sequence
  RPE65 RNA guide
cucaaaaacgauccuuaauacu

SEQ ID NO: 1554 - RNA, 22 nt, Artificial Sequence
  RPE65 RNA guide
gaucguuuuugaguauuacgga

SEQ ID NO: 1555 - RNA, 22 nt, Artificial Sequence
  RPE65 RNA guide
ggaucguuuuugaguauuacgg

SEQ ID NO: 1556 - RNA, 22 nt, Artificial Sequence
  RPE65 RNA guide
guaauacucaaaaacgauccuu

SEQ ID NO: 1557 - RNA, 22 nt, Artificial Sequence
  RPE65 RNA guide
guauuaaggaucguuuuugagu

SEQ ID NO: 1558 - RNA, 22 nt, Artificial Sequence
  RPE65 RNA guide
uauuccguaauacucaaaaacg

SEQ ID NO: 1559 - RNA, 22 nt, Artificial Sequence
  RPE65 RNA guide
uccguaauacucaaaaacgauc

SEQ ID NO: 1560 - RNA, 22 nt, Artificial Sequence
  RPE65 RNA guide
ucguuuuugaguauuacggaau

SEQ ID NO: 1561 - RNA, 22 nt, Artificial Sequence
  RPE65 RNA guide
uuccguaauacucaaaaacgau

SEQ ID NO: 1562 - RNA, 20 nt, Artificial Sequence
  RPE65 RNA guide
aucauuuuugaguauuacgg

SEQ ID NO: 1563 - RNA, 20 nt, Artificial Sequence
  RPE65 RNA guide
cauuuuugaguauuacggaa

SEQ ID NO: 1564 - RNA, 20 nt, Artificial Sequence
  RPE65 RNA guide
ccguaauacucaaaaaugau

SEQ ID NO: 1565 - RNA, 20 nt, Artificial Sequence
  RPE65 RNA guide
cguaauacucaaaaaugauc

SEQ ID NO: 1566 - RNA, 20 nt, Artificial Sequence
  RPE65 RNA guide
gaucauuuuugaguauuacg

SEQ ID NO: 1567 - RNA, 20 nt, Artificial Sequence
  RPE65 RNA guide
ggaucauuuuugaguauuac

SEQ ID NO: 1568 - RNA, 20 nt, Artificial Sequence
  RPE65 RNA guide
guaauacucaaaaaugaucc

SEQ ID NO: 1569 - RNA, 20 nt, Artificial Sequence
  RPE65 RNA guide
ucauuuuugaguauuacgga

SEQ ID NO: 1570 - RNA, 20 nt, Artificial Sequence
  RPE65 RNA guide
uccguaauacucaaaaauga

SEQ ID NO: 1571 - RNA, 20 nt, Artificial Sequence
  RPE65 RNA guide
uuccguaauacucaaaaaug

SEQ ID NO: 1572 - RNA, 21 nt, Artificial Sequence
  RPE65 RNA guide
ccguaauacucaaaaaugauc

SEQ ID NO: 1573 - RNA, 21 nt, Artificial Sequence
  RPE65 RNA guide
cguaauacucaaaaaugaucc

SEQ ID NO: 1574 - RNA, 21 nt, Artificial Sequence
  RPE65 RNA guide
gaucauuuuugaguauuacgg

SEQ ID NO: 1575 - RNA, 21 nt, Artificial Sequence
  RPE65 RNA guide
ggaucauuuuugaguauuacg

SEQ ID NO: 1576 - RNA, 22 nt, Artificial Sequence
  RPE65 RNA guide
aggaucauuuuugaguauuacg

SEQ ID NO: 1577 - RNA, 22 nt, Artificial Sequence
  RPE65 RNA guide
ccguaauacucaaaaaugaucc

SEQ ID NO: 1578 - RNA, 22 nt, Artificial Sequence
  RPE65 RNA guide
cguaauacucaaaaaugauccu

SEQ ID NO: 1579 - RNA, 22 nt, Artificial Sequence
  RPE65 RNA guide
gaucauuuuugaguauuacgga

SEQ ID NO: 1580 - RNA, 22 nt, Artificial Sequence
  RPE65 RNA guide
ggaucauuuuugaguauuacgg

SEQ ID NO: 1581 - RNA, 22 nt, Artificial Sequence
  RPE65 RNA guide
uccguaauacucaaaaaugauc

SEQ ID NO: 1582 - RNA, 20 nt, Artificial Sequence
  RPE65 RNA guide
aaaaaacgcuggaccauaug

SEQ ID NO: 1583 - RNA, 20 nt, Artificial Sequence
  RPE65 RNA guide
aaaaacgcuggaccauaugu

SEQ ID NO: 1584 - RNA, 20 nt, Artificial Sequence
  RPE65 RNA guide
aaaacgcuggaccauauguu

SEQ ID NO: 1585 - RNA, 20 nt, Artificial Sequence
  RPE65 RNA guide
aaacauaugguccagcguuu

SEQ ID NO: 1586 - RNA, 20 nt, Artificial Sequence
  RPE65 RNA guide
aaacgcuggaccauauguuu

SEQ ID NO: 1587 - RNA, 20 nt, Artificial Sequence
  RPE65 RNA guide
aacauaugguccagcguuuu

SEQ ID NO: 1588 - RNA, 20 nt, Artificial Sequence
  RPE65 RNA guide
aacgcuggaccauauguuuc

SEQ ID NO: 1589 - RNA, 20 nt, Artificial Sequence
  RPE65 RNA guide
acauaugguccagcguuuuu

SEQ ID NO: 1590 - RNA, 20 nt, Artificial Sequence
  RPE65 RNA guide
acgcuggaccauauguuucc

SEQ ID NO: 1591 - RNA, 20 nt, Artificial Sequence
  RPE65 RNA guide
aggaaacauaugguccagcg

SEQ ID NO: 1592 - RNA, 20 nt, Artificial Sequence
  RPE65 RNA guide
aucuuaggaaacauaugguc

SEQ ID NO: 1593 - RNA, 20 nt, Artificial Sequence
  RPE65 RNA guide
cauaugguccagcguuuuuu

SEQ ID NO: 1594 - RNA, 20 nt, Artificial Sequence
  RPE65 RNA guide
cgcuggaccauauguuuccu

SEQ ID NO: 1595 - RNA, 20 nt, Artificial Sequence
  RPE65 RNA guide
cuuaggaaacauauggucca

SEQ ID NO: 1596 - RNA, 20 nt, Artificial Sequence
  RPE65 RNA guide
gaaacauaugguccagcguu

SEQ ID NO: 1597 - RNA, 20 nt, Artificial Sequence
  RPE65 RNA guide
ggaaacauaugguccagcgu

SEQ ID NO: 1598 - RNA, 20 nt, Artificial Sequence
  RPE65 RNA guide
uaggaaacauaugguccagc

SEQ ID NO: 1599 - RNA, 20 nt, Artificial Sequence
  RPE65 RNA guide
ucuuaggaaacauauggucc

SEQ ID NO: 1600 - RNA, 20 nt, Artificial Sequence
  RPE65 RNA guide
uuaggaaacauaugguccag

SEQ ID NO: 1601 - RNA, 21 nt, Artificial Sequence
  RPE65 RNA guide
aaaaaacgcuggaccauaugu

SEQ ID NO: 1602 - RNA, 21 nt, Artificial Sequence
  RPE65 RNA guide
aaaaacgcuggaccauauguu

SEQ ID NO: 1603 - RNA, 21 nt, Artificial Sequence
  RPE65 RNA guide
aaaacgcuggaccauauguuu

SEQ ID NO: 1604 - RNA, 21 nt, Artificial Sequence
  RPE65 RNA guide
aaacauaugguccagcguuuu

SEQ ID NO: 1605 - RNA, 21 nt, Artificial Sequence
  RPE65 RNA guide
aaacgcuggaccauauguuuc

SEQ ID NO: 1606 - RNA, 21 nt, Artificial Sequence
  RPE65 RNA guide
aacauaugguccagcguuuuu

SEQ ID NO: 1607 - RNA, 21 nt, Artificial Sequence
  RPE65 RNA guide
aacgcuggaccauauguuucc

SEQ ID NO: 1608 - RNA, 21 nt, Artificial Sequence
  RPE65 RNA guide
acauaugguccagcguuuuuu

SEQ ID NO: 1609 - RNA, 21 nt, Artificial Sequence
  RPE65 RNA guide
acgcuggaccauauguuuccu

SEQ ID NO: 1610 - RNA, 21 nt, Artificial Sequence
  RPE65 RNA guide
aggaaacauaugguccagcgu

SEQ ID NO: 1611 - RNA, 21 nt, Artificial Sequence
  RPE65 RNA guide
aucuuaggaaacauauggucc

SEQ ID NO: 1612 - RNA, 21 nt, Artificial Sequence
  RPE65 RNA guide
cgcuggaccauauguuuccua

SEQ ID NO: 1613 - RNA, 21 nt, Artificial Sequence
  RPE65 RNA guide
cuuaggaaacauaugguccag

SEQ ID NO: 1614 - RNA, 21 nt, Artificial Sequence
  RPE65 RNA guide
gaaacauaugguccagcguuu

SEQ ID NO: 1615 - RNA, 21 nt, Artificial Sequence
  RPE65 RNA guide
gaucuuaggaaacauaugguc

SEQ ID NO: 1616 - RNA, 21 nt, Artificial Sequence
  RPE65 RNA guide
ggaaacauaugguccagcguu

SEQ ID NO: 1617 - RNA, 21 nt, Artificial Sequence
  RPE65 RNA guide
uaggaaacauaugguccagcg

SEQ ID NO: 1618 - RNA, 21 nt, Artificial Sequence
  RPE65 RNA guide
ucuuaggaaacauauggucca

SEQ ID NO: 1619 - RNA, 21 nt, Artificial Sequence
  RPE65 RNA guide
uuaggaaacauaugguccagc

SEQ ID NO: 1620 - RNA, 22 nt, Artificial Sequence
  RPE65 RNA guide
aaaaaacgcuggaccauauguu

SEQ ID NO: 1621 - RNA, 22 nt, Artificial Sequence
  RPE65 RNA guide
aaaaacgcuggaccauauguuu

SEQ ID NO: 1622 - RNA, 22 nt, Artificial Sequence
  RPE65 RNA guide
aaaacgcuggaccauauguuuc

SEQ ID NO: 1623 - RNA, 22 nt, Artificial Sequence
  RPE65 RNA guide
aaacauaugguccagcguuuuu

SEQ ID NO: 1624 - RNA, 22 nt, Artificial Sequence
  RPE65 RNA guide
aaacgcuggaccauauguuucc

SEQ ID NO: 1625 - RNA, 22 nt, Artificial Sequence
  RPE65 RNA guide
aacauaugguccagcguuuuuu

SEQ ID NO: 1626 - RNA, 22 nt, Artificial Sequence
  RPE65 RNA guide
aacgcuggaccauauguuuccu

SEQ ID NO: 1627 - RNA, 22 nt, Artificial Sequence
  RPE65 RNA guide
acgcuggaccauauguuuccua

SEQ ID NO: 1628 - RNA, 22 nt, Artificial Sequence
  RPE65 RNA guide
agaucuuaggaaacauaugguc

SEQ ID NO: 1629 - RNA, 22 nt, Artificial Sequence
  RPE65 RNA guide
aggaaacauaugguccagcguu

SEQ ID NO: 1630 - RNA, 22 nt, Artificial Sequence
  RPE65 RNA guide
aucuuaggaaacauauggucca

SEQ ID NO: 1631 - RNA, 22 nt, Artificial Sequence
  RPE65 RNA guide
cgcuggaccauauguuuccuaa

SEQ ID NO: 1632 - RNA, 22 nt, Artificial Sequence
  RPE65 RNA guide
cuuaggaaacauaugguccagc

SEQ ID NO: 1633 - RNA, 22 nt, Artificial Sequence
  RPE65 RNA guide
gaaacauaugguccagcguuuu

SEQ ID NO: 1634 - RNA, 22 nt, Artificial Sequence
  RPE65 RNA guide
gaucuuaggaaacauauggucc

SEQ ID NO: 1635 - RNA, 22 nt, Artificial Sequence
  RPE65 RNA guide
ggaaacauaugguccagcguuu

SEQ ID NO: 1636 - RNA, 22 nt, Artificial Sequence
  RPE65 RNA guide
uaggaaacauaugguccagcgu

SEQ ID NO: 1637 - RNA, 22 nt, Artificial Sequence
  RPE65 RNA guide
ucuuaggaaacauaugguccag

SEQ ID NO: 1638 - RNA, 22 nt, Artificial Sequence
  RPE65 RNA guide
uuaggaaacauaugguccagcg

SEQ ID NO: 1639 - RNA, 20 nt, Artificial Sequence
  RPE65 RNA guide
aaaaaacacuggaccauaug

SEQ ID NO: 1640 - RNA, 20 nt, Artificial Sequence
  RPE65 RNA guide
aaaaacacuggaccauaugu

SEQ ID NO: 1641 - RNA, 20 nt, Artificial Sequence
  RPE65 RNA guide
aaaacacuggaccauauguu

SEQ ID NO: 1642 - RNA, 20 nt, Artificial Sequence
  RPE65 RNA guide
aaacacuggaccauauguuu

SEQ ID NO: 1643 - RNA, 20 nt, Artificial Sequence
  RPE65 RNA guide
aaacauaugguccaguguuu

SEQ ID NO: 1644 - RNA, 20 nt, Artificial Sequence
  RPE65 RNA guide
aacacuggaccauauguuuc

SEQ ID NO: 1645 - RNA, 20 nt, Artificial Sequence
  RPE65 RNA guide
aacauaugguccaguguuuu

SEQ ID NO: 1646 - RNA, 20 nt, Artificial Sequence
  RPE65 RNA guide
acacuggaccauauguuucc

SEQ ID NO: 1647 - RNA, 20 nt, Artificial Sequence
  RPE65 RNA guide
acauaugguccaguguuuuu

SEQ ID NO: 1648 - RNA, 20 nt, Artificial Sequence
  RPE65 RNA guide
aggaaacauaugguccagug

SEQ ID NO: 1649 - RNA, 20 nt, Artificial Sequence
  RPE65 RNA guide
cacuggaccauauguuuccu

SEQ ID NO: 1650 - RNA, 20 nt, Artificial Sequence
  RPE65 RNA guide
cauaugguccaguguuuuuu

SEQ ID NO: 1651 - RNA, 20 nt, Artificial Sequence
  RPE65 RNA guide
gaaacauaugguccaguguu

SEQ ID NO: 1652 - RNA, 20 nt, Artificial Sequence
  RPE65 RNA guide
ggaaacauaugguccagugu

SEQ ID NO: 1653 - RNA, 20 nt, Artificial Sequence
  RPE65 RNA guide
uaggaaacauaugguccagu

SEQ ID NO: 1654 - RNA, 21 nt, Artificial Sequence
  RPE65 RNA guide
aaaaaacacuggaccauaugu

SEQ ID NO: 1655 - RNA, 21 nt, Artificial Sequence
  RPE65 RNA guide
aaaaacacuggaccauauguu

SEQ ID NO: 1656 - RNA, 21 nt, Artificial Sequence
  RPE65 RNA guide
aaaacacuggaccauauguuu

SEQ ID NO: 1657 - RNA, 21 nt, Artificial Sequence
  RPE65 RNA guide
aaacacuggaccauauguuuc

SEQ ID NO: 1658 - RNA, 21 nt, Artificial Sequence
  RPE65 RNA guide
aaacauaugguccaguguuuu

SEQ ID NO: 1659 - RNA, 21 nt, Artificial Sequence
  RPE65 RNA guide
aacacuggaccauauguuucc

SEQ ID NO: 1660 - RNA, 21 nt, Artificial Sequence
  RPE65 RNA guide
aacauaugguccaguguuuuu

SEQ ID NO: 1661 - RNA, 21 nt, Artificial Sequence
  RPE65 RNA guide
acacuggaccauauguuuccu

SEQ ID NO: 1662 - RNA, 21 nt, Artificial Sequence
  RPE65 RNA guide
acauaugguccaguguuuuuu

SEQ ID NO: 1663 - RNA, 21 nt, Artificial Sequence
  RPE65 RNA guide
aggaaacauaugguccagugu

SEQ ID NO: 1664 - RNA, 21 nt, Artificial Sequence
  RPE65 RNA guide
cacuggaccauauguuuccua

SEQ ID NO: 1665 - RNA, 21 nt, Artificial Sequence
  RPE65 RNA guide
gaaacauaugguccaguguuu

SEQ ID NO: 1666 - RNA, 21 nt, Artificial Sequence
  RPE65 RNA guide
ggaaacauaugguccaguguu

SEQ ID NO: 1667 - RNA, 21 nt, Artificial Sequence
  RPE65 RNA guide
uaggaaacauaugguccagug

SEQ ID NO: 1668 - RNA, 21 nt, Artificial Sequence
  RPE65 RNA guide
uuaggaaacauaugguccagu

SEQ ID NO: 1669 - RNA, 22 nt, Artificial Sequence
  RPE65 RNA guide
aaaaaacacuggaccauauguu

SEQ ID NO: 1670 - RNA, 22 nt, Artificial Sequence
  RPE65 RNA guide
aaaaacacuggaccauauguuu

SEQ ID NO: 1671 - RNA, 22 nt, Artificial Sequence
  RPE65 RNA guide
aaaacacuggaccauauguuuc

SEQ ID NO: 1672 - RNA, 22 nt, Artificial Sequence
  RPE65 RNA guide
aaacacuggaccauauguuucc

SEQ ID NO: 1673 - RNA, 22 nt, Artificial Sequence
  RPE65 RNA guide
aaacauaugguccaguguuuuu

SEQ ID NO: 1674 - RNA, 22 nt, Artificial Sequence
  RPE65 RNA guide
aacacuggaccauauguuuccu

SEQ ID NO: 1675 - RNA, 22 nt, Artificial Sequence
  RPE65 RNA guide
aacauaugguccaguguuuuuu

SEQ ID NO: 1676 - RNA, 22 nt, Artificial Sequence
  RPE65 RNA guide
acacuggaccauauguuuccua

SEQ ID NO: 1677 - RNA, 22 nt, Artificial Sequence
  RPE65 RNA guide
aggaaacauaugguccaguguu

SEQ ID NO: 1678 - RNA, 22 nt, Artificial Sequence
  RPE65 RNA guide
cacuggaccauauguuuccuaa

SEQ ID NO: 1679 - RNA, 22 nt, Artificial Sequence
  RPE65 RNA guide
cuuaggaaacauaugguccagu

SEQ ID NO: 1680 - RNA, 22 nt, Artificial Sequence
  RPE65 RNA guide
gaaacauaugguccaguguuuu

SEQ ID NO: 1681 - RNA, 22 nt, Artificial Sequence
  RPE65 RNA guide
ggaaacauaugguccaguguuu

SEQ ID NO: 1682 - RNA, 22 nt, Artificial Sequence
  RPE65 RNA guide
uaggaaacauaugguccagugu

SEQ ID NO: 1683 - RNA, 22 nt, Artificial Sequence
  RPE65 RNA guide
uuaggaaacauaugguccagug

SEQ ID NO: 1684 - RNA, 20 nt, Artificial Sequence
  RPE65 RNA guide
aagucccuguccucaugaag

SEQ ID NO: 1685 - RNA, 20 nt, Artificial Sequence
  RPE65 RNA guide
aauguaggcuucaugaggac

SEQ ID NO: 1686 - RNA, 20 nt, Artificial Sequence
  RPE65 RNA guide
acagggacuucacucuccaa

SEQ ID NO: 1687 - RNA, 20 nt, Artificial Sequence
  RPE65 RNA guide
agaauguaggcuucaugagg

SEQ ID NO: 1688 - RNA, 20 nt, Artificial Sequence
  RPE65 RNA guide
agagugaagucccuguccuc

SEQ ID NO: 1689 - RNA, 20 nt, Artificial Sequence
  RPE65 RNA guide
aggacagggacuucacucuc

SEQ ID NO: 1690 - RNA, 20 nt, Artificial Sequence
  RPE65 RNA guide
aggcuucaugaggacaggga

SEQ ID NO: 1691 - RNA, 20 nt, Artificial Sequence
  RPE65 RNA guide
agggacuucacucuccaaaa

SEQ ID NO: 1692 - RNA, 20 nt, Artificial Sequence
  RPE65 RNA guide
agucccuguccucaugaagc

SEQ ID NO: 1693 - RNA, 20 nt, Artificial Sequence
  RPE65 RNA guide
agugaagucccuguccucau

SEQ ID NO: 1694 - RNA, 20 nt, Artificial Sequence
  RPE65 RNA guide
augaggacagggacuucacu

SEQ ID NO: 1695 - RNA, 20 nt, Artificial Sequence
  RPE65 RNA guide
auguaggcuucaugaggaca

SEQ ID NO: 1696 - RNA, 20 nt, Artificial Sequence
  RPE65 RNA guide
auguuuuggagagugaaguc

SEQ ID NO: 1697 - RNA, 20 nt, Artificial Sequence
  RPE65 RNA guide
cagggacuucacucuccaaa

SEQ ID NO: 1698 - RNA, 20 nt, Artificial Sequence
  RPE65 RNA guide
caugaggacagggacuucac

SEQ ID NO: 1699 - RNA, 20 nt, Artificial Sequence
  RPE65 RNA guide
cccuguccucaugaagccua

SEQ ID NO: 1700 - RNA, 20 nt, Artificial Sequence
  RPE65 RNA guide
ccuguccucaugaagccuac

SEQ ID NO: 1701 - RNA, 20 nt, Artificial Sequence
  RPE65 RNA guide
cuucaugaggacagggacuu

SEQ ID NO: 1702 - RNA, 20 nt, Artificial Sequence
  RPE65 RNA guide
gaagucccuguccucaugaa

SEQ ID NO: 1703 - RNA, 20 nt, Artificial Sequence
  RPE65 RNA guide
gaauguaggcuucaugagga

SEQ ID NO: 1704 - RNA, 20 nt, Artificial Sequence
  RPE65 RNA guide
gacagggacuucacucucca

SEQ ID NO: 1705 - RNA, 20 nt, Artificial Sequence
  RPE65 RNA guide
gagagugaagucccuguccu

SEQ ID NO: 1706 - RNA, 20 nt, Artificial Sequence
  RPE65 RNA guide
gaggacagggacuucacucu

SEQ ID NO: 1707 - RNA, 20 nt, Artificial Sequence
  RPE65 RNA guide
gagugaagucccuguccuca

SEQ ID NO: 1708 - RNA, 20 nt, Artificial Sequence
  RPE65 RNA guide
gauguuuuggagagugaagu

SEQ ID NO: 1709 - RNA, 20 nt, Artificial Sequence
  RPE65 RNA guide
gcuucaugaggacagggacu

SEQ ID NO: 1710 - RNA, 20 nt, Artificial Sequence
  RPE65 RNA guide
ggacagggacuucacucucc

SEQ ID NO: 1711 - RNA, 20 nt, Artificial Sequence
  RPE65 RNA guide
ggagagugaagucccugucc

SEQ ID NO: 1712 - RNA, 20 nt, Artificial Sequence
  RPE65 RNA guide
ggauguuuuggagagugaag

SEQ ID NO: 1713 - RNA, 20 nt, Artificial Sequence
  RPE65 RNA guide
ggcuucaugaggacagggac

SEQ ID NO: 1714 - RNA, 20 nt, Artificial Sequence
  RPE65 RNA guide
guaggcuucaugaggacagg

SEQ ID NO: 1715 - RNA, 20 nt, Artificial Sequence
  RPE65 RNA guide
gucccuguccucaugaagcc

SEQ ID NO: 1716 - RNA, 20 nt, Artificial Sequence
  RPE65 RNA guide
gugaagucccuguccucaug

SEQ ID NO: 1717 - RNA, 20 nt, Artificial Sequence
  RPE65 RNA guide
guuuuggagagugaaguccc

SEQ ID NO: 1718 - RNA, 20 nt, Artificial Sequence
  RPE65 RNA guide
uaggcuucaugaggacaggg

SEQ ID NO: 1719 - RNA, 20 nt, Artificial Sequence
  RPE65 RNA guide
ucaugaggacagggacuuca

SEQ ID NO: 1720 - RNA, 20 nt, Artificial Sequence
  RPE65 RNA guide
ucccuguccucaugaagccu

SEQ ID NO: 1721 - RNA, 20 nt, Artificial Sequence
  RPE65 RNA guide
ugaagucccuguccucauga

SEQ ID NO: 1722 - RNA, 20 nt, Artificial Sequence
  RPE65 RNA guide
ugaggacagggacuucacuc

SEQ ID NO: 1723 - RNA, 20 nt, Artificial Sequence
  RPE65 RNA guide
uggagagugaagucccuguc

SEQ ID NO: 1724 - RNA, 20 nt, Artificial Sequence
  RPE65 RNA guide
uguaggcuucaugaggacag

SEQ ID NO: 1725 - RNA, 20 nt, Artificial Sequence
  RPE65 RNA guide
uguuuuggagagugaagucc

SEQ ID NO: 1726 - RNA, 20 nt, Artificial Sequence
  RPE65 RNA guide
uucaugaggacagggacuuc

SEQ ID NO: 1727 - RNA, 20 nt, Artificial Sequence
  RPE65 RNA guide
uuggagagugaagucccugu

SEQ ID NO: 1728 - RNA, 20 nt, Artificial Sequence
  RPE65 RNA guide
uuuggagagugaagucccug

SEQ ID NO: 1729 - RNA, 20 nt, Artificial Sequence
  RPE65 RNA guide
uuuuggagagugaagucccu

SEQ ID NO: 1730 - RNA, 21 nt, Artificial Sequence
  RPE65 RNA guide
aagucccuguccucaugaagc

SEQ ID NO: 1731 - RNA, 21 nt, Artificial Sequence
  RPE65 RNA guide
aauguaggcuucaugaggaca

SEQ ID NO: 1732 - RNA, 21 nt, Artificial Sequence
  RPE65 RNA guide
acagggacuucacucuccaaa

SEQ ID NO: 1733 - RNA, 21 nt, Artificial Sequence
  RPE65 RNA guide
agaauguaggcuucaugagga

SEQ ID NO: 1734 - RNA, 21 nt, Artificial Sequence
  RPE65 RNA guide
agagugaagucccuguccuca

SEQ ID NO: 1735 - RNA, 21 nt, Artificial Sequence
  RPE65 RNA guide
aggacagggacuucacucucc

SEQ ID NO: 1736 - RNA, 21 nt, Artificial Sequence
  RPE65 RNA guide
aggauguuuuggagagugaag

SEQ ID NO: 1737 - RNA, 21 nt, Artificial Sequence
  RPE65 RNA guide
aggcuucaugaggacagggac

SEQ ID NO: 1738 - RNA, 21 nt, Artificial Sequence
  RPE65 RNA guide
agggacuucacucuccaaaac

SEQ ID NO: 1739 - RNA, 21 nt, Artificial Sequence
  RPE65 RNA guide
agucccuguccucaugaagcc

SEQ ID NO: 1740 - RNA, 21 nt, Artificial Sequence
  RPE65 RNA guide
agugaagucccuguccucaug

SEQ ID NO: 1741 - RNA, 21 nt, Artificial Sequence
  RPE65 RNA guide
augaggacagggacuucacuc

SEQ ID NO: 1742 - RNA, 21 nt, Artificial Sequence
  RPE65 RNA guide
auguaggcuucaugaggacag

SEQ ID NO: 1743 - RNA, 21 nt, Artificial Sequence
  RPE65 RNA guide
auguuuuggagagugaagucc

SEQ ID NO: 1744 - RNA, 21 nt, Artificial Sequence
  RPE65 RNA guide
cagggacuucacucuccaaaa

SEQ ID NO: 1745 - RNA, 21 nt, Artificial Sequence
  RPE65 RNA guide
caugaggacagggacuucacu

SEQ ID NO: 1746 - RNA, 21 nt, Artificial Sequence
  RPE65 RNA guide
cccuguccucaugaagccuac

SEQ ID NO: 1747 - RNA, 21 nt, Artificial Sequence
  RPE65 RNA guide
ccuguccucaugaagccuaca

SEQ ID NO: 1748 - RNA, 21 nt, Artificial Sequence
  RPE65 RNA guide
cuucaugaggacagggacuuc

SEQ ID NO: 1749 - RNA, 21 nt, Artificial Sequence
  RPE65 RNA guide
gaagucccuguccucaugaag

SEQ ID NO: 1750 - RNA, 21 nt, Artificial Sequence
  RPE65 RNA guide
gaauguaggcuucaugaggac

SEQ ID NO: 1751 - RNA, 21 nt, Artificial Sequence
  RPE65 RNA guide
gacagggacuucacucuccaa

SEQ ID NO: 1752 - RNA, 21 nt, Artificial Sequence
  RPE65 RNA guide
gagagugaagucccuguccuc

SEQ ID NO: 1753 - RNA, 21 nt, Artificial Sequence
  RPE65 RNA guide
gaggacagggacuucacucuc

SEQ ID NO: 1754 - RNA, 21 nt, Artificial Sequence
  RPE65 RNA guide
gagugaagucccuguccucau

SEQ ID NO: 1755 - RNA, 21 nt, Artificial Sequence
  RPE65 RNA guide
gauguuuuggagagugaaguc

SEQ ID NO: 1756 - RNA, 21 nt, Artificial Sequence
  RPE65 RNA guide
gcuucaugaggacagggacuu

SEQ ID NO: 1757 - RNA, 21 nt, Artificial Sequence
  RPE65 RNA guide
ggacagggacuucacucucca

SEQ ID NO: 1758 - RNA, 21 nt, Artificial Sequence
  RPE65 RNA guide
ggagagugaagucccuguccu

SEQ ID NO: 1759 - RNA, 21 nt, Artificial Sequence
  RPE65 RNA guide
ggauguuuuggagagugaagu

SEQ ID NO: 1760 - RNA, 21 nt, Artificial Sequence
  RPE65 RNA guide
ggcuucaugaggacagggacu

SEQ ID NO: 1761 - RNA, 21 nt, Artificial Sequence
  RPE65 RNA guide
guaggcuucaugaggacaggg

SEQ ID NO: 1762 - RNA, 21 nt, Artificial Sequence
  RPE65 RNA guide
gucccuguccucaugaagccu

SEQ ID NO: 1763 - RNA, 21 nt, Artificial Sequence
  RPE65 RNA guide
gugaagucccuguccucauga

SEQ ID NO: 1764 - RNA, 21 nt, Artificial Sequence
  RPE65 RNA guide
guuuuggagagugaagucccu

SEQ ID NO: 1765 - RNA, 21 nt, Artificial Sequence
  RPE65 RNA guide
uagaauguaggcuucaugagg

SEQ ID NO: 1766 - RNA, 21 nt, Artificial Sequence
  RPE65 RNA guide
uaggcuucaugaggacaggga

SEQ ID NO: 1767 - RNA, 21 nt, Artificial Sequence
  RPE65 RNA guide
ucaugaggacagggacuucac

SEQ ID NO: 1768 - RNA, 21 nt, Artificial Sequence
  RPE65 RNA guide
ucccuguccucaugaagccua

SEQ ID NO: 1769 - RNA, 21 nt, Artificial Sequence
  RPE65 RNA guide
ugaagucccuguccucaugaa

SEQ ID NO: 1770 - RNA, 21 nt, Artificial Sequence
  RPE65 RNA guide
ugaggacagggacuucacucu

SEQ ID NO: 1771 - RNA, 21 nt, Artificial Sequence
  RPE65 RNA guide
uggagagugaagucccugucc

SEQ ID NO: 1772 - RNA, 21 nt, Artificial Sequence
  RPE65 RNA guide
uguaggcuucaugaggacagg

SEQ ID NO: 1773 - RNA, 21 nt, Artificial Sequence
  RPE65 RNA guide
uguuuuggagagugaaguccc

SEQ ID NO: 1774 - RNA, 21 nt, Artificial Sequence
  RPE65 RNA guide
uucaugaggacagggacuuca

SEQ ID NO: 1775 - RNA, 21 nt, Artificial Sequence
  RPE65 RNA guide
uuggagagugaagucccuguc

SEQ ID NO: 1776 - RNA, 21 nt, Artificial Sequence
  RPE65 RNA guide
uuuggagagugaagucccugu

SEQ ID NO: 1777 - RNA, 21 nt, Artificial Sequence
  RPE65 RNA guide
uuuuggagagugaagucccug

SEQ ID NO: 1778 - RNA, 22 nt, Artificial Sequence
  RPE65 RNA guide
aagucccuguccucaugaagcc

SEQ ID NO: 1779 - RNA, 22 nt, Artificial Sequence
  RPE65 RNA guide
aauguaggcuucaugaggacag

SEQ ID NO: 1780 - RNA, 22 nt, Artificial Sequence
  RPE65 RNA guide
acagggacuucacucuccaaaa

SEQ ID NO: 1781 - RNA, 22 nt, Artificial Sequence
  RPE65 RNA guide
agaauguaggcuucaugaggac

SEQ ID NO: 1782 - RNA, 22 nt, Artificial Sequence
  RPE65 RNA guide
agagugaagucccuguccucau

SEQ ID NO: 1783 - RNA, 22 nt, Artificial Sequence
  RPE65 RNA guide
aggacagggacuucacucucca

SEQ ID NO: 1784 - RNA, 22 nt, Artificial Sequence
  RPE65 RNA guide
aggauguuuuggagagugaagu

SEQ ID NO: 1785 - RNA, 22 nt, Artificial Sequence
  RPE65 RNA guide
aggcuucaugaggacagggacu

SEQ ID NO: 1786 - RNA, 22 nt, Artificial Sequence
  RPE65 RNA guide
agggacuucacucuccaaaaca

SEQ ID NO: 1787 - RNA, 22 nt, Artificial Sequence
  RPE65 RNA guide
agucccuguccucaugaagccu

SEQ ID NO: 1788 - RNA, 22 nt, Artificial Sequence
  RPE65 RNA guide
agugaagucccuguccucauga

SEQ ID NO: 1789 - RNA, 22 nt, Artificial Sequence
  RPE65 RNA guide
augaggacagggacuucacucu

SEQ ID NO: 1790 - RNA, 22 nt, Artificial Sequence
  RPE65 RNA guide
auguaggcuucaugaggacagg

SEQ ID NO: 1791 - RNA, 22 nt, Artificial Sequence
  RPE65 RNA guide
auguuuuggagagugaaguccc

SEQ ID NO: 1792 - RNA, 22 nt, Artificial Sequence
  RPE65 RNA guide
caggauguuuuggagagugaag

SEQ ID NO: 1793 - RNA, 22 nt, Artificial Sequence
  RPE65 RNA guide
cagggacuucacucuccaaaac

SEQ ID NO: 1794 - RNA, 22 nt, Artificial Sequence
  RPE65 RNA guide
caugaggacagggacuucacuc

SEQ ID NO: 1795 - RNA, 22 nt, Artificial Sequence
  RPE65 RNA guide
cccuguccucaugaagccuaca

SEQ ID NO: 1796 - RNA, 22 nt, Artificial Sequence
  RPE65 RNA guide
ccuguccucaugaagccuacau

SEQ ID NO: 1797 - RNA, 22 nt, Artificial Sequence
  RPE65 RNA guide
cuagaauguaggcuucaugagg

SEQ ID NO: 1798 - RNA, 22 nt, Artificial Sequence
  RPE65 RNA guide
cuucaugaggacagggacuuca

SEQ ID NO: 1799 - RNA, 22 nt, Artificial Sequence
  RPE65 RNA guide
gaagucccuguccucaugaagc

SEQ ID NO: 1800 - RNA, 22 nt, Artificial Sequence
  RPE65 RNA guide
gaauguaggcuucaugaggaca

SEQ ID NO: 1801 - RNA, 22 nt, Artificial Sequence
  RPE65 RNA guide
gacagggacuucacucuccaaa

SEQ ID NO: 1802 - RNA, 22 nt, Artificial Sequence
  RPE65 RNA guide
gagagugaagucccuguccuca

SEQ ID NO: 1803 - RNA, 22 nt, Artificial Sequence
  RPE65 RNA guide
gaggacagggacuucacucucc

SEQ ID NO: 1804 - RNA, 22 nt, Artificial Sequence
  RPE65 RNA guide
gagugaagucccuguccucaug

SEQ ID NO: 1805 - RNA, 22 nt, Artificial Sequence
  RPE65 RNA guide
gauguuuuggagagugaagucc

SEQ ID NO: 1806 - RNA, 22 nt, Artificial Sequence
  RPE65 RNA guide
gcuucaugaggacagggacuuc

SEQ ID NO: 1807 - RNA, 22 nt, Artificial Sequence
  RPE65 RNA guide
ggacagggacuucacucuccaa

SEQ ID NO: 1808 - RNA, 22 nt, Artificial Sequence
  RPE65 RNA guide
ggagagugaagucccuguccuc

SEQ ID NO: 1809 - RNA, 22 nt, Artificial Sequence
  RPE65 RNA guide
ggauguuuuggagagugaaguc

SEQ ID NO: 1810 - RNA, 22 nt, Artificial Sequence
  RPE65 RNA guide
ggcuucaugaggacagggacuu

SEQ ID NO: 1811 - RNA, 22 nt, Artificial Sequence
  RPE65 RNA guide
guaggcuucaugaggacaggga

SEQ ID NO: 1812 - RNA, 22 nt, Artificial Sequence
  RPE65 RNA guide
gucccuguccucaugaagccua

SEQ ID NO: 1813 - RNA, 22 nt, Artificial Sequence
  RPE65 RNA guide
gugaagucccuguccucaugaa

SEQ ID NO: 1814 - RNA, 22 nt, Artificial Sequence
  RPE65 RNA guide
guuuuggagagugaagucccug

SEQ ID NO: 1815 - RNA, 22 nt, Artificial Sequence
  RPE65 RNA guide
uagaauguaggcuucaugagga

SEQ ID NO: 1816 - RNA, 22 nt, Artificial Sequence
  RPE65 RNA guide
uaggcuucaugaggacagggac

SEQ ID NO: 1817 - RNA, 22 nt, Artificial Sequence
  RPE65 RNA guide
ucaugaggacagggacuucacu

SEQ ID NO: 1818 - RNA, 22 nt, Artificial Sequence
  RPE65 RNA guide
ucccuguccucaugaagccuac

SEQ ID NO: 1819 - RNA, 22 nt, Artificial Sequence
  RPE65 RNA guide
ugaagucccuguccucaugaag

SEQ ID NO: 1820 - RNA, 22 nt, Artificial Sequence
  RPE65 RNA guide
ugaggacagggacuucacucuc

SEQ ID NO: 1821 - RNA, 22 nt, Artificial Sequence
  RPE65 RNA guide
uggagagugaagucccuguccu

SEQ ID NO: 1822 - RNA, 22 nt, Artificial Sequence
  RPE65 RNA guide
uguaggcuucaugaggacaggg

SEQ ID NO: 1823 - RNA, 22 nt, Artificial Sequence
  RPE65 RNA guide
uguuuuggagagugaagucccu

SEQ ID NO: 1824 - RNA, 22 nt, Artificial Sequence
  RPE65 RNA guide
uucaugaggacagggacuucac

SEQ ID NO: 1825 - RNA, 22 nt, Artificial Sequence
  RPE65 RNA guide
uuggagagugaagucccugucc

SEQ ID NO: 1826 - RNA, 22 nt, Artificial Sequence
  RPE65 RNA guide
uuuggagagugaagucccuguc

SEQ ID NO: 1827 - RNA, 22 nt, Artificial Sequence
  RPE65 RNA guide
uuuuggagagugaagucccugu

SEQ ID NO: 1828 - RNA, 20 nt, Artificial Sequence
  RPE65 RNA guide
aaguccguguccucaugaag

SEQ ID NO: 1829 - RNA, 20 nt, Artificial Sequence
  RPE65 RNA guide
acacggacuucacucuccaa

SEQ ID NO: 1830 - RNA, 20 nt, Artificial Sequence
  RPE65 RNA guide
acggacuucacucuccaaaa

SEQ ID NO: 1831 - RNA, 20 nt, Artificial Sequence
  RPE65 RNA guide
agagugaaguccguguccuc

SEQ ID NO: 1832 - RNA, 20 nt, Artificial Sequence
  RPE65 RNA guide
aggacacggacuucacucuc

SEQ ID NO: 1833 - RNA, 20 nt, Artificial Sequence
  RPE65 RNA guide
aggcuucaugaggacacgga

SEQ ID NO: 1834 - RNA, 20 nt, Artificial Sequence
  RPE65 RNA guide
aguccguguccucaugaagc

SEQ ID NO: 1835 - RNA, 20 nt, Artificial Sequence
  RPE65 RNA guide
agugaaguccguguccucau

SEQ ID NO: 1836 - RNA, 20 nt, Artificial Sequence
  RPE65 RNA guide
augaggacacggacuucacu

SEQ ID NO: 1837 - RNA, 20 nt, Artificial Sequence
  RPE65 RNA guide
cacggacuucacucuccaaa

SEQ ID NO: 1838 - RNA, 20 nt, Artificial Sequence
  RPE65 RNA guide
caugaggacacggacuucac

SEQ ID NO: 1839 - RNA, 20 nt, Artificial Sequence
  RPE65 RNA guide
ccguguccucaugaagccua

SEQ ID NO: 1840 - RNA, 20 nt, Artificial Sequence
  RPE65 RNA guide
cguguccucaugaagccuac

SEQ ID NO: 1841 - RNA, 20 nt, Artificial Sequence
  RPE65 RNA guide
cuucaugaggacacggacuu

SEQ ID NO: 1842 - RNA, 20 nt, Artificial Sequence
  RPE65 RNA guide
gaaguccguguccucaugaa

SEQ ID NO: 1843 - RNA, 20 nt, Artificial Sequence
  RPE65 RNA guide
gacacggacuucacucucca

SEQ ID NO: 1844 - RNA, 20 nt, Artificial Sequence
  RPE65 RNA guide
gagagugaaguccguguccu

SEQ ID NO: 1845 - RNA, 20 nt, Artificial Sequence
  RPE65 RNA guide
gaggacacggacuucacucu

SEQ ID NO: 1846 - RNA, 20 nt, Artificial Sequence
  RPE65 RNA guide
gagugaaguccguguccuca

SEQ ID NO: 1847 - RNA, 20 nt, Artificial Sequence
  RPE65 RNA guide
gcuucaugaggacacggacu

SEQ ID NO: 1848 - RNA, 20 nt, Artificial Sequence
  RPE65 RNA guide
ggacacggacuucacucucc

SEQ ID NO: 1849 - RNA, 20 nt, Artificial Sequence
  RPE65 RNA guide
ggagagugaaguccgugucc

SEQ ID NO: 1850 - RNA, 20 nt, Artificial Sequence
  RPE65 RNA guide
ggcuucaugaggacacggac

SEQ ID NO: 1851 - RNA, 20 nt, Artificial Sequence
  RPE65 RNA guide
guaggcuucaugaggacacg

SEQ ID NO: 1852 - RNA, 20 nt, Artificial Sequence
  RPE65 RNA guide
guccguguccucaugaagcc

SEQ ID NO: 1853 - RNA, 20 nt, Artificial Sequence
  RPE65 RNA guide
gugaaguccguguccucaug

SEQ ID NO: 1854 - RNA, 20 nt, Artificial Sequence
  RPE65 RNA guide
guuuuggagagugaaguccg

SEQ ID NO: 1855 - RNA, 20 nt, Artificial Sequence
  RPE65 RNA guide
uaggcuucaugaggacacgg

SEQ ID NO: 1856 - RNA, 20 nt, Artificial Sequence
  RPE65 RNA guide
ucaugaggacacggacuuca

SEQ ID NO: 1857 - RNA, 20 nt, Artificial Sequence
  RPE65 RNA guide
uccguguccucaugaagccu

SEQ ID NO: 1858 - RNA, 20 nt, Artificial Sequence
  RPE65 RNA guide
ugaaguccguguccucauga

SEQ ID NO: 1859 - RNA, 20 nt, Artificial Sequence
  RPE65 RNA guide
ugaggacacggacuucacuc

SEQ ID NO: 1860 - RNA, 20 nt, Artificial Sequence
  RPE65 RNA guide
uggagagugaaguccguguc

SEQ ID NO: 1861 - RNA, 20 nt, Artificial Sequence
  RPE65 RNA guide
uguaggcuucaugaggacac

SEQ ID NO: 1862 - RNA, 20 nt, Artificial Sequence
  RPE65 RNA guide
uucaugaggacacggacuuc

SEQ ID NO: 1863 - RNA, 20 nt, Artificial Sequence
  RPE65 RNA guide
uuggagagugaaguccgugu

SEQ ID NO: 1864 - RNA, 20 nt, Artificial Sequence
  RPE65 RNA guide
uuuggagagugaaguccgug

SEQ ID NO: 1865 - RNA, 20 nt, Artificial Sequence
  RPE65 RNA guide
uuuuggagagugaaguccgu

SEQ ID NO: 1866 - RNA, 21 nt, Artificial Sequence
  RPE65 RNA guide
aaguccguguccucaugaagc

SEQ ID NO: 1867 - RNA, 21 nt, Artificial Sequence
  RPE65 RNA guide
acacggacuucacucuccaaa

SEQ ID NO: 1868 - RNA, 21 nt, Artificial Sequence
  RPE65 RNA guide
acggacuucacucuccaaaac

SEQ ID NO: 1869 - RNA, 21 nt, Artificial Sequence
  RPE65 RNA guide
agagugaaguccguguccuca

SEQ ID NO: 1870 - RNA, 21 nt, Artificial Sequence
  RPE65 RNA guide
aggacacggacuucacucucc

SEQ ID NO: 1871 - RNA, 21 nt, Artificial Sequence
  RPE65 RNA guide
aggcuucaugaggacacggac

SEQ ID NO: 1872 - RNA, 21 nt, Artificial Sequence
  RPE65 RNA guide
aguccguguccucaugaagcc

SEQ ID NO: 1873 - RNA, 21 nt, Artificial Sequence
  RPE65 RNA guide
agugaaguccguguccucaug

SEQ ID NO: 1874 - RNA, 21 nt, Artificial Sequence
  RPE65 RNA guide
augaggacacggacuucacuc

SEQ ID NO: 1875 - RNA, 21 nt, Artificial Sequence
  RPE65 RNA guide
auguaggcuucaugaggacac

SEQ ID NO: 1876 - RNA, 21 nt, Artificial Sequence
  RPE65 RNA guide
cacggacuucacucuccaaaa

SEQ ID NO: 1877 - RNA, 21 nt, Artificial Sequence
  RPE65 RNA guide
caugaggacacggacuucacu

SEQ ID NO: 1878 - RNA, 21 nt, Artificial Sequence
  RPE65 RNA guide
ccguguccucaugaagccuac

SEQ ID NO: 1879 - RNA, 21 nt, Artificial Sequence
  RPE65 RNA guide
cguguccucaugaagccuaca

SEQ ID NO: 1880 - RNA, 21 nt, Artificial Sequence
  RPE65 RNA guide
cuucaugaggacacggacuuc

SEQ ID NO: 1881 - RNA, 21 nt, Artificial Sequence
  RPE65 RNA guide
gaaguccguguccucaugaag

SEQ ID NO: 1882 - RNA, 21 nt, Artificial Sequence
  RPE65 RNA guide
gacacggacuucacucuccaa

SEQ ID NO: 1883 - RNA, 21 nt, Artificial Sequence
  RPE65 RNA guide
gagagugaaguccguguccuc

SEQ ID NO: 1884 - RNA, 21 nt, Artificial Sequence
  RPE65 RNA guide
gaggacacggacuucacucuc

SEQ ID NO: 1885 - RNA, 21 nt, Artificial Sequence
  RPE65 RNA guide
gagugaaguccguguccucau

SEQ ID NO: 1886 - RNA, 21 nt, Artificial Sequence
  RPE65 RNA guide
gcuucaugaggacacggacuu

SEQ ID NO: 1887 - RNA, 21 nt, Artificial Sequence
  RPE65 RNA guide
ggacacggacuucacucucca

SEQ ID NO: 1888 - RNA, 21 nt, Artificial Sequence
  RPE65 RNA guide
ggagagugaaguccguguccu

SEQ ID NO: 1889 - RNA, 21 nt, Artificial Sequence
  RPE65 RNA guide
ggcuucaugaggacacggacu

SEQ ID NO: 1890 - RNA, 21 nt, Artificial Sequence
  RPE65 RNA guide
guaggcuucaugaggacacgg

SEQ ID NO: 1891 - RNA, 21 nt, Artificial Sequence
  RPE65 RNA guide
guccguguccucaugaagccu

SEQ ID NO: 1892 - RNA, 21 nt, Artificial Sequence
  RPE65 RNA guide
gugaaguccguguccucauga

SEQ ID NO: 1893 - RNA, 21 nt, Artificial Sequence
  RPE65 RNA guide
guuuuggagagugaaguccgu

SEQ ID NO: 1894 - RNA, 21 nt, Artificial Sequence
  RPE65 RNA guide
uaggcuucaugaggacacgga

SEQ ID NO: 1895 - RNA, 21 nt, Artificial Sequence
  RPE65 RNA guide
ucaugaggacacggacuucac

SEQ ID NO: 1896 - RNA, 21 nt, Artificial Sequence
  RPE65 RNA guide
uccguguccucaugaagccua

SEQ ID NO: 1897 - RNA, 21 nt, Artificial Sequence
  RPE65 RNA guide
ugaaguccguguccucaugaa

SEQ ID NO: 1898 - RNA, 21 nt, Artificial Sequence
  RPE65 RNA guide
ugaggacacggacuucacucu

SEQ ID NO: 1899 - RNA, 21 nt, Artificial Sequence
  RPE65 RNA guide
uggagagugaaguccgugucc

SEQ ID NO: 1900 - RNA, 21 nt, Artificial Sequence
  RPE65 RNA guide
uguaggcuucaugaggacacg

SEQ ID NO: 1901 - RNA, 21 nt, Artificial Sequence
  RPE65 RNA guide
uguuuuggagagugaaguccg

SEQ ID NO: 1902 - RNA, 21 nt, Artificial Sequence
  RPE65 RNA guide
uucaugaggacacggacuuca

SEQ ID NO: 1903 - RNA, 21 nt, Artificial Sequence
  RPE65 RNA guide
uuggagagugaaguccguguc

SEQ ID NO: 1904 - RNA, 21 nt, Artificial Sequence
  RPE65 RNA guide
uuuggagagugaaguccgugu

SEQ ID NO: 1905 - RNA, 21 nt, Artificial Sequence
  RPE65 RNA guide
uuuuggagagugaaguccgug

SEQ ID NO: 1906 - RNA, 22 nt, Artificial Sequence
  RPE65 RNA guide
aaguccguguccucaugaagcc

SEQ ID NO: 1907 - RNA, 22 nt, Artificial Sequence
  RPE65 RNA guide
aauguaggcuucaugaggacac

SEQ ID NO: 1908 - RNA, 22 nt, Artificial Sequence
  RPE65 RNA guide
acacggacuucacucuccaaaa

SEQ ID NO: 1909 - RNA, 22 nt, Artificial Sequence
  RPE65 RNA guide
acggacuucacucuccaaaaca

SEQ ID NO: 1910 - RNA, 22 nt, Artificial Sequence
  RPE65 RNA guide
agagugaaguccguguccucau

SEQ ID NO: 1911 - RNA, 22 nt, Artificial Sequence
  RPE65 RNA guide
aggacacggacuucacucucca

SEQ ID NO: 1912 - RNA, 22 nt, Artificial Sequence
  RPE65 RNA guide
aggcuucaugaggacacggacu

SEQ ID NO: 1913 - RNA, 22 nt, Artificial Sequence
  RPE65 RNA guide
aguccguguccucaugaagccu

SEQ ID NO: 1914 - RNA, 22 nt, Artificial Sequence
  RPE65 RNA guide
agugaaguccguguccucauga

SEQ ID NO: 1915 - RNA, 22 nt, Artificial Sequence
  RPE65 RNA guide
augaggacacggacuucacucu

SEQ ID NO: 1916 - RNA, 22 nt, Artificial Sequence
  RPE65 RNA guide
auguaggcuucaugaggacacg

SEQ ID NO: 1917 - RNA, 22 nt, Artificial Sequence
  RPE65 RNA guide
auguuuuggagagugaaguccg

SEQ ID NO: 1918 - RNA, 22 nt, Artificial Sequence
  RPE65 RNA guide
cacggacuucacucuccaaaac

SEQ ID NO: 1919 - RNA, 22 nt, Artificial Sequence
  RPE65 RNA guide
caugaggacacggacuucacuc

SEQ ID NO: 1920 - RNA, 22 nt, Artificial Sequence
  RPE65 RNA guide
ccguguccucaugaagccuaca

SEQ ID NO: 1921 - RNA, 22 nt, Artificial Sequence
  RPE65 RNA guide
cguguccucaugaagccuacau

SEQ ID NO: 1922 - RNA, 22 nt, Artificial Sequence
  RPE65 RNA guide
cuucaugaggacacggacuuca

SEQ ID NO: 1923 - RNA, 22 nt, Artificial Sequence
  RPE65 RNA guide
gaaguccguguccucaugaagc

SEQ ID NO: 1924 - RNA, 22 nt, Artificial Sequence
  RPE65 RNA guide
gacacggacuucacucuccaaa

SEQ ID NO: 1925 - RNA, 22 nt, Artificial Sequence
  RPE65 RNA guide
gagagugaaguccguguccuca

SEQ ID NO: 1926 - RNA, 22 nt, Artificial Sequence
  RPE65 RNA guide
gaggacacggacuucacucucc

SEQ ID NO: 1927 - RNA, 22 nt, Artificial Sequence
  RPE65 RNA guide
gagugaaguccguguccucaug

SEQ ID NO: 1928 - RNA, 22 nt, Artificial Sequence
  RPE65 RNA guide
gcuucaugaggacacggacuuc

SEQ ID NO: 1929 - RNA, 22 nt, Artificial Sequence
  RPE65 RNA guide
ggacacggacuucacucuccaa

SEQ ID NO: 1930 - RNA, 22 nt, Artificial Sequence
  RPE65 RNA guide
ggagagugaaguccguguccuc

SEQ ID NO: 1931 - RNA, 22 nt, Artificial Sequence
  RPE65 RNA guide
ggcuucaugaggacacggacuu

SEQ ID NO: 1932 - RNA, 22 nt, Artificial Sequence
  RPE65 RNA guide
guaggcuucaugaggacacgga

SEQ ID NO: 1933 - RNA, 22 nt, Artificial Sequence
  RPE65 RNA guide
guccguguccucaugaagccua

SEQ ID NO: 1934 - RNA, 22 nt, Artificial Sequence
  RPE65 RNA guide
gugaaguccguguccucaugaa

SEQ ID NO: 1935 - RNA, 22 nt, Artificial Sequence
  RPE65 RNA guide
guuuuggagagugaaguccgug

SEQ ID NO: 1936 - RNA, 22 nt, Artificial Sequence
  RPE65 RNA guide
uaggcuucaugaggacacggac

SEQ ID NO: 1937 - RNA, 22 nt, Artificial Sequence
  RPE65 RNA guide
ucaugaggacacggacuucacu

SEQ ID NO: 1938 - RNA, 22 nt, Artificial Sequence
  RPE65 RNA guide
uccguguccucaugaagccuac

SEQ ID NO: 1939 - RNA, 22 nt, Artificial Sequence
  RPE65 RNA guide
ugaaguccguguccucaugaag

SEQ ID NO: 1940 - RNA, 22 nt, Artificial Sequence
  RPE65 RNA guide
ugaggacacggacuucacucuc

SEQ ID NO: 1941 - RNA, 22 nt, Artificial Sequence
  RPE65 RNA guide
uggagagugaaguccguguccu

SEQ ID NO: 1942 - RNA, 22 nt, Artificial Sequence
  RPE65 RNA guide
uguaggcuucaugaggacacgg

SEQ ID NO: 1943 - RNA, 22 nt, Artificial Sequence
  RPE65 RNA guide
uguuuuggagagugaaguccgu

SEQ ID NO: 1944 - RNA, 22 nt, Artificial Sequence
  RPE65 RNA guide
uucaugaggacacggacuucac

SEQ ID NO: 1945 - RNA, 22 nt, Artificial Sequence
  RPE65 RNA guide
uuggagagugaaguccgugucc

SEQ ID NO: 1946 - RNA, 22 nt, Artificial Sequence
  RPE65 RNA guide
uuuggagagugaaguccguguc

SEQ ID NO: 1947 - RNA, 22 nt, Artificial Sequence
  RPE65 RNA guide
uuuuggagagugaaguccgugu

SEQ ID NO: 1948 - RNA, 20 nt, Artificial Sequence
  RPE65 RNA guide
aaagauggggagaauuggga

SEQ ID NO: 1949 - RNA, 20 nt, Artificial Sequence
  RPE65 RNA guide
aaaucacucucccaauucuc

SEQ ID NO: 1950 - RNA, 20 nt, Artificial Sequence
  RPE65 RNA guide
aagauggggagaauugggag

SEQ ID NO: 1951 - RNA, 20 nt, Artificial Sequence
  RPE65 RNA guide
aaucacucucccaauucucc

SEQ ID NO: 1952 - RNA, 20 nt, Artificial Sequence
  RPE65 RNA guide
aauucuccccaucuuuccua

SEQ ID NO: 1953 - RNA, 20 nt, Artificial Sequence
  RPE65 RNA guide
acucucccaauucuccccau

SEQ ID NO: 1954 - RNA, 20 nt, Artificial Sequence
  RPE65 RNA guide
agauggggagaauugggaga

SEQ ID NO: 1955 - RNA, 20 nt, Artificial Sequence
  RPE65 RNA guide
aggaaagauggggagaauug

SEQ ID NO: 1956 - RNA, 20 nt, Artificial Sequence
  RPE65 RNA guide
agggaaaucacucucccaau

SEQ ID NO: 1957 - RNA, 20 nt, Artificial Sequence
  RPE65 RNA guide
aguggugaucuaggaaagau

SEQ ID NO: 1958 - RNA, 20 nt, Artificial Sequence
  RPE65 RNA guide
aucacucucccaauucuccc

SEQ ID NO: 1959 - RNA, 20 nt, Artificial Sequence
  RPE65 RNA guide
aucuaggaaagauggggaga

SEQ ID NO: 1960 - RNA, 20 nt, Artificial Sequence
  RPE65 RNA guide
auggggagaauugggagagu

SEQ ID NO: 1961 - RNA, 20 nt, Artificial Sequence
  RPE65 RNA guide
auucuccccaucuuuccuag

SEQ ID NO: 1962 - RNA, 20 nt, Artificial Sequence
  RPE65 RNA guide
caauucuccccaucuuuccu

SEQ ID NO: 1963 - RNA, 20 nt, Artificial Sequence
  RPE65 RNA guide
cacucucccaauucucccca

SEQ ID NO: 1964 - RNA, 20 nt, Artificial Sequence
  RPE65 RNA guide
ccaauucuccccaucuuucc

SEQ ID NO: 1965 - RNA, 20 nt, Artificial Sequence
  RPE65 RNA guide
cccaauucuccccaucuuuc

SEQ ID NO: 1966 - RNA, 20 nt, Artificial Sequence
  RPE65 RNA guide
cuaggaaagauggggagaau

SEQ ID NO: 1967 - RNA, 20 nt, Artificial Sequence
  RPE65 RNA guide
cucccaauucuccccaucuu

SEQ ID NO: 1968 - RNA, 20 nt, Artificial Sequence
  RPE65 RNA guide
cuccccaucuuuccuagauc

SEQ ID NO: 1969 - RNA, 20 nt, Artificial Sequence
  RPE65 RNA guide
cucucccaauucuccccauc

SEQ ID NO: 1970 - RNA, 20 nt, Artificial Sequence
  RPE65 RNA guide
gaaagauggggagaauuggg

SEQ ID NO: 1971 - RNA, 20 nt, Artificial Sequence
  RPE65 RNA guide
gaaaucacucucccaauucu

SEQ ID NO: 1972 - RNA, 20 nt, Artificial Sequence
  RPE65 RNA guide
gaucuaggaaagauggggag

SEQ ID NO: 1973 - RNA, 20 nt, Artificial Sequence
  RPE65 RNA guide
gauggggagaauugggagag

SEQ ID NO: 1974 - RNA, 20 nt, Artificial Sequence
  RPE65 RNA guide
ggaaagauggggagaauugg

SEQ ID NO: 1975 - RNA, 20 nt, Artificial Sequence
  RPE65 RNA guide
ggaaaucacucucccaauuc

SEQ ID NO: 1976 - RNA, 20 nt, Artificial Sequence
  RPE65 RNA guide
ggagaauugggagagugauu

SEQ ID NO: 1977 - RNA, 20 nt, Artificial Sequence
  RPE65 RNA guide
gggaaaucacucucccaauu

SEQ ID NO: 1978 - RNA, 20 nt, Artificial Sequence
  RPE65 RNA guide
gggagaauugggagagugau

SEQ ID NO: 1979 - RNA, 20 nt, Artificial Sequence
  RPE65 RNA guide
ggggagaauugggagaguga

SEQ ID NO: 1980 - RNA, 20 nt, Artificial Sequence
  RPE65 RNA guide
ggugaucuaggaaagauggg

SEQ ID NO: 1981 - RNA, 20 nt, Artificial Sequence
  RPE65 RNA guide
gugaucuaggaaagaugggg

SEQ ID NO: 1982 - RNA, 20 nt, Artificial Sequence
  RPE65 RNA guide
guggugaucuaggaaagaug

SEQ ID NO: 1983 - RNA, 20 nt, Artificial Sequence
  RPE65 RNA guide
uaggaaagauggggagaauu

SEQ ID NO: 1984 - RNA, 20 nt, Artificial Sequence
  RPE65 RNA guide
ucacucucccaauucucccc

SEQ ID NO: 1985 - RNA, 20 nt, Artificial Sequence
  RPE65 RNA guide
ucccaauucuccccaucuuu

SEQ ID NO: 1986 - RNA, 20 nt, Artificial Sequence
  RPE65 RNA guide
uccccaucuuuccuagauca

SEQ ID NO: 1987 - RNA, 20 nt, Artificial Sequence
  RPE65 RNA guide
ucuaggaaagauggggagaa

SEQ ID NO: 1988 - RNA, 20 nt, Artificial Sequence
  RPE65 RNA guide
ucucccaauucuccccaucu

SEQ ID NO: 1989 - RNA, 20 nt, Artificial Sequence
  RPE65 RNA guide
ucuccccaucuuuccuagau

SEQ ID NO: 1990 - RNA, 20 nt, Artificial Sequence
  RPE65 RNA guide
ugaucuaggaaagaugggga

SEQ ID NO: 1991 - RNA, 20 nt, Artificial Sequence
  RPE65 RNA guide
uggggagaauugggagagug

SEQ ID NO: 1992 - RNA, 20 nt, Artificial Sequence
  RPE65 RNA guide
uggugaucuaggaaagaugg

SEQ ID NO: 1993 - RNA, 20 nt, Artificial Sequence
  RPE65 RNA guide
uucuccccaucuuuccuaga

SEQ ID NO: 1994 - RNA, 21 nt, Artificial Sequence
  RPE65 RNA guide
aaagauggggagaauugggag

SEQ ID NO: 1995 - RNA, 21 nt, Artificial Sequence
  RPE65 RNA guide
aaaucacucucccaauucucc

SEQ ID NO: 1996 - RNA, 21 nt, Artificial Sequence
  RPE65 RNA guide
aagauggggagaauugggaga

SEQ ID NO: 1997 - RNA, 21 nt, Artificial Sequence
  RPE65 RNA guide
aaucacucucccaauucuccc

SEQ ID NO: 1998 - RNA, 21 nt, Artificial Sequence
  RPE65 RNA guide
aauucuccccaucuuuccuag

SEQ ID NO: 1999 - RNA, 21 nt, Artificial Sequence
  RPE65 RNA guide
acucucccaauucuccccauc

SEQ ID NO: 2000 - RNA, 21 nt, Artificial Sequence
  RPE65 RNA guide
agauggggagaauugggagag

SEQ ID NO: 2001 - RNA, 21 nt, Artificial Sequence
  RPE65 RNA guide
aggaaagauggggagaauugg

SEQ ID NO: 2002 - RNA, 21 nt, Artificial Sequence
  RPE65 RNA guide
agggaaaucacucucccaauu

SEQ ID NO: 2003 - RNA, 21 nt, Artificial Sequence
  RPE65 RNA guide
aguggugaucuaggaaagaug

SEQ ID NO: 2004 - RNA, 21 nt, Artificial Sequence
  RPE65 RNA guide
aucacucucccaauucucccc

SEQ ID NO: 2005 - RNA, 21 nt, Artificial Sequence
  RPE65 RNA guide
aucuaggaaagauggggagaa

SEQ ID NO: 2006 - RNA, 21 nt, Artificial Sequence
  RPE65 RNA guide
auggggagaauugggagagug

SEQ ID NO: 2007 - RNA, 21 nt, Artificial Sequence
  RPE65 RNA guide
auucuccccaucuuuccuaga

SEQ ID NO: 2008 - RNA, 21 nt, Artificial Sequence
  RPE65 RNA guide
caauucuccccaucuuuccua

SEQ ID NO: 2009 - RNA, 21 nt, Artificial Sequence
  RPE65 RNA guide
cacucucccaauucuccccau

SEQ ID NO: 2010 - RNA, 21 nt, Artificial Sequence
  RPE65 RNA guide
cagggaaaucacucucccaau

SEQ ID NO: 2011 - RNA, 21 nt, Artificial Sequence
  RPE65 RNA guide
ccaauucuccccaucuuuccu

SEQ ID NO: 2012 - RNA, 21 nt, Artificial Sequence
  RPE65 RNA guide
cccaauucuccccaucuuucc

SEQ ID NO: 2013 - RNA, 21 nt, Artificial Sequence
  RPE65 RNA guide
cuaggaaagauggggagaauu

SEQ ID NO: 2014 - RNA, 21 nt, Artificial Sequence
  RPE65 RNA guide
cucccaauucuccccaucuuu

SEQ ID NO: 2015 - RNA, 21 nt, Artificial Sequence
  RPE65 RNA guide
cuccccaucuuuccuagauca

SEQ ID NO: 2016 - RNA, 21 nt, Artificial Sequence
  RPE65 RNA guide
cucucccaauucuccccaucu

SEQ ID NO: 2017 - RNA, 21 nt, Artificial Sequence
  RPE65 RNA guide
gaaagauggggagaauuggga

SEQ ID NO: 2018 - RNA, 21 nt, Artificial Sequence
  RPE65 RNA guide
gaaaucacucucccaauucuc

SEQ ID NO: 2019 - RNA, 21 nt, Artificial Sequence
  RPE65 RNA guide
gaguggugaucuaggaaagau

SEQ ID NO: 2020 - RNA, 21 nt, Artificial Sequence
  RPE65 RNA guide
gaucuaggaaagauggggaga

SEQ ID NO: 2021 - RNA, 21 nt, Artificial Sequence
  RPE65 RNA guide
gauggggagaauugggagagu

SEQ ID NO: 2022 - RNA, 21 nt, Artificial Sequence
  RPE65 RNA guide
ggaaagauggggagaauuggg

SEQ ID NO: 2023 - RNA, 21 nt, Artificial Sequence
  RPE65 RNA guide
ggaaaucacucucccaauucu

SEQ ID NO: 2024 - RNA, 21 nt, Artificial Sequence
  RPE65 RNA guide
ggagaauugggagagugauuu

SEQ ID NO: 2025 - RNA, 21 nt, Artificial Sequence
  RPE65 RNA guide
gggaaaucacucucccaauuc

SEQ ID NO: 2026 - RNA, 21 nt, Artificial Sequence
  RPE65 RNA guide
gggagaauugggagagugauu

SEQ ID NO: 2027 - RNA, 21 nt, Artificial Sequence
  RPE65 RNA guide
ggggagaauugggagagugau

SEQ ID NO: 2028 - RNA, 21 nt, Artificial Sequence
  RPE65 RNA guide
ggugaucuaggaaagaugggg

SEQ ID NO: 2029 - RNA, 21 nt, Artificial Sequence
  RPE65 RNA guide
gugaucuaggaaagaugggga

SEQ ID NO: 2030 - RNA, 21 nt, Artificial Sequence
  RPE65 RNA guide
guggugaucuaggaaagaugg

SEQ ID NO: 2031 - RNA, 21 nt, Artificial Sequence
  RPE65 RNA guide
uaggaaagauggggagaauug

SEQ ID NO: 2032 - RNA, 21 nt, Artificial Sequence
  RPE65 RNA guide
ucacucucccaauucucccca

SEQ ID NO: 2033 - RNA, 21 nt, Artificial Sequence
  RPE65 RNA guide
ucccaauucuccccaucuuuc

SEQ ID NO: 2034 - RNA, 21 nt, Artificial Sequence
  RPE65 RNA guide
uccccaucuuuccuagaucac

SEQ ID NO: 2035 - RNA, 21 nt, Artificial Sequence
  RPE65 RNA guide
ucuaggaaagauggggagaau

SEQ ID NO: 2036 - RNA, 21 nt, Artificial Sequence
  RPE65 RNA guide
ucucccaauucuccccaucuu

SEQ ID NO: 2037 - RNA, 21 nt, Artificial Sequence
  RPE65 RNA guide
ucuccccaucuuuccuagauc

SEQ ID NO: 2038 - RNA, 21 nt, Artificial Sequence
  RPE65 RNA guide
ugaucuaggaaagauggggag

SEQ ID NO: 2039 - RNA, 21 nt, Artificial Sequence
  RPE65 RNA guide
uggggagaauugggagaguga

SEQ ID NO: 2040 - RNA, 21 nt, Artificial Sequence
  RPE65 RNA guide
uggugaucuaggaaagauggg

SEQ ID NO: 2041 - RNA, 21 nt, Artificial Sequence
  RPE65 RNA guide
uucuccccaucuuuccuagau

SEQ ID NO: 2042 - RNA, 22 nt, Artificial Sequence
  RPE65 RNA guide
aaagauggggagaauugggaga

SEQ ID NO: 2043 - RNA, 22 nt, Artificial Sequence
  RPE65 RNA guide
aaaucacucucccaauucuccc

SEQ ID NO: 2044 - RNA, 22 nt, Artificial Sequence
  RPE65 RNA guide
aagauggggagaauugggagag

SEQ ID NO: 2045 - RNA, 22 nt, Artificial Sequence
  RPE65 RNA guide
aaucacucucccaauucucccc

SEQ ID NO: 2046 - RNA, 22 nt, Artificial Sequence
  RPE65 RNA guide
aauucuccccaucuuuccuaga

SEQ ID NO: 2047 - RNA, 22 nt, Artificial Sequence
  RPE65 RNA guide
acucucccaauucuccccaucu

SEQ ID NO: 2048 - RNA, 22 nt, Artificial Sequence
  RPE65 RNA guide
agaguggugaucuaggaaagau

SEQ ID NO: 2049 - RNA, 22 nt, Artificial Sequence
  RPE65 RNA guide
agauggggagaauugggagagu

SEQ ID NO: 2050 - RNA, 22 nt, Artificial Sequence
  RPE65 RNA guide
aggaaagauggggagaauuggg

SEQ ID NO: 2051 - RNA, 22 nt, Artificial Sequence
  RPE65 RNA guide
agggaaaucacucucccaauuc

SEQ ID NO: 2052 - RNA, 22 nt, Artificial Sequence
  RPE65 RNA guide
aguggugaucuaggaaagaugg

SEQ ID NO: 2053 - RNA, 22 nt, Artificial Sequence
  RPE65 RNA guide
aucacucucccaauucucccca

SEQ ID NO: 2054 - RNA, 22 nt, Artificial Sequence
  RPE65 RNA guide
aucuaggaaagauggggagaau

SEQ ID NO: 2055 - RNA, 22 nt, Artificial Sequence
  RPE65 RNA guide
auggggagaauugggagaguga

SEQ ID NO: 2056 - RNA, 22 nt, Artificial Sequence
  RPE65 RNA guide
auucuccccaucuuuccuagau

SEQ ID NO: 2057 - RNA, 22 nt, Artificial Sequence
  RPE65 RNA guide
caauucuccccaucuuuccuag

SEQ ID NO: 2058 - RNA, 22 nt, Artificial Sequence
  RPE65 RNA guide
cacucucccaauucuccccauc

SEQ ID NO: 2059 - RNA, 22 nt, Artificial Sequence
  RPE65 RNA guide
cagggaaaucacucucccaauu

SEQ ID NO: 2060 - RNA, 22 nt, Artificial Sequence
  RPE65 RNA guide
ccaauucuccccaucuuuccua

SEQ ID NO: 2061 - RNA, 22 nt, Artificial Sequence
  RPE65 RNA guide
cccaauucuccccaucuuuccu

SEQ ID NO: 2062 - RNA, 22 nt, Artificial Sequence
  RPE65 RNA guide
cuaggaaagauggggagaauug

SEQ ID NO: 2063 - RNA, 22 nt, Artificial Sequence
  RPE65 RNA guide
cucccaauucuccccaucuuuc

SEQ ID NO: 2064 - RNA, 22 nt, Artificial Sequence
  RPE65 RNA guide
cuccccaucuuuccuagaucac

SEQ ID NO: 2065 - RNA, 22 nt, Artificial Sequence
  RPE65 RNA guide
cucucccaauucuccccaucuu

SEQ ID NO: 2066 - RNA, 22 nt, Artificial Sequence
  RPE65 RNA guide
gaaagauggggagaauugggag

SEQ ID NO: 2067 - RNA, 22 nt, Artificial Sequence
  RPE65 RNA guide
gaaaucacucucccaauucucc

SEQ ID NO: 2068 - RNA, 22 nt, Artificial Sequence
  RPE65 RNA guide
gaguggugaucuaggaaagaug

SEQ ID NO: 2069 - RNA, 22 nt, Artificial Sequence
  RPE65 RNA guide
gaucuaggaaagauggggagaa

SEQ ID NO: 2070 - RNA, 22 nt, Artificial Sequence
  RPE65 RNA guide
gauggggagaauugggagagug

SEQ ID NO: 2071 - RNA, 22 nt, Artificial Sequence
  RPE65 RNA guide
ggaaagauggggagaauuggga

SEQ ID NO: 2072 - RNA, 22 nt, Artificial Sequence
  RPE65 RNA guide
ggaaaucacucucccaauucuc

SEQ ID NO: 2073 - RNA, 22 nt, Artificial Sequence
  RPE65 RNA guide
ggagaauugggagagugauuuc

SEQ ID NO: 2074 - RNA, 22 nt, Artificial Sequence
  RPE65 RNA guide
gggaaaucacucucccaauucu

SEQ ID NO: 2075 - RNA, 22 nt, Artificial Sequence
  RPE65 RNA guide
gggagaauugggagagugauuu

SEQ ID NO: 2076 - RNA, 22 nt, Artificial Sequence
  RPE65 RNA guide
ggggagaauugggagagugauu

SEQ ID NO: 2077 - RNA, 22 nt, Artificial Sequence
  RPE65 RNA guide
ggugaucuaggaaagaugggga

SEQ ID NO: 2078 - RNA, 22 nt, Artificial Sequence
  RPE65 RNA guide
gugaucuaggaaagauggggag

SEQ ID NO: 2079 - RNA, 22 nt, Artificial Sequence
  RPE65 RNA guide
guggugaucuaggaaagauggg

SEQ ID NO: 2080 - RNA, 22 nt, Artificial Sequence
  RPE65 RNA guide
uaggaaagauggggagaauugg

SEQ ID NO: 2081 - RNA, 22 nt, Artificial Sequence
  RPE65 RNA guide
ucacucucccaauucuccccau

SEQ ID NO: 2082 - RNA, 22 nt, Artificial Sequence
  RPE65 RNA guide
ucagggaaaucacucucccaau

SEQ ID NO: 2083 - RNA, 22 nt, Artificial Sequence
  RPE65 RNA guide
ucccaauucuccccaucuuucc

SEQ ID NO: 2084 - RNA, 22 nt, Artificial Sequence
  RPE65 RNA guide
uccccaucuuuccuagaucacc

SEQ ID NO: 2085 - RNA, 22 nt, Artificial Sequence
  RPE65 RNA guide
ucuaggaaagauggggagaauu

SEQ ID NO: 2086 - RNA, 22 nt, Artificial Sequence
  RPE65 RNA guide
ucucccaauucuccccaucuuu

SEQ ID NO: 2087 - RNA, 22 nt, Artificial Sequence
  RPE65 RNA guide
ucuccccaucuuuccuagauca

SEQ ID NO: 2088 - RNA, 22 nt, Artificial Sequence
  RPE65 RNA guide
ugaucuaggaaagauggggaga

SEQ ID NO: 2089 - RNA, 22 nt, Artificial Sequence
  RPE65 RNA guide
uggggagaauugggagagugau

SEQ ID NO: 2090 - RNA, 22 nt, Artificial Sequence
  RPE65 RNA guide
uggugaucuaggaaagaugggg

SEQ ID NO: 2091 - RNA, 22 nt, Artificial Sequence
  RPE65 RNA guide
uucuccccaucuuuccuagauc

SEQ ID NO: 2092 - RNA, 20 nt, Artificial Sequence
  RPE65 RNA guide
aaagaugggaagaauuggga

SEQ ID NO: 2093 - RNA, 20 nt, Artificial Sequence
  RPE65 RNA guide
aaaucacucucccaauucuu

SEQ ID NO: 2094 - RNA, 20 nt, Artificial Sequence
  RPE65 RNA guide
aagaugggaagaauugggag

SEQ ID NO: 2095 - RNA, 20 nt, Artificial Sequence
  RPE65 RNA guide
aaucacucucccaauucuuc

SEQ ID NO: 2096 - RNA, 20 nt, Artificial Sequence
  RPE65 RNA guide
aauucuucccaucuuuccua

SEQ ID NO: 2097 - RNA, 20 nt, Artificial Sequence
  RPE65 RNA guide
acucucccaauucuucccau

SEQ ID NO: 2098 - RNA, 20 nt, Artificial Sequence
  RPE65 RNA guide
agaugggaagaauugggaga

SEQ ID NO: 2099 - RNA, 20 nt, Artificial Sequence
  RPE65 RNA guide
aggaaagaugggaagaauug

SEQ ID NO: 2100 - RNA, 20 nt, Artificial Sequence
  RPE65 RNA guide
aucacucucccaauucuucc

SEQ ID NO: 2101 - RNA, 20 nt, Artificial Sequence
  RPE65 RNA guide
aucuaggaaagaugggaaga

SEQ ID NO: 2102 - RNA, 20 nt, Artificial Sequence
  RPE65 RNA guide
augggaagaauugggagagu

SEQ ID NO: 2103 - RNA, 20 nt, Artificial Sequence
  RPE65 RNA guide
auucuucccaucuuuccuag

SEQ ID NO: 2104 - RNA, 20 nt, Artificial Sequence
  RPE65 RNA guide
caauucuucccaucuuuccu

SEQ ID NO: 2105 - RNA, 20 nt, Artificial Sequence
  RPE65 RNA guide
cacucucccaauucuuccca

SEQ ID NO: 2106 - RNA, 20 nt, Artificial Sequence
  RPE65 RNA guide
ccaauucuucccaucuuucc

SEQ ID NO: 2107 - RNA, 20 nt, Artificial Sequence
  RPE65 RNA guide
cccaauucuucccaucuuuc

SEQ ID NO: 2108 - RNA, 20 nt, Artificial Sequence
  RPE65 RNA guide
cuaggaaagaugggaagaau

SEQ ID NO: 2109 - RNA, 20 nt, Artificial Sequence
  RPE65 RNA guide
cucccaauucuucccaucuu

SEQ ID NO: 2110 - RNA, 20 nt, Artificial Sequence
  RPE65 RNA guide
cucucccaauucuucccauc

SEQ ID NO: 2111 - RNA, 20 nt, Artificial Sequence
  RPE65 RNA guide
cuucccaucuuuccuagauc

SEQ ID NO: 2112 - RNA, 20 nt, Artificial Sequence
  RPE65 RNA guide
gaaagaugggaagaauuggg

SEQ ID NO: 2113 - RNA, 20 nt, Artificial Sequence
  RPE65 RNA guide
gaagaauugggagagugauu

SEQ ID NO: 2114 - RNA, 20 nt, Artificial Sequence
  RPE65 RNA guide
gaucuaggaaagaugggaag

SEQ ID NO: 2115 - RNA, 20 nt, Artificial Sequence
  RPE65 RNA guide
gaugggaagaauugggagag

SEQ ID NO: 2116 - RNA, 20 nt, Artificial Sequence
  RPE65 RNA guide
ggaaagaugggaagaauugg

SEQ ID NO: 2117 - RNA, 20 nt, Artificial Sequence
  RPE65 RNA guide
ggaagaauugggagagugau

SEQ ID NO: 2118 - RNA, 20 nt, Artificial Sequence
  RPE65 RNA guide
gggaagaauugggagaguga

SEQ ID NO: 2119 - RNA, 20 nt, Artificial Sequence
  RPE65 RNA guide
gugaucuaggaaagauggga

SEQ ID NO: 2120 - RNA, 20 nt, Artificial Sequence
  RPE65 RNA guide
uaggaaagaugggaagaauu

SEQ ID NO: 2121 - RNA, 20 nt, Artificial Sequence
  RPE65 RNA guide
ucacucucccaauucuuccc

SEQ ID NO: 2122 - RNA, 20 nt, Artificial Sequence
  RPE65 RNA guide
ucccaauucuucccaucuuu

SEQ ID NO: 2123 - RNA, 20 nt, Artificial Sequence
  RPE65 RNA guide
ucuaggaaagaugggaagaa

SEQ ID NO: 2124 - RNA, 20 nt, Artificial Sequence
  RPE65 RNA guide
ucucccaauucuucccaucu

SEQ ID NO: 2125 - RNA, 20 nt, Artificial Sequence
  RPE65 RNA guide
ucuucccaucuuuccuagau

SEQ ID NO: 2126 - RNA, 20 nt, Artificial Sequence
  RPE65 RNA guide
ugaucuaggaaagaugggaa

SEQ ID NO: 2127 - RNA, 20 nt, Artificial Sequence
  RPE65 RNA guide
ugggaagaauugggagagug

SEQ ID NO: 2128 - RNA, 20 nt, Artificial Sequence
  RPE65 RNA guide
uucccaucuuuccuagauca

SEQ ID NO: 2129 - RNA, 20 nt, Artificial Sequence
  RPE65 RNA guide
uucuucccaucuuuccuaga

SEQ ID NO: 2130 - RNA, 21 nt, Artificial Sequence
  RPE65 RNA guide
aaagaugggaagaauugggag

SEQ ID NO: 2131 - RNA, 21 nt, Artificial Sequence
  RPE65 RNA guide
aaaucacucucccaauucuuc

SEQ ID NO: 2132 - RNA, 21 nt, Artificial Sequence
  RPE65 RNA guide
aagaugggaagaauugggaga

SEQ ID NO: 2133 - RNA, 21 nt, Artificial Sequence
  RPE65 RNA guide
aaucacucucccaauucuucc

SEQ ID NO: 2134 - RNA, 21 nt, Artificial Sequence
  RPE65 RNA guide
aauucuucccaucuuuccuag

SEQ ID NO: 2135 - RNA, 21 nt, Artificial Sequence
  RPE65 RNA guide
acucucccaauucuucccauc

SEQ ID NO: 2136 - RNA, 21 nt, Artificial Sequence
  RPE65 RNA guide
agaugggaagaauugggagag

SEQ ID NO: 2137 - RNA, 21 nt, Artificial Sequence
  RPE65 RNA guide
aggaaagaugggaagaauugg

SEQ ID NO: 2138 - RNA, 21 nt, Artificial Sequence
  RPE65 RNA guide
aucacucucccaauucuuccc

SEQ ID NO: 2139 - RNA, 21 nt, Artificial Sequence
  RPE65 RNA guide
aucuaggaaagaugggaagaa

SEQ ID NO: 2140 - RNA, 21 nt, Artificial Sequence
  RPE65 RNA guide
augggaagaauugggagagug

SEQ ID NO: 2141 - RNA, 21 nt, Artificial Sequence
  RPE65 RNA guide
auucuucccaucuuuccuaga

SEQ ID NO: 2142 - RNA, 21 nt, Artificial Sequence
  RPE65 RNA guide
caauucuucccaucuuuccua

SEQ ID NO: 2143 - RNA, 21 nt, Artificial Sequence
  RPE65 RNA guide
cacucucccaauucuucccau

SEQ ID NO: 2144 - RNA, 21 nt, Artificial Sequence
  RPE65 RNA guide
ccaauucuucccaucuuuccu

SEQ ID NO: 2145 - RNA, 21 nt, Artificial Sequence
  RPE65 RNA guide
cccaauucuucccaucuuucc

SEQ ID NO: 2146 - RNA, 21 nt, Artificial Sequence
  RPE65 RNA guide
cuaggaaagaugggaagaauu

SEQ ID NO: 2147 - RNA, 21 nt, Artificial Sequence
  RPE65 RNA guide
cucccaauucuucccaucuuu

SEQ ID NO: 2148 - RNA, 21 nt, Artificial Sequence
  RPE65 RNA guide
cucucccaauucuucccaucu

SEQ ID NO: 2149 - RNA, 21 nt, Artificial Sequence
  RPE65 RNA guide
cuucccaucuuuccuagauca

SEQ ID NO: 2150 - RNA, 21 nt, Artificial Sequence
  RPE65 RNA guide
gaaagaugggaagaauuggga

SEQ ID NO: 2151 - RNA, 21 nt, Artificial Sequence
  RPE65 RNA guide
gaaaucacucucccaauucuu

SEQ ID NO: 2152 - RNA, 21 nt, Artificial Sequence
  RPE65 RNA guide
gaagaauugggagagugauuu

SEQ ID NO: 2153 - RNA, 21 nt, Artificial Sequence
  RPE65 RNA guide
gaucuaggaaagaugggaaga

SEQ ID NO: 2154 - RNA, 21 nt, Artificial Sequence
  RPE65 RNA guide
gaugggaagaauugggagagu

SEQ ID NO: 2155 - RNA, 21 nt, Artificial Sequence
  RPE65 RNA guide
ggaaagaugggaagaauuggg

SEQ ID NO: 2156 - RNA, 21 nt, Artificial Sequence
  RPE65 RNA guide
ggaagaauugggagagugauu

SEQ ID NO: 2157 - RNA, 21 nt, Artificial Sequence
  RPE65 RNA guide
gggaagaauugggagagugau

SEQ ID NO: 2158 - RNA, 21 nt, Artificial Sequence
  RPE65 RNA guide
ggugaucuaggaaagauggga

SEQ ID NO: 2159 - RNA, 21 nt, Artificial Sequence
  RPE65 RNA guide
gugaucuaggaaagaugggaa

SEQ ID NO: 2160 - RNA, 21 nt, Artificial Sequence
  RPE65 RNA guide
uaggaaagaugggaagaauug

SEQ ID NO: 2161 - RNA, 21 nt, Artificial Sequence
  RPE65 RNA guide
ucacucucccaauucuuccca

SEQ ID NO: 2162 - RNA, 21 nt, Artificial Sequence
  RPE65 RNA guide
ucccaauucuucccaucuuuc

SEQ ID NO: 2163 - RNA, 21 nt, Artificial Sequence
  RPE65 RNA guide
ucuaggaaagaugggaagaau

SEQ ID NO: 2164 - RNA, 21 nt, Artificial Sequence
  RPE65 RNA guide
ucucccaauucuucccaucuu

SEQ ID NO: 2165 - RNA, 21 nt, Artificial Sequence
  RPE65 RNA guide
ucuucccaucuuuccuagauc

SEQ ID NO: 2166 - RNA, 21 nt, Artificial Sequence
  RPE65 RNA guide
ugaucuaggaaagaugggaag

SEQ ID NO: 2167 - RNA, 21 nt, Artificial Sequence
  RPE65 RNA guide
ugggaagaauugggagaguga

SEQ ID NO: 2168 - RNA, 21 nt, Artificial Sequence
  RPE65 RNA guide
uucccaucuuuccuagaucac

SEQ ID NO: 2169 - RNA, 21 nt, Artificial Sequence
  RPE65 RNA guide
uucuucccaucuuuccuagau

SEQ ID NO: 2170 - RNA, 22 nt, Artificial Sequence
  RPE65 RNA guide
aaagaugggaagaauugggaga

SEQ ID NO: 2171 - RNA, 22 nt, Artificial Sequence
  RPE65 RNA guide
aaaucacucucccaauucuucc

SEQ ID NO: 2172 - RNA, 22 nt, Artificial Sequence
  RPE65 RNA guide
aagaugggaagaauugggagag

SEQ ID NO: 2173 - RNA, 22 nt, Artificial Sequence
  RPE65 RNA guide
aaucacucucccaauucuuccc

SEQ ID NO: 2174 - RNA, 22 nt, Artificial Sequence
  RPE65 RNA guide
aauucuucccaucuuuccuaga

SEQ ID NO: 2175 - RNA, 22 nt, Artificial Sequence
  RPE65 RNA guide
acucucccaauucuucccaucu

SEQ ID NO: 2176 - RNA, 22 nt, Artificial Sequence
  RPE65 RNA guide
agaugggaagaauugggagagu

SEQ ID NO: 2177 - RNA, 22 nt, Artificial Sequence
  RPE65 RNA guide
aggaaagaugggaagaauuggg

SEQ ID NO: 2178 - RNA, 22 nt, Artificial Sequence
  RPE65 RNA guide
aucacucucccaauucuuccca

SEQ ID NO: 2179 - RNA, 22 nt, Artificial Sequence
  RPE65 RNA guide
aucuaggaaagaugggaagaau

SEQ ID NO: 2180 - RNA, 22 nt, Artificial Sequence
  RPE65 RNA guide
augggaagaauugggagaguga

SEQ ID NO: 2181 - RNA, 22 nt, Artificial Sequence
  RPE65 RNA guide
auucuucccaucuuuccuagau

SEQ ID NO: 2182 - RNA, 22 nt, Artificial Sequence
  RPE65 RNA guide
caauucuucccaucuuuccuag

SEQ ID NO: 2183 - RNA, 22 nt, Artificial Sequence
  RPE65 RNA guide
cacucucccaauucuucccauc

SEQ ID NO: 2184 - RNA, 22 nt, Artificial Sequence
  RPE65 RNA guide
ccaauucuucccaucuuuccua

SEQ ID NO: 2185 - RNA, 22 nt, Artificial Sequence
  RPE65 RNA guide
cccaauucuucccaucuuuccu

SEQ ID NO: 2186 - RNA, 22 nt, Artificial Sequence
  RPE65 RNA guide
cuaggaaagaugggaagaauug

SEQ ID NO: 2187 - RNA, 22 nt, Artificial Sequence
  RPE65 RNA guide
cucccaauucuucccaucuuuc

SEQ ID NO: 2188 - RNA, 22 nt, Artificial Sequence
  RPE65 RNA guide
cucucccaauucuucccaucuu

SEQ ID NO: 2189 - RNA, 22 nt, Artificial Sequence
  RPE65 RNA guide
cuucccaucuuuccuagaucac

SEQ ID NO: 2190 - RNA, 22 nt, Artificial Sequence
  RPE65 RNA guide
gaaagaugggaagaauugggag

SEQ ID NO: 2191 - RNA, 22 nt, Artificial Sequence
  RPE65 RNA guide
gaaaucacucucccaauucuuc

SEQ ID NO: 2192 - RNA, 22 nt, Artificial Sequence
  RPE65 RNA guide
gaagaauugggagagugauuuc

SEQ ID NO: 2193 - RNA, 22 nt, Artificial Sequence
  RPE65 RNA guide
gaucuaggaaagaugggaagaa

SEQ ID NO: 2194 - RNA, 22 nt, Artificial Sequence
  RPE65 RNA guide
gaugggaagaauugggagagug

SEQ ID NO: 2195 - RNA, 22 nt, Artificial Sequence
  RPE65 RNA guide
ggaaagaugggaagaauuggga

SEQ ID NO: 2196 - RNA, 22 nt, Artificial Sequence
  RPE65 RNA guide
ggaaaucacucucccaauucuu

SEQ ID NO: 2197 - RNA, 22 nt, Artificial Sequence
  RPE65 RNA guide
ggaagaauugggagagugauuu

SEQ ID NO: 2198 - RNA, 22 nt, Artificial Sequence
  RPE65 RNA guide
gggaagaauugggagagugauu

SEQ ID NO: 2199 - RNA, 22 nt, Artificial Sequence
  RPE65 RNA guide
ggugaucuaggaaagaugggaa

SEQ ID NO: 2200 - RNA, 22 nt, Artificial Sequence
  RPE65 RNA guide
gugaucuaggaaagaugggaag

SEQ ID NO: 2201 - RNA, 22 nt, Artificial Sequence
  RPE65 RNA guide
uaggaaagaugggaagaauugg

SEQ ID NO: 2202 - RNA, 22 nt, Artificial Sequence
  RPE65 RNA guide
ucacucucccaauucuucccau

SEQ ID NO: 2203 - RNA, 22 nt, Artificial Sequence
  RPE65 RNA guide
ucccaauucuucccaucuuucc

SEQ ID NO: 2204 - RNA, 22 nt, Artificial Sequence
  RPE65 RNA guide
ucuaggaaagaugggaagaauu

SEQ ID NO: 2205 - RNA, 22 nt, Artificial Sequence
  RPE65 RNA guide
ucucccaauucuucccaucuuu

SEQ ID NO: 2206 - RNA, 22 nt, Artificial Sequence
  RPE65 RNA guide
ucuucccaucuuuccuagauca

SEQ ID NO: 2207 - RNA, 22 nt, Artificial Sequence
  RPE65 RNA guide
ugaucuaggaaagaugggaaga

SEQ ID NO: 2208 - RNA, 22 nt, Artificial Sequence
  RPE65 RNA guide
ugggaagaauugggagagugau

SEQ ID NO: 2209 - RNA, 22 nt, Artificial Sequence
  RPE65 RNA guide
uggugaucuaggaaagauggga

SEQ ID NO: 2210 - RNA, 22 nt, Artificial Sequence
  RPE65 RNA guide
uucccaucuuuccuagaucacc

SEQ ID NO: 2211 - RNA, 22 nt, Artificial Sequence
  RPE65 RNA guide
uucuucccaucuuuccuagauc

SEQ ID NO: 2212 - RNA, 20 nt, Artificial Sequence
  RPE65 RNA guide
aaauggaaccaauuaacaug

SEQ ID NO: 2213 - RNA, 20 nt, Artificial Sequence
  RPE65 RNA guide
aaucauguuaauugguucca

SEQ ID NO: 2214 - RNA, 20 nt, Artificial Sequence
  RPE65 RNA guide
aauggaaccaauuaacauga

SEQ ID NO: 2215 - RNA, 20 nt, Artificial Sequence
  RPE65 RNA guide
aauugguuccauuuuagaug

SEQ ID NO: 2216 - RNA, 20 nt, Artificial Sequence
  RPE65 RNA guide
acaaucauguuaauugguuc

SEQ ID NO: 2217 - RNA, 20 nt, Artificial Sequence
  RPE65 RNA guide
acacaaucauguuaauuggu

SEQ ID NO: 2218 - RNA, 20 nt, Artificial Sequence
  RPE65 RNA guide
acacacaaucauguuaauug

SEQ ID NO: 2219 - RNA, 20 nt, Artificial Sequence
  RPE65 RNA guide
aucauguuaauugguuccau

SEQ ID NO: 2220 - RNA, 20 nt, Artificial Sequence
  RPE65 RNA guide
augcaucuaaaauggaacca

SEQ ID NO: 2221 - RNA, 20 nt, Artificial Sequence
  RPE65 RNA guide
auggaaccaauuaacaugau

SEQ ID NO: 2222 - RNA, 20 nt, Artificial Sequence
  RPE65 RNA guide
auugguuccauuuuagaugc

SEQ ID NO: 2223 - RNA, 20 nt, Artificial Sequence
  RPE65 RNA guide
caaucauguuaauugguucc

SEQ ID NO: 2224 - RNA, 20 nt, Artificial Sequence
  RPE65 RNA guide
cacaaucauguuaauugguu

SEQ ID NO: 2225 - RNA, 20 nt, Artificial Sequence
  RPE65 RNA guide
cacacaaucauguuaauugg

SEQ ID NO: 2226 - RNA, 20 nt, Artificial Sequence
  RPE65 RNA guide
caucuaaaauggaaccaauu

SEQ ID NO: 2227 - RNA, 20 nt, Artificial Sequence
  RPE65 RNA guide
caugcaucuaaaauggaacc

SEQ ID NO: 2228 - RNA, 20 nt, Artificial Sequence
  RPE65 RNA guide
cauguuaauugguuccauuu

SEQ ID NO: 2229 - RNA, 20 nt, Artificial Sequence
  RPE65 RNA guide
cuaaaauggaaccaauuaac

SEQ ID NO: 2230 - RNA, 20 nt, Artificial Sequence
  RPE65 RNA guide
gaaccaauuaacaugauugu

SEQ ID NO: 2231 - RNA, 20 nt, Artificial Sequence
  RPE65 RNA guide
gcaucuaaaauggaaccaau

SEQ ID NO: 2232 - RNA, 20 nt, Artificial Sequence
  RPE65 RNA guide
ggaaccaauuaacaugauug

SEQ ID NO: 2233 - RNA, 20 nt, Artificial Sequence
  RPE65 RNA guide
ggucaugcaucuaaaaugga

SEQ ID NO: 2234 - RNA, 20 nt, Artificial Sequence
  RPE65 RNA guide
gguuccauuuuagaugcaug

SEQ ID NO: 2235 - RNA, 20 nt, Artificial Sequence
  RPE65 RNA guide
gucaugcaucuaaaauggaa

SEQ ID NO: 2236 - RNA, 20 nt, Artificial Sequence
  RPE65 RNA guide
guggucaugcaucuaaaaug

SEQ ID NO: 2237 - RNA, 20 nt, Artificial Sequence
  RPE65 RNA guide
guuaauugguuccauuuuag

SEQ ID NO: 2238 - RNA, 20 nt, Artificial Sequence
  RPE65 RNA guide
guuccauuuuagaugcauga

SEQ ID NO: 2239 - RNA, 20 nt, Artificial Sequence
  RPE65 RNA guide
ucaugcaucuaaaauggaac

SEQ ID NO: 2240 - RNA, 20 nt, Artificial Sequence
  RPE65 RNA guide
ucauguuaauugguuccauu

SEQ ID NO: 2241 - RNA, 20 nt, Artificial Sequence
  RPE65 RNA guide
ugcaucuaaaauggaaccaa

SEQ ID NO: 2242 - RNA, 20 nt, Artificial Sequence
  RPE65 RNA guide
uggaaccaauuaacaugauu

SEQ ID NO: 2243 - RNA, 20 nt, Artificial Sequence
  RPE65 RNA guide
uggucaugcaucuaaaaugg

SEQ ID NO: 2244 - RNA, 20 nt, Artificial Sequence
  RPE65 RNA guide
ugguuccauuuuagaugcau

SEQ ID NO: 2245 - RNA, 20 nt, Artificial Sequence
  RPE65 RNA guide
uguggucaugcaucuaaaau

SEQ ID NO: 2246 - RNA, 20 nt, Artificial Sequence
  RPE65 RNA guide
uuccauuuuagaugcaugac

SEQ ID NO: 2247 - RNA, 20 nt, Artificial Sequence
  RPE65 RNA guide
uugguuccauuuuagaugca

SEQ ID NO: 2248 - RNA, 20 nt, Artificial Sequence
  RPE65 RNA guide
uuguggucaugcaucuaaaa

SEQ ID NO: 2249 - RNA, 21 nt, Artificial Sequence
  RPE65 RNA guide
aauugguuccauuuuagaugc

SEQ ID NO: 2250 - RNA, 21 nt, Artificial Sequence
  RPE65 RNA guide
acaaucauguuaauugguucc

SEQ ID NO: 2251 - RNA, 21 nt, Artificial Sequence
  RPE65 RNA guide
acacacaaucauguuaauugg

SEQ ID NO: 2252 - RNA, 21 nt, Artificial Sequence
  RPE65 RNA guide
augcaucuaaaauggaaccaa

SEQ ID NO: 2253 - RNA, 21 nt, Artificial Sequence
  RPE65 RNA guide
auugguuccauuuuagaugca

SEQ ID NO: 2254 - RNA, 21 nt, Artificial Sequence
  RPE65 RNA guide
caaucauguuaauugguucca

SEQ ID NO: 2255 - RNA, 21 nt, Artificial Sequence
  RPE65 RNA guide
cacaaucauguuaauugguuc

SEQ ID NO: 2256 - RNA, 21 nt, Artificial Sequence
  RPE65 RNA guide
cacacaaucauguuaauuggu

SEQ ID NO: 2257 - RNA, 21 nt, Artificial Sequence
  RPE65 RNA guide
caugcaucuaaaauggaacca

SEQ ID NO: 2258 - RNA, 21 nt, Artificial Sequence
  RPE65 RNA guide
gaaccaauuaacaugauugug

SEQ ID NO: 2259 - RNA, 21 nt, Artificial Sequence
  RPE65 RNA guide
gcaucuaaaauggaaccaauu

SEQ ID NO: 2260 - RNA, 21 nt, Artificial Sequence
  RPE65 RNA guide
ggaaccaauuaacaugauugu

SEQ ID NO: 2261 - RNA, 21 nt, Artificial Sequence
  RPE65 RNA guide
ggucaugcaucuaaaauggaa

SEQ ID NO: 2262 - RNA, 21 nt, Artificial Sequence
  RPE65 RNA guide
gguuccauuuuagaugcauga

SEQ ID NO: 2263 - RNA, 21 nt, Artificial Sequence
  RPE65 RNA guide
gucaugcaucuaaaauggaac

SEQ ID NO: 2264 - RNA, 21 nt, Artificial Sequence
  RPE65 RNA guide
guggucaugcaucuaaaaugg

SEQ ID NO: 2265 - RNA, 21 nt, Artificial Sequence
  RPE65 RNA guide
guuccauuuuagaugcaugac

SEQ ID NO: 2266 - RNA, 21 nt, Artificial Sequence
  RPE65 RNA guide
ucaugcaucuaaaauggaacc

SEQ ID NO: 2267 - RNA, 21 nt, Artificial Sequence
  RPE65 RNA guide
ugcaucuaaaauggaaccaau

SEQ ID NO: 2268 - RNA, 21 nt, Artificial Sequence
  RPE65 RNA guide
uggaaccaauuaacaugauug

SEQ ID NO: 2269 - RNA, 21 nt, Artificial Sequence
  RPE65 RNA guide
uggucaugcaucuaaaaugga

SEQ ID NO: 2270 - RNA, 21 nt, Artificial Sequence
  RPE65 RNA guide
ugguuccauuuuagaugcaug

SEQ ID NO: 2271 - RNA, 21 nt, Artificial Sequence
  RPE65 RNA guide
uguggucaugcaucuaaaaug

SEQ ID NO: 2272 - RNA, 21 nt, Artificial Sequence
  RPE65 RNA guide
uuccauuuuagaugcaugacc

SEQ ID NO: 2273 - RNA, 21 nt, Artificial Sequence
  RPE65 RNA guide
uugguuccauuuuagaugcau

SEQ ID NO: 2274 - RNA, 21 nt, Artificial Sequence
  RPE65 RNA guide
uuguggucaugcaucuaaaau

SEQ ID NO: 2275 - RNA, 21 nt, Artificial Sequence
  RPE65 RNA guide
uuuguggucaugcaucuaaaa

SEQ ID NO: 2276 - RNA, 22 nt, Artificial Sequence
  RPE65 RNA guide
aacacacaaucauguuaauugg

SEQ ID NO: 2277 - RNA, 22 nt, Artificial Sequence
  RPE65 RNA guide
aauugguuccauuuuagaugca

SEQ ID NO: 2278 - RNA, 22 nt, Artificial Sequence
  RPE65 RNA guide
acaaucauguuaauugguucca

SEQ ID NO: 2279 - RNA, 22 nt, Artificial Sequence
  RPE65 RNA guide
acacaaucauguuaauugguuc

SEQ ID NO: 2280 - RNA, 22 nt, Artificial Sequence
  RPE65 RNA guide
acacacaaucauguuaauuggu

SEQ ID NO: 2281 - RNA, 22 nt, Artificial Sequence
  RPE65 RNA guide
augcaucuaaaauggaaccaau

SEQ ID NO: 2282 - RNA, 22 nt, Artificial Sequence
  RPE65 RNA guide
auggaaccaauuaacaugauug

SEQ ID NO: 2283 - RNA, 22 nt, Artificial Sequence
  RPE65 RNA guide
auugguuccauuuuagaugcau

SEQ ID NO: 2284 - RNA, 22 nt, Artificial Sequence
  RPE65 RNA guide
auuuguggucaugcaucuaaaa

SEQ ID NO: 2285 - RNA, 22 nt, Artificial Sequence
  RPE65 RNA guide
caacacacaaucauguuaauug

SEQ ID NO: 2286 - RNA, 22 nt, Artificial Sequence
  RPE65 RNA guide
caaucauguuaauugguuccau

SEQ ID NO: 2287 - RNA, 22 nt, Artificial Sequence
  RPE65 RNA guide
cacaaucauguuaauugguucc

SEQ ID NO: 2288 - RNA, 22 nt, Artificial Sequence
  RPE65 RNA guide
cacacaaucauguuaauugguu

SEQ ID NO: 2289 - RNA, 22 nt, Artificial Sequence
  RPE65 RNA guide
caugcaucuaaaauggaaccaa

SEQ ID NO: 2290 - RNA, 22 nt, Artificial Sequence
  RPE65 RNA guide
gaaccaauuaacaugauugugu

SEQ ID NO: 2291 - RNA, 22 nt, Artificial Sequence
  RPE65 RNA guide
gcaucuaaaauggaaccaauua

SEQ ID NO: 2292 - RNA, 22 nt, Artificial Sequence
  RPE65 RNA guide
ggaaccaauuaacaugauugug

SEQ ID NO: 2293 - RNA, 22 nt, Artificial Sequence
  RPE65 RNA guide
ggucaugcaucuaaaauggaac

SEQ ID NO: 2294 - RNA, 22 nt, Artificial Sequence
  RPE65 RNA guide
gguuccauuuuagaugcaugac

SEQ ID NO: 2295 - RNA, 22 nt, Artificial Sequence
  RPE65 RNA guide
gucaugcaucuaaaauggaacc

SEQ ID NO: 2296 - RNA, 22 nt, Artificial Sequence
  RPE65 RNA guide
guggucaugcaucuaaaaugga

SEQ ID NO: 2297 - RNA, 22 nt, Artificial Sequence
  RPE65 RNA guide
guuccauuuuagaugcaugacc

SEQ ID NO: 2298 - RNA, 22 nt, Artificial Sequence
  RPE65 RNA guide
uaauugguuccauuuuagaugc

SEQ ID NO: 2299 - RNA, 22 nt, Artificial Sequence
  RPE65 RNA guide
ucaugcaucuaaaauggaacca

SEQ ID NO: 2300 - RNA, 22 nt, Artificial Sequence
  RPE65 RNA guide
ugcaucuaaaauggaaccaauu

SEQ ID NO: 2301 - RNA, 22 nt, Artificial Sequence
  RPE65 RNA guide
uggaaccaauuaacaugauugu

SEQ ID NO: 2302 - RNA, 22 nt, Artificial Sequence
  RPE65 RNA guide
uggucaugcaucuaaaauggaa

SEQ ID NO: 2303 - RNA, 22 nt, Artificial Sequence
  RPE65 RNA guide
ugguuccauuuuagaugcauga

SEQ ID NO: 2304 - RNA, 22 nt, Artificial Sequence
  RPE65 RNA guide
uguggucaugcaucuaaaaugg

SEQ ID NO: 2305 - RNA, 22 nt, Artificial Sequence
  RPE65 RNA guide
uuccauuuuagaugcaugacca

SEQ ID NO: 2306 - RNA, 22 nt, Artificial Sequence
  RPE65 RNA guide
uugguuccauuuuagaugcaug

SEQ ID NO: 2307 - RNA, 22 nt, Artificial Sequence
  RPE65 RNA guide
uuguggucaugcaucuaaaaug

SEQ ID NO: 2308 - RNA, 22 nt, Artificial Sequence
  RPE65 RNA guide
uuuguggucaugcaucuaaaau

SEQ ID NO: 2309 - RNA, 20 nt, Artificial Sequence
  RPE65 RNA guide
aaaaugggaccaauuaacau

SEQ ID NO: 2310 - RNA, 20 nt, Artificial Sequence
  RPE65 RNA guide
aaaugggaccaauuaacaug

SEQ ID NO: 2311 - RNA, 20 nt, Artificial Sequence
  RPE65 RNA guide
aaucauguuaauugguccca

SEQ ID NO: 2312 - RNA, 20 nt, Artificial Sequence
  RPE65 RNA guide
aaugggaccaauuaacauga

SEQ ID NO: 2313 - RNA, 20 nt, Artificial Sequence
  RPE65 RNA guide
aauuggucccauuuuagaug

SEQ ID NO: 2314 - RNA, 20 nt, Artificial Sequence
  RPE65 RNA guide
acaaucauguuaauuggucc

SEQ ID NO: 2315 - RNA, 20 nt, Artificial Sequence
  RPE65 RNA guide
aucauguuaauuggucccau

SEQ ID NO: 2316 - RNA, 20 nt, Artificial Sequence
  RPE65 RNA guide
aucuaaaaugggaccaauua

SEQ ID NO: 2317 - RNA, 20 nt, Artificial Sequence
  RPE65 RNA guide
augcaucuaaaaugggacca

SEQ ID NO: 2318 - RNA, 20 nt, Artificial Sequence
  RPE65 RNA guide
augggaccaauuaacaugau

SEQ ID NO: 2319 - RNA, 20 nt, Artificial Sequence
  RPE65 RNA guide
auguuaauuggucccauuuu

SEQ ID NO: 2320 - RNA, 20 nt, Artificial Sequence
  RPE65 RNA guide
auuggucccauuuuagaugc

SEQ ID NO: 2321 - RNA, 20 nt, Artificial Sequence
  RPE65 RNA guide
caaucauguuaauugguccc

SEQ ID NO: 2322 - RNA, 20 nt, Artificial Sequence
  RPE65 RNA guide
cacaaucauguuaauugguc

SEQ ID NO: 2323 - RNA, 20 nt, Artificial Sequence
  RPE65 RNA guide
caucuaaaaugggaccaauu

SEQ ID NO: 2324 - RNA, 20 nt, Artificial Sequence
  RPE65 RNA guide
caugcaucuaaaaugggacc

SEQ ID NO: 2325 - RNA, 20 nt, Artificial Sequence
  RPE65 RNA guide
cauguuaauuggucccauuu

SEQ ID NO: 2326 - RNA, 20 nt, Artificial Sequence
  RPE65 RNA guide
cuaaaaugggaccaauuaac

SEQ ID NO: 2327 - RNA, 20 nt, Artificial Sequence
  RPE65 RNA guide
gcaucuaaaaugggaccaau

SEQ ID NO: 2328 - RNA, 20 nt, Artificial Sequence
  RPE65 RNA guide
ggaccaauuaacaugauugu

SEQ ID NO: 2329 - RNA, 20 nt, Artificial Sequence
  RPE65 RNA guide
gggaccaauuaacaugauug

SEQ ID NO: 2330 - RNA, 20 nt, Artificial Sequence
  RPE65 RNA guide
ggucaugcaucuaaaauggg

SEQ ID NO: 2331 - RNA, 20 nt, Artificial Sequence
  RPE65 RNA guide
ggucccauuuuagaugcaug

SEQ ID NO: 2332 - RNA, 20 nt, Artificial Sequence
  RPE65 RNA guide
gucaugcaucuaaaauggga

SEQ ID NO: 2333 - RNA, 20 nt, Artificial Sequence
  RPE65 RNA guide
gucccauuuuagaugcauga

SEQ ID NO: 2334 - RNA, 20 nt, Artificial Sequence
  RPE65 RNA guide
guuaauuggucccauuuuag

SEQ ID NO: 2335 - RNA, 20 nt, Artificial Sequence
  RPE65 RNA guide
uaaaaugggaccaauuaaca

SEQ ID NO: 2336 - RNA, 20 nt, Artificial Sequence
  RPE65 RNA guide
uaauuggucccauuuuagau

SEQ ID NO: 2337 - RNA, 20 nt, Artificial Sequence
  RPE65 RNA guide
ucaugcaucuaaaaugggac

SEQ ID NO: 2338 - RNA, 20 nt, Artificial Sequence
  RPE65 RNA guide
ucauguuaauuggucccauu

SEQ ID NO: 2339 - RNA, 20 nt, Artificial Sequence
  RPE65 RNA guide
ucccauuuuagaugcaugac

SEQ ID NO: 2340 - RNA, 20 nt, Artificial Sequence
  RPE65 RNA guide
ucuaaaaugggaccaauuaa

SEQ ID NO: 2341 - RNA, 20 nt, Artificial Sequence
  RPE65 RNA guide
ugcaucuaaaaugggaccaa

SEQ ID NO: 2342 - RNA, 20 nt, Artificial Sequence
  RPE65 RNA guide
ugggaccaauuaacaugauu

SEQ ID NO: 2343 - RNA, 20 nt, Artificial Sequence
  RPE65 RNA guide
uggucccauuuuagaugcau

SEQ ID NO: 2344 - RNA, 20 nt, Artificial Sequence
  RPE65 RNA guide
uguuaauuggucccauuuua

SEQ ID NO: 2345 - RNA, 20 nt, Artificial Sequence
  RPE65 RNA guide
uuaauuggucccauuuuaga

SEQ ID NO: 2346 - RNA, 20 nt, Artificial Sequence
  RPE65 RNA guide
uuggucccauuuuagaugca

SEQ ID NO: 2347 - RNA, 21 nt, Artificial Sequence
  RPE65 RNA guide
aaaaugggaccaauuaacaug

SEQ ID NO: 2348 - RNA, 21 nt, Artificial Sequence
  RPE65 RNA guide
aaaugggaccaauuaacauga

SEQ ID NO: 2349 - RNA, 21 nt, Artificial Sequence
  RPE65 RNA guide
aaucauguuaauuggucccau

SEQ ID NO: 2350 - RNA, 21 nt, Artificial Sequence
  RPE65 RNA guide
aaugggaccaauuaacaugau

SEQ ID NO: 2351 - RNA, 21 nt, Artificial Sequence
  RPE65 RNA guide
aauuggucccauuuuagaugc

SEQ ID NO: 2352 - RNA, 21 nt, Artificial Sequence
  RPE65 RNA guide
acaaucauguuaauugguccc

SEQ ID NO: 2353 - RNA, 21 nt, Artificial Sequence
  RPE65 RNA guide
acacaaucauguuaauugguc

SEQ ID NO: 2354 - RNA, 21 nt, Artificial Sequence
  RPE65 RNA guide
aucauguuaauuggucccauu

SEQ ID NO: 2355 - RNA, 21 nt, Artificial Sequence
  RPE65 RNA guide
augcaucuaaaaugggaccaa

SEQ ID NO: 2356 - RNA, 21 nt, Artificial Sequence
  RPE65 RNA guide
augggaccaauuaacaugauu

SEQ ID NO: 2357 - RNA, 21 nt, Artificial Sequence
  RPE65 RNA guide
auuggucccauuuuagaugca

SEQ ID NO: 2358 - RNA, 21 nt, Artificial Sequence
  RPE65 RNA guide
caaucauguuaauugguccca

SEQ ID NO: 2359 - RNA, 21 nt, Artificial Sequence
  RPE65 RNA guide
cacaaucauguuaauuggucc

SEQ ID NO: 2360 - RNA, 21 nt, Artificial Sequence
  RPE65 RNA guide
caucuaaaaugggaccaauua

SEQ ID NO: 2361 - RNA, 21 nt, Artificial Sequence
  RPE65 RNA guide
caugcaucuaaaaugggacca

SEQ ID NO: 2362 - RNA, 21 nt, Artificial Sequence
  RPE65 RNA guide
cauguuaauuggucccauuuu

SEQ ID NO: 2363 - RNA, 21 nt, Artificial Sequence
  RPE65 RNA guide
cuaaaaugggaccaauuaaca

SEQ ID NO: 2364 - RNA, 21 nt, Artificial Sequence
  RPE65 RNA guide
gcaucuaaaaugggaccaauu

SEQ ID NO: 2365 - RNA, 21 nt, Artificial Sequence
  RPE65 RNA guide
ggaccaauuaacaugauugug

SEQ ID NO: 2366 - RNA, 21 nt, Artificial Sequence
  RPE65 RNA guide
gggaccaauuaacaugauugu

SEQ ID NO: 2367 - RNA, 21 nt, Artificial Sequence
  RPE65 RNA guide
ggucaugcaucuaaaauggga

SEQ ID NO: 2368 - RNA, 21 nt, Artificial Sequence
  RPE65 RNA guide
ggucccauuuuagaugcauga

SEQ ID NO: 2369 - RNA, 21 nt, Artificial Sequence
  RPE65 RNA guide
gucaugcaucuaaaaugggac

SEQ ID NO: 2370 - RNA, 21 nt, Artificial Sequence
  RPE65 RNA guide
gucccauuuuagaugcaugac

SEQ ID NO: 2371 - RNA, 21 nt, Artificial Sequence
  RPE65 RNA guide
guuaauuggucccauuuuaga

SEQ ID NO: 2372 - RNA, 21 nt, Artificial Sequence
  RPE65 RNA guide
uaauuggucccauuuuagaug

SEQ ID NO: 2373 - RNA, 21 nt, Artificial Sequence
  RPE65 RNA guide
ucaugcaucuaaaaugggacc

SEQ ID NO: 2374 - RNA, 21 nt, Artificial Sequence
  RPE65 RNA guide
ucauguuaauuggucccauuu

SEQ ID NO: 2375 - RNA, 21 nt, Artificial Sequence
  RPE65 RNA guide
ucccauuuuagaugcaugacc

SEQ ID NO: 2376 - RNA, 21 nt, Artificial Sequence
  RPE65 RNA guide
ucuaaaaugggaccaauuaac

SEQ ID NO: 2377 - RNA, 21 nt, Artificial Sequence
  RPE65 RNA guide
ugcaucuaaaaugggaccaau

SEQ ID NO: 2378 - RNA, 21 nt, Artificial Sequence
  RPE65 RNA guide
ugggaccaauuaacaugauug

SEQ ID NO: 2379 - RNA, 21 nt, Artificial Sequence
  RPE65 RNA guide
uggucaugcaucuaaaauggg

SEQ ID NO: 2380 - RNA, 21 nt, Artificial Sequence
  RPE65 RNA guide
uggucccauuuuagaugcaug

SEQ ID NO: 2381 - RNA, 21 nt, Artificial Sequence
  RPE65 RNA guide
uguuaauuggucccauuuuag

SEQ ID NO: 2382 - RNA, 21 nt, Artificial Sequence
  RPE65 RNA guide
uuggucccauuuuagaugcau

SEQ ID NO: 2383 - RNA, 22 nt, Artificial Sequence
  RPE65 RNA guide
aaaaugggaccaauuaacauga

SEQ ID NO: 2384 - RNA, 22 nt, Artificial Sequence
  RPE65 RNA guide
aaaugggaccaauuaacaugau

SEQ ID NO: 2385 - RNA, 22 nt, Artificial Sequence
  RPE65 RNA guide
aaucauguuaauuggucccauu

SEQ ID NO: 2386 - RNA, 22 nt, Artificial Sequence
  RPE65 RNA guide
aaugggaccaauuaacaugauu

SEQ ID NO: 2387 - RNA, 22 nt, Artificial Sequence
  RPE65 RNA guide
aauuggucccauuuuagaugca

SEQ ID NO: 2388 - RNA, 22 nt, Artificial Sequence
  RPE65 RNA guide
acaaucauguuaauugguccca

SEQ ID NO: 2389 - RNA, 22 nt, Artificial Sequence
  RPE65 RNA guide
acacaaucauguuaauuggucc

SEQ ID NO: 2390 - RNA, 22 nt, Artificial Sequence
  RPE65 RNA guide
aucauguuaauuggucccauuu

SEQ ID NO: 2391 - RNA, 22 nt, Artificial Sequence
  RPE65 RNA guide
aucuaaaaugggaccaauuaac

SEQ ID NO: 2392 - RNA, 22 nt, Artificial Sequence
  RPE65 RNA guide
augcaucuaaaaugggaccaau

SEQ ID NO: 2393 - RNA, 22 nt, Artificial Sequence
  RPE65 RNA guide
augggaccaauuaacaugauug

SEQ ID NO: 2394 - RNA, 22 nt, Artificial Sequence
  RPE65 RNA guide
auguuaauuggucccauuuuag

SEQ ID NO: 2395 - RNA, 22 nt, Artificial Sequence
  RPE65 RNA guide
auuggucccauuuuagaugcau

SEQ ID NO: 2396 - RNA, 22 nt, Artificial Sequence
  RPE65 RNA guide
caaucauguuaauuggucccau

SEQ ID NO: 2397 - RNA, 22 nt, Artificial Sequence
  RPE65 RNA guide
cacaaucauguuaauugguccc

SEQ ID NO: 2398 - RNA, 22 nt, Artificial Sequence
  RPE65 RNA guide
cacacaaucauguuaauugguc

SEQ ID NO: 2399 - RNA, 22 nt, Artificial Sequence
  RPE65 RNA guide
caucuaaaaugggaccaauuaa

SEQ ID NO: 2400 - RNA, 22 nt, Artificial Sequence
  RPE65 RNA guide
caugcaucuaaaaugggaccaa

SEQ ID NO: 2401 - RNA, 22 nt, Artificial Sequence
  RPE65 RNA guide
cauguuaauuggucccauuuua

SEQ ID NO: 2402 - RNA, 22 nt, Artificial Sequence
  RPE65 RNA guide
cuaaaaugggaccaauuaacau

SEQ ID NO: 2403 - RNA, 22 nt, Artificial Sequence
  RPE65 RNA guide
gcaucuaaaaugggaccaauua

SEQ ID NO: 2404 - RNA, 22 nt, Artificial Sequence
  RPE65 RNA guide
ggaccaauuaacaugauugugu

SEQ ID NO: 2405 - RNA, 22 nt, Artificial Sequence
  RPE65 RNA guide
gggaccaauuaacaugauugug

SEQ ID NO: 2406 - RNA, 22 nt, Artificial Sequence
  RPE65 RNA guide
ggucaugcaucuaaaaugggac

SEQ ID NO: 2407 - RNA, 22 nt, Artificial Sequence
  RPE65 RNA guide
ggucccauuuuagaugcaugac

SEQ ID NO: 2408 - RNA, 22 nt, Artificial Sequence
  RPE65 RNA guide
gucaugcaucuaaaaugggacc

SEQ ID NO: 2409 - RNA, 22 nt, Artificial Sequence
  RPE65 RNA guide
gucccauuuuagaugcaugacc

SEQ ID NO: 2410 - RNA, 22 nt, Artificial Sequence
  RPE65 RNA guide
guggucaugcaucuaaaauggg

SEQ ID NO: 2411 - RNA, 22 nt, Artificial Sequence
  RPE65 RNA guide
guuaauuggucccauuuuagau

SEQ ID NO: 2412 - RNA, 22 nt, Artificial Sequence
  RPE65 RNA guide
uaaaaugggaccaauuaacaug

SEQ ID NO: 2413 - RNA, 22 nt, Artificial Sequence
  RPE65 RNA guide
uaauuggucccauuuuagaugc

SEQ ID NO: 2414 - RNA, 22 nt, Artificial Sequence
  RPE65 RNA guide
ucaugcaucuaaaaugggacca

SEQ ID NO: 2415 - RNA, 22 nt, Artificial Sequence
  RPE65 RNA guide
ucauguuaauuggucccauuuu

SEQ ID NO: 2416 - RNA, 22 nt, Artificial Sequence
  RPE65 RNA guide
ucccauuuuagaugcaugacca

SEQ ID NO: 2417 - RNA, 22 nt, Artificial Sequence
  RPE65 RNA guide
ucuaaaaugggaccaauuaaca

SEQ ID NO: 2418 - RNA, 22 nt, Artificial Sequence
  RPE65 RNA guide
ugcaucuaaaaugggaccaauu

SEQ ID NO: 2419 - RNA, 22 nt, Artificial Sequence
  RPE65 RNA guide
ugggaccaauuaacaugauugu

SEQ ID NO: 2420 - RNA, 22 nt, Artificial Sequence
  RPE65 RNA guide
uggucaugcaucuaaaauggga

SEQ ID NO: 2421 - RNA, 22 nt, Artificial Sequence
  RPE65 RNA guide
uggucccauuuuagaugcauga

SEQ ID NO: 2422 - RNA, 22 nt, Artificial Sequence
  RPE65 RNA guide
uguuaauuggucccauuuuaga

SEQ ID NO: 2423 - RNA, 22 nt, Artificial Sequence
  RPE65 RNA guide
uuaauuggucccauuuuagaug

SEQ ID NO: 2424 - RNA, 22 nt, Artificial Sequence
  RPE65 RNA guide
uuggucccauuuuagaugcaug

SEQ ID NO: 2425 - RNA, 20 nt, Artificial Sequence
  RPE65 RNA guide
aaguuccugguggaaauugc

SEQ ID NO: 2426 - RNA, 20 nt, Artificial Sequence
  RPE65 RNA guide
aauggauuggaaguuccugg

SEQ ID NO: 2427 - RNA, 20 nt, Artificial Sequence
  RPE65 RNA guide
aauuuccaccaggaacuucc

SEQ ID NO: 2428 - RNA, 20 nt, Artificial Sequence
  RPE65 RNA guide
acugcaauuuccaccaggaa

SEQ ID NO: 2429 - RNA, 20 nt, Artificial Sequence
  RPE65 RNA guide
acuugcccuacugcaauuuc

SEQ ID NO: 2430 - RNA, 20 nt, Artificial Sequence
  RPE65 RNA guide
aguuccugguggaaauugca

SEQ ID NO: 2431 - RNA, 20 nt, Artificial Sequence
  RPE65 RNA guide
aucacuugcccuacugcaau

SEQ ID NO: 2432 - RNA, 20 nt, Artificial Sequence
  RPE65 RNA guide
auggauuggaaguuccuggu

SEQ ID NO: 2433 - RNA, 20 nt, Artificial Sequence
  RPE65 RNA guide
auuggaaguuccugguggaa

SEQ ID NO: 2434 - RNA, 20 nt, Artificial Sequence
  RPE65 RNA guide
auuuccaccaggaacuucca

SEQ ID NO: 2435 - RNA, 20 nt, Artificial Sequence
  RPE65 RNA guide
caauggauuggaaguuccug

SEQ ID NO: 2436 - RNA, 20 nt, Artificial Sequence
  RPE65 RNA guide
caauuuccaccaggaacuuc

SEQ ID NO: 2437 - RNA, 20 nt, Artificial Sequence
  RPE65 RNA guide
cacuugcccuacugcaauuu

SEQ ID NO: 2438 - RNA, 20 nt, Artificial Sequence
  RPE65 RNA guide
caucacuugcccuacugcaa

SEQ ID NO: 2439 - RNA, 20 nt, Artificial Sequence
  RPE65 RNA guide
cccuacugcaauuuccacca

SEQ ID NO: 2440 - RNA, 20 nt, Artificial Sequence
  RPE65 RNA guide
ccuacugcaauuuccaccag

SEQ ID NO: 2441 - RNA, 20 nt, Artificial Sequence
  RPE65 RNA guide
ccugguggaaauugcaguag

SEQ ID NO: 2442 - RNA, 20 nt, Artificial Sequence
  RPE65 RNA guide
cuacugcaauuuccaccagg

SEQ ID NO: 2443 - RNA, 20 nt, Artificial Sequence
  RPE65 RNA guide
cugcaauuuccaccaggaac

SEQ ID NO: 2444 - RNA, 20 nt, Artificial Sequence
  RPE65 RNA guide
cugguggaaauugcaguagg

SEQ ID NO: 2445 - RNA, 20 nt, Artificial Sequence
  RPE65 RNA guide
cuugcccuacugcaauuucc

SEQ ID NO: 2446 - RNA, 20 nt, Artificial Sequence
  RPE65 RNA guide
gaaguuccugguggaaauug

SEQ ID NO: 2447 - RNA, 20 nt, Artificial Sequence
  RPE65 RNA guide
gauuggaaguuccuggugga

SEQ ID NO: 2448 - RNA, 20 nt, Artificial Sequence
  RPE65 RNA guide
gcaauuuccaccaggaacuu

SEQ ID NO: 2449 - RNA, 20 nt, Artificial Sequence
  RPE65 RNA guide
gcccuacugcaauuuccacc

SEQ ID NO: 2450 - RNA, 20 nt, Artificial Sequence
  RPE65 RNA guide
ggaaauugcaguagggcaag

SEQ ID NO: 2451 - RNA, 20 nt, Artificial Sequence
  RPE65 RNA guide
ggaaguuccugguggaaauu

SEQ ID NO: 2452 - RNA, 20 nt, Artificial Sequence
  RPE65 RNA guide
ggauuggaaguuccuggugg

SEQ ID NO: 2453 - RNA, 20 nt, Artificial Sequence
  RPE65 RNA guide
gguggaaauugcaguagggc

SEQ ID NO: 2454 - RNA, 20 nt, Artificial Sequence
  RPE65 RNA guide
guggaaauugcaguagggca

SEQ ID NO: 2455 - RNA, 20 nt, Artificial Sequence
  RPE65 RNA guide
guuccugguggaaauugcag

SEQ ID NO: 2456 - RNA, 20 nt, Artificial Sequence
  RPE65 RNA guide
uacugcaauuuccaccagga

SEQ ID NO: 2457 - RNA, 20 nt, Artificial Sequence
  RPE65 RNA guide
ucacuugcccuacugcaauu

SEQ ID NO: 2458 - RNA, 20 nt, Artificial Sequence
  RPE65 RNA guide
uccaccaggaacuuccaauc

SEQ ID NO: 2459 - RNA, 20 nt, Artificial Sequence
  RPE65 RNA guide
uccugguggaaauugcagua

SEQ ID NO: 2460 - RNA, 20 nt, Artificial Sequence
  RPE65 RNA guide
ugcaauuuccaccaggaacu

SEQ ID NO: 2461 - RNA, 20 nt, Artificial Sequence
  RPE65 RNA guide
ugcccuacugcaauuuccac

SEQ ID NO: 2462 - RNA, 20 nt, Artificial Sequence
  RPE65 RNA guide
uggaaauugcaguagggcaa

SEQ ID NO: 2463 - RNA, 20 nt, Artificial Sequence
  RPE65 RNA guide
uggaaguuccugguggaaau

SEQ ID NO: 2464 - RNA, 20 nt, Artificial Sequence
  RPE65 RNA guide
uggauuggaaguuccuggug

SEQ ID NO: 2465 - RNA, 20 nt, Artificial Sequence
  RPE65 RNA guide
ugguggaaauugcaguaggg

SEQ ID NO: 2466 - RNA, 20 nt, Artificial Sequence
  RPE65 RNA guide
uuccaccaggaacuuccaau

SEQ ID NO: 2467 - RNA, 20 nt, Artificial Sequence
  RPE65 RNA guide
uuccugguggaaauugcagu

SEQ ID NO: 2468 - RNA, 20 nt, Artificial Sequence
  RPE65 RNA guide
uugcccuacugcaauuucca

SEQ ID NO: 2469 - RNA, 20 nt, Artificial Sequence
  RPE65 RNA guide
uuggaaguuccugguggaaa

SEQ ID NO: 2470 - RNA, 20 nt, Artificial Sequence
  RPE65 RNA guide
uuuccaccaggaacuuccaa

SEQ ID NO: 2471 - RNA, 21 nt, Artificial Sequence
  RPE65 RNA guide
aaguuccugguggaaauugca

SEQ ID NO: 2472 - RNA, 21 nt, Artificial Sequence
  RPE65 RNA guide
aauggauuggaaguuccuggu

SEQ ID NO: 2473 - RNA, 21 nt, Artificial Sequence
  RPE65 RNA guide
aauuuccaccaggaacuucca

SEQ ID NO: 2474 - RNA, 21 nt, Artificial Sequence
  RPE65 RNA guide
acaucacuugcccuacugcaa

SEQ ID NO: 2475 - RNA, 21 nt, Artificial Sequence
  RPE65 RNA guide
acugcaauuuccaccaggaac

SEQ ID NO: 2476 - RNA, 21 nt, Artificial Sequence
  RPE65 RNA guide
acuugcccuacugcaauuucc

SEQ ID NO: 2477 - RNA, 21 nt, Artificial Sequence
  RPE65 RNA guide
aguuccugguggaaauugcag

SEQ ID NO: 2478 - RNA, 21 nt, Artificial Sequence
  RPE65 RNA guide
aucacuugcccuacugcaauu

SEQ ID NO: 2479 - RNA, 21 nt, Artificial Sequence
  RPE65 RNA guide
auggauuggaaguuccuggug

SEQ ID NO: 2480 - RNA, 21 nt, Artificial Sequence
  RPE65 RNA guide
auuggaaguuccugguggaaa

SEQ ID NO: 2481 - RNA, 21 nt, Artificial Sequence
  RPE65 RNA guide
auuuccaccaggaacuuccaa

SEQ ID NO: 2482 - RNA, 21 nt, Artificial Sequence
  RPE65 RNA guide
caauggauuggaaguuccugg

SEQ ID NO: 2483 - RNA, 21 nt, Artificial Sequence
  RPE65 RNA guide
caauuuccaccaggaacuucc

SEQ ID NO: 2484 - RNA, 21 nt, Artificial Sequence
  RPE65 RNA guide
cacuugcccuacugcaauuuc

SEQ ID NO: 2485 - RNA, 21 nt, Artificial Sequence
  RPE65 RNA guide
caucacuugcccuacugcaau

SEQ ID NO: 2486 - RNA, 21 nt, Artificial Sequence
  RPE65 RNA guide
cccuacugcaauuuccaccag

SEQ ID NO: 2487 - RNA, 21 nt, Artificial Sequence
  RPE65 RNA guide
ccuacugcaauuuccaccagg

SEQ ID NO: 2488 - RNA, 21 nt, Artificial Sequence
  RPE65 RNA guide
ccugguggaaauugcaguagg

SEQ ID NO: 2489 - RNA, 21 nt, Artificial Sequence
  RPE65 RNA guide
cuacugcaauuuccaccagga

SEQ ID NO: 2490 - RNA, 21 nt, Artificial Sequence
  RPE65 RNA guide
cugcaauuuccaccaggaacu

SEQ ID NO: 2491 - RNA, 21 nt, Artificial Sequence
  RPE65 RNA guide
cugguggaaauugcaguaggg

SEQ ID NO: 2492 - RNA, 21 nt, Artificial Sequence
  RPE65 RNA guide
cuugcccuacugcaauuucca

SEQ ID NO: 2493 - RNA, 21 nt, Artificial Sequence
  RPE65 RNA guide
gaaguuccugguggaaauugc

SEQ ID NO: 2494 - RNA, 21 nt, Artificial Sequence
  RPE65 RNA guide
gauuggaaguuccugguggaa

SEQ ID NO: 2495 - RNA, 21 nt, Artificial Sequence
  RPE65 RNA guide
gcaauuuccaccaggaacuuc

SEQ ID NO: 2496 - RNA, 21 nt, Artificial Sequence
  RPE65 RNA guide
gcccuacugcaauuuccacca

SEQ ID NO: 2497 - RNA, 21 nt, Artificial Sequence
  RPE65 RNA guide
ggaaauugcaguagggcaagu

SEQ ID NO: 2498 - RNA, 21 nt, Artificial Sequence
  RPE65 RNA guide
ggaaguuccugguggaaauug

SEQ ID NO: 2499 - RNA, 21 nt, Artificial Sequence
  RPE65 RNA guide
ggauuggaaguuccuggugga

SEQ ID NO: 2500 - RNA, 21 nt, Artificial Sequence
  RPE65 RNA guide
gguggaaauugcaguagggca

SEQ ID NO: 2501 - RNA, 21 nt, Artificial Sequence
  RPE65 RNA guide
guggaaauugcaguagggcaa

SEQ ID NO: 2502 - RNA, 21 nt, Artificial Sequence
  RPE65 RNA guide
guuccugguggaaauugcagu

SEQ ID NO: 2503 - RNA, 21 nt, Artificial Sequence
  RPE65 RNA guide
uacugcaauuuccaccaggaa

SEQ ID NO: 2504 - RNA, 21 nt, Artificial Sequence
  RPE65 RNA guide
ucaauggauuggaaguuccug

SEQ ID NO: 2505 - RNA, 21 nt, Artificial Sequence
  RPE65 RNA guide
ucacuugcccuacugcaauuu

SEQ ID NO: 2506 - RNA, 21 nt, Artificial Sequence
  RPE65 RNA guide
uccaccaggaacuuccaaucc

SEQ ID NO: 2507 - RNA, 21 nt, Artificial Sequence
  RPE65 RNA guide
uccugguggaaauugcaguag

SEQ ID NO: 2508 - RNA, 21 nt, Artificial Sequence
  RPE65 RNA guide
ugcaauuuccaccaggaacuu

SEQ ID NO: 2509 - RNA, 21 nt, Artificial Sequence
  RPE65 RNA guide
ugcccuacugcaauuuccacc

SEQ ID NO: 2510 - RNA, 21 nt, Artificial Sequence
  RPE65 RNA guide
uggaaauugcaguagggcaag

SEQ ID NO: 2511 - RNA, 21 nt, Artificial Sequence
  RPE65 RNA guide
uggaaguuccugguggaaauu

SEQ ID NO: 2512 - RNA, 21 nt, Artificial Sequence
  RPE65 RNA guide
uggauuggaaguuccuggugg

SEQ ID NO: 2513 - RNA, 21 nt, Artificial Sequence
  RPE65 RNA guide
ugguggaaauugcaguagggc

SEQ ID NO: 2514 - RNA, 21 nt, Artificial Sequence
  RPE65 RNA guide
uuccaccaggaacuuccaauc

SEQ ID NO: 2515 - RNA, 21 nt, Artificial Sequence
  RPE65 RNA guide
uuccugguggaaauugcagua

SEQ ID NO: 2516 - RNA, 21 nt, Artificial Sequence
  RPE65 RNA guide
uugcccuacugcaauuuccac

SEQ ID NO: 2517 - RNA, 21 nt, Artificial Sequence
  RPE65 RNA guide
uuggaaguuccugguggaaau

SEQ ID NO: 2518 - RNA, 21 nt, Artificial Sequence
  RPE65 RNA guide
uuuccaccaggaacuuccaau

SEQ ID NO: 2519 - RNA, 22 nt, Artificial Sequence
  RPE65 RNA guide
aacaucacuugcccuacugcaa

SEQ ID NO: 2520 - RNA, 22 nt, Artificial Sequence
  RPE65 RNA guide
aaguuccugguggaaauugcag

SEQ ID NO: 2521 - RNA, 22 nt, Artificial Sequence
  RPE65 RNA guide
aauggauuggaaguuccuggug

SEQ ID NO: 2522 - RNA, 22 nt, Artificial Sequence
  RPE65 RNA guide
aauuuccaccaggaacuuccaa

SEQ ID NO: 2523 - RNA, 22 nt, Artificial Sequence
  RPE65 RNA guide
acaucacuugcccuacugcaau

SEQ ID NO: 2524 - RNA, 22 nt, Artificial Sequence
  RPE65 RNA guide
acugcaauuuccaccaggaacu

SEQ ID NO: 2525 - RNA, 22 nt, Artificial Sequence
  RPE65 RNA guide
acuugcccuacugcaauuucca

SEQ ID NO: 2526 - RNA, 22 nt, Artificial Sequence
  RPE65 RNA guide
aguuccugguggaaauugcagu

SEQ ID NO: 2527 - RNA, 22 nt, Artificial Sequence
  RPE65 RNA guide
aucacuugcccuacugcaauuu

SEQ ID NO: 2528 - RNA, 22 nt, Artificial Sequence
  RPE65 RNA guide
auggauuggaaguuccuggugg

SEQ ID NO: 2529 - RNA, 22 nt, Artificial Sequence
  RPE65 RNA guide
auuggaaguuccugguggaaau

SEQ ID NO: 2530 - RNA, 22 nt, Artificial Sequence
  RPE65 RNA guide
auuuccaccaggaacuuccaau

SEQ ID NO: 2531 - RNA, 22 nt, Artificial Sequence
  RPE65 RNA guide
caauggauuggaaguuccuggu

SEQ ID NO: 2532 - RNA, 22 nt, Artificial Sequence
  RPE65 RNA guide
caauuuccaccaggaacuucca

SEQ ID NO: 2533 - RNA, 22 nt, Artificial Sequence
  RPE65 RNA guide
cacuugcccuacugcaauuucc

SEQ ID NO: 2534 - RNA, 22 nt, Artificial Sequence
  RPE65 RNA guide
caucacuugcccuacugcaauu

SEQ ID NO: 2535 - RNA, 22 nt, Artificial Sequence
  RPE65 RNA guide
cccuacugcaauuuccaccagg

SEQ ID NO: 2536 - RNA, 22 nt, Artificial Sequence
  RPE65 RNA guide
ccuacugcaauuuccaccagga

SEQ ID NO: 2537 - RNA, 22 nt, Artificial Sequence
  RPE65 RNA guide
ccugguggaaauugcaguaggg

SEQ ID NO: 2538 - RNA, 22 nt, Artificial Sequence
  RPE65 RNA guide
cuacugcaauuuccaccaggaa

SEQ ID NO: 2539 - RNA, 22 nt, Artificial Sequence
  RPE65 RNA guide
cugcaauuuccaccaggaacuu

SEQ ID NO: 2540 - RNA, 22 nt, Artificial Sequence
  RPE65 RNA guide
cugguggaaauugcaguagggc

SEQ ID NO: 2541 - RNA, 22 nt, Artificial Sequence
  RPE65 RNA guide
cuugcccuacugcaauuuccac

SEQ ID NO: 2542 - RNA, 22 nt, Artificial Sequence
  RPE65 RNA guide
gaaguuccugguggaaauugca

SEQ ID NO: 2543 - RNA, 22 nt, Artificial Sequence
  RPE65 RNA guide
gauuggaaguuccugguggaaa

SEQ ID NO: 2544 - RNA, 22 nt, Artificial Sequence
  RPE65 RNA guide
gcaauuuccaccaggaacuucc

SEQ ID NO: 2545 - RNA, 22 nt, Artificial Sequence
  RPE65 RNA guide
gcccuacugcaauuuccaccag

SEQ ID NO: 2546 - RNA, 22 nt, Artificial Sequence
  RPE65 RNA guide
ggaaauugcaguagggcaagug

SEQ ID NO: 2547 - RNA, 22 nt, Artificial Sequence
  RPE65 RNA guide
ggaaguuccugguggaaauugc

SEQ ID NO: 2548 - RNA, 22 nt, Artificial Sequence
  RPE65 RNA guide
ggauuggaaguuccugguggaa

SEQ ID NO: 2549 - RNA, 22 nt, Artificial Sequence
  RPE65 RNA guide
gguggaaauugcaguagggcaa

SEQ ID NO: 2550 - RNA, 22 nt, Artificial Sequence
  RPE65 RNA guide
guggaaauugcaguagggcaag

SEQ ID NO: 2551 - RNA, 22 nt, Artificial Sequence
  RPE65 RNA guide
guuccugguggaaauugcagua

SEQ ID NO: 2552 - RNA, 22 nt, Artificial Sequence
  RPE65 RNA guide
uacugcaauuuccaccaggaac

SEQ ID NO: 2553 - RNA, 22 nt, Artificial Sequence
  RPE65 RNA guide
ucaauggauuggaaguuccugg

SEQ ID NO: 2554 - RNA, 22 nt, Artificial Sequence
  RPE65 RNA guide
ucacuugcccuacugcaauuuc

SEQ ID NO: 2555 - RNA, 22 nt, Artificial Sequence
  RPE65 RNA guide
uccaccaggaacuuccaaucca

SEQ ID NO: 2556 - RNA, 22 nt, Artificial Sequence
  RPE65 RNA guide
uccugguggaaauugcaguagg

SEQ ID NO: 2557 - RNA, 22 nt, Artificial Sequence
  RPE65 RNA guide
ugcaauuuccaccaggaacuuc

SEQ ID NO: 2558 - RNA, 22 nt, Artificial Sequence
  RPE65 RNA guide
ugcccuacugcaauuuccacca

SEQ ID NO: 2559 - RNA, 22 nt, Artificial Sequence
  RPE65 RNA guide
uggaaauugcaguagggcaagu

SEQ ID NO: 2560 - RNA, 22 nt, Artificial Sequence
  RPE65 RNA guide
uggaaguuccugguggaaauug

SEQ ID NO: 2561 - RNA, 22 nt, Artificial Sequence
  RPE65 RNA guide
uggauuggaaguuccuggugga

SEQ ID NO: 2562 - RNA, 22 nt, Artificial Sequence
  RPE65 RNA guide
ugguggaaauugcaguagggca

SEQ ID NO: 2563 - RNA, 22 nt, Artificial Sequence
  RPE65 RNA guide
uucaauggauuggaaguuccug

SEQ ID NO: 2564 - RNA, 22 nt, Artificial Sequence
  RPE65 RNA guide
uuccaccaggaacuuccaaucc

SEQ ID NO: 2565 - RNA, 22 nt, Artificial Sequence
  RPE65 RNA guide
uuccugguggaaauugcaguag

SEQ ID NO: 2566 - RNA, 22 nt, Artificial Sequence
  RPE65 RNA guide
uugcccuacugcaauuuccacc

SEQ ID NO: 2567 - RNA, 22 nt, Artificial Sequence
  RPE65 RNA guide
uuggaaguuccugguggaaauu

SEQ ID NO: 2568 - RNA, 22 nt, Artificial Sequence
  RPE65 RNA guide
uuuccaccaggaacuuccaauc

SEQ ID NO: 2569 - RNA, 20 nt, Artificial Sequence
  RPE65 RNA guide
aaguuccuggugaaaauugc

SEQ ID NO: 2570 - RNA, 20 nt, Artificial Sequence
  RPE65 RNA guide
aauuuucaccaggaacuucc

SEQ ID NO: 2571 - RNA, 20 nt, Artificial Sequence
  RPE65 RNA guide
acugcaauuuucaccaggaa

SEQ ID NO: 2572 - RNA, 20 nt, Artificial Sequence
  RPE65 RNA guide
acuugcccuacugcaauuuu

SEQ ID NO: 2573 - RNA, 20 nt, Artificial Sequence
  RPE65 RNA guide
aguuccuggugaaaauugca

SEQ ID NO: 2574 - RNA, 20 nt, Artificial Sequence
  RPE65 RNA guide
auuggaaguuccuggugaaa

SEQ ID NO: 2575 - RNA, 20 nt, Artificial Sequence
  RPE65 RNA guide
auuuucaccaggaacuucca

SEQ ID NO: 2576 - RNA, 20 nt, Artificial Sequence
  RPE65 RNA guide
caauuuucaccaggaacuuc

SEQ ID NO: 2577 - RNA, 20 nt, Artificial Sequence
  RPE65 RNA guide
cccuacugcaauuuucacca

SEQ ID NO: 2578 - RNA, 20 nt, Artificial Sequence
  RPE65 RNA guide
ccuacugcaauuuucaccag

SEQ ID NO: 2579 - RNA, 20 nt, Artificial Sequence
  RPE65 RNA guide
ccuggugaaaauugcaguag

SEQ ID NO: 2580 - RNA, 20 nt, Artificial Sequence
  RPE65 RNA guide
cuacugcaauuuucaccagg

SEQ ID NO: 2581 - RNA, 20 nt, Artificial Sequence
  RPE65 RNA guide
cugcaauuuucaccaggaac

SEQ ID NO: 2582 - RNA, 20 nt, Artificial Sequence
  RPE65 RNA guide
cuggugaaaauugcaguagg

SEQ ID NO: 2583 - RNA, 20 nt, Artificial Sequence
  RPE65 RNA guide
cuugcccuacugcaauuuuc

SEQ ID NO: 2584 - RNA, 20 nt, Artificial Sequence
  RPE65 RNA guide
gaaaauugcaguagggcaag

SEQ ID NO: 2585 - RNA, 20 nt, Artificial Sequence
  RPE65 RNA guide
gaaguuccuggugaaaauug

SEQ ID NO: 2586 - RNA, 20 nt, Artificial Sequence
  RPE65 RNA guide
gauuggaaguuccuggugaa

SEQ ID NO: 2587 - RNA, 20 nt, Artificial Sequence
  RPE65 RNA guide
gcaauuuucaccaggaacuu

SEQ ID NO: 2588 - RNA, 20 nt, Artificial Sequence
  RPE65 RNA guide
gcccuacugcaauuuucacc

SEQ ID NO: 2589 - RNA, 20 nt, Artificial Sequence
  RPE65 RNA guide
ggaaguuccuggugaaaauu

SEQ ID NO: 2590 - RNA, 20 nt, Artificial Sequence
  RPE65 RNA guide
ggauuggaaguuccugguga

SEQ ID NO: 2591 - RNA, 20 nt, Artificial Sequence
  RPE65 RNA guide
ggugaaaauugcaguagggc

SEQ ID NO: 2592 - RNA, 20 nt, Artificial Sequence
  RPE65 RNA guide
gugaaaauugcaguagggca

SEQ ID NO: 2593 - RNA, 20 nt, Artificial Sequence
  RPE65 RNA guide
guuccuggugaaaauugcag

SEQ ID NO: 2594 - RNA, 20 nt, Artificial Sequence
  RPE65 RNA guide
uacugcaauuuucaccagga

SEQ ID NO: 2595 - RNA, 20 nt, Artificial Sequence
  RPE65 RNA guide
uccuggugaaaauugcagua

SEQ ID NO: 2596 - RNA, 20 nt, Artificial Sequence
  RPE65 RNA guide
ugaaaauugcaguagggcaa

SEQ ID NO: 2597 - RNA, 20 nt, Artificial Sequence
  RPE65 RNA guide
ugcaauuuucaccaggaacu

SEQ ID NO: 2598 - RNA, 20 nt, Artificial Sequence
  RPE65 RNA guide
ugcccuacugcaauuuucac

SEQ ID NO: 2599 - RNA, 20 nt, Artificial Sequence
  RPE65 RNA guide
uggaaguuccuggugaaaau

SEQ ID NO: 2600 - RNA, 20 nt, Artificial Sequence
  RPE65 RNA guide
uggugaaaauugcaguaggg

SEQ ID NO: 2601 - RNA, 20 nt, Artificial Sequence
  RPE65 RNA guide
uucaccaggaacuuccaauc

SEQ ID NO: 2602 - RNA, 20 nt, Artificial Sequence
  RPE65 RNA guide
uuccuggugaaaauugcagu

SEQ ID NO: 2603 - RNA, 20 nt, Artificial Sequence
  RPE65 RNA guide
uugcccuacugcaauuuuca

SEQ ID NO: 2604 - RNA, 20 nt, Artificial Sequence
  RPE65 RNA guide
uuggaaguuccuggugaaaa

SEQ ID NO: 2605 - RNA, 20 nt, Artificial Sequence
  RPE65 RNA guide
uuucaccaggaacuuccaau

SEQ ID NO: 2606 - RNA, 20 nt, Artificial Sequence
  RPE65 RNA guide
uuuucaccaggaacuuccaa

SEQ ID NO: 2607 - RNA, 21 nt, Artificial Sequence
  RPE65 RNA guide
aaguuccuggugaaaauugca

SEQ ID NO: 2608 - RNA, 21 nt, Artificial Sequence
  RPE65 RNA guide
aauuuucaccaggaacuucca

SEQ ID NO: 2609 - RNA, 21 nt, Artificial Sequence
  RPE65 RNA guide
acugcaauuuucaccaggaac

SEQ ID NO: 2610 - RNA, 21 nt, Artificial Sequence
  RPE65 RNA guide
acuugcccuacugcaauuuuc

SEQ ID NO: 2611 - RNA, 21 nt, Artificial Sequence
  RPE65 RNA guide
aguuccuggugaaaauugcag

SEQ ID NO: 2612 - RNA, 21 nt, Artificial Sequence
  RPE65 RNA guide
auuggaaguuccuggugaaaa

SEQ ID NO: 2613 - RNA, 21 nt, Artificial Sequence
  RPE65 RNA guide
auuuucaccaggaacuuccaa

SEQ ID NO: 2614 - RNA, 21 nt, Artificial Sequence
  RPE65 RNA guide
caauuuucaccaggaacuucc

SEQ ID NO: 2615 - RNA, 21 nt, Artificial Sequence
  RPE65 RNA guide
cacuugcccuacugcaauuuu

SEQ ID NO: 2616 - RNA, 21 nt, Artificial Sequence
  RPE65 RNA guide
cccuacugcaauuuucaccag

SEQ ID NO: 2617 - RNA, 21 nt, Artificial Sequence
  RPE65 RNA guide
ccuacugcaauuuucaccagg

SEQ ID NO: 2618 - RNA, 21 nt, Artificial Sequence
  RPE65 RNA guide
ccuggugaaaauugcaguagg

SEQ ID NO: 2619 - RNA, 21 nt, Artificial Sequence
  RPE65 RNA guide
cuacugcaauuuucaccagga

SEQ ID NO: 2620 - RNA, 21 nt, Artificial Sequence
  RPE65 RNA guide
cugcaauuuucaccaggaacu

SEQ ID NO: 2621 - RNA, 21 nt, Artificial Sequence
  RPE65 RNA guide
cuggugaaaauugcaguaggg

SEQ ID NO: 2622 - RNA, 21 nt, Artificial Sequence
  RPE65 RNA guide
cuugcccuacugcaauuuuca

SEQ ID NO: 2623 - RNA, 21 nt, Artificial Sequence
  RPE65 RNA guide
gaaaauugcaguagggcaagu

SEQ ID NO: 2624 - RNA, 21 nt, Artificial Sequence
  RPE65 RNA guide
gaaguuccuggugaaaauugc

SEQ ID NO: 2625 - RNA, 21 nt, Artificial Sequence
  RPE65 RNA guide
gauuggaaguuccuggugaaa

SEQ ID NO: 2626 - RNA, 21 nt, Artificial Sequence
  RPE65 RNA guide
gcaauuuucaccaggaacuuc

SEQ ID NO: 2627 - RNA, 21 nt, Artificial Sequence
  RPE65 RNA guide
gcccuacugcaauuuucacca

SEQ ID NO: 2628 - RNA, 21 nt, Artificial Sequence
  RPE65 RNA guide
ggaaguuccuggugaaaauug

SEQ ID NO: 2629 - RNA, 21 nt, Artificial Sequence
  RPE65 RNA guide
ggauuggaaguuccuggugaa

SEQ ID NO: 2630 - RNA, 21 nt, Artificial Sequence
  RPE65 RNA guide
ggugaaaauugcaguagggca

SEQ ID NO: 2631 - RNA, 21 nt, Artificial Sequence
  RPE65 RNA guide
gugaaaauugcaguagggcaa

SEQ ID NO: 2632 - RNA, 21 nt, Artificial Sequence
  RPE65 RNA guide
guuccuggugaaaauugcagu

SEQ ID NO: 2633 - RNA, 21 nt, Artificial Sequence
  RPE65 RNA guide
uacugcaauuuucaccaggaa

SEQ ID NO: 2634 - RNA, 21 nt, Artificial Sequence
  RPE65 RNA guide
uccuggugaaaauugcaguag

SEQ ID NO: 2635 - RNA, 21 nt, Artificial Sequence
  RPE65 RNA guide
ugaaaauugcaguagggcaag

SEQ ID NO: 2636 - RNA, 21 nt, Artificial Sequence
  RPE65 RNA guide
ugcaauuuucaccaggaacuu

SEQ ID NO: 2637 - RNA, 21 nt, Artificial Sequence
  RPE65 RNA guide
ugcccuacugcaauuuucacc

SEQ ID NO: 2638 - RNA, 21 nt, Artificial Sequence
  RPE65 RNA guide
uggaaguuccuggugaaaauu

SEQ ID NO: 2639 - RNA, 21 nt, Artificial Sequence
  RPE65 RNA guide
uggauuggaaguuccugguga

SEQ ID NO: 2640 - RNA, 21 nt, Artificial Sequence
  RPE65 RNA guide
uggugaaaauugcaguagggc

SEQ ID NO: 2641 - RNA, 21 nt, Artificial Sequence
  RPE65 RNA guide
uucaccaggaacuuccaaucc

SEQ ID NO: 2642 - RNA, 21 nt, Artificial Sequence
  RPE65 RNA guide
uuccuggugaaaauugcagua

SEQ ID NO: 2643 - RNA, 21 nt, Artificial Sequence
  RPE65 RNA guide
uugcccuacugcaauuuucac

SEQ ID NO: 2644 - RNA, 21 nt, Artificial Sequence
  RPE65 RNA guide
uuggaaguuccuggugaaaau

SEQ ID NO: 2645 - RNA, 21 nt, Artificial Sequence
  RPE65 RNA guide
uuucaccaggaacuuccaauc

SEQ ID NO: 2646 - RNA, 21 nt, Artificial Sequence
  RPE65 RNA guide
uuuucaccaggaacuuccaau

SEQ ID NO: 2647 - RNA, 22 nt, Artificial Sequence
  RPE65 RNA guide
aaguuccuggugaaaauugcag

SEQ ID NO: 2648 - RNA, 22 nt, Artificial Sequence
  RPE65 RNA guide
aauuuucaccaggaacuuccaa

SEQ ID NO: 2649 - RNA, 22 nt, Artificial Sequence
  RPE65 RNA guide
acugcaauuuucaccaggaacu

SEQ ID NO: 2650 - RNA, 22 nt, Artificial Sequence
  RPE65 RNA guide
acuugcccuacugcaauuuuca

SEQ ID NO: 2651 - RNA, 22 nt, Artificial Sequence
  RPE65 RNA guide
aguuccuggugaaaauugcagu

SEQ ID NO: 2652 - RNA, 22 nt, Artificial Sequence
  RPE65 RNA guide
auggauuggaaguuccugguga

SEQ ID NO: 2653 - RNA, 22 nt, Artificial Sequence
  RPE65 RNA guide
auuggaaguuccuggugaaaau

SEQ ID NO: 2654 - RNA, 22 nt, Artificial Sequence
  RPE65 RNA guide
auuuucaccaggaacuuccaau

SEQ ID NO: 2655 - RNA, 22 nt, Artificial Sequence
  RPE65 RNA guide
caauuuucaccaggaacuucca

SEQ ID NO: 2656 - RNA, 22 nt, Artificial Sequence
  RPE65 RNA guide
cacuugcccuacugcaauuuuc

SEQ ID NO: 2657 - RNA, 22 nt, Artificial Sequence
  RPE65 RNA guide
cccuacugcaauuuucaccagg

SEQ ID NO: 2658 - RNA, 22 nt, Artificial Sequence
  RPE65 RNA guide
ccuacugcaauuuucaccagga

SEQ ID NO: 2659 - RNA, 22 nt, Artificial Sequence
  RPE65 RNA guide
ccuggugaaaauugcaguaggg

SEQ ID NO: 2660 - RNA, 22 nt, Artificial Sequence
  RPE65 RNA guide
cuacugcaauuuucaccaggaa

SEQ ID NO: 2661 - RNA, 22 nt, Artificial Sequence
  RPE65 RNA guide
cugcaauuuucaccaggaacuu

SEQ ID NO: 2662 - RNA, 22 nt, Artificial Sequence
  RPE65 RNA guide
cuggugaaaauugcaguagggc

SEQ ID NO: 2663 - RNA, 22 nt, Artificial Sequence
  RPE65 RNA guide
cuugcccuacugcaauuuucac

SEQ ID NO: 2664 - RNA, 22 nt, Artificial Sequence
  RPE65 RNA guide
gaaaauugcaguagggcaagug

SEQ ID NO: 2665 - RNA, 22 nt, Artificial Sequence
  RPE65 RNA guide
gaaguuccuggugaaaauugca

SEQ ID NO: 2666 - RNA, 22 nt, Artificial Sequence
  RPE65 RNA guide
gauuggaaguuccuggugaaaa

SEQ ID NO: 2667 - RNA, 22 nt, Artificial Sequence
  RPE65 RNA guide
gcaauuuucaccaggaacuucc

SEQ ID NO: 2668 - RNA, 22 nt, Artificial Sequence
  RPE65 RNA guide
gcccuacugcaauuuucaccag

SEQ ID NO: 2669 - RNA, 22 nt, Artificial Sequence
  RPE65 RNA guide
ggaaguuccuggugaaaauugc

SEQ ID NO: 2670 - RNA, 22 nt, Artificial Sequence
  RPE65 RNA guide
ggauuggaaguuccuggugaaa

SEQ ID NO: 2671 - RNA, 22 nt, Artificial Sequence
  RPE65 RNA guide
ggugaaaauugcaguagggcaa

SEQ ID NO: 2672 - RNA, 22 nt, Artificial Sequence
  RPE65 RNA guide
gugaaaauugcaguagggcaag

SEQ ID NO: 2673 - RNA, 22 nt, Artificial Sequence
  RPE65 RNA guide
guuccuggugaaaauugcagua

SEQ ID NO: 2674 - RNA, 22 nt, Artificial Sequence
  RPE65 RNA guide
uacugcaauuuucaccaggaac

SEQ ID NO: 2675 - RNA, 22 nt, Artificial Sequence
  RPE65 RNA guide
ucacuugcccuacugcaauuuu

SEQ ID NO: 2676 - RNA, 22 nt, Artificial Sequence
  RPE65 RNA guide
uccuggugaaaauugcaguagg

SEQ ID NO: 2677 - RNA, 22 nt, Artificial Sequence
  RPE65 RNA guide
ugaaaauugcaguagggcaagu

SEQ ID NO: 2678 - RNA, 22 nt, Artificial Sequence
  RPE65 RNA guide
ugcaauuuucaccaggaacuuc

SEQ ID NO: 2679 - RNA, 22 nt, Artificial Sequence
  RPE65 RNA guide
ugcccuacugcaauuuucacca

SEQ ID NO: 2680 - RNA, 22 nt, Artificial Sequence
  RPE65 RNA guide
uggaaguuccuggugaaaauug

SEQ ID NO: 2681 - RNA, 22 nt, Artificial Sequence
  RPE65 RNA guide
uggauuggaaguuccuggugaa

SEQ ID NO: 2682 - RNA, 22 nt, Artificial Sequence
  RPE65 RNA guide
uggugaaaauugcaguagggca

SEQ ID NO: 2683 - RNA, 22 nt, Artificial Sequence
  RPE65 RNA guide
uucaccaggaacuuccaaucca

SEQ ID NO: 2684 - RNA, 22 nt, Artificial Sequence
  RPE65 RNA guide
uuccuggugaaaauugcaguag

SEQ ID NO: 2685 - RNA, 22 nt, Artificial Sequence
  RPE65 RNA guide
uugcccuacugcaauuuucacc

SEQ ID NO: 2686 - RNA, 22 nt, Artificial Sequence
  RPE65 RNA guide
uuggaaguuccuggugaaaauu

SEQ ID NO: 2687 - RNA, 22 nt, Artificial Sequence
  RPE65 RNA guide
uuucaccaggaacuuccaaucc

SEQ ID NO: 2688 - RNA, 22 nt, Artificial Sequence
  RPE65 RNA guide
uuuucaccaggaacuuccaauc

SEQ ID NO: 2689 - RNA, 20 nt, Artificial Sequence
  RPE65 RNA guide
aaagucgagggcaugaggga

SEQ ID NO: 2690 - RNA, 20 nt, Artificial Sequence
  RPE65 RNA guide
aaguaguggcaaagucgagg

SEQ ID NO: 2691 - RNA, 20 nt, Artificial Sequence
  RPE65 RNA guide
aagucgagggcaugagggau

SEQ ID NO: 2692 - RNA, 20 nt, Artificial Sequence
  RPE65 RNA guide
aguaguggcaaagucgaggg

SEQ ID NO: 2693 - RNA, 20 nt, Artificial Sequence
  RPE65 RNA guide
agucgagggcaugagggaua

SEQ ID NO: 2694 - RNA, 20 nt, Artificial Sequence
  RPE65 RNA guide
agucuuaaguaguggcaaag

SEQ ID NO: 2695 - RNA, 20 nt, Artificial Sequence
  RPE65 RNA guide
aguggcaaagucgagggcau

SEQ ID NO: 2696 - RNA, 20 nt, Artificial Sequence
  RPE65 RNA guide
auauauauaucccucaugcc

SEQ ID NO: 2697 - RNA, 20 nt, Artificial Sequence
  RPE65 RNA guide
auauauaucccucaugcccu

SEQ ID NO: 2698 - RNA, 20 nt, Artificial Sequence
  RPE65 RNA guide
auauaucccucaugcccucg

SEQ ID NO: 2699 - RNA, 20 nt, Artificial Sequence
  RPE65 RNA guide
auaucccucaugcccucgac

SEQ ID NO: 2700 - RNA, 20 nt, Artificial Sequence
  RPE65 RNA guide
aucccucaugcccucgacuu

SEQ ID NO: 2701 - RNA, 20 nt, Artificial Sequence
  RPE65 RNA guide
augcccucgacuuugccacu

SEQ ID NO: 2702 - RNA, 20 nt, Artificial Sequence
  RPE65 RNA guide
caaagucgagggcaugaggg

SEQ ID NO: 2703 - RNA, 20 nt, Artificial Sequence
  RPE65 RNA guide
caugcccucgacuuugccac

SEQ ID NO: 2704 - RNA, 20 nt, Artificial Sequence
  RPE65 RNA guide
cccucaugcccucgacuuug

SEQ ID NO: 2705 - RNA, 20 nt, Artificial Sequence
  RPE65 RNA guide
cccucgacuuugccacuacu

SEQ ID NO: 2706 - RNA, 20 nt, Artificial Sequence
  RPE65 RNA guide
ccucaugcccucgacuuugc

SEQ ID NO: 2707 - RNA, 20 nt, Artificial Sequence
  RPE65 RNA guide
ccucgacuuugccacuacuu

SEQ ID NO: 2708 - RNA, 20 nt, Artificial Sequence
  RPE65 RNA guide
cgagggcaugagggauauau

SEQ ID NO: 2709 - RNA, 20 nt, Artificial Sequence
  RPE65 RNA guide
cucaugcccucgacuuugcc

SEQ ID NO: 2710 - RNA, 20 nt, Artificial Sequence
  RPE65 RNA guide
cucgacuuugccacuacuua

SEQ ID NO: 2711 - RNA, 20 nt, Artificial Sequence
  RPE65 RNA guide
cuuaaguaguggcaaagucg

SEQ ID NO: 2712 - RNA, 20 nt, Artificial Sequence
  RPE65 RNA guide
gcaaagucgagggcaugagg

SEQ ID NO: 2713 - RNA, 20 nt, Artificial Sequence
  RPE65 RNA guide
gcccucgacuuugccacuac

SEQ ID NO: 2714 - RNA, 20 nt, Artificial Sequence
  RPE65 RNA guide
ggcaaagucgagggcaugag

SEQ ID NO: 2715 - RNA, 20 nt, Artificial Sequence
  RPE65 RNA guide
guaguggcaaagucgagggc

SEQ ID NO: 2716 - RNA, 20 nt, Artificial Sequence
  RPE65 RNA guide
gucgagggcaugagggauau

SEQ ID NO: 2717 - RNA, 20 nt, Artificial Sequence
  RPE65 RNA guide
gucuuaaguaguggcaaagu

SEQ ID NO: 2718 - RNA, 20 nt, Artificial Sequence
  RPE65 RNA guide
guggcaaagucgagggcaug

SEQ ID NO: 2719 - RNA, 20 nt, Artificial Sequence
  RPE65 RNA guide
uaaguaguggcaaagucgag

SEQ ID NO: 2720 - RNA, 20 nt, Artificial Sequence
  RPE65 RNA guide
uagucuuaaguaguggcaaa

SEQ ID NO: 2721 - RNA, 20 nt, Artificial Sequence
  RPE65 RNA guide
uaguggcaaagucgagggca

SEQ ID NO: 2722 - RNA, 20 nt, Artificial Sequence
  RPE65 RNA guide
uauauauauaucccucaugc

SEQ ID NO: 2723 - RNA, 20 nt, Artificial Sequence
  RPE65 RNA guide
uauauauaucccucaugccc

SEQ ID NO: 2724 - RNA, 20 nt, Artificial Sequence
  RPE65 RNA guide
uauauaucccucaugcccuc

SEQ ID NO: 2725 - RNA, 20 nt, Artificial Sequence
  RPE65 RNA guide
uauaucccucaugcccucga

SEQ ID NO: 2726 - RNA, 20 nt, Artificial Sequence
  RPE65 RNA guide
uaucccucaugcccucgacu

SEQ ID NO: 2727 - RNA, 20 nt, Artificial Sequence
  RPE65 RNA guide
ucaugcccucgacuuugcca

SEQ ID NO: 2728 - RNA, 20 nt, Artificial Sequence
  RPE65 RNA guide
ucccucaugcccucgacuuu

SEQ ID NO: 2729 - RNA, 20 nt, Artificial Sequence
  RPE65 RNA guide
ucgacuuugccacuacuuaa

SEQ ID NO: 2730 - RNA, 20 nt, Artificial Sequence
  RPE65 RNA guide
ucgagggcaugagggauaua

SEQ ID NO: 2731 - RNA, 20 nt, Artificial Sequence
  RPE65 RNA guide
ucuuaaguaguggcaaaguc

SEQ ID NO: 2732 - RNA, 20 nt, Artificial Sequence
  RPE65 RNA guide
ugcccucgacuuugccacua

SEQ ID NO: 2733 - RNA, 20 nt, Artificial Sequence
  RPE65 RNA guide
uggcaaagucgagggcauga

SEQ ID NO: 2734 - RNA, 20 nt, Artificial Sequence
  RPE65 RNA guide
uuaaguaguggcaaagucga

SEQ ID NO: 2735 - RNA, 21 nt, Artificial Sequence
  RPE65 RNA guide
aaagucgagggcaugagggau

SEQ ID NO: 2736 - RNA, 21 nt, Artificial Sequence
  RPE65 RNA guide
aaguaguggcaaagucgaggg

SEQ ID NO: 2737 - RNA, 21 nt, Artificial Sequence
  RPE65 RNA guide
aagucgagggcaugagggaua

SEQ ID NO: 2738 - RNA, 21 nt, Artificial Sequence
  RPE65 RNA guide
aguaguggcaaagucgagggc

SEQ ID NO: 2739 - RNA, 21 nt, Artificial Sequence
  RPE65 RNA guide
agucgagggcaugagggauau

SEQ ID NO: 2740 - RNA, 21 nt, Artificial Sequence
  RPE65 RNA guide
agucuuaaguaguggcaaagu

SEQ ID NO: 2741 - RNA, 21 nt, Artificial Sequence
  RPE65 RNA guide
aguggcaaagucgagggcaug

SEQ ID NO: 2742 - RNA, 21 nt, Artificial Sequence
  RPE65 RNA guide
auagucuuaaguaguggcaaa

SEQ ID NO: 2743 - RNA, 21 nt, Artificial Sequence
  RPE65 RNA guide
auauauauaucccucaugccc

SEQ ID NO: 2744 - RNA, 21 nt, Artificial Sequence
  RPE65 RNA guide
auauauaucccucaugcccuc

SEQ ID NO: 2745 - RNA, 21 nt, Artificial Sequence
  RPE65 RNA guide
auauaucccucaugcccucga

SEQ ID NO: 2746 - RNA, 21 nt, Artificial Sequence
  RPE65 RNA guide
auaucccucaugcccucgacu

SEQ ID NO: 2747 - RNA, 21 nt, Artificial Sequence
  RPE65 RNA guide
aucccucaugcccucgacuuu

SEQ ID NO: 2748 - RNA, 21 nt, Artificial Sequence
  RPE65 RNA guide
augcccucgacuuugccacua

SEQ ID NO: 2749 - RNA, 21 nt, Artificial Sequence
  RPE65 RNA guide
caaagucgagggcaugaggga

SEQ ID NO: 2750 - RNA, 21 nt, Artificial Sequence
  RPE65 RNA guide
caugcccucgacuuugccacu

SEQ ID NO: 2751 - RNA, 21 nt, Artificial Sequence
  RPE65 RNA guide
cccucaugcccucgacuuugc

SEQ ID NO: 2752 - RNA, 21 nt, Artificial Sequence
  RPE65 RNA guide
cccucgacuuugccacuacuu

SEQ ID NO: 2753 - RNA, 21 nt, Artificial Sequence
  RPE65 RNA guide
ccucaugcccucgacuuugcc

SEQ ID NO: 2754 - RNA, 21 nt, Artificial Sequence
  RPE65 RNA guide
ccucgacuuugccacuacuua

SEQ ID NO: 2755 - RNA, 21 nt, Artificial Sequence
  RPE65 RNA guide
cgagggcaugagggauauaua

SEQ ID NO: 2756 - RNA, 21 nt, Artificial Sequence
  RPE65 RNA guide
cucaugcccucgacuuugcca

SEQ ID NO: 2757 - RNA, 21 nt, Artificial Sequence
  RPE65 RNA guide
cucgacuuugccacuacuuaa

SEQ ID NO: 2758 - RNA, 21 nt, Artificial Sequence
  RPE65 RNA guide
cuuaaguaguggcaaagucga

SEQ ID NO: 2759 - RNA, 21 nt, Artificial Sequence
  RPE65 RNA guide
gcaaagucgagggcaugaggg

SEQ ID NO: 2760 - RNA, 21 nt, Artificial Sequence
  RPE65 RNA guide
gcccucgacuuugccacuacu

SEQ ID NO: 2761 - RNA, 21 nt, Artificial Sequence
  RPE65 RNA guide
ggcaaagucgagggcaugagg

SEQ ID NO: 2762 - RNA, 21 nt, Artificial Sequence
  RPE65 RNA guide
guaguggcaaagucgagggca

SEQ ID NO: 2763 - RNA, 21 nt, Artificial Sequence
  RPE65 RNA guide
gucgagggcaugagggauaua

SEQ ID NO: 2764 - RNA, 21 nt, Artificial Sequence
  RPE65 RNA guide
gucuuaaguaguggcaaaguc

SEQ ID NO: 2765 - RNA, 21 nt, Artificial Sequence
  RPE65 RNA guide
guggcaaagucgagggcauga

SEQ ID NO: 2766 - RNA, 21 nt, Artificial Sequence
  RPE65 RNA guide
uaaguaguggcaaagucgagg

SEQ ID NO: 2767 - RNA, 21 nt, Artificial Sequence
  RPE65 RNA guide
uagucuuaaguaguggcaaag

SEQ ID NO: 2768 - RNA, 21 nt, Artificial Sequence
  RPE65 RNA guide
uaguggcaaagucgagggcau

SEQ ID NO: 2769 - RNA, 21 nt, Artificial Sequence
  RPE65 RNA guide
uauauauauaucccucaugcc

SEQ ID NO: 2770 - RNA, 21 nt, Artificial Sequence
  RPE65 RNA guide
uauauauaucccucaugcccu

SEQ ID NO: 2771 - RNA, 21 nt, Artificial Sequence
  RPE65 RNA guide
uauauaucccucaugcccucg

SEQ ID NO: 2772 - RNA, 21 nt, Artificial Sequence
  RPE65 RNA guide
uauaucccucaugcccucgac

SEQ ID NO: 2773 - RNA, 21 nt, Artificial Sequence
  RPE65 RNA guide
uaucccucaugcccucgacuu

SEQ ID NO: 2774 - RNA, 21 nt, Artificial Sequence
  RPE65 RNA guide
ucaugcccucgacuuugccac

SEQ ID NO: 2775 - RNA, 21 nt, Artificial Sequence
  RPE65 RNA guide
ucccucaugcccucgacuuug

SEQ ID NO: 2776 - RNA, 21 nt, Artificial Sequence
  RPE65 RNA guide
ucgacuuugccacuacuuaag

SEQ ID NO: 2777 - RNA, 21 nt, Artificial Sequence
  RPE65 RNA guide
ucgagggcaugagggauauau

SEQ ID NO: 2778 - RNA, 21 nt, Artificial Sequence
  RPE65 RNA guide
ucuuaaguaguggcaaagucg

SEQ ID NO: 2779 - RNA, 21 nt, Artificial Sequence
  RPE65 RNA guide
ugcccucgacuuugccacuac

SEQ ID NO: 2780 - RNA, 21 nt, Artificial Sequence
  RPE65 RNA guide
uggcaaagucgagggcaugag

SEQ ID NO: 2781 - RNA, 21 nt, Artificial Sequence
  RPE65 RNA guide
uuaaguaguggcaaagucgag

SEQ ID NO: 2782 - RNA, 22 nt, Artificial Sequence
  RPE65 RNA guide
aaagucgagggcaugagggaua

SEQ ID NO: 2783 - RNA, 22 nt, Artificial Sequence
  RPE65 RNA guide
aaguaguggcaaagucgagggc

SEQ ID NO: 2784 - RNA, 22 nt, Artificial Sequence
  RPE65 RNA guide
aagucgagggcaugagggauau

SEQ ID NO: 2785 - RNA, 22 nt, Artificial Sequence
  RPE65 RNA guide
aguaguggcaaagucgagggca

SEQ ID NO: 2786 - RNA, 22 nt, Artificial Sequence
  RPE65 RNA guide
agucgagggcaugagggauaua

SEQ ID NO: 2787 - RNA, 22 nt, Artificial Sequence
  RPE65 RNA guide
agucuuaaguaguggcaaaguc

SEQ ID NO: 2788 - RNA, 22 nt, Artificial Sequence
  RPE65 RNA guide
aguggcaaagucgagggcauga

SEQ ID NO: 2789 - RNA, 22 nt, Artificial Sequence
  RPE65 RNA guide
auagucuuaaguaguggcaaag

SEQ ID NO: 2790 - RNA, 22 nt, Artificial Sequence
  RPE65 RNA guide
auauauauaucccucaugcccu

SEQ ID NO: 2791 - RNA, 22 nt, Artificial Sequence
  RPE65 RNA guide
auauauaucccucaugcccucg

SEQ ID NO: 2792 - RNA, 22 nt, Artificial Sequence
  RPE65 RNA guide
auauaucccucaugcccucgac

SEQ ID NO: 2793 - RNA, 22 nt, Artificial Sequence
  RPE65 RNA guide
auaucccucaugcccucgacuu

SEQ ID NO: 2794 - RNA, 22 nt, Artificial Sequence
  RPE65 RNA guide
aucccucaugcccucgacuuug

SEQ ID NO: 2795 - RNA, 22 nt, Artificial Sequence
  RPE65 RNA guide
augcccucgacuuugccacuac

SEQ ID NO: 2796 - RNA, 22 nt, Artificial Sequence
  RPE65 RNA guide
caaagucgagggcaugagggau

SEQ ID NO: 2797 - RNA, 22 nt, Artificial Sequence
  RPE65 RNA guide
caugcccucgacuuugccacua

SEQ ID NO: 2798 - RNA, 22 nt, Artificial Sequence
  RPE65 RNA guide
cccucaugcccucgacuuugcc

SEQ ID NO: 2799 - RNA, 22 nt, Artificial Sequence
  RPE65 RNA guide
cccucgacuuugccacuacuua

SEQ ID NO: 2800 - RNA, 22 nt, Artificial Sequence
  RPE65 RNA guide
ccucaugcccucgacuuugcca

SEQ ID NO: 2801 - RNA, 22 nt, Artificial Sequence
  RPE65 RNA guide
ccucgacuuugccacuacuuaa

SEQ ID NO: 2802 - RNA, 22 nt, Artificial Sequence
  RPE65 RNA guide
cgagggcaugagggauauauau

SEQ ID NO: 2803 - RNA, 22 nt, Artificial Sequence
  RPE65 RNA guide
cucaugcccucgacuuugccac

SEQ ID NO: 2804 - RNA, 22 nt, Artificial Sequence
  RPE65 RNA guide
cucgacuuugccacuacuuaag

SEQ ID NO: 2805 - RNA, 22 nt, Artificial Sequence
  RPE65 RNA guide
cuuaaguaguggcaaagucgag

SEQ ID NO: 2806 - RNA, 22 nt, Artificial Sequence
  RPE65 RNA guide
gcaaagucgagggcaugaggga

SEQ ID NO: 2807 - RNA, 22 nt, Artificial Sequence
  RPE65 RNA guide
gcccucgacuuugccacuacuu

SEQ ID NO: 2808 - RNA, 22 nt, Artificial Sequence
  RPE65 RNA guide
ggcaaagucgagggcaugaggg

SEQ ID NO: 2809 - RNA, 22 nt, Artificial Sequence
  RPE65 RNA guide
guaguggcaaagucgagggcau

SEQ ID NO: 2810 - RNA, 22 nt, Artificial Sequence
  RPE65 RNA guide
gucgagggcaugagggauauau

SEQ ID NO: 2811 - RNA, 22 nt, Artificial Sequence
  RPE65 RNA guide
gucuuaaguaguggcaaagucg

SEQ ID NO: 2812 - RNA, 22 nt, Artificial Sequence
  RPE65 RNA guide
guggcaaagucgagggcaugag

SEQ ID NO: 2813 - RNA, 22 nt, Artificial Sequence
  RPE65 RNA guide
uaaguaguggcaaagucgaggg

SEQ ID NO: 2814 - RNA, 22 nt, Artificial Sequence
  RPE65 RNA guide
uagucuuaaguaguggcaaagu

SEQ ID NO: 2815 - RNA, 22 nt, Artificial Sequence
  RPE65 RNA guide
uaguggcaaagucgagggcaug

SEQ ID NO: 2816 - RNA, 22 nt, Artificial Sequence
  RPE65 RNA guide
uauagucuuaaguaguggcaaa

SEQ ID NO: 2817 - RNA, 22 nt, Artificial Sequence
  RPE65 RNA guide
uauauauauaucccucaugccc

SEQ ID NO: 2818 - RNA, 22 nt, Artificial Sequence
  RPE65 RNA guide
uauauauaucccucaugcccuc

SEQ ID NO: 2819 - RNA, 22 nt, Artificial Sequence
  RPE65 RNA guide
uauauaucccucaugcccucga

SEQ ID NO: 2820 - RNA, 22 nt, Artificial Sequence
  RPE65 RNA guide
uauaucccucaugcccucgacu

SEQ ID NO: 2821 - RNA, 22 nt, Artificial Sequence
  RPE65 RNA guide
uaucccucaugcccucgacuuu

SEQ ID NO: 2822 - RNA, 22 nt, Artificial Sequence
  RPE65 RNA guide
ucaugcccucgacuuugccacu

SEQ ID NO: 2823 - RNA, 22 nt, Artificial Sequence
  RPE65 RNA guide
ucccucaugcccucgacuuugc

SEQ ID NO: 2824 - RNA, 22 nt, Artificial Sequence
  RPE65 RNA guide
ucgacuuugccacuacuuaaga

SEQ ID NO: 2825 - RNA, 22 nt, Artificial Sequence
  RPE65 RNA guide
ucgagggcaugagggauauaua

SEQ ID NO: 2826 - RNA, 22 nt, Artificial Sequence
  RPE65 RNA guide
ucuuaaguaguggcaaagucga

SEQ ID NO: 2827 - RNA, 22 nt, Artificial Sequence
  RPE65 RNA guide
ugcccucgacuuugccacuacu

SEQ ID NO: 2828 - RNA, 22 nt, Artificial Sequence
  RPE65 RNA guide
uggcaaagucgagggcaugagg

SEQ ID NO: 2829 - RNA, 22 nt, Artificial Sequence
  RPE65 RNA guide
uuaaguaguggcaaagucgagg

SEQ ID NO: 2830 - RNA, 20 nt, Artificial Sequence
  RPE65 RNA guide
aaagucaagggcaugaggga

SEQ ID NO: 2831 - RNA, 20 nt, Artificial Sequence
  RPE65 RNA guide
aaguaguggcaaagucaagg

SEQ ID NO: 2832 - RNA, 20 nt, Artificial Sequence
  RPE65 RNA guide
aagucaagggcaugagggau

SEQ ID NO: 2833 - RNA, 20 nt, Artificial Sequence
  RPE65 RNA guide
aguaguggcaaagucaaggg

SEQ ID NO: 2834 - RNA, 20 nt, Artificial Sequence
  RPE65 RNA guide
agucaagggcaugagggaua

SEQ ID NO: 2835 - RNA, 20 nt, Artificial Sequence
  RPE65 RNA guide
aguggcaaagucaagggcau

SEQ ID NO: 2836 - RNA, 20 nt, Artificial Sequence
  RPE65 RNA guide
auauaucccucaugcccuug

SEQ ID NO: 2837 - RNA, 20 nt, Artificial Sequence
  RPE65 RNA guide
auaucccucaugcccuugac

SEQ ID NO: 2838 - RNA, 20 nt, Artificial Sequence
  RPE65 RNA guide
aucccucaugcccuugacuu

SEQ ID NO: 2839 - RNA, 20 nt, Artificial Sequence
  RPE65 RNA guide
augcccuugacuuugccacu

SEQ ID NO: 2840 - RNA, 20 nt, Artificial Sequence
  RPE65 RNA guide
caaagucaagggcaugaggg

SEQ ID NO: 2841 - RNA, 20 nt, Artificial Sequence
  RPE65 RNA guide
caagggcaugagggauauau

SEQ ID NO: 2842 - RNA, 20 nt, Artificial Sequence
  RPE65 RNA guide
caugcccuugacuuugccac

SEQ ID NO: 2843 - RNA, 20 nt, Artificial Sequence
  RPE65 RNA guide
cccucaugcccuugacuuug

SEQ ID NO: 2844 - RNA, 20 nt, Artificial Sequence
  RPE65 RNA guide
cccuugacuuugccacuacu

SEQ ID NO: 2845 - RNA, 20 nt, Artificial Sequence
  RPE65 RNA guide
ccucaugcccuugacuuugc

SEQ ID NO: 2846 - RNA, 20 nt, Artificial Sequence
  RPE65 RNA guide
ccuugacuuugccacuacuu

SEQ ID NO: 2847 - RNA, 20 nt, Artificial Sequence
  RPE65 RNA guide
cucaugcccuugacuuugcc

SEQ ID NO: 2848 - RNA, 20 nt, Artificial Sequence
  RPE65 RNA guide
cuuaaguaguggcaaaguca

SEQ ID NO: 2849 - RNA, 20 nt, Artificial Sequence
  RPE65 RNA guide
cuugacuuugccacuacuua

SEQ ID NO: 2850 - RNA, 20 nt, Artificial Sequence
  RPE65 RNA guide
gcaaagucaagggcaugagg

SEQ ID NO: 2851 - RNA, 20 nt, Artificial Sequence
  RPE65 RNA guide
gcccuugacuuugccacuac

SEQ ID NO: 2852 - RNA, 20 nt, Artificial Sequence
  RPE65 RNA guide
ggcaaagucaagggcaugag

SEQ ID NO: 2853 - RNA, 20 nt, Artificial Sequence
  RPE65 RNA guide
guaguggcaaagucaagggc

SEQ ID NO: 2854 - RNA, 20 nt, Artificial Sequence
  RPE65 RNA guide
gucaagggcaugagggauau

SEQ ID NO: 2855 - RNA, 20 nt, Artificial Sequence
  RPE65 RNA guide
guggcaaagucaagggcaug

SEQ ID NO: 2856 - RNA, 20 nt, Artificial Sequence
  RPE65 RNA guide
uaaguaguggcaaagucaag

SEQ ID NO: 2857 - RNA, 20 nt, Artificial Sequence
  RPE65 RNA guide
uaguggcaaagucaagggca

SEQ ID NO: 2858 - RNA, 20 nt, Artificial Sequence
  RPE65 RNA guide
uauauaucccucaugcccuu

SEQ ID NO: 2859 - RNA, 20 nt, Artificial Sequence
  RPE65 RNA guide
uauaucccucaugcccuuga

SEQ ID NO: 2860 - RNA, 20 nt, Artificial Sequence
  RPE65 RNA guide
uaucccucaugcccuugacu

SEQ ID NO: 2861 - RNA, 20 nt, Artificial Sequence
  RPE65 RNA guide
ucaagggcaugagggauaua

SEQ ID NO: 2862 - RNA, 20 nt, Artificial Sequence
  RPE65 RNA guide
ucaugcccuugacuuugcca

SEQ ID NO: 2863 - RNA, 20 nt, Artificial Sequence
  RPE65 RNA guide
ucccucaugcccuugacuuu

SEQ ID NO: 2864 - RNA, 20 nt, Artificial Sequence
  RPE65 RNA guide
ugcccuugacuuugccacua

SEQ ID NO: 2865 - RNA, 20 nt, Artificial Sequence
  RPE65 RNA guide
uggcaaagucaagggcauga

SEQ ID NO: 2866 - RNA, 20 nt, Artificial Sequence
  RPE65 RNA guide
uuaaguaguggcaaagucaa

SEQ ID NO: 2867 - RNA, 20 nt, Artificial Sequence
  RPE65 RNA guide
uugacuuugccacuacuuaa

SEQ ID NO: 2868 - RNA, 21 nt, Artificial Sequence
  RPE65 RNA guide
aaagucaagggcaugagggau

SEQ ID NO: 2869 - RNA, 21 nt, Artificial Sequence
  RPE65 RNA guide
aaguaguggcaaagucaaggg

SEQ ID NO: 2870 - RNA, 21 nt, Artificial Sequence
  RPE65 RNA guide
aagucaagggcaugagggaua

SEQ ID NO: 2871 - RNA, 21 nt, Artificial Sequence
  RPE65 RNA guide
aguaguggcaaagucaagggc

SEQ ID NO: 2872 - RNA, 21 nt, Artificial Sequence
  RPE65 RNA guide
agucaagggcaugagggauau

SEQ ID NO: 2873 - RNA, 21 nt, Artificial Sequence
  RPE65 RNA guide
aguggcaaagucaagggcaug

SEQ ID NO: 2874 - RNA, 21 nt, Artificial Sequence
  RPE65 RNA guide
auauauaucccucaugcccuu

SEQ ID NO: 2875 - RNA, 21 nt, Artificial Sequence
  RPE65 RNA guide
auauaucccucaugcccuuga

SEQ ID NO: 2876 - RNA, 21 nt, Artificial Sequence
  RPE65 RNA guide
auaucccucaugcccuugacu

SEQ ID NO: 2877 - RNA, 21 nt, Artificial Sequence
  RPE65 RNA guide
aucccucaugcccuugacuuu

SEQ ID NO: 2878 - RNA, 21 nt, Artificial Sequence
  RPE65 RNA guide
augcccuugacuuugccacua

SEQ ID NO: 2879 - RNA, 21 nt, Artificial Sequence
  RPE65 RNA guide
caaagucaagggcaugaggga

SEQ ID NO: 2880 - RNA, 21 nt, Artificial Sequence
  RPE65 RNA guide
caagggcaugagggauauaua

SEQ ID NO: 2881 - RNA, 21 nt, Artificial Sequence
  RPE65 RNA guide
caugcccuugacuuugccacu

SEQ ID NO: 2882 - RNA, 21 nt, Artificial Sequence
  RPE65 RNA guide
cccucaugcccuugacuuugc

SEQ ID NO: 2883 - RNA, 21 nt, Artificial Sequence
  RPE65 RNA guide
cccuugacuuugccacuacuu

SEQ ID NO: 2884 - RNA, 21 nt, Artificial Sequence
  RPE65 RNA guide
ccucaugcccuugacuuugcc

SEQ ID NO: 2885 - RNA, 21 nt, Artificial Sequence
  RPE65 RNA guide
ccuugacuuugccacuacuua

SEQ ID NO: 2886 - RNA, 21 nt, Artificial Sequence
  RPE65 RNA guide
cucaugcccuugacuuugcca

SEQ ID NO: 2887 - RNA, 21 nt, Artificial Sequence
  RPE65 RNA guide
cuuaaguaguggcaaagucaa

SEQ ID NO: 2888 - RNA, 21 nt, Artificial Sequence
  RPE65 RNA guide
cuugacuuugccacuacuuaa

SEQ ID NO: 2889 - RNA, 21 nt, Artificial Sequence
  RPE65 RNA guide
gcaaagucaagggcaugaggg

SEQ ID NO: 2890 - RNA, 21 nt, Artificial Sequence
  RPE65 RNA guide
gcccuugacuuugccacuacu

SEQ ID NO: 2891 - RNA, 21 nt, Artificial Sequence
  RPE65 RNA guide
ggcaaagucaagggcaugagg

SEQ ID NO: 2892 - RNA, 21 nt, Artificial Sequence
  RPE65 RNA guide
guaguggcaaagucaagggca

SEQ ID NO: 2893 - RNA, 21 nt, Artificial Sequence
  RPE65 RNA guide
gucaagggcaugagggauaua

SEQ ID NO: 2894 - RNA, 21 nt, Artificial Sequence
  RPE65 RNA guide
guggcaaagucaagggcauga

SEQ ID NO: 2895 - RNA, 21 nt, Artificial Sequence
  RPE65 RNA guide
uaaguaguggcaaagucaagg

SEQ ID NO: 2896 - RNA, 21 nt, Artificial Sequence
  RPE65 RNA guide
uaguggcaaagucaagggcau

SEQ ID NO: 2897 - RNA, 21 nt, Artificial Sequence
  RPE65 RNA guide
uauauaucccucaugcccuug

SEQ ID NO: 2898 - RNA, 21 nt, Artificial Sequence
  RPE65 RNA guide
uauaucccucaugcccuugac

SEQ ID NO: 2899 - RNA, 21 nt, Artificial Sequence
  RPE65 RNA guide
uaucccucaugcccuugacuu

SEQ ID NO: 2900 - RNA, 21 nt, Artificial Sequence
  RPE65 RNA guide
ucaagggcaugagggauauau

SEQ ID NO: 2901 - RNA, 21 nt, Artificial Sequence
  RPE65 RNA guide
ucaugcccuugacuuugccac

SEQ ID NO: 2902 - RNA, 21 nt, Artificial Sequence
  RPE65 RNA guide
ucccucaugcccuugacuuug

SEQ ID NO: 2903 - RNA, 21 nt, Artificial Sequence
  RPE65 RNA guide
ucuuaaguaguggcaaaguca

SEQ ID NO: 2904 - RNA, 21 nt, Artificial Sequence
  RPE65 RNA guide
ugcccuugacuuugccacuac

SEQ ID NO: 2905 - RNA, 21 nt, Artificial Sequence
  RPE65 RNA guide
uggcaaagucaagggcaugag

SEQ ID NO: 2906 - RNA, 21 nt, Artificial Sequence
  RPE65 RNA guide
uuaaguaguggcaaagucaag

SEQ ID NO: 2907 - RNA, 21 nt, Artificial Sequence
  RPE65 RNA guide
uugacuuugccacuacuuaag

SEQ ID NO: 2908 - RNA, 22 nt, Artificial Sequence
  RPE65 RNA guide
aaagucaagggcaugagggaua

SEQ ID NO: 2909 - RNA, 22 nt, Artificial Sequence
  RPE65 RNA guide
aaguaguggcaaagucaagggc

SEQ ID NO: 2910 - RNA, 22 nt, Artificial Sequence
  RPE65 RNA guide
aagucaagggcaugagggauau

SEQ ID NO: 2911 - RNA, 22 nt, Artificial Sequence
  RPE65 RNA guide
aguaguggcaaagucaagggca

SEQ ID NO: 2912 - RNA, 22 nt, Artificial Sequence
  RPE65 RNA guide
agucaagggcaugagggauaua

SEQ ID NO: 2913 - RNA, 22 nt, Artificial Sequence
  RPE65 RNA guide
aguggcaaagucaagggcauga

SEQ ID NO: 2914 - RNA, 22 nt, Artificial Sequence
  RPE65 RNA guide
auauauaucccucaugcccuug

SEQ ID NO: 2915 - RNA, 22 nt, Artificial Sequence
  RPE65 RNA guide
auauaucccucaugcccuugac

SEQ ID NO: 2916 - RNA, 22 nt, Artificial Sequence
  RPE65 RNA guide
auaucccucaugcccuugacuu

SEQ ID NO: 2917 - RNA, 22 nt, Artificial Sequence
  RPE65 RNA guide
aucccucaugcccuugacuuug

SEQ ID NO: 2918 - RNA, 22 nt, Artificial Sequence
  RPE65 RNA guide
augcccuugacuuugccacuac

SEQ ID NO: 2919 - RNA, 22 nt, Artificial Sequence
  RPE65 RNA guide
caaagucaagggcaugagggau

SEQ ID NO: 2920 - RNA, 22 nt, Artificial Sequence
  RPE65 RNA guide
caagggcaugagggauauauau

SEQ ID NO: 2921 - RNA, 22 nt, Artificial Sequence
  RPE65 RNA guide
caugcccuugacuuugccacua

SEQ ID NO: 2922 - RNA, 22 nt, Artificial Sequence
  RPE65 RNA guide
cccucaugcccuugacuuugcc

SEQ ID NO: 2923 - RNA, 22 nt, Artificial Sequence
  RPE65 RNA guide
cccuugacuuugccacuacuua

SEQ ID NO: 2924 - RNA, 22 nt, Artificial Sequence
  RPE65 RNA guide
ccucaugcccuugacuuugcca

SEQ ID NO: 2925 - RNA, 22 nt, Artificial Sequence
  RPE65 RNA guide
ccuugacuuugccacuacuuaa

SEQ ID NO: 2926 - RNA, 22 nt, Artificial Sequence
  RPE65 RNA guide
cucaugcccuugacuuugccac

SEQ ID NO: 2927 - RNA, 22 nt, Artificial Sequence
  RPE65 RNA guide
cuuaaguaguggcaaagucaag

SEQ ID NO: 2928 - RNA, 22 nt, Artificial Sequence
  RPE65 RNA guide
cuugacuuugccacuacuuaag

SEQ ID NO: 2929 - RNA, 22 nt, Artificial Sequence
  RPE65 RNA guide
gcaaagucaagggcaugaggga

SEQ ID NO: 2930 - RNA, 22 nt, Artificial Sequence
  RPE65 RNA guide
gcccuugacuuugccacuacuu

SEQ ID NO: 2931 - RNA, 22 nt, Artificial Sequence
  RPE65 RNA guide
ggcaaagucaagggcaugaggg

SEQ ID NO: 2932 - RNA, 22 nt, Artificial Sequence
  RPE65 RNA guide
guaguggcaaagucaagggcau

SEQ ID NO: 2933 - RNA, 22 nt, Artificial Sequence
  RPE65 RNA guide
gucaagggcaugagggauauau

SEQ ID NO: 2934 - RNA, 22 nt, Artificial Sequence
  RPE65 RNA guide
gucuuaaguaguggcaaaguca

SEQ ID NO: 2935 - RNA, 22 nt, Artificial Sequence
  RPE65 RNA guide
guggcaaagucaagggcaugag

SEQ ID NO: 2936 - RNA, 22 nt, Artificial Sequence
  RPE65 RNA guide
uaaguaguggcaaagucaaggg

SEQ ID NO: 2937 - RNA, 22 nt, Artificial Sequence
  RPE65 RNA guide
uaguggcaaagucaagggcaug

SEQ ID NO: 2938 - RNA, 22 nt, Artificial Sequence
  RPE65 RNA guide
uauauauaucccucaugcccuu

SEQ ID NO: 2939 - RNA, 22 nt, Artificial Sequence
  RPE65 RNA guide
uauauaucccucaugcccuuga

SEQ ID NO: 2940 - RNA, 22 nt, Artificial Sequence
  RPE65 RNA guide
uauaucccucaugcccuugacu

SEQ ID NO: 2941 - RNA, 22 nt, Artificial Sequence
  RPE65 RNA guide
uaucccucaugcccuugacuuu

SEQ ID NO: 2942 - RNA, 22 nt, Artificial Sequence
  RPE65 RNA guide
ucaagggcaugagggauauaua

SEQ ID NO: 2943 - RNA, 22 nt, Artificial Sequence
  RPE65 RNA guide
ucaugcccuugacuuugccacu

SEQ ID NO: 2944 - RNA, 22 nt, Artificial Sequence
  RPE65 RNA guide
ucccucaugcccuugacuuugc

SEQ ID NO: 2945 - RNA, 22 nt, Artificial Sequence
  RPE65 RNA guide
ucuuaaguaguggcaaagucaa

SEQ ID NO: 2946 - RNA, 22 nt, Artificial Sequence
  RPE65 RNA guide
ugcccuugacuuugccacuacu

SEQ ID NO: 2947 - RNA, 22 nt, Artificial Sequence
  RPE65 RNA guide
uggcaaagucaagggcaugagg

SEQ ID NO: 2948 - RNA, 22 nt, Artificial Sequence
  RPE65 RNA guide
uuaaguaguggcaaagucaagg

SEQ ID NO: 2949 - RNA, 22 nt, Artificial Sequence
  RPE65 RNA guide
uugacuuugccacuacuuaaga

SEQ ID NO: 2950 - RNA, 20 nt, Artificial Sequence
  RPE65 RNA guide
agggcaugagggauauauau

SEQ ID NO: 2951 - RNA, 20 nt, Artificial Sequence
  RPE65 RNA guide
gagggcaugagggauauaua

SEQ ID NO: 2952 - RNA, 20 nt, Artificial Sequence
  RPE65 RNA guide
gcaugagggauauauauaua

SEQ ID NO: 2953 - RNA, 20 nt, Artificial Sequence
  RPE65 RNA guide
ggcaugagggauauauauau

SEQ ID NO: 2954 - RNA, 20 nt, Artificial Sequence
  RPE65 RNA guide
gggcaugagggauauauaua

SEQ ID NO: 2955 - RNA, 21 nt, Artificial Sequence
  RPE65 RNA guide
agggcaugagggauauauaua

SEQ ID NO: 2956 - RNA, 21 nt, Artificial Sequence
  RPE65 RNA guide
gagggcaugagggauauauau

SEQ ID NO: 2957 - RNA, 21 nt, Artificial Sequence
  RPE65 RNA guide
ggcaugagggauauauauaua

SEQ ID NO: 2958 - RNA, 21 nt, Artificial Sequence
  RPE65 RNA guide
gggcaugagggauauauauau

SEQ ID NO: 2959 - RNA, 22 nt, Artificial Sequence
  RPE65 RNA guide
agggcaugagggauauauauau

SEQ ID NO: 2960 - RNA, 22 nt, Artificial Sequence
  RPE65 RNA guide
gagggcaugagggauauauaua

SEQ ID NO: 2961 - RNA, 22 nt, Artificial Sequence
  RPE65 RNA guide
gggcaugagggauauauauaua

SEQ ID NO: 2962 - RNA, 20 nt, Artificial Sequence
  RPE65 RNA guide
acaccccucgcuucuuccca

SEQ ID NO: 2963 - RNA, 20 nt, Artificial Sequence
  RPE65 RNA guide
accccucgcuucuucccagc

SEQ ID NO: 2964 - RNA, 20 nt, Artificial Sequence
  RPE65 RNA guide
acucgagguacuuaguggug

SEQ ID NO: 2965 - RNA, 20 nt, Artificial Sequence
  RPE65 RNA guide
acuuaguggugaugcuggga

SEQ ID NO: 2966 - RNA, 20 nt, Artificial Sequence
  RPE65 RNA guide
agcaucaccacuaaguaccu

SEQ ID NO: 2967 - RNA, 20 nt, Artificial Sequence
  RPE65 RNA guide
agguacuuaguggugaugcu

SEQ ID NO: 2968 - RNA, 20 nt, Artificial Sequence
  RPE65 RNA guide
aguggugaugcugggaagaa

SEQ ID NO: 2969 - RNA, 20 nt, Artificial Sequence
  RPE65 RNA guide
augcugggaagaagcgaggg

SEQ ID NO: 2970 - RNA, 20 nt, Artificial Sequence
  RPE65 RNA guide
cacaccccucgcuucuuccc

SEQ ID NO: 2971 - RNA, 20 nt, Artificial Sequence
  RPE65 RNA guide
caccccucgcuucuucccag

SEQ ID NO: 2972 - RNA, 20 nt, Artificial Sequence
  RPE65 RNA guide
cagcaucaccacuaaguacc

SEQ ID NO: 2973 - RNA, 20 nt, Artificial Sequence
  RPE65 RNA guide
caucaccacuaaguaccucg

SEQ ID NO: 2974 - RNA, 20 nt, Artificial Sequence
  RPE65 RNA guide
ccagcaucaccacuaaguac

SEQ ID NO: 2975 - RNA, 20 nt, Artificial Sequence
  RPE65 RNA guide
cccagcaucaccacuaagua

SEQ ID NO: 2976 - RNA, 20 nt, Artificial Sequence
  RPE65 RNA guide
ccccucgcuucuucccagca

SEQ ID NO: 2977 - RNA, 20 nt, Artificial Sequence
  RPE65 RNA guide
cccucgcuucuucccagcau

SEQ ID NO: 2978 - RNA, 20 nt, Artificial Sequence
  RPE65 RNA guide
ccucgcuucuucccagcauc

SEQ ID NO: 2979 - RNA, 20 nt, Artificial Sequence
  RPE65 RNA guide
cgagguacuuaguggugaug

SEQ ID NO: 2980 - RNA, 20 nt, Artificial Sequence
  RPE65 RNA guide
cgcuucuucccagcaucacc

SEQ ID NO: 2981 - RNA, 20 nt, Artificial Sequence
  RPE65 RNA guide
cucgagguacuuagugguga

SEQ ID NO: 2982 - RNA, 20 nt, Artificial Sequence
  RPE65 RNA guide
cucgcuucuucccagcauca

SEQ ID NO: 2983 - RNA, 20 nt, Artificial Sequence
  RPE65 RNA guide
cuuaguggugaugcugggaa

SEQ ID NO: 2984 - RNA, 20 nt, Artificial Sequence
  RPE65 RNA guide
cuucccagcaucaccacuaa

SEQ ID NO: 2985 - RNA, 20 nt, Artificial Sequence
  RPE65 RNA guide
cuucuucccagcaucaccac

SEQ ID NO: 2986 - RNA, 20 nt, Artificial Sequence
  RPE65 RNA guide
gacucgagguacuuaguggu

SEQ ID NO: 2987 - RNA, 20 nt, Artificial Sequence
  RPE65 RNA guide
gagguacuuaguggugaugc

SEQ ID NO: 2988 - RNA, 20 nt, Artificial Sequence
  RPE65 RNA guide
gaugcugggaagaagcgagg

SEQ ID NO: 2989 - RNA, 20 nt, Artificial Sequence
  RPE65 RNA guide
gcaucaccacuaaguaccuc

SEQ ID NO: 2990 - RNA, 20 nt, Artificial Sequence
  RPE65 RNA guide
gcuucuucccagcaucacca

SEQ ID NO: 2991 - RNA, 20 nt, Artificial Sequence
  RPE65 RNA guide
ggacucgagguacuuagugg

SEQ ID NO: 2992 - RNA, 20 nt, Artificial Sequence
  RPE65 RNA guide
gguacuuaguggugaugcug

SEQ ID NO: 2993 - RNA, 20 nt, Artificial Sequence
  RPE65 RNA guide
ggugaugcugggaagaagcg

SEQ ID NO: 2994 - RNA, 20 nt, Artificial Sequence
  RPE65 RNA guide
guacuuaguggugaugcugg

SEQ ID NO: 2995 - RNA, 20 nt, Artificial Sequence
  RPE65 RNA guide
gugaugcugggaagaagcga

SEQ ID NO: 2996 - RNA, 20 nt, Artificial Sequence
  RPE65 RNA guide
guggugaugcugggaagaag

SEQ ID NO: 2997 - RNA, 20 nt, Artificial Sequence
  RPE65 RNA guide
uacuuaguggugaugcuggg

SEQ ID NO: 2998 - RNA, 20 nt, Artificial Sequence
  RPE65 RNA guide
uaguggugaugcugggaaga

SEQ ID NO: 2999 - RNA, 20 nt, Artificial Sequence
  RPE65 RNA guide
ucccagcaucaccacuaagu

SEQ ID NO: 3000 - RNA, 20 nt, Artificial Sequence
  RPE65 RNA guide
ucgagguacuuaguggugau

SEQ ID NO: 3001 - RNA, 20 nt, Artificial Sequence
  RPE65 RNA guide
ucgcuucuucccagcaucac

SEQ ID NO: 3002 - RNA, 20 nt, Artificial Sequence
  RPE65 RNA guide
ucuucccagcaucaccacua

SEQ ID NO: 3003 - RNA, 20 nt, Artificial Sequence
  RPE65 RNA guide
ugaugcugggaagaagcgag

SEQ ID NO: 3004 - RNA, 20 nt, Artificial Sequence
  RPE65 RNA guide
uggugaugcugggaagaagc

SEQ ID NO: 3005 - RNA, 20 nt, Artificial Sequence
  RPE65 RNA guide
uuaguggugaugcugggaag

SEQ ID NO: 3006 - RNA, 20 nt, Artificial Sequence
  RPE65 RNA guide
uucccagcaucaccacuaag

SEQ ID NO: 3007 - RNA, 20 nt, Artificial Sequence
  RPE65 RNA guide
uucuucccagcaucaccacu

SEQ ID NO: 3008 - RNA, 21 nt, Artificial Sequence
  RPE65 RNA guide
acaccccucgcuucuucccag

SEQ ID NO: 3009 - RNA, 21 nt, Artificial Sequence
  RPE65 RNA guide
accccucgcuucuucccagca

SEQ ID NO: 3010 - RNA, 21 nt, Artificial Sequence
  RPE65 RNA guide
acucgagguacuuagugguga

SEQ ID NO: 3011 - RNA, 21 nt, Artificial Sequence
  RPE65 RNA guide
acuuaguggugaugcugggaa

SEQ ID NO: 3012 - RNA, 21 nt, Artificial Sequence
  RPE65 RNA guide
agcaucaccacuaaguaccuc

SEQ ID NO: 3013 - RNA, 21 nt, Artificial Sequence
  RPE65 RNA guide
agguacuuaguggugaugcug

SEQ ID NO: 3014 - RNA, 21 nt, Artificial Sequence
  RPE65 RNA guide
aguggugaugcugggaagaag

SEQ ID NO: 3015 - RNA, 21 nt, Artificial Sequence
  RPE65 RNA guide
augcugggaagaagcgagggg

SEQ ID NO: 3016 - RNA, 21 nt, Artificial Sequence
  RPE65 RNA guide
cacaccccucgcuucuuccca

SEQ ID NO: 3017 - RNA, 21 nt, Artificial Sequence
  RPE65 RNA guide
caccccucgcuucuucccagc

SEQ ID NO: 3018 - RNA, 21 nt, Artificial Sequence
  RPE65 RNA guide
cagcaucaccacuaaguaccu

SEQ ID NO: 3019 - RNA, 21 nt, Artificial Sequence
  RPE65 RNA guide
caucaccacuaaguaccucga

SEQ ID NO: 3020 - RNA, 21 nt, Artificial Sequence
  RPE65 RNA guide
ccagcaucaccacuaaguacc

SEQ ID NO: 3021 - RNA, 21 nt, Artificial Sequence
  RPE65 RNA guide
cccagcaucaccacuaaguac

SEQ ID NO: 3022 - RNA, 21 nt, Artificial Sequence
  RPE65 RNA guide
ccccucgcuucuucccagcau

SEQ ID NO: 3023 - RNA, 21 nt, Artificial Sequence
  RPE65 RNA guide
cccucgcuucuucccagcauc

SEQ ID NO: 3024 - RNA, 21 nt, Artificial Sequence
  RPE65 RNA guide
ccucgcuucuucccagcauca

SEQ ID NO: 3025 - RNA, 21 nt, Artificial Sequence
  RPE65 RNA guide
cgagguacuuaguggugaugc

SEQ ID NO: 3026 - RNA, 21 nt, Artificial Sequence
  RPE65 RNA guide
cgcuucuucccagcaucacca

SEQ ID NO: 3027 - RNA, 21 nt, Artificial Sequence
  RPE65 RNA guide
cucgagguacuuaguggugau

SEQ ID NO: 3028 - RNA, 21 nt, Artificial Sequence
  RPE65 RNA guide
cucgcuucuucccagcaucac

SEQ ID NO: 3029 - RNA, 21 nt, Artificial Sequence
  RPE65 RNA guide
cuuaguggugaugcugggaag

SEQ ID NO: 3030 - RNA, 21 nt, Artificial Sequence
  RPE65 RNA guide
cuucccagcaucaccacuaag

SEQ ID NO: 3031 - RNA, 21 nt, Artificial Sequence
  RPE65 RNA guide
cuucuucccagcaucaccacu

SEQ ID NO: 3032 - RNA, 21 nt, Artificial Sequence
  RPE65 RNA guide
gacucgagguacuuaguggug

SEQ ID NO: 3033 - RNA, 21 nt, Artificial Sequence
  RPE65 RNA guide
gagguacuuaguggugaugcu

SEQ ID NO: 3034 - RNA, 21 nt, Artificial Sequence
  RPE65 RNA guide
gaugcugggaagaagcgaggg

SEQ ID NO: 3035 - RNA, 21 nt, Artificial Sequence
  RPE65 RNA guide
gcacaccccucgcuucuuccc

SEQ ID NO: 3036 - RNA, 21 nt, Artificial Sequence
  RPE65 RNA guide
gcaucaccacuaaguaccucg

SEQ ID NO: 3037 - RNA, 21 nt, Artificial Sequence
  RPE65 RNA guide
gcuucuucccagcaucaccac

SEQ ID NO: 3038 - RNA, 21 nt, Artificial Sequence
  RPE65 RNA guide
ggacucgagguacuuaguggu

SEQ ID NO: 3039 - RNA, 21 nt, Artificial Sequence
  RPE65 RNA guide
gggacucgagguacuuagugg

SEQ ID NO: 3040 - RNA, 21 nt, Artificial Sequence
  RPE65 RNA guide
gguacuuaguggugaugcugg

SEQ ID NO: 3041 - RNA, 21 nt, Artificial Sequence
  RPE65 RNA guide
ggugaugcugggaagaagcga

SEQ ID NO: 3042 - RNA, 21 nt, Artificial Sequence
  RPE65 RNA guide
guacuuaguggugaugcuggg

SEQ ID NO: 3043 - RNA, 21 nt, Artificial Sequence
  RPE65 RNA guide
gugaugcugggaagaagcgag

SEQ ID NO: 3044 - RNA, 21 nt, Artificial Sequence
  RPE65 RNA guide
guggugaugcugggaagaagc

SEQ ID NO: 3045 - RNA, 21 nt, Artificial Sequence
  RPE65 RNA guide
uacuuaguggugaugcuggga

SEQ ID NO: 3046 - RNA, 21 nt, Artificial Sequence
  RPE65 RNA guide
uaguggugaugcugggaagaa

SEQ ID NO: 3047 - RNA, 21 nt, Artificial Sequence
  RPE65 RNA guide
ucccagcaucaccacuaagua

SEQ ID NO: 3048 - RNA, 21 nt, Artificial Sequence
  RPE65 RNA guide
ucgagguacuuaguggugaug

SEQ ID NO: 3049 - RNA, 21 nt, Artificial Sequence
  RPE65 RNA guide
ucgcuucuucccagcaucacc

SEQ ID NO: 3050 - RNA, 21 nt, Artificial Sequence
  RPE65 RNA guide
ucuucccagcaucaccacuaa

SEQ ID NO: 3051 - RNA, 21 nt, Artificial Sequence
  RPE65 RNA guide
ugaugcugggaagaagcgagg

SEQ ID NO: 3052 - RNA, 21 nt, Artificial Sequence
  RPE65 RNA guide
uggugaugcugggaagaagcg

SEQ ID NO: 3053 - RNA, 21 nt, Artificial Sequence
  RPE65 RNA guide
uuaguggugaugcugggaaga

SEQ ID NO: 3054 - RNA, 21 nt, Artificial Sequence
  RPE65 RNA guide
uucccagcaucaccacuaagu

SEQ ID NO: 3055 - RNA, 21 nt, Artificial Sequence
  RPE65 RNA guide
uucuucccagcaucaccacua

SEQ ID NO: 3056 - RNA, 22 nt, Artificial Sequence
  RPE65 RNA guide
acaccccucgcuucuucccagc

SEQ ID NO: 3057 - RNA, 22 nt, Artificial Sequence
  RPE65 RNA guide
accccucgcuucuucccagcau

SEQ ID NO: 3058 - RNA, 22 nt, Artificial Sequence
  RPE65 RNA guide
acucgagguacuuaguggugau

SEQ ID NO: 3059 - RNA, 22 nt, Artificial Sequence
  RPE65 RNA guide
acuuaguggugaugcugggaag

SEQ ID NO: 3060 - RNA, 22 nt, Artificial Sequence
  RPE65 RNA guide
agcaucaccacuaaguaccucg

SEQ ID NO: 3061 - RNA, 22 nt, Artificial Sequence
  RPE65 RNA guide
agggacucgagguacuuagugg

SEQ ID NO: 3062 - RNA, 22 nt, Artificial Sequence
  RPE65 RNA guide
agguacuuaguggugaugcugg

SEQ ID NO: 3063 - RNA, 22 nt, Artificial Sequence
  RPE65 RNA guide
aguggugaugcugggaagaagc

SEQ ID NO: 3064 - RNA, 22 nt, Artificial Sequence
  RPE65 RNA guide
augcugggaagaagcgaggggu

SEQ ID NO: 3065 - RNA, 22 nt, Artificial Sequence
  RPE65 RNA guide
cacaccccucgcuucuucccag

SEQ ID NO: 3066 - RNA, 22 nt, Artificial Sequence
  RPE65 RNA guide
caccccucgcuucuucccagca

SEQ ID NO: 3067 - RNA, 22 nt, Artificial Sequence
  RPE65 RNA guide
cagcaucaccacuaaguaccuc

SEQ ID NO: 3068 - RNA, 22 nt, Artificial Sequence
  RPE65 RNA guide
caucaccacuaaguaccucgag

SEQ ID NO: 3069 - RNA, 22 nt, Artificial Sequence
  RPE65 RNA guide
ccagcaucaccacuaaguaccu

SEQ ID NO: 3070 - RNA, 22 nt, Artificial Sequence
  RPE65 RNA guide
cccagcaucaccacuaaguacc

SEQ ID NO: 3071 - RNA, 22 nt, Artificial Sequence
  RPE65 RNA guide
ccccucgcuucuucccagcauc

SEQ ID NO: 3072 - RNA, 22 nt, Artificial Sequence
  RPE65 RNA guide
cccucgcuucuucccagcauca

SEQ ID NO: 3073 - RNA, 22 nt, Artificial Sequence
  RPE65 RNA guide
ccucgcuucuucccagcaucac

SEQ ID NO: 3074 - RNA, 22 nt, Artificial Sequence
  RPE65 RNA guide
cgagguacuuaguggugaugcu

SEQ ID NO: 3075 - RNA, 22 nt, Artificial Sequence
  RPE65 RNA guide
cgcuucuucccagcaucaccac

SEQ ID NO: 3076 - RNA, 22 nt, Artificial Sequence
  RPE65 RNA guide
cucgagguacuuaguggugaug

SEQ ID NO: 3077 - RNA, 22 nt, Artificial Sequence
  RPE65 RNA guide
cucgcuucuucccagcaucacc

SEQ ID NO: 3078 - RNA, 22 nt, Artificial Sequence
  RPE65 RNA guide
cuuaguggugaugcugggaaga

SEQ ID NO: 3079 - RNA, 22 nt, Artificial Sequence
  RPE65 RNA guide
cuucccagcaucaccacuaagu

SEQ ID NO: 3080 - RNA, 22 nt, Artificial Sequence
  RPE65 RNA guide
cuucuucccagcaucaccacua

SEQ ID NO: 3081 - RNA, 22 nt, Artificial Sequence
  RPE65 RNA guide
gacucgagguacuuagugguga

SEQ ID NO: 3082 - RNA, 22 nt, Artificial Sequence
  RPE65 RNA guide
gagguacuuaguggugaugcug

SEQ ID NO: 3083 - RNA, 22 nt, Artificial Sequence
  RPE65 RNA guide
gaugcugggaagaagcgagggg

SEQ ID NO: 3084 - RNA, 22 nt, Artificial Sequence
  RPE65 RNA guide
gcacaccccucgcuucuuccca

SEQ ID NO: 3085 - RNA, 22 nt, Artificial Sequence
  RPE65 RNA guide
gcaucaccacuaaguaccucga

SEQ ID NO: 3086 - RNA, 22 nt, Artificial Sequence
  RPE65 RNA guide
gcuucuucccagcaucaccacu

SEQ ID NO: 3087 - RNA, 22 nt, Artificial Sequence
  RPE65 RNA guide
ggacucgagguacuuaguggug

SEQ ID NO: 3088 - RNA, 22 nt, Artificial Sequence
  RPE65 RNA guide
gggacucgagguacuuaguggu

SEQ ID NO: 3089 - RNA, 22 nt, Artificial Sequence
  RPE65 RNA guide
gguacuuaguggugaugcuggg

SEQ ID NO: 3090 - RNA, 22 nt, Artificial Sequence
  RPE65 RNA guide
ggugaugcugggaagaagcgag

SEQ ID NO: 3091 - RNA, 22 nt, Artificial Sequence
  RPE65 RNA guide
guacuuaguggugaugcuggga

SEQ ID NO: 3092 - RNA, 22 nt, Artificial Sequence
  RPE65 RNA guide
gugaugcugggaagaagcgagg

SEQ ID NO: 3093 - RNA, 22 nt, Artificial Sequence
  RPE65 RNA guide
guggugaugcugggaagaagcg

SEQ ID NO: 3094 - RNA, 22 nt, Artificial Sequence
  RPE65 RNA guide
uacuuaguggugaugcugggaa

SEQ ID NO: 3095 - RNA, 22 nt, Artificial Sequence
  RPE65 RNA guide
uaguggugaugcugggaagaag

SEQ ID NO: 3096 - RNA, 22 nt, Artificial Sequence
  RPE65 RNA guide
ucccagcaucaccacuaaguac

SEQ ID NO: 3097 - RNA, 22 nt, Artificial Sequence
  RPE65 RNA guide
ucgagguacuuaguggugaugc

SEQ ID NO: 3098 - RNA, 22 nt, Artificial Sequence
  RPE65 RNA guide
ucgcuucuucccagcaucacca

SEQ ID NO: 3099 - RNA, 22 nt, Artificial Sequence
  RPE65 RNA guide
ucuucccagcaucaccacuaag

SEQ ID NO: 3100 - RNA, 22 nt, Artificial Sequence
  RPE65 RNA guide
ugaugcugggaagaagcgaggg

SEQ ID NO: 3101 - RNA, 22 nt, Artificial Sequence
  RPE65 RNA guide
ugcacaccccucgcuucuuccc

SEQ ID NO: 3102 - RNA, 22 nt, Artificial Sequence
  RPE65 RNA guide
uggugaugcugggaagaagcga

SEQ ID NO: 3103 - RNA, 22 nt, Artificial Sequence
  RPE65 RNA guide
uuaguggugaugcugggaagaa

SEQ ID NO: 3104 - RNA, 22 nt, Artificial Sequence
  RPE65 RNA guide
uucccagcaucaccacuaagua

SEQ ID NO: 3105 - RNA, 22 nt, Artificial Sequence
  RPE65 RNA guide
uucuucccagcaucaccacuaa

SEQ ID NO: 3106 - RNA, 20 nt, Artificial Sequence
  RPE65 RNA guide
acgcugggaagaagcgaggg

SEQ ID NO: 3107 - RNA, 20 nt, Artificial Sequence
  RPE65 RNA guide
acuuaguggugacgcuggga

SEQ ID NO: 3108 - RNA, 20 nt, Artificial Sequence
  RPE65 RNA guide
agcgucaccacuaaguaccu

SEQ ID NO: 3109 - RNA, 20 nt, Artificial Sequence
  RPE65 RNA guide
agguacuuaguggugacgcu

SEQ ID NO: 3110 - RNA, 20 nt, Artificial Sequence
  RPE65 RNA guide
aguggugacgcugggaagaa

SEQ ID NO: 3111 - RNA, 20 nt, Artificial Sequence
  RPE65 RNA guide
cagcgucaccacuaaguacc

SEQ ID NO: 3112 - RNA, 20 nt, Artificial Sequence
  RPE65 RNA guide
ccagcgucaccacuaaguac

SEQ ID NO: 3113 - RNA, 20 nt, Artificial Sequence
  RPE65 RNA guide
cccagcgucaccacuaagua

SEQ ID NO: 3114 - RNA, 20 nt, Artificial Sequence
  RPE65 RNA guide
ccccucgcuucuucccagcg

SEQ ID NO: 3115 - RNA, 20 nt, Artificial Sequence
  RPE65 RNA guide
cccucgcuucuucccagcgu

SEQ ID NO: 3116 - RNA, 20 nt, Artificial Sequence
  RPE65 RNA guide
ccucgcuucuucccagcguc

SEQ ID NO: 3117 - RNA, 20 nt, Artificial Sequence
  RPE65 RNA guide
cgagguacuuaguggugacg

SEQ ID NO: 3118 - RNA, 20 nt, Artificial Sequence
  RPE65 RNA guide
cgcuucuucccagcgucacc

SEQ ID NO: 3119 - RNA, 20 nt, Artificial Sequence
  RPE65 RNA guide
cgucaccacuaaguaccucg

SEQ ID NO: 3120 - RNA, 20 nt, Artificial Sequence
  RPE65 RNA guide
cucgcuucuucccagcguca

SEQ ID NO: 3121 - RNA, 20 nt, Artificial Sequence
  RPE65 RNA guide
cuuaguggugacgcugggaa

SEQ ID NO: 3122 - RNA, 20 nt, Artificial Sequence
  RPE65 RNA guide
cuucccagcgucaccacuaa

SEQ ID NO: 3123 - RNA, 20 nt, Artificial Sequence
  RPE65 RNA guide
cuucuucccagcgucaccac

SEQ ID NO: 3124 - RNA, 20 nt, Artificial Sequence
  RPE65 RNA guide
gacgcugggaagaagcgagg

SEQ ID NO: 3125 - RNA, 20 nt, Artificial Sequence
  RPE65 RNA guide
gagguacuuaguggugacgc

SEQ ID NO: 3126 - RNA, 20 nt, Artificial Sequence
  RPE65 RNA guide
gcgucaccacuaaguaccuc

SEQ ID NO: 3127 - RNA, 20 nt, Artificial Sequence
  RPE65 RNA guide
gcuucuucccagcgucacca

SEQ ID NO: 3128 - RNA, 20 nt, Artificial Sequence
  RPE65 RNA guide
gguacuuaguggugacgcug

SEQ ID NO: 3129 - RNA, 20 nt, Artificial Sequence
  RPE65 RNA guide
ggugacgcugggaagaagcg

SEQ ID NO: 3130 - RNA, 20 nt, Artificial Sequence
  RPE65 RNA guide
guacuuaguggugacgcugg

SEQ ID NO: 3131 - RNA, 20 nt, Artificial Sequence
  RPE65 RNA guide
gugacgcugggaagaagcga

SEQ ID NO: 3132 - RNA, 20 nt, Artificial Sequence
  RPE65 RNA guide
guggugacgcugggaagaag

SEQ ID NO: 3133 - RNA, 20 nt, Artificial Sequence
  RPE65 RNA guide
uacuuaguggugacgcuggg

SEQ ID NO: 3134 - RNA, 20 nt, Artificial Sequence
  RPE65 RNA guide
uaguggugacgcugggaaga

SEQ ID NO: 3135 - RNA, 20 nt, Artificial Sequence
  RPE65 RNA guide
ucccagcgucaccacuaagu

SEQ ID NO: 3136 - RNA, 20 nt, Artificial Sequence
  RPE65 RNA guide
ucgagguacuuaguggugac

SEQ ID NO: 3137 - RNA, 20 nt, Artificial Sequence
  RPE65 RNA guide
ucgcuucuucccagcgucac

SEQ ID NO: 3138 - RNA, 20 nt, Artificial Sequence
  RPE65 RNA guide
ucuucccagcgucaccacua

SEQ ID NO: 3139 - RNA, 20 nt, Artificial Sequence
  RPE65 RNA guide
ugacgcugggaagaagcgag

SEQ ID NO: 3140 - RNA, 20 nt, Artificial Sequence
  RPE65 RNA guide
uggugacgcugggaagaagc

SEQ ID NO: 3141 - RNA, 20 nt, Artificial Sequence
  RPE65 RNA guide
uuaguggugacgcugggaag

SEQ ID NO: 3142 - RNA, 20 nt, Artificial Sequence
  RPE65 RNA guide
uucccagcgucaccacuaag

SEQ ID NO: 3143 - RNA, 20 nt, Artificial Sequence
  RPE65 RNA guide
uucuucccagcgucaccacu

SEQ ID NO: 3144 - RNA, 21 nt, Artificial Sequence
  RPE65 RNA guide
accccucgcuucuucccagcg

SEQ ID NO: 3145 - RNA, 21 nt, Artificial Sequence
  RPE65 RNA guide
acgcugggaagaagcgagggg

SEQ ID NO: 3146 - RNA, 21 nt, Artificial Sequence
  RPE65 RNA guide
acuuaguggugacgcugggaa

SEQ ID NO: 3147 - RNA, 21 nt, Artificial Sequence
  RPE65 RNA guide
agcgucaccacuaaguaccuc

SEQ ID NO: 3148 - RNA, 21 nt, Artificial Sequence
  RPE65 RNA guide
agguacuuaguggugacgcug

SEQ ID NO: 3149 - RNA, 21 nt, Artificial Sequence
  RPE65 RNA guide
aguggugacgcugggaagaag

SEQ ID NO: 3150 - RNA, 21 nt, Artificial Sequence
  RPE65 RNA guide
cagcgucaccacuaaguaccu

SEQ ID NO: 3151 - RNA, 21 nt, Artificial Sequence
  RPE65 RNA guide
ccagcgucaccacuaaguacc

SEQ ID NO: 3152 - RNA, 21 nt, Artificial Sequence
  RPE65 RNA guide
cccagcgucaccacuaaguac

SEQ ID NO: 3153 - RNA, 21 nt, Artificial Sequence
  RPE65 RNA guide
ccccucgcuucuucccagcgu

SEQ ID NO: 3154 - RNA, 21 nt, Artificial Sequence
  RPE65 RNA guide
cccucgcuucuucccagcguc

SEQ ID NO: 3155 - RNA, 21 nt, Artificial Sequence
  RPE65 RNA guide
ccucgcuucuucccagcguca

SEQ ID NO: 3156 - RNA, 21 nt, Artificial Sequence
  RPE65 RNA guide
cgagguacuuaguggugacgc

SEQ ID NO: 3157 - RNA, 21 nt, Artificial Sequence
  RPE65 RNA guide
cgcuucuucccagcgucacca

SEQ ID NO: 3158 - RNA, 21 nt, Artificial Sequence
  RPE65 RNA guide
cgucaccacuaaguaccucga

SEQ ID NO: 3159 - RNA, 21 nt, Artificial Sequence
  RPE65 RNA guide
cucgagguacuuaguggugac

SEQ ID NO: 3160 - RNA, 21 nt, Artificial Sequence
  RPE65 RNA guide
cucgcuucuucccagcgucac

SEQ ID NO: 3161 - RNA, 21 nt, Artificial Sequence
  RPE65 RNA guide
cuuaguggugacgcugggaag

SEQ ID NO: 3162 - RNA, 21 nt, Artificial Sequence
  RPE65 RNA guide
cuucccagcgucaccacuaag

SEQ ID NO: 3163 - RNA, 21 nt, Artificial Sequence
  RPE65 RNA guide
cuucuucccagcgucaccacu

SEQ ID NO: 3164 - RNA, 21 nt, Artificial Sequence
  RPE65 RNA guide
gacgcugggaagaagcgaggg

SEQ ID NO: 3165 - RNA, 21 nt, Artificial Sequence
  RPE65 RNA guide
gagguacuuaguggugacgcu

SEQ ID NO: 3166 - RNA, 21 nt, Artificial Sequence
  RPE65 RNA guide
gcgucaccacuaaguaccucg

SEQ ID NO: 3167 - RNA, 21 nt, Artificial Sequence
  RPE65 RNA guide
gcuucuucccagcgucaccac

SEQ ID NO: 3168 - RNA, 21 nt, Artificial Sequence
  RPE65 RNA guide
gguacuuaguggugacgcugg

SEQ ID NO: 3169 - RNA, 21 nt, Artificial Sequence
  RPE65 RNA guide
ggugacgcugggaagaagcga

SEQ ID NO: 3170 - RNA, 21 nt, Artificial Sequence
  RPE65 RNA guide
guacuuaguggugacgcuggg

SEQ ID NO: 3171 - RNA, 21 nt, Artificial Sequence
  RPE65 RNA guide
gugacgcugggaagaagcgag

SEQ ID NO: 3172 - RNA, 21 nt, Artificial Sequence
  RPE65 RNA guide
guggugacgcugggaagaagc

SEQ ID NO: 3173 - RNA, 21 nt, Artificial Sequence
  RPE65 RNA guide
uacuuaguggugacgcuggga

SEQ ID NO: 3174 - RNA, 21 nt, Artificial Sequence
  RPE65 RNA guide
uaguggugacgcugggaagaa

SEQ ID NO: 3175 - RNA, 21 nt, Artificial Sequence
  RPE65 RNA guide
ucccagcgucaccacuaagua

SEQ ID NO: 3176 - RNA, 21 nt, Artificial Sequence
  RPE65 RNA guide
ucgagguacuuaguggugacg

SEQ ID NO: 3177 - RNA, 21 nt, Artificial Sequence
  RPE65 RNA guide
ucgcuucuucccagcgucacc

SEQ ID NO: 3178 - RNA, 21 nt, Artificial Sequence
  RPE65 RNA guide
ucuucccagcgucaccacuaa

SEQ ID NO: 3179 - RNA, 21 nt, Artificial Sequence
  RPE65 RNA guide
ugacgcugggaagaagcgagg

SEQ ID NO: 3180 - RNA, 21 nt, Artificial Sequence
  RPE65 RNA guide
uggugacgcugggaagaagcg

SEQ ID NO: 3181 - RNA, 21 nt, Artificial Sequence
  RPE65 RNA guide
uuaguggugacgcugggaaga

SEQ ID NO: 3182 - RNA, 21 nt, Artificial Sequence
  RPE65 RNA guide
uucccagcgucaccacuaagu

SEQ ID NO: 3183 - RNA, 21 nt, Artificial Sequence
  RPE65 RNA guide
uucuucccagcgucaccacua

SEQ ID NO: 3184 - RNA, 22 nt, Artificial Sequence
  RPE65 RNA guide
accccucgcuucuucccagcgu

SEQ ID NO: 3185 - RNA, 22 nt, Artificial Sequence
  RPE65 RNA guide
acgcugggaagaagcgaggggu

SEQ ID NO: 3186 - RNA, 22 nt, Artificial Sequence
  RPE65 RNA guide
acucgagguacuuaguggugac

SEQ ID NO: 3187 - RNA, 22 nt, Artificial Sequence
  RPE65 RNA guide
acuuaguggugacgcugggaag

SEQ ID NO: 3188 - RNA, 22 nt, Artificial Sequence
  RPE65 RNA guide
agcgucaccacuaaguaccucg

SEQ ID NO: 3189 - RNA, 22 nt, Artificial Sequence
  RPE65 RNA guide
agguacuuaguggugacgcugg

SEQ ID NO: 3190 - RNA, 22 nt, Artificial Sequence
  RPE65 RNA guide
aguggugacgcugggaagaagc

SEQ ID NO: 3191 - RNA, 22 nt, Artificial Sequence
  RPE65 RNA guide
caccccucgcuucuucccagcg

SEQ ID NO: 3192 - RNA, 22 nt, Artificial Sequence
  RPE65 RNA guide
cagcgucaccacuaaguaccuc

SEQ ID NO: 3193 - RNA, 22 nt, Artificial Sequence
  RPE65 RNA guide
ccagcgucaccacuaaguaccu

SEQ ID NO: 3194 - RNA, 22 nt, Artificial Sequence
  RPE65 RNA guide
cccagcgucaccacuaaguacc

SEQ ID NO: 3195 - RNA, 22 nt, Artificial Sequence
  RPE65 RNA guide
ccccucgcuucuucccagcguc

SEQ ID NO: 3196 - RNA, 22 nt, Artificial Sequence
  RPE65 RNA guide
cccucgcuucuucccagcguca

SEQ ID NO: 3197 - RNA, 22 nt, Artificial Sequence
  RPE65 RNA guide
ccucgcuucuucccagcgucac

SEQ ID NO: 3198 - RNA, 22 nt, Artificial Sequence
  RPE65 RNA guide
cgagguacuuaguggugacgcu

SEQ ID NO: 3199 - RNA, 22 nt, Artificial Sequence
  RPE65 RNA guide
cgcuucuucccagcgucaccac

SEQ ID NO: 3200 - RNA, 22 nt, Artificial Sequence
  RPE65 RNA guide
cgucaccacuaaguaccucgag

SEQ ID NO: 3201 - RNA, 22 nt, Artificial Sequence
  RPE65 RNA guide
cucgagguacuuaguggugacg

SEQ ID NO: 3202 - RNA, 22 nt, Artificial Sequence
  RPE65 RNA guide
cucgcuucuucccagcgucacc

SEQ ID NO: 3203 - RNA, 22 nt, Artificial Sequence
  RPE65 RNA guide
cuuaguggugacgcugggaaga

SEQ ID NO: 3204 - RNA, 22 nt, Artificial Sequence
  RPE65 RNA guide
cuucccagcgucaccacuaagu

SEQ ID NO: 3205 - RNA, 22 nt, Artificial Sequence
  RPE65 RNA guide
cuucuucccagcgucaccacua

SEQ ID NO: 3206 - RNA, 22 nt, Artificial Sequence
  RPE65 RNA guide
gacgcugggaagaagcgagggg

SEQ ID NO: 3207 - RNA, 22 nt, Artificial Sequence
  RPE65 RNA guide
gagguacuuaguggugacgcug

SEQ ID NO: 3208 - RNA, 22 nt, Artificial Sequence
  RPE65 RNA guide
gcgucaccacuaaguaccucga

SEQ ID NO: 3209 - RNA, 22 nt, Artificial Sequence
  RPE65 RNA guide
gcuucuucccagcgucaccacu

SEQ ID NO: 3210 - RNA, 22 nt, Artificial Sequence
  RPE65 RNA guide
gguacuuaguggugacgcuggg

SEQ ID NO: 3211 - RNA, 22 nt, Artificial Sequence
  RPE65 RNA guide
ggugacgcugggaagaagcgag

SEQ ID NO: 3212 - RNA, 22 nt, Artificial Sequence
  RPE65 RNA guide
guacuuaguggugacgcuggga

SEQ ID NO: 3213 - RNA, 22 nt, Artificial Sequence
  RPE65 RNA guide
gugacgcugggaagaagcgagg

SEQ ID NO: 3214 - RNA, 22 nt, Artificial Sequence
  RPE65 RNA guide
guggugacgcugggaagaagcg

SEQ ID NO: 3215 - RNA, 22 nt, Artificial Sequence
  RPE65 RNA guide
uacuuaguggugacgcugggaa

SEQ ID NO: 3216 - RNA, 22 nt, Artificial Sequence
  RPE65 RNA guide
uaguggugacgcugggaagaag

SEQ ID NO: 3217 - RNA, 22 nt, Artificial Sequence
  RPE65 RNA guide
ucccagcgucaccacuaaguac

SEQ ID NO: 3218 - RNA, 22 nt, Artificial Sequence
  RPE65 RNA guide
ucgagguacuuaguggugacgc

SEQ ID NO: 3219 - RNA, 22 nt, Artificial Sequence
  RPE65 RNA guide
ucgcuucuucccagcgucacca

SEQ ID NO: 3220 - RNA, 22 nt, Artificial Sequence
  RPE65 RNA guide
ucuucccagcgucaccacuaag

SEQ ID NO: 3221 - RNA, 22 nt, Artificial Sequence
  RPE65 RNA guide
ugacgcugggaagaagcgaggg

SEQ ID NO: 3222 - RNA, 22 nt, Artificial Sequence
  RPE65 RNA guide
uggugacgcugggaagaagcga

SEQ ID NO: 3223 - RNA, 22 nt, Artificial Sequence
  RPE65 RNA guide
uuaguggugacgcugggaagaa

SEQ ID NO: 3224 - RNA, 22 nt, Artificial Sequence
  RPE65 RNA guide
uucccagcgucaccacuaagua

SEQ ID NO: 3225 - RNA, 22 nt, Artificial Sequence
  RPE65 RNA guide
uucuucccagcgucaccacuaa

SEQ ID NO: 3226 - RNA, 20 nt, Artificial Sequence
  RPE65 RNA guide
aaaauucaacuugaaaccac

SEQ ID NO: 3227 - RNA, 20 nt, Artificial Sequence
  RPE65 RNA guide
aaauucaacuugaaaccaca

SEQ ID NO: 3228 - RNA, 20 nt, Artificial Sequence
  RPE65 RNA guide
aauucaacuugaaaccacau

SEQ ID NO: 3229 - RNA, 20 nt, Artificial Sequence
  RPE65 RNA guide
augugguuucaaguugaauu

SEQ ID NO: 3230 - RNA, 20 nt, Artificial Sequence
  RPE65 RNA guide
auucaacuugaaaccacaua

SEQ ID NO: 3231 - RNA, 20 nt, Artificial Sequence
  RPE65 RNA guide
auuuaugugguuucaaguug

SEQ ID NO: 3232 - RNA, 20 nt, Artificial Sequence
  RPE65 RNA guide
gugguuucaaguugaauuuu

SEQ ID NO: 3233 - RNA, 20 nt, Artificial Sequence
  RPE65 RNA guide
uaugugguuucaaguugaau

SEQ ID NO: 3234 - RNA, 20 nt, Artificial Sequence
  RPE65 RNA guide
ugugguuucaaguugaauuu

SEQ ID NO: 3235 - RNA, 20 nt, Artificial Sequence
  RPE65 RNA guide
uuaugugguuucaaguugaa

SEQ ID NO: 3236 - RNA, 20 nt, Artificial Sequence
  RPE65 RNA guide
uuuaugugguuucaaguuga

SEQ ID NO: 3237 - RNA, 20 nt, Artificial Sequence
  RPE65 RNA guide
aaacaaacaaacaggaaauc

SEQ ID NO: 3238 - RNA, 20 nt, Artificial Sequence
  RPE65 RNA guide
aacaaacaaacaaacaggaa

SEQ ID NO: 3239 - RNA, 20 nt, Artificial Sequence
  RPE65 RNA guide
aacaaacaaacaggaaaucu

SEQ ID NO: 3240 - RNA, 20 nt, Artificial Sequence
  RPE65 RNA guide
acaaacaaacaaacaggaaa

SEQ ID NO: 3241 - RNA, 20 nt, Artificial Sequence
  RPE65 RNA guide
acaaacaaacaggaaaucua

SEQ ID NO: 3242 - RNA, 20 nt, Artificial Sequence
  RPE65 RNA guide
agauuuccuguuuguuuguu

SEQ ID NO: 3243 - RNA, 20 nt, Artificial Sequence
  RPE65 RNA guide
caaacaaacaaacaggaaau

SEQ ID NO: 3244 - RNA, 20 nt, Artificial Sequence
  RPE65 RNA guide
caaacaaacaggaaaucuaa

SEQ ID NO: 3245 - RNA, 20 nt, Artificial Sequence
  RPE65 RNA guide
uagauuuccuguuuguuugu

SEQ ID NO: 3246 - RNA, 20 nt, Artificial Sequence
  RPE65 RNA guide
uuagauuuccuguuuguuug

SEQ ID NO: 3247 - RNA, 21 nt, Artificial Sequence
  RPE65 RNA guide
caaacaaacaaacaggaaauc

SEQ ID NO: 3248 - RNA, 22 nt, Artificial Sequence
  RPE65 RNA guide
acaaacaaacaaacaggaaauc

SEQ ID NO: 3249 - RNA, 22 nt, Artificial Sequence
  RPE65 RNA guide
agauuuccuguuuguuuguuug

SEQ ID NO: 3250 - RNA, 22 nt, Artificial Sequence
  RPE65 RNA guide
caaacaaacaaacaaacaggaa

SEQ ID NO: 3251 - RNA, 22 nt, Artificial Sequence
  RPE65 RNA guide
caaacaaacaaacaggaaaucu

SEQ ID NO: 3252 - RNA, 21 nt, Artificial Sequence
  RPE65 RNA guide
ccuccugccucagucuuccaa

SEQ ID NO: 3253 - RNA, 21 nt, Artificial Sequence
  RPE65 RNA guide
uuacuuggaagacugaggcag

SEQ ID NO: 3254 - RNA, 22 nt, Artificial Sequence
  RPE65 RNA guide
ccuccugccucagucuuccaag

SEQ ID NO: 3255 - RNA, 22 nt, Artificial Sequence
  RPE65 RNA guide
gccucagucuuccaaguaacug

SEQ ID NO: 3256 - RNA, 22 nt, Artificial Sequence
  RPE65 RNA guide
ggucccaguuacuuggaagacu

SEQ ID NO: 3257 - RNA, 22 nt, Artificial Sequence
  RPE65 RNA guide
gucccaguuacuuggaagacug

SEQ ID NO: 3258 - RNA, 22 nt, Artificial Sequence
  RPE65 RNA guide
guuacuuggaagacugaggcag

SEQ ID NO: 3259 - RNA, 22 nt, Artificial Sequence
  RPE65 RNA guide
uccuccugccucagucuuccaa

SEQ ID NO: 3260 - RNA, 22 nt, Artificial Sequence
  RPE65 RNA guide
uuacuuggaagacugaggcagg

SEQ ID NO: 3261 - RNA, 20 nt, Artificial Sequence
  RPE65 RNA guide
aguuacuuggaagacugaga

SEQ ID NO: 3262 - RNA, 20 nt, Artificial Sequence
  RPE65 RNA guide
caguuacuuggaagacugag

SEQ ID NO: 3263 - RNA, 20 nt, Artificial Sequence
  RPE65 RNA guide
ccaguuacuuggaagacuga

SEQ ID NO: 3264 - RNA, 20 nt, Artificial Sequence
  RPE65 RNA guide
ccugucucagucuuccaagu

SEQ ID NO: 3265 - RNA, 20 nt, Artificial Sequence
  RPE65 RNA guide
cuccugucucagucuuccaa

SEQ ID NO: 3266 - RNA, 20 nt, Artificial Sequence
  RPE65 RNA guide
cugucucagucuuccaagua

SEQ ID NO: 3267 - RNA, 20 nt, Artificial Sequence
  RPE65 RNA guide
guuacuuggaagacugagac

SEQ ID NO: 3268 - RNA, 20 nt, Artificial Sequence
  RPE65 RNA guide
uccugucucagucuuccaag

SEQ ID NO: 3269 - RNA, 20 nt, Artificial Sequence
  RPE65 RNA guide
ugucucagucuuccaaguaa

SEQ ID NO: 3270 - RNA, 20 nt, Artificial Sequence
  RPE65 RNA guide
uuacuuggaagacugagaca

SEQ ID NO: 3271 - RNA, 21 nt, Artificial Sequence
  RPE65 RNA guide
aguuacuuggaagacugagac

SEQ ID NO: 3272 - RNA, 21 nt, Artificial Sequence
  RPE65 RNA guide
caguuacuuggaagacugaga

SEQ ID NO: 3273 - RNA, 21 nt, Artificial Sequence
  RPE65 RNA guide
ccaguuacuuggaagacugag

SEQ ID NO: 3274 - RNA, 21 nt, Artificial Sequence
  RPE65 RNA guide
cccaguuacuuggaagacuga

SEQ ID NO: 3275 - RNA, 21 nt, Artificial Sequence
  RPE65 RNA guide
ccuccugucucagucuuccaa

SEQ ID NO: 3276 - RNA, 21 nt, Artificial Sequence
  RPE65 RNA guide
ccugucucagucuuccaagua

SEQ ID NO: 3277 - RNA, 21 nt, Artificial Sequence
  RPE65 RNA guide
cuccugucucagucuuccaag

SEQ ID NO: 3278 - RNA, 21 nt, Artificial Sequence
  RPE65 RNA guide
cugucucagucuuccaaguaa

SEQ ID NO: 3279 - RNA, 21 nt, Artificial Sequence
  RPE65 RNA guide
guuacuuggaagacugagaca

SEQ ID NO: 3280 - RNA, 21 nt, Artificial Sequence
  RPE65 RNA guide
uccugucucagucuuccaagu

SEQ ID NO: 3281 - RNA, 21 nt, Artificial Sequence
  RPE65 RNA guide
ugucucagucuuccaaguaac

SEQ ID NO: 3282 - RNA, 21 nt, Artificial Sequence
  RPE65 RNA guide
uuacuuggaagacugagacag

SEQ ID NO: 3283 - RNA, 22 nt, Artificial Sequence
  RPE65 RNA guide
acucaagcaauccuccugucuc

SEQ ID NO: 3284 - RNA, 22 nt, Artificial Sequence
  RPE65 RNA guide
aguuacuuggaagacugagaca

SEQ ID NO: 3285 - RNA, 22 nt, Artificial Sequence
  RPE65 RNA guide
caguuacuuggaagacugagac

SEQ ID NO: 3286 - RNA, 22 nt, Artificial Sequence
  RPE65 RNA guide
ccaguuacuuggaagacugaga

SEQ ID NO: 3287 - RNA, 22 nt, Artificial Sequence
  RPE65 RNA guide
cccaguuacuuggaagacugag

SEQ ID NO: 3288 - RNA, 22 nt, Artificial Sequence
  RPE65 RNA guide
ccuccugucucagucuuccaag

SEQ ID NO: 3289 - RNA, 22 nt, Artificial Sequence
  RPE65 RNA guide
ccugucucagucuuccaaguaa

SEQ ID NO: 3290 - RNA, 22 nt, Artificial Sequence
  RPE65 RNA guide
cuccugucucagucuuccaagu

SEQ ID NO: 3291 - RNA, 22 nt, Artificial Sequence
  RPE65 RNA guide
cugucucagucuuccaaguaac

SEQ ID NO: 3292 - RNA, 22 nt, Artificial Sequence
  RPE65 RNA guide
gacugagacaggaggauugcuu

SEQ ID NO: 3293 - RNA, 22 nt, Artificial Sequence
  RPE65 RNA guide
guuacuuggaagacugagacag

SEQ ID NO: 3294 - RNA, 22 nt, Artificial Sequence
  RPE65 RNA guide
ucccaguuacuuggaagacuga

SEQ ID NO: 3295 - RNA, 22 nt, Artificial Sequence
  RPE65 RNA guide
uccuccugucucagucuuccaa

SEQ ID NO: 3296 - RNA, 22 nt, Artificial Sequence
  RPE65 RNA guide
uccugucucagucuuccaagua

SEQ ID NO: 3297 - RNA, 22 nt, Artificial Sequence
  RPE65 RNA guide
ugucucagucuuccaaguaacu

SEQ ID NO: 3298 - RNA, 22 nt, Artificial Sequence
  RPE65 RNA guide
uuacuuggaagacugagacagg

SEQ ID NO: 3299 - RNA, 20 nt, Artificial Sequence
  RPE65 RNA guide
aaaaagaaacaagagccacc

SEQ ID NO: 3300 - RNA, 20 nt, Artificial Sequence
  RPE65 RNA guide
aaaagaaacaagagccacca

SEQ ID NO: 3301 - RNA, 20 nt, Artificial Sequence
  RPE65 RNA guide
aaacaagagccaccagaaag

SEQ ID NO: 3302 - RNA, 20 nt, Artificial Sequence
  RPE65 RNA guide
aaagaaacaagagccaccag

SEQ ID NO: 3303 - RNA, 20 nt, Artificial Sequence
  RPE65 RNA guide
aacaagagccaccagaaagc

SEQ ID NO: 3304 - RNA, 20 nt, Artificial Sequence
  RPE65 RNA guide
aacuagggcuuucugguggc

SEQ ID NO: 3305 - RNA, 20 nt, Artificial Sequence
  RPE65 RNA guide
aagaaacaagagccaccaga

SEQ ID NO: 3306 - RNA, 20 nt, Artificial Sequence
  RPE65 RNA guide
aagagccaccagaaagcccu

SEQ ID NO: 3307 - RNA, 20 nt, Artificial Sequence
  RPE65 RNA guide
aagccagaaaaagaaacaag

SEQ ID NO: 3308 - RNA, 20 nt, Artificial Sequence
  RPE65 RNA guide
acaagagccaccagaaagcc

SEQ ID NO: 3309 - RNA, 20 nt, Artificial Sequence
  RPE65 RNA guide
acuagggcuuucugguggcu

SEQ ID NO: 3310 - RNA, 20 nt, Artificial Sequence
  RPE65 RNA guide
agaaaaagaaacaagagcca

SEQ ID NO: 3311 - RNA, 20 nt, Artificial Sequence
  RPE65 RNA guide
agaaacaagagccaccagaa

SEQ ID NO: 3312 - RNA, 20 nt, Artificial Sequence
  RPE65 RNA guide
agagccaccagaaagcccua

SEQ ID NO: 3313 - RNA, 20 nt, Artificial Sequence
  RPE65 RNA guide
agccaccagaaagcccuagu

SEQ ID NO: 3314 - RNA, 20 nt, Artificial Sequence
  RPE65 RNA guide
agccagaaaaagaaacaaga

SEQ ID NO: 3315 - RNA, 20 nt, Artificial Sequence
  RPE65 RNA guide
aggaacuagggcuuucuggu

SEQ ID NO: 3316 - RNA, 20 nt, Artificial Sequence
  RPE65 RNA guide
agggcuuucugguggcucuu

SEQ ID NO: 3317 - RNA, 20 nt, Artificial Sequence
  RPE65 RNA guide
caagagccaccagaaagccc

SEQ ID NO: 3318 - RNA, 20 nt, Artificial Sequence
  RPE65 RNA guide
cagaaaaagaaacaagagcc

SEQ ID NO: 3319 - RNA, 20 nt, Artificial Sequence
  RPE65 RNA guide
ccagaaaaagaaacaagagc

SEQ ID NO: 3320 - RNA, 20 nt, Artificial Sequence
  RPE65 RNA guide
cuagggcuuucugguggcuc

SEQ ID NO: 3321 - RNA, 20 nt, Artificial Sequence
  RPE65 RNA guide
cugguggcucuuguuucuuu

SEQ ID NO: 3322 - RNA, 20 nt, Artificial Sequence
  RPE65 RNA guide
cuuucugguggcucuuguuu

SEQ ID NO: 3323 - RNA, 20 nt, Artificial Sequence
  RPE65 RNA guide
gaaaaagaaacaagagccac

SEQ ID NO: 3324 - RNA, 20 nt, Artificial Sequence
  RPE65 RNA guide
gaaacaagagccaccagaaa

SEQ ID NO: 3325 - RNA, 20 nt, Artificial Sequence
  RPE65 RNA guide
gaacuagggcuuucuggugg

SEQ ID NO: 3326 - RNA, 20 nt, Artificial Sequence
  RPE65 RNA guide
gaagccagaaaaagaaacaa

SEQ ID NO: 3327 - RNA, 20 nt, Artificial Sequence
  RPE65 RNA guide
gagccaccagaaagcccuag

SEQ ID NO: 3328 - RNA, 20 nt, Artificial Sequence
  RPE65 RNA guide
gccaccagaaagcccuaguu

SEQ ID NO: 3329 - RNA, 20 nt, Artificial Sequence
  RPE65 RNA guide
gccagaaaaagaaacaagag

SEQ ID NO: 3330 - RNA, 20 nt, Artificial Sequence
  RPE65 RNA guide
gcuuucugguggcucuuguu

SEQ ID NO: 3331 - RNA, 20 nt, Artificial Sequence
  RPE65 RNA guide
ggaacuagggcuuucuggug

SEQ ID NO: 3332 - RNA, 20 nt, Artificial Sequence
  RPE65 RNA guide
ggcucuuguuucuuuuucug

SEQ ID NO: 3333 - RNA, 20 nt, Artificial Sequence
  RPE65 RNA guide
ggcuuucugguggcucuugu

SEQ ID NO: 3334 - RNA, 20 nt, Artificial Sequence
  RPE65 RNA guide
gggcuuucugguggcucuug

SEQ ID NO: 3335 - RNA, 20 nt, Artificial Sequence
  RPE65 RNA guide
gguggcucuuguuucuuuuu

SEQ ID NO: 3336 - RNA, 20 nt, Artificial Sequence
  RPE65 RNA guide
guaggaacuagggcuuucug

SEQ ID NO: 3337 - RNA, 20 nt, Artificial Sequence
  RPE65 RNA guide
guggcucuuguuucuuuuuc

SEQ ID NO: 3338 - RNA, 20 nt, Artificial Sequence
  RPE65 RNA guide
uaggaacuagggcuuucugg

SEQ ID NO: 3339 - RNA, 20 nt, Artificial Sequence
  RPE65 RNA guide
uagggcuuucugguggcucu

SEQ ID NO: 3340 - RNA, 20 nt, Artificial Sequence
  RPE65 RNA guide
ucugguggcucuuguuucuu

SEQ ID NO: 3341 - RNA, 20 nt, Artificial Sequence
  RPE65 RNA guide
uggcucuuguuucuuuuucu

SEQ ID NO: 3342 - RNA, 20 nt, Artificial Sequence
  RPE65 RNA guide
ugguggcucuuguuucuuuu

SEQ ID NO: 3343 - RNA, 20 nt, Artificial Sequence
  RPE65 RNA guide
uucugguggcucuuguuucu

SEQ ID NO: 3344 - RNA, 20 nt, Artificial Sequence
  RPE65 RNA guide
uuucugguggcucuuguuuc

SEQ ID NO: 3345 - RNA, 21 nt, Artificial Sequence
  RPE65 RNA guide
aaaaagaaacaagagccacca

SEQ ID NO: 3346 - RNA, 21 nt, Artificial Sequence
  RPE65 RNA guide
aaaagaaacaagagccaccag

SEQ ID NO: 3347 - RNA, 21 nt, Artificial Sequence
  RPE65 RNA guide
aaacaagagccaccagaaagc

SEQ ID NO: 3348 - RNA, 21 nt, Artificial Sequence
  RPE65 RNA guide
aaagaaacaagagccaccaga

SEQ ID NO: 3349 - RNA, 21 nt, Artificial Sequence
  RPE65 RNA guide
aacaagagccaccagaaagcc

SEQ ID NO: 3350 - RNA, 21 nt, Artificial Sequence
  RPE65 RNA guide
aacuagggcuuucugguggcu

SEQ ID NO: 3351 - RNA, 21 nt, Artificial Sequence
  RPE65 RNA guide
aagaaacaagagccaccagaa

SEQ ID NO: 3352 - RNA, 21 nt, Artificial Sequence
  RPE65 RNA guide
aagagccaccagaaagcccua

SEQ ID NO: 3353 - RNA, 21 nt, Artificial Sequence
  RPE65 RNA guide
aagccagaaaaagaaacaaga

SEQ ID NO: 3354 - RNA, 21 nt, Artificial Sequence
  RPE65 RNA guide
acaagagccaccagaaagccc

SEQ ID NO: 3355 - RNA, 21 nt, Artificial Sequence
  RPE65 RNA guide
acuagggcuuucugguggcuc

SEQ ID NO: 3356 - RNA, 21 nt, Artificial Sequence
  RPE65 RNA guide
agaaaaagaaacaagagccac

SEQ ID NO: 3357 - RNA, 21 nt, Artificial Sequence
  RPE65 RNA guide
agaaacaagagccaccagaaa

SEQ ID NO: 3358 - RNA, 21 nt, Artificial Sequence
  RPE65 RNA guide
agaagccagaaaaagaaacaa

SEQ ID NO: 3359 - RNA, 21 nt, Artificial Sequence
  RPE65 RNA guide
agagccaccagaaagcccuag

SEQ ID NO: 3360 - RNA, 21 nt, Artificial Sequence
  RPE65 RNA guide
agccaccagaaagcccuaguu

SEQ ID NO: 3361 - RNA, 21 nt, Artificial Sequence
  RPE65 RNA guide
agccagaaaaagaaacaagag

SEQ ID NO: 3362 - RNA, 21 nt, Artificial Sequence
  RPE65 RNA guide
aggaacuagggcuuucuggug

SEQ ID NO: 3363 - RNA, 21 nt, Artificial Sequence
  RPE65 RNA guide
agggcuuucugguggcucuug

SEQ ID NO: 3364 - RNA, 21 nt, Artificial Sequence
  RPE65 RNA guide
aguaggaacuagggcuuucug

SEQ ID NO: 3365 - RNA, 21 nt, Artificial Sequence
  RPE65 RNA guide
caagagccaccagaaagcccu

SEQ ID NO: 3366 - RNA, 21 nt, Artificial Sequence
  RPE65 RNA guide
cagaaaaagaaacaagagcca

SEQ ID NO: 3367 - RNA, 21 nt, Artificial Sequence
  RPE65 RNA guide
ccagaaaaagaaacaagagcc

SEQ ID NO: 3368 - RNA, 21 nt, Artificial Sequence
  RPE65 RNA guide
cuagggcuuucugguggcucu

SEQ ID NO: 3369 - RNA, 21 nt, Artificial Sequence
  RPE65 RNA guide
cugguggcucuuguuucuuuu

SEQ ID NO: 3370 - RNA, 21 nt, Artificial Sequence
  RPE65 RNA guide
cuuucugguggcucuuguuuc

SEQ ID NO: 3371 - RNA, 21 nt, Artificial Sequence
  RPE65 RNA guide
gaaaaagaaacaagagccacc

SEQ ID NO: 3372 - RNA, 21 nt, Artificial Sequence
  RPE65 RNA guide
gaaacaagagccaccagaaag

SEQ ID NO: 3373 - RNA, 21 nt, Artificial Sequence
  RPE65 RNA guide
gaacuagggcuuucugguggc

SEQ ID NO: 3374 - RNA, 21 nt, Artificial Sequence
  RPE65 RNA guide
gaagccagaaaaagaaacaag

SEQ ID NO: 3375 - RNA, 21 nt, Artificial Sequence
  RPE65 RNA guide
gagccaccagaaagcccuagu

SEQ ID NO: 3376 - RNA, 21 nt, Artificial Sequence
  RPE65 RNA guide
gccaccagaaagcccuaguuc

SEQ ID NO: 3377 - RNA, 21 nt, Artificial Sequence
  RPE65 RNA guide
gccagaaaaagaaacaagagc

SEQ ID NO: 3378 - RNA, 21 nt, Artificial Sequence
  RPE65 RNA guide
gcuuucugguggcucuuguuu

SEQ ID NO: 3379 - RNA, 21 nt, Artificial Sequence
  RPE65 RNA guide
ggaacuagggcuuucuggugg

SEQ ID NO: 3380 - RNA, 21 nt, Artificial Sequence
  RPE65 RNA guide
ggcucuuguuucuuuuucugg

SEQ ID NO: 3381 - RNA, 21 nt, Artificial Sequence
  RPE65 RNA guide
ggcuuucugguggcucuuguu

SEQ ID NO: 3382 - RNA, 21 nt, Artificial Sequence
  RPE65 RNA guide
gggcuuucugguggcucuugu

SEQ ID NO: 3383 - RNA, 21 nt, Artificial Sequence
  RPE65 RNA guide
gguggcucuuguuucuuuuuc

SEQ ID NO: 3384 - RNA, 21 nt, Artificial Sequence
  RPE65 RNA guide
guaggaacuagggcuuucugg

SEQ ID NO: 3385 - RNA, 21 nt, Artificial Sequence
  RPE65 RNA guide
guggcucuuguuucuuuuucu

SEQ ID NO: 3386 - RNA, 21 nt, Artificial Sequence
  RPE65 RNA guide
uaggaacuagggcuuucuggu

SEQ ID NO: 3387 - RNA, 21 nt, Artificial Sequence
  RPE65 RNA guide
uagggcuuucugguggcucuu

SEQ ID NO: 3388 - RNA, 21 nt, Artificial Sequence
  RPE65 RNA guide
ucugguggcucuuguuucuuu

SEQ ID NO: 3389 - RNA, 21 nt, Artificial Sequence
  RPE65 RNA guide
uggcucuuguuucuuuuucug

SEQ ID NO: 3390 - RNA, 21 nt, Artificial Sequence
  RPE65 RNA guide
ugguggcucuuguuucuuuuu

SEQ ID NO: 3391 - RNA, 21 nt, Artificial Sequence
  RPE65 RNA guide
uucugguggcucuuguuucuu

SEQ ID NO: 3392 - RNA, 21 nt, Artificial Sequence
  RPE65 RNA guide
uuucugguggcucuuguuucu

SEQ ID NO: 3393 - RNA, 22 nt, Artificial Sequence
  RPE65 RNA guide
aaaaagaaacaagagccaccag

SEQ ID NO: 3394 - RNA, 22 nt, Artificial Sequence
  RPE65 RNA guide
aaaagaaacaagagccaccaga

SEQ ID NO: 3395 - RNA, 22 nt, Artificial Sequence
  RPE65 RNA guide
aaacaagagccaccagaaagcc

SEQ ID NO: 3396 - RNA, 22 nt, Artificial Sequence
  RPE65 RNA guide
aaagaaacaagagccaccagaa

SEQ ID NO: 3397 - RNA, 22 nt, Artificial Sequence
  RPE65 RNA guide
aacaagagccaccagaaagccc

SEQ ID NO: 3398 - RNA, 22 nt, Artificial Sequence
  RPE65 RNA guide
aacuagggcuuucugguggcuc

SEQ ID NO: 3399 - RNA, 22 nt, Artificial Sequence
  RPE65 RNA guide
aagaaacaagagccaccagaaa

SEQ ID NO: 3400 - RNA, 22 nt, Artificial Sequence
  RPE65 RNA guide
aagagccaccagaaagcccuag

SEQ ID NO: 3401 - RNA, 22 nt, Artificial Sequence
  RPE65 RNA guide
aagccagaaaaagaaacaagag

SEQ ID NO: 3402 - RNA, 22 nt, Artificial Sequence
  RPE65 RNA guide
acaagagccaccagaaagcccu

SEQ ID NO: 3403 - RNA, 22 nt, Artificial Sequence
  RPE65 RNA guide
acuagggcuuucugguggcucu

SEQ ID NO: 3404 - RNA, 22 nt, Artificial Sequence
  RPE65 RNA guide
agaaaaagaaacaagagccacc

SEQ ID NO: 3405 - RNA, 22 nt, Artificial Sequence
  RPE65 RNA guide
agaaacaagagccaccagaaag

SEQ ID NO: 3406 - RNA, 22 nt, Artificial Sequence
  RPE65 RNA guide
agaagccagaaaaagaaacaag

SEQ ID NO: 3407 - RNA, 22 nt, Artificial Sequence
  RPE65 RNA guide
agagccaccagaaagcccuagu

SEQ ID NO: 3408 - RNA, 22 nt, Artificial Sequence
  RPE65 RNA guide
agccaccagaaagcccuaguuc

SEQ ID NO: 3409 - RNA, 22 nt, Artificial Sequence
  RPE65 RNA guide
agccagaaaaagaaacaagagc

SEQ ID NO: 3410 - RNA, 22 nt, Artificial Sequence
  RPE65 RNA guide
aggaacuagggcuuucuggugg

SEQ ID NO: 3411 - RNA, 22 nt, Artificial Sequence
  RPE65 RNA guide
agggcuuucugguggcucuugu

SEQ ID NO: 3412 - RNA, 22 nt, Artificial Sequence
  RPE65 RNA guide
aguaggaacuagggcuuucugg

SEQ ID NO: 3413 - RNA, 22 nt, Artificial Sequence
  RPE65 RNA guide
caagagccaccagaaagcccua

SEQ ID NO: 3414 - RNA, 22 nt, Artificial Sequence
  RPE65 RNA guide
cagaaaaagaaacaagagccac

SEQ ID NO: 3415 - RNA, 22 nt, Artificial Sequence
  RPE65 RNA guide
ccagaaaaagaaacaagagcca

SEQ ID NO: 3416 - RNA, 22 nt, Artificial Sequence
  RPE65 RNA guide
cuagggcuuucugguggcucuu

SEQ ID NO: 3417 - RNA, 22 nt, Artificial Sequence
  RPE65 RNA guide
cugguggcucuuguuucuuuuu

SEQ ID NO: 3418 - RNA, 22 nt, Artificial Sequence
  RPE65 RNA guide
cuuucugguggcucuuguuucu

SEQ ID NO: 3419 - RNA, 22 nt, Artificial Sequence
  RPE65 RNA guide
gaaaaagaaacaagagccacca

SEQ ID NO: 3420 - RNA, 22 nt, Artificial Sequence
  RPE65 RNA guide
gaaacaagagccaccagaaagc

SEQ ID NO: 3421 - RNA, 22 nt, Artificial Sequence
  RPE65 RNA guide
gaacuagggcuuucugguggcu

SEQ ID NO: 3422 - RNA, 22 nt, Artificial Sequence
  RPE65 RNA guide
gaagccagaaaaagaaacaaga

SEQ ID NO: 3423 - RNA, 22 nt, Artificial Sequence
  RPE65 RNA guide
gagaagccagaaaaagaaacaa

SEQ ID NO: 3424 - RNA, 22 nt, Artificial Sequence
  RPE65 RNA guide
gagccaccagaaagcccuaguu

SEQ ID NO: 3425 - RNA, 22 nt, Artificial Sequence
  RPE65 RNA guide
gccaccagaaagcccuaguucc

SEQ ID NO: 3426 - RNA, 22 nt, Artificial Sequence
  RPE65 RNA guide
gccagaaaaagaaacaagagcc

SEQ ID NO: 3427 - RNA, 22 nt, Artificial Sequence
  RPE65 RNA guide
gcuuucugguggcucuuguuuc

SEQ ID NO: 3428 - RNA, 22 nt, Artificial Sequence
  RPE65 RNA guide
ggaacuagggcuuucugguggc

SEQ ID NO: 3429 - RNA, 22 nt, Artificial Sequence
  RPE65 RNA guide
ggcucuuguuucuuuuucuggc

SEQ ID NO: 3430 - RNA, 22 nt, Artificial Sequence
  RPE65 RNA guide
ggcuuucugguggcucuuguuu

SEQ ID NO: 3431 - RNA, 22 nt, Artificial Sequence
  RPE65 RNA guide
gggcuuucugguggcucuuguu

SEQ ID NO: 3432 - RNA, 22 nt, Artificial Sequence
  RPE65 RNA guide
gguggcucuuguuucuuuuucu

SEQ ID NO: 3433 - RNA, 22 nt, Artificial Sequence
  RPE65 RNA guide
guaggaacuagggcuuucuggu

SEQ ID NO: 3434 - RNA, 22 nt, Artificial Sequence
  RPE65 RNA guide
guggcucuuguuucuuuuucug

SEQ ID NO: 3435 - RNA, 22 nt, Artificial Sequence
  RPE65 RNA guide
uaggaacuagggcuuucuggug

SEQ ID NO: 3436 - RNA, 22 nt, Artificial Sequence
  RPE65 RNA guide
uagggcuuucugguggcucuug

SEQ ID NO: 3437 - RNA, 22 nt, Artificial Sequence
  RPE65 RNA guide
uaguaggaacuagggcuuucug

SEQ ID NO: 3438 - RNA, 22 nt, Artificial Sequence
  RPE65 RNA guide
ucugguggcucuuguuucuuuu

SEQ ID NO: 3439 - RNA, 22 nt, Artificial Sequence
  RPE65 RNA guide
uggcucuuguuucuuuuucugg

SEQ ID NO: 3440 - RNA, 22 nt, Artificial Sequence
  RPE65 RNA guide
ugguggcucuuguuucuuuuuc

SEQ ID NO: 3441 - RNA, 22 nt, Artificial Sequence
  RPE65 RNA guide
uucugguggcucuuguuucuuu

SEQ ID NO: 3442 - RNA, 22 nt, Artificial Sequence
  RPE65 RNA guide
uuucugguggcucuuguuucuu

SEQ ID NO: 3443 - RNA, 20 nt, Artificial Sequence
  RPE65 RNA guide
aacuauguuccauuaaucuc

SEQ ID NO: 3444 - RNA, 20 nt, Artificial Sequence
  RPE65 RNA guide
aaucuccccuacauuaucau

SEQ ID NO: 3445 - RNA, 20 nt, Artificial Sequence
  RPE65 RNA guide
aauguaggggagauuaaugg

SEQ ID NO: 3446 - RNA, 20 nt, Artificial Sequence
  RPE65 RNA guide
acuauguuccauuaaucucc

SEQ ID NO: 3447 - RNA, 20 nt, Artificial Sequence
  RPE65 RNA guide
agaugauaauguaggggaga

SEQ ID NO: 3448 - RNA, 20 nt, Artificial Sequence
  RPE65 RNA guide
aggggagauuaauggaacau

SEQ ID NO: 3449 - RNA, 20 nt, Artificial Sequence
  RPE65 RNA guide
agucagaugauaauguaggg

SEQ ID NO: 3450 - RNA, 20 nt, Artificial Sequence
  RPE65 RNA guide
auaauguaggggagauuaau

SEQ ID NO: 3451 - RNA, 20 nt, Artificial Sequence
  RPE65 RNA guide
aucuccccuacauuaucauc

SEQ ID NO: 3452 - RNA, 20 nt, Artificial Sequence
  RPE65 RNA guide
augauaauguaggggagauu

SEQ ID NO: 3453 - RNA, 20 nt, Artificial Sequence
  RPE65 RNA guide
auguaggggagauuaaugga

SEQ ID NO: 3454 - RNA, 20 nt, Artificial Sequence
  RPE65 RNA guide
auguuccauuaaucuccccu

SEQ ID NO: 3455 - RNA, 20 nt, Artificial Sequence
  RPE65 RNA guide
auuaaucuccccuacauuau

SEQ ID NO: 3456 - RNA, 20 nt, Artificial Sequence
  RPE65 RNA guide
cagaugauaauguaggggag

SEQ ID NO: 3457 - RNA, 20 nt, Artificial Sequence
  RPE65 RNA guide
cauuaaucuccccuacauua

SEQ ID NO: 3458 - RNA, 20 nt, Artificial Sequence
  RPE65 RNA guide
ccauuaaucuccccuacauu

SEQ ID NO: 3459 - RNA, 20 nt, Artificial Sequence
  RPE65 RNA guide
cuagucagaugauaauguag

SEQ ID NO: 3460 - RNA, 20 nt, Artificial Sequence
  RPE65 RNA guide
cuauguuccauuaaucuccc

SEQ ID NO: 3461 - RNA, 20 nt, Artificial Sequence
  RPE65 RNA guide
cuccccuacauuaucaucug

SEQ ID NO: 3462 - RNA, 20 nt, Artificial Sequence
  RPE65 RNA guide
gagauuaauggaacauaguu

SEQ ID NO: 3463 - RNA, 20 nt, Artificial Sequence
  RPE65 RNA guide
gauaauguaggggagauuaa

SEQ ID NO: 3464 - RNA, 20 nt, Artificial Sequence
  RPE65 RNA guide
gaugauaauguaggggagau

SEQ ID NO: 3465 - RNA, 20 nt, Artificial Sequence
  RPE65 RNA guide
ggagauuaauggaacauagu

SEQ ID NO: 3466 - RNA, 20 nt, Artificial Sequence
  RPE65 RNA guide
gggagauuaauggaacauag

SEQ ID NO: 3467 - RNA, 20 nt, Artificial Sequence
  RPE65 RNA guide
ggggagauuaauggaacaua

SEQ ID NO: 3468 - RNA, 20 nt, Artificial Sequence
  RPE65 RNA guide
guaggggagauuaauggaac

SEQ ID NO: 3469 - RNA, 20 nt, Artificial Sequence
  RPE65 RNA guide
gucagaugauaauguagggg

SEQ ID NO: 3470 - RNA, 20 nt, Artificial Sequence
  RPE65 RNA guide
guuccauuaaucuccccuac

SEQ ID NO: 3471 - RNA, 20 nt, Artificial Sequence
  RPE65 RNA guide
uaaucuccccuacauuauca

SEQ ID NO: 3472 - RNA, 20 nt, Artificial Sequence
  RPE65 RNA guide
uaauguaggggagauuaaug

SEQ ID NO: 3473 - RNA, 20 nt, Artificial Sequence
  RPE65 RNA guide
uaggggagauuaauggaaca

SEQ ID NO: 3474 - RNA, 20 nt, Artificial Sequence
  RPE65 RNA guide
uagucagaugauaauguagg

SEQ ID NO: 3475 - RNA, 20 nt, Artificial Sequence
  RPE65 RNA guide
uauguuccauuaaucucccc

SEQ ID NO: 3476 - RNA, 20 nt, Artificial Sequence
  RPE65 RNA guide
ucagaugauaauguagggga

SEQ ID NO: 3477 - RNA, 20 nt, Artificial Sequence
  RPE65 RNA guide
uccauuaaucuccccuacau

SEQ ID NO: 3478 - RNA, 20 nt, Artificial Sequence
  RPE65 RNA guide
ucuccccuacauuaucaucu

SEQ ID NO: 3479 - RNA, 20 nt, Artificial Sequence
  RPE65 RNA guide
ugauaauguaggggagauua

SEQ ID NO: 3480 - RNA, 20 nt, Artificial Sequence
  RPE65 RNA guide
uguaggggagauuaauggaa

SEQ ID NO: 3481 - RNA, 20 nt, Artificial Sequence
  RPE65 RNA guide
uguuccauuaaucuccccua

SEQ ID NO: 3482 - RNA, 20 nt, Artificial Sequence
  RPE65 RNA guide
uuaaucuccccuacauuauc

SEQ ID NO: 3483 - RNA, 20 nt, Artificial Sequence
  RPE65 RNA guide
uuccauuaaucuccccuaca

SEQ ID NO: 3484 - RNA, 21 nt, Artificial Sequence
  RPE65 RNA guide
aacuauguuccauuaaucucc

SEQ ID NO: 3485 - RNA, 21 nt, Artificial Sequence
  RPE65 RNA guide
aaucuccccuacauuaucauc

SEQ ID NO: 3486 - RNA, 21 nt, Artificial Sequence
  RPE65 RNA guide
aauguaggggagauuaaugga

SEQ ID NO: 3487 - RNA, 21 nt, Artificial Sequence
  RPE65 RNA guide
acuauguuccauuaaucuccc

SEQ ID NO: 3488 - RNA, 21 nt, Artificial Sequence
  RPE65 RNA guide
agaugauaauguaggggagau

SEQ ID NO: 3489 - RNA, 21 nt, Artificial Sequence
  RPE65 RNA guide
aggggagauuaauggaacaua

SEQ ID NO: 3490 - RNA, 21 nt, Artificial Sequence
  RPE65 RNA guide
agucagaugauaauguagggg

SEQ ID NO: 3491 - RNA, 21 nt, Artificial Sequence
  RPE65 RNA guide
auaauguaggggagauuaaug

SEQ ID NO: 3492 - RNA, 21 nt, Artificial Sequence
  RPE65 RNA guide
aucuccccuacauuaucaucu

SEQ ID NO: 3493 - RNA, 21 nt, Artificial Sequence
  RPE65 RNA guide
augauaauguaggggagauua

SEQ ID NO: 3494 - RNA, 21 nt, Artificial Sequence
  RPE65 RNA guide
auguaggggagauuaauggaa

SEQ ID NO: 3495 - RNA, 21 nt, Artificial Sequence
  RPE65 RNA guide
auguuccauuaaucuccccua

SEQ ID NO: 3496 - RNA, 21 nt, Artificial Sequence
  RPE65 RNA guide
auuaaucuccccuacauuauc

SEQ ID NO: 3497 - RNA, 21 nt, Artificial Sequence
  RPE65 RNA guide
cagaugauaauguaggggaga

SEQ ID NO: 3498 - RNA, 21 nt, Artificial Sequence
  RPE65 RNA guide
cauuaaucuccccuacauuau

SEQ ID NO: 3499 - RNA, 21 nt, Artificial Sequence
  RPE65 RNA guide
ccauuaaucuccccuacauua

SEQ ID NO: 3500 - RNA, 21 nt, Artificial Sequence
  RPE65 RNA guide
cuagucagaugauaauguagg

SEQ ID NO: 3501 - RNA, 21 nt, Artificial Sequence
  RPE65 RNA guide
cuauguuccauuaaucucccc

SEQ ID NO: 3502 - RNA, 21 nt, Artificial Sequence
  RPE65 RNA guide
cuccccuacauuaucaucuga

SEQ ID NO: 3503 - RNA, 21 nt, Artificial Sequence
  RPE65 RNA guide
gauaauguaggggagauuaau

SEQ ID NO: 3504 - RNA, 21 nt, Artificial Sequence
  RPE65 RNA guide
gaugauaauguaggggagauu

SEQ ID NO: 3505 - RNA, 21 nt, Artificial Sequence
  RPE65 RNA guide
gcuagucagaugauaauguag

SEQ ID NO: 3506 - RNA, 21 nt, Artificial Sequence
  RPE65 RNA guide
ggagauuaauggaacauaguu

SEQ ID NO: 3507 - RNA, 21 nt, Artificial Sequence
  RPE65 RNA guide
gggagauuaauggaacauagu

SEQ ID NO: 3508 - RNA, 21 nt, Artificial Sequence
  RPE65 RNA guide
ggggagauuaauggaacauag

SEQ ID NO: 3509 - RNA, 21 nt, Artificial Sequence
  RPE65 RNA guide
guaggggagauuaauggaaca

SEQ ID NO: 3510 - RNA, 21 nt, Artificial Sequence
  RPE65 RNA guide
gucagaugauaauguagggga

SEQ ID NO: 3511 - RNA, 21 nt, Artificial Sequence
  RPE65 RNA guide
guuccauuaaucuccccuaca

SEQ ID NO: 3512 - RNA, 21 nt, Artificial Sequence
  RPE65 RNA guide
uaaucuccccuacauuaucau

SEQ ID NO: 3513 - RNA, 21 nt, Artificial Sequence
  RPE65 RNA guide
uaauguaggggagauuaaugg

SEQ ID NO: 3514 - RNA, 21 nt, Artificial Sequence
  RPE65 RNA guide
uaggggagauuaauggaacau

SEQ ID NO: 3515 - RNA, 21 nt, Artificial Sequence
  RPE65 RNA guide
uagucagaugauaauguaggg

SEQ ID NO: 3516 - RNA, 21 nt, Artificial Sequence
  RPE65 RNA guide
uauguuccauuaaucuccccu

SEQ ID NO: 3517 - RNA, 21 nt, Artificial Sequence
  RPE65 RNA guide
ucagaugauaauguaggggag

SEQ ID NO: 3518 - RNA, 21 nt, Artificial Sequence
  RPE65 RNA guide
uccauuaaucuccccuacauu

SEQ ID NO: 3519 - RNA, 21 nt, Artificial Sequence
  RPE65 RNA guide
ucuccccuacauuaucaucug

SEQ ID NO: 3520 - RNA, 21 nt, Artificial Sequence
  RPE65 RNA guide
ugauaauguaggggagauuaa

SEQ ID NO: 3521 - RNA, 21 nt, Artificial Sequence
  RPE65 RNA guide
uguaggggagauuaauggaac

SEQ ID NO: 3522 - RNA, 21 nt, Artificial Sequence
  RPE65 RNA guide
uguuccauuaaucuccccuac

SEQ ID NO: 3523 - RNA, 21 nt, Artificial Sequence
  RPE65 RNA guide
uuaaucuccccuacauuauca

SEQ ID NO: 3524 - RNA, 21 nt, Artificial Sequence
  RPE65 RNA guide
uuccauuaaucuccccuacau

SEQ ID NO: 3525 - RNA, 22 nt, Artificial Sequence
  RPE65 RNA guide
aacuauguuccauuaaucuccc

SEQ ID NO: 3526 - RNA, 22 nt, Artificial Sequence
  RPE65 RNA guide
aaucuccccuacauuaucaucu

SEQ ID NO: 3527 - RNA, 22 nt, Artificial Sequence
  RPE65 RNA guide
aauguaggggagauuaauggaa

SEQ ID NO: 3528 - RNA, 22 nt, Artificial Sequence
  RPE65 RNA guide
acuauguuccauuaaucucccc

SEQ ID NO: 3529 - RNA, 22 nt, Artificial Sequence
  RPE65 RNA guide
agaugauaauguaggggagauu

SEQ ID NO: 3530 - RNA, 22 nt, Artificial Sequence
  RPE65 RNA guide
agcuagucagaugauaauguag

SEQ ID NO: 3531 - RNA, 22 nt, Artificial Sequence
  RPE65 RNA guide
aggggagauuaauggaacauag

SEQ ID NO: 3532 - RNA, 22 nt, Artificial Sequence
  RPE65 RNA guide
agucagaugauaauguagggga

SEQ ID NO: 3533 - RNA, 22 nt, Artificial Sequence
  RPE65 RNA guide
auaauguaggggagauuaaugg

SEQ ID NO: 3534 - RNA, 22 nt, Artificial Sequence
  RPE65 RNA guide
aucuccccuacauuaucaucug

SEQ ID NO: 3535 - RNA, 22 nt, Artificial Sequence
  RPE65 RNA guide
augauaauguaggggagauuaa

SEQ ID NO: 3536 - RNA, 22 nt, Artificial Sequence
  RPE65 RNA guide
auguaggggagauuaauggaac

SEQ ID NO: 3537 - RNA, 22 nt, Artificial Sequence
  RPE65 RNA guide
auguuccauuaaucuccccuac

SEQ ID NO: 3538 - RNA, 22 nt, Artificial Sequence
  RPE65 RNA guide
auuaaucuccccuacauuauca

SEQ ID NO: 3539 - RNA, 22 nt, Artificial Sequence
  RPE65 RNA guide
cagaugauaauguaggggagau

SEQ ID NO: 3540 - RNA, 22 nt, Artificial Sequence
  RPE65 RNA guide
cauuaaucuccccuacauuauc

SEQ ID NO: 3541 - RNA, 22 nt, Artificial Sequence
  RPE65 RNA guide
ccauuaaucuccccuacauuau

SEQ ID NO: 3542 - RNA, 22 nt, Artificial Sequence
  RPE65 RNA guide
cuagucagaugauaauguaggg

SEQ ID NO: 3543 - RNA, 22 nt, Artificial Sequence
  RPE65 RNA guide
cuauguuccauuaaucuccccu

SEQ ID NO: 3544 - RNA, 22 nt, Artificial Sequence
  RPE65 RNA guide
cuccccuacauuaucaucugac

SEQ ID NO: 3545 - RNA, 22 nt, Artificial Sequence
  RPE65 RNA guide
gauaauguaggggagauuaaug

SEQ ID NO: 3546 - RNA, 22 nt, Artificial Sequence
  RPE65 RNA guide
gaugauaauguaggggagauua

SEQ ID NO: 3547 - RNA, 22 nt, Artificial Sequence
  RPE65 RNA guide
gcuagucagaugauaauguagg

SEQ ID NO: 3548 - RNA, 22 nt, Artificial Sequence
  RPE65 RNA guide
ggagauuaauggaacauaguua

SEQ ID NO: 3549 - RNA, 22 nt, Artificial Sequence
  RPE65 RNA guide
gggagauuaauggaacauaguu

SEQ ID NO: 3550 - RNA, 22 nt, Artificial Sequence
  RPE65 RNA guide
ggggagauuaauggaacauagu

SEQ ID NO: 3551 - RNA, 22 nt, Artificial Sequence
  RPE65 RNA guide
guaggggagauuaauggaacau

SEQ ID NO: 3552 - RNA, 22 nt, Artificial Sequence
  RPE65 RNA guide
gucagaugauaauguaggggag

SEQ ID NO: 3553 - RNA, 22 nt, Artificial Sequence
  RPE65 RNA guide
guuccauuaaucuccccuacau

SEQ ID NO: 3554 - RNA, 22 nt, Artificial Sequence
  RPE65 RNA guide
uaacuauguuccauuaaucucc

SEQ ID NO: 3555 - RNA, 22 nt, Artificial Sequence
  RPE65 RNA guide
uaaucuccccuacauuaucauc

SEQ ID NO: 3556 - RNA, 22 nt, Artificial Sequence
  RPE65 RNA guide
uaauguaggggagauuaaugga

SEQ ID NO: 3557 - RNA, 22 nt, Artificial Sequence
  RPE65 RNA guide
uaggggagauuaauggaacaua

SEQ ID NO: 3558 - RNA, 22 nt, Artificial Sequence
  RPE65 RNA guide
uagucagaugauaauguagggg

SEQ ID NO: 3559 - RNA, 22 nt, Artificial Sequence
  RPE65 RNA guide
uauguuccauuaaucuccccua

SEQ ID NO: 3560 - RNA, 22 nt, Artificial Sequence
  RPE65 RNA guide
ucagaugauaauguaggggaga

SEQ ID NO: 3561 - RNA, 22 nt, Artificial Sequence
  RPE65 RNA guide
uccauuaaucuccccuacauua

SEQ ID NO: 3562 - RNA, 22 nt, Artificial Sequence
  RPE65 RNA guide
ucuccccuacauuaucaucuga

SEQ ID NO: 3563 - RNA, 22 nt, Artificial Sequence
  RPE65 RNA guide
ugauaauguaggggagauuaau

SEQ ID NO: 3564 - RNA, 22 nt, Artificial Sequence
  RPE65 RNA guide
uguaggggagauuaauggaaca

SEQ ID NO: 3565 - RNA, 22 nt, Artificial Sequence
  RPE65 RNA guide
uguuccauuaaucuccccuaca

SEQ ID NO: 3566 - RNA, 22 nt, Artificial Sequence
  RPE65 RNA guide
uuaaucuccccuacauuaucau

SEQ ID NO: 3567 - RNA, 22 nt, Artificial Sequence
  RPE65 RNA guide
uuccauuaaucuccccuacauu

SEQ ID NO: 3568 - RNA, 20 nt, Artificial Sequence
  RPE65 RNA guide
aacuauguuccauuaaucgc

SEQ ID NO: 3569 - RNA, 20 nt, Artificial Sequence
  RPE65 RNA guide
aaucgccccuacauuaucau

SEQ ID NO: 3570 - RNA, 20 nt, Artificial Sequence
  RPE65 RNA guide
aauguaggggcgauuaaugg

SEQ ID NO: 3571 - RNA, 20 nt, Artificial Sequence
  RPE65 RNA guide
acuauguuccauuaaucgcc

SEQ ID NO: 3572 - RNA, 20 nt, Artificial Sequence
  RPE65 RNA guide
agaugauaauguaggggcga

SEQ ID NO: 3573 - RNA, 20 nt, Artificial Sequence
  RPE65 RNA guide
aggggcgauuaauggaacau

SEQ ID NO: 3574 - RNA, 20 nt, Artificial Sequence
  RPE65 RNA guide
auaauguaggggcgauuaau

SEQ ID NO: 3575 - RNA, 20 nt, Artificial Sequence
  RPE65 RNA guide
aucgccccuacauuaucauc

SEQ ID NO: 3576 - RNA, 20 nt, Artificial Sequence
  RPE65 RNA guide
augauaauguaggggcgauu

SEQ ID NO: 3577 - RNA, 20 nt, Artificial Sequence
  RPE65 RNA guide
auguaggggcgauuaaugga

SEQ ID NO: 3578 - RNA, 20 nt, Artificial Sequence
  RPE65 RNA guide
auguuccauuaaucgccccu

SEQ ID NO: 3579 - RNA, 20 nt, Artificial Sequence
  RPE65 RNA guide
auuaaucgccccuacauuau

SEQ ID NO: 3580 - RNA, 20 nt, Artificial Sequence
  RPE65 RNA guide
cagaugauaauguaggggcg

SEQ ID NO: 3581 - RNA, 20 nt, Artificial Sequence
  RPE65 RNA guide
cauuaaucgccccuacauua

SEQ ID NO: 3582 - RNA, 20 nt, Artificial Sequence
  RPE65 RNA guide
ccauuaaucgccccuacauu

SEQ ID NO: 3583 - RNA, 20 nt, Artificial Sequence
  RPE65 RNA guide
cgccccuacauuaucaucug

SEQ ID NO: 3584 - RNA, 20 nt, Artificial Sequence
  RPE65 RNA guide
cuauguuccauuaaucgccc

SEQ ID NO: 3585 - RNA, 20 nt, Artificial Sequence
  RPE65 RNA guide
gauaauguaggggcgauuaa

SEQ ID NO: 3586 - RNA, 20 nt, Artificial Sequence
  RPE65 RNA guide
gaugauaauguaggggcgau

SEQ ID NO: 3587 - RNA, 20 nt, Artificial Sequence
  RPE65 RNA guide
gcgauuaauggaacauaguu

SEQ ID NO: 3588 - RNA, 20 nt, Artificial Sequence
  RPE65 RNA guide
ggcgauuaauggaacauagu

SEQ ID NO: 3589 - RNA, 20 nt, Artificial Sequence
  RPE65 RNA guide
gggcgauuaauggaacauag

SEQ ID NO: 3590 - RNA, 20 nt, Artificial Sequence
  RPE65 RNA guide
ggggcgauuaauggaacaua

SEQ ID NO: 3591 - RNA, 20 nt, Artificial Sequence
  RPE65 RNA guide
guaggggcgauuaauggaac

SEQ ID NO: 3592 - RNA, 20 nt, Artificial Sequence
  RPE65 RNA guide
guuccauuaaucgccccuac

SEQ ID NO: 3593 - RNA, 20 nt, Artificial Sequence
  RPE65 RNA guide
uaacuauguuccauuaaucg

SEQ ID NO: 3594 - RNA, 20 nt, Artificial Sequence
  RPE65 RNA guide
uaaucgccccuacauuauca

SEQ ID NO: 3595 - RNA, 20 nt, Artificial Sequence
  RPE65 RNA guide
uaauguaggggcgauuaaug

SEQ ID NO: 3596 - RNA, 20 nt, Artificial Sequence
  RPE65 RNA guide
uaggggcgauuaauggaaca

SEQ ID NO: 3597 - RNA, 20 nt, Artificial Sequence
  RPE65 RNA guide
uauguuccauuaaucgcccc

SEQ ID NO: 3598 - RNA, 20 nt, Artificial Sequence
  RPE65 RNA guide
ucagaugauaauguaggggc

SEQ ID NO: 3599 - RNA, 20 nt, Artificial Sequence
  RPE65 RNA guide
uccauuaaucgccccuacau

SEQ ID NO: 3600 - RNA, 20 nt, Artificial Sequence
  RPE65 RNA guide
ucgccccuacauuaucaucu

SEQ ID NO: 3601 - RNA, 20 nt, Artificial Sequence
  RPE65 RNA guide
ugauaauguaggggcgauua

SEQ ID NO: 3602 - RNA, 20 nt, Artificial Sequence
  RPE65 RNA guide
uguaggggcgauuaauggaa

SEQ ID NO: 3603 - RNA, 20 nt, Artificial Sequence
  RPE65 RNA guide
uguuccauuaaucgccccua

SEQ ID NO: 3604 - RNA, 20 nt, Artificial Sequence
  RPE65 RNA guide
uuaaucgccccuacauuauc

SEQ ID NO: 3605 - RNA, 20 nt, Artificial Sequence
  RPE65 RNA guide
uuccauuaaucgccccuaca

SEQ ID NO: 3606 - RNA, 21 nt, Artificial Sequence
  RPE65 RNA guide
aacuauguuccauuaaucgcc

SEQ ID NO: 3607 - RNA, 21 nt, Artificial Sequence
  RPE65 RNA guide
aaucgccccuacauuaucauc

SEQ ID NO: 3608 - RNA, 21 nt, Artificial Sequence
  RPE65 RNA guide
aauguaggggcgauuaaugga

SEQ ID NO: 3609 - RNA, 21 nt, Artificial Sequence
  RPE65 RNA guide
acuauguuccauuaaucgccc

SEQ ID NO: 3610 - RNA, 21 nt, Artificial Sequence
  RPE65 RNA guide
agaugauaauguaggggcgau

SEQ ID NO: 3611 - RNA, 21 nt, Artificial Sequence
  RPE65 RNA guide
aggggcgauuaauggaacaua

SEQ ID NO: 3612 - RNA, 21 nt, Artificial Sequence
  RPE65 RNA guide
auaauguaggggcgauuaaug

SEQ ID NO: 3613 - RNA, 21 nt, Artificial Sequence
  RPE65 RNA guide
aucgccccuacauuaucaucu

SEQ ID NO: 3614 - RNA, 21 nt, Artificial Sequence
  RPE65 RNA guide
augauaauguaggggcgauua

SEQ ID NO: 3615 - RNA, 21 nt, Artificial Sequence
  RPE65 RNA guide
auguaggggcgauuaauggaa

SEQ ID NO: 3616 - RNA, 21 nt, Artificial Sequence
  RPE65 RNA guide
auguuccauuaaucgccccua

SEQ ID NO: 3617 - RNA, 21 nt, Artificial Sequence
  RPE65 RNA guide
auuaaucgccccuacauuauc

SEQ ID NO: 3618 - RNA, 21 nt, Artificial Sequence
  RPE65 RNA guide
cagaugauaauguaggggcga

SEQ ID NO: 3619 - RNA, 21 nt, Artificial Sequence
  RPE65 RNA guide
cauuaaucgccccuacauuau

SEQ ID NO: 3620 - RNA, 21 nt, Artificial Sequence
  RPE65 RNA guide
ccauuaaucgccccuacauua

SEQ ID NO: 3621 - RNA, 21 nt, Artificial Sequence
  RPE65 RNA guide
cgccccuacauuaucaucuga

SEQ ID NO: 3622 - RNA, 21 nt, Artificial Sequence
  RPE65 RNA guide
cuauguuccauuaaucgcccc

SEQ ID NO: 3623 - RNA, 21 nt, Artificial Sequence
  RPE65 RNA guide
gauaauguaggggcgauuaau

SEQ ID NO: 3624 - RNA, 21 nt, Artificial Sequence
  RPE65 RNA guide
gaugauaauguaggggcgauu

SEQ ID NO: 3625 - RNA, 21 nt, Artificial Sequence
  RPE65 RNA guide
gcgauuaauggaacauaguua

SEQ ID NO: 3626 - RNA, 21 nt, Artificial Sequence
  RPE65 RNA guide
ggcgauuaauggaacauaguu

SEQ ID NO: 3627 - RNA, 21 nt, Artificial Sequence
  RPE65 RNA guide
gggcgauuaauggaacauagu

SEQ ID NO: 3628 - RNA, 21 nt, Artificial Sequence
  RPE65 RNA guide
ggggcgauuaauggaacauag

SEQ ID NO: 3629 - RNA, 21 nt, Artificial Sequence
  RPE65 RNA guide
guaggggcgauuaauggaaca

SEQ ID NO: 3630 - RNA, 21 nt, Artificial Sequence
  RPE65 RNA guide
gucagaugauaauguaggggc

SEQ ID NO: 3631 - RNA, 21 nt, Artificial Sequence
  RPE65 RNA guide
guuccauuaaucgccccuaca

SEQ ID NO: 3632 - RNA, 21 nt, Artificial Sequence
  RPE65 RNA guide
uaacuauguuccauuaaucgc

SEQ ID NO: 3633 - RNA, 21 nt, Artificial Sequence
  RPE65 RNA guide
uaaucgccccuacauuaucau

SEQ ID NO: 3634 - RNA, 21 nt, Artificial Sequence
  RPE65 RNA guide
uaauguaggggcgauuaaugg

SEQ ID NO: 3635 - RNA, 21 nt, Artificial Sequence
  RPE65 RNA guide
uaggggcgauuaauggaacau

SEQ ID NO: 3636 - RNA, 21 nt, Artificial Sequence
  RPE65 RNA guide
uauguuccauuaaucgccccu

SEQ ID NO: 3637 - RNA, 21 nt, Artificial Sequence
  RPE65 RNA guide
ucagaugauaauguaggggcg

SEQ ID NO: 3638 - RNA, 21 nt, Artificial Sequence
  RPE65 RNA guide
uccauuaaucgccccuacauu

SEQ ID NO: 3639 - RNA, 21 nt, Artificial Sequence
  RPE65 RNA guide
ucgccccuacauuaucaucug

SEQ ID NO: 3640 - RNA, 21 nt, Artificial Sequence
  RPE65 RNA guide
ugauaauguaggggcgauuaa

SEQ ID NO: 3641 - RNA, 21 nt, Artificial Sequence
  RPE65 RNA guide
uguaggggcgauuaauggaac

SEQ ID NO: 3642 - RNA, 21 nt, Artificial Sequence
  RPE65 RNA guide
uguuccauuaaucgccccuac

SEQ ID NO: 3643 - RNA, 21 nt, Artificial Sequence
  RPE65 RNA guide
uuaaucgccccuacauuauca

SEQ ID NO: 3644 - RNA, 21 nt, Artificial Sequence
  RPE65 RNA guide
uuccauuaaucgccccuacau

SEQ ID NO: 3645 - RNA, 22 nt, Artificial Sequence
  RPE65 RNA guide
aacuauguuccauuaaucgccc

SEQ ID NO: 3646 - RNA, 22 nt, Artificial Sequence
  RPE65 RNA guide
aaucgccccuacauuaucaucu

SEQ ID NO: 3647 - RNA, 22 nt, Artificial Sequence
  RPE65 RNA guide
aauguaggggcgauuaauggaa

SEQ ID NO: 3648 - RNA, 22 nt, Artificial Sequence
  RPE65 RNA guide
acuauguuccauuaaucgcccc

SEQ ID NO: 3649 - RNA, 22 nt, Artificial Sequence
  RPE65 RNA guide
agaugauaauguaggggcgauu

SEQ ID NO: 3650 - RNA, 22 nt, Artificial Sequence
  RPE65 RNA guide
aggggcgauuaauggaacauag

SEQ ID NO: 3651 - RNA, 22 nt, Artificial Sequence
  RPE65 RNA guide
agucagaugauaauguaggggc

SEQ ID NO: 3652 - RNA, 22 nt, Artificial Sequence
  RPE65 RNA guide
auaacuauguuccauuaaucgc

SEQ ID NO: 3653 - RNA, 22 nt, Artificial Sequence
  RPE65 RNA guide
auaauguaggggcgauuaaugg

SEQ ID NO: 3654 - RNA, 22 nt, Artificial Sequence
  RPE65 RNA guide
aucgccccuacauuaucaucug

SEQ ID NO: 3655 - RNA, 22 nt, Artificial Sequence
  RPE65 RNA guide
augauaauguaggggcgauuaa

SEQ ID NO: 3656 - RNA, 22 nt, Artificial Sequence
  RPE65 RNA guide
auguaggggcgauuaauggaac

SEQ ID NO: 3657 - RNA, 22 nt, Artificial Sequence
  RPE65 RNA guide
auguuccauuaaucgccccuac

SEQ ID NO: 3658 - RNA, 22 nt, Artificial Sequence
  RPE65 RNA guide
auuaaucgccccuacauuauca

SEQ ID NO: 3659 - RNA, 22 nt, Artificial Sequence
  RPE65 RNA guide
cagaugauaauguaggggcgau

SEQ ID NO: 3660 - RNA, 22 nt, Artificial Sequence
  RPE65 RNA guide
cauuaaucgccccuacauuauc

SEQ ID NO: 3661 - RNA, 22 nt, Artificial Sequence
  RPE65 RNA guide
ccauuaaucgccccuacauuau

SEQ ID NO: 3662 - RNA, 22 nt, Artificial Sequence
  RPE65 RNA guide
cgccccuacauuaucaucugac

SEQ ID NO: 3663 - RNA, 22 nt, Artificial Sequence
  RPE65 RNA guide
cuauguuccauuaaucgccccu

SEQ ID NO: 3664 - RNA, 22 nt, Artificial Sequence
  RPE65 RNA guide
gauaauguaggggcgauuaaug

SEQ ID NO: 3665 - RNA, 22 nt, Artificial Sequence
  RPE65 RNA guide
gaugauaauguaggggcgauua

SEQ ID NO: 3666 - RNA, 22 nt, Artificial Sequence
  RPE65 RNA guide
gcgauuaauggaacauaguuau

SEQ ID NO: 3667 - RNA, 22 nt, Artificial Sequence
  RPE65 RNA guide
ggcgauuaauggaacauaguua

SEQ ID NO: 3668 - RNA, 22 nt, Artificial Sequence
  RPE65 RNA guide
gggcgauuaauggaacauaguu

SEQ ID NO: 3669 - RNA, 22 nt, Artificial Sequence
  RPE65 RNA guide
ggggcgauuaauggaacauagu

SEQ ID NO: 3670 - RNA, 22 nt, Artificial Sequence
  RPE65 RNA guide
guaggggcgauuaauggaacau

SEQ ID NO: 3671 - RNA, 22 nt, Artificial Sequence
  RPE65 RNA guide
gucagaugauaauguaggggcg

SEQ ID NO: 3672 - RNA, 22 nt, Artificial Sequence
  RPE65 RNA guide
guuccauuaaucgccccuacau

SEQ ID NO: 3673 - RNA, 22 nt, Artificial Sequence
  RPE65 RNA guide
uaacuauguuccauuaaucgcc

SEQ ID NO: 3674 - RNA, 22 nt, Artificial Sequence
  RPE65 RNA guide
uaaucgccccuacauuaucauc

SEQ ID NO: 3675 - RNA, 22 nt, Artificial Sequence
  RPE65 RNA guide
uaauguaggggcgauuaaugga

SEQ ID NO: 3676 - RNA, 22 nt, Artificial Sequence
  RPE65 RNA guide
uaggggcgauuaauggaacaua

SEQ ID NO: 3677 - RNA, 22 nt, Artificial Sequence
  RPE65 RNA guide
uauguuccauuaaucgccccua

SEQ ID NO: 3678 - RNA, 22 nt, Artificial Sequence
  RPE65 RNA guide
ucagaugauaauguaggggcga

SEQ ID NO: 3679 - RNA, 22 nt, Artificial Sequence
  RPE65 RNA guide
uccauuaaucgccccuacauua

SEQ ID NO: 3680 - RNA, 22 nt, Artificial Sequence
  RPE65 RNA guide
ucgccccuacauuaucaucuga

SEQ ID NO: 3681 - RNA, 22 nt, Artificial Sequence
  RPE65 RNA guide
ugauaauguaggggcgauuaau

SEQ ID NO: 3682 - RNA, 22 nt, Artificial Sequence
  RPE65 RNA guide
uguaggggcgauuaauggaaca

SEQ ID NO: 3683 - RNA, 22 nt, Artificial Sequence
  RPE65 RNA guide
uguuccauuaaucgccccuaca

SEQ ID NO: 3684 - RNA, 22 nt, Artificial Sequence
  RPE65 RNA guide
uuaaucgccccuacauuaucau

SEQ ID NO: 3685 - RNA, 22 nt, Artificial Sequence
  RPE65 RNA guide
uuccauuaaucgccccuacauu

SEQ ID NO: 3686 - RNA, 20 nt, Artificial Sequence
  RPE65 RNA guide
aaagaggagacggauuugau

SEQ ID NO: 3687 - RNA, 20 nt, Artificial Sequence
  RPE65 RNA guide
aacaucaucaaauccgucuc

SEQ ID NO: 3688 - RNA, 20 nt, Artificial Sequence
  RPE65 RNA guide
aagaggagacggauuugaug

SEQ ID NO: 3689 - RNA, 20 nt, Artificial Sequence
  RPE65 RNA guide
acaucaucaaauccgucucc

SEQ ID NO: 3690 - RNA, 20 nt, Artificial Sequence
  RPE65 RNA guide
acggauuugaugauguuaga

SEQ ID NO: 3691 - RNA, 20 nt, Artificial Sequence
  RPE65 RNA guide
agacggauuugaugauguua

SEQ ID NO: 3692 - RNA, 20 nt, Artificial Sequence
  RPE65 RNA guide
agaggagacggauuugauga

SEQ ID NO: 3693 - RNA, 20 nt, Artificial Sequence
  RPE65 RNA guide
aggagacggauuugaugaug

SEQ ID NO: 3694 - RNA, 20 nt, Artificial Sequence
  RPE65 RNA guide
augucuaacaucaucaaauc

SEQ ID NO: 3695 - RNA, 20 nt, Artificial Sequence
  RPE65 RNA guide
caucaucaaauccgucuccu

SEQ ID NO: 3696 - RNA, 20 nt, Artificial Sequence
  RPE65 RNA guide
cggauuugaugauguuagac

SEQ ID NO: 3697 - RNA, 20 nt, Artificial Sequence
  RPE65 RNA guide
cuaacaucaucaaauccguc

SEQ ID NO: 3698 - RNA, 20 nt, Artificial Sequence
  RPE65 RNA guide
gaaagaggagacggauuuga

SEQ ID NO: 3699 - RNA, 20 nt, Artificial Sequence
  RPE65 RNA guide
gacggauuugaugauguuag

SEQ ID NO: 3700 - RNA, 20 nt, Artificial Sequence
  RPE65 RNA guide
gagacggauuugaugauguu

SEQ ID NO: 3701 - RNA, 20 nt, Artificial Sequence
  RPE65 RNA guide
gaggagacggauuugaugau

SEQ ID NO: 3702 - RNA, 20 nt, Artificial Sequence
  RPE65 RNA guide
gauuugaugauguuagacau

SEQ ID NO: 3703 - RNA, 20 nt, Artificial Sequence
  RPE65 RNA guide
ggagacggauuugaugaugu

SEQ ID NO: 3704 - RNA, 20 nt, Artificial Sequence
  RPE65 RNA guide
ggauuugaugauguuagaca

SEQ ID NO: 3705 - RNA, 20 nt, Artificial Sequence
  RPE65 RNA guide
gucuaacaucaucaaauccg

SEQ ID NO: 3706 - RNA, 20 nt, Artificial Sequence
  RPE65 RNA guide
uaacaucaucaaauccgucu

SEQ ID NO: 3707 - RNA, 20 nt, Artificial Sequence
  RPE65 RNA guide
ucuaacaucaucaaauccgu

SEQ ID NO: 3708 - RNA, 20 nt, Artificial Sequence
  RPE65 RNA guide
ugucuaacaucaucaaaucc

SEQ ID NO: 3709 - RNA, 21 nt, Artificial Sequence
  RPE65 RNA guide
aaagaggagacggauuugaug

SEQ ID NO: 3710 - RNA, 21 nt, Artificial Sequence
  RPE65 RNA guide
aacaucaucaaauccgucucc

SEQ ID NO: 3711 - RNA, 21 nt, Artificial Sequence
  RPE65 RNA guide
aagaggagacggauuugauga

SEQ ID NO: 3712 - RNA, 21 nt, Artificial Sequence
  RPE65 RNA guide
acaucaucaaauccgucuccu

SEQ ID NO: 3713 - RNA, 21 nt, Artificial Sequence
  RPE65 RNA guide
acggauuugaugauguuagac

SEQ ID NO: 3714 - RNA, 21 nt, Artificial Sequence
  RPE65 RNA guide
agaaagaggagacggauuuga

SEQ ID NO: 3715 - RNA, 21 nt, Artificial Sequence
  RPE65 RNA guide
agacggauuugaugauguuag

SEQ ID NO: 3716 - RNA, 21 nt, Artificial Sequence
  RPE65 RNA guide
agaggagacggauuugaugau

SEQ ID NO: 3717 - RNA, 21 nt, Artificial Sequence
  RPE65 RNA guide
aggagacggauuugaugaugu

SEQ ID NO: 3718 - RNA, 21 nt, Artificial Sequence
  RPE65 RNA guide
augucuaacaucaucaaaucc

SEQ ID NO: 3719 - RNA, 21 nt, Artificial Sequence
  RPE65 RNA guide
caucaucaaauccgucuccuc

SEQ ID NO: 3720 - RNA, 21 nt, Artificial Sequence
  RPE65 RNA guide
cggauuugaugauguuagaca

SEQ ID NO: 3721 - RNA, 21 nt, Artificial Sequence
  RPE65 RNA guide
cuaacaucaucaaauccgucu

SEQ ID NO: 3722 - RNA, 21 nt, Artificial Sequence
  RPE65 RNA guide
gaaagaggagacggauuugau

SEQ ID NO: 3723 - RNA, 21 nt, Artificial Sequence
  RPE65 RNA guide
gacggauuugaugauguuaga

SEQ ID NO: 3724 - RNA, 21 nt, Artificial Sequence
  RPE65 RNA guide
gagacggauuugaugauguua

SEQ ID NO: 3725 - RNA, 21 nt, Artificial Sequence
  RPE65 RNA guide
gaggagacggauuugaugaug

SEQ ID NO: 3726 - RNA, 21 nt, Artificial Sequence
  RPE65 RNA guide
ggagacggauuugaugauguu

SEQ ID NO: 3727 - RNA, 21 nt, Artificial Sequence
  RPE65 RNA guide
ggauuugaugauguuagacau

SEQ ID NO: 3728 - RNA, 21 nt, Artificial Sequence
  RPE65 RNA guide
gucuaacaucaucaaauccgu

SEQ ID NO: 3729 - RNA, 21 nt, Artificial Sequence
  RPE65 RNA guide
uaacaucaucaaauccgucuc

SEQ ID NO: 3730 - RNA, 21 nt, Artificial Sequence
  RPE65 RNA guide
ucuaacaucaucaaauccguc

SEQ ID NO: 3731 - RNA, 21 nt, Artificial Sequence
  RPE65 RNA guide
ugucuaacaucaucaaauccg

SEQ ID NO: 3732 - RNA, 22 nt, Artificial Sequence
  RPE65 RNA guide
aaagaggagacggauuugauga

SEQ ID NO: 3733 - RNA, 22 nt, Artificial Sequence
  RPE65 RNA guide
aacaucaucaaauccgucuccu

SEQ ID NO: 3734 - RNA, 22 nt, Artificial Sequence
  RPE65 RNA guide
aagaaagaggagacggauuuga

SEQ ID NO: 3735 - RNA, 22 nt, Artificial Sequence
  RPE65 RNA guide
aagaggagacggauuugaugau

SEQ ID NO: 3736 - RNA, 22 nt, Artificial Sequence
  RPE65 RNA guide
aaugucuaacaucaucaaaucc

SEQ ID NO: 3737 - RNA, 22 nt, Artificial Sequence
  RPE65 RNA guide
acaucaucaaauccgucuccuc

SEQ ID NO: 3738 - RNA, 22 nt, Artificial Sequence
  RPE65 RNA guide
acggauuugaugauguuagaca

SEQ ID NO: 3739 - RNA, 22 nt, Artificial Sequence
  RPE65 RNA guide
agaaagaggagacggauuugau

SEQ ID NO: 3740 - RNA, 22 nt, Artificial Sequence
  RPE65 RNA guide
agacggauuugaugauguuaga

SEQ ID NO: 3741 - RNA, 22 nt, Artificial Sequence
  RPE65 RNA guide
agaggagacggauuugaugaug

SEQ ID NO: 3742 - RNA, 22 nt, Artificial Sequence
  RPE65 RNA guide
aggagacggauuugaugauguu

SEQ ID NO: 3743 - RNA, 22 nt, Artificial Sequence
  RPE65 RNA guide
augucuaacaucaucaaauccg

SEQ ID NO: 3744 - RNA, 22 nt, Artificial Sequence
  RPE65 RNA guide
caucaucaaauccgucuccucu

SEQ ID NO: 3745 - RNA, 22 nt, Artificial Sequence
  RPE65 RNA guide
cggauuugaugauguuagacau

SEQ ID NO: 3746 - RNA, 22 nt, Artificial Sequence
  RPE65 RNA guide
cuaacaucaucaaauccgucuc

SEQ ID NO: 3747 - RNA, 22 nt, Artificial Sequence
  RPE65 RNA guide
gaaagaggagacggauuugaug

SEQ ID NO: 3748 - RNA, 22 nt, Artificial Sequence
  RPE65 RNA guide
gacggauuugaugauguuagac

SEQ ID NO: 3749 - RNA, 22 nt, Artificial Sequence
  RPE65 RNA guide
gagacggauuugaugauguuag

SEQ ID NO: 3750 - RNA, 22 nt, Artificial Sequence
  RPE65 RNA guide
gaggagacggauuugaugaugu

SEQ ID NO: 3751 - RNA, 22 nt, Artificial Sequence
  RPE65 RNA guide
ggagacggauuugaugauguua

SEQ ID NO: 3752 - RNA, 22 nt, Artificial Sequence
  RPE65 RNA guide
ggauuugaugauguuagacauu

SEQ ID NO: 3753 - RNA, 22 nt, Artificial Sequence
  RPE65 RNA guide
gucuaacaucaucaaauccguc

SEQ ID NO: 3754 - RNA, 22 nt, Artificial Sequence
  RPE65 RNA guide
uaacaucaucaaauccgucucc

SEQ ID NO: 3755 - RNA, 22 nt, Artificial Sequence
  RPE65 RNA guide
ucuaacaucaucaaauccgucu

SEQ ID NO: 3756 - RNA, 22 nt, Artificial Sequence
  RPE65 RNA guide
ugucuaacaucaucaaauccgu

SEQ ID NO: 3757 - RNA, 20 nt, Artificial Sequence
  RPE65 RNA guide
aaaaaaugucuaacgucauc

SEQ ID NO: 3758 - RNA, 20 nt, Artificial Sequence
  RPE65 RNA guide
aaaaaugucuaacgucauca

SEQ ID NO: 3759 - RNA, 20 nt, Artificial Sequence
  RPE65 RNA guide
aaaaugucuaacgucaucaa

SEQ ID NO: 3760 - RNA, 20 nt, Artificial Sequence
  RPE65 RNA guide
aaaugucuaacgucaucaaa

SEQ ID NO: 3761 - RNA, 20 nt, Artificial Sequence
  RPE65 RNA guide
aacgucaucaaauccgucuc

SEQ ID NO: 3762 - RNA, 20 nt, Artificial Sequence
  RPE65 RNA guide
aaugucuaacgucaucaaau

SEQ ID NO: 3763 - RNA, 20 nt, Artificial Sequence
  RPE65 RNA guide
acggauuugaugacguuaga

SEQ ID NO: 3764 - RNA, 20 nt, Artificial Sequence
  RPE65 RNA guide
acgucaucaaauccgucucc

SEQ ID NO: 3765 - RNA, 20 nt, Artificial Sequence
  RPE65 RNA guide
agacggauuugaugacguua

SEQ ID NO: 3766 - RNA, 20 nt, Artificial Sequence
  RPE65 RNA guide
aggagacggauuugaugacg

SEQ ID NO: 3767 - RNA, 20 nt, Artificial Sequence
  RPE65 RNA guide
augucuaacgucaucaaauc

SEQ ID NO: 3768 - RNA, 20 nt, Artificial Sequence
  RPE65 RNA guide
auuugaugacguuagacauu

SEQ ID NO: 3769 - RNA, 20 nt, Artificial Sequence
  RPE65 RNA guide
cauaaaaaaugucuaacguc

SEQ ID NO: 3770 - RNA, 20 nt, Artificial Sequence
  RPE65 RNA guide
cggauuugaugacguuagac

SEQ ID NO: 3771 - RNA, 20 nt, Artificial Sequence
  RPE65 RNA guide
cgucaucaaauccgucuccu

SEQ ID NO: 3772 - RNA, 20 nt, Artificial Sequence
  RPE65 RNA guide
cuaacgucaucaaauccguc

SEQ ID NO: 3773 - RNA, 20 nt, Artificial Sequence
  RPE65 RNA guide
gacggauuugaugacguuag

SEQ ID NO: 3774 - RNA, 20 nt, Artificial Sequence
  RPE65 RNA guide
gacguuagacauuuuuuaug

SEQ ID NO: 3775 - RNA, 20 nt, Artificial Sequence
  RPE65 RNA guide
gagacggauuugaugacguu

SEQ ID NO: 3776 - RNA, 20 nt, Artificial Sequence
  RPE65 RNA guide
gaggagacggauuugaugac

SEQ ID NO: 3777 - RNA, 20 nt, Artificial Sequence
  RPE65 RNA guide
gaugacguuagacauuuuuu

SEQ ID NO: 3778 - RNA, 20 nt, Artificial Sequence
  RPE65 RNA guide
gauuugaugacguuagacau

SEQ ID NO: 3779 - RNA, 20 nt, Artificial Sequence
  RPE65 RNA guide
ggagacggauuugaugacgu

SEQ ID NO: 3780 - RNA, 20 nt, Artificial Sequence
  RPE65 RNA guide
ggauuugaugacguuagaca

SEQ ID NO: 3781 - RNA, 20 nt, Artificial Sequence
  RPE65 RNA guide
gucuaacgucaucaaauccg

SEQ ID NO: 3782 - RNA, 20 nt, Artificial Sequence
  RPE65 RNA guide
uaacgucaucaaauccgucu

SEQ ID NO: 3783 - RNA, 20 nt, Artificial Sequence
  RPE65 RNA guide
ucuaacgucaucaaauccgu

SEQ ID NO: 3784 - RNA, 20 nt, Artificial Sequence
  RPE65 RNA guide
ugaugacguuagacauuuuu

SEQ ID NO: 3785 - RNA, 20 nt, Artificial Sequence
  RPE65 RNA guide
ugucuaacgucaucaaaucc

SEQ ID NO: 3786 - RNA, 20 nt, Artificial Sequence
  RPE65 RNA guide
uugaugacguuagacauuuu

SEQ ID NO: 3787 - RNA, 20 nt, Artificial Sequence
  RPE65 RNA guide
uuugaugacguuagacauuu

SEQ ID NO: 3788 - RNA, 21 nt, Artificial Sequence
  RPE65 RNA guide
aacgucaucaaauccgucucc

SEQ ID NO: 3789 - RNA, 21 nt, Artificial Sequence
  RPE65 RNA guide
aaugucuaacgucaucaaauc

SEQ ID NO: 3790 - RNA, 21 nt, Artificial Sequence
  RPE65 RNA guide
acggauuugaugacguuagac

SEQ ID NO: 3791 - RNA, 21 nt, Artificial Sequence
  RPE65 RNA guide
acgucaucaaauccgucuccu

SEQ ID NO: 3792 - RNA, 21 nt, Artificial Sequence
  RPE65 RNA guide
agacggauuugaugacguuag

SEQ ID NO: 3793 - RNA, 21 nt, Artificial Sequence
  RPE65 RNA guide
agaggagacggauuugaugac

SEQ ID NO: 3794 - RNA, 21 nt, Artificial Sequence
  RPE65 RNA guide
aggagacggauuugaugacgu

SEQ ID NO: 3795 - RNA, 21 nt, Artificial Sequence
  RPE65 RNA guide
augucuaacgucaucaaaucc

SEQ ID NO: 3796 - RNA, 21 nt, Artificial Sequence
  RPE65 RNA guide
cggauuugaugacguuagaca

SEQ ID NO: 3797 - RNA, 21 nt, Artificial Sequence
  RPE65 RNA guide
cgucaucaaauccgucuccuc

SEQ ID NO: 3798 - RNA, 21 nt, Artificial Sequence
  RPE65 RNA guide
cuaacgucaucaaauccgucu

SEQ ID NO: 3799 - RNA, 21 nt, Artificial Sequence
  RPE65 RNA guide
gacggauuugaugacguuaga

SEQ ID NO: 3800 - RNA, 21 nt, Artificial Sequence
  RPE65 RNA guide
gagacggauuugaugacguua

SEQ ID NO: 3801 - RNA, 21 nt, Artificial Sequence
  RPE65 RNA guide
gaggagacggauuugaugacg

SEQ ID NO: 3802 - RNA, 21 nt, Artificial Sequence
  RPE65 RNA guide
gauuugaugacguuagacauu

SEQ ID NO: 3803 - RNA, 21 nt, Artificial Sequence
  RPE65 RNA guide
ggagacggauuugaugacguu

SEQ ID NO: 3804 - RNA, 21 nt, Artificial Sequence
  RPE65 RNA guide
ggauuugaugacguuagacau

SEQ ID NO: 3805 - RNA, 21 nt, Artificial Sequence
  RPE65 RNA guide
gucuaacgucaucaaauccgu

SEQ ID NO: 3806 - RNA, 21 nt, Artificial Sequence
  RPE65 RNA guide
uaacgucaucaaauccgucuc

SEQ ID NO: 3807 - RNA, 21 nt, Artificial Sequence
  RPE65 RNA guide
ucuaacgucaucaaauccguc

SEQ ID NO: 3808 - RNA, 21 nt, Artificial Sequence
  RPE65 RNA guide
ugucuaacgucaucaaauccg

SEQ ID NO: 3809 - RNA, 22 nt, Artificial Sequence
  RPE65 RNA guide
aaaugucuaacgucaucaaauc

SEQ ID NO: 3810 - RNA, 22 nt, Artificial Sequence
  RPE65 RNA guide
aacgucaucaaauccgucuccu

SEQ ID NO: 3811 - RNA, 22 nt, Artificial Sequence
  RPE65 RNA guide
aagaggagacggauuugaugac

SEQ ID NO: 3812 - RNA, 22 nt, Artificial Sequence
  RPE65 RNA guide
aaugucuaacgucaucaaaucc

SEQ ID NO: 3813 - RNA, 22 nt, Artificial Sequence
  RPE65 RNA guide
acggauuugaugacguuagaca

SEQ ID NO: 3814 - RNA, 22 nt, Artificial Sequence
  RPE65 RNA guide
acgucaucaaauccgucuccuc

SEQ ID NO: 3815 - RNA, 22 nt, Artificial Sequence
  RPE65 RNA guide
agacggauuugaugacguuaga

SEQ ID NO: 3816 - RNA, 22 nt, Artificial Sequence
  RPE65 RNA guide
agaggagacggauuugaugacg

SEQ ID NO: 3817 - RNA, 22 nt, Artificial Sequence
  RPE65 RNA guide
aggagacggauuugaugacguu

SEQ ID NO: 3818 - RNA, 22 nt, Artificial Sequence
  RPE65 RNA guide
augucuaacgucaucaaauccg

SEQ ID NO: 3819 - RNA, 22 nt, Artificial Sequence
  RPE65 RNA guide
cggauuugaugacguuagacau

SEQ ID NO: 3820 - RNA, 22 nt, Artificial Sequence
  RPE65 RNA guide
cgucaucaaauccgucuccucu

SEQ ID NO: 3821 - RNA, 22 nt, Artificial Sequence
  RPE65 RNA guide
cuaacgucaucaaauccgucuc

SEQ ID NO: 3822 - RNA, 22 nt, Artificial Sequence
  RPE65 RNA guide
gacggauuugaugacguuagac

SEQ ID NO: 3823 - RNA, 22 nt, Artificial Sequence
  RPE65 RNA guide
gagacggauuugaugacguuag

SEQ ID NO: 3824 - RNA, 22 nt, Artificial Sequence
  RPE65 RNA guide
gaggagacggauuugaugacgu

SEQ ID NO: 3825 - RNA, 22 nt, Artificial Sequence
  RPE65 RNA guide
gauuugaugacguuagacauuu

SEQ ID NO: 3826 - RNA, 22 nt, Artificial Sequence
  RPE65 RNA guide
ggagacggauuugaugacguua

SEQ ID NO: 3827 - RNA, 22 nt, Artificial Sequence
  RPE65 RNA guide
ggauuugaugacguuagacauu

SEQ ID NO: 3828 - RNA, 22 nt, Artificial Sequence
  RPE65 RNA guide
gucuaacgucaucaaauccguc

SEQ ID NO: 3829 - RNA, 22 nt, Artificial Sequence
  RPE65 RNA guide
uaacgucaucaaauccgucucc

SEQ ID NO: 3830 - RNA, 22 nt, Artificial Sequence
  RPE65 RNA guide
ucuaacgucaucaaauccgucu

SEQ ID NO: 3831 - RNA, 22 nt, Artificial Sequence
  RPE65 RNA guide
ugucuaacgucaucaaauccgu

SEQ ID NO: 3832 - RNA, 20 nt, Artificial Sequence
  RPE65 RNA guide
aacuguaugguuaucacggc

SEQ ID NO: 3833 - RNA, 20 nt, Artificial Sequence
  RPE65 RNA guide
aauauuucuucaggccguga

SEQ ID NO: 3834 - RNA, 20 nt, Artificial Sequence
  RPE65 RNA guide
acggccugaagaaauauuac

SEQ ID NO: 3835 - RNA, 20 nt, Artificial Sequence
  RPE65 RNA guide
acuguaugguuaucacggcc

SEQ ID NO: 3836 - RNA, 20 nt, Artificial Sequence
  RPE65 RNA guide
aggccgugauaaccauacag

SEQ ID NO: 3837 - RNA, 20 nt, Artificial Sequence
  RPE65 RNA guide
auauuucuucaggccgugau

SEQ ID NO: 3838 - RNA, 20 nt, Artificial Sequence
  RPE65 RNA guide
aucacggccugaagaaauau

SEQ ID NO: 3839 - RNA, 20 nt, Artificial Sequence
  RPE65 RNA guide
augguuaucacggccugaag

SEQ ID NO: 3840 - RNA, 20 nt, Artificial Sequence
  RPE65 RNA guide
auuggguaauauuucuucag

SEQ ID NO: 3841 - RNA, 20 nt, Artificial Sequence
  RPE65 RNA guide
auuucuucaggccgugauaa

SEQ ID NO: 3842 - RNA, 20 nt, Artificial Sequence
  RPE65 RNA guide
cacggccugaagaaauauua

SEQ ID NO: 3843 - RNA, 20 nt, Artificial Sequence
  RPE65 RNA guide
caggccgugauaaccauaca

SEQ ID NO: 3844 - RNA, 20 nt, Artificial Sequence
  RPE65 RNA guide
ccgugauaaccauacaguua

SEQ ID NO: 3845 - RNA, 20 nt, Artificial Sequence
  RPE65 RNA guide
cggccugaagaaauauuacc

SEQ ID NO: 3846 - RNA, 20 nt, Artificial Sequence
  RPE65 RNA guide
cuaacuguaugguuaucacg

SEQ ID NO: 3847 - RNA, 20 nt, Artificial Sequence
  RPE65 RNA guide
cuguaugguuaucacggccu

SEQ ID NO: 3848 - RNA, 20 nt, Artificial Sequence
  RPE65 RNA guide
cuucaggccgugauaaccau

SEQ ID NO: 3849 - RNA, 20 nt, Artificial Sequence
  RPE65 RNA guide
gccgugauaaccauacaguu

SEQ ID NO: 3850 - RNA, 20 nt, Artificial Sequence
  RPE65 RNA guide
ggccgugauaaccauacagu

SEQ ID NO: 3851 - RNA, 20 nt, Artificial Sequence
  RPE65 RNA guide
ggguaauauuucuucaggcc

SEQ ID NO: 3852 - RNA, 20 nt, Artificial Sequence
  RPE65 RNA guide
gguaauauuucuucaggccg

SEQ ID NO: 3853 - RNA, 20 nt, Artificial Sequence
  RPE65 RNA guide
gguuaucacggccugaagaa

SEQ ID NO: 3854 - RNA, 20 nt, Artificial Sequence
  RPE65 RNA guide
guaauauuucuucaggccgu

SEQ ID NO: 3855 - RNA, 20 nt, Artificial Sequence
  RPE65 RNA guide
guaugguuaucacggccuga

SEQ ID NO: 3856 - RNA, 20 nt, Artificial Sequence
  RPE65 RNA guide
guuaucacggccugaagaaa

SEQ ID NO: 3857 - RNA, 20 nt, Artificial Sequence
  RPE65 RNA guide
uaacuguaugguuaucacgg

SEQ ID NO: 3858 - RNA, 20 nt, Artificial Sequence
  RPE65 RNA guide
uaauauuucuucaggccgug

SEQ ID NO: 3859 - RNA, 20 nt, Artificial Sequence
  RPE65 RNA guide
uaucacggccugaagaaaua

SEQ ID NO: 3860 - RNA, 20 nt, Artificial Sequence
  RPE65 RNA guide
uaugguuaucacggccugaa

SEQ ID NO: 3861 - RNA, 20 nt, Artificial Sequence
  RPE65 RNA guide
uauuucuucaggccgugaua

SEQ ID NO: 3862 - RNA, 20 nt, Artificial Sequence
  RPE65 RNA guide
ucacggccugaagaaauauu

SEQ ID NO: 3863 - RNA, 20 nt, Artificial Sequence
  RPE65 RNA guide
ucaggccgugauaaccauac

SEQ ID NO: 3864 - RNA, 20 nt, Artificial Sequence
  RPE65 RNA guide
ucuaacuguaugguuaucac

SEQ ID NO: 3865 - RNA, 20 nt, Artificial Sequence
  RPE65 RNA guide
ucuucaggccgugauaacca

SEQ ID NO: 3866 - RNA, 20 nt, Artificial Sequence
  RPE65 RNA guide
uggguaauauuucuucaggc

SEQ ID NO: 3867 - RNA, 20 nt, Artificial Sequence
  RPE65 RNA guide
ugguuaucacggccugaaga

SEQ ID NO: 3868 - RNA, 20 nt, Artificial Sequence
  RPE65 RNA guide
uguaugguuaucacggccug

SEQ ID NO: 3869 - RNA, 20 nt, Artificial Sequence
  RPE65 RNA guide
uuaucacggccugaagaaau

SEQ ID NO: 3870 - RNA, 20 nt, Artificial Sequence
  RPE65 RNA guide
uucaggccgugauaaccaua

SEQ ID NO: 3871 - RNA, 20 nt, Artificial Sequence
  RPE65 RNA guide
uucuaacuguaugguuauca

SEQ ID NO: 3872 - RNA, 20 nt, Artificial Sequence
  RPE65 RNA guide
uucuucaggccgugauaacc

SEQ ID NO: 3873 - RNA, 20 nt, Artificial Sequence
  RPE65 RNA guide
uuggguaauauuucuucagg

SEQ ID NO: 3874 - RNA, 20 nt, Artificial Sequence
  RPE65 RNA guide
uuucuaacuguaugguuauc

SEQ ID NO: 3875 - RNA, 20 nt, Artificial Sequence
  RPE65 RNA guide
uuucuucaggccgugauaac

SEQ ID NO: 3876 - RNA, 21 nt, Artificial Sequence
  RPE65 RNA guide
aacuguaugguuaucacggcc

SEQ ID NO: 3877 - RNA, 21 nt, Artificial Sequence
  RPE65 RNA guide
aauauuucuucaggccgugau

SEQ ID NO: 3878 - RNA, 21 nt, Artificial Sequence
  RPE65 RNA guide
acggccugaagaaauauuacc

SEQ ID NO: 3879 - RNA, 21 nt, Artificial Sequence
  RPE65 RNA guide
acuguaugguuaucacggccu

SEQ ID NO: 3880 - RNA, 21 nt, Artificial Sequence
  RPE65 RNA guide
aggccgugauaaccauacagu

SEQ ID NO: 3881 - RNA, 21 nt, Artificial Sequence
  RPE65 RNA guide
auauuucuucaggccgugaua

SEQ ID NO: 3882 - RNA, 21 nt, Artificial Sequence
  RPE65 RNA guide
aucacggccugaagaaauauu

SEQ ID NO: 3883 - RNA, 21 nt, Artificial Sequence
  RPE65 RNA guide
augguuaucacggccugaaga

SEQ ID NO: 3884 - RNA, 21 nt, Artificial Sequence
  RPE65 RNA guide
auuggguaauauuucuucagg

SEQ ID NO: 3885 - RNA, 21 nt, Artificial Sequence
  RPE65 RNA guide
auuucuucaggccgugauaac

SEQ ID NO: 3886 - RNA, 21 nt, Artificial Sequence
  RPE65 RNA guide
cacggccugaagaaauauuac

SEQ ID NO: 3887 - RNA, 21 nt, Artificial Sequence
  RPE65 RNA guide
caggccgugauaaccauacag

SEQ ID NO: 3888 - RNA, 21 nt, Artificial Sequence
  RPE65 RNA guide
ccgugauaaccauacaguuag

SEQ ID NO: 3889 - RNA, 21 nt, Artificial Sequence
  RPE65 RNA guide
cggccugaagaaauauuaccc

SEQ ID NO: 3890 - RNA, 21 nt, Artificial Sequence
  RPE65 RNA guide
cuaacuguaugguuaucacgg

SEQ ID NO: 3891 - RNA, 21 nt, Artificial Sequence
  RPE65 RNA guide
cuguaugguuaucacggccug

SEQ ID NO: 3892 - RNA, 21 nt, Artificial Sequence
  RPE65 RNA guide
cuucaggccgugauaaccaua

SEQ ID NO: 3893 - RNA, 21 nt, Artificial Sequence
  RPE65 RNA guide
gccgugauaaccauacaguua

SEQ ID NO: 3894 - RNA, 21 nt, Artificial Sequence
  RPE65 RNA guide
ggccgugauaaccauacaguu

SEQ ID NO: 3895 - RNA, 21 nt, Artificial Sequence
  RPE65 RNA guide
ggguaauauuucuucaggccg

SEQ ID NO: 3896 - RNA, 21 nt, Artificial Sequence
  RPE65 RNA guide
gguaauauuucuucaggccgu

SEQ ID NO: 3897 - RNA, 21 nt, Artificial Sequence
  RPE65 RNA guide
gguuaucacggccugaagaaa

SEQ ID NO: 3898 - RNA, 21 nt, Artificial Sequence
  RPE65 RNA guide
guaauauuucuucaggccgug

SEQ ID NO: 3899 - RNA, 21 nt, Artificial Sequence
  RPE65 RNA guide
guaugguuaucacggccugaa

SEQ ID NO: 3900 - RNA, 21 nt, Artificial Sequence
  RPE65 RNA guide
guuaucacggccugaagaaau

SEQ ID NO: 3901 - RNA, 21 nt, Artificial Sequence
  RPE65 RNA guide
uaacuguaugguuaucacggc

SEQ ID NO: 3902 - RNA, 21 nt, Artificial Sequence
  RPE65 RNA guide
uaauauuucuucaggccguga

SEQ ID NO: 3903 - RNA, 21 nt, Artificial Sequence
  RPE65 RNA guide
uaucacggccugaagaaauau

SEQ ID NO: 3904 - RNA, 21 nt, Artificial Sequence
  RPE65 RNA guide
uaugguuaucacggccugaag

SEQ ID NO: 3905 - RNA, 21 nt, Artificial Sequence
  RPE65 RNA guide
uauuucuucaggccgugauaa

SEQ ID NO: 3906 - RNA, 21 nt, Artificial Sequence
  RPE65 RNA guide
ucacggccugaagaaauauua

SEQ ID NO: 3907 - RNA, 21 nt, Artificial Sequence
  RPE65 RNA guide
ucaggccgugauaaccauaca

SEQ ID NO: 3908 - RNA, 21 nt, Artificial Sequence
  RPE65 RNA guide
ucuaacuguaugguuaucacg

SEQ ID NO: 3909 - RNA, 21 nt, Artificial Sequence
  RPE65 RNA guide
ucuucaggccgugauaaccau

SEQ ID NO: 3910 - RNA, 21 nt, Artificial Sequence
  RPE65 RNA guide
uggguaauauuucuucaggcc

SEQ ID NO: 3911 - RNA, 21 nt, Artificial Sequence
  RPE65 RNA guide
ugguuaucacggccugaagaa

SEQ ID NO: 3912 - RNA, 21 nt, Artificial Sequence
  RPE65 RNA guide
uguaugguuaucacggccuga

SEQ ID NO: 3913 - RNA, 21 nt, Artificial Sequence
  RPE65 RNA guide
uuaucacggccugaagaaaua

SEQ ID NO: 3914 - RNA, 21 nt, Artificial Sequence
  RPE65 RNA guide
uucaggccgugauaaccauac

SEQ ID NO: 3915 - RNA, 21 nt, Artificial Sequence
  RPE65 RNA guide
uucuaacuguaugguuaucac

SEQ ID NO: 3916 - RNA, 21 nt, Artificial Sequence
  RPE65 RNA guide
uucuucaggccgugauaacca

SEQ ID NO: 3917 - RNA, 21 nt, Artificial Sequence
  RPE65 RNA guide
uuggguaauauuucuucaggc

SEQ ID NO: 3918 - RNA, 21 nt, Artificial Sequence
  RPE65 RNA guide
uuucuucaggccgugauaacc

SEQ ID NO: 3919 - RNA, 22 nt, Artificial Sequence
  RPE65 RNA guide
aacuguaugguuaucacggccu

SEQ ID NO: 3920 - RNA, 22 nt, Artificial Sequence
  RPE65 RNA guide
aauauuucuucaggccgugaua

SEQ ID NO: 3921 - RNA, 22 nt, Artificial Sequence
  RPE65 RNA guide
aauuggguaauauuucuucagg

SEQ ID NO: 3922 - RNA, 22 nt, Artificial Sequence
  RPE65 RNA guide
acggccugaagaaauauuaccc

SEQ ID NO: 3923 - RNA, 22 nt, Artificial Sequence
  RPE65 RNA guide
acuguaugguuaucacggccug

SEQ ID NO: 3924 - RNA, 22 nt, Artificial Sequence
  RPE65 RNA guide
aggccgugauaaccauacaguu

SEQ ID NO: 3925 - RNA, 22 nt, Artificial Sequence
  RPE65 RNA guide
auauuucuucaggccgugauaa

SEQ ID NO: 3926 - RNA, 22 nt, Artificial Sequence
  RPE65 RNA guide
aucacggccugaagaaauauua

SEQ ID NO: 3927 - RNA, 22 nt, Artificial Sequence
  RPE65 RNA guide
augguuaucacggccugaagaa

SEQ ID NO: 3928 - RNA, 22 nt, Artificial Sequence
  RPE65 RNA guide
auuggguaauauuucuucaggc

SEQ ID NO: 3929 - RNA, 22 nt, Artificial Sequence
  RPE65 RNA guide
auuucuucaggccgugauaacc

SEQ ID NO: 3930 - RNA, 22 nt, Artificial Sequence
  RPE65 RNA guide
cacggccugaagaaauauuacc

SEQ ID NO: 3931 - RNA, 22 nt, Artificial Sequence
  RPE65 RNA guide
caggccgugauaaccauacagu

SEQ ID NO: 3932 - RNA, 22 nt, Artificial Sequence
  RPE65 RNA guide
ccgugauaaccauacaguuaga

SEQ ID NO: 3933 - RNA, 22 nt, Artificial Sequence
  RPE65 RNA guide
cggccugaagaaauauuaccca

SEQ ID NO: 3934 - RNA, 22 nt, Artificial Sequence
  RPE65 RNA guide
cuaacuguaugguuaucacggc

SEQ ID NO: 3935 - RNA, 22 nt, Artificial Sequence
  RPE65 RNA guide
cuguaugguuaucacggccuga

SEQ ID NO: 3936 - RNA, 22 nt, Artificial Sequence
  RPE65 RNA guide
cuucaggccgugauaaccauac

SEQ ID NO: 3937 - RNA, 22 nt, Artificial Sequence
  RPE65 RNA guide
gccgugauaaccauacaguuag

SEQ ID NO: 3938 - RNA, 22 nt, Artificial Sequence
  RPE65 RNA guide
ggccgugauaaccauacaguua

SEQ ID NO: 3939 - RNA, 22 nt, Artificial Sequence
  RPE65 RNA guide
ggguaauauuucuucaggccgu

SEQ ID NO: 3940 - RNA, 22 nt, Artificial Sequence
  RPE65 RNA guide
gguaauauuucuucaggccgug

SEQ ID NO: 3941 - RNA, 22 nt, Artificial Sequence
  RPE65 RNA guide
gguuaucacggccugaagaaau

SEQ ID NO: 3942 - RNA, 22 nt, Artificial Sequence
  RPE65 RNA guide
guaauauuucuucaggccguga

SEQ ID NO: 3943 - RNA, 22 nt, Artificial Sequence
  RPE65 RNA guide
guaugguuaucacggccugaag

SEQ ID NO: 3944 - RNA, 22 nt, Artificial Sequence
  RPE65 RNA guide
guuaucacggccugaagaaaua

SEQ ID NO: 3945 - RNA, 22 nt, Artificial Sequence
  RPE65 RNA guide
uaacuguaugguuaucacggcc

SEQ ID NO: 3946 - RNA, 22 nt, Artificial Sequence
  RPE65 RNA guide
uaauauuucuucaggccgugau

SEQ ID NO: 3947 - RNA, 22 nt, Artificial Sequence
  RPE65 RNA guide
uaucacggccugaagaaauauu

SEQ ID NO: 3948 - RNA, 22 nt, Artificial Sequence
  RPE65 RNA guide
uaugguuaucacggccugaaga

SEQ ID NO: 3949 - RNA, 22 nt, Artificial Sequence
  RPE65 RNA guide
uauuucuucaggccgugauaac

SEQ ID NO: 3950 - RNA, 22 nt, Artificial Sequence
  RPE65 RNA guide
ucacggccugaagaaauauuac

SEQ ID NO: 3951 - RNA, 22 nt, Artificial Sequence
  RPE65 RNA guide
ucaggccgugauaaccauacag

SEQ ID NO: 3952 - RNA, 22 nt, Artificial Sequence
  RPE65 RNA guide
ucuaacuguaugguuaucacgg

SEQ ID NO: 3953 - RNA, 22 nt, Artificial Sequence
  RPE65 RNA guide
ucuucaggccgugauaaccaua

SEQ ID NO: 3954 - RNA, 22 nt, Artificial Sequence
  RPE65 RNA guide
uggguaauauuucuucaggccg

SEQ ID NO: 3955 - RNA, 22 nt, Artificial Sequence
  RPE65 RNA guide
ugguuaucacggccugaagaaa

SEQ ID NO: 3956 - RNA, 22 nt, Artificial Sequence
  RPE65 RNA guide
uguaugguuaucacggccugaa

SEQ ID NO: 3957 - RNA, 22 nt, Artificial Sequence
  RPE65 RNA guide
uuaucacggccugaagaaauau

SEQ ID NO: 3958 - RNA, 22 nt, Artificial Sequence
  RPE65 RNA guide
uucaggccgugauaaccauaca

SEQ ID NO: 3959 - RNA, 22 nt, Artificial Sequence
  RPE65 RNA guide
uucuaacuguaugguuaucacg

SEQ ID NO: 3960 - RNA, 22 nt, Artificial Sequence
  RPE65 RNA guide
uucuucaggccgugauaaccau

SEQ ID NO: 3961 - RNA, 22 nt, Artificial Sequence
  RPE65 RNA guide
uuggguaauauuucuucaggcc

SEQ ID NO: 3962 - RNA, 22 nt, Artificial Sequence
  RPE65 RNA guide
uuucuaacuguaugguuaucac

SEQ ID NO: 3963 - RNA, 22 nt, Artificial Sequence
  RPE65 RNA guide
uuucuucaggccgugauaacca

SEQ ID NO: 3964 - RNA, 20 nt, Artificial Sequence
  RPE65 RNA guide
aacuguaugguuaucacugc

SEQ ID NO: 3965 - RNA, 20 nt, Artificial Sequence
  RPE65 RNA guide
aauauuucuucaggcaguga

SEQ ID NO: 3966 - RNA, 20 nt, Artificial Sequence
  RPE65 RNA guide
acugccugaagaaauauuac

SEQ ID NO: 3967 - RNA, 20 nt, Artificial Sequence
  RPE65 RNA guide
acuguaugguuaucacugcc

SEQ ID NO: 3968 - RNA, 20 nt, Artificial Sequence
  RPE65 RNA guide
aggcagugauaaccauacag

SEQ ID NO: 3969 - RNA, 20 nt, Artificial Sequence
  RPE65 RNA guide
auauuucuucaggcagugau

SEQ ID NO: 3970 - RNA, 20 nt, Artificial Sequence
  RPE65 RNA guide
aucacugccugaagaaauau

SEQ ID NO: 3971 - RNA, 20 nt, Artificial Sequence
  RPE65 RNA guide
augguuaucacugccugaag

SEQ ID NO: 3972 - RNA, 20 nt, Artificial Sequence
  RPE65 RNA guide
auuucuucaggcagugauaa

SEQ ID NO: 3973 - RNA, 20 nt, Artificial Sequence
  RPE65 RNA guide
cacugccugaagaaauauua

SEQ ID NO: 3974 - RNA, 20 nt, Artificial Sequence
  RPE65 RNA guide
caggcagugauaaccauaca

SEQ ID NO: 3975 - RNA, 20 nt, Artificial Sequence
  RPE65 RNA guide
cagugauaaccauacaguua

SEQ ID NO: 3976 - RNA, 20 nt, Artificial Sequence
  RPE65 RNA guide
cuaacuguaugguuaucacu

SEQ ID NO: 3977 - RNA, 20 nt, Artificial Sequence
  RPE65 RNA guide
cugccugaagaaauauuacc

SEQ ID NO: 3978 - RNA, 20 nt, Artificial Sequence
  RPE65 RNA guide
cuguaugguuaucacugccu

SEQ ID NO: 3979 - RNA, 20 nt, Artificial Sequence
  RPE65 RNA guide
cuucaggcagugauaaccau

SEQ ID NO: 3980 - RNA, 20 nt, Artificial Sequence
  RPE65 RNA guide
gcagugauaaccauacaguu

SEQ ID NO: 3981 - RNA, 20 nt, Artificial Sequence
  RPE65 RNA guide
ggcagugauaaccauacagu

SEQ ID NO: 3982 - RNA, 20 nt, Artificial Sequence
  RPE65 RNA guide
ggguaauauuucuucaggca

SEQ ID NO: 3983 - RNA, 20 nt, Artificial Sequence
  RPE65 RNA guide
gguaauauuucuucaggcag

SEQ ID NO: 3984 - RNA, 20 nt, Artificial Sequence
  RPE65 RNA guide
gguuaucacugccugaagaa

SEQ ID NO: 3985 - RNA, 20 nt, Artificial Sequence
  RPE65 RNA guide
guaauauuucuucaggcagu

SEQ ID NO: 3986 - RNA, 20 nt, Artificial Sequence
  RPE65 RNA guide
guaugguuaucacugccuga

SEQ ID NO: 3987 - RNA, 20 nt, Artificial Sequence
  RPE65 RNA guide
guuaucacugccugaagaaa

SEQ ID NO: 3988 - RNA, 20 nt, Artificial Sequence
  RPE65 RNA guide
uaacuguaugguuaucacug

SEQ ID NO: 3989 - RNA, 20 nt, Artificial Sequence
  RPE65 RNA guide
uaauauuucuucaggcagug

SEQ ID NO: 3990 - RNA, 20 nt, Artificial Sequence
  RPE65 RNA guide
uaucacugccugaagaaaua

SEQ ID NO: 3991 - RNA, 20 nt, Artificial Sequence
  RPE65 RNA guide
uaugguuaucacugccugaa

SEQ ID NO: 3992 - RNA, 20 nt, Artificial Sequence
  RPE65 RNA guide
uauuucuucaggcagugaua

SEQ ID NO: 3993 - RNA, 20 nt, Artificial Sequence
  RPE65 RNA guide
ucacugccugaagaaauauu

SEQ ID NO: 3994 - RNA, 20 nt, Artificial Sequence
  RPE65 RNA guide
ucaggcagugauaaccauac

SEQ ID NO: 3995 - RNA, 20 nt, Artificial Sequence
  RPE65 RNA guide
ucuucaggcagugauaacca

SEQ ID NO: 3996 - RNA, 20 nt, Artificial Sequence
  RPE65 RNA guide
ugguuaucacugccugaaga

SEQ ID NO: 3997 - RNA, 20 nt, Artificial Sequence
  RPE65 RNA guide
uguaugguuaucacugccug

SEQ ID NO: 3998 - RNA, 20 nt, Artificial Sequence
  RPE65 RNA guide
uuaucacugccugaagaaau

SEQ ID NO: 3999 - RNA, 20 nt, Artificial Sequence
  RPE65 RNA guide
uucaggcagugauaaccaua

SEQ ID NO: 4000 - RNA, 20 nt, Artificial Sequence
  RPE65 RNA guide
uucuucaggcagugauaacc

SEQ ID NO: 4001 - RNA, 20 nt, Artificial Sequence
  RPE65 RNA guide
uuucuucaggcagugauaac

SEQ ID NO: 4002 - RNA, 21 nt, Artificial Sequence
  RPE65 RNA guide
aacuguaugguuaucacugcc

SEQ ID NO: 4003 - RNA, 21 nt, Artificial Sequence
  RPE65 RNA guide
aauauuucuucaggcagugau

SEQ ID NO: 4004 - RNA, 21 nt, Artificial Sequence
  RPE65 RNA guide
acugccugaagaaauauuacc

SEQ ID NO: 4005 - RNA, 21 nt, Artificial Sequence
  RPE65 RNA guide
acuguaugguuaucacugccu

SEQ ID NO: 4006 - RNA, 21 nt, Artificial Sequence
  RPE65 RNA guide
aggcagugauaaccauacagu

SEQ ID NO: 4007 - RNA, 21 nt, Artificial Sequence
  RPE65 RNA guide
auauuucuucaggcagugaua

SEQ ID NO: 4008 - RNA, 21 nt, Artificial Sequence
  RPE65 RNA guide
aucacugccugaagaaauauu

SEQ ID NO: 4009 - RNA, 21 nt, Artificial Sequence
  RPE65 RNA guide
augguuaucacugccugaaga

SEQ ID NO: 4010 - RNA, 21 nt, Artificial Sequence
  RPE65 RNA guide
auuucuucaggcagugauaac

SEQ ID NO: 4011 - RNA, 21 nt, Artificial Sequence
  RPE65 RNA guide
cacugccugaagaaauauuac

SEQ ID NO: 4012 - RNA, 21 nt, Artificial Sequence
  RPE65 RNA guide
caggcagugauaaccauacag

SEQ ID NO: 4013 - RNA, 21 nt, Artificial Sequence
  RPE65 RNA guide
cagugauaaccauacaguuag

SEQ ID NO: 4014 - RNA, 21 nt, Artificial Sequence
  RPE65 RNA guide
cuaacuguaugguuaucacug

SEQ ID NO: 4015 - RNA, 21 nt, Artificial Sequence
  RPE65 RNA guide
cugccugaagaaauauuaccc

SEQ ID NO: 4016 - RNA, 21 nt, Artificial Sequence
  RPE65 RNA guide
cuguaugguuaucacugccug

SEQ ID NO: 4017 - RNA, 21 nt, Artificial Sequence
  RPE65 RNA guide
cuucaggcagugauaaccaua

SEQ ID NO: 4018 - RNA, 21 nt, Artificial Sequence
  RPE65 RNA guide
gcagugauaaccauacaguua

SEQ ID NO: 4019 - RNA, 21 nt, Artificial Sequence
  RPE65 RNA guide
ggcagugauaaccauacaguu

SEQ ID NO: 4020 - RNA, 21 nt, Artificial Sequence
  RPE65 RNA guide
ggguaauauuucuucaggcag

SEQ ID NO: 4021 - RNA, 21 nt, Artificial Sequence
  RPE65 RNA guide
gguaauauuucuucaggcagu

SEQ ID NO: 4022 - RNA, 21 nt, Artificial Sequence
  RPE65 RNA guide
gguuaucacugccugaagaaa

SEQ ID NO: 4023 - RNA, 21 nt, Artificial Sequence
  RPE65 RNA guide
guaauauuucuucaggcagug

SEQ ID NO: 4024 - RNA, 21 nt, Artificial Sequence
  RPE65 RNA guide
guaugguuaucacugccugaa

SEQ ID NO: 4025 - RNA, 21 nt, Artificial Sequence
  RPE65 RNA guide
guuaucacugccugaagaaau

SEQ ID NO: 4026 - RNA, 21 nt, Artificial Sequence
  RPE65 RNA guide
uaacuguaugguuaucacugc

SEQ ID NO: 4027 - RNA, 21 nt, Artificial Sequence
  RPE65 RNA guide
uaauauuucuucaggcaguga

SEQ ID NO: 4028 - RNA, 21 nt, Artificial Sequence
  RPE65 RNA guide
uaucacugccugaagaaauau

SEQ ID NO: 4029 - RNA, 21 nt, Artificial Sequence
  RPE65 RNA guide
uaugguuaucacugccugaag

SEQ ID NO: 4030 - RNA, 21 nt, Artificial Sequence
  RPE65 RNA guide
uauuucuucaggcagugauaa

SEQ ID NO: 4031 - RNA, 21 nt, Artificial Sequence
  RPE65 RNA guide
ucacugccugaagaaauauua

SEQ ID NO: 4032 - RNA, 21 nt, Artificial Sequence
  RPE65 RNA guide
ucaggcagugauaaccauaca

SEQ ID NO: 4033 - RNA, 21 nt, Artificial Sequence
  RPE65 RNA guide
ucuaacuguaugguuaucacu

SEQ ID NO: 4034 - RNA, 21 nt, Artificial Sequence
  RPE65 RNA guide
ucuucaggcagugauaaccau

SEQ ID NO: 4035 - RNA, 21 nt, Artificial Sequence
  RPE65 RNA guide
uggguaauauuucuucaggca

SEQ ID NO: 4036 - RNA, 21 nt, Artificial Sequence
  RPE65 RNA guide
ugguuaucacugccugaagaa

SEQ ID NO: 4037 - RNA, 21 nt, Artificial Sequence
  RPE65 RNA guide
uguaugguuaucacugccuga

SEQ ID NO: 4038 - RNA, 21 nt, Artificial Sequence
  RPE65 RNA guide
uuaucacugccugaagaaaua

SEQ ID NO: 4039 - RNA, 21 nt, Artificial Sequence
  RPE65 RNA guide
uucaggcagugauaaccauac

SEQ ID NO: 4040 - RNA, 21 nt, Artificial Sequence
  RPE65 RNA guide
uucuucaggcagugauaacca

SEQ ID NO: 4041 - RNA, 21 nt, Artificial Sequence
  RPE65 RNA guide
uuucuucaggcagugauaacc

SEQ ID NO: 4042 - RNA, 22 nt, Artificial Sequence
  RPE65 RNA guide
aacuguaugguuaucacugccu

SEQ ID NO: 4043 - RNA, 22 nt, Artificial Sequence
  RPE65 RNA guide
aauauuucuucaggcagugaua

SEQ ID NO: 4044 - RNA, 22 nt, Artificial Sequence
  RPE65 RNA guide
acugccugaagaaauauuaccc

SEQ ID NO: 4045 - RNA, 22 nt, Artificial Sequence
  RPE65 RNA guide
acuguaugguuaucacugccug

SEQ ID NO: 4046 - RNA, 22 nt, Artificial Sequence
  RPE65 RNA guide
aggcagugauaaccauacaguu

SEQ ID NO: 4047 - RNA, 22 nt, Artificial Sequence
  RPE65 RNA guide
auauuucuucaggcagugauaa

SEQ ID NO: 4048 - RNA, 22 nt, Artificial Sequence
  RPE65 RNA guide
aucacugccugaagaaauauua

SEQ ID NO: 4049 - RNA, 22 nt, Artificial Sequence
  RPE65 RNA guide
augguuaucacugccugaagaa

SEQ ID NO: 4050 - RNA, 22 nt, Artificial Sequence
  RPE65 RNA guide
auuucuucaggcagugauaacc

SEQ ID NO: 4051 - RNA, 22 nt, Artificial Sequence
  RPE65 RNA guide
cacugccugaagaaauauuacc

SEQ ID NO: 4052 - RNA, 22 nt, Artificial Sequence
  RPE65 RNA guide
caggcagugauaaccauacagu

SEQ ID NO: 4053 - RNA, 22 nt, Artificial Sequence
  RPE65 RNA guide
cagugauaaccauacaguuaga

SEQ ID NO: 4054 - RNA, 22 nt, Artificial Sequence
  RPE65 RNA guide
cuaacuguaugguuaucacugc

SEQ ID NO: 4055 - RNA, 22 nt, Artificial Sequence
  RPE65 RNA guide
cugccugaagaaauauuaccca

SEQ ID NO: 4056 - RNA, 22 nt, Artificial Sequence
  RPE65 RNA guide
cuguaugguuaucacugccuga

SEQ ID NO: 4057 - RNA, 22 nt, Artificial Sequence
  RPE65 RNA guide
cuucaggcagugauaaccauac

SEQ ID NO: 4058 - RNA, 22 nt, Artificial Sequence
  RPE65 RNA guide
gcagugauaaccauacaguuag

SEQ ID NO: 4059 - RNA, 22 nt, Artificial Sequence
  RPE65 RNA guide
ggcagugauaaccauacaguua

SEQ ID NO: 4060 - RNA, 22 nt, Artificial Sequence
  RPE65 RNA guide
ggguaauauuucuucaggcagu

SEQ ID NO: 4061 - RNA, 22 nt, Artificial Sequence
  RPE65 RNA guide
gguaauauuucuucaggcagug

SEQ ID NO: 4062 - RNA, 22 nt, Artificial Sequence
  RPE65 RNA guide
gguuaucacugccugaagaaau

SEQ ID NO: 4063 - RNA, 22 nt, Artificial Sequence
  RPE65 RNA guide
guaauauuucuucaggcaguga

SEQ ID NO: 4064 - RNA, 22 nt, Artificial Sequence
  RPE65 RNA guide
guaugguuaucacugccugaag

SEQ ID NO: 4065 - RNA, 22 nt, Artificial Sequence
  RPE65 RNA guide
guuaucacugccugaagaaaua

SEQ ID NO: 4066 - RNA, 22 nt, Artificial Sequence
  RPE65 RNA guide
uaacuguaugguuaucacugcc

SEQ ID NO: 4067 - RNA, 22 nt, Artificial Sequence
  RPE65 RNA guide
uaauauuucuucaggcagugau

SEQ ID NO: 4068 - RNA, 22 nt, Artificial Sequence
  RPE65 RNA guide
uaucacugccugaagaaauauu

SEQ ID NO: 4069 - RNA, 22 nt, Artificial Sequence
  RPE65 RNA guide
uaugguuaucacugccugaaga

SEQ ID NO: 4070 - RNA, 22 nt, Artificial Sequence
  RPE65 RNA guide
uauuucuucaggcagugauaac

SEQ ID NO: 4071 - RNA, 22 nt, Artificial Sequence
  RPE65 RNA guide
ucacugccugaagaaauauuac

SEQ ID NO: 4072 - RNA, 22 nt, Artificial Sequence
  RPE65 RNA guide
ucaggcagugauaaccauacag

SEQ ID NO: 4073 - RNA, 22 nt, Artificial Sequence
  RPE65 RNA guide
ucuaacuguaugguuaucacug

SEQ ID NO: 4074 - RNA, 22 nt, Artificial Sequence
  RPE65 RNA guide
ucuucaggcagugauaaccaua

SEQ ID NO: 4075 - RNA, 22 nt, Artificial Sequence
  RPE65 RNA guide
uggguaauauuucuucaggcag

SEQ ID NO: 4076 - RNA, 22 nt, Artificial Sequence
  RPE65 RNA guide
ugguuaucacugccugaagaaa

SEQ ID NO: 4077 - RNA, 22 nt, Artificial Sequence
  RPE65 RNA guide
uguaugguuaucacugccugaa

SEQ ID NO: 4078 - RNA, 22 nt, Artificial Sequence
  RPE65 RNA guide
uuaucacugccugaagaaauau

SEQ ID NO: 4079 - RNA, 22 nt, Artificial Sequence
  RPE65 RNA guide
uucaggcagugauaaccauaca

SEQ ID NO: 4080 - RNA, 22 nt, Artificial Sequence
  RPE65 RNA guide
uucuaacuguaugguuaucacu

SEQ ID NO: 4081 - RNA, 22 nt, Artificial Sequence
  RPE65 RNA guide
uucuucaggcagugauaaccau

SEQ ID NO: 4082 - RNA, 22 nt, Artificial Sequence
  RPE65 RNA guide
uuggguaauauuucuucaggca

SEQ ID NO: 4083 - RNA, 22 nt, Artificial Sequence
  RPE65 RNA guide
uuucuucaggcagugauaacca

SEQ ID NO: 4084 - RNA, 20 nt, Artificial Sequence
  RPE65 RNA guide
aaucacaaucaucuuuaagg

SEQ ID NO: 4085 - RNA, 20 nt, Artificial Sequence
  RPE65 RNA guide
acuucgcuaauaaugguaaa

SEQ ID NO: 4086 - RNA, 20 nt, Artificial Sequence
  RPE65 RNA guide
agaugauugugauuuuuacc

SEQ ID NO: 4087 - RNA, 20 nt, Artificial Sequence
  RPE65 RNA guide
aucacaaucaucuuuaagga

SEQ ID NO: 4088 - RNA, 20 nt, Artificial Sequence
  RPE65 RNA guide
ccuuaaagaugauugugauu

SEQ ID NO: 4089 - RNA, 20 nt, Artificial Sequence
  RPE65 RNA guide
cgcuaauaaugguaaaaauc

SEQ ID NO: 4090 - RNA, 20 nt, Artificial Sequence
  RPE65 RNA guide
cuucgcuaauaaugguaaaa

SEQ ID NO: 4091 - RNA, 20 nt, Artificial Sequence
  RPE65 RNA guide
gaugauugugauuuuuacca

SEQ ID NO: 4092 - RNA, 20 nt, Artificial Sequence
  RPE65 RNA guide
gguaaaaaucacaaucaucu

SEQ ID NO: 4093 - RNA, 20 nt, Artificial Sequence
  RPE65 RNA guide
ucacaaucaucuuuaaggaa

SEQ ID NO: 4094 - RNA, 20 nt, Artificial Sequence
  RPE65 RNA guide
uccuuaaagaugauugugau

SEQ ID NO: 4095 - RNA, 20 nt, Artificial Sequence
  RPE65 RNA guide
ugguaaaaaucacaaucauc

SEQ ID NO: 4096 - RNA, 20 nt, Artificial Sequence
  RPE65 RNA guide
uuccuuaaagaugauuguga

SEQ ID NO: 4097 - RNA, 20 nt, Artificial Sequence
  RPE65 RNA guide
uuuccuuaaagaugauugug

SEQ ID NO: 4098 - RNA, 22 nt, Artificial Sequence
  RPE65 RNA guide
cgcuaauaaugguaaaaaucac

SEQ ID NO: 4099 - RNA, 22 nt, Artificial Sequence
  RPE65 RNA guide
gugauuuuuaccauuauuagcg

SEQ ID NO: 4100 - RNA, 20 nt, Artificial Sequence
  RPE65 RNA guide
aaacucuuacuucgcuaaua

SEQ ID NO: 4101 - RNA, 20 nt, Artificial Sequence
  RPE65 RNA guide
aacucuuacuucgcuaauaa

SEQ ID NO: 4102 - RNA, 20 nt, Artificial Sequence
  RPE65 RNA guide
accauuauuagcgaaguaag

SEQ ID NO: 4103 - RNA, 20 nt, Artificial Sequence
  RPE65 RNA guide
acucuuacuucgcuaauaau

SEQ ID NO: 4104 - RNA, 20 nt, Artificial Sequence
  RPE65 RNA guide
agcgaaguaagaguuuacug

SEQ ID NO: 4105 - RNA, 20 nt, Artificial Sequence
  RPE65 RNA guide
aguaaacucuuacuucgcua

SEQ ID NO: 4106 - RNA, 20 nt, Artificial Sequence
  RPE65 RNA guide
auuagcgaaguaagaguuua

SEQ ID NO: 4107 - RNA, 20 nt, Artificial Sequence
  RPE65 RNA guide
auuauuagcgaaguaagagu

SEQ ID NO: 4108 - RNA, 20 nt, Artificial Sequence
  RPE65 RNA guide
caguaaacucuuacuucgcu

SEQ ID NO: 4109 - RNA, 20 nt, Artificial Sequence
  RPE65 RNA guide
cauuauuagcgaaguaagag

SEQ ID NO: 4110 - RNA, 20 nt, Artificial Sequence
  RPE65 RNA guide
ccauuauuagcgaaguaaga

SEQ ID NO: 4111 - RNA, 20 nt, Artificial Sequence
  RPE65 RNA guide
cgaaguaagaguuuacugaa

SEQ ID NO: 4112 - RNA, 20 nt, Artificial Sequence
  RPE65 RNA guide
cucuuacuucgcuaauaaug

SEQ ID NO: 4113 - RNA, 20 nt, Artificial Sequence
  RPE65 RNA guide
cuuacuucgcuaauaauggu

SEQ ID NO: 4114 - RNA, 20 nt, Artificial Sequence
  RPE65 RNA guide
gauuuuuaccauuauuagcg

SEQ ID NO: 4115 - RNA, 20 nt, Artificial Sequence
  RPE65 RNA guide
gcgaaguaagaguuuacuga

SEQ ID NO: 4116 - RNA, 20 nt, Artificial Sequence
  RPE65 RNA guide
guaaacucuuacuucgcuaa

SEQ ID NO: 4117 - RNA, 20 nt, Artificial Sequence
  RPE65 RNA guide
uaaacucuuacuucgcuaau

SEQ ID NO: 4118 - RNA, 20 nt, Artificial Sequence
  RPE65 RNA guide
uaccauuauuagcgaaguaa

SEQ ID NO: 4119 - RNA, 20 nt, Artificial Sequence
  RPE65 RNA guide
uacuucgcuaauaaugguaa

SEQ ID NO: 4120 - RNA, 20 nt, Artificial Sequence
  RPE65 RNA guide
uagcgaaguaagaguuuacu

SEQ ID NO: 4121 - RNA, 20 nt, Artificial Sequence
  RPE65 RNA guide
uauuagcgaaguaagaguuu

SEQ ID NO: 4122 - RNA, 20 nt, Artificial Sequence
  RPE65 RNA guide
ucaguaaacucuuacuucgc

SEQ ID NO: 4123 - RNA, 20 nt, Artificial Sequence
  RPE65 RNA guide
ucuuacuucgcuaauaaugg

SEQ ID NO: 4124 - RNA, 20 nt, Artificial Sequence
  RPE65 RNA guide
uuaccauuauuagcgaagua

SEQ ID NO: 4125 - RNA, 20 nt, Artificial Sequence
  RPE65 RNA guide
uuacuucgcuaauaauggua

SEQ ID NO: 4126 - RNA, 20 nt, Artificial Sequence
  RPE65 RNA guide
uuagcgaaguaagaguuuac

SEQ ID NO: 4127 - RNA, 20 nt, Artificial Sequence
  RPE65 RNA guide
uuauuagcgaaguaagaguu

SEQ ID NO: 4128 - RNA, 20 nt, Artificial Sequence
  RPE65 RNA guide
uucaguaaacucuuacuucg

SEQ ID NO: 4129 - RNA, 20 nt, Artificial Sequence
  RPE65 RNA guide
uuuaccauuauuagcgaagu

SEQ ID NO: 4130 - RNA, 20 nt, Artificial Sequence
  RPE65 RNA guide
uuucaguaaacucuuacuuc

SEQ ID NO: 4131 - RNA, 20 nt, Artificial Sequence
  RPE65 RNA guide
uuuuaccauuauuagcgaag

SEQ ID NO: 4132 - RNA, 21 nt, Artificial Sequence
  RPE65 RNA guide
accauuauuagcgaaguaaga

SEQ ID NO: 4133 - RNA, 21 nt, Artificial Sequence
  RPE65 RNA guide
acucuuacuucgcuaauaaug

SEQ ID NO: 4134 - RNA, 21 nt, Artificial Sequence
  RPE65 RNA guide
agcgaaguaagaguuuacuga

SEQ ID NO: 4135 - RNA, 21 nt, Artificial Sequence
  RPE65 RNA guide
aguaaacucuuacuucgcuaa

SEQ ID NO: 4136 - RNA, 21 nt, Artificial Sequence
  RPE65 RNA guide
auuagcgaaguaagaguuuac

SEQ ID NO: 4137 - RNA, 21 nt, Artificial Sequence
  RPE65 RNA guide
caguaaacucuuacuucgcua

SEQ ID NO: 4138 - RNA, 21 nt, Artificial Sequence
  RPE65 RNA guide
cauuauuagcgaaguaagagu

SEQ ID NO: 4139 - RNA, 21 nt, Artificial Sequence
  RPE65 RNA guide
ccauuauuagcgaaguaagag

SEQ ID NO: 4140 - RNA, 21 nt, Artificial Sequence
  RPE65 RNA guide
cgaaguaagaguuuacugaaa

SEQ ID NO: 4141 - RNA, 21 nt, Artificial Sequence
  RPE65 RNA guide
cucuuacuucgcuaauaaugg

SEQ ID NO: 4142 - RNA, 21 nt, Artificial Sequence
  RPE65 RNA guide
cuuacuucgcuaauaauggua

SEQ ID NO: 4143 - RNA, 21 nt, Artificial Sequence
  RPE65 RNA guide
gcgaaguaagaguuuacugaa

SEQ ID NO: 4144 - RNA, 21 nt, Artificial Sequence
  RPE65 RNA guide
guaaacucuuacuucgcuaau

SEQ ID NO: 4145 - RNA, 21 nt, Artificial Sequence
  RPE65 RNA guide
uaccauuauuagcgaaguaag

SEQ ID NO: 4146 - RNA, 21 nt, Artificial Sequence
  RPE65 RNA guide
uagcgaaguaagaguuuacug

SEQ ID NO: 4147 - RNA, 21 nt, Artificial Sequence
  RPE65 RNA guide
ucaguaaacucuuacuucgcu

SEQ ID NO: 4148 - RNA, 21 nt, Artificial Sequence
  RPE65 RNA guide
ucuuacuucgcuaauaauggu

SEQ ID NO: 4149 - RNA, 21 nt, Artificial Sequence
  RPE65 RNA guide
uuagcgaaguaagaguuuacu

SEQ ID NO: 4150 - RNA, 21 nt, Artificial Sequence
  RPE65 RNA guide
uucaguaaacucuuacuucgc

SEQ ID NO: 4151 - RNA, 21 nt, Artificial Sequence
  RPE65 RNA guide
uuucaguaaacucuuacuucg

SEQ ID NO: 4152 - RNA, 22 nt, Artificial Sequence
  RPE65 RNA guide
aacucuuacuucgcuaauaaug

SEQ ID NO: 4153 - RNA, 22 nt, Artificial Sequence
  RPE65 RNA guide
accauuauuagcgaaguaagag

SEQ ID NO: 4154 - RNA, 22 nt, Artificial Sequence
  RPE65 RNA guide
acucuuacuucgcuaauaaugg

SEQ ID NO: 4155 - RNA, 22 nt, Artificial Sequence
  RPE65 RNA guide
agcgaaguaagaguuuacugaa

SEQ ID NO: 4156 - RNA, 22 nt, Artificial Sequence
  RPE65 RNA guide
aguaaacucuuacuucgcuaau

SEQ ID NO: 4157 - RNA, 22 nt, Artificial Sequence
  RPE65 RNA guide
auuagcgaaguaagaguuuacu

SEQ ID NO: 4158 - RNA, 22 nt, Artificial Sequence
  RPE65 RNA guide
auuucaguaaacucuuacuucg

SEQ ID NO: 4159 - RNA, 22 nt, Artificial Sequence
  RPE65 RNA guide
caguaaacucuuacuucgcuaa

SEQ ID NO: 4160 - RNA, 22 nt, Artificial Sequence
  RPE65 RNA guide
cauuauuagcgaaguaagaguu

SEQ ID NO: 4161 - RNA, 22 nt, Artificial Sequence
  RPE65 RNA guide
ccauuauuagcgaaguaagagu

SEQ ID NO: 4162 - RNA, 22 nt, Artificial Sequence
  RPE65 RNA guide
cgaaguaagaguuuacugaaau

SEQ ID NO: 4163 - RNA, 22 nt, Artificial Sequence
  RPE65 RNA guide
cucuuacuucgcuaauaauggu

SEQ ID NO: 4164 - RNA, 22 nt, Artificial Sequence
  RPE65 RNA guide
cuuacuucgcuaauaaugguaa

SEQ ID NO: 4165 - RNA, 22 nt, Artificial Sequence
  RPE65 RNA guide
gcgaaguaagaguuuacugaaa

SEQ ID NO: 4166 - RNA, 22 nt, Artificial Sequence
  RPE65 RNA guide
guaaacucuuacuucgcuaaua

SEQ ID NO: 4167 - RNA, 22 nt, Artificial Sequence
  RPE65 RNA guide
uaccauuauuagcgaaguaaga

SEQ ID NO: 4168 - RNA, 22 nt, Artificial Sequence
  RPE65 RNA guide
uagcgaaguaagaguuuacuga

SEQ ID NO: 4169 - RNA, 22 nt, Artificial Sequence
  RPE65 RNA guide
uauuagcgaaguaagaguuuac

SEQ ID NO: 4170 - RNA, 22 nt, Artificial Sequence
  RPE65 RNA guide
ucaguaaacucuuacuucgcua

SEQ ID NO: 4171 - RNA, 22 nt, Artificial Sequence
  RPE65 RNA guide
ucuuacuucgcuaauaauggua

SEQ ID NO: 4172 - RNA, 22 nt, Artificial Sequence
  RPE65 RNA guide
uuaccauuauuagcgaaguaag

SEQ ID NO: 4173 - RNA, 22 nt, Artificial Sequence
  RPE65 RNA guide
uuagcgaaguaagaguuuacug

SEQ ID NO: 4174 - RNA, 22 nt, Artificial Sequence
  RPE65 RNA guide
uucaguaaacucuuacuucgcu

SEQ ID NO: 4175 - RNA, 22 nt, Artificial Sequence
  RPE65 RNA guide
uuucaguaaacucuuacuucgc

SEQ ID NO: 4176 - RNA, 20 nt, Artificial Sequence
  RPE65 RNA guide
accauuauuagcaaaguaag

SEQ ID NO: 4177 - RNA, 20 nt, Artificial Sequence
  RPE65 RNA guide
agcaaaguaagaguuuacug

SEQ ID NO: 4178 - RNA, 20 nt, Artificial Sequence
  RPE65 RNA guide
aguaaacucuuacuuugcua

SEQ ID NO: 4179 - RNA, 20 nt, Artificial Sequence
  RPE65 RNA guide
caaaguaagaguuuacugaa

SEQ ID NO: 4180 - RNA, 20 nt, Artificial Sequence
  RPE65 RNA guide
caguaaacucuuacuuugcu

SEQ ID NO: 4181 - RNA, 20 nt, Artificial Sequence
  RPE65 RNA guide
cauuauuagcaaaguaagag

SEQ ID NO: 4182 - RNA, 20 nt, Artificial Sequence
  RPE65 RNA guide
ccauuauuagcaaaguaaga

SEQ ID NO: 4183 - RNA, 20 nt, Artificial Sequence
  RPE65 RNA guide
cucuuacuuugcuaauaaug

SEQ ID NO: 4184 - RNA, 20 nt, Artificial Sequence
  RPE65 RNA guide
cuuacuuugcuaauaauggu

SEQ ID NO: 4185 - RNA, 20 nt, Artificial Sequence
  RPE65 RNA guide
gcaaaguaagaguuuacuga

SEQ ID NO: 4186 - RNA, 20 nt, Artificial Sequence
  RPE65 RNA guide
guaaacucuuacuuugcuaa

SEQ ID NO: 4187 - RNA, 20 nt, Artificial Sequence
  RPE65 RNA guide
uagcaaaguaagaguuuacu

SEQ ID NO: 4188 - RNA, 20 nt, Artificial Sequence
  RPE65 RNA guide
ucaguaaacucuuacuuugc

SEQ ID NO: 4189 - RNA, 20 nt, Artificial Sequence
  RPE65 RNA guide
ucuuacuuugcuaauaaugg

SEQ ID NO: 4190 - RNA, 20 nt, Artificial Sequence
  RPE65 RNA guide
uuagcaaaguaagaguuuac

SEQ ID NO: 4191 - RNA, 20 nt, Artificial Sequence
  RPE65 RNA guide
uucaguaaacucuuacuuug

SEQ ID NO: 4192 - RNA, 21 nt, Artificial Sequence
  RPE65 RNA guide
agcaaaguaagaguuuacuga

SEQ ID NO: 4193 - RNA, 21 nt, Artificial Sequence
  RPE65 RNA guide
caguaaacucuuacuuugcua

SEQ ID NO: 4194 - RNA, 21 nt, Artificial Sequence
  RPE65 RNA guide
ccauuauuagcaaaguaagag

SEQ ID NO: 4195 - RNA, 21 nt, Artificial Sequence
  RPE65 RNA guide
cucuuacuuugcuaauaaugg

SEQ ID NO: 4196 - RNA, 21 nt, Artificial Sequence
  RPE65 RNA guide
gcaaaguaagaguuuacugaa

SEQ ID NO: 4197 - RNA, 21 nt, Artificial Sequence
  RPE65 RNA guide
uagcaaaguaagaguuuacug

SEQ ID NO: 4198 - RNA, 21 nt, Artificial Sequence
  RPE65 RNA guide
ucaguaaacucuuacuuugcu

SEQ ID NO: 4199 - RNA, 21 nt, Artificial Sequence
  RPE65 RNA guide
uucaguaaacucuuacuuugc

SEQ ID NO: 4200 - RNA, 22 nt, Artificial Sequence
  RPE65 RNA guide
accauuauuagcaaaguaagag

SEQ ID NO: 4201 - RNA, 22 nt, Artificial Sequence
  RPE65 RNA guide
acucuuacuuugcuaauaaugg

SEQ ID NO: 4202 - RNA, 22 nt, Artificial Sequence
  RPE65 RNA guide
agcaaaguaagaguuuacugaa

SEQ ID NO: 4203 - RNA, 22 nt, Artificial Sequence
  RPE65 RNA guide
caguaaacucuuacuuugcuaa

SEQ ID NO: 4204 - RNA, 22 nt, Artificial Sequence
  RPE65 RNA guide
ccauuauuagcaaaguaagagu

SEQ ID NO: 4205 - RNA, 22 nt, Artificial Sequence
  RPE65 RNA guide
cucuuacuuugcuaauaauggu

SEQ ID NO: 4206 - RNA, 22 nt, Artificial Sequence
  RPE65 RNA guide
gcaaaguaagaguuuacugaaa

SEQ ID NO: 4207 - RNA, 22 nt, Artificial Sequence
  RPE65 RNA guide
uagcaaaguaagaguuuacuga

SEQ ID NO: 4208 - RNA, 22 nt, Artificial Sequence
  RPE65 RNA guide
ucaguaaacucuuacuuugcua

SEQ ID NO: 4209 - RNA, 22 nt, Artificial Sequence
  RPE65 RNA guide
uuagcaaaguaagaguuuacug

SEQ ID NO: 4210 - RNA, 22 nt, Artificial Sequence
  RPE65 RNA guide
uucaguaaacucuuacuuugcu

SEQ ID NO: 4211 - RNA, 22 nt, Artificial Sequence
  RPE65 RNA guide
uuucaguaaacucuuacuuugc

SEQ ID NO: 4212 - RNA, 20 nt, Artificial Sequence
  RPE65 RNA guide
aaugcucaacuacaugucag

SEQ ID NO: 4213 - RNA, 20 nt, Artificial Sequence
  RPE65 RNA guide
acauguaguugagcauuccc

SEQ ID NO: 4214 - RNA, 20 nt, Artificial Sequence
  RPE65 RNA guide
acugacauguaguugagcau

SEQ ID NO: 4215 - RNA, 20 nt, Artificial Sequence
  RPE65 RNA guide
agcauucccaaaauacucac

SEQ ID NO: 4216 - RNA, 20 nt, Artificial Sequence
  RPE65 RNA guide
aguauuuugggaaugcucaa

SEQ ID NO: 4217 - RNA, 20 nt, Artificial Sequence
  RPE65 RNA guide
aguugagcauucccaaaaua

SEQ ID NO: 4218 - RNA, 20 nt, Artificial Sequence
  RPE65 RNA guide
auaucacugacauguaguug

SEQ ID NO: 4219 - RNA, 20 nt, Artificial Sequence
  RPE65 RNA guide
aucacugacauguaguugag

SEQ ID NO: 4220 - RNA, 20 nt, Artificial Sequence
  RPE65 RNA guide
augcucaacuacaugucagu

SEQ ID NO: 4221 - RNA, 20 nt, Artificial Sequence
  RPE65 RNA guide
auguaguugagcauucccaa

SEQ ID NO: 4222 - RNA, 20 nt, Artificial Sequence
  RPE65 RNA guide
auuuggugaguauuuuggga

SEQ ID NO: 4223 - RNA, 20 nt, Artificial Sequence
  RPE65 RNA guide
auuuugggaaugcucaacua

SEQ ID NO: 4224 - RNA, 20 nt, Artificial Sequence
  RPE65 RNA guide
cacugacauguaguugagca

SEQ ID NO: 4225 - RNA, 20 nt, Artificial Sequence
  RPE65 RNA guide
cauguaguugagcauuccca

SEQ ID NO: 4226 - RNA, 20 nt, Artificial Sequence
  RPE65 RNA guide
cauucccaaaauacucacca

SEQ ID NO: 4227 - RNA, 20 nt, Artificial Sequence
  RPE65 RNA guide
cauuuggugaguauuuuggg

SEQ ID NO: 4228 - RNA, 20 nt, Artificial Sequence
  RPE65 RNA guide
ccauuuggugaguauuuugg

SEQ ID NO: 4229 - RNA, 20 nt, Artificial Sequence
  RPE65 RNA guide
cugacauguaguugagcauu

SEQ ID NO: 4230 - RNA, 20 nt, Artificial Sequence
  RPE65 RNA guide
gaaugcucaacuacauguca

SEQ ID NO: 4231 - RNA, 20 nt, Artificial Sequence
  RPE65 RNA guide
gacauguaguugagcauucc

SEQ ID NO: 4232 - RNA, 20 nt, Artificial Sequence
  RPE65 RNA guide
gagcauucccaaaauacuca

SEQ ID NO: 4233 - RNA, 20 nt, Artificial Sequence
  RPE65 RNA guide
gaguauuuugggaaugcuca

SEQ ID NO: 4234 - RNA, 20 nt, Artificial Sequence
  RPE65 RNA guide
gcauucccaaaauacucacc

SEQ ID NO: 4235 - RNA, 20 nt, Artificial Sequence
  RPE65 RNA guide
ggaaugcucaacuacauguc

SEQ ID NO: 4236 - RNA, 20 nt, Artificial Sequence
  RPE65 RNA guide
gggaaugcucaacuacaugu

SEQ ID NO: 4237 - RNA, 20 nt, Artificial Sequence
  RPE65 RNA guide
ggugaguauuuugggaaugc

SEQ ID NO: 4238 - RNA, 20 nt, Artificial Sequence
  RPE65 RNA guide
guaguugagcauucccaaaa

SEQ ID NO: 4239 - RNA, 20 nt, Artificial Sequence
  RPE65 RNA guide
guauuuugggaaugcucaac

SEQ ID NO: 4240 - RNA, 20 nt, Artificial Sequence
  RPE65 RNA guide
gugaguauuuugggaaugcu

SEQ ID NO: 4241 - RNA, 20 nt, Artificial Sequence
  RPE65 RNA guide
guugagcauucccaaaauac

SEQ ID NO: 4242 - RNA, 20 nt, Artificial Sequence
  RPE65 RNA guide
uaguugagcauucccaaaau

SEQ ID NO: 4243 - RNA, 20 nt, Artificial Sequence
  RPE65 RNA guide
uaucacugacauguaguuga

SEQ ID NO: 4244 - RNA, 20 nt, Artificial Sequence
  RPE65 RNA guide
uauuuugggaaugcucaacu

SEQ ID NO: 4245 - RNA, 20 nt, Artificial Sequence
  RPE65 RNA guide
ucacugacauguaguugagc

SEQ ID NO: 4246 - RNA, 20 nt, Artificial Sequence
  RPE65 RNA guide
ugacauguaguugagcauuc

SEQ ID NO: 4247 - RNA, 20 nt, Artificial Sequence
  RPE65 RNA guide
ugagcauucccaaaauacuc

SEQ ID NO: 4248 - RNA, 20 nt, Artificial Sequence
  RPE65 RNA guide
ugaguauuuugggaaugcuc

SEQ ID NO: 4249 - RNA, 20 nt, Artificial Sequence
  RPE65 RNA guide
ugggaaugcucaacuacaug

SEQ ID NO: 4250 - RNA, 20 nt, Artificial Sequence
  RPE65 RNA guide
uggugaguauuuugggaaug

SEQ ID NO: 4251 - RNA, 20 nt, Artificial Sequence
  RPE65 RNA guide
uguaguugagcauucccaaa

SEQ ID NO: 4252 - RNA, 20 nt, Artificial Sequence
  RPE65 RNA guide
uugagcauucccaaaauacu

SEQ ID NO: 4253 - RNA, 20 nt, Artificial Sequence
  RPE65 RNA guide
uugggaaugcucaacuacau

SEQ ID NO: 4254 - RNA, 20 nt, Artificial Sequence
  RPE65 RNA guide
uuggugaguauuuugggaau

SEQ ID NO: 4255 - RNA, 20 nt, Artificial Sequence
  RPE65 RNA guide
uuugggaaugcucaacuaca

SEQ ID NO: 4256 - RNA, 20 nt, Artificial Sequence
  RPE65 RNA guide
uuuggugaguauuuugggaa

SEQ ID NO: 4257 - RNA, 20 nt, Artificial Sequence
  RPE65 RNA guide
uuuugggaaugcucaacuac

SEQ ID NO: 4258 - RNA, 21 nt, Artificial Sequence
  RPE65 RNA guide
aaugcucaacuacaugucagu

SEQ ID NO: 4259 - RNA, 21 nt, Artificial Sequence
  RPE65 RNA guide
acauguaguugagcauuccca

SEQ ID NO: 4260 - RNA, 21 nt, Artificial Sequence
  RPE65 RNA guide
acugacauguaguugagcauu

SEQ ID NO: 4261 - RNA, 21 nt, Artificial Sequence
  RPE65 RNA guide
agcauucccaaaauacucacc

SEQ ID NO: 4262 - RNA, 21 nt, Artificial Sequence
  RPE65 RNA guide
aguauuuugggaaugcucaac

SEQ ID NO: 4263 - RNA, 21 nt, Artificial Sequence
  RPE65 RNA guide
aguugagcauucccaaaauac

SEQ ID NO: 4264 - RNA, 21 nt, Artificial Sequence
  RPE65 RNA guide
auaucacugacauguaguuga

SEQ ID NO: 4265 - RNA, 21 nt, Artificial Sequence
  RPE65 RNA guide
aucacugacauguaguugagc

SEQ ID NO: 4266 - RNA, 21 nt, Artificial Sequence
  RPE65 RNA guide
augcucaacuacaugucagug

SEQ ID NO: 4267 - RNA, 21 nt, Artificial Sequence
  RPE65 RNA guide
auguaguugagcauucccaaa

SEQ ID NO: 4268 - RNA, 21 nt, Artificial Sequence
  RPE65 RNA guide
auuuggugaguauuuugggaa

SEQ ID NO: 4269 - RNA, 21 nt, Artificial Sequence
  RPE65 RNA guide
auuuugggaaugcucaacuac

SEQ ID NO: 4270 - RNA, 21 nt, Artificial Sequence
  RPE65 RNA guide
cacugacauguaguugagcau

SEQ ID NO: 4271 - RNA, 21 nt, Artificial Sequence
  RPE65 RNA guide
cauaucacugacauguaguug

SEQ ID NO: 4272 - RNA, 21 nt, Artificial Sequence
  RPE65 RNA guide
cauguaguugagcauucccaa

SEQ ID NO: 4273 - RNA, 21 nt, Artificial Sequence
  RPE65 RNA guide
cauucccaaaauacucaccaa

SEQ ID NO: 4274 - RNA, 21 nt, Artificial Sequence
  RPE65 RNA guide
cauuuggugaguauuuuggga

SEQ ID NO: 4275 - RNA, 21 nt, Artificial Sequence
  RPE65 RNA guide
ccauuuggugaguauuuuggg

SEQ ID NO: 4276 - RNA, 21 nt, Artificial Sequence
  RPE65 RNA guide
cugacauguaguugagcauuc

SEQ ID NO: 4277 - RNA, 21 nt, Artificial Sequence
  RPE65 RNA guide
gaaugcucaacuacaugucag

SEQ ID NO: 4278 - RNA, 21 nt, Artificial Sequence
  RPE65 RNA guide
gacauguaguugagcauuccc

SEQ ID NO: 4279 - RNA, 21 nt, Artificial Sequence
  RPE65 RNA guide
gagcauucccaaaauacucac

SEQ ID NO: 4280 - RNA, 21 nt, Artificial Sequence
  RPE65 RNA guide
gaguauuuugggaaugcucaa

SEQ ID NO: 4281 - RNA, 21 nt, Artificial Sequence
  RPE65 RNA guide
gcauucccaaaauacucacca

SEQ ID NO: 4282 - RNA, 21 nt, Artificial Sequence
  RPE65 RNA guide
ggaaugcucaacuacauguca

SEQ ID NO: 4283 - RNA, 21 nt, Artificial Sequence
  RPE65 RNA guide
gggaaugcucaacuacauguc

SEQ ID NO: 4284 - RNA, 21 nt, Artificial Sequence
  RPE65 RNA guide
ggugaguauuuugggaaugcu

SEQ ID NO: 4285 - RNA, 21 nt, Artificial Sequence
  RPE65 RNA guide
guaguugagcauucccaaaau

SEQ ID NO: 4286 - RNA, 21 nt, Artificial Sequence
  RPE65 RNA guide
guauuuugggaaugcucaacu

SEQ ID NO: 4287 - RNA, 21 nt, Artificial Sequence
  RPE65 RNA guide
gugaguauuuugggaaugcuc

SEQ ID NO: 4288 - RNA, 21 nt, Artificial Sequence
  RPE65 RNA guide
guugagcauucccaaaauacu

SEQ ID NO: 4289 - RNA, 21 nt, Artificial Sequence
  RPE65 RNA guide
uaguugagcauucccaaaaua

SEQ ID NO: 4290 - RNA, 21 nt, Artificial Sequence
  RPE65 RNA guide
uaucacugacauguaguugag

SEQ ID NO: 4291 - RNA, 21 nt, Artificial Sequence
  RPE65 RNA guide
uauuuugggaaugcucaacua

SEQ ID NO: 4292 - RNA, 21 nt, Artificial Sequence
  RPE65 RNA guide
ucacugacauguaguugagca

SEQ ID NO: 4293 - RNA, 21 nt, Artificial Sequence
  RPE65 RNA guide
uccauuuggugaguauuuugg

SEQ ID NO: 4294 - RNA, 21 nt, Artificial Sequence
  RPE65 RNA guide
ugacauguaguugagcauucc

SEQ ID NO: 4295 - RNA, 21 nt, Artificial Sequence
  RPE65 RNA guide
ugagcauucccaaaauacuca

SEQ ID NO: 4296 - RNA, 21 nt, Artificial Sequence
  RPE65 RNA guide
ugaguauuuugggaaugcuca

SEQ ID NO: 4297 - RNA, 21 nt, Artificial Sequence
  RPE65 RNA guide
ugggaaugcucaacuacaugu

SEQ ID NO: 4298 - RNA, 21 nt, Artificial Sequence
  RPE65 RNA guide
uggugaguauuuugggaaugc

SEQ ID NO: 4299 - RNA, 21 nt, Artificial Sequence
  RPE65 RNA guide
uguaguugagcauucccaaaa

SEQ ID NO: 4300 - RNA, 21 nt, Artificial Sequence
  RPE65 RNA guide
uugagcauucccaaaauacuc

SEQ ID NO: 4301 - RNA, 21 nt, Artificial Sequence
  RPE65 RNA guide
uugggaaugcucaacuacaug

SEQ ID NO: 4302 - RNA, 21 nt, Artificial Sequence
  RPE65 RNA guide
uuggugaguauuuugggaaug

SEQ ID NO: 4303 - RNA, 21 nt, Artificial Sequence
  RPE65 RNA guide
uuugggaaugcucaacuacau

SEQ ID NO: 4304 - RNA, 21 nt, Artificial Sequence
  RPE65 RNA guide
uuuggugaguauuuugggaau

SEQ ID NO: 4305 - RNA, 21 nt, Artificial Sequence
  RPE65 RNA guide
uuuugggaaugcucaacuaca

SEQ ID NO: 4306 - RNA, 22 nt, Artificial Sequence
  RPE65 RNA guide
aaugcucaacuacaugucagug

SEQ ID NO: 4307 - RNA, 22 nt, Artificial Sequence
  RPE65 RNA guide
acauguaguugagcauucccaa

SEQ ID NO: 4308 - RNA, 22 nt, Artificial Sequence
  RPE65 RNA guide
acugacauguaguugagcauuc

SEQ ID NO: 4309 - RNA, 22 nt, Artificial Sequence
  RPE65 RNA guide
agcauucccaaaauacucacca

SEQ ID NO: 4310 - RNA, 22 nt, Artificial Sequence
  RPE65 RNA guide
aguauuuugggaaugcucaacu

SEQ ID NO: 4311 - RNA, 22 nt, Artificial Sequence
  RPE65 RNA guide
aguugagcauucccaaaauacu

SEQ ID NO: 4312 - RNA, 22 nt, Artificial Sequence
  RPE65 RNA guide
auaucacugacauguaguugag

SEQ ID NO: 4313 - RNA, 22 nt, Artificial Sequence
  RPE65 RNA guide
aucacugacauguaguugagca

SEQ ID NO: 4314 - RNA, 22 nt, Artificial Sequence
  RPE65 RNA guide
auccauuuggugaguauuuugg

SEQ ID NO: 4315 - RNA, 22 nt, Artificial Sequence
  RPE65 RNA guide
augcucaacuacaugucaguga

SEQ ID NO: 4316 - RNA, 22 nt, Artificial Sequence
  RPE65 RNA guide
auguaguugagcauucccaaaa

SEQ ID NO: 4317 - RNA, 22 nt, Artificial Sequence
  RPE65 RNA guide
auuuggugaguauuuugggaau

SEQ ID NO: 4318 - RNA, 22 nt, Artificial Sequence
  RPE65 RNA guide
auuuugggaaugcucaacuaca

SEQ ID NO: 4319 - RNA, 22 nt, Artificial Sequence
  RPE65 RNA guide
cacugacauguaguugagcauu

SEQ ID NO: 4320 - RNA, 22 nt, Artificial Sequence
  RPE65 RNA guide
cauaucacugacauguaguuga

SEQ ID NO: 4321 - RNA, 22 nt, Artificial Sequence
  RPE65 RNA guide
cauguaguugagcauucccaaa

SEQ ID NO: 4322 - RNA, 22 nt, Artificial Sequence
  RPE65 RNA guide
cauucccaaaauacucaccaaa

SEQ ID NO: 4323 - RNA, 22 nt, Artificial Sequence
  RPE65 RNA guide
cauuuggugaguauuuugggaa

SEQ ID NO: 4324 - RNA, 22 nt, Artificial Sequence
  RPE65 RNA guide
ccauuuggugaguauuuuggga

SEQ ID NO: 4325 - RNA, 22 nt, Artificial Sequence
  RPE65 RNA guide
cugacauguaguugagcauucc

SEQ ID NO: 4326 - RNA, 22 nt, Artificial Sequence
  RPE65 RNA guide
gaaugcucaacuacaugucagu

SEQ ID NO: 4327 - RNA, 22 nt, Artificial Sequence
  RPE65 RNA guide
gacauguaguugagcauuccca

SEQ ID NO: 4328 - RNA, 22 nt, Artificial Sequence
  RPE65 RNA guide
gagcauucccaaaauacucacc

SEQ ID NO: 4329 - RNA, 22 nt, Artificial Sequence
  RPE65 RNA guide
gaguauuuugggaaugcucaac

SEQ ID NO: 4330 - RNA, 22 nt, Artificial Sequence
  RPE65 RNA guide
gcauaucacugacauguaguug

SEQ ID NO: 4331 - RNA, 22 nt, Artificial Sequence
  RPE65 RNA guide
gcauucccaaaauacucaccaa

SEQ ID NO: 4332 - RNA, 22 nt, Artificial Sequence
  RPE65 RNA guide
ggaaugcucaacuacaugucag

SEQ ID NO: 4333 - RNA, 22 nt, Artificial Sequence
  RPE65 RNA guide
gggaaugcucaacuacauguca

SEQ ID NO: 4334 - RNA, 22 nt, Artificial Sequence
  RPE65 RNA guide
ggugaguauuuugggaaugcuc

SEQ ID NO: 4335 - RNA, 22 nt, Artificial Sequence
  RPE65 RNA guide
guaguugagcauucccaaaaua

SEQ ID NO: 4336 - RNA, 22 nt, Artificial Sequence
  RPE65 RNA guide
guauuuugggaaugcucaacua

SEQ ID NO: 4337 - RNA, 22 nt, Artificial Sequence
  RPE65 RNA guide
gugaguauuuugggaaugcuca

SEQ ID NO: 4338 - RNA, 22 nt, Artificial Sequence
  RPE65 RNA guide
guugagcauucccaaaauacuc

SEQ ID NO: 4339 - RNA, 22 nt, Artificial Sequence
  RPE65 RNA guide
uaguugagcauucccaaaauac

SEQ ID NO: 4340 - RNA, 22 nt, Artificial Sequence
  RPE65 RNA guide
uaucacugacauguaguugagc

SEQ ID NO: 4341 - RNA, 22 nt, Artificial Sequence
  RPE65 RNA guide
uauuuugggaaugcucaacuac

SEQ ID NO: 4342 - RNA, 22 nt, Artificial Sequence
  RPE65 RNA guide
ucacugacauguaguugagcau

SEQ ID NO: 4343 - RNA, 22 nt, Artificial Sequence
  RPE65 RNA guide
uccauuuggugaguauuuuggg

SEQ ID NO: 4344 - RNA, 22 nt, Artificial Sequence
  RPE65 RNA guide
ugacauguaguugagcauuccc

SEQ ID NO: 4345 - RNA, 22 nt, Artificial Sequence
  RPE65 RNA guide
ugagcauucccaaaauacucac

SEQ ID NO: 4346 - RNA, 22 nt, Artificial Sequence
  RPE65 RNA guide
ugaguauuuugggaaugcucaa

SEQ ID NO: 4347 - RNA, 22 nt, Artificial Sequence
  RPE65 RNA guide
ugggaaugcucaacuacauguc

SEQ ID NO: 4348 - RNA, 22 nt, Artificial Sequence
  RPE65 RNA guide
uggugaguauuuugggaaugcu

SEQ ID NO: 4349 - RNA, 22 nt, Artificial Sequence
  RPE65 RNA guide
uguaguugagcauucccaaaau

SEQ ID NO: 4350 - RNA, 22 nt, Artificial Sequence
  RPE65 RNA guide
uugagcauucccaaaauacuca

SEQ ID NO: 4351 - RNA, 22 nt, Artificial Sequence
  RPE65 RNA guide
uugggaaugcucaacuacaugu

SEQ ID NO: 4352 - RNA, 22 nt, Artificial Sequence
  RPE65 RNA guide
uuggugaguauuuugggaaugc

SEQ ID NO: 4353 - RNA, 22 nt, Artificial Sequence
  RPE65 RNA guide
uuugggaaugcucaacuacaug

SEQ ID NO: 4354 - RNA, 22 nt, Artificial Sequence
  RPE65 RNA guide
uuuggugaguauuuugggaaug

SEQ ID NO: 4355 - RNA, 22 nt, Artificial Sequence
  RPE65 RNA guide
uuuugggaaugcucaacuacau

SEQ ID NO: 4356 - RNA, 20 nt, Artificial Sequence
  RPE65 RNA guide
aacgcucaacuacaugucag

SEQ ID NO: 4357 - RNA, 20 nt, Artificial Sequence
  RPE65 RNA guide
acauguaguugagcguuccc

SEQ ID NO: 4358 - RNA, 20 nt, Artificial Sequence
  RPE65 RNA guide
acgcucaacuacaugucagu

SEQ ID NO: 4359 - RNA, 20 nt, Artificial Sequence
  RPE65 RNA guide
acugacauguaguugagcgu

SEQ ID NO: 4360 - RNA, 20 nt, Artificial Sequence
  RPE65 RNA guide
agcguucccaaaauacucac

SEQ ID NO: 4361 - RNA, 20 nt, Artificial Sequence
  RPE65 RNA guide
aguauuuugggaacgcucaa

SEQ ID NO: 4362 - RNA, 20 nt, Artificial Sequence
  RPE65 RNA guide
aguugagcguucccaaaaua

SEQ ID NO: 4363 - RNA, 20 nt, Artificial Sequence
  RPE65 RNA guide
auguaguugagcguucccaa

SEQ ID NO: 4364 - RNA, 20 nt, Artificial Sequence
  RPE65 RNA guide
auuuugggaacgcucaacua

SEQ ID NO: 4365 - RNA, 20 nt, Artificial Sequence
  RPE65 RNA guide
cacugacauguaguugagcg

SEQ ID NO: 4366 - RNA, 20 nt, Artificial Sequence
  RPE65 RNA guide
cauguaguugagcguuccca

SEQ ID NO: 4367 - RNA, 20 nt, Artificial Sequence
  RPE65 RNA guide
cguucccaaaauacucacca

SEQ ID NO: 4368 - RNA, 20 nt, Artificial Sequence
  RPE65 RNA guide
cugacauguaguugagcguu

SEQ ID NO: 4369 - RNA, 20 nt, Artificial Sequence
  RPE65 RNA guide
gaacgcucaacuacauguca

SEQ ID NO: 4370 - RNA, 20 nt, Artificial Sequence
  RPE65 RNA guide
gacauguaguugagcguucc

SEQ ID NO: 4371 - RNA, 20 nt, Artificial Sequence
  RPE65 RNA guide
gagcguucccaaaauacuca

SEQ ID NO: 4372 - RNA, 20 nt, Artificial Sequence
  RPE65 RNA guide
gaguauuuugggaacgcuca

SEQ ID NO: 4373 - RNA, 20 nt, Artificial Sequence
  RPE65 RNA guide
gcguucccaaaauacucacc

SEQ ID NO: 4374 - RNA, 20 nt, Artificial Sequence
  RPE65 RNA guide
ggaacgcucaacuacauguc

SEQ ID NO: 4375 - RNA, 20 nt, Artificial Sequence
  RPE65 RNA guide
gggaacgcucaacuacaugu

SEQ ID NO: 4376 - RNA, 20 nt, Artificial Sequence
  RPE65 RNA guide
ggugaguauuuugggaacgc

SEQ ID NO: 4377 - RNA, 20 nt, Artificial Sequence
  RPE65 RNA guide
guaguugagcguucccaaaa

SEQ ID NO: 4378 - RNA, 20 nt, Artificial Sequence
  RPE65 RNA guide
guauuuugggaacgcucaac

SEQ ID NO: 4379 - RNA, 20 nt, Artificial Sequence
  RPE65 RNA guide
gugaguauuuugggaacgcu

SEQ ID NO: 4380 - RNA, 20 nt, Artificial Sequence
  RPE65 RNA guide
guugagcguucccaaaauac

SEQ ID NO: 4381 - RNA, 20 nt, Artificial Sequence
  RPE65 RNA guide
uaguugagcguucccaaaau

SEQ ID NO: 4382 - RNA, 20 nt, Artificial Sequence
  RPE65 RNA guide
uauuuugggaacgcucaacu

SEQ ID NO: 4383 - RNA, 20 nt, Artificial Sequence
  RPE65 RNA guide
ugacauguaguugagcguuc

SEQ ID NO: 4384 - RNA, 20 nt, Artificial Sequence
  RPE65 RNA guide
ugagcguucccaaaauacuc

SEQ ID NO: 4385 - RNA, 20 nt, Artificial Sequence
  RPE65 RNA guide
ugaguauuuugggaacgcuc

SEQ ID NO: 4386 - RNA, 20 nt, Artificial Sequence
  RPE65 RNA guide
ugggaacgcucaacuacaug

SEQ ID NO: 4387 - RNA, 20 nt, Artificial Sequence
  RPE65 RNA guide
uggugaguauuuugggaacg

SEQ ID NO: 4388 - RNA, 20 nt, Artificial Sequence
  RPE65 RNA guide
uguaguugagcguucccaaa

SEQ ID NO: 4389 - RNA, 20 nt, Artificial Sequence
  RPE65 RNA guide
uugagcguucccaaaauacu

SEQ ID NO: 4390 - RNA, 20 nt, Artificial Sequence
  RPE65 RNA guide
uugggaacgcucaacuacau

SEQ ID NO: 4391 - RNA, 20 nt, Artificial Sequence
  RPE65 RNA guide
uuggugaguauuuugggaac

SEQ ID NO: 4392 - RNA, 20 nt, Artificial Sequence
  RPE65 RNA guide
uuugggaacgcucaacuaca

SEQ ID NO: 4393 - RNA, 20 nt, Artificial Sequence
  RPE65 RNA guide
uuuugggaacgcucaacuac

SEQ ID NO: 4394 - RNA, 21 nt, Artificial Sequence
  RPE65 RNA guide
aacgcucaacuacaugucagu

SEQ ID NO: 4395 - RNA, 21 nt, Artificial Sequence
  RPE65 RNA guide
acauguaguugagcguuccca

SEQ ID NO: 4396 - RNA, 21 nt, Artificial Sequence
  RPE65 RNA guide
acgcucaacuacaugucagug

SEQ ID NO: 4397 - RNA, 21 nt, Artificial Sequence
  RPE65 RNA guide
acugacauguaguugagcguu

SEQ ID NO: 4398 - RNA, 21 nt, Artificial Sequence
  RPE65 RNA guide
agcguucccaaaauacucacc

SEQ ID NO: 4399 - RNA, 21 nt, Artificial Sequence
  RPE65 RNA guide
aguauuuugggaacgcucaac

SEQ ID NO: 4400 - RNA, 21 nt, Artificial Sequence
  RPE65 RNA guide
aguugagcguucccaaaauac

SEQ ID NO: 4401 - RNA, 21 nt, Artificial Sequence
  RPE65 RNA guide
auguaguugagcguucccaaa

SEQ ID NO: 4402 - RNA, 21 nt, Artificial Sequence
  RPE65 RNA guide
auuuugggaacgcucaacuac

SEQ ID NO: 4403 - RNA, 21 nt, Artificial Sequence
  RPE65 RNA guide
cacugacauguaguugagcgu

SEQ ID NO: 4404 - RNA, 21 nt, Artificial Sequence
  RPE65 RNA guide
cauguaguugagcguucccaa

SEQ ID NO: 4405 - RNA, 21 nt, Artificial Sequence
  RPE65 RNA guide
cguucccaaaauacucaccaa

SEQ ID NO: 4406 - RNA, 21 nt, Artificial Sequence
  RPE65 RNA guide
cugacauguaguugagcguuc

SEQ ID NO: 4407 - RNA, 21 nt, Artificial Sequence
  RPE65 RNA guide
gaacgcucaacuacaugucag

SEQ ID NO: 4408 - RNA, 21 nt, Artificial Sequence
  RPE65 RNA guide
gacauguaguugagcguuccc

SEQ ID NO: 4409 - RNA, 21 nt, Artificial Sequence
  RPE65 RNA guide
gagcguucccaaaauacucac

SEQ ID NO: 4410 - RNA, 21 nt, Artificial Sequence
  RPE65 RNA guide
gaguauuuugggaacgcucaa

SEQ ID NO: 4411 - RNA, 21 nt, Artificial Sequence
  RPE65 RNA guide
gcguucccaaaauacucacca

SEQ ID NO: 4412 - RNA, 21 nt, Artificial Sequence
  RPE65 RNA guide
ggaacgcucaacuacauguca

SEQ ID NO: 4413 - RNA, 21 nt, Artificial Sequence
  RPE65 RNA guide
gggaacgcucaacuacauguc

SEQ ID NO: 4414 - RNA, 21 nt, Artificial Sequence
  RPE65 RNA guide
ggugaguauuuugggaacgcu

SEQ ID NO: 4415 - RNA, 21 nt, Artificial Sequence
  RPE65 RNA guide
guaguugagcguucccaaaau

SEQ ID NO: 4416 - RNA, 21 nt, Artificial Sequence
  RPE65 RNA guide
guauuuugggaacgcucaacu

SEQ ID NO: 4417 - RNA, 21 nt, Artificial Sequence
  RPE65 RNA guide
gugaguauuuugggaacgcuc

SEQ ID NO: 4418 - RNA, 21 nt, Artificial Sequence
  RPE65 RNA guide
guugagcguucccaaaauacu

SEQ ID NO: 4419 - RNA, 21 nt, Artificial Sequence
  RPE65 RNA guide
uaguugagcguucccaaaaua

SEQ ID NO: 4420 - RNA, 21 nt, Artificial Sequence
  RPE65 RNA guide
uauuuugggaacgcucaacua

SEQ ID NO: 4421 - RNA, 21 nt, Artificial Sequence
  RPE65 RNA guide
ucacugacauguaguugagcg

SEQ ID NO: 4422 - RNA, 21 nt, Artificial Sequence
  RPE65 RNA guide
ugacauguaguugagcguucc

SEQ ID NO: 4423 - RNA, 21 nt, Artificial Sequence
  RPE65 RNA guide
ugagcguucccaaaauacuca

SEQ ID NO: 4424 - RNA, 21 nt, Artificial Sequence
  RPE65 RNA guide
ugaguauuuugggaacgcuca

SEQ ID NO: 4425 - RNA, 21 nt, Artificial Sequence
  RPE65 RNA guide
ugggaacgcucaacuacaugu

SEQ ID NO: 4426 - RNA, 21 nt, Artificial Sequence
  RPE65 RNA guide
uggugaguauuuugggaacgc

SEQ ID NO: 4427 - RNA, 21 nt, Artificial Sequence
  RPE65 RNA guide
uguaguugagcguucccaaaa

SEQ ID NO: 4428 - RNA, 21 nt, Artificial Sequence
  RPE65 RNA guide
uugagcguucccaaaauacuc

SEQ ID NO: 4429 - RNA, 21 nt, Artificial Sequence
  RPE65 RNA guide
uugggaacgcucaacuacaug

SEQ ID NO: 4430 - RNA, 21 nt, Artificial Sequence
  RPE65 RNA guide
uuggugaguauuuugggaacg

SEQ ID NO: 4431 - RNA, 21 nt, Artificial Sequence
  RPE65 RNA guide
uuugggaacgcucaacuacau

SEQ ID NO: 4432 - RNA, 21 nt, Artificial Sequence
  RPE65 RNA guide
uuuggugaguauuuugggaac

SEQ ID NO: 4433 - RNA, 21 nt, Artificial Sequence
  RPE65 RNA guide
uuuugggaacgcucaacuaca

SEQ ID NO: 4434 - RNA, 22 nt, Artificial Sequence
  RPE65 RNA guide
aacgcucaacuacaugucagug

SEQ ID NO: 4435 - RNA, 22 nt, Artificial Sequence
  RPE65 RNA guide
acauguaguugagcguucccaa

SEQ ID NO: 4436 - RNA, 22 nt, Artificial Sequence
  RPE65 RNA guide
acgcucaacuacaugucaguga

SEQ ID NO: 4437 - RNA, 22 nt, Artificial Sequence
  RPE65 RNA guide
acugacauguaguugagcguuc

SEQ ID NO: 4438 - RNA, 22 nt, Artificial Sequence
  RPE65 RNA guide
agcguucccaaaauacucacca

SEQ ID NO: 4439 - RNA, 22 nt, Artificial Sequence
  RPE65 RNA guide
aguauuuugggaacgcucaacu

SEQ ID NO: 4440 - RNA, 22 nt, Artificial Sequence
  RPE65 RNA guide
aguugagcguucccaaaauacu

SEQ ID NO: 4441 - RNA, 22 nt, Artificial Sequence
  RPE65 RNA guide
aucacugacauguaguugagcg

SEQ ID NO: 4442 - RNA, 22 nt, Artificial Sequence
  RPE65 RNA guide
auguaguugagcguucccaaaa

SEQ ID NO: 4443 - RNA, 22 nt, Artificial Sequence
  RPE65 RNA guide
auuuggugaguauuuugggaac

SEQ ID NO: 4444 - RNA, 22 nt, Artificial Sequence
  RPE65 RNA guide
auuuugggaacgcucaacuaca

SEQ ID NO: 4445 - RNA, 22 nt, Artificial Sequence
  RPE65 RNA guide
cacugacauguaguugagcguu

SEQ ID NO: 4446 - RNA, 22 nt, Artificial Sequence
  RPE65 RNA guide
cauguaguugagcguucccaaa

SEQ ID NO: 4447 - RNA, 22 nt, Artificial Sequence
  RPE65 RNA guide
cguucccaaaauacucaccaaa

SEQ ID NO: 4448 - RNA, 22 nt, Artificial Sequence
  RPE65 RNA guide
cugacauguaguugagcguucc

SEQ ID NO: 4449 - RNA, 22 nt, Artificial Sequence
  RPE65 RNA guide
gaacgcucaacuacaugucagu

SEQ ID NO: 4450 - RNA, 22 nt, Artificial Sequence
  RPE65 RNA guide
gacauguaguugagcguuccca

SEQ ID NO: 4451 - RNA, 22 nt, Artificial Sequence
  RPE65 RNA guide
gagcguucccaaaauacucacc

SEQ ID NO: 4452 - RNA, 22 nt, Artificial Sequence
  RPE65 RNA guide
gaguauuuugggaacgcucaac

SEQ ID NO: 4453 - RNA, 22 nt, Artificial Sequence
  RPE65 RNA guide
gcguucccaaaauacucaccaa

SEQ ID NO: 4454 - RNA, 22 nt, Artificial Sequence
  RPE65 RNA guide
ggaacgcucaacuacaugucag

SEQ ID NO: 4455 - RNA, 22 nt, Artificial Sequence
  RPE65 RNA guide
gggaacgcucaacuacauguca

SEQ ID NO: 4456 - RNA, 22 nt, Artificial Sequence
  RPE65 RNA guide
ggugaguauuuugggaacgcuc

SEQ ID NO: 4457 - RNA, 22 nt, Artificial Sequence
  RPE65 RNA guide
guaguugagcguucccaaaaua

SEQ ID NO: 4458 - RNA, 22 nt, Artificial Sequence
  RPE65 RNA guide
guauuuugggaacgcucaacua

SEQ ID NO: 4459 - RNA, 22 nt, Artificial Sequence
  RPE65 RNA guide
gugaguauuuugggaacgcuca

SEQ ID NO: 4460 - RNA, 22 nt, Artificial Sequence
  RPE65 RNA guide
guugagcguucccaaaauacuc

SEQ ID NO: 4461 - RNA, 22 nt, Artificial Sequence
  RPE65 RNA guide
uaguugagcguucccaaaauac

SEQ ID NO: 4462 - RNA, 22 nt, Artificial Sequence
  RPE65 RNA guide
uauuuugggaacgcucaacuac

SEQ ID NO: 4463 - RNA, 22 nt, Artificial Sequence
  RPE65 RNA guide
ucacugacauguaguugagcgu

SEQ ID NO: 4464 - RNA, 22 nt, Artificial Sequence
  RPE65 RNA guide
ugacauguaguugagcguuccc

SEQ ID NO: 4465 - RNA, 22 nt, Artificial Sequence
  RPE65 RNA guide
ugagcguucccaaaauacucac

SEQ ID NO: 4466 - RNA, 22 nt, Artificial Sequence
  RPE65 RNA guide
ugaguauuuugggaacgcucaa

SEQ ID NO: 4467 - RNA, 22 nt, Artificial Sequence
  RPE65 RNA guide
ugggaacgcucaacuacauguc

SEQ ID NO: 4468 - RNA, 22 nt, Artificial Sequence
  RPE65 RNA guide
uggugaguauuuugggaacgcu

SEQ ID NO: 4469 - RNA, 22 nt, Artificial Sequence
  RPE65 RNA guide
uguaguugagcguucccaaaau

SEQ ID NO: 4470 - RNA, 22 nt, Artificial Sequence
  RPE65 RNA guide
uugagcguucccaaaauacuca

SEQ ID NO: 4471 - RNA, 22 nt, Artificial Sequence
  RPE65 RNA guide
uugggaacgcucaacuacaugu

SEQ ID NO: 4472 - RNA, 22 nt, Artificial Sequence
  RPE65 RNA guide
uuggugaguauuuugggaacgc

SEQ ID NO: 4473 - RNA, 22 nt, Artificial Sequence
  RPE65 RNA guide
uuugggaacgcucaacuacaug

SEQ ID NO: 4474 - RNA, 22 nt, Artificial Sequence
  RPE65 RNA guide
uuuggugaguauuuugggaacg

SEQ ID NO: 4475 - RNA, 22 nt, Artificial Sequence
  RPE65 RNA guide
uuuugggaacgcucaacuacau

SEQ ID NO: 4476 - RNA, 20 nt, Artificial Sequence
  RPE65 RNA guide
aaagaaagaucauggagaga

SEQ ID NO: 4477 - RNA, 20 nt, Artificial Sequence
  RPE65 RNA guide
aaagaucauggagagagauc

SEQ ID NO: 4478 - RNA, 20 nt, Artificial Sequence
  RPE65 RNA guide
aagaaagaucauggagagag

SEQ ID NO: 4479 - RNA, 20 nt, Artificial Sequence
  RPE65 RNA guide
aagaucauggagagagauca

SEQ ID NO: 4480 - RNA, 20 nt, Artificial Sequence
  RPE65 RNA guide
agaaagaucauggagagaga

SEQ ID NO: 4481 - RNA, 20 nt, Artificial Sequence
  RPE65 RNA guide
agaucauggagagagaucaa

SEQ ID NO: 4482 - RNA, 20 nt, Artificial Sequence
  RPE65 RNA guide
agauugaucucucuccauga

SEQ ID NO: 4483 - RNA, 20 nt, Artificial Sequence
  RPE65 RNA guide
agcuccaaagaaagaucaug

SEQ ID NO: 4484 - RNA, 20 nt, Artificial Sequence
  RPE65 RNA guide
aucucucuccaugaucuuuc

SEQ ID NO: 4485 - RNA, 20 nt, Artificial Sequence
  RPE65 RNA guide
aucuggagcuccaaagaaag

SEQ ID NO: 4486 - RNA, 20 nt, Artificial Sequence
  RPE65 RNA guide
aucuuucuuuggagcuccag

SEQ ID NO: 4487 - RNA, 20 nt, Artificial Sequence
  RPE65 RNA guide
augaucuuucuuuggagcuc

SEQ ID NO: 4488 - RNA, 20 nt, Artificial Sequence
  RPE65 RNA guide
auugaucucucuccaugauc

SEQ ID NO: 4489 - RNA, 20 nt, Artificial Sequence
  RPE65 RNA guide
caaagaaagaucauggagag

SEQ ID NO: 4490 - RNA, 20 nt, Artificial Sequence
  RPE65 RNA guide
cagauugaucucucuccaug

SEQ ID NO: 4491 - RNA, 20 nt, Artificial Sequence
  RPE65 RNA guide
caugaucuuucuuuggagcu

SEQ ID NO: 4492 - RNA, 20 nt, Artificial Sequence
  RPE65 RNA guide
ccaaagaaagaucauggaga

SEQ ID NO: 4493 - RNA, 20 nt, Artificial Sequence
  RPE65 RNA guide
ccagauugaucucucuccau

SEQ ID NO: 4494 - RNA, 20 nt, Artificial Sequence
  RPE65 RNA guide
ccaugaucuuucuuuggagc

SEQ ID NO: 4495 - RNA, 20 nt, Artificial Sequence
  RPE65 RNA guide
cccagauugaucucucucca

SEQ ID NO: 4496 - RNA, 20 nt, Artificial Sequence
  RPE65 RNA guide
cuccaaagaaagaucaugga

SEQ ID NO: 4497 - RNA, 20 nt, Artificial Sequence
  RPE65 RNA guide
cuccaugaucuuucuuugga

SEQ ID NO: 4498 - RNA, 20 nt, Artificial Sequence
  RPE65 RNA guide
cucuccaugaucuuucuuug

SEQ ID NO: 4499 - RNA, 20 nt, Artificial Sequence
  RPE65 RNA guide
cucucuccaugaucuuucuu

SEQ ID NO: 4500 - RNA, 20 nt, Artificial Sequence
  RPE65 RNA guide
cuggagcuccaaagaaagau

SEQ ID NO: 4501 - RNA, 20 nt, Artificial Sequence
  RPE65 RNA guide
gaaagaucauggagagagau

SEQ ID NO: 4502 - RNA, 20 nt, Artificial Sequence
  RPE65 RNA guide
gagcuccaaagaaagaucau

SEQ ID NO: 4503 - RNA, 20 nt, Artificial Sequence
  RPE65 RNA guide
gaucauggagagagaucaau

SEQ ID NO: 4504 - RNA, 20 nt, Artificial Sequence
  RPE65 RNA guide
gaucucucuccaugaucuuu

SEQ ID NO: 4505 - RNA, 20 nt, Artificial Sequence
  RPE65 RNA guide
gaucuggagcuccaaagaaa

SEQ ID NO: 4506 - RNA, 20 nt, Artificial Sequence
  RPE65 RNA guide
gaucuuucuuuggagcucca

SEQ ID NO: 4507 - RNA, 20 nt, Artificial Sequence
  RPE65 RNA guide
gauugaucucucuccaugau

SEQ ID NO: 4508 - RNA, 20 nt, Artificial Sequence
  RPE65 RNA guide
gcuccaaagaaagaucaugg

SEQ ID NO: 4509 - RNA, 20 nt, Artificial Sequence
  RPE65 RNA guide
ggagcuccaaagaaagauca

SEQ ID NO: 4510 - RNA, 20 nt, Artificial Sequence
  RPE65 RNA guide
ggaucuggagcuccaaagaa

SEQ ID NO: 4511 - RNA, 20 nt, Artificial Sequence
  RPE65 RNA guide
uccaaagaaagaucauggag

SEQ ID NO: 4512 - RNA, 20 nt, Artificial Sequence
  RPE65 RNA guide
uccaugaucuuucuuuggag

SEQ ID NO: 4513 - RNA, 20 nt, Artificial Sequence
  RPE65 RNA guide
ucuccaugaucuuucuuugg

SEQ ID NO: 4514 - RNA, 20 nt, Artificial Sequence
  RPE65 RNA guide
ucucuccaugaucuuucuuu

SEQ ID NO: 4515 - RNA, 20 nt, Artificial Sequence
  RPE65 RNA guide
ucucucuccaugaucuuucu

SEQ ID NO: 4516 - RNA, 20 nt, Artificial Sequence
  RPE65 RNA guide
ucuggagcuccaaagaaaga

SEQ ID NO: 4517 - RNA, 20 nt, Artificial Sequence
  RPE65 RNA guide
ugaucucucuccaugaucuu

SEQ ID NO: 4518 - RNA, 20 nt, Artificial Sequence
  RPE65 RNA guide
ugaucuuucuuuggagcucc

SEQ ID NO: 4519 - RNA, 20 nt, Artificial Sequence
  RPE65 RNA guide
uggagcuccaaagaaagauc

SEQ ID NO: 4520 - RNA, 20 nt, Artificial Sequence
  RPE65 RNA guide
uggaucuggagcuccaaaga

SEQ ID NO: 4521 - RNA, 20 nt, Artificial Sequence
  RPE65 RNA guide
uugaucucucuccaugaucu

SEQ ID NO: 4522 - RNA, 21 nt, Artificial Sequence
  RPE65 RNA guide
aaagaaagaucauggagagag

SEQ ID NO: 4523 - RNA, 21 nt, Artificial Sequence
  RPE65 RNA guide
aaagaucauggagagagauca

SEQ ID NO: 4524 - RNA, 21 nt, Artificial Sequence
  RPE65 RNA guide
aagaaagaucauggagagaga

SEQ ID NO: 4525 - RNA, 21 nt, Artificial Sequence
  RPE65 RNA guide
aagaucauggagagagaucaa

SEQ ID NO: 4526 - RNA, 21 nt, Artificial Sequence
  RPE65 RNA guide
acccagauugaucucucucca

SEQ ID NO: 4527 - RNA, 21 nt, Artificial Sequence
  RPE65 RNA guide
agaaagaucauggagagagau

SEQ ID NO: 4528 - RNA, 21 nt, Artificial Sequence
  RPE65 RNA guide
agaucauggagagagaucaau

SEQ ID NO: 4529 - RNA, 21 nt, Artificial Sequence
  RPE65 RNA guide
agauugaucucucuccaugau

SEQ ID NO: 4530 - RNA, 21 nt, Artificial Sequence
  RPE65 RNA guide
agcuccaaagaaagaucaugg

SEQ ID NO: 4531 - RNA, 21 nt, Artificial Sequence
  RPE65 RNA guide
aucucucuccaugaucuuucu

SEQ ID NO: 4532 - RNA, 21 nt, Artificial Sequence
  RPE65 RNA guide
aucuggagcuccaaagaaaga

SEQ ID NO: 4533 - RNA, 21 nt, Artificial Sequence
  RPE65 RNA guide
aucuuucuuuggagcuccaga

SEQ ID NO: 4534 - RNA, 21 nt, Artificial Sequence
  RPE65 RNA guide
augaucuuucuuuggagcucc

SEQ ID NO: 4535 - RNA, 21 nt, Artificial Sequence
  RPE65 RNA guide
auggaucuggagcuccaaaga

SEQ ID NO: 4536 - RNA, 21 nt, Artificial Sequence
  RPE65 RNA guide
auugaucucucuccaugaucu

SEQ ID NO: 4537 - RNA, 21 nt, Artificial Sequence
  RPE65 RNA guide
caaagaaagaucauggagaga

SEQ ID NO: 4538 - RNA, 21 nt, Artificial Sequence
  RPE65 RNA guide
cagauugaucucucuccauga

SEQ ID NO: 4539 - RNA, 21 nt, Artificial Sequence
  RPE65 RNA guide
caugaucuuucuuuggagcuc

SEQ ID NO: 4540 - RNA, 21 nt, Artificial Sequence
  RPE65 RNA guide
ccaaagaaagaucauggagag

SEQ ID NO: 4541 - RNA, 21 nt, Artificial Sequence
  RPE65 RNA guide
ccagauugaucucucuccaug

SEQ ID NO: 4542 - RNA, 21 nt, Artificial Sequence
  RPE65 RNA guide
ccaugaucuuucuuuggagcu

SEQ ID NO: 4543 - RNA, 21 nt, Artificial Sequence
  RPE65 RNA guide
cccagauugaucucucuccau

SEQ ID NO: 4544 - RNA, 21 nt, Artificial Sequence
  RPE65 RNA guide
cuccaaagaaagaucauggag

SEQ ID NO: 4545 - RNA, 21 nt, Artificial Sequence
  RPE65 RNA guide
cuccaugaucuuucuuuggag

SEQ ID NO: 4546 - RNA, 21 nt, Artificial Sequence
  RPE65 RNA guide
cucuccaugaucuuucuuugg

SEQ ID NO: 4547 - RNA, 21 nt, Artificial Sequence
  RPE65 RNA guide
cucucuccaugaucuuucuuu

SEQ ID NO: 4548 - RNA, 21 nt, Artificial Sequence
  RPE65 RNA guide
cuggagcuccaaagaaagauc

SEQ ID NO: 4549 - RNA, 21 nt, Artificial Sequence
  RPE65 RNA guide
gaaagaucauggagagagauc

SEQ ID NO: 4550 - RNA, 21 nt, Artificial Sequence
  RPE65 RNA guide
gagcuccaaagaaagaucaug

SEQ ID NO: 4551 - RNA, 21 nt, Artificial Sequence
  RPE65 RNA guide
gaucauggagagagaucaauc

SEQ ID NO: 4552 - RNA, 21 nt, Artificial Sequence
  RPE65 RNA guide
gaucucucuccaugaucuuuc

SEQ ID NO: 4553 - RNA, 21 nt, Artificial Sequence
  RPE65 RNA guide
gaucuggagcuccaaagaaag

SEQ ID NO: 4554 - RNA, 21 nt, Artificial Sequence
  RPE65 RNA guide
gaucuuucuuuggagcuccag

SEQ ID NO: 4555 - RNA, 21 nt, Artificial Sequence
  RPE65 RNA guide
gauugaucucucuccaugauc

SEQ ID NO: 4556 - RNA, 21 nt, Artificial Sequence
  RPE65 RNA guide
gcuccaaagaaagaucaugga

SEQ ID NO: 4557 - RNA, 21 nt, Artificial Sequence
  RPE65 RNA guide
ggagcuccaaagaaagaucau

SEQ ID NO: 4558 - RNA, 21 nt, Artificial Sequence
  RPE65 RNA guide
ggaucuggagcuccaaagaaa

SEQ ID NO: 4559 - RNA, 21 nt, Artificial Sequence
  RPE65 RNA guide
uccaaagaaagaucauggaga

SEQ ID NO: 4560 - RNA, 21 nt, Artificial Sequence
  RPE65 RNA guide
uccaugaucuuucuuuggagc

SEQ ID NO: 4561 - RNA, 21 nt, Artificial Sequence
  RPE65 RNA guide
ucuccaugaucuuucuuugga

SEQ ID NO: 4562 - RNA, 21 nt, Artificial Sequence
  RPE65 RNA guide
ucucuccaugaucuuucuuug

SEQ ID NO: 4563 - RNA, 21 nt, Artificial Sequence
  RPE65 RNA guide
ucucucuccaugaucuuucuu

SEQ ID NO: 4564 - RNA, 21 nt, Artificial Sequence
  RPE65 RNA guide
ucuggagcuccaaagaaagau

SEQ ID NO: 4565 - RNA, 21 nt, Artificial Sequence
  RPE65 RNA guide
ugaucucucuccaugaucuuu

SEQ ID NO: 4566 - RNA, 21 nt, Artificial Sequence
  RPE65 RNA guide
ugaucuuucuuuggagcucca

SEQ ID NO: 4567 - RNA, 21 nt, Artificial Sequence
  RPE65 RNA guide
uggagcuccaaagaaagauca

SEQ ID NO: 4568 - RNA, 21 nt, Artificial Sequence
  RPE65 RNA guide
uggaucuggagcuccaaagaa

SEQ ID NO: 4569 - RNA, 21 nt, Artificial Sequence
  RPE65 RNA guide
uugaucucucuccaugaucuu

SEQ ID NO: 4570 - RNA, 22 nt, Artificial Sequence
  RPE65 RNA guide
aaagaaagaucauggagagaga

SEQ ID NO: 4571 - RNA, 22 nt, Artificial Sequence
  RPE65 RNA guide
aaagaucauggagagagaucaa

SEQ ID NO: 4572 - RNA, 22 nt, Artificial Sequence
  RPE65 RNA guide
aagaaagaucauggagagagau

SEQ ID NO: 4573 - RNA, 22 nt, Artificial Sequence
  RPE65 RNA guide
aagaucauggagagagaucaau

SEQ ID NO: 4574 - RNA, 22 nt, Artificial Sequence
  RPE65 RNA guide
acccagauugaucucucuccau

SEQ ID NO: 4575 - RNA, 22 nt, Artificial Sequence
  RPE65 RNA guide
agaaagaucauggagagagauc

SEQ ID NO: 4576 - RNA, 22 nt, Artificial Sequence
  RPE65 RNA guide
agaucauggagagagaucaauc

SEQ ID NO: 4577 - RNA, 22 nt, Artificial Sequence
  RPE65 RNA guide
agauugaucucucuccaugauc

SEQ ID NO: 4578 - RNA, 22 nt, Artificial Sequence
  RPE65 RNA guide
agcuccaaagaaagaucaugga

SEQ ID NO: 4579 - RNA, 22 nt, Artificial Sequence
  RPE65 RNA guide
aucucucuccaugaucuuucuu

SEQ ID NO: 4580 - RNA, 22 nt, Artificial Sequence
  RPE65 RNA guide
aucuggagcuccaaagaaagau

SEQ ID NO: 4581 - RNA, 22 nt, Artificial Sequence
  RPE65 RNA guide
aucuuucuuuggagcuccagau

SEQ ID NO: 4582 - RNA, 22 nt, Artificial Sequence
  RPE65 RNA guide
augaucuuucuuuggagcucca

SEQ ID NO: 4583 - RNA, 22 nt, Artificial Sequence
  RPE65 RNA guide
auggaucuggagcuccaaagaa

SEQ ID NO: 4584 - RNA, 22 nt, Artificial Sequence
  RPE65 RNA guide
auugaucucucuccaugaucuu

SEQ ID NO: 4585 - RNA, 22 nt, Artificial Sequence
  RPE65 RNA guide
caaagaaagaucauggagagag

SEQ ID NO: 4586 - RNA, 22 nt, Artificial Sequence
  RPE65 RNA guide
cagauugaucucucuccaugau

SEQ ID NO: 4587 - RNA, 22 nt, Artificial Sequence
  RPE65 RNA guide
caugaucuuucuuuggagcucc

SEQ ID NO: 4588 - RNA, 22 nt, Artificial Sequence
  RPE65 RNA guide
cauggaucuggagcuccaaaga

SEQ ID NO: 4589 - RNA, 22 nt, Artificial Sequence
  RPE65 RNA guide
ccaaagaaagaucauggagaga

SEQ ID NO: 4590 - RNA, 22 nt, Artificial Sequence
  RPE65 RNA guide
ccagauugaucucucuccauga

SEQ ID NO: 4591 - RNA, 22 nt, Artificial Sequence
  RPE65 RNA guide
ccaugaucuuucuuuggagcuc

SEQ ID NO: 4592 - RNA, 22 nt, Artificial Sequence
  RPE65 RNA guide
cccagauugaucucucuccaug

SEQ ID NO: 4593 - RNA, 22 nt, Artificial Sequence
  RPE65 RNA guide
cuccaaagaaagaucauggaga

SEQ ID NO: 4594 - RNA, 22 nt, Artificial Sequence
  RPE65 RNA guide
cuccaugaucuuucuuuggagc

SEQ ID NO: 4595 - RNA, 22 nt, Artificial Sequence
  RPE65 RNA guide
cucuccaugaucuuucuuugga

SEQ ID NO: 4596 - RNA, 22 nt, Artificial Sequence
  RPE65 RNA guide
cucucuccaugaucuuucuuug

SEQ ID NO: 4597 - RNA, 22 nt, Artificial Sequence
  RPE65 RNA guide
cuggagcuccaaagaaagauca

SEQ ID NO: 4598 - RNA, 22 nt, Artificial Sequence
  RPE65 RNA guide
gaaagaucauggagagagauca

SEQ ID NO: 4599 - RNA, 22 nt, Artificial Sequence
  RPE65 RNA guide
gagcuccaaagaaagaucaugg

SEQ ID NO: 4600 - RNA, 22 nt, Artificial Sequence
  RPE65 RNA guide
gaucauggagagagaucaaucu

SEQ ID NO: 4601 - RNA, 22 nt, Artificial Sequence
  RPE65 RNA guide
gaucucucuccaugaucuuucu

SEQ ID NO: 4602 - RNA, 22 nt, Artificial Sequence
  RPE65 RNA guide
gaucuggagcuccaaagaaaga

SEQ ID NO: 4603 - RNA, 22 nt, Artificial Sequence
  RPE65 RNA guide
gaucuuucuuuggagcuccaga

SEQ ID NO: 4604 - RNA, 22 nt, Artificial Sequence
  RPE65 RNA guide
gauugaucucucuccaugaucu

SEQ ID NO: 4605 - RNA, 22 nt, Artificial Sequence
  RPE65 RNA guide
gcuccaaagaaagaucauggag

SEQ ID NO: 4606 - RNA, 22 nt, Artificial Sequence
  RPE65 RNA guide
ggagcuccaaagaaagaucaug

SEQ ID NO: 4607 - RNA, 22 nt, Artificial Sequence
  RPE65 RNA guide
ggaucuggagcuccaaagaaag

SEQ ID NO: 4608 - RNA, 22 nt, Artificial Sequence
  RPE65 RNA guide
uacccagauugaucucucucca

SEQ ID NO: 4609 - RNA, 22 nt, Artificial Sequence
  RPE65 RNA guide
uccaaagaaagaucauggagag

SEQ ID NO: 4610 - RNA, 22 nt, Artificial Sequence
  RPE65 RNA guide
uccaugaucuuucuuuggagcu

SEQ ID NO: 4611 - RNA, 22 nt, Artificial Sequence
  RPE65 RNA guide
ucuccaugaucuuucuuuggag

SEQ ID NO: 4612 - RNA, 22 nt, Artificial Sequence
  RPE65 RNA guide
ucucuccaugaucuuucuuugg

SEQ ID NO: 4613 - RNA, 22 nt, Artificial Sequence
  RPE65 RNA guide
ucucucuccaugaucuuucuuu

SEQ ID NO: 4614 - RNA, 22 nt, Artificial Sequence
  RPE65 RNA guide
ucuggagcuccaaagaaagauc

SEQ ID NO: 4615 - RNA, 22 nt, Artificial Sequence
  RPE65 RNA guide
ugaucucucuccaugaucuuuc

SEQ ID NO: 4616 - RNA, 22 nt, Artificial Sequence
  RPE65 RNA guide
ugaucuuucuuuggagcuccag

SEQ ID NO: 4617 - RNA, 22 nt, Artificial Sequence
  RPE65 RNA guide
uggagcuccaaagaaagaucau

SEQ ID NO: 4618 - RNA, 22 nt, Artificial Sequence
  RPE65 RNA guide
uggaucuggagcuccaaagaaa

SEQ ID NO: 4619 - RNA, 22 nt, Artificial Sequence
  RPE65 RNA guide
uugaucucucuccaugaucuuu

SEQ ID NO: 4620 - RNA, 20 nt, Artificial Sequence
  RPE65 RNA guide
aaagaaaggucauggagaga

SEQ ID NO: 4621 - RNA, 20 nt, Artificial Sequence
  RPE65 RNA guide
aaaggucauggagagagauc

SEQ ID NO: 4622 - RNA, 20 nt, Artificial Sequence
  RPE65 RNA guide
aagaaaggucauggagagag

SEQ ID NO: 4623 - RNA, 20 nt, Artificial Sequence
  RPE65 RNA guide
aaggucauggagagagauca

SEQ ID NO: 4624 - RNA, 20 nt, Artificial Sequence
  RPE65 RNA guide
accuuucuuuggagcuccag

SEQ ID NO: 4625 - RNA, 20 nt, Artificial Sequence
  RPE65 RNA guide
agaaaggucauggagagaga

SEQ ID NO: 4626 - RNA, 20 nt, Artificial Sequence
  RPE65 RNA guide
agcuccaaagaaaggucaug

SEQ ID NO: 4627 - RNA, 20 nt, Artificial Sequence
  RPE65 RNA guide
aggucauggagagagaucaa

SEQ ID NO: 4628 - RNA, 20 nt, Artificial Sequence
  RPE65 RNA guide
aucucucuccaugaccuuuc

SEQ ID NO: 4629 - RNA, 20 nt, Artificial Sequence
  RPE65 RNA guide
augaccuuucuuuggagcuc

SEQ ID NO: 4630 - RNA, 20 nt, Artificial Sequence
  RPE65 RNA guide
auugaucucucuccaugacc

SEQ ID NO: 4631 - RNA, 20 nt, Artificial Sequence
  RPE65 RNA guide
caaagaaaggucauggagag

SEQ ID NO: 4632 - RNA, 20 nt, Artificial Sequence
  RPE65 RNA guide
caugaccuuucuuuggagcu

SEQ ID NO: 4633 - RNA, 20 nt, Artificial Sequence
  RPE65 RNA guide
ccaaagaaaggucauggaga

SEQ ID NO: 4634 - RNA, 20 nt, Artificial Sequence
  RPE65 RNA guide
ccaugaccuuucuuuggagc

SEQ ID NO: 4635 - RNA, 20 nt, Artificial Sequence
  RPE65 RNA guide
cuccaaagaaaggucaugga

SEQ ID NO: 4636 - RNA, 20 nt, Artificial Sequence
  RPE65 RNA guide
cuccaugaccuuucuuugga

SEQ ID NO: 4637 - RNA, 20 nt, Artificial Sequence
  RPE65 RNA guide
cucuccaugaccuuucuuug

SEQ ID NO: 4638 - RNA, 20 nt, Artificial Sequence
  RPE65 RNA guide
cucucuccaugaccuuucuu

SEQ ID NO: 4639 - RNA, 20 nt, Artificial Sequence
  RPE65 RNA guide
cuggagcuccaaagaaaggu

SEQ ID NO: 4640 - RNA, 20 nt, Artificial Sequence
  RPE65 RNA guide
gaaaggucauggagagagau

SEQ ID NO: 4641 - RNA, 20 nt, Artificial Sequence
  RPE65 RNA guide
gaccuuucuuuggagcucca

SEQ ID NO: 4642 - RNA, 20 nt, Artificial Sequence
  RPE65 RNA guide
gagcuccaaagaaaggucau

SEQ ID NO: 4643 - RNA, 20 nt, Artificial Sequence
  RPE65 RNA guide
gaucucucuccaugaccuuu

SEQ ID NO: 4644 - RNA, 20 nt, Artificial Sequence
  RPE65 RNA guide
gauugaucucucuccaugac

SEQ ID NO: 4645 - RNA, 20 nt, Artificial Sequence
  RPE65 RNA guide
gcuccaaagaaaggucaugg

SEQ ID NO: 4646 - RNA, 20 nt, Artificial Sequence
  RPE65 RNA guide
ggagcuccaaagaaagguca

SEQ ID NO: 4647 - RNA, 20 nt, Artificial Sequence
  RPE65 RNA guide
ggucauggagagagaucaau

SEQ ID NO: 4648 - RNA, 20 nt, Artificial Sequence
  RPE65 RNA guide
uccaaagaaaggucauggag

SEQ ID NO: 4649 - RNA, 20 nt, Artificial Sequence
  RPE65 RNA guide
uccaugaccuuucuuuggag

SEQ ID NO: 4650 - RNA, 20 nt, Artificial Sequence
  RPE65 RNA guide
ucuccaugaccuuucuuugg

SEQ ID NO: 4651 - RNA, 20 nt, Artificial Sequence
  RPE65 RNA guide
ucucuccaugaccuuucuuu

SEQ ID NO: 4652 - RNA, 20 nt, Artificial Sequence
  RPE65 RNA guide
ucucucuccaugaccuuucu

SEQ ID NO: 4653 - RNA, 20 nt, Artificial Sequence
  RPE65 RNA guide
ucuggagcuccaaagaaagg

SEQ ID NO: 4654 - RNA, 20 nt, Artificial Sequence
  RPE65 RNA guide
ugaccuuucuuuggagcucc

SEQ ID NO: 4655 - RNA, 20 nt, Artificial Sequence
  RPE65 RNA guide
ugaucucucuccaugaccuu

SEQ ID NO: 4656 - RNA, 20 nt, Artificial Sequence
  RPE65 RNA guide
uggagcuccaaagaaagguc

SEQ ID NO: 4657 - RNA, 20 nt, Artificial Sequence
  RPE65 RNA guide
uugaucucucuccaugaccu

SEQ ID NO: 4658 - RNA, 21 nt, Artificial Sequence
  RPE65 RNA guide
aaagaaaggucauggagagag

SEQ ID NO: 4659 - RNA, 21 nt, Artificial Sequence
  RPE65 RNA guide
aaaggucauggagagagauca

SEQ ID NO: 4660 - RNA, 21 nt, Artificial Sequence
  RPE65 RNA guide
aagaaaggucauggagagaga

SEQ ID NO: 4661 - RNA, 21 nt, Artificial Sequence
  RPE65 RNA guide
aaggucauggagagagaucaa

SEQ ID NO: 4662 - RNA, 21 nt, Artificial Sequence
  RPE65 RNA guide
accuuucuuuggagcuccaga

SEQ ID NO: 4663 - RNA, 21 nt, Artificial Sequence
  RPE65 RNA guide
agaaaggucauggagagagau

SEQ ID NO: 4664 - RNA, 21 nt, Artificial Sequence
  RPE65 RNA guide
agauugaucucucuccaugac

SEQ ID NO: 4665 - RNA, 21 nt, Artificial Sequence
  RPE65 RNA guide
agcuccaaagaaaggucaugg

SEQ ID NO: 4666 - RNA, 21 nt, Artificial Sequence
  RPE65 RNA guide
aggucauggagagagaucaau

SEQ ID NO: 4667 - RNA, 21 nt, Artificial Sequence
  RPE65 RNA guide
aucucucuccaugaccuuucu

SEQ ID NO: 4668 - RNA, 21 nt, Artificial Sequence
  RPE65 RNA guide
aucuggagcuccaaagaaagg

SEQ ID NO: 4669 - RNA, 21 nt, Artificial Sequence
  RPE65 RNA guide
augaccuuucuuuggagcucc

SEQ ID NO: 4670 - RNA, 21 nt, Artificial Sequence
  RPE65 RNA guide
auugaucucucuccaugaccu

SEQ ID NO: 4671 - RNA, 21 nt, Artificial Sequence
  RPE65 RNA guide
caaagaaaggucauggagaga

SEQ ID NO: 4672 - RNA, 21 nt, Artificial Sequence
  RPE65 RNA guide
caugaccuuucuuuggagcuc

SEQ ID NO: 4673 - RNA, 21 nt, Artificial Sequence
  RPE65 RNA guide
ccaaagaaaggucauggagag

SEQ ID NO: 4674 - RNA, 21 nt, Artificial Sequence
  RPE65 RNA guide
ccaugaccuuucuuuggagcu

SEQ ID NO: 4675 - RNA, 21 nt, Artificial Sequence
  RPE65 RNA guide
cuccaaagaaaggucauggag

SEQ ID NO: 4676 - RNA, 21 nt, Artificial Sequence
  RPE65 RNA guide
cuccaugaccuuucuuuggag

SEQ ID NO: 4677 - RNA, 21 nt, Artificial Sequence
  RPE65 RNA guide
cucuccaugaccuuucuuugg

SEQ ID NO: 4678 - RNA, 21 nt, Artificial Sequence
  RPE65 RNA guide
cucucuccaugaccuuucuuu

SEQ ID NO: 4679 - RNA, 21 nt, Artificial Sequence
  RPE65 RNA guide
cuggagcuccaaagaaagguc

SEQ ID NO: 4680 - RNA, 21 nt, Artificial Sequence
  RPE65 RNA guide
gaaaggucauggagagagauc

SEQ ID NO: 4681 - RNA, 21 nt, Artificial Sequence
  RPE65 RNA guide
gaccuuucuuuggagcuccag

SEQ ID NO: 4682 - RNA, 21 nt, Artificial Sequence
  RPE65 RNA guide
gagcuccaaagaaaggucaug

SEQ ID NO: 4683 - RNA, 21 nt, Artificial Sequence
  RPE65 RNA guide
gaucucucuccaugaccuuuc

SEQ ID NO: 4684 - RNA, 21 nt, Artificial Sequence
  RPE65 RNA guide
gauugaucucucuccaugacc

SEQ ID NO: 4685 - RNA, 21 nt, Artificial Sequence
  RPE65 RNA guide
gcuccaaagaaaggucaugga

SEQ ID NO: 4686 - RNA, 21 nt, Artificial Sequence
  RPE65 RNA guide
ggagcuccaaagaaaggucau

SEQ ID NO: 4687 - RNA, 21 nt, Artificial Sequence
  RPE65 RNA guide
ggucauggagagagaucaauc

SEQ ID NO: 4688 - RNA, 21 nt, Artificial Sequence
  RPE65 RNA guide
uccaaagaaaggucauggaga

SEQ ID NO: 4689 - RNA, 21 nt, Artificial Sequence
  RPE65 RNA guide
uccaugaccuuucuuuggagc

SEQ ID NO: 4690 - RNA, 21 nt, Artificial Sequence
  RPE65 RNA guide
ucuccaugaccuuucuuugga

SEQ ID NO: 4691 - RNA, 21 nt, Artificial Sequence
  RPE65 RNA guide
ucucuccaugaccuuucuuug

SEQ ID NO: 4692 - RNA, 21 nt, Artificial Sequence
  RPE65 RNA guide
ucucucuccaugaccuuucuu

SEQ ID NO: 4693 - RNA, 21 nt, Artificial Sequence
  RPE65 RNA guide
ucuggagcuccaaagaaaggu

SEQ ID NO: 4694 - RNA, 21 nt, Artificial Sequence
  RPE65 RNA guide
ugaccuuucuuuggagcucca

SEQ ID NO: 4695 - RNA, 21 nt, Artificial Sequence
  RPE65 RNA guide
ugaucucucuccaugaccuuu

SEQ ID NO: 4696 - RNA, 21 nt, Artificial Sequence
  RPE65 RNA guide
uggagcuccaaagaaagguca

SEQ ID NO: 4697 - RNA, 21 nt, Artificial Sequence
  RPE65 RNA guide
uugaucucucuccaugaccuu

SEQ ID NO: 4698 - RNA, 22 nt, Artificial Sequence
  RPE65 RNA guide
aaagaaaggucauggagagaga

SEQ ID NO: 4699 - RNA, 22 nt, Artificial Sequence
  RPE65 RNA guide
aaaggucauggagagagaucaa

SEQ ID NO: 4700 - RNA, 22 nt, Artificial Sequence
  RPE65 RNA guide
aagaaaggucauggagagagau

SEQ ID NO: 4701 - RNA, 22 nt, Artificial Sequence
  RPE65 RNA guide
aaggucauggagagagaucaau

SEQ ID NO: 4702 - RNA, 22 nt, Artificial Sequence
  RPE65 RNA guide
accuuucuuuggagcuccagau

SEQ ID NO: 4703 - RNA, 22 nt, Artificial Sequence
  RPE65 RNA guide
agaaaggucauggagagagauc

SEQ ID NO: 4704 - RNA, 22 nt, Artificial Sequence
  RPE65 RNA guide
agauugaucucucuccaugacc

SEQ ID NO: 4705 - RNA, 22 nt, Artificial Sequence
  RPE65 RNA guide
agcuccaaagaaaggucaugga

SEQ ID NO: 4706 - RNA, 22 nt, Artificial Sequence
  RPE65 RNA guide
aggucauggagagagaucaauc

SEQ ID NO: 4707 - RNA, 22 nt, Artificial Sequence
  RPE65 RNA guide
aucucucuccaugaccuuucuu

SEQ ID NO: 4708 - RNA, 22 nt, Artificial Sequence
  RPE65 RNA guide
aucuggagcuccaaagaaaggu

SEQ ID NO: 4709 - RNA, 22 nt, Artificial Sequence
  RPE65 RNA guide
augaccuuucuuuggagcucca

SEQ ID NO: 4710 - RNA, 22 nt, Artificial Sequence
  RPE65 RNA guide
auugaucucucuccaugaccuu

SEQ ID NO: 4711 - RNA, 22 nt, Artificial Sequence
  RPE65 RNA guide
caaagaaaggucauggagagag

SEQ ID NO: 4712 - RNA, 22 nt, Artificial Sequence
  RPE65 RNA guide
cagauugaucucucuccaugac

SEQ ID NO: 4713 - RNA, 22 nt, Artificial Sequence
  RPE65 RNA guide
caugaccuuucuuuggagcucc

SEQ ID NO: 4714 - RNA, 22 nt, Artificial Sequence
  RPE65 RNA guide
ccaaagaaaggucauggagaga

SEQ ID NO: 4715 - RNA, 22 nt, Artificial Sequence
  RPE65 RNA guide
ccaugaccuuucuuuggagcuc

SEQ ID NO: 4716 - RNA, 22 nt, Artificial Sequence
  RPE65 RNA guide
cuccaaagaaaggucauggaga

SEQ ID NO: 4717 - RNA, 22 nt, Artificial Sequence
  RPE65 RNA guide
cuccaugaccuuucuuuggagc

SEQ ID NO: 4718 - RNA, 22 nt, Artificial Sequence
  RPE65 RNA guide
cucuccaugaccuuucuuugga

SEQ ID NO: 4719 - RNA, 22 nt, Artificial Sequence
  RPE65 RNA guide
cucucuccaugaccuuucuuug

SEQ ID NO: 4720 - RNA, 22 nt, Artificial Sequence
  RPE65 RNA guide
cuggagcuccaaagaaagguca

SEQ ID NO: 4721 - RNA, 22 nt, Artificial Sequence
  RPE65 RNA guide
gaaaggucauggagagagauca

SEQ ID NO: 4722 - RNA, 22 nt, Artificial Sequence
  RPE65 RNA guide
gaccuuucuuuggagcuccaga

SEQ ID NO: 4723 - RNA, 22 nt, Artificial Sequence
  RPE65 RNA guide
gagcuccaaagaaaggucaugg

SEQ ID NO: 4724 - RNA, 22 nt, Artificial Sequence
  RPE65 RNA guide
gaucucucuccaugaccuuucu

SEQ ID NO: 4725 - RNA, 22 nt, Artificial Sequence
  RPE65 RNA guide
gaucuggagcuccaaagaaagg

SEQ ID NO: 4726 - RNA, 22 nt, Artificial Sequence
  RPE65 RNA guide
gauugaucucucuccaugaccu

SEQ ID NO: 4727 - RNA, 22 nt, Artificial Sequence
  RPE65 RNA guide
gcuccaaagaaaggucauggag

SEQ ID NO: 4728 - RNA, 22 nt, Artificial Sequence
  RPE65 RNA guide
ggagcuccaaagaaaggucaug

SEQ ID NO: 4729 - RNA, 22 nt, Artificial Sequence
  RPE65 RNA guide
ggucauggagagagaucaaucu

SEQ ID NO: 4730 - RNA, 22 nt, Artificial Sequence
  RPE65 RNA guide
uccaaagaaaggucauggagag

SEQ ID NO: 4731 - RNA, 22 nt, Artificial Sequence
  RPE65 RNA guide
uccaugaccuuucuuuggagcu

SEQ ID NO: 4732 - RNA, 22 nt, Artificial Sequence
  RPE65 RNA guide
ucuccaugaccuuucuuuggag

SEQ ID NO: 4733 - RNA, 22 nt, Artificial Sequence
  RPE65 RNA guide
ucucuccaugaccuuucuuugg

SEQ ID NO: 4734 - RNA, 22 nt, Artificial Sequence
  RPE65 RNA guide
ucucucuccaugaccuuucuuu

SEQ ID NO: 4735 - RNA, 22 nt, Artificial Sequence
  RPE65 RNA guide
ucuggagcuccaaagaaagguc

SEQ ID NO: 4736 - RNA, 22 nt, Artificial Sequence
  RPE65 RNA guide
ugaccuuucuuuggagcuccag

SEQ ID NO: 4737 - RNA, 22 nt, Artificial Sequence
  RPE65 RNA guide
ugaucucucuccaugaccuuuc

SEQ ID NO: 4738 - RNA, 22 nt, Artificial Sequence
  RPE65 RNA guide
uggagcuccaaagaaaggucau

SEQ ID NO: 4739 - RNA, 22 nt, Artificial Sequence
  RPE65 RNA guide
uugaucucucuccaugaccuuu

SEQ ID NO: 4740 - RNA, 20 nt, Artificial Sequence
  RPE65 RNA guide
aaauagaaguaacaggagcu

SEQ ID NO: 4741 - RNA, 20 nt, Artificial Sequence
  RPE65 RNA guide
aagcuagcuccuguuacuuc

SEQ ID NO: 4742 - RNA, 20 nt, Artificial Sequence
  RPE65 RNA guide
aauagaaguaacaggagcua

SEQ ID NO: 4743 - RNA, 20 nt, Artificial Sequence
  RPE65 RNA guide
acaagcuagcuccuguuacu

SEQ ID NO: 4744 - RNA, 20 nt, Artificial Sequence
  RPE65 RNA guide
agaaguaacaggagcuagcu

SEQ ID NO: 4745 - RNA, 20 nt, Artificial Sequence
  RPE65 RNA guide
agcuagcuccuguuacuucu

SEQ ID NO: 4746 - RNA, 20 nt, Artificial Sequence
  RPE65 RNA guide
agcuccuguuacuucuauuu

SEQ ID NO: 4747 - RNA, 20 nt, Artificial Sequence
  RPE65 RNA guide
auaaauagaaguaacaggag

SEQ ID NO: 4748 - RNA, 20 nt, Artificial Sequence
  RPE65 RNA guide
auagaaguaacaggagcuag

SEQ ID NO: 4749 - RNA, 20 nt, Artificial Sequence
  RPE65 RNA guide
caagcuagcuccuguuacuu

SEQ ID NO: 4750 - RNA, 20 nt, Artificial Sequence
  RPE65 RNA guide
cuacaagcuagcuccuguua

SEQ ID NO: 4751 - RNA, 20 nt, Artificial Sequence
  RPE65 RNA guide
cuagcuccuguuacuucuau

SEQ ID NO: 4752 - RNA, 20 nt, Artificial Sequence
  RPE65 RNA guide
cuccuguuacuucuauuuau

SEQ ID NO: 4753 - RNA, 20 nt, Artificial Sequence
  RPE65 RNA guide
gcuagcuccuguuacuucua

SEQ ID NO: 4754 - RNA, 20 nt, Artificial Sequence
  RPE65 RNA guide
gcuccuguuacuucuauuua

SEQ ID NO: 4755 - RNA, 20 nt, Artificial Sequence
  RPE65 RNA guide
uaaauagaaguaacaggagc

SEQ ID NO: 4756 - RNA, 20 nt, Artificial Sequence
  RPE65 RNA guide
uacaagcuagcuccuguuac

SEQ ID NO: 4757 - RNA, 20 nt, Artificial Sequence
  RPE65 RNA guide
uagaaguaacaggagcuagc

SEQ ID NO: 4758 - RNA, 20 nt, Artificial Sequence
  RPE65 RNA guide
uagcuccuguuacuucuauu

SEQ ID NO: 4759 - RNA, 21 nt, Artificial Sequence
  RPE65 RNA guide
aaauagaaguaacaggagcua

SEQ ID NO: 4760 - RNA, 21 nt, Artificial Sequence
  RPE65 RNA guide
aagcuagcuccuguuacuucu

SEQ ID NO: 4761 - RNA, 21 nt, Artificial Sequence
  RPE65 RNA guide
aauagaaguaacaggagcuag

SEQ ID NO: 4762 - RNA, 21 nt, Artificial Sequence
  RPE65 RNA guide
acaagcuagcuccuguuacuu

SEQ ID NO: 4763 - RNA, 21 nt, Artificial Sequence
  RPE65 RNA guide
agaaguaacaggagcuagcuu

SEQ ID NO: 4764 - RNA, 21 nt, Artificial Sequence
  RPE65 RNA guide
agcuagcuccuguuacuucua

SEQ ID NO: 4765 - RNA, 21 nt, Artificial Sequence
  RPE65 RNA guide
agcuccuguuacuucuauuua

SEQ ID NO: 4766 - RNA, 21 nt, Artificial Sequence
  RPE65 RNA guide
auaaauagaaguaacaggagc

SEQ ID NO: 4767 - RNA, 21 nt, Artificial Sequence
  RPE65 RNA guide
auagaaguaacaggagcuagc

SEQ ID NO: 4768 - RNA, 21 nt, Artificial Sequence
  RPE65 RNA guide
caagcuagcuccuguuacuuc

SEQ ID NO: 4769 - RNA, 21 nt, Artificial Sequence
  RPE65 RNA guide
cuacaagcuagcuccuguuac

SEQ ID NO: 4770 - RNA, 21 nt, Artificial Sequence
  RPE65 RNA guide
cuagcuccuguuacuucuauu

SEQ ID NO: 4771 - RNA, 21 nt, Artificial Sequence
  RPE65 RNA guide
gcuagcuccuguuacuucuau

SEQ ID NO: 4772 - RNA, 21 nt, Artificial Sequence
  RPE65 RNA guide
gcuccuguuacuucuauuuau

SEQ ID NO: 4773 - RNA, 21 nt, Artificial Sequence
  RPE65 RNA guide
uaaauagaaguaacaggagcu

SEQ ID NO: 4774 - RNA, 21 nt, Artificial Sequence
  RPE65 RNA guide
uacaagcuagcuccuguuacu

SEQ ID NO: 4775 - RNA, 21 nt, Artificial Sequence
  RPE65 RNA guide
uagaaguaacaggagcuagcu

SEQ ID NO: 4776 - RNA, 21 nt, Artificial Sequence
  RPE65 RNA guide
uagcuccuguuacuucuauuu

SEQ ID NO: 4777 - RNA, 21 nt, Artificial Sequence
  RPE65 RNA guide
ucuacaagcuagcuccuguua

SEQ ID NO: 4778 - RNA, 22 nt, Artificial Sequence
  RPE65 RNA guide
aaauagaaguaacaggagcuag

SEQ ID NO: 4779 - RNA, 22 nt, Artificial Sequence
  RPE65 RNA guide
aagcuagcuccuguuacuucua

SEQ ID NO: 4780 - RNA, 22 nt, Artificial Sequence
  RPE65 RNA guide
aauaaauagaaguaacaggagc

SEQ ID NO: 4781 - RNA, 22 nt, Artificial Sequence
  RPE65 RNA guide
aauagaaguaacaggagcuagc

SEQ ID NO: 4782 - RNA, 22 nt, Artificial Sequence
  RPE65 RNA guide
acaagcuagcuccuguuacuuc

SEQ ID NO: 4783 - RNA, 22 nt, Artificial Sequence
  RPE65 RNA guide
agaaguaacaggagcuagcuug

SEQ ID NO: 4784 - RNA, 22 nt, Artificial Sequence
  RPE65 RNA guide
agcuagcuccuguuacuucuau

SEQ ID NO: 4785 - RNA, 22 nt, Artificial Sequence
  RPE65 RNA guide
agcuccuguuacuucuauuuau

SEQ ID NO: 4786 - RNA, 22 nt, Artificial Sequence
  RPE65 RNA guide
auaaauagaaguaacaggagcu

SEQ ID NO: 4787 - RNA, 22 nt, Artificial Sequence
  RPE65 RNA guide
auagaaguaacaggagcuagcu

SEQ ID NO: 4788 - RNA, 22 nt, Artificial Sequence
  RPE65 RNA guide
caagcuagcuccuguuacuucu

SEQ ID NO: 4789 - RNA, 22 nt, Artificial Sequence
  RPE65 RNA guide
cuacaagcuagcuccuguuacu

SEQ ID NO: 4790 - RNA, 22 nt, Artificial Sequence
  RPE65 RNA guide
cuagcuccuguuacuucuauuu

SEQ ID NO: 4791 - RNA, 22 nt, Artificial Sequence
  RPE65 RNA guide
gcuagcuccuguuacuucuauu

SEQ ID NO: 4792 - RNA, 22 nt, Artificial Sequence
  RPE65 RNA guide
gcuccuguuacuucuauuuauu

SEQ ID NO: 4793 - RNA, 22 nt, Artificial Sequence
  RPE65 RNA guide
uaaauagaaguaacaggagcua

SEQ ID NO: 4794 - RNA, 22 nt, Artificial Sequence
  RPE65 RNA guide
uacaagcuagcuccuguuacuu

SEQ ID NO: 4795 - RNA, 22 nt, Artificial Sequence
  RPE65 RNA guide
uagaaguaacaggagcuagcuu

SEQ ID NO: 4796 - RNA, 22 nt, Artificial Sequence
  RPE65 RNA guide
uagcuccuguuacuucuauuua

SEQ ID NO: 4797 - RNA, 22 nt, Artificial Sequence
  RPE65 RNA guide
ucuacaagcuagcuccuguuac

SEQ ID NO: 4798 - RNA, 22 nt, Artificial Sequence
  RPE65 RNA guide
uucuacaagcuagcuccuguua

SEQ ID NO: 4799 - RNA, 20 nt, Artificial Sequence
  RPE65 RNA guide
aaccucgggugaugcacccg

SEQ ID NO: 4800 - RNA, 20 nt, Artificial Sequence
  RPE65 RNA guide
aacucccaaccucgggugau

SEQ ID NO: 4801 - RNA, 20 nt, Artificial Sequence
  RPE65 RNA guide
accucgggugaugcacccgc

SEQ ID NO: 4802 - RNA, 20 nt, Artificial Sequence
  RPE65 RNA guide
acucccaaccucgggugaug

SEQ ID NO: 4803 - RNA, 20 nt, Artificial Sequence
  RPE65 RNA guide
aggccgaggcgggugcauca

SEQ ID NO: 4804 - RNA, 20 nt, Artificial Sequence
  RPE65 RNA guide
aggcgggugcaucacccgag

SEQ ID NO: 4805 - RNA, 20 nt, Artificial Sequence
  RPE65 RNA guide
caaccucgggugaugcaccc

SEQ ID NO: 4806 - RNA, 20 nt, Artificial Sequence
  RPE65 RNA guide
caucacccgagguugggagu

SEQ ID NO: 4807 - RNA, 20 nt, Artificial Sequence
  RPE65 RNA guide
ccaaccucgggugaugcacc

SEQ ID NO: 4808 - RNA, 20 nt, Artificial Sequence
  RPE65 RNA guide
cccaaccucgggugaugcac

SEQ ID NO: 4809 - RNA, 20 nt, Artificial Sequence
  RPE65 RNA guide
ccgaggcgggugcaucaccc

SEQ ID NO: 4810 - RNA, 20 nt, Artificial Sequence
  RPE65 RNA guide
ccucgggugaugcacccgcc

SEQ ID NO: 4811 - RNA, 20 nt, Artificial Sequence
  RPE65 RNA guide
cgaggcgggugcaucacccg

SEQ ID NO: 4812 - RNA, 20 nt, Artificial Sequence
  RPE65 RNA guide
cgggugaugcacccgccucg

SEQ ID NO: 4813 - RNA, 20 nt, Artificial Sequence
  RPE65 RNA guide
cgggugcaucacccgagguu

SEQ ID NO: 4814 - RNA, 20 nt, Artificial Sequence
  RPE65 RNA guide
cucccaaccucgggugaugc

SEQ ID NO: 4815 - RNA, 20 nt, Artificial Sequence
  RPE65 RNA guide
cucgggugaugcacccgccu

SEQ ID NO: 4816 - RNA, 20 nt, Artificial Sequence
  RPE65 RNA guide
gaacucccaaccucggguga

SEQ ID NO: 4817 - RNA, 20 nt, Artificial Sequence
  RPE65 RNA guide
gaggccgaggcgggugcauc

SEQ ID NO: 4818 - RNA, 20 nt, Artificial Sequence
  RPE65 RNA guide
gaggcgggugcaucacccga

SEQ ID NO: 4819 - RNA, 20 nt, Artificial Sequence
  RPE65 RNA guide
gcaucacccgagguugggag

SEQ ID NO: 4820 - RNA, 20 nt, Artificial Sequence
  RPE65 RNA guide
gccgaggcgggugcaucacc

SEQ ID NO: 4821 - RNA, 20 nt, Artificial Sequence
  RPE65 RNA guide
gcgggugcaucacccgaggu

SEQ ID NO: 4822 - RNA, 20 nt, Artificial Sequence
  RPE65 RNA guide
ggccgaggcgggugcaucac

SEQ ID NO: 4823 - RNA, 20 nt, Artificial Sequence
  RPE65 RNA guide
ggcgggugcaucacccgagg

SEQ ID NO: 4824 - RNA, 20 nt, Artificial Sequence
  RPE65 RNA guide
gggugcaucacccgagguug

SEQ ID NO: 4825 - RNA, 20 nt, Artificial Sequence
  RPE65 RNA guide
ggugcaucacccgagguugg

SEQ ID NO: 4826 - RNA, 20 nt, Artificial Sequence
  RPE65 RNA guide
gugcaucacccgagguuggg

SEQ ID NO: 4827 - RNA, 20 nt, Artificial Sequence
  RPE65 RNA guide
ucccaaccucgggugaugca

SEQ ID NO: 4828 - RNA, 20 nt, Artificial Sequence
  RPE65 RNA guide
ucgggugaugcacccgccuc

SEQ ID NO: 4829 - RNA, 20 nt, Artificial Sequence
  RPE65 RNA guide
ugaacucccaaccucgggug

SEQ ID NO: 4830 - RNA, 20 nt, Artificial Sequence
  RPE65 RNA guide
ugcaucacccgagguuggga

SEQ ID NO: 4831 - RNA, 20 nt, Artificial Sequence
  RPE65 RNA guide
uugaacucccaaccucgggu

SEQ ID NO: 4832 - RNA, 21 nt, Artificial Sequence
  RPE65 RNA guide
aaccucgggugaugcacccgc

SEQ ID NO: 4833 - RNA, 21 nt, Artificial Sequence
  RPE65 RNA guide
aacucccaaccucgggugaug

SEQ ID NO: 4834 - RNA, 21 nt, Artificial Sequence
  RPE65 RNA guide
accucgggugaugcacccgcc

SEQ ID NO: 4835 - RNA, 21 nt, Artificial Sequence
  RPE65 RNA guide
acucccaaccucgggugaugc

SEQ ID NO: 4836 - RNA, 21 nt, Artificial Sequence
  RPE65 RNA guide
aggccgaggcgggugcaucac

SEQ ID NO: 4837 - RNA, 21 nt, Artificial Sequence
  RPE65 RNA guide
aggcgggugcaucacccgagg

SEQ ID NO: 4838 - RNA, 21 nt, Artificial Sequence
  RPE65 RNA guide
caaccucgggugaugcacccg

SEQ ID NO: 4839 - RNA, 21 nt, Artificial Sequence
  RPE65 RNA guide
caucacccgagguugggaguu

SEQ ID NO: 4840 - RNA, 21 nt, Artificial Sequence
  RPE65 RNA guide
ccaaccucgggugaugcaccc

SEQ ID NO: 4841 - RNA, 21 nt, Artificial Sequence
  RPE65 RNA guide
cccaaccucgggugaugcacc

SEQ ID NO: 4842 - RNA, 21 nt, Artificial Sequence
  RPE65 RNA guide
ccgaggcgggugcaucacccg

SEQ ID NO: 4843 - RNA, 21 nt, Artificial Sequence
  RPE65 RNA guide
ccucgggugaugcacccgccu

SEQ ID NO: 4844 - RNA, 21 nt, Artificial Sequence
  RPE65 RNA guide
cgaggcgggugcaucacccga

SEQ ID NO: 4845 - RNA, 21 nt, Artificial Sequence
  RPE65 RNA guide
cgggugaugcacccgccucgg

SEQ ID NO: 4846 - RNA, 21 nt, Artificial Sequence
  RPE65 RNA guide
cgggugcaucacccgagguug

SEQ ID NO: 4847 - RNA, 21 nt, Artificial Sequence
  RPE65 RNA guide
cucccaaccucgggugaugca

SEQ ID NO: 4848 - RNA, 21 nt, Artificial Sequence
  RPE65 RNA guide
cucgggugaugcacccgccuc

SEQ ID NO: 4849 - RNA, 21 nt, Artificial Sequence
  RPE65 RNA guide
cuugaacucccaaccucgggu

SEQ ID NO: 4850 - RNA, 21 nt, Artificial Sequence
  RPE65 RNA guide
gaacucccaaccucgggugau

SEQ ID NO: 4851 - RNA, 21 nt, Artificial Sequence
  RPE65 RNA guide
gaggccgaggcgggugcauca

SEQ ID NO: 4852 - RNA, 21 nt, Artificial Sequence
  RPE65 RNA guide
gaggcgggugcaucacccgag

SEQ ID NO: 4853 - RNA, 21 nt, Artificial Sequence
  RPE65 RNA guide
gcaucacccgagguugggagu

SEQ ID NO: 4854 - RNA, 21 nt, Artificial Sequence
  RPE65 RNA guide
gccgaggcgggugcaucaccc

SEQ ID NO: 4855 - RNA, 21 nt, Artificial Sequence
  RPE65 RNA guide
gcgggugcaucacccgagguu

SEQ ID NO: 4856 - RNA, 21 nt, Artificial Sequence
  RPE65 RNA guide
ggaggccgaggcgggugcauc

SEQ ID NO: 4857 - RNA, 21 nt, Artificial Sequence
  RPE65 RNA guide
ggccgaggcgggugcaucacc

SEQ ID NO: 4858 - RNA, 21 nt, Artificial Sequence
  RPE65 RNA guide
ggcgggugcaucacccgaggu

SEQ ID NO: 4859 - RNA, 21 nt, Artificial Sequence
  RPE65 RNA guide
gggugcaucacccgagguugg

SEQ ID NO: 4860 - RNA, 21 nt, Artificial Sequence
  RPE65 RNA guide
ggugcaucacccgagguuggg

SEQ ID NO: 4861 - RNA, 21 nt, Artificial Sequence
  RPE65 RNA guide
gugcaucacccgagguuggga

SEQ ID NO: 4862 - RNA, 21 nt, Artificial Sequence
  RPE65 RNA guide
ucccaaccucgggugaugcac

SEQ ID NO: 4863 - RNA, 21 nt, Artificial Sequence
  RPE65 RNA guide
ucgggugaugcacccgccucg

SEQ ID NO: 4864 - RNA, 21 nt, Artificial Sequence
  RPE65 RNA guide
ugaacucccaaccucggguga

SEQ ID NO: 4865 - RNA, 21 nt, Artificial Sequence
  RPE65 RNA guide
ugcaucacccgagguugggag

SEQ ID NO: 4866 - RNA, 21 nt, Artificial Sequence
  RPE65 RNA guide
uugaacucccaaccucgggug

SEQ ID NO: 4867 - RNA, 22 nt, Artificial Sequence
  RPE65 RNA guide
aaccucgggugaugcacccgcc

SEQ ID NO: 4868 - RNA, 22 nt, Artificial Sequence
  RPE65 RNA guide
aacucccaaccucgggugaugc

SEQ ID NO: 4869 - RNA, 22 nt, Artificial Sequence
  RPE65 RNA guide
accucgggugaugcacccgccu

SEQ ID NO: 4870 - RNA, 22 nt, Artificial Sequence
  RPE65 RNA guide
acucccaaccucgggugaugca

SEQ ID NO: 4871 - RNA, 22 nt, Artificial Sequence
  RPE65 RNA guide
aggccgaggcgggugcaucacc

SEQ ID NO: 4872 - RNA, 22 nt, Artificial Sequence
  RPE65 RNA guide
aggcgggugcaucacccgaggu

SEQ ID NO: 4873 - RNA, 22 nt, Artificial Sequence
  RPE65 RNA guide
caaccucgggugaugcacccgc

SEQ ID NO: 4874 - RNA, 22 nt, Artificial Sequence
  RPE65 RNA guide
caucacccgagguugggaguuc

SEQ ID NO: 4875 - RNA, 22 nt, Artificial Sequence
  RPE65 RNA guide
ccaaccucgggugaugcacccg

SEQ ID NO: 4876 - RNA, 22 nt, Artificial Sequence
  RPE65 RNA guide
cccaaccucgggugaugcaccc

SEQ ID NO: 4877 - RNA, 22 nt, Artificial Sequence
  RPE65 RNA guide
ccgaggcgggugcaucacccga

SEQ ID NO: 4878 - RNA, 22 nt, Artificial Sequence
  RPE65 RNA guide
ccucgggugaugcacccgccuc

SEQ ID NO: 4879 - RNA, 22 nt, Artificial Sequence
  RPE65 RNA guide
cgaggcgggugcaucacccgag

SEQ ID NO: 4880 - RNA, 22 nt, Artificial Sequence
  RPE65 RNA guide
cgggugaugcacccgccucggc

SEQ ID NO: 4881 - RNA, 22 nt, Artificial Sequence
  RPE65 RNA guide
cgggugcaucacccgagguugg

SEQ ID NO: 4882 - RNA, 22 nt, Artificial Sequence
  RPE65 RNA guide
cucccaaccucgggugaugcac

SEQ ID NO: 4883 - RNA, 22 nt, Artificial Sequence
  RPE65 RNA guide
cucgggugaugcacccgccucg

SEQ ID NO: 4884 - RNA, 22 nt, Artificial Sequence
  RPE65 RNA guide
cuugaacucccaaccucgggug

SEQ ID NO: 4885 - RNA, 22 nt, Artificial Sequence
  RPE65 RNA guide
gaacucccaaccucgggugaug

SEQ ID NO: 4886 - RNA, 22 nt, Artificial Sequence
  RPE65 RNA guide
gaggccgaggcgggugcaucac

SEQ ID NO: 4887 - RNA, 22 nt, Artificial Sequence
  RPE65 RNA guide
gaggcgggugcaucacccgagg

SEQ ID NO: 4888 - RNA, 22 nt, Artificial Sequence
  RPE65 RNA guide
gcaucacccgagguugggaguu

SEQ ID NO: 4889 - RNA, 22 nt, Artificial Sequence
  RPE65 RNA guide
gccgaggcgggugcaucacccg

SEQ ID NO: 4890 - RNA, 22 nt, Artificial Sequence
  RPE65 RNA guide
gcgggugcaucacccgagguug

SEQ ID NO: 4891 - RNA, 22 nt, Artificial Sequence
  RPE65 RNA guide
ggaggccgaggcgggugcauca

SEQ ID NO: 4892 - RNA, 22 nt, Artificial Sequence
  RPE65 RNA guide
ggccgaggcgggugcaucaccc

SEQ ID NO: 4893 - RNA, 22 nt, Artificial Sequence
  RPE65 RNA guide
ggcgggugcaucacccgagguu

SEQ ID NO: 4894 - RNA, 22 nt, Artificial Sequence
  RPE65 RNA guide
gggaggccgaggcgggugcauc

SEQ ID NO: 4895 - RNA, 22 nt, Artificial Sequence
  RPE65 RNA guide
gggugcaucacccgagguuggg

SEQ ID NO: 4896 - RNA, 22 nt, Artificial Sequence
  RPE65 RNA guide
ggugcaucacccgagguuggga

SEQ ID NO: 4897 - RNA, 22 nt, Artificial Sequence
  RPE65 RNA guide
gugcaucacccgagguugggag

SEQ ID NO: 4898 - RNA, 22 nt, Artificial Sequence
  RPE65 RNA guide
ucccaaccucgggugaugcacc

SEQ ID NO: 4899 - RNA, 22 nt, Artificial Sequence
  RPE65 RNA guide
ucgggugaugcacccgccucgg

SEQ ID NO: 4900 - RNA, 22 nt, Artificial Sequence
  RPE65 RNA guide
ucuugaacucccaaccucgggu

SEQ ID NO: 4901 - RNA, 22 nt, Artificial Sequence
  RPE65 RNA guide
ugaacucccaaccucgggugau

SEQ ID NO: 4902 - RNA, 22 nt, Artificial Sequence
  RPE65 RNA guide
ugcaucacccgagguugggagu

SEQ ID NO: 4903 - RNA, 22 nt, Artificial Sequence
  RPE65 RNA guide
uugaacucccaaccucggguga

SEQ ID NO: 4904 - RNA, 20 nt, Artificial Sequence
  RPE65 RNA guide
gggugaugcacccgccucgg

SEQ ID NO: 4905 - RNA, 21 nt, Artificial Sequence
  RPE65 RNA guide
gggugaugcacccgccucggc

SEQ ID NO: 4906 - RNA, 22 nt, Artificial Sequence
  RPE65 RNA guide
gggugaugcacccgccucggcc

SEQ ID NO: 4907 - RNA, 20 nt, Artificial Sequence
  RPE65 RNA guide
aaccucgggugaugcaccca

SEQ ID NO: 4908 - RNA, 20 nt, Artificial Sequence
  RPE65 RNA guide
accucgggugaugcacccac

SEQ ID NO: 4909 - RNA, 20 nt, Artificial Sequence
  RPE65 RNA guide
aggccgaggugggugcauca

SEQ ID NO: 4910 - RNA, 20 nt, Artificial Sequence
  RPE65 RNA guide
aggugggugcaucacccgag

SEQ ID NO: 4911 - RNA, 20 nt, Artificial Sequence
  RPE65 RNA guide
aguuugggaggccgaggugg

SEQ ID NO: 4912 - RNA, 20 nt, Artificial Sequence
  RPE65 RNA guide
ccgaggugggugcaucaccc

SEQ ID NO: 4913 - RNA, 20 nt, Artificial Sequence
  RPE65 RNA guide
ccucgggugaugcacccacc

SEQ ID NO: 4914 - RNA, 20 nt, Artificial Sequence
  RPE65 RNA guide
cgaggugggugcaucacccg

SEQ ID NO: 4915 - RNA, 20 nt, Artificial Sequence
  RPE65 RNA guide
cgggugaugcacccaccucg

SEQ ID NO: 4916 - RNA, 20 nt, Artificial Sequence
  RPE65 RNA guide
cucgggugaugcacccaccu

SEQ ID NO: 4917 - RNA, 20 nt, Artificial Sequence
  RPE65 RNA guide
gaggccgaggugggugcauc

SEQ ID NO: 4918 - RNA, 20 nt, Artificial Sequence
  RPE65 RNA guide
gaggugggugcaucacccga

SEQ ID NO: 4919 - RNA, 20 nt, Artificial Sequence
  RPE65 RNA guide
gcacccaccucggccuccca

SEQ ID NO: 4920 - RNA, 20 nt, Artificial Sequence
  RPE65 RNA guide
gccgaggugggugcaucacc

SEQ ID NO: 4921 - RNA, 20 nt, Artificial Sequence
  RPE65 RNA guide
ggccgaggugggugcaucac

SEQ ID NO: 4922 - RNA, 20 nt, Artificial Sequence
  RPE65 RNA guide
gggugaugcacccaccucgg

SEQ ID NO: 4923 - RNA, 20 nt, Artificial Sequence
  RPE65 RNA guide
ggugggugcaucacccgagg

SEQ ID NO: 4924 - RNA, 20 nt, Artificial Sequence
  RPE65 RNA guide
gugggugcaucacccgaggu

SEQ ID NO: 4925 - RNA, 20 nt, Artificial Sequence
  RPE65 RNA guide
guuugggaggccgagguggg

SEQ ID NO: 4926 - RNA, 20 nt, Artificial Sequence
  RPE65 RNA guide
ucgggugaugcacccaccuc

SEQ ID NO: 4927 - RNA, 20 nt, Artificial Sequence
  RPE65 RNA guide
ugcacccaccucggccuccc

SEQ ID NO: 4928 - RNA, 21 nt, Artificial Sequence
  RPE65 RNA guide
aaccucgggugaugcacccac

SEQ ID NO: 4929 - RNA, 21 nt, Artificial Sequence
  RPE65 RNA guide
accucgggugaugcacccacc

SEQ ID NO: 4930 - RNA, 21 nt, Artificial Sequence
  RPE65 RNA guide
aggccgaggugggugcaucac

SEQ ID NO: 4931 - RNA, 21 nt, Artificial Sequence
  RPE65 RNA guide
aggugggugcaucacccgagg

SEQ ID NO: 4932 - RNA, 21 nt, Artificial Sequence
  RPE65 RNA guide
aguuugggaggccgagguggg

SEQ ID NO: 4933 - RNA, 21 nt, Artificial Sequence
  RPE65 RNA guide
augcacccaccucggccuccc

SEQ ID NO: 4934 - RNA, 21 nt, Artificial Sequence
  RPE65 RNA guide
caaccucgggugaugcaccca

SEQ ID NO: 4935 - RNA, 21 nt, Artificial Sequence
  RPE65 RNA guide
caguuugggaggccgaggugg

SEQ ID NO: 4936 - RNA, 21 nt, Artificial Sequence
  RPE65 RNA guide
ccgaggugggugcaucacccg

SEQ ID NO: 4937 - RNA, 21 nt, Artificial Sequence
  RPE65 RNA guide
ccucgggugaugcacccaccu

SEQ ID NO: 4938 - RNA, 21 nt, Artificial Sequence
  RPE65 RNA guide
cgaggugggugcaucacccga

SEQ ID NO: 4939 - RNA, 21 nt, Artificial Sequence
  RPE65 RNA guide
cgggugaugcacccaccucgg

SEQ ID NO: 4940 - RNA, 21 nt, Artificial Sequence
  RPE65 RNA guide
cucgggugaugcacccaccuc

SEQ ID NO: 4941 - RNA, 21 nt, Artificial Sequence
  RPE65 RNA guide
gaggccgaggugggugcauca

SEQ ID NO: 4942 - RNA, 21 nt, Artificial Sequence
  RPE65 RNA guide
gaggugggugcaucacccgag

SEQ ID NO: 4943 - RNA, 21 nt, Artificial Sequence
  RPE65 RNA guide
gcacccaccucggccucccaa

SEQ ID NO: 4944 - RNA, 21 nt, Artificial Sequence
  RPE65 RNA guide
gccgaggugggugcaucaccc

SEQ ID NO: 4945 - RNA, 21 nt, Artificial Sequence
  RPE65 RNA guide
ggaggccgaggugggugcauc

SEQ ID NO: 4946 - RNA, 21 nt, Artificial Sequence
  RPE65 RNA guide
ggccgaggugggugcaucacc

SEQ ID NO: 4947 - RNA, 21 nt, Artificial Sequence
  RPE65 RNA guide
gggugaugcacccaccucggc

SEQ ID NO: 4948 - RNA, 21 nt, Artificial Sequence
  RPE65 RNA guide
ggugggugcaucacccgaggu

SEQ ID NO: 4949 - RNA, 21 nt, Artificial Sequence
  RPE65 RNA guide
gugggugcaucacccgagguu

SEQ ID NO: 4950 - RNA, 21 nt, Artificial Sequence
  RPE65 RNA guide
guuugggaggccgaggugggu

SEQ ID NO: 4951 - RNA, 21 nt, Artificial Sequence
  RPE65 RNA guide
ucgggugaugcacccaccucg

SEQ ID NO: 4952 - RNA, 21 nt, Artificial Sequence
  RPE65 RNA guide
ugcacccaccucggccuccca

SEQ ID NO: 4953 - RNA, 22 nt, Artificial Sequence
  RPE65 RNA guide
aaccucgggugaugcacccacc

SEQ ID NO: 4954 - RNA, 22 nt, Artificial Sequence
  RPE65 RNA guide
accucgggugaugcacccaccu

SEQ ID NO: 4955 - RNA, 22 nt, Artificial Sequence
  RPE65 RNA guide
aggccgaggugggugcaucacc

SEQ ID NO: 4956 - RNA, 22 nt, Artificial Sequence
  RPE65 RNA guide
aggugggugcaucacccgaggu

SEQ ID NO: 4957 - RNA, 22 nt, Artificial Sequence
  RPE65 RNA guide
aguuugggaggccgaggugggu

SEQ ID NO: 4958 - RNA, 22 nt, Artificial Sequence
  RPE65 RNA guide
augcacccaccucggccuccca

SEQ ID NO: 4959 - RNA, 22 nt, Artificial Sequence
  RPE65 RNA guide
caaccucgggugaugcacccac

SEQ ID NO: 4960 - RNA, 22 nt, Artificial Sequence
  RPE65 RNA guide
caguuugggaggccgagguggg

SEQ ID NO: 4961 - RNA, 22 nt, Artificial Sequence
  RPE65 RNA guide
ccaaccucgggugaugcaccca

SEQ ID NO: 4962 - RNA, 22 nt, Artificial Sequence
  RPE65 RNA guide
ccgaggugggugcaucacccga

SEQ ID NO: 4963 - RNA, 22 nt, Artificial Sequence
  RPE65 RNA guide
ccucgggugaugcacccaccuc

SEQ ID NO: 4964 - RNA, 22 nt, Artificial Sequence
  RPE65 RNA guide
cgaggugggugcaucacccgag

SEQ ID NO: 4965 - RNA, 22 nt, Artificial Sequence
  RPE65 RNA guide
cgggugaugcacccaccucggc

SEQ ID NO: 4966 - RNA, 22 nt, Artificial Sequence
  RPE65 RNA guide
cucgggugaugcacccaccucg

SEQ ID NO: 4967 - RNA, 22 nt, Artificial Sequence
  RPE65 RNA guide
gaggccgaggugggugcaucac

SEQ ID NO: 4968 - RNA, 22 nt, Artificial Sequence
  RPE65 RNA guide
gaggugggugcaucacccgagg

SEQ ID NO: 4969 - RNA, 22 nt, Artificial Sequence
  RPE65 RNA guide
gaugcacccaccucggccuccc

SEQ ID NO: 4970 - RNA, 22 nt, Artificial Sequence
  RPE65 RNA guide
gcacccaccucggccucccaaa

SEQ ID NO: 4971 - RNA, 22 nt, Artificial Sequence
  RPE65 RNA guide
gcaguuugggaggccgaggugg

SEQ ID NO: 4972 - RNA, 22 nt, Artificial Sequence
  RPE65 RNA guide
gccgaggugggugcaucacccg

SEQ ID NO: 4973 - RNA, 22 nt, Artificial Sequence
  RPE65 RNA guide
ggaggccgaggugggugcauca

SEQ ID NO: 4974 - RNA, 22 nt, Artificial Sequence
  RPE65 RNA guide
ggccgaggugggugcaucaccc

SEQ ID NO: 4975 - RNA, 22 nt, Artificial Sequence
  RPE65 RNA guide
gggaggccgaggugggugcauc

SEQ ID NO: 4976 - RNA, 22 nt, Artificial Sequence
  RPE65 RNA guide
gggugaugcacccaccucggcc

SEQ ID NO: 4977 - RNA, 22 nt, Artificial Sequence
  RPE65 RNA guide
ggugggugcaucacccgagguu

SEQ ID NO: 4978 - RNA, 22 nt, Artificial Sequence
  RPE65 RNA guide
gugggugcaucacccgagguug

SEQ ID NO: 4979 - RNA, 22 nt, Artificial Sequence
  RPE65 RNA guide
guuugggaggccgaggugggug

SEQ ID NO: 4980 - RNA, 22 nt, Artificial Sequence
  RPE65 RNA guide
ucgggugaugcacccaccucgg

SEQ ID NO: 4981 - RNA, 22 nt, Artificial Sequence
  RPE65 RNA guide
ugcacccaccucggccucccaa

SEQ ID NO: 4982 - RNA, 20 nt, Artificial Sequence
  RPE65 RNA guide
aggcugaggcgggugcauca

SEQ ID NO: 4983 - RNA, 20 nt, Artificial Sequence
  RPE65 RNA guide
aguuugggaggcugaggcgg

SEQ ID NO: 4984 - RNA, 20 nt, Artificial Sequence
  RPE65 RNA guide
cgggugaugcacccgccuca

SEQ ID NO: 4985 - RNA, 20 nt, Artificial Sequence
  RPE65 RNA guide
cugaggcgggugcaucaccc

SEQ ID NO: 4986 - RNA, 20 nt, Artificial Sequence
  RPE65 RNA guide
gaggcugaggcgggugcauc

SEQ ID NO: 4987 - RNA, 20 nt, Artificial Sequence
  RPE65 RNA guide
gcacccgccucagccuccca

SEQ ID NO: 4988 - RNA, 20 nt, Artificial Sequence
  RPE65 RNA guide
gcugaggcgggugcaucacc

SEQ ID NO: 4989 - RNA, 20 nt, Artificial Sequence
  RPE65 RNA guide
ggcugaggcgggugcaucac

SEQ ID NO: 4990 - RNA, 20 nt, Artificial Sequence
  RPE65 RNA guide
gggugaugcacccgccucag

SEQ ID NO: 4991 - RNA, 20 nt, Artificial Sequence
  RPE65 RNA guide
guuugggaggcugaggcggg

SEQ ID NO: 4992 - RNA, 20 nt, Artificial Sequence
  RPE65 RNA guide
ugcacccgccucagccuccc

SEQ ID NO: 4993 - RNA, 21 nt, Artificial Sequence
  RPE65 RNA guide
aggcugaggcgggugcaucac

SEQ ID NO: 4994 - RNA, 21 nt, Artificial Sequence
  RPE65 RNA guide
aguuugggaggcugaggcggg

SEQ ID NO: 4995 - RNA, 21 nt, Artificial Sequence
  RPE65 RNA guide
augcacccgccucagccuccc

SEQ ID NO: 4996 - RNA, 21 nt, Artificial Sequence
  RPE65 RNA guide
caguuugggaggcugaggcgg

SEQ ID NO: 4997 - RNA, 21 nt, Artificial Sequence
  RPE65 RNA guide
cgggugaugcacccgccucag

SEQ ID NO: 4998 - RNA, 21 nt, Artificial Sequence
  RPE65 RNA guide
cugaggcgggugcaucacccg

SEQ ID NO: 4999 - RNA, 21 nt, Artificial Sequence
  RPE65 RNA guide
gaggcugaggcgggugcauca

SEQ ID NO: 5000 - RNA, 21 nt, Artificial Sequence
  RPE65 RNA guide
gcacccgccucagccucccaa

SEQ ID NO: 5001 - RNA, 21 nt, Artificial Sequence
  RPE65 RNA guide
gcugaggcgggugcaucaccc

SEQ ID NO: 5002 - RNA, 21 nt, Artificial Sequence
  RPE65 RNA guide
ggaggcugaggcgggugcauc

SEQ ID NO: 5003 - RNA, 21 nt, Artificial Sequence
  RPE65 RNA guide
ggcugaggcgggugcaucacc

SEQ ID NO: 5004 - RNA, 21 nt, Artificial Sequence
  RPE65 RNA guide
gggugaugcacccgccucagc

SEQ ID NO: 5005 - RNA, 21 nt, Artificial Sequence
  RPE65 RNA guide
guuugggaggcugaggcgggu

SEQ ID NO: 5006 - RNA, 21 nt, Artificial Sequence
  RPE65 RNA guide
ucgggugaugcacccgccuca

SEQ ID NO: 5007 - RNA, 21 nt, Artificial Sequence
  RPE65 RNA guide
ugcacccgccucagccuccca

SEQ ID NO: 5008 - RNA, 22 nt, Artificial Sequence
  RPE65 RNA guide
aggcugaggcgggugcaucacc

SEQ ID NO: 5009 - RNA, 22 nt, Artificial Sequence
  RPE65 RNA guide
aguuugggaggcugaggcgggu

SEQ ID NO: 5010 - RNA, 22 nt, Artificial Sequence
  RPE65 RNA guide
augcacccgccucagccuccca

SEQ ID NO: 5011 - RNA, 22 nt, Artificial Sequence
  RPE65 RNA guide
caguuugggaggcugaggcggg

SEQ ID NO: 5012 - RNA, 22 nt, Artificial Sequence
  RPE65 RNA guide
cgggugaugcacccgccucagc

SEQ ID NO: 5013 - RNA, 22 nt, Artificial Sequence
  RPE65 RNA guide
cucgggugaugcacccgccuca

SEQ ID NO: 5014 - RNA, 22 nt, Artificial Sequence
  RPE65 RNA guide
cugaggcgggugcaucacccga

SEQ ID NO: 5015 - RNA, 22 nt, Artificial Sequence
  RPE65 RNA guide
gaggcugaggcgggugcaucac

SEQ ID NO: 5016 - RNA, 22 nt, Artificial Sequence
  RPE65 RNA guide
gaugcacccgccucagccuccc

SEQ ID NO: 5017 - RNA, 22 nt, Artificial Sequence
  RPE65 RNA guide
gcacccgccucagccucccaaa

SEQ ID NO: 5018 - RNA, 22 nt, Artificial Sequence
  RPE65 RNA guide
gcaguuugggaggcugaggcgg

SEQ ID NO: 5019 - RNA, 22 nt, Artificial Sequence
  RPE65 RNA guide
gcugaggcgggugcaucacccg

SEQ ID NO: 5020 - RNA, 22 nt, Artificial Sequence
  RPE65 RNA guide
ggaggcugaggcgggugcauca

SEQ ID NO: 5021 - RNA, 22 nt, Artificial Sequence
  RPE65 RNA guide
ggcugaggcgggugcaucaccc

SEQ ID NO: 5022 - RNA, 22 nt, Artificial Sequence
  RPE65 RNA guide
gggaggcugaggcgggugcauc

SEQ ID NO: 5023 - RNA, 22 nt, Artificial Sequence
  RPE65 RNA guide
gggugaugcacccgccucagcc

SEQ ID NO: 5024 - RNA, 22 nt, Artificial Sequence
  RPE65 RNA guide
guuugggaggcugaggcgggug

SEQ ID NO: 5025 - RNA, 22 nt, Artificial Sequence
  RPE65 RNA guide
ucgggugaugcacccgccucag

SEQ ID NO: 5026 - RNA, 22 nt, Artificial Sequence
  RPE65 RNA guide
ugcacccgccucagccucccaa

SEQ ID NO: 5027 - RNA, 20 nt, Artificial Sequence
  RPE65 RNA guide
aaaacccaucuccccuacac

SEQ ID NO: 5028 - RNA, 20 nt, Artificial Sequence
  RPE65 RNA guide
aaacccaucuccccuacacc

SEQ ID NO: 5029 - RNA, 20 nt, Artificial Sequence
  RPE65 RNA guide
aacccaucuccccuacaccc

SEQ ID NO: 5030 - RNA, 20 nt, Artificial Sequence
  RPE65 RNA guide
acaccccuaaauaaaccaaa

SEQ ID NO: 5031 - RNA, 20 nt, Artificial Sequence
  RPE65 RNA guide
acccaucuccccuacacccc

SEQ ID NO: 5032 - RNA, 20 nt, Artificial Sequence
  RPE65 RNA guide
accccuaaauaaaccaaacu

SEQ ID NO: 5033 - RNA, 20 nt, Artificial Sequence
  RPE65 RNA guide
agggguguaggggagauggg

SEQ ID NO: 5034 - RNA, 20 nt, Artificial Sequence
  RPE65 RNA guide
aguuugguuuauuuaggggu

SEQ ID NO: 5035 - RNA, 20 nt, Artificial Sequence
  RPE65 RNA guide
aucuccccuacaccccuaaa

SEQ ID NO: 5036 - RNA, 20 nt, Artificial Sequence
  RPE65 RNA guide
auuuagggguguaggggaga

SEQ ID NO: 5037 - RNA, 20 nt, Artificial Sequence
  RPE65 RNA guide
caaaacccaucuccccuaca

SEQ ID NO: 5038 - RNA, 20 nt, Artificial Sequence
  RPE65 RNA guide
caccccuaaauaaaccaaac

SEQ ID NO: 5039 - RNA, 20 nt, Artificial Sequence
  RPE65 RNA guide
caucuccccuacaccccuaa

SEQ ID NO: 5040 - RNA, 20 nt, Artificial Sequence
  RPE65 RNA guide
ccaaaacccaucuccccuac

SEQ ID NO: 5041 - RNA, 20 nt, Artificial Sequence
  RPE65 RNA guide
ccaucuccccuacaccccua

SEQ ID NO: 5042 - RNA, 20 nt, Artificial Sequence
  RPE65 RNA guide
cccaaaacccaucuccccua

SEQ ID NO: 5043 - RNA, 20 nt, Artificial Sequence
  RPE65 RNA guide
cccaucuccccuacaccccu

SEQ ID NO: 5044 - RNA, 20 nt, Artificial Sequence
  RPE65 RNA guide
ccccuacaccccuaaauaaa

SEQ ID NO: 5045 - RNA, 20 nt, Artificial Sequence
  RPE65 RNA guide
cccuacaccccuaaauaaac

SEQ ID NO: 5046 - RNA, 20 nt, Artificial Sequence
  RPE65 RNA guide
ccuacaccccuaaauaaacc

SEQ ID NO: 5047 - RNA, 20 nt, Artificial Sequence
  RPE65 RNA guide
cuacaccccuaaauaaacca

SEQ ID NO: 5048 - RNA, 20 nt, Artificial Sequence
  RPE65 RNA guide
cuccccuacaccccuaaaua

SEQ ID NO: 5049 - RNA, 20 nt, Artificial Sequence
  RPE65 RNA guide
cugaguuugguuuauuuagg

SEQ ID NO: 5050 - RNA, 20 nt, Artificial Sequence
  RPE65 RNA guide
gaguuugguuuauuuagggg

SEQ ID NO: 5051 - RNA, 20 nt, Artificial Sequence
  RPE65 RNA guide
gcccaaaacccaucuccccu

SEQ ID NO: 5052 - RNA, 20 nt, Artificial Sequence
  RPE65 RNA guide
gcugaguuugguuuauuuag

SEQ ID NO: 5053 - RNA, 20 nt, Artificial Sequence
  RPE65 RNA guide
gggguguaggggagaugggu

SEQ ID NO: 5054 - RNA, 20 nt, Artificial Sequence
  RPE65 RNA guide
ggguguaggggagauggguu

SEQ ID NO: 5055 - RNA, 20 nt, Artificial Sequence
  RPE65 RNA guide
gguguaggggagauggguuu

SEQ ID NO: 5056 - RNA, 20 nt, Artificial Sequence
  RPE65 RNA guide
gguuuauuuagggguguagg

SEQ ID NO: 5057 - RNA, 20 nt, Artificial Sequence
  RPE65 RNA guide
guuuauuuagggguguaggg

SEQ ID NO: 5058 - RNA, 20 nt, Artificial Sequence
  RPE65 RNA guide
guuugguuuauuuaggggug

SEQ ID NO: 5059 - RNA, 20 nt, Artificial Sequence
  RPE65 RNA guide
uacaccccuaaauaaaccaa

SEQ ID NO: 5060 - RNA, 20 nt, Artificial Sequence
  RPE65 RNA guide
uagggguguaggggagaugg

SEQ ID NO: 5061 - RNA, 20 nt, Artificial Sequence
  RPE65 RNA guide
uauuuagggguguaggggag

SEQ ID NO: 5062 - RNA, 20 nt, Artificial Sequence
  RPE65 RNA guide
uccccuacaccccuaaauaa

SEQ ID NO: 5063 - RNA, 20 nt, Artificial Sequence
  RPE65 RNA guide
ucuccccuacaccccuaaau

SEQ ID NO: 5064 - RNA, 20 nt, Artificial Sequence
  RPE65 RNA guide
ugaguuugguuuauuuaggg

SEQ ID NO: 5065 - RNA, 20 nt, Artificial Sequence
  RPE65 RNA guide
ugcugaguuugguuuauuua

SEQ ID NO: 5066 - RNA, 20 nt, Artificial Sequence
  RPE65 RNA guide
ugguuuauuuagggguguag

SEQ ID NO: 5067 - RNA, 20 nt, Artificial Sequence
  RPE65 RNA guide
uuagggguguaggggagaug

SEQ ID NO: 5068 - RNA, 20 nt, Artificial Sequence
  RPE65 RNA guide
uuauuuagggguguagggga

SEQ ID NO: 5069 - RNA, 20 nt, Artificial Sequence
  RPE65 RNA guide
uugguuuauuuaggggugua

SEQ ID NO: 5070 - RNA, 20 nt, Artificial Sequence
  RPE65 RNA guide
uuuagggguguaggggagau

SEQ ID NO: 5071 - RNA, 20 nt, Artificial Sequence
  RPE65 RNA guide
uuuauuuagggguguagggg

SEQ ID NO: 5072 - RNA, 20 nt, Artificial Sequence
  RPE65 RNA guide
uuugguuuauuuaggggugu

SEQ ID NO: 5073 - RNA, 21 nt, Artificial Sequence
  RPE65 RNA guide
aaaacccaucuccccuacacc

SEQ ID NO: 5074 - RNA, 21 nt, Artificial Sequence
  RPE65 RNA guide
aaacccaucuccccuacaccc

SEQ ID NO: 5075 - RNA, 21 nt, Artificial Sequence
  RPE65 RNA guide
aacccaucuccccuacacccc

SEQ ID NO: 5076 - RNA, 21 nt, Artificial Sequence
  RPE65 RNA guide
acaccccuaaauaaaccaaac

SEQ ID NO: 5077 - RNA, 21 nt, Artificial Sequence
  RPE65 RNA guide
acccaucuccccuacaccccu

SEQ ID NO: 5078 - RNA, 21 nt, Artificial Sequence
  RPE65 RNA guide
accccuaaauaaaccaaacuc

SEQ ID NO: 5079 - RNA, 21 nt, Artificial Sequence
  RPE65 RNA guide
agggguguaggggagaugggu

SEQ ID NO: 5080 - RNA, 21 nt, Artificial Sequence
  RPE65 RNA guide
aguuugguuuauuuaggggug

SEQ ID NO: 5081 - RNA, 21 nt, Artificial Sequence
  RPE65 RNA guide
aucuccccuacaccccuaaau

SEQ ID NO: 5082 - RNA, 21 nt, Artificial Sequence
  RPE65 RNA guide
auuuagggguguaggggagau

SEQ ID NO: 5083 - RNA, 21 nt, Artificial Sequence
  RPE65 RNA guide
caaaacccaucuccccuacac

SEQ ID NO: 5084 - RNA, 21 nt, Artificial Sequence
  RPE65 RNA guide
caccccuaaauaaaccaaacu

SEQ ID NO: 5085 - RNA, 21 nt, Artificial Sequence
  RPE65 RNA guide
caucuccccuacaccccuaaa

SEQ ID NO: 5086 - RNA, 21 nt, Artificial Sequence
  RPE65 RNA guide
ccaaaacccaucuccccuaca

SEQ ID NO: 5087 - RNA, 21 nt, Artificial Sequence
  RPE65 RNA guide
ccaucuccccuacaccccuaa

SEQ ID NO: 5088 - RNA, 21 nt, Artificial Sequence
  RPE65 RNA guide
cccaaaacccaucuccccuac

SEQ ID NO: 5089 - RNA, 21 nt, Artificial Sequence
  RPE65 RNA guide
cccaucuccccuacaccccua

SEQ ID NO: 5090 - RNA, 21 nt, Artificial Sequence
  RPE65 RNA guide
ccccuacaccccuaaauaaac

SEQ ID NO: 5091 - RNA, 21 nt, Artificial Sequence
  RPE65 RNA guide
cccuacaccccuaaauaaacc

SEQ ID NO: 5092 - RNA, 21 nt, Artificial Sequence
  RPE65 RNA guide
ccuacaccccuaaauaaacca

SEQ ID NO: 5093 - RNA, 21 nt, Artificial Sequence
  RPE65 RNA guide
cuacaccccuaaauaaaccaa

SEQ ID NO: 5094 - RNA, 21 nt, Artificial Sequence
  RPE65 RNA guide
cuccccuacaccccuaaauaa

SEQ ID NO: 5095 - RNA, 21 nt, Artificial Sequence
  RPE65 RNA guide
cugaguuugguuuauuuaggg

SEQ ID NO: 5096 - RNA, 21 nt, Artificial Sequence
  RPE65 RNA guide
gaguuugguuuauuuaggggu

SEQ ID NO: 5097 - RNA, 21 nt, Artificial Sequence
  RPE65 RNA guide
gcccaaaacccaucuccccua

SEQ ID NO: 5098 - RNA, 21 nt, Artificial Sequence
  RPE65 RNA guide
gcugaguuugguuuauuuagg

SEQ ID NO: 5099 - RNA, 21 nt, Artificial Sequence
  RPE65 RNA guide
gggguguaggggagauggguu

SEQ ID NO: 5100 - RNA, 21 nt, Artificial Sequence
  RPE65 RNA guide
ggguguaggggagauggguuu

SEQ ID NO: 5101 - RNA, 21 nt, Artificial Sequence
  RPE65 RNA guide
gguguaggggagauggguuuu

SEQ ID NO: 5102 - RNA, 21 nt, Artificial Sequence
  RPE65 RNA guide
gguuuauuuagggguguaggg

SEQ ID NO: 5103 - RNA, 21 nt, Artificial Sequence
  RPE65 RNA guide
guuuauuuagggguguagggg

SEQ ID NO: 5104 - RNA, 21 nt, Artificial Sequence
  RPE65 RNA guide
guuugguuuauuuaggggugu

SEQ ID NO: 5105 - RNA, 21 nt, Artificial Sequence
  RPE65 RNA guide
uacaccccuaaauaaaccaaa

SEQ ID NO: 5106 - RNA, 21 nt, Artificial Sequence
  RPE65 RNA guide
uagggguguaggggagauggg

SEQ ID NO: 5107 - RNA, 21 nt, Artificial Sequence
  RPE65 RNA guide
uauuuagggguguaggggaga

SEQ ID NO: 5108 - RNA, 21 nt, Artificial Sequence
  RPE65 RNA guide
uccccuacaccccuaaauaaa

SEQ ID NO: 5109 - RNA, 21 nt, Artificial Sequence
  RPE65 RNA guide
ucuccccuacaccccuaaaua

SEQ ID NO: 5110 - RNA, 21 nt, Artificial Sequence
  RPE65 RNA guide
ugaguuugguuuauuuagggg

SEQ ID NO: 5111 - RNA, 21 nt, Artificial Sequence
  RPE65 RNA guide
ugcccaaaacccaucuccccu

SEQ ID NO: 5112 - RNA, 21 nt, Artificial Sequence
  RPE65 RNA guide
ugcugaguuugguuuauuuag

SEQ ID NO: 5113 - RNA, 21 nt, Artificial Sequence
  RPE65 RNA guide
ugguuuauuuagggguguagg

SEQ ID NO: 5114 - RNA, 21 nt, Artificial Sequence
  RPE65 RNA guide
uuagggguguaggggagaugg

SEQ ID NO: 5115 - RNA, 21 nt, Artificial Sequence
  RPE65 RNA guide
uuauuuagggguguaggggag

SEQ ID NO: 5116 - RNA, 21 nt, Artificial Sequence
  RPE65 RNA guide
uugguuuauuuagggguguag

SEQ ID NO: 5117 - RNA, 21 nt, Artificial Sequence
  RPE65 RNA guide
uuuagggguguaggggagaug

SEQ ID NO: 5118 - RNA, 21 nt, Artificial Sequence
  RPE65 RNA guide
uuuauuuagggguguagggga

SEQ ID NO: 5119 - RNA, 21 nt, Artificial Sequence
  RPE65 RNA guide
uuugguuuauuuaggggugua

SEQ ID NO: 5120 - RNA, 22 nt, Artificial Sequence
  RPE65 RNA guide
aaaacccaucuccccuacaccc

SEQ ID NO: 5121 - RNA, 22 nt, Artificial Sequence
  RPE65 RNA guide
aaacccaucuccccuacacccc

SEQ ID NO: 5122 - RNA, 22 nt, Artificial Sequence
  RPE65 RNA guide
aacccaucuccccuacaccccu

SEQ ID NO: 5123 - RNA, 22 nt, Artificial Sequence
  RPE65 RNA guide
acaccccuaaauaaaccaaacu

SEQ ID NO: 5124 - RNA, 22 nt, Artificial Sequence
  RPE65 RNA guide
acccaucuccccuacaccccua

SEQ ID NO: 5125 - RNA, 22 nt, Artificial Sequence
  RPE65 RNA guide
accccuaaauaaaccaaacuca

SEQ ID NO: 5126 - RNA, 22 nt, Artificial Sequence
  RPE65 RNA guide
agggguguaggggagauggguu

SEQ ID NO: 5127 - RNA, 22 nt, Artificial Sequence
  RPE65 RNA guide
aguuugguuuauuuaggggugu

SEQ ID NO: 5128 - RNA, 22 nt, Artificial Sequence
  RPE65 RNA guide
aucuccccuacaccccuaaaua

SEQ ID NO: 5129 - RNA, 22 nt, Artificial Sequence
  RPE65 RNA guide
auuuagggguguaggggagaug

SEQ ID NO: 5130 - RNA, 22 nt, Artificial Sequence
  RPE65 RNA guide
caaaacccaucuccccuacacc

SEQ ID NO: 5131 - RNA, 22 nt, Artificial Sequence
  RPE65 RNA guide
caccccuaaauaaaccaaacuc

SEQ ID NO: 5132 - RNA, 22 nt, Artificial Sequence
  RPE65 RNA guide
caucuccccuacaccccuaaau

SEQ ID NO: 5133 - RNA, 22 nt, Artificial Sequence
  RPE65 RNA guide
ccaaaacccaucuccccuacac

SEQ ID NO: 5134 - RNA, 22 nt, Artificial Sequence
  RPE65 RNA guide
ccaucuccccuacaccccuaaa

SEQ ID NO: 5135 - RNA, 22 nt, Artificial Sequence
  RPE65 RNA guide
cccaaaacccaucuccccuaca

SEQ ID NO: 5136 - RNA, 22 nt, Artificial Sequence
  RPE65 RNA guide
cccaucuccccuacaccccuaa

SEQ ID NO: 5137 - RNA, 22 nt, Artificial Sequence
  RPE65 RNA guide
ccccuacaccccuaaauaaacc

SEQ ID NO: 5138 - RNA, 22 nt, Artificial Sequence
  RPE65 RNA guide
cccuacaccccuaaauaaacca

SEQ ID NO: 5139 - RNA, 22 nt, Artificial Sequence
  RPE65 RNA guide
ccuacaccccuaaauaaaccaa

SEQ ID NO: 5140 - RNA, 22 nt, Artificial Sequence
  RPE65 RNA guide
cuacaccccuaaauaaaccaaa

SEQ ID NO: 5141 - RNA, 22 nt, Artificial Sequence
  RPE65 RNA guide
cuccccuacaccccuaaauaaa

SEQ ID NO: 5142 - RNA, 22 nt, Artificial Sequence
  RPE65 RNA guide
cugaguuugguuuauuuagggg

SEQ ID NO: 5143 - RNA, 22 nt, Artificial Sequence
  RPE65 RNA guide
cugcccaaaacccaucuccccu

SEQ ID NO: 5144 - RNA, 22 nt, Artificial Sequence
  RPE65 RNA guide
gaguuugguuuauuuaggggug

SEQ ID NO: 5145 - RNA, 22 nt, Artificial Sequence
  RPE65 RNA guide
gcccaaaacccaucuccccuac

SEQ ID NO: 5146 - RNA, 22 nt, Artificial Sequence
  RPE65 RNA guide
gcugaguuugguuuauuuaggg

SEQ ID NO: 5147 - RNA, 22 nt, Artificial Sequence
  RPE65 RNA guide
gggguguaggggagauggguuu

SEQ ID NO: 5148 - RNA, 22 nt, Artificial Sequence
  RPE65 RNA guide
ggguguaggggagauggguuuu

SEQ ID NO: 5149 - RNA, 22 nt, Artificial Sequence
  RPE65 RNA guide
gguguaggggagauggguuuug

SEQ ID NO: 5150 - RNA, 22 nt, Artificial Sequence
  RPE65 RNA guide
gguuuauuuagggguguagggg

SEQ ID NO: 5151 - RNA, 22 nt, Artificial Sequence
  RPE65 RNA guide
guugcugaguuugguuuauuua

SEQ ID NO: 5152 - RNA, 22 nt, Artificial Sequence
  RPE65 RNA guide
guuuauuuagggguguagggga

SEQ ID NO: 5153 - RNA, 22 nt, Artificial Sequence
  RPE65 RNA guide
guuugguuuauuuaggggugua

SEQ ID NO: 5154 - RNA, 22 nt, Artificial Sequence
  RPE65 RNA guide
uacaccccuaaauaaaccaaac

SEQ ID NO: 5155 - RNA, 22 nt, Artificial Sequence
  RPE65 RNA guide
uagggguguaggggagaugggu

SEQ ID NO: 5156 - RNA, 22 nt, Artificial Sequence
  RPE65 RNA guide
uauuuagggguguaggggagau

SEQ ID NO: 5157 - RNA, 22 nt, Artificial Sequence
  RPE65 RNA guide
uccccuacaccccuaaauaaac

SEQ ID NO: 5158 - RNA, 22 nt, Artificial Sequence
  RPE65 RNA guide
ucuccccuacaccccuaaauaa

SEQ ID NO: 5159 - RNA, 22 nt, Artificial Sequence
  RPE65 RNA guide
ugaguuugguuuauuuaggggu

SEQ ID NO: 5160 - RNA, 22 nt, Artificial Sequence
  RPE65 RNA guide
ugcccaaaacccaucuccccua

SEQ ID NO: 5161 - RNA, 22 nt, Artificial Sequence
  RPE65 RNA guide
ugcugaguuugguuuauuuagg

SEQ ID NO: 5162 - RNA, 22 nt, Artificial Sequence
  RPE65 RNA guide
ugguuuauuuagggguguaggg

SEQ ID NO: 5163 - RNA, 22 nt, Artificial Sequence
  RPE65 RNA guide
uuagggguguaggggagauggg

SEQ ID NO: 5164 - RNA, 22 nt, Artificial Sequence
  RPE65 RNA guide
uuauuuagggguguaggggaga

SEQ ID NO: 5165 - RNA, 22 nt, Artificial Sequence
  RPE65 RNA guide
uugcugaguuugguuuauuuag

SEQ ID NO: 5166 - RNA, 22 nt, Artificial Sequence
  RPE65 RNA guide
uugguuuauuuagggguguagg

SEQ ID NO: 5167 - RNA, 22 nt, Artificial Sequence
  RPE65 RNA guide
uuuagggguguaggggagaugg

SEQ ID NO: 5168 - RNA, 22 nt, Artificial Sequence
  RPE65 RNA guide
uuuauuuagggguguaggggag

SEQ ID NO: 5169 - RNA, 22 nt, Artificial Sequence
  RPE65 RNA guide
uuugguuuauuuagggguguag

SEQ ID NO: 5170 - RNA, 20 nt, Artificial Sequence
  RPE65 RNA guide
aaaacccaucuccccuacag

SEQ ID NO: 5171 - RNA, 20 nt, Artificial Sequence
  RPE65 RNA guide
aaacccaucuccccuacagc

SEQ ID NO: 5172 - RNA, 20 nt, Artificial Sequence
  RPE65 RNA guide
aacccaucuccccuacagcc

SEQ ID NO: 5173 - RNA, 20 nt, Artificial Sequence
  RPE65 RNA guide
acagcccuaaauaaaccaaa

SEQ ID NO: 5174 - RNA, 20 nt, Artificial Sequence
  RPE65 RNA guide
acccaucuccccuacagccc

SEQ ID NO: 5175 - RNA, 20 nt, Artificial Sequence
  RPE65 RNA guide
agcccuaaauaaaccaaacu

SEQ ID NO: 5176 - RNA, 20 nt, Artificial Sequence
  RPE65 RNA guide
agggcuguaggggagauggg

SEQ ID NO: 5177 - RNA, 20 nt, Artificial Sequence
  RPE65 RNA guide
aguuugguuuauuuagggcu

SEQ ID NO: 5178 - RNA, 20 nt, Artificial Sequence
  RPE65 RNA guide
aucuccccuacagcccuaaa

SEQ ID NO: 5179 - RNA, 20 nt, Artificial Sequence
  RPE65 RNA guide
auuuagggcuguaggggaga

SEQ ID NO: 5180 - RNA, 20 nt, Artificial Sequence
  RPE65 RNA guide
cagcccuaaauaaaccaaac

SEQ ID NO: 5181 - RNA, 20 nt, Artificial Sequence
  RPE65 RNA guide
caucuccccuacagcccuaa

SEQ ID NO: 5182 - RNA, 20 nt, Artificial Sequence
  RPE65 RNA guide
ccaucuccccuacagcccua

SEQ ID NO: 5183 - RNA, 20 nt, Artificial Sequence
  RPE65 RNA guide
cccaucuccccuacagcccu

SEQ ID NO: 5184 - RNA, 20 nt, Artificial Sequence
  RPE65 RNA guide
ccccuacagcccuaaauaaa

SEQ ID NO: 5185 - RNA, 20 nt, Artificial Sequence
  RPE65 RNA guide
cccuacagcccuaaauaaac

SEQ ID NO: 5186 - RNA, 20 nt, Artificial Sequence
  RPE65 RNA guide
ccuacagcccuaaauaaacc

SEQ ID NO: 5187 - RNA, 20 nt, Artificial Sequence
  RPE65 RNA guide
cuacagcccuaaauaaacca

SEQ ID NO: 5188 - RNA, 20 nt, Artificial Sequence
  RPE65 RNA guide
cuccccuacagcccuaaaua

SEQ ID NO: 5189 - RNA, 20 nt, Artificial Sequence
  RPE65 RNA guide
gaguuugguuuauuuagggc

SEQ ID NO: 5190 - RNA, 20 nt, Artificial Sequence
  RPE65 RNA guide
gcuguaggggagauggguuu

SEQ ID NO: 5191 - RNA, 20 nt, Artificial Sequence
  RPE65 RNA guide
ggcuguaggggagauggguu

SEQ ID NO: 5192 - RNA, 20 nt, Artificial Sequence
  RPE65 RNA guide
gggcuguaggggagaugggu

SEQ ID NO: 5193 - RNA, 20 nt, Artificial Sequence
  RPE65 RNA guide
gguuuauuuagggcuguagg

SEQ ID NO: 5194 - RNA, 20 nt, Artificial Sequence
  RPE65 RNA guide
guuuauuuagggcuguaggg

SEQ ID NO: 5195 - RNA, 20 nt, Artificial Sequence
  RPE65 RNA guide
guuugguuuauuuagggcug

SEQ ID NO: 5196 - RNA, 20 nt, Artificial Sequence
  RPE65 RNA guide
uacagcccuaaauaaaccaa

SEQ ID NO: 5197 - RNA, 20 nt, Artificial Sequence
  RPE65 RNA guide
uagggcuguaggggagaugg

SEQ ID NO: 5198 - RNA, 20 nt, Artificial Sequence
  RPE65 RNA guide
uauuuagggcuguaggggag

SEQ ID NO: 5199 - RNA, 20 nt, Artificial Sequence
  RPE65 RNA guide
uccccuacagcccuaaauaa

SEQ ID NO: 5200 - RNA, 20 nt, Artificial Sequence
  RPE65 RNA guide
ucuccccuacagcccuaaau

SEQ ID NO: 5201 - RNA, 20 nt, Artificial Sequence
  RPE65 RNA guide
ugguuuauuuagggcuguag

SEQ ID NO: 5202 - RNA, 20 nt, Artificial Sequence
  RPE65 RNA guide
uuagggcuguaggggagaug

SEQ ID NO: 5203 - RNA, 20 nt, Artificial Sequence
  RPE65 RNA guide
uuauuuagggcuguagggga

SEQ ID NO: 5204 - RNA, 20 nt, Artificial Sequence
  RPE65 RNA guide
uugguuuauuuagggcugua

SEQ ID NO: 5205 - RNA, 20 nt, Artificial Sequence
  RPE65 RNA guide
uuuagggcuguaggggagau

SEQ ID NO: 5206 - RNA, 20 nt, Artificial Sequence
  RPE65 RNA guide
uuuauuuagggcuguagggg

SEQ ID NO: 5207 - RNA, 20 nt, Artificial Sequence
  RPE65 RNA guide
uuugguuuauuuagggcugu

SEQ ID NO: 5208 - RNA, 21 nt, Artificial Sequence
  RPE65 RNA guide
aaaacccaucuccccuacagc

SEQ ID NO: 5209 - RNA, 21 nt, Artificial Sequence
  RPE65 RNA guide
aaacccaucuccccuacagcc

SEQ ID NO: 5210 - RNA, 21 nt, Artificial Sequence
  RPE65 RNA guide
aacccaucuccccuacagccc

SEQ ID NO: 5211 - RNA, 21 nt, Artificial Sequence
  RPE65 RNA guide
acagcccuaaauaaaccaaac

SEQ ID NO: 5212 - RNA, 21 nt, Artificial Sequence
  RPE65 RNA guide
acccaucuccccuacagcccu

SEQ ID NO: 5213 - RNA, 21 nt, Artificial Sequence
  RPE65 RNA guide
agcccuaaauaaaccaaacuc

SEQ ID NO: 5214 - RNA, 21 nt, Artificial Sequence
  RPE65 RNA guide
agggcuguaggggagaugggu

SEQ ID NO: 5215 - RNA, 21 nt, Artificial Sequence
  RPE65 RNA guide
aguuugguuuauuuagggcug

SEQ ID NO: 5216 - RNA, 21 nt, Artificial Sequence
  RPE65 RNA guide
aucuccccuacagcccuaaau

SEQ ID NO: 5217 - RNA, 21 nt, Artificial Sequence
  RPE65 RNA guide
auuuagggcuguaggggagau

SEQ ID NO: 5218 - RNA, 21 nt, Artificial Sequence
  RPE65 RNA guide
caaaacccaucuccccuacag

SEQ ID NO: 5219 - RNA, 21 nt, Artificial Sequence
  RPE65 RNA guide
cagcccuaaauaaaccaaacu

SEQ ID NO: 5220 - RNA, 21 nt, Artificial Sequence
  RPE65 RNA guide
caucuccccuacagcccuaaa

SEQ ID NO: 5221 - RNA, 21 nt, Artificial Sequence
  RPE65 RNA guide
ccaucuccccuacagcccuaa

SEQ ID NO: 5222 - RNA, 21 nt, Artificial Sequence
  RPE65 RNA guide
cccaucuccccuacagcccua

SEQ ID NO: 5223 - RNA, 21 nt, Artificial Sequence
  RPE65 RNA guide
ccccuacagcccuaaauaaac

SEQ ID NO: 5224 - RNA, 21 nt, Artificial Sequence
  RPE65 RNA guide
cccuacagcccuaaauaaacc

SEQ ID NO: 5225 - RNA, 21 nt, Artificial Sequence
  RPE65 RNA guide
ccuacagcccuaaauaaacca

SEQ ID NO: 5226 - RNA, 21 nt, Artificial Sequence
  RPE65 RNA guide
cuacagcccuaaauaaaccaa

SEQ ID NO: 5227 - RNA, 21 nt, Artificial Sequence
  RPE65 RNA guide
cuccccuacagcccuaaauaa

SEQ ID NO: 5228 - RNA, 21 nt, Artificial Sequence
  RPE65 RNA guide
gaguuugguuuauuuagggcu

SEQ ID NO: 5229 - RNA, 21 nt, Artificial Sequence
  RPE65 RNA guide
gcuguaggggagauggguuuu

SEQ ID NO: 5230 - RNA, 21 nt, Artificial Sequence
  RPE65 RNA guide
ggcuguaggggagauggguuu

SEQ ID NO: 5231 - RNA, 21 nt, Artificial Sequence
  RPE65 RNA guide
gggcuguaggggagauggguu

SEQ ID NO: 5232 - RNA, 21 nt, Artificial Sequence
  RPE65 RNA guide
gguuuauuuagggcuguaggg

SEQ ID NO: 5233 - RNA, 21 nt, Artificial Sequence
  RPE65 RNA guide
guuuauuuagggcuguagggg

SEQ ID NO: 5234 - RNA, 21 nt, Artificial Sequence
  RPE65 RNA guide
guuugguuuauuuagggcugu

SEQ ID NO: 5235 - RNA, 21 nt, Artificial Sequence
  RPE65 RNA guide
uacagcccuaaauaaaccaaa

SEQ ID NO: 5236 - RNA, 21 nt, Artificial Sequence
  RPE65 RNA guide
uagggcuguaggggagauggg

SEQ ID NO: 5237 - RNA, 21 nt, Artificial Sequence
  RPE65 RNA guide
uauuuagggcuguaggggaga

SEQ ID NO: 5238 - RNA, 21 nt, Artificial Sequence
  RPE65 RNA guide
uccccuacagcccuaaauaaa

SEQ ID NO: 5239 - RNA, 21 nt, Artificial Sequence
  RPE65 RNA guide
ucuccccuacagcccuaaaua

SEQ ID NO: 5240 - RNA, 21 nt, Artificial Sequence
  RPE65 RNA guide
ugaguuugguuuauuuagggc

SEQ ID NO: 5241 - RNA, 21 nt, Artificial Sequence
  RPE65 RNA guide
ugguuuauuuagggcuguagg

SEQ ID NO: 5242 - RNA, 21 nt, Artificial Sequence
  RPE65 RNA guide
uuagggcuguaggggagaugg

SEQ ID NO: 5243 - RNA, 21 nt, Artificial Sequence
  RPE65 RNA guide
uuauuuagggcuguaggggag

SEQ ID NO: 5244 - RNA, 21 nt, Artificial Sequence
  RPE65 RNA guide
uugguuuauuuagggcuguag

SEQ ID NO: 5245 - RNA, 21 nt, Artificial Sequence
  RPE65 RNA guide
uuuagggcuguaggggagaug

SEQ ID NO: 5246 - RNA, 21 nt, Artificial Sequence
  RPE65 RNA guide
uuuauuuagggcuguagggga

SEQ ID NO: 5247 - RNA, 21 nt, Artificial Sequence
  RPE65 RNA guide
uuugguuuauuuagggcugua

SEQ ID NO: 5248 - RNA, 22 nt, Artificial Sequence
  RPE65 RNA guide
aaaacccaucuccccuacagcc

SEQ ID NO: 5249 - RNA, 22 nt, Artificial Sequence
  RPE65 RNA guide
aaacccaucuccccuacagccc

SEQ ID NO: 5250 - RNA, 22 nt, Artificial Sequence
  RPE65 RNA guide
aacccaucuccccuacagcccu

SEQ ID NO: 5251 - RNA, 22 nt, Artificial Sequence
  RPE65 RNA guide
acagcccuaaauaaaccaaacu

SEQ ID NO: 5252 - RNA, 22 nt, Artificial Sequence
  RPE65 RNA guide
acccaucuccccuacagcccua

SEQ ID NO: 5253 - RNA, 22 nt, Artificial Sequence
  RPE65 RNA guide
agcccuaaauaaaccaaacuca

SEQ ID NO: 5254 - RNA, 22 nt, Artificial Sequence
  RPE65 RNA guide
agggcuguaggggagauggguu

SEQ ID NO: 5255 - RNA, 22 nt, Artificial Sequence
  RPE65 RNA guide
aguuugguuuauuuagggcugu

SEQ ID NO: 5256 - RNA, 22 nt, Artificial Sequence
  RPE65 RNA guide
aucuccccuacagcccuaaaua

SEQ ID NO: 5257 - RNA, 22 nt, Artificial Sequence
  RPE65 RNA guide
auuuagggcuguaggggagaug

SEQ ID NO: 5258 - RNA, 22 nt, Artificial Sequence
  RPE65 RNA guide
caaaacccaucuccccuacagc

SEQ ID NO: 5259 - RNA, 22 nt, Artificial Sequence
  RPE65 RNA guide
cagcccuaaauaaaccaaacuc

SEQ ID NO: 5260 - RNA, 22 nt, Artificial Sequence
  RPE65 RNA guide
caucuccccuacagcccuaaau

SEQ ID NO: 5261 - RNA, 22 nt, Artificial Sequence
  RPE65 RNA guide
ccaaaacccaucuccccuacag

SEQ ID NO: 5262 - RNA, 22 nt, Artificial Sequence
  RPE65 RNA guide
ccaucuccccuacagcccuaaa

SEQ ID NO: 5263 - RNA, 22 nt, Artificial Sequence
  RPE65 RNA guide
cccaucuccccuacagcccuaa

SEQ ID NO: 5264 - RNA, 22 nt, Artificial Sequence
  RPE65 RNA guide
ccccuacagcccuaaauaaacc

SEQ ID NO: 5265 - RNA, 22 nt, Artificial Sequence
  RPE65 RNA guide
cccuacagcccuaaauaaacca

SEQ ID NO: 5266 - RNA, 22 nt, Artificial Sequence
  RPE65 RNA guide
ccuacagcccuaaauaaaccaa

SEQ ID NO: 5267 - RNA, 22 nt, Artificial Sequence
  RPE65 RNA guide
cuacagcccuaaauaaaccaaa

SEQ ID NO: 5268 - RNA, 22 nt, Artificial Sequence
  RPE65 RNA guide
cuccccuacagcccuaaauaaa

SEQ ID NO: 5269 - RNA, 22 nt, Artificial Sequence
  RPE65 RNA guide
cugaguuugguuuauuuagggc

SEQ ID NO: 5270 - RNA, 22 nt, Artificial Sequence
  RPE65 RNA guide
gaguuugguuuauuuagggcug

SEQ ID NO: 5271 - RNA, 22 nt, Artificial Sequence
  RPE65 RNA guide
gcuguaggggagauggguuuug

SEQ ID NO: 5272 - RNA, 22 nt, Artificial Sequence
  RPE65 RNA guide
ggcuguaggggagauggguuuu

SEQ ID NO: 5273 - RNA, 22 nt, Artificial Sequence
  RPE65 RNA guide
gggcuguaggggagauggguuu

SEQ ID NO: 5274 - RNA, 22 nt, Artificial Sequence
  RPE65 RNA guide
gguuuauuuagggcuguagggg

SEQ ID NO: 5275 - RNA, 22 nt, Artificial Sequence
  RPE65 RNA guide
guuuauuuagggcuguagggga

SEQ ID NO: 5276 - RNA, 22 nt, Artificial Sequence
  RPE65 RNA guide
guuugguuuauuuagggcugua

SEQ ID NO: 5277 - RNA, 22 nt, Artificial Sequence
  RPE65 RNA guide
uacagcccuaaauaaaccaaac

SEQ ID NO: 5278 - RNA, 22 nt, Artificial Sequence
  RPE65 RNA guide
uagggcuguaggggagaugggu

SEQ ID NO: 5279 - RNA, 22 nt, Artificial Sequence
  RPE65 RNA guide
uauuuagggcuguaggggagau

SEQ ID NO: 5280 - RNA, 22 nt, Artificial Sequence
  RPE65 RNA guide
uccccuacagcccuaaauaaac

SEQ ID NO: 5281 - RNA, 22 nt, Artificial Sequence
  RPE65 RNA guide
ucuccccuacagcccuaaauaa

SEQ ID NO: 5282 - RNA, 22 nt, Artificial Sequence
  RPE65 RNA guide
ugaguuugguuuauuuagggcu

SEQ ID NO: 5283 - RNA, 22 nt, Artificial Sequence
  RPE65 RNA guide
ugguuuauuuagggcuguaggg

SEQ ID NO: 5284 - RNA, 22 nt, Artificial Sequence
  RPE65 RNA guide
uuagggcuguaggggagauggg

SEQ ID NO: 5285 - RNA, 22 nt, Artificial Sequence
  RPE65 RNA guide
uuauuuagggcuguaggggaga

SEQ ID NO: 5286 - RNA, 22 nt, Artificial Sequence
  RPE65 RNA guide
uugguuuauuuagggcuguagg

SEQ ID NO: 5287 - RNA, 22 nt, Artificial Sequence
  RPE65 RNA guide
uuuagggcuguaggggagaugg

SEQ ID NO: 5288 - RNA, 22 nt, Artificial Sequence
  RPE65 RNA guide
uuuauuuagggcuguaggggag

SEQ ID NO: 5289 - RNA, 22 nt, Artificial Sequence
  RPE65 RNA guide
uuugguuuauuuagggcuguag

SEQ ID NO: 5290 - RNA, 20 nt, Artificial Sequence
  RPE65 RNA guide
aacugggaagaggugaaaaa

SEQ ID NO: 5291 - RNA, 20 nt, Artificial Sequence
  RPE65 RNA guide
aauuuacgugagaacuggga

SEQ ID NO: 5292 - RNA, 20 nt, Artificial Sequence
  RPE65 RNA guide
accucuucccaguucucacg

SEQ ID NO: 5293 - RNA, 20 nt, Artificial Sequence
  RPE65 RNA guide
acgugagaacugggaagagg

SEQ ID NO: 5294 - RNA, 20 nt, Artificial Sequence
  RPE65 RNA guide
acugggaagaggugaaaaaa

SEQ ID NO: 5295 - RNA, 20 nt, Artificial Sequence
  RPE65 RNA guide
agaacugggaagaggugaaa

SEQ ID NO: 5296 - RNA, 20 nt, Artificial Sequence
  RPE65 RNA guide
auuuacgugagaacugggaa

SEQ ID NO: 5297 - RNA, 20 nt, Artificial Sequence
  RPE65 RNA guide
caccucuucccaguucucac

SEQ ID NO: 5298 - RNA, 20 nt, Artificial Sequence
  RPE65 RNA guide
ccucuucccaguucucacgu

SEQ ID NO: 5299 - RNA, 20 nt, Artificial Sequence
  RPE65 RNA guide
cgugagaacugggaagaggu

SEQ ID NO: 5300 - RNA, 20 nt, Artificial Sequence
  RPE65 RNA guide
gaacugggaagaggugaaaa

SEQ ID NO: 5301 - RNA, 20 nt, Artificial Sequence
  RPE65 RNA guide
gagaacugggaagaggugaa

SEQ ID NO: 5302 - RNA, 20 nt, Artificial Sequence
  RPE65 RNA guide
gugagaacugggaagaggug

SEQ ID NO: 5303 - RNA, 20 nt, Artificial Sequence
  RPE65 RNA guide
uacgugagaacugggaagag

SEQ ID NO: 5304 - RNA, 20 nt, Artificial Sequence
  RPE65 RNA guide
ucaccucuucccaguucuca

SEQ ID NO: 5305 - RNA, 20 nt, Artificial Sequence
  RPE65 RNA guide
ugagaacugggaagagguga

SEQ ID NO: 5306 - RNA, 20 nt, Artificial Sequence
  RPE65 RNA guide
uuacgugagaacugggaaga

SEQ ID NO: 5307 - RNA, 20 nt, Artificial Sequence
  RPE65 RNA guide
uucaccucuucccaguucuc

SEQ ID NO: 5308 - RNA, 20 nt, Artificial Sequence
  RPE65 RNA guide
uuuacgugagaacugggaag

SEQ ID NO: 5309 - RNA, 20 nt, Artificial Sequence
  RPE65 RNA guide
uuucaccucuucccaguucu

SEQ ID NO: 5310 - RNA, 20 nt, Artificial Sequence
  RPE65 RNA guide
uuuucaccucuucccaguuc

SEQ ID NO: 5311 - RNA, 20 nt, Artificial Sequence
  RPE65 RNA guide
uuuuucaccucuucccaguu

SEQ ID NO: 5312 - RNA, 20 nt, Artificial Sequence
  RPE65 RNA guide
uuuuuucaccucuucccagu

SEQ ID NO: 5313 - RNA, 21 nt, Artificial Sequence
  RPE65 RNA guide
aacugggaagaggugaaaaaa

SEQ ID NO: 5314 - RNA, 21 nt, Artificial Sequence
  RPE65 RNA guide
aauuuacgugagaacugggaa

SEQ ID NO: 5315 - RNA, 21 nt, Artificial Sequence
  RPE65 RNA guide
accucuucccaguucucacgu

SEQ ID NO: 5316 - RNA, 21 nt, Artificial Sequence
  RPE65 RNA guide
acgugagaacugggaagaggu

SEQ ID NO: 5317 - RNA, 21 nt, Artificial Sequence
  RPE65 RNA guide
agaacugggaagaggugaaaa

SEQ ID NO: 5318 - RNA, 21 nt, Artificial Sequence
  RPE65 RNA guide
auuuacgugagaacugggaag

SEQ ID NO: 5319 - RNA, 21 nt, Artificial Sequence
  RPE65 RNA guide
caauuuacgugagaacuggga

SEQ ID NO: 5320 - RNA, 21 nt, Artificial Sequence
  RPE65 RNA guide
caccucuucccaguucucacg

SEQ ID NO: 5321 - RNA, 21 nt, Artificial Sequence
  RPE65 RNA guide
ccucuucccaguucucacgua

SEQ ID NO: 5322 - RNA, 21 nt, Artificial Sequence
  RPE65 RNA guide
cgugagaacugggaagaggug

SEQ ID NO: 5323 - RNA, 21 nt, Artificial Sequence
  RPE65 RNA guide
gaacugggaagaggugaaaaa

SEQ ID NO: 5324 - RNA, 21 nt, Artificial Sequence
  RPE65 RNA guide
gagaacugggaagaggugaaa

SEQ ID NO: 5325 - RNA, 21 nt, Artificial Sequence
  RPE65 RNA guide
gugagaacugggaagagguga

SEQ ID NO: 5326 - RNA, 21 nt, Artificial Sequence
  RPE65 RNA guide
uacgugagaacugggaagagg

SEQ ID NO: 5327 - RNA, 21 nt, Artificial Sequence
  RPE65 RNA guide
ucaccucuucccaguucucac

SEQ ID NO: 5328 - RNA, 21 nt, Artificial Sequence
  RPE65 RNA guide
ugagaacugggaagaggugaa

SEQ ID NO: 5329 - RNA, 21 nt, Artificial Sequence
  RPE65 RNA guide
uuacgugagaacugggaagag

SEQ ID NO: 5330 - RNA, 21 nt, Artificial Sequence
  RPE65 RNA guide
uucaccucuucccaguucuca

SEQ ID NO: 5331 - RNA, 21 nt, Artificial Sequence
  RPE65 RNA guide
uuuacgugagaacugggaaga

SEQ ID NO: 5332 - RNA, 21 nt, Artificial Sequence
  RPE65 RNA guide
uuucaccucuucccaguucuc

SEQ ID NO: 5333 - RNA, 21 nt, Artificial Sequence
  RPE65 RNA guide
uuuucaccucuucccaguucu

SEQ ID NO: 5334 - RNA, 21 nt, Artificial Sequence
  RPE65 RNA guide
uuuuucaccucuucccaguuc

SEQ ID NO: 5335 - RNA, 21 nt, Artificial Sequence
  RPE65 RNA guide
uuuuuucaccucuucccaguu

SEQ ID NO: 5336 - RNA, 22 nt, Artificial Sequence
  RPE65 RNA guide
aauuuacgugagaacugggaag

SEQ ID NO: 5337 - RNA, 22 nt, Artificial Sequence
  RPE65 RNA guide
accucuucccaguucucacgua

SEQ ID NO: 5338 - RNA, 22 nt, Artificial Sequence
  RPE65 RNA guide
acgugagaacugggaagaggug

SEQ ID NO: 5339 - RNA, 22 nt, Artificial Sequence
  RPE65 RNA guide
agaacugggaagaggugaaaaa

SEQ ID NO: 5340 - RNA, 22 nt, Artificial Sequence
  RPE65 RNA guide
auuuacgugagaacugggaaga

SEQ ID NO: 5341 - RNA, 22 nt, Artificial Sequence
  RPE65 RNA guide
caauuuacgugagaacugggaa

SEQ ID NO: 5342 - RNA, 22 nt, Artificial Sequence
  RPE65 RNA guide
caccucuucccaguucucacgu

SEQ ID NO: 5343 - RNA, 22 nt, Artificial Sequence
  RPE65 RNA guide
ccaauuuacgugagaacuggga

SEQ ID NO: 5344 - RNA, 22 nt, Artificial Sequence
  RPE65 RNA guide
ccucuucccaguucucacguaa

SEQ ID NO: 5345 - RNA, 22 nt, Artificial Sequence
  RPE65 RNA guide
cgugagaacugggaagagguga

SEQ ID NO: 5346 - RNA, 22 nt, Artificial Sequence
  RPE65 RNA guide
gaacugggaagaggugaaaaaa

SEQ ID NO: 5347 - RNA, 22 nt, Artificial Sequence
  RPE65 RNA guide
gagaacugggaagaggugaaaa

SEQ ID NO: 5348 - RNA, 22 nt, Artificial Sequence
  RPE65 RNA guide
gugagaacugggaagaggugaa

SEQ ID NO: 5349 - RNA, 22 nt, Artificial Sequence
  RPE65 RNA guide
uacgugagaacugggaagaggu

SEQ ID NO: 5350 - RNA, 22 nt, Artificial Sequence
  RPE65 RNA guide
ucaccucuucccaguucucacg

SEQ ID NO: 5351 - RNA, 22 nt, Artificial Sequence
  RPE65 RNA guide
ugagaacugggaagaggugaaa

SEQ ID NO: 5352 - RNA, 22 nt, Artificial Sequence
  RPE65 RNA guide
uuacgugagaacugggaagagg

SEQ ID NO: 5353 - RNA, 22 nt, Artificial Sequence
  RPE65 RNA guide
uucaccucuucccaguucucac

SEQ ID NO: 5354 - RNA, 22 nt, Artificial Sequence
  RPE65 RNA guide
uuuacgugagaacugggaagag

SEQ ID NO: 5355 - RNA, 22 nt, Artificial Sequence
  RPE65 RNA guide
uuucaccucuucccaguucuca

SEQ ID NO: 5356 - RNA, 22 nt, Artificial Sequence
  RPE65 RNA guide
uuuucaccucuucccaguucuc

SEQ ID NO: 5357 - RNA, 22 nt, Artificial Sequence
  RPE65 RNA guide
uuuuucaccucuucccaguucu

SEQ ID NO: 5358 - RNA, 22 nt, Artificial Sequence
  RPE65 RNA guide
uuuuuucaccucuucccaguuc

SEQ ID NO: 5359 - RNA, 20 nt, Artificial Sequence
  RPE65 RNA guide
aacugggaagaagugaaaaa

SEQ ID NO: 5360 - RNA, 20 nt, Artificial Sequence
  RPE65 RNA guide
acgugagaacugggaagaag

SEQ ID NO: 5361 - RNA, 20 nt, Artificial Sequence
  RPE65 RNA guide
acugggaagaagugaaaaaa

SEQ ID NO: 5362 - RNA, 20 nt, Artificial Sequence
  RPE65 RNA guide
acuucuucccaguucucacg

SEQ ID NO: 5363 - RNA, 20 nt, Artificial Sequence
  RPE65 RNA guide
agaacugggaagaagugaaa

SEQ ID NO: 5364 - RNA, 20 nt, Artificial Sequence
  RPE65 RNA guide
cacuucuucccaguucucac

SEQ ID NO: 5365 - RNA, 20 nt, Artificial Sequence
  RPE65 RNA guide
cgugagaacugggaagaagu

SEQ ID NO: 5366 - RNA, 20 nt, Artificial Sequence
  RPE65 RNA guide
cuucuucccaguucucacgu

SEQ ID NO: 5367 - RNA, 20 nt, Artificial Sequence
  RPE65 RNA guide
gaacugggaagaagugaaaa

SEQ ID NO: 5368 - RNA, 20 nt, Artificial Sequence
  RPE65 RNA guide
gagaacugggaagaagugaa

SEQ ID NO: 5369 - RNA, 20 nt, Artificial Sequence
  RPE65 RNA guide
gugagaacugggaagaagug

SEQ ID NO: 5370 - RNA, 20 nt, Artificial Sequence
  RPE65 RNA guide
uacgugagaacugggaagaa

SEQ ID NO: 5371 - RNA, 20 nt, Artificial Sequence
  RPE65 RNA guide
ucacuucuucccaguucuca

SEQ ID NO: 5372 - RNA, 20 nt, Artificial Sequence
  RPE65 RNA guide
ugagaacugggaagaaguga

SEQ ID NO: 5373 - RNA, 20 nt, Artificial Sequence
  RPE65 RNA guide
uucacuucuucccaguucuc

SEQ ID NO: 5374 - RNA, 20 nt, Artificial Sequence
  RPE65 RNA guide
uuucacuucuucccaguucu

SEQ ID NO: 5375 - RNA, 20 nt, Artificial Sequence
  RPE65 RNA guide
uuuucacuucuucccaguuc

SEQ ID NO: 5376 - RNA, 20 nt, Artificial Sequence
  RPE65 RNA guide
uuuuucacuucuucccaguu

SEQ ID NO: 5377 - RNA, 20 nt, Artificial Sequence
  RPE65 RNA guide
uuuuuucacuucuucccagu

SEQ ID NO: 5378 - RNA, 21 nt, Artificial Sequence
  RPE65 RNA guide
aacugggaagaagugaaaaaa

SEQ ID NO: 5379 - RNA, 21 nt, Artificial Sequence
  RPE65 RNA guide
acgugagaacugggaagaagu

SEQ ID NO: 5380 - RNA, 21 nt, Artificial Sequence
  RPE65 RNA guide
acuucuucccaguucucacgu

SEQ ID NO: 5381 - RNA, 21 nt, Artificial Sequence
  RPE65 RNA guide
agaacugggaagaagugaaaa

SEQ ID NO: 5382 - RNA, 21 nt, Artificial Sequence
  RPE65 RNA guide
cacuucuucccaguucucacg

SEQ ID NO: 5383 - RNA, 21 nt, Artificial Sequence
  RPE65 RNA guide
cgugagaacugggaagaagug

SEQ ID NO: 5384 - RNA, 21 nt, Artificial Sequence
  RPE65 RNA guide
cuucuucccaguucucacgua

SEQ ID NO: 5385 - RNA, 21 nt, Artificial Sequence
  RPE65 RNA guide
gaacugggaagaagugaaaaa

SEQ ID NO: 5386 - RNA, 21 nt, Artificial Sequence
  RPE65 RNA guide
gagaacugggaagaagugaaa

SEQ ID NO: 5387 - RNA, 21 nt, Artificial Sequence
  RPE65 RNA guide
gugagaacugggaagaaguga

SEQ ID NO: 5388 - RNA, 21 nt, Artificial Sequence
  RPE65 RNA guide
uacgugagaacugggaagaag

SEQ ID NO: 5389 - RNA, 21 nt, Artificial Sequence
  RPE65 RNA guide
ucacuucuucccaguucucac

SEQ ID NO: 5390 - RNA, 21 nt, Artificial Sequence
  RPE65 RNA guide
ugagaacugggaagaagugaa

SEQ ID NO: 5391 - RNA, 21 nt, Artificial Sequence
  RPE65 RNA guide
uuacgugagaacugggaagaa

SEQ ID NO: 5392 - RNA, 21 nt, Artificial Sequence
  RPE65 RNA guide
uucacuucuucccaguucuca

SEQ ID NO: 5393 - RNA, 21 nt, Artificial Sequence
  RPE65 RNA guide
uuucacuucuucccaguucuc

SEQ ID NO: 5394 - RNA, 21 nt, Artificial Sequence
  RPE65 RNA guide
uuuucacuucuucccaguucu

SEQ ID NO: 5395 - RNA, 21 nt, Artificial Sequence
  RPE65 RNA guide
uuuuucacuucuucccaguuc

SEQ ID NO: 5396 - RNA, 21 nt, Artificial Sequence
  RPE65 RNA guide
uuuuuucacuucuucccaguu

SEQ ID NO: 5397 - RNA, 22 nt, Artificial Sequence
  RPE65 RNA guide
acgugagaacugggaagaagug

SEQ ID NO: 5398 - RNA, 22 nt, Artificial Sequence
  RPE65 RNA guide
acuucuucccaguucucacgua

SEQ ID NO: 5399 - RNA, 22 nt, Artificial Sequence
  RPE65 RNA guide
agaacugggaagaagugaaaaa

SEQ ID NO: 5400 - RNA, 22 nt, Artificial Sequence
  RPE65 RNA guide
cacuucuucccaguucucacgu

SEQ ID NO: 5401 - RNA, 22 nt, Artificial Sequence
  RPE65 RNA guide
cgugagaacugggaagaaguga

SEQ ID NO: 5402 - RNA, 22 nt, Artificial Sequence
  RPE65 RNA guide
cuucuucccaguucucacguaa

SEQ ID NO: 5403 - RNA, 22 nt, Artificial Sequence
  RPE65 RNA guide
gaacugggaagaagugaaaaaa

SEQ ID NO: 5404 - RNA, 22 nt, Artificial Sequence
  RPE65 RNA guide
gagaacugggaagaagugaaaa

SEQ ID NO: 5405 - RNA, 22 nt, Artificial Sequence
  RPE65 RNA guide
gugagaacugggaagaagugaa

SEQ ID NO: 5406 - RNA, 22 nt, Artificial Sequence
  RPE65 RNA guide
uacgugagaacugggaagaagu

SEQ ID NO: 5407 - RNA, 22 nt, Artificial Sequence
  RPE65 RNA guide
ucacuucuucccaguucucacg

SEQ ID NO: 5408 - RNA, 22 nt, Artificial Sequence
  RPE65 RNA guide
ugagaacugggaagaagugaaa

SEQ ID NO: 5409 - RNA, 22 nt, Artificial Sequence
  RPE65 RNA guide
uuacgugagaacugggaagaag

SEQ ID NO: 5410 - RNA, 22 nt, Artificial Sequence
  RPE65 RNA guide
uucacuucuucccaguucucac

SEQ ID NO: 5411 - RNA, 22 nt, Artificial Sequence
  RPE65 RNA guide
uuuacgugagaacugggaagaa

SEQ ID NO: 5412 - RNA, 22 nt, Artificial Sequence
  RPE65 RNA guide
uuucacuucuucccaguucuca

SEQ ID NO: 5413 - RNA, 22 nt, Artificial Sequence
  RPE65 RNA guide
uuuucacuucuucccaguucuc

SEQ ID NO: 5414 - RNA, 22 nt, Artificial Sequence
  RPE65 RNA guide
uuuuucacuucuucccaguucu

SEQ ID NO: 5415 - RNA, 22 nt, Artificial Sequence
  RPE65 RNA guide
uuuuuucacuucuucccaguuc

SEQ ID NO: 5416 - RNA, 20 nt, Artificial Sequence
  RPE65 RNA guide
aaaucacuaagaagacaaca

SEQ ID NO: 5417 - RNA, 20 nt, Artificial Sequence
  RPE65 RNA guide
aacagcaccuaaggacacaa

SEQ ID NO: 5418 - RNA, 20 nt, Artificial Sequence
  RPE65 RNA guide
aagaagacaacagcaccuaa

SEQ ID NO: 5419 - RNA, 20 nt, Artificial Sequence
  RPE65 RNA guide
aagacaacagcaccuaagga

SEQ ID NO: 5420 - RNA, 20 nt, Artificial Sequence
  RPE65 RNA guide
aaucacuaagaagacaacag

SEQ ID NO: 5421 - RNA, 20 nt, Artificial Sequence
  RPE65 RNA guide
acaacagcaccuaaggacac

SEQ ID NO: 5422 - RNA, 20 nt, Artificial Sequence
  RPE65 RNA guide
acagcaccuaaggacacaaa

SEQ ID NO: 5423 - RNA, 20 nt, Artificial Sequence
  RPE65 RNA guide
accauucuguuuguguccuu

SEQ ID NO: 5424 - RNA, 20 nt, Artificial Sequence
  RPE65 RNA guide
acuaagaagacaacagcacc

SEQ ID NO: 5425 - RNA, 20 nt, Artificial Sequence
  RPE65 RNA guide
agaagacaacagcaccuaag

SEQ ID NO: 5426 - RNA, 20 nt, Artificial Sequence
  RPE65 RNA guide
agacaacagcaccuaaggac

SEQ ID NO: 5427 - RNA, 20 nt, Artificial Sequence
  RPE65 RNA guide
agcaccuaaggacacaaaca

SEQ ID NO: 5428 - RNA, 20 nt, Artificial Sequence
  RPE65 RNA guide
aggugcuguugucuucuuag

SEQ ID NO: 5429 - RNA, 20 nt, Artificial Sequence
  RPE65 RNA guide
aucacuaagaagacaacagc

SEQ ID NO: 5430 - RNA, 20 nt, Artificial Sequence
  RPE65 RNA guide
auucuguuuguguccuuagg

SEQ ID NO: 5431 - RNA, 20 nt, Artificial Sequence
  RPE65 RNA guide
caaaucacuaagaagacaac

SEQ ID NO: 5432 - RNA, 20 nt, Artificial Sequence
  RPE65 RNA guide
caacagcaccuaaggacaca

SEQ ID NO: 5433 - RNA, 20 nt, Artificial Sequence
  RPE65 RNA guide
caccuaaggacacaaacaga

SEQ ID NO: 5434 - RNA, 20 nt, Artificial Sequence
  RPE65 RNA guide
cacuaagaagacaacagcac

SEQ ID NO: 5435 - RNA, 20 nt, Artificial Sequence
  RPE65 RNA guide
cagcaccuaaggacacaaac

SEQ ID NO: 5436 - RNA, 20 nt, Artificial Sequence
  RPE65 RNA guide
cauucuguuuguguccuuag

SEQ ID NO: 5437 - RNA, 20 nt, Artificial Sequence
  RPE65 RNA guide
ccauucuguuuguguccuua

SEQ ID NO: 5438 - RNA, 20 nt, Artificial Sequence
  RPE65 RNA guide
ccuuaggugcuguugucuuc

SEQ ID NO: 5439 - RNA, 20 nt, Artificial Sequence
  RPE65 RNA guide
cuaagaagacaacagcaccu

SEQ ID NO: 5440 - RNA, 20 nt, Artificial Sequence
  RPE65 RNA guide
cuguuuguguccuuaggugc

SEQ ID NO: 5441 - RNA, 20 nt, Artificial Sequence
  RPE65 RNA guide
cuuaggugcuguugucuucu

SEQ ID NO: 5442 - RNA, 20 nt, Artificial Sequence
  RPE65 RNA guide
gaagacaacagcaccuaagg

SEQ ID NO: 5443 - RNA, 20 nt, Artificial Sequence
  RPE65 RNA guide
gacaacagcaccuaaggaca

SEQ ID NO: 5444 - RNA, 20 nt, Artificial Sequence
  RPE65 RNA guide
gcaccuaaggacacaaacag

SEQ ID NO: 5445 - RNA, 20 nt, Artificial Sequence
  RPE65 RNA guide
ggugcuguugucuucuuagu

SEQ ID NO: 5446 - RNA, 20 nt, Artificial Sequence
  RPE65 RNA guide
guccuuaggugcuguugucu

SEQ ID NO: 5447 - RNA, 20 nt, Artificial Sequence
  RPE65 RNA guide
gugcuguugucuucuuagug

SEQ ID NO: 5448 - RNA, 20 nt, Artificial Sequence
  RPE65 RNA guide
guguccuuaggugcuguugu

SEQ ID NO: 5449 - RNA, 20 nt, Artificial Sequence
  RPE65 RNA guide
guuuguguccuuaggugcug

SEQ ID NO: 5450 - RNA, 20 nt, Artificial Sequence
  RPE65 RNA guide
uaagaagacaacagcaccua

SEQ ID NO: 5451 - RNA, 20 nt, Artificial Sequence
  RPE65 RNA guide
uaggugcuguugucuucuua

SEQ ID NO: 5452 - RNA, 20 nt, Artificial Sequence
  RPE65 RNA guide
ucacuaagaagacaacagca

SEQ ID NO: 5453 - RNA, 20 nt, Artificial Sequence
  RPE65 RNA guide
uccuuaggugcuguugucuu

SEQ ID NO: 5454 - RNA, 20 nt, Artificial Sequence
  RPE65 RNA guide
ucuguuuguguccuuaggug

SEQ ID NO: 5455 - RNA, 20 nt, Artificial Sequence
  RPE65 RNA guide
uguccuuaggugcuguuguc

SEQ ID NO: 5456 - RNA, 20 nt, Artificial Sequence
  RPE65 RNA guide
uguguccuuaggugcuguug

SEQ ID NO: 5457 - RNA, 20 nt, Artificial Sequence
  RPE65 RNA guide
uguuuguguccuuaggugcu

SEQ ID NO: 5458 - RNA, 20 nt, Artificial Sequence
  RPE65 RNA guide
uuaggugcuguugucuucuu

SEQ ID NO: 5459 - RNA, 20 nt, Artificial Sequence
  RPE65 RNA guide
uucuguuuguguccuuaggu

SEQ ID NO: 5460 - RNA, 20 nt, Artificial Sequence
  RPE65 RNA guide
uuguguccuuaggugcuguu

SEQ ID NO: 5461 - RNA, 20 nt, Artificial Sequence
  RPE65 RNA guide
uuuguguccuuaggugcugu

SEQ ID NO: 5462 - RNA, 21 nt, Artificial Sequence
  RPE65 RNA guide
aaaucacuaagaagacaacag

SEQ ID NO: 5463 - RNA, 21 nt, Artificial Sequence
  RPE65 RNA guide
aacagcaccuaaggacacaaa

SEQ ID NO: 5464 - RNA, 21 nt, Artificial Sequence
  RPE65 RNA guide
aagaagacaacagcaccuaag

SEQ ID NO: 5465 - RNA, 21 nt, Artificial Sequence
  RPE65 RNA guide
aagacaacagcaccuaaggac

SEQ ID NO: 5466 - RNA, 21 nt, Artificial Sequence
  RPE65 RNA guide
aaucacuaagaagacaacagc

SEQ ID NO: 5467 - RNA, 21 nt, Artificial Sequence
  RPE65 RNA guide
acaacagcaccuaaggacaca

SEQ ID NO: 5468 - RNA, 21 nt, Artificial Sequence
  RPE65 RNA guide
acagcaccuaaggacacaaac

SEQ ID NO: 5469 - RNA, 21 nt, Artificial Sequence
  RPE65 RNA guide
accauucuguuuguguccuua

SEQ ID NO: 5470 - RNA, 21 nt, Artificial Sequence
  RPE65 RNA guide
acuaagaagacaacagcaccu

SEQ ID NO: 5471 - RNA, 21 nt, Artificial Sequence
  RPE65 RNA guide
agaagacaacagcaccuaagg

SEQ ID NO: 5472 - RNA, 21 nt, Artificial Sequence
  RPE65 RNA guide
agacaacagcaccuaaggaca

SEQ ID NO: 5473 - RNA, 21 nt, Artificial Sequence
  RPE65 RNA guide
agcaccuaaggacacaaacag

SEQ ID NO: 5474 - RNA, 21 nt, Artificial Sequence
  RPE65 RNA guide
aggugcuguugucuucuuagu

SEQ ID NO: 5475 - RNA, 21 nt, Artificial Sequence
  RPE65 RNA guide
aucacuaagaagacaacagca

SEQ ID NO: 5476 - RNA, 21 nt, Artificial Sequence
  RPE65 RNA guide
auucuguuuguguccuuaggu

SEQ ID NO: 5477 - RNA, 21 nt, Artificial Sequence
  RPE65 RNA guide
caaaucacuaagaagacaaca

SEQ ID NO: 5478 - RNA, 21 nt, Artificial Sequence
  RPE65 RNA guide
caacagcaccuaaggacacaa

SEQ ID NO: 5479 - RNA, 21 nt, Artificial Sequence
  RPE65 RNA guide
caccauucuguuuguguccuu

SEQ ID NO: 5480 - RNA, 21 nt, Artificial Sequence
  RPE65 RNA guide
caccuaaggacacaaacagaa

SEQ ID NO: 5481 - RNA, 21 nt, Artificial Sequence
  RPE65 RNA guide
cacuaagaagacaacagcacc

SEQ ID NO: 5482 - RNA, 21 nt, Artificial Sequence
  RPE65 RNA guide
cagcaccuaaggacacaaaca

SEQ ID NO: 5483 - RNA, 21 nt, Artificial Sequence
  RPE65 RNA guide
cauucuguuuguguccuuagg

SEQ ID NO: 5484 - RNA, 21 nt, Artificial Sequence
  RPE65 RNA guide
ccaaaucacuaagaagacaac

SEQ ID NO: 5485 - RNA, 21 nt, Artificial Sequence
  RPE65 RNA guide
ccauucuguuuguguccuuag

SEQ ID NO: 5486 - RNA, 21 nt, Artificial Sequence
  RPE65 RNA guide
ccuuaggugcuguugucuucu

SEQ ID NO: 5487 - RNA, 21 nt, Artificial Sequence
  RPE65 RNA guide
cuaagaagacaacagcaccua

SEQ ID NO: 5488 - RNA, 21 nt, Artificial Sequence
  RPE65 RNA guide
cuguuuguguccuuaggugcu

SEQ ID NO: 5489 - RNA, 21 nt, Artificial Sequence
  RPE65 RNA guide
cuuaggugcuguugucuucuu

SEQ ID NO: 5490 - RNA, 21 nt, Artificial Sequence
  RPE65 RNA guide
gaagacaacagcaccuaagga

SEQ ID NO: 5491 - RNA, 21 nt, Artificial Sequence
  RPE65 RNA guide
gacaacagcaccuaaggacac

SEQ ID NO: 5492 - RNA, 21 nt, Artificial Sequence
  RPE65 RNA guide
gcaccuaaggacacaaacaga

SEQ ID NO: 5493 - RNA, 21 nt, Artificial Sequence
  RPE65 RNA guide
ggugcuguugucuucuuagug

SEQ ID NO: 5494 - RNA, 21 nt, Artificial Sequence
  RPE65 RNA guide
guccuuaggugcuguugucuu

SEQ ID NO: 5495 - RNA, 21 nt, Artificial Sequence
  RPE65 RNA guide
gugcuguugucuucuuaguga

SEQ ID NO: 5496 - RNA, 21 nt, Artificial Sequence
  RPE65 RNA guide
guguccuuaggugcuguuguc

SEQ ID NO: 5497 - RNA, 21 nt, Artificial Sequence
  RPE65 RNA guide
guuuguguccuuaggugcugu

SEQ ID NO: 5498 - RNA, 21 nt, Artificial Sequence
  RPE65 RNA guide
uaagaagacaacagcaccuaa

SEQ ID NO: 5499 - RNA, 21 nt, Artificial Sequence
  RPE65 RNA guide
uaggugcuguugucuucuuag

SEQ ID NO: 5500 - RNA, 21 nt, Artificial Sequence
  RPE65 RNA guide
ucacuaagaagacaacagcac

SEQ ID NO: 5501 - RNA, 21 nt, Artificial Sequence
  RPE65 RNA guide
uccuuaggugcuguugucuuc

SEQ ID NO: 5502 - RNA, 21 nt, Artificial Sequence
  RPE65 RNA guide
ucuguuuguguccuuaggugc

SEQ ID NO: 5503 - RNA, 21 nt, Artificial Sequence
  RPE65 RNA guide
uguccuuaggugcuguugucu

SEQ ID NO: 5504 - RNA, 21 nt, Artificial Sequence
  RPE65 RNA guide
uguguccuuaggugcuguugu

SEQ ID NO: 5505 - RNA, 21 nt, Artificial Sequence
  RPE65 RNA guide
uguuuguguccuuaggugcug

SEQ ID NO: 5506 - RNA, 21 nt, Artificial Sequence
  RPE65 RNA guide
uuaggugcuguugucuucuua

SEQ ID NO: 5507 - RNA, 21 nt, Artificial Sequence
  RPE65 RNA guide
uucuguuuguguccuuaggug

SEQ ID NO: 5508 - RNA, 21 nt, Artificial Sequence
  RPE65 RNA guide
uuguguccuuaggugcuguug

SEQ ID NO: 5509 - RNA, 21 nt, Artificial Sequence
  RPE65 RNA guide
uuuguguccuuaggugcuguu

SEQ ID NO: 5510 - RNA, 22 nt, Artificial Sequence
  RPE65 RNA guide
aaaucacuaagaagacaacagc

SEQ ID NO: 5511 - RNA, 22 nt, Artificial Sequence
  RPE65 RNA guide
aacagcaccuaaggacacaaac

SEQ ID NO: 5512 - RNA, 22 nt, Artificial Sequence
  RPE65 RNA guide
aagaagacaacagcaccuaagg

SEQ ID NO: 5513 - RNA, 22 nt, Artificial Sequence
  RPE65 RNA guide
aagacaacagcaccuaaggaca

SEQ ID NO: 5514 - RNA, 22 nt, Artificial Sequence
  RPE65 RNA guide
aaucacuaagaagacaacagca

SEQ ID NO: 5515 - RNA, 22 nt, Artificial Sequence
  RPE65 RNA guide
acaacagcaccuaaggacacaa

SEQ ID NO: 5516 - RNA, 22 nt, Artificial Sequence
  RPE65 RNA guide
acagcaccuaaggacacaaaca

SEQ ID NO: 5517 - RNA, 22 nt, Artificial Sequence
  RPE65 RNA guide
accauucuguuuguguccuuag

SEQ ID NO: 5518 - RNA, 22 nt, Artificial Sequence
  RPE65 RNA guide
acuaagaagacaacagcaccua

SEQ ID NO: 5519 - RNA, 22 nt, Artificial Sequence
  RPE65 RNA guide
agaagacaacagcaccuaagga

SEQ ID NO: 5520 - RNA, 22 nt, Artificial Sequence
  RPE65 RNA guide
agacaacagcaccuaaggacac

SEQ ID NO: 5521 - RNA, 22 nt, Artificial Sequence
  RPE65 RNA guide
agcaccuaaggacacaaacaga

SEQ ID NO: 5522 - RNA, 22 nt, Artificial Sequence
  RPE65 RNA guide
aggugcuguugucuucuuagug

SEQ ID NO: 5523 - RNA, 22 nt, Artificial Sequence
  RPE65 RNA guide
aucacuaagaagacaacagcac

SEQ ID NO: 5524 - RNA, 22 nt, Artificial Sequence
  RPE65 RNA guide
auucuguuuguguccuuaggug

SEQ ID NO: 5525 - RNA, 22 nt, Artificial Sequence
  RPE65 RNA guide
caaaucacuaagaagacaacag

SEQ ID NO: 5526 - RNA, 22 nt, Artificial Sequence
  RPE65 RNA guide
caacagcaccuaaggacacaaa

SEQ ID NO: 5527 - RNA, 22 nt, Artificial Sequence
  RPE65 RNA guide
caccauucuguuuguguccuua

SEQ ID NO: 5528 - RNA, 22 nt, Artificial Sequence
  RPE65 RNA guide
caccuaaggacacaaacagaau

SEQ ID NO: 5529 - RNA, 22 nt, Artificial Sequence
  RPE65 RNA guide
cacuaagaagacaacagcaccu

SEQ ID NO: 5530 - RNA, 22 nt, Artificial Sequence
  RPE65 RNA guide
cagcaccuaaggacacaaacag

SEQ ID NO: 5531 - RNA, 22 nt, Artificial Sequence
  RPE65 RNA guide
cauucuguuuguguccuuaggu

SEQ ID NO: 5532 - RNA, 22 nt, Artificial Sequence
  RPE65 RNA guide
ccaaaucacuaagaagacaaca

SEQ ID NO: 5533 - RNA, 22 nt, Artificial Sequence
  RPE65 RNA guide
ccauucuguuuguguccuuagg

SEQ ID NO: 5534 - RNA, 22 nt, Artificial Sequence
  RPE65 RNA guide
ccuuaggugcuguugucuucuu

SEQ ID NO: 5535 - RNA, 22 nt, Artificial Sequence
  RPE65 RNA guide
cuaagaagacaacagcaccuaa

SEQ ID NO: 5536 - RNA, 22 nt, Artificial Sequence
  RPE65 RNA guide
cuguuuguguccuuaggugcug

SEQ ID NO: 5537 - RNA, 22 nt, Artificial Sequence
  RPE65 RNA guide
cuuaggugcuguugucuucuua

SEQ ID NO: 5538 - RNA, 22 nt, Artificial Sequence
  RPE65 RNA guide
gaagacaacagcaccuaaggac

SEQ ID NO: 5539 - RNA, 22 nt, Artificial Sequence
  RPE65 RNA guide
gacaacagcaccuaaggacaca

SEQ ID NO: 5540 - RNA, 22 nt, Artificial Sequence
  RPE65 RNA guide
gcaccuaaggacacaaacagaa

SEQ ID NO: 5541 - RNA, 22 nt, Artificial Sequence
  RPE65 RNA guide
gccaaaucacuaagaagacaac

SEQ ID NO: 5542 - RNA, 22 nt, Artificial Sequence
  RPE65 RNA guide
ggugcuguugucuucuuaguga

SEQ ID NO: 5543 - RNA, 22 nt, Artificial Sequence
  RPE65 RNA guide
guccuuaggugcuguugucuuc

SEQ ID NO: 5544 - RNA, 22 nt, Artificial Sequence
  RPE65 RNA guide
gugcuguugucuucuuagugau

SEQ ID NO: 5545 - RNA, 22 nt, Artificial Sequence
  RPE65 RNA guide
guguccuuaggugcuguugucu

SEQ ID NO: 5546 - RNA, 22 nt, Artificial Sequence
  RPE65 RNA guide
guuuguguccuuaggugcuguu

SEQ ID NO: 5547 - RNA, 22 nt, Artificial Sequence
  RPE65 RNA guide
uaagaagacaacagcaccuaag

SEQ ID NO: 5548 - RNA, 22 nt, Artificial Sequence
  RPE65 RNA guide
uaggugcuguugucuucuuagu

SEQ ID NO: 5549 - RNA, 22 nt, Artificial Sequence
  RPE65 RNA guide
ucaccauucuguuuguguccuu

SEQ ID NO: 5550 - RNA, 22 nt, Artificial Sequence
  RPE65 RNA guide
ucacuaagaagacaacagcacc

SEQ ID NO: 5551 - RNA, 22 nt, Artificial Sequence
  RPE65 RNA guide
uccuuaggugcuguugucuucu

SEQ ID NO: 5552 - RNA, 22 nt, Artificial Sequence
  RPE65 RNA guide
ucuguuuguguccuuaggugcu

SEQ ID NO: 5553 - RNA, 22 nt, Artificial Sequence
  RPE65 RNA guide
uguccuuaggugcuguugucuu

SEQ ID NO: 5554 - RNA, 22 nt, Artificial Sequence
  RPE65 RNA guide
uguguccuuaggugcuguuguc

SEQ ID NO: 5555 - RNA, 22 nt, Artificial Sequence
  RPE65 RNA guide
uguuuguguccuuaggugcugu

SEQ ID NO: 5556 - RNA, 22 nt, Artificial Sequence
  RPE65 RNA guide
uuaggugcuguugucuucuuag

SEQ ID NO: 5557 - RNA, 22 nt, Artificial Sequence
  RPE65 RNA guide
uucuguuuguguccuuaggugc

SEQ ID NO: 5558 - RNA, 22 nt, Artificial Sequence
  RPE65 RNA guide
uuguguccuuaggugcuguugu

SEQ ID NO: 5559 - RNA, 22 nt, Artificial Sequence
  RPE65 RNA guide
uuuguguccuuaggugcuguug

SEQ ID NO: 5560 - RNA, 20 nt, Artificial Sequence
  RPE65 RNA guide
aacagcgccuaaggacacaa

SEQ ID NO: 5561 - RNA, 20 nt, Artificial Sequence
  RPE65 RNA guide
aagaagacaacagcgccuaa

SEQ ID NO: 5562 - RNA, 20 nt, Artificial Sequence
  RPE65 RNA guide
aagacaacagcgccuaagga

SEQ ID NO: 5563 - RNA, 20 nt, Artificial Sequence
  RPE65 RNA guide
acaacagcgccuaaggacac

SEQ ID NO: 5564 - RNA, 20 nt, Artificial Sequence
  RPE65 RNA guide
acagcgccuaaggacacaaa

SEQ ID NO: 5565 - RNA, 20 nt, Artificial Sequence
  RPE65 RNA guide
acuaagaagacaacagcgcc

SEQ ID NO: 5566 - RNA, 20 nt, Artificial Sequence
  RPE65 RNA guide
agaagacaacagcgccuaag

SEQ ID NO: 5567 - RNA, 20 nt, Artificial Sequence
  RPE65 RNA guide
agacaacagcgccuaaggac

SEQ ID NO: 5568 - RNA, 20 nt, Artificial Sequence
  RPE65 RNA guide
agcgccuaaggacacaaaca

SEQ ID NO: 5569 - RNA, 20 nt, Artificial Sequence
  RPE65 RNA guide
aggcgcuguugucuucuuag

SEQ ID NO: 5570 - RNA, 20 nt, Artificial Sequence
  RPE65 RNA guide
caacagcgccuaaggacaca

SEQ ID NO: 5571 - RNA, 20 nt, Artificial Sequence
  RPE65 RNA guide
cacuaagaagacaacagcgc

SEQ ID NO: 5572 - RNA, 20 nt, Artificial Sequence
  RPE65 RNA guide
cagcgccuaaggacacaaac

SEQ ID NO: 5573 - RNA, 20 nt, Artificial Sequence
  RPE65 RNA guide
ccuuaggcgcuguugucuuc

SEQ ID NO: 5574 - RNA, 20 nt, Artificial Sequence
  RPE65 RNA guide
cgccuaaggacacaaacaga

SEQ ID NO: 5575 - RNA, 20 nt, Artificial Sequence
  RPE65 RNA guide
cuaagaagacaacagcgccu

SEQ ID NO: 5576 - RNA, 20 nt, Artificial Sequence
  RPE65 RNA guide
cuguuuguguccuuaggcgc

SEQ ID NO: 5577 - RNA, 20 nt, Artificial Sequence
  RPE65 RNA guide
cuuaggcgcuguugucuucu

SEQ ID NO: 5578 - RNA, 20 nt, Artificial Sequence
  RPE65 RNA guide
gaagacaacagcgccuaagg

SEQ ID NO: 5579 - RNA, 20 nt, Artificial Sequence
  RPE65 RNA guide
gacaacagcgccuaaggaca

SEQ ID NO: 5580 - RNA, 20 nt, Artificial Sequence
  RPE65 RNA guide
gcgccuaaggacacaaacag

SEQ ID NO: 5581 - RNA, 20 nt, Artificial Sequence
  RPE65 RNA guide
gcgcuguugucuucuuagug

SEQ ID NO: 5582 - RNA, 20 nt, Artificial Sequence
  RPE65 RNA guide
ggcgcuguugucuucuuagu

SEQ ID NO: 5583 - RNA, 20 nt, Artificial Sequence
  RPE65 RNA guide
guccuuaggcgcuguugucu

SEQ ID NO: 5584 - RNA, 20 nt, Artificial Sequence
  RPE65 RNA guide
guguccuuaggcgcuguugu

SEQ ID NO: 5585 - RNA, 20 nt, Artificial Sequence
  RPE65 RNA guide
guuuguguccuuaggcgcug

SEQ ID NO: 5586 - RNA, 20 nt, Artificial Sequence
  RPE65 RNA guide
uaagaagacaacagcgccua

SEQ ID NO: 5587 - RNA, 20 nt, Artificial Sequence
  RPE65 RNA guide
uaggcgcuguugucuucuua

SEQ ID NO: 5588 - RNA, 20 nt, Artificial Sequence
  RPE65 RNA guide
ucacuaagaagacaacagcg

SEQ ID NO: 5589 - RNA, 20 nt, Artificial Sequence
  RPE65 RNA guide
uccuuaggcgcuguugucuu

SEQ ID NO: 5590 - RNA, 20 nt, Artificial Sequence
  RPE65 RNA guide
ucuguuuguguccuuaggcg

SEQ ID NO: 5591 - RNA, 20 nt, Artificial Sequence
  RPE65 RNA guide
uguccuuaggcgcuguuguc

SEQ ID NO: 5592 - RNA, 20 nt, Artificial Sequence
  RPE65 RNA guide
uguguccuuaggcgcuguug

SEQ ID NO: 5593 - RNA, 20 nt, Artificial Sequence
  RPE65 RNA guide
uguuuguguccuuaggcgcu

SEQ ID NO: 5594 - RNA, 20 nt, Artificial Sequence
  RPE65 RNA guide
uuaggcgcuguugucuucuu

SEQ ID NO: 5595 - RNA, 20 nt, Artificial Sequence
  RPE65 RNA guide
uucuguuuguguccuuaggc

SEQ ID NO: 5596 - RNA, 20 nt, Artificial Sequence
  RPE65 RNA guide
uuguguccuuaggcgcuguu

SEQ ID NO: 5597 - RNA, 20 nt, Artificial Sequence
  RPE65 RNA guide
uuuguguccuuaggcgcugu

SEQ ID NO: 5598 - RNA, 21 nt, Artificial Sequence
  RPE65 RNA guide
aacagcgccuaaggacacaaa

SEQ ID NO: 5599 - RNA, 21 nt, Artificial Sequence
  RPE65 RNA guide
aagaagacaacagcgccuaag

SEQ ID NO: 5600 - RNA, 21 nt, Artificial Sequence
  RPE65 RNA guide
aagacaacagcgccuaaggac

SEQ ID NO: 5601 - RNA, 21 nt, Artificial Sequence
  RPE65 RNA guide
acaacagcgccuaaggacaca

SEQ ID NO: 5602 - RNA, 21 nt, Artificial Sequence
  RPE65 RNA guide
acagcgccuaaggacacaaac

SEQ ID NO: 5603 - RNA, 21 nt, Artificial Sequence
  RPE65 RNA guide
acuaagaagacaacagcgccu

SEQ ID NO: 5604 - RNA, 21 nt, Artificial Sequence
  RPE65 RNA guide
agaagacaacagcgccuaagg

SEQ ID NO: 5605 - RNA, 21 nt, Artificial Sequence
  RPE65 RNA guide
agacaacagcgccuaaggaca

SEQ ID NO: 5606 - RNA, 21 nt, Artificial Sequence
  RPE65 RNA guide
agcgccuaaggacacaaacag

SEQ ID NO: 5607 - RNA, 21 nt, Artificial Sequence
  RPE65 RNA guide
aggcgcuguugucuucuuagu

SEQ ID NO: 5608 - RNA, 21 nt, Artificial Sequence
  RPE65 RNA guide
aucacuaagaagacaacagcg

SEQ ID NO: 5609 - RNA, 21 nt, Artificial Sequence
  RPE65 RNA guide
auucuguuuguguccuuaggc

SEQ ID NO: 5610 - RNA, 21 nt, Artificial Sequence
  RPE65 RNA guide
caacagcgccuaaggacacaa

SEQ ID NO: 5611 - RNA, 21 nt, Artificial Sequence
  RPE65 RNA guide
cacuaagaagacaacagcgcc

SEQ ID NO: 5612 - RNA, 21 nt, Artificial Sequence
  RPE65 RNA guide
cagcgccuaaggacacaaaca

SEQ ID NO: 5613 - RNA, 21 nt, Artificial Sequence
  RPE65 RNA guide
ccuuaggcgcuguugucuucu

SEQ ID NO: 5614 - RNA, 21 nt, Artificial Sequence
  RPE65 RNA guide
cgccuaaggacacaaacagaa

SEQ ID NO: 5615 - RNA, 21 nt, Artificial Sequence
  RPE65 RNA guide
cuaagaagacaacagcgccua

SEQ ID NO: 5616 - RNA, 21 nt, Artificial Sequence
  RPE65 RNA guide
cuguuuguguccuuaggcgcu

SEQ ID NO: 5617 - RNA, 21 nt, Artificial Sequence
  RPE65 RNA guide
cuuaggcgcuguugucuucuu

SEQ ID NO: 5618 - RNA, 21 nt, Artificial Sequence
  RPE65 RNA guide
gaagacaacagcgccuaagga

SEQ ID NO: 5619 - RNA, 21 nt, Artificial Sequence
  RPE65 RNA guide
gacaacagcgccuaaggacac

SEQ ID NO: 5620 - RNA, 21 nt, Artificial Sequence
  RPE65 RNA guide
gcgccuaaggacacaaacaga

SEQ ID NO: 5621 - RNA, 21 nt, Artificial Sequence
  RPE65 RNA guide
gcgcuguugucuucuuaguga

SEQ ID NO: 5622 - RNA, 21 nt, Artificial Sequence
  RPE65 RNA guide
ggcgcuguugucuucuuagug

SEQ ID NO: 5623 - RNA, 21 nt, Artificial Sequence
  RPE65 RNA guide
guccuuaggcgcuguugucuu

SEQ ID NO: 5624 - RNA, 21 nt, Artificial Sequence
  RPE65 RNA guide
guguccuuaggcgcuguuguc

SEQ ID NO: 5625 - RNA, 21 nt, Artificial Sequence
  RPE65 RNA guide
guuuguguccuuaggcgcugu

SEQ ID NO: 5626 - RNA, 21 nt, Artificial Sequence
  RPE65 RNA guide
uaagaagacaacagcgccuaa

SEQ ID NO: 5627 - RNA, 21 nt, Artificial Sequence
  RPE65 RNA guide
uaggcgcuguugucuucuuag

SEQ ID NO: 5628 - RNA, 21 nt, Artificial Sequence
  RPE65 RNA guide
ucacuaagaagacaacagcgc

SEQ ID NO: 5629 - RNA, 21 nt, Artificial Sequence
  RPE65 RNA guide
uccuuaggcgcuguugucuuc

SEQ ID NO: 5630 - RNA, 21 nt, Artificial Sequence
  RPE65 RNA guide
ucuguuuguguccuuaggcgc

SEQ ID NO: 5631 - RNA, 21 nt, Artificial Sequence
  RPE65 RNA guide
uguccuuaggcgcuguugucu

SEQ ID NO: 5632 - RNA, 21 nt, Artificial Sequence
  RPE65 RNA guide
uguguccuuaggcgcuguugu

SEQ ID NO: 5633 - RNA, 21 nt, Artificial Sequence
  RPE65 RNA guide
uguuuguguccuuaggcgcug

SEQ ID NO: 5634 - RNA, 21 nt, Artificial Sequence
  RPE65 RNA guide
uuaggcgcuguugucuucuua

SEQ ID NO: 5635 - RNA, 21 nt, Artificial Sequence
  RPE65 RNA guide
uucuguuuguguccuuaggcg

SEQ ID NO: 5636 - RNA, 21 nt, Artificial Sequence
  RPE65 RNA guide
uuguguccuuaggcgcuguug

SEQ ID NO: 5637 - RNA, 21 nt, Artificial Sequence
  RPE65 RNA guide
uuuguguccuuaggcgcuguu

SEQ ID NO: 5638 - RNA, 22 nt, Artificial Sequence
  RPE65 RNA guide
aacagcgccuaaggacacaaac

SEQ ID NO: 5639 - RNA, 22 nt, Artificial Sequence
  RPE65 RNA guide
aagaagacaacagcgccuaagg

SEQ ID NO: 5640 - RNA, 22 nt, Artificial Sequence
  RPE65 RNA guide
aagacaacagcgccuaaggaca

SEQ ID NO: 5641 - RNA, 22 nt, Artificial Sequence
  RPE65 RNA guide
aaucacuaagaagacaacagcg

SEQ ID NO: 5642 - RNA, 22 nt, Artificial Sequence
  RPE65 RNA guide
acaacagcgccuaaggacacaa

SEQ ID NO: 5643 - RNA, 22 nt, Artificial Sequence
  RPE65 RNA guide
acagcgccuaaggacacaaaca

SEQ ID NO: 5644 - RNA, 22 nt, Artificial Sequence
  RPE65 RNA guide
acuaagaagacaacagcgccua

SEQ ID NO: 5645 - RNA, 22 nt, Artificial Sequence
  RPE65 RNA guide
agaagacaacagcgccuaagga

SEQ ID NO: 5646 - RNA, 22 nt, Artificial Sequence
  RPE65 RNA guide
agacaacagcgccuaaggacac

SEQ ID NO: 5647 - RNA, 22 nt, Artificial Sequence
  RPE65 RNA guide
agcgccuaaggacacaaacaga

SEQ ID NO: 5648 - RNA, 22 nt, Artificial Sequence
  RPE65 RNA guide
aggcgcuguugucuucuuagug

SEQ ID NO: 5649 - RNA, 22 nt, Artificial Sequence
  RPE65 RNA guide
aucacuaagaagacaacagcgc

SEQ ID NO: 5650 - RNA, 22 nt, Artificial Sequence
  RPE65 RNA guide
auucuguuuguguccuuaggcg

SEQ ID NO: 5651 - RNA, 22 nt, Artificial Sequence
  RPE65 RNA guide
caacagcgccuaaggacacaaa

SEQ ID NO: 5652 - RNA, 22 nt, Artificial Sequence
  RPE65 RNA guide
cacuaagaagacaacagcgccu

SEQ ID NO: 5653 - RNA, 22 nt, Artificial Sequence
  RPE65 RNA guide
cagcgccuaaggacacaaacag

SEQ ID NO: 5654 - RNA, 22 nt, Artificial Sequence
  RPE65 RNA guide
cauucuguuuguguccuuaggc

SEQ ID NO: 5655 - RNA, 22 nt, Artificial Sequence
  RPE65 RNA guide
ccuuaggcgcuguugucuucuu

SEQ ID NO: 5656 - RNA, 22 nt, Artificial Sequence
  RPE65 RNA guide
cgccuaaggacacaaacagaau

SEQ ID NO: 5657 - RNA, 22 nt, Artificial Sequence
  RPE65 RNA guide
cuaagaagacaacagcgccuaa

SEQ ID NO: 5658 - RNA, 22 nt, Artificial Sequence
  RPE65 RNA guide
cuguuuguguccuuaggcgcug

SEQ ID NO: 5659 - RNA, 22 nt, Artificial Sequence
  RPE65 RNA guide
cuuaggcgcuguugucuucuua

SEQ ID NO: 5660 - RNA, 22 nt, Artificial Sequence
  RPE65 RNA guide
gaagacaacagcgccuaaggac

SEQ ID NO: 5661 - RNA, 22 nt, Artificial Sequence
  RPE65 RNA guide
gacaacagcgccuaaggacaca

SEQ ID NO: 5662 - RNA, 22 nt, Artificial Sequence
  RPE65 RNA guide
gcgccuaaggacacaaacagaa

SEQ ID NO: 5663 - RNA, 22 nt, Artificial Sequence
  RPE65 RNA guide
gcgcuguugucuucuuagugau

SEQ ID NO: 5664 - RNA, 22 nt, Artificial Sequence
  RPE65 RNA guide
ggcgcuguugucuucuuaguga

SEQ ID NO: 5665 - RNA, 22 nt, Artificial Sequence
  RPE65 RNA guide
guccuuaggcgcuguugucuuc

SEQ ID NO: 5666 - RNA, 22 nt, Artificial Sequence
  RPE65 RNA guide
guguccuuaggcgcuguugucu

SEQ ID NO: 5667 - RNA, 22 nt, Artificial Sequence
  RPE65 RNA guide
guuuguguccuuaggcgcuguu

SEQ ID NO: 5668 - RNA, 22 nt, Artificial Sequence
  RPE65 RNA guide
uaagaagacaacagcgccuaag

SEQ ID NO: 5669 - RNA, 22 nt, Artificial Sequence
  RPE65 RNA guide
uaggcgcuguugucuucuuagu

SEQ ID NO: 5670 - RNA, 22 nt, Artificial Sequence
  RPE65 RNA guide
ucacuaagaagacaacagcgcc

SEQ ID NO: 5671 - RNA, 22 nt, Artificial Sequence
  RPE65 RNA guide
uccuuaggcgcuguugucuucu

SEQ ID NO: 5672 - RNA, 22 nt, Artificial Sequence
  RPE65 RNA guide
ucuguuuguguccuuaggcgcu

SEQ ID NO: 5673 - RNA, 22 nt, Artificial Sequence
  RPE65 RNA guide
uguccuuaggcgcuguugucuu

SEQ ID NO: 5674 - RNA, 22 nt, Artificial Sequence
  RPE65 RNA guide
uguguccuuaggcgcuguuguc

SEQ ID NO: 5675 - RNA, 22 nt, Artificial Sequence
  RPE65 RNA guide
uguuuguguccuuaggcgcugu

SEQ ID NO: 5676 - RNA, 22 nt, Artificial Sequence
  RPE65 RNA guide
uuaggcgcuguugucuucuuag

SEQ ID NO: 5677 - RNA, 22 nt, Artificial Sequence
  RPE65 RNA guide
uucuguuuguguccuuaggcgc

SEQ ID NO: 5678 - RNA, 22 nt, Artificial Sequence
  RPE65 RNA guide
uuguguccuuaggcgcuguugu

SEQ ID NO: 5679 - RNA, 22 nt, Artificial Sequence
  RPE65 RNA guide
uuuguguccuuaggcgcuguug

SEQ ID NO: 5680 - RNA, 20 nt, Artificial Sequence
  RPE65 RNA guide
aaaaucccuggggaaacuug

SEQ ID NO: 5681 - RNA, 20 nt, Artificial Sequence
  RPE65 RNA guide
aaaguugacaaaaucccugg

SEQ ID NO: 5682 - RNA, 20 nt, Artificial Sequence
  RPE65 RNA guide
aaaucccuggggaaacuuga

SEQ ID NO: 5683 - RNA, 20 nt, Artificial Sequence
  RPE65 RNA guide
aaguugacaaaaucccuggg

SEQ ID NO: 5684 - RNA, 20 nt, Artificial Sequence
  RPE65 RNA guide
aaguuuccccagggauuuug

SEQ ID NO: 5685 - RNA, 20 nt, Artificial Sequence
  RPE65 RNA guide
aaucccuggggaaacuugag

SEQ ID NO: 5686 - RNA, 20 nt, Artificial Sequence
  RPE65 RNA guide
acaaaaucccuggggaaacu

SEQ ID NO: 5687 - RNA, 20 nt, Artificial Sequence
  RPE65 RNA guide
acuuaaaguugacaaaaucc

SEQ ID NO: 5688 - RNA, 20 nt, Artificial Sequence
  RPE65 RNA guide
agauggggcucaaguuuccc

SEQ ID NO: 5689 - RNA, 20 nt, Artificial Sequence
  RPE65 RNA guide
agggauuuugucaacuuuaa

SEQ ID NO: 5690 - RNA, 20 nt, Artificial Sequence
  RPE65 RNA guide
aguugacaaaaucccugggg

SEQ ID NO: 5691 - RNA, 20 nt, Artificial Sequence
  RPE65 RNA guide
aguuuccccagggauuuugu

SEQ ID NO: 5692 - RNA, 20 nt, Artificial Sequence
  RPE65 RNA guide
aucccuggggaaacuugagc

SEQ ID NO: 5693 - RNA, 20 nt, Artificial Sequence
  RPE65 RNA guide
auggggcucaaguuucccca

SEQ ID NO: 5694 - RNA, 20 nt, Artificial Sequence
  RPE65 RNA guide
caaaaucccuggggaaacuu

SEQ ID NO: 5695 - RNA, 20 nt, Artificial Sequence
  RPE65 RNA guide
caaguuuccccagggauuuu

SEQ ID NO: 5696 - RNA, 20 nt, Artificial Sequence
  RPE65 RNA guide
cagggauuuugucaacuuua

SEQ ID NO: 5697 - RNA, 20 nt, Artificial Sequence
  RPE65 RNA guide
ccagggauuuugucaacuuu

SEQ ID NO: 5698 - RNA, 20 nt, Artificial Sequence
  RPE65 RNA guide
cccagggauuuugucaacuu

SEQ ID NO: 5699 - RNA, 20 nt, Artificial Sequence
  RPE65 RNA guide
ccccagggauuuugucaacu

SEQ ID NO: 5700 - RNA, 20 nt, Artificial Sequence
  RPE65 RNA guide
cccuggggaaacuugagccc

SEQ ID NO: 5701 - RNA, 20 nt, Artificial Sequence
  RPE65 RNA guide
cucaaguuuccccagggauu

SEQ ID NO: 5702 - RNA, 20 nt, Artificial Sequence
  RPE65 RNA guide
cuuaaaguugacaaaauccc

SEQ ID NO: 5703 - RNA, 20 nt, Artificial Sequence
  RPE65 RNA guide
gacaaaaucccuggggaaac

SEQ ID NO: 5704 - RNA, 20 nt, Artificial Sequence
  RPE65 RNA guide
gauggggcucaaguuucccc

SEQ ID NO: 5705 - RNA, 20 nt, Artificial Sequence
  RPE65 RNA guide
gcucaaguuuccccagggau

SEQ ID NO: 5706 - RNA, 20 nt, Artificial Sequence
  RPE65 RNA guide
ggcucaaguuuccccaggga

SEQ ID NO: 5707 - RNA, 20 nt, Artificial Sequence
  RPE65 RNA guide
gggauuuugucaacuuuaag

SEQ ID NO: 5708 - RNA, 20 nt, Artificial Sequence
  RPE65 RNA guide
gggcucaaguuuccccaggg

SEQ ID NO: 5709 - RNA, 20 nt, Artificial Sequence
  RPE65 RNA guide
ggggcucaaguuuccccagg

SEQ ID NO: 5710 - RNA, 20 nt, Artificial Sequence
  RPE65 RNA guide
gugaacuuaaaguugacaaa

SEQ ID NO: 5711 - RNA, 20 nt, Artificial Sequence
  RPE65 RNA guide
guugacaaaaucccugggga

SEQ ID NO: 5712 - RNA, 20 nt, Artificial Sequence
  RPE65 RNA guide
guuuccccagggauuuuguc

SEQ ID NO: 5713 - RNA, 20 nt, Artificial Sequence
  RPE65 RNA guide
uaaaguugacaaaaucccug

SEQ ID NO: 5714 - RNA, 20 nt, Artificial Sequence
  RPE65 RNA guide
ucaaguuuccccagggauuu

SEQ ID NO: 5715 - RNA, 20 nt, Artificial Sequence
  RPE65 RNA guide
uccccagggauuuugucaac

SEQ ID NO: 5716 - RNA, 20 nt, Artificial Sequence
  RPE65 RNA guide
ucccuggggaaacuugagcc

SEQ ID NO: 5717 - RNA, 20 nt, Artificial Sequence
  RPE65 RNA guide
ugacaaaaucccuggggaaa

SEQ ID NO: 5718 - RNA, 20 nt, Artificial Sequence
  RPE65 RNA guide
uggggcucaaguuuccccag

SEQ ID NO: 5719 - RNA, 20 nt, Artificial Sequence
  RPE65 RNA guide
uuaaaguugacaaaaucccu

SEQ ID NO: 5720 - RNA, 20 nt, Artificial Sequence
  RPE65 RNA guide
uuccccagggauuuugucaa

SEQ ID NO: 5721 - RNA, 20 nt, Artificial Sequence
  RPE65 RNA guide
uugacaaaaucccuggggaa

SEQ ID NO: 5722 - RNA, 20 nt, Artificial Sequence
  RPE65 RNA guide
uuuccccagggauuuuguca

SEQ ID NO: 5723 - RNA, 21 nt, Artificial Sequence
  RPE65 RNA guide
aaaaucccuggggaaacuuga

SEQ ID NO: 5724 - RNA, 21 nt, Artificial Sequence
  RPE65 RNA guide
aaaguugacaaaaucccuggg

SEQ ID NO: 5725 - RNA, 21 nt, Artificial Sequence
  RPE65 RNA guide
aaaucccuggggaaacuugag

SEQ ID NO: 5726 - RNA, 21 nt, Artificial Sequence
  RPE65 RNA guide
aagauggggcucaaguuuccc

SEQ ID NO: 5727 - RNA, 21 nt, Artificial Sequence
  RPE65 RNA guide
aaguugacaaaaucccugggg

SEQ ID NO: 5728 - RNA, 21 nt, Artificial Sequence
  RPE65 RNA guide
aaguuuccccagggauuuugu

SEQ ID NO: 5729 - RNA, 21 nt, Artificial Sequence
  RPE65 RNA guide
aaucccuggggaaacuugagc

SEQ ID NO: 5730 - RNA, 21 nt, Artificial Sequence
  RPE65 RNA guide
acaaaaucccuggggaaacuu

SEQ ID NO: 5731 - RNA, 21 nt, Artificial Sequence
  RPE65 RNA guide
acuuaaaguugacaaaauccc

SEQ ID NO: 5732 - RNA, 21 nt, Artificial Sequence
  RPE65 RNA guide
agauggggcucaaguuucccc

SEQ ID NO: 5733 - RNA, 21 nt, Artificial Sequence
  RPE65 RNA guide
agggauuuugucaacuuuaag

SEQ ID NO: 5734 - RNA, 21 nt, Artificial Sequence
  RPE65 RNA guide
aguugacaaaaucccugggga

SEQ ID NO: 5735 - RNA, 21 nt, Artificial Sequence
  RPE65 RNA guide
aguuuccccagggauuuuguc

SEQ ID NO: 5736 - RNA, 21 nt, Artificial Sequence
  RPE65 RNA guide
aucccuggggaaacuugagcc

SEQ ID NO: 5737 - RNA, 21 nt, Artificial Sequence
  RPE65 RNA guide
auggggcucaaguuuccccag

SEQ ID NO: 5738 - RNA, 21 nt, Artificial Sequence
  RPE65 RNA guide
caaaaucccuggggaaacuug

SEQ ID NO: 5739 - RNA, 21 nt, Artificial Sequence
  RPE65 RNA guide
caaguuuccccagggauuuug

SEQ ID NO: 5740 - RNA, 21 nt, Artificial Sequence
  RPE65 RNA guide
cagggauuuugucaacuuuaa

SEQ ID NO: 5741 - RNA, 21 nt, Artificial Sequence
  RPE65 RNA guide
ccagggauuuugucaacuuua

SEQ ID NO: 5742 - RNA, 21 nt, Artificial Sequence
  RPE65 RNA guide
cccagggauuuugucaacuuu

SEQ ID NO: 5743 - RNA, 21 nt, Artificial Sequence
  RPE65 RNA guide
ccccagggauuuugucaacuu

SEQ ID NO: 5744 - RNA, 21 nt, Artificial Sequence
  RPE65 RNA guide
cccuggggaaacuugagcccc

SEQ ID NO: 5745 - RNA, 21 nt, Artificial Sequence
  RPE65 RNA guide
cucaaguuuccccagggauuu

SEQ ID NO: 5746 - RNA, 21 nt, Artificial Sequence
  RPE65 RNA guide
cuuaaaguugacaaaaucccu

SEQ ID NO: 5747 - RNA, 21 nt, Artificial Sequence
  RPE65 RNA guide
gacaaaaucccuggggaaacu

SEQ ID NO: 5748 - RNA, 21 nt, Artificial Sequence
  RPE65 RNA guide
gauggggcucaaguuucccca

SEQ ID NO: 5749 - RNA, 21 nt, Artificial Sequence
  RPE65 RNA guide
gcucaaguuuccccagggauu

SEQ ID NO: 5750 - RNA, 21 nt, Artificial Sequence
  RPE65 RNA guide
ggcucaaguuuccccagggau

SEQ ID NO: 5751 - RNA, 21 nt, Artificial Sequence
  RPE65 RNA guide
gggauuuugucaacuuuaagu

SEQ ID NO: 5752 - RNA, 21 nt, Artificial Sequence
  RPE65 RNA guide
gggcucaaguuuccccaggga

SEQ ID NO: 5753 - RNA, 21 nt, Artificial Sequence
  RPE65 RNA guide
ggggcucaaguuuccccaggg

SEQ ID NO: 5754 - RNA, 21 nt, Artificial Sequence
  RPE65 RNA guide
ggugaacuuaaaguugacaaa

SEQ ID NO: 5755 - RNA, 21 nt, Artificial Sequence
  RPE65 RNA guide
guugacaaaaucccuggggaa

SEQ ID NO: 5756 - RNA, 21 nt, Artificial Sequence
  RPE65 RNA guide
guuuccccagggauuuuguca

SEQ ID NO: 5757 - RNA, 21 nt, Artificial Sequence
  RPE65 RNA guide
uaaaguugacaaaaucccugg

SEQ ID NO: 5758 - RNA, 21 nt, Artificial Sequence
  RPE65 RNA guide
ucaaguuuccccagggauuuu

SEQ ID NO: 5759 - RNA, 21 nt, Artificial Sequence
  RPE65 RNA guide
uccccagggauuuugucaacu

SEQ ID NO: 5760 - RNA, 21 nt, Artificial Sequence
  RPE65 RNA guide
ucccuggggaaacuugagccc

SEQ ID NO: 5761 - RNA, 21 nt, Artificial Sequence
  RPE65 RNA guide
ugacaaaaucccuggggaaac

SEQ ID NO: 5762 - RNA, 21 nt, Artificial Sequence
  RPE65 RNA guide
uggggcucaaguuuccccagg

SEQ ID NO: 5763 - RNA, 21 nt, Artificial Sequence
  RPE65 RNA guide
uuaaaguugacaaaaucccug

SEQ ID NO: 5764 - RNA, 21 nt, Artificial Sequence
  RPE65 RNA guide
uuccccagggauuuugucaac

SEQ ID NO: 5765 - RNA, 21 nt, Artificial Sequence
  RPE65 RNA guide
uugacaaaaucccuggggaaa

SEQ ID NO: 5766 - RNA, 21 nt, Artificial Sequence
  RPE65 RNA guide
uuuccccagggauuuugucaa

SEQ ID NO: 5767 - RNA, 22 nt, Artificial Sequence
  RPE65 RNA guide
aaaaucccuggggaaacuugag

SEQ ID NO: 5768 - RNA, 22 nt, Artificial Sequence
  RPE65 RNA guide
aaaguugacaaaaucccugggg

SEQ ID NO: 5769 - RNA, 22 nt, Artificial Sequence
  RPE65 RNA guide
aaaucccuggggaaacuugagc

SEQ ID NO: 5770 - RNA, 22 nt, Artificial Sequence
  RPE65 RNA guide
aacuuaaaguugacaaaauccc

SEQ ID NO: 5771 - RNA, 22 nt, Artificial Sequence
  RPE65 RNA guide
aagauggggcucaaguuucccc

SEQ ID NO: 5772 - RNA, 22 nt, Artificial Sequence
  RPE65 RNA guide
aaguugacaaaaucccugggga

SEQ ID NO: 5773 - RNA, 22 nt, Artificial Sequence
  RPE65 RNA guide
aaguuuccccagggauuuuguc

SEQ ID NO: 5774 - RNA, 22 nt, Artificial Sequence
  RPE65 RNA guide
aaucccuggggaaacuugagcc

SEQ ID NO: 5775 - RNA, 22 nt, Artificial Sequence
  RPE65 RNA guide
acaaaaucccuggggaaacuug

SEQ ID NO: 5776 - RNA, 22 nt, Artificial Sequence
  RPE65 RNA guide
acuuaaaguugacaaaaucccu

SEQ ID NO: 5777 - RNA, 22 nt, Artificial Sequence
  RPE65 RNA guide
agauggggcucaaguuucccca

SEQ ID NO: 5778 - RNA, 22 nt, Artificial Sequence
  RPE65 RNA guide
agggauuuugucaacuuuaagu

SEQ ID NO: 5779 - RNA, 22 nt, Artificial Sequence
  RPE65 RNA guide
aggugaacuuaaaguugacaaa

SEQ ID NO: 5780 - RNA, 22 nt, Artificial Sequence
  RPE65 RNA guide
aguugacaaaaucccuggggaa

SEQ ID NO: 5781 - RNA, 22 nt, Artificial Sequence
  RPE65 RNA guide
aguuuccccagggauuuuguca

SEQ ID NO: 5782 - RNA, 22 nt, Artificial Sequence
  RPE65 RNA guide
aucccuggggaaacuugagccc

SEQ ID NO: 5783 - RNA, 22 nt, Artificial Sequence
  RPE65 RNA guide
auggggcucaaguuuccccagg

SEQ ID NO: 5784 - RNA, 22 nt, Artificial Sequence
  RPE65 RNA guide
caaaaucccuggggaaacuuga

SEQ ID NO: 5785 - RNA, 22 nt, Artificial Sequence
  RPE65 RNA guide
caaguuuccccagggauuuugu

SEQ ID NO: 5786 - RNA, 22 nt, Artificial Sequence
  RPE65 RNA guide
cagggauuuugucaacuuuaag

SEQ ID NO: 5787 - RNA, 22 nt, Artificial Sequence
  RPE65 RNA guide
ccagggauuuugucaacuuuaa

SEQ ID NO: 5788 - RNA, 22 nt, Artificial Sequence
  RPE65 RNA guide
cccagggauuuugucaacuuua

SEQ ID NO: 5789 - RNA, 22 nt, Artificial Sequence
  RPE65 RNA guide
ccccagggauuuugucaacuuu

SEQ ID NO: 5790 - RNA, 22 nt, Artificial Sequence
  RPE65 RNA guide
cccuggggaaacuugagcccca

SEQ ID NO: 5791 - RNA, 22 nt, Artificial Sequence
  RPE65 RNA guide
cucaaguuuccccagggauuuu

SEQ ID NO: 5792 - RNA, 22 nt, Artificial Sequence
  RPE65 RNA guide
cuuaaaguugacaaaaucccug

SEQ ID NO: 5793 - RNA, 22 nt, Artificial Sequence
  RPE65 RNA guide
gaacuuaaaguugacaaaaucc

SEQ ID NO: 5794 - RNA, 22 nt, Artificial Sequence
  RPE65 RNA guide
gaagauggggcucaaguuuccc

SEQ ID NO: 5795 - RNA, 22 nt, Artificial Sequence
  RPE65 RNA guide
gacaaaaucccuggggaaacuu

SEQ ID NO: 5796 - RNA, 22 nt, Artificial Sequence
  RPE65 RNA guide
gauggggcucaaguuuccccag

SEQ ID NO: 5797 - RNA, 22 nt, Artificial Sequence
  RPE65 RNA guide
gcucaaguuuccccagggauuu

SEQ ID NO: 5798 - RNA, 22 nt, Artificial Sequence
  RPE65 RNA guide
ggcucaaguuuccccagggauu

SEQ ID NO: 5799 - RNA, 22 nt, Artificial Sequence
  RPE65 RNA guide
gggauuuugucaacuuuaaguu

SEQ ID NO: 5800 - RNA, 22 nt, Artificial Sequence
  RPE65 RNA guide
gggcucaaguuuccccagggau

SEQ ID NO: 5801 - RNA, 22 nt, Artificial Sequence
  RPE65 RNA guide
ggggcucaaguuuccccaggga

SEQ ID NO: 5802 - RNA, 22 nt, Artificial Sequence
  RPE65 RNA guide
ggugaacuuaaaguugacaaaa

SEQ ID NO: 5803 - RNA, 22 nt, Artificial Sequence
  RPE65 RNA guide
guugacaaaaucccuggggaaa

SEQ ID NO: 5804 - RNA, 22 nt, Artificial Sequence
  RPE65 RNA guide
guuuccccagggauuuugucaa

SEQ ID NO: 5805 - RNA, 22 nt, Artificial Sequence
  RPE65 RNA guide
uaaaguugacaaaaucccuggg

SEQ ID NO: 5806 - RNA, 22 nt, Artificial Sequence
  RPE65 RNA guide
ucaaguuuccccagggauuuug

SEQ ID NO: 5807 - RNA, 22 nt, Artificial Sequence
  RPE65 RNA guide
uccccagggauuuugucaacuu

SEQ ID NO: 5808 - RNA, 22 nt, Artificial Sequence
  RPE65 RNA guide
ucccuggggaaacuugagcccc

SEQ ID NO: 5809 - RNA, 22 nt, Artificial Sequence
  RPE65 RNA guide
ugacaaaaucccuggggaaacu

SEQ ID NO: 5810 - RNA, 22 nt, Artificial Sequence
  RPE65 RNA guide
uggggcucaaguuuccccaggg

SEQ ID NO: 5811 - RNA, 22 nt, Artificial Sequence
  RPE65 RNA guide
uuaaaguugacaaaaucccugg

SEQ ID NO: 5812 - RNA, 22 nt, Artificial Sequence
  RPE65 RNA guide
uuccccagggauuuugucaacu

SEQ ID NO: 5813 - RNA, 22 nt, Artificial Sequence
  RPE65 RNA guide
uugacaaaaucccuggggaaac

SEQ ID NO: 5814 - RNA, 22 nt, Artificial Sequence
  RPE65 RNA guide
uuuccccagggauuuugucaac

SEQ ID NO: 5815 - RNA, 20 nt, Artificial Sequence
  RPE65 RNA guide
aaaaucacuggggaaacuug

SEQ ID NO: 5816 - RNA, 20 nt, Artificial Sequence
  RPE65 RNA guide
aaaguugacaaaaucacugg

SEQ ID NO: 5817 - RNA, 20 nt, Artificial Sequence
  RPE65 RNA guide
aaaucacuggggaaacuuga

SEQ ID NO: 5818 - RNA, 20 nt, Artificial Sequence
  RPE65 RNA guide
aaguugacaaaaucacuggg

SEQ ID NO: 5819 - RNA, 20 nt, Artificial Sequence
  RPE65 RNA guide
aaguuuccccagugauuuug

SEQ ID NO: 5820 - RNA, 20 nt, Artificial Sequence
  RPE65 RNA guide
aaucacuggggaaacuugag

SEQ ID NO: 5821 - RNA, 20 nt, Artificial Sequence
  RPE65 RNA guide
acaaaaucacuggggaaacu

SEQ ID NO: 5822 - RNA, 20 nt, Artificial Sequence
  RPE65 RNA guide
aguugacaaaaucacugggg

SEQ ID NO: 5823 - RNA, 20 nt, Artificial Sequence
  RPE65 RNA guide
aguuuccccagugauuuugu

SEQ ID NO: 5824 - RNA, 20 nt, Artificial Sequence
  RPE65 RNA guide
aucacuggggaaacuugagc

SEQ ID NO: 5825 - RNA, 20 nt, Artificial Sequence
  RPE65 RNA guide
caaaaucacuggggaaacuu

SEQ ID NO: 5826 - RNA, 20 nt, Artificial Sequence
  RPE65 RNA guide
caaguuuccccagugauuuu

SEQ ID NO: 5827 - RNA, 20 nt, Artificial Sequence
  RPE65 RNA guide
cacuggggaaacuugagccc

SEQ ID NO: 5828 - RNA, 20 nt, Artificial Sequence
  RPE65 RNA guide
cagugauuuugucaacuuua

SEQ ID NO: 5829 - RNA, 20 nt, Artificial Sequence
  RPE65 RNA guide
ccagugauuuugucaacuuu

SEQ ID NO: 5830 - RNA, 20 nt, Artificial Sequence
  RPE65 RNA guide
cccagugauuuugucaacuu

SEQ ID NO: 5831 - RNA, 20 nt, Artificial Sequence
  RPE65 RNA guide
ccccagugauuuugucaacu

SEQ ID NO: 5832 - RNA, 20 nt, Artificial Sequence
  RPE65 RNA guide
cucaaguuuccccagugauu

SEQ ID NO: 5833 - RNA, 20 nt, Artificial Sequence
  RPE65 RNA guide
cuuaaaguugacaaaaucac

SEQ ID NO: 5834 - RNA, 20 nt, Artificial Sequence
  RPE65 RNA guide
gacaaaaucacuggggaaac

SEQ ID NO: 5835 - RNA, 20 nt, Artificial Sequence
  RPE65 RNA guide
gcucaaguuuccccagugau

SEQ ID NO: 5836 - RNA, 20 nt, Artificial Sequence
  RPE65 RNA guide
ggcucaaguuuccccaguga

SEQ ID NO: 5837 - RNA, 20 nt, Artificial Sequence
  RPE65 RNA guide
gggcucaaguuuccccagug

SEQ ID NO: 5838 - RNA, 20 nt, Artificial Sequence
  RPE65 RNA guide
ggggcucaaguuuccccagu

SEQ ID NO: 5839 - RNA, 20 nt, Artificial Sequence
  RPE65 RNA guide
gugauuuugucaacuuuaag

SEQ ID NO: 5840 - RNA, 20 nt, Artificial Sequence
  RPE65 RNA guide
guugacaaaaucacugggga

SEQ ID NO: 5841 - RNA, 20 nt, Artificial Sequence
  RPE65 RNA guide
guuuccccagugauuuuguc

SEQ ID NO: 5842 - RNA, 20 nt, Artificial Sequence
  RPE65 RNA guide
uaaaguugacaaaaucacug

SEQ ID NO: 5843 - RNA, 20 nt, Artificial Sequence
  RPE65 RNA guide
ucaaguuuccccagugauuu

SEQ ID NO: 5844 - RNA, 20 nt, Artificial Sequence
  RPE65 RNA guide
ucacuggggaaacuugagcc

SEQ ID NO: 5845 - RNA, 20 nt, Artificial Sequence
  RPE65 RNA guide
uccccagugauuuugucaac

SEQ ID NO: 5846 - RNA, 20 nt, Artificial Sequence
  RPE65 RNA guide
ugacaaaaucacuggggaaa

SEQ ID NO: 5847 - RNA, 20 nt, Artificial Sequence
  RPE65 RNA guide
uuccccagugauuuugucaa

SEQ ID NO: 5848 - RNA, 20 nt, Artificial Sequence
  RPE65 RNA guide
uugacaaaaucacuggggaa

SEQ ID NO: 5849 - RNA, 20 nt, Artificial Sequence
  RPE65 RNA guide
uuuccccagugauuuuguca

SEQ ID NO: 5850 - RNA, 21 nt, Artificial Sequence
  RPE65 RNA guide
aaaaucacuggggaaacuuga

SEQ ID NO: 5851 - RNA, 21 nt, Artificial Sequence
  RPE65 RNA guide
aaaguugacaaaaucacuggg

SEQ ID NO: 5852 - RNA, 21 nt, Artificial Sequence
  RPE65 RNA guide
aaaucacuggggaaacuugag

SEQ ID NO: 5853 - RNA, 21 nt, Artificial Sequence
  RPE65 RNA guide
aaguugacaaaaucacugggg

SEQ ID NO: 5854 - RNA, 21 nt, Artificial Sequence
  RPE65 RNA guide
aaguuuccccagugauuuugu

SEQ ID NO: 5855 - RNA, 21 nt, Artificial Sequence
  RPE65 RNA guide
aaucacuggggaaacuugagc

SEQ ID NO: 5856 - RNA, 21 nt, Artificial Sequence
  RPE65 RNA guide
acaaaaucacuggggaaacuu

SEQ ID NO: 5857 - RNA, 21 nt, Artificial Sequence
  RPE65 RNA guide
aguugacaaaaucacugggga

SEQ ID NO: 5858 - RNA, 21 nt, Artificial Sequence
  RPE65 RNA guide
aguuuccccagugauuuuguc

SEQ ID NO: 5859 - RNA, 21 nt, Artificial Sequence
  RPE65 RNA guide
aucacuggggaaacuugagcc

SEQ ID NO: 5860 - RNA, 21 nt, Artificial Sequence
  RPE65 RNA guide
caaaaucacuggggaaacuug

SEQ ID NO: 5861 - RNA, 21 nt, Artificial Sequence
  RPE65 RNA guide
caaguuuccccagugauuuug

SEQ ID NO: 5862 - RNA, 21 nt, Artificial Sequence
  RPE65 RNA guide
cacuggggaaacuugagcccc

SEQ ID NO: 5863 - RNA, 21 nt, Artificial Sequence
  RPE65 RNA guide
ccagugauuuugucaacuuua

SEQ ID NO: 5864 - RNA, 21 nt, Artificial Sequence
  RPE65 RNA guide
cccagugauuuugucaacuuu

SEQ ID NO: 5865 - RNA, 21 nt, Artificial Sequence
  RPE65 RNA guide
ccccagugauuuugucaacuu

SEQ ID NO: 5866 - RNA, 21 nt, Artificial Sequence
  RPE65 RNA guide
cucaaguuuccccagugauuu

SEQ ID NO: 5867 - RNA, 21 nt, Artificial Sequence
  RPE65 RNA guide
gacaaaaucacuggggaaacu

SEQ ID NO: 5868 - RNA, 21 nt, Artificial Sequence
  RPE65 RNA guide
gcucaaguuuccccagugauu

SEQ ID NO: 5869 - RNA, 21 nt, Artificial Sequence
  RPE65 RNA guide
ggcucaaguuuccccagugau

SEQ ID NO: 5870 - RNA, 21 nt, Artificial Sequence
  RPE65 RNA guide
gggcucaaguuuccccaguga

SEQ ID NO: 5871 - RNA, 21 nt, Artificial Sequence
  RPE65 RNA guide
ggggcucaaguuuccccagug

SEQ ID NO: 5872 - RNA, 21 nt, Artificial Sequence
  RPE65 RNA guide
guugacaaaaucacuggggaa

SEQ ID NO: 5873 - RNA, 21 nt, Artificial Sequence
  RPE65 RNA guide
guuuccccagugauuuuguca

SEQ ID NO: 5874 - RNA, 21 nt, Artificial Sequence
  RPE65 RNA guide
uaaaguugacaaaaucacugg

SEQ ID NO: 5875 - RNA, 21 nt, Artificial Sequence
  RPE65 RNA guide
ucaaguuuccccagugauuuu

SEQ ID NO: 5876 - RNA, 21 nt, Artificial Sequence
  RPE65 RNA guide
ucacuggggaaacuugagccc

SEQ ID NO: 5877 - RNA, 21 nt, Artificial Sequence
  RPE65 RNA guide
uccccagugauuuugucaacu

SEQ ID NO: 5878 - RNA, 21 nt, Artificial Sequence
  RPE65 RNA guide
ugacaaaaucacuggggaaac

SEQ ID NO: 5879 - RNA, 21 nt, Artificial Sequence
  RPE65 RNA guide
uggggcucaaguuuccccagu

SEQ ID NO: 5880 - RNA, 21 nt, Artificial Sequence
  RPE65 RNA guide
uuccccagugauuuugucaac

SEQ ID NO: 5881 - RNA, 21 nt, Artificial Sequence
  RPE65 RNA guide
uugacaaaaucacuggggaaa

SEQ ID NO: 5882 - RNA, 21 nt, Artificial Sequence
  RPE65 RNA guide
uuuccccagugauuuugucaa

SEQ ID NO: 5883 - RNA, 22 nt, Artificial Sequence
  RPE65 RNA guide
aaaaucacuggggaaacuugag

SEQ ID NO: 5884 - RNA, 22 nt, Artificial Sequence
  RPE65 RNA guide
aaaguugacaaaaucacugggg

SEQ ID NO: 5885 - RNA, 22 nt, Artificial Sequence
  RPE65 RNA guide
aaaucacuggggaaacuugagc

SEQ ID NO: 5886 - RNA, 22 nt, Artificial Sequence
  RPE65 RNA guide
aaguugacaaaaucacugggga

SEQ ID NO: 5887 - RNA, 22 nt, Artificial Sequence
  RPE65 RNA guide
aaguuuccccagugauuuuguc

SEQ ID NO: 5888 - RNA, 22 nt, Artificial Sequence
  RPE65 RNA guide
aaucacuggggaaacuugagcc

SEQ ID NO: 5889 - RNA, 22 nt, Artificial Sequence
  RPE65 RNA guide
acaaaaucacuggggaaacuug

SEQ ID NO: 5890 - RNA, 22 nt, Artificial Sequence
  RPE65 RNA guide
aguugacaaaaucacuggggaa

SEQ ID NO: 5891 - RNA, 22 nt, Artificial Sequence
  RPE65 RNA guide
aguuuccccagugauuuuguca

SEQ ID NO: 5892 - RNA, 22 nt, Artificial Sequence
  RPE65 RNA guide
aucacuggggaaacuugagccc

SEQ ID NO: 5893 - RNA, 22 nt, Artificial Sequence
  RPE65 RNA guide
auggggcucaaguuuccccagu

SEQ ID NO: 5894 - RNA, 22 nt, Artificial Sequence
  RPE65 RNA guide
caaaaucacuggggaaacuuga

SEQ ID NO: 5895 - RNA, 22 nt, Artificial Sequence
  RPE65 RNA guide
caaguuuccccagugauuuugu

SEQ ID NO: 5896 - RNA, 22 nt, Artificial Sequence
  RPE65 RNA guide
cacuggggaaacuugagcccca

SEQ ID NO: 5897 - RNA, 22 nt, Artificial Sequence
  RPE65 RNA guide
cagugauuuugucaacuuuaag

SEQ ID NO: 5898 - RNA, 22 nt, Artificial Sequence
  RPE65 RNA guide
ccagugauuuugucaacuuuaa

SEQ ID NO: 5899 - RNA, 22 nt, Artificial Sequence
  RPE65 RNA guide
cccagugauuuugucaacuuua

SEQ ID NO: 5900 - RNA, 22 nt, Artificial Sequence
  RPE65 RNA guide
ccccagugauuuugucaacuuu

SEQ ID NO: 5901 - RNA, 22 nt, Artificial Sequence
  RPE65 RNA guide
cucaaguuuccccagugauuuu

SEQ ID NO: 5902 - RNA, 22 nt, Artificial Sequence
  RPE65 RNA guide
cuuaaaguugacaaaaucacug

SEQ ID NO: 5903 - RNA, 22 nt, Artificial Sequence
  RPE65 RNA guide
gacaaaaucacuggggaaacuu

SEQ ID NO: 5904 - RNA, 22 nt, Artificial Sequence
  RPE65 RNA guide
gcucaaguuuccccagugauuu

SEQ ID NO: 5905 - RNA, 22 nt, Artificial Sequence
  RPE65 RNA guide
ggcucaaguuuccccagugauu

SEQ ID NO: 5906 - RNA, 22 nt, Artificial Sequence
  RPE65 RNA guide
gggcucaaguuuccccagugau

SEQ ID NO: 5907 - RNA, 22 nt, Artificial Sequence
  RPE65 RNA guide
ggggcucaaguuuccccaguga

SEQ ID NO: 5908 - RNA, 22 nt, Artificial Sequence
  RPE65 RNA guide
guugacaaaaucacuggggaaa

SEQ ID NO: 5909 - RNA, 22 nt, Artificial Sequence
  RPE65 RNA guide
guuuccccagugauuuugucaa

SEQ ID NO: 5910 - RNA, 22 nt, Artificial Sequence
  RPE65 RNA guide
uaaaguugacaaaaucacuggg

SEQ ID NO: 5911 - RNA, 22 nt, Artificial Sequence
  RPE65 RNA guide
ucaaguuuccccagugauuuug

SEQ ID NO: 5912 - RNA, 22 nt, Artificial Sequence
  RPE65 RNA guide
ucacuggggaaacuugagcccc

SEQ ID NO: 5913 - RNA, 22 nt, Artificial Sequence
  RPE65 RNA guide
uccccagugauuuugucaacuu

SEQ ID NO: 5914 - RNA, 22 nt, Artificial Sequence
  RPE65 RNA guide
ugacaaaaucacuggggaaacu

SEQ ID NO: 5915 - RNA, 22 nt, Artificial Sequence
  RPE65 RNA guide
uggggcucaaguuuccccagug

SEQ ID NO: 5916 - RNA, 22 nt, Artificial Sequence
  RPE65 RNA guide
uuaaaguugacaaaaucacugg

SEQ ID NO: 5917 - RNA, 22 nt, Artificial Sequence
  RPE65 RNA guide
uuccccagugauuuugucaacu

SEQ ID NO: 5918 - RNA, 22 nt, Artificial Sequence
  RPE65 RNA guide
uugacaaaaucacuggggaaac

SEQ ID NO: 5919 - RNA, 22 nt, Artificial Sequence
  RPE65 RNA guide
uuuccccagugauuuugucaac

SEQ ID NO: 5920 - RNA, 20 nt, Artificial Sequence
  RPE65 RNA guide
aaaacagcaagaguuaugug

SEQ ID NO: 5921 - RNA, 20 nt, Artificial Sequence
  RPE65 RNA guide
aaacagcaagaguuauguga

SEQ ID NO: 5922 - RNA, 20 nt, Artificial Sequence
  RPE65 RNA guide
aacagcaagaguuaugugag

SEQ ID NO: 5923 - RNA, 20 nt, Artificial Sequence
  RPE65 RNA guide
aagaguuaugugagagucaa

SEQ ID NO: 5924 - RNA, 20 nt, Artificial Sequence
  RPE65 RNA guide
acagcaagaguuaugugaga

SEQ ID NO: 5925 - RNA, 20 nt, Artificial Sequence
  RPE65 RNA guide
acauaacucuugcuguuuua

SEQ ID NO: 5926 - RNA, 20 nt, Artificial Sequence
  RPE65 RNA guide
acaucuaaaacagcaagagu

SEQ ID NO: 5927 - RNA, 20 nt, Artificial Sequence
  RPE65 RNA guide
acauuuuugacucucacaua

SEQ ID NO: 5928 - RNA, 20 nt, Artificial Sequence
  RPE65 RNA guide
acucucacauaacucuugcu

SEQ ID NO: 5929 - RNA, 20 nt, Artificial Sequence
  RPE65 RNA guide
agaguuaugugagagucaaa

SEQ ID NO: 5930 - RNA, 20 nt, Artificial Sequence
  RPE65 RNA guide
agcaagaguuaugugagagu

SEQ ID NO: 5931 - RNA, 20 nt, Artificial Sequence
  RPE65 RNA guide
aguuaugugagagucaaaaa

SEQ ID NO: 5932 - RNA, 20 nt, Artificial Sequence
  RPE65 RNA guide
aucuaaaacagcaagaguua

SEQ ID NO: 5933 - RNA, 20 nt, Artificial Sequence
  RPE65 RNA guide
augugagagucaaaaaugua

SEQ ID NO: 5934 - RNA, 20 nt, Artificial Sequence
  RPE65 RNA guide
auuacauuuuugacucucac

SEQ ID NO: 5935 - RNA, 20 nt, Artificial Sequence
  RPE65 RNA guide
auuuuugacucucacauaac

SEQ ID NO: 5936 - RNA, 20 nt, Artificial Sequence
  RPE65 RNA guide
caagaguuaugugagaguca

SEQ ID NO: 5937 - RNA, 20 nt, Artificial Sequence
  RPE65 RNA guide
caauuacauuuuugacucuc

SEQ ID NO: 5938 - RNA, 20 nt, Artificial Sequence
  RPE65 RNA guide
cacauaacucuugcuguuuu

SEQ ID NO: 5939 - RNA, 20 nt, Artificial Sequence
  RPE65 RNA guide
cacaucuaaaacagcaagag

SEQ ID NO: 5940 - RNA, 20 nt, Artificial Sequence
  RPE65 RNA guide
cagcaagaguuaugugagag

SEQ ID NO: 5941 - RNA, 20 nt, Artificial Sequence
  RPE65 RNA guide
cauaacucuugcuguuuuag

SEQ ID NO: 5942 - RNA, 20 nt, Artificial Sequence
  RPE65 RNA guide
caucuaaaacagcaagaguu

SEQ ID NO: 5943 - RNA, 20 nt, Artificial Sequence
  RPE65 RNA guide
cauuuuugacucucacauaa

SEQ ID NO: 5944 - RNA, 20 nt, Artificial Sequence
  RPE65 RNA guide
ccaauuacauuuuugacucu

SEQ ID NO: 5945 - RNA, 20 nt, Artificial Sequence
  RPE65 RNA guide
cuaaaacagcaagaguuaug

SEQ ID NO: 5946 - RNA, 20 nt, Artificial Sequence
  RPE65 RNA guide
cucacauaacucuugcuguu

SEQ ID NO: 5947 - RNA, 20 nt, Artificial Sequence
  RPE65 RNA guide
cucucacauaacucuugcug

SEQ ID NO: 5948 - RNA, 20 nt, Artificial Sequence
  RPE65 RNA guide
gacucucacauaacucuugc

SEQ ID NO: 5949 - RNA, 20 nt, Artificial Sequence
  RPE65 RNA guide
gaguuaugugagagucaaaa

SEQ ID NO: 5950 - RNA, 20 nt, Artificial Sequence
  RPE65 RNA guide
gcaagaguuaugugagaguc

SEQ ID NO: 5951 - RNA, 20 nt, Artificial Sequence
  RPE65 RNA guide
guuaugugagagucaaaaau

SEQ ID NO: 5952 - RNA, 20 nt, Artificial Sequence
  RPE65 RNA guide
uaaaacagcaagaguuaugu

SEQ ID NO: 5953 - RNA, 20 nt, Artificial Sequence
  RPE65 RNA guide
uacauuuuugacucucacau

SEQ ID NO: 5954 - RNA, 20 nt, Artificial Sequence
  RPE65 RNA guide
uaugugagagucaaaaaugu

SEQ ID NO: 5955 - RNA, 20 nt, Artificial Sequence
  RPE65 RNA guide
ucacauaacucuugcuguuu

SEQ ID NO: 5956 - RNA, 20 nt, Artificial Sequence
  RPE65 RNA guide
ucuaaaacagcaagaguuau

SEQ ID NO: 5957 - RNA, 20 nt, Artificial Sequence
  RPE65 RNA guide
ucucacauaacucuugcugu

SEQ ID NO: 5958 - RNA, 20 nt, Artificial Sequence
  RPE65 RNA guide
ugacucucacauaacucuug

SEQ ID NO: 5959 - RNA, 20 nt, Artificial Sequence
  RPE65 RNA guide
uuacauuuuugacucucaca

SEQ ID NO: 5960 - RNA, 20 nt, Artificial Sequence
  RPE65 RNA guide
uuaugugagagucaaaaaug

SEQ ID NO: 5961 - RNA, 20 nt, Artificial Sequence
  RPE65 RNA guide
uugacucucacauaacucuu

SEQ ID NO: 5962 - RNA, 20 nt, Artificial Sequence
  RPE65 RNA guide
uuugacucucacauaacucu

SEQ ID NO: 5963 - RNA, 20 nt, Artificial Sequence
  RPE65 RNA guide
uuuugacucucacauaacuc

SEQ ID NO: 5964 - RNA, 20 nt, Artificial Sequence
  RPE65 RNA guide
uuuuugacucucacauaacu

SEQ ID NO: 5965 - RNA, 21 nt, Artificial Sequence
  RPE65 RNA guide
aaaacagcaagaguuauguga

SEQ ID NO: 5966 - RNA, 21 nt, Artificial Sequence
  RPE65 RNA guide
aaacagcaagaguuaugugag

SEQ ID NO: 5967 - RNA, 21 nt, Artificial Sequence
  RPE65 RNA guide
aacagcaagaguuaugugaga

SEQ ID NO: 5968 - RNA, 21 nt, Artificial Sequence
  RPE65 RNA guide
aagaguuaugugagagucaaa

SEQ ID NO: 5969 - RNA, 21 nt, Artificial Sequence
  RPE65 RNA guide
acagcaagaguuaugugagag

SEQ ID NO: 5970 - RNA, 21 nt, Artificial Sequence
  RPE65 RNA guide
acauaacucuugcuguuuuag

SEQ ID NO: 5971 - RNA, 21 nt, Artificial Sequence
  RPE65 RNA guide
acaucuaaaacagcaagaguu

SEQ ID NO: 5972 - RNA, 21 nt, Artificial Sequence
  RPE65 RNA guide
acucucacauaacucuugcug

SEQ ID NO: 5973 - RNA, 21 nt, Artificial Sequence
  RPE65 RNA guide
agaguuaugugagagucaaaa

SEQ ID NO: 5974 - RNA, 21 nt, Artificial Sequence
  RPE65 RNA guide
agcaagaguuaugugagaguc

SEQ ID NO: 5975 - RNA, 21 nt, Artificial Sequence
  RPE65 RNA guide
caagaguuaugugagagucaa

SEQ ID NO: 5976 - RNA, 21 nt, Artificial Sequence
  RPE65 RNA guide
cacauaacucuugcuguuuua

SEQ ID NO: 5977 - RNA, 21 nt, Artificial Sequence
  RPE65 RNA guide
cacaucuaaaacagcaagagu

SEQ ID NO: 5978 - RNA, 21 nt, Artificial Sequence
  RPE65 RNA guide
cagcaagaguuaugugagagu

SEQ ID NO: 5979 - RNA, 21 nt, Artificial Sequence
  RPE65 RNA guide
cauaacucuugcuguuuuaga

SEQ ID NO: 5980 - RNA, 21 nt, Artificial Sequence
  RPE65 RNA guide
caucuaaaacagcaagaguua

SEQ ID NO: 5981 - RNA, 21 nt, Artificial Sequence
  RPE65 RNA guide
cauuuuugacucucacauaac

SEQ ID NO: 5982 - RNA, 21 nt, Artificial Sequence
  RPE65 RNA guide
ccaauuacauuuuugacucuc

SEQ ID NO: 5983 - RNA, 21 nt, Artificial Sequence
  RPE65 RNA guide
cuaaaacagcaagaguuaugu

SEQ ID NO: 5984 - RNA, 21 nt, Artificial Sequence
  RPE65 RNA guide
cucacauaacucuugcuguuu

SEQ ID NO: 5985 - RNA, 21 nt, Artificial Sequence
  RPE65 RNA guide
cucucacauaacucuugcugu

SEQ ID NO: 5986 - RNA, 21 nt, Artificial Sequence
  RPE65 RNA guide
gacucucacauaacucuugcu

SEQ ID NO: 5987 - RNA, 21 nt, Artificial Sequence
  RPE65 RNA guide
gaguuaugugagagucaaaaa

SEQ ID NO: 5988 - RNA, 21 nt, Artificial Sequence
  RPE65 RNA guide
gcaagaguuaugugagaguca

SEQ ID NO: 5989 - RNA, 21 nt, Artificial Sequence
  RPE65 RNA guide
guuaugugagagucaaaaaug

SEQ ID NO: 5990 - RNA, 21 nt, Artificial Sequence
  RPE65 RNA guide
uaaaacagcaagaguuaugug

SEQ ID NO: 5991 - RNA, 21 nt, Artificial Sequence
  RPE65 RNA guide
ucacauaacucuugcuguuuu

SEQ ID NO: 5992 - RNA, 21 nt, Artificial Sequence
  RPE65 RNA guide
ucacaucuaaaacagcaagag

SEQ ID NO: 5993 - RNA, 21 nt, Artificial Sequence
  RPE65 RNA guide
ucuaaaacagcaagaguuaug

SEQ ID NO: 5994 - RNA, 21 nt, Artificial Sequence
  RPE65 RNA guide
ucucacauaacucuugcuguu

SEQ ID NO: 5995 - RNA, 21 nt, Artificial Sequence
  RPE65 RNA guide
ugacucucacauaacucuugc

SEQ ID NO: 5996 - RNA, 21 nt, Artificial Sequence
  RPE65 RNA guide
uugacucucacauaacucuug

SEQ ID NO: 5997 - RNA, 21 nt, Artificial Sequence
  RPE65 RNA guide
uuugacucucacauaacucuu

SEQ ID NO: 5998 - RNA, 21 nt, Artificial Sequence
  RPE65 RNA guide
uuuugacucucacauaacucu

SEQ ID NO: 5999 - RNA, 21 nt, Artificial Sequence
  RPE65 RNA guide
uuuuugacucucacauaacuc

SEQ ID NO: 6000 - RNA, 22 nt, Artificial Sequence
  RPE65 RNA guide
aaaacagcaagaguuaugugag

SEQ ID NO: 6001 - RNA, 22 nt, Artificial Sequence
  RPE65 RNA guide
aaacagcaagaguuaugugaga

SEQ ID NO: 6002 - RNA, 22 nt, Artificial Sequence
  RPE65 RNA guide
aacagcaagaguuaugugagag

SEQ ID NO: 6003 - RNA, 22 nt, Artificial Sequence
  RPE65 RNA guide
aagaguuaugugagagucaaaa

SEQ ID NO: 6004 - RNA, 22 nt, Artificial Sequence
  RPE65 RNA guide
acagcaagaguuaugugagagu

SEQ ID NO: 6005 - RNA, 22 nt, Artificial Sequence
  RPE65 RNA guide
acauaacucuugcuguuuuaga

SEQ ID NO: 6006 - RNA, 22 nt, Artificial Sequence
  RPE65 RNA guide
acaucuaaaacagcaagaguua

SEQ ID NO: 6007 - RNA, 22 nt, Artificial Sequence
  RPE65 RNA guide
acauuuuugacucucacauaac

SEQ ID NO: 6008 - RNA, 22 nt, Artificial Sequence
  RPE65 RNA guide
acucucacauaacucuugcugu

SEQ ID NO: 6009 - RNA, 22 nt, Artificial Sequence
  RPE65 RNA guide
agaguuaugugagagucaaaaa

SEQ ID NO: 6010 - RNA, 22 nt, Artificial Sequence
  RPE65 RNA guide
agcaagaguuaugugagaguca

SEQ ID NO: 6011 - RNA, 22 nt, Artificial Sequence
  RPE65 RNA guide
aguuaugugagagucaaaaaug

SEQ ID NO: 6012 - RNA, 22 nt, Artificial Sequence
  RPE65 RNA guide
aucacaucuaaaacagcaagag

SEQ ID NO: 6013 - RNA, 22 nt, Artificial Sequence
  RPE65 RNA guide
aucuaaaacagcaagaguuaug

SEQ ID NO: 6014 - RNA, 22 nt, Artificial Sequence
  RPE65 RNA guide
auuuuugacucucacauaacuc

SEQ ID NO: 6015 - RNA, 22 nt, Artificial Sequence
  RPE65 RNA guide
caagaguuaugugagagucaaa

SEQ ID NO: 6016 - RNA, 22 nt, Artificial Sequence
  RPE65 RNA guide
caauuacauuuuugacucucac

SEQ ID NO: 6017 - RNA, 22 nt, Artificial Sequence
  RPE65 RNA guide
cacauaacucuugcuguuuuag

SEQ ID NO: 6018 - RNA, 22 nt, Artificial Sequence
  RPE65 RNA guide
cacaucuaaaacagcaagaguu

SEQ ID NO: 6019 - RNA, 22 nt, Artificial Sequence
  RPE65 RNA guide
cagcaagaguuaugugagaguc

SEQ ID NO: 6020 - RNA, 22 nt, Artificial Sequence
  RPE65 RNA guide
cauaacucuugcuguuuuagau

SEQ ID NO: 6021 - RNA, 22 nt, Artificial Sequence
  RPE65 RNA guide
caucuaaaacagcaagaguuau

SEQ ID NO: 6022 - RNA, 22 nt, Artificial Sequence
  RPE65 RNA guide
cauuuuugacucucacauaacu

SEQ ID NO: 6023 - RNA, 22 nt, Artificial Sequence
  RPE65 RNA guide
ccaauuacauuuuugacucuca

SEQ ID NO: 6024 - RNA, 22 nt, Artificial Sequence
  RPE65 RNA guide
cuaaaacagcaagaguuaugug

SEQ ID NO: 6025 - RNA, 22 nt, Artificial Sequence
  RPE65 RNA guide
cucacauaacucuugcuguuuu

SEQ ID NO: 6026 - RNA, 22 nt, Artificial Sequence
  RPE65 RNA guide
cucucacauaacucuugcuguu

SEQ ID NO: 6027 - RNA, 22 nt, Artificial Sequence
  RPE65 RNA guide
gacucucacauaacucuugcug

SEQ ID NO: 6028 - RNA, 22 nt, Artificial Sequence
  RPE65 RNA guide
gaguuaugugagagucaaaaau

SEQ ID NO: 6029 - RNA, 22 nt, Artificial Sequence
  RPE65 RNA guide
gcaagaguuaugugagagucaa

SEQ ID NO: 6030 - RNA, 22 nt, Artificial Sequence
  RPE65 RNA guide
guuaugugagagucaaaaaugu

SEQ ID NO: 6031 - RNA, 22 nt, Artificial Sequence
  RPE65 RNA guide
uaaaacagcaagaguuauguga

SEQ ID NO: 6032 - RNA, 22 nt, Artificial Sequence
  RPE65 RNA guide
ucacauaacucuugcuguuuua

SEQ ID NO: 6033 - RNA, 22 nt, Artificial Sequence
  RPE65 RNA guide
ucacaucuaaaacagcaagagu

SEQ ID NO: 6034 - RNA, 22 nt, Artificial Sequence
  RPE65 RNA guide
uccaauuacauuuuugacucuc

SEQ ID NO: 6035 - RNA, 22 nt, Artificial Sequence
  RPE65 RNA guide
ucuaaaacagcaagaguuaugu

SEQ ID NO: 6036 - RNA, 22 nt, Artificial Sequence
  RPE65 RNA guide
ucucacauaacucuugcuguuu

SEQ ID NO: 6037 - RNA, 22 nt, Artificial Sequence
  RPE65 RNA guide
ugacucucacauaacucuugcu

SEQ ID NO: 6038 - RNA, 22 nt, Artificial Sequence
  RPE65 RNA guide
uugacucucacauaacucuugc

SEQ ID NO: 6039 - RNA, 22 nt, Artificial Sequence
  RPE65 RNA guide
uuugacucucacauaacucuug

SEQ ID NO: 6040 - RNA, 22 nt, Artificial Sequence
  RPE65 RNA guide
uuuugacucucacauaacucuu

SEQ ID NO: 6041 - RNA, 22 nt, Artificial Sequence
  RPE65 RNA guide
uuuuugacucucacauaacucu

SEQ ID NO: 6042 - RNA, 20 nt, Artificial Sequence
  RPE65 RNA guide
aaaacagcaagaguuacgug

SEQ ID NO: 6043 - RNA, 20 nt, Artificial Sequence
  RPE65 RNA guide
aaacagcaagaguuacguga

SEQ ID NO: 6044 - RNA, 20 nt, Artificial Sequence
  RPE65 RNA guide
aacagcaagaguuacgugag

SEQ ID NO: 6045 - RNA, 20 nt, Artificial Sequence
  RPE65 RNA guide
aagaguuacgugagagucaa

SEQ ID NO: 6046 - RNA, 20 nt, Artificial Sequence
  RPE65 RNA guide
acagcaagaguuacgugaga

SEQ ID NO: 6047 - RNA, 20 nt, Artificial Sequence
  RPE65 RNA guide
acauuuuugacucucacgua

SEQ ID NO: 6048 - RNA, 20 nt, Artificial Sequence
  RPE65 RNA guide
acguaacucuugcuguuuua

SEQ ID NO: 6049 - RNA, 20 nt, Artificial Sequence
  RPE65 RNA guide
acgugagagucaaaaaugua

SEQ ID NO: 6050 - RNA, 20 nt, Artificial Sequence
  RPE65 RNA guide
acucucacguaacucuugcu

SEQ ID NO: 6051 - RNA, 20 nt, Artificial Sequence
  RPE65 RNA guide
agaguuacgugagagucaaa

SEQ ID NO: 6052 - RNA, 20 nt, Artificial Sequence
  RPE65 RNA guide
agcaagaguuacgugagagu

SEQ ID NO: 6053 - RNA, 20 nt, Artificial Sequence
  RPE65 RNA guide
aguuacgugagagucaaaaa

SEQ ID NO: 6054 - RNA, 20 nt, Artificial Sequence
  RPE65 RNA guide
auuuuugacucucacguaac

SEQ ID NO: 6055 - RNA, 20 nt, Artificial Sequence
  RPE65 RNA guide
caagaguuacgugagaguca

SEQ ID NO: 6056 - RNA, 20 nt, Artificial Sequence
  RPE65 RNA guide
cacguaacucuugcuguuuu

SEQ ID NO: 6057 - RNA, 20 nt, Artificial Sequence
  RPE65 RNA guide
cagcaagaguuacgugagag

SEQ ID NO: 6058 - RNA, 20 nt, Artificial Sequence
  RPE65 RNA guide
cauuuuugacucucacguaa

SEQ ID NO: 6059 - RNA, 20 nt, Artificial Sequence
  RPE65 RNA guide
cguaacucuugcuguuuuag

SEQ ID NO: 6060 - RNA, 20 nt, Artificial Sequence
  RPE65 RNA guide
cuaaaacagcaagaguuacg

SEQ ID NO: 6061 - RNA, 20 nt, Artificial Sequence
  RPE65 RNA guide
cucacguaacucuugcuguu

SEQ ID NO: 6062 - RNA, 20 nt, Artificial Sequence
  RPE65 RNA guide
cucucacguaacucuugcug

SEQ ID NO: 6063 - RNA, 20 nt, Artificial Sequence
  RPE65 RNA guide
gacucucacguaacucuugc

SEQ ID NO: 6064 - RNA, 20 nt, Artificial Sequence
  RPE65 RNA guide
gaguuacgugagagucaaaa

SEQ ID NO: 6065 - RNA, 20 nt, Artificial Sequence
  RPE65 RNA guide
gcaagaguuacgugagaguc

SEQ ID NO: 6066 - RNA, 20 nt, Artificial Sequence
  RPE65 RNA guide
guuacgugagagucaaaaau

SEQ ID NO: 6067 - RNA, 20 nt, Artificial Sequence
  RPE65 RNA guide
uaaaacagcaagaguuacgu

SEQ ID NO: 6068 - RNA, 20 nt, Artificial Sequence
  RPE65 RNA guide
uacauuuuugacucucacgu

SEQ ID NO: 6069 - RNA, 20 nt, Artificial Sequence
  RPE65 RNA guide
uacgugagagucaaaaaugu

SEQ ID NO: 6070 - RNA, 20 nt, Artificial Sequence
  RPE65 RNA guide
ucacguaacucuugcuguuu

SEQ ID NO: 6071 - RNA, 20 nt, Artificial Sequence
  RPE65 RNA guide
ucuaaaacagcaagaguuac

SEQ ID NO: 6072 - RNA, 20 nt, Artificial Sequence
  RPE65 RNA guide
ucucacguaacucuugcugu

SEQ ID NO: 6073 - RNA, 20 nt, Artificial Sequence
  RPE65 RNA guide
ugacucucacguaacucuug

SEQ ID NO: 6074 - RNA, 20 nt, Artificial Sequence
  RPE65 RNA guide
uuacauuuuugacucucacg

SEQ ID NO: 6075 - RNA, 20 nt, Artificial Sequence
  RPE65 RNA guide
uuacgugagagucaaaaaug

SEQ ID NO: 6076 - RNA, 20 nt, Artificial Sequence
  RPE65 RNA guide
uugacucucacguaacucuu

SEQ ID NO: 6077 - RNA, 20 nt, Artificial Sequence
  RPE65 RNA guide
uuugacucucacguaacucu

SEQ ID NO: 6078 - RNA, 20 nt, Artificial Sequence
  RPE65 RNA guide
uuuugacucucacguaacuc

SEQ ID NO: 6079 - RNA, 20 nt, Artificial Sequence
  RPE65 RNA guide
uuuuugacucucacguaacu

SEQ ID NO: 6080 - RNA, 21 nt, Artificial Sequence
  RPE65 RNA guide
aaaacagcaagaguuacguga

SEQ ID NO: 6081 - RNA, 21 nt, Artificial Sequence
  RPE65 RNA guide
aaacagcaagaguuacgugag

SEQ ID NO: 6082 - RNA, 21 nt, Artificial Sequence
  RPE65 RNA guide
aacagcaagaguuacgugaga

SEQ ID NO: 6083 - RNA, 21 nt, Artificial Sequence
  RPE65 RNA guide
aagaguuacgugagagucaaa

SEQ ID NO: 6084 - RNA, 21 nt, Artificial Sequence
  RPE65 RNA guide
acagcaagaguuacgugagag

SEQ ID NO: 6085 - RNA, 21 nt, Artificial Sequence
  RPE65 RNA guide
acauuuuugacucucacguaa

SEQ ID NO: 6086 - RNA, 21 nt, Artificial Sequence
  RPE65 RNA guide
acguaacucuugcuguuuuag

SEQ ID NO: 6087 - RNA, 21 nt, Artificial Sequence
  RPE65 RNA guide
acgugagagucaaaaauguaa

SEQ ID NO: 6088 - RNA, 21 nt, Artificial Sequence
  RPE65 RNA guide
acucucacguaacucuugcug

SEQ ID NO: 6089 - RNA, 21 nt, Artificial Sequence
  RPE65 RNA guide
agaguuacgugagagucaaaa

SEQ ID NO: 6090 - RNA, 21 nt, Artificial Sequence
  RPE65 RNA guide
agcaagaguuacgugagaguc

SEQ ID NO: 6091 - RNA, 21 nt, Artificial Sequence
  RPE65 RNA guide
aguuacgugagagucaaaaau

SEQ ID NO: 6092 - RNA, 21 nt, Artificial Sequence
  RPE65 RNA guide
aucuaaaacagcaagaguuac

SEQ ID NO: 6093 - RNA, 21 nt, Artificial Sequence
  RPE65 RNA guide
auuacauuuuugacucucacg

SEQ ID NO: 6094 - RNA, 21 nt, Artificial Sequence
  RPE65 RNA guide
auuuuugacucucacguaacu

SEQ ID NO: 6095 - RNA, 21 nt, Artificial Sequence
  RPE65 RNA guide
caagaguuacgugagagucaa

SEQ ID NO: 6096 - RNA, 21 nt, Artificial Sequence
  RPE65 RNA guide
cacguaacucuugcuguuuua

SEQ ID NO: 6097 - RNA, 21 nt, Artificial Sequence
  RPE65 RNA guide
cagcaagaguuacgugagagu

SEQ ID NO: 6098 - RNA, 21 nt, Artificial Sequence
  RPE65 RNA guide
cauuuuugacucucacguaac

SEQ ID NO: 6099 - RNA, 21 nt, Artificial Sequence
  RPE65 RNA guide
cguaacucuugcuguuuuaga

SEQ ID NO: 6100 - RNA, 21 nt, Artificial Sequence
  RPE65 RNA guide
cuaaaacagcaagaguuacgu

SEQ ID NO: 6101 - RNA, 21 nt, Artificial Sequence
  RPE65 RNA guide
cucacguaacucuugcuguuu

SEQ ID NO: 6102 - RNA, 21 nt, Artificial Sequence
  RPE65 RNA guide
cucucacguaacucuugcugu

SEQ ID NO: 6103 - RNA, 21 nt, Artificial Sequence
  RPE65 RNA guide
gacucucacguaacucuugcu

SEQ ID NO: 6104 - RNA, 21 nt, Artificial Sequence
  RPE65 RNA guide
gaguuacgugagagucaaaaa

SEQ ID NO: 6105 - RNA, 21 nt, Artificial Sequence
  RPE65 RNA guide
gcaagaguuacgugagaguca

SEQ ID NO: 6106 - RNA, 21 nt, Artificial Sequence
  RPE65 RNA guide
guuacgugagagucaaaaaug

SEQ ID NO: 6107 - RNA, 21 nt, Artificial Sequence
  RPE65 RNA guide
uaaaacagcaagaguuacgug

SEQ ID NO: 6108 - RNA, 21 nt, Artificial Sequence
  RPE65 RNA guide
uacauuuuugacucucacgua

SEQ ID NO: 6109 - RNA, 21 nt, Artificial Sequence
  RPE65 RNA guide
uacgugagagucaaaaaugua

SEQ ID NO: 6110 - RNA, 21 nt, Artificial Sequence
  RPE65 RNA guide
ucacguaacucuugcuguuuu

SEQ ID NO: 6111 - RNA, 21 nt, Artificial Sequence
  RPE65 RNA guide
ucuaaaacagcaagaguuacg

SEQ ID NO: 6112 - RNA, 21 nt, Artificial Sequence
  RPE65 RNA guide
ucucacguaacucuugcuguu

SEQ ID NO: 6113 - RNA, 21 nt, Artificial Sequence
  RPE65 RNA guide
ugacucucacguaacucuugc

SEQ ID NO: 6114 - RNA, 21 nt, Artificial Sequence
  RPE65 RNA guide
uuacauuuuugacucucacgu

SEQ ID NO: 6115 - RNA, 21 nt, Artificial Sequence
  RPE65 RNA guide
uuacgugagagucaaaaaugu

SEQ ID NO: 6116 - RNA, 21 nt, Artificial Sequence
  RPE65 RNA guide
uugacucucacguaacucuug

SEQ ID NO: 6117 - RNA, 21 nt, Artificial Sequence
  RPE65 RNA guide
uuugacucucacguaacucuu

SEQ ID NO: 6118 - RNA, 21 nt, Artificial Sequence
  RPE65 RNA guide
uuuugacucucacguaacucu

SEQ ID NO: 6119 - RNA, 21 nt, Artificial Sequence
  RPE65 RNA guide
uuuuugacucucacguaacuc

SEQ ID NO: 6120 - RNA, 22 nt, Artificial Sequence
  RPE65 RNA guide
aaaacagcaagaguuacgugag

SEQ ID NO: 6121 - RNA, 22 nt, Artificial Sequence
  RPE65 RNA guide
aaacagcaagaguuacgugaga

SEQ ID NO: 6122 - RNA, 22 nt, Artificial Sequence
  RPE65 RNA guide
aacagcaagaguuacgugagag

SEQ ID NO: 6123 - RNA, 22 nt, Artificial Sequence
  RPE65 RNA guide
aagaguuacgugagagucaaaa

SEQ ID NO: 6124 - RNA, 22 nt, Artificial Sequence
  RPE65 RNA guide
aauuacauuuuugacucucacg

SEQ ID NO: 6125 - RNA, 22 nt, Artificial Sequence
  RPE65 RNA guide
acagcaagaguuacgugagagu

SEQ ID NO: 6126 - RNA, 22 nt, Artificial Sequence
  RPE65 RNA guide
acauuuuugacucucacguaac

SEQ ID NO: 6127 - RNA, 22 nt, Artificial Sequence
  RPE65 RNA guide
acguaacucuugcuguuuuaga

SEQ ID NO: 6128 - RNA, 22 nt, Artificial Sequence
  RPE65 RNA guide
acgugagagucaaaaauguaau

SEQ ID NO: 6129 - RNA, 22 nt, Artificial Sequence
  RPE65 RNA guide
acucucacguaacucuugcugu

SEQ ID NO: 6130 - RNA, 22 nt, Artificial Sequence
  RPE65 RNA guide
agaguuacgugagagucaaaaa

SEQ ID NO: 6131 - RNA, 22 nt, Artificial Sequence
  RPE65 RNA guide
agcaagaguuacgugagaguca

SEQ ID NO: 6132 - RNA, 22 nt, Artificial Sequence
  RPE65 RNA guide
aguuacgugagagucaaaaaug

SEQ ID NO: 6133 - RNA, 22 nt, Artificial Sequence
  RPE65 RNA guide
aucuaaaacagcaagaguuacg

SEQ ID NO: 6134 - RNA, 22 nt, Artificial Sequence
  RPE65 RNA guide
auuacauuuuugacucucacgu

SEQ ID NO: 6135 - RNA, 22 nt, Artificial Sequence
  RPE65 RNA guide
auuuuugacucucacguaacuc

SEQ ID NO: 6136 - RNA, 22 nt, Artificial Sequence
  RPE65 RNA guide
caagaguuacgugagagucaaa

SEQ ID NO: 6137 - RNA, 22 nt, Artificial Sequence
  RPE65 RNA guide
cacguaacucuugcuguuuuag

SEQ ID NO: 6138 - RNA, 22 nt, Artificial Sequence
  RPE65 RNA guide
cagcaagaguuacgugagaguc

SEQ ID NO: 6139 - RNA, 22 nt, Artificial Sequence
  RPE65 RNA guide
caucuaaaacagcaagaguuac

SEQ ID NO: 6140 - RNA, 22 nt, Artificial Sequence
  RPE65 RNA guide
cauuuuugacucucacguaacu

SEQ ID NO: 6141 - RNA, 22 nt, Artificial Sequence
  RPE65 RNA guide
cguaacucuugcuguuuuagau

SEQ ID NO: 6142 - RNA, 22 nt, Artificial Sequence
  RPE65 RNA guide
cuaaaacagcaagaguuacgug

SEQ ID NO: 6143 - RNA, 22 nt, Artificial Sequence
  RPE65 RNA guide
cucacguaacucuugcuguuuu

SEQ ID NO: 6144 - RNA, 22 nt, Artificial Sequence
  RPE65 RNA guide
cucucacguaacucuugcuguu

SEQ ID NO: 6145 - RNA, 22 nt, Artificial Sequence
  RPE65 RNA guide
gacucucacguaacucuugcug

SEQ ID NO: 6146 - RNA, 22 nt, Artificial Sequence
  RPE65 RNA guide
gaguuacgugagagucaaaaau

SEQ ID NO: 6147 - RNA, 22 nt, Artificial Sequence
  RPE65 RNA guide
gcaagaguuacgugagagucaa

SEQ ID NO: 6148 - RNA, 22 nt, Artificial Sequence
  RPE65 RNA guide
guuacgugagagucaaaaaugu

SEQ ID NO: 6149 - RNA, 22 nt, Artificial Sequence
  RPE65 RNA guide
uaaaacagcaagaguuacguga

SEQ ID NO: 6150 - RNA, 22 nt, Artificial Sequence
  RPE65 RNA guide
uacauuuuugacucucacguaa

SEQ ID NO: 6151 - RNA, 22 nt, Artificial Sequence
  RPE65 RNA guide
uacgugagagucaaaaauguaa

SEQ ID NO: 6152 - RNA, 22 nt, Artificial Sequence
  RPE65 RNA guide
ucacguaacucuugcuguuuua

SEQ ID NO: 6153 - RNA, 22 nt, Artificial Sequence
  RPE65 RNA guide
ucuaaaacagcaagaguuacgu

SEQ ID NO: 6154 - RNA, 22 nt, Artificial Sequence
  RPE65 RNA guide
ucucacguaacucuugcuguuu

SEQ ID NO: 6155 - RNA, 22 nt, Artificial Sequence
  RPE65 RNA guide
ugacucucacguaacucuugcu

SEQ ID NO: 6156 - RNA, 22 nt, Artificial Sequence
  RPE65 RNA guide
uuacauuuuugacucucacgua

SEQ ID NO: 6157 - RNA, 22 nt, Artificial Sequence
  RPE65 RNA guide
uuacgugagagucaaaaaugua

SEQ ID NO: 6158 - RNA, 22 nt, Artificial Sequence
  RPE65 RNA guide
uugacucucacguaacucuugc

SEQ ID NO: 6159 - RNA, 22 nt, Artificial Sequence
  RPE65 RNA guide
uuugacucucacguaacucuug

SEQ ID NO: 6160 - RNA, 22 nt, Artificial Sequence
  RPE65 RNA guide
uuuugacucucacguaacucuu

SEQ ID NO: 6161 - RNA, 22 nt, Artificial Sequence
  RPE65 RNA guide
uuuuugacucucacguaacucu

SEQ ID NO: 6162 - RNA, 20 nt, Artificial Sequence
  RPE65 RNA guide
aaaaaauaagaggcucuucc

SEQ ID NO: 6163 - RNA, 20 nt, Artificial Sequence
  RPE65 RNA guide
aaaaauaagaggcucuucca

SEQ ID NO: 6164 - RNA, 20 nt, Artificial Sequence
  RPE65 RNA guide
aaaaggcuuuggaagagccu

SEQ ID NO: 6165 - RNA, 20 nt, Artificial Sequence
  RPE65 RNA guide
aaaauaagaggcucuuccaa

SEQ ID NO: 6166 - RNA, 20 nt, Artificial Sequence
  RPE65 RNA guide
aaaggcuuuggaagagccuc

SEQ ID NO: 6167 - RNA, 20 nt, Artificial Sequence
  RPE65 RNA guide
aaauaagaggcucuuccaaa

SEQ ID NO: 6168 - RNA, 20 nt, Artificial Sequence
  RPE65 RNA guide
aagaggcucuuccaaagccu

SEQ ID NO: 6169 - RNA, 20 nt, Artificial Sequence
  RPE65 RNA guide
aaggcuuuggaagagccucu

SEQ ID NO: 6170 - RNA, 20 nt, Artificial Sequence
  RPE65 RNA guide
aauaagaggcucuuccaaag

SEQ ID NO: 6171 - RNA, 20 nt, Artificial Sequence
  RPE65 RNA guide
agaggcucuuccaaagccuu

SEQ ID NO: 6172 - RNA, 20 nt, Artificial Sequence
  RPE65 RNA guide
aggcucuuccaaagccuuuu

SEQ ID NO: 6173 - RNA, 20 nt, Artificial Sequence
  RPE65 RNA guide
aggcuuuggaagagccucuu

SEQ ID NO: 6174 - RNA, 20 nt, Artificial Sequence
  RPE65 RNA guide
agugguuuuaaaaggcuuug

SEQ ID NO: 6175 - RNA, 20 nt, Artificial Sequence
  RPE65 RNA guide
auaagaggcucuuccaaagc

SEQ ID NO: 6176 - RNA, 20 nt, Artificial Sequence
  RPE65 RNA guide
cucuuccaaagccuuuuaaa

SEQ ID NO: 6177 - RNA, 20 nt, Artificial Sequence
  RPE65 RNA guide
cuuuggaagagccucuuauu

SEQ ID NO: 6178 - RNA, 20 nt, Artificial Sequence
  RPE65 RNA guide
gaggcucuuccaaagccuuu

SEQ ID NO: 6179 - RNA, 20 nt, Artificial Sequence
  RPE65 RNA guide
gcucuuccaaagccuuuuaa

SEQ ID NO: 6180 - RNA, 20 nt, Artificial Sequence
  RPE65 RNA guide
gcuuuggaagagccucuuau

SEQ ID NO: 6181 - RNA, 20 nt, Artificial Sequence
  RPE65 RNA guide
ggaagagccucuuauuuuuu

SEQ ID NO: 6182 - RNA, 20 nt, Artificial Sequence
  RPE65 RNA guide
ggcucuuccaaagccuuuua

SEQ ID NO: 6183 - RNA, 20 nt, Artificial Sequence
  RPE65 RNA guide
ggcuuuggaagagccucuua

SEQ ID NO: 6184 - RNA, 20 nt, Artificial Sequence
  RPE65 RNA guide
gguuuuaaaaggcuuuggaa

SEQ ID NO: 6185 - RNA, 20 nt, Artificial Sequence
  RPE65 RNA guide
gugguuuuaaaaggcuuugg

SEQ ID NO: 6186 - RNA, 20 nt, Artificial Sequence
  RPE65 RNA guide
guuuuaaaaggcuuuggaag

SEQ ID NO: 6187 - RNA, 20 nt, Artificial Sequence
  RPE65 RNA guide
uaaaaggcuuuggaagagcc

SEQ ID NO: 6188 - RNA, 20 nt, Artificial Sequence
  RPE65 RNA guide
uaagaggcucuuccaaagcc

SEQ ID NO: 6189 - RNA, 20 nt, Artificial Sequence
  RPE65 RNA guide
ucuuccaaagccuuuuaaaa

SEQ ID NO: 6190 - RNA, 20 nt, Artificial Sequence
  RPE65 RNA guide
uggaagagccucuuauuuuu

SEQ ID NO: 6191 - RNA, 20 nt, Artificial Sequence
  RPE65 RNA guide
ugguuuuaaaaggcuuugga

SEQ ID NO: 6192 - RNA, 20 nt, Artificial Sequence
  RPE65 RNA guide
uuaaaaggcuuuggaagagc

SEQ ID NO: 6193 - RNA, 20 nt, Artificial Sequence
  RPE65 RNA guide
uuggaagagccucuuauuuu

SEQ ID NO: 6194 - RNA, 20 nt, Artificial Sequence
  RPE65 RNA guide
uuuaaaaggcuuuggaagag

SEQ ID NO: 6195 - RNA, 20 nt, Artificial Sequence
  RPE65 RNA guide
uuuggaagagccucuuauuu

SEQ ID NO: 6196 - RNA, 20 nt, Artificial Sequence
  RPE65 RNA guide
uuuuaaaaggcuuuggaaga

SEQ ID NO: 6197 - RNA, 21 nt, Artificial Sequence
  RPE65 RNA guide
aaaaaauaagaggcucuucca

SEQ ID NO: 6198 - RNA, 21 nt, Artificial Sequence
  RPE65 RNA guide
aaaaauaagaggcucuuccaa

SEQ ID NO: 6199 - RNA, 21 nt, Artificial Sequence
  RPE65 RNA guide
aaaaggcuuuggaagagccuc

SEQ ID NO: 6200 - RNA, 21 nt, Artificial Sequence
  RPE65 RNA guide
aaaauaagaggcucuuccaaa

SEQ ID NO: 6201 - RNA, 21 nt, Artificial Sequence
  RPE65 RNA guide
aaaggcuuuggaagagccucu

SEQ ID NO: 6202 - RNA, 21 nt, Artificial Sequence
  RPE65 RNA guide
aaauaagaggcucuuccaaag

SEQ ID NO: 6203 - RNA, 21 nt, Artificial Sequence
  RPE65 RNA guide
aagaggcucuuccaaagccuu

SEQ ID NO: 6204 - RNA, 21 nt, Artificial Sequence
  RPE65 RNA guide
aaggcuuuggaagagccucuu

SEQ ID NO: 6205 - RNA, 21 nt, Artificial Sequence
  RPE65 RNA guide
aagugguuuuaaaaggcuuug

SEQ ID NO: 6206 - RNA, 21 nt, Artificial Sequence
  RPE65 RNA guide
aauaagaggcucuuccaaagc

SEQ ID NO: 6207 - RNA, 21 nt, Artificial Sequence
  RPE65 RNA guide
agaggcucuuccaaagccuuu

SEQ ID NO: 6208 - RNA, 21 nt, Artificial Sequence
  RPE65 RNA guide
aggcucuuccaaagccuuuua

SEQ ID NO: 6209 - RNA, 21 nt, Artificial Sequence
  RPE65 RNA guide
aggcuuuggaagagccucuua

SEQ ID NO: 6210 - RNA, 21 nt, Artificial Sequence
  RPE65 RNA guide
agugguuuuaaaaggcuuugg

SEQ ID NO: 6211 - RNA, 21 nt, Artificial Sequence
  RPE65 RNA guide
auaagaggcucuuccaaagcc

SEQ ID NO: 6212 - RNA, 21 nt, Artificial Sequence
  RPE65 RNA guide
cucuuccaaagccuuuuaaaa

SEQ ID NO: 6213 - RNA, 21 nt, Artificial Sequence
  RPE65 RNA guide
cuuuggaagagccucuuauuu

SEQ ID NO: 6214 - RNA, 21 nt, Artificial Sequence
  RPE65 RNA guide
gaggcucuuccaaagccuuuu

SEQ ID NO: 6215 - RNA, 21 nt, Artificial Sequence
  RPE65 RNA guide
gcucuuccaaagccuuuuaaa

SEQ ID NO: 6216 - RNA, 21 nt, Artificial Sequence
  RPE65 RNA guide
gcuuuggaagagccucuuauu

SEQ ID NO: 6217 - RNA, 21 nt, Artificial Sequence
  RPE65 RNA guide
ggcucuuccaaagccuuuuaa

SEQ ID NO: 6218 - RNA, 21 nt, Artificial Sequence
  RPE65 RNA guide
ggcuuuggaagagccucuuau

SEQ ID NO: 6219 - RNA, 21 nt, Artificial Sequence
  RPE65 RNA guide
gguuuuaaaaggcuuuggaag

SEQ ID NO: 6220 - RNA, 21 nt, Artificial Sequence
  RPE65 RNA guide
gugguuuuaaaaggcuuugga

SEQ ID NO: 6221 - RNA, 21 nt, Artificial Sequence
  RPE65 RNA guide
guuuuaaaaggcuuuggaaga

SEQ ID NO: 6222 - RNA, 21 nt, Artificial Sequence
  RPE65 RNA guide
uaaaaggcuuuggaagagccu

SEQ ID NO: 6223 - RNA, 21 nt, Artificial Sequence
  RPE65 RNA guide
uaagaggcucuuccaaagccu

SEQ ID NO: 6224 - RNA, 21 nt, Artificial Sequence
  RPE65 RNA guide
ucuuccaaagccuuuuaaaac

SEQ ID NO: 6225 - RNA, 21 nt, Artificial Sequence
  RPE65 RNA guide
uggaagagccucuuauuuuuu

SEQ ID NO: 6226 - RNA, 21 nt, Artificial Sequence
  RPE65 RNA guide
ugguuuuaaaaggcuuuggaa

SEQ ID NO: 6227 - RNA, 21 nt, Artificial Sequence
  RPE65 RNA guide
uuaaaaggcuuuggaagagcc

SEQ ID NO: 6228 - RNA, 21 nt, Artificial Sequence
  RPE65 RNA guide
uuggaagagccucuuauuuuu

SEQ ID NO: 6229 - RNA, 21 nt, Artificial Sequence
  RPE65 RNA guide
uuuaaaaggcuuuggaagagc

SEQ ID NO: 6230 - RNA, 21 nt, Artificial Sequence
  RPE65 RNA guide
uuuggaagagccucuuauuuu

SEQ ID NO: 6231 - RNA, 21 nt, Artificial Sequence
  RPE65 RNA guide
uuuuaaaaggcuuuggaagag

SEQ ID NO: 6232 - RNA, 22 nt, Artificial Sequence
  RPE65 RNA guide
aaaaaauaagaggcucuuccaa

SEQ ID NO: 6233 - RNA, 22 nt, Artificial Sequence
  RPE65 RNA guide
aaaaauaagaggcucuuccaaa

SEQ ID NO: 6234 - RNA, 22 nt, Artificial Sequence
  RPE65 RNA guide
aaaaggcuuuggaagagccucu

SEQ ID NO: 6235 - RNA, 22 nt, Artificial Sequence
  RPE65 RNA guide
aaaauaagaggcucuuccaaag

SEQ ID NO: 6236 - RNA, 22 nt, Artificial Sequence
  RPE65 RNA guide
aaaggcuuuggaagagccucuu

SEQ ID NO: 6237 - RNA, 22 nt, Artificial Sequence
  RPE65 RNA guide
aaagugguuuuaaaaggcuuug

SEQ ID NO: 6238 - RNA, 22 nt, Artificial Sequence
  RPE65 RNA guide
aaauaagaggcucuuccaaagc

SEQ ID NO: 6239 - RNA, 22 nt, Artificial Sequence
  RPE65 RNA guide
aagaggcucuuccaaagccuuu

SEQ ID NO: 6240 - RNA, 22 nt, Artificial Sequence
  RPE65 RNA guide
aaggcuuuggaagagccucuua

SEQ ID NO: 6241 - RNA, 22 nt, Artificial Sequence
  RPE65 RNA guide
aagugguuuuaaaaggcuuugg

SEQ ID NO: 6242 - RNA, 22 nt, Artificial Sequence
  RPE65 RNA guide
aauaagaggcucuuccaaagcc

SEQ ID NO: 6243 - RNA, 22 nt, Artificial Sequence
  RPE65 RNA guide
agaggcucuuccaaagccuuuu

SEQ ID NO: 6244 - RNA, 22 nt, Artificial Sequence
  RPE65 RNA guide
aggcucuuccaaagccuuuuaa

SEQ ID NO: 6245 - RNA, 22 nt, Artificial Sequence
  RPE65 RNA guide
aggcuuuggaagagccucuuau

SEQ ID NO: 6246 - RNA, 22 nt, Artificial Sequence
  RPE65 RNA guide
agugguuuuaaaaggcuuugga

SEQ ID NO: 6247 - RNA, 22 nt, Artificial Sequence
  RPE65 RNA guide
auaagaggcucuuccaaagccu

SEQ ID NO: 6248 - RNA, 22 nt, Artificial Sequence
  RPE65 RNA guide
cucuuccaaagccuuuuaaaac

SEQ ID NO: 6249 - RNA, 22 nt, Artificial Sequence
  RPE65 RNA guide
cuuuggaagagccucuuauuuu

SEQ ID NO: 6250 - RNA, 22 nt, Artificial Sequence
  RPE65 RNA guide
gaggcucuuccaaagccuuuua

SEQ ID NO: 6251 - RNA, 22 nt, Artificial Sequence
  RPE65 RNA guide
gcucuuccaaagccuuuuaaaa

SEQ ID NO: 6252 - RNA, 22 nt, Artificial Sequence
  RPE65 RNA guide
gcuuuggaagagccucuuauuu

SEQ ID NO: 6253 - RNA, 22 nt, Artificial Sequence
  RPE65 RNA guide
ggcucuuccaaagccuuuuaaa

SEQ ID NO: 6254 - RNA, 22 nt, Artificial Sequence
  RPE65 RNA guide
ggcuuuggaagagccucuuauu

SEQ ID NO: 6255 - RNA, 22 nt, Artificial Sequence
  RPE65 RNA guide
gguuuuaaaaggcuuuggaaga

SEQ ID NO: 6256 - RNA, 22 nt, Artificial Sequence
  RPE65 RNA guide
gugguuuuaaaaggcuuuggaa

SEQ ID NO: 6257 - RNA, 22 nt, Artificial Sequence
  RPE65 RNA guide
guuuuaaaaggcuuuggaagag

SEQ ID NO: 6258 - RNA, 22 nt, Artificial Sequence
  RPE65 RNA guide
uaaaaggcuuuggaagagccuc

SEQ ID NO: 6259 - RNA, 22 nt, Artificial Sequence
  RPE65 RNA guide
uaagaggcucuuccaaagccuu

SEQ ID NO: 6260 - RNA, 22 nt, Artificial Sequence
  RPE65 RNA guide
ucuuccaaagccuuuuaaaacc

SEQ ID NO: 6261 - RNA, 22 nt, Artificial Sequence
  RPE65 RNA guide
ugguuuuaaaaggcuuuggaag

SEQ ID NO: 6262 - RNA, 22 nt, Artificial Sequence
  RPE65 RNA guide
uuaaaaggcuuuggaagagccu

SEQ ID NO: 6263 - RNA, 22 nt, Artificial Sequence
  RPE65 RNA guide
uuggaagagccucuuauuuuuu

SEQ ID NO: 6264 - RNA, 22 nt, Artificial Sequence
  RPE65 RNA guide
uuuaaaaggcuuuggaagagcc

SEQ ID NO: 6265 - RNA, 22 nt, Artificial Sequence
  RPE65 RNA guide
uuuggaagagccucuuauuuuu

SEQ ID NO: 6266 - RNA, 22 nt, Artificial Sequence
  RPE65 RNA guide
uuuuaaaaggcuuuggaagagc

SEQ ID NO: 6267 - RNA, 20 nt, Artificial Sequence
  RPE65 RNA guide
aaaaaauaagaggcuguucc

SEQ ID NO: 6268 - RNA, 20 nt, Artificial Sequence
  RPE65 RNA guide
aaaaauaagaggcuguucca

SEQ ID NO: 6269 - RNA, 20 nt, Artificial Sequence
  RPE65 RNA guide
aaaaggcuuuggaacagccu

SEQ ID NO: 6270 - RNA, 20 nt, Artificial Sequence
  RPE65 RNA guide
aaaauaagaggcuguuccaa

SEQ ID NO: 6271 - RNA, 20 nt, Artificial Sequence
  RPE65 RNA guide
aaaggcuuuggaacagccuc

SEQ ID NO: 6272 - RNA, 20 nt, Artificial Sequence
  RPE65 RNA guide
aaauaagaggcuguuccaaa

SEQ ID NO: 6273 - RNA, 20 nt, Artificial Sequence
  RPE65 RNA guide
aagaggcuguuccaaagccu

SEQ ID NO: 6274 - RNA, 20 nt, Artificial Sequence
  RPE65 RNA guide
aaggcuuuggaacagccucu

SEQ ID NO: 6275 - RNA, 20 nt, Artificial Sequence
  RPE65 RNA guide
aauaagaggcuguuccaaag

SEQ ID NO: 6276 - RNA, 20 nt, Artificial Sequence
  RPE65 RNA guide
agaggcuguuccaaagccuu

SEQ ID NO: 6277 - RNA, 20 nt, Artificial Sequence
  RPE65 RNA guide
aggcuguuccaaagccuuuu

SEQ ID NO: 6278 - RNA, 20 nt, Artificial Sequence
  RPE65 RNA guide
aggcuuuggaacagccucuu

SEQ ID NO: 6279 - RNA, 20 nt, Artificial Sequence
  RPE65 RNA guide
auaagaggcuguuccaaagc

SEQ ID NO: 6280 - RNA, 20 nt, Artificial Sequence
  RPE65 RNA guide
cuguuccaaagccuuuuaaa

SEQ ID NO: 6281 - RNA, 20 nt, Artificial Sequence
  RPE65 RNA guide
cuuuggaacagccucuuauu

SEQ ID NO: 6282 - RNA, 20 nt, Artificial Sequence
  RPE65 RNA guide
gaggcuguuccaaagccuuu

SEQ ID NO: 6283 - RNA, 20 nt, Artificial Sequence
  RPE65 RNA guide
gcuguuccaaagccuuuuaa

SEQ ID NO: 6284 - RNA, 20 nt, Artificial Sequence
  RPE65 RNA guide
gcuuuggaacagccucuuau

SEQ ID NO: 6285 - RNA, 20 nt, Artificial Sequence
  RPE65 RNA guide
ggaacagccucuuauuuuuu

SEQ ID NO: 6286 - RNA, 20 nt, Artificial Sequence
  RPE65 RNA guide
ggcuguuccaaagccuuuua

SEQ ID NO: 6287 - RNA, 20 nt, Artificial Sequence
  RPE65 RNA guide
ggcuuuggaacagccucuua

SEQ ID NO: 6288 - RNA, 20 nt, Artificial Sequence
  RPE65 RNA guide
guuuuaaaaggcuuuggaac

SEQ ID NO: 6289 - RNA, 20 nt, Artificial Sequence
  RPE65 RNA guide
uaaaaggcuuuggaacagcc

SEQ ID NO: 6290 - RNA, 20 nt, Artificial Sequence
  RPE65 RNA guide
uaagaggcuguuccaaagcc

SEQ ID NO: 6291 - RNA, 20 nt, Artificial Sequence
  RPE65 RNA guide
uggaacagccucuuauuuuu

SEQ ID NO: 6292 - RNA, 20 nt, Artificial Sequence
  RPE65 RNA guide
uguuccaaagccuuuuaaaa

SEQ ID NO: 6293 - RNA, 20 nt, Artificial Sequence
  RPE65 RNA guide
uuaaaaggcuuuggaacagc

SEQ ID NO: 6294 - RNA, 20 nt, Artificial Sequence
  RPE65 RNA guide
uuggaacagccucuuauuuu

SEQ ID NO: 6295 - RNA, 20 nt, Artificial Sequence
  RPE65 RNA guide
uuuaaaaggcuuuggaacag

SEQ ID NO: 6296 - RNA, 20 nt, Artificial Sequence
  RPE65 RNA guide
uuuggaacagccucuuauuu

SEQ ID NO: 6297 - RNA, 20 nt, Artificial Sequence
  RPE65 RNA guide
uuuuaaaaggcuuuggaaca

SEQ ID NO: 6298 - RNA, 21 nt, Artificial Sequence
  RPE65 RNA guide
aaaaaauaagaggcuguucca

SEQ ID NO: 6299 - RNA, 21 nt, Artificial Sequence
  RPE65 RNA guide
aaaaauaagaggcuguuccaa

SEQ ID NO: 6300 - RNA, 21 nt, Artificial Sequence
  RPE65 RNA guide
aaaaggcuuuggaacagccuc

SEQ ID NO: 6301 - RNA, 21 nt, Artificial Sequence
  RPE65 RNA guide
aaaauaagaggcuguuccaaa

SEQ ID NO: 6302 - RNA, 21 nt, Artificial Sequence
  RPE65 RNA guide
aaaggcuuuggaacagccucu

SEQ ID NO: 6303 - RNA, 21 nt, Artificial Sequence
  RPE65 RNA guide
aaauaagaggcuguuccaaag

SEQ ID NO: 6304 - RNA, 21 nt, Artificial Sequence
  RPE65 RNA guide
aagaggcuguuccaaagccuu

SEQ ID NO: 6305 - RNA, 21 nt, Artificial Sequence
  RPE65 RNA guide
aaggcuuuggaacagccucuu

SEQ ID NO: 6306 - RNA, 21 nt, Artificial Sequence
  RPE65 RNA guide
aauaagaggcuguuccaaagc

SEQ ID NO: 6307 - RNA, 21 nt, Artificial Sequence
  RPE65 RNA guide
agaggcuguuccaaagccuuu

SEQ ID NO: 6308 - RNA, 21 nt, Artificial Sequence
  RPE65 RNA guide
aggcuguuccaaagccuuuua

SEQ ID NO: 6309 - RNA, 21 nt, Artificial Sequence
  RPE65 RNA guide
aggcuuuggaacagccucuua

SEQ ID NO: 6310 - RNA, 21 nt, Artificial Sequence
  RPE65 RNA guide
auaagaggcuguuccaaagcc

SEQ ID NO: 6311 - RNA, 21 nt, Artificial Sequence
  RPE65 RNA guide
cuguuccaaagccuuuuaaaa

SEQ ID NO: 6312 - RNA, 21 nt, Artificial Sequence
  RPE65 RNA guide
cuuuggaacagccucuuauuu

SEQ ID NO: 6313 - RNA, 21 nt, Artificial Sequence
  RPE65 RNA guide
gaggcuguuccaaagccuuuu

SEQ ID NO: 6314 - RNA, 21 nt, Artificial Sequence
  RPE65 RNA guide
gcuguuccaaagccuuuuaaa

SEQ ID NO: 6315 - RNA, 21 nt, Artificial Sequence
  RPE65 RNA guide
gcuuuggaacagccucuuauu

SEQ ID NO: 6316 - RNA, 21 nt, Artificial Sequence
  RPE65 RNA guide
ggcuguuccaaagccuuuuaa

SEQ ID NO: 6317 - RNA, 21 nt, Artificial Sequence
  RPE65 RNA guide
ggcuuuggaacagccucuuau

SEQ ID NO: 6318 - RNA, 21 nt, Artificial Sequence
  RPE65 RNA guide
gguuuuaaaaggcuuuggaac

SEQ ID NO: 6319 - RNA, 21 nt, Artificial Sequence
  RPE65 RNA guide
guuuuaaaaggcuuuggaaca

SEQ ID NO: 6320 - RNA, 21 nt, Artificial Sequence
  RPE65 RNA guide
uaaaaggcuuuggaacagccu

SEQ ID NO: 6321 - RNA, 21 nt, Artificial Sequence
  RPE65 RNA guide
uaagaggcuguuccaaagccu

SEQ ID NO: 6322 - RNA, 21 nt, Artificial Sequence
  RPE65 RNA guide
uggaacagccucuuauuuuuu

SEQ ID NO: 6323 - RNA, 21 nt, Artificial Sequence
  RPE65 RNA guide
uguuccaaagccuuuuaaaac

SEQ ID NO: 6324 - RNA, 21 nt, Artificial Sequence
  RPE65 RNA guide
uuaaaaggcuuuggaacagcc

SEQ ID NO: 6325 - RNA, 21 nt, Artificial Sequence
  RPE65 RNA guide
uuggaacagccucuuauuuuu

SEQ ID NO: 6326 - RNA, 21 nt, Artificial Sequence
  RPE65 RNA guide
uuuaaaaggcuuuggaacagc

SEQ ID NO: 6327 - RNA, 21 nt, Artificial Sequence
  RPE65 RNA guide
uuuggaacagccucuuauuuu

SEQ ID NO: 6328 - RNA, 21 nt, Artificial Sequence
  RPE65 RNA guide
uuuuaaaaggcuuuggaacag

SEQ ID NO: 6329 - RNA, 22 nt, Artificial Sequence
  RPE65 RNA guide
aaaaaauaagaggcuguuccaa

SEQ ID NO: 6330 - RNA, 22 nt, Artificial Sequence
  RPE65 RNA guide
aaaaauaagaggcuguuccaaa

SEQ ID NO: 6331 - RNA, 22 nt, Artificial Sequence
  RPE65 RNA guide
aaaaggcuuuggaacagccucu

SEQ ID NO: 6332 - RNA, 22 nt, Artificial Sequence
  RPE65 RNA guide
aaaauaagaggcuguuccaaag

SEQ ID NO: 6333 - RNA, 22 nt, Artificial Sequence
  RPE65 RNA guide
aaaggcuuuggaacagccucuu

SEQ ID NO: 6334 - RNA, 22 nt, Artificial Sequence
  RPE65 RNA guide
aaauaagaggcuguuccaaagc

SEQ ID NO: 6335 - RNA, 22 nt, Artificial Sequence
  RPE65 RNA guide
aagaggcuguuccaaagccuuu

SEQ ID NO: 6336 - RNA, 22 nt, Artificial Sequence
  RPE65 RNA guide
aaggcuuuggaacagccucuua

SEQ ID NO: 6337 - RNA, 22 nt, Artificial Sequence
  RPE65 RNA guide
aauaagaggcuguuccaaagcc

SEQ ID NO: 6338 - RNA, 22 nt, Artificial Sequence
  RPE65 RNA guide
agaggcuguuccaaagccuuuu

SEQ ID NO: 6339 - RNA, 22 nt, Artificial Sequence
  RPE65 RNA guide
aggcuguuccaaagccuuuuaa

SEQ ID NO: 6340 - RNA, 22 nt, Artificial Sequence
  RPE65 RNA guide
aggcuuuggaacagccucuuau

SEQ ID NO: 6341 - RNA, 22 nt, Artificial Sequence
  RPE65 RNA guide
auaagaggcuguuccaaagccu

SEQ ID NO: 6342 - RNA, 22 nt, Artificial Sequence
  RPE65 RNA guide
cuguuccaaagccuuuuaaaac

SEQ ID NO: 6343 - RNA, 22 nt, Artificial Sequence
  RPE65 RNA guide
cuuuggaacagccucuuauuuu

SEQ ID NO: 6344 - RNA, 22 nt, Artificial Sequence
  RPE65 RNA guide
gaggcuguuccaaagccuuuua

SEQ ID NO: 6345 - RNA, 22 nt, Artificial Sequence
  RPE65 RNA guide
gcuguuccaaagccuuuuaaaa

SEQ ID NO: 6346 - RNA, 22 nt, Artificial Sequence
  RPE65 RNA guide
gcuuuggaacagccucuuauuu

SEQ ID NO: 6347 - RNA, 22 nt, Artificial Sequence
  RPE65 RNA guide
ggcuguuccaaagccuuuuaaa

SEQ ID NO: 6348 - RNA, 22 nt, Artificial Sequence
  RPE65 RNA guide
ggcuuuggaacagccucuuauu

SEQ ID NO: 6349 - RNA, 22 nt, Artificial Sequence
  RPE65 RNA guide
gguuuuaaaaggcuuuggaaca

SEQ ID NO: 6350 - RNA, 22 nt, Artificial Sequence
  RPE65 RNA guide
guuuuaaaaggcuuuggaacag

SEQ ID NO: 6351 - RNA, 22 nt, Artificial Sequence
  RPE65 RNA guide
uaaaaggcuuuggaacagccuc

SEQ ID NO: 6352 - RNA, 22 nt, Artificial Sequence
  RPE65 RNA guide
uaagaggcuguuccaaagccuu

SEQ ID NO: 6353 - RNA, 22 nt, Artificial Sequence
  RPE65 RNA guide
ugguuuuaaaaggcuuuggaac

SEQ ID NO: 6354 - RNA, 22 nt, Artificial Sequence
  RPE65 RNA guide
uguuccaaagccuuuuaaaacc

SEQ ID NO: 6355 - RNA, 22 nt, Artificial Sequence
  RPE65 RNA guide
uuaaaaggcuuuggaacagccu

SEQ ID NO: 6356 - RNA, 22 nt, Artificial Sequence
  RPE65 RNA guide
uuggaacagccucuuauuuuuu

SEQ ID NO: 6357 - RNA, 22 nt, Artificial Sequence
  RPE65 RNA guide
uuuaaaaggcuuuggaacagcc

SEQ ID NO: 6358 - RNA, 22 nt, Artificial Sequence
  RPE65 RNA guide
uuuggaacagccucuuauuuuu

SEQ ID NO: 6359 - RNA, 22 nt, Artificial Sequence
  RPE65 RNA guide
uuuuaaaaggcuuuggaacagc

SEQ ID NO: 6360 - RNA, 20 nt, Artificial Sequence
  RPE65 RNA guide
aaauaauuccaucaucaagg

SEQ ID NO: 6361 - RNA, 20 nt, Artificial Sequence
  RPE65 RNA guide
aauaauuccaucaucaaggu

SEQ ID NO: 6362 - RNA, 20 nt, Artificial Sequence
  RPE65 RNA guide
aauuccaucaucaagguggu

SEQ ID NO: 6363 - RNA, 20 nt, Artificial Sequence
  RPE65 RNA guide
accaccuugaugauggaauu

SEQ ID NO: 6364 - RNA, 20 nt, Artificial Sequence
  RPE65 RNA guide
accuugaugauggaauuauu

SEQ ID NO: 6365 - RNA, 20 nt, Artificial Sequence
  RPE65 RNA guide
auaauuccaucaucaaggug

SEQ ID NO: 6366 - RNA, 20 nt, Artificial Sequence
  RPE65 RNA guide
auuccaucaucaagguggug

SEQ ID NO: 6367 - RNA, 20 nt, Artificial Sequence
  RPE65 RNA guide
auuguucaccaccuugauga

SEQ ID NO: 6368 - RNA, 20 nt, Artificial Sequence
  RPE65 RNA guide
caaauaauuccaucaucaag

SEQ ID NO: 6369 - RNA, 20 nt, Artificial Sequence
  RPE65 RNA guide
caccaccuugaugauggaau

SEQ ID NO: 6370 - RNA, 20 nt, Artificial Sequence
  RPE65 RNA guide
caccuugaugauggaauuau

SEQ ID NO: 6371 - RNA, 20 nt, Artificial Sequence
  RPE65 RNA guide
ccaccuugaugauggaauua

SEQ ID NO: 6372 - RNA, 20 nt, Artificial Sequence
  RPE65 RNA guide
ccuugaugauggaauuauuu

SEQ ID NO: 6373 - RNA, 20 nt, Artificial Sequence
  RPE65 RNA guide
cuugaugauggaauuauuug

SEQ ID NO: 6374 - RNA, 20 nt, Artificial Sequence
  RPE65 RNA guide
guucaccaccuugaugaugg

SEQ ID NO: 6375 - RNA, 20 nt, Artificial Sequence
  RPE65 RNA guide
uaauuccaucaucaaggugg

SEQ ID NO: 6376 - RNA, 20 nt, Artificial Sequence
  RPE65 RNA guide
ucaccaccuugaugauggaa

SEQ ID NO: 6377 - RNA, 20 nt, Artificial Sequence
  RPE65 RNA guide
uguucaccaccuugaugaug

SEQ ID NO: 6378 - RNA, 20 nt, Artificial Sequence
  RPE65 RNA guide
uucaccaccuugaugaugga

SEQ ID NO: 6379 - RNA, 20 nt, Artificial Sequence
  RPE65 RNA guide
uuccaucaucaaggugguga

SEQ ID NO: 6380 - RNA, 20 nt, Artificial Sequence
  RPE65 RNA guide
uuguucaccaccuugaugau

SEQ ID NO: 6381 - RNA, 21 nt, Artificial Sequence
  RPE65 RNA guide
aauaauuccaucaucaaggug

SEQ ID NO: 6382 - RNA, 21 nt, Artificial Sequence
  RPE65 RNA guide
aauuccaucaucaagguggug

SEQ ID NO: 6383 - RNA, 21 nt, Artificial Sequence
  RPE65 RNA guide
accaccuugaugauggaauua

SEQ ID NO: 6384 - RNA, 21 nt, Artificial Sequence
  RPE65 RNA guide
auaauuccaucaucaaggugg

SEQ ID NO: 6385 - RNA, 21 nt, Artificial Sequence
  RPE65 RNA guide
auuccaucaucaaggugguga

SEQ ID NO: 6386 - RNA, 21 nt, Artificial Sequence
  RPE65 RNA guide
auuguucaccaccuugaugau

SEQ ID NO: 6387 - RNA, 21 nt, Artificial Sequence
  RPE65 RNA guide
caaauaauuccaucaucaagg

SEQ ID NO: 6388 - RNA, 21 nt, Artificial Sequence
  RPE65 RNA guide
caccaccuugaugauggaauu

SEQ ID NO: 6389 - RNA, 21 nt, Artificial Sequence
  RPE65 RNA guide
caccuugaugauggaauuauu

SEQ ID NO: 6390 - RNA, 21 nt, Artificial Sequence
  RPE65 RNA guide
cauuguucaccaccuugauga

SEQ ID NO: 6391 - RNA, 21 nt, Artificial Sequence
  RPE65 RNA guide
ccaccuugaugauggaauuau

SEQ ID NO: 6392 - RNA, 21 nt, Artificial Sequence
  RPE65 RNA guide
ccuugaugauggaauuauuug

SEQ ID NO: 6393 - RNA, 21 nt, Artificial Sequence
  RPE65 RNA guide
guucaccaccuugaugaugga

SEQ ID NO: 6394 - RNA, 21 nt, Artificial Sequence
  RPE65 RNA guide
uaauuccaucaucaagguggu

SEQ ID NO: 6395 - RNA, 21 nt, Artificial Sequence
  RPE65 RNA guide
ucaccaccuugaugauggaau

SEQ ID NO: 6396 - RNA, 21 nt, Artificial Sequence
  RPE65 RNA guide
uguucaccaccuugaugaugg

SEQ ID NO: 6397 - RNA, 21 nt, Artificial Sequence
  RPE65 RNA guide
uucaccaccuugaugauggaa

SEQ ID NO: 6398 - RNA, 21 nt, Artificial Sequence
  RPE65 RNA guide
uuccaucaucaagguggugaa

SEQ ID NO: 6399 - RNA, 21 nt, Artificial Sequence
  RPE65 RNA guide
uuguucaccaccuugaugaug

SEQ ID NO: 6400 - RNA, 22 nt, Artificial Sequence
  RPE65 RNA guide
aaauaauuccaucaucaaggug

SEQ ID NO: 6401 - RNA, 22 nt, Artificial Sequence
  RPE65 RNA guide
aauaauuccaucaucaaggugg

SEQ ID NO: 6402 - RNA, 22 nt, Artificial Sequence
  RPE65 RNA guide
aauuccaucaucaaggugguga

SEQ ID NO: 6403 - RNA, 22 nt, Artificial Sequence
  RPE65 RNA guide
accaccuugaugauggaauuau

SEQ ID NO: 6404 - RNA, 22 nt, Artificial Sequence
  RPE65 RNA guide
accuugaugauggaauuauuug

SEQ ID NO: 6405 - RNA, 22 nt, Artificial Sequence
  RPE65 RNA guide
auaauuccaucaucaagguggu

SEQ ID NO: 6406 - RNA, 22 nt, Artificial Sequence
  RPE65 RNA guide
auuccaucaucaagguggugaa

SEQ ID NO: 6407 - RNA, 22 nt, Artificial Sequence
  RPE65 RNA guide
auuguucaccaccuugaugaug

SEQ ID NO: 6408 - RNA, 22 nt, Artificial Sequence
  RPE65 RNA guide
caaauaauuccaucaucaaggu

SEQ ID NO: 6409 - RNA, 22 nt, Artificial Sequence
  RPE65 RNA guide
caccaccuugaugauggaauua

SEQ ID NO: 6410 - RNA, 22 nt, Artificial Sequence
  RPE65 RNA guide
caccuugaugauggaauuauuu

SEQ ID NO: 6411 - RNA, 22 nt, Artificial Sequence
  RPE65 RNA guide
cauuguucaccaccuugaugau

SEQ ID NO: 6412 - RNA, 22 nt, Artificial Sequence
  RPE65 RNA guide
ccaccuugaugauggaauuauu

SEQ ID NO: 6413 - RNA, 22 nt, Artificial Sequence
  RPE65 RNA guide
ccuugaugauggaauuauuuga

SEQ ID NO: 6414 - RNA, 22 nt, Artificial Sequence
  RPE65 RNA guide
guucaccaccuugaugauggaa

SEQ ID NO: 6415 - RNA, 22 nt, Artificial Sequence
  RPE65 RNA guide
uaauuccaucaucaagguggug

SEQ ID NO: 6416 - RNA, 22 nt, Artificial Sequence
  RPE65 RNA guide
ucaaauaauuccaucaucaagg

SEQ ID NO: 6417 - RNA, 22 nt, Artificial Sequence
  RPE65 RNA guide
ucaccaccuugaugauggaauu

SEQ ID NO: 6418 - RNA, 22 nt, Artificial Sequence
  RPE65 RNA guide
ucauuguucaccaccuugauga

SEQ ID NO: 6419 - RNA, 22 nt, Artificial Sequence
  RPE65 RNA guide
uguucaccaccuugaugaugga

SEQ ID NO: 6420 - RNA, 22 nt, Artificial Sequence
  RPE65 RNA guide
uucaccaccuugaugauggaau

SEQ ID NO: 6421 - RNA, 22 nt, Artificial Sequence
  RPE65 RNA guide
uuccaucaucaagguggugaac

SEQ ID NO: 6422 - RNA, 22 nt, Artificial Sequence
  RPE65 RNA guide
uuguucaccaccuugaugaugg

SEQ ID NO: 6423 - RNA, 20 nt, Artificial Sequence
  RPE65 RNA guide
aaauaauaccaucaucaagg

SEQ ID NO: 6424 - RNA, 20 nt, Artificial Sequence
  RPE65 RNA guide
aauaauaccaucaucaaggu

SEQ ID NO: 6425 - RNA, 20 nt, Artificial Sequence
  RPE65 RNA guide
aauaccaucaucaagguggu

SEQ ID NO: 6426 - RNA, 20 nt, Artificial Sequence
  RPE65 RNA guide
accaccuugaugaugguauu

SEQ ID NO: 6427 - RNA, 20 nt, Artificial Sequence
  RPE65 RNA guide
accuugaugaugguauuauu

SEQ ID NO: 6428 - RNA, 20 nt, Artificial Sequence
  RPE65 RNA guide
auaauaccaucaucaaggug

SEQ ID NO: 6429 - RNA, 20 nt, Artificial Sequence
  RPE65 RNA guide
auaccaucaucaagguggug

SEQ ID NO: 6430 - RNA, 20 nt, Artificial Sequence
  RPE65 RNA guide
caaauaauaccaucaucaag

SEQ ID NO: 6431 - RNA, 20 nt, Artificial Sequence
  RPE65 RNA guide
caccaccuugaugaugguau

SEQ ID NO: 6432 - RNA, 20 nt, Artificial Sequence
  RPE65 RNA guide
caccuugaugaugguauuau

SEQ ID NO: 6433 - RNA, 20 nt, Artificial Sequence
  RPE65 RNA guide
ccaccuugaugaugguauua

SEQ ID NO: 6434 - RNA, 20 nt, Artificial Sequence
  RPE65 RNA guide
ccuugaugaugguauuauuu

SEQ ID NO: 6435 - RNA, 20 nt, Artificial Sequence
  RPE65 RNA guide
cuugaugaugguauuauuug

SEQ ID NO: 6436 - RNA, 20 nt, Artificial Sequence
  RPE65 RNA guide
uaauaccaucaucaaggugg

SEQ ID NO: 6437 - RNA, 20 nt, Artificial Sequence
  RPE65 RNA guide
uaccaucaucaaggugguga

SEQ ID NO: 6438 - RNA, 20 nt, Artificial Sequence
  RPE65 RNA guide
ucaccaccuugaugauggua

SEQ ID NO: 6439 - RNA, 20 nt, Artificial Sequence
  RPE65 RNA guide
uucaccaccuugaugauggu

SEQ ID NO: 6440 - RNA, 21 nt, Artificial Sequence
  RPE65 RNA guide
aauaauaccaucaucaaggug

SEQ ID NO: 6441 - RNA, 21 nt, Artificial Sequence
  RPE65 RNA guide
aauaccaucaucaagguggug

SEQ ID NO: 6442 - RNA, 21 nt, Artificial Sequence
  RPE65 RNA guide
accaccuugaugaugguauua

SEQ ID NO: 6443 - RNA, 21 nt, Artificial Sequence
  RPE65 RNA guide
auaauaccaucaucaaggugg

SEQ ID NO: 6444 - RNA, 21 nt, Artificial Sequence
  RPE65 RNA guide
auaccaucaucaaggugguga

SEQ ID NO: 6445 - RNA, 21 nt, Artificial Sequence
  RPE65 RNA guide
caaauaauaccaucaucaagg

SEQ ID NO: 6446 - RNA, 21 nt, Artificial Sequence
  RPE65 RNA guide
caccaccuugaugaugguauu

SEQ ID NO: 6447 - RNA, 21 nt, Artificial Sequence
  RPE65 RNA guide
caccuugaugaugguauuauu

SEQ ID NO: 6448 - RNA, 21 nt, Artificial Sequence
  RPE65 RNA guide
ccaccuugaugaugguauuau

SEQ ID NO: 6449 - RNA, 21 nt, Artificial Sequence
  RPE65 RNA guide
ccuugaugaugguauuauuug

SEQ ID NO: 6450 - RNA, 21 nt, Artificial Sequence
  RPE65 RNA guide
guucaccaccuugaugauggu

SEQ ID NO: 6451 - RNA, 21 nt, Artificial Sequence
  RPE65 RNA guide
uaauaccaucaucaagguggu

SEQ ID NO: 6452 - RNA, 21 nt, Artificial Sequence
  RPE65 RNA guide
uaccaucaucaagguggugaa

SEQ ID NO: 6453 - RNA, 21 nt, Artificial Sequence
  RPE65 RNA guide
ucaccaccuugaugaugguau

SEQ ID NO: 6454 - RNA, 21 nt, Artificial Sequence
  RPE65 RNA guide
uucaccaccuugaugauggua

SEQ ID NO: 6455 - RNA, 22 nt, Artificial Sequence
  RPE65 RNA guide
aaauaauaccaucaucaaggug

SEQ ID NO: 6456 - RNA, 22 nt, Artificial Sequence
  RPE65 RNA guide
aauaauaccaucaucaaggugg

SEQ ID NO: 6457 - RNA, 22 nt, Artificial Sequence
  RPE65 RNA guide
aauaccaucaucaaggugguga

SEQ ID NO: 6458 - RNA, 22 nt, Artificial Sequence
  RPE65 RNA guide
accaccuugaugaugguauuau

SEQ ID NO: 6459 - RNA, 22 nt, Artificial Sequence
  RPE65 RNA guide
accuugaugaugguauuauuug

SEQ ID NO: 6460 - RNA, 22 nt, Artificial Sequence
  RPE65 RNA guide
auaauaccaucaucaagguggu

SEQ ID NO: 6461 - RNA, 22 nt, Artificial Sequence
  RPE65 RNA guide
auaccaucaucaagguggugaa

SEQ ID NO: 6462 - RNA, 22 nt, Artificial Sequence
  RPE65 RNA guide
caaauaauaccaucaucaaggu

SEQ ID NO: 6463 - RNA, 22 nt, Artificial Sequence
  RPE65 RNA guide
caccaccuugaugaugguauua

SEQ ID NO: 6464 - RNA, 22 nt, Artificial Sequence
  RPE65 RNA guide
caccuugaugaugguauuauuu

SEQ ID NO: 6465 - RNA, 22 nt, Artificial Sequence
  RPE65 RNA guide
ccaccuugaugaugguauuauu

SEQ ID NO: 6466 - RNA, 22 nt, Artificial Sequence
  RPE65 RNA guide
ccuugaugaugguauuauuuga

SEQ ID NO: 6467 - RNA, 22 nt, Artificial Sequence
  RPE65 RNA guide
guucaccaccuugaugauggua

SEQ ID NO: 6468 - RNA, 22 nt, Artificial Sequence
  RPE65 RNA guide
uaauaccaucaucaagguggug

SEQ ID NO: 6469 - RNA, 22 nt, Artificial Sequence
  RPE65 RNA guide
uaccaucaucaagguggugaac

SEQ ID NO: 6470 - RNA, 22 nt, Artificial Sequence
  RPE65 RNA guide
ucaaauaauaccaucaucaagg

SEQ ID NO: 6471 - RNA, 22 nt, Artificial Sequence
  RPE65 RNA guide
ucaccaccuugaugaugguauu

SEQ ID NO: 6472 - RNA, 22 nt, Artificial Sequence
  RPE65 RNA guide
uguucaccaccuugaugauggu

SEQ ID NO: 6473 - RNA, 22 nt, Artificial Sequence
  RPE65 RNA guide
uucaccaccuugaugaugguau

SEQ ID NO: 6474 - RNA, 20 nt, Artificial Sequence
  RPE65 RNA guide
aaucuguuaucucauagaag

SEQ ID NO: 6475 - RNA, 20 nt, Artificial Sequence
  RPE65 RNA guide
acaaacaaaucuguuaucuc

SEQ ID NO: 6476 - RNA, 20 nt, Artificial Sequence
  RPE65 RNA guide
acaaaucuguuaucucauag

SEQ ID NO: 6477 - RNA, 20 nt, Artificial Sequence
  RPE65 RNA guide
acuucuaugagauaacagau

SEQ ID NO: 6478 - RNA, 20 nt, Artificial Sequence
  RPE65 RNA guide
aguacuucuaugagauaaca

SEQ ID NO: 6479 - RNA, 20 nt, Artificial Sequence
  RPE65 RNA guide
aucucauagaaguacuauag

SEQ ID NO: 6480 - RNA, 20 nt, Artificial Sequence
  RPE65 RNA guide
aucuguuaucucauagaagu

SEQ ID NO: 6481 - RNA, 20 nt, Artificial Sequence
  RPE65 RNA guide
caaacaaaucuguuaucuca

SEQ ID NO: 6482 - RNA, 20 nt, Artificial Sequence
  RPE65 RNA guide
caaaucuguuaucucauaga

SEQ ID NO: 6483 - RNA, 20 nt, Artificial Sequence
  RPE65 RNA guide
cuacaaacaaaucuguuauc

SEQ ID NO: 6484 - RNA, 20 nt, Artificial Sequence
  RPE65 RNA guide
cuauaguacuucuaugagau

SEQ ID NO: 6485 - RNA, 20 nt, Artificial Sequence
  RPE65 RNA guide
cuaugagauaacagauuugu

SEQ ID NO: 6486 - RNA, 20 nt, Artificial Sequence
  RPE65 RNA guide
cuguuaucucauagaaguac

SEQ ID NO: 6487 - RNA, 20 nt, Artificial Sequence
  RPE65 RNA guide
cuucuaugagauaacagauu

SEQ ID NO: 6488 - RNA, 20 nt, Artificial Sequence
  RPE65 RNA guide
gagauaacagauuuguuugu

SEQ ID NO: 6489 - RNA, 20 nt, Artificial Sequence
  RPE65 RNA guide
guacuucuaugagauaacag

SEQ ID NO: 6490 - RNA, 20 nt, Artificial Sequence
  RPE65 RNA guide
guuaucucauagaaguacua

SEQ ID NO: 6491 - RNA, 20 nt, Artificial Sequence
  RPE65 RNA guide
uacuucuaugagauaacaga

SEQ ID NO: 6492 - RNA, 20 nt, Artificial Sequence
  RPE65 RNA guide
uaguacuucuaugagauaac

SEQ ID NO: 6493 - RNA, 20 nt, Artificial Sequence
  RPE65 RNA guide
ucuauaguacuucuaugaga

SEQ ID NO: 6494 - RNA, 20 nt, Artificial Sequence
  RPE65 RNA guide
ucuaugagauaacagauuug

SEQ ID NO: 6495 - RNA, 20 nt, Artificial Sequence
  RPE65 RNA guide
ucucauagaaguacuauaga

SEQ ID NO: 6496 - RNA, 20 nt, Artificial Sequence
  RPE65 RNA guide
ucuguuaucucauagaagua

SEQ ID NO: 6497 - RNA, 20 nt, Artificial Sequence
  RPE65 RNA guide
ugagauaacagauuuguuug

SEQ ID NO: 6498 - RNA, 20 nt, Artificial Sequence
  RPE65 RNA guide
uguuaucucauagaaguacu

SEQ ID NO: 6499 - RNA, 20 nt, Artificial Sequence
  RPE65 RNA guide
uucuauaguacuucuaugag

SEQ ID NO: 6500 - RNA, 21 nt, Artificial Sequence
  RPE65 RNA guide
aguacuucuaugagauaacag

SEQ ID NO: 6501 - RNA, 21 nt, Artificial Sequence
  RPE65 RNA guide
cuguuaucucauagaaguacu

SEQ ID NO: 6502 - RNA, 21 nt, Artificial Sequence
  RPE65 RNA guide
guacuucuaugagauaacaga

SEQ ID NO: 6503 - RNA, 21 nt, Artificial Sequence
  RPE65 RNA guide
ucuguuaucucauagaaguac

SEQ ID NO: 6504 - RNA, 22 nt, Artificial Sequence
  RPE65 RNA guide
aguacuucuaugagauaacaga

SEQ ID NO: 6505 - RNA, 22 nt, Artificial Sequence
  RPE65 RNA guide
aucuguuaucucauagaaguac

SEQ ID NO: 6506 - RNA, 22 nt, Artificial Sequence
  RPE65 RNA guide
caaaucuguuaucucauagaag

SEQ ID NO: 6507 - RNA, 22 nt, Artificial Sequence
  RPE65 RNA guide
ccaaaacuacaaacaaaucugu

SEQ ID NO: 6508 - RNA, 22 nt, Artificial Sequence
  RPE65 RNA guide
cuacaaacaaaucuguuaucuc

SEQ ID NO: 6509 - RNA, 22 nt, Artificial Sequence
  RPE65 RNA guide
cuguuaucucauagaaguacua

SEQ ID NO: 6510 - RNA, 22 nt, Artificial Sequence
  RPE65 RNA guide
cuucuaugagauaacagauuug

SEQ ID NO: 6511 - RNA, 22 nt, Artificial Sequence
  RPE65 RNA guide
gagauaacagauuuguuuguag

SEQ ID NO: 6512 - RNA, 22 nt, Artificial Sequence
  RPE65 RNA guide
guacuucuaugagauaacagau

SEQ ID NO: 6513 - RNA, 22 nt, Artificial Sequence
  RPE65 RNA guide
uaguacuucuaugagauaacag

SEQ ID NO: 6514 - RNA, 22 nt, Artificial Sequence
  RPE65 RNA guide
ucuguuaucucauagaaguacu

SEQ ID NO: 6515 - RNA, 20 nt, Artificial Sequence
  RPE65 RNA guide
cuguuauuucauagaaguac

SEQ ID NO: 6516 - RNA, 20 nt, Artificial Sequence
  RPE65 RNA guide
guacuucuaugaaauaacag

SEQ ID NO: 6517 - RNA, 20 nt, Artificial Sequence
  RPE65 RNA guide
aaaagagauccaugguucuc

SEQ ID NO: 6518 - RNA, 20 nt, Artificial Sequence
  RPE65 RNA guide
aaagagauccaugguucucc

SEQ ID NO: 6519 - RNA, 20 nt, Artificial Sequence
  RPE65 RNA guide
aaauagacuuuaggagaacc

SEQ ID NO: 6520 - RNA, 20 nt, Artificial Sequence
  RPE65 RNA guide
aaccauggaucucuuuuaau

SEQ ID NO: 6521 - RNA, 20 nt, Artificial Sequence
  RPE65 RNA guide
aagagauccaugguucuccu

SEQ ID NO: 6522 - RNA, 20 nt, Artificial Sequence
  RPE65 RNA guide
aauagacuuuaggagaacca

SEQ ID NO: 6523 - RNA, 20 nt, Artificial Sequence
  RPE65 RNA guide
aauuaaaagagauccauggu

SEQ ID NO: 6524 - RNA, 20 nt, Artificial Sequence
  RPE65 RNA guide
accauggaucucuuuuaauu

SEQ ID NO: 6525 - RNA, 20 nt, Artificial Sequence
  RPE65 RNA guide
acuuuaggagaaccauggau

SEQ ID NO: 6526 - RNA, 20 nt, Artificial Sequence
  RPE65 RNA guide
agaaccauggaucucuuuua

SEQ ID NO: 6527 - RNA, 20 nt, Artificial Sequence
  RPE65 RNA guide
agacuuuaggagaaccaugg

SEQ ID NO: 6528 - RNA, 20 nt, Artificial Sequence
  RPE65 RNA guide
agagauccaugguucuccua

SEQ ID NO: 6529 - RNA, 20 nt, Artificial Sequence
  RPE65 RNA guide
agauccaugguucuccuaaa

SEQ ID NO: 6530 - RNA, 20 nt, Artificial Sequence
  RPE65 RNA guide
aggagaaccauggaucucuu

SEQ ID NO: 6531 - RNA, 20 nt, Artificial Sequence
  RPE65 RNA guide
auagacuuuaggagaaccau

SEQ ID NO: 6532 - RNA, 20 nt, Artificial Sequence
  RPE65 RNA guide
auccaugguucuccuaaagu

SEQ ID NO: 6533 - RNA, 20 nt, Artificial Sequence
  RPE65 RNA guide
auuaaaagagauccaugguu

SEQ ID NO: 6534 - RNA, 20 nt, Artificial Sequence
  RPE65 RNA guide
caugguucuccuaaagucua

SEQ ID NO: 6535 - RNA, 20 nt, Artificial Sequence
  RPE65 RNA guide
ccauggaucucuuuuaauua

SEQ ID NO: 6536 - RNA, 20 nt, Artificial Sequence
  RPE65 RNA guide
ccaugguucuccuaaagucu

SEQ ID NO: 6537 - RNA, 20 nt, Artificial Sequence
  RPE65 RNA guide
cuuuaggagaaccauggauc

SEQ ID NO: 6538 - RNA, 20 nt, Artificial Sequence
  RPE65 RNA guide
gaaccauggaucucuuuuaa

SEQ ID NO: 6539 - RNA, 20 nt, Artificial Sequence
  RPE65 RNA guide
gacuuuaggagaaccaugga

SEQ ID NO: 6540 - RNA, 20 nt, Artificial Sequence
  RPE65 RNA guide
gagaaccauggaucucuuuu

SEQ ID NO: 6541 - RNA, 20 nt, Artificial Sequence
  RPE65 RNA guide
gagauccaugguucuccuaa

SEQ ID NO: 6542 - RNA, 20 nt, Artificial Sequence
  RPE65 RNA guide
gauccaugguucuccuaaag

SEQ ID NO: 6543 - RNA, 20 nt, Artificial Sequence
  RPE65 RNA guide
ggagaaccauggaucucuuu

SEQ ID NO: 6544 - RNA, 20 nt, Artificial Sequence
  RPE65 RNA guide
uaaaagagauccaugguucu

SEQ ID NO: 6545 - RNA, 20 nt, Artificial Sequence
  RPE65 RNA guide
uaaauagacuuuaggagaac

SEQ ID NO: 6546 - RNA, 20 nt, Artificial Sequence
  RPE65 RNA guide
uaauuaaaagagauccaugg

SEQ ID NO: 6547 - RNA, 20 nt, Artificial Sequence
  RPE65 RNA guide
uagacuuuaggagaaccaug

SEQ ID NO: 6548 - RNA, 20 nt, Artificial Sequence
  RPE65 RNA guide
uaggagaaccauggaucucu

SEQ ID NO: 6549 - RNA, 20 nt, Artificial Sequence
  RPE65 RNA guide
uccaugguucuccuaaaguc

SEQ ID NO: 6550 - RNA, 20 nt, Artificial Sequence
  RPE65 RNA guide
uuaaaagagauccaugguuc

SEQ ID NO: 6551 - RNA, 20 nt, Artificial Sequence
  RPE65 RNA guide
uuaggagaaccauggaucuc

SEQ ID NO: 6552 - RNA, 20 nt, Artificial Sequence
  RPE65 RNA guide
uuuaggagaaccauggaucu

SEQ ID NO: 6553 - RNA, 21 nt, Artificial Sequence
  RPE65 RNA guide
aaaagagauccaugguucucc

SEQ ID NO: 6554 - RNA, 21 nt, Artificial Sequence
  RPE65 RNA guide
aaagagauccaugguucuccu

SEQ ID NO: 6555 - RNA, 21 nt, Artificial Sequence
  RPE65 RNA guide
aaauagacuuuaggagaacca

SEQ ID NO: 6556 - RNA, 21 nt, Artificial Sequence
  RPE65 RNA guide
aagagauccaugguucuccua

SEQ ID NO: 6557 - RNA, 21 nt, Artificial Sequence
  RPE65 RNA guide
aauagacuuuaggagaaccau

SEQ ID NO: 6558 - RNA, 21 nt, Artificial Sequence
  RPE65 RNA guide
acuuuaggagaaccauggauc

SEQ ID NO: 6559 - RNA, 21 nt, Artificial Sequence
  RPE65 RNA guide
agaaccauggaucucuuuuaa

SEQ ID NO: 6560 - RNA, 21 nt, Artificial Sequence
  RPE65 RNA guide
agacuuuaggagaaccaugga

SEQ ID NO: 6561 - RNA, 21 nt, Artificial Sequence
  RPE65 RNA guide
agagauccaugguucuccuaa

SEQ ID NO: 6562 - RNA, 21 nt, Artificial Sequence
  RPE65 RNA guide
agauccaugguucuccuaaag

SEQ ID NO: 6563 - RNA, 21 nt, Artificial Sequence
  RPE65 RNA guide
aggagaaccauggaucucuuu

SEQ ID NO: 6564 - RNA, 21 nt, Artificial Sequence
  RPE65 RNA guide
auagacuuuaggagaaccaug

SEQ ID NO: 6565 - RNA, 21 nt, Artificial Sequence
  RPE65 RNA guide
auccaugguucuccuaaaguc

SEQ ID NO: 6566 - RNA, 21 nt, Artificial Sequence
  RPE65 RNA guide
auuaaaagagauccaugguuc

SEQ ID NO: 6567 - RNA, 21 nt, Artificial Sequence
  RPE65 RNA guide
caugguucuccuaaagucuau

SEQ ID NO: 6568 - RNA, 21 nt, Artificial Sequence
  RPE65 RNA guide
ccaugguucuccuaaagucua

SEQ ID NO: 6569 - RNA, 21 nt, Artificial Sequence
  RPE65 RNA guide
cuuuaggagaaccauggaucu

SEQ ID NO: 6570 - RNA, 21 nt, Artificial Sequence
  RPE65 RNA guide
gaaccauggaucucuuuuaau

SEQ ID NO: 6571 - RNA, 21 nt, Artificial Sequence
  RPE65 RNA guide
gacuuuaggagaaccauggau

SEQ ID NO: 6572 - RNA, 21 nt, Artificial Sequence
  RPE65 RNA guide
gagaaccauggaucucuuuua

SEQ ID NO: 6573 - RNA, 21 nt, Artificial Sequence
  RPE65 RNA guide
gagauccaugguucuccuaaa

SEQ ID NO: 6574 - RNA, 21 nt, Artificial Sequence
  RPE65 RNA guide
gauccaugguucuccuaaagu

SEQ ID NO: 6575 - RNA, 21 nt, Artificial Sequence
  RPE65 RNA guide
ggagaaccauggaucucuuuu

SEQ ID NO: 6576 - RNA, 21 nt, Artificial Sequence
  RPE65 RNA guide
uaaaagagauccaugguucuc

SEQ ID NO: 6577 - RNA, 21 nt, Artificial Sequence
  RPE65 RNA guide
uaaauagacuuuaggagaacc

SEQ ID NO: 6578 - RNA, 21 nt, Artificial Sequence
  RPE65 RNA guide
uagacuuuaggagaaccaugg

SEQ ID NO: 6579 - RNA, 21 nt, Artificial Sequence
  RPE65 RNA guide
uaggagaaccauggaucucuu

SEQ ID NO: 6580 - RNA, 21 nt, Artificial Sequence
  RPE65 RNA guide
uccaugguucuccuaaagucu

SEQ ID NO: 6581 - RNA, 21 nt, Artificial Sequence
  RPE65 RNA guide
uuaaaagagauccaugguucu

SEQ ID NO: 6582 - RNA, 21 nt, Artificial Sequence
  RPE65 RNA guide
uuaggagaaccauggaucucu

SEQ ID NO: 6583 - RNA, 21 nt, Artificial Sequence
  RPE65 RNA guide
uuuaggagaaccauggaucuc

SEQ ID NO: 6584 - RNA, 22 nt, Artificial Sequence
  RPE65 RNA guide
aaaagagauccaugguucuccu

SEQ ID NO: 6585 - RNA, 22 nt, Artificial Sequence
  RPE65 RNA guide
aaagagauccaugguucuccua

SEQ ID NO: 6586 - RNA, 22 nt, Artificial Sequence
  RPE65 RNA guide
aaauagacuuuaggagaaccau

SEQ ID NO: 6587 - RNA, 22 nt, Artificial Sequence
  RPE65 RNA guide
aagagauccaugguucuccuaa

SEQ ID NO: 6588 - RNA, 22 nt, Artificial Sequence
  RPE65 RNA guide
aauagacuuuaggagaaccaug

SEQ ID NO: 6589 - RNA, 22 nt, Artificial Sequence
  RPE65 RNA guide
aauuaaaagagauccaugguuc

SEQ ID NO: 6590 - RNA, 22 nt, Artificial Sequence
  RPE65 RNA guide
acuuuaggagaaccauggaucu

SEQ ID NO: 6591 - RNA, 22 nt, Artificial Sequence
  RPE65 RNA guide
agaaccauggaucucuuuuaau

SEQ ID NO: 6592 - RNA, 22 nt, Artificial Sequence
  RPE65 RNA guide
agacuuuaggagaaccauggau

SEQ ID NO: 6593 - RNA, 22 nt, Artificial Sequence
  RPE65 RNA guide
agagauccaugguucuccuaaa

SEQ ID NO: 6594 - RNA, 22 nt, Artificial Sequence
  RPE65 RNA guide
agauccaugguucuccuaaagu

SEQ ID NO: 6595 - RNA, 22 nt, Artificial Sequence
  RPE65 RNA guide
aggagaaccauggaucucuuuu

SEQ ID NO: 6596 - RNA, 22 nt, Artificial Sequence
  RPE65 RNA guide
auagacuuuaggagaaccaugg

SEQ ID NO: 6597 - RNA, 22 nt, Artificial Sequence
  RPE65 RNA guide
auccaugguucuccuaaagucu

SEQ ID NO: 6598 - RNA, 22 nt, Artificial Sequence
  RPE65 RNA guide
auuaaaagagauccaugguucu

SEQ ID NO: 6599 - RNA, 22 nt, Artificial Sequence
  RPE65 RNA guide
caugguucuccuaaagucuauu

SEQ ID NO: 6600 - RNA, 22 nt, Artificial Sequence
  RPE65 RNA guide
ccaugguucuccuaaagucuau

SEQ ID NO: 6601 - RNA, 22 nt, Artificial Sequence
  RPE65 RNA guide
cuuuaggagaaccauggaucuc

SEQ ID NO: 6602 - RNA, 22 nt, Artificial Sequence
  RPE65 RNA guide
gaaccauggaucucuuuuaauu

SEQ ID NO: 6603 - RNA, 22 nt, Artificial Sequence
  RPE65 RNA guide
gacuuuaggagaaccauggauc

SEQ ID NO: 6604 - RNA, 22 nt, Artificial Sequence
  RPE65 RNA guide
gagaaccauggaucucuuuuaa

SEQ ID NO: 6605 - RNA, 22 nt, Artificial Sequence
  RPE65 RNA guide
gagauccaugguucuccuaaag

SEQ ID NO: 6606 - RNA, 22 nt, Artificial Sequence
  RPE65 RNA guide
gauccaugguucuccuaaaguc

SEQ ID NO: 6607 - RNA, 22 nt, Artificial Sequence
  RPE65 RNA guide
ggagaaccauggaucucuuuua

SEQ ID NO: 6608 - RNA, 22 nt, Artificial Sequence
  RPE65 RNA guide
uaaaagagauccaugguucucc

SEQ ID NO: 6609 - RNA, 22 nt, Artificial Sequence
  RPE65 RNA guide
uaaauagacuuuaggagaacca

SEQ ID NO: 6610 - RNA, 22 nt, Artificial Sequence
  RPE65 RNA guide
uagacuuuaggagaaccaugga

SEQ ID NO: 6611 - RNA, 22 nt, Artificial Sequence
  RPE65 RNA guide
uaggagaaccauggaucucuuu

SEQ ID NO: 6612 - RNA, 22 nt, Artificial Sequence
  RPE65 RNA guide
uccaugguucuccuaaagucua

SEQ ID NO: 6613 - RNA, 22 nt, Artificial Sequence
  RPE65 RNA guide
uuaaaagagauccaugguucuc

SEQ ID NO: 6614 - RNA, 22 nt, Artificial Sequence
  RPE65 RNA guide
uuaaauagacuuuaggagaacc

SEQ ID NO: 6615 - RNA, 22 nt, Artificial Sequence
  RPE65 RNA guide
uuaggagaaccauggaucucuu

SEQ ID NO: 6616 - RNA, 22 nt, Artificial Sequence
  RPE65 RNA guide
uuuaggagaaccauggaucucu

SEQ ID NO: 6617 - RNA, 20 nt, Artificial Sequence
  RPE65 RNA guide
aaaagagauccgugguucuc

SEQ ID NO: 6618 - RNA, 20 nt, Artificial Sequence
  RPE65 RNA guide
aaagagauccgugguucucc

SEQ ID NO: 6619 - RNA, 20 nt, Artificial Sequence
  RPE65 RNA guide
aaccacggaucucuuuuaau

SEQ ID NO: 6620 - RNA, 20 nt, Artificial Sequence
  RPE65 RNA guide
aagagauccgugguucuccu

SEQ ID NO: 6621 - RNA, 20 nt, Artificial Sequence
  RPE65 RNA guide
aauuaaaagagauccguggu

SEQ ID NO: 6622 - RNA, 20 nt, Artificial Sequence
  RPE65 RNA guide
accacggaucucuuuuaauu

SEQ ID NO: 6623 - RNA, 20 nt, Artificial Sequence
  RPE65 RNA guide
acuuuaggagaaccacggau

SEQ ID NO: 6624 - RNA, 20 nt, Artificial Sequence
  RPE65 RNA guide
agaaccacggaucucuuuua

SEQ ID NO: 6625 - RNA, 20 nt, Artificial Sequence
  RPE65 RNA guide
agacuuuaggagaaccacgg

SEQ ID NO: 6626 - RNA, 20 nt, Artificial Sequence
  RPE65 RNA guide
agagauccgugguucuccua

SEQ ID NO: 6627 - RNA, 20 nt, Artificial Sequence
  RPE65 RNA guide
agauccgugguucuccuaaa

SEQ ID NO: 6628 - RNA, 20 nt, Artificial Sequence
  RPE65 RNA guide
aggagaaccacggaucucuu

SEQ ID NO: 6629 - RNA, 20 nt, Artificial Sequence
  RPE65 RNA guide
auagacuuuaggagaaccac

SEQ ID NO: 6630 - RNA, 20 nt, Artificial Sequence
  RPE65 RNA guide
auccgugguucuccuaaagu

SEQ ID NO: 6631 - RNA, 20 nt, Artificial Sequence
  RPE65 RNA guide
auuaaaagagauccgugguu

SEQ ID NO: 6632 - RNA, 20 nt, Artificial Sequence
  RPE65 RNA guide
cacggaucucuuuuaauuaa

SEQ ID NO: 6633 - RNA, 20 nt, Artificial Sequence
  RPE65 RNA guide
ccacggaucucuuuuaauua

SEQ ID NO: 6634 - RNA, 20 nt, Artificial Sequence
  RPE65 RNA guide
ccgugguucuccuaaagucu

SEQ ID NO: 6635 - RNA, 20 nt, Artificial Sequence
  RPE65 RNA guide
cgugguucuccuaaagucua

SEQ ID NO: 6636 - RNA, 20 nt, Artificial Sequence
  RPE65 RNA guide
cuuuaggagaaccacggauc

SEQ ID NO: 6637 - RNA, 20 nt, Artificial Sequence
  RPE65 RNA guide
gaaccacggaucucuuuuaa

SEQ ID NO: 6638 - RNA, 20 nt, Artificial Sequence
  RPE65 RNA guide
gacuuuaggagaaccacgga

SEQ ID NO: 6639 - RNA, 20 nt, Artificial Sequence
  RPE65 RNA guide
gagaaccacggaucucuuuu

SEQ ID NO: 6640 - RNA, 20 nt, Artificial Sequence
  RPE65 RNA guide
gagauccgugguucuccuaa

SEQ ID NO: 6641 - RNA, 20 nt, Artificial Sequence
  RPE65 RNA guide
gauccgugguucuccuaaag

SEQ ID NO: 6642 - RNA, 20 nt, Artificial Sequence
  RPE65 RNA guide
ggagaaccacggaucucuuu

SEQ ID NO: 6643 - RNA, 20 nt, Artificial Sequence
  RPE65 RNA guide
uaaaagagauccgugguucu

SEQ ID NO: 6644 - RNA, 20 nt, Artificial Sequence
  RPE65 RNA guide
uaauuaaaagagauccgugg

SEQ ID NO: 6645 - RNA, 20 nt, Artificial Sequence
  RPE65 RNA guide
uagacuuuaggagaaccacg

SEQ ID NO: 6646 - RNA, 20 nt, Artificial Sequence
  RPE65 RNA guide
uaggagaaccacggaucucu

SEQ ID NO: 6647 - RNA, 20 nt, Artificial Sequence
  RPE65 RNA guide
uccgugguucuccuaaaguc

SEQ ID NO: 6648 - RNA, 20 nt, Artificial Sequence
  RPE65 RNA guide
uuaaaagagauccgugguuc

SEQ ID NO: 6649 - RNA, 20 nt, Artificial Sequence
  RPE65 RNA guide
uuaauuaaaagagauccgug

SEQ ID NO: 6650 - RNA, 20 nt, Artificial Sequence
  RPE65 RNA guide
uuaggagaaccacggaucuc

SEQ ID NO: 6651 - RNA, 20 nt, Artificial Sequence
  RPE65 RNA guide
uuuaggagaaccacggaucu

SEQ ID NO: 6652 - RNA, 21 nt, Artificial Sequence
  RPE65 RNA guide
aaaagagauccgugguucucc

SEQ ID NO: 6653 - RNA, 21 nt, Artificial Sequence
  RPE65 RNA guide
aaagagauccgugguucuccu

SEQ ID NO: 6654 - RNA, 21 nt, Artificial Sequence
  RPE65 RNA guide
aaccacggaucucuuuuaauu

SEQ ID NO: 6655 - RNA, 21 nt, Artificial Sequence
  RPE65 RNA guide
aagagauccgugguucuccua

SEQ ID NO: 6656 - RNA, 21 nt, Artificial Sequence
  RPE65 RNA guide
aauagacuuuaggagaaccac

SEQ ID NO: 6657 - RNA, 21 nt, Artificial Sequence
  RPE65 RNA guide
aauuaaaagagauccgugguu

SEQ ID NO: 6658 - RNA, 21 nt, Artificial Sequence
  RPE65 RNA guide
accacggaucucuuuuaauua

SEQ ID NO: 6659 - RNA, 21 nt, Artificial Sequence
  RPE65 RNA guide
acuuuaggagaaccacggauc

SEQ ID NO: 6660 - RNA, 21 nt, Artificial Sequence
  RPE65 RNA guide
agaaccacggaucucuuuuaa

SEQ ID NO: 6661 - RNA, 21 nt, Artificial Sequence
  RPE65 RNA guide
agacuuuaggagaaccacgga

SEQ ID NO: 6662 - RNA, 21 nt, Artificial Sequence
  RPE65 RNA guide
agagauccgugguucuccuaa

SEQ ID NO: 6663 - RNA, 21 nt, Artificial Sequence
  RPE65 RNA guide
agauccgugguucuccuaaag

SEQ ID NO: 6664 - RNA, 21 nt, Artificial Sequence
  RPE65 RNA guide
aggagaaccacggaucucuuu

SEQ ID NO: 6665 - RNA, 21 nt, Artificial Sequence
  RPE65 RNA guide
auagacuuuaggagaaccacg

SEQ ID NO: 6666 - RNA, 21 nt, Artificial Sequence
  RPE65 RNA guide
auccgugguucuccuaaaguc

SEQ ID NO: 6667 - RNA, 21 nt, Artificial Sequence
  RPE65 RNA guide
auuaaaagagauccgugguuc

SEQ ID NO: 6668 - RNA, 21 nt, Artificial Sequence
  RPE65 RNA guide
ccacggaucucuuuuaauuaa

SEQ ID NO: 6669 - RNA, 21 nt, Artificial Sequence
  RPE65 RNA guide
ccgugguucuccuaaagucua

SEQ ID NO: 6670 - RNA, 21 nt, Artificial Sequence
  RPE65 RNA guide
cgugguucuccuaaagucuau

SEQ ID NO: 6671 - RNA, 21 nt, Artificial Sequence
  RPE65 RNA guide
cuuuaggagaaccacggaucu

SEQ ID NO: 6672 - RNA, 21 nt, Artificial Sequence
  RPE65 RNA guide
gaaccacggaucucuuuuaau

SEQ ID NO: 6673 - RNA, 21 nt, Artificial Sequence
  RPE65 RNA guide
gacuuuaggagaaccacggau

SEQ ID NO: 6674 - RNA, 21 nt, Artificial Sequence
  RPE65 RNA guide
gagaaccacggaucucuuuua

SEQ ID NO: 6675 - RNA, 21 nt, Artificial Sequence
  RPE65 RNA guide
gagauccgugguucuccuaaa

SEQ ID NO: 6676 - RNA, 21 nt, Artificial Sequence
  RPE65 RNA guide
gauccgugguucuccuaaagu

SEQ ID NO: 6677 - RNA, 21 nt, Artificial Sequence
  RPE65 RNA guide
ggagaaccacggaucucuuuu

SEQ ID NO: 6678 - RNA, 21 nt, Artificial Sequence
  RPE65 RNA guide
uaaaagagauccgugguucuc

SEQ ID NO: 6679 - RNA, 21 nt, Artificial Sequence
  RPE65 RNA guide
uaauuaaaagagauccguggu

SEQ ID NO: 6680 - RNA, 21 nt, Artificial Sequence
  RPE65 RNA guide
uagacuuuaggagaaccacgg

SEQ ID NO: 6681 - RNA, 21 nt, Artificial Sequence
  RPE65 RNA guide
uaggagaaccacggaucucuu

SEQ ID NO: 6682 - RNA, 21 nt, Artificial Sequence
  RPE65 RNA guide
uccgugguucuccuaaagucu

SEQ ID NO: 6683 - RNA, 21 nt, Artificial Sequence
  RPE65 RNA guide
uuaaaagagauccgugguucu

SEQ ID NO: 6684 - RNA, 21 nt, Artificial Sequence
  RPE65 RNA guide
uuaauuaaaagagauccgugg

SEQ ID NO: 6685 - RNA, 21 nt, Artificial Sequence
  RPE65 RNA guide
uuaggagaaccacggaucucu

SEQ ID NO: 6686 - RNA, 21 nt, Artificial Sequence
  RPE65 RNA guide
uuuaggagaaccacggaucuc

SEQ ID NO: 6687 - RNA, 22 nt, Artificial Sequence
  RPE65 RNA guide
aaaagagauccgugguucuccu

SEQ ID NO: 6688 - RNA, 22 nt, Artificial Sequence
  RPE65 RNA guide
aaagagauccgugguucuccua

SEQ ID NO: 6689 - RNA, 22 nt, Artificial Sequence
  RPE65 RNA guide
aaauagacuuuaggagaaccac

SEQ ID NO: 6690 - RNA, 22 nt, Artificial Sequence
  RPE65 RNA guide
aaccacggaucucuuuuaauua

SEQ ID NO: 6691 - RNA, 22 nt, Artificial Sequence
  RPE65 RNA guide
aagagauccgugguucuccuaa

SEQ ID NO: 6692 - RNA, 22 nt, Artificial Sequence
  RPE65 RNA guide
aauagacuuuaggagaaccacg

SEQ ID NO: 6693 - RNA, 22 nt, Artificial Sequence
  RPE65 RNA guide
aauuaaaagagauccgugguuc

SEQ ID NO: 6694 - RNA, 22 nt, Artificial Sequence
  RPE65 RNA guide
accacggaucucuuuuaauuaa

SEQ ID NO: 6695 - RNA, 22 nt, Artificial Sequence
  RPE65 RNA guide
acuuuaggagaaccacggaucu

SEQ ID NO: 6696 - RNA, 22 nt, Artificial Sequence
  RPE65 RNA guide
agaaccacggaucucuuuuaau

SEQ ID NO: 6697 - RNA, 22 nt, Artificial Sequence
  RPE65 RNA guide
agacuuuaggagaaccacggau

SEQ ID NO: 6698 - RNA, 22 nt, Artificial Sequence
  RPE65 RNA guide
agagauccgugguucuccuaaa

SEQ ID NO: 6699 - RNA, 22 nt, Artificial Sequence
  RPE65 RNA guide
agauccgugguucuccuaaagu

SEQ ID NO: 6700 - RNA, 22 nt, Artificial Sequence
  RPE65 RNA guide
aggagaaccacggaucucuuuu

SEQ ID NO: 6701 - RNA, 22 nt, Artificial Sequence
  RPE65 RNA guide
auagacuuuaggagaaccacgg

SEQ ID NO: 6702 - RNA, 22 nt, Artificial Sequence
  RPE65 RNA guide
auccgugguucuccuaaagucu

SEQ ID NO: 6703 - RNA, 22 nt, Artificial Sequence
  RPE65 RNA guide
auuaaaagagauccgugguucu

SEQ ID NO: 6704 - RNA, 22 nt, Artificial Sequence
  RPE65 RNA guide
ccacggaucucuuuuaauuaaa

SEQ ID NO: 6705 - RNA, 22 nt, Artificial Sequence
  RPE65 RNA guide
ccgugguucuccuaaagucuau

SEQ ID NO: 6706 - RNA, 22 nt, Artificial Sequence
  RPE65 RNA guide
cgugguucuccuaaagucuauu

SEQ ID NO: 6707 - RNA, 22 nt, Artificial Sequence
  RPE65 RNA guide
cuuuaggagaaccacggaucuc

SEQ ID NO: 6708 - RNA, 22 nt, Artificial Sequence
  RPE65 RNA guide
gaaccacggaucucuuuuaauu

SEQ ID NO: 6709 - RNA, 22 nt, Artificial Sequence
  RPE65 RNA guide
gacuuuaggagaaccacggauc

SEQ ID NO: 6710 - RNA, 22 nt, Artificial Sequence
  RPE65 RNA guide
gagaaccacggaucucuuuuaa

SEQ ID NO: 6711 - RNA, 22 nt, Artificial Sequence
  RPE65 RNA guide
gagauccgugguucuccuaaag

SEQ ID NO: 6712 - RNA, 22 nt, Artificial Sequence
  RPE65 RNA guide
gauccgugguucuccuaaaguc

SEQ ID NO: 6713 - RNA, 22 nt, Artificial Sequence
  RPE65 RNA guide
ggagaaccacggaucucuuuua

SEQ ID NO: 6714 - RNA, 22 nt, Artificial Sequence
  RPE65 RNA guide
uaaaagagauccgugguucucc

SEQ ID NO: 6715 - RNA, 22 nt, Artificial Sequence
  RPE65 RNA guide
uaauuaaaagagauccgugguu

SEQ ID NO: 6716 - RNA, 22 nt, Artificial Sequence
  RPE65 RNA guide
uagacuuuaggagaaccacgga

SEQ ID NO: 6717 - RNA, 22 nt, Artificial Sequence
  RPE65 RNA guide
uaggagaaccacggaucucuuu

SEQ ID NO: 6718 - RNA, 22 nt, Artificial Sequence
  RPE65 RNA guide
uccgugguucuccuaaagucua

SEQ ID NO: 6719 - RNA, 22 nt, Artificial Sequence
  RPE65 RNA guide
uuaaaagagauccgugguucuc

SEQ ID NO: 6720 - RNA, 22 nt, Artificial Sequence
  RPE65 RNA guide
uuaauuaaaagagauccguggu

SEQ ID NO: 6721 - RNA, 22 nt, Artificial Sequence
  RPE65 RNA guide
uuaggagaaccacggaucucuu

SEQ ID NO: 6722 - RNA, 22 nt, Artificial Sequence
  RPE65 RNA guide
uuuaauuaaaagagauccgugg

SEQ ID NO: 6723 - RNA, 22 nt, Artificial Sequence
  RPE65 RNA guide
uuuaggagaaccacggaucucu

SEQ ID NO: 6724 - RNA, 20 nt, Artificial Sequence
  RPE65 RNA guide
aaaucucccuaauuaauugg

SEQ ID NO: 6725 - RNA, 20 nt, Artificial Sequence
  RPE65 RNA guide
aaucucccuaauuaauugga

SEQ ID NO: 6726 - RNA, 20 nt, Artificial Sequence
  RPE65 RNA guide
aucucccuaauuaauuggaa

SEQ ID NO: 6727 - RNA, 20 nt, Artificial Sequence
  RPE65 RNA guide
auuuccaauuaauuagggag

SEQ ID NO: 6728 - RNA, 20 nt, Artificial Sequence
  RPE65 RNA guide
ccaauuaauuagggagauuu

SEQ ID NO: 6729 - RNA, 20 nt, Artificial Sequence
  RPE65 RNA guide
uccaauuaauuagggagauu

SEQ ID NO: 6730 - RNA, 20 nt, Artificial Sequence
  RPE65 RNA guide
ucucccuaauuaauuggaaa

SEQ ID NO: 6731 - RNA, 20 nt, Artificial Sequence
  RPE65 RNA guide
uuccaauuaauuagggagau

SEQ ID NO: 6732 - RNA, 20 nt, Artificial Sequence
  RPE65 RNA guide
uuuccaauuaauuagggaga

SEQ ID NO: 6733 - RNA, 20 nt, Artificial Sequence
  RPE65 RNA guide
aaaacucccuaauuaauugg

SEQ ID NO: 6734 - RNA, 20 nt, Artificial Sequence
  RPE65 RNA guide
aaacucccuaauuaauugga

SEQ ID NO: 6735 - RNA, 20 nt, Artificial Sequence
  RPE65 RNA guide
aacucccuaauuaauuggaa

SEQ ID NO: 6736 - RNA, 20 nt, Artificial Sequence
  RPE65 RNA guide
acucccuaauuaauuggaaa

SEQ ID NO: 6737 - RNA, 20 nt, Artificial Sequence
  RPE65 RNA guide
ccaauuaauuagggaguuuu

SEQ ID NO: 6738 - RNA, 20 nt, Artificial Sequence
  RPE65 RNA guide
uccaauuaauuagggaguuu

SEQ ID NO: 6739 - RNA, 20 nt, Artificial Sequence
  RPE65 RNA guide
uuccaauuaauuagggaguu

SEQ ID NO: 6740 - RNA, 20 nt, Artificial Sequence
  RPE65 RNA guide
uuuccaauuaauuagggagu

SEQ ID NO: 6741 - RNA, 20 nt, Artificial Sequence
  RPE65 RNA guide
aaagcauaggacauuuuagc

SEQ ID NO: 6742 - RNA, 20 nt, Artificial Sequence
  RPE65 RNA guide
aagcauaggacauuuuagca

SEQ ID NO: 6743 - RNA, 20 nt, Artificial Sequence
  RPE65 RNA guide
aagguugcuaaaauguccua

SEQ ID NO: 6744 - RNA, 20 nt, Artificial Sequence
  RPE65 RNA guide
aauaagguugcuaaaauguc

SEQ ID NO: 6745 - RNA, 20 nt, Artificial Sequence
  RPE65 RNA guide
agcauaggacauuuuagcaa

SEQ ID NO: 6746 - RNA, 20 nt, Artificial Sequence
  RPE65 RNA guide
aggacauuuuagcaaccuua

SEQ ID NO: 6747 - RNA, 20 nt, Artificial Sequence
  RPE65 RNA guide
agguugcuaaaauguccuau

SEQ ID NO: 6748 - RNA, 20 nt, Artificial Sequence
  RPE65 RNA guide
auaagguugcuaaaaugucc

SEQ ID NO: 6749 - RNA, 20 nt, Artificial Sequence
  RPE65 RNA guide
auaggacauuuuagcaaccu

SEQ ID NO: 6750 - RNA, 20 nt, Artificial Sequence
  RPE65 RNA guide
cauaggacauuuuagcaacc

SEQ ID NO: 6751 - RNA, 20 nt, Artificial Sequence
  RPE65 RNA guide
gacauuuuagcaaccuuauu

SEQ ID NO: 6752 - RNA, 20 nt, Artificial Sequence
  RPE65 RNA guide
gcauaggacauuuuagcaac

SEQ ID NO: 6753 - RNA, 20 nt, Artificial Sequence
  RPE65 RNA guide
ggacauuuuagcaaccuuau

SEQ ID NO: 6754 - RNA, 20 nt, Artificial Sequence
  RPE65 RNA guide
gguugcuaaaauguccuaug

SEQ ID NO: 6755 - RNA, 20 nt, Artificial Sequence
  RPE65 RNA guide
guugcuaaaauguccuaugc

SEQ ID NO: 6756 - RNA, 20 nt, Artificial Sequence
  RPE65 RNA guide
uaaagcauaggacauuuuag

SEQ ID NO: 6757 - RNA, 20 nt, Artificial Sequence
  RPE65 RNA guide
uaagguugcuaaaauguccu

SEQ ID NO: 6758 - RNA, 20 nt, Artificial Sequence
  RPE65 RNA guide
uaggacauuuuagcaaccuu

SEQ ID NO: 6759 - RNA, 21 nt, Artificial Sequence
  RPE65 RNA guide
aaagcauaggacauuuuagca

SEQ ID NO: 6760 - RNA, 21 nt, Artificial Sequence
  RPE65 RNA guide
aagcauaggacauuuuagcaa

SEQ ID NO: 6761 - RNA, 21 nt, Artificial Sequence
  RPE65 RNA guide
aagguugcuaaaauguccuau

SEQ ID NO: 6762 - RNA, 21 nt, Artificial Sequence
  RPE65 RNA guide
aauaagguugcuaaaaugucc

SEQ ID NO: 6763 - RNA, 21 nt, Artificial Sequence
  RPE65 RNA guide
agcauaggacauuuuagcaac

SEQ ID NO: 6764 - RNA, 21 nt, Artificial Sequence
  RPE65 RNA guide
aggacauuuuagcaaccuuau

SEQ ID NO: 6765 - RNA, 21 nt, Artificial Sequence
  RPE65 RNA guide
agguugcuaaaauguccuaug

SEQ ID NO: 6766 - RNA, 21 nt, Artificial Sequence
  RPE65 RNA guide
auaagguugcuaaaauguccu

SEQ ID NO: 6767 - RNA, 21 nt, Artificial Sequence
  RPE65 RNA guide
auaggacauuuuagcaaccuu

SEQ ID NO: 6768 - RNA, 21 nt, Artificial Sequence
  RPE65 RNA guide
cauaggacauuuuagcaaccu

SEQ ID NO: 6769 - RNA, 21 nt, Artificial Sequence
  RPE65 RNA guide
gcauaggacauuuuagcaacc

SEQ ID NO: 6770 - RNA, 21 nt, Artificial Sequence
  RPE65 RNA guide
ggacauuuuagcaaccuuauu

SEQ ID NO: 6771 - RNA, 21 nt, Artificial Sequence
  RPE65 RNA guide
gguugcuaaaauguccuaugc

SEQ ID NO: 6772 - RNA, 21 nt, Artificial Sequence
  RPE65 RNA guide
guugcuaaaauguccuaugcu

SEQ ID NO: 6773 - RNA, 21 nt, Artificial Sequence
  RPE65 RNA guide
uaaagcauaggacauuuuagc

SEQ ID NO: 6774 - RNA, 21 nt, Artificial Sequence
  RPE65 RNA guide
uaagguugcuaaaauguccua

SEQ ID NO: 6775 - RNA, 21 nt, Artificial Sequence
  RPE65 RNA guide
uaggacauuuuagcaaccuua

SEQ ID NO: 6776 - RNA, 22 nt, Artificial Sequence
  RPE65 RNA guide
aaagcauaggacauuuuagcaa

SEQ ID NO: 6777 - RNA, 22 nt, Artificial Sequence
  RPE65 RNA guide
aaauaagguugcuaaaaugucc

SEQ ID NO: 6778 - RNA, 22 nt, Artificial Sequence
  RPE65 RNA guide
aagcauaggacauuuuagcaac

SEQ ID NO: 6779 - RNA, 22 nt, Artificial Sequence
  RPE65 RNA guide
aagguugcuaaaauguccuaug

SEQ ID NO: 6780 - RNA, 22 nt, Artificial Sequence
  RPE65 RNA guide
aauaagguugcuaaaauguccu

SEQ ID NO: 6781 - RNA, 22 nt, Artificial Sequence
  RPE65 RNA guide
agcauaggacauuuuagcaacc

SEQ ID NO: 6782 - RNA, 22 nt, Artificial Sequence
  RPE65 RNA guide
aggacauuuuagcaaccuuauu

SEQ ID NO: 6783 - RNA, 22 nt, Artificial Sequence
  RPE65 RNA guide
agguugcuaaaauguccuaugc

SEQ ID NO: 6784 - RNA, 22 nt, Artificial Sequence
  RPE65 RNA guide
auaagguugcuaaaauguccua

SEQ ID NO: 6785 - RNA, 22 nt, Artificial Sequence
  RPE65 RNA guide
auaggacauuuuagcaaccuua

SEQ ID NO: 6786 - RNA, 22 nt, Artificial Sequence
  RPE65 RNA guide
cauaggacauuuuagcaaccuu

SEQ ID NO: 6787 - RNA, 22 nt, Artificial Sequence
  RPE65 RNA guide
gcauaggacauuuuagcaaccu

SEQ ID NO: 6788 - RNA, 22 nt, Artificial Sequence
  RPE65 RNA guide
ggacauuuuagcaaccuuauuu

SEQ ID NO: 6789 - RNA, 22 nt, Artificial Sequence
  RPE65 RNA guide
gguugcuaaaauguccuaugcu

SEQ ID NO: 6790 - RNA, 22 nt, Artificial Sequence
  RPE65 RNA guide
guugcuaaaauguccuaugcuu

SEQ ID NO: 6791 - RNA, 22 nt, Artificial Sequence
  RPE65 RNA guide
uaaagcauaggacauuuuagca

SEQ ID NO: 6792 - RNA, 22 nt, Artificial Sequence
  RPE65 RNA guide
uaagguugcuaaaauguccuau

SEQ ID NO: 6793 - RNA, 22 nt, Artificial Sequence
  RPE65 RNA guide
uaggacauuuuagcaaccuuau

SEQ ID NO: 6794 - RNA, 22 nt, Artificial Sequence
  RPE65 RNA guide
uuaaagcauaggacauuuuagc

SEQ ID NO: 6795 - RNA, 20 nt, Artificial Sequence
  RPE65 RNA guide
aaauaagggugcuaaaaugu

SEQ ID NO: 6796 - RNA, 20 nt, Artificial Sequence
  RPE65 RNA guide
aagggugcuaaaauguccua

SEQ ID NO: 6797 - RNA, 20 nt, Artificial Sequence
  RPE65 RNA guide
aauaagggugcuaaaauguc

SEQ ID NO: 6798 - RNA, 20 nt, Artificial Sequence
  RPE65 RNA guide
acauuuuagcacccuuauuu

SEQ ID NO: 6799 - RNA, 20 nt, Artificial Sequence
  RPE65 RNA guide
agcauaggacauuuuagcac

SEQ ID NO: 6800 - RNA, 20 nt, Artificial Sequence
  RPE65 RNA guide
aggacauuuuagcacccuua

SEQ ID NO: 6801 - RNA, 20 nt, Artificial Sequence
  RPE65 RNA guide
agggugcuaaaauguccuau

SEQ ID NO: 6802 - RNA, 20 nt, Artificial Sequence
  RPE65 RNA guide
auaagggugcuaaaaugucc

SEQ ID NO: 6803 - RNA, 20 nt, Artificial Sequence
  RPE65 RNA guide
auaggacauuuuagcacccu

SEQ ID NO: 6804 - RNA, 20 nt, Artificial Sequence
  RPE65 RNA guide
cauaggacauuuuagcaccc

SEQ ID NO: 6805 - RNA, 20 nt, Artificial Sequence
  RPE65 RNA guide
cauuuuagcacccuuauuua

SEQ ID NO: 6806 - RNA, 20 nt, Artificial Sequence
  RPE65 RNA guide
gacauuuuagcacccuuauu

SEQ ID NO: 6807 - RNA, 20 nt, Artificial Sequence
  RPE65 RNA guide
gcauaggacauuuuagcacc

SEQ ID NO: 6808 - RNA, 20 nt, Artificial Sequence
  RPE65 RNA guide
gccuauuauuuaaauaaggg

SEQ ID NO: 6809 - RNA, 20 nt, Artificial Sequence
  RPE65 RNA guide
ggacauuuuagcacccuuau

SEQ ID NO: 6810 - RNA, 20 nt, Artificial Sequence
  RPE65 RNA guide
gggugcuaaaauguccuaug

SEQ ID NO: 6811 - RNA, 20 nt, Artificial Sequence
  RPE65 RNA guide
ggugcuaaaauguccuaugc

SEQ ID NO: 6812 - RNA, 20 nt, Artificial Sequence
  RPE65 RNA guide
uaaauaagggugcuaaaaug

SEQ ID NO: 6813 - RNA, 20 nt, Artificial Sequence
  RPE65 RNA guide
uaagggugcuaaaauguccu

SEQ ID NO: 6814 - RNA, 20 nt, Artificial Sequence
  RPE65 RNA guide
uaggacauuuuagcacccuu

SEQ ID NO: 6815 - RNA, 21 nt, Artificial Sequence
  RPE65 RNA guide
aaauaagggugcuaaaauguc

SEQ ID NO: 6816 - RNA, 21 nt, Artificial Sequence
  RPE65 RNA guide
aagcauaggacauuuuagcac

SEQ ID NO: 6817 - RNA, 21 nt, Artificial Sequence
  RPE65 RNA guide
aagggugcuaaaauguccuau

SEQ ID NO: 6818 - RNA, 21 nt, Artificial Sequence
  RPE65 RNA guide
aauaagggugcuaaaaugucc

SEQ ID NO: 6819 - RNA, 21 nt, Artificial Sequence
  RPE65 RNA guide
agcauaggacauuuuagcacc

SEQ ID NO: 6820 - RNA, 21 nt, Artificial Sequence
  RPE65 RNA guide
aggacauuuuagcacccuuau

SEQ ID NO: 6821 - RNA, 21 nt, Artificial Sequence
  RPE65 RNA guide
agggugcuaaaauguccuaug

SEQ ID NO: 6822 - RNA, 21 nt, Artificial Sequence
  RPE65 RNA guide
auaagggugcuaaaauguccu

SEQ ID NO: 6823 - RNA, 21 nt, Artificial Sequence
  RPE65 RNA guide
auaggacauuuuagcacccuu

SEQ ID NO: 6824 - RNA, 21 nt, Artificial Sequence
  RPE65 RNA guide
cauaggacauuuuagcacccu

SEQ ID NO: 6825 - RNA, 21 nt, Artificial Sequence
  RPE65 RNA guide
gacauuuuagcacccuuauuu

SEQ ID NO: 6826 - RNA, 21 nt, Artificial Sequence
  RPE65 RNA guide
gcauaggacauuuuagcaccc

SEQ ID NO: 6827 - RNA, 21 nt, Artificial Sequence
  RPE65 RNA guide
ggacauuuuagcacccuuauu

SEQ ID NO: 6828 - RNA, 21 nt, Artificial Sequence
  RPE65 RNA guide
gggugcuaaaauguccuaugc

SEQ ID NO: 6829 - RNA, 21 nt, Artificial Sequence
  RPE65 RNA guide
ggugcuaaaauguccuaugcu

SEQ ID NO: 6830 - RNA, 21 nt, Artificial Sequence
  RPE65 RNA guide
uaagggugcuaaaauguccua

SEQ ID NO: 6831 - RNA, 21 nt, Artificial Sequence
  RPE65 RNA guide
uaggacauuuuagcacccuua

SEQ ID NO: 6832 - RNA, 22 nt, Artificial Sequence
  RPE65 RNA guide
aaagcauaggacauuuuagcac

SEQ ID NO: 6833 - RNA, 22 nt, Artificial Sequence
  RPE65 RNA guide
aaauaagggugcuaaaaugucc

SEQ ID NO: 6834 - RNA, 22 nt, Artificial Sequence
  RPE65 RNA guide
aagcauaggacauuuuagcacc

SEQ ID NO: 6835 - RNA, 22 nt, Artificial Sequence
  RPE65 RNA guide
aagggugcuaaaauguccuaug

SEQ ID NO: 6836 - RNA, 22 nt, Artificial Sequence
  RPE65 RNA guide
aauaagggugcuaaaauguccu

SEQ ID NO: 6837 - RNA, 22 nt, Artificial Sequence
  RPE65 RNA guide
agcauaggacauuuuagcaccc

SEQ ID NO: 6838 - RNA, 22 nt, Artificial Sequence
  RPE65 RNA guide
aggacauuuuagcacccuuauu

SEQ ID NO: 6839 - RNA, 22 nt, Artificial Sequence
  RPE65 RNA guide
agggugcuaaaauguccuaugc

SEQ ID NO: 6840 - RNA, 22 nt, Artificial Sequence
  RPE65 RNA guide
auaagggugcuaaaauguccua

SEQ ID NO: 6841 - RNA, 22 nt, Artificial Sequence
  RPE65 RNA guide
auaggacauuuuagcacccuua

SEQ ID NO: 6842 - RNA, 22 nt, Artificial Sequence
  RPE65 RNA guide
cacccuuauuuaaauaauaggc

SEQ ID NO: 6843 - RNA, 22 nt, Artificial Sequence
  RPE65 RNA guide
cauaggacauuuuagcacccuu

SEQ ID NO: 6844 - RNA, 22 nt, Artificial Sequence
  RPE65 RNA guide
ccuauuauuuaaauaagggugc

SEQ ID NO: 6845 - RNA, 22 nt, Artificial Sequence
  RPE65 RNA guide
gacauuuuagcacccuuauuua

SEQ ID NO: 6846 - RNA, 22 nt, Artificial Sequence
  RPE65 RNA guide
gcacccuuauuuaaauaauagg

SEQ ID NO: 6847 - RNA, 22 nt, Artificial Sequence
  RPE65 RNA guide
gcauaggacauuuuagcacccu

SEQ ID NO: 6848 - RNA, 22 nt, Artificial Sequence
  RPE65 RNA guide
gccuauuauuuaaauaagggug

SEQ ID NO: 6849 - RNA, 22 nt, Artificial Sequence
  RPE65 RNA guide
ggacauuuuagcacccuuauuu

SEQ ID NO: 6850 - RNA, 22 nt, Artificial Sequence
  RPE65 RNA guide
gggugcuaaaauguccuaugcu

SEQ ID NO: 6851 - RNA, 22 nt, Artificial Sequence
  RPE65 RNA guide
ggugcuaaaauguccuaugcuu

SEQ ID NO: 6852 - RNA, 22 nt, Artificial Sequence
  RPE65 RNA guide
uaaauaagggugcuaaaauguc

SEQ ID NO: 6853 - RNA, 22 nt, Artificial Sequence
  RPE65 RNA guide
uaagggugcuaaaauguccuau

SEQ ID NO: 6854 - RNA, 22 nt, Artificial Sequence
  RPE65 RNA guide
uaggacauuuuagcacccuuau

SEQ ID NO: 6855 - RNA, 20 nt, Artificial Sequence
  RPE65 RNA guide
aaaggagcuacacacacacu

SEQ ID NO: 6856 - RNA, 20 nt, Artificial Sequence
  RPE65 RNA guide
aaggagcuacacacacacuu

SEQ ID NO: 6857 - RNA, 20 nt, Artificial Sequence
  RPE65 RNA guide
aaguguguguguagcuccuu

SEQ ID NO: 6858 - RNA, 20 nt, Artificial Sequence
  RPE65 RNA guide
acaaguguguguguagcucc

SEQ ID NO: 6859 - RNA, 20 nt, Artificial Sequence
  RPE65 RNA guide
accauauacaagugugugug

SEQ ID NO: 6860 - RNA, 20 nt, Artificial Sequence
  RPE65 RNA guide
agcuacacacacacuuguau

SEQ ID NO: 6861 - RNA, 20 nt, Artificial Sequence
  RPE65 RNA guide
agcuccuuuagagaagaaca

SEQ ID NO: 6862 - RNA, 20 nt, Artificial Sequence
  RPE65 RNA guide
agcuuuuguucuucucuaaa

SEQ ID NO: 6863 - RNA, 20 nt, Artificial Sequence
  RPE65 RNA guide
aggagcuacacacacacuug

SEQ ID NO: 6864 - RNA, 20 nt, Artificial Sequence
  RPE65 RNA guide
aguguguguguagcuccuuu

SEQ ID NO: 6865 - RNA, 20 nt, Artificial Sequence
  RPE65 RNA guide
auacaaguguguguguagcu

SEQ ID NO: 6866 - RNA, 20 nt, Artificial Sequence
  RPE65 RNA guide
auauacaaguguguguguag

SEQ ID NO: 6867 - RNA, 20 nt, Artificial Sequence
  RPE65 RNA guide
caaguguguguguagcuccu

SEQ ID NO: 6868 - RNA, 20 nt, Artificial Sequence
  RPE65 RNA guide
cauauacaagugugugugua

SEQ ID NO: 6869 - RNA, 20 nt, Artificial Sequence
  RPE65 RNA guide
ccauauacaagugugugugu

SEQ ID NO: 6870 - RNA, 20 nt, Artificial Sequence
  RPE65 RNA guide
cuaaaggagcuacacacaca

SEQ ID NO: 6871 - RNA, 20 nt, Artificial Sequence
  RPE65 RNA guide
cucuaaaggagcuacacaca

SEQ ID NO: 6872 - RNA, 20 nt, Artificial Sequence
  RPE65 RNA guide
cuucucuaaaggagcuacac

SEQ ID NO: 6873 - RNA, 20 nt, Artificial Sequence
  RPE65 RNA guide
cuuuuguucuucucuaaagg

SEQ ID NO: 6874 - RNA, 20 nt, Artificial Sequence
  RPE65 RNA guide
gagcuacacacacacuugua

SEQ ID NO: 6875 - RNA, 20 nt, Artificial Sequence
  RPE65 RNA guide
gcuccuuuagagaagaacaa

SEQ ID NO: 6876 - RNA, 20 nt, Artificial Sequence
  RPE65 RNA guide
gcuuuuguucuucucuaaag

SEQ ID NO: 6877 - RNA, 20 nt, Artificial Sequence
  RPE65 RNA guide
ggagcuacacacacacuugu

SEQ ID NO: 6878 - RNA, 20 nt, Artificial Sequence
  RPE65 RNA guide
guagcuccuuuagagaagaa

SEQ ID NO: 6879 - RNA, 20 nt, Artificial Sequence
  RPE65 RNA guide
guguagcuccuuuagagaag

SEQ ID NO: 6880 - RNA, 20 nt, Artificial Sequence
  RPE65 RNA guide
guguguagcuccuuuagaga

SEQ ID NO: 6881 - RNA, 20 nt, Artificial Sequence
  RPE65 RNA guide
guguguguagcuccuuuaga

SEQ ID NO: 6882 - RNA, 20 nt, Artificial Sequence
  RPE65 RNA guide
guguguguguagcuccuuua

SEQ ID NO: 6883 - RNA, 20 nt, Artificial Sequence
  RPE65 RNA guide
guucuucucuaaaggagcua

SEQ ID NO: 6884 - RNA, 20 nt, Artificial Sequence
  RPE65 RNA guide
uaaaggagcuacacacacac

SEQ ID NO: 6885 - RNA, 20 nt, Artificial Sequence
  RPE65 RNA guide
uacaaguguguguguagcuc

SEQ ID NO: 6886 - RNA, 20 nt, Artificial Sequence
  RPE65 RNA guide
uagcuccuuuagagaagaac

SEQ ID NO: 6887 - RNA, 20 nt, Artificial Sequence
  RPE65 RNA guide
uauacaaguguguguguagc

SEQ ID NO: 6888 - RNA, 20 nt, Artificial Sequence
  RPE65 RNA guide
ucuaaaggagcuacacacac

SEQ ID NO: 6889 - RNA, 20 nt, Artificial Sequence
  RPE65 RNA guide
ucucuaaaggagcuacacac

SEQ ID NO: 6890 - RNA, 20 nt, Artificial Sequence
  RPE65 RNA guide
ucuucucuaaaggagcuaca

SEQ ID NO: 6891 - RNA, 20 nt, Artificial Sequence
  RPE65 RNA guide
uguagcuccuuuagagaaga

SEQ ID NO: 6892 - RNA, 20 nt, Artificial Sequence
  RPE65 RNA guide
uguguagcuccuuuagagaa

SEQ ID NO: 6893 - RNA, 20 nt, Artificial Sequence
  RPE65 RNA guide
uguguguagcuccuuuagag

SEQ ID NO: 6894 - RNA, 20 nt, Artificial Sequence
  RPE65 RNA guide
uguguguguagcuccuuuag

SEQ ID NO: 6895 - RNA, 20 nt, Artificial Sequence
  RPE65 RNA guide
uguucuucucuaaaggagcu

SEQ ID NO: 6896 - RNA, 20 nt, Artificial Sequence
  RPE65 RNA guide
uucucuaaaggagcuacaca

SEQ ID NO: 6897 - RNA, 20 nt, Artificial Sequence
  RPE65 RNA guide
uucuucucuaaaggagcuac

SEQ ID NO: 6898 - RNA, 20 nt, Artificial Sequence
  RPE65 RNA guide
uuguucuucucuaaaggagc

SEQ ID NO: 6899 - RNA, 20 nt, Artificial Sequence
  RPE65 RNA guide
uuuguucuucucuaaaggag

SEQ ID NO: 6900 - RNA, 20 nt, Artificial Sequence
  RPE65 RNA guide
uuuuguucuucucuaaagga

SEQ ID NO: 6901 - RNA, 21 nt, Artificial Sequence
  RPE65 RNA guide
aaaggagcuacacacacacuu

SEQ ID NO: 6902 - RNA, 21 nt, Artificial Sequence
  RPE65 RNA guide
aaccauauacaagugugugug

SEQ ID NO: 6903 - RNA, 21 nt, Artificial Sequence
  RPE65 RNA guide
aaggagcuacacacacacuug

SEQ ID NO: 6904 - RNA, 21 nt, Artificial Sequence
  RPE65 RNA guide
aaguguguguguagcuccuuu

SEQ ID NO: 6905 - RNA, 21 nt, Artificial Sequence
  RPE65 RNA guide
acaaguguguguguagcuccu

SEQ ID NO: 6906 - RNA, 21 nt, Artificial Sequence
  RPE65 RNA guide
accauauacaagugugugugu

SEQ ID NO: 6907 - RNA, 21 nt, Artificial Sequence
  RPE65 RNA guide
agcuacacacacacuuguaua

SEQ ID NO: 6908 - RNA, 21 nt, Artificial Sequence
  RPE65 RNA guide
agcuccuuuagagaagaacaa

SEQ ID NO: 6909 - RNA, 21 nt, Artificial Sequence
  RPE65 RNA guide
agcuuuuguucuucucuaaag

SEQ ID NO: 6910 - RNA, 21 nt, Artificial Sequence
  RPE65 RNA guide
aggagcuacacacacacuugu

SEQ ID NO: 6911 - RNA, 21 nt, Artificial Sequence
  RPE65 RNA guide
aguguguguguagcuccuuua

SEQ ID NO: 6912 - RNA, 21 nt, Artificial Sequence
  RPE65 RNA guide
auacaaguguguguguagcuc

SEQ ID NO: 6913 - RNA, 21 nt, Artificial Sequence
  RPE65 RNA guide
auauacaaguguguguguagc

SEQ ID NO: 6914 - RNA, 21 nt, Artificial Sequence
  RPE65 RNA guide
caaguguguguguagcuccuu

SEQ ID NO: 6915 - RNA, 21 nt, Artificial Sequence
  RPE65 RNA guide
cagcuuuuguucuucucuaaa

SEQ ID NO: 6916 - RNA, 21 nt, Artificial Sequence
  RPE65 RNA guide
cauauacaaguguguguguag

SEQ ID NO: 6917 - RNA, 21 nt, Artificial Sequence
  RPE65 RNA guide
ccauauacaagugugugugua

SEQ ID NO: 6918 - RNA, 21 nt, Artificial Sequence
  RPE65 RNA guide
cuaaaggagcuacacacacac

SEQ ID NO: 6919 - RNA, 21 nt, Artificial Sequence
  RPE65 RNA guide
cucuaaaggagcuacacacac

SEQ ID NO: 6920 - RNA, 21 nt, Artificial Sequence
  RPE65 RNA guide
cuucucuaaaggagcuacaca

SEQ ID NO: 6921 - RNA, 21 nt, Artificial Sequence
  RPE65 RNA guide
cuuuuguucuucucuaaagga

SEQ ID NO: 6922 - RNA, 21 nt, Artificial Sequence
  RPE65 RNA guide
gagcuacacacacacuuguau

SEQ ID NO: 6923 - RNA, 21 nt, Artificial Sequence
  RPE65 RNA guide
gcuccuuuagagaagaacaaa

SEQ ID NO: 6924 - RNA, 21 nt, Artificial Sequence
  RPE65 RNA guide
gcuuuuguucuucucuaaagg

SEQ ID NO: 6925 - RNA, 21 nt, Artificial Sequence
  RPE65 RNA guide
ggagcuacacacacacuugua

SEQ ID NO: 6926 - RNA, 21 nt, Artificial Sequence
  RPE65 RNA guide
guagcuccuuuagagaagaac

SEQ ID NO: 6927 - RNA, 21 nt, Artificial Sequence
  RPE65 RNA guide
guguagcuccuuuagagaaga

SEQ ID NO: 6928 - RNA, 21 nt, Artificial Sequence
  RPE65 RNA guide
guguguagcuccuuuagagaa

SEQ ID NO: 6929 - RNA, 21 nt, Artificial Sequence
  RPE65 RNA guide
guguguguagcuccuuuagag

SEQ ID NO: 6930 - RNA, 21 nt, Artificial Sequence
  RPE65 RNA guide
guguguguguagcuccuuuag

SEQ ID NO: 6931 - RNA, 21 nt, Artificial Sequence
  RPE65 RNA guide
guucuucucuaaaggagcuac

SEQ ID NO: 6932 - RNA, 21 nt, Artificial Sequence
  RPE65 RNA guide
uaaaggagcuacacacacacu

SEQ ID NO: 6933 - RNA, 21 nt, Artificial Sequence
  RPE65 RNA guide
uacaaguguguguguagcucc

SEQ ID NO: 6934 - RNA, 21 nt, Artificial Sequence
  RPE65 RNA guide
uagcuccuuuagagaagaaca

SEQ ID NO: 6935 - RNA, 21 nt, Artificial Sequence
  RPE65 RNA guide
uauacaaguguguguguagcu

SEQ ID NO: 6936 - RNA, 21 nt, Artificial Sequence
  RPE65 RNA guide
ucuaaaggagcuacacacaca

SEQ ID NO: 6937 - RNA, 21 nt, Artificial Sequence
  RPE65 RNA guide
ucucuaaaggagcuacacaca

SEQ ID NO: 6938 - RNA, 21 nt, Artificial Sequence
  RPE65 RNA guide
ucuucucuaaaggagcuacac

SEQ ID NO: 6939 - RNA, 21 nt, Artificial Sequence
  RPE65 RNA guide
uguagcuccuuuagagaagaa

SEQ ID NO: 6940 - RNA, 21 nt, Artificial Sequence
  RPE65 RNA guide
uguguagcuccuuuagagaag

SEQ ID NO: 6941 - RNA, 21 nt, Artificial Sequence
  RPE65 RNA guide
uguguguagcuccuuuagaga

SEQ ID NO: 6942 - RNA, 21 nt, Artificial Sequence
  RPE65 RNA guide
uguguguguagcuccuuuaga

SEQ ID NO: 6943 - RNA, 21 nt, Artificial Sequence
  RPE65 RNA guide
uguucuucucuaaaggagcua

SEQ ID NO: 6944 - RNA, 21 nt, Artificial Sequence
  RPE65 RNA guide
uucucuaaaggagcuacacac

SEQ ID NO: 6945 - RNA, 21 nt, Artificial Sequence
  RPE65 RNA guide
uucuucucuaaaggagcuaca

SEQ ID NO: 6946 - RNA, 21 nt, Artificial Sequence
  RPE65 RNA guide
uuguucuucucuaaaggagcu

SEQ ID NO: 6947 - RNA, 21 nt, Artificial Sequence
  RPE65 RNA guide
uuuguucuucucuaaaggagc

SEQ ID NO: 6948 - RNA, 21 nt, Artificial Sequence
  RPE65 RNA guide
uuuuguucuucucuaaaggag

SEQ ID NO: 6949 - RNA, 22 nt, Artificial Sequence
  RPE65 RNA guide
aaaggagcuacacacacacuug

SEQ ID NO: 6950 - RNA, 22 nt, Artificial Sequence
  RPE65 RNA guide
aaccauauacaagugugugugu

SEQ ID NO: 6951 - RNA, 22 nt, Artificial Sequence
  RPE65 RNA guide
aaggagcuacacacacacuugu

SEQ ID NO: 6952 - RNA, 22 nt, Artificial Sequence
  RPE65 RNA guide
aaguguguguguagcuccuuua

SEQ ID NO: 6953 - RNA, 22 nt, Artificial Sequence
  RPE65 RNA guide
acaaguguguguguagcuccuu

SEQ ID NO: 6954 - RNA, 22 nt, Artificial Sequence
  RPE65 RNA guide
accauauacaagugugugugua

SEQ ID NO: 6955 - RNA, 22 nt, Artificial Sequence
  RPE65 RNA guide
agcuacacacacacuuguauau

SEQ ID NO: 6956 - RNA, 22 nt, Artificial Sequence
  RPE65 RNA guide
agcuccuuuagagaagaacaaa

SEQ ID NO: 6957 - RNA, 22 nt, Artificial Sequence
  RPE65 RNA guide
agcuuuuguucuucucuaaagg

SEQ ID NO: 6958 - RNA, 22 nt, Artificial Sequence
  RPE65 RNA guide
aggagcuacacacacacuugua

SEQ ID NO: 6959 - RNA, 22 nt, Artificial Sequence
  RPE65 RNA guide
aguguguguguagcuccuuuag

SEQ ID NO: 6960 - RNA, 22 nt, Artificial Sequence
  RPE65 RNA guide
auacaaguguguguguagcucc

SEQ ID NO: 6961 - RNA, 22 nt, Artificial Sequence
  RPE65 RNA guide
auauacaaguguguguguagcu

SEQ ID NO: 6962 - RNA, 22 nt, Artificial Sequence
  RPE65 RNA guide
caaguguguguguagcuccuuu

SEQ ID NO: 6963 - RNA, 22 nt, Artificial Sequence
  RPE65 RNA guide
cagcuuuuguucuucucuaaag

SEQ ID NO: 6964 - RNA, 22 nt, Artificial Sequence
  RPE65 RNA guide
cauauacaaguguguguguagc

SEQ ID NO: 6965 - RNA, 22 nt, Artificial Sequence
  RPE65 RNA guide
ccauauacaaguguguguguag

SEQ ID NO: 6966 - RNA, 22 nt, Artificial Sequence
  RPE65 RNA guide
cuaaaggagcuacacacacacu

SEQ ID NO: 6967 - RNA, 22 nt, Artificial Sequence
  RPE65 RNA guide
cucuaaaggagcuacacacaca

SEQ ID NO: 6968 - RNA, 22 nt, Artificial Sequence
  RPE65 RNA guide
cuucucuaaaggagcuacacac

SEQ ID NO: 6969 - RNA, 22 nt, Artificial Sequence
  RPE65 RNA guide
cuuuuguucuucucuaaaggag

SEQ ID NO: 6970 - RNA, 22 nt, Artificial Sequence
  RPE65 RNA guide
gagcuacacacacacuuguaua

SEQ ID NO: 6971 - RNA, 22 nt, Artificial Sequence
  RPE65 RNA guide
gcuccuuuagagaagaacaaaa

SEQ ID NO: 6972 - RNA, 22 nt, Artificial Sequence
  RPE65 RNA guide
gcuuuuguucuucucuaaagga

SEQ ID NO: 6973 - RNA, 22 nt, Artificial Sequence
  RPE65 RNA guide
ggagcuacacacacacuuguau

SEQ ID NO: 6974 - RNA, 22 nt, Artificial Sequence
  RPE65 RNA guide
guagcuccuuuagagaagaaca

SEQ ID NO: 6975 - RNA, 22 nt, Artificial Sequence
  RPE65 RNA guide
guguagcuccuuuagagaagaa

SEQ ID NO: 6976 - RNA, 22 nt, Artificial Sequence
  RPE65 RNA guide
guguguagcuccuuuagagaag

SEQ ID NO: 6977 - RNA, 22 nt, Artificial Sequence
  RPE65 RNA guide
guguguguagcuccuuuagaga

SEQ ID NO: 6978 - RNA, 22 nt, Artificial Sequence
  RPE65 RNA guide
guguguguguagcuccuuuaga

SEQ ID NO: 6979 - RNA, 22 nt, Artificial Sequence
  RPE65 RNA guide
guucuucucuaaaggagcuaca

SEQ ID NO: 6980 - RNA, 22 nt, Artificial Sequence
  RPE65 RNA guide
uaaaggagcuacacacacacuu

SEQ ID NO: 6981 - RNA, 22 nt, Artificial Sequence
  RPE65 RNA guide
uaaccauauacaagugugugug

SEQ ID NO: 6982 - RNA, 22 nt, Artificial Sequence
  RPE65 RNA guide
uacaaguguguguguagcuccu

SEQ ID NO: 6983 - RNA, 22 nt, Artificial Sequence
  RPE65 RNA guide
uagcuccuuuagagaagaacaa

SEQ ID NO: 6984 - RNA, 22 nt, Artificial Sequence
  RPE65 RNA guide
uauacaaguguguguguagcuc

SEQ ID NO: 6985 - RNA, 22 nt, Artificial Sequence
  RPE65 RNA guide
ucagcuuuuguucuucucuaaa

SEQ ID NO: 6986 - RNA, 22 nt, Artificial Sequence
  RPE65 RNA guide
ucuaaaggagcuacacacacac

SEQ ID NO: 6987 - RNA, 22 nt, Artificial Sequence
  RPE65 RNA guide
ucucuaaaggagcuacacacac

SEQ ID NO: 6988 - RNA, 22 nt, Artificial Sequence
  RPE65 RNA guide
ucuucucuaaaggagcuacaca

SEQ ID NO: 6989 - RNA, 22 nt, Artificial Sequence
  RPE65 RNA guide
uguagcuccuuuagagaagaac

SEQ ID NO: 6990 - RNA, 22 nt, Artificial Sequence
  RPE65 RNA guide
uguguagcuccuuuagagaaga

SEQ ID NO: 6991 - RNA, 22 nt, Artificial Sequence
  RPE65 RNA guide
uguguguagcuccuuuagagaa

SEQ ID NO: 6992 - RNA, 22 nt, Artificial Sequence
  RPE65 RNA guide
uguguguguagcuccuuuagag

SEQ ID NO: 6993 - RNA, 22 nt, Artificial Sequence
  RPE65 RNA guide
uguucuucucuaaaggagcuac

SEQ ID NO: 6994 - RNA, 22 nt, Artificial Sequence
  RPE65 RNA guide
uucucuaaaggagcuacacaca

SEQ ID NO: 6995 - RNA, 22 nt, Artificial Sequence
  RPE65 RNA guide
uucuucucuaaaggagcuacac

SEQ ID NO: 6996 - RNA, 22 nt, Artificial Sequence
  RPE65 RNA guide
uuguucuucucuaaaggagcua

SEQ ID NO: 6997 - RNA, 22 nt, Artificial Sequence
  RPE65 RNA guide
uuuguucuucucuaaaggagcu

SEQ ID NO: 6998 - RNA, 22 nt, Artificial Sequence
  RPE65 RNA guide
uuuuguucuucucuaaaggagc

SEQ ID NO: 6999 - RNA, 20 nt, Artificial Sequence
  RPE65 RNA guide
aaaggaacuacacacacacu

SEQ ID NO: 7000 - RNA, 20 nt, Artificial Sequence
  RPE65 RNA guide
aacuacacacacacuuguau

SEQ ID NO: 7001 - RNA, 20 nt, Artificial Sequence
  RPE65 RNA guide
aaggaacuacacacacacuu

SEQ ID NO: 7002 - RNA, 20 nt, Artificial Sequence
  RPE65 RNA guide
aaguguguguguaguuccuu

SEQ ID NO: 7003 - RNA, 20 nt, Artificial Sequence
  RPE65 RNA guide
acaaguguguguguaguucc

SEQ ID NO: 7004 - RNA, 20 nt, Artificial Sequence
  RPE65 RNA guide
aggaacuacacacacacuug

SEQ ID NO: 7005 - RNA, 20 nt, Artificial Sequence
  RPE65 RNA guide
aguguguguguaguuccuuu

SEQ ID NO: 7006 - RNA, 20 nt, Artificial Sequence
  RPE65 RNA guide
aguuccuuuagagaagaaca

SEQ ID NO: 7007 - RNA, 20 nt, Artificial Sequence
  RPE65 RNA guide
auacaaguguguguguaguu

SEQ ID NO: 7008 - RNA, 20 nt, Artificial Sequence
  RPE65 RNA guide
caaguguguguguaguuccu

SEQ ID NO: 7009 - RNA, 20 nt, Artificial Sequence
  RPE65 RNA guide
cuaaaggaacuacacacaca

SEQ ID NO: 7010 - RNA, 20 nt, Artificial Sequence
  RPE65 RNA guide
cucuaaaggaacuacacaca

SEQ ID NO: 7011 - RNA, 20 nt, Artificial Sequence
  RPE65 RNA guide
cuucucuaaaggaacuacac

SEQ ID NO: 7012 - RNA, 20 nt, Artificial Sequence
  RPE65 RNA guide
gaacuacacacacacuugua

SEQ ID NO: 7013 - RNA, 20 nt, Artificial Sequence
  RPE65 RNA guide
ggaacuacacacacacuugu

SEQ ID NO: 7014 - RNA, 20 nt, Artificial Sequence
  RPE65 RNA guide
guaguuccuuuagagaagaa

SEQ ID NO: 7015 - RNA, 20 nt, Artificial Sequence
  RPE65 RNA guide
guguaguuccuuuagagaag

SEQ ID NO: 7016 - RNA, 20 nt, Artificial Sequence
  RPE65 RNA guide
guguguaguuccuuuagaga

SEQ ID NO: 7017 - RNA, 20 nt, Artificial Sequence
  RPE65 RNA guide
guguguguaguuccuuuaga

SEQ ID NO: 7018 - RNA, 20 nt, Artificial Sequence
  RPE65 RNA guide
guguguguguaguuccuuua

SEQ ID NO: 7019 - RNA, 20 nt, Artificial Sequence
  RPE65 RNA guide
guuccuuuagagaagaacaa

SEQ ID NO: 7020 - RNA, 20 nt, Artificial Sequence
  RPE65 RNA guide
guucuucucuaaaggaacua

SEQ ID NO: 7021 - RNA, 20 nt, Artificial Sequence
  RPE65 RNA guide
uaaaggaacuacacacacac

SEQ ID NO: 7022 - RNA, 20 nt, Artificial Sequence
  RPE65 RNA guide
uacaaguguguguguaguuc

SEQ ID NO: 7023 - RNA, 20 nt, Artificial Sequence
  RPE65 RNA guide
uaguuccuuuagagaagaac

SEQ ID NO: 7024 - RNA, 20 nt, Artificial Sequence
  RPE65 RNA guide
uauacaaguguguguguagu

SEQ ID NO: 7025 - RNA, 20 nt, Artificial Sequence
  RPE65 RNA guide
ucuaaaggaacuacacacac

SEQ ID NO: 7026 - RNA, 20 nt, Artificial Sequence
  RPE65 RNA guide
ucucuaaaggaacuacacac

SEQ ID NO: 7027 - RNA, 20 nt, Artificial Sequence
  RPE65 RNA guide
ucuucucuaaaggaacuaca

SEQ ID NO: 7028 - RNA, 20 nt, Artificial Sequence
  RPE65 RNA guide
uguaguuccuuuagagaaga

SEQ ID NO: 7029 - RNA, 20 nt, Artificial Sequence
  RPE65 RNA guide
uguguaguuccuuuagagaa

SEQ ID NO: 7030 - RNA, 20 nt, Artificial Sequence
  RPE65 RNA guide
uguguguaguuccuuuagag

SEQ ID NO: 7031 - RNA, 20 nt, Artificial Sequence
  RPE65 RNA guide
uguguguguaguuccuuuag

SEQ ID NO: 7032 - RNA, 20 nt, Artificial Sequence
  RPE65 RNA guide
uguucuucucuaaaggaacu

SEQ ID NO: 7033 - RNA, 20 nt, Artificial Sequence
  RPE65 RNA guide
uucucuaaaggaacuacaca

SEQ ID NO: 7034 - RNA, 20 nt, Artificial Sequence
  RPE65 RNA guide
uucuucucuaaaggaacuac

SEQ ID NO: 7035 - RNA, 20 nt, Artificial Sequence
  RPE65 RNA guide
uuguucuucucuaaaggaac

SEQ ID NO: 7036 - RNA, 20 nt, Artificial Sequence
  RPE65 RNA guide
uuuguucuucucuaaaggaa

SEQ ID NO: 7037 - RNA, 21 nt, Artificial Sequence
  RPE65 RNA guide
aaaggaacuacacacacacuu

SEQ ID NO: 7038 - RNA, 21 nt, Artificial Sequence
  RPE65 RNA guide
aacuacacacacacuuguaua

SEQ ID NO: 7039 - RNA, 21 nt, Artificial Sequence
  RPE65 RNA guide
aaggaacuacacacacacuug

SEQ ID NO: 7040 - RNA, 21 nt, Artificial Sequence
  RPE65 RNA guide
aaguguguguguaguuccuuu

SEQ ID NO: 7041 - RNA, 21 nt, Artificial Sequence
  RPE65 RNA guide
acaaguguguguguaguuccu

SEQ ID NO: 7042 - RNA, 21 nt, Artificial Sequence
  RPE65 RNA guide
aggaacuacacacacacuugu

SEQ ID NO: 7043 - RNA, 21 nt, Artificial Sequence
  RPE65 RNA guide
aguguguguguaguuccuuua

SEQ ID NO: 7044 - RNA, 21 nt, Artificial Sequence
  RPE65 RNA guide
aguuccuuuagagaagaacaa

SEQ ID NO: 7045 - RNA, 21 nt, Artificial Sequence
  RPE65 RNA guide
auacaaguguguguguaguuc

SEQ ID NO: 7046 - RNA, 21 nt, Artificial Sequence
  RPE65 RNA guide
auauacaaguguguguguagu

SEQ ID NO: 7047 - RNA, 21 nt, Artificial Sequence
  RPE65 RNA guide
caaguguguguguaguuccuu

SEQ ID NO: 7048 - RNA, 21 nt, Artificial Sequence
  RPE65 RNA guide
cuaaaggaacuacacacacac

SEQ ID NO: 7049 - RNA, 21 nt, Artificial Sequence
  RPE65 RNA guide
cucuaaaggaacuacacacac

SEQ ID NO: 7050 - RNA, 21 nt, Artificial Sequence
  RPE65 RNA guide
cuucucuaaaggaacuacaca

SEQ ID NO: 7051 - RNA, 21 nt, Artificial Sequence
  RPE65 RNA guide
gaacuacacacacacuuguau

SEQ ID NO: 7052 - RNA, 21 nt, Artificial Sequence
  RPE65 RNA guide
ggaacuacacacacacuugua

SEQ ID NO: 7053 - RNA, 21 nt, Artificial Sequence
  RPE65 RNA guide
guaguuccuuuagagaagaac

SEQ ID NO: 7054 - RNA, 21 nt, Artificial Sequence
  RPE65 RNA guide
guguaguuccuuuagagaaga

SEQ ID NO: 7055 - RNA, 21 nt, Artificial Sequence
  RPE65 RNA guide
guguguaguuccuuuagagaa

SEQ ID NO: 7056 - RNA, 21 nt, Artificial Sequence
  RPE65 RNA guide
guguguguaguuccuuuagag

SEQ ID NO: 7057 - RNA, 21 nt, Artificial Sequence
  RPE65 RNA guide
guguguguguaguuccuuuag

SEQ ID NO: 7058 - RNA, 21 nt, Artificial Sequence
  RPE65 RNA guide
guuccuuuagagaagaacaaa

SEQ ID NO: 7059 - RNA, 21 nt, Artificial Sequence
  RPE65 RNA guide
guucuucucuaaaggaacuac

SEQ ID NO: 7060 - RNA, 21 nt, Artificial Sequence
  RPE65 RNA guide
uaaaggaacuacacacacacu

SEQ ID NO: 7061 - RNA, 21 nt, Artificial Sequence
  RPE65 RNA guide
uacaaguguguguguaguucc

SEQ ID NO: 7062 - RNA, 21 nt, Artificial Sequence
  RPE65 RNA guide
uaguuccuuuagagaagaaca

SEQ ID NO: 7063 - RNA, 21 nt, Artificial Sequence
  RPE65 RNA guide
uauacaaguguguguguaguu

SEQ ID NO: 7064 - RNA, 21 nt, Artificial Sequence
  RPE65 RNA guide
ucuaaaggaacuacacacaca

SEQ ID NO: 7065 - RNA, 21 nt, Artificial Sequence
  RPE65 RNA guide
ucucuaaaggaacuacacaca

SEQ ID NO: 7066 - RNA, 21 nt, Artificial Sequence
  RPE65 RNA guide
ucuucucuaaaggaacuacac

SEQ ID NO: 7067 - RNA, 21 nt, Artificial Sequence
  RPE65 RNA guide
uguaguuccuuuagagaagaa

SEQ ID NO: 7068 - RNA, 21 nt, Artificial Sequence
  RPE65 RNA guide
uguguaguuccuuuagagaag

SEQ ID NO: 7069 - RNA, 21 nt, Artificial Sequence
  RPE65 RNA guide
uguguguaguuccuuuagaga

SEQ ID NO: 7070 - RNA, 21 nt, Artificial Sequence
  RPE65 RNA guide
uguguguguaguuccuuuaga

SEQ ID NO: 7071 - RNA, 21 nt, Artificial Sequence
  RPE65 RNA guide
uguucuucucuaaaggaacua

SEQ ID NO: 7072 - RNA, 21 nt, Artificial Sequence
  RPE65 RNA guide
uucucuaaaggaacuacacac

SEQ ID NO: 7073 - RNA, 21 nt, Artificial Sequence
  RPE65 RNA guide
uucuucucuaaaggaacuaca

SEQ ID NO: 7074 - RNA, 21 nt, Artificial Sequence
  RPE65 RNA guide
uuguucuucucuaaaggaacu

SEQ ID NO: 7075 - RNA, 21 nt, Artificial Sequence
  RPE65 RNA guide
uuuguucuucucuaaaggaac

SEQ ID NO: 7076 - RNA, 22 nt, Artificial Sequence
  RPE65 RNA guide
aaaggaacuacacacacacuug

SEQ ID NO: 7077 - RNA, 22 nt, Artificial Sequence
  RPE65 RNA guide
aacuacacacacacuuguauau

SEQ ID NO: 7078 - RNA, 22 nt, Artificial Sequence
  RPE65 RNA guide
aaggaacuacacacacacuugu

SEQ ID NO: 7079 - RNA, 22 nt, Artificial Sequence
  RPE65 RNA guide
aaguguguguguaguuccuuua

SEQ ID NO: 7080 - RNA, 22 nt, Artificial Sequence
  RPE65 RNA guide
acaaguguguguguaguuccuu

SEQ ID NO: 7081 - RNA, 22 nt, Artificial Sequence
  RPE65 RNA guide
aggaacuacacacacacuugua

SEQ ID NO: 7082 - RNA, 22 nt, Artificial Sequence
  RPE65 RNA guide
aguguguguguaguuccuuuag

SEQ ID NO: 7083 - RNA, 22 nt, Artificial Sequence
  RPE65 RNA guide
aguuccuuuagagaagaacaaa

SEQ ID NO: 7084 - RNA, 22 nt, Artificial Sequence
  RPE65 RNA guide
auacaaguguguguguaguucc

SEQ ID NO: 7085 - RNA, 22 nt, Artificial Sequence
  RPE65 RNA guide
auauacaaguguguguguaguu

SEQ ID NO: 7086 - RNA, 22 nt, Artificial Sequence
  RPE65 RNA guide
caaguguguguguaguuccuuu

SEQ ID NO: 7087 - RNA, 22 nt, Artificial Sequence
  RPE65 RNA guide
cauauacaaguguguguguagu

SEQ ID NO: 7088 - RNA, 22 nt, Artificial Sequence
  RPE65 RNA guide
cuaaaggaacuacacacacacu

SEQ ID NO: 7089 - RNA, 22 nt, Artificial Sequence
  RPE65 RNA guide
cucuaaaggaacuacacacaca

SEQ ID NO: 7090 - RNA, 22 nt, Artificial Sequence
  RPE65 RNA guide
cuucucuaaaggaacuacacac

SEQ ID NO: 7091 - RNA, 22 nt, Artificial Sequence
  RPE65 RNA guide
cuuuuguucuucucuaaaggaa

SEQ ID NO: 7092 - RNA, 22 nt, Artificial Sequence
  RPE65 RNA guide
gaacuacacacacacuuguaua

SEQ ID NO: 7093 - RNA, 22 nt, Artificial Sequence
  RPE65 RNA guide
ggaacuacacacacacuuguau

SEQ ID NO: 7094 - RNA, 22 nt, Artificial Sequence
  RPE65 RNA guide
guaguuccuuuagagaagaaca

SEQ ID NO: 7095 - RNA, 22 nt, Artificial Sequence
  RPE65 RNA guide
guguaguuccuuuagagaagaa

SEQ ID NO: 7096 - RNA, 22 nt, Artificial Sequence
  RPE65 RNA guide
guguguaguuccuuuagagaag

SEQ ID NO: 7097 - RNA, 22 nt, Artificial Sequence
  RPE65 RNA guide
guguguguaguuccuuuagaga

SEQ ID NO: 7098 - RNA, 22 nt, Artificial Sequence
  RPE65 RNA guide
guguguguguaguuccuuuaga

SEQ ID NO: 7099 - RNA, 22 nt, Artificial Sequence
  RPE65 RNA guide
guuccuuuagagaagaacaaaa

SEQ ID NO: 7100 - RNA, 22 nt, Artificial Sequence
  RPE65 RNA guide
guucuucucuaaaggaacuaca

SEQ ID NO: 7101 - RNA, 22 nt, Artificial Sequence
  RPE65 RNA guide
uaaaggaacuacacacacacuu

SEQ ID NO: 7102 - RNA, 22 nt, Artificial Sequence
  RPE65 RNA guide
uacaaguguguguguaguuccu

SEQ ID NO: 7103 - RNA, 22 nt, Artificial Sequence
  RPE65 RNA guide
uaguuccuuuagagaagaacaa

SEQ ID NO: 7104 - RNA, 22 nt, Artificial Sequence
  RPE65 RNA guide
uauacaaguguguguguaguuc

SEQ ID NO: 7105 - RNA, 22 nt, Artificial Sequence
  RPE65 RNA guide
ucuaaaggaacuacacacacac

SEQ ID NO: 7106 - RNA, 22 nt, Artificial Sequence
  RPE65 RNA guide
ucucuaaaggaacuacacacac

SEQ ID NO: 7107 - RNA, 22 nt, Artificial Sequence
  RPE65 RNA guide
ucuucucuaaaggaacuacaca

SEQ ID NO: 7108 - RNA, 22 nt, Artificial Sequence
  RPE65 RNA guide
uguaguuccuuuagagaagaac

SEQ ID NO: 7109 - RNA, 22 nt, Artificial Sequence
  RPE65 RNA guide
uguguaguuccuuuagagaaga

SEQ ID NO: 7110 - RNA, 22 nt, Artificial Sequence
  RPE65 RNA guide
uguguguaguuccuuuagagaa

SEQ ID NO: 7111 - RNA, 22 nt, Artificial Sequence
  RPE65 RNA guide
uguguguguaguuccuuuagag

SEQ ID NO: 7112 - RNA, 22 nt, Artificial Sequence
  RPE65 RNA guide
uguucuucucuaaaggaacuac

SEQ ID NO: 7113 - RNA, 22 nt, Artificial Sequence
  RPE65 RNA guide
uucucuaaaggaacuacacaca

SEQ ID NO: 7114 - RNA, 22 nt, Artificial Sequence
  RPE65 RNA guide
uucuucucuaaaggaacuacac

SEQ ID NO: 7115 - RNA, 22 nt, Artificial Sequence
  RPE65 RNA guide
uuguucuucucuaaaggaacua

SEQ ID NO: 7116 - RNA, 22 nt, Artificial Sequence
  RPE65 RNA guide
uuuguucuucucuaaaggaacu

SEQ ID NO: 7117 - RNA, 22 nt, Artificial Sequence
  RPE65 RNA guide
uuuuguucuucucuaaaggaac

SEQ ID NO: 7118 - RNA, 20 nt, Artificial Sequence
  RPE65 RNA guide
aaccauauacaagugugugu

SEQ ID NO: 7119 - RNA, 20 nt, Artificial Sequence
  RPE65 RNA guide
acacacacacuuguauaugg

SEQ ID NO: 7120 - RNA, 20 nt, Artificial Sequence
  RPE65 RNA guide
acacacacuuguauaugguu

SEQ ID NO: 7121 - RNA, 20 nt, Artificial Sequence
  RPE65 RNA guide
acacacuuguauaugguuac

SEQ ID NO: 7122 - RNA, 20 nt, Artificial Sequence
  RPE65 RNA guide
acacuuguauaugguuacac

SEQ ID NO: 7123 - RNA, 20 nt, Artificial Sequence
  RPE65 RNA guide
acuuguauaugguuacacac

SEQ ID NO: 7124 - RNA, 20 nt, Artificial Sequence
  RPE65 RNA guide
auaugguuacacacacacaa

SEQ ID NO: 7125 - RNA, 20 nt, Artificial Sequence
  RPE65 RNA guide
auguuguguguguguaacca

SEQ ID NO: 7126 - RNA, 20 nt, Artificial Sequence
  RPE65 RNA guide
cacacacacuuguauauggu

SEQ ID NO: 7127 - RNA, 20 nt, Artificial Sequence
  RPE65 RNA guide
cacacacuuguauaugguua

SEQ ID NO: 7128 - RNA, 20 nt, Artificial Sequence
  RPE65 RNA guide
cacacuuguauaugguuaca

SEQ ID NO: 7129 - RNA, 20 nt, Artificial Sequence
  RPE65 RNA guide
cacuuguauaugguuacaca

SEQ ID NO: 7130 - RNA, 20 nt, Artificial Sequence
  RPE65 RNA guide
cuacacacacacuuguauau

SEQ ID NO: 7131 - RNA, 20 nt, Artificial Sequence
  RPE65 RNA guide
cuuguauaugguuacacaca

SEQ ID NO: 7132 - RNA, 20 nt, Artificial Sequence
  RPE65 RNA guide
gcuacacacacacuuguaua

SEQ ID NO: 7133 - RNA, 20 nt, Artificial Sequence
  RPE65 RNA guide
guaaccauauacaagugugu

SEQ ID NO: 7134 - RNA, 20 nt, Artificial Sequence
  RPE65 RNA guide
guauaugguuacacacacac

SEQ ID NO: 7135 - RNA, 20 nt, Artificial Sequence
  RPE65 RNA guide
guguaaccauauacaagugu

SEQ ID NO: 7136 - RNA, 20 nt, Artificial Sequence
  RPE65 RNA guide
guguguaaccauauacaagu

SEQ ID NO: 7137 - RNA, 20 nt, Artificial Sequence
  RPE65 RNA guide
guguguguaaccauauacaa

SEQ ID NO: 7138 - RNA, 20 nt, Artificial Sequence
  RPE65 RNA guide
guguguguguaaccauauac

SEQ ID NO: 7139 - RNA, 20 nt, Artificial Sequence
  RPE65 RNA guide
guuguguguguguaaccaua

SEQ ID NO: 7140 - RNA, 20 nt, Artificial Sequence
  RPE65 RNA guide
uaaccauauacaagugugug

SEQ ID NO: 7141 - RNA, 20 nt, Artificial Sequence
  RPE65 RNA guide
uacacacacacuuguauaug

SEQ ID NO: 7142 - RNA, 20 nt, Artificial Sequence
  RPE65 RNA guide
uauaugguuacacacacaca

SEQ ID NO: 7143 - RNA, 20 nt, Artificial Sequence
  RPE65 RNA guide
uauguuguguguguguaacc

SEQ ID NO: 7144 - RNA, 20 nt, Artificial Sequence
  RPE65 RNA guide
uguaaccauauacaagugug

SEQ ID NO: 7145 - RNA, 20 nt, Artificial Sequence
  RPE65 RNA guide
uguauaugguuacacacaca

SEQ ID NO: 7146 - RNA, 20 nt, Artificial Sequence
  RPE65 RNA guide
uguguaaccauauacaagug

SEQ ID NO: 7147 - RNA, 20 nt, Artificial Sequence
  RPE65 RNA guide
uguguguaaccauauacaag

SEQ ID NO: 7148 - RNA, 20 nt, Artificial Sequence
  RPE65 RNA guide
uguguguguaaccauauaca

SEQ ID NO: 7149 - RNA, 20 nt, Artificial Sequence
  RPE65 RNA guide
uguguguguguaaccauaua

SEQ ID NO: 7150 - RNA, 20 nt, Artificial Sequence
  RPE65 RNA guide
uguuguguguguguaaccau

SEQ ID NO: 7151 - RNA, 20 nt, Artificial Sequence
  RPE65 RNA guide
uuauguuguguguguguaac

SEQ ID NO: 7152 - RNA, 20 nt, Artificial Sequence
  RPE65 RNA guide
uuguauaugguuacacacac

SEQ ID NO: 7153 - RNA, 20 nt, Artificial Sequence
  RPE65 RNA guide
uuguguguguguaaccauau

SEQ ID NO: 7154 - RNA, 21 nt, Artificial Sequence
  RPE65 RNA guide
acacacacacuuguauauggu

SEQ ID NO: 7155 - RNA, 21 nt, Artificial Sequence
  RPE65 RNA guide
acacacacuuguauaugguua

SEQ ID NO: 7156 - RNA, 21 nt, Artificial Sequence
  RPE65 RNA guide
acacacuuguauaugguuaca

SEQ ID NO: 7157 - RNA, 21 nt, Artificial Sequence
  RPE65 RNA guide
acacuuguauaugguuacaca

SEQ ID NO: 7158 - RNA, 21 nt, Artificial Sequence
  RPE65 RNA guide
acuuguauaugguuacacaca

SEQ ID NO: 7159 - RNA, 21 nt, Artificial Sequence
  RPE65 RNA guide
auaugguuacacacacacaac

SEQ ID NO: 7160 - RNA, 21 nt, Artificial Sequence
  RPE65 RNA guide
auguuguguguguguaaccau

SEQ ID NO: 7161 - RNA, 21 nt, Artificial Sequence
  RPE65 RNA guide
cacacacacuuguauaugguu

SEQ ID NO: 7162 - RNA, 21 nt, Artificial Sequence
  RPE65 RNA guide
cacacacuuguauaugguuac

SEQ ID NO: 7163 - RNA, 21 nt, Artificial Sequence
  RPE65 RNA guide
cacacuuguauaugguuacac

SEQ ID NO: 7164 - RNA, 21 nt, Artificial Sequence
  RPE65 RNA guide
cacuuguauaugguuacacac

SEQ ID NO: 7165 - RNA, 21 nt, Artificial Sequence
  RPE65 RNA guide
cuacacacacacuuguauaug

SEQ ID NO: 7166 - RNA, 21 nt, Artificial Sequence
  RPE65 RNA guide
cuuguauaugguuacacacac

SEQ ID NO: 7167 - RNA, 21 nt, Artificial Sequence
  RPE65 RNA guide
gcuacacacacacuuguauau

SEQ ID NO: 7168 - RNA, 21 nt, Artificial Sequence
  RPE65 RNA guide
guaaccauauacaagugugug

SEQ ID NO: 7169 - RNA, 21 nt, Artificial Sequence
  RPE65 RNA guide
guauaugguuacacacacaca

SEQ ID NO: 7170 - RNA, 21 nt, Artificial Sequence
  RPE65 RNA guide
guguaaccauauacaagugug

SEQ ID NO: 7171 - RNA, 21 nt, Artificial Sequence
  RPE65 RNA guide
guguguaaccauauacaagug

SEQ ID NO: 7172 - RNA, 21 nt, Artificial Sequence
  RPE65 RNA guide
guguguguaaccauauacaag

SEQ ID NO: 7173 - RNA, 21 nt, Artificial Sequence
  RPE65 RNA guide
guguguguguaaccauauaca

SEQ ID NO: 7174 - RNA, 21 nt, Artificial Sequence
  RPE65 RNA guide
guuguguguguguaaccauau

SEQ ID NO: 7175 - RNA, 21 nt, Artificial Sequence
  RPE65 RNA guide
uaaccauauacaagugugugu

SEQ ID NO: 7176 - RNA, 21 nt, Artificial Sequence
  RPE65 RNA guide
uacacacacacuuguauaugg

SEQ ID NO: 7177 - RNA, 21 nt, Artificial Sequence
  RPE65 RNA guide
uauaugguuacacacacacaa

SEQ ID NO: 7178 - RNA, 21 nt, Artificial Sequence
  RPE65 RNA guide
uauguuguguguguguaacca

SEQ ID NO: 7179 - RNA, 21 nt, Artificial Sequence
  RPE65 RNA guide
uguaaccauauacaagugugu

SEQ ID NO: 7180 - RNA, 21 nt, Artificial Sequence
  RPE65 RNA guide
uguauaugguuacacacacac

SEQ ID NO: 7181 - RNA, 21 nt, Artificial Sequence
  RPE65 RNA guide
uguguaaccauauacaagugu

SEQ ID NO: 7182 - RNA, 21 nt, Artificial Sequence
  RPE65 RNA guide
uguguguaaccauauacaagu

SEQ ID NO: 7183 - RNA, 21 nt, Artificial Sequence
  RPE65 RNA guide
uguguguguaaccauauacaa

SEQ ID NO: 7184 - RNA, 21 nt, Artificial Sequence
  RPE65 RNA guide
uguguguguguaaccauauac

SEQ ID NO: 7185 - RNA, 21 nt, Artificial Sequence
  RPE65 RNA guide
uguuguguguguguaaccaua

SEQ ID NO: 7186 - RNA, 21 nt, Artificial Sequence
  RPE65 RNA guide
uuauguuguguguguguaacc

SEQ ID NO: 7187 - RNA, 21 nt, Artificial Sequence
  RPE65 RNA guide
uuguauaugguuacacacaca

SEQ ID NO: 7188 - RNA, 21 nt, Artificial Sequence
  RPE65 RNA guide
uuguguguguguaaccauaua

SEQ ID NO: 7189 - RNA, 21 nt, Artificial Sequence
  RPE65 RNA guide
uuuauguuguguguguguaac

SEQ ID NO: 7190 - RNA, 22 nt, Artificial Sequence
  RPE65 RNA guide
acacacacacuuguauaugguu

SEQ ID NO: 7191 - RNA, 22 nt, Artificial Sequence
  RPE65 RNA guide
acacacacuuguauaugguuac

SEQ ID NO: 7192 - RNA, 22 nt, Artificial Sequence
  RPE65 RNA guide
acacacuuguauaugguuacac

SEQ ID NO: 7193 - RNA, 22 nt, Artificial Sequence
  RPE65 RNA guide
acacuuguauaugguuacacac

SEQ ID NO: 7194 - RNA, 22 nt, Artificial Sequence
  RPE65 RNA guide
acuuguauaugguuacacacac

SEQ ID NO: 7195 - RNA, 22 nt, Artificial Sequence
  RPE65 RNA guide
auaugguuacacacacacaaca

SEQ ID NO: 7196 - RNA, 22 nt, Artificial Sequence
  RPE65 RNA guide
auguuguguguguguaaccaua

SEQ ID NO: 7197 - RNA, 22 nt, Artificial Sequence
  RPE65 RNA guide
cacacacacuuguauaugguua

SEQ ID NO: 7198 - RNA, 22 nt, Artificial Sequence
  RPE65 RNA guide
cacacacuuguauaugguuaca

SEQ ID NO: 7199 - RNA, 22 nt, Artificial Sequence
  RPE65 RNA guide
cacacuuguauaugguuacaca

SEQ ID NO: 7200 - RNA, 22 nt, Artificial Sequence
  RPE65 RNA guide
cacuuguauaugguuacacaca

SEQ ID NO: 7201 - RNA, 22 nt, Artificial Sequence
  RPE65 RNA guide
cuacacacacacuuguauaugg

SEQ ID NO: 7202 - RNA, 22 nt, Artificial Sequence
  RPE65 RNA guide
cuuguauaugguuacacacaca

SEQ ID NO: 7203 - RNA, 22 nt, Artificial Sequence
  RPE65 RNA guide
gcuacacacacacuuguauaug

SEQ ID NO: 7204 - RNA, 22 nt, Artificial Sequence
  RPE65 RNA guide
guaaccauauacaagugugugu

SEQ ID NO: 7205 - RNA, 22 nt, Artificial Sequence
  RPE65 RNA guide
guauaugguuacacacacacaa

SEQ ID NO: 7206 - RNA, 22 nt, Artificial Sequence
  RPE65 RNA guide
guguaaccauauacaagugugu

SEQ ID NO: 7207 - RNA, 22 nt, Artificial Sequence
  RPE65 RNA guide
guguguaaccauauacaagugu

SEQ ID NO: 7208 - RNA, 22 nt, Artificial Sequence
  RPE65 RNA guide
guguguguaaccauauacaagu

SEQ ID NO: 7209 - RNA, 22 nt, Artificial Sequence
  RPE65 RNA guide
guguguguguaaccauauacaa

SEQ ID NO: 7210 - RNA, 22 nt, Artificial Sequence
  RPE65 RNA guide
guuguguguguguaaccauaua

SEQ ID NO: 7211 - RNA, 22 nt, Artificial Sequence
  RPE65 RNA guide
guuuauguuguguguguguaac

SEQ ID NO: 7212 - RNA, 22 nt, Artificial Sequence
  RPE65 RNA guide
uacacacacacuuguauauggu

SEQ ID NO: 7213 - RNA, 22 nt, Artificial Sequence
  RPE65 RNA guide
uauaugguuacacacacacaac

SEQ ID NO: 7214 - RNA, 22 nt, Artificial Sequence
  RPE65 RNA guide
uauguuguguguguguaaccau

SEQ ID NO: 7215 - RNA, 22 nt, Artificial Sequence
  RPE65 RNA guide
uguaaccauauacaagugugug

SEQ ID NO: 7216 - RNA, 22 nt, Artificial Sequence
  RPE65 RNA guide
uguauaugguuacacacacaca

SEQ ID NO: 7217 - RNA, 22 nt, Artificial Sequence
  RPE65 RNA guide
uguguaaccauauacaagugug

SEQ ID NO: 7218 - RNA, 22 nt, Artificial Sequence
  RPE65 RNA guide
uguguguaaccauauacaagug

SEQ ID NO: 7219 - RNA, 22 nt, Artificial Sequence
  RPE65 RNA guide
uguguguguaaccauauacaag

SEQ ID NO: 7220 - RNA, 22 nt, Artificial Sequence
  RPE65 RNA guide
uguguguguguaaccauauaca

SEQ ID NO: 7221 - RNA, 22 nt, Artificial Sequence
  RPE65 RNA guide
uguuguguguguguaaccauau

SEQ ID NO: 7222 - RNA, 22 nt, Artificial Sequence
  RPE65 RNA guide
uuauguuguguguguguaacca

SEQ ID NO: 7223 - RNA, 22 nt, Artificial Sequence
  RPE65 RNA guide
uuguauaugguuacacacacac

SEQ ID NO: 7224 - RNA, 22 nt, Artificial Sequence
  RPE65 RNA guide
uuguguguguguaaccauauac

SEQ ID NO: 7225 - RNA, 22 nt, Artificial Sequence
  RPE65 RNA guide
uuuauguuguguguguguaacc

SEQ ID NO: 7226 - RNA, 20 nt, Artificial Sequence
  RPE65 RNA guide
aaccauguacaagugugugu

SEQ ID NO: 7227 - RNA, 20 nt, Artificial Sequence
  RPE65 RNA guide
acacacacacuuguacaugg

SEQ ID NO: 7228 - RNA, 20 nt, Artificial Sequence
  RPE65 RNA guide
acacacacuuguacaugguu

SEQ ID NO: 7229 - RNA, 20 nt, Artificial Sequence
  RPE65 RNA guide
acacacuuguacaugguuac

SEQ ID NO: 7230 - RNA, 20 nt, Artificial Sequence
  RPE65 RNA guide
acacuuguacaugguuacac

SEQ ID NO: 7231 - RNA, 20 nt, Artificial Sequence
  RPE65 RNA guide
acaugguuacacacacacaa

SEQ ID NO: 7232 - RNA, 20 nt, Artificial Sequence
  RPE65 RNA guide
accauguacaagugugugug

SEQ ID NO: 7233 - RNA, 20 nt, Artificial Sequence
  RPE65 RNA guide
acuuguacaugguuacacac

SEQ ID NO: 7234 - RNA, 20 nt, Artificial Sequence
  RPE65 RNA guide
agcuacacacacacuuguac

SEQ ID NO: 7235 - RNA, 20 nt, Artificial Sequence
  RPE65 RNA guide
auguacaaguguguguguag

SEQ ID NO: 7236 - RNA, 20 nt, Artificial Sequence
  RPE65 RNA guide
cacacacacuuguacauggu

SEQ ID NO: 7237 - RNA, 20 nt, Artificial Sequence
  RPE65 RNA guide
cacacacuuguacaugguua

SEQ ID NO: 7238 - RNA, 20 nt, Artificial Sequence
  RPE65 RNA guide
cacacuuguacaugguuaca

SEQ ID NO: 7239 - RNA, 20 nt, Artificial Sequence
  RPE65 RNA guide
cacuuguacaugguuacaca

SEQ ID NO: 7240 - RNA, 20 nt, Artificial Sequence
  RPE65 RNA guide
cauguacaagugugugugua

SEQ ID NO: 7241 - RNA, 20 nt, Artificial Sequence
  RPE65 RNA guide
ccauguacaagugugugugu

SEQ ID NO: 7242 - RNA, 20 nt, Artificial Sequence
  RPE65 RNA guide
cuacacacacacuuguacau

SEQ ID NO: 7243 - RNA, 20 nt, Artificial Sequence
  RPE65 RNA guide
cuuguacaugguuacacaca

SEQ ID NO: 7244 - RNA, 20 nt, Artificial Sequence
  RPE65 RNA guide
gcuacacacacacuuguaca

SEQ ID NO: 7245 - RNA, 20 nt, Artificial Sequence
  RPE65 RNA guide
guaaccauguacaagugugu

SEQ ID NO: 7246 - RNA, 20 nt, Artificial Sequence
  RPE65 RNA guide
guacaugguuacacacacac

SEQ ID NO: 7247 - RNA, 20 nt, Artificial Sequence
  RPE65 RNA guide
guguaaccauguacaagugu

SEQ ID NO: 7248 - RNA, 20 nt, Artificial Sequence
  RPE65 RNA guide
guguguaaccauguacaagu

SEQ ID NO: 7249 - RNA, 20 nt, Artificial Sequence
  RPE65 RNA guide
guguguguaaccauguacaa

SEQ ID NO: 7250 - RNA, 20 nt, Artificial Sequence
  RPE65 RNA guide
guguguguguaaccauguac

SEQ ID NO: 7251 - RNA, 20 nt, Artificial Sequence
  RPE65 RNA guide
guuguguguguguaaccaug

SEQ ID NO: 7252 - RNA, 20 nt, Artificial Sequence
  RPE65 RNA guide
uaaccauguacaagugugug

SEQ ID NO: 7253 - RNA, 20 nt, Artificial Sequence
  RPE65 RNA guide
uacacacacacuuguacaug

SEQ ID NO: 7254 - RNA, 20 nt, Artificial Sequence
  RPE65 RNA guide
uacaugguuacacacacaca

SEQ ID NO: 7255 - RNA, 20 nt, Artificial Sequence
  RPE65 RNA guide
uguaaccauguacaagugug

SEQ ID NO: 7256 - RNA, 20 nt, Artificial Sequence
  RPE65 RNA guide
uguacaaguguguguguagc

SEQ ID NO: 7257 - RNA, 20 nt, Artificial Sequence
  RPE65 RNA guide
uguacaugguuacacacaca

SEQ ID NO: 7258 - RNA, 20 nt, Artificial Sequence
  RPE65 RNA guide
uguguaaccauguacaagug

SEQ ID NO: 7259 - RNA, 20 nt, Artificial Sequence
  RPE65 RNA guide
uguguguaaccauguacaag

SEQ ID NO: 7260 - RNA, 20 nt, Artificial Sequence
  RPE65 RNA guide
uguguguguaaccauguaca

SEQ ID NO: 7261 - RNA, 20 nt, Artificial Sequence
  RPE65 RNA guide
uguguguguguaaccaugua

SEQ ID NO: 7262 - RNA, 20 nt, Artificial Sequence
  RPE65 RNA guide
uuguacaugguuacacacac

SEQ ID NO: 7263 - RNA, 20 nt, Artificial Sequence
  RPE65 RNA guide
uuguguguguguaaccaugu

SEQ ID NO: 7264 - RNA, 21 nt, Artificial Sequence
  RPE65 RNA guide
aaccauguacaagugugugug

SEQ ID NO: 7265 - RNA, 21 nt, Artificial Sequence
  RPE65 RNA guide
acacacacacuuguacauggu

SEQ ID NO: 7266 - RNA, 21 nt, Artificial Sequence
  RPE65 RNA guide
acacacacuuguacaugguua

SEQ ID NO: 7267 - RNA, 21 nt, Artificial Sequence
  RPE65 RNA guide
acacacuuguacaugguuaca

SEQ ID NO: 7268 - RNA, 21 nt, Artificial Sequence
  RPE65 RNA guide
acacuuguacaugguuacaca

SEQ ID NO: 7269 - RNA, 21 nt, Artificial Sequence
  RPE65 RNA guide
acaugguuacacacacacaac

SEQ ID NO: 7270 - RNA, 21 nt, Artificial Sequence
  RPE65 RNA guide
accauguacaagugugugugu

SEQ ID NO: 7271 - RNA, 21 nt, Artificial Sequence
  RPE65 RNA guide
acuuguacaugguuacacaca

SEQ ID NO: 7272 - RNA, 21 nt, Artificial Sequence
  RPE65 RNA guide
agcuacacacacacuuguaca

SEQ ID NO: 7273 - RNA, 21 nt, Artificial Sequence
  RPE65 RNA guide
auguacaaguguguguguagc

SEQ ID NO: 7274 - RNA, 21 nt, Artificial Sequence
  RPE65 RNA guide
cacacacacuuguacaugguu

SEQ ID NO: 7275 - RNA, 21 nt, Artificial Sequence
  RPE65 RNA guide
cacacacuuguacaugguuac

SEQ ID NO: 7276 - RNA, 21 nt, Artificial Sequence
  RPE65 RNA guide
cacacuuguacaugguuacac

SEQ ID NO: 7277 - RNA, 21 nt, Artificial Sequence
  RPE65 RNA guide
cacuuguacaugguuacacac

SEQ ID NO: 7278 - RNA, 21 nt, Artificial Sequence
  RPE65 RNA guide
cauguacaaguguguguguag

SEQ ID NO: 7279 - RNA, 21 nt, Artificial Sequence
  RPE65 RNA guide
ccauguacaagugugugugua

SEQ ID NO: 7280 - RNA, 21 nt, Artificial Sequence
  RPE65 RNA guide
cuacacacacacuuguacaug

SEQ ID NO: 7281 - RNA, 21 nt, Artificial Sequence
  RPE65 RNA guide
cuuguacaugguuacacacac

SEQ ID NO: 7282 - RNA, 21 nt, Artificial Sequence
  RPE65 RNA guide
gagcuacacacacacuuguac

SEQ ID NO: 7283 - RNA, 21 nt, Artificial Sequence
  RPE65 RNA guide
gcuacacacacacuuguacau

SEQ ID NO: 7284 - RNA, 21 nt, Artificial Sequence
  RPE65 RNA guide
guaaccauguacaagugugug

SEQ ID NO: 7285 - RNA, 21 nt, Artificial Sequence
  RPE65 RNA guide
guacaugguuacacacacaca

SEQ ID NO: 7286 - RNA, 21 nt, Artificial Sequence
  RPE65 RNA guide
guguaaccauguacaagugug

SEQ ID NO: 7287 - RNA, 21 nt, Artificial Sequence
  RPE65 RNA guide
guguguaaccauguacaagug

SEQ ID NO: 7288 - RNA, 21 nt, Artificial Sequence
  RPE65 RNA guide
guguguguaaccauguacaag

SEQ ID NO: 7289 - RNA, 21 nt, Artificial Sequence
  RPE65 RNA guide
guguguguguaaccauguaca

SEQ ID NO: 7290 - RNA, 21 nt, Artificial Sequence
  RPE65 RNA guide
guuguguguguguaaccaugu

SEQ ID NO: 7291 - RNA, 21 nt, Artificial Sequence
  RPE65 RNA guide
uaaccauguacaagugugugu

SEQ ID NO: 7292 - RNA, 21 nt, Artificial Sequence
  RPE65 RNA guide
uacacacacacuuguacaugg

SEQ ID NO: 7293 - RNA, 21 nt, Artificial Sequence
  RPE65 RNA guide
uacaugguuacacacacacaa

SEQ ID NO: 7294 - RNA, 21 nt, Artificial Sequence
  RPE65 RNA guide
uguaaccauguacaagugugu

SEQ ID NO: 7295 - RNA, 21 nt, Artificial Sequence
  RPE65 RNA guide
uguacaaguguguguguagcu

SEQ ID NO: 7296 - RNA, 21 nt, Artificial Sequence
  RPE65 RNA guide
uguacaugguuacacacacac

SEQ ID NO: 7297 - RNA, 21 nt, Artificial Sequence
  RPE65 RNA guide
uguguaaccauguacaagugu

SEQ ID NO: 7298 - RNA, 21 nt, Artificial Sequence
  RPE65 RNA guide
uguguguaaccauguacaagu

SEQ ID NO: 7299 - RNA, 21 nt, Artificial Sequence
  RPE65 RNA guide
uguguguguaaccauguacaa

SEQ ID NO: 7300 - RNA, 21 nt, Artificial Sequence
  RPE65 RNA guide
uguguguguguaaccauguac

SEQ ID NO: 7301 - RNA, 21 nt, Artificial Sequence
  RPE65 RNA guide
uguuguguguguguaaccaug

SEQ ID NO: 7302 - RNA, 21 nt, Artificial Sequence
  RPE65 RNA guide
uuguacaugguuacacacaca

SEQ ID NO: 7303 - RNA, 21 nt, Artificial Sequence
  RPE65 RNA guide
uuguguguguguaaccaugua

SEQ ID NO: 7304 - RNA, 22 nt, Artificial Sequence
  RPE65 RNA guide
aaccauguacaagugugugugu

SEQ ID NO: 7305 - RNA, 22 nt, Artificial Sequence
  RPE65 RNA guide
acacacacacuuguacaugguu

SEQ ID NO: 7306 - RNA, 22 nt, Artificial Sequence
  RPE65 RNA guide
acacacacuuguacaugguuac

SEQ ID NO: 7307 - RNA, 22 nt, Artificial Sequence
  RPE65 RNA guide
acacacuuguacaugguuacac

SEQ ID NO: 7308 - RNA, 22 nt, Artificial Sequence
  RPE65 RNA guide
acacuuguacaugguuacacac

SEQ ID NO: 7309 - RNA, 22 nt, Artificial Sequence
  RPE65 RNA guide
acaugguuacacacacacaaca

SEQ ID NO: 7310 - RNA, 22 nt, Artificial Sequence
  RPE65 RNA guide
accauguacaagugugugugua

SEQ ID NO: 7311 - RNA, 22 nt, Artificial Sequence
  RPE65 RNA guide
acuuguacaugguuacacacac

SEQ ID NO: 7312 - RNA, 22 nt, Artificial Sequence
  RPE65 RNA guide
agcuacacacacacuuguacau

SEQ ID NO: 7313 - RNA, 22 nt, Artificial Sequence
  RPE65 RNA guide
auguacaaguguguguguagcu

SEQ ID NO: 7314 - RNA, 22 nt, Artificial Sequence
  RPE65 RNA guide
auguuguguguguguaaccaug

SEQ ID NO: 7315 - RNA, 22 nt, Artificial Sequence
  RPE65 RNA guide
cacacacacuuguacaugguua

SEQ ID NO: 7316 - RNA, 22 nt, Artificial Sequence
  RPE65 RNA guide
cacacacuuguacaugguuaca

SEQ ID NO: 7317 - RNA, 22 nt, Artificial Sequence
  RPE65 RNA guide
cacacuuguacaugguuacaca

SEQ ID NO: 7318 - RNA, 22 nt, Artificial Sequence
  RPE65 RNA guide
cacuuguacaugguuacacaca

SEQ ID NO: 7319 - RNA, 22 nt, Artificial Sequence
  RPE65 RNA guide
cauguacaaguguguguguagc

SEQ ID NO: 7320 - RNA, 22 nt, Artificial Sequence
  RPE65 RNA guide
ccauguacaaguguguguguag

SEQ ID NO: 7321 - RNA, 22 nt, Artificial Sequence
  RPE65 RNA guide
cuacacacacacuuguacaugg

SEQ ID NO: 7322 - RNA, 22 nt, Artificial Sequence
  RPE65 RNA guide
cuuguacaugguuacacacaca

SEQ ID NO: 7323 - RNA, 22 nt, Artificial Sequence
  RPE65 RNA guide
gagcuacacacacacuuguaca

SEQ ID NO: 7324 - RNA, 22 nt, Artificial Sequence
  RPE65 RNA guide
gcuacacacacacuuguacaug

SEQ ID NO: 7325 - RNA, 22 nt, Artificial Sequence
  RPE65 RNA guide
ggagcuacacacacacuuguac

SEQ ID NO: 7326 - RNA, 22 nt, Artificial Sequence
  RPE65 RNA guide
guaaccauguacaagugugugu

SEQ ID NO: 7327 - RNA, 22 nt, Artificial Sequence
  RPE65 RNA guide
guacaugguuacacacacacaa

SEQ ID NO: 7328 - RNA, 22 nt, Artificial Sequence
  RPE65 RNA guide
guguaaccauguacaagugugu

SEQ ID NO: 7329 - RNA, 22 nt, Artificial Sequence
  RPE65 RNA guide
guguguaaccauguacaagugu

SEQ ID NO: 7330 - RNA, 22 nt, Artificial Sequence
  RPE65 RNA guide
guguguguaaccauguacaagu

SEQ ID NO: 7331 - RNA, 22 nt, Artificial Sequence
  RPE65 RNA guide
guguguguguaaccauguacaa

SEQ ID NO: 7332 - RNA, 22 nt, Artificial Sequence
  RPE65 RNA guide
guuguguguguguaaccaugua

SEQ ID NO: 7333 - RNA, 22 nt, Artificial Sequence
  RPE65 RNA guide
uaaccauguacaagugugugug

SEQ ID NO: 7334 - RNA, 22 nt, Artificial Sequence
  RPE65 RNA guide
uacacacacacuuguacauggu

SEQ ID NO: 7335 - RNA, 22 nt, Artificial Sequence
  RPE65 RNA guide
uacaugguuacacacacacaac

SEQ ID NO: 7336 - RNA, 22 nt, Artificial Sequence
  RPE65 RNA guide
uguaaccauguacaagugugug

SEQ ID NO: 7337 - RNA, 22 nt, Artificial Sequence
  RPE65 RNA guide
uguacaaguguguguguagcuc

SEQ ID NO: 7338 - RNA, 22 nt, Artificial Sequence
  RPE65 RNA guide
uguacaugguuacacacacaca

SEQ ID NO: 7339 - RNA, 22 nt, Artificial Sequence
  RPE65 RNA guide
uguguaaccauguacaagugug

SEQ ID NO: 7340 - RNA, 22 nt, Artificial Sequence
  RPE65 RNA guide
uguguguaaccauguacaagug

SEQ ID NO: 7341 - RNA, 22 nt, Artificial Sequence
  RPE65 RNA guide
uguguguguaaccauguacaag

SEQ ID NO: 7342 - RNA, 22 nt, Artificial Sequence
  RPE65 RNA guide
uguguguguguaaccauguaca

SEQ ID NO: 7343 - RNA, 22 nt, Artificial Sequence
  RPE65 RNA guide
uguuguguguguguaaccaugu

SEQ ID NO: 7344 - RNA, 22 nt, Artificial Sequence
  RPE65 RNA guide
uuguacaugguuacacacacac

SEQ ID NO: 7345 - RNA, 22 nt, Artificial Sequence
  RPE65 RNA guide
uuguguguguguaaccauguac

SEQ ID NO: 7346 - RNA, 20 nt, Artificial Sequence
  RPE65 RNA guide
aaaaacuuucaguagcuucc

SEQ ID NO: 7347 - RNA, 20 nt, Artificial Sequence
  RPE65 RNA guide
aaaacuuucaguagcuuccc

SEQ ID NO: 7348 - RNA, 20 nt, Artificial Sequence
  RPE65 RNA guide
aaacuuucaguagcuuccca

SEQ ID NO: 7349 - RNA, 20 nt, Artificial Sequence
  RPE65 RNA guide
aacuuucaguagcuucccau

SEQ ID NO: 7350 - RNA, 20 nt, Artificial Sequence
  RPE65 RNA guide
aagcuacugaaaguuuuugc

SEQ ID NO: 7351 - RNA, 20 nt, Artificial Sequence
  RPE65 RNA guide
aaugggaagcuacugaaagu

SEQ ID NO: 7352 - RNA, 20 nt, Artificial Sequence
  RPE65 RNA guide
acugaaaguuuuugcucaaa

SEQ ID NO: 7353 - RNA, 20 nt, Artificial Sequence
  RPE65 RNA guide
acuucuuugagcaaaaacuu

SEQ ID NO: 7354 - RNA, 20 nt, Artificial Sequence
  RPE65 RNA guide
acuuucaguagcuucccauu

SEQ ID NO: 7355 - RNA, 20 nt, Artificial Sequence
  RPE65 RNA guide
agcaaaaacuuucaguagcu

SEQ ID NO: 7356 - RNA, 20 nt, Artificial Sequence
  RPE65 RNA guide
agcuaaugggaagcuacuga

SEQ ID NO: 7357 - RNA, 20 nt, Artificial Sequence
  RPE65 RNA guide
agcuacugaaaguuuuugcu

SEQ ID NO: 7358 - RNA, 20 nt, Artificial Sequence
  RPE65 RNA guide
augggaagcuacugaaaguu

SEQ ID NO: 7359 - RNA, 20 nt, Artificial Sequence
  RPE65 RNA guide
caaaaacuuucaguagcuuc

SEQ ID NO: 7360 - RNA, 20 nt, Artificial Sequence
  RPE65 RNA guide
cuaaugggaagcuacugaaa

SEQ ID NO: 7361 - RNA, 20 nt, Artificial Sequence
  RPE65 RNA guide
cuacugaaaguuuuugcuca

SEQ ID NO: 7362 - RNA, 20 nt, Artificial Sequence
  RPE65 RNA guide
cuacuucuuugagcaaaaac

SEQ ID NO: 7363 - RNA, 20 nt, Artificial Sequence
  RPE65 RNA guide
cugaaaguuuuugcucaaag

SEQ ID NO: 7364 - RNA, 20 nt, Artificial Sequence
  RPE65 RNA guide
cuucuuugagcaaaaacuuu

SEQ ID NO: 7365 - RNA, 20 nt, Artificial Sequence
  RPE65 RNA guide
cuuucaguagcuucccauua

SEQ ID NO: 7366 - RNA, 20 nt, Artificial Sequence
  RPE65 RNA guide
cuuugagcaaaaacuuucag

SEQ ID NO: 7367 - RNA, 20 nt, Artificial Sequence
  RPE65 RNA guide
gaagcuacugaaaguuuuug

SEQ ID NO: 7368 - RNA, 20 nt, Artificial Sequence
  RPE65 RNA guide
gagcaaaaacuuucaguagc

SEQ ID NO: 7369 - RNA, 20 nt, Artificial Sequence
  RPE65 RNA guide
gcaaaaacuuucaguagcuu

SEQ ID NO: 7370 - RNA, 20 nt, Artificial Sequence
  RPE65 RNA guide
gcuaaugggaagcuacugaa

SEQ ID NO: 7371 - RNA, 20 nt, Artificial Sequence
  RPE65 RNA guide
gcuacugaaaguuuuugcuc

SEQ ID NO: 7372 - RNA, 20 nt, Artificial Sequence
  RPE65 RNA guide
ggaagcuacugaaaguuuuu

SEQ ID NO: 7373 - RNA, 20 nt, Artificial Sequence
  RPE65 RNA guide
gggaagcuacugaaaguuuu

SEQ ID NO: 7374 - RNA, 20 nt, Artificial Sequence
  RPE65 RNA guide
guuuagcuaaugggaagcua

SEQ ID NO: 7375 - RNA, 20 nt, Artificial Sequence
  RPE65 RNA guide
uaaugggaagcuacugaaag

SEQ ID NO: 7376 - RNA, 20 nt, Artificial Sequence
  RPE65 RNA guide
uacugaaaguuuuugcucaa

SEQ ID NO: 7377 - RNA, 20 nt, Artificial Sequence
  RPE65 RNA guide
uacuucuuugagcaaaaacu

SEQ ID NO: 7378 - RNA, 20 nt, Artificial Sequence
  RPE65 RNA guide
uagcuaaugggaagcuacug

SEQ ID NO: 7379 - RNA, 20 nt, Artificial Sequence
  RPE65 RNA guide
ucaguagcuucccauuagcu

SEQ ID NO: 7380 - RNA, 20 nt, Artificial Sequence
  RPE65 RNA guide
ucuuugagcaaaaacuuuca

SEQ ID NO: 7381 - RNA, 20 nt, Artificial Sequence
  RPE65 RNA guide
ugaaaguuuuugcucaaaga

SEQ ID NO: 7382 - RNA, 20 nt, Artificial Sequence
  RPE65 RNA guide
ugagcaaaaacuuucaguag

SEQ ID NO: 7383 - RNA, 20 nt, Artificial Sequence
  RPE65 RNA guide
ugggaagcuacugaaaguuu

SEQ ID NO: 7384 - RNA, 20 nt, Artificial Sequence
  RPE65 RNA guide
uguuuagcuaaugggaagcu

SEQ ID NO: 7385 - RNA, 20 nt, Artificial Sequence
  RPE65 RNA guide
uuagcuaaugggaagcuacu

SEQ ID NO: 7386 - RNA, 20 nt, Artificial Sequence
  RPE65 RNA guide
uucaguagcuucccauuagc

SEQ ID NO: 7387 - RNA, 20 nt, Artificial Sequence
  RPE65 RNA guide
uucuuugagcaaaaacuuuc

SEQ ID NO: 7388 - RNA, 20 nt, Artificial Sequence
  RPE65 RNA guide
uugagcaaaaacuuucagua

SEQ ID NO: 7389 - RNA, 20 nt, Artificial Sequence
  RPE65 RNA guide
uuuagcuaaugggaagcuac

SEQ ID NO: 7390 - RNA, 20 nt, Artificial Sequence
  RPE65 RNA guide
uuucaguagcuucccauuag

SEQ ID NO: 7391 - RNA, 20 nt, Artificial Sequence
  RPE65 RNA guide
uuugagcaaaaacuuucagu

SEQ ID NO: 7392 - RNA, 21 nt, Artificial Sequence
  RPE65 RNA guide
aaaaacuuucaguagcuuccc

SEQ ID NO: 7393 - RNA, 21 nt, Artificial Sequence
  RPE65 RNA guide
aaaacuuucaguagcuuccca

SEQ ID NO: 7394 - RNA, 21 nt, Artificial Sequence
  RPE65 RNA guide
aaacuuucaguagcuucccau

SEQ ID NO: 7395 - RNA, 21 nt, Artificial Sequence
  RPE65 RNA guide
aacuuucaguagcuucccauu

SEQ ID NO: 7396 - RNA, 21 nt, Artificial Sequence
  RPE65 RNA guide
aagcuacugaaaguuuuugcu

SEQ ID NO: 7397 - RNA, 21 nt, Artificial Sequence
  RPE65 RNA guide
aaugggaagcuacugaaaguu

SEQ ID NO: 7398 - RNA, 21 nt, Artificial Sequence
  RPE65 RNA guide
acuacuucuuugagcaaaaac

SEQ ID NO: 7399 - RNA, 21 nt, Artificial Sequence
  RPE65 RNA guide
acugaaaguuuuugcucaaag

SEQ ID NO: 7400 - RNA, 21 nt, Artificial Sequence
  RPE65 RNA guide
acuuucaguagcuucccauua

SEQ ID NO: 7401 - RNA, 21 nt, Artificial Sequence
  RPE65 RNA guide
agcaaaaacuuucaguagcuu

SEQ ID NO: 7402 - RNA, 21 nt, Artificial Sequence
  RPE65 RNA guide
agcuaaugggaagcuacugaa

SEQ ID NO: 7403 - RNA, 21 nt, Artificial Sequence
  RPE65 RNA guide
agcuacugaaaguuuuugcuc

SEQ ID NO: 7404 - RNA, 21 nt, Artificial Sequence
  RPE65 RNA guide
augggaagcuacugaaaguuu

SEQ ID NO: 7405 - RNA, 21 nt, Artificial Sequence
  RPE65 RNA guide
caaaaacuuucaguagcuucc

SEQ ID NO: 7406 - RNA, 21 nt, Artificial Sequence
  RPE65 RNA guide
cuaaugggaagcuacugaaag

SEQ ID NO: 7407 - RNA, 21 nt, Artificial Sequence
  RPE65 RNA guide
cuacugaaaguuuuugcucaa

SEQ ID NO: 7408 - RNA, 21 nt, Artificial Sequence
  RPE65 RNA guide
cuacuucuuugagcaaaaacu

SEQ ID NO: 7409 - RNA, 21 nt, Artificial Sequence
  RPE65 RNA guide
cugaaaguuuuugcucaaaga

SEQ ID NO: 7410 - RNA, 21 nt, Artificial Sequence
  RPE65 RNA guide
cuucuuugagcaaaaacuuuc

SEQ ID NO: 7411 - RNA, 21 nt, Artificial Sequence
  RPE65 RNA guide
cuuucaguagcuucccauuag

SEQ ID NO: 7412 - RNA, 21 nt, Artificial Sequence
  RPE65 RNA guide
cuuugagcaaaaacuuucagu

SEQ ID NO: 7413 - RNA, 21 nt, Artificial Sequence
  RPE65 RNA guide
gaagcuacugaaaguuuuugc

SEQ ID NO: 7414 - RNA, 21 nt, Artificial Sequence
  RPE65 RNA guide
gagcaaaaacuuucaguagcu

SEQ ID NO: 7415 - RNA, 21 nt, Artificial Sequence
  RPE65 RNA guide
gcaaaaacuuucaguagcuuc

SEQ ID NO: 7416 - RNA, 21 nt, Artificial Sequence
  RPE65 RNA guide
gcuaaugggaagcuacugaaa

SEQ ID NO: 7417 - RNA, 21 nt, Artificial Sequence
  RPE65 RNA guide
gcuacugaaaguuuuugcuca

SEQ ID NO: 7418 - RNA, 21 nt, Artificial Sequence
  RPE65 RNA guide
ggaagcuacugaaaguuuuug

SEQ ID NO: 7419 - RNA, 21 nt, Artificial Sequence
  RPE65 RNA guide
gggaagcuacugaaaguuuuu

SEQ ID NO: 7420 - RNA, 21 nt, Artificial Sequence
  RPE65 RNA guide
guuuagcuaaugggaagcuac

SEQ ID NO: 7421 - RNA, 21 nt, Artificial Sequence
  RPE65 RNA guide
uaaugggaagcuacugaaagu

SEQ ID NO: 7422 - RNA, 21 nt, Artificial Sequence
  RPE65 RNA guide
uagcuaaugggaagcuacuga

SEQ ID NO: 7423 - RNA, 21 nt, Artificial Sequence
  RPE65 RNA guide
ucaguagcuucccauuagcua

SEQ ID NO: 7424 - RNA, 21 nt, Artificial Sequence
  RPE65 RNA guide
ucuuugagcaaaaacuuucag

SEQ ID NO: 7425 - RNA, 21 nt, Artificial Sequence
  RPE65 RNA guide
ugagcaaaaacuuucaguagc

SEQ ID NO: 7426 - RNA, 21 nt, Artificial Sequence
  RPE65 RNA guide
ugggaagcuacugaaaguuuu

SEQ ID NO: 7427 - RNA, 21 nt, Artificial Sequence
  RPE65 RNA guide
uguuuagcuaaugggaagcua

SEQ ID NO: 7428 - RNA, 21 nt, Artificial Sequence
  RPE65 RNA guide
uuagcuaaugggaagcuacug

SEQ ID NO: 7429 - RNA, 21 nt, Artificial Sequence
  RPE65 RNA guide
uucaguagcuucccauuagcu

SEQ ID NO: 7430 - RNA, 21 nt, Artificial Sequence
  RPE65 RNA guide
uugagcaaaaacuuucaguag

SEQ ID NO: 7431 - RNA, 21 nt, Artificial Sequence
  RPE65 RNA guide
uuguuuagcuaaugggaagcu

SEQ ID NO: 7432 - RNA, 21 nt, Artificial Sequence
  RPE65 RNA guide
uuuagcuaaugggaagcuacu

SEQ ID NO: 7433 - RNA, 21 nt, Artificial Sequence
  RPE65 RNA guide
uuucaguagcuucccauuagc

SEQ ID NO: 7434 - RNA, 22 nt, Artificial Sequence
  RPE65 RNA guide
aaaaacuuucaguagcuuccca

SEQ ID NO: 7435 - RNA, 22 nt, Artificial Sequence
  RPE65 RNA guide
aaaacuuucaguagcuucccau

SEQ ID NO: 7436 - RNA, 22 nt, Artificial Sequence
  RPE65 RNA guide
aaacuuucaguagcuucccauu

SEQ ID NO: 7437 - RNA, 22 nt, Artificial Sequence
  RPE65 RNA guide
aacuuucaguagcuucccauua

SEQ ID NO: 7438 - RNA, 22 nt, Artificial Sequence
  RPE65 RNA guide
aagcuacugaaaguuuuugcuc

SEQ ID NO: 7439 - RNA, 22 nt, Artificial Sequence
  RPE65 RNA guide
aaugggaagcuacugaaaguuu

SEQ ID NO: 7440 - RNA, 22 nt, Artificial Sequence
  RPE65 RNA guide
acuacuucuuugagcaaaaacu

SEQ ID NO: 7441 - RNA, 22 nt, Artificial Sequence
  RPE65 RNA guide
acugaaaguuuuugcucaaaga

SEQ ID NO: 7442 - RNA, 22 nt, Artificial Sequence
  RPE65 RNA guide
acuucuuugagcaaaaacuuuc

SEQ ID NO: 7443 - RNA, 22 nt, Artificial Sequence
  RPE65 RNA guide
acuuucaguagcuucccauuag

SEQ ID NO: 7444 - RNA, 22 nt, Artificial Sequence
  RPE65 RNA guide
agcaaaaacuuucaguagcuuc

SEQ ID NO: 7445 - RNA, 22 nt, Artificial Sequence
  RPE65 RNA guide
agcuaaugggaagcuacugaaa

SEQ ID NO: 7446 - RNA, 22 nt, Artificial Sequence
  RPE65 RNA guide
agcuacugaaaguuuuugcuca

SEQ ID NO: 7447 - RNA, 22 nt, Artificial Sequence
  RPE65 RNA guide
augggaagcuacugaaaguuuu

SEQ ID NO: 7448 - RNA, 22 nt, Artificial Sequence
  RPE65 RNA guide
caaaaacuuucaguagcuuccc

SEQ ID NO: 7449 - RNA, 22 nt, Artificial Sequence
  RPE65 RNA guide
cuaaugggaagcuacugaaagu

SEQ ID NO: 7450 - RNA, 22 nt, Artificial Sequence
  RPE65 RNA guide
cuacugaaaguuuuugcucaaa

SEQ ID NO: 7451 - RNA, 22 nt, Artificial Sequence
  RPE65 RNA guide
cuacuucuuugagcaaaaacuu

SEQ ID NO: 7452 - RNA, 22 nt, Artificial Sequence
  RPE65 RNA guide
cugaaaguuuuugcucaaagaa

SEQ ID NO: 7453 - RNA, 22 nt, Artificial Sequence
  RPE65 RNA guide
cuucuuugagcaaaaacuuuca

SEQ ID NO: 7454 - RNA, 22 nt, Artificial Sequence
  RPE65 RNA guide
cuuucaguagcuucccauuagc

SEQ ID NO: 7455 - RNA, 22 nt, Artificial Sequence
  RPE65 RNA guide
cuuugagcaaaaacuuucagua

SEQ ID NO: 7456 - RNA, 22 nt, Artificial Sequence
  RPE65 RNA guide
gaagcuacugaaaguuuuugcu

SEQ ID NO: 7457 - RNA, 22 nt, Artificial Sequence
  RPE65 RNA guide
gagcaaaaacuuucaguagcuu

SEQ ID NO: 7458 - RNA, 22 nt, Artificial Sequence
  RPE65 RNA guide
gcaaaaacuuucaguagcuucc

SEQ ID NO: 7459 - RNA, 22 nt, Artificial Sequence
  RPE65 RNA guide
gcuaaugggaagcuacugaaag

SEQ ID NO: 7460 - RNA, 22 nt, Artificial Sequence
  RPE65 RNA guide
gcuacugaaaguuuuugcucaa

SEQ ID NO: 7461 - RNA, 22 nt, Artificial Sequence
  RPE65 RNA guide
ggaagcuacugaaaguuuuugc

SEQ ID NO: 7462 - RNA, 22 nt, Artificial Sequence
  RPE65 RNA guide
gggaagcuacugaaaguuuuug

SEQ ID NO: 7463 - RNA, 22 nt, Artificial Sequence
  RPE65 RNA guide
guuguuuagcuaaugggaagcu

SEQ ID NO: 7464 - RNA, 22 nt, Artificial Sequence
  RPE65 RNA guide
guuuagcuaaugggaagcuacu

SEQ ID NO: 7465 - RNA, 22 nt, Artificial Sequence
  RPE65 RNA guide
uaaugggaagcuacugaaaguu

SEQ ID NO: 7466 - RNA, 22 nt, Artificial Sequence
  RPE65 RNA guide
uacuacuucuuugagcaaaaac

SEQ ID NO: 7467 - RNA, 22 nt, Artificial Sequence
  RPE65 RNA guide
uacugaaaguuuuugcucaaag

SEQ ID NO: 7468 - RNA, 22 nt, Artificial Sequence
  RPE65 RNA guide
uagcuaaugggaagcuacugaa

SEQ ID NO: 7469 - RNA, 22 nt, Artificial Sequence
  RPE65 RNA guide
ucaguagcuucccauuagcuaa

SEQ ID NO: 7470 - RNA, 22 nt, Artificial Sequence
  RPE65 RNA guide
ucuuugagcaaaaacuuucagu

SEQ ID NO: 7471 - RNA, 22 nt, Artificial Sequence
  RPE65 RNA guide
ugaaaguuuuugcucaaagaag

SEQ ID NO: 7472 - RNA, 22 nt, Artificial Sequence
  RPE65 RNA guide
ugagcaaaaacuuucaguagcu

SEQ ID NO: 7473 - RNA, 22 nt, Artificial Sequence
  RPE65 RNA guide
ugggaagcuacugaaaguuuuu

SEQ ID NO: 7474 - RNA, 22 nt, Artificial Sequence
  RPE65 RNA guide
uguuuagcuaaugggaagcuac

SEQ ID NO: 7475 - RNA, 22 nt, Artificial Sequence
  RPE65 RNA guide
uuagcuaaugggaagcuacuga

SEQ ID NO: 7476 - RNA, 22 nt, Artificial Sequence
  RPE65 RNA guide
uucaguagcuucccauuagcua

SEQ ID NO: 7477 - RNA, 22 nt, Artificial Sequence
  RPE65 RNA guide
uucuuugagcaaaaacuuucag

SEQ ID NO: 7478 - RNA, 22 nt, Artificial Sequence
  RPE65 RNA guide
uugagcaaaaacuuucaguagc

SEQ ID NO: 7479 - RNA, 22 nt, Artificial Sequence
  RPE65 RNA guide
uuguuuagcuaaugggaagcua

SEQ ID NO: 7480 - RNA, 22 nt, Artificial Sequence
  RPE65 RNA guide
uuuagcuaaugggaagcuacug

SEQ ID NO: 7481 - RNA, 22 nt, Artificial Sequence
  RPE65 RNA guide
uuucaguagcuucccauuagcu

SEQ ID NO: 7482 - RNA, 22 nt, Artificial Sequence
  RPE65 RNA guide
uuugagcaaaaacuuucaguag

SEQ ID NO: 7483 - RNA, 20 nt, Artificial Sequence
  RPE65 RNA guide
aaaaacuuucguagcuuccc

SEQ ID NO: 7484 - RNA, 20 nt, Artificial Sequence
  RPE65 RNA guide
aaaacuuucguagcuuccca

SEQ ID NO: 7485 - RNA, 20 nt, Artificial Sequence
  RPE65 RNA guide
aaacuuucguagcuucccau

SEQ ID NO: 7486 - RNA, 20 nt, Artificial Sequence
  RPE65 RNA guide
aacuuucguagcuucccauu

SEQ ID NO: 7487 - RNA, 20 nt, Artificial Sequence
  RPE65 RNA guide
aagcuacgaaaguuuuugcu

SEQ ID NO: 7488 - RNA, 20 nt, Artificial Sequence
  RPE65 RNA guide
aaugggaagcuacgaaaguu

SEQ ID NO: 7489 - RNA, 20 nt, Artificial Sequence
  RPE65 RNA guide
acgaaaguuuuugcucaaag

SEQ ID NO: 7490 - RNA, 20 nt, Artificial Sequence
  RPE65 RNA guide
acuuucguagcuucccauua

SEQ ID NO: 7491 - RNA, 20 nt, Artificial Sequence
  RPE65 RNA guide
agcaaaaacuuucguagcuu

SEQ ID NO: 7492 - RNA, 20 nt, Artificial Sequence
  RPE65 RNA guide
agcuaaugggaagcuacgaa

SEQ ID NO: 7493 - RNA, 20 nt, Artificial Sequence
  RPE65 RNA guide
agcuacgaaaguuuuugcuc

SEQ ID NO: 7494 - RNA, 20 nt, Artificial Sequence
  RPE65 RNA guide
augggaagcuacgaaaguuu

SEQ ID NO: 7495 - RNA, 20 nt, Artificial Sequence
  RPE65 RNA guide
caaaaacuuucguagcuucc

SEQ ID NO: 7496 - RNA, 20 nt, Artificial Sequence
  RPE65 RNA guide
cgaaaguuuuugcucaaaga

SEQ ID NO: 7497 - RNA, 20 nt, Artificial Sequence
  RPE65 RNA guide
cuaaugggaagcuacgaaag

SEQ ID NO: 7498 - RNA, 20 nt, Artificial Sequence
  RPE65 RNA guide
cuacgaaaguuuuugcucaa

SEQ ID NO: 7499 - RNA, 20 nt, Artificial Sequence
  RPE65 RNA guide
cuuucguagcuucccauuag

SEQ ID NO: 7500 - RNA, 20 nt, Artificial Sequence
  RPE65 RNA guide
cuuugagcaaaaacuuucgu

SEQ ID NO: 7501 - RNA, 20 nt, Artificial Sequence
  RPE65 RNA guide
gaagcuacgaaaguuuuugc

SEQ ID NO: 7502 - RNA, 20 nt, Artificial Sequence
  RPE65 RNA guide
gagcaaaaacuuucguagcu

SEQ ID NO: 7503 - RNA, 20 nt, Artificial Sequence
  RPE65 RNA guide
gcaaaaacuuucguagcuuc

SEQ ID NO: 7504 - RNA, 20 nt, Artificial Sequence
  RPE65 RNA guide
gcuaaugggaagcuacgaaa

SEQ ID NO: 7505 - RNA, 20 nt, Artificial Sequence
  RPE65 RNA guide
gcuacgaaaguuuuugcuca

SEQ ID NO: 7506 - RNA, 20 nt, Artificial Sequence
  RPE65 RNA guide
ggaagcuacgaaaguuuuug

SEQ ID NO: 7507 - RNA, 20 nt, Artificial Sequence
  RPE65 RNA guide
gggaagcuacgaaaguuuuu

SEQ ID NO: 7508 - RNA, 20 nt, Artificial Sequence
  RPE65 RNA guide
uaaugggaagcuacgaaagu

SEQ ID NO: 7509 - RNA, 20 nt, Artificial Sequence
  RPE65 RNA guide
uacgaaaguuuuugcucaaa

SEQ ID NO: 7510 - RNA, 20 nt, Artificial Sequence
  RPE65 RNA guide
uagcuaaugggaagcuacga

SEQ ID NO: 7511 - RNA, 20 nt, Artificial Sequence
  RPE65 RNA guide
ucguagcuucccauuagcua

SEQ ID NO: 7512 - RNA, 20 nt, Artificial Sequence
  RPE65 RNA guide
ucuuugagcaaaaacuuucg

SEQ ID NO: 7513 - RNA, 20 nt, Artificial Sequence
  RPE65 RNA guide
ugagcaaaaacuuucguagc

SEQ ID NO: 7514 - RNA, 20 nt, Artificial Sequence
  RPE65 RNA guide
ugggaagcuacgaaaguuuu

SEQ ID NO: 7515 - RNA, 20 nt, Artificial Sequence
  RPE65 RNA guide
uuagcuaaugggaagcuacg

SEQ ID NO: 7516 - RNA, 20 nt, Artificial Sequence
  RPE65 RNA guide
uucguagcuucccauuagcu

SEQ ID NO: 7517 - RNA, 20 nt, Artificial Sequence
  RPE65 RNA guide
uugagcaaaaacuuucguag

SEQ ID NO: 7518 - RNA, 20 nt, Artificial Sequence
  RPE65 RNA guide
uuguuuagcuaaugggaagc

SEQ ID NO: 7519 - RNA, 20 nt, Artificial Sequence
  RPE65 RNA guide
uuucguagcuucccauuagc

SEQ ID NO: 7520 - RNA, 20 nt, Artificial Sequence
  RPE65 RNA guide
uuugagcaaaaacuuucgua

SEQ ID NO: 7521 - RNA, 21 nt, Artificial Sequence
  RPE65 RNA guide
aaaaacuuucguagcuuccca

SEQ ID NO: 7522 - RNA, 21 nt, Artificial Sequence
  RPE65 RNA guide
aaaacuuucguagcuucccau

SEQ ID NO: 7523 - RNA, 21 nt, Artificial Sequence
  RPE65 RNA guide
aaacuuucguagcuucccauu

SEQ ID NO: 7524 - RNA, 21 nt, Artificial Sequence
  RPE65 RNA guide
aacuuucguagcuucccauua

SEQ ID NO: 7525 - RNA, 21 nt, Artificial Sequence
  RPE65 RNA guide
aagcuacgaaaguuuuugcuc

SEQ ID NO: 7526 - RNA, 21 nt, Artificial Sequence
  RPE65 RNA guide
aaugggaagcuacgaaaguuu

SEQ ID NO: 7527 - RNA, 21 nt, Artificial Sequence
  RPE65 RNA guide
acgaaaguuuuugcucaaaga

SEQ ID NO: 7528 - RNA, 21 nt, Artificial Sequence
  RPE65 RNA guide
acuuucguagcuucccauuag

SEQ ID NO: 7529 - RNA, 21 nt, Artificial Sequence
  RPE65 RNA guide
agcaaaaacuuucguagcuuc

SEQ ID NO: 7530 - RNA, 21 nt, Artificial Sequence
  RPE65 RNA guide
agcuaaugggaagcuacgaaa

SEQ ID NO: 7531 - RNA, 21 nt, Artificial Sequence
  RPE65 RNA guide
agcuacgaaaguuuuugcuca

SEQ ID NO: 7532 - RNA, 21 nt, Artificial Sequence
  RPE65 RNA guide
augggaagcuacgaaaguuuu

SEQ ID NO: 7533 - RNA, 21 nt, Artificial Sequence
  RPE65 RNA guide
caaaaacuuucguagcuuccc

SEQ ID NO: 7534 - RNA, 21 nt, Artificial Sequence
  RPE65 RNA guide
cgaaaguuuuugcucaaagaa

SEQ ID NO: 7535 - RNA, 21 nt, Artificial Sequence
  RPE65 RNA guide
cuaaugggaagcuacgaaagu

SEQ ID NO: 7536 - RNA, 21 nt, Artificial Sequence
  RPE65 RNA guide
cuacgaaaguuuuugcucaaa

SEQ ID NO: 7537 - RNA, 21 nt, Artificial Sequence
  RPE65 RNA guide
cuuucguagcuucccauuagc

SEQ ID NO: 7538 - RNA, 21 nt, Artificial Sequence
  RPE65 RNA guide
cuuugagcaaaaacuuucgua

SEQ ID NO: 7539 - RNA, 21 nt, Artificial Sequence
  RPE65 RNA guide
gaagcuacgaaaguuuuugcu

SEQ ID NO: 7540 - RNA, 21 nt, Artificial Sequence
  RPE65 RNA guide
gagcaaaaacuuucguagcuu

SEQ ID NO: 7541 - RNA, 21 nt, Artificial Sequence
  RPE65 RNA guide
gcaaaaacuuucguagcuucc

SEQ ID NO: 7542 - RNA, 21 nt, Artificial Sequence
  RPE65 RNA guide
gcuaaugggaagcuacgaaag

SEQ ID NO: 7543 - RNA, 21 nt, Artificial Sequence
  RPE65 RNA guide
gcuacgaaaguuuuugcucaa

SEQ ID NO: 7544 - RNA, 21 nt, Artificial Sequence
  RPE65 RNA guide
ggaagcuacgaaaguuuuugc

SEQ ID NO: 7545 - RNA, 21 nt, Artificial Sequence
  RPE65 RNA guide
gggaagcuacgaaaguuuuug

SEQ ID NO: 7546 - RNA, 21 nt, Artificial Sequence
  RPE65 RNA guide
guuguuuagcuaaugggaagc

SEQ ID NO: 7547 - RNA, 21 nt, Artificial Sequence
  RPE65 RNA guide
uaaugggaagcuacgaaaguu

SEQ ID NO: 7548 - RNA, 21 nt, Artificial Sequence
  RPE65 RNA guide
uacgaaaguuuuugcucaaag

SEQ ID NO: 7549 - RNA, 21 nt, Artificial Sequence
  RPE65 RNA guide
uagcuaaugggaagcuacgaa

SEQ ID NO: 7550 - RNA, 21 nt, Artificial Sequence
  RPE65 RNA guide
ucguagcuucccauuagcuaa

SEQ ID NO: 7551 - RNA, 21 nt, Artificial Sequence
  RPE65 RNA guide
ucuuugagcaaaaacuuucgu

SEQ ID NO: 7552 - RNA, 21 nt, Artificial Sequence
  RPE65 RNA guide
ugagcaaaaacuuucguagcu

SEQ ID NO: 7553 - RNA, 21 nt, Artificial Sequence
  RPE65 RNA guide
ugggaagcuacgaaaguuuuu

SEQ ID NO: 7554 - RNA, 21 nt, Artificial Sequence
  RPE65 RNA guide
uuagcuaaugggaagcuacga

SEQ ID NO: 7555 - RNA, 21 nt, Artificial Sequence
  RPE65 RNA guide
uucguagcuucccauuagcua

SEQ ID NO: 7556 - RNA, 21 nt, Artificial Sequence
  RPE65 RNA guide
uucuuugagcaaaaacuuucg

SEQ ID NO: 7557 - RNA, 21 nt, Artificial Sequence
  RPE65 RNA guide
uugagcaaaaacuuucguagc

SEQ ID NO: 7558 - RNA, 21 nt, Artificial Sequence
  RPE65 RNA guide
uuuagcuaaugggaagcuacg

SEQ ID NO: 7559 - RNA, 21 nt, Artificial Sequence
  RPE65 RNA guide
uuucguagcuucccauuagcu

SEQ ID NO: 7560 - RNA, 21 nt, Artificial Sequence
  RPE65 RNA guide
uuugagcaaaaacuuucguag

SEQ ID NO: 7561 - RNA, 22 nt, Artificial Sequence
  RPE65 RNA guide
aaaaacuuucguagcuucccau

SEQ ID NO: 7562 - RNA, 22 nt, Artificial Sequence
  RPE65 RNA guide
aaaacuuucguagcuucccauu

SEQ ID NO: 7563 - RNA, 22 nt, Artificial Sequence
  RPE65 RNA guide
aaacuuucguagcuucccauua

SEQ ID NO: 7564 - RNA, 22 nt, Artificial Sequence
  RPE65 RNA guide
aacuuucguagcuucccauuag

SEQ ID NO: 7565 - RNA, 22 nt, Artificial Sequence
  RPE65 RNA guide
aagcuacgaaaguuuuugcuca

SEQ ID NO: 7566 - RNA, 22 nt, Artificial Sequence
  RPE65 RNA guide
aaugggaagcuacgaaaguuuu

SEQ ID NO: 7567 - RNA, 22 nt, Artificial Sequence
  RPE65 RNA guide
acgaaaguuuuugcucaaagaa

SEQ ID NO: 7568 - RNA, 22 nt, Artificial Sequence
  RPE65 RNA guide
acuuucguagcuucccauuagc

SEQ ID NO: 7569 - RNA, 22 nt, Artificial Sequence
  RPE65 RNA guide
agcaaaaacuuucguagcuucc

SEQ ID NO: 7570 - RNA, 22 nt, Artificial Sequence
  RPE65 RNA guide
agcuaaugggaagcuacgaaag

SEQ ID NO: 7571 - RNA, 22 nt, Artificial Sequence
  RPE65 RNA guide
agcuacgaaaguuuuugcucaa

SEQ ID NO: 7572 - RNA, 22 nt, Artificial Sequence
  RPE65 RNA guide
augggaagcuacgaaaguuuuu

SEQ ID NO: 7573 - RNA, 22 nt, Artificial Sequence
  RPE65 RNA guide
caaaaacuuucguagcuuccca

SEQ ID NO: 7574 - RNA, 22 nt, Artificial Sequence
  RPE65 RNA guide
cgaaaguuuuugcucaaagaag

SEQ ID NO: 7575 - RNA, 22 nt, Artificial Sequence
  RPE65 RNA guide
cuaaugggaagcuacgaaaguu

SEQ ID NO: 7576 - RNA, 22 nt, Artificial Sequence
  RPE65 RNA guide
cuacgaaaguuuuugcucaaag

SEQ ID NO: 7577 - RNA, 22 nt, Artificial Sequence
  RPE65 RNA guide
cuucuuugagcaaaaacuuucg

SEQ ID NO: 7578 - RNA, 22 nt, Artificial Sequence
  RPE65 RNA guide
cuuucguagcuucccauuagcu

SEQ ID NO: 7579 - RNA, 22 nt, Artificial Sequence
  RPE65 RNA guide
cuuugagcaaaaacuuucguag

SEQ ID NO: 7580 - RNA, 22 nt, Artificial Sequence
  RPE65 RNA guide
gaagcuacgaaaguuuuugcuc

SEQ ID NO: 7581 - RNA, 22 nt, Artificial Sequence
  RPE65 RNA guide
gagcaaaaacuuucguagcuuc

SEQ ID NO: 7582 - RNA, 22 nt, Artificial Sequence
  RPE65 RNA guide
gcaaaaacuuucguagcuuccc

SEQ ID NO: 7583 - RNA, 22 nt, Artificial Sequence
  RPE65 RNA guide
gcuaaugggaagcuacgaaagu

SEQ ID NO: 7584 - RNA, 22 nt, Artificial Sequence
  RPE65 RNA guide
gcuacgaaaguuuuugcucaaa

SEQ ID NO: 7585 - RNA, 22 nt, Artificial Sequence
  RPE65 RNA guide
ggaagcuacgaaaguuuuugcu

SEQ ID NO: 7586 - RNA, 22 nt, Artificial Sequence
  RPE65 RNA guide
gggaagcuacgaaaguuuuugc

SEQ ID NO: 7587 - RNA, 22 nt, Artificial Sequence
  RPE65 RNA guide
guuuagcuaaugggaagcuacg

SEQ ID NO: 7588 - RNA, 22 nt, Artificial Sequence
  RPE65 RNA guide
uaaugggaagcuacgaaaguuu

SEQ ID NO: 7589 - RNA, 22 nt, Artificial Sequence
  RPE65 RNA guide
uacgaaaguuuuugcucaaaga

SEQ ID NO: 7590 - RNA, 22 nt, Artificial Sequence
  RPE65 RNA guide
uagcuaaugggaagcuacgaaa

SEQ ID NO: 7591 - RNA, 22 nt, Artificial Sequence
  RPE65 RNA guide
ucguagcuucccauuagcuaaa

SEQ ID NO: 7592 - RNA, 22 nt, Artificial Sequence
  RPE65 RNA guide
ucuuugagcaaaaacuuucgua

SEQ ID NO: 7593 - RNA, 22 nt, Artificial Sequence
  RPE65 RNA guide
ugagcaaaaacuuucguagcuu

SEQ ID NO: 7594 - RNA, 22 nt, Artificial Sequence
  RPE65 RNA guide
ugggaagcuacgaaaguuuuug

SEQ ID NO: 7595 - RNA, 22 nt, Artificial Sequence
  RPE65 RNA guide
uguuguuuagcuaaugggaagc

SEQ ID NO: 7596 - RNA, 22 nt, Artificial Sequence
  RPE65 RNA guide
uuagcuaaugggaagcuacgaa

SEQ ID NO: 7597 - RNA, 22 nt, Artificial Sequence
  RPE65 RNA guide
uucguagcuucccauuagcuaa

SEQ ID NO: 7598 - RNA, 22 nt, Artificial Sequence
  RPE65 RNA guide
uucuuugagcaaaaacuuucgu

SEQ ID NO: 7599 - RNA, 22 nt, Artificial Sequence
  RPE65 RNA guide
uugagcaaaaacuuucguagcu

SEQ ID NO: 7600 - RNA, 22 nt, Artificial Sequence
  RPE65 RNA guide
uuuagcuaaugggaagcuacga

SEQ ID NO: 7601 - RNA, 22 nt, Artificial Sequence
  RPE65 RNA guide
uuucguagcuucccauuagcua

SEQ ID NO: 7602 - RNA, 22 nt, Artificial Sequence
  RPE65 RNA guide
uuugagcaaaaacuuucguagc

SEQ ID NO: 7603 - RNA, 20 nt, Artificial Sequence
  RPE65 RNA guide
aauaccuccacugagaaaug

SEQ ID NO: 7604 - RNA, 20 nt, Artificial Sequence
  RPE65 RNA guide
aaugucauacuaauaccucc

SEQ ID NO: 7605 - RNA, 20 nt, Artificial Sequence
  RPE65 RNA guide
accuccacugagaaaugcug

SEQ ID NO: 7606 - RNA, 20 nt, Artificial Sequence
  RPE65 RNA guide
acuaauaccuccacugagaa

SEQ ID NO: 7607 - RNA, 20 nt, Artificial Sequence
  RPE65 RNA guide
acuagacuugcagcauuucu

SEQ ID NO: 7608 - RNA, 20 nt, Artificial Sequence
  RPE65 RNA guide
acugagaaaugcugcaaguc

SEQ ID NO: 7609 - RNA, 20 nt, Artificial Sequence
  RPE65 RNA guide
acuugcagcauuucucagug

SEQ ID NO: 7610 - RNA, 20 nt, Artificial Sequence
  RPE65 RNA guide
agacuugcagcauuucucag

SEQ ID NO: 7611 - RNA, 20 nt, Artificial Sequence
  RPE65 RNA guide
agcauuucucaguggaggua

SEQ ID NO: 7612 - RNA, 20 nt, Artificial Sequence
  RPE65 RNA guide
aguggagguauuaguaugac

SEQ ID NO: 7613 - RNA, 20 nt, Artificial Sequence
  RPE65 RNA guide
auaccuccacugagaaaugc

SEQ ID NO: 7614 - RNA, 20 nt, Artificial Sequence
  RPE65 RNA guide
auacuaauaccuccacugag

SEQ ID NO: 7615 - RNA, 20 nt, Artificial Sequence
  RPE65 RNA guide
augucauacuaauaccucca

SEQ ID NO: 7616 - RNA, 20 nt, Artificial Sequence
  RPE65 RNA guide
auuucucaguggagguauua

SEQ ID NO: 7617 - RNA, 20 nt, Artificial Sequence
  RPE65 RNA guide
cacugagaaaugcugcaagu

SEQ ID NO: 7618 - RNA, 20 nt, Artificial Sequence
  RPE65 RNA guide
cagcauuucucaguggaggu

SEQ ID NO: 7619 - RNA, 20 nt, Artificial Sequence
  RPE65 RNA guide
caguggagguauuaguauga

SEQ ID NO: 7620 - RNA, 20 nt, Artificial Sequence
  RPE65 RNA guide
cauacuaauaccuccacuga

SEQ ID NO: 7621 - RNA, 20 nt, Artificial Sequence
  RPE65 RNA guide
cauuucucaguggagguauu

SEQ ID NO: 7622 - RNA, 20 nt, Artificial Sequence
  RPE65 RNA guide
ccacugagaaaugcugcaag

SEQ ID NO: 7623 - RNA, 20 nt, Artificial Sequence
  RPE65 RNA guide
ccuccacugagaaaugcugc

SEQ ID NO: 7624 - RNA, 20 nt, Artificial Sequence
  RPE65 RNA guide
cuaauaccuccacugagaaa

SEQ ID NO: 7625 - RNA, 20 nt, Artificial Sequence
  RPE65 RNA guide
cuaaugucauacuaauaccu

SEQ ID NO: 7626 - RNA, 20 nt, Artificial Sequence
  RPE65 RNA guide
cuagacuugcagcauuucuc

SEQ ID NO: 7627 - RNA, 20 nt, Artificial Sequence
  RPE65 RNA guide
cucaguggagguauuaguau

SEQ ID NO: 7628 - RNA, 20 nt, Artificial Sequence
  RPE65 RNA guide
cuccacugagaaaugcugca

SEQ ID NO: 7629 - RNA, 20 nt, Artificial Sequence
  RPE65 RNA guide
cuugcagcauuucucagugg

SEQ ID NO: 7630 - RNA, 20 nt, Artificial Sequence
  RPE65 RNA guide
gacuagacuugcagcauuuc

SEQ ID NO: 7631 - RNA, 20 nt, Artificial Sequence
  RPE65 RNA guide
gacuugcagcauuucucagu

SEQ ID NO: 7632 - RNA, 20 nt, Artificial Sequence
  RPE65 RNA guide
gcagcauuucucaguggagg

SEQ ID NO: 7633 - RNA, 20 nt, Artificial Sequence
  RPE65 RNA guide
gcauuucucaguggagguau

SEQ ID NO: 7634 - RNA, 20 nt, Artificial Sequence
  RPE65 RNA guide
gucauacuaauaccuccacu

SEQ ID NO: 7635 - RNA, 20 nt, Artificial Sequence
  RPE65 RNA guide
uaauaccuccacugagaaau

SEQ ID NO: 7636 - RNA, 20 nt, Artificial Sequence
  RPE65 RNA guide
uaaugucauacuaauaccuc

SEQ ID NO: 7637 - RNA, 20 nt, Artificial Sequence
  RPE65 RNA guide
uaccuccacugagaaaugcu

SEQ ID NO: 7638 - RNA, 20 nt, Artificial Sequence
  RPE65 RNA guide
uacuaauaccuccacugaga

SEQ ID NO: 7639 - RNA, 20 nt, Artificial Sequence
  RPE65 RNA guide
uagacuugcagcauuucuca

SEQ ID NO: 7640 - RNA, 20 nt, Artificial Sequence
  RPE65 RNA guide
ucaguggagguauuaguaug

SEQ ID NO: 7641 - RNA, 20 nt, Artificial Sequence
  RPE65 RNA guide
ucauacuaauaccuccacug

SEQ ID NO: 7642 - RNA, 20 nt, Artificial Sequence
  RPE65 RNA guide
uccacugagaaaugcugcaa

SEQ ID NO: 7643 - RNA, 20 nt, Artificial Sequence
  RPE65 RNA guide
ucucaguggagguauuagua

SEQ ID NO: 7644 - RNA, 20 nt, Artificial Sequence
  RPE65 RNA guide
ugcagcauuucucaguggag

SEQ ID NO: 7645 - RNA, 20 nt, Artificial Sequence
  RPE65 RNA guide
ugucauacuaauaccuccac

SEQ ID NO: 7646 - RNA, 20 nt, Artificial Sequence
  RPE65 RNA guide
uucucaguggagguauuagu

SEQ ID NO: 7647 - RNA, 20 nt, Artificial Sequence
  RPE65 RNA guide
uugcagcauuucucagugga

SEQ ID NO: 7648 - RNA, 20 nt, Artificial Sequence
  RPE65 RNA guide
uuucucaguggagguauuag

SEQ ID NO: 7649 - RNA, 21 nt, Artificial Sequence
  RPE65 RNA guide
aauaccuccacugagaaaugc

SEQ ID NO: 7650 - RNA, 21 nt, Artificial Sequence
  RPE65 RNA guide
aaugucauacuaauaccucca

SEQ ID NO: 7651 - RNA, 21 nt, Artificial Sequence
  RPE65 RNA guide
accuccacugagaaaugcugc

SEQ ID NO: 7652 - RNA, 21 nt, Artificial Sequence
  RPE65 RNA guide
acuaauaccuccacugagaaa

SEQ ID NO: 7653 - RNA, 21 nt, Artificial Sequence
  RPE65 RNA guide
acuagacuugcagcauuucuc

SEQ ID NO: 7654 - RNA, 21 nt, Artificial Sequence
  RPE65 RNA guide
acugagaaaugcugcaagucu

SEQ ID NO: 7655 - RNA, 21 nt, Artificial Sequence
  RPE65 RNA guide
acuugcagcauuucucagugg

SEQ ID NO: 7656 - RNA, 21 nt, Artificial Sequence
  RPE65 RNA guide
agacuugcagcauuucucagu

SEQ ID NO: 7657 - RNA, 21 nt, Artificial Sequence
  RPE65 RNA guide
agcauuucucaguggagguau

SEQ ID NO: 7658 - RNA, 21 nt, Artificial Sequence
  RPE65 RNA guide
aguggagguauuaguaugaca

SEQ ID NO: 7659 - RNA, 21 nt, Artificial Sequence
  RPE65 RNA guide
auaccuccacugagaaaugcu

SEQ ID NO: 7660 - RNA, 21 nt, Artificial Sequence
  RPE65 RNA guide
auacuaauaccuccacugaga

SEQ ID NO: 7661 - RNA, 21 nt, Artificial Sequence
  RPE65 RNA guide
augucauacuaauaccuccac

SEQ ID NO: 7662 - RNA, 21 nt, Artificial Sequence
  RPE65 RNA guide
auuucucaguggagguauuag

SEQ ID NO: 7663 - RNA, 21 nt, Artificial Sequence
  RPE65 RNA guide
cacugagaaaugcugcaaguc

SEQ ID NO: 7664 - RNA, 21 nt, Artificial Sequence
  RPE65 RNA guide
cagcauuucucaguggaggua

SEQ ID NO: 7665 - RNA, 21 nt, Artificial Sequence
  RPE65 RNA guide
caguggagguauuaguaugac

SEQ ID NO: 7666 - RNA, 21 nt, Artificial Sequence
  RPE65 RNA guide
cauacuaauaccuccacugag

SEQ ID NO: 7667 - RNA, 21 nt, Artificial Sequence
  RPE65 RNA guide
cauuucucaguggagguauua

SEQ ID NO: 7668 - RNA, 21 nt, Artificial Sequence
  RPE65 RNA guide
ccacugagaaaugcugcaagu

SEQ ID NO: 7669 - RNA, 21 nt, Artificial Sequence
  RPE65 RNA guide
ccuaaugucauacuaauaccu

SEQ ID NO: 7670 - RNA, 21 nt, Artificial Sequence
  RPE65 RNA guide
ccuccacugagaaaugcugca

SEQ ID NO: 7671 - RNA, 21 nt, Artificial Sequence
  RPE65 RNA guide
cuaauaccuccacugagaaau

SEQ ID NO: 7672 - RNA, 21 nt, Artificial Sequence
  RPE65 RNA guide
cuaaugucauacuaauaccuc

SEQ ID NO: 7673 - RNA, 21 nt, Artificial Sequence
  RPE65 RNA guide
cuagacuugcagcauuucuca

SEQ ID NO: 7674 - RNA, 21 nt, Artificial Sequence
  RPE65 RNA guide
cucaguggagguauuaguaug

SEQ ID NO: 7675 - RNA, 21 nt, Artificial Sequence
  RPE65 RNA guide
cuccacugagaaaugcugcaa

SEQ ID NO: 7676 - RNA, 21 nt, Artificial Sequence
  RPE65 RNA guide
cuugcagcauuucucagugga

SEQ ID NO: 7677 - RNA, 21 nt, Artificial Sequence
  RPE65 RNA guide
gacuagacuugcagcauuucu

SEQ ID NO: 7678 - RNA, 21 nt, Artificial Sequence
  RPE65 RNA guide
gacuugcagcauuucucagug

SEQ ID NO: 7679 - RNA, 21 nt, Artificial Sequence
  RPE65 RNA guide
gcagcauuucucaguggaggu

SEQ ID NO: 7680 - RNA, 21 nt, Artificial Sequence
  RPE65 RNA guide
gcauuucucaguggagguauu

SEQ ID NO: 7681 - RNA, 21 nt, Artificial Sequence
  RPE65 RNA guide
ggacuagacuugcagcauuuc

SEQ ID NO: 7682 - RNA, 21 nt, Artificial Sequence
  RPE65 RNA guide
gucauacuaauaccuccacug

SEQ ID NO: 7683 - RNA, 21 nt, Artificial Sequence
  RPE65 RNA guide
uaauaccuccacugagaaaug

SEQ ID NO: 7684 - RNA, 21 nt, Artificial Sequence
  RPE65 RNA guide
uaaugucauacuaauaccucc

SEQ ID NO: 7685 - RNA, 21 nt, Artificial Sequence
  RPE65 RNA guide
uaccuccacugagaaaugcug

SEQ ID NO: 7686 - RNA, 21 nt, Artificial Sequence
  RPE65 RNA guide
uacuaauaccuccacugagaa

SEQ ID NO: 7687 - RNA, 21 nt, Artificial Sequence
  RPE65 RNA guide
uagacuugcagcauuucucag

SEQ ID NO: 7688 - RNA, 21 nt, Artificial Sequence
  RPE65 RNA guide
ucaguggagguauuaguauga

SEQ ID NO: 7689 - RNA, 21 nt, Artificial Sequence
  RPE65 RNA guide
ucauacuaauaccuccacuga

SEQ ID NO: 7690 - RNA, 21 nt, Artificial Sequence
  RPE65 RNA guide
uccacugagaaaugcugcaag

SEQ ID NO: 7691 - RNA, 21 nt, Artificial Sequence
  RPE65 RNA guide
ucucaguggagguauuaguau

SEQ ID NO: 7692 - RNA, 21 nt, Artificial Sequence
  RPE65 RNA guide
ugcagcauuucucaguggagg

SEQ ID NO: 7693 - RNA, 21 nt, Artificial Sequence
  RPE65 RNA guide
ugucauacuaauaccuccacu

SEQ ID NO: 7694 - RNA, 21 nt, Artificial Sequence
  RPE65 RNA guide
uucucaguggagguauuagua

SEQ ID NO: 7695 - RNA, 21 nt, Artificial Sequence
  RPE65 RNA guide
uugcagcauuucucaguggag

SEQ ID NO: 7696 - RNA, 21 nt, Artificial Sequence
  RPE65 RNA guide
uuucucaguggagguauuagu

SEQ ID NO: 7697 - RNA, 22 nt, Artificial Sequence
  RPE65 RNA guide
aauaccuccacugagaaaugcu

SEQ ID NO: 7698 - RNA, 22 nt, Artificial Sequence
  RPE65 RNA guide
aaugucauacuaauaccuccac

SEQ ID NO: 7699 - RNA, 22 nt, Artificial Sequence
  RPE65 RNA guide
accuccacugagaaaugcugca

SEQ ID NO: 7700 - RNA, 22 nt, Artificial Sequence
  RPE65 RNA guide
acuaauaccuccacugagaaau

SEQ ID NO: 7701 - RNA, 22 nt, Artificial Sequence
  RPE65 RNA guide
acuagacuugcagcauuucuca

SEQ ID NO: 7702 - RNA, 22 nt, Artificial Sequence
  RPE65 RNA guide
acugagaaaugcugcaagucua

SEQ ID NO: 7703 - RNA, 22 nt, Artificial Sequence
  RPE65 RNA guide
acuugcagcauuucucagugga

SEQ ID NO: 7704 - RNA, 22 nt, Artificial Sequence
  RPE65 RNA guide
agacuugcagcauuucucagug

SEQ ID NO: 7705 - RNA, 22 nt, Artificial Sequence
  RPE65 RNA guide
agcauuucucaguggagguauu

SEQ ID NO: 7706 - RNA, 22 nt, Artificial Sequence
  RPE65 RNA guide
aguggagguauuaguaugacau

SEQ ID NO: 7707 - RNA, 22 nt, Artificial Sequence
  RPE65 RNA guide
auaccuccacugagaaaugcug

SEQ ID NO: 7708 - RNA, 22 nt, Artificial Sequence
  RPE65 RNA guide
auacuaauaccuccacugagaa

SEQ ID NO: 7709 - RNA, 22 nt, Artificial Sequence
  RPE65 RNA guide
augucauacuaauaccuccacu

SEQ ID NO: 7710 - RNA, 22 nt, Artificial Sequence
  RPE65 RNA guide
auuucucaguggagguauuagu

SEQ ID NO: 7711 - RNA, 22 nt, Artificial Sequence
  RPE65 RNA guide
cacugagaaaugcugcaagucu

SEQ ID NO: 7712 - RNA, 22 nt, Artificial Sequence
  RPE65 RNA guide
cagcauuucucaguggagguau

SEQ ID NO: 7713 - RNA, 22 nt, Artificial Sequence
  RPE65 RNA guide
caguggagguauuaguaugaca

SEQ ID NO: 7714 - RNA, 22 nt, Artificial Sequence
  RPE65 RNA guide
cauacuaauaccuccacugaga

SEQ ID NO: 7715 - RNA, 22 nt, Artificial Sequence
  RPE65 RNA guide
cauuucucaguggagguauuag

SEQ ID NO: 7716 - RNA, 22 nt, Artificial Sequence
  RPE65 RNA guide
ccacugagaaaugcugcaaguc

SEQ ID NO: 7717 - RNA, 22 nt, Artificial Sequence
  RPE65 RNA guide
ccuaaugucauacuaauaccuc

SEQ ID NO: 7718 - RNA, 22 nt, Artificial Sequence
  RPE65 RNA guide
ccuccacugagaaaugcugcaa

SEQ ID NO: 7719 - RNA, 22 nt, Artificial Sequence
  RPE65 RNA guide
cuaauaccuccacugagaaaug

SEQ ID NO: 7720 - RNA, 22 nt, Artificial Sequence
  RPE65 RNA guide
cuaaugucauacuaauaccucc

SEQ ID NO: 7721 - RNA, 22 nt, Artificial Sequence
  RPE65 RNA guide
cuagacuugcagcauuucucag

SEQ ID NO: 7722 - RNA, 22 nt, Artificial Sequence
  RPE65 RNA guide
cucaguggagguauuaguauga

SEQ ID NO: 7723 - RNA, 22 nt, Artificial Sequence
  RPE65 RNA guide
cuccacugagaaaugcugcaag

SEQ ID NO: 7724 - RNA, 22 nt, Artificial Sequence
  RPE65 RNA guide
cuugcagcauuucucaguggag

SEQ ID NO: 7725 - RNA, 22 nt, Artificial Sequence
  RPE65 RNA guide
gacuagacuugcagcauuucuc

SEQ ID NO: 7726 - RNA, 22 nt, Artificial Sequence
  RPE65 RNA guide
gacuugcagcauuucucagugg

SEQ ID NO: 7727 - RNA, 22 nt, Artificial Sequence
  RPE65 RNA guide
gcagcauuucucaguggaggua

SEQ ID NO: 7728 - RNA, 22 nt, Artificial Sequence
  RPE65 RNA guide
gcauuucucaguggagguauua

SEQ ID NO: 7729 - RNA, 22 nt, Artificial Sequence
  RPE65 RNA guide
gccuaaugucauacuaauaccu

SEQ ID NO: 7730 - RNA, 22 nt, Artificial Sequence
  RPE65 RNA guide
ggacuagacuugcagcauuucu

SEQ ID NO: 7731 - RNA, 22 nt, Artificial Sequence
  RPE65 RNA guide
gucauacuaauaccuccacuga

SEQ ID NO: 7732 - RNA, 22 nt, Artificial Sequence
  RPE65 RNA guide
uaauaccuccacugagaaaugc

SEQ ID NO: 7733 - RNA, 22 nt, Artificial Sequence
  RPE65 RNA guide
uaaugucauacuaauaccucca

SEQ ID NO: 7734 - RNA, 22 nt, Artificial Sequence
  RPE65 RNA guide
uaccuccacugagaaaugcugc

SEQ ID NO: 7735 - RNA, 22 nt, Artificial Sequence
  RPE65 RNA guide
uacuaauaccuccacugagaaa

SEQ ID NO: 7736 - RNA, 22 nt, Artificial Sequence
  RPE65 RNA guide
uagacuugcagcauuucucagu

SEQ ID NO: 7737 - RNA, 22 nt, Artificial Sequence
  RPE65 RNA guide
ucaguggagguauuaguaugac

SEQ ID NO: 7738 - RNA, 22 nt, Artificial Sequence
  RPE65 RNA guide
ucauacuaauaccuccacugag

SEQ ID NO: 7739 - RNA, 22 nt, Artificial Sequence
  RPE65 RNA guide
uccacugagaaaugcugcaagu

SEQ ID NO: 7740 - RNA, 22 nt, Artificial Sequence
  RPE65 RNA guide
ucucaguggagguauuaguaug

SEQ ID NO: 7741 - RNA, 22 nt, Artificial Sequence
  RPE65 RNA guide
ugcagcauuucucaguggaggu

SEQ ID NO: 7742 - RNA, 22 nt, Artificial Sequence
  RPE65 RNA guide
uggacuagacuugcagcauuuc

SEQ ID NO: 7743 - RNA, 22 nt, Artificial Sequence
  RPE65 RNA guide
ugucauacuaauaccuccacug

SEQ ID NO: 7744 - RNA, 22 nt, Artificial Sequence
  RPE65 RNA guide
uucucaguggagguauuaguau

SEQ ID NO: 7745 - RNA, 22 nt, Artificial Sequence
  RPE65 RNA guide
uugcagcauuucucaguggagg

SEQ ID NO: 7746 - RNA, 22 nt, Artificial Sequence
  RPE65 RNA guide
uuucucaguggagguauuagua

SEQ ID NO: 7747 - RNA, 20 nt, Artificial Sequence
  RPE65 RNA guide
aauaccuccauugagaaaug

SEQ ID NO: 7748 - RNA, 20 nt, Artificial Sequence
  RPE65 RNA guide
aauggagguauuaguaugac

SEQ ID NO: 7749 - RNA, 20 nt, Artificial Sequence
  RPE65 RNA guide
accuccauugagaaaugcug

SEQ ID NO: 7750 - RNA, 20 nt, Artificial Sequence
  RPE65 RNA guide
acuaauaccuccauugagaa

SEQ ID NO: 7751 - RNA, 20 nt, Artificial Sequence
  RPE65 RNA guide
acuugcagcauuucucaaug

SEQ ID NO: 7752 - RNA, 20 nt, Artificial Sequence
  RPE65 RNA guide
agacuugcagcauuucucaa

SEQ ID NO: 7753 - RNA, 20 nt, Artificial Sequence
  RPE65 RNA guide
agcauuucucaauggaggua

SEQ ID NO: 7754 - RNA, 20 nt, Artificial Sequence
  RPE65 RNA guide
auaccuccauugagaaaugc

SEQ ID NO: 7755 - RNA, 20 nt, Artificial Sequence
  RPE65 RNA guide
auacuaauaccuccauugag

SEQ ID NO: 7756 - RNA, 20 nt, Artificial Sequence
  RPE65 RNA guide
auugagaaaugcugcaaguc

SEQ ID NO: 7757 - RNA, 20 nt, Artificial Sequence
  RPE65 RNA guide
auuucucaauggagguauua

SEQ ID NO: 7758 - RNA, 20 nt, Artificial Sequence
  RPE65 RNA guide
caauggagguauuaguauga

SEQ ID NO: 7759 - RNA, 20 nt, Artificial Sequence
  RPE65 RNA guide
cagcauuucucaauggaggu

SEQ ID NO: 7760 - RNA, 20 nt, Artificial Sequence
  RPE65 RNA guide
cauacuaauaccuccauuga

SEQ ID NO: 7761 - RNA, 20 nt, Artificial Sequence
  RPE65 RNA guide
cauugagaaaugcugcaagu

SEQ ID NO: 7762 - RNA, 20 nt, Artificial Sequence
  RPE65 RNA guide
cauuucucaauggagguauu

SEQ ID NO: 7763 - RNA, 20 nt, Artificial Sequence
  RPE65 RNA guide
ccauugagaaaugcugcaag

SEQ ID NO: 7764 - RNA, 20 nt, Artificial Sequence
  RPE65 RNA guide
ccuccauugagaaaugcugc

SEQ ID NO: 7765 - RNA, 20 nt, Artificial Sequence
  RPE65 RNA guide
cuaauaccuccauugagaaa

SEQ ID NO: 7766 - RNA, 20 nt, Artificial Sequence
  RPE65 RNA guide
cucaauggagguauuaguau

SEQ ID NO: 7767 - RNA, 20 nt, Artificial Sequence
  RPE65 RNA guide
cuccauugagaaaugcugca

SEQ ID NO: 7768 - RNA, 20 nt, Artificial Sequence
  RPE65 RNA guide
cuugcagcauuucucaaugg

SEQ ID NO: 7769 - RNA, 20 nt, Artificial Sequence
  RPE65 RNA guide
gacuugcagcauuucucaau

SEQ ID NO: 7770 - RNA, 20 nt, Artificial Sequence
  RPE65 RNA guide
gcagcauuucucaauggagg

SEQ ID NO: 7771 - RNA, 20 nt, Artificial Sequence
  RPE65 RNA guide
gcauuucucaauggagguau

SEQ ID NO: 7772 - RNA, 20 nt, Artificial Sequence
  RPE65 RNA guide
gucauacuaauaccuccauu

SEQ ID NO: 7773 - RNA, 20 nt, Artificial Sequence
  RPE65 RNA guide
uaauaccuccauugagaaau

SEQ ID NO: 7774 - RNA, 20 nt, Artificial Sequence
  RPE65 RNA guide
uaccuccauugagaaaugcu

SEQ ID NO: 7775 - RNA, 20 nt, Artificial Sequence
  RPE65 RNA guide
uacuaauaccuccauugaga

SEQ ID NO: 7776 - RNA, 20 nt, Artificial Sequence
  RPE65 RNA guide
ucaauggagguauuaguaug

SEQ ID NO: 7777 - RNA, 20 nt, Artificial Sequence
  RPE65 RNA guide
ucauacuaauaccuccauug

SEQ ID NO: 7778 - RNA, 20 nt, Artificial Sequence
  RPE65 RNA guide
uccauugagaaaugcugcaa

SEQ ID NO: 7779 - RNA, 20 nt, Artificial Sequence
  RPE65 RNA guide
ucucaauggagguauuagua

SEQ ID NO: 7780 - RNA, 20 nt, Artificial Sequence
  RPE65 RNA guide
ugcagcauuucucaauggag

SEQ ID NO: 7781 - RNA, 20 nt, Artificial Sequence
  RPE65 RNA guide
ugucauacuaauaccuccau

SEQ ID NO: 7782 - RNA, 20 nt, Artificial Sequence
  RPE65 RNA guide
uucucaauggagguauuagu

SEQ ID NO: 7783 - RNA, 20 nt, Artificial Sequence
  RPE65 RNA guide
uugcagcauuucucaaugga

SEQ ID NO: 7784 - RNA, 20 nt, Artificial Sequence
  RPE65 RNA guide
uuucucaauggagguauuag

SEQ ID NO: 7785 - RNA, 21 nt, Artificial Sequence
  RPE65 RNA guide
aauaccuccauugagaaaugc

SEQ ID NO: 7786 - RNA, 21 nt, Artificial Sequence
  RPE65 RNA guide
aauggagguauuaguaugaca

SEQ ID NO: 7787 - RNA, 21 nt, Artificial Sequence
  RPE65 RNA guide
accuccauugagaaaugcugc

SEQ ID NO: 7788 - RNA, 21 nt, Artificial Sequence
  RPE65 RNA guide
acuaauaccuccauugagaaa

SEQ ID NO: 7789 - RNA, 21 nt, Artificial Sequence
  RPE65 RNA guide
acuugcagcauuucucaaugg

SEQ ID NO: 7790 - RNA, 21 nt, Artificial Sequence
  RPE65 RNA guide
agacuugcagcauuucucaau

SEQ ID NO: 7791 - RNA, 21 nt, Artificial Sequence
  RPE65 RNA guide
agcauuucucaauggagguau

SEQ ID NO: 7792 - RNA, 21 nt, Artificial Sequence
  RPE65 RNA guide
auaccuccauugagaaaugcu

SEQ ID NO: 7793 - RNA, 21 nt, Artificial Sequence
  RPE65 RNA guide
auacuaauaccuccauugaga

SEQ ID NO: 7794 - RNA, 21 nt, Artificial Sequence
  RPE65 RNA guide
augucauacuaauaccuccau

SEQ ID NO: 7795 - RNA, 21 nt, Artificial Sequence
  RPE65 RNA guide
auugagaaaugcugcaagucu

SEQ ID NO: 7796 - RNA, 21 nt, Artificial Sequence
  RPE65 RNA guide
auuucucaauggagguauuag

SEQ ID NO: 7797 - RNA, 21 nt, Artificial Sequence
  RPE65 RNA guide
caauggagguauuaguaugac

SEQ ID NO: 7798 - RNA, 21 nt, Artificial Sequence
  RPE65 RNA guide
cagcauuucucaauggaggua

SEQ ID NO: 7799 - RNA, 21 nt, Artificial Sequence
  RPE65 RNA guide
cauacuaauaccuccauugag

SEQ ID NO: 7800 - RNA, 21 nt, Artificial Sequence
  RPE65 RNA guide
cauugagaaaugcugcaaguc

SEQ ID NO: 7801 - RNA, 21 nt, Artificial Sequence
  RPE65 RNA guide
cauuucucaauggagguauua

SEQ ID NO: 7802 - RNA, 21 nt, Artificial Sequence
  RPE65 RNA guide
ccauugagaaaugcugcaagu

SEQ ID NO: 7803 - RNA, 21 nt, Artificial Sequence
  RPE65 RNA guide
ccuccauugagaaaugcugca

SEQ ID NO: 7804 - RNA, 21 nt, Artificial Sequence
  RPE65 RNA guide
cuaauaccuccauugagaaau

SEQ ID NO: 7805 - RNA, 21 nt, Artificial Sequence
  RPE65 RNA guide
cucaauggagguauuaguaug

SEQ ID NO: 7806 - RNA, 21 nt, Artificial Sequence
  RPE65 RNA guide
cuccauugagaaaugcugcaa

SEQ ID NO: 7807 - RNA, 21 nt, Artificial Sequence
  RPE65 RNA guide
cuugcagcauuucucaaugga

SEQ ID NO: 7808 - RNA, 21 nt, Artificial Sequence
  RPE65 RNA guide
gacuugcagcauuucucaaug

SEQ ID NO: 7809 - RNA, 21 nt, Artificial Sequence
  RPE65 RNA guide
gcagcauuucucaauggaggu

SEQ ID NO: 7810 - RNA, 21 nt, Artificial Sequence
  RPE65 RNA guide
gcauuucucaauggagguauu

SEQ ID NO: 7811 - RNA, 21 nt, Artificial Sequence
  RPE65 RNA guide
gucauacuaauaccuccauug

SEQ ID NO: 7812 - RNA, 21 nt, Artificial Sequence
  RPE65 RNA guide
uaauaccuccauugagaaaug

SEQ ID NO: 7813 - RNA, 21 nt, Artificial Sequence
  RPE65 RNA guide
uaccuccauugagaaaugcug

SEQ ID NO: 7814 - RNA, 21 nt, Artificial Sequence
  RPE65 RNA guide
uacuaauaccuccauugagaa

SEQ ID NO: 7815 - RNA, 21 nt, Artificial Sequence
  RPE65 RNA guide
uagacuugcagcauuucucaa

SEQ ID NO: 7816 - RNA, 21 nt, Artificial Sequence
  RPE65 RNA guide
ucaauggagguauuaguauga

SEQ ID NO: 7817 - RNA, 21 nt, Artificial Sequence
  RPE65 RNA guide
ucauacuaauaccuccauuga

SEQ ID NO: 7818 - RNA, 21 nt, Artificial Sequence
  RPE65 RNA guide
uccauugagaaaugcugcaag

SEQ ID NO: 7819 - RNA, 21 nt, Artificial Sequence
  RPE65 RNA guide
ucucaauggagguauuaguau

SEQ ID NO: 7820 - RNA, 21 nt, Artificial Sequence
  RPE65 RNA guide
ugcagcauuucucaauggagg

SEQ ID NO: 7821 - RNA, 21 nt, Artificial Sequence
  RPE65 RNA guide
ugucauacuaauaccuccauu

SEQ ID NO: 7822 - RNA, 21 nt, Artificial Sequence
  RPE65 RNA guide
uucucaauggagguauuagua

SEQ ID NO: 7823 - RNA, 21 nt, Artificial Sequence
  RPE65 RNA guide
uugcagcauuucucaauggag

SEQ ID NO: 7824 - RNA, 21 nt, Artificial Sequence
  RPE65 RNA guide
uuucucaauggagguauuagu

SEQ ID NO: 7825 - RNA, 22 nt, Artificial Sequence
  RPE65 RNA guide
aauaccuccauugagaaaugcu

SEQ ID NO: 7826 - RNA, 22 nt, Artificial Sequence
  RPE65 RNA guide
aauggagguauuaguaugacau

SEQ ID NO: 7827 - RNA, 22 nt, Artificial Sequence
  RPE65 RNA guide
aaugucauacuaauaccuccau

SEQ ID NO: 7828 - RNA, 22 nt, Artificial Sequence
  RPE65 RNA guide
accuccauugagaaaugcugca

SEQ ID NO: 7829 - RNA, 22 nt, Artificial Sequence
  RPE65 RNA guide
acuaauaccuccauugagaaau

SEQ ID NO: 7830 - RNA, 22 nt, Artificial Sequence
  RPE65 RNA guide
acuugcagcauuucucaaugga

SEQ ID NO: 7831 - RNA, 22 nt, Artificial Sequence
  RPE65 RNA guide
agacuugcagcauuucucaaug

SEQ ID NO: 7832 - RNA, 22 nt, Artificial Sequence
  RPE65 RNA guide
agcauuucucaauggagguauu

SEQ ID NO: 7833 - RNA, 22 nt, Artificial Sequence
  RPE65 RNA guide
auaccuccauugagaaaugcug

SEQ ID NO: 7834 - RNA, 22 nt, Artificial Sequence
  RPE65 RNA guide
auacuaauaccuccauugagaa

SEQ ID NO: 7835 - RNA, 22 nt, Artificial Sequence
  RPE65 RNA guide
augucauacuaauaccuccauu

SEQ ID NO: 7836 - RNA, 22 nt, Artificial Sequence
  RPE65 RNA guide
auugagaaaugcugcaagucua

SEQ ID NO: 7837 - RNA, 22 nt, Artificial Sequence
  RPE65 RNA guide
auuucucaauggagguauuagu

SEQ ID NO: 7838 - RNA, 22 nt, Artificial Sequence
  RPE65 RNA guide
caauggagguauuaguaugaca

SEQ ID NO: 7839 - RNA, 22 nt, Artificial Sequence
  RPE65 RNA guide
cagcauuucucaauggagguau

SEQ ID NO: 7840 - RNA, 22 nt, Artificial Sequence
  RPE65 RNA guide
cauacuaauaccuccauugaga

SEQ ID NO: 7841 - RNA, 22 nt, Artificial Sequence
  RPE65 RNA guide
cauugagaaaugcugcaagucu

SEQ ID NO: 7842 - RNA, 22 nt, Artificial Sequence
  RPE65 RNA guide
cauuucucaauggagguauuag

SEQ ID NO: 7843 - RNA, 22 nt, Artificial Sequence
  RPE65 RNA guide
ccauugagaaaugcugcaaguc

SEQ ID NO: 7844 - RNA, 22 nt, Artificial Sequence
  RPE65 RNA guide
ccuccauugagaaaugcugcaa

SEQ ID NO: 7845 - RNA, 22 nt, Artificial Sequence
  RPE65 RNA guide
cuaauaccuccauugagaaaug

SEQ ID NO: 7846 - RNA, 22 nt, Artificial Sequence
  RPE65 RNA guide
cuagacuugcagcauuucucaa

SEQ ID NO: 7847 - RNA, 22 nt, Artificial Sequence
  RPE65 RNA guide
cucaauggagguauuaguauga

SEQ ID NO: 7848 - RNA, 22 nt, Artificial Sequence
  RPE65 RNA guide
cuccauugagaaaugcugcaag

SEQ ID NO: 7849 - RNA, 22 nt, Artificial Sequence
  RPE65 RNA guide
cuugcagcauuucucaauggag

SEQ ID NO: 7850 - RNA, 22 nt, Artificial Sequence
  RPE65 RNA guide
gacuugcagcauuucucaaugg

SEQ ID NO: 7851 - RNA, 22 nt, Artificial Sequence
  RPE65 RNA guide
gcagcauuucucaauggaggua

SEQ ID NO: 7852 - RNA, 22 nt, Artificial Sequence
  RPE65 RNA guide
gcauuucucaauggagguauua

SEQ ID NO: 7853 - RNA, 22 nt, Artificial Sequence
  RPE65 RNA guide
gucauacuaauaccuccauuga

SEQ ID NO: 7854 - RNA, 22 nt, Artificial Sequence
  RPE65 RNA guide
uaauaccuccauugagaaaugc

SEQ ID NO: 7855 - RNA, 22 nt, Artificial Sequence
  RPE65 RNA guide
uaccuccauugagaaaugcugc

SEQ ID NO: 7856 - RNA, 22 nt, Artificial Sequence
  RPE65 RNA guide
uacuaauaccuccauugagaaa

SEQ ID NO: 7857 - RNA, 22 nt, Artificial Sequence
  RPE65 RNA guide
uagacuugcagcauuucucaau

SEQ ID NO: 7858 - RNA, 22 nt, Artificial Sequence
  RPE65 RNA guide
ucaauggagguauuaguaugac

SEQ ID NO: 7859 - RNA, 22 nt, Artificial Sequence
  RPE65 RNA guide
ucauacuaauaccuccauugag

SEQ ID NO: 7860 - RNA, 22 nt, Artificial Sequence
  RPE65 RNA guide
uccauugagaaaugcugcaagu

SEQ ID NO: 7861 - RNA, 22 nt, Artificial Sequence
  RPE65 RNA guide
ucucaauggagguauuaguaug

SEQ ID NO: 7862 - RNA, 22 nt, Artificial Sequence
  RPE65 RNA guide
ugcagcauuucucaauggaggu

SEQ ID NO: 7863 - RNA, 22 nt, Artificial Sequence
  RPE65 RNA guide
ugucauacuaauaccuccauug

SEQ ID NO: 7864 - RNA, 22 nt, Artificial Sequence
  RPE65 RNA guide
uucucaauggagguauuaguau

SEQ ID NO: 7865 - RNA, 22 nt, Artificial Sequence
  RPE65 RNA guide
uugcagcauuucucaauggagg

SEQ ID NO: 7866 - RNA, 22 nt, Artificial Sequence
  RPE65 RNA guide
uuucucaauggagguauuagua

SEQ ID NO: 7867 - RNA, 20 nt, Artificial Sequence
  RPE65 RNA guide
aaaugcugcaagucuagucc

SEQ ID NO: 7868 - RNA, 20 nt, Artificial Sequence
  RPE65 RNA guide
aagucuaguccaaggagauu

SEQ ID NO: 7869 - RNA, 20 nt, Artificial Sequence
  RPE65 RNA guide
aauaaucuccuuggacuaga

SEQ ID NO: 7870 - RNA, 20 nt, Artificial Sequence
  RPE65 RNA guide
aaucuccuuggacuagacuu

SEQ ID NO: 7871 - RNA, 20 nt, Artificial Sequence
  RPE65 RNA guide
aaugcugcaagucuagucca

SEQ ID NO: 7872 - RNA, 20 nt, Artificial Sequence
  RPE65 RNA guide
agaaaugcugcaagucuagu

SEQ ID NO: 7873 - RNA, 20 nt, Artificial Sequence
  RPE65 RNA guide
agaauaaucuccuuggacua

SEQ ID NO: 7874 - RNA, 20 nt, Artificial Sequence
  RPE65 RNA guide
auaaucuccuuggacuagac

SEQ ID NO: 7875 - RNA, 20 nt, Artificial Sequence
  RPE65 RNA guide
aucuccuuggacuagacuug

SEQ ID NO: 7876 - RNA, 20 nt, Artificial Sequence
  RPE65 RNA guide
augcugcaagucuaguccaa

SEQ ID NO: 7877 - RNA, 20 nt, Artificial Sequence
  RPE65 RNA guide
caagucuaguccaaggagau

SEQ ID NO: 7878 - RNA, 20 nt, Artificial Sequence
  RPE65 RNA guide
ccuuggacuagacuugcagc

SEQ ID NO: 7879 - RNA, 20 nt, Artificial Sequence
  RPE65 RNA guide
cuccuuggacuagacuugca

SEQ ID NO: 7880 - RNA, 20 nt, Artificial Sequence
  RPE65 RNA guide
cugagaaaugcugcaagucu

SEQ ID NO: 7881 - RNA, 20 nt, Artificial Sequence
  RPE65 RNA guide
cugcaagucuaguccaagga

SEQ ID NO: 7882 - RNA, 20 nt, Artificial Sequence
  RPE65 RNA guide
cuuggacuagacuugcagca

SEQ ID NO: 7883 - RNA, 20 nt, Artificial Sequence
  RPE65 RNA guide
gaaaugcugcaagucuaguc

SEQ ID NO: 7884 - RNA, 20 nt, Artificial Sequence
  RPE65 RNA guide
gaauaaucuccuuggacuag

SEQ ID NO: 7885 - RNA, 20 nt, Artificial Sequence
  RPE65 RNA guide
gagaaaugcugcaagucuag

SEQ ID NO: 7886 - RNA, 20 nt, Artificial Sequence
  RPE65 RNA guide
gcaagucuaguccaaggaga

SEQ ID NO: 7887 - RNA, 20 nt, Artificial Sequence
  RPE65 RNA guide
gcugcaagucuaguccaagg

SEQ ID NO: 7888 - RNA, 20 nt, Artificial Sequence
  RPE65 RNA guide
ggacuagacuugcagcauuu

SEQ ID NO: 7889 - RNA, 20 nt, Artificial Sequence
  RPE65 RNA guide
uaaucuccuuggacuagacu

SEQ ID NO: 7890 - RNA, 20 nt, Artificial Sequence
  RPE65 RNA guide
uccuuggacuagacuugcag

SEQ ID NO: 7891 - RNA, 20 nt, Artificial Sequence
  RPE65 RNA guide
ucuccuuggacuagacuugc

SEQ ID NO: 7892 - RNA, 20 nt, Artificial Sequence
  RPE65 RNA guide
ugagaaaugcugcaagucua

SEQ ID NO: 7893 - RNA, 20 nt, Artificial Sequence
  RPE65 RNA guide
ugcaagucuaguccaaggag

SEQ ID NO: 7894 - RNA, 20 nt, Artificial Sequence
  RPE65 RNA guide
ugcugcaagucuaguccaag

SEQ ID NO: 7895 - RNA, 20 nt, Artificial Sequence
  RPE65 RNA guide
uggacuagacuugcagcauu

SEQ ID NO: 7896 - RNA, 20 nt, Artificial Sequence
  RPE65 RNA guide
uuggacuagacuugcagcau

SEQ ID NO: 7897 - RNA, 21 nt, Artificial Sequence
  RPE65 RNA guide
aaaugcugcaagucuagucca

SEQ ID NO: 7898 - RNA, 21 nt, Artificial Sequence
  RPE65 RNA guide
aagucuaguccaaggagauua

SEQ ID NO: 7899 - RNA, 21 nt, Artificial Sequence
  RPE65 RNA guide
aauaaucuccuuggacuagac

SEQ ID NO: 7900 - RNA, 21 nt, Artificial Sequence
  RPE65 RNA guide
aaucuccuuggacuagacuug

SEQ ID NO: 7901 - RNA, 21 nt, Artificial Sequence
  RPE65 RNA guide
aaugcugcaagucuaguccaa

SEQ ID NO: 7902 - RNA, 21 nt, Artificial Sequence
  RPE65 RNA guide
agaaaugcugcaagucuaguc

SEQ ID NO: 7903 - RNA, 21 nt, Artificial Sequence
  RPE65 RNA guide
agaauaaucuccuuggacuag

SEQ ID NO: 7904 - RNA, 21 nt, Artificial Sequence
  RPE65 RNA guide
auaaucuccuuggacuagacu

SEQ ID NO: 7905 - RNA, 21 nt, Artificial Sequence
  RPE65 RNA guide
aucuccuuggacuagacuugc

SEQ ID NO: 7906 - RNA, 21 nt, Artificial Sequence
  RPE65 RNA guide
augcugcaagucuaguccaag

SEQ ID NO: 7907 - RNA, 21 nt, Artificial Sequence
  RPE65 RNA guide
caagucuaguccaaggagauu

SEQ ID NO: 7908 - RNA, 21 nt, Artificial Sequence
  RPE65 RNA guide
ccuuggacuagacuugcagca

SEQ ID NO: 7909 - RNA, 21 nt, Artificial Sequence
  RPE65 RNA guide
cuccuuggacuagacuugcag

SEQ ID NO: 7910 - RNA, 21 nt, Artificial Sequence
  RPE65 RNA guide
cugagaaaugcugcaagucua

SEQ ID NO: 7911 - RNA, 21 nt, Artificial Sequence
  RPE65 RNA guide
cugcaagucuaguccaaggag

SEQ ID NO: 7912 - RNA, 21 nt, Artificial Sequence
  RPE65 RNA guide
cuuggacuagacuugcagcau

SEQ ID NO: 7913 - RNA, 21 nt, Artificial Sequence
  RPE65 RNA guide
gaaaugcugcaagucuagucc

SEQ ID NO: 7914 - RNA, 21 nt, Artificial Sequence
  RPE65 RNA guide
gaauaaucuccuuggacuaga

SEQ ID NO: 7915 - RNA, 21 nt, Artificial Sequence
  RPE65 RNA guide
gagaaaugcugcaagucuagu

SEQ ID NO: 7916 - RNA, 21 nt, Artificial Sequence
  RPE65 RNA guide
gagaauaaucuccuuggacua

SEQ ID NO: 7917 - RNA, 21 nt, Artificial Sequence
  RPE65 RNA guide
gcaagucuaguccaaggagau

SEQ ID NO: 7918 - RNA, 21 nt, Artificial Sequence
  RPE65 RNA guide
gcugcaagucuaguccaagga

SEQ ID NO: 7919 - RNA, 21 nt, Artificial Sequence
  RPE65 RNA guide
uaaucuccuuggacuagacuu

SEQ ID NO: 7920 - RNA, 21 nt, Artificial Sequence
  RPE65 RNA guide
uccuuggacuagacuugcagc

SEQ ID NO: 7921 - RNA, 21 nt, Artificial Sequence
  RPE65 RNA guide
ucuccuuggacuagacuugca

SEQ ID NO: 7922 - RNA, 21 nt, Artificial Sequence
  RPE65 RNA guide
ugagaaaugcugcaagucuag

SEQ ID NO: 7923 - RNA, 21 nt, Artificial Sequence
  RPE65 RNA guide
ugcaagucuaguccaaggaga

SEQ ID NO: 7924 - RNA, 21 nt, Artificial Sequence
  RPE65 RNA guide
ugcugcaagucuaguccaagg

SEQ ID NO: 7925 - RNA, 21 nt, Artificial Sequence
  RPE65 RNA guide
uggacuagacuugcagcauuu

SEQ ID NO: 7926 - RNA, 21 nt, Artificial Sequence
  RPE65 RNA guide
uuggacuagacuugcagcauu

SEQ ID NO: 7927 - RNA, 22 nt, Artificial Sequence
  RPE65 RNA guide
aaaugcugcaagucuaguccaa

SEQ ID NO: 7928 - RNA, 22 nt, Artificial Sequence
  RPE65 RNA guide
aagucuaguccaaggagauuau

SEQ ID NO: 7929 - RNA, 22 nt, Artificial Sequence
  RPE65 RNA guide
aauaaucuccuuggacuagacu

SEQ ID NO: 7930 - RNA, 22 nt, Artificial Sequence
  RPE65 RNA guide
aaucuccuuggacuagacuugc

SEQ ID NO: 7931 - RNA, 22 nt, Artificial Sequence
  RPE65 RNA guide
aaugcugcaagucuaguccaag

SEQ ID NO: 7932 - RNA, 22 nt, Artificial Sequence
  RPE65 RNA guide
agaaaugcugcaagucuagucc

SEQ ID NO: 7933 - RNA, 22 nt, Artificial Sequence
  RPE65 RNA guide
agaauaaucuccuuggacuaga

SEQ ID NO: 7934 - RNA, 22 nt, Artificial Sequence
  RPE65 RNA guide
auaaucuccuuggacuagacuu

SEQ ID NO: 7935 - RNA, 22 nt, Artificial Sequence
  RPE65 RNA guide
aucuccuuggacuagacuugca

SEQ ID NO: 7936 - RNA, 22 nt, Artificial Sequence
  RPE65 RNA guide
augcugcaagucuaguccaagg

SEQ ID NO: 7937 - RNA, 22 nt, Artificial Sequence
  RPE65 RNA guide
caagucuaguccaaggagauua

SEQ ID NO: 7938 - RNA, 22 nt, Artificial Sequence
  RPE65 RNA guide
ccuuggacuagacuugcagcau

SEQ ID NO: 7939 - RNA, 22 nt, Artificial Sequence
  RPE65 RNA guide
cuccuuggacuagacuugcagc

SEQ ID NO: 7940 - RNA, 22 nt, Artificial Sequence
  RPE65 RNA guide
cugagaaaugcugcaagucuag

SEQ ID NO: 7941 - RNA, 22 nt, Artificial Sequence
  RPE65 RNA guide
cugcaagucuaguccaaggaga

SEQ ID NO: 7942 - RNA, 22 nt, Artificial Sequence
  RPE65 RNA guide
cuuggacuagacuugcagcauu

SEQ ID NO: 7943 - RNA, 22 nt, Artificial Sequence
  RPE65 RNA guide
gaaaugcugcaagucuagucca

SEQ ID NO: 7944 - RNA, 22 nt, Artificial Sequence
  RPE65 RNA guide
gaauaaucuccuuggacuagac

SEQ ID NO: 7945 - RNA, 22 nt, Artificial Sequence
  RPE65 RNA guide
gagaaaugcugcaagucuaguc

SEQ ID NO: 7946 - RNA, 22 nt, Artificial Sequence
  RPE65 RNA guide
gagaauaaucuccuuggacuag

SEQ ID NO: 7947 - RNA, 22 nt, Artificial Sequence
  RPE65 RNA guide
gcaagucuaguccaaggagauu

SEQ ID NO: 7948 - RNA, 22 nt, Artificial Sequence
  RPE65 RNA guide
gcugcaagucuaguccaaggag

SEQ ID NO: 7949 - RNA, 22 nt, Artificial Sequence
  RPE65 RNA guide
ggagaauaaucuccuuggacua

SEQ ID NO: 7950 - RNA, 22 nt, Artificial Sequence
  RPE65 RNA guide
uaaucuccuuggacuagacuug

SEQ ID NO: 7951 - RNA, 22 nt, Artificial Sequence
  RPE65 RNA guide
uccuuggacuagacuugcagca

SEQ ID NO: 7952 - RNA, 22 nt, Artificial Sequence
  RPE65 RNA guide
ucuccuuggacuagacuugcag

SEQ ID NO: 7953 - RNA, 22 nt, Artificial Sequence
  RPE65 RNA guide
ugagaaaugcugcaagucuagu

SEQ ID NO: 7954 - RNA, 22 nt, Artificial Sequence
  RPE65 RNA guide
ugcaagucuaguccaaggagau

SEQ ID NO: 7955 - RNA, 22 nt, Artificial Sequence
  RPE65 RNA guide
ugcugcaagucuaguccaagga

SEQ ID NO: 7956 - RNA, 22 nt, Artificial Sequence
  RPE65 RNA guide
uuggacuagacuugcagcauuu

SEQ ID NO: 7957 - RNA, 20 nt, Artificial Sequence
  RPE65 RNA guide
aaaugcugcaggucuagucc

SEQ ID NO: 7958 - RNA, 20 nt, Artificial Sequence
  RPE65 RNA guide
aaucuccuuggacuagaccu

SEQ ID NO: 7959 - RNA, 20 nt, Artificial Sequence
  RPE65 RNA guide
aaugcugcaggucuagucca

SEQ ID NO: 7960 - RNA, 20 nt, Artificial Sequence
  RPE65 RNA guide
accugcagcauuucucagug

SEQ ID NO: 7961 - RNA, 20 nt, Artificial Sequence
  RPE65 RNA guide
acuagaccugcagcauuucu

SEQ ID NO: 7962 - RNA, 20 nt, Artificial Sequence
  RPE65 RNA guide
acugagaaaugcugcagguc

SEQ ID NO: 7963 - RNA, 20 nt, Artificial Sequence
  RPE65 RNA guide
agaaaugcugcaggucuagu

SEQ ID NO: 7964 - RNA, 20 nt, Artificial Sequence
  RPE65 RNA guide
agaccugcagcauuucucag

SEQ ID NO: 7965 - RNA, 20 nt, Artificial Sequence
  RPE65 RNA guide
aggucuaguccaaggagauu

SEQ ID NO: 7966 - RNA, 20 nt, Artificial Sequence
  RPE65 RNA guide
aucuccuuggacuagaccug

SEQ ID NO: 7967 - RNA, 20 nt, Artificial Sequence
  RPE65 RNA guide
augcugcaggucuaguccaa

SEQ ID NO: 7968 - RNA, 20 nt, Artificial Sequence
  RPE65 RNA guide
cacugagaaaugcugcaggu

SEQ ID NO: 7969 - RNA, 20 nt, Artificial Sequence
  RPE65 RNA guide
caggucuaguccaaggagau

SEQ ID NO: 7970 - RNA, 20 nt, Artificial Sequence
  RPE65 RNA guide
ccacugagaaaugcugcagg

SEQ ID NO: 7971 - RNA, 20 nt, Artificial Sequence
  RPE65 RNA guide
ccugcagcauuucucagugg

SEQ ID NO: 7972 - RNA, 20 nt, Artificial Sequence
  RPE65 RNA guide
ccuuggacuagaccugcagc

SEQ ID NO: 7973 - RNA, 20 nt, Artificial Sequence
  RPE65 RNA guide
cuagaccugcagcauuucuc

SEQ ID NO: 7974 - RNA, 20 nt, Artificial Sequence
  RPE65 RNA guide
cuccuuggacuagaccugca

SEQ ID NO: 7975 - RNA, 20 nt, Artificial Sequence
  RPE65 RNA guide
cugagaaaugcugcaggucu

SEQ ID NO: 7976 - RNA, 20 nt, Artificial Sequence
  RPE65 RNA guide
cugcaggucuaguccaagga

SEQ ID NO: 7977 - RNA, 20 nt, Artificial Sequence
  RPE65 RNA guide
cuuggacuagaccugcagca

SEQ ID NO: 7978 - RNA, 20 nt, Artificial Sequence
  RPE65 RNA guide
gaaaugcugcaggucuaguc

SEQ ID NO: 7979 - RNA, 20 nt, Artificial Sequence
  RPE65 RNA guide
gaccugcagcauuucucagu

SEQ ID NO: 7980 - RNA, 20 nt, Artificial Sequence
  RPE65 RNA guide
gacuagaccugcagcauuuc

SEQ ID NO: 7981 - RNA, 20 nt, Artificial Sequence
  RPE65 RNA guide
gagaaaugcugcaggucuag

SEQ ID NO: 7982 - RNA, 20 nt, Artificial Sequence
  RPE65 RNA guide
gcaggucuaguccaaggaga

SEQ ID NO: 7983 - RNA, 20 nt, Artificial Sequence
  RPE65 RNA guide
gcugcaggucuaguccaagg

SEQ ID NO: 7984 - RNA, 20 nt, Artificial Sequence
  RPE65 RNA guide
ggacuagaccugcagcauuu

SEQ ID NO: 7985 - RNA, 20 nt, Artificial Sequence
  RPE65 RNA guide
uaaucuccuuggacuagacc

SEQ ID NO: 7986 - RNA, 20 nt, Artificial Sequence
  RPE65 RNA guide
uagaccugcagcauuucuca

SEQ ID NO: 7987 - RNA, 20 nt, Artificial Sequence
  RPE65 RNA guide
uccacugagaaaugcugcag

SEQ ID NO: 7988 - RNA, 20 nt, Artificial Sequence
  RPE65 RNA guide
uccuuggacuagaccugcag

SEQ ID NO: 7989 - RNA, 20 nt, Artificial Sequence
  RPE65 RNA guide
ucuccuuggacuagaccugc

SEQ ID NO: 7990 - RNA, 20 nt, Artificial Sequence
  RPE65 RNA guide
ugagaaaugcugcaggucua

SEQ ID NO: 7991 - RNA, 20 nt, Artificial Sequence
  RPE65 RNA guide
ugcaggucuaguccaaggag

SEQ ID NO: 7992 - RNA, 20 nt, Artificial Sequence
  RPE65 RNA guide
ugcugcaggucuaguccaag

SEQ ID NO: 7993 - RNA, 20 nt, Artificial Sequence
  RPE65 RNA guide
uggacuagaccugcagcauu

SEQ ID NO: 7994 - RNA, 20 nt, Artificial Sequence
  RPE65 RNA guide
uuggacuagaccugcagcau

SEQ ID NO: 7995 - RNA, 21 nt, Artificial Sequence
  RPE65 RNA guide
aaaugcugcaggucuagucca

SEQ ID NO: 7996 - RNA, 21 nt, Artificial Sequence
  RPE65 RNA guide
aaucuccuuggacuagaccug

SEQ ID NO: 7997 - RNA, 21 nt, Artificial Sequence
  RPE65 RNA guide
aaugcugcaggucuaguccaa

SEQ ID NO: 7998 - RNA, 21 nt, Artificial Sequence
  RPE65 RNA guide
accugcagcauuucucagugg

SEQ ID NO: 7999 - RNA, 21 nt, Artificial Sequence
  RPE65 RNA guide
acuagaccugcagcauuucuc

SEQ ID NO: 8000 - RNA, 21 nt, Artificial Sequence
  RPE65 RNA guide
acugagaaaugcugcaggucu

SEQ ID NO: 8001 - RNA, 21 nt, Artificial Sequence
  RPE65 RNA guide
agaaaugcugcaggucuaguc

SEQ ID NO: 8002 - RNA, 21 nt, Artificial Sequence
  RPE65 RNA guide
agaccugcagcauuucucagu

SEQ ID NO: 8003 - RNA, 21 nt, Artificial Sequence
  RPE65 RNA guide
aggucuaguccaaggagauua

SEQ ID NO: 8004 - RNA, 21 nt, Artificial Sequence
  RPE65 RNA guide
auaaucuccuuggacuagacc

SEQ ID NO: 8005 - RNA, 21 nt, Artificial Sequence
  RPE65 RNA guide
aucuccuuggacuagaccugc

SEQ ID NO: 8006 - RNA, 21 nt, Artificial Sequence
  RPE65 RNA guide
augcugcaggucuaguccaag

SEQ ID NO: 8007 - RNA, 21 nt, Artificial Sequence
  RPE65 RNA guide
cacugagaaaugcugcagguc

SEQ ID NO: 8008 - RNA, 21 nt, Artificial Sequence
  RPE65 RNA guide
caggucuaguccaaggagauu

SEQ ID NO: 8009 - RNA, 21 nt, Artificial Sequence
  RPE65 RNA guide
ccacugagaaaugcugcaggu

SEQ ID NO: 8010 - RNA, 21 nt, Artificial Sequence
  RPE65 RNA guide
ccugcagcauuucucagugga

SEQ ID NO: 8011 - RNA, 21 nt, Artificial Sequence
  RPE65 RNA guide
ccuuggacuagaccugcagca

SEQ ID NO: 8012 - RNA, 21 nt, Artificial Sequence
  RPE65 RNA guide
cuagaccugcagcauuucuca

SEQ ID NO: 8013 - RNA, 21 nt, Artificial Sequence
  RPE65 RNA guide
cuccacugagaaaugcugcag

SEQ ID NO: 8014 - RNA, 21 nt, Artificial Sequence
  RPE65 RNA guide
cuccuuggacuagaccugcag

SEQ ID NO: 8015 - RNA, 21 nt, Artificial Sequence
  RPE65 RNA guide
cugagaaaugcugcaggucua

SEQ ID NO: 8016 - RNA, 21 nt, Artificial Sequence
  RPE65 RNA guide
cugcaggucuaguccaaggag

SEQ ID NO: 8017 - RNA, 21 nt, Artificial Sequence
  RPE65 RNA guide
cuuggacuagaccugcagcau

SEQ ID NO: 8018 - RNA, 21 nt, Artificial Sequence
  RPE65 RNA guide
gaaaugcugcaggucuagucc

SEQ ID NO: 8019 - RNA, 21 nt, Artificial Sequence
  RPE65 RNA guide
gaccugcagcauuucucagug

SEQ ID NO: 8020 - RNA, 21 nt, Artificial Sequence
  RPE65 RNA guide
gacuagaccugcagcauuucu

SEQ ID NO: 8021 - RNA, 21 nt, Artificial Sequence
  RPE65 RNA guide
gagaaaugcugcaggucuagu

SEQ ID NO: 8022 - RNA, 21 nt, Artificial Sequence
  RPE65 RNA guide
gcaggucuaguccaaggagau

SEQ ID NO: 8023 - RNA, 21 nt, Artificial Sequence
  RPE65 RNA guide
gcugcaggucuaguccaagga

SEQ ID NO: 8024 - RNA, 21 nt, Artificial Sequence
  RPE65 RNA guide
ggacuagaccugcagcauuuc

SEQ ID NO: 8025 - RNA, 21 nt, Artificial Sequence
  RPE65 RNA guide
uaaucuccuuggacuagaccu

SEQ ID NO: 8026 - RNA, 21 nt, Artificial Sequence
  RPE65 RNA guide
uagaccugcagcauuucucag

SEQ ID NO: 8027 - RNA, 21 nt, Artificial Sequence
  RPE65 RNA guide
uccacugagaaaugcugcagg

SEQ ID NO: 8028 - RNA, 21 nt, Artificial Sequence
  RPE65 RNA guide
uccuuggacuagaccugcagc

SEQ ID NO: 8029 - RNA, 21 nt, Artificial Sequence
  RPE65 RNA guide
ucuccuuggacuagaccugca

SEQ ID NO: 8030 - RNA, 21 nt, Artificial Sequence
  RPE65 RNA guide
ugagaaaugcugcaggucuag

SEQ ID NO: 8031 - RNA, 21 nt, Artificial Sequence
  RPE65 RNA guide
ugcaggucuaguccaaggaga

SEQ ID NO: 8032 - RNA, 21 nt, Artificial Sequence
  RPE65 RNA guide
ugcugcaggucuaguccaagg

SEQ ID NO: 8033 - RNA, 21 nt, Artificial Sequence
  RPE65 RNA guide
uggacuagaccugcagcauuu

SEQ ID NO: 8034 - RNA, 21 nt, Artificial Sequence
  RPE65 RNA guide
uuggacuagaccugcagcauu

SEQ ID NO: 8035 - RNA, 22 nt, Artificial Sequence
  RPE65 RNA guide
aaaugcugcaggucuaguccaa

SEQ ID NO: 8036 - RNA, 22 nt, Artificial Sequence
  RPE65 RNA guide
aauaaucuccuuggacuagacc

SEQ ID NO: 8037 - RNA, 22 nt, Artificial Sequence
  RPE65 RNA guide
aaucuccuuggacuagaccugc

SEQ ID NO: 8038 - RNA, 22 nt, Artificial Sequence
  RPE65 RNA guide
aaugcugcaggucuaguccaag

SEQ ID NO: 8039 - RNA, 22 nt, Artificial Sequence
  RPE65 RNA guide
accugcagcauuucucagugga

SEQ ID NO: 8040 - RNA, 22 nt, Artificial Sequence
  RPE65 RNA guide
acuagaccugcagcauuucuca

SEQ ID NO: 8041 - RNA, 22 nt, Artificial Sequence
  RPE65 RNA guide
acugagaaaugcugcaggucua

SEQ ID NO: 8042 - RNA, 22 nt, Artificial Sequence
  RPE65 RNA guide
agaaaugcugcaggucuagucc

SEQ ID NO: 8043 - RNA, 22 nt, Artificial Sequence
  RPE65 RNA guide
agaccugcagcauuucucagug

SEQ ID NO: 8044 - RNA, 22 nt, Artificial Sequence
  RPE65 RNA guide
aggucuaguccaaggagauuau

SEQ ID NO: 8045 - RNA, 22 nt, Artificial Sequence
  RPE65 RNA guide
auaaucuccuuggacuagaccu

SEQ ID NO: 8046 - RNA, 22 nt, Artificial Sequence
  RPE65 RNA guide
aucuccuuggacuagaccugca

SEQ ID NO: 8047 - RNA, 22 nt, Artificial Sequence
  RPE65 RNA guide
augcugcaggucuaguccaagg

SEQ ID NO: 8048 - RNA, 22 nt, Artificial Sequence
  RPE65 RNA guide
cacugagaaaugcugcaggucu

SEQ ID NO: 8049 - RNA, 22 nt, Artificial Sequence
  RPE65 RNA guide
caggucuaguccaaggagauua

SEQ ID NO: 8050 - RNA, 22 nt, Artificial Sequence
  RPE65 RNA guide
ccacugagaaaugcugcagguc

SEQ ID NO: 8051 - RNA, 22 nt, Artificial Sequence
  RPE65 RNA guide
ccuccacugagaaaugcugcag

SEQ ID NO: 8052 - RNA, 22 nt, Artificial Sequence
  RPE65 RNA guide
ccugcagcauuucucaguggag

SEQ ID NO: 8053 - RNA, 22 nt, Artificial Sequence
  RPE65 RNA guide
ccuuggacuagaccugcagcau

SEQ ID NO: 8054 - RNA, 22 nt, Artificial Sequence
  RPE65 RNA guide
cuagaccugcagcauuucucag

SEQ ID NO: 8055 - RNA, 22 nt, Artificial Sequence
  RPE65 RNA guide
cuccacugagaaaugcugcagg

SEQ ID NO: 8056 - RNA, 22 nt, Artificial Sequence
  RPE65 RNA guide
cuccuuggacuagaccugcagc

SEQ ID NO: 8057 - RNA, 22 nt, Artificial Sequence
  RPE65 RNA guide
cugagaaaugcugcaggucuag

SEQ ID NO: 8058 - RNA, 22 nt, Artificial Sequence
  RPE65 RNA guide
cugcaggucuaguccaaggaga

SEQ ID NO: 8059 - RNA, 22 nt, Artificial Sequence
  RPE65 RNA guide
cuuggacuagaccugcagcauu

SEQ ID NO: 8060 - RNA, 22 nt, Artificial Sequence
  RPE65 RNA guide
gaaaugcugcaggucuagucca

SEQ ID NO: 8061 - RNA, 22 nt, Artificial Sequence
  RPE65 RNA guide
gaccugcagcauuucucagugg

SEQ ID NO: 8062 - RNA, 22 nt, Artificial Sequence
  RPE65 RNA guide
gacuagaccugcagcauuucuc

SEQ ID NO: 8063 - RNA, 22 nt, Artificial Sequence
  RPE65 RNA guide
gagaaaugcugcaggucuaguc

SEQ ID NO: 8064 - RNA, 22 nt, Artificial Sequence
  RPE65 RNA guide
gcaggucuaguccaaggagauu

SEQ ID NO: 8065 - RNA, 22 nt, Artificial Sequence
  RPE65 RNA guide
gcugcaggucuaguccaaggag

SEQ ID NO: 8066 - RNA, 22 nt, Artificial Sequence
  RPE65 RNA guide
ggacuagaccugcagcauuucu

SEQ ID NO: 8067 - RNA, 22 nt, Artificial Sequence
  RPE65 RNA guide
uaaucuccuuggacuagaccug

SEQ ID NO: 8068 - RNA, 22 nt, Artificial Sequence
  RPE65 RNA guide
uagaccugcagcauuucucagu

SEQ ID NO: 8069 - RNA, 22 nt, Artificial Sequence
  RPE65 RNA guide
uccacugagaaaugcugcaggu

SEQ ID NO: 8070 - RNA, 22 nt, Artificial Sequence
  RPE65 RNA guide
uccuuggacuagaccugcagca

SEQ ID NO: 8071 - RNA, 22 nt, Artificial Sequence
  RPE65 RNA guide
ucuccuuggacuagaccugcag

SEQ ID NO: 8072 - RNA, 22 nt, Artificial Sequence
  RPE65 RNA guide
ugagaaaugcugcaggucuagu

SEQ ID NO: 8073 - RNA, 22 nt, Artificial Sequence
  RPE65 RNA guide
ugcaggucuaguccaaggagau

SEQ ID NO: 8074 - RNA, 22 nt, Artificial Sequence
  RPE65 RNA guide
ugcugcaggucuaguccaagga

SEQ ID NO: 8075 - RNA, 22 nt, Artificial Sequence
  RPE65 RNA guide
uggacuagaccugcagcauuuc

SEQ ID NO: 8076 - RNA, 22 nt, Artificial Sequence
  RPE65 RNA guide
uuggacuagaccugcagcauuu

SEQ ID NO: 8077 - RNA, 20 nt, Artificial Sequence
  RPE65 RNA guide
aaaauguguaucuaaggacu

SEQ ID NO: 8078 - RNA, 20 nt, Artificial Sequence
  RPE65 RNA guide
aaauguguaucuaaggacug

SEQ ID NO: 8079 - RNA, 20 nt, Artificial Sequence
  RPE65 RNA guide
aaugcagcaguccuuagaua

SEQ ID NO: 8080 - RNA, 20 nt, Artificial Sequence
  RPE65 RNA guide
aauguguaucuaaggacugc

SEQ ID NO: 8081 - RNA, 20 nt, Artificial Sequence
  RPE65 RNA guide
agauacacauuuugaaccaa

SEQ ID NO: 8082 - RNA, 20 nt, Artificial Sequence
  RPE65 RNA guide
agcaguccuuagauacacau

SEQ ID NO: 8083 - RNA, 20 nt, Artificial Sequence
  RPE65 RNA guide
aguccuuagauacacauuuu

SEQ ID NO: 8084 - RNA, 20 nt, Artificial Sequence
  RPE65 RNA guide
augcagcaguccuuagauac

SEQ ID NO: 8085 - RNA, 20 nt, Artificial Sequence
  RPE65 RNA guide
auguguaucuaaggacugcu

SEQ ID NO: 8086 - RNA, 20 nt, Artificial Sequence
  RPE65 RNA guide
auugguucaaaauguguauc

SEQ ID NO: 8087 - RNA, 20 nt, Artificial Sequence
  RPE65 RNA guide
caaaauguguaucuaaggac

SEQ ID NO: 8088 - RNA, 20 nt, Artificial Sequence
  RPE65 RNA guide
caaugcagcaguccuuagau

SEQ ID NO: 8089 - RNA, 20 nt, Artificial Sequence
  RPE65 RNA guide
cagcaguccuuagauacaca

SEQ ID NO: 8090 - RNA, 20 nt, Artificial Sequence
  RPE65 RNA guide
caguccuuagauacacauuu

SEQ ID NO: 8091 - RNA, 20 nt, Artificial Sequence
  RPE65 RNA guide
ccuuagauacacauuuugaa

SEQ ID NO: 8092 - RNA, 20 nt, Artificial Sequence
  RPE65 RNA guide
cuuagauacacauuuugaac

SEQ ID NO: 8093 - RNA, 20 nt, Artificial Sequence
  RPE65 RNA guide
gauacacauuuugaaccaau

SEQ ID NO: 8094 - RNA, 20 nt, Artificial Sequence
  RPE65 RNA guide
gcagcaguccuuagauacac

SEQ ID NO: 8095 - RNA, 20 nt, Artificial Sequence
  RPE65 RNA guide
gcaguccuuagauacacauu

SEQ ID NO: 8096 - RNA, 20 nt, Artificial Sequence
  RPE65 RNA guide
gguucaaaauguguaucuaa

SEQ ID NO: 8097 - RNA, 20 nt, Artificial Sequence
  RPE65 RNA guide
guccuuagauacacauuuug

SEQ ID NO: 8098 - RNA, 20 nt, Artificial Sequence
  RPE65 RNA guide
guucaaaauguguaucuaag

SEQ ID NO: 8099 - RNA, 20 nt, Artificial Sequence
  RPE65 RNA guide
uagauacacauuuugaacca

SEQ ID NO: 8100 - RNA, 20 nt, Artificial Sequence
  RPE65 RNA guide
ucaaaauguguaucuaagga

SEQ ID NO: 8101 - RNA, 20 nt, Artificial Sequence
  RPE65 RNA guide
uccuuagauacacauuuuga

SEQ ID NO: 8102 - RNA, 20 nt, Artificial Sequence
  RPE65 RNA guide
ugcagcaguccuuagauaca

SEQ ID NO: 8103 - RNA, 20 nt, Artificial Sequence
  RPE65 RNA guide
ugguucaaaauguguaucua

SEQ ID NO: 8104 - RNA, 20 nt, Artificial Sequence
  RPE65 RNA guide
uguguaucuaaggacugcug

SEQ ID NO: 8105 - RNA, 20 nt, Artificial Sequence
  RPE65 RNA guide
uuagauacacauuuugaacc

SEQ ID NO: 8106 - RNA, 20 nt, Artificial Sequence
  RPE65 RNA guide
uucaaaauguguaucuaagg

SEQ ID NO: 8107 - RNA, 20 nt, Artificial Sequence
  RPE65 RNA guide
uugguucaaaauguguaucu

SEQ ID NO: 8108 - RNA, 21 nt, Artificial Sequence
  RPE65 RNA guide
aaaauguguaucuaaggacug

SEQ ID NO: 8109 - RNA, 21 nt, Artificial Sequence
  RPE65 RNA guide
aaauguguaucuaaggacugc

SEQ ID NO: 8110 - RNA, 21 nt, Artificial Sequence
  RPE65 RNA guide
aaugcagcaguccuuagauac

SEQ ID NO: 8111 - RNA, 21 nt, Artificial Sequence
  RPE65 RNA guide
aauguguaucuaaggacugcu

SEQ ID NO: 8112 - RNA, 21 nt, Artificial Sequence
  RPE65 RNA guide
agcaguccuuagauacacauu

SEQ ID NO: 8113 - RNA, 21 nt, Artificial Sequence
  RPE65 RNA guide
aguccuuagauacacauuuug

SEQ ID NO: 8114 - RNA, 21 nt, Artificial Sequence
  RPE65 RNA guide
augcagcaguccuuagauaca

SEQ ID NO: 8115 - RNA, 21 nt, Artificial Sequence
  RPE65 RNA guide
auguguaucuaaggacugcug

SEQ ID NO: 8116 - RNA, 21 nt, Artificial Sequence
  RPE65 RNA guide
caaaauguguaucuaaggacu

SEQ ID NO: 8117 - RNA, 21 nt, Artificial Sequence
  RPE65 RNA guide
caaugcagcaguccuuagaua

SEQ ID NO: 8118 - RNA, 21 nt, Artificial Sequence
  RPE65 RNA guide
cagcaguccuuagauacacau

SEQ ID NO: 8119 - RNA, 21 nt, Artificial Sequence
  RPE65 RNA guide
caguccuuagauacacauuuu

SEQ ID NO: 8120 - RNA, 21 nt, Artificial Sequence
  RPE65 RNA guide
ccuuagauacacauuuugaac

SEQ ID NO: 8121 - RNA, 21 nt, Artificial Sequence
  RPE65 RNA guide
cuuagauacacauuuugaacc

SEQ ID NO: 8122 - RNA, 21 nt, Artificial Sequence
  RPE65 RNA guide
gcagcaguccuuagauacaca

SEQ ID NO: 8123 - RNA, 21 nt, Artificial Sequence
  RPE65 RNA guide
gcaguccuuagauacacauuu

SEQ ID NO: 8124 - RNA, 21 nt, Artificial Sequence
  RPE65 RNA guide
gguucaaaauguguaucuaag

SEQ ID NO: 8125 - RNA, 21 nt, Artificial Sequence
  RPE65 RNA guide
guccuuagauacacauuuuga

SEQ ID NO: 8126 - RNA, 21 nt, Artificial Sequence
  RPE65 RNA guide
guucaaaauguguaucuaagg

SEQ ID NO: 8127 - RNA, 21 nt, Artificial Sequence
  RPE65 RNA guide
ucaaaauguguaucuaaggac

SEQ ID NO: 8128 - RNA, 21 nt, Artificial Sequence
  RPE65 RNA guide
ucaaugcagcaguccuuagau

SEQ ID NO: 8129 - RNA, 21 nt, Artificial Sequence
  RPE65 RNA guide
ugcagcaguccuuagauacac

SEQ ID NO: 8130 - RNA, 21 nt, Artificial Sequence
  RPE65 RNA guide
uguguaucuaaggacugcugc

SEQ ID NO: 8131 - RNA, 22 nt, Artificial Sequence
  RPE65 RNA guide
aaaauguguaucuaaggacugc

SEQ ID NO: 8132 - RNA, 22 nt, Artificial Sequence
  RPE65 RNA guide
aaauguguaucuaaggacugcu

SEQ ID NO: 8133 - RNA, 22 nt, Artificial Sequence
  RPE65 RNA guide
aaugcagcaguccuuagauaca

SEQ ID NO: 8134 - RNA, 22 nt, Artificial Sequence
  RPE65 RNA guide
aauguguaucuaaggacugcug

SEQ ID NO: 8135 - RNA, 22 nt, Artificial Sequence
  RPE65 RNA guide
agcaguccuuagauacacauuu

SEQ ID NO: 8136 - RNA, 22 nt, Artificial Sequence
  RPE65 RNA guide
aguccuuagauacacauuuuga

SEQ ID NO: 8137 - RNA, 22 nt, Artificial Sequence
  RPE65 RNA guide
augcagcaguccuuagauacac

SEQ ID NO: 8138 - RNA, 22 nt, Artificial Sequence
  RPE65 RNA guide
auguguaucuaaggacugcugc

SEQ ID NO: 8139 - RNA, 22 nt, Artificial Sequence
  RPE65 RNA guide
caaaauguguaucuaaggacug

SEQ ID NO: 8140 - RNA, 22 nt, Artificial Sequence
  RPE65 RNA guide
caaugcagcaguccuuagauac

SEQ ID NO: 8141 - RNA, 22 nt, Artificial Sequence
  RPE65 RNA guide
cagcaguccuuagauacacauu

SEQ ID NO: 8142 - RNA, 22 nt, Artificial Sequence
  RPE65 RNA guide
caguccuuagauacacauuuug

SEQ ID NO: 8143 - RNA, 22 nt, Artificial Sequence
  RPE65 RNA guide
ccuuagauacacauuuugaacc

SEQ ID NO: 8144 - RNA, 22 nt, Artificial Sequence
  RPE65 RNA guide
cucaaugcagcaguccuuagau

SEQ ID NO: 8145 - RNA, 22 nt, Artificial Sequence
  RPE65 RNA guide
cuuagauacacauuuugaacca

SEQ ID NO: 8146 - RNA, 22 nt, Artificial Sequence
  RPE65 RNA guide
gcagcaguccuuagauacacau

SEQ ID NO: 8147 - RNA, 22 nt, Artificial Sequence
  RPE65 RNA guide
gcaguccuuagauacacauuuu

SEQ ID NO: 8148 - RNA, 22 nt, Artificial Sequence
  RPE65 RNA guide
gguucaaaauguguaucuaagg

SEQ ID NO: 8149 - RNA, 22 nt, Artificial Sequence
  RPE65 RNA guide
guccuuagauacacauuuugaa

SEQ ID NO: 8150 - RNA, 22 nt, Artificial Sequence
  RPE65 RNA guide
guucaaaauguguaucuaagga

SEQ ID NO: 8151 - RNA, 22 nt, Artificial Sequence
  RPE65 RNA guide
ucaaaauguguaucuaaggacu

SEQ ID NO: 8152 - RNA, 22 nt, Artificial Sequence
  RPE65 RNA guide
ucaaugcagcaguccuuagaua

SEQ ID NO: 8153 - RNA, 22 nt, Artificial Sequence
  RPE65 RNA guide
uccuuagauacacauuuugaac

SEQ ID NO: 8154 - RNA, 22 nt, Artificial Sequence
  RPE65 RNA guide
ugcagcaguccuuagauacaca

SEQ ID NO: 8155 - RNA, 22 nt, Artificial Sequence
  RPE65 RNA guide
ugguucaaaauguguaucuaag

SEQ ID NO: 8156 - RNA, 22 nt, Artificial Sequence
  RPE65 RNA guide
uguguaucuaaggacugcugca

SEQ ID NO: 8157 - RNA, 22 nt, Artificial Sequence
  RPE65 RNA guide
uucaaaauguguaucuaaggac

SEQ ID NO: 8158 - RNA, 20 nt, Artificial Sequence
  RPE65 RNA guide
aaauauguaucuaaggacug

SEQ ID NO: 8159 - RNA, 20 nt, Artificial Sequence
  RPE65 RNA guide
aauauguaucuaaggacugc

SEQ ID NO: 8160 - RNA, 20 nt, Artificial Sequence
  RPE65 RNA guide
agcaguccuuagauacauau

SEQ ID NO: 8161 - RNA, 20 nt, Artificial Sequence
  RPE65 RNA guide
auauguaucuaaggacugcu

SEQ ID NO: 8162 - RNA, 20 nt, Artificial Sequence
  RPE65 RNA guide
caaaauauguaucuaaggac

SEQ ID NO: 8163 - RNA, 20 nt, Artificial Sequence
  RPE65 RNA guide
cagcaguccuuagauacaua

SEQ ID NO: 8164 - RNA, 20 nt, Artificial Sequence
  RPE65 RNA guide
caguccuuagauacauauuu

SEQ ID NO: 8165 - RNA, 20 nt, Artificial Sequence
  RPE65 RNA guide
gcagcaguccuuagauacau

SEQ ID NO: 8166 - RNA, 20 nt, Artificial Sequence
  RPE65 RNA guide
gcaguccuuagauacauauu

SEQ ID NO: 8167 - RNA, 20 nt, Artificial Sequence
  RPE65 RNA guide
guccuuagauacauauuuug

SEQ ID NO: 8168 - RNA, 20 nt, Artificial Sequence
  RPE65 RNA guide
uauguaucuaaggacugcug

SEQ ID NO: 8169 - RNA, 21 nt, Artificial Sequence
  RPE65 RNA guide
aaauauguaucuaaggacugc

SEQ ID NO: 8170 - RNA, 21 nt, Artificial Sequence
  RPE65 RNA guide
aauauguaucuaaggacugcu

SEQ ID NO: 8171 - RNA, 21 nt, Artificial Sequence
  RPE65 RNA guide
agcaguccuuagauacauauu

SEQ ID NO: 8172 - RNA, 21 nt, Artificial Sequence
  RPE65 RNA guide
auauguaucuaaggacugcug

SEQ ID NO: 8173 - RNA, 21 nt, Artificial Sequence
  RPE65 RNA guide
cagcaguccuuagauacauau

SEQ ID NO: 8174 - RNA, 21 nt, Artificial Sequence
  RPE65 RNA guide
gcagcaguccuuagauacaua

SEQ ID NO: 8175 - RNA, 21 nt, Artificial Sequence
  RPE65 RNA guide
gcaguccuuagauacauauuu

SEQ ID NO: 8176 - RNA, 21 nt, Artificial Sequence
  RPE65 RNA guide
uauguaucuaaggacugcugc

SEQ ID NO: 8177 - RNA, 21 nt, Artificial Sequence
  RPE65 RNA guide
ugcagcaguccuuagauacau

SEQ ID NO: 8178 - RNA, 22 nt, Artificial Sequence
  RPE65 RNA guide
aaaauauguaucuaaggacugc

SEQ ID NO: 8179 - RNA, 22 nt, Artificial Sequence
  RPE65 RNA guide
aaauauguaucuaaggacugcu

SEQ ID NO: 8180 - RNA, 22 nt, Artificial Sequence
  RPE65 RNA guide
aauauguaucuaaggacugcug

SEQ ID NO: 8181 - RNA, 22 nt, Artificial Sequence
  RPE65 RNA guide
agcaguccuuagauacauauuu

SEQ ID NO: 8182 - RNA, 22 nt, Artificial Sequence
  RPE65 RNA guide
auauguaucuaaggacugcugc

SEQ ID NO: 8183 - RNA, 22 nt, Artificial Sequence
  RPE65 RNA guide
augcagcaguccuuagauacau

SEQ ID NO: 8184 - RNA, 22 nt, Artificial Sequence
  RPE65 RNA guide
caaaauauguaucuaaggacug

SEQ ID NO: 8185 - RNA, 22 nt, Artificial Sequence
  RPE65 RNA guide
cagcaguccuuagauacauauu

SEQ ID NO: 8186 - RNA, 22 nt, Artificial Sequence
  RPE65 RNA guide
caguccuuagauacauauuuug

SEQ ID NO: 8187 - RNA, 22 nt, Artificial Sequence
  RPE65 RNA guide
ccuuagauacauauuuugaacc

SEQ ID NO: 8188 - RNA, 22 nt, Artificial Sequence
  RPE65 RNA guide
gcagcaguccuuagauacauau

SEQ ID NO: 8189 - RNA, 22 nt, Artificial Sequence
  RPE65 RNA guide
gcaguccuuagauacauauuuu

SEQ ID NO: 8190 - RNA, 22 nt, Artificial Sequence
  RPE65 RNA guide
gguucaaaauauguaucuaagg

SEQ ID NO: 8191 - RNA, 22 nt, Artificial Sequence
  RPE65 RNA guide
uauguaucuaaggacugcugca

SEQ ID NO: 8192 - RNA, 22 nt, Artificial Sequence
  RPE65 RNA guide
ugcagcaguccuuagauacaua

SEQ ID NO: 8193 - RNA, 20 nt, Artificial Sequence
  RPE65 RNA guide
aacagagggagauugagaag

SEQ ID NO: 8194 - RNA, 20 nt, Artificial Sequence
  RPE65 RNA guide
aagaauauaauucagcacac

SEQ ID NO: 8195 - RNA, 20 nt, Artificial Sequence
  RPE65 RNA guide
aaguaacagagggagauuga

SEQ ID NO: 8196 - RNA, 20 nt, Artificial Sequence
  RPE65 RNA guide
acagagggagauugagaaga

SEQ ID NO: 8197 - RNA, 20 nt, Artificial Sequence
  RPE65 RNA guide
acauggugugcugaauuaua

SEQ ID NO: 8198 - RNA, 20 nt, Artificial Sequence
  RPE65 RNA guide
agaagaauauaauucagcac

SEQ ID NO: 8199 - RNA, 20 nt, Artificial Sequence
  RPE65 RNA guide
agaauauaauucagcacacc

SEQ ID NO: 8200 - RNA, 20 nt, Artificial Sequence
  RPE65 RNA guide
agagggagauugagaagaau

SEQ ID NO: 8201 - RNA, 20 nt, Artificial Sequence
  RPE65 RNA guide
agggagauugagaagaauau

SEQ ID NO: 8202 - RNA, 20 nt, Artificial Sequence
  RPE65 RNA guide
aguaacagagggagauugag

SEQ ID NO: 8203 - RNA, 20 nt, Artificial Sequence
  RPE65 RNA guide
auauucuucucaaucucccu

SEQ ID NO: 8204 - RNA, 20 nt, Artificial Sequence
  RPE65 RNA guide
auggugugcugaauuauauu

SEQ ID NO: 8205 - RNA, 20 nt, Artificial Sequence
  RPE65 RNA guide
auucuucucaaucucccucu

SEQ ID NO: 8206 - RNA, 20 nt, Artificial Sequence
  RPE65 RNA guide
cagagggagauugagaagaa

SEQ ID NO: 8207 - RNA, 20 nt, Artificial Sequence
  RPE65 RNA guide
cauggugugcugaauuauau

SEQ ID NO: 8208 - RNA, 20 nt, Artificial Sequence
  RPE65 RNA guide
gaagaauauaauucagcaca

SEQ ID NO: 8209 - RNA, 20 nt, Artificial Sequence
  RPE65 RNA guide
gacauggugugcugaauuau

SEQ ID NO: 8210 - RNA, 20 nt, Artificial Sequence
  RPE65 RNA guide
gagaagaauauaauucagca

SEQ ID NO: 8211 - RNA, 20 nt, Artificial Sequence
  RPE65 RNA guide
gagggagauugagaagaaua

SEQ ID NO: 8212 - RNA, 20 nt, Artificial Sequence
  RPE65 RNA guide
gcugaauuauauucuucuca

SEQ ID NO: 8213 - RNA, 20 nt, Artificial Sequence
  RPE65 RNA guide
ggagauugagaagaauauaa

SEQ ID NO: 8214 - RNA, 20 nt, Artificial Sequence
  RPE65 RNA guide
gggagauugagaagaauaua

SEQ ID NO: 8215 - RNA, 20 nt, Artificial Sequence
  RPE65 RNA guide
ggugugcugaauuauauucu

SEQ ID NO: 8216 - RNA, 20 nt, Artificial Sequence
  RPE65 RNA guide
guaacagagggagauugaga

SEQ ID NO: 8217 - RNA, 20 nt, Artificial Sequence
  RPE65 RNA guide
gugcugaauuauauucuucu

SEQ ID NO: 8218 - RNA, 20 nt, Artificial Sequence
  RPE65 RNA guide
gugugcugaauuauauucuu

SEQ ID NO: 8219 - RNA, 20 nt, Artificial Sequence
  RPE65 RNA guide
uaacagagggagauugagaa

SEQ ID NO: 8220 - RNA, 20 nt, Artificial Sequence
  RPE65 RNA guide
uauauucuucucaaucuccc

SEQ ID NO: 8221 - RNA, 20 nt, Artificial Sequence
  RPE65 RNA guide
uauucuucucaaucucccuc

SEQ ID NO: 8222 - RNA, 20 nt, Artificial Sequence
  RPE65 RNA guide
ucuucucaaucucccucugu

SEQ ID NO: 8223 - RNA, 20 nt, Artificial Sequence
  RPE65 RNA guide
ugagaagaauauaauucagc

SEQ ID NO: 8224 - RNA, 20 nt, Artificial Sequence
  RPE65 RNA guide
ugcugaauuauauucuucuc

SEQ ID NO: 8225 - RNA, 20 nt, Artificial Sequence
  RPE65 RNA guide
uggugugcugaauuauauuc

SEQ ID NO: 8226 - RNA, 20 nt, Artificial Sequence
  RPE65 RNA guide
ugugcugaauuauauucuuc

SEQ ID NO: 8227 - RNA, 20 nt, Artificial Sequence
  RPE65 RNA guide
uuauauucuucucaaucucc

SEQ ID NO: 8228 - RNA, 20 nt, Artificial Sequence
  RPE65 RNA guide
uucuucucaaucucccucug

SEQ ID NO: 8229 - RNA, 21 nt, Artificial Sequence
  RPE65 RNA guide
aaaguaacagagggagauuga

SEQ ID NO: 8230 - RNA, 21 nt, Artificial Sequence
  RPE65 RNA guide
aacagagggagauugagaaga

SEQ ID NO: 8231 - RNA, 21 nt, Artificial Sequence
  RPE65 RNA guide
aagaauauaauucagcacacc

SEQ ID NO: 8232 - RNA, 21 nt, Artificial Sequence
  RPE65 RNA guide
aaguaacagagggagauugag

SEQ ID NO: 8233 - RNA, 21 nt, Artificial Sequence
  RPE65 RNA guide
acagagggagauugagaagaa

SEQ ID NO: 8234 - RNA, 21 nt, Artificial Sequence
  RPE65 RNA guide
acauggugugcugaauuauau

SEQ ID NO: 8235 - RNA, 21 nt, Artificial Sequence
  RPE65 RNA guide
agaauauaauucagcacacca

SEQ ID NO: 8236 - RNA, 21 nt, Artificial Sequence
  RPE65 RNA guide
agagggagauugagaagaaua

SEQ ID NO: 8237 - RNA, 21 nt, Artificial Sequence
  RPE65 RNA guide
agggagauugagaagaauaua

SEQ ID NO: 8238 - RNA, 21 nt, Artificial Sequence
  RPE65 RNA guide
aguaacagagggagauugaga

SEQ ID NO: 8239 - RNA, 21 nt, Artificial Sequence
  RPE65 RNA guide
auauucuucucaaucucccuc

SEQ ID NO: 8240 - RNA, 21 nt, Artificial Sequence
  RPE65 RNA guide
auggugugcugaauuauauuc

SEQ ID NO: 8241 - RNA, 21 nt, Artificial Sequence
  RPE65 RNA guide
auucuucucaaucucccucug

SEQ ID NO: 8242 - RNA, 21 nt, Artificial Sequence
  RPE65 RNA guide
cagagggagauugagaagaau

SEQ ID NO: 8243 - RNA, 21 nt, Artificial Sequence
  RPE65 RNA guide
cauggugugcugaauuauauu

SEQ ID NO: 8244 - RNA, 21 nt, Artificial Sequence
  RPE65 RNA guide
gaagaauauaauucagcacac

SEQ ID NO: 8245 - RNA, 21 nt, Artificial Sequence
  RPE65 RNA guide
gacauggugugcugaauuaua

SEQ ID NO: 8246 - RNA, 21 nt, Artificial Sequence
  RPE65 RNA guide
gagaagaauauaauucagcac

SEQ ID NO: 8247 - RNA, 21 nt, Artificial Sequence
  RPE65 RNA guide
gagggagauugagaagaauau

SEQ ID NO: 8248 - RNA, 21 nt, Artificial Sequence
  RPE65 RNA guide
ggacauggugugcugaauuau

SEQ ID NO: 8249 - RNA, 21 nt, Artificial Sequence
  RPE65 RNA guide
gggagauugagaagaauauaa

SEQ ID NO: 8250 - RNA, 21 nt, Artificial Sequence
  RPE65 RNA guide
ggugugcugaauuauauucuu

SEQ ID NO: 8251 - RNA, 21 nt, Artificial Sequence
  RPE65 RNA guide
guaacagagggagauugagaa

SEQ ID NO: 8252 - RNA, 21 nt, Artificial Sequence
  RPE65 RNA guide
gugcugaauuauauucuucuc

SEQ ID NO: 8253 - RNA, 21 nt, Artificial Sequence
  RPE65 RNA guide
gugugcugaauuauauucuuc

SEQ ID NO: 8254 - RNA, 21 nt, Artificial Sequence
  RPE65 RNA guide
uaacagagggagauugagaag

SEQ ID NO: 8255 - RNA, 21 nt, Artificial Sequence
  RPE65 RNA guide
uauauucuucucaaucucccu

SEQ ID NO: 8256 - RNA, 21 nt, Artificial Sequence
  RPE65 RNA guide
uauucuucucaaucucccucu

SEQ ID NO: 8257 - RNA, 21 nt, Artificial Sequence
  RPE65 RNA guide
ucuucucaaucucccucuguu

SEQ ID NO: 8258 - RNA, 21 nt, Artificial Sequence
  RPE65 RNA guide
uggugugcugaauuauauucu

SEQ ID NO: 8259 - RNA, 21 nt, Artificial Sequence
  RPE65 RNA guide
uuauauucuucucaaucuccc

SEQ ID NO: 8260 - RNA, 21 nt, Artificial Sequence
  RPE65 RNA guide
uucuucucaaucucccucugu

SEQ ID NO: 8261 - RNA, 22 nt, Artificial Sequence
  RPE65 RNA guide
aaaaguaacagagggagauuga

SEQ ID NO: 8262 - RNA, 22 nt, Artificial Sequence
  RPE65 RNA guide
aaaguaacagagggagauugag

SEQ ID NO: 8263 - RNA, 22 nt, Artificial Sequence
  RPE65 RNA guide
aacagagggagauugagaagaa

SEQ ID NO: 8264 - RNA, 22 nt, Artificial Sequence
  RPE65 RNA guide
aagaauauaauucagcacacca

SEQ ID NO: 8265 - RNA, 22 nt, Artificial Sequence
  RPE65 RNA guide
aaguaacagagggagauugaga

SEQ ID NO: 8266 - RNA, 22 nt, Artificial Sequence
  RPE65 RNA guide
acagagggagauugagaagaau

SEQ ID NO: 8267 - RNA, 22 nt, Artificial Sequence
  RPE65 RNA guide
acauggugugcugaauuauauu

SEQ ID NO: 8268 - RNA, 22 nt, Artificial Sequence
  RPE65 RNA guide
agaagaauauaauucagcacac

SEQ ID NO: 8269 - RNA, 22 nt, Artificial Sequence
  RPE65 RNA guide
agaauauaauucagcacaccau

SEQ ID NO: 8270 - RNA, 22 nt, Artificial Sequence
  RPE65 RNA guide
agagggagauugagaagaauau

SEQ ID NO: 8271 - RNA, 22 nt, Artificial Sequence
  RPE65 RNA guide
agggagauugagaagaauauaa

SEQ ID NO: 8272 - RNA, 22 nt, Artificial Sequence
  RPE65 RNA guide
aguaacagagggagauugagaa

SEQ ID NO: 8273 - RNA, 22 nt, Artificial Sequence
  RPE65 RNA guide
auauucuucucaaucucccucu

SEQ ID NO: 8274 - RNA, 22 nt, Artificial Sequence
  RPE65 RNA guide
auggugugcugaauuauauucu

SEQ ID NO: 8275 - RNA, 22 nt, Artificial Sequence
  RPE65 RNA guide
auuauauucuucucaaucuccc

SEQ ID NO: 8276 - RNA, 22 nt, Artificial Sequence
  RPE65 RNA guide
auucuucucaaucucccucugu

SEQ ID NO: 8277 - RNA, 22 nt, Artificial Sequence
  RPE65 RNA guide
cagagggagauugagaagaaua

SEQ ID NO: 8278 - RNA, 22 nt, Artificial Sequence
  RPE65 RNA guide
cauggugugcugaauuauauuc

SEQ ID NO: 8279 - RNA, 22 nt, Artificial Sequence
  RPE65 RNA guide
cggacauggugugcugaauuau

SEQ ID NO: 8280 - RNA, 22 nt, Artificial Sequence
  RPE65 RNA guide
gaagaauauaauucagcacacc

SEQ ID NO: 8281 - RNA, 22 nt, Artificial Sequence
  RPE65 RNA guide
gacauggugugcugaauuauau

SEQ ID NO: 8282 - RNA, 22 nt, Artificial Sequence
  RPE65 RNA guide
gagaagaauauaauucagcaca

SEQ ID NO: 8283 - RNA, 22 nt, Artificial Sequence
  RPE65 RNA guide
gagggagauugagaagaauaua

SEQ ID NO: 8284 - RNA, 22 nt, Artificial Sequence
  RPE65 RNA guide
ggacauggugugcugaauuaua

SEQ ID NO: 8285 - RNA, 22 nt, Artificial Sequence
  RPE65 RNA guide
gggagauugagaagaauauaau

SEQ ID NO: 8286 - RNA, 22 nt, Artificial Sequence
  RPE65 RNA guide
ggugugcugaauuauauucuuc

SEQ ID NO: 8287 - RNA, 22 nt, Artificial Sequence
  RPE65 RNA guide
guaacagagggagauugagaag

SEQ ID NO: 8288 - RNA, 22 nt, Artificial Sequence
  RPE65 RNA guide
gugcugaauuauauucuucuca

SEQ ID NO: 8289 - RNA, 22 nt, Artificial Sequence
  RPE65 RNA guide
gugugcugaauuauauucuucu

SEQ ID NO: 8290 - RNA, 22 nt, Artificial Sequence
  RPE65 RNA guide
uaacagagggagauugagaaga

SEQ ID NO: 8291 - RNA, 22 nt, Artificial Sequence
  RPE65 RNA guide
uauauucuucucaaucucccuc

SEQ ID NO: 8292 - RNA, 22 nt, Artificial Sequence
  RPE65 RNA guide
uauucuucucaaucucccucug

SEQ ID NO: 8293 - RNA, 22 nt, Artificial Sequence
  RPE65 RNA guide
ucuucucaaucucccucuguua

SEQ ID NO: 8294 - RNA, 22 nt, Artificial Sequence
  RPE65 RNA guide
ugagaagaauauaauucagcac

SEQ ID NO: 8295 - RNA, 22 nt, Artificial Sequence
  RPE65 RNA guide
uggugugcugaauuauauucuu

SEQ ID NO: 8296 - RNA, 22 nt, Artificial Sequence
  RPE65 RNA guide
ugugcugaauuauauucuucuc

SEQ ID NO: 8297 - RNA, 22 nt, Artificial Sequence
  RPE65 RNA guide
uuauauucuucucaaucucccu

SEQ ID NO: 8298 - RNA, 22 nt, Artificial Sequence
  RPE65 RNA guide
uucuucucaaucucccucuguu

SEQ ID NO: 8299 - RNA, 20 nt, Artificial Sequence
  RPE65 RNA guide
aacagagggagauugagaau

SEQ ID NO: 8300 - RNA, 20 nt, Artificial Sequence
  RPE65 RNA guide
acagagggagauugagaaua

SEQ ID NO: 8301 - RNA, 20 nt, Artificial Sequence
  RPE65 RNA guide
agagggagauugagaauaau

SEQ ID NO: 8302 - RNA, 20 nt, Artificial Sequence
  RPE65 RNA guide
agggagauugagaauaauau

SEQ ID NO: 8303 - RNA, 20 nt, Artificial Sequence
  RPE65 RNA guide
auaauauaauucagcacacc

SEQ ID NO: 8304 - RNA, 20 nt, Artificial Sequence
  RPE65 RNA guide
auauuauucucaaucucccu

SEQ ID NO: 8305 - RNA, 20 nt, Artificial Sequence
  RPE65 RNA guide
auuauucucaaucucccucu

SEQ ID NO: 8306 - RNA, 20 nt, Artificial Sequence
  RPE65 RNA guide
cagagggagauugagaauaa

SEQ ID NO: 8307 - RNA, 20 nt, Artificial Sequence
  RPE65 RNA guide
gagggagauugagaauaaua

SEQ ID NO: 8308 - RNA, 20 nt, Artificial Sequence
  RPE65 RNA guide
gggagauugagaauaauaua

SEQ ID NO: 8309 - RNA, 20 nt, Artificial Sequence
  RPE65 RNA guide
ggugugcugaauuauauuau

SEQ ID NO: 8310 - RNA, 20 nt, Artificial Sequence
  RPE65 RNA guide
uauauuauucucaaucuccc

SEQ ID NO: 8311 - RNA, 20 nt, Artificial Sequence
  RPE65 RNA guide
uauuauucucaaucucccuc

SEQ ID NO: 8312 - RNA, 20 nt, Artificial Sequence
  RPE65 RNA guide
uauucucaaucucccucugu

SEQ ID NO: 8313 - RNA, 20 nt, Artificial Sequence
  RPE65 RNA guide
uggugugcugaauuauauua

SEQ ID NO: 8314 - RNA, 20 nt, Artificial Sequence
  RPE65 RNA guide
uuauucucaaucucccucug

SEQ ID NO: 8315 - RNA, 21 nt, Artificial Sequence
  RPE65 RNA guide
aacagagggagauugagaaua

SEQ ID NO: 8316 - RNA, 21 nt, Artificial Sequence
  RPE65 RNA guide
acagagggagauugagaauaa

SEQ ID NO: 8317 - RNA, 21 nt, Artificial Sequence
  RPE65 RNA guide
agagggagauugagaauaaua

SEQ ID NO: 8318 - RNA, 21 nt, Artificial Sequence
  RPE65 RNA guide
auauuauucucaaucucccuc

SEQ ID NO: 8319 - RNA, 21 nt, Artificial Sequence
  RPE65 RNA guide
auuauucucaaucucccucug

SEQ ID NO: 8320 - RNA, 21 nt, Artificial Sequence
  RPE65 RNA guide
cagagggagauugagaauaau

SEQ ID NO: 8321 - RNA, 21 nt, Artificial Sequence
  RPE65 RNA guide
gagggagauugagaauaauau

SEQ ID NO: 8322 - RNA, 21 nt, Artificial Sequence
  RPE65 RNA guide
uaacagagggagauugagaau

SEQ ID NO: 8323 - RNA, 21 nt, Artificial Sequence
  RPE65 RNA guide
uauuauucucaaucucccucu

SEQ ID NO: 8324 - RNA, 21 nt, Artificial Sequence
  RPE65 RNA guide
uauucucaaucucccucuguu

SEQ ID NO: 8325 - RNA, 21 nt, Artificial Sequence
  RPE65 RNA guide
uuauucucaaucucccucugu

SEQ ID NO: 8326 - RNA, 22 nt, Artificial Sequence
  RPE65 RNA guide
aacagagggagauugagaauaa

SEQ ID NO: 8327 - RNA, 22 nt, Artificial Sequence
  RPE65 RNA guide
acagagggagauugagaauaau

SEQ ID NO: 8328 - RNA, 22 nt, Artificial Sequence
  RPE65 RNA guide
agagggagauugagaauaauau

SEQ ID NO: 8329 - RNA, 22 nt, Artificial Sequence
  RPE65 RNA guide
auauuauucucaaucucccucu

SEQ ID NO: 8330 - RNA, 22 nt, Artificial Sequence
  RPE65 RNA guide
auuauucucaaucucccucugu

SEQ ID NO: 8331 - RNA, 22 nt, Artificial Sequence
  RPE65 RNA guide
cagagggagauugagaauaaua

SEQ ID NO: 8332 - RNA, 22 nt, Artificial Sequence
  RPE65 RNA guide
cauggugugcugaauuauauua

SEQ ID NO: 8333 - RNA, 22 nt, Artificial Sequence
  RPE65 RNA guide
gaauaauauaauucagcacacc

SEQ ID NO: 8334 - RNA, 22 nt, Artificial Sequence
  RPE65 RNA guide
gagggagauugagaauaauaua

SEQ ID NO: 8335 - RNA, 22 nt, Artificial Sequence
  RPE65 RNA guide
ggugugcugaauuauauuauuc

SEQ ID NO: 8336 - RNA, 22 nt, Artificial Sequence
  RPE65 RNA guide
guaacagagggagauugagaau

SEQ ID NO: 8337 - RNA, 22 nt, Artificial Sequence
  RPE65 RNA guide
uaacagagggagauugagaaua

SEQ ID NO: 8338 - RNA, 22 nt, Artificial Sequence
  RPE65 RNA guide
uauauuauucucaaucucccuc

SEQ ID NO: 8339 - RNA, 22 nt, Artificial Sequence
  RPE65 RNA guide
uauuauucucaaucucccucug

SEQ ID NO: 8340 - RNA, 22 nt, Artificial Sequence
  RPE65 RNA guide
uauucucaaucucccucuguua

SEQ ID NO: 8341 - RNA, 22 nt, Artificial Sequence
  RPE65 RNA guide
uuauucucaaucucccucuguu

SEQ ID NO: 8342 - RNA, 20 nt, Artificial Sequence
  RPE65 RNA guide
aaaccauaucuuagaguaga

SEQ ID NO: 8343 - RNA, 20 nt, Artificial Sequence
  RPE65 RNA guide
aaccauaucuuagaguagac

SEQ ID NO: 8344 - RNA, 20 nt, Artificial Sequence
  RPE65 RNA guide
aagauaugguuuagcagacc

SEQ ID NO: 8345 - RNA, 20 nt, Artificial Sequence
  RPE65 RNA guide
acaggucugcuaaaccauau

SEQ ID NO: 8346 - RNA, 20 nt, Artificial Sequence
  RPE65 RNA guide
accauaucuuagaguagaca

SEQ ID NO: 8347 - RNA, 20 nt, Artificial Sequence
  RPE65 RNA guide
acucuaagauaugguuuagc

SEQ ID NO: 8348 - RNA, 20 nt, Artificial Sequence
  RPE65 RNA guide
agacaggucugcuaaaccau

SEQ ID NO: 8349 - RNA, 20 nt, Artificial Sequence
  RPE65 RNA guide
agauaugguuuagcagaccu

SEQ ID NO: 8350 - RNA, 20 nt, Artificial Sequence
  RPE65 RNA guide
aggucugcuaaaccauaucu

SEQ ID NO: 8351 - RNA, 20 nt, Artificial Sequence
  RPE65 RNA guide
aguaugcugucuacucuaag

SEQ ID NO: 8352 - RNA, 20 nt, Artificial Sequence
  RPE65 RNA guide
auaugguuuagcagaccugu

SEQ ID NO: 8353 - RNA, 20 nt, Artificial Sequence
  RPE65 RNA guide
augcugucuacucuaagaua

SEQ ID NO: 8354 - RNA, 20 nt, Artificial Sequence
  RPE65 RNA guide
augguuuagcagaccugucu

SEQ ID NO: 8355 - RNA, 20 nt, Artificial Sequence
  RPE65 RNA guide
caggucugcuaaaccauauc

SEQ ID NO: 8356 - RNA, 20 nt, Artificial Sequence
  RPE65 RNA guide
cauaucuuagaguagacagc

SEQ ID NO: 8357 - RNA, 20 nt, Artificial Sequence
  RPE65 RNA guide
ccauaucuuagaguagacag

SEQ ID NO: 8358 - RNA, 20 nt, Artificial Sequence
  RPE65 RNA guide
ccuagacaggucugcuaaac

SEQ ID NO: 8359 - RNA, 20 nt, Artificial Sequence
  RPE65 RNA guide
cuaaaccauaucuuagagua

SEQ ID NO: 8360 - RNA, 20 nt, Artificial Sequence
  RPE65 RNA guide
cuaagauaugguuuagcaga

SEQ ID NO: 8361 - RNA, 20 nt, Artificial Sequence
  RPE65 RNA guide
cuacucuaagauaugguuua

SEQ ID NO: 8362 - RNA, 20 nt, Artificial Sequence
  RPE65 RNA guide
cuagacaggucugcuaaacc

SEQ ID NO: 8363 - RNA, 20 nt, Artificial Sequence
  RPE65 RNA guide
cucuaagauaugguuuagca

SEQ ID NO: 8364 - RNA, 20 nt, Artificial Sequence
  RPE65 RNA guide
cugcuaaaccauaucuuaga

SEQ ID NO: 8365 - RNA, 20 nt, Artificial Sequence
  RPE65 RNA guide
cugucuacucuaagauaugg

SEQ ID NO: 8366 - RNA, 20 nt, Artificial Sequence
  RPE65 RNA guide
gacaggucugcuaaaccaua

SEQ ID NO: 8367 - RNA, 20 nt, Artificial Sequence
  RPE65 RNA guide
gauaugguuuagcagaccug

SEQ ID NO: 8368 - RNA, 20 nt, Artificial Sequence
  RPE65 RNA guide
gccuagacaggucugcuaaa

SEQ ID NO: 8369 - RNA, 20 nt, Artificial Sequence
  RPE65 RNA guide
gcuaaaccauaucuuagagu

SEQ ID NO: 8370 - RNA, 20 nt, Artificial Sequence
  RPE65 RNA guide
gcugucuacucuaagauaug

SEQ ID NO: 8371 - RNA, 20 nt, Artificial Sequence
  RPE65 RNA guide
ggucugcuaaaccauaucuu

SEQ ID NO: 8372 - RNA, 20 nt, Artificial Sequence
  RPE65 RNA guide
guaugcugucuacucuaaga

SEQ ID NO: 8373 - RNA, 20 nt, Artificial Sequence
  RPE65 RNA guide
gucuacucuaagauaugguu

SEQ ID NO: 8374 - RNA, 20 nt, Artificial Sequence
  RPE65 RNA guide
gucugcuaaaccauaucuua

SEQ ID NO: 8375 - RNA, 20 nt, Artificial Sequence
  RPE65 RNA guide
uaaaccauaucuuagaguag

SEQ ID NO: 8376 - RNA, 20 nt, Artificial Sequence
  RPE65 RNA guide
uaagauaugguuuagcagac

SEQ ID NO: 8377 - RNA, 20 nt, Artificial Sequence
  RPE65 RNA guide
uacucuaagauaugguuuag

SEQ ID NO: 8378 - RNA, 20 nt, Artificial Sequence
  RPE65 RNA guide
uagacaggucugcuaaacca

SEQ ID NO: 8379 - RNA, 20 nt, Artificial Sequence
  RPE65 RNA guide
uaugcugucuacucuaagau

SEQ ID NO: 8380 - RNA, 20 nt, Artificial Sequence
  RPE65 RNA guide
uaugguuuagcagaccuguc

SEQ ID NO: 8381 - RNA, 20 nt, Artificial Sequence
  RPE65 RNA guide
ucuaagauaugguuuagcag

SEQ ID NO: 8382 - RNA, 20 nt, Artificial Sequence
  RPE65 RNA guide
ucuacucuaagauaugguuu

SEQ ID NO: 8383 - RNA, 20 nt, Artificial Sequence
  RPE65 RNA guide
ucugcuaaaccauaucuuag

SEQ ID NO: 8384 - RNA, 20 nt, Artificial Sequence
  RPE65 RNA guide
ugccuagacaggucugcuaa

SEQ ID NO: 8385 - RNA, 20 nt, Artificial Sequence
  RPE65 RNA guide
ugcuaaaccauaucuuagag

SEQ ID NO: 8386 - RNA, 20 nt, Artificial Sequence
  RPE65 RNA guide
ugcugucuacucuaagauau

SEQ ID NO: 8387 - RNA, 20 nt, Artificial Sequence
  RPE65 RNA guide
ugucuacucuaagauauggu

SEQ ID NO: 8388 - RNA, 21 nt, Artificial Sequence
  RPE65 RNA guide
aaaccauaucuuagaguagac

SEQ ID NO: 8389 - RNA, 21 nt, Artificial Sequence
  RPE65 RNA guide
aaccauaucuuagaguagaca

SEQ ID NO: 8390 - RNA, 21 nt, Artificial Sequence
  RPE65 RNA guide
aagauaugguuuagcagaccu

SEQ ID NO: 8391 - RNA, 21 nt, Artificial Sequence
  RPE65 RNA guide
aaguaugcugucuacucuaag

SEQ ID NO: 8392 - RNA, 21 nt, Artificial Sequence
  RPE65 RNA guide
acaggucugcuaaaccauauc

SEQ ID NO: 8393 - RNA, 21 nt, Artificial Sequence
  RPE65 RNA guide
accauaucuuagaguagacag

SEQ ID NO: 8394 - RNA, 21 nt, Artificial Sequence
  RPE65 RNA guide
acucuaagauaugguuuagca

SEQ ID NO: 8395 - RNA, 21 nt, Artificial Sequence
  RPE65 RNA guide
agacaggucugcuaaaccaua

SEQ ID NO: 8396 - RNA, 21 nt, Artificial Sequence
  RPE65 RNA guide
agauaugguuuagcagaccug

SEQ ID NO: 8397 - RNA, 21 nt, Artificial Sequence
  RPE65 RNA guide
aggucugcuaaaccauaucuu

SEQ ID NO: 8398 - RNA, 21 nt, Artificial Sequence
  RPE65 RNA guide
aguaugcugucuacucuaaga

SEQ ID NO: 8399 - RNA, 21 nt, Artificial Sequence
  RPE65 RNA guide
auaugguuuagcagaccuguc

SEQ ID NO: 8400 - RNA, 21 nt, Artificial Sequence
  RPE65 RNA guide
augcugucuacucuaagauau

SEQ ID NO: 8401 - RNA, 21 nt, Artificial Sequence
  RPE65 RNA guide
augguuuagcagaccugucua

SEQ ID NO: 8402 - RNA, 21 nt, Artificial Sequence
  RPE65 RNA guide
caggucugcuaaaccauaucu

SEQ ID NO: 8403 - RNA, 21 nt, Artificial Sequence
  RPE65 RNA guide
cauaucuuagaguagacagca

SEQ ID NO: 8404 - RNA, 21 nt, Artificial Sequence
  RPE65 RNA guide
ccauaucuuagaguagacagc

SEQ ID NO: 8405 - RNA, 21 nt, Artificial Sequence
  RPE65 RNA guide
ccuagacaggucugcuaaacc

SEQ ID NO: 8406 - RNA, 21 nt, Artificial Sequence
  RPE65 RNA guide
cuaaaccauaucuuagaguag

SEQ ID NO: 8407 - RNA, 21 nt, Artificial Sequence
  RPE65 RNA guide
cuaagauaugguuuagcagac

SEQ ID NO: 8408 - RNA, 21 nt, Artificial Sequence
  RPE65 RNA guide
cuacucuaagauaugguuuag

SEQ ID NO: 8409 - RNA, 21 nt, Artificial Sequence
  RPE65 RNA guide
cuagacaggucugcuaaacca

SEQ ID NO: 8410 - RNA, 21 nt, Artificial Sequence
  RPE65 RNA guide
cucuaagauaugguuuagcag

SEQ ID NO: 8411 - RNA, 21 nt, Artificial Sequence
  RPE65 RNA guide
cugcuaaaccauaucuuagag

SEQ ID NO: 8412 - RNA, 21 nt, Artificial Sequence
  RPE65 RNA guide
cugucuacucuaagauauggu

SEQ ID NO: 8413 - RNA, 21 nt, Artificial Sequence
  RPE65 RNA guide
gacaggucugcuaaaccauau

SEQ ID NO: 8414 - RNA, 21 nt, Artificial Sequence
  RPE65 RNA guide
gauaugguuuagcagaccugu

SEQ ID NO: 8415 - RNA, 21 nt, Artificial Sequence
  RPE65 RNA guide
gccuagacaggucugcuaaac

SEQ ID NO: 8416 - RNA, 21 nt, Artificial Sequence
  RPE65 RNA guide
gcuaaaccauaucuuagagua

SEQ ID NO: 8417 - RNA, 21 nt, Artificial Sequence
  RPE65 RNA guide
gcugucuacucuaagauaugg

SEQ ID NO: 8418 - RNA, 21 nt, Artificial Sequence
  RPE65 RNA guide
ggucugcuaaaccauaucuua

SEQ ID NO: 8419 - RNA, 21 nt, Artificial Sequence
  RPE65 RNA guide
guaugcugucuacucuaagau

SEQ ID NO: 8420 - RNA, 21 nt, Artificial Sequence
  RPE65 RNA guide
gucuacucuaagauaugguuu

SEQ ID NO: 8421 - RNA, 21 nt, Artificial Sequence
  RPE65 RNA guide
gucugcuaaaccauaucuuag

SEQ ID NO: 8422 - RNA, 21 nt, Artificial Sequence
  RPE65 RNA guide
uaagauaugguuuagcagacc

SEQ ID NO: 8423 - RNA, 21 nt, Artificial Sequence
  RPE65 RNA guide
uacucuaagauaugguuuagc

SEQ ID NO: 8424 - RNA, 21 nt, Artificial Sequence
  RPE65 RNA guide
uagacaggucugcuaaaccau

SEQ ID NO: 8425 - RNA, 21 nt, Artificial Sequence
  RPE65 RNA guide
uaugcugucuacucuaagaua

SEQ ID NO: 8426 - RNA, 21 nt, Artificial Sequence
  RPE65 RNA guide
uaugguuuagcagaccugucu

SEQ ID NO: 8427 - RNA, 21 nt, Artificial Sequence
  RPE65 RNA guide
ucuaagauaugguuuagcaga

SEQ ID NO: 8428 - RNA, 21 nt, Artificial Sequence
  RPE65 RNA guide
ucugcuaaaccauaucuuaga

SEQ ID NO: 8429 - RNA, 21 nt, Artificial Sequence
  RPE65 RNA guide
ugccuagacaggucugcuaaa

SEQ ID NO: 8430 - RNA, 21 nt, Artificial Sequence
  RPE65 RNA guide
ugcuaaaccauaucuuagagu

SEQ ID NO: 8431 - RNA, 21 nt, Artificial Sequence
  RPE65 RNA guide
ugcugucuacucuaagauaug

SEQ ID NO: 8432 - RNA, 21 nt, Artificial Sequence
  RPE65 RNA guide
ugucuacucuaagauaugguu

SEQ ID NO: 8433 - RNA, 21 nt, Artificial Sequence
  RPE65 RNA guide
uugccuagacaggucugcuaa

SEQ ID NO: 8434 - RNA, 22 nt, Artificial Sequence
  RPE65 RNA guide
aaaccauaucuuagaguagaca

SEQ ID NO: 8435 - RNA, 22 nt, Artificial Sequence
  RPE65 RNA guide
aaaguaugcugucuacucuaag

SEQ ID NO: 8436 - RNA, 22 nt, Artificial Sequence
  RPE65 RNA guide
aaccauaucuuagaguagacag

SEQ ID NO: 8437 - RNA, 22 nt, Artificial Sequence
  RPE65 RNA guide
aagauaugguuuagcagaccug

SEQ ID NO: 8438 - RNA, 22 nt, Artificial Sequence
  RPE65 RNA guide
aaguaugcugucuacucuaaga

SEQ ID NO: 8439 - RNA, 22 nt, Artificial Sequence
  RPE65 RNA guide
acaggucugcuaaaccauaucu

SEQ ID NO: 8440 - RNA, 22 nt, Artificial Sequence
  RPE65 RNA guide
accauaucuuagaguagacagc

SEQ ID NO: 8441 - RNA, 22 nt, Artificial Sequence
  RPE65 RNA guide
acucuaagauaugguuuagcag

SEQ ID NO: 8442 - RNA, 22 nt, Artificial Sequence
  RPE65 RNA guide
agacaggucugcuaaaccauau

SEQ ID NO: 8443 - RNA, 22 nt, Artificial Sequence
  RPE65 RNA guide
agauaugguuuagcagaccugu

SEQ ID NO: 8444 - RNA, 22 nt, Artificial Sequence
  RPE65 RNA guide
aggucugcuaaaccauaucuua

SEQ ID NO: 8445 - RNA, 22 nt, Artificial Sequence
  RPE65 RNA guide
aguaugcugucuacucuaagau

SEQ ID NO: 8446 - RNA, 22 nt, Artificial Sequence
  RPE65 RNA guide
auaugguuuagcagaccugucu

SEQ ID NO: 8447 - RNA, 22 nt, Artificial Sequence
  RPE65 RNA guide
augcugucuacucuaagauaug

SEQ ID NO: 8448 - RNA, 22 nt, Artificial Sequence
  RPE65 RNA guide
augguuuagcagaccugucuag

SEQ ID NO: 8449 - RNA, 22 nt, Artificial Sequence
  RPE65 RNA guide
caggucugcuaaaccauaucuu

SEQ ID NO: 8450 - RNA, 22 nt, Artificial Sequence
  RPE65 RNA guide
cauaucuuagaguagacagcau

SEQ ID NO: 8451 - RNA, 22 nt, Artificial Sequence
  RPE65 RNA guide
ccauaucuuagaguagacagca

SEQ ID NO: 8452 - RNA, 22 nt, Artificial Sequence
  RPE65 RNA guide
ccuagacaggucugcuaaacca

SEQ ID NO: 8453 - RNA, 22 nt, Artificial Sequence
  RPE65 RNA guide
cuaaaccauaucuuagaguaga

SEQ ID NO: 8454 - RNA, 22 nt, Artificial Sequence
  RPE65 RNA guide
cuaagauaugguuuagcagacc

SEQ ID NO: 8455 - RNA, 22 nt, Artificial Sequence
  RPE65 RNA guide
cuacucuaagauaugguuuagc

SEQ ID NO: 8456 - RNA, 22 nt, Artificial Sequence
  RPE65 RNA guide
cuagacaggucugcuaaaccau

SEQ ID NO: 8457 - RNA, 22 nt, Artificial Sequence
  RPE65 RNA guide
cucuaagauaugguuuagcaga

SEQ ID NO: 8458 - RNA, 22 nt, Artificial Sequence
  RPE65 RNA guide
cugcuaaaccauaucuuagagu

SEQ ID NO: 8459 - RNA, 22 nt, Artificial Sequence
  RPE65 RNA guide
cugucuacucuaagauaugguu

SEQ ID NO: 8460 - RNA, 22 nt, Artificial Sequence
  RPE65 RNA guide
cuugccuagacaggucugcuaa

SEQ ID NO: 8461 - RNA, 22 nt, Artificial Sequence
  RPE65 RNA guide
gacaggucugcuaaaccauauc

SEQ ID NO: 8462 - RNA, 22 nt, Artificial Sequence
  RPE65 RNA guide
gauaugguuuagcagaccuguc

SEQ ID NO: 8463 - RNA, 22 nt, Artificial Sequence
  RPE65 RNA guide
gccuagacaggucugcuaaacc

SEQ ID NO: 8464 - RNA, 22 nt, Artificial Sequence
  RPE65 RNA guide
gcuaaaccauaucuuagaguag

SEQ ID NO: 8465 - RNA, 22 nt, Artificial Sequence
  RPE65 RNA guide
gcugucuacucuaagauauggu

SEQ ID NO: 8466 - RNA, 22 nt, Artificial Sequence
  RPE65 RNA guide
ggucugcuaaaccauaucuuag

SEQ ID NO: 8467 - RNA, 22 nt, Artificial Sequence
  RPE65 RNA guide
guaugcugucuacucuaagaua

SEQ ID NO: 8468 - RNA, 22 nt, Artificial Sequence
  RPE65 RNA guide
gucuacucuaagauaugguuua

SEQ ID NO: 8469 - RNA, 22 nt, Artificial Sequence
  RPE65 RNA guide
gucugcuaaaccauaucuuaga

SEQ ID NO: 8470 - RNA, 22 nt, Artificial Sequence
  RPE65 RNA guide
uaaaccauaucuuagaguagac

SEQ ID NO: 8471 - RNA, 22 nt, Artificial Sequence
  RPE65 RNA guide
uaagauaugguuuagcagaccu

SEQ ID NO: 8472 - RNA, 22 nt, Artificial Sequence
  RPE65 RNA guide
uacucuaagauaugguuuagca

SEQ ID NO: 8473 - RNA, 22 nt, Artificial Sequence
  RPE65 RNA guide
uagacaggucugcuaaaccaua

SEQ ID NO: 8474 - RNA, 22 nt, Artificial Sequence
  RPE65 RNA guide
uaugcugucuacucuaagauau

SEQ ID NO: 8475 - RNA, 22 nt, Artificial Sequence
  RPE65 RNA guide
uaugguuuagcagaccugucua

SEQ ID NO: 8476 - RNA, 22 nt, Artificial Sequence
  RPE65 RNA guide
ucuaagauaugguuuagcagac

SEQ ID NO: 8477 - RNA, 22 nt, Artificial Sequence
  RPE65 RNA guide
ucuacucuaagauaugguuuag

SEQ ID NO: 8478 - RNA, 22 nt, Artificial Sequence
  RPE65 RNA guide
ucugcuaaaccauaucuuagag

SEQ ID NO: 8479 - RNA, 22 nt, Artificial Sequence
  RPE65 RNA guide
ugccuagacaggucugcuaaac

SEQ ID NO: 8480 - RNA, 22 nt, Artificial Sequence
  RPE65 RNA guide
ugcuaaaccauaucuuagagua

SEQ ID NO: 8481 - RNA, 22 nt, Artificial Sequence
  RPE65 RNA guide
ugcugucuacucuaagauaugg

SEQ ID NO: 8482 - RNA, 22 nt, Artificial Sequence
  RPE65 RNA guide
ugucuacucuaagauaugguuu

SEQ ID NO: 8483 - RNA, 22 nt, Artificial Sequence
  RPE65 RNA guide
uugccuagacaggucugcuaaa

SEQ ID NO: 8484 - RNA, 20 nt, Artificial Sequence
  RPE65 RNA guide
aaaccguaucuuagaguaga

SEQ ID NO: 8485 - RNA, 20 nt, Artificial Sequence
  RPE65 RNA guide
aaccguaucuuagaguagac

SEQ ID NO: 8486 - RNA, 20 nt, Artificial Sequence
  RPE65 RNA guide
aagauacgguuuagcagacc

SEQ ID NO: 8487 - RNA, 20 nt, Artificial Sequence
  RPE65 RNA guide
acaggucugcuaaaccguau

SEQ ID NO: 8488 - RNA, 20 nt, Artificial Sequence
  RPE65 RNA guide
accguaucuuagaguagaca

SEQ ID NO: 8489 - RNA, 20 nt, Artificial Sequence
  RPE65 RNA guide
acgguuuagcagaccugucu

SEQ ID NO: 8490 - RNA, 20 nt, Artificial Sequence
  RPE65 RNA guide
acucuaagauacgguuuagc

SEQ ID NO: 8491 - RNA, 20 nt, Artificial Sequence
  RPE65 RNA guide
agacaggucugcuaaaccgu

SEQ ID NO: 8492 - RNA, 20 nt, Artificial Sequence
  RPE65 RNA guide
agauacgguuuagcagaccu

SEQ ID NO: 8493 - RNA, 20 nt, Artificial Sequence
  RPE65 RNA guide
aggucugcuaaaccguaucu

SEQ ID NO: 8494 - RNA, 20 nt, Artificial Sequence
  RPE65 RNA guide
auacgguuuagcagaccugu

SEQ ID NO: 8495 - RNA, 20 nt, Artificial Sequence
  RPE65 RNA guide
caggucugcuaaaccguauc

SEQ ID NO: 8496 - RNA, 20 nt, Artificial Sequence
  RPE65 RNA guide
ccguaucuuagaguagacag

SEQ ID NO: 8497 - RNA, 20 nt, Artificial Sequence
  RPE65 RNA guide
cguaucuuagaguagacagc

SEQ ID NO: 8498 - RNA, 20 nt, Artificial Sequence
  RPE65 RNA guide
cuaaaccguaucuuagagua

SEQ ID NO: 8499 - RNA, 20 nt, Artificial Sequence
  RPE65 RNA guide
cuaagauacgguuuagcaga

SEQ ID NO: 8500 - RNA, 20 nt, Artificial Sequence
  RPE65 RNA guide
cuacucuaagauacgguuua

SEQ ID NO: 8501 - RNA, 20 nt, Artificial Sequence
  RPE65 RNA guide
cucuaagauacgguuuagca

SEQ ID NO: 8502 - RNA, 20 nt, Artificial Sequence
  RPE65 RNA guide
cugcuaaaccguaucuuaga

SEQ ID NO: 8503 - RNA, 20 nt, Artificial Sequence
  RPE65 RNA guide
cugucuacucuaagauacgg

SEQ ID NO: 8504 - RNA, 20 nt, Artificial Sequence
  RPE65 RNA guide
gacaggucugcuaaaccgua

SEQ ID NO: 8505 - RNA, 20 nt, Artificial Sequence
  RPE65 RNA guide
gauacgguuuagcagaccug

SEQ ID NO: 8506 - RNA, 20 nt, Artificial Sequence
  RPE65 RNA guide
gcuaaaccguaucuuagagu

SEQ ID NO: 8507 - RNA, 20 nt, Artificial Sequence
  RPE65 RNA guide
gcugucuacucuaagauacg

SEQ ID NO: 8508 - RNA, 20 nt, Artificial Sequence
  RPE65 RNA guide
ggucugcuaaaccguaucuu

SEQ ID NO: 8509 - RNA, 20 nt, Artificial Sequence
  RPE65 RNA guide
gucuacucuaagauacgguu

SEQ ID NO: 8510 - RNA, 20 nt, Artificial Sequence
  RPE65 RNA guide
gucugcuaaaccguaucuua

SEQ ID NO: 8511 - RNA, 20 nt, Artificial Sequence
  RPE65 RNA guide
uaaaccguaucuuagaguag

SEQ ID NO: 8512 - RNA, 20 nt, Artificial Sequence
  RPE65 RNA guide
uaagauacgguuuagcagac

SEQ ID NO: 8513 - RNA, 20 nt, Artificial Sequence
  RPE65 RNA guide
uacgguuuagcagaccuguc

SEQ ID NO: 8514 - RNA, 20 nt, Artificial Sequence
  RPE65 RNA guide
uacucuaagauacgguuuag

SEQ ID NO: 8515 - RNA, 20 nt, Artificial Sequence
  RPE65 RNA guide
uagacaggucugcuaaaccg

SEQ ID NO: 8516 - RNA, 20 nt, Artificial Sequence
  RPE65 RNA guide
ucuaagauacgguuuagcag

SEQ ID NO: 8517 - RNA, 20 nt, Artificial Sequence
  RPE65 RNA guide
ucuacucuaagauacgguuu

SEQ ID NO: 8518 - RNA, 20 nt, Artificial Sequence
  RPE65 RNA guide
ucugcuaaaccguaucuuag

SEQ ID NO: 8519 - RNA, 20 nt, Artificial Sequence
  RPE65 RNA guide
ugcuaaaccguaucuuagag

SEQ ID NO: 8520 - RNA, 20 nt, Artificial Sequence
  RPE65 RNA guide
ugcugucuacucuaagauac

SEQ ID NO: 8521 - RNA, 20 nt, Artificial Sequence
  RPE65 RNA guide
ugucuacucuaagauacggu

SEQ ID NO: 8522 - RNA, 21 nt, Artificial Sequence
  RPE65 RNA guide
aaaccguaucuuagaguagac

SEQ ID NO: 8523 - RNA, 21 nt, Artificial Sequence
  RPE65 RNA guide
aaccguaucuuagaguagaca

SEQ ID NO: 8524 - RNA, 21 nt, Artificial Sequence
  RPE65 RNA guide
aagauacgguuuagcagaccu

SEQ ID NO: 8525 - RNA, 21 nt, Artificial Sequence
  RPE65 RNA guide
acaggucugcuaaaccguauc

SEQ ID NO: 8526 - RNA, 21 nt, Artificial Sequence
  RPE65 RNA guide
accguaucuuagaguagacag

SEQ ID NO: 8527 - RNA, 21 nt, Artificial Sequence
  RPE65 RNA guide
acgguuuagcagaccugucua

SEQ ID NO: 8528 - RNA, 21 nt, Artificial Sequence
  RPE65 RNA guide
acucuaagauacgguuuagca

SEQ ID NO: 8529 - RNA, 21 nt, Artificial Sequence
  RPE65 RNA guide
agacaggucugcuaaaccgua

SEQ ID NO: 8530 - RNA, 21 nt, Artificial Sequence
  RPE65 RNA guide
agauacgguuuagcagaccug

SEQ ID NO: 8531 - RNA, 21 nt, Artificial Sequence
  RPE65 RNA guide
aggucugcuaaaccguaucuu

SEQ ID NO: 8532 - RNA, 21 nt, Artificial Sequence
  RPE65 RNA guide
auacgguuuagcagaccuguc

SEQ ID NO: 8533 - RNA, 21 nt, Artificial Sequence
  RPE65 RNA guide
augcugucuacucuaagauac

SEQ ID NO: 8534 - RNA, 21 nt, Artificial Sequence
  RPE65 RNA guide
caggucugcuaaaccguaucu

SEQ ID NO: 8535 - RNA, 21 nt, Artificial Sequence
  RPE65 RNA guide
ccguaucuuagaguagacagc

SEQ ID NO: 8536 - RNA, 21 nt, Artificial Sequence
  RPE65 RNA guide
cguaucuuagaguagacagca

SEQ ID NO: 8537 - RNA, 21 nt, Artificial Sequence
  RPE65 RNA guide
cuaaaccguaucuuagaguag

SEQ ID NO: 8538 - RNA, 21 nt, Artificial Sequence
  RPE65 RNA guide
cuaagauacgguuuagcagac

SEQ ID NO: 8539 - RNA, 21 nt, Artificial Sequence
  RPE65 RNA guide
cuacucuaagauacgguuuag

SEQ ID NO: 8540 - RNA, 21 nt, Artificial Sequence
  RPE65 RNA guide
cuagacaggucugcuaaaccg

SEQ ID NO: 8541 - RNA, 21 nt, Artificial Sequence
  RPE65 RNA guide
cucuaagauacgguuuagcag

SEQ ID NO: 8542 - RNA, 21 nt, Artificial Sequence
  RPE65 RNA guide
cugcuaaaccguaucuuagag

SEQ ID NO: 8543 - RNA, 21 nt, Artificial Sequence
  RPE65 RNA guide
cugucuacucuaagauacggu

SEQ ID NO: 8544 - RNA, 21 nt, Artificial Sequence
  RPE65 RNA guide
gacaggucugcuaaaccguau

SEQ ID NO: 8545 - RNA, 21 nt, Artificial Sequence
  RPE65 RNA guide
gauacgguuuagcagaccugu

SEQ ID NO: 8546 - RNA, 21 nt, Artificial Sequence
  RPE65 RNA guide
gcuaaaccguaucuuagagua

SEQ ID NO: 8547 - RNA, 21 nt, Artificial Sequence
  RPE65 RNA guide
gcugucuacucuaagauacgg

SEQ ID NO: 8548 - RNA, 21 nt, Artificial Sequence
  RPE65 RNA guide
ggucugcuaaaccguaucuua

SEQ ID NO: 8549 - RNA, 21 nt, Artificial Sequence
  RPE65 RNA guide
gucuacucuaagauacgguuu

SEQ ID NO: 8550 - RNA, 21 nt, Artificial Sequence
  RPE65 RNA guide
gucugcuaaaccguaucuuag

SEQ ID NO: 8551 - RNA, 21 nt, Artificial Sequence
  RPE65 RNA guide
uaaaccguaucuuagaguaga

SEQ ID NO: 8552 - RNA, 21 nt, Artificial Sequence
  RPE65 RNA guide
uaagauacgguuuagcagacc

SEQ ID NO: 8553 - RNA, 21 nt, Artificial Sequence
  RPE65 RNA guide
uacgguuuagcagaccugucu

SEQ ID NO: 8554 - RNA, 21 nt, Artificial Sequence
  RPE65 RNA guide
uacucuaagauacgguuuagc

SEQ ID NO: 8555 - RNA, 21 nt, Artificial Sequence
  RPE65 RNA guide
uagacaggucugcuaaaccgu

SEQ ID NO: 8556 - RNA, 21 nt, Artificial Sequence
  RPE65 RNA guide
ucuaagauacgguuuagcaga

SEQ ID NO: 8557 - RNA, 21 nt, Artificial Sequence
  RPE65 RNA guide
ucuacucuaagauacgguuua

SEQ ID NO: 8558 - RNA, 21 nt, Artificial Sequence
  RPE65 RNA guide
ucugcuaaaccguaucuuaga

SEQ ID NO: 8559 - RNA, 21 nt, Artificial Sequence
  RPE65 RNA guide
ugcuaaaccguaucuuagagu

SEQ ID NO: 8560 - RNA, 21 nt, Artificial Sequence
  RPE65 RNA guide
ugcugucuacucuaagauacg

SEQ ID NO: 8561 - RNA, 21 nt, Artificial Sequence
  RPE65 RNA guide
ugucuacucuaagauacgguu

SEQ ID NO: 8562 - RNA, 22 nt, Artificial Sequence
  RPE65 RNA guide
aaaccguaucuuagaguagaca

SEQ ID NO: 8563 - RNA, 22 nt, Artificial Sequence
  RPE65 RNA guide
aaccguaucuuagaguagacag

SEQ ID NO: 8564 - RNA, 22 nt, Artificial Sequence
  RPE65 RNA guide
aagauacgguuuagcagaccug

SEQ ID NO: 8565 - RNA, 22 nt, Artificial Sequence
  RPE65 RNA guide
acaggucugcuaaaccguaucu

SEQ ID NO: 8566 - RNA, 22 nt, Artificial Sequence
  RPE65 RNA guide
accguaucuuagaguagacagc

SEQ ID NO: 8567 - RNA, 22 nt, Artificial Sequence
  RPE65 RNA guide
acgguuuagcagaccugucuag

SEQ ID NO: 8568 - RNA, 22 nt, Artificial Sequence
  RPE65 RNA guide
acucuaagauacgguuuagcag

SEQ ID NO: 8569 - RNA, 22 nt, Artificial Sequence
  RPE65 RNA guide
agacaggucugcuaaaccguau

SEQ ID NO: 8570 - RNA, 22 nt, Artificial Sequence
  RPE65 RNA guide
agauacgguuuagcagaccugu

SEQ ID NO: 8571 - RNA, 22 nt, Artificial Sequence
  RPE65 RNA guide
aggucugcuaaaccguaucuua

SEQ ID NO: 8572 - RNA, 22 nt, Artificial Sequence
  RPE65 RNA guide
auacgguuuagcagaccugucu

SEQ ID NO: 8573 - RNA, 22 nt, Artificial Sequence
  RPE65 RNA guide
augcugucuacucuaagauacg

SEQ ID NO: 8574 - RNA, 22 nt, Artificial Sequence
  RPE65 RNA guide
caggucugcuaaaccguaucuu

SEQ ID NO: 8575 - RNA, 22 nt, Artificial Sequence
  RPE65 RNA guide
ccguaucuuagaguagacagca

SEQ ID NO: 8576 - RNA, 22 nt, Artificial Sequence
  RPE65 RNA guide
ccuagacaggucugcuaaaccg

SEQ ID NO: 8577 - RNA, 22 nt, Artificial Sequence
  RPE65 RNA guide
cguaucuuagaguagacagcau

SEQ ID NO: 8578 - RNA, 22 nt, Artificial Sequence
  RPE65 RNA guide
cuaaaccguaucuuagaguaga

SEQ ID NO: 8579 - RNA, 22 nt, Artificial Sequence
  RPE65 RNA guide
cuaagauacgguuuagcagacc

SEQ ID NO: 8580 - RNA, 22 nt, Artificial Sequence
  RPE65 RNA guide
cuacucuaagauacgguuuagc

SEQ ID NO: 8581 - RNA, 22 nt, Artificial Sequence
  RPE65 RNA guide
cuagacaggucugcuaaaccgu

SEQ ID NO: 8582 - RNA, 22 nt, Artificial Sequence
  RPE65 RNA guide
cucuaagauacgguuuagcaga

SEQ ID NO: 8583 - RNA, 22 nt, Artificial Sequence
  RPE65 RNA guide
cugcuaaaccguaucuuagagu

SEQ ID NO: 8584 - RNA, 22 nt, Artificial Sequence
  RPE65 RNA guide
cugucuacucuaagauacgguu

SEQ ID NO: 8585 - RNA, 22 nt, Artificial Sequence
  RPE65 RNA guide
gacaggucugcuaaaccguauc

SEQ ID NO: 8586 - RNA, 22 nt, Artificial Sequence
  RPE65 RNA guide
gauacgguuuagcagaccuguc

SEQ ID NO: 8587 - RNA, 22 nt, Artificial Sequence
  RPE65 RNA guide
gcuaaaccguaucuuagaguag

SEQ ID NO: 8588 - RNA, 22 nt, Artificial Sequence
  RPE65 RNA guide
gcugucuacucuaagauacggu

SEQ ID NO: 8589 - RNA, 22 nt, Artificial Sequence
  RPE65 RNA guide
ggucugcuaaaccguaucuuag

SEQ ID NO: 8590 - RNA, 22 nt, Artificial Sequence
  RPE65 RNA guide
gucuacucuaagauacgguuua

SEQ ID NO: 8591 - RNA, 22 nt, Artificial Sequence
  RPE65 RNA guide
gucugcuaaaccguaucuuaga

SEQ ID NO: 8592 - RNA, 22 nt, Artificial Sequence
  RPE65 RNA guide
uaaaccguaucuuagaguagac

SEQ ID NO: 8593 - RNA, 22 nt, Artificial Sequence
  RPE65 RNA guide
uaagauacgguuuagcagaccu

SEQ ID NO: 8594 - RNA, 22 nt, Artificial Sequence
  RPE65 RNA guide
uacgguuuagcagaccugucua

SEQ ID NO: 8595 - RNA, 22 nt, Artificial Sequence
  RPE65 RNA guide
uacucuaagauacgguuuagca

SEQ ID NO: 8596 - RNA, 22 nt, Artificial Sequence
  RPE65 RNA guide
uagacaggucugcuaaaccgua

SEQ ID NO: 8597 - RNA, 22 nt, Artificial Sequence
  RPE65 RNA guide
uaugcugucuacucuaagauac

SEQ ID NO: 8598 - RNA, 22 nt, Artificial Sequence
  RPE65 RNA guide
ucuaagauacgguuuagcagac

SEQ ID NO: 8599 - RNA, 22 nt, Artificial Sequence
  RPE65 RNA guide
ucuacucuaagauacgguuuag

SEQ ID NO: 8600 - RNA, 22 nt, Artificial Sequence
  RPE65 RNA guide
ucugcuaaaccguaucuuagag

SEQ ID NO: 8601 - RNA, 22 nt, Artificial Sequence
  RPE65 RNA guide
ugcuaaaccguaucuuagagua

SEQ ID NO: 8602 - RNA, 22 nt, Artificial Sequence
  RPE65 RNA guide
ugcugucuacucuaagauacgg

SEQ ID NO: 8603 - RNA, 22 nt, Artificial Sequence
  RPE65 RNA guide
ugucuacucuaagauacgguuu

SEQ ID NO: 8604 - RNA, 20 nt, Artificial Sequence
  RPE65 RNA guide
aaaugagagcgcagugucua

SEQ ID NO: 8605 - RNA, 20 nt, Artificial Sequence
  RPE65 RNA guide
aagugcuuugugugugcuag

SEQ ID NO: 8606 - RNA, 20 nt, Artificial Sequence
  RPE65 RNA guide
aaugagagcgcagugucuag

SEQ ID NO: 8607 - RNA, 20 nt, Artificial Sequence
  RPE65 RNA guide
agagcgcagugucuagcaca

SEQ ID NO: 8608 - RNA, 20 nt, Artificial Sequence
  RPE65 RNA guide
agcacacacaaagcacuuca

SEQ ID NO: 8609 - RNA, 20 nt, Artificial Sequence
  RPE65 RNA guide
agcgcagugucuagcacaca

SEQ ID NO: 8610 - RNA, 20 nt, Artificial Sequence
  RPE65 RNA guide
agugcuuugugugugcuaga

SEQ ID NO: 8611 - RNA, 20 nt, Artificial Sequence
  RPE65 RNA guide
agugucuagcacacacaaag

SEQ ID NO: 8612 - RNA, 20 nt, Artificial Sequence
  RPE65 RNA guide
augaagugcuuugugugugc

SEQ ID NO: 8613 - RNA, 20 nt, Artificial Sequence
  RPE65 RNA guide
augagagcgcagugucuagc

SEQ ID NO: 8614 - RNA, 20 nt, Artificial Sequence
  RPE65 RNA guide
auuaugaagugcuuugugug

SEQ ID NO: 8615 - RNA, 20 nt, Artificial Sequence
  RPE65 RNA guide
cacacacaaagcacuucaua

SEQ ID NO: 8616 - RNA, 20 nt, Artificial Sequence
  RPE65 RNA guide
cagugucuagcacacacaaa

SEQ ID NO: 8617 - RNA, 20 nt, Artificial Sequence
  RPE65 RNA guide
cgcagugucuagcacacaca

SEQ ID NO: 8618 - RNA, 20 nt, Artificial Sequence
  RPE65 RNA guide
cuagcacacacaaagcacuu

SEQ ID NO: 8619 - RNA, 20 nt, Artificial Sequence
  RPE65 RNA guide
cuuugugugugcuagacacu

SEQ ID NO: 8620 - RNA, 20 nt, Artificial Sequence
  RPE65 RNA guide
gaagugcuuugugugugcua

SEQ ID NO: 8621 - RNA, 20 nt, Artificial Sequence
  RPE65 RNA guide
gagagcgcagugucuagcac

SEQ ID NO: 8622 - RNA, 20 nt, Artificial Sequence
  RPE65 RNA guide
gagcgcagugucuagcacac

SEQ ID NO: 8623 - RNA, 20 nt, Artificial Sequence
  RPE65 RNA guide
gcacacacaaagcacuucau

SEQ ID NO: 8624 - RNA, 20 nt, Artificial Sequence
  RPE65 RNA guide
gcagugucuagcacacacaa

SEQ ID NO: 8625 - RNA, 20 nt, Artificial Sequence
  RPE65 RNA guide
gcgcagugucuagcacacac

SEQ ID NO: 8626 - RNA, 20 nt, Artificial Sequence
  RPE65 RNA guide
gcuuugugugugcuagacac

SEQ ID NO: 8627 - RNA, 20 nt, Artificial Sequence
  RPE65 RNA guide
gucuagcacacacaaagcac

SEQ ID NO: 8628 - RNA, 20 nt, Artificial Sequence
  RPE65 RNA guide
gugcuagacacugcgcucuc

SEQ ID NO: 8629 - RNA, 20 nt, Artificial Sequence
  RPE65 RNA guide
gugcuuugugugugcuagac

SEQ ID NO: 8630 - RNA, 20 nt, Artificial Sequence
  RPE65 RNA guide
gugucuagcacacacaaagc

SEQ ID NO: 8631 - RNA, 20 nt, Artificial Sequence
  RPE65 RNA guide
gugugcuagacacugcgcuc

SEQ ID NO: 8632 - RNA, 20 nt, Artificial Sequence
  RPE65 RNA guide
gugugugcuagacacugcgc

SEQ ID NO: 8633 - RNA, 20 nt, Artificial Sequence
  RPE65 RNA guide
uaaaugagagcgcagugucu

SEQ ID NO: 8634 - RNA, 20 nt, Artificial Sequence
  RPE65 RNA guide
uagcacacacaaagcacuuc

SEQ ID NO: 8635 - RNA, 20 nt, Artificial Sequence
  RPE65 RNA guide
uaugaagugcuuugugugug

SEQ ID NO: 8636 - RNA, 20 nt, Artificial Sequence
  RPE65 RNA guide
uauuaugaagugcuuugugu

SEQ ID NO: 8637 - RNA, 20 nt, Artificial Sequence
  RPE65 RNA guide
ucuagcacacacaaagcacu

SEQ ID NO: 8638 - RNA, 20 nt, Artificial Sequence
  RPE65 RNA guide
ugaagugcuuugugugugcu

SEQ ID NO: 8639 - RNA, 20 nt, Artificial Sequence
  RPE65 RNA guide
ugagagcgcagugucuagca

SEQ ID NO: 8640 - RNA, 20 nt, Artificial Sequence
  RPE65 RNA guide
ugcuuugugugugcuagaca

SEQ ID NO: 8641 - RNA, 20 nt, Artificial Sequence
  RPE65 RNA guide
ugucuagcacacacaaagca

SEQ ID NO: 8642 - RNA, 20 nt, Artificial Sequence
  RPE65 RNA guide
ugugcuagacacugcgcucu

SEQ ID NO: 8643 - RNA, 20 nt, Artificial Sequence
  RPE65 RNA guide
ugugugcuagacacugcgcu

SEQ ID NO: 8644 - RNA, 20 nt, Artificial Sequence
  RPE65 RNA guide
ugugugugcuagacacugcg

SEQ ID NO: 8645 - RNA, 20 nt, Artificial Sequence
  RPE65 RNA guide
uuaugaagugcuuugugugu

SEQ ID NO: 8646 - RNA, 20 nt, Artificial Sequence
  RPE65 RNA guide
uuauuaugaagugcuuugug

SEQ ID NO: 8647 - RNA, 20 nt, Artificial Sequence
  RPE65 RNA guide
uugugugugcuagacacugc

SEQ ID NO: 8648 - RNA, 20 nt, Artificial Sequence
  RPE65 RNA guide
uuugugugugcuagacacug

SEQ ID NO: 8649 - RNA, 21 nt, Artificial Sequence
  RPE65 RNA guide
aaaugagagcgcagugucuag

SEQ ID NO: 8650 - RNA, 21 nt, Artificial Sequence
  RPE65 RNA guide
aagugcuuugugugugcuaga

SEQ ID NO: 8651 - RNA, 21 nt, Artificial Sequence
  RPE65 RNA guide
aaugagagcgcagugucuagc

SEQ ID NO: 8652 - RNA, 21 nt, Artificial Sequence
  RPE65 RNA guide
agagcgcagugucuagcacac

SEQ ID NO: 8653 - RNA, 21 nt, Artificial Sequence
  RPE65 RNA guide
agcacacacaaagcacuucau

SEQ ID NO: 8654 - RNA, 21 nt, Artificial Sequence
  RPE65 RNA guide
agcgcagugucuagcacacac

SEQ ID NO: 8655 - RNA, 21 nt, Artificial Sequence
  RPE65 RNA guide
agugcuuugugugugcuagac

SEQ ID NO: 8656 - RNA, 21 nt, Artificial Sequence
  RPE65 RNA guide
agugucuagcacacacaaagc

SEQ ID NO: 8657 - RNA, 21 nt, Artificial Sequence
  RPE65 RNA guide
augaagugcuuugugugugcu

SEQ ID NO: 8658 - RNA, 21 nt, Artificial Sequence
  RPE65 RNA guide
augagagcgcagugucuagca

SEQ ID NO: 8659 - RNA, 21 nt, Artificial Sequence
  RPE65 RNA guide
auuaugaagugcuuugugugu

SEQ ID NO: 8660 - RNA, 21 nt, Artificial Sequence
  RPE65 RNA guide
cacacacaaagcacuucauaa

SEQ ID NO: 8661 - RNA, 21 nt, Artificial Sequence
  RPE65 RNA guide
cagugucuagcacacacaaag

SEQ ID NO: 8662 - RNA, 21 nt, Artificial Sequence
  RPE65 RNA guide
cgcagugucuagcacacacaa

SEQ ID NO: 8663 - RNA, 21 nt, Artificial Sequence
  RPE65 RNA guide
cuagcacacacaaagcacuuc

SEQ ID NO: 8664 - RNA, 21 nt, Artificial Sequence
  RPE65 RNA guide
cuuugugugugcuagacacug

SEQ ID NO: 8665 - RNA, 21 nt, Artificial Sequence
  RPE65 RNA guide
gaagugcuuugugugugcuag

SEQ ID NO: 8666 - RNA, 21 nt, Artificial Sequence
  RPE65 RNA guide
gagagcgcagugucuagcaca

SEQ ID NO: 8667 - RNA, 21 nt, Artificial Sequence
  RPE65 RNA guide
gagcgcagugucuagcacaca

SEQ ID NO: 8668 - RNA, 21 nt, Artificial Sequence
  RPE65 RNA guide
gcacacacaaagcacuucaua

SEQ ID NO: 8669 - RNA, 21 nt, Artificial Sequence
  RPE65 RNA guide
gcagugucuagcacacacaaa

SEQ ID NO: 8670 - RNA, 21 nt, Artificial Sequence
  RPE65 RNA guide
gcgcagugucuagcacacaca

SEQ ID NO: 8671 - RNA, 21 nt, Artificial Sequence
  RPE65 RNA guide
gcuuugugugugcuagacacu

SEQ ID NO: 8672 - RNA, 21 nt, Artificial Sequence
  RPE65 RNA guide
gucuagcacacacaaagcacu

SEQ ID NO: 8673 - RNA, 21 nt, Artificial Sequence
  RPE65 RNA guide
gugcuagacacugcgcucuca

SEQ ID NO: 8674 - RNA, 21 nt, Artificial Sequence
  RPE65 RNA guide
gugcuuugugugugcuagaca

SEQ ID NO: 8675 - RNA, 21 nt, Artificial Sequence
  RPE65 RNA guide
gugucuagcacacacaaagca

SEQ ID NO: 8676 - RNA, 21 nt, Artificial Sequence
  RPE65 RNA guide
gugugcuagacacugcgcucu

SEQ ID NO: 8677 - RNA, 21 nt, Artificial Sequence
  RPE65 RNA guide
gugugugcuagacacugcgcu

SEQ ID NO: 8678 - RNA, 21 nt, Artificial Sequence
  RPE65 RNA guide
uaaaugagagcgcagugucua

SEQ ID NO: 8679 - RNA, 21 nt, Artificial Sequence
  RPE65 RNA guide
uagcacacacaaagcacuuca

SEQ ID NO: 8680 - RNA, 21 nt, Artificial Sequence
  RPE65 RNA guide
uaugaagugcuuugugugugc

SEQ ID NO: 8681 - RNA, 21 nt, Artificial Sequence
  RPE65 RNA guide
uauuaugaagugcuuugugug

SEQ ID NO: 8682 - RNA, 21 nt, Artificial Sequence
  RPE65 RNA guide
ucuagcacacacaaagcacuu

SEQ ID NO: 8683 - RNA, 21 nt, Artificial Sequence
  RPE65 RNA guide
ugaagugcuuugugugugcua

SEQ ID NO: 8684 - RNA, 21 nt, Artificial Sequence
  RPE65 RNA guide
ugagagcgcagugucuagcac

SEQ ID NO: 8685 - RNA, 21 nt, Artificial Sequence
  RPE65 RNA guide
ugcuuugugugugcuagacac

SEQ ID NO: 8686 - RNA, 21 nt, Artificial Sequence
  RPE65 RNA guide
ugucuagcacacacaaagcac

SEQ ID NO: 8687 - RNA, 21 nt, Artificial Sequence
  RPE65 RNA guide
ugugcuagacacugcgcucuc

SEQ ID NO: 8688 - RNA, 21 nt, Artificial Sequence
  RPE65 RNA guide
ugugugcuagacacugcgcuc

SEQ ID NO: 8689 - RNA, 21 nt, Artificial Sequence
  RPE65 RNA guide
ugugugugcuagacacugcgc

SEQ ID NO: 8690 - RNA, 21 nt, Artificial Sequence
  RPE65 RNA guide
uuaaaugagagcgcagugucu

SEQ ID NO: 8691 - RNA, 21 nt, Artificial Sequence
  RPE65 RNA guide
uuaugaagugcuuugugugug

SEQ ID NO: 8692 - RNA, 21 nt, Artificial Sequence
  RPE65 RNA guide
uugugugugcuagacacugcg

SEQ ID NO: 8693 - RNA, 21 nt, Artificial Sequence
  RPE65 RNA guide
uuugugugugcuagacacugc

SEQ ID NO: 8694 - RNA, 22 nt, Artificial Sequence
  RPE65 RNA guide
aaaugagagcgcagugucuagc

SEQ ID NO: 8695 - RNA, 22 nt, Artificial Sequence
  RPE65 RNA guide
aagugcuuugugugugcuagac

SEQ ID NO: 8696 - RNA, 22 nt, Artificial Sequence
  RPE65 RNA guide
aaugagagcgcagugucuagca

SEQ ID NO: 8697 - RNA, 22 nt, Artificial Sequence
  RPE65 RNA guide
agagcgcagugucuagcacaca

SEQ ID NO: 8698 - RNA, 22 nt, Artificial Sequence
  RPE65 RNA guide
agcacacacaaagcacuucaua

SEQ ID NO: 8699 - RNA, 22 nt, Artificial Sequence
  RPE65 RNA guide
agcgcagugucuagcacacaca

SEQ ID NO: 8700 - RNA, 22 nt, Artificial Sequence
  RPE65 RNA guide
agugcuuugugugugcuagaca

SEQ ID NO: 8701 - RNA, 22 nt, Artificial Sequence
  RPE65 RNA guide
agugucuagcacacacaaagca

SEQ ID NO: 8702 - RNA, 22 nt, Artificial Sequence
  RPE65 RNA guide
augaagugcuuugugugugcua

SEQ ID NO: 8703 - RNA, 22 nt, Artificial Sequence
  RPE65 RNA guide
augagagcgcagugucuagcac

SEQ ID NO: 8704 - RNA, 22 nt, Artificial Sequence
  RPE65 RNA guide
auuaaaugagagcgcagugucu

SEQ ID NO: 8705 - RNA, 22 nt, Artificial Sequence
  RPE65 RNA guide
auuaugaagugcuuugugugug

SEQ ID NO: 8706 - RNA, 22 nt, Artificial Sequence
  RPE65 RNA guide
cacacacaaagcacuucauaau

SEQ ID NO: 8707 - RNA, 22 nt, Artificial Sequence
  RPE65 RNA guide
cagugucuagcacacacaaagc

SEQ ID NO: 8708 - RNA, 22 nt, Artificial Sequence
  RPE65 RNA guide
cgcagugucuagcacacacaaa

SEQ ID NO: 8709 - RNA, 22 nt, Artificial Sequence
  RPE65 RNA guide
cuagcacacacaaagcacuuca

SEQ ID NO: 8710 - RNA, 22 nt, Artificial Sequence
  RPE65 RNA guide
cuuugugugugcuagacacugc

SEQ ID NO: 8711 - RNA, 22 nt, Artificial Sequence
  RPE65 RNA guide
gaagugcuuugugugugcuaga

SEQ ID NO: 8712 - RNA, 22 nt, Artificial Sequence
  RPE65 RNA guide
gagagcgcagugucuagcacac

SEQ ID NO: 8713 - RNA, 22 nt, Artificial Sequence
  RPE65 RNA guide
gagcgcagugucuagcacacac

SEQ ID NO: 8714 - RNA, 22 nt, Artificial Sequence
  RPE65 RNA guide
gcacacacaaagcacuucauaa

SEQ ID NO: 8715 - RNA, 22 nt, Artificial Sequence
  RPE65 RNA guide
gcagugucuagcacacacaaag

SEQ ID NO: 8716 - RNA, 22 nt, Artificial Sequence
  RPE65 RNA guide
gcgcagugucuagcacacacaa

SEQ ID NO: 8717 - RNA, 22 nt, Artificial Sequence
  RPE65 RNA guide
gcuuugugugugcuagacacug

SEQ ID NO: 8718 - RNA, 22 nt, Artificial Sequence
  RPE65 RNA guide
gucuagcacacacaaagcacuu

SEQ ID NO: 8719 - RNA, 22 nt, Artificial Sequence
  RPE65 RNA guide
gugcuagacacugcgcucucau

SEQ ID NO: 8720 - RNA, 22 nt, Artificial Sequence
  RPE65 RNA guide
gugcuuugugugugcuagacac

SEQ ID NO: 8721 - RNA, 22 nt, Artificial Sequence
  RPE65 RNA guide
gugucuagcacacacaaagcac

SEQ ID NO: 8722 - RNA, 22 nt, Artificial Sequence
  RPE65 RNA guide
gugugcuagacacugcgcucuc

SEQ ID NO: 8723 - RNA, 22 nt, Artificial Sequence
  RPE65 RNA guide
gugugugcuagacacugcgcuc

SEQ ID NO: 8724 - RNA, 22 nt, Artificial Sequence
  RPE65 RNA guide
uaaaugagagcgcagugucuag

SEQ ID NO: 8725 - RNA, 22 nt, Artificial Sequence
  RPE65 RNA guide
uagcacacacaaagcacuucau

SEQ ID NO: 8726 - RNA, 22 nt, Artificial Sequence
  RPE65 RNA guide
uaugaagugcuuugugugugcu

SEQ ID NO: 8727 - RNA, 22 nt, Artificial Sequence
  RPE65 RNA guide
uauuaugaagugcuuugugugu

SEQ ID NO: 8728 - RNA, 22 nt, Artificial Sequence
  RPE65 RNA guide
ucuagcacacacaaagcacuuc

SEQ ID NO: 8729 - RNA, 22 nt, Artificial Sequence
  RPE65 RNA guide
ugaagugcuuugugugugcuag

SEQ ID NO: 8730 - RNA, 22 nt, Artificial Sequence
  RPE65 RNA guide
ugagagcgcagugucuagcaca

SEQ ID NO: 8731 - RNA, 22 nt, Artificial Sequence
  RPE65 RNA guide
ugcuuugugugugcuagacacu

SEQ ID NO: 8732 - RNA, 22 nt, Artificial Sequence
  RPE65 RNA guide
ugucuagcacacacaaagcacu

SEQ ID NO: 8733 - RNA, 22 nt, Artificial Sequence
  RPE65 RNA guide
ugugcuagacacugcgcucuca

SEQ ID NO: 8734 - RNA, 22 nt, Artificial Sequence
  RPE65 RNA guide
ugugugcuagacacugcgcucu

SEQ ID NO: 8735 - RNA, 22 nt, Artificial Sequence
  RPE65 RNA guide
ugugugugcuagacacugcgcu

SEQ ID NO: 8736 - RNA, 22 nt, Artificial Sequence
  RPE65 RNA guide
uuaaaugagagcgcagugucua

SEQ ID NO: 8737 - RNA, 22 nt, Artificial Sequence
  RPE65 RNA guide
uuaugaagugcuuugugugugc

SEQ ID NO: 8738 - RNA, 22 nt, Artificial Sequence
  RPE65 RNA guide
uuauuaugaagugcuuugugug

SEQ ID NO: 8739 - RNA, 22 nt, Artificial Sequence
  RPE65 RNA guide
uugugugugcuagacacugcgc

SEQ ID NO: 8740 - RNA, 22 nt, Artificial Sequence
  RPE65 RNA guide
uuugugugugcuagacacugcg

SEQ ID NO: 8741 - RNA, 20 nt, Artificial Sequence
  RPE65 RNA guide
agagcgcagugucuagcuag

SEQ ID NO: 8742 - RNA, 20 nt, Artificial Sequence
  RPE65 RNA guide
agcgcagugucuagcuagca

SEQ ID NO: 8743 - RNA, 20 nt, Artificial Sequence
  RPE65 RNA guide
agcuagcacacacaaagcac

SEQ ID NO: 8744 - RNA, 20 nt, Artificial Sequence
  RPE65 RNA guide
agugcuuugugugugcuagc

SEQ ID NO: 8745 - RNA, 20 nt, Artificial Sequence
  RPE65 RNA guide
agugucuagcuagcacacac

SEQ ID NO: 8746 - RNA, 20 nt, Artificial Sequence
  RPE65 RNA guide
cagugucuagcuagcacaca

SEQ ID NO: 8747 - RNA, 20 nt, Artificial Sequence
  RPE65 RNA guide
cgcagugucuagcuagcaca

SEQ ID NO: 8748 - RNA, 20 nt, Artificial Sequence
  RPE65 RNA guide
cuagcuagcacacacaaagc

SEQ ID NO: 8749 - RNA, 20 nt, Artificial Sequence
  RPE65 RNA guide
cuuugugugugcuagcuaga

SEQ ID NO: 8750 - RNA, 20 nt, Artificial Sequence
  RPE65 RNA guide
gagagcgcagugucuagcua

SEQ ID NO: 8751 - RNA, 20 nt, Artificial Sequence
  RPE65 RNA guide
gagcgcagugucuagcuagc

SEQ ID NO: 8752 - RNA, 20 nt, Artificial Sequence
  RPE65 RNA guide
gcagugucuagcuagcacac

SEQ ID NO: 8753 - RNA, 20 nt, Artificial Sequence
  RPE65 RNA guide
gcgcagugucuagcuagcac

SEQ ID NO: 8754 - RNA, 20 nt, Artificial Sequence
  RPE65 RNA guide
gcuagcacacacaaagcacu

SEQ ID NO: 8755 - RNA, 20 nt, Artificial Sequence
  RPE65 RNA guide
gcuuugugugugcuagcuag

SEQ ID NO: 8756 - RNA, 20 nt, Artificial Sequence
  RPE65 RNA guide
gucuagcuagcacacacaaa

SEQ ID NO: 8757 - RNA, 20 nt, Artificial Sequence
  RPE65 RNA guide
gugcuagcuagacacugcgc

SEQ ID NO: 8758 - RNA, 20 nt, Artificial Sequence
  RPE65 RNA guide
gugcuuugugugugcuagcu

SEQ ID NO: 8759 - RNA, 20 nt, Artificial Sequence
  RPE65 RNA guide
gugucuagcuagcacacaca

SEQ ID NO: 8760 - RNA, 20 nt, Artificial Sequence
  RPE65 RNA guide
gugugcuagcuagacacugc

SEQ ID NO: 8761 - RNA, 20 nt, Artificial Sequence
  RPE65 RNA guide
gugugugcuagcuagacacu

SEQ ID NO: 8762 - RNA, 20 nt, Artificial Sequence
  RPE65 RNA guide
uagcuagcacacacaaagca

SEQ ID NO: 8763 - RNA, 20 nt, Artificial Sequence
  RPE65 RNA guide
ucuagcuagcacacacaaag

SEQ ID NO: 8764 - RNA, 20 nt, Artificial Sequence
  RPE65 RNA guide
ugagagcgcagugucuagcu

SEQ ID NO: 8765 - RNA, 20 nt, Artificial Sequence
  RPE65 RNA guide
ugcuuugugugugcuagcua

SEQ ID NO: 8766 - RNA, 20 nt, Artificial Sequence
  RPE65 RNA guide
ugucuagcuagcacacacaa

SEQ ID NO: 8767 - RNA, 20 nt, Artificial Sequence
  RPE65 RNA guide
ugugcuagcuagacacugcg

SEQ ID NO: 8768 - RNA, 20 nt, Artificial Sequence
  RPE65 RNA guide
ugugugcuagcuagacacug

SEQ ID NO: 8769 - RNA, 20 nt, Artificial Sequence
  RPE65 RNA guide
ugugugugcuagcuagacac

SEQ ID NO: 8770 - RNA, 20 nt, Artificial Sequence
  RPE65 RNA guide
uugugugugcuagcuagaca

SEQ ID NO: 8771 - RNA, 20 nt, Artificial Sequence
  RPE65 RNA guide
uuugugugugcuagcuagac

SEQ ID NO: 8772 - RNA, 21 nt, Artificial Sequence
  RPE65 RNA guide
aagugcuuugugugugcuagc

SEQ ID NO: 8773 - RNA, 21 nt, Artificial Sequence
  RPE65 RNA guide
agagcgcagugucuagcuagc

SEQ ID NO: 8774 - RNA, 21 nt, Artificial Sequence
  RPE65 RNA guide
agcgcagugucuagcuagcac

SEQ ID NO: 8775 - RNA, 21 nt, Artificial Sequence
  RPE65 RNA guide
agcuagcacacacaaagcacu

SEQ ID NO: 8776 - RNA, 21 nt, Artificial Sequence
  RPE65 RNA guide
agugcuuugugugugcuagcu

SEQ ID NO: 8777 - RNA, 21 nt, Artificial Sequence
  RPE65 RNA guide
agugucuagcuagcacacaca

SEQ ID NO: 8778 - RNA, 21 nt, Artificial Sequence
  RPE65 RNA guide
augagagcgcagugucuagcu

SEQ ID NO: 8779 - RNA, 21 nt, Artificial Sequence
  RPE65 RNA guide
cagugucuagcuagcacacac

SEQ ID NO: 8780 - RNA, 21 nt, Artificial Sequence
  RPE65 RNA guide
cgcagugucuagcuagcacac

SEQ ID NO: 8781 - RNA, 21 nt, Artificial Sequence
  RPE65 RNA guide
cuagcuagcacacacaaagca

SEQ ID NO: 8782 - RNA, 21 nt, Artificial Sequence
  RPE65 RNA guide
cuuugugugugcuagcuagac

SEQ ID NO: 8783 - RNA, 21 nt, Artificial Sequence
  RPE65 RNA guide
gagagcgcagugucuagcuag

SEQ ID NO: 8784 - RNA, 21 nt, Artificial Sequence
  RPE65 RNA guide
gagcgcagugucuagcuagca

SEQ ID NO: 8785 - RNA, 21 nt, Artificial Sequence
  RPE65 RNA guide
gcagugucuagcuagcacaca

SEQ ID NO: 8786 - RNA, 21 nt, Artificial Sequence
  RPE65 RNA guide
gcgcagugucuagcuagcaca

SEQ ID NO: 8787 - RNA, 21 nt, Artificial Sequence
  RPE65 RNA guide
gcuagcacacacaaagcacuu

SEQ ID NO: 8788 - RNA, 21 nt, Artificial Sequence
  RPE65 RNA guide
gcuuugugugugcuagcuaga

SEQ ID NO: 8789 - RNA, 21 nt, Artificial Sequence
  RPE65 RNA guide
gucuagcuagcacacacaaag

SEQ ID NO: 8790 - RNA, 21 nt, Artificial Sequence
  RPE65 RNA guide
gugcuagcuagacacugcgcu

SEQ ID NO: 8791 - RNA, 21 nt, Artificial Sequence
  RPE65 RNA guide
gugcuuugugugugcuagcua

SEQ ID NO: 8792 - RNA, 21 nt, Artificial Sequence
  RPE65 RNA guide
gugucuagcuagcacacacaa

SEQ ID NO: 8793 - RNA, 21 nt, Artificial Sequence
  RPE65 RNA guide
gugugcuagcuagacacugcg

SEQ ID NO: 8794 - RNA, 21 nt, Artificial Sequence
  RPE65 RNA guide
gugugugcuagcuagacacug

SEQ ID NO: 8795 - RNA, 21 nt, Artificial Sequence
  RPE65 RNA guide
uagcuagcacacacaaagcac

SEQ ID NO: 8796 - RNA, 21 nt, Artificial Sequence
  RPE65 RNA guide
ucuagcuagcacacacaaagc

SEQ ID NO: 8797 - RNA, 21 nt, Artificial Sequence
  RPE65 RNA guide
ugagagcgcagugucuagcua

SEQ ID NO: 8798 - RNA, 21 nt, Artificial Sequence
  RPE65 RNA guide
ugcuuugugugugcuagcuag

SEQ ID NO: 8799 - RNA, 21 nt, Artificial Sequence
  RPE65 RNA guide
ugucuagcuagcacacacaaa

SEQ ID NO: 8800 - RNA, 21 nt, Artificial Sequence
  RPE65 RNA guide
ugugcuagcuagacacugcgc

SEQ ID NO: 8801 - RNA, 21 nt, Artificial Sequence
  RPE65 RNA guide
ugugugcuagcuagacacugc

SEQ ID NO: 8802 - RNA, 21 nt, Artificial Sequence
  RPE65 RNA guide
ugugugugcuagcuagacacu

SEQ ID NO: 8803 - RNA, 21 nt, Artificial Sequence
  RPE65 RNA guide
uugugugugcuagcuagacac

SEQ ID NO: 8804 - RNA, 21 nt, Artificial Sequence
  RPE65 RNA guide
uuugugugugcuagcuagaca

SEQ ID NO: 8805 - RNA, 22 nt, Artificial Sequence
  RPE65 RNA guide
aagugcuuugugugugcuagcu

SEQ ID NO: 8806 - RNA, 22 nt, Artificial Sequence
  RPE65 RNA guide
aaugagagcgcagugucuagcu

SEQ ID NO: 8807 - RNA, 22 nt, Artificial Sequence
  RPE65 RNA guide
agagcgcagugucuagcuagca

SEQ ID NO: 8808 - RNA, 22 nt, Artificial Sequence
  RPE65 RNA guide
agcgcagugucuagcuagcaca

SEQ ID NO: 8809 - RNA, 22 nt, Artificial Sequence
  RPE65 RNA guide
agcuagcacacacaaagcacuu

SEQ ID NO: 8810 - RNA, 22 nt, Artificial Sequence
  RPE65 RNA guide
agugcuuugugugugcuagcua

SEQ ID NO: 8811 - RNA, 22 nt, Artificial Sequence
  RPE65 RNA guide
agugucuagcuagcacacacaa

SEQ ID NO: 8812 - RNA, 22 nt, Artificial Sequence
  RPE65 RNA guide
augagagcgcagugucuagcua

SEQ ID NO: 8813 - RNA, 22 nt, Artificial Sequence
  RPE65 RNA guide
cagugucuagcuagcacacaca

SEQ ID NO: 8814 - RNA, 22 nt, Artificial Sequence
  RPE65 RNA guide
cgcagugucuagcuagcacaca

SEQ ID NO: 8815 - RNA, 22 nt, Artificial Sequence
  RPE65 RNA guide
cuagcuagcacacacaaagcac

SEQ ID NO: 8816 - RNA, 22 nt, Artificial Sequence
  RPE65 RNA guide
cuuugugugugcuagcuagaca

SEQ ID NO: 8817 - RNA, 22 nt, Artificial Sequence
  RPE65 RNA guide
gaagugcuuugugugugcuagc

SEQ ID NO: 8818 - RNA, 22 nt, Artificial Sequence
  RPE65 RNA guide
gagagcgcagugucuagcuagc

SEQ ID NO: 8819 - RNA, 22 nt, Artificial Sequence
  RPE65 RNA guide
gagcgcagugucuagcuagcac

SEQ ID NO: 8820 - RNA, 22 nt, Artificial Sequence
  RPE65 RNA guide
gcagugucuagcuagcacacac

SEQ ID NO: 8821 - RNA, 22 nt, Artificial Sequence
  RPE65 RNA guide
gcgcagugucuagcuagcacac

SEQ ID NO: 8822 - RNA, 22 nt, Artificial Sequence
  RPE65 RNA guide
gcuagcacacacaaagcacuuc

SEQ ID NO: 8823 - RNA, 22 nt, Artificial Sequence
  RPE65 RNA guide
gcuuugugugugcuagcuagac

SEQ ID NO: 8824 - RNA, 22 nt, Artificial Sequence
  RPE65 RNA guide
gucuagcuagcacacacaaagc

SEQ ID NO: 8825 - RNA, 22 nt, Artificial Sequence
  RPE65 RNA guide
gugcuagcuagacacugcgcuc

SEQ ID NO: 8826 - RNA, 22 nt, Artificial Sequence
  RPE65 RNA guide
gugcuuugugugugcuagcuag

SEQ ID NO: 8827 - RNA, 22 nt, Artificial Sequence
  RPE65 RNA guide
gugucuagcuagcacacacaaa

SEQ ID NO: 8828 - RNA, 22 nt, Artificial Sequence
  RPE65 RNA guide
gugugcuagcuagacacugcgc

SEQ ID NO: 8829 - RNA, 22 nt, Artificial Sequence
  RPE65 RNA guide
gugugugcuagcuagacacugc

SEQ ID NO: 8830 - RNA, 22 nt, Artificial Sequence
  RPE65 RNA guide
uagcuagcacacacaaagcacu

SEQ ID NO: 8831 - RNA, 22 nt, Artificial Sequence
  RPE65 RNA guide
ucuagcuagcacacacaaagca

SEQ ID NO: 8832 - RNA, 22 nt, Artificial Sequence
  RPE65 RNA guide
ugagagcgcagugucuagcuag

SEQ ID NO: 8833 - RNA, 22 nt, Artificial Sequence
  RPE65 RNA guide
ugcuuugugugugcuagcuaga

SEQ ID NO: 8834 - RNA, 22 nt, Artificial Sequence
  RPE65 RNA guide
ugucuagcuagcacacacaaag

SEQ ID NO: 8835 - RNA, 22 nt, Artificial Sequence
  RPE65 RNA guide
ugugcuagcuagacacugcgcu

SEQ ID NO: 8836 - RNA, 22 nt, Artificial Sequence
  RPE65 RNA guide
ugugugcuagcuagacacugcg

SEQ ID NO: 8837 - RNA, 22 nt, Artificial Sequence
  RPE65 RNA guide
ugugugugcuagcuagacacug

SEQ ID NO: 8838 - RNA, 22 nt, Artificial Sequence
  RPE65 RNA guide
uugugugugcuagcuagacacu

SEQ ID NO: 8839 - RNA, 22 nt, Artificial Sequence
  RPE65 RNA guide
uuugugugugcuagcuagacac

SEQ ID NO: 8840 - RNA, 20 nt, Artificial Sequence
  RPE65 RNA guide
aaauguggagaugccccaga

SEQ ID NO: 8841 - RNA, 20 nt, Artificial Sequence
  RPE65 RNA guide
aauguggagaugccccagag

SEQ ID NO: 8842 - RNA, 20 nt, Artificial Sequence
  RPE65 RNA guide
acaccuugggaaauguggag

SEQ ID NO: 8843 - RNA, 20 nt, Artificial Sequence
  RPE65 RNA guide
acacucuggggcaucuccac

SEQ ID NO: 8844 - RNA, 20 nt, Artificial Sequence
  RPE65 RNA guide
acauuucccaaggugugauc

SEQ ID NO: 8845 - RNA, 20 nt, Artificial Sequence
  RPE65 RNA guide
accuugggaaauguggagau

SEQ ID NO: 8846 - RNA, 20 nt, Artificial Sequence
  RPE65 RNA guide
acucuggggcaucuccacau

SEQ ID NO: 8847 - RNA, 20 nt, Artificial Sequence
  RPE65 RNA guide
agaucacaccuugggaaaug

SEQ ID NO: 8848 - RNA, 20 nt, Artificial Sequence
  RPE65 RNA guide
aggagaucacaccuugggaa

SEQ ID NO: 8849 - RNA, 20 nt, Artificial Sequence
  RPE65 RNA guide
aucacaccuugggaaaugug

SEQ ID NO: 8850 - RNA, 20 nt, Artificial Sequence
  RPE65 RNA guide
aucuccacauuucccaaggu

SEQ ID NO: 8851 - RNA, 20 nt, Artificial Sequence
  RPE65 RNA guide
auguggagaugccccagagu

SEQ ID NO: 8852 - RNA, 20 nt, Artificial Sequence
  RPE65 RNA guide
cacaccuugggaaaugugga

SEQ ID NO: 8853 - RNA, 20 nt, Artificial Sequence
  RPE65 RNA guide
cacacucuggggcaucucca

SEQ ID NO: 8854 - RNA, 20 nt, Artificial Sequence
  RPE65 RNA guide
cacauuucccaaggugugau

SEQ ID NO: 8855 - RNA, 20 nt, Artificial Sequence
  RPE65 RNA guide
caccuugggaaauguggaga

SEQ ID NO: 8856 - RNA, 20 nt, Artificial Sequence
  RPE65 RNA guide
cacucuggggcaucuccaca

SEQ ID NO: 8857 - RNA, 20 nt, Artificial Sequence
  RPE65 RNA guide
caucuccacauuucccaagg

SEQ ID NO: 8858 - RNA, 20 nt, Artificial Sequence
  RPE65 RNA guide
cauuucccaaggugugaucu

SEQ ID NO: 8859 - RNA, 20 nt, Artificial Sequence
  RPE65 RNA guide
ccacacucuggggcaucucc

SEQ ID NO: 8860 - RNA, 20 nt, Artificial Sequence
  RPE65 RNA guide
ccacauuucccaagguguga

SEQ ID NO: 8861 - RNA, 20 nt, Artificial Sequence
  RPE65 RNA guide
ccuugggaaauguggagaug

SEQ ID NO: 8862 - RNA, 20 nt, Artificial Sequence
  RPE65 RNA guide
cuaggagaucacaccuuggg

SEQ ID NO: 8863 - RNA, 20 nt, Artificial Sequence
  RPE65 RNA guide
cuccacauuucccaaggugu

SEQ ID NO: 8864 - RNA, 20 nt, Artificial Sequence
  RPE65 RNA guide
cucuggggcaucuccacauu

SEQ ID NO: 8865 - RNA, 20 nt, Artificial Sequence
  RPE65 RNA guide
cuggggcaucuccacauuuc

SEQ ID NO: 8866 - RNA, 20 nt, Artificial Sequence
  RPE65 RNA guide
cuugggaaauguggagaugc

SEQ ID NO: 8867 - RNA, 20 nt, Artificial Sequence
  RPE65 RNA guide
gaaauguggagaugccccag

SEQ ID NO: 8868 - RNA, 20 nt, Artificial Sequence
  RPE65 RNA guide
gagaucacaccuugggaaau

SEQ ID NO: 8869 - RNA, 20 nt, Artificial Sequence
  RPE65 RNA guide
gaucacaccuugggaaaugu

SEQ ID NO: 8870 - RNA, 20 nt, Artificial Sequence
  RPE65 RNA guide
gcaucuccacauuucccaag

SEQ ID NO: 8871 - RNA, 20 nt, Artificial Sequence
  RPE65 RNA guide
ggaaauguggagaugcccca

SEQ ID NO: 8872 - RNA, 20 nt, Artificial Sequence
  RPE65 RNA guide
ggagaucacaccuugggaaa

SEQ ID NO: 8873 - RNA, 20 nt, Artificial Sequence
  RPE65 RNA guide
ggcaucuccacauuucccaa

SEQ ID NO: 8874 - RNA, 20 nt, Artificial Sequence
  RPE65 RNA guide
gggaaauguggagaugcccc

SEQ ID NO: 8875 - RNA, 20 nt, Artificial Sequence
  RPE65 RNA guide
gggcaucuccacauuuccca

SEQ ID NO: 8876 - RNA, 20 nt, Artificial Sequence
  RPE65 RNA guide
ggggcaucuccacauuuccc

SEQ ID NO: 8877 - RNA, 20 nt, Artificial Sequence
  RPE65 RNA guide
uaggagaucacaccuuggga

SEQ ID NO: 8878 - RNA, 20 nt, Artificial Sequence
  RPE65 RNA guide
ucacaccuugggaaaugugg

SEQ ID NO: 8879 - RNA, 20 nt, Artificial Sequence
  RPE65 RNA guide
uccacacucuggggcaucuc

SEQ ID NO: 8880 - RNA, 20 nt, Artificial Sequence
  RPE65 RNA guide
uccacauuucccaaggugug

SEQ ID NO: 8881 - RNA, 20 nt, Artificial Sequence
  RPE65 RNA guide
ucuccacauuucccaaggug

SEQ ID NO: 8882 - RNA, 20 nt, Artificial Sequence
  RPE65 RNA guide
ucuggggcaucuccacauuu

SEQ ID NO: 8883 - RNA, 20 nt, Artificial Sequence
  RPE65 RNA guide
ugggaaauguggagaugccc

SEQ ID NO: 8884 - RNA, 20 nt, Artificial Sequence
  RPE65 RNA guide
uggggcaucuccacauuucc

SEQ ID NO: 8885 - RNA, 20 nt, Artificial Sequence
  RPE65 RNA guide
uugggaaauguggagaugcc

SEQ ID NO: 8886 - RNA, 21 nt, Artificial Sequence
  RPE65 RNA guide
aaauguggagaugccccagag

SEQ ID NO: 8887 - RNA, 21 nt, Artificial Sequence
  RPE65 RNA guide
aauguggagaugccccagagu

SEQ ID NO: 8888 - RNA, 21 nt, Artificial Sequence
  RPE65 RNA guide
acaccuugggaaauguggaga

SEQ ID NO: 8889 - RNA, 21 nt, Artificial Sequence
  RPE65 RNA guide
acacucuggggcaucuccaca

SEQ ID NO: 8890 - RNA, 21 nt, Artificial Sequence
  RPE65 RNA guide
acauuucccaaggugugaucu

SEQ ID NO: 8891 - RNA, 21 nt, Artificial Sequence
  RPE65 RNA guide
accuugggaaauguggagaug

SEQ ID NO: 8892 - RNA, 21 nt, Artificial Sequence
  RPE65 RNA guide
acuaggagaucacaccuuggg

SEQ ID NO: 8893 - RNA, 21 nt, Artificial Sequence
  RPE65 RNA guide
acucuggggcaucuccacauu

SEQ ID NO: 8894 - RNA, 21 nt, Artificial Sequence
  RPE65 RNA guide
agaucacaccuugggaaaugu

SEQ ID NO: 8895 - RNA, 21 nt, Artificial Sequence
  RPE65 RNA guide
aggagaucacaccuugggaaa

SEQ ID NO: 8896 - RNA, 21 nt, Artificial Sequence
  RPE65 RNA guide
aucacaccuugggaaaugugg

SEQ ID NO: 8897 - RNA, 21 nt, Artificial Sequence
  RPE65 RNA guide
auccacacucuggggcaucuc

SEQ ID NO: 8898 - RNA, 21 nt, Artificial Sequence
  RPE65 RNA guide
aucuccacauuucccaaggug

SEQ ID NO: 8899 - RNA, 21 nt, Artificial Sequence
  RPE65 RNA guide
auguggagaugccccagagug

SEQ ID NO: 8900 - RNA, 21 nt, Artificial Sequence
  RPE65 RNA guide
cacaccuugggaaauguggag

SEQ ID NO: 8901 - RNA, 21 nt, Artificial Sequence
  RPE65 RNA guide
cacacucuggggcaucuccac

SEQ ID NO: 8902 - RNA, 21 nt, Artificial Sequence
  RPE65 RNA guide
cacauuucccaaggugugauc

SEQ ID NO: 8903 - RNA, 21 nt, Artificial Sequence
  RPE65 RNA guide
caccuugggaaauguggagau

SEQ ID NO: 8904 - RNA, 21 nt, Artificial Sequence
  RPE65 RNA guide
cacucuggggcaucuccacau

SEQ ID NO: 8905 - RNA, 21 nt, Artificial Sequence
  RPE65 RNA guide
caucuccacauuucccaaggu

SEQ ID NO: 8906 - RNA, 21 nt, Artificial Sequence
  RPE65 RNA guide
cauuucccaaggugugaucuc

SEQ ID NO: 8907 - RNA, 21 nt, Artificial Sequence
  RPE65 RNA guide
ccacacucuggggcaucucca

SEQ ID NO: 8908 - RNA, 21 nt, Artificial Sequence
  RPE65 RNA guide
ccacauuucccaaggugugau

SEQ ID NO: 8909 - RNA, 21 nt, Artificial Sequence
  RPE65 RNA guide
ccuugggaaauguggagaugc

SEQ ID NO: 8910 - RNA, 21 nt, Artificial Sequence
  RPE65 RNA guide
cuaggagaucacaccuuggga

SEQ ID NO: 8911 - RNA, 21 nt, Artificial Sequence
  RPE65 RNA guide
cuccacauuucccaaggugug

SEQ ID NO: 8912 - RNA, 21 nt, Artificial Sequence
  RPE65 RNA guide
cucuggggcaucuccacauuu

SEQ ID NO: 8913 - RNA, 21 nt, Artificial Sequence
  RPE65 RNA guide
cuggggcaucuccacauuucc

SEQ ID NO: 8914 - RNA, 21 nt, Artificial Sequence
  RPE65 RNA guide
cuugggaaauguggagaugcc

SEQ ID NO: 8915 - RNA, 21 nt, Artificial Sequence
  RPE65 RNA guide
gaaauguggagaugccccaga

SEQ ID NO: 8916 - RNA, 21 nt, Artificial Sequence
  RPE65 RNA guide
gagaucacaccuugggaaaug

SEQ ID NO: 8917 - RNA, 21 nt, Artificial Sequence
  RPE65 RNA guide
gaucacaccuugggaaaugug

SEQ ID NO: 8918 - RNA, 21 nt, Artificial Sequence
  RPE65 RNA guide
gcaucuccacauuucccaagg

SEQ ID NO: 8919 - RNA, 21 nt, Artificial Sequence
  RPE65 RNA guide
ggaaauguggagaugccccag

SEQ ID NO: 8920 - RNA, 21 nt, Artificial Sequence
  RPE65 RNA guide
ggagaucacaccuugggaaau

SEQ ID NO: 8921 - RNA, 21 nt, Artificial Sequence
  RPE65 RNA guide
ggcaucuccacauuucccaag

SEQ ID NO: 8922 - RNA, 21 nt, Artificial Sequence
  RPE65 RNA guide
gggaaauguggagaugcccca

SEQ ID NO: 8923 - RNA, 21 nt, Artificial Sequence
  RPE65 RNA guide
gggcaucuccacauuucccaa

SEQ ID NO: 8924 - RNA, 21 nt, Artificial Sequence
  RPE65 RNA guide
ggggcaucuccacauuuccca

SEQ ID NO: 8925 - RNA, 21 nt, Artificial Sequence
  RPE65 RNA guide
uaggagaucacaccuugggaa

SEQ ID NO: 8926 - RNA, 21 nt, Artificial Sequence
  RPE65 RNA guide
ucacaccuugggaaaugugga

SEQ ID NO: 8927 - RNA, 21 nt, Artificial Sequence
  RPE65 RNA guide
uccacacucuggggcaucucc

SEQ ID NO: 8928 - RNA, 21 nt, Artificial Sequence
  RPE65 RNA guide
uccacauuucccaagguguga

SEQ ID NO: 8929 - RNA, 21 nt, Artificial Sequence
  RPE65 RNA guide
ucuccacauuucccaaggugu

SEQ ID NO: 8930 - RNA, 21 nt, Artificial Sequence
  RPE65 RNA guide
ucuggggcaucuccacauuuc

SEQ ID NO: 8931 - RNA, 21 nt, Artificial Sequence
  RPE65 RNA guide
ugggaaauguggagaugcccc

SEQ ID NO: 8932 - RNA, 21 nt, Artificial Sequence
  RPE65 RNA guide
uggggcaucuccacauuuccc

SEQ ID NO: 8933 - RNA, 21 nt, Artificial Sequence
  RPE65 RNA guide
uugggaaauguggagaugccc

SEQ ID NO: 8934 - RNA, 22 nt, Artificial Sequence
  RPE65 RNA guide
aaauguggagaugccccagagu

SEQ ID NO: 8935 - RNA, 22 nt, Artificial Sequence
  RPE65 RNA guide
aauguggagaugccccagagug

SEQ ID NO: 8936 - RNA, 22 nt, Artificial Sequence
  RPE65 RNA guide
acaccuugggaaauguggagau

SEQ ID NO: 8937 - RNA, 22 nt, Artificial Sequence
  RPE65 RNA guide
acacucuggggcaucuccacau

SEQ ID NO: 8938 - RNA, 22 nt, Artificial Sequence
  RPE65 RNA guide
acauuucccaaggugugaucuc

SEQ ID NO: 8939 - RNA, 22 nt, Artificial Sequence
  RPE65 RNA guide
accuugggaaauguggagaugc

SEQ ID NO: 8940 - RNA, 22 nt, Artificial Sequence
  RPE65 RNA guide
acuaggagaucacaccuuggga

SEQ ID NO: 8941 - RNA, 22 nt, Artificial Sequence
  RPE65 RNA guide
acucuggggcaucuccacauuu

SEQ ID NO: 8942 - RNA, 22 nt, Artificial Sequence
  RPE65 RNA guide
agaucacaccuugggaaaugug

SEQ ID NO: 8943 - RNA, 22 nt, Artificial Sequence
  RPE65 RNA guide
aggagaucacaccuugggaaau

SEQ ID NO: 8944 - RNA, 22 nt, Artificial Sequence
  RPE65 RNA guide
aucacaccuugggaaaugugga

SEQ ID NO: 8945 - RNA, 22 nt, Artificial Sequence
  RPE65 RNA guide
auccacacucuggggcaucucc

SEQ ID NO: 8946 - RNA, 22 nt, Artificial Sequence
  RPE65 RNA guide
aucuccacauuucccaaggugu

SEQ ID NO: 8947 - RNA, 22 nt, Artificial Sequence
  RPE65 RNA guide
auguggagaugccccagagugu

SEQ ID NO: 8948 - RNA, 22 nt, Artificial Sequence
  RPE65 RNA guide
cacaccuugggaaauguggaga

SEQ ID NO: 8949 - RNA, 22 nt, Artificial Sequence
  RPE65 RNA guide
cacacucuggggcaucuccaca

SEQ ID NO: 8950 - RNA, 22 nt, Artificial Sequence
  RPE65 RNA guide
cacauuucccaaggugugaucu

SEQ ID NO: 8951 - RNA, 22 nt, Artificial Sequence
  RPE65 RNA guide
caccuugggaaauguggagaug

SEQ ID NO: 8952 - RNA, 22 nt, Artificial Sequence
  RPE65 RNA guide
cacuaggagaucacaccuuggg

SEQ ID NO: 8953 - RNA, 22 nt, Artificial Sequence
  RPE65 RNA guide
cacucuggggcaucuccacauu

SEQ ID NO: 8954 - RNA, 22 nt, Artificial Sequence
  RPE65 RNA guide
caucuccacauuucccaaggug

SEQ ID NO: 8955 - RNA, 22 nt, Artificial Sequence
  RPE65 RNA guide
cauuucccaaggugugaucucc

SEQ ID NO: 8956 - RNA, 22 nt, Artificial Sequence
  RPE65 RNA guide
ccacacucuggggcaucuccac

SEQ ID NO: 8957 - RNA, 22 nt, Artificial Sequence
  RPE65 RNA guide
ccacauuucccaaggugugauc

SEQ ID NO: 8958 - RNA, 22 nt, Artificial Sequence
  RPE65 RNA guide
ccuugggaaauguggagaugcc

SEQ ID NO: 8959 - RNA, 22 nt, Artificial Sequence
  RPE65 RNA guide
cuaggagaucacaccuugggaa

SEQ ID NO: 8960 - RNA, 22 nt, Artificial Sequence
  RPE65 RNA guide
cuccacauuucccaagguguga

SEQ ID NO: 8961 - RNA, 22 nt, Artificial Sequence
  RPE65 RNA guide
cucuggggcaucuccacauuuc

SEQ ID NO: 8962 - RNA, 22 nt, Artificial Sequence
  RPE65 RNA guide
cuggggcaucuccacauuuccc

SEQ ID NO: 8963 - RNA, 22 nt, Artificial Sequence
  RPE65 RNA guide
cuugggaaauguggagaugccc

SEQ ID NO: 8964 - RNA, 22 nt, Artificial Sequence
  RPE65 RNA guide
gaaauguggagaugccccagag

SEQ ID NO: 8965 - RNA, 22 nt, Artificial Sequence
  RPE65 RNA guide
gagaucacaccuugggaaaugu

SEQ ID NO: 8966 - RNA, 22 nt, Artificial Sequence
  RPE65 RNA guide
gaucacaccuugggaaaugugg

SEQ ID NO: 8967 - RNA, 22 nt, Artificial Sequence
  RPE65 RNA guide
gcaucuccacauuucccaaggu

SEQ ID NO: 8968 - RNA, 22 nt, Artificial Sequence
  RPE65 RNA guide
ggaaauguggagaugccccaga

SEQ ID NO: 8969 - RNA, 22 nt, Artificial Sequence
  RPE65 RNA guide
ggagaucacaccuugggaaaug

SEQ ID NO: 8970 - RNA, 22 nt, Artificial Sequence
  RPE65 RNA guide
ggcaucuccacauuucccaagg

SEQ ID NO: 8971 - RNA, 22 nt, Artificial Sequence
  RPE65 RNA guide
gggaaauguggagaugccccag

SEQ ID NO: 8972 - RNA, 22 nt, Artificial Sequence
  RPE65 RNA guide
gggcaucuccacauuucccaag

SEQ ID NO: 8973 - RNA, 22 nt, Artificial Sequence
  RPE65 RNA guide
ggggcaucuccacauuucccaa

SEQ ID NO: 8974 - RNA, 22 nt, Artificial Sequence
  RPE65 RNA guide
uaggagaucacaccuugggaaa

SEQ ID NO: 8975 - RNA, 22 nt, Artificial Sequence
  RPE65 RNA guide
uauccacacucuggggcaucuc

SEQ ID NO: 8976 - RNA, 22 nt, Artificial Sequence
  RPE65 RNA guide
ucacaccuugggaaauguggag

SEQ ID NO: 8977 - RNA, 22 nt, Artificial Sequence
  RPE65 RNA guide
uccacacucuggggcaucucca

SEQ ID NO: 8978 - RNA, 22 nt, Artificial Sequence
  RPE65 RNA guide
uccacauuucccaaggugugau

SEQ ID NO: 8979 - RNA, 22 nt, Artificial Sequence
  RPE65 RNA guide
ucuccacauuucccaaggugug

SEQ ID NO: 8980 - RNA, 22 nt, Artificial Sequence
  RPE65 RNA guide
ucuggggcaucuccacauuucc

SEQ ID NO: 8981 - RNA, 22 nt, Artificial Sequence
  RPE65 RNA guide
ugggaaauguggagaugcccca

SEQ ID NO: 8982 - RNA, 22 nt, Artificial Sequence
  RPE65 RNA guide
uggggcaucuccacauuuccca

SEQ ID NO: 8983 - RNA, 22 nt, Artificial Sequence
  RPE65 RNA guide
uugggaaauguggagaugcccc

SEQ ID NO: 8984 - RNA, 20 nt, Artificial Sequence
  RPE65 RNA guide
aaacguggagaugccccaga

SEQ ID NO: 8985 - RNA, 20 nt, Artificial Sequence
  RPE65 RNA guide
aacguggagaugccccagag

SEQ ID NO: 8986 - RNA, 20 nt, Artificial Sequence
  RPE65 RNA guide
acaccuugggaaacguggag

SEQ ID NO: 8987 - RNA, 20 nt, Artificial Sequence
  RPE65 RNA guide
accuugggaaacguggagau

SEQ ID NO: 8988 - RNA, 20 nt, Artificial Sequence
  RPE65 RNA guide
acguggagaugccccagagu

SEQ ID NO: 8989 - RNA, 20 nt, Artificial Sequence
  RPE65 RNA guide
acguuucccaaggugugauc

SEQ ID NO: 8990 - RNA, 20 nt, Artificial Sequence
  RPE65 RNA guide
acucuggggcaucuccacgu

SEQ ID NO: 8991 - RNA, 20 nt, Artificial Sequence
  RPE65 RNA guide
agaucacaccuugggaaacg

SEQ ID NO: 8992 - RNA, 20 nt, Artificial Sequence
  RPE65 RNA guide
aucacaccuugggaaacgug

SEQ ID NO: 8993 - RNA, 20 nt, Artificial Sequence
  RPE65 RNA guide
aucuccacguuucccaaggu

SEQ ID NO: 8994 - RNA, 20 nt, Artificial Sequence
  RPE65 RNA guide
cacaccuugggaaacgugga

SEQ ID NO: 8995 - RNA, 20 nt, Artificial Sequence
  RPE65 RNA guide
caccuugggaaacguggaga

SEQ ID NO: 8996 - RNA, 20 nt, Artificial Sequence
  RPE65 RNA guide
cacguuucccaaggugugau

SEQ ID NO: 8997 - RNA, 20 nt, Artificial Sequence
  RPE65 RNA guide
cacucuggggcaucuccacg

SEQ ID NO: 8998 - RNA, 20 nt, Artificial Sequence
  RPE65 RNA guide
caucuccacguuucccaagg

SEQ ID NO: 8999 - RNA, 20 nt, Artificial Sequence
  RPE65 RNA guide
ccacguuucccaagguguga

SEQ ID NO: 9000 - RNA, 20 nt, Artificial Sequence
  RPE65 RNA guide
ccuugggaaacguggagaug

SEQ ID NO: 9001 - RNA, 20 nt, Artificial Sequence
  RPE65 RNA guide
cguuucccaaggugugaucu

SEQ ID NO: 9002 - RNA, 20 nt, Artificial Sequence
  RPE65 RNA guide
cuccacguuucccaaggugu

SEQ ID NO: 9003 - RNA, 20 nt, Artificial Sequence
  RPE65 RNA guide
cucuggggcaucuccacguu

SEQ ID NO: 9004 - RNA, 20 nt, Artificial Sequence
  RPE65 RNA guide
cuggggcaucuccacguuuc

SEQ ID NO: 9005 - RNA, 20 nt, Artificial Sequence
  RPE65 RNA guide
cuugggaaacguggagaugc

SEQ ID NO: 9006 - RNA, 20 nt, Artificial Sequence
  RPE65 RNA guide
gaaacguggagaugccccag

SEQ ID NO: 9007 - RNA, 20 nt, Artificial Sequence
  RPE65 RNA guide
gagaucacaccuugggaaac

SEQ ID NO: 9008 - RNA, 20 nt, Artificial Sequence
  RPE65 RNA guide
gaucacaccuugggaaacgu

SEQ ID NO: 9009 - RNA, 20 nt, Artificial Sequence
  RPE65 RNA guide
gcaucuccacguuucccaag

SEQ ID NO: 9010 - RNA, 20 nt, Artificial Sequence
  RPE65 RNA guide
ggaaacguggagaugcccca

SEQ ID NO: 9011 - RNA, 20 nt, Artificial Sequence
  RPE65 RNA guide
ggcaucuccacguuucccaa

SEQ ID NO: 9012 - RNA, 20 nt, Artificial Sequence
  RPE65 RNA guide
gggaaacguggagaugcccc

SEQ ID NO: 9013 - RNA, 20 nt, Artificial Sequence
  RPE65 RNA guide
gggcaucuccacguuuccca

SEQ ID NO: 9014 - RNA, 20 nt, Artificial Sequence
  RPE65 RNA guide
ggggcaucuccacguuuccc

SEQ ID NO: 9015 - RNA, 20 nt, Artificial Sequence
  RPE65 RNA guide
ucacaccuugggaaacgugg

SEQ ID NO: 9016 - RNA, 20 nt, Artificial Sequence
  RPE65 RNA guide
uccacguuucccaaggugug

SEQ ID NO: 9017 - RNA, 20 nt, Artificial Sequence
  RPE65 RNA guide
ucuccacguuucccaaggug

SEQ ID NO: 9018 - RNA, 20 nt, Artificial Sequence
  RPE65 RNA guide
ucuggggcaucuccacguuu

SEQ ID NO: 9019 - RNA, 20 nt, Artificial Sequence
  RPE65 RNA guide
ugggaaacguggagaugccc

SEQ ID NO: 9020 - RNA, 20 nt, Artificial Sequence
  RPE65 RNA guide
uggggcaucuccacguuucc

SEQ ID NO: 9021 - RNA, 20 nt, Artificial Sequence
  RPE65 RNA guide
uugggaaacguggagaugcc

SEQ ID NO: 9022 - RNA, 21 nt, Artificial Sequence
  RPE65 RNA guide
aaacguggagaugccccagag

SEQ ID NO: 9023 - RNA, 21 nt, Artificial Sequence
  RPE65 RNA guide
aacguggagaugccccagagu

SEQ ID NO: 9024 - RNA, 21 nt, Artificial Sequence
  RPE65 RNA guide
acaccuugggaaacguggaga

SEQ ID NO: 9025 - RNA, 21 nt, Artificial Sequence
  RPE65 RNA guide
acacucuggggcaucuccacg

SEQ ID NO: 9026 - RNA, 21 nt, Artificial Sequence
  RPE65 RNA guide
accuugggaaacguggagaug

SEQ ID NO: 9027 - RNA, 21 nt, Artificial Sequence
  RPE65 RNA guide
acguggagaugccccagagug

SEQ ID NO: 9028 - RNA, 21 nt, Artificial Sequence
  RPE65 RNA guide
acguuucccaaggugugaucu

SEQ ID NO: 9029 - RNA, 21 nt, Artificial Sequence
  RPE65 RNA guide
acucuggggcaucuccacguu

SEQ ID NO: 9030 - RNA, 21 nt, Artificial Sequence
  RPE65 RNA guide
agaucacaccuugggaaacgu

SEQ ID NO: 9031 - RNA, 21 nt, Artificial Sequence
  RPE65 RNA guide
aucacaccuugggaaacgugg

SEQ ID NO: 9032 - RNA, 21 nt, Artificial Sequence
  RPE65 RNA guide
aucuccacguuucccaaggug

SEQ ID NO: 9033 - RNA, 21 nt, Artificial Sequence
  RPE65 RNA guide
cacaccuugggaaacguggag

SEQ ID NO: 9034 - RNA, 21 nt, Artificial Sequence
  RPE65 RNA guide
caccuugggaaacguggagau

SEQ ID NO: 9035 - RNA, 21 nt, Artificial Sequence
  RPE65 RNA guide
cacguuucccaaggugugauc

SEQ ID NO: 9036 - RNA, 21 nt, Artificial Sequence
  RPE65 RNA guide
cacucuggggcaucuccacgu

SEQ ID NO: 9037 - RNA, 21 nt, Artificial Sequence
  RPE65 RNA guide
caucuccacguuucccaaggu

SEQ ID NO: 9038 - RNA, 21 nt, Artificial Sequence
  RPE65 RNA guide
ccacguuucccaaggugugau

SEQ ID NO: 9039 - RNA, 21 nt, Artificial Sequence
  RPE65 RNA guide
ccuugggaaacguggagaugc

SEQ ID NO: 9040 - RNA, 21 nt, Artificial Sequence
  RPE65 RNA guide
cguuucccaaggugugaucuc

SEQ ID NO: 9041 - RNA, 21 nt, Artificial Sequence
  RPE65 RNA guide
cuccacguuucccaaggugug

SEQ ID NO: 9042 - RNA, 21 nt, Artificial Sequence
  RPE65 RNA guide
cucuggggcaucuccacguuu

SEQ ID NO: 9043 - RNA, 21 nt, Artificial Sequence
  RPE65 RNA guide
cuggggcaucuccacguuucc

SEQ ID NO: 9044 - RNA, 21 nt, Artificial Sequence
  RPE65 RNA guide
cuugggaaacguggagaugcc

SEQ ID NO: 9045 - RNA, 21 nt, Artificial Sequence
  RPE65 RNA guide
gaaacguggagaugccccaga

SEQ ID NO: 9046 - RNA, 21 nt, Artificial Sequence
  RPE65 RNA guide
gagaucacaccuugggaaacg

SEQ ID NO: 9047 - RNA, 21 nt, Artificial Sequence
  RPE65 RNA guide
gaucacaccuugggaaacgug

SEQ ID NO: 9048 - RNA, 21 nt, Artificial Sequence
  RPE65 RNA guide
gcaucuccacguuucccaagg

SEQ ID NO: 9049 - RNA, 21 nt, Artificial Sequence
  RPE65 RNA guide
ggaaacguggagaugccccag

SEQ ID NO: 9050 - RNA, 21 nt, Artificial Sequence
  RPE65 RNA guide
ggagaucacaccuugggaaac

SEQ ID NO: 9051 - RNA, 21 nt, Artificial Sequence
  RPE65 RNA guide
ggcaucuccacguuucccaag

SEQ ID NO: 9052 - RNA, 21 nt, Artificial Sequence
  RPE65 RNA guide
gggaaacguggagaugcccca

SEQ ID NO: 9053 - RNA, 21 nt, Artificial Sequence
  RPE65 RNA guide
gggcaucuccacguuucccaa

SEQ ID NO: 9054 - RNA, 21 nt, Artificial Sequence
  RPE65 RNA guide
ggggcaucuccacguuuccca

SEQ ID NO: 9055 - RNA, 21 nt, Artificial Sequence
  RPE65 RNA guide
ucacaccuugggaaacgugga

SEQ ID NO: 9056 - RNA, 21 nt, Artificial Sequence
  RPE65 RNA guide
uccacguuucccaagguguga

SEQ ID NO: 9057 - RNA, 21 nt, Artificial Sequence
  RPE65 RNA guide
ucuccacguuucccaaggugu

SEQ ID NO: 9058 - RNA, 21 nt, Artificial Sequence
  RPE65 RNA guide
ucuggggcaucuccacguuuc

SEQ ID NO: 9059 - RNA, 21 nt, Artificial Sequence
  RPE65 RNA guide
ugggaaacguggagaugcccc

SEQ ID NO: 9060 - RNA, 21 nt, Artificial Sequence
  RPE65 RNA guide
uggggcaucuccacguuuccc

SEQ ID NO: 9061 - RNA, 21 nt, Artificial Sequence
  RPE65 RNA guide
uugggaaacguggagaugccc

SEQ ID NO: 9062 - RNA, 22 nt, Artificial Sequence
  RPE65 RNA guide
aaacguggagaugccccagagu

SEQ ID NO: 9063 - RNA, 22 nt, Artificial Sequence
  RPE65 RNA guide
aacguggagaugccccagagug

SEQ ID NO: 9064 - RNA, 22 nt, Artificial Sequence
  RPE65 RNA guide
acaccuugggaaacguggagau

SEQ ID NO: 9065 - RNA, 22 nt, Artificial Sequence
  RPE65 RNA guide
acacucuggggcaucuccacgu

SEQ ID NO: 9066 - RNA, 22 nt, Artificial Sequence
  RPE65 RNA guide
accuugggaaacguggagaugc

SEQ ID NO: 9067 - RNA, 22 nt, Artificial Sequence
  RPE65 RNA guide
acguggagaugccccagagugu

SEQ ID NO: 9068 - RNA, 22 nt, Artificial Sequence
  RPE65 RNA guide
acguuucccaaggugugaucuc

SEQ ID NO: 9069 - RNA, 22 nt, Artificial Sequence
  RPE65 RNA guide
acucuggggcaucuccacguuu

SEQ ID NO: 9070 - RNA, 22 nt, Artificial Sequence
  RPE65 RNA guide
agaucacaccuugggaaacgug

SEQ ID NO: 9071 - RNA, 22 nt, Artificial Sequence
  RPE65 RNA guide
aggagaucacaccuugggaaac

SEQ ID NO: 9072 - RNA, 22 nt, Artificial Sequence
  RPE65 RNA guide
aucacaccuugggaaacgugga

SEQ ID NO: 9073 - RNA, 22 nt, Artificial Sequence
  RPE65 RNA guide
aucuccacguuucccaaggugu

SEQ ID NO: 9074 - RNA, 22 nt, Artificial Sequence
  RPE65 RNA guide
cacaccuugggaaacguggaga

SEQ ID NO: 9075 - RNA, 22 nt, Artificial Sequence
  RPE65 RNA guide
cacacucuggggcaucuccacg

SEQ ID NO: 9076 - RNA, 22 nt, Artificial Sequence
  RPE65 RNA guide
caccuugggaaacguggagaug

SEQ ID NO: 9077 - RNA, 22 nt, Artificial Sequence
  RPE65 RNA guide
cacguuucccaaggugugaucu

SEQ ID NO: 9078 - RNA, 22 nt, Artificial Sequence
  RPE65 RNA guide
cacucuggggcaucuccacguu

SEQ ID NO: 9079 - RNA, 22 nt, Artificial Sequence
  RPE65 RNA guide
caucuccacguuucccaaggug

SEQ ID NO: 9080 - RNA, 22 nt, Artificial Sequence
  RPE65 RNA guide
ccacguuucccaaggugugauc

SEQ ID NO: 9081 - RNA, 22 nt, Artificial Sequence
  RPE65 RNA guide
ccuugggaaacguggagaugcc

SEQ ID NO: 9082 - RNA, 22 nt, Artificial Sequence
  RPE65 RNA guide
cguuucccaaggugugaucucc

SEQ ID NO: 9083 - RNA, 22 nt, Artificial Sequence
  RPE65 RNA guide
cuccacguuucccaagguguga

SEQ ID NO: 9084 - RNA, 22 nt, Artificial Sequence
  RPE65 RNA guide
cucuggggcaucuccacguuuc

SEQ ID NO: 9085 - RNA, 22 nt, Artificial Sequence
  RPE65 RNA guide
cuggggcaucuccacguuuccc

SEQ ID NO: 9086 - RNA, 22 nt, Artificial Sequence
  RPE65 RNA guide
cuugggaaacguggagaugccc

SEQ ID NO: 9087 - RNA, 22 nt, Artificial Sequence
  RPE65 RNA guide
gaaacguggagaugccccagag

SEQ ID NO: 9088 - RNA, 22 nt, Artificial Sequence
  RPE65 RNA guide
gagaucacaccuugggaaacgu

SEQ ID NO: 9089 - RNA, 22 nt, Artificial Sequence
  RPE65 RNA guide
gaucacaccuugggaaacgugg

SEQ ID NO: 9090 - RNA, 22 nt, Artificial Sequence
  RPE65 RNA guide
gcaucuccacguuucccaaggu

SEQ ID NO: 9091 - RNA, 22 nt, Artificial Sequence
  RPE65 RNA guide
ggaaacguggagaugccccaga

SEQ ID NO: 9092 - RNA, 22 nt, Artificial Sequence
  RPE65 RNA guide
ggagaucacaccuugggaaacg

SEQ ID NO: 9093 - RNA, 22 nt, Artificial Sequence
  RPE65 RNA guide
ggcaucuccacguuucccaagg

SEQ ID NO: 9094 - RNA, 22 nt, Artificial Sequence
  RPE65 RNA guide
gggaaacguggagaugccccag

SEQ ID NO: 9095 - RNA, 22 nt, Artificial Sequence
  RPE65 RNA guide
gggcaucuccacguuucccaag

SEQ ID NO: 9096 - RNA, 22 nt, Artificial Sequence
  RPE65 RNA guide
ggggcaucuccacguuucccaa

SEQ ID NO: 9097 - RNA, 22 nt, Artificial Sequence
  RPE65 RNA guide
ucacaccuugggaaacguggag

SEQ ID NO: 9098 - RNA, 22 nt, Artificial Sequence
  RPE65 RNA guide
uccacguuucccaaggugugau

SEQ ID NO: 9099 - RNA, 22 nt, Artificial Sequence
  RPE65 RNA guide
ucuccacguuucccaaggugug

SEQ ID NO: 9100 - RNA, 22 nt, Artificial Sequence
  RPE65 RNA guide
ucuggggcaucuccacguuucc

SEQ ID NO: 9101 - RNA, 22 nt, Artificial Sequence
  RPE65 RNA guide
ugggaaacguggagaugcccca

SEQ ID NO: 9102 - RNA, 22 nt, Artificial Sequence
  RPE65 RNA guide
uggggcaucuccacguuuccca

SEQ ID NO: 9103 - RNA, 22 nt, Artificial Sequence
  RPE65 RNA guide
uugggaaacguggagaugcccc

SEQ ID NO: 9104 - RNA, 20 nt, Artificial Sequence
  RPE65 RNA guide
aaguauggauuaagagugag

SEQ ID NO: 9105 - RNA, 20 nt, Artificial Sequence
  RPE65 RNA guide
aauccauacuucuacuccuc

SEQ ID NO: 9106 - RNA, 20 nt, Artificial Sequence
  RPE65 RNA guide
acucuuaauccauacuucua

SEQ ID NO: 9107 - RNA, 20 nt, Artificial Sequence
  RPE65 RNA guide
agaaguauggauuaagagug

SEQ ID NO: 9108 - RNA, 20 nt, Artificial Sequence
  RPE65 RNA guide
aggaguagaaguauggauua

SEQ ID NO: 9109 - RNA, 20 nt, Artificial Sequence
  RPE65 RNA guide
aguagaaguauggauuaaga

SEQ ID NO: 9110 - RNA, 20 nt, Artificial Sequence
  RPE65 RNA guide
aguauggauuaagagugaga

SEQ ID NO: 9111 - RNA, 20 nt, Artificial Sequence
  RPE65 RNA guide
agugaggaguagaaguaugg

SEQ ID NO: 9112 - RNA, 20 nt, Artificial Sequence
  RPE65 RNA guide
aguggagugaggaguagaag

SEQ ID NO: 9113 - RNA, 20 nt, Artificial Sequence
  RPE65 RNA guide
auacuucuacuccucacucc

SEQ ID NO: 9114 - RNA, 20 nt, Artificial Sequence
  RPE65 RNA guide
auccauacuucuacuccuca

SEQ ID NO: 9115 - RNA, 20 nt, Artificial Sequence
  RPE65 RNA guide
auucucacucuuaauccaua

SEQ ID NO: 9116 - RNA, 20 nt, Artificial Sequence
  RPE65 RNA guide
cacucuuaauccauacuucu

SEQ ID NO: 9117 - RNA, 20 nt, Artificial Sequence
  RPE65 RNA guide
cauacuucuacuccucacuc

SEQ ID NO: 9118 - RNA, 20 nt, Artificial Sequence
  RPE65 RNA guide
ccauacuucuacuccucacu

SEQ ID NO: 9119 - RNA, 20 nt, Artificial Sequence
  RPE65 RNA guide
cucacucuuaauccauacuu

SEQ ID NO: 9120 - RNA, 20 nt, Artificial Sequence
  RPE65 RNA guide
cucuuaauccauacuucuac

SEQ ID NO: 9121 - RNA, 20 nt, Artificial Sequence
  RPE65 RNA guide
cuuaauccauacuucuacuc

SEQ ID NO: 9122 - RNA, 20 nt, Artificial Sequence
  RPE65 RNA guide
gaaguauggauuaagaguga

SEQ ID NO: 9123 - RNA, 20 nt, Artificial Sequence
  RPE65 RNA guide
gaggaguagaaguauggauu

SEQ ID NO: 9124 - RNA, 20 nt, Artificial Sequence
  RPE65 RNA guide
gaguagaaguauggauuaag

SEQ ID NO: 9125 - RNA, 20 nt, Artificial Sequence
  RPE65 RNA guide
gagugaggaguagaaguaug

SEQ ID NO: 9126 - RNA, 20 nt, Artificial Sequence
  RPE65 RNA guide
ggaguagaaguauggauuaa

SEQ ID NO: 9127 - RNA, 20 nt, Artificial Sequence
  RPE65 RNA guide
ggagugaggaguagaaguau

SEQ ID NO: 9128 - RNA, 20 nt, Artificial Sequence
  RPE65 RNA guide
guagaaguauggauuaagag

SEQ ID NO: 9129 - RNA, 20 nt, Artificial Sequence
  RPE65 RNA guide
guauggauuaagagugagaa

SEQ ID NO: 9130 - RNA, 20 nt, Artificial Sequence
  RPE65 RNA guide
gugaggaguagaaguaugga

SEQ ID NO: 9131 - RNA, 20 nt, Artificial Sequence
  RPE65 RNA guide
guggagugaggaguagaagu

SEQ ID NO: 9132 - RNA, 20 nt, Artificial Sequence
  RPE65 RNA guide
uaauccauacuucuacuccu

SEQ ID NO: 9133 - RNA, 20 nt, Artificial Sequence
  RPE65 RNA guide
uacuucuacuccucacucca

SEQ ID NO: 9134 - RNA, 20 nt, Artificial Sequence
  RPE65 RNA guide
uagaaguauggauuaagagu

SEQ ID NO: 9135 - RNA, 20 nt, Artificial Sequence
  RPE65 RNA guide
uaguggagugaggaguagaa

SEQ ID NO: 9136 - RNA, 20 nt, Artificial Sequence
  RPE65 RNA guide
uauucucacucuuaauccau

SEQ ID NO: 9137 - RNA, 20 nt, Artificial Sequence
  RPE65 RNA guide
ucacucuuaauccauacuuc

SEQ ID NO: 9138 - RNA, 20 nt, Artificial Sequence
  RPE65 RNA guide
uccauacuucuacuccucac

SEQ ID NO: 9139 - RNA, 20 nt, Artificial Sequence
  RPE65 RNA guide
ucucacucuuaauccauacu

SEQ ID NO: 9140 - RNA, 20 nt, Artificial Sequence
  RPE65 RNA guide
ucuuaauccauacuucuacu

SEQ ID NO: 9141 - RNA, 20 nt, Artificial Sequence
  RPE65 RNA guide
ugaggaguagaaguauggau

SEQ ID NO: 9142 - RNA, 20 nt, Artificial Sequence
  RPE65 RNA guide
uggagugaggaguagaagua

SEQ ID NO: 9143 - RNA, 20 nt, Artificial Sequence
  RPE65 RNA guide
uuaauccauacuucuacucc

SEQ ID NO: 9144 - RNA, 20 nt, Artificial Sequence
  RPE65 RNA guide
uuaguggagugaggaguaga

SEQ ID NO: 9145 - RNA, 20 nt, Artificial Sequence
  RPE65 RNA guide
uuauucucacucuuaaucca

SEQ ID NO: 9146 - RNA, 20 nt, Artificial Sequence
  RPE65 RNA guide
uucucacucuuaauccauac

SEQ ID NO: 9147 - RNA, 20 nt, Artificial Sequence
  RPE65 RNA guide
uuuaguggagugaggaguag

SEQ ID NO: 9148 - RNA, 20 nt, Artificial Sequence
  RPE65 RNA guide
uuuauucucacucuuaaucc

SEQ ID NO: 9149 - RNA, 21 nt, Artificial Sequence
  RPE65 RNA guide
aaguauggauuaagagugaga

SEQ ID NO: 9150 - RNA, 21 nt, Artificial Sequence
  RPE65 RNA guide
aauccauacuucuacuccuca

SEQ ID NO: 9151 - RNA, 21 nt, Artificial Sequence
  RPE65 RNA guide
acucuuaauccauacuucuac

SEQ ID NO: 9152 - RNA, 21 nt, Artificial Sequence
  RPE65 RNA guide
agaaguauggauuaagaguga

SEQ ID NO: 9153 - RNA, 21 nt, Artificial Sequence
  RPE65 RNA guide
aggaguagaaguauggauuaa

SEQ ID NO: 9154 - RNA, 21 nt, Artificial Sequence
  RPE65 RNA guide
aguagaaguauggauuaagag

SEQ ID NO: 9155 - RNA, 21 nt, Artificial Sequence
  RPE65 RNA guide
aguauggauuaagagugagaa

SEQ ID NO: 9156 - RNA, 21 nt, Artificial Sequence
  RPE65 RNA guide
agugaggaguagaaguaugga

SEQ ID NO: 9157 - RNA, 21 nt, Artificial Sequence
  RPE65 RNA guide
aguggagugaggaguagaagu

SEQ ID NO: 9158 - RNA, 21 nt, Artificial Sequence
  RPE65 RNA guide
auacuucuacuccucacucca

SEQ ID NO: 9159 - RNA, 21 nt, Artificial Sequence
  RPE65 RNA guide
auccauacuucuacuccucac

SEQ ID NO: 9160 - RNA, 21 nt, Artificial Sequence
  RPE65 RNA guide
auucucacucuuaauccauac

SEQ ID NO: 9161 - RNA, 21 nt, Artificial Sequence
  RPE65 RNA guide
cacucuuaauccauacuucua

SEQ ID NO: 9162 - RNA, 21 nt, Artificial Sequence
  RPE65 RNA guide
cauacuucuacuccucacucc

SEQ ID NO: 9163 - RNA, 21 nt, Artificial Sequence
  RPE65 RNA guide
ccauacuucuacuccucacuc

SEQ ID NO: 9164 - RNA, 21 nt, Artificial Sequence
  RPE65 RNA guide
cucacucuuaauccauacuuc

SEQ ID NO: 9165 - RNA, 21 nt, Artificial Sequence
  RPE65 RNA guide
cucuuaauccauacuucuacu

SEQ ID NO: 9166 - RNA, 21 nt, Artificial Sequence
  RPE65 RNA guide
cuuaauccauacuucuacucc

SEQ ID NO: 9167 - RNA, 21 nt, Artificial Sequence
  RPE65 RNA guide
gaaguauggauuaagagugag

SEQ ID NO: 9168 - RNA, 21 nt, Artificial Sequence
  RPE65 RNA guide
gaggaguagaaguauggauua

SEQ ID NO: 9169 - RNA, 21 nt, Artificial Sequence
  RPE65 RNA guide
gaguagaaguauggauuaaga

SEQ ID NO: 9170 - RNA, 21 nt, Artificial Sequence
  RPE65 RNA guide
gagugaggaguagaaguaugg

SEQ ID NO: 9171 - RNA, 21 nt, Artificial Sequence
  RPE65 RNA guide
ggaguagaaguauggauuaag

SEQ ID NO: 9172 - RNA, 21 nt, Artificial Sequence
  RPE65 RNA guide
ggagugaggaguagaaguaug

SEQ ID NO: 9173 - RNA, 21 nt, Artificial Sequence
  RPE65 RNA guide
guagaaguauggauuaagagu

SEQ ID NO: 9174 - RNA, 21 nt, Artificial Sequence
  RPE65 RNA guide
guauggauuaagagugagaau

SEQ ID NO: 9175 - RNA, 21 nt, Artificial Sequence
  RPE65 RNA guide
gugaggaguagaaguauggau

SEQ ID NO: 9176 - RNA, 21 nt, Artificial Sequence
  RPE65 RNA guide
guggagugaggaguagaagua

SEQ ID NO: 9177 - RNA, 21 nt, Artificial Sequence
  RPE65 RNA guide
uaauccauacuucuacuccuc

SEQ ID NO: 9178 - RNA, 21 nt, Artificial Sequence
  RPE65 RNA guide
uacuucuacuccucacuccac

SEQ ID NO: 9179 - RNA, 21 nt, Artificial Sequence
  RPE65 RNA guide
uagaaguauggauuaagagug

SEQ ID NO: 9180 - RNA, 21 nt, Artificial Sequence
  RPE65 RNA guide
uaguggagugaggaguagaag

SEQ ID NO: 9181 - RNA, 21 nt, Artificial Sequence
  RPE65 RNA guide
ucacucuuaauccauacuucu

SEQ ID NO: 9182 - RNA, 21 nt, Artificial Sequence
  RPE65 RNA guide
uccauacuucuacuccucacu

SEQ ID NO: 9183 - RNA, 21 nt, Artificial Sequence
  RPE65 RNA guide
ucucacucuuaauccauacuu

SEQ ID NO: 9184 - RNA, 21 nt, Artificial Sequence
  RPE65 RNA guide
ucuuaauccauacuucuacuc

SEQ ID NO: 9185 - RNA, 21 nt, Artificial Sequence
  RPE65 RNA guide
ugaggaguagaaguauggauu

SEQ ID NO: 9186 - RNA, 21 nt, Artificial Sequence
  RPE65 RNA guide
uggagugaggaguagaaguau

SEQ ID NO: 9187 - RNA, 21 nt, Artificial Sequence
  RPE65 RNA guide
uuaauccauacuucuacuccu

SEQ ID NO: 9188 - RNA, 21 nt, Artificial Sequence
  RPE65 RNA guide
uuaguggagugaggaguagaa

SEQ ID NO: 9189 - RNA, 21 nt, Artificial Sequence
  RPE65 RNA guide
uucucacucuuaauccauacu

SEQ ID NO: 9190 - RNA, 21 nt, Artificial Sequence
  RPE65 RNA guide
uuuaguggagugaggaguaga

SEQ ID NO: 9191 - RNA, 21 nt, Artificial Sequence
  RPE65 RNA guide
uuuuaguggagugaggaguag

SEQ ID NO: 9192 - RNA, 22 nt, Artificial Sequence
  RPE65 RNA guide
aaguauggauuaagagugagaa

SEQ ID NO: 9193 - RNA, 22 nt, Artificial Sequence
  RPE65 RNA guide
aauccauacuucuacuccucac

SEQ ID NO: 9194 - RNA, 22 nt, Artificial Sequence
  RPE65 RNA guide
acucuuaauccauacuucuacu

SEQ ID NO: 9195 - RNA, 22 nt, Artificial Sequence
  RPE65 RNA guide
agaaguauggauuaagagugag

SEQ ID NO: 9196 - RNA, 22 nt, Artificial Sequence
  RPE65 RNA guide
aggaguagaaguauggauuaag

SEQ ID NO: 9197 - RNA, 22 nt, Artificial Sequence
  RPE65 RNA guide
aguagaaguauggauuaagagu

SEQ ID NO: 9198 - RNA, 22 nt, Artificial Sequence
  RPE65 RNA guide
aguauggauuaagagugagaau

SEQ ID NO: 9199 - RNA, 22 nt, Artificial Sequence
  RPE65 RNA guide
agugaggaguagaaguauggau

SEQ ID NO: 9200 - RNA, 22 nt, Artificial Sequence
  RPE65 RNA guide
aguggagugaggaguagaagua

SEQ ID NO: 9201 - RNA, 22 nt, Artificial Sequence
  RPE65 RNA guide
auacuucuacuccucacuccac

SEQ ID NO: 9202 - RNA, 22 nt, Artificial Sequence
  RPE65 RNA guide
auccauacuucuacuccucacu

SEQ ID NO: 9203 - RNA, 22 nt, Artificial Sequence
  RPE65 RNA guide
auucucacucuuaauccauacu

SEQ ID NO: 9204 - RNA, 22 nt, Artificial Sequence
  RPE65 RNA guide
auuuuaguggagugaggaguag

SEQ ID NO: 9205 - RNA, 22 nt, Artificial Sequence
  RPE65 RNA guide
cacucuuaauccauacuucuac

SEQ ID NO: 9206 - RNA, 22 nt, Artificial Sequence
  RPE65 RNA guide
cauacuucuacuccucacucca

SEQ ID NO: 9207 - RNA, 22 nt, Artificial Sequence
  RPE65 RNA guide
cauuuauucucacucuuaaucc

SEQ ID NO: 9208 - RNA, 22 nt, Artificial Sequence
  RPE65 RNA guide
ccauacuucuacuccucacucc

SEQ ID NO: 9209 - RNA, 22 nt, Artificial Sequence
  RPE65 RNA guide
cucacucuuaauccauacuucu

SEQ ID NO: 9210 - RNA, 22 nt, Artificial Sequence
  RPE65 RNA guide
cucuuaauccauacuucuacuc

SEQ ID NO: 9211 - RNA, 22 nt, Artificial Sequence
  RPE65 RNA guide
cuuaauccauacuucuacuccu

SEQ ID NO: 9212 - RNA, 22 nt, Artificial Sequence
  RPE65 RNA guide
gaaguauggauuaagagugaga

SEQ ID NO: 9213 - RNA, 22 nt, Artificial Sequence
  RPE65 RNA guide
gaggaguagaaguauggauuaa

SEQ ID NO: 9214 - RNA, 22 nt, Artificial Sequence
  RPE65 RNA guide
gaguagaaguauggauuaagag

SEQ ID NO: 9215 - RNA, 22 nt, Artificial Sequence
  RPE65 RNA guide
gagugaggaguagaaguaugga

SEQ ID NO: 9216 - RNA, 22 nt, Artificial Sequence
  RPE65 RNA guide
ggaguagaaguauggauuaaga

SEQ ID NO: 9217 - RNA, 22 nt, Artificial Sequence
  RPE65 RNA guide
ggagugaggaguagaaguaugg

SEQ ID NO: 9218 - RNA, 22 nt, Artificial Sequence
  RPE65 RNA guide
guagaaguauggauuaagagug

SEQ ID NO: 9219 - RNA, 22 nt, Artificial Sequence
  RPE65 RNA guide
guauggauuaagagugagaaua

SEQ ID NO: 9220 - RNA, 22 nt, Artificial Sequence
  RPE65 RNA guide
gugaggaguagaaguauggauu

SEQ ID NO: 9221 - RNA, 22 nt, Artificial Sequence
  RPE65 RNA guide
guggagugaggaguagaaguau

SEQ ID NO: 9222 - RNA, 22 nt, Artificial Sequence
  RPE65 RNA guide
uaauccauacuucuacuccuca

SEQ ID NO: 9223 - RNA, 22 nt, Artificial Sequence
  RPE65 RNA guide
uacuucuacuccucacuccacu

SEQ ID NO: 9224 - RNA, 22 nt, Artificial Sequence
  RPE65 RNA guide
uagaaguauggauuaagaguga

SEQ ID NO: 9225 - RNA, 22 nt, Artificial Sequence
  RPE65 RNA guide
uaguggagugaggaguagaagu

SEQ ID NO: 9226 - RNA, 22 nt, Artificial Sequence
  RPE65 RNA guide
uauucucacucuuaauccauac

SEQ ID NO: 9227 - RNA, 22 nt, Artificial Sequence
  RPE65 RNA guide
ucacucuuaauccauacuucua

SEQ ID NO: 9228 - RNA, 22 nt, Artificial Sequence
  RPE65 RNA guide
uccauacuucuacuccucacuc

SEQ ID NO: 9229 - RNA, 22 nt, Artificial Sequence
  RPE65 RNA guide
ucucacucuuaauccauacuuc

SEQ ID NO: 9230 - RNA, 22 nt, Artificial Sequence
  RPE65 RNA guide
ucuuaauccauacuucuacucc

SEQ ID NO: 9231 - RNA, 22 nt, Artificial Sequence
  RPE65 RNA guide
ugaggaguagaaguauggauua

SEQ ID NO: 9232 - RNA, 22 nt, Artificial Sequence
  RPE65 RNA guide
uggagugaggaguagaaguaug

SEQ ID NO: 9233 - RNA, 22 nt, Artificial Sequence
  RPE65 RNA guide
uuaauccauacuucuacuccuc

SEQ ID NO: 9234 - RNA, 22 nt, Artificial Sequence
  RPE65 RNA guide
uuaguggagugaggaguagaag

SEQ ID NO: 9235 - RNA, 22 nt, Artificial Sequence
  RPE65 RNA guide
uucucacucuuaauccauacuu

SEQ ID NO: 9236 - RNA, 22 nt, Artificial Sequence
  RPE65 RNA guide
uuuaguggagugaggaguagaa

SEQ ID NO: 9237 - RNA, 22 nt, Artificial Sequence
  RPE65 RNA guide
uuuuaguggagugaggaguaga

SEQ ID NO: 9238 - RNA, 20 nt, Artificial Sequence
  RPE65 RNA guide
aaggauggauuaagagugag

SEQ ID NO: 9239 - RNA, 20 nt, Artificial Sequence
  RPE65 RNA guide
aauccauccuucuacuccuc

SEQ ID NO: 9240 - RNA, 20 nt, Artificial Sequence
  RPE65 RNA guide
acucuuaauccauccuucua

SEQ ID NO: 9241 - RNA, 20 nt, Artificial Sequence
  RPE65 RNA guide
agaaggauggauuaagagug

SEQ ID NO: 9242 - RNA, 20 nt, Artificial Sequence
  RPE65 RNA guide
aggaguagaaggauggauua

SEQ ID NO: 9243 - RNA, 20 nt, Artificial Sequence
  RPE65 RNA guide
aggauggauuaagagugaga

SEQ ID NO: 9244 - RNA, 20 nt, Artificial Sequence
  RPE65 RNA guide
aguagaaggauggauuaaga

SEQ ID NO: 9245 - RNA, 20 nt, Artificial Sequence
  RPE65 RNA guide
agugaggaguagaaggaugg

SEQ ID NO: 9246 - RNA, 20 nt, Artificial Sequence
  RPE65 RNA guide
auccauccuucuacuccuca

SEQ ID NO: 9247 - RNA, 20 nt, Artificial Sequence
  RPE65 RNA guide
auccuucuacuccucacucc

SEQ ID NO: 9248 - RNA, 20 nt, Artificial Sequence
  RPE65 RNA guide
auucucacucuuaauccauc

SEQ ID NO: 9249 - RNA, 20 nt, Artificial Sequence
  RPE65 RNA guide
cacucuuaauccauccuucu

SEQ ID NO: 9250 - RNA, 20 nt, Artificial Sequence
  RPE65 RNA guide
cauccuucuacuccucacuc

SEQ ID NO: 9251 - RNA, 20 nt, Artificial Sequence
  RPE65 RNA guide
ccauccuucuacuccucacu

SEQ ID NO: 9252 - RNA, 20 nt, Artificial Sequence
  RPE65 RNA guide
cucacucuuaauccauccuu

SEQ ID NO: 9253 - RNA, 20 nt, Artificial Sequence
  RPE65 RNA guide
cucuuaauccauccuucuac

SEQ ID NO: 9254 - RNA, 20 nt, Artificial Sequence
  RPE65 RNA guide
cuuaauccauccuucuacuc

SEQ ID NO: 9255 - RNA, 20 nt, Artificial Sequence
  RPE65 RNA guide
gaaggauggauuaagaguga

SEQ ID NO: 9256 - RNA, 20 nt, Artificial Sequence
  RPE65 RNA guide
gaggaguagaaggauggauu

SEQ ID NO: 9257 - RNA, 20 nt, Artificial Sequence
  RPE65 RNA guide
gaguagaaggauggauuaag

SEQ ID NO: 9258 - RNA, 20 nt, Artificial Sequence
  RPE65 RNA guide
gagugaggaguagaaggaug

SEQ ID NO: 9259 - RNA, 20 nt, Artificial Sequence
  RPE65 RNA guide
ggaguagaaggauggauuaa

SEQ ID NO: 9260 - RNA, 20 nt, Artificial Sequence
  RPE65 RNA guide
ggagugaggaguagaaggau

SEQ ID NO: 9261 - RNA, 20 nt, Artificial Sequence
  RPE65 RNA guide
ggauggauuaagagugagaa

SEQ ID NO: 9262 - RNA, 20 nt, Artificial Sequence
  RPE65 RNA guide
guagaaggauggauuaagag

SEQ ID NO: 9263 - RNA, 20 nt, Artificial Sequence
  RPE65 RNA guide
gugaggaguagaaggaugga

SEQ ID NO: 9264 - RNA, 20 nt, Artificial Sequence
  RPE65 RNA guide
guggagugaggaguagaagg

SEQ ID NO: 9265 - RNA, 20 nt, Artificial Sequence
  RPE65 RNA guide
uaauccauccuucuacuccu

SEQ ID NO: 9266 - RNA, 20 nt, Artificial Sequence
  RPE65 RNA guide
uagaaggauggauuaagagu

SEQ ID NO: 9267 - RNA, 20 nt, Artificial Sequence
  RPE65 RNA guide
ucacucuuaauccauccuuc

SEQ ID NO: 9268 - RNA, 20 nt, Artificial Sequence
  RPE65 RNA guide
uccauccuucuacuccucac

SEQ ID NO: 9269 - RNA, 20 nt, Artificial Sequence
  RPE65 RNA guide
uccuucuacuccucacucca

SEQ ID NO: 9270 - RNA, 20 nt, Artificial Sequence
  RPE65 RNA guide
ucucacucuuaauccauccu

SEQ ID NO: 9271 - RNA, 20 nt, Artificial Sequence
  RPE65 RNA guide
ucuuaauccauccuucuacu

SEQ ID NO: 9272 - RNA, 20 nt, Artificial Sequence
  RPE65 RNA guide
ugaggaguagaaggauggau

SEQ ID NO: 9273 - RNA, 20 nt, Artificial Sequence
  RPE65 RNA guide
uggagugaggaguagaagga

SEQ ID NO: 9274 - RNA, 20 nt, Artificial Sequence
  RPE65 RNA guide
uuaauccauccuucuacucc

SEQ ID NO: 9275 - RNA, 20 nt, Artificial Sequence
  RPE65 RNA guide
uucucacucuuaauccaucc

SEQ ID NO: 9276 - RNA, 21 nt, Artificial Sequence
  RPE65 RNA guide
aaggauggauuaagagugaga

SEQ ID NO: 9277 - RNA, 21 nt, Artificial Sequence
  RPE65 RNA guide
aauccauccuucuacuccuca

SEQ ID NO: 9278 - RNA, 21 nt, Artificial Sequence
  RPE65 RNA guide
acucuuaauccauccuucuac

SEQ ID NO: 9279 - RNA, 21 nt, Artificial Sequence
  RPE65 RNA guide
agaaggauggauuaagaguga

SEQ ID NO: 9280 - RNA, 21 nt, Artificial Sequence
  RPE65 RNA guide
aggaguagaaggauggauuaa

SEQ ID NO: 9281 - RNA, 21 nt, Artificial Sequence
  RPE65 RNA guide
aggauggauuaagagugagaa

SEQ ID NO: 9282 - RNA, 21 nt, Artificial Sequence
  RPE65 RNA guide
aguagaaggauggauuaagag

SEQ ID NO: 9283 - RNA, 21 nt, Artificial Sequence
  RPE65 RNA guide
agugaggaguagaaggaugga

SEQ ID NO: 9284 - RNA, 21 nt, Artificial Sequence
  RPE65 RNA guide
aguggagugaggaguagaagg

SEQ ID NO: 9285 - RNA, 21 nt, Artificial Sequence
  RPE65 RNA guide
auccauccuucuacuccucac

SEQ ID NO: 9286 - RNA, 21 nt, Artificial Sequence
  RPE65 RNA guide
auccuucuacuccucacucca

SEQ ID NO: 9287 - RNA, 21 nt, Artificial Sequence
  RPE65 RNA guide
auucucacucuuaauccaucc

SEQ ID NO: 9288 - RNA, 21 nt, Artificial Sequence
  RPE65 RNA guide
cacucuuaauccauccuucua

SEQ ID NO: 9289 - RNA, 21 nt, Artificial Sequence
  RPE65 RNA guide
cauccuucuacuccucacucc

SEQ ID NO: 9290 - RNA, 21 nt, Artificial Sequence
  RPE65 RNA guide
ccauccuucuacuccucacuc

SEQ ID NO: 9291 - RNA, 21 nt, Artificial Sequence
  RPE65 RNA guide
cucacucuuaauccauccuuc

SEQ ID NO: 9292 - RNA, 21 nt, Artificial Sequence
  RPE65 RNA guide
cucuuaauccauccuucuacu

SEQ ID NO: 9293 - RNA, 21 nt, Artificial Sequence
  RPE65 RNA guide
cuuaauccauccuucuacucc

SEQ ID NO: 9294 - RNA, 21 nt, Artificial Sequence
  RPE65 RNA guide
gaaggauggauuaagagugag

SEQ ID NO: 9295 - RNA, 21 nt, Artificial Sequence
  RPE65 RNA guide
gaggaguagaaggauggauua

SEQ ID NO: 9296 - RNA, 21 nt, Artificial Sequence
  RPE65 RNA guide
gaguagaaggauggauuaaga

SEQ ID NO: 9297 - RNA, 21 nt, Artificial Sequence
  RPE65 RNA guide
gagugaggaguagaaggaugg

SEQ ID NO: 9298 - RNA, 21 nt, Artificial Sequence
  RPE65 RNA guide
ggaguagaaggauggauuaag

SEQ ID NO: 9299 - RNA, 21 nt, Artificial Sequence
  RPE65 RNA guide
ggagugaggaguagaaggaug

SEQ ID NO: 9300 - RNA, 21 nt, Artificial Sequence
  RPE65 RNA guide
ggauggauuaagagugagaau

SEQ ID NO: 9301 - RNA, 21 nt, Artificial Sequence
  RPE65 RNA guide
guagaaggauggauuaagagu

SEQ ID NO: 9302 - RNA, 21 nt, Artificial Sequence
  RPE65 RNA guide
gugaggaguagaaggauggau

SEQ ID NO: 9303 - RNA, 21 nt, Artificial Sequence
  RPE65 RNA guide
guggagugaggaguagaagga

SEQ ID NO: 9304 - RNA, 21 nt, Artificial Sequence
  RPE65 RNA guide
uaauccauccuucuacuccuc

SEQ ID NO: 9305 - RNA, 21 nt, Artificial Sequence
  RPE65 RNA guide
uagaaggauggauuaagagug

SEQ ID NO: 9306 - RNA, 21 nt, Artificial Sequence
  RPE65 RNA guide
uauucucacucuuaauccauc

SEQ ID NO: 9307 - RNA, 21 nt, Artificial Sequence
  RPE65 RNA guide
ucacucuuaauccauccuucu

SEQ ID NO: 9308 - RNA, 21 nt, Artificial Sequence
  RPE65 RNA guide
uccauccuucuacuccucacu

SEQ ID NO: 9309 - RNA, 21 nt, Artificial Sequence
  RPE65 RNA guide
uccuucuacuccucacuccac

SEQ ID NO: 9310 - RNA, 21 nt, Artificial Sequence
  RPE65 RNA guide
ucucacucuuaauccauccuu

SEQ ID NO: 9311 - RNA, 21 nt, Artificial Sequence
  RPE65 RNA guide
ucuuaauccauccuucuacuc

SEQ ID NO: 9312 - RNA, 21 nt, Artificial Sequence
  RPE65 RNA guide
ugaggaguagaaggauggauu

SEQ ID NO: 9313 - RNA, 21 nt, Artificial Sequence
  RPE65 RNA guide
uggagugaggaguagaaggau

SEQ ID NO: 9314 - RNA, 21 nt, Artificial Sequence
  RPE65 RNA guide
uuaauccauccuucuacuccu

SEQ ID NO: 9315 - RNA, 21 nt, Artificial Sequence
  RPE65 RNA guide
uucucacucuuaauccauccu

SEQ ID NO: 9316 - RNA, 22 nt, Artificial Sequence
  RPE65 RNA guide
aaggauggauuaagagugagaa

SEQ ID NO: 9317 - RNA, 22 nt, Artificial Sequence
  RPE65 RNA guide
aauccauccuucuacuccucac

SEQ ID NO: 9318 - RNA, 22 nt, Artificial Sequence
  RPE65 RNA guide
acucuuaauccauccuucuacu

SEQ ID NO: 9319 - RNA, 22 nt, Artificial Sequence
  RPE65 RNA guide
agaaggauggauuaagagugag

SEQ ID NO: 9320 - RNA, 22 nt, Artificial Sequence
  RPE65 RNA guide
aggaguagaaggauggauuaag

SEQ ID NO: 9321 - RNA, 22 nt, Artificial Sequence
  RPE65 RNA guide
aggauggauuaagagugagaau

SEQ ID NO: 9322 - RNA, 22 nt, Artificial Sequence
  RPE65 RNA guide
aguagaaggauggauuaagagu

SEQ ID NO: 9323 - RNA, 22 nt, Artificial Sequence
  RPE65 RNA guide
agugaggaguagaaggauggau

SEQ ID NO: 9324 - RNA, 22 nt, Artificial Sequence
  RPE65 RNA guide
aguggagugaggaguagaagga

SEQ ID NO: 9325 - RNA, 22 nt, Artificial Sequence
  RPE65 RNA guide
auccauccuucuacuccucacu

SEQ ID NO: 9326 - RNA, 22 nt, Artificial Sequence
  RPE65 RNA guide
auccuucuacuccucacuccac

SEQ ID NO: 9327 - RNA, 22 nt, Artificial Sequence
  RPE65 RNA guide
auucucacucuuaauccauccu

SEQ ID NO: 9328 - RNA, 22 nt, Artificial Sequence
  RPE65 RNA guide
cacucuuaauccauccuucuac

SEQ ID NO: 9329 - RNA, 22 nt, Artificial Sequence
  RPE65 RNA guide
cauccuucuacuccucacucca

SEQ ID NO: 9330 - RNA, 22 nt, Artificial Sequence
  RPE65 RNA guide
ccauccuucuacuccucacucc

SEQ ID NO: 9331 - RNA, 22 nt, Artificial Sequence
  RPE65 RNA guide
cucacucuuaauccauccuucu

SEQ ID NO: 9332 - RNA, 22 nt, Artificial Sequence
  RPE65 RNA guide
cucuuaauccauccuucuacuc

SEQ ID NO: 9333 - RNA, 22 nt, Artificial Sequence
  RPE65 RNA guide
cuuaauccauccuucuacuccu

SEQ ID NO: 9334 - RNA, 22 nt, Artificial Sequence
  RPE65 RNA guide
gaaggauggauuaagagugaga

SEQ ID NO: 9335 - RNA, 22 nt, Artificial Sequence
  RPE65 RNA guide
gaggaguagaaggauggauuaa

SEQ ID NO: 9336 - RNA, 22 nt, Artificial Sequence
  RPE65 RNA guide
gaguagaaggauggauuaagag

SEQ ID NO: 9337 - RNA, 22 nt, Artificial Sequence
  RPE65 RNA guide
gagugaggaguagaaggaugga

SEQ ID NO: 9338 - RNA, 22 nt, Artificial Sequence
  RPE65 RNA guide
ggaguagaaggauggauuaaga

SEQ ID NO: 9339 - RNA, 22 nt, Artificial Sequence
  RPE65 RNA guide
ggagugaggaguagaaggaugg

SEQ ID NO: 9340 - RNA, 22 nt, Artificial Sequence
  RPE65 RNA guide
ggauggauuaagagugagaaua

SEQ ID NO: 9341 - RNA, 22 nt, Artificial Sequence
  RPE65 RNA guide
guagaaggauggauuaagagug

SEQ ID NO: 9342 - RNA, 22 nt, Artificial Sequence
  RPE65 RNA guide
gugaggaguagaaggauggauu

SEQ ID NO: 9343 - RNA, 22 nt, Artificial Sequence
  RPE65 RNA guide
guggagugaggaguagaaggau

SEQ ID NO: 9344 - RNA, 22 nt, Artificial Sequence
  RPE65 RNA guide
uaauccauccuucuacuccuca

SEQ ID NO: 9345 - RNA, 22 nt, Artificial Sequence
  RPE65 RNA guide
uagaaggauggauuaagaguga

SEQ ID NO: 9346 - RNA, 22 nt, Artificial Sequence
  RPE65 RNA guide
uaguggagugaggaguagaagg

SEQ ID NO: 9347 - RNA, 22 nt, Artificial Sequence
  RPE65 RNA guide
uauucucacucuuaauccaucc

SEQ ID NO: 9348 - RNA, 22 nt, Artificial Sequence
  RPE65 RNA guide
ucacucuuaauccauccuucua

SEQ ID NO: 9349 - RNA, 22 nt, Artificial Sequence
  RPE65 RNA guide
uccauccuucuacuccucacuc

SEQ ID NO: 9350 - RNA, 22 nt, Artificial Sequence
  RPE65 RNA guide
uccuucuacuccucacuccacu

SEQ ID NO: 9351 - RNA, 22 nt, Artificial Sequence
  RPE65 RNA guide
ucucacucuuaauccauccuuc

SEQ ID NO: 9352 - RNA, 22 nt, Artificial Sequence
  RPE65 RNA guide
ucuuaauccauccuucuacucc

SEQ ID NO: 9353 - RNA, 22 nt, Artificial Sequence
  RPE65 RNA guide
ugaggaguagaaggauggauua

SEQ ID NO: 9354 - RNA, 22 nt, Artificial Sequence
  RPE65 RNA guide
uggagugaggaguagaaggaug

SEQ ID NO: 9355 - RNA, 22 nt, Artificial Sequence
  RPE65 RNA guide
uuaauccauccuucuacuccuc

SEQ ID NO: 9356 - RNA, 22 nt, Artificial Sequence
  RPE65 RNA guide
uuauucucacucuuaauccauc

SEQ ID NO: 9357 - RNA, 22 nt, Artificial Sequence
  RPE65 RNA guide
uucucacucuuaauccauccuu

SEQ ID NO: 9358 - RNA, 20 nt, Artificial Sequence
  RPE65 RNA guide
aagcuccgccucauggguuu

SEQ ID NO: 9359 - RNA, 20 nt, Artificial Sequence
  RPE65 RNA guide
aauggcauaaacccaugagg

SEQ ID NO: 9360 - RNA, 20 nt, Artificial Sequence
  RPE65 RNA guide
agaauggcauaaacccauga

SEQ ID NO: 9361 - RNA, 20 nt, Artificial Sequence
  RPE65 RNA guide
agcuccgccucauggguuua

SEQ ID NO: 9362 - RNA, 20 nt, Artificial Sequence
  RPE65 RNA guide
aggagaauggcauaaaccca

SEQ ID NO: 9363 - RNA, 20 nt, Artificial Sequence
  RPE65 RNA guide
auaaacccaugaggcggagc

SEQ ID NO: 9364 - RNA, 20 nt, Artificial Sequence
  RPE65 RNA guide
auggcauaaacccaugaggc

SEQ ID NO: 9365 - RNA, 20 nt, Artificial Sequence
  RPE65 RNA guide
caagcuccgccucauggguu

SEQ ID NO: 9366 - RNA, 20 nt, Artificial Sequence
  RPE65 RNA guide
caggagaauggcauaaaccc

SEQ ID NO: 9367 - RNA, 20 nt, Artificial Sequence
  RPE65 RNA guide
cauaaacccaugaggcggag

SEQ ID NO: 9368 - RNA, 20 nt, Artificial Sequence
  RPE65 RNA guide
cauggguuuaugccauucuc

SEQ ID NO: 9369 - RNA, 20 nt, Artificial Sequence
  RPE65 RNA guide
ccgccucauggguuuaugcc

SEQ ID NO: 9370 - RNA, 20 nt, Artificial Sequence
  RPE65 RNA guide
ccucauggguuuaugccauu

SEQ ID NO: 9371 - RNA, 20 nt, Artificial Sequence
  RPE65 RNA guide
cgccucauggguuuaugcca

SEQ ID NO: 9372 - RNA, 20 nt, Artificial Sequence
  RPE65 RNA guide
cucauggguuuaugccauuc

SEQ ID NO: 9373 - RNA, 20 nt, Artificial Sequence
  RPE65 RNA guide
cuccgccucauggguuuaug

SEQ ID NO: 9374 - RNA, 20 nt, Artificial Sequence
  RPE65 RNA guide
gaauggcauaaacccaugag

SEQ ID NO: 9375 - RNA, 20 nt, Artificial Sequence
  RPE65 RNA guide
gagaauggcauaaacccaug

SEQ ID NO: 9376 - RNA, 20 nt, Artificial Sequence
  RPE65 RNA guide
gcaagcuccgccucaugggu

SEQ ID NO: 9377 - RNA, 20 nt, Artificial Sequence
  RPE65 RNA guide
gcaggagaauggcauaaacc

SEQ ID NO: 9378 - RNA, 20 nt, Artificial Sequence
  RPE65 RNA guide
gcauaaacccaugaggcgga

SEQ ID NO: 9379 - RNA, 20 nt, Artificial Sequence
  RPE65 RNA guide
gccucauggguuuaugccau

SEQ ID NO: 9380 - RNA, 20 nt, Artificial Sequence
  RPE65 RNA guide
gcuccgccucauggguuuau

SEQ ID NO: 9381 - RNA, 20 nt, Artificial Sequence
  RPE65 RNA guide
ggagaauggcauaaacccau

SEQ ID NO: 9382 - RNA, 20 nt, Artificial Sequence
  RPE65 RNA guide
ggcaggagaauggcauaaac

SEQ ID NO: 9383 - RNA, 20 nt, Artificial Sequence
  RPE65 RNA guide
ggcauaaacccaugaggcgg

SEQ ID NO: 9384 - RNA, 20 nt, Artificial Sequence
  RPE65 RNA guide
ucauggguuuaugccauucu

SEQ ID NO: 9385 - RNA, 20 nt, Artificial Sequence
  RPE65 RNA guide
uccgccucauggguuuaugc

SEQ ID NO: 9386 - RNA, 20 nt, Artificial Sequence
  RPE65 RNA guide
uggcauaaacccaugaggcg

SEQ ID NO: 9387 - RNA, 21 nt, Artificial Sequence
  RPE65 RNA guide
aagcuccgccucauggguuua

SEQ ID NO: 9388 - RNA, 21 nt, Artificial Sequence
  RPE65 RNA guide
aauggcauaaacccaugaggc

SEQ ID NO: 9389 - RNA, 21 nt, Artificial Sequence
  RPE65 RNA guide
agaauggcauaaacccaugag

SEQ ID NO: 9390 - RNA, 21 nt, Artificial Sequence
  RPE65 RNA guide
agcuccgccucauggguuuau

SEQ ID NO: 9391 - RNA, 21 nt, Artificial Sequence
  RPE65 RNA guide
aggagaauggcauaaacccau

SEQ ID NO: 9392 - RNA, 21 nt, Artificial Sequence
  RPE65 RNA guide
aggcaggagaauggcauaaac

SEQ ID NO: 9393 - RNA, 21 nt, Artificial Sequence
  RPE65 RNA guide
auaaacccaugaggcggagcu

SEQ ID NO: 9394 - RNA, 21 nt, Artificial Sequence
  RPE65 RNA guide
auggcauaaacccaugaggcg

SEQ ID NO: 9395 - RNA, 21 nt, Artificial Sequence
  RPE65 RNA guide
caagcuccgccucauggguuu

SEQ ID NO: 9396 - RNA, 21 nt, Artificial Sequence
  RPE65 RNA guide
caggagaauggcauaaaccca

SEQ ID NO: 9397 - RNA, 21 nt, Artificial Sequence
  RPE65 RNA guide
cauaaacccaugaggcggagc

SEQ ID NO: 9398 - RNA, 21 nt, Artificial Sequence
  RPE65 RNA guide
cauggguuuaugccauucucc

SEQ ID NO: 9399 - RNA, 21 nt, Artificial Sequence
  RPE65 RNA guide
ccgccucauggguuuaugcca

SEQ ID NO: 9400 - RNA, 21 nt, Artificial Sequence
  RPE65 RNA guide
ccucauggguuuaugccauuc

SEQ ID NO: 9401 - RNA, 21 nt, Artificial Sequence
  RPE65 RNA guide
cgccucauggguuuaugccau

SEQ ID NO: 9402 - RNA, 21 nt, Artificial Sequence
  RPE65 RNA guide
cucauggguuuaugccauucu

SEQ ID NO: 9403 - RNA, 21 nt, Artificial Sequence
  RPE65 RNA guide
cuccgccucauggguuuaugc

SEQ ID NO: 9404 - RNA, 21 nt, Artificial Sequence
  RPE65 RNA guide
gaauggcauaaacccaugagg

SEQ ID NO: 9405 - RNA, 21 nt, Artificial Sequence
  RPE65 RNA guide
gagaauggcauaaacccauga

SEQ ID NO: 9406 - RNA, 21 nt, Artificial Sequence
  RPE65 RNA guide
gcaagcuccgccucauggguu

SEQ ID NO: 9407 - RNA, 21 nt, Artificial Sequence
  RPE65 RNA guide
gcaggagaauggcauaaaccc

SEQ ID NO: 9408 - RNA, 21 nt, Artificial Sequence
  RPE65 RNA guide
gcauaaacccaugaggcggag

SEQ ID NO: 9409 - RNA, 21 nt, Artificial Sequence
  RPE65 RNA guide
gccucauggguuuaugccauu

SEQ ID NO: 9410 - RNA, 21 nt, Artificial Sequence
  RPE65 RNA guide
gcuccgccucauggguuuaug

SEQ ID NO: 9411 - RNA, 21 nt, Artificial Sequence
  RPE65 RNA guide
ggagaauggcauaaacccaug

SEQ ID NO: 9412 - RNA, 21 nt, Artificial Sequence
  RPE65 RNA guide
ggcaggagaauggcauaaacc

SEQ ID NO: 9413 - RNA, 21 nt, Artificial Sequence
  RPE65 RNA guide
ggcauaaacccaugaggcgga

SEQ ID NO: 9414 - RNA, 21 nt, Artificial Sequence
  RPE65 RNA guide
ucauggguuuaugccauucuc

SEQ ID NO: 9415 - RNA, 21 nt, Artificial Sequence
  RPE65 RNA guide
uccgccucauggguuuaugcc

SEQ ID NO: 9416 - RNA, 21 nt, Artificial Sequence
  RPE65 RNA guide
ugcaagcuccgccucaugggu

SEQ ID NO: 9417 - RNA, 21 nt, Artificial Sequence
  RPE65 RNA guide
uggcauaaacccaugaggcgg

SEQ ID NO: 9418 - RNA, 22 nt, Artificial Sequence
  RPE65 RNA guide
aagcuccgccucauggguuuau

SEQ ID NO: 9419 - RNA, 22 nt, Artificial Sequence
  RPE65 RNA guide
aauggcauaaacccaugaggcg

SEQ ID NO: 9420 - RNA, 22 nt, Artificial Sequence
  RPE65 RNA guide
agaauggcauaaacccaugagg

SEQ ID NO: 9421 - RNA, 22 nt, Artificial Sequence
  RPE65 RNA guide
agcuccgccucauggguuuaug

SEQ ID NO: 9422 - RNA, 22 nt, Artificial Sequence
  RPE65 RNA guide
aggagaauggcauaaacccaug

SEQ ID NO: 9423 - RNA, 22 nt, Artificial Sequence
  RPE65 RNA guide
aggcaggagaauggcauaaacc

SEQ ID NO: 9424 - RNA, 22 nt, Artificial Sequence
  RPE65 RNA guide
auaaacccaugaggcggagcuu

SEQ ID NO: 9425 - RNA, 22 nt, Artificial Sequence
  RPE65 RNA guide
auggcauaaacccaugaggcgg

SEQ ID NO: 9426 - RNA, 22 nt, Artificial Sequence
  RPE65 RNA guide
caagcuccgccucauggguuua

SEQ ID NO: 9427 - RNA, 22 nt, Artificial Sequence
  RPE65 RNA guide
caggagaauggcauaaacccau

SEQ ID NO: 9428 - RNA, 22 nt, Artificial Sequence
  RPE65 RNA guide
cauaaacccaugaggcggagcu

SEQ ID NO: 9429 - RNA, 22 nt, Artificial Sequence
  RPE65 RNA guide
cauggguuuaugccauucuccu

SEQ ID NO: 9430 - RNA, 22 nt, Artificial Sequence
  RPE65 RNA guide
ccgccucauggguuuaugccau

SEQ ID NO: 9431 - RNA, 22 nt, Artificial Sequence
  RPE65 RNA guide
ccucauggguuuaugccauucu

SEQ ID NO: 9432 - RNA, 22 nt, Artificial Sequence
  RPE65 RNA guide
cgccucauggguuuaugccauu

SEQ ID NO: 9433 - RNA, 22 nt, Artificial Sequence
  RPE65 RNA guide
cucauggguuuaugccauucuc

SEQ ID NO: 9434 - RNA, 22 nt, Artificial Sequence
  RPE65 RNA guide
cuccgccucauggguuuaugcc

SEQ ID NO: 9435 - RNA, 22 nt, Artificial Sequence
  RPE65 RNA guide
cugcaagcuccgccucaugggu

SEQ ID NO: 9436 - RNA, 22 nt, Artificial Sequence
  RPE65 RNA guide
gaauggcauaaacccaugaggc

SEQ ID NO: 9437 - RNA, 22 nt, Artificial Sequence
  RPE65 RNA guide
gagaauggcauaaacccaugag

SEQ ID NO: 9438 - RNA, 22 nt, Artificial Sequence
  RPE65 RNA guide
gaggcaggagaauggcauaaac

SEQ ID NO: 9439 - RNA, 22 nt, Artificial Sequence
  RPE65 RNA guide
gcaagcuccgccucauggguuu

SEQ ID NO: 9440 - RNA, 22 nt, Artificial Sequence
  RPE65 RNA guide
gcaggagaauggcauaaaccca

SEQ ID NO: 9441 - RNA, 22 nt, Artificial Sequence
  RPE65 RNA guide
gcauaaacccaugaggcggagc

SEQ ID NO: 9442 - RNA, 22 nt, Artificial Sequence
  RPE65 RNA guide
gccucauggguuuaugccauuc

SEQ ID NO: 9443 - RNA, 22 nt, Artificial Sequence
  RPE65 RNA guide
gcuccgccucauggguuuaugc

SEQ ID NO: 9444 - RNA, 22 nt, Artificial Sequence
  RPE65 RNA guide
ggagaauggcauaaacccauga

SEQ ID NO: 9445 - RNA, 22 nt, Artificial Sequence
  RPE65 RNA guide
ggcaggagaauggcauaaaccc

SEQ ID NO: 9446 - RNA, 22 nt, Artificial Sequence
  RPE65 RNA guide
ggcauaaacccaugaggcggag

SEQ ID NO: 9447 - RNA, 22 nt, Artificial Sequence
  RPE65 RNA guide
ucauggguuuaugccauucucc

SEQ ID NO: 9448 - RNA, 22 nt, Artificial Sequence
  RPE65 RNA guide
uccgccucauggguuuaugcca

SEQ ID NO: 9449 - RNA, 22 nt, Artificial Sequence
  RPE65 RNA guide
ugcaagcuccgccucauggguu

SEQ ID NO: 9450 - RNA, 22 nt, Artificial Sequence
  RPE65 RNA guide
uggcauaaacccaugaggcgga

SEQ ID NO: 9451 - RNA, 20 nt, Artificial Sequence
  RPE65 RNA guide
aaaaaaccccagguagguuu

SEQ ID NO: 9452 - RNA, 20 nt, Artificial Sequence
  RPE65 RNA guide
aaaaaccccagguagguuua

SEQ ID NO: 9453 - RNA, 20 nt, Artificial Sequence
  RPE65 RNA guide
aaaaccccagguagguuuau

SEQ ID NO: 9454 - RNA, 20 nt, Artificial Sequence
  RPE65 RNA guide
aaaccccagguagguuuauc

SEQ ID NO: 9455 - RNA, 20 nt, Artificial Sequence
  RPE65 RNA guide
aaaccuaccugggguuuuuu

SEQ ID NO: 9456 - RNA, 20 nt, Artificial Sequence
  RPE65 RNA guide
aaaggauaaaccuaccuggg

SEQ ID NO: 9457 - RNA, 20 nt, Artificial Sequence
  RPE65 RNA guide
aaccccagguagguuuaucc

SEQ ID NO: 9458 - RNA, 20 nt, Artificial Sequence
  RPE65 RNA guide
aaggauaaaccuaccugggg

SEQ ID NO: 9459 - RNA, 20 nt, Artificial Sequence
  RPE65 RNA guide
accccagguagguuuauccu

SEQ ID NO: 9460 - RNA, 20 nt, Artificial Sequence
  RPE65 RNA guide
aggauaaaccuaccuggggu

SEQ ID NO: 9461 - RNA, 20 nt, Artificial Sequence
  RPE65 RNA guide
auaaaccuaccugggguuuu

SEQ ID NO: 9462 - RNA, 20 nt, Artificial Sequence
  RPE65 RNA guide
caaaggauaaaccuaccugg

SEQ ID NO: 9463 - RNA, 20 nt, Artificial Sequence
  RPE65 RNA guide
cucaaaggauaaaccuaccu

SEQ ID NO: 9464 - RNA, 20 nt, Artificial Sequence
  RPE65 RNA guide
gauaaaccuaccugggguuu

SEQ ID NO: 9465 - RNA, 20 nt, Artificial Sequence
  RPE65 RNA guide
ggauaaaccuaccugggguu

SEQ ID NO: 9466 - RNA, 20 nt, Artificial Sequence
  RPE65 RNA guide
uaaaccuaccugggguuuuu

SEQ ID NO: 9467 - RNA, 20 nt, Artificial Sequence
  RPE65 RNA guide
ucaaaggauaaaccuaccug

SEQ ID NO: 9468 - RNA, 21 nt, Artificial Sequence
  RPE65 RNA guide
aaaaaaccccagguagguuua

SEQ ID NO: 9469 - RNA, 21 nt, Artificial Sequence
  RPE65 RNA guide
aaaaaccccagguagguuuau

SEQ ID NO: 9470 - RNA, 21 nt, Artificial Sequence
  RPE65 RNA guide
aaaaccccagguagguuuauc

SEQ ID NO: 9471 - RNA, 21 nt, Artificial Sequence
  RPE65 RNA guide
aaaccccagguagguuuaucc

SEQ ID NO: 9472 - RNA, 21 nt, Artificial Sequence
  RPE65 RNA guide
aaaggauaaaccuaccugggg

SEQ ID NO: 9473 - RNA, 21 nt, Artificial Sequence
  RPE65 RNA guide
aaccccagguagguuuauccu

SEQ ID NO: 9474 - RNA, 21 nt, Artificial Sequence
  RPE65 RNA guide
aaggauaaaccuaccuggggu

SEQ ID NO: 9475 - RNA, 21 nt, Artificial Sequence
  RPE65 RNA guide
accccagguagguuuauccuu

SEQ ID NO: 9476 - RNA, 21 nt, Artificial Sequence
  RPE65 RNA guide
aggauaaaccuaccugggguu

SEQ ID NO: 9477 - RNA, 21 nt, Artificial Sequence
  RPE65 RNA guide
auaaaccuaccugggguuuuu

SEQ ID NO: 9478 - RNA, 21 nt, Artificial Sequence
  RPE65 RNA guide
caaaggauaaaccuaccuggg

SEQ ID NO: 9479 - RNA, 21 nt, Artificial Sequence
  RPE65 RNA guide
cucaaaggauaaaccuaccug

SEQ ID NO: 9480 - RNA, 21 nt, Artificial Sequence
  RPE65 RNA guide
gauaaaccuaccugggguuuu

SEQ ID NO: 9481 - RNA, 21 nt, Artificial Sequence
  RPE65 RNA guide
ggauaaaccuaccugggguuu

SEQ ID NO: 9482 - RNA, 21 nt, Artificial Sequence
  RPE65 RNA guide
uaaaccuaccugggguuuuuu

SEQ ID NO: 9483 - RNA, 21 nt, Artificial Sequence
  RPE65 RNA guide
ucaaaggauaaaccuaccugg

SEQ ID NO: 9484 - RNA, 21 nt, Artificial Sequence
  RPE65 RNA guide
ucucaaaggauaaaccuaccu

SEQ ID NO: 9485 - RNA, 22 nt, Artificial Sequence
  RPE65 RNA guide
aaaaaaccccagguagguuuau

SEQ ID NO: 9486 - RNA, 22 nt, Artificial Sequence
  RPE65 RNA guide
aaaaaccccagguagguuuauc

SEQ ID NO: 9487 - RNA, 22 nt, Artificial Sequence
  RPE65 RNA guide
aaaaccccagguagguuuaucc

SEQ ID NO: 9488 - RNA, 22 nt, Artificial Sequence
  RPE65 RNA guide
aaaccccagguagguuuauccu

SEQ ID NO: 9489 - RNA, 22 nt, Artificial Sequence
  RPE65 RNA guide
aaaggauaaaccuaccuggggu

SEQ ID NO: 9490 - RNA, 22 nt, Artificial Sequence
  RPE65 RNA guide
aaccccagguagguuuauccuu

SEQ ID NO: 9491 - RNA, 22 nt, Artificial Sequence
  RPE65 RNA guide
aaggauaaaccuaccugggguu

SEQ ID NO: 9492 - RNA, 22 nt, Artificial Sequence
  RPE65 RNA guide
accccagguagguuuauccuuu

SEQ ID NO: 9493 - RNA, 22 nt, Artificial Sequence
  RPE65 RNA guide
aggauaaaccuaccugggguuu

SEQ ID NO: 9494 - RNA, 22 nt, Artificial Sequence
  RPE65 RNA guide
auaaaccuaccugggguuuuuu

SEQ ID NO: 9495 - RNA, 22 nt, Artificial Sequence
  RPE65 RNA guide
caaaggauaaaccuaccugggg

SEQ ID NO: 9496 - RNA, 22 nt, Artificial Sequence
  RPE65 RNA guide
cucaaaggauaaaccuaccugg

SEQ ID NO: 9497 - RNA, 22 nt, Artificial Sequence
  RPE65 RNA guide
gauaaaccuaccugggguuuuu

SEQ ID NO: 9498 - RNA, 22 nt, Artificial Sequence
  RPE65 RNA guide
ggauaaaccuaccugggguuuu

SEQ ID NO: 9499 - RNA, 22 nt, Artificial Sequence
  RPE65 RNA guide
ucaaaggauaaaccuaccuggg

SEQ ID NO: 9500 - RNA, 22 nt, Artificial Sequence
  RPE65 RNA guide
ucucaaaggauaaaccuaccug

SEQ ID NO: 9501 - RNA, 22 nt, Artificial Sequence
  RPE65 RNA guide
uucucaaaggauaaaccuaccu

SEQ ID NO: 9502 - RNA, 20 nt, Artificial Sequence
  RPE65 RNA guide
aaaaaacccagguagguuua

SEQ ID NO: 9503 - RNA, 20 nt, Artificial Sequence
  RPE65 RNA guide
aaaaacccagguagguuuau

SEQ ID NO: 9504 - RNA, 20 nt, Artificial Sequence
  RPE65 RNA guide
aaaacccagguagguuuauc

SEQ ID NO: 9505 - RNA, 20 nt, Artificial Sequence
  RPE65 RNA guide
aaacccagguagguuuaucc

SEQ ID NO: 9506 - RNA, 20 nt, Artificial Sequence
  RPE65 RNA guide
aacccagguagguuuauccu

SEQ ID NO: 9507 - RNA, 20 nt, Artificial Sequence
  RPE65 RNA guide
aaggauaaaccuaccugggu

SEQ ID NO: 9508 - RNA, 20 nt, Artificial Sequence
  RPE65 RNA guide
aggauaaaccuaccuggguu

SEQ ID NO: 9509 - RNA, 20 nt, Artificial Sequence
  RPE65 RNA guide
auaaaccuaccuggguuuuu

SEQ ID NO: 9510 - RNA, 20 nt, Artificial Sequence
  RPE65 RNA guide
gauaaaccuaccuggguuuu

SEQ ID NO: 9511 - RNA, 20 nt, Artificial Sequence
  RPE65 RNA guide
ggauaaaccuaccuggguuu

SEQ ID NO: 9512 - RNA, 20 nt, Artificial Sequence
  RPE65 RNA guide
uaaaccuaccuggguuuuuu

SEQ ID NO: 9513 - RNA, 21 nt, Artificial Sequence
  RPE65 RNA guide
aaaaaacccagguagguuuau

SEQ ID NO: 9514 - RNA, 21 nt, Artificial Sequence
  RPE65 RNA guide
aaaaacccagguagguuuauc

SEQ ID NO: 9515 - RNA, 21 nt, Artificial Sequence
  RPE65 RNA guide
aaaacccagguagguuuaucc

SEQ ID NO: 9516 - RNA, 21 nt, Artificial Sequence
  RPE65 RNA guide
aaacccagguagguuuauccu

SEQ ID NO: 9517 - RNA, 21 nt, Artificial Sequence
  RPE65 RNA guide
aaaggauaaaccuaccugggu

SEQ ID NO: 9518 - RNA, 21 nt, Artificial Sequence
  RPE65 RNA guide
aacccagguagguuuauccuu

SEQ ID NO: 9519 - RNA, 21 nt, Artificial Sequence
  RPE65 RNA guide
aaggauaaaccuaccuggguu

SEQ ID NO: 9520 - RNA, 21 nt, Artificial Sequence
  RPE65 RNA guide
aggauaaaccuaccuggguuu

SEQ ID NO: 9521 - RNA, 21 nt, Artificial Sequence
  RPE65 RNA guide
auaaaccuaccuggguuuuuu

SEQ ID NO: 9522 - RNA, 21 nt, Artificial Sequence
  RPE65 RNA guide
gauaaaccuaccuggguuuuu

SEQ ID NO: 9523 - RNA, 21 nt, Artificial Sequence
  RPE65 RNA guide
ggauaaaccuaccuggguuuu

SEQ ID NO: 9524 - RNA, 22 nt, Artificial Sequence
  RPE65 RNA guide
aaaaaacccagguagguuuauc

SEQ ID NO: 9525 - RNA, 22 nt, Artificial Sequence
  RPE65 RNA guide
aaaaacccagguagguuuaucc

SEQ ID NO: 9526 - RNA, 22 nt, Artificial Sequence
  RPE65 RNA guide
aaaacccagguagguuuauccu

SEQ ID NO: 9527 - RNA, 22 nt, Artificial Sequence
  RPE65 RNA guide
aaacccagguagguuuauccuu

SEQ ID NO: 9528 - RNA, 22 nt, Artificial Sequence
  RPE65 RNA guide
aaaggauaaaccuaccuggguu

SEQ ID NO: 9529 - RNA, 22 nt, Artificial Sequence
  RPE65 RNA guide
aacccagguagguuuauccuuu

SEQ ID NO: 9530 - RNA, 22 nt, Artificial Sequence
  RPE65 RNA guide
aaggauaaaccuaccuggguuu

SEQ ID NO: 9531 - RNA, 22 nt, Artificial Sequence
  RPE65 RNA guide
aggauaaaccuaccuggguuuu

SEQ ID NO: 9532 - RNA, 22 nt, Artificial Sequence
  RPE65 RNA guide
caaaggauaaaccuaccugggu

SEQ ID NO: 9533 - RNA, 22 nt, Artificial Sequence
  RPE65 RNA guide
gauaaaccuaccuggguuuuuu

SEQ ID NO: 9534 - RNA, 22 nt, Artificial Sequence
  RPE65 RNA guide
ggauaaaccuaccuggguuuuu

SEQ ID NO: 9535 - RNA, 20 nt, Artificial Sequence
  RPE65 RNA guide
aaauguccuauaaaugucug

SEQ ID NO: 9536 - RNA, 20 nt, Artificial Sequence
  RPE65 RNA guide
aaaugucuguuccauuggug

SEQ ID NO: 9537 - RNA, 20 nt, Artificial Sequence
  RPE65 RNA guide
aacagacauuuauaggacau

SEQ ID NO: 9538 - RNA, 20 nt, Artificial Sequence
  RPE65 RNA guide
aauggaacagacauuuauag

SEQ ID NO: 9539 - RNA, 20 nt, Artificial Sequence
  RPE65 RNA guide
aauguccuauaaaugucugu

SEQ ID NO: 9540 - RNA, 20 nt, Artificial Sequence
  RPE65 RNA guide
aaugucuguuccauuggugu

SEQ ID NO: 9541 - RNA, 20 nt, Artificial Sequence
  RPE65 RNA guide
acaccaauggaacagacauu

SEQ ID NO: 9542 - RNA, 20 nt, Artificial Sequence
  RPE65 RNA guide
acagacauuuauaggacauu

SEQ ID NO: 9543 - RNA, 20 nt, Artificial Sequence
  RPE65 RNA guide
accaauggaacagacauuua

SEQ ID NO: 9544 - RNA, 20 nt, Artificial Sequence
  RPE65 RNA guide
agacaccaauggaacagaca

SEQ ID NO: 9545 - RNA, 20 nt, Artificial Sequence
  RPE65 RNA guide
auaaaugucuguuccauugg

SEQ ID NO: 9546 - RNA, 20 nt, Artificial Sequence
  RPE65 RNA guide
auggaacagacauuuauagg

SEQ ID NO: 9547 - RNA, 20 nt, Artificial Sequence
  RPE65 RNA guide
auguccuauaaaugucuguu

SEQ ID NO: 9548 - RNA, 20 nt, Artificial Sequence
  RPE65 RNA guide
augucuguuccauugguguc

SEQ ID NO: 9549 - RNA, 20 nt, Artificial Sequence
  RPE65 RNA guide
auucagacaccaauggaaca

SEQ ID NO: 9550 - RNA, 20 nt, Artificial Sequence
  RPE65 RNA guide
auuuauucagacaccaaugg

SEQ ID NO: 9551 - RNA, 20 nt, Artificial Sequence
  RPE65 RNA guide
caauggaacagacauuuaua

SEQ ID NO: 9552 - RNA, 20 nt, Artificial Sequence
  RPE65 RNA guide
caccaauggaacagacauuu

SEQ ID NO: 9553 - RNA, 20 nt, Artificial Sequence
  RPE65 RNA guide
cagacaccaauggaacagac

SEQ ID NO: 9554 - RNA, 20 nt, Artificial Sequence
  RPE65 RNA guide
cauuuauucagacaccaaug

SEQ ID NO: 9555 - RNA, 20 nt, Artificial Sequence
  RPE65 RNA guide
ccaauggaacagacauuuau

SEQ ID NO: 9556 - RNA, 20 nt, Artificial Sequence
  RPE65 RNA guide
ccuauaaaugucuguuccau

SEQ ID NO: 9557 - RNA, 20 nt, Artificial Sequence
  RPE65 RNA guide
cuauaaaugucuguuccauu

SEQ ID NO: 9558 - RNA, 20 nt, Artificial Sequence
  RPE65 RNA guide
cuguuccauuggugucugaa

SEQ ID NO: 9559 - RNA, 20 nt, Artificial Sequence
  RPE65 RNA guide
gaacagacauuuauaggaca

SEQ ID NO: 9560 - RNA, 20 nt, Artificial Sequence
  RPE65 RNA guide
gacaccaauggaacagacau

SEQ ID NO: 9561 - RNA, 20 nt, Artificial Sequence
  RPE65 RNA guide
ggaacagacauuuauaggac

SEQ ID NO: 9562 - RNA, 20 nt, Artificial Sequence
  RPE65 RNA guide
guaaauguccuauaaauguc

SEQ ID NO: 9563 - RNA, 20 nt, Artificial Sequence
  RPE65 RNA guide
guccuauaaaugucuguucc

SEQ ID NO: 9564 - RNA, 20 nt, Artificial Sequence
  RPE65 RNA guide
gucuguuccauuggugucug

SEQ ID NO: 9565 - RNA, 20 nt, Artificial Sequence
  RPE65 RNA guide
uaaaugucuguuccauuggu

SEQ ID NO: 9566 - RNA, 20 nt, Artificial Sequence
  RPE65 RNA guide
uauaaaugucuguuccauug

SEQ ID NO: 9567 - RNA, 20 nt, Artificial Sequence
  RPE65 RNA guide
uauucagacaccaauggaac

SEQ ID NO: 9568 - RNA, 20 nt, Artificial Sequence
  RPE65 RNA guide
ucagacaccaauggaacaga

SEQ ID NO: 9569 - RNA, 20 nt, Artificial Sequence
  RPE65 RNA guide
uccuauaaaugucuguucca

SEQ ID NO: 9570 - RNA, 20 nt, Artificial Sequence
  RPE65 RNA guide
ucuguuccauuggugucuga

SEQ ID NO: 9571 - RNA, 20 nt, Artificial Sequence
  RPE65 RNA guide
uggaacagacauuuauagga

SEQ ID NO: 9572 - RNA, 20 nt, Artificial Sequence
  RPE65 RNA guide
uguccuauaaaugucuguuc

SEQ ID NO: 9573 - RNA, 20 nt, Artificial Sequence
  RPE65 RNA guide
ugucuguuccauuggugucu

SEQ ID NO: 9574 - RNA, 20 nt, Artificial Sequence
  RPE65 RNA guide
uguuccauuggugucugaau

SEQ ID NO: 9575 - RNA, 20 nt, Artificial Sequence
  RPE65 RNA guide
uuauucagacaccaauggaa

SEQ ID NO: 9576 - RNA, 20 nt, Artificial Sequence
  RPE65 RNA guide
uucagacaccaauggaacag

SEQ ID NO: 9577 - RNA, 20 nt, Artificial Sequence
  RPE65 RNA guide
uuuauucagacaccaaugga

SEQ ID NO: 9578 - RNA, 21 nt, Artificial Sequence
  RPE65 RNA guide
aaaugucuguuccauuggugu

SEQ ID NO: 9579 - RNA, 21 nt, Artificial Sequence
  RPE65 RNA guide
aauggaacagacauuuauagg

SEQ ID NO: 9580 - RNA, 21 nt, Artificial Sequence
  RPE65 RNA guide
aaugucuguuccauugguguc

SEQ ID NO: 9581 - RNA, 21 nt, Artificial Sequence
  RPE65 RNA guide
acaccaauggaacagacauuu

SEQ ID NO: 9582 - RNA, 21 nt, Artificial Sequence
  RPE65 RNA guide
accaauggaacagacauuuau

SEQ ID NO: 9583 - RNA, 21 nt, Artificial Sequence
  RPE65 RNA guide
agacaccaauggaacagacau

SEQ ID NO: 9584 - RNA, 21 nt, Artificial Sequence
  RPE65 RNA guide
auaaaugucuguuccauuggu

SEQ ID NO: 9585 - RNA, 21 nt, Artificial Sequence
  RPE65 RNA guide
auggaacagacauuuauagga

SEQ ID NO: 9586 - RNA, 21 nt, Artificial Sequence
  RPE65 RNA guide
auguccuauaaaugucuguuc

SEQ ID NO: 9587 - RNA, 21 nt, Artificial Sequence
  RPE65 RNA guide
augucuguuccauuggugucu

SEQ ID NO: 9588 - RNA, 21 nt, Artificial Sequence
  RPE65 RNA guide
auucagacaccaauggaacag

SEQ ID NO: 9589 - RNA, 21 nt, Artificial Sequence
  RPE65 RNA guide
auuuauucagacaccaaugga

SEQ ID NO: 9590 - RNA, 21 nt, Artificial Sequence
  RPE65 RNA guide
caauggaacagacauuuauag

SEQ ID NO: 9591 - RNA, 21 nt, Artificial Sequence
  RPE65 RNA guide
caccaauggaacagacauuua

SEQ ID NO: 9592 - RNA, 21 nt, Artificial Sequence
  RPE65 RNA guide
cagacaccaauggaacagaca

SEQ ID NO: 9593 - RNA, 21 nt, Artificial Sequence
  RPE65 RNA guide
cauuuauucagacaccaaugg

SEQ ID NO: 9594 - RNA, 21 nt, Artificial Sequence
  RPE65 RNA guide
ccaauggaacagacauuuaua

SEQ ID NO: 9595 - RNA, 21 nt, Artificial Sequence
  RPE65 RNA guide
ccuauaaaugucuguuccauu

SEQ ID NO: 9596 - RNA, 21 nt, Artificial Sequence
  RPE65 RNA guide
cuauaaaugucuguuccauug

SEQ ID NO: 9597 - RNA, 21 nt, Artificial Sequence
  RPE65 RNA guide
cuguuccauuggugucugaau

SEQ ID NO: 9598 - RNA, 21 nt, Artificial Sequence
  RPE65 RNA guide
gaacagacauuuauaggacau

SEQ ID NO: 9599 - RNA, 21 nt, Artificial Sequence
  RPE65 RNA guide
gacaccaauggaacagacauu

SEQ ID NO: 9600 - RNA, 21 nt, Artificial Sequence
  RPE65 RNA guide
ggaacagacauuuauaggaca

SEQ ID NO: 9601 - RNA, 21 nt, Artificial Sequence
  RPE65 RNA guide
guccuauaaaugucuguucca

SEQ ID NO: 9602 - RNA, 21 nt, Artificial Sequence
  RPE65 RNA guide
gucuguuccauuggugucuga

SEQ ID NO: 9603 - RNA, 21 nt, Artificial Sequence
  RPE65 RNA guide
uaaaugucuguuccauuggug

SEQ ID NO: 9604 - RNA, 21 nt, Artificial Sequence
  RPE65 RNA guide
uauaaaugucuguuccauugg

SEQ ID NO: 9605 - RNA, 21 nt, Artificial Sequence
  RPE65 RNA guide
uauucagacaccaauggaaca

SEQ ID NO: 9606 - RNA, 21 nt, Artificial Sequence
  RPE65 RNA guide
ucagacaccaauggaacagac

SEQ ID NO: 9607 - RNA, 21 nt, Artificial Sequence
  RPE65 RNA guide
ucauuuauucagacaccaaug

SEQ ID NO: 9608 - RNA, 21 nt, Artificial Sequence
  RPE65 RNA guide
uccuauaaaugucuguuccau

SEQ ID NO: 9609 - RNA, 21 nt, Artificial Sequence
  RPE65 RNA guide
ucuguuccauuggugucugaa

SEQ ID NO: 9610 - RNA, 21 nt, Artificial Sequence
  RPE65 RNA guide
uggaacagacauuuauaggac

SEQ ID NO: 9611 - RNA, 21 nt, Artificial Sequence
  RPE65 RNA guide
uguccuauaaaugucuguucc

SEQ ID NO: 9612 - RNA, 21 nt, Artificial Sequence
  RPE65 RNA guide
ugucuguuccauuggugucug

SEQ ID NO: 9613 - RNA, 21 nt, Artificial Sequence
  RPE65 RNA guide
uguuccauuggugucugaaua

SEQ ID NO: 9614 - RNA, 21 nt, Artificial Sequence
  RPE65 RNA guide
uuauucagacaccaauggaac

SEQ ID NO: 9615 - RNA, 21 nt, Artificial Sequence
  RPE65 RNA guide
uucagacaccaauggaacaga

SEQ ID NO: 9616 - RNA, 21 nt, Artificial Sequence
  RPE65 RNA guide
uuuauucagacaccaauggaa

SEQ ID NO: 9617 - RNA, 22 nt, Artificial Sequence
  RPE65 RNA guide
aaaugucuguuccauugguguc

SEQ ID NO: 9618 - RNA, 22 nt, Artificial Sequence
  RPE65 RNA guide
aauggaacagacauuuauagga

SEQ ID NO: 9619 - RNA, 22 nt, Artificial Sequence
  RPE65 RNA guide
aauguccuauaaaugucuguuc

SEQ ID NO: 9620 - RNA, 22 nt, Artificial Sequence
  RPE65 RNA guide
aaugucuguuccauuggugucu

SEQ ID NO: 9621 - RNA, 22 nt, Artificial Sequence
  RPE65 RNA guide
acaccaauggaacagacauuua

SEQ ID NO: 9622 - RNA, 22 nt, Artificial Sequence
  RPE65 RNA guide
accaauggaacagacauuuaua

SEQ ID NO: 9623 - RNA, 22 nt, Artificial Sequence
  RPE65 RNA guide
agacaccaauggaacagacauu

SEQ ID NO: 9624 - RNA, 22 nt, Artificial Sequence
  RPE65 RNA guide
auaaaugucuguuccauuggug

SEQ ID NO: 9625 - RNA, 22 nt, Artificial Sequence
  RPE65 RNA guide
auggaacagacauuuauaggac

SEQ ID NO: 9626 - RNA, 22 nt, Artificial Sequence
  RPE65 RNA guide
auguccuauaaaugucuguucc

SEQ ID NO: 9627 - RNA, 22 nt, Artificial Sequence
  RPE65 RNA guide
augucuguuccauuggugucug

SEQ ID NO: 9628 - RNA, 22 nt, Artificial Sequence
  RPE65 RNA guide
auucagacaccaauggaacaga

SEQ ID NO: 9629 - RNA, 22 nt, Artificial Sequence
  RPE65 RNA guide
auuuauucagacaccaauggaa

SEQ ID NO: 9630 - RNA, 22 nt, Artificial Sequence
  RPE65 RNA guide
caauggaacagacauuuauagg

SEQ ID NO: 9631 - RNA, 22 nt, Artificial Sequence
  RPE65 RNA guide
caccaauggaacagacauuuau

SEQ ID NO: 9632 - RNA, 22 nt, Artificial Sequence
  RPE65 RNA guide
cagacaccaauggaacagacau

SEQ ID NO: 9633 - RNA, 22 nt, Artificial Sequence
  RPE65 RNA guide
cauuuauucagacaccaaugga

SEQ ID NO: 9634 - RNA, 22 nt, Artificial Sequence
  RPE65 RNA guide
ccaauggaacagacauuuauag

SEQ ID NO: 9635 - RNA, 22 nt, Artificial Sequence
  RPE65 RNA guide
ccuauaaaugucuguuccauug

SEQ ID NO: 9636 - RNA, 22 nt, Artificial Sequence
  RPE65 RNA guide
cuauaaaugucuguuccauugg

SEQ ID NO: 9637 - RNA, 22 nt, Artificial Sequence
  RPE65 RNA guide
cuguuccauuggugucugaaua

SEQ ID NO: 9638 - RNA, 22 nt, Artificial Sequence
  RPE65 RNA guide
gaacagacauuuauaggacauu

SEQ ID NO: 9639 - RNA, 22 nt, Artificial Sequence
  RPE65 RNA guide
gacaccaauggaacagacauuu

SEQ ID NO: 9640 - RNA, 22 nt, Artificial Sequence
  RPE65 RNA guide
ggaacagacauuuauaggacau

SEQ ID NO: 9641 - RNA, 22 nt, Artificial Sequence
  RPE65 RNA guide
guaaauguccuauaaaugucug

SEQ ID NO: 9642 - RNA, 22 nt, Artificial Sequence
  RPE65 RNA guide
guccuauaaaugucuguuccau

SEQ ID NO: 9643 - RNA, 22 nt, Artificial Sequence
  RPE65 RNA guide
gucuguuccauuggugucugaa

SEQ ID NO: 9644 - RNA, 22 nt, Artificial Sequence
  RPE65 RNA guide
uaaaugucuguuccauuggugu

SEQ ID NO: 9645 - RNA, 22 nt, Artificial Sequence
  RPE65 RNA guide
uauaaaugucuguuccauuggu

SEQ ID NO: 9646 - RNA, 22 nt, Artificial Sequence
  RPE65 RNA guide
uauucagacaccaauggaacag

SEQ ID NO: 9647 - RNA, 22 nt, Artificial Sequence
  RPE65 RNA guide
ucagacaccaauggaacagaca

SEQ ID NO: 9648 - RNA, 22 nt, Artificial Sequence
  RPE65 RNA guide
ucauuuauucagacaccaaugg

SEQ ID NO: 9649 - RNA, 22 nt, Artificial Sequence
  RPE65 RNA guide
uccuauaaaugucuguuccauu

SEQ ID NO: 9650 - RNA, 22 nt, Artificial Sequence
  RPE65 RNA guide
ucuguuccauuggugucugaau

SEQ ID NO: 9651 - RNA, 22 nt, Artificial Sequence
  RPE65 RNA guide
uggaacagacauuuauaggaca

SEQ ID NO: 9652 - RNA, 22 nt, Artificial Sequence
  RPE65 RNA guide
uguccuauaaaugucuguucca

SEQ ID NO: 9653 - RNA, 22 nt, Artificial Sequence
  RPE65 RNA guide
ugucuguuccauuggugucuga

SEQ ID NO: 9654 - RNA, 22 nt, Artificial Sequence
  RPE65 RNA guide
uguuccauuggugucugaauaa

SEQ ID NO: 9655 - RNA, 22 nt, Artificial Sequence
  RPE65 RNA guide
uuauucagacaccaauggaaca

SEQ ID NO: 9656 - RNA, 22 nt, Artificial Sequence
  RPE65 RNA guide
uucagacaccaauggaacagac

SEQ ID NO: 9657 - RNA, 22 nt, Artificial Sequence
  RPE65 RNA guide
uucauuuauucagacaccaaug

SEQ ID NO: 9658 - RNA, 22 nt, Artificial Sequence
  RPE65 RNA guide
uuuauucagacaccaauggaac

SEQ ID NO: 9659 - RNA, 20 nt, Artificial Sequence
  RPE65 RNA guide
aaaugucuauuccauuggug

SEQ ID NO: 9660 - RNA, 20 nt, Artificial Sequence
  RPE65 RNA guide
aaugucuauuccauuggugu

SEQ ID NO: 9661 - RNA, 20 nt, Artificial Sequence
  RPE65 RNA guide
acaccaauggaauagacauu

SEQ ID NO: 9662 - RNA, 20 nt, Artificial Sequence
  RPE65 RNA guide
accaauggaauagacauuua

SEQ ID NO: 9663 - RNA, 20 nt, Artificial Sequence
  RPE65 RNA guide
agacaccaauggaauagaca

SEQ ID NO: 9664 - RNA, 20 nt, Artificial Sequence
  RPE65 RNA guide
auaaaugucuauuccauugg

SEQ ID NO: 9665 - RNA, 20 nt, Artificial Sequence
  RPE65 RNA guide
auggaauagacauuuauagg

SEQ ID NO: 9666 - RNA, 20 nt, Artificial Sequence
  RPE65 RNA guide
augucuauuccauugguguc

SEQ ID NO: 9667 - RNA, 20 nt, Artificial Sequence
  RPE65 RNA guide
auucagacaccaauggaaua

SEQ ID NO: 9668 - RNA, 20 nt, Artificial Sequence
  RPE65 RNA guide
caccaauggaauagacauuu

SEQ ID NO: 9669 - RNA, 20 nt, Artificial Sequence
  RPE65 RNA guide
cagacaccaauggaauagac

SEQ ID NO: 9670 - RNA, 20 nt, Artificial Sequence
  RPE65 RNA guide
ccaauggaauagacauuuau

SEQ ID NO: 9671 - RNA, 20 nt, Artificial Sequence
  RPE65 RNA guide
ccuauaaaugucuauuccau

SEQ ID NO: 9672 - RNA, 20 nt, Artificial Sequence
  RPE65 RNA guide
cuauuccauuggugucugaa

SEQ ID NO: 9673 - RNA, 20 nt, Artificial Sequence
  RPE65 RNA guide
gaauagacauuuauaggaca

SEQ ID NO: 9674 - RNA, 20 nt, Artificial Sequence
  RPE65 RNA guide
gacaccaauggaauagacau

SEQ ID NO: 9675 - RNA, 20 nt, Artificial Sequence
  RPE65 RNA guide
ggaauagacauuuauaggac

SEQ ID NO: 9676 - RNA, 20 nt, Artificial Sequence
  RPE65 RNA guide
guccuauaaaugucuauucc

SEQ ID NO: 9677 - RNA, 20 nt, Artificial Sequence
  RPE65 RNA guide
gucuauuccauuggugucug

SEQ ID NO: 9678 - RNA, 20 nt, Artificial Sequence
  RPE65 RNA guide
uaaaugucuauuccauuggu

SEQ ID NO: 9679 - RNA, 20 nt, Artificial Sequence
  RPE65 RNA guide
uauucagacaccaauggaau

SEQ ID NO: 9680 - RNA, 20 nt, Artificial Sequence
  RPE65 RNA guide
uauuccauuggugucugaau

SEQ ID NO: 9681 - RNA, 20 nt, Artificial Sequence
  RPE65 RNA guide
ucagacaccaauggaauaga

SEQ ID NO: 9682 - RNA, 20 nt, Artificial Sequence
  RPE65 RNA guide
uccuauaaaugucuauucca

SEQ ID NO: 9683 - RNA, 20 nt, Artificial Sequence
  RPE65 RNA guide
ucuauuccauuggugucuga

SEQ ID NO: 9684 - RNA, 20 nt, Artificial Sequence
  RPE65 RNA guide
uggaauagacauuuauagga

SEQ ID NO: 9685 - RNA, 20 nt, Artificial Sequence
  RPE65 RNA guide
uguccuauaaaugucuauuc

SEQ ID NO: 9686 - RNA, 20 nt, Artificial Sequence
  RPE65 RNA guide
ugucuauuccauuggugucu

SEQ ID NO: 9687 - RNA, 20 nt, Artificial Sequence
  RPE65 RNA guide
uucagacaccaauggaauag

SEQ ID NO: 9688 - RNA, 21 nt, Artificial Sequence
  RPE65 RNA guide
aaaugucuauuccauuggugu

SEQ ID NO: 9689 - RNA, 21 nt, Artificial Sequence
  RPE65 RNA guide
aaugucuauuccauugguguc

SEQ ID NO: 9690 - RNA, 21 nt, Artificial Sequence
  RPE65 RNA guide
acaccaauggaauagacauuu

SEQ ID NO: 9691 - RNA, 21 nt, Artificial Sequence
  RPE65 RNA guide
agacaccaauggaauagacau

SEQ ID NO: 9692 - RNA, 21 nt, Artificial Sequence
  RPE65 RNA guide
augucuauuccauuggugucu

SEQ ID NO: 9693 - RNA, 21 nt, Artificial Sequence
  RPE65 RNA guide
auucagacaccaauggaauag

SEQ ID NO: 9694 - RNA, 21 nt, Artificial Sequence
  RPE65 RNA guide
caccaauggaauagacauuua

SEQ ID NO: 9695 - RNA, 21 nt, Artificial Sequence
  RPE65 RNA guide
cagacaccaauggaauagaca

SEQ ID NO: 9696 - RNA, 21 nt, Artificial Sequence
  RPE65 RNA guide
cuauuccauuggugucugaau

SEQ ID NO: 9697 - RNA, 21 nt, Artificial Sequence
  RPE65 RNA guide
gacaccaauggaauagacauu

SEQ ID NO: 9698 - RNA, 21 nt, Artificial Sequence
  RPE65 RNA guide
ggaauagacauuuauaggaca

SEQ ID NO: 9699 - RNA, 21 nt, Artificial Sequence
  RPE65 RNA guide
guccuauaaaugucuauucca

SEQ ID NO: 9700 - RNA, 21 nt, Artificial Sequence
  RPE65 RNA guide
gucuauuccauuggugucuga

SEQ ID NO: 9701 - RNA, 21 nt, Artificial Sequence
  RPE65 RNA guide
uaaaugucuauuccauuggug

SEQ ID NO: 9702 - RNA, 21 nt, Artificial Sequence
  RPE65 RNA guide
uauucagacaccaauggaaua

SEQ ID NO: 9703 - RNA, 21 nt, Artificial Sequence
  RPE65 RNA guide
uauuccauuggugucugaaua

SEQ ID NO: 9704 - RNA, 21 nt, Artificial Sequence
  RPE65 RNA guide
ucagacaccaauggaauagac

SEQ ID NO: 9705 - RNA, 21 nt, Artificial Sequence
  RPE65 RNA guide
ucuauuccauuggugucugaa

SEQ ID NO: 9706 - RNA, 21 nt, Artificial Sequence
  RPE65 RNA guide
uggaauagacauuuauaggac

SEQ ID NO: 9707 - RNA, 21 nt, Artificial Sequence
  RPE65 RNA guide
uguccuauaaaugucuauucc

SEQ ID NO: 9708 - RNA, 21 nt, Artificial Sequence
  RPE65 RNA guide
ugucuauuccauuggugucug

SEQ ID NO: 9709 - RNA, 21 nt, Artificial Sequence
  RPE65 RNA guide
uuauucagacaccaauggaau

SEQ ID NO: 9710 - RNA, 21 nt, Artificial Sequence
  RPE65 RNA guide
uucagacaccaauggaauaga

SEQ ID NO: 9711 - RNA, 22 nt, Artificial Sequence
  RPE65 RNA guide
aaaugucuauuccauugguguc

SEQ ID NO: 9712 - RNA, 22 nt, Artificial Sequence
  RPE65 RNA guide
aaugucuauuccauuggugucu

SEQ ID NO: 9713 - RNA, 22 nt, Artificial Sequence
  RPE65 RNA guide
acaccaauggaauagacauuua

SEQ ID NO: 9714 - RNA, 22 nt, Artificial Sequence
  RPE65 RNA guide
agacaccaauggaauagacauu

SEQ ID NO: 9715 - RNA, 22 nt, Artificial Sequence
  RPE65 RNA guide
auaaaugucuauuccauuggug

SEQ ID NO: 9716 - RNA, 22 nt, Artificial Sequence
  RPE65 RNA guide
auggaauagacauuuauaggac

SEQ ID NO: 9717 - RNA, 22 nt, Artificial Sequence
  RPE65 RNA guide
auguccuauaaaugucuauucc

SEQ ID NO: 9718 - RNA, 22 nt, Artificial Sequence
  RPE65 RNA guide
augucuauuccauuggugucug

SEQ ID NO: 9719 - RNA, 22 nt, Artificial Sequence
  RPE65 RNA guide
auucagacaccaauggaauaga

SEQ ID NO: 9720 - RNA, 22 nt, Artificial Sequence
  RPE65 RNA guide
caauggaauagacauuuauagg

SEQ ID NO: 9721 - RNA, 22 nt, Artificial Sequence
  RPE65 RNA guide
caccaauggaauagacauuuau

SEQ ID NO: 9722 - RNA, 22 nt, Artificial Sequence
  RPE65 RNA guide
cagacaccaauggaauagacau

SEQ ID NO: 9723 - RNA, 22 nt, Artificial Sequence
  RPE65 RNA guide
ccaauggaauagacauuuauag

SEQ ID NO: 9724 - RNA, 22 nt, Artificial Sequence
  RPE65 RNA guide
ccuauaaaugucuauuccauug

SEQ ID NO: 9725 - RNA, 22 nt, Artificial Sequence
  RPE65 RNA guide
cuauaaaugucuauuccauugg

SEQ ID NO: 9726 - RNA, 22 nt, Artificial Sequence
  RPE65 RNA guide
cuauuccauuggugucugaaua

SEQ ID NO: 9727 - RNA, 22 nt, Artificial Sequence
  RPE65 RNA guide
gacaccaauggaauagacauuu

SEQ ID NO: 9728 - RNA, 22 nt, Artificial Sequence
  RPE65 RNA guide
ggaauagacauuuauaggacau

SEQ ID NO: 9729 - RNA, 22 nt, Artificial Sequence
  RPE65 RNA guide
guccuauaaaugucuauuccau

SEQ ID NO: 9730 - RNA, 22 nt, Artificial Sequence
  RPE65 RNA guide
gucuauuccauuggugucugaa

SEQ ID NO: 9731 - RNA, 22 nt, Artificial Sequence
  RPE65 RNA guide
uaaaugucuauuccauuggugu

SEQ ID NO: 9732 - RNA, 22 nt, Artificial Sequence
  RPE65 RNA guide
uauucagacaccaauggaauag

SEQ ID NO: 9733 - RNA, 22 nt, Artificial Sequence
  RPE65 RNA guide
uauuccauuggugucugaauaa

SEQ ID NO: 9734 - RNA, 22 nt, Artificial Sequence
  RPE65 RNA guide
ucagacaccaauggaauagaca

SEQ ID NO: 9735 - RNA, 22 nt, Artificial Sequence
  RPE65 RNA guide
ucuauuccauuggugucugaau

SEQ ID NO: 9736 - RNA, 22 nt, Artificial Sequence
  RPE65 RNA guide
uggaauagacauuuauaggaca

SEQ ID NO: 9737 - RNA, 22 nt, Artificial Sequence
  RPE65 RNA guide
uguccuauaaaugucuauucca

SEQ ID NO: 9738 - RNA, 22 nt, Artificial Sequence
  RPE65 RNA guide
ugucuauuccauuggugucuga

SEQ ID NO: 9739 - RNA, 22 nt, Artificial Sequence
  RPE65 RNA guide
uuauucagacaccaauggaaua

SEQ ID NO: 9740 - RNA, 22 nt, Artificial Sequence
  RPE65 RNA guide
uucagacaccaauggaauagac

SEQ ID NO: 9741 - RNA, 22 nt, Artificial Sequence
  RPE65 RNA guide
uuuauucagacaccaauggaau

SEQ ID NO: 9742 - RNA, 20 nt, Artificial Sequence
  RPE65 RNA guide
aaccauugacauuaaaagag

SEQ ID NO: 9743 - RNA, 20 nt, Artificial Sequence
  RPE65 RNA guide
aaguucacuguaaccauuga

SEQ ID NO: 9744 - RNA, 20 nt, Artificial Sequence
  RPE65 RNA guide
aaugguuacagugaacuuaa

SEQ ID NO: 9745 - RNA, 20 nt, Artificial Sequence
  RPE65 RNA guide
aaugucaaugguuacaguga

SEQ ID NO: 9746 - RNA, 20 nt, Artificial Sequence
  RPE65 RNA guide
acaugaccucucuuuuaaug

SEQ ID NO: 9747 - RNA, 20 nt, Artificial Sequence
  RPE65 RNA guide
accauugacauuaaaagaga

SEQ ID NO: 9748 - RNA, 20 nt, Artificial Sequence
  RPE65 RNA guide
accucucuuuuaaugucaau

SEQ ID NO: 9749 - RNA, 20 nt, Artificial Sequence
  RPE65 RNA guide
acuguaaccauugacauuaa

SEQ ID NO: 9750 - RNA, 20 nt, Artificial Sequence
  RPE65 RNA guide
aggauuaaguucacuguaac

SEQ ID NO: 9751 - RNA, 20 nt, Artificial Sequence
  RPE65 RNA guide
aguucacuguaaccauugac

SEQ ID NO: 9752 - RNA, 20 nt, Artificial Sequence
  RPE65 RNA guide
augaccucucuuuuaauguc

SEQ ID NO: 9753 - RNA, 20 nt, Artificial Sequence
  RPE65 RNA guide
augucaaugguuacagugaa

SEQ ID NO: 9754 - RNA, 20 nt, Artificial Sequence
  RPE65 RNA guide
auuaaguucacuguaaccau

SEQ ID NO: 9755 - RNA, 20 nt, Artificial Sequence
  RPE65 RNA guide
auugacauuaaaagagaggu

SEQ ID NO: 9756 - RNA, 20 nt, Artificial Sequence
  RPE65 RNA guide
caaugguuacagugaacuua

SEQ ID NO: 9757 - RNA, 20 nt, Artificial Sequence
  RPE65 RNA guide
cacuguaaccauugacauua

SEQ ID NO: 9758 - RNA, 20 nt, Artificial Sequence
  RPE65 RNA guide
caggauuaaguucacuguaa

SEQ ID NO: 9759 - RNA, 20 nt, Artificial Sequence
  RPE65 RNA guide
caugaccucucuuuuaaugu

SEQ ID NO: 9760 - RNA, 20 nt, Artificial Sequence
  RPE65 RNA guide
cauugacauuaaaagagagg

SEQ ID NO: 9761 - RNA, 20 nt, Artificial Sequence
  RPE65 RNA guide
ccauugacauuaaaagagag

SEQ ID NO: 9762 - RNA, 20 nt, Artificial Sequence
  RPE65 RNA guide
ccucucuuuuaaugucaaug

SEQ ID NO: 9763 - RNA, 20 nt, Artificial Sequence
  RPE65 RNA guide
cucucuuuuaaugucaaugg

SEQ ID NO: 9764 - RNA, 20 nt, Artificial Sequence
  RPE65 RNA guide
cucuuuuaaugucaaugguu

SEQ ID NO: 9765 - RNA, 20 nt, Artificial Sequence
  RPE65 RNA guide
cuguaaccauugacauuaaa

SEQ ID NO: 9766 - RNA, 20 nt, Artificial Sequence
  RPE65 RNA guide
cuuuuaaugucaaugguuac

SEQ ID NO: 9767 - RNA, 20 nt, Artificial Sequence
  RPE65 RNA guide
gaccucucuuuuaaugucaa

SEQ ID NO: 9768 - RNA, 20 nt, Artificial Sequence
  RPE65 RNA guide
gauuaaguucacuguaacca

SEQ ID NO: 9769 - RNA, 20 nt, Artificial Sequence
  RPE65 RNA guide
ggauuaaguucacuguaacc

SEQ ID NO: 9770 - RNA, 20 nt, Artificial Sequence
  RPE65 RNA guide
guaaccauugacauuaaaag

SEQ ID NO: 9771 - RNA, 20 nt, Artificial Sequence
  RPE65 RNA guide
gucaaugguuacagugaacu

SEQ ID NO: 9772 - RNA, 20 nt, Artificial Sequence
  RPE65 RNA guide
guucacuguaaccauugaca

SEQ ID NO: 9773 - RNA, 20 nt, Artificial Sequence
  RPE65 RNA guide
uaaguucacuguaaccauug

SEQ ID NO: 9774 - RNA, 20 nt, Artificial Sequence
  RPE65 RNA guide
uaaugucaaugguuacagug

SEQ ID NO: 9775 - RNA, 20 nt, Artificial Sequence
  RPE65 RNA guide
ucaaugguuacagugaacuu

SEQ ID NO: 9776 - RNA, 20 nt, Artificial Sequence
  RPE65 RNA guide
ucacuguaaccauugacauu

SEQ ID NO: 9777 - RNA, 20 nt, Artificial Sequence
  RPE65 RNA guide
ucucuuuuaaugucaauggu

SEQ ID NO: 9778 - RNA, 20 nt, Artificial Sequence
  RPE65 RNA guide
ugaccucucuuuuaauguca

SEQ ID NO: 9779 - RNA, 20 nt, Artificial Sequence
  RPE65 RNA guide
ugucaaugguuacagugaac

SEQ ID NO: 9780 - RNA, 20 nt, Artificial Sequence
  RPE65 RNA guide
uuaaguucacuguaaccauu

SEQ ID NO: 9781 - RNA, 20 nt, Artificial Sequence
  RPE65 RNA guide
uuaaugucaaugguuacagu

SEQ ID NO: 9782 - RNA, 20 nt, Artificial Sequence
  RPE65 RNA guide
uucacuguaaccauugacau

SEQ ID NO: 9783 - RNA, 20 nt, Artificial Sequence
  RPE65 RNA guide
uuuaaugucaaugguuacag

SEQ ID NO: 9784 - RNA, 21 nt, Artificial Sequence
  RPE65 RNA guide
aaguucacuguaaccauugac

SEQ ID NO: 9785 - RNA, 21 nt, Artificial Sequence
  RPE65 RNA guide
aaugucaaugguuacagugaa

SEQ ID NO: 9786 - RNA, 21 nt, Artificial Sequence
  RPE65 RNA guide
acaggauuaaguucacuguaa

SEQ ID NO: 9787 - RNA, 21 nt, Artificial Sequence
  RPE65 RNA guide
acaugaccucucuuuuaaugu

SEQ ID NO: 9788 - RNA, 21 nt, Artificial Sequence
  RPE65 RNA guide
accauugacauuaaaagagag

SEQ ID NO: 9789 - RNA, 21 nt, Artificial Sequence
  RPE65 RNA guide
accucucuuuuaaugucaaug

SEQ ID NO: 9790 - RNA, 21 nt, Artificial Sequence
  RPE65 RNA guide
aggauuaaguucacuguaacc

SEQ ID NO: 9791 - RNA, 21 nt, Artificial Sequence
  RPE65 RNA guide
aguucacuguaaccauugaca

SEQ ID NO: 9792 - RNA, 21 nt, Artificial Sequence
  RPE65 RNA guide
augaccucucuuuuaauguca

SEQ ID NO: 9793 - RNA, 21 nt, Artificial Sequence
  RPE65 RNA guide
augucaaugguuacagugaac

SEQ ID NO: 9794 - RNA, 21 nt, Artificial Sequence
  RPE65 RNA guide
auugacauuaaaagagagguc

SEQ ID NO: 9795 - RNA, 21 nt, Artificial Sequence
  RPE65 RNA guide
caaugguuacagugaacuuaa

SEQ ID NO: 9796 - RNA, 21 nt, Artificial Sequence
  RPE65 RNA guide
cacuguaaccauugacauuaa

SEQ ID NO: 9797 - RNA, 21 nt, Artificial Sequence
  RPE65 RNA guide
caggauuaaguucacuguaac

SEQ ID NO: 9798 - RNA, 21 nt, Artificial Sequence
  RPE65 RNA guide
caugaccucucuuuuaauguc

SEQ ID NO: 9799 - RNA, 21 nt, Artificial Sequence
  RPE65 RNA guide
cauugacauuaaaagagaggu

SEQ ID NO: 9800 - RNA, 21 nt, Artificial Sequence
  RPE65 RNA guide
ccauugacauuaaaagagagg

SEQ ID NO: 9801 - RNA, 21 nt, Artificial Sequence
  RPE65 RNA guide
ccucucuuuuaaugucaaugg

SEQ ID NO: 9802 - RNA, 21 nt, Artificial Sequence
  RPE65 RNA guide
cucucuuuuaaugucaauggu

SEQ ID NO: 9803 - RNA, 21 nt, Artificial Sequence
  RPE65 RNA guide
gacaugaccucucuuuuaaug

SEQ ID NO: 9804 - RNA, 21 nt, Artificial Sequence
  RPE65 RNA guide
gaccucucuuuuaaugucaau

SEQ ID NO: 9805 - RNA, 21 nt, Artificial Sequence
  RPE65 RNA guide
gauuaaguucacuguaaccau

SEQ ID NO: 9806 - RNA, 21 nt, Artificial Sequence
  RPE65 RNA guide
ggauuaaguucacuguaacca

SEQ ID NO: 9807 - RNA, 21 nt, Artificial Sequence
  RPE65 RNA guide
gucaaugguuacagugaacuu

SEQ ID NO: 9808 - RNA, 21 nt, Artificial Sequence
  RPE65 RNA guide
guucacuguaaccauugacau

SEQ ID NO: 9809 - RNA, 21 nt, Artificial Sequence
  RPE65 RNA guide
uaaguucacuguaaccauuga

SEQ ID NO: 9810 - RNA, 21 nt, Artificial Sequence
  RPE65 RNA guide
uaaugucaaugguuacaguga

SEQ ID NO: 9811 - RNA, 21 nt, Artificial Sequence
  RPE65 RNA guide
ucaaugguuacagugaacuua

SEQ ID NO: 9812 - RNA, 21 nt, Artificial Sequence
  RPE65 RNA guide
ucacuguaaccauugacauua

SEQ ID NO: 9813 - RNA, 21 nt, Artificial Sequence
  RPE65 RNA guide
ugaccucucuuuuaaugucaa

SEQ ID NO: 9814 - RNA, 21 nt, Artificial Sequence
  RPE65 RNA guide
ugucaaugguuacagugaacu

SEQ ID NO: 9815 - RNA, 21 nt, Artificial Sequence
  RPE65 RNA guide
uuaaguucacuguaaccauug

SEQ ID NO: 9816 - RNA, 21 nt, Artificial Sequence
  RPE65 RNA guide
uuaaugucaaugguuacagug

SEQ ID NO: 9817 - RNA, 21 nt, Artificial Sequence
  RPE65 RNA guide
uucacuguaaccauugacauu

SEQ ID NO: 9818 - RNA, 22 nt, Artificial Sequence
  RPE65 RNA guide
aaccauugacauuaaaagagag

SEQ ID NO: 9819 - RNA, 22 nt, Artificial Sequence
  RPE65 RNA guide
aaguucacuguaaccauugaca

SEQ ID NO: 9820 - RNA, 22 nt, Artificial Sequence
  RPE65 RNA guide
aaugguuacagugaacuuaauc

SEQ ID NO: 9821 - RNA, 22 nt, Artificial Sequence
  RPE65 RNA guide
aaugucaaugguuacagugaac

SEQ ID NO: 9822 - RNA, 22 nt, Artificial Sequence
  RPE65 RNA guide
acaggauuaaguucacuguaac

SEQ ID NO: 9823 - RNA, 22 nt, Artificial Sequence
  RPE65 RNA guide
acaugaccucucuuuuaauguc

SEQ ID NO: 9824 - RNA, 22 nt, Artificial Sequence
  RPE65 RNA guide
accauugacauuaaaagagagg

SEQ ID NO: 9825 - RNA, 22 nt, Artificial Sequence
  RPE65 RNA guide
accucucuuuuaaugucaaugg

SEQ ID NO: 9826 - RNA, 22 nt, Artificial Sequence
  RPE65 RNA guide
agacaugaccucucuuuuaaug

SEQ ID NO: 9827 - RNA, 22 nt, Artificial Sequence
  RPE65 RNA guide
aggauuaaguucacuguaacca

SEQ ID NO: 9828 - RNA, 22 nt, Artificial Sequence
  RPE65 RNA guide
aguucacuguaaccauugacau

SEQ ID NO: 9829 - RNA, 22 nt, Artificial Sequence
  RPE65 RNA guide
augaccucucuuuuaaugucaa

SEQ ID NO: 9830 - RNA, 22 nt, Artificial Sequence
  RPE65 RNA guide
augucaaugguuacagugaacu

SEQ ID NO: 9831 - RNA, 22 nt, Artificial Sequence
  RPE65 RNA guide
auuaaguucacuguaaccauug

SEQ ID NO: 9832 - RNA, 22 nt, Artificial Sequence
  RPE65 RNA guide
auugacauuaaaagagagguca

SEQ ID NO: 9833 - RNA, 22 nt, Artificial Sequence
  RPE65 RNA guide
caaugguuacagugaacuuaau

SEQ ID NO: 9834 - RNA, 22 nt, Artificial Sequence
  RPE65 RNA guide
cacuguaaccauugacauuaaa

SEQ ID NO: 9835 - RNA, 22 nt, Artificial Sequence
  RPE65 RNA guide
caggauuaaguucacuguaacc

SEQ ID NO: 9836 - RNA, 22 nt, Artificial Sequence
  RPE65 RNA guide
caugaccucucuuuuaauguca

SEQ ID NO: 9837 - RNA, 22 nt, Artificial Sequence
  RPE65 RNA guide
cauugacauuaaaagagagguc

SEQ ID NO: 9838 - RNA, 22 nt, Artificial Sequence
  RPE65 RNA guide
ccauugacauuaaaagagaggu

SEQ ID NO: 9839 - RNA, 22 nt, Artificial Sequence
  RPE65 RNA guide
ccucucuuuuaaugucaauggu

SEQ ID NO: 9840 - RNA, 22 nt, Artificial Sequence
  RPE65 RNA guide
cucucuuuuaaugucaaugguu

SEQ ID NO: 9841 - RNA, 22 nt, Artificial Sequence
  RPE65 RNA guide
cucuuuuaaugucaaugguuac

SEQ ID NO: 9842 - RNA, 22 nt, Artificial Sequence
  RPE65 RNA guide
cuguaaccauugacauuaaaag

SEQ ID NO: 9843 - RNA, 22 nt, Artificial Sequence
  RPE65 RNA guide
cuuuuaaugucaaugguuacag

SEQ ID NO: 9844 - RNA, 22 nt, Artificial Sequence
  RPE65 RNA guide
gacaggauuaaguucacuguaa

SEQ ID NO: 9845 - RNA, 22 nt, Artificial Sequence
  RPE65 RNA guide
gacaugaccucucuuuuaaugu

SEQ ID NO: 9846 - RNA, 22 nt, Artificial Sequence
  RPE65 RNA guide
gaccucucuuuuaaugucaaug

SEQ ID NO: 9847 - RNA, 22 nt, Artificial Sequence
  RPE65 RNA guide
gauuaaguucacuguaaccauu

SEQ ID NO: 9848 - RNA, 22 nt, Artificial Sequence
  RPE65 RNA guide
ggauuaaguucacuguaaccau

SEQ ID NO: 9849 - RNA, 22 nt, Artificial Sequence
  RPE65 RNA guide
guaaccauugacauuaaaagag

SEQ ID NO: 9850 - RNA, 22 nt, Artificial Sequence
  RPE65 RNA guide
gucaaugguuacagugaacuua

SEQ ID NO: 9851 - RNA, 22 nt, Artificial Sequence
  RPE65 RNA guide
guucacuguaaccauugacauu

SEQ ID NO: 9852 - RNA, 22 nt, Artificial Sequence
  RPE65 RNA guide
uaaguucacuguaaccauugac

SEQ ID NO: 9853 - RNA, 22 nt, Artificial Sequence
  RPE65 RNA guide
uaaugucaaugguuacagugaa

SEQ ID NO: 9854 - RNA, 22 nt, Artificial Sequence
  RPE65 RNA guide
ucaaugguuacagugaacuuaa

SEQ ID NO: 9855 - RNA, 22 nt, Artificial Sequence
  RPE65 RNA guide
ucacuguaaccauugacauuaa

SEQ ID NO: 9856 - RNA, 22 nt, Artificial Sequence
  RPE65 RNA guide
ugaccucucuuuuaaugucaau

SEQ ID NO: 9857 - RNA, 22 nt, Artificial Sequence
  RPE65 RNA guide
ugucaaugguuacagugaacuu

SEQ ID NO: 9858 - RNA, 22 nt, Artificial Sequence
  RPE65 RNA guide
uuaaguucacuguaaccauuga

SEQ ID NO: 9859 - RNA, 22 nt, Artificial Sequence
  RPE65 RNA guide
uuaaugucaaugguuacaguga

SEQ ID NO: 9860 - RNA, 22 nt, Artificial Sequence
  RPE65 RNA guide
uucacuguaaccauugacauua

SEQ ID NO: 9861 - RNA, 22 nt, Artificial Sequence
  RPE65 RNA guide
uuuaaugucaaugguuacagug

SEQ ID NO: 9862 - RNA, 20 nt, Artificial Sequence
  RPE65 RNA guide
aaccacugacauuaaaagag

SEQ ID NO: 9863 - RNA, 20 nt, Artificial Sequence
  RPE65 RNA guide
aaguucacuguaaccacuga

SEQ ID NO: 9864 - RNA, 20 nt, Artificial Sequence
  RPE65 RNA guide
aaugucagugguuacaguga

SEQ ID NO: 9865 - RNA, 20 nt, Artificial Sequence
  RPE65 RNA guide
accacugacauuaaaagaga

SEQ ID NO: 9866 - RNA, 20 nt, Artificial Sequence
  RPE65 RNA guide
accucucuuuuaaugucagu

SEQ ID NO: 9867 - RNA, 20 nt, Artificial Sequence
  RPE65 RNA guide
acugacauuaaaagagaggu

SEQ ID NO: 9868 - RNA, 20 nt, Artificial Sequence
  RPE65 RNA guide
acuguaaccacugacauuaa

SEQ ID NO: 9869 - RNA, 20 nt, Artificial Sequence
  RPE65 RNA guide
agugguuacagugaacuuaa

SEQ ID NO: 9870 - RNA, 20 nt, Artificial Sequence
  RPE65 RNA guide
aguucacuguaaccacugac

SEQ ID NO: 9871 - RNA, 20 nt, Artificial Sequence
  RPE65 RNA guide
augucagugguuacagugaa

SEQ ID NO: 9872 - RNA, 20 nt, Artificial Sequence
  RPE65 RNA guide
auuaaguucacuguaaccac

SEQ ID NO: 9873 - RNA, 20 nt, Artificial Sequence
  RPE65 RNA guide
cacugacauuaaaagagagg

SEQ ID NO: 9874 - RNA, 20 nt, Artificial Sequence
  RPE65 RNA guide
cacuguaaccacugacauua

SEQ ID NO: 9875 - RNA, 20 nt, Artificial Sequence
  RPE65 RNA guide
cagugguuacagugaacuua

SEQ ID NO: 9876 - RNA, 20 nt, Artificial Sequence
  RPE65 RNA guide
ccacugacauuaaaagagag

SEQ ID NO: 9877 - RNA, 20 nt, Artificial Sequence
  RPE65 RNA guide
ccucucuuuuaaugucagug

SEQ ID NO: 9878 - RNA, 20 nt, Artificial Sequence
  RPE65 RNA guide
cucucuuuuaaugucagugg

SEQ ID NO: 9879 - RNA, 20 nt, Artificial Sequence
  RPE65 RNA guide
cucuuuuaaugucagugguu

SEQ ID NO: 9880 - RNA, 20 nt, Artificial Sequence
  RPE65 RNA guide
cuguaaccacugacauuaaa

SEQ ID NO: 9881 - RNA, 20 nt, Artificial Sequence
  RPE65 RNA guide
cuuuuaaugucagugguuac

SEQ ID NO: 9882 - RNA, 20 nt, Artificial Sequence
  RPE65 RNA guide
gaccucucuuuuaaugucag

SEQ ID NO: 9883 - RNA, 20 nt, Artificial Sequence
  RPE65 RNA guide
guaaccacugacauuaaaag

SEQ ID NO: 9884 - RNA, 20 nt, Artificial Sequence
  RPE65 RNA guide
gucagugguuacagugaacu

SEQ ID NO: 9885 - RNA, 20 nt, Artificial Sequence
  RPE65 RNA guide
guucacuguaaccacugaca

SEQ ID NO: 9886 - RNA, 20 nt, Artificial Sequence
  RPE65 RNA guide
uaaccacugacauuaaaaga

SEQ ID NO: 9887 - RNA, 20 nt, Artificial Sequence
  RPE65 RNA guide
uaaguucacuguaaccacug

SEQ ID NO: 9888 - RNA, 20 nt, Artificial Sequence
  RPE65 RNA guide
uaaugucagugguuacagug

SEQ ID NO: 9889 - RNA, 20 nt, Artificial Sequence
  RPE65 RNA guide
ucacuguaaccacugacauu

SEQ ID NO: 9890 - RNA, 20 nt, Artificial Sequence
  RPE65 RNA guide
ucagugguuacagugaacuu

SEQ ID NO: 9891 - RNA, 20 nt, Artificial Sequence
  RPE65 RNA guide
ucucuuuuaaugucaguggu

SEQ ID NO: 9892 - RNA, 20 nt, Artificial Sequence
  RPE65 RNA guide
ucuuuuaaugucagugguua

SEQ ID NO: 9893 - RNA, 20 nt, Artificial Sequence
  RPE65 RNA guide
uguaaccacugacauuaaaa

SEQ ID NO: 9894 - RNA, 20 nt, Artificial Sequence
  RPE65 RNA guide
ugucagugguuacagugaac

SEQ ID NO: 9895 - RNA, 20 nt, Artificial Sequence
  RPE65 RNA guide
uuaaguucacuguaaccacu

SEQ ID NO: 9896 - RNA, 20 nt, Artificial Sequence
  RPE65 RNA guide
uuaaugucagugguuacagu

SEQ ID NO: 9897 - RNA, 20 nt, Artificial Sequence
  RPE65 RNA guide
uucacuguaaccacugacau

SEQ ID NO: 9898 - RNA, 20 nt, Artificial Sequence
  RPE65 RNA guide
uuuaaugucagugguuacag

SEQ ID NO: 9899 - RNA, 20 nt, Artificial Sequence
  RPE65 RNA guide
uuuuaaugucagugguuaca

SEQ ID NO: 9900 - RNA, 21 nt, Artificial Sequence
  RPE65 RNA guide
aaccacugacauuaaaagaga

SEQ ID NO: 9901 - RNA, 21 nt, Artificial Sequence
  RPE65 RNA guide
aaguucacuguaaccacugac

SEQ ID NO: 9902 - RNA, 21 nt, Artificial Sequence
  RPE65 RNA guide
aaugucagugguuacagugaa

SEQ ID NO: 9903 - RNA, 21 nt, Artificial Sequence
  RPE65 RNA guide
accacugacauuaaaagagag

SEQ ID NO: 9904 - RNA, 21 nt, Artificial Sequence
  RPE65 RNA guide
accucucuuuuaaugucagug

SEQ ID NO: 9905 - RNA, 21 nt, Artificial Sequence
  RPE65 RNA guide
acugacauuaaaagagagguc

SEQ ID NO: 9906 - RNA, 21 nt, Artificial Sequence
  RPE65 RNA guide
acuguaaccacugacauuaaa

SEQ ID NO: 9907 - RNA, 21 nt, Artificial Sequence
  RPE65 RNA guide
agugguuacagugaacuuaau

SEQ ID NO: 9908 - RNA, 21 nt, Artificial Sequence
  RPE65 RNA guide
aguucacuguaaccacugaca

SEQ ID NO: 9909 - RNA, 21 nt, Artificial Sequence
  RPE65 RNA guide
augucagugguuacagugaac

SEQ ID NO: 9910 - RNA, 21 nt, Artificial Sequence
  RPE65 RNA guide
auuaaguucacuguaaccacu

SEQ ID NO: 9911 - RNA, 21 nt, Artificial Sequence
  RPE65 RNA guide
cacugacauuaaaagagaggu

SEQ ID NO: 9912 - RNA, 21 nt, Artificial Sequence
  RPE65 RNA guide
cacuguaaccacugacauuaa

SEQ ID NO: 9913 - RNA, 21 nt, Artificial Sequence
  RPE65 RNA guide
cagugguuacagugaacuuaa

SEQ ID NO: 9914 - RNA, 21 nt, Artificial Sequence
  RPE65 RNA guide
ccacugacauuaaaagagagg

SEQ ID NO: 9915 - RNA, 21 nt, Artificial Sequence
  RPE65 RNA guide
ccucucuuuuaaugucagugg

SEQ ID NO: 9916 - RNA, 21 nt, Artificial Sequence
  RPE65 RNA guide
cucucuuuuaaugucaguggu

SEQ ID NO: 9917 - RNA, 21 nt, Artificial Sequence
  RPE65 RNA guide
cucuuuuaaugucagugguua

SEQ ID NO: 9918 - RNA, 21 nt, Artificial Sequence
  RPE65 RNA guide
cuguaaccacugacauuaaaa

SEQ ID NO: 9919 - RNA, 21 nt, Artificial Sequence
  RPE65 RNA guide
cuuuuaaugucagugguuaca

SEQ ID NO: 9920 - RNA, 21 nt, Artificial Sequence
  RPE65 RNA guide
gaccucucuuuuaaugucagu

SEQ ID NO: 9921 - RNA, 21 nt, Artificial Sequence
  RPE65 RNA guide
gauuaaguucacuguaaccac

SEQ ID NO: 9922 - RNA, 21 nt, Artificial Sequence
  RPE65 RNA guide
guaaccacugacauuaaaaga

SEQ ID NO: 9923 - RNA, 21 nt, Artificial Sequence
  RPE65 RNA guide
gucagugguuacagugaacuu

SEQ ID NO: 9924 - RNA, 21 nt, Artificial Sequence
  RPE65 RNA guide
guucacuguaaccacugacau

SEQ ID NO: 9925 - RNA, 21 nt, Artificial Sequence
  RPE65 RNA guide
uaaccacugacauuaaaagag

SEQ ID NO: 9926 - RNA, 21 nt, Artificial Sequence
  RPE65 RNA guide
uaaguucacuguaaccacuga

SEQ ID NO: 9927 - RNA, 21 nt, Artificial Sequence
  RPE65 RNA guide
uaaugucagugguuacaguga

SEQ ID NO: 9928 - RNA, 21 nt, Artificial Sequence
  RPE65 RNA guide
ucacuguaaccacugacauua

SEQ ID NO: 9929 - RNA, 21 nt, Artificial Sequence
  RPE65 RNA guide
ucagugguuacagugaacuua

SEQ ID NO: 9930 - RNA, 21 nt, Artificial Sequence
  RPE65 RNA guide
ucucuuuuaaugucagugguu

SEQ ID NO: 9931 - RNA, 21 nt, Artificial Sequence
  RPE65 RNA guide
ucuuuuaaugucagugguuac

SEQ ID NO: 9932 - RNA, 21 nt, Artificial Sequence
  RPE65 RNA guide
ugaccucucuuuuaaugucag

SEQ ID NO: 9933 - RNA, 21 nt, Artificial Sequence
  RPE65 RNA guide
uguaaccacugacauuaaaag

SEQ ID NO: 9934 - RNA, 21 nt, Artificial Sequence
  RPE65 RNA guide
ugucagugguuacagugaacu

SEQ ID NO: 9935 - RNA, 21 nt, Artificial Sequence
  RPE65 RNA guide
uuaaguucacuguaaccacug

SEQ ID NO: 9936 - RNA, 21 nt, Artificial Sequence
  RPE65 RNA guide
uuaaugucagugguuacagug

SEQ ID NO: 9937 - RNA, 21 nt, Artificial Sequence
  RPE65 RNA guide
uucacuguaaccacugacauu

SEQ ID NO: 9938 - RNA, 21 nt, Artificial Sequence
  RPE65 RNA guide
uuuaaugucagugguuacagu

SEQ ID NO: 9939 - RNA, 21 nt, Artificial Sequence
  RPE65 RNA guide
uuuuaaugucagugguuacag

SEQ ID NO: 9940 - RNA, 22 nt, Artificial Sequence
  RPE65 RNA guide
aaccacugacauuaaaagagag

SEQ ID NO: 9941 - RNA, 22 nt, Artificial Sequence
  RPE65 RNA guide
aaguucacuguaaccacugaca

SEQ ID NO: 9942 - RNA, 22 nt, Artificial Sequence
  RPE65 RNA guide
aaugucagugguuacagugaac

SEQ ID NO: 9943 - RNA, 22 nt, Artificial Sequence
  RPE65 RNA guide
accacugacauuaaaagagagg

SEQ ID NO: 9944 - RNA, 22 nt, Artificial Sequence
  RPE65 RNA guide
accucucuuuuaaugucagugg

SEQ ID NO: 9945 - RNA, 22 nt, Artificial Sequence
  RPE65 RNA guide
acugacauuaaaagagagguca

SEQ ID NO: 9946 - RNA, 22 nt, Artificial Sequence
  RPE65 RNA guide
acuguaaccacugacauuaaaa

SEQ ID NO: 9947 - RNA, 22 nt, Artificial Sequence
  RPE65 RNA guide
agugguuacagugaacuuaauc

SEQ ID NO: 9948 - RNA, 22 nt, Artificial Sequence
  RPE65 RNA guide
aguucacuguaaccacugacau

SEQ ID NO: 9949 - RNA, 22 nt, Artificial Sequence
  RPE65 RNA guide
augaccucucuuuuaaugucag

SEQ ID NO: 9950 - RNA, 22 nt, Artificial Sequence
  RPE65 RNA guide
augucagugguuacagugaacu

SEQ ID NO: 9951 - RNA, 22 nt, Artificial Sequence
  RPE65 RNA guide
auuaaguucacuguaaccacug

SEQ ID NO: 9952 - RNA, 22 nt, Artificial Sequence
  RPE65 RNA guide
cacugacauuaaaagagagguc

SEQ ID NO: 9953 - RNA, 22 nt, Artificial Sequence
  RPE65 RNA guide
cacuguaaccacugacauuaaa

SEQ ID NO: 9954 - RNA, 22 nt, Artificial Sequence
  RPE65 RNA guide
cagugguuacagugaacuuaau

SEQ ID NO: 9955 - RNA, 22 nt, Artificial Sequence
  RPE65 RNA guide
ccacugacauuaaaagagaggu

SEQ ID NO: 9956 - RNA, 22 nt, Artificial Sequence
  RPE65 RNA guide
ccucucuuuuaaugucaguggu

SEQ ID NO: 9957 - RNA, 22 nt, Artificial Sequence
  RPE65 RNA guide
cucucuuuuaaugucagugguu

SEQ ID NO: 9958 - RNA, 22 nt, Artificial Sequence
  RPE65 RNA guide
cucuuuuaaugucagugguuac

SEQ ID NO: 9959 - RNA, 22 nt, Artificial Sequence
  RPE65 RNA guide
cuguaaccacugacauuaaaag

SEQ ID NO: 9960 - RNA, 22 nt, Artificial Sequence
  RPE65 RNA guide
cuuuuaaugucagugguuacag

SEQ ID NO: 9961 - RNA, 22 nt, Artificial Sequence
  RPE65 RNA guide
gaccucucuuuuaaugucagug

SEQ ID NO: 9962 - RNA, 22 nt, Artificial Sequence
  RPE65 RNA guide
gauuaaguucacuguaaccacu

SEQ ID NO: 9963 - RNA, 22 nt, Artificial Sequence
  RPE65 RNA guide
ggauuaaguucacuguaaccac

SEQ ID NO: 9964 - RNA, 22 nt, Artificial Sequence
  RPE65 RNA guide
guaaccacugacauuaaaagag

SEQ ID NO: 9965 - RNA, 22 nt, Artificial Sequence
  RPE65 RNA guide
gucagugguuacagugaacuua

SEQ ID NO: 9966 - RNA, 22 nt, Artificial Sequence
  RPE65 RNA guide
guucacuguaaccacugacauu

SEQ ID NO: 9967 - RNA, 22 nt, Artificial Sequence
  RPE65 RNA guide
uaaccacugacauuaaaagaga

SEQ ID NO: 9968 - RNA, 22 nt, Artificial Sequence
  RPE65 RNA guide
uaaguucacuguaaccacugac

SEQ ID NO: 9969 - RNA, 22 nt, Artificial Sequence
  RPE65 RNA guide
uaaugucagugguuacagugaa

SEQ ID NO: 9970 - RNA, 22 nt, Artificial Sequence
  RPE65 RNA guide
ucacuguaaccacugacauuaa

SEQ ID NO: 9971 - RNA, 22 nt, Artificial Sequence
  RPE65 RNA guide
ucagugguuacagugaacuuaa

SEQ ID NO: 9972 - RNA, 22 nt, Artificial Sequence
  RPE65 RNA guide
ucucuuuuaaugucagugguua

SEQ ID NO: 9973 - RNA, 22 nt, Artificial Sequence
  RPE65 RNA guide
ucuuuuaaugucagugguuaca

SEQ ID NO: 9974 - RNA, 22 nt, Artificial Sequence
  RPE65 RNA guide
ugaccucucuuuuaaugucagu

SEQ ID NO: 9975 - RNA, 22 nt, Artificial Sequence
  RPE65 RNA guide
uguaaccacugacauuaaaaga

SEQ ID NO: 9976 - RNA, 22 nt, Artificial Sequence
  RPE65 RNA guide
ugucagugguuacagugaacuu

SEQ ID NO: 9977 - RNA, 22 nt, Artificial Sequence
  RPE65 RNA guide
uuaaguucacuguaaccacuga

SEQ ID NO: 9978 - RNA, 22 nt, Artificial Sequence
  RPE65 RNA guide
uuaaugucagugguuacaguga

SEQ ID NO: 9979 - RNA, 22 nt, Artificial Sequence
  RPE65 RNA guide
uucacuguaaccacugacauua

SEQ ID NO: 9980 - RNA, 22 nt, Artificial Sequence
  RPE65 RNA guide
uuuaaugucagugguuacagug

SEQ ID NO: 9981 - RNA, 22 nt, Artificial Sequence
  RPE65 RNA guide
uuuuaaugucagugguuacagu

SEQ ID NO: 9982 - RNA, 20 nt, Artificial Sequence
  RPE65 RNA guide
accauaauuuuuuccccauc

SEQ ID NO: 9983 - RNA, 20 nt, Artificial Sequence
  RPE65 RNA guide
agaugauggggaaaaaauua

SEQ ID NO: 9984 - RNA, 20 nt, Artificial Sequence
  RPE65 RNA guide
auaccauaauuuuuucccca

SEQ ID NO: 9985 - RNA, 20 nt, Artificial Sequence
  RPE65 RNA guide
augagaugauggggaaaaaa

SEQ ID NO: 9986 - RNA, 20 nt, Artificial Sequence
  RPE65 RNA guide
augauggggaaaaaauuaug

SEQ ID NO: 9987 - RNA, 20 nt, Artificial Sequence
  RPE65 RNA guide
auggggaaaaaauuauggua

SEQ ID NO: 9988 - RNA, 20 nt, Artificial Sequence
  RPE65 RNA guide
cauaauuuuuuccccaucau

SEQ ID NO: 9989 - RNA, 20 nt, Artificial Sequence
  RPE65 RNA guide
ccauaauuuuuuccccauca

SEQ ID NO: 9990 - RNA, 20 nt, Artificial Sequence
  RPE65 RNA guide
gagaugauggggaaaaaauu

SEQ ID NO: 9991 - RNA, 20 nt, Artificial Sequence
  RPE65 RNA guide
gaugauggggaaaaaauuau

SEQ ID NO: 9992 - RNA, 20 nt, Artificial Sequence
  RPE65 RNA guide
gauggggaaaaaauuauggu

SEQ ID NO: 9993 - RNA, 20 nt, Artificial Sequence
  RPE65 RNA guide
ggggaaaaaauuaugguaua

SEQ ID NO: 9994 - RNA, 20 nt, Artificial Sequence
  RPE65 RNA guide
uaccauaauuuuuuccccau

SEQ ID NO: 9995 - RNA, 20 nt, Artificial Sequence
  RPE65 RNA guide
uauaccauaauuuuuucccc

SEQ ID NO: 9996 - RNA, 20 nt, Artificial Sequence
  RPE65 RNA guide
ugagaugauggggaaaaaau

SEQ ID NO: 9997 - RNA, 20 nt, Artificial Sequence
  RPE65 RNA guide
ugauggggaaaaaauuaugg

SEQ ID NO: 9998 - RNA, 20 nt, Artificial Sequence
  RPE65 RNA guide
uggggaaaaaauuaugguau

SEQ ID NO: 9999 - RNA, 21 nt, Artificial Sequence
  RPE65 RNA guide
aaugagaugauggggaaaaaa

SEQ ID NO: 10000 - RNA, 21 nt, Artificial Sequence
  RPE65 RNA guide
accauaauuuuuuccccauca

SEQ ID NO: 10001 - RNA, 21 nt, Artificial Sequence
  RPE65 RNA guide
augagaugauggggaaaaaau

SEQ ID NO: 10002 - RNA, 21 nt, Artificial Sequence
  RPE65 RNA guide
augauggggaaaaaauuaugg

SEQ ID NO: 10003 - RNA, 21 nt, Artificial Sequence
  RPE65 RNA guide
cauaauuuuuuccccaucauc

SEQ ID NO: 10004 - RNA, 21 nt, Artificial Sequence
  RPE65 RNA guide
ccauaauuuuuuccccaucau

SEQ ID NO: 10005 - RNA, 21 nt, Artificial Sequence
  RPE65 RNA guide
gagaugauggggaaaaaauua

SEQ ID NO: 10006 - RNA, 21 nt, Artificial Sequence
  RPE65 RNA guide
gaugauggggaaaaaauuaug

SEQ ID NO: 10007 - RNA, 21 nt, Artificial Sequence
  RPE65 RNA guide
gauggggaaaaaauuauggua

SEQ ID NO: 10008 - RNA, 21 nt, Artificial Sequence
  RPE65 RNA guide
uaccauaauuuuuuccccauc

SEQ ID NO: 10009 - RNA, 21 nt, Artificial Sequence
  RPE65 RNA guide
ugagaugauggggaaaaaauu

SEQ ID NO: 10010 - RNA, 21 nt, Artificial Sequence
  RPE65 RNA guide
ugauggggaaaaaauuauggu

SEQ ID NO: 10011 - RNA, 22 nt, Artificial Sequence
  RPE65 RNA guide
aaaugagaugauggggaaaaaa

SEQ ID NO: 10012 - RNA, 22 nt, Artificial Sequence
  RPE65 RNA guide
aaugagaugauggggaaaaaau

SEQ ID NO: 10013 - RNA, 22 nt, Artificial Sequence
  RPE65 RNA guide
accauaauuuuuuccccaucau

SEQ ID NO: 10014 - RNA, 22 nt, Artificial Sequence
  RPE65 RNA guide
agaugauggggaaaaaauuaug

SEQ ID NO: 10015 - RNA, 22 nt, Artificial Sequence
  RPE65 RNA guide
auaccauaauuuuuuccccauc

SEQ ID NO: 10016 - RNA, 22 nt, Artificial Sequence
  RPE65 RNA guide
augagaugauggggaaaaaauu

SEQ ID NO: 10017 - RNA, 22 nt, Artificial Sequence
  RPE65 RNA guide
augauggggaaaaaauuauggu

SEQ ID NO: 10018 - RNA, 22 nt, Artificial Sequence
  RPE65 RNA guide
cauaauuuuuuccccaucaucu

SEQ ID NO: 10019 - RNA, 22 nt, Artificial Sequence
  RPE65 RNA guide
ccauaauuuuuuccccaucauc

SEQ ID NO: 10020 - RNA, 22 nt, Artificial Sequence
  RPE65 RNA guide
gagaugauggggaaaaaauuau

SEQ ID NO: 10021 - RNA, 22 nt, Artificial Sequence
  RPE65 RNA guide
gaugauggggaaaaaauuaugg

SEQ ID NO: 10022 - RNA, 22 nt, Artificial Sequence
  RPE65 RNA guide
gauggggaaaaaauuaugguau

SEQ ID NO: 10023 - RNA, 22 nt, Artificial Sequence
  RPE65 RNA guide
uaccauaauuuuuuccccauca

SEQ ID NO: 10024 - RNA, 22 nt, Artificial Sequence
  RPE65 RNA guide
ugagaugauggggaaaaaauua

SEQ ID NO: 10025 - RNA, 22 nt, Artificial Sequence
  RPE65 RNA guide
ugauggggaaaaaauuauggua

SEQ ID NO: 10026 - RNA, 20 nt, Artificial Sequence
  RPE65 RNA guide
accguaauuuuuuccccauc

SEQ ID NO: 10027 - RNA, 20 nt, Artificial Sequence
  RPE65 RNA guide
acgguauaauaugagugaau

SEQ ID NO: 10028 - RNA, 20 nt, Artificial Sequence
  RPE65 RNA guide
auaccguaauuuuuucccca

SEQ ID NO: 10029 - RNA, 20 nt, Artificial Sequence
  RPE65 RNA guide
augauggggaaaaaauuacg

SEQ ID NO: 10030 - RNA, 20 nt, Artificial Sequence
  RPE65 RNA guide
auggggaaaaaauuacggua

SEQ ID NO: 10031 - RNA, 20 nt, Artificial Sequence
  RPE65 RNA guide
auuacgguauaauaugagug

SEQ ID NO: 10032 - RNA, 20 nt, Artificial Sequence
  RPE65 RNA guide
auucacucauauuauaccgu

SEQ ID NO: 10033 - RNA, 20 nt, Artificial Sequence
  RPE65 RNA guide
cacucauauuauaccguaau

SEQ ID NO: 10034 - RNA, 20 nt, Artificial Sequence
  RPE65 RNA guide
ccguaauuuuuuccccauca

SEQ ID NO: 10035 - RNA, 20 nt, Artificial Sequence
  RPE65 RNA guide
cguaauuuuuuccccaucau

SEQ ID NO: 10036 - RNA, 20 nt, Artificial Sequence
  RPE65 RNA guide
gaugauggggaaaaaauuac

SEQ ID NO: 10037 - RNA, 20 nt, Artificial Sequence
  RPE65 RNA guide
gauggggaaaaaauuacggu

SEQ ID NO: 10038 - RNA, 20 nt, Artificial Sequence
  RPE65 RNA guide
gggaaaaaauuacgguauaa

SEQ ID NO: 10039 - RNA, 20 nt, Artificial Sequence
  RPE65 RNA guide
ggggaaaaaauuacgguaua

SEQ ID NO: 10040 - RNA, 20 nt, Artificial Sequence
  RPE65 RNA guide
uaccguaauuuuuuccccau

SEQ ID NO: 10041 - RNA, 20 nt, Artificial Sequence
  RPE65 RNA guide
uacgguauaauaugagugaa

SEQ ID NO: 10042 - RNA, 20 nt, Artificial Sequence
  RPE65 RNA guide
uauaccguaauuuuuucccc

SEQ ID NO: 10043 - RNA, 20 nt, Artificial Sequence
  RPE65 RNA guide
uauucacucauauuauaccg

SEQ ID NO: 10044 - RNA, 20 nt, Artificial Sequence
  RPE65 RNA guide
ucacucauauuauaccguaa

SEQ ID NO: 10045 - RNA, 20 nt, Artificial Sequence
  RPE65 RNA guide
ugauggggaaaaaauuacgg

SEQ ID NO: 10046 - RNA, 20 nt, Artificial Sequence
  RPE65 RNA guide
uggggaaaaaauuacgguau

SEQ ID NO: 10047 - RNA, 20 nt, Artificial Sequence
  RPE65 RNA guide
uuacgguauaauaugaguga

SEQ ID NO: 10048 - RNA, 20 nt, Artificial Sequence
  RPE65 RNA guide
uuauaccguaauuuuuuccc

SEQ ID NO: 10049 - RNA, 20 nt, Artificial Sequence
  RPE65 RNA guide
uucacucauauuauaccgua

SEQ ID NO: 10050 - RNA, 21 nt, Artificial Sequence
  RPE65 RNA guide
accguaauuuuuuccccauca

SEQ ID NO: 10051 - RNA, 21 nt, Artificial Sequence
  RPE65 RNA guide
agaugauggggaaaaaauuac

SEQ ID NO: 10052 - RNA, 21 nt, Artificial Sequence
  RPE65 RNA guide
auaccguaauuuuuuccccau

SEQ ID NO: 10053 - RNA, 21 nt, Artificial Sequence
  RPE65 RNA guide
augauggggaaaaaauuacgg

SEQ ID NO: 10054 - RNA, 21 nt, Artificial Sequence
  RPE65 RNA guide
auggggaaaaaauuacgguau

SEQ ID NO: 10055 - RNA, 21 nt, Artificial Sequence
  RPE65 RNA guide
ccguaauuuuuuccccaucau

SEQ ID NO: 10056 - RNA, 21 nt, Artificial Sequence
  RPE65 RNA guide
cguaauuuuuuccccaucauc

SEQ ID NO: 10057 - RNA, 21 nt, Artificial Sequence
  RPE65 RNA guide
gaugauggggaaaaaauuacg

SEQ ID NO: 10058 - RNA, 21 nt, Artificial Sequence
  RPE65 RNA guide
gauggggaaaaaauuacggua

SEQ ID NO: 10059 - RNA, 21 nt, Artificial Sequence
  RPE65 RNA guide
ggggaaaaaauuacgguauaa

SEQ ID NO: 10060 - RNA, 21 nt, Artificial Sequence
  RPE65 RNA guide
uaccguaauuuuuuccccauc

SEQ ID NO: 10061 - RNA, 21 nt, Artificial Sequence
  RPE65 RNA guide
uauaccguaauuuuuucccca

SEQ ID NO: 10062 - RNA, 21 nt, Artificial Sequence
  RPE65 RNA guide
ugauggggaaaaaauuacggu

SEQ ID NO: 10063 - RNA, 21 nt, Artificial Sequence
  RPE65 RNA guide
uggggaaaaaauuacgguaua

SEQ ID NO: 10064 - RNA, 21 nt, Artificial Sequence
  RPE65 RNA guide
uuauaccguaauuuuuucccc

SEQ ID NO: 10065 - RNA, 22 nt, Artificial Sequence
  RPE65 RNA guide
accguaauuuuuuccccaucau

SEQ ID NO: 10066 - RNA, 22 nt, Artificial Sequence
  RPE65 RNA guide
agaugauggggaaaaaauuacg

SEQ ID NO: 10067 - RNA, 22 nt, Artificial Sequence
  RPE65 RNA guide
auaccguaauuuuuuccccauc

SEQ ID NO: 10068 - RNA, 22 nt, Artificial Sequence
  RPE65 RNA guide
augauggggaaaaaauuacggu

SEQ ID NO: 10069 - RNA, 22 nt, Artificial Sequence
  RPE65 RNA guide
auggggaaaaaauuacgguaua

SEQ ID NO: 10070 - RNA, 22 nt, Artificial Sequence
  RPE65 RNA guide
auuauaccguaauuuuuucccc

SEQ ID NO: 10071 - RNA, 22 nt, Artificial Sequence
  RPE65 RNA guide
ccguaauuuuuuccccaucauc

SEQ ID NO: 10072 - RNA, 22 nt, Artificial Sequence
  RPE65 RNA guide
cguaauuuuuuccccaucaucu

SEQ ID NO: 10073 - RNA, 22 nt, Artificial Sequence
  RPE65 RNA guide
gagaugauggggaaaaaauuac

SEQ ID NO: 10074 - RNA, 22 nt, Artificial Sequence
  RPE65 RNA guide
gaugauggggaaaaaauuacgg

SEQ ID NO: 10075 - RNA, 22 nt, Artificial Sequence
  RPE65 RNA guide
gauggggaaaaaauuacgguau

SEQ ID NO: 10076 - RNA, 22 nt, Artificial Sequence
  RPE65 RNA guide
ggggaaaaaauuacgguauaau

SEQ ID NO: 10077 - RNA, 22 nt, Artificial Sequence
  RPE65 RNA guide
uaccguaauuuuuuccccauca

SEQ ID NO: 10078 - RNA, 22 nt, Artificial Sequence
  RPE65 RNA guide
uauaccguaauuuuuuccccau

SEQ ID NO: 10079 - RNA, 22 nt, Artificial Sequence
  RPE65 RNA guide
ugauggggaaaaaauuacggua

SEQ ID NO: 10080 - RNA, 22 nt, Artificial Sequence
  RPE65 RNA guide
uggggaaaaaauuacgguauaa

SEQ ID NO: 10081 - RNA, 22 nt, Artificial Sequence
  RPE65 RNA guide
uuauaccguaauuuuuucccca

SEQ ID NO: 10082 - RNA, 20 nt, Artificial Sequence
  RPE65 RNA guide
aaacugaacagaggauguag

SEQ ID NO: 10083 - RNA, 20 nt, Artificial Sequence
  RPE65 RNA guide
aacaugaaacugaacagagg

SEQ ID NO: 10084 - RNA, 20 nt, Artificial Sequence
  RPE65 RNA guide
aacugaacagaggauguaga

SEQ ID NO: 10085 - RNA, 20 nt, Artificial Sequence
  RPE65 RNA guide
aaguuacaacaugaaacuga

SEQ ID NO: 10086 - RNA, 20 nt, Artificial Sequence
  RPE65 RNA guide
acaacaugaaacugaacaga

SEQ ID NO: 10087 - RNA, 20 nt, Artificial Sequence
  RPE65 RNA guide
acauccucuguucaguuuca

SEQ ID NO: 10088 - RNA, 20 nt, Artificial Sequence
  RPE65 RNA guide
acaugaaacugaacagagga

SEQ ID NO: 10089 - RNA, 20 nt, Artificial Sequence
  RPE65 RNA guide
acugaacagaggauguagaa

SEQ ID NO: 10090 - RNA, 20 nt, Artificial Sequence
  RPE65 RNA guide
acuuucuacauccucuguuc

SEQ ID NO: 10091 - RNA, 20 nt, Artificial Sequence
  RPE65 RNA guide
aguuacaacaugaaacugaa

SEQ ID NO: 10092 - RNA, 20 nt, Artificial Sequence
  RPE65 RNA guide
auccucuguucaguuucaug

SEQ ID NO: 10093 - RNA, 20 nt, Artificial Sequence
  RPE65 RNA guide
augaaacugaacagaggaug

SEQ ID NO: 10094 - RNA, 20 nt, Artificial Sequence
  RPE65 RNA guide
caacaugaaacugaacagag

SEQ ID NO: 10095 - RNA, 20 nt, Artificial Sequence
  RPE65 RNA guide
cauccucuguucaguuucau

SEQ ID NO: 10096 - RNA, 20 nt, Artificial Sequence
  RPE65 RNA guide
caugaaacugaacagaggau

SEQ ID NO: 10097 - RNA, 20 nt, Artificial Sequence
  RPE65 RNA guide
ccucuguucaguuucauguu

SEQ ID NO: 10098 - RNA, 20 nt, Artificial Sequence
  RPE65 RNA guide
cuacauccucuguucaguuu

SEQ ID NO: 10099 - RNA, 20 nt, Artificial Sequence
  RPE65 RNA guide
cucuguucaguuucauguug

SEQ ID NO: 10100 - RNA, 20 nt, Artificial Sequence
  RPE65 RNA guide
cugaacagaggauguagaaa

SEQ ID NO: 10101 - RNA, 20 nt, Artificial Sequence
  RPE65 RNA guide
cuguucaguuucauguugua

SEQ ID NO: 10102 - RNA, 20 nt, Artificial Sequence
  RPE65 RNA guide
cuuucuacauccucuguuca

SEQ ID NO: 10103 - RNA, 20 nt, Artificial Sequence
  RPE65 RNA guide
cuuugaaguuacaacaugaa

SEQ ID NO: 10104 - RNA, 20 nt, Artificial Sequence
  RPE65 RNA guide
gaaacugaacagaggaugua

SEQ ID NO: 10105 - RNA, 20 nt, Artificial Sequence
  RPE65 RNA guide
gaaguuacaacaugaaacug

SEQ ID NO: 10106 - RNA, 20 nt, Artificial Sequence
  RPE65 RNA guide
guuacaacaugaaacugaac

SEQ ID NO: 10107 - RNA, 20 nt, Artificial Sequence
  RPE65 RNA guide
guucaguuucauguuguaac

SEQ ID NO: 10108 - RNA, 20 nt, Artificial Sequence
  RPE65 RNA guide
guuuacuuucuacauccucu

SEQ ID NO: 10109 - RNA, 20 nt, Artificial Sequence
  RPE65 RNA guide
uacaacaugaaacugaacag

SEQ ID NO: 10110 - RNA, 20 nt, Artificial Sequence
  RPE65 RNA guide
uacauccucuguucaguuuc

SEQ ID NO: 10111 - RNA, 20 nt, Artificial Sequence
  RPE65 RNA guide
uacuuucuacauccucuguu

SEQ ID NO: 10112 - RNA, 20 nt, Artificial Sequence
  RPE65 RNA guide
ucaguuucauguuguaacuu

SEQ ID NO: 10113 - RNA, 20 nt, Artificial Sequence
  RPE65 RNA guide
uccucuguucaguuucaugu

SEQ ID NO: 10114 - RNA, 20 nt, Artificial Sequence
  RPE65 RNA guide
ucuacauccucuguucaguu

SEQ ID NO: 10115 - RNA, 20 nt, Artificial Sequence
  RPE65 RNA guide
ucuguucaguuucauguugu

SEQ ID NO: 10116 - RNA, 20 nt, Artificial Sequence
  RPE65 RNA guide
ugaaacugaacagaggaugu

SEQ ID NO: 10117 - RNA, 20 nt, Artificial Sequence
  RPE65 RNA guide
ugaacagaggauguagaaag

SEQ ID NO: 10118 - RNA, 20 nt, Artificial Sequence
  RPE65 RNA guide
ugaaguuacaacaugaaacu

SEQ ID NO: 10119 - RNA, 20 nt, Artificial Sequence
  RPE65 RNA guide
uguucaguuucauguuguaa

SEQ ID NO: 10120 - RNA, 20 nt, Artificial Sequence
  RPE65 RNA guide
uuacaacaugaaacugaaca

SEQ ID NO: 10121 - RNA, 20 nt, Artificial Sequence
  RPE65 RNA guide
uuacuuucuacauccucugu

SEQ ID NO: 10122 - RNA, 20 nt, Artificial Sequence
  RPE65 RNA guide
uucaguuucauguuguaacu

SEQ ID NO: 10123 - RNA, 20 nt, Artificial Sequence
  RPE65 RNA guide
uucuacauccucuguucagu

SEQ ID NO: 10124 - RNA, 20 nt, Artificial Sequence
  RPE65 RNA guide
uugaaguuacaacaugaaac

SEQ ID NO: 10125 - RNA, 20 nt, Artificial Sequence
  RPE65 RNA guide
uuuacuuucuacauccucug

SEQ ID NO: 10126 - RNA, 20 nt, Artificial Sequence
  RPE65 RNA guide
uuucuacauccucuguucag

SEQ ID NO: 10127 - RNA, 21 nt, Artificial Sequence
  RPE65 RNA guide
aaacugaacagaggauguaga

SEQ ID NO: 10128 - RNA, 21 nt, Artificial Sequence
  RPE65 RNA guide
aacaugaaacugaacagagga

SEQ ID NO: 10129 - RNA, 21 nt, Artificial Sequence
  RPE65 RNA guide
aacugaacagaggauguagaa

SEQ ID NO: 10130 - RNA, 21 nt, Artificial Sequence
  RPE65 RNA guide
acaacaugaaacugaacagag

SEQ ID NO: 10131 - RNA, 21 nt, Artificial Sequence
  RPE65 RNA guide
acauccucuguucaguuucau

SEQ ID NO: 10132 - RNA, 21 nt, Artificial Sequence
  RPE65 RNA guide
acaugaaacugaacagaggau

SEQ ID NO: 10133 - RNA, 21 nt, Artificial Sequence
  RPE65 RNA guide
acugaacagaggauguagaaa

SEQ ID NO: 10134 - RNA, 21 nt, Artificial Sequence
  RPE65 RNA guide
acuuucuacauccucuguuca

SEQ ID NO: 10135 - RNA, 21 nt, Artificial Sequence
  RPE65 RNA guide
aguuacaacaugaaacugaac

SEQ ID NO: 10136 - RNA, 21 nt, Artificial Sequence
  RPE65 RNA guide
auccucuguucaguuucaugu

SEQ ID NO: 10137 - RNA, 21 nt, Artificial Sequence
  RPE65 RNA guide
augaaacugaacagaggaugu

SEQ ID NO: 10138 - RNA, 21 nt, Artificial Sequence
  RPE65 RNA guide
caacaugaaacugaacagagg

SEQ ID NO: 10139 - RNA, 21 nt, Artificial Sequence
  RPE65 RNA guide
cauccucuguucaguuucaug

SEQ ID NO: 10140 - RNA, 21 nt, Artificial Sequence
  RPE65 RNA guide
caugaaacugaacagaggaug

SEQ ID NO: 10141 - RNA, 21 nt, Artificial Sequence
  RPE65 RNA guide
ccucuguucaguuucauguug

SEQ ID NO: 10142 - RNA, 21 nt, Artificial Sequence
  RPE65 RNA guide
cuacauccucuguucaguuuc

SEQ ID NO: 10143 - RNA, 21 nt, Artificial Sequence
  RPE65 RNA guide
cucuguucaguuucauguugu

SEQ ID NO: 10144 - RNA, 21 nt, Artificial Sequence
  RPE65 RNA guide
cugaacagaggauguagaaag

SEQ ID NO: 10145 - RNA, 21 nt, Artificial Sequence
  RPE65 RNA guide
cuguucaguuucauguuguaa

SEQ ID NO: 10146 - RNA, 21 nt, Artificial Sequence
  RPE65 RNA guide
cuuucuacauccucuguucag

SEQ ID NO: 10147 - RNA, 21 nt, Artificial Sequence
  RPE65 RNA guide
gaaacugaacagaggauguag

SEQ ID NO: 10148 - RNA, 21 nt, Artificial Sequence
  RPE65 RNA guide
gaaguuacaacaugaaacuga

SEQ ID NO: 10149 - RNA, 21 nt, Artificial Sequence
  RPE65 RNA guide
guuacaacaugaaacugaaca

SEQ ID NO: 10150 - RNA, 21 nt, Artificial Sequence
  RPE65 RNA guide
guucaguuucauguuguaacu

SEQ ID NO: 10151 - RNA, 21 nt, Artificial Sequence
  RPE65 RNA guide
guuuacuuucuacauccucug

SEQ ID NO: 10152 - RNA, 21 nt, Artificial Sequence
  RPE65 RNA guide
uacaacaugaaacugaacaga

SEQ ID NO: 10153 - RNA, 21 nt, Artificial Sequence
  RPE65 RNA guide
uacauccucuguucaguuuca

SEQ ID NO: 10154 - RNA, 21 nt, Artificial Sequence
  RPE65 RNA guide
uacuuucuacauccucuguuc

SEQ ID NO: 10155 - RNA, 21 nt, Artificial Sequence
  RPE65 RNA guide
ucaguuucauguuguaacuuc

SEQ ID NO: 10156 - RNA, 21 nt, Artificial Sequence
  RPE65 RNA guide
uccucuguucaguuucauguu

SEQ ID NO: 10157 - RNA, 21 nt, Artificial Sequence
  RPE65 RNA guide
ucuacauccucuguucaguuu

SEQ ID NO: 10158 - RNA, 21 nt, Artificial Sequence
  RPE65 RNA guide
ucuguucaguuucauguugua

SEQ ID NO: 10159 - RNA, 21 nt, Artificial Sequence
  RPE65 RNA guide
ugaaacugaacagaggaugua

SEQ ID NO: 10160 - RNA, 21 nt, Artificial Sequence
  RPE65 RNA guide
ugaacagaggauguagaaagu

SEQ ID NO: 10161 - RNA, 21 nt, Artificial Sequence
  RPE65 RNA guide
ugaaguuacaacaugaaacug

SEQ ID NO: 10162 - RNA, 21 nt, Artificial Sequence
  RPE65 RNA guide
uguucaguuucauguuguaac

SEQ ID NO: 10163 - RNA, 21 nt, Artificial Sequence
  RPE65 RNA guide
uguuuacuuucuacauccucu

SEQ ID NO: 10164 - RNA, 21 nt, Artificial Sequence
  RPE65 RNA guide
uuacaacaugaaacugaacag

SEQ ID NO: 10165 - RNA, 21 nt, Artificial Sequence
  RPE65 RNA guide
uuacuuucuacauccucuguu

SEQ ID NO: 10166 - RNA, 21 nt, Artificial Sequence
  RPE65 RNA guide
uucuacauccucuguucaguu

SEQ ID NO: 10167 - RNA, 21 nt, Artificial Sequence
  RPE65 RNA guide
uuuacuuucuacauccucugu

SEQ ID NO: 10168 - RNA, 21 nt, Artificial Sequence
  RPE65 RNA guide
uuucuacauccucuguucagu

SEQ ID NO: 10169 - RNA, 22 nt, Artificial Sequence
  RPE65 RNA guide
aaacugaacagaggauguagaa

SEQ ID NO: 10170 - RNA, 22 nt, Artificial Sequence
  RPE65 RNA guide
aacaugaaacugaacagaggau

SEQ ID NO: 10171 - RNA, 22 nt, Artificial Sequence
  RPE65 RNA guide
aacugaacagaggauguagaaa

SEQ ID NO: 10172 - RNA, 22 nt, Artificial Sequence
  RPE65 RNA guide
aaguuacaacaugaaacugaac

SEQ ID NO: 10173 - RNA, 22 nt, Artificial Sequence
  RPE65 RNA guide
acaacaugaaacugaacagagg

SEQ ID NO: 10174 - RNA, 22 nt, Artificial Sequence
  RPE65 RNA guide
acauccucuguucaguuucaug

SEQ ID NO: 10175 - RNA, 22 nt, Artificial Sequence
  RPE65 RNA guide
acaugaaacugaacagaggaug

SEQ ID NO: 10176 - RNA, 22 nt, Artificial Sequence
  RPE65 RNA guide
acugaacagaggauguagaaag

SEQ ID NO: 10177 - RNA, 22 nt, Artificial Sequence
  RPE65 RNA guide
acuuucuacauccucuguucag

SEQ ID NO: 10178 - RNA, 22 nt, Artificial Sequence
  RPE65 RNA guide
aguuacaacaugaaacugaaca

SEQ ID NO: 10179 - RNA, 22 nt, Artificial Sequence
  RPE65 RNA guide
auccucuguucaguuucauguu

SEQ ID NO: 10180 - RNA, 22 nt, Artificial Sequence
  RPE65 RNA guide
augaaacugaacagaggaugua

SEQ ID NO: 10181 - RNA, 22 nt, Artificial Sequence
  RPE65 RNA guide
caacaugaaacugaacagagga

SEQ ID NO: 10182 - RNA, 22 nt, Artificial Sequence
  RPE65 RNA guide
cauccucuguucaguuucaugu

SEQ ID NO: 10183 - RNA, 22 nt, Artificial Sequence
  RPE65 RNA guide
caugaaacugaacagaggaugu

SEQ ID NO: 10184 - RNA, 22 nt, Artificial Sequence
  RPE65 RNA guide
ccucuguucaguuucauguugu

SEQ ID NO: 10185 - RNA, 22 nt, Artificial Sequence
  RPE65 RNA guide
cuacauccucuguucaguuuca

SEQ ID NO: 10186 - RNA, 22 nt, Artificial Sequence
  RPE65 RNA guide
cucuguucaguuucauguugua

SEQ ID NO: 10187 - RNA, 22 nt, Artificial Sequence
  RPE65 RNA guide
cucuuugaaguuacaacaugaa

SEQ ID NO: 10188 - RNA, 22 nt, Artificial Sequence
  RPE65 RNA guide
cugaacagaggauguagaaagu

SEQ ID NO: 10189 - RNA, 22 nt, Artificial Sequence
  RPE65 RNA guide
cuguucaguuucauguuguaac

SEQ ID NO: 10190 - RNA, 22 nt, Artificial Sequence
  RPE65 RNA guide
cuuucuacauccucuguucagu

SEQ ID NO: 10191 - RNA, 22 nt, Artificial Sequence
  RPE65 RNA guide
cuuugaaguuacaacaugaaac

SEQ ID NO: 10192 - RNA, 22 nt, Artificial Sequence
  RPE65 RNA guide
gaaacugaacagaggauguaga

SEQ ID NO: 10193 - RNA, 22 nt, Artificial Sequence
  RPE65 RNA guide
gaaguuacaacaugaaacugaa

SEQ ID NO: 10194 - RNA, 22 nt, Artificial Sequence
  RPE65 RNA guide
guuacaacaugaaacugaacag

SEQ ID NO: 10195 - RNA, 22 nt, Artificial Sequence
  RPE65 RNA guide
guucaguuucauguuguaacuu

SEQ ID NO: 10196 - RNA, 22 nt, Artificial Sequence
  RPE65 RNA guide
guuuacuuucuacauccucugu

SEQ ID NO: 10197 - RNA, 22 nt, Artificial Sequence
  RPE65 RNA guide
uacaacaugaaacugaacagag

SEQ ID NO: 10198 - RNA, 22 nt, Artificial Sequence
  RPE65 RNA guide
uacauccucuguucaguuucau

SEQ ID NO: 10199 - RNA, 22 nt, Artificial Sequence
  RPE65 RNA guide
uacuuucuacauccucuguuca

SEQ ID NO: 10200 - RNA, 22 nt, Artificial Sequence
  RPE65 RNA guide
ucaguuucauguuguaacuuca

SEQ ID NO: 10201 - RNA, 22 nt, Artificial Sequence
  RPE65 RNA guide
uccucuguucaguuucauguug

SEQ ID NO: 10202 - RNA, 22 nt, Artificial Sequence
  RPE65 RNA guide
ucuacauccucuguucaguuuc

SEQ ID NO: 10203 - RNA, 22 nt, Artificial Sequence
  RPE65 RNA guide
ucuguucaguuucauguuguaa

SEQ ID NO: 10204 - RNA, 22 nt, Artificial Sequence
  RPE65 RNA guide
ugaaacugaacagaggauguag

SEQ ID NO: 10205 - RNA, 22 nt, Artificial Sequence
  RPE65 RNA guide
ugaacagaggauguagaaagua

SEQ ID NO: 10206 - RNA, 22 nt, Artificial Sequence
  RPE65 RNA guide
ugaaguuacaacaugaaacuga

SEQ ID NO: 10207 - RNA, 22 nt, Artificial Sequence
  RPE65 RNA guide
uguucaguuucauguuguaacu

SEQ ID NO: 10208 - RNA, 22 nt, Artificial Sequence
  RPE65 RNA guide
uguuuacuuucuacauccucug

SEQ ID NO: 10209 - RNA, 22 nt, Artificial Sequence
  RPE65 RNA guide
uuacaacaugaaacugaacaga

SEQ ID NO: 10210 - RNA, 22 nt, Artificial Sequence
  RPE65 RNA guide
uuacuuucuacauccucuguuc

SEQ ID NO: 10211 - RNA, 22 nt, Artificial Sequence
  RPE65 RNA guide
uucaguuucauguuguaacuuc

SEQ ID NO: 10212 - RNA, 22 nt, Artificial Sequence
  RPE65 RNA guide
uucuacauccucuguucaguuu

SEQ ID NO: 10213 - RNA, 22 nt, Artificial Sequence
  RPE65 RNA guide
uugaaguuacaacaugaaacug

SEQ ID NO: 10214 - RNA, 22 nt, Artificial Sequence
  RPE65 RNA guide
uuguuuacuuucuacauccucu

SEQ ID NO: 10215 - RNA, 22 nt, Artificial Sequence
  RPE65 RNA guide
uuuacuuucuacauccucuguu

SEQ ID NO: 10216 - RNA, 22 nt, Artificial Sequence
  RPE65 RNA guide
uuucuacauccucuguucaguu

SEQ ID NO: 10217 - RNA, 20 nt, Artificial Sequence
  RPE65 RNA guide
aaacuuaacagaggauguag

SEQ ID NO: 10218 - RNA, 20 nt, Artificial Sequence
  RPE65 RNA guide
aacaugaaacuuaacagagg

SEQ ID NO: 10219 - RNA, 20 nt, Artificial Sequence
  RPE65 RNA guide
aacuuaacagaggauguaga

SEQ ID NO: 10220 - RNA, 20 nt, Artificial Sequence
  RPE65 RNA guide
acaacaugaaacuuaacaga

SEQ ID NO: 10221 - RNA, 20 nt, Artificial Sequence
  RPE65 RNA guide
acauccucuguuaaguuuca

SEQ ID NO: 10222 - RNA, 20 nt, Artificial Sequence
  RPE65 RNA guide
acaugaaacuuaacagagga

SEQ ID NO: 10223 - RNA, 20 nt, Artificial Sequence
  RPE65 RNA guide
acuuaacagaggauguagaa

SEQ ID NO: 10224 - RNA, 20 nt, Artificial Sequence
  RPE65 RNA guide
acuuucuacauccucuguua

SEQ ID NO: 10225 - RNA, 20 nt, Artificial Sequence
  RPE65 RNA guide
auccucuguuaaguuucaug

SEQ ID NO: 10226 - RNA, 20 nt, Artificial Sequence
  RPE65 RNA guide
augaaacuuaacagaggaug

SEQ ID NO: 10227 - RNA, 20 nt, Artificial Sequence
  RPE65 RNA guide
caacaugaaacuuaacagag

SEQ ID NO: 10228 - RNA, 20 nt, Artificial Sequence
  RPE65 RNA guide
cauccucuguuaaguuucau

SEQ ID NO: 10229 - RNA, 20 nt, Artificial Sequence
  RPE65 RNA guide
caugaaacuuaacagaggau

SEQ ID NO: 10230 - RNA, 20 nt, Artificial Sequence
  RPE65 RNA guide
ccucuguuaaguuucauguu

SEQ ID NO: 10231 - RNA, 20 nt, Artificial Sequence
  RPE65 RNA guide
cuacauccucuguuaaguuu

SEQ ID NO: 10232 - RNA, 20 nt, Artificial Sequence
  RPE65 RNA guide
cucuguuaaguuucauguug

SEQ ID NO: 10233 - RNA, 20 nt, Artificial Sequence
  RPE65 RNA guide
cuguuaaguuucauguugua

SEQ ID NO: 10234 - RNA, 20 nt, Artificial Sequence
  RPE65 RNA guide
cuuaacagaggauguagaaa

SEQ ID NO: 10235 - RNA, 20 nt, Artificial Sequence
  RPE65 RNA guide
cuuucuacauccucuguuaa

SEQ ID NO: 10236 - RNA, 20 nt, Artificial Sequence
  RPE65 RNA guide
gaaacuuaacagaggaugua

SEQ ID NO: 10237 - RNA, 20 nt, Artificial Sequence
  RPE65 RNA guide
gaaguuacaacaugaaacuu

SEQ ID NO: 10238 - RNA, 20 nt, Artificial Sequence
  RPE65 RNA guide
guuaaguuucauguuguaac

SEQ ID NO: 10239 - RNA, 20 nt, Artificial Sequence
  RPE65 RNA guide
guuacaacaugaaacuuaac

SEQ ID NO: 10240 - RNA, 20 nt, Artificial Sequence
  RPE65 RNA guide
uacaacaugaaacuuaacag

SEQ ID NO: 10241 - RNA, 20 nt, Artificial Sequence
  RPE65 RNA guide
uacauccucuguuaaguuuc

SEQ ID NO: 10242 - RNA, 20 nt, Artificial Sequence
  RPE65 RNA guide
uccucuguuaaguuucaugu

SEQ ID NO: 10243 - RNA, 20 nt, Artificial Sequence
  RPE65 RNA guide
ucuacauccucuguuaaguu

SEQ ID NO: 10244 - RNA, 20 nt, Artificial Sequence
  RPE65 RNA guide
ucuguuaaguuucauguugu

SEQ ID NO: 10245 - RNA, 20 nt, Artificial Sequence
  RPE65 RNA guide
ugaaacuuaacagaggaugu

SEQ ID NO: 10246 - RNA, 20 nt, Artificial Sequence
  RPE65 RNA guide
uuaacagaggauguagaaag

SEQ ID NO: 10247 - RNA, 20 nt, Artificial Sequence
  RPE65 RNA guide
uucuacauccucuguuaagu

SEQ ID NO: 10248 - RNA, 20 nt, Artificial Sequence
  RPE65 RNA guide
uuucuacauccucuguuaag

SEQ ID NO: 10249 - RNA, 21 nt, Artificial Sequence
  RPE65 RNA guide
aaacuuaacagaggauguaga

SEQ ID NO: 10250 - RNA, 21 nt, Artificial Sequence
  RPE65 RNA guide
aacaugaaacuuaacagagga

SEQ ID NO: 10251 - RNA, 21 nt, Artificial Sequence
  RPE65 RNA guide
aacuuaacagaggauguagaa

SEQ ID NO: 10252 - RNA, 21 nt, Artificial Sequence
  RPE65 RNA guide
acaacaugaaacuuaacagag

SEQ ID NO: 10253 - RNA, 21 nt, Artificial Sequence
  RPE65 RNA guide
acauccucuguuaaguuucau

SEQ ID NO: 10254 - RNA, 21 nt, Artificial Sequence
  RPE65 RNA guide
acaugaaacuuaacagaggau

SEQ ID NO: 10255 - RNA, 21 nt, Artificial Sequence
  RPE65 RNA guide
acuuaacagaggauguagaaa

SEQ ID NO: 10256 - RNA, 21 nt, Artificial Sequence
  RPE65 RNA guide
acuuucuacauccucuguuaa

SEQ ID NO: 10257 - RNA, 21 nt, Artificial Sequence
  RPE65 RNA guide
auccucuguuaaguuucaugu

SEQ ID NO: 10258 - RNA, 21 nt, Artificial Sequence
  RPE65 RNA guide
augaaacuuaacagaggaugu

SEQ ID NO: 10259 - RNA, 21 nt, Artificial Sequence
  RPE65 RNA guide
caacaugaaacuuaacagagg

SEQ ID NO: 10260 - RNA, 21 nt, Artificial Sequence
  RPE65 RNA guide
cauccucuguuaaguuucaug

SEQ ID NO: 10261 - RNA, 21 nt, Artificial Sequence
  RPE65 RNA guide
caugaaacuuaacagaggaug

SEQ ID NO: 10262 - RNA, 21 nt, Artificial Sequence
  RPE65 RNA guide
ccucuguuaaguuucauguug

SEQ ID NO: 10263 - RNA, 21 nt, Artificial Sequence
  RPE65 RNA guide
cuacauccucuguuaaguuuc

SEQ ID NO: 10264 - RNA, 21 nt, Artificial Sequence
  RPE65 RNA guide
cucuguuaaguuucauguugu

SEQ ID NO: 10265 - RNA, 21 nt, Artificial Sequence
  RPE65 RNA guide
cuuaacagaggauguagaaag

SEQ ID NO: 10266 - RNA, 21 nt, Artificial Sequence
  RPE65 RNA guide
cuuucuacauccucuguuaag

SEQ ID NO: 10267 - RNA, 21 nt, Artificial Sequence
  RPE65 RNA guide
gaaacuuaacagaggauguag

SEQ ID NO: 10268 - RNA, 21 nt, Artificial Sequence
  RPE65 RNA guide
uacauccucuguuaaguuuca

SEQ ID NO: 10269 - RNA, 21 nt, Artificial Sequence
  RPE65 RNA guide
uacuuucuacauccucuguua

SEQ ID NO: 10270 - RNA, 21 nt, Artificial Sequence
  RPE65 RNA guide
uccucuguuaaguuucauguu

SEQ ID NO: 10271 - RNA, 21 nt, Artificial Sequence
  RPE65 RNA guide
ucuacauccucuguuaaguuu

SEQ ID NO: 10272 - RNA, 21 nt, Artificial Sequence
  RPE65 RNA guide
ugaaacuuaacagaggaugua

SEQ ID NO: 10273 - RNA, 21 nt, Artificial Sequence
  RPE65 RNA guide
uuaacagaggauguagaaagu

SEQ ID NO: 10274 - RNA, 21 nt, Artificial Sequence
  RPE65 RNA guide
uucuacauccucuguuaaguu

SEQ ID NO: 10275 - RNA, 21 nt, Artificial Sequence
  RPE65 RNA guide
uuucuacauccucuguuaagu

SEQ ID NO: 10276 - RNA, 22 nt, Artificial Sequence
  RPE65 RNA guide
aaacuuaacagaggauguagaa

SEQ ID NO: 10277 - RNA, 22 nt, Artificial Sequence
  RPE65 RNA guide
aacaugaaacuuaacagaggau

SEQ ID NO: 10278 - RNA, 22 nt, Artificial Sequence
  RPE65 RNA guide
aacuuaacagaggauguagaaa

SEQ ID NO: 10279 - RNA, 22 nt, Artificial Sequence
  RPE65 RNA guide
acaacaugaaacuuaacagagg

SEQ ID NO: 10280 - RNA, 22 nt, Artificial Sequence
  RPE65 RNA guide
acauccucuguuaaguuucaug

SEQ ID NO: 10281 - RNA, 22 nt, Artificial Sequence
  RPE65 RNA guide
acaugaaacuuaacagaggaug

SEQ ID NO: 10282 - RNA, 22 nt, Artificial Sequence
  RPE65 RNA guide
acuuaacagaggauguagaaag

SEQ ID NO: 10283 - RNA, 22 nt, Artificial Sequence
  RPE65 RNA guide
acuuucuacauccucuguuaag

SEQ ID NO: 10284 - RNA, 22 nt, Artificial Sequence
  RPE65 RNA guide
auccucuguuaaguuucauguu

SEQ ID NO: 10285 - RNA, 22 nt, Artificial Sequence
  RPE65 RNA guide
augaaacuuaacagaggaugua

SEQ ID NO: 10286 - RNA, 22 nt, Artificial Sequence
  RPE65 RNA guide
caacaugaaacuuaacagagga

SEQ ID NO: 10287 - RNA, 22 nt, Artificial Sequence
  RPE65 RNA guide
cauccucuguuaaguuucaugu

SEQ ID NO: 10288 - RNA, 22 nt, Artificial Sequence
  RPE65 RNA guide
caugaaacuuaacagaggaugu

SEQ ID NO: 10289 - RNA, 22 nt, Artificial Sequence
  RPE65 RNA guide
ccucuguuaaguuucauguugu

SEQ ID NO: 10290 - RNA, 22 nt, Artificial Sequence
  RPE65 RNA guide
cuacauccucuguuaaguuuca

SEQ ID NO: 10291 - RNA, 22 nt, Artificial Sequence
  RPE65 RNA guide
cucuguuaaguuucauguugua

SEQ ID NO: 10292 - RNA, 22 nt, Artificial Sequence
  RPE65 RNA guide
cuguuaaguuucauguuguaac

SEQ ID NO: 10293 - RNA, 22 nt, Artificial Sequence
  RPE65 RNA guide
cuuaacagaggauguagaaagu

SEQ ID NO: 10294 - RNA, 22 nt, Artificial Sequence
  RPE65 RNA guide
cuuucuacauccucuguuaagu

SEQ ID NO: 10295 - RNA, 22 nt, Artificial Sequence
  RPE65 RNA guide
gaaacuuaacagaggauguaga

SEQ ID NO: 10296 - RNA, 22 nt, Artificial Sequence
  RPE65 RNA guide
guuacaacaugaaacuuaacag

SEQ ID NO: 10297 - RNA, 22 nt, Artificial Sequence
  RPE65 RNA guide
uacaacaugaaacuuaacagag

SEQ ID NO: 10298 - RNA, 22 nt, Artificial Sequence
  RPE65 RNA guide
uacauccucuguuaaguuucau

SEQ ID NO: 10299 - RNA, 22 nt, Artificial Sequence
  RPE65 RNA guide
uacuuucuacauccucuguuaa

SEQ ID NO: 10300 - RNA, 22 nt, Artificial Sequence
  RPE65 RNA guide
uccucuguuaaguuucauguug

SEQ ID NO: 10301 - RNA, 22 nt, Artificial Sequence
  RPE65 RNA guide
ucuacauccucuguuaaguuuc

SEQ ID NO: 10302 - RNA, 22 nt, Artificial Sequence
  RPE65 RNA guide
ugaaacuuaacagaggauguag

SEQ ID NO: 10303 - RNA, 22 nt, Artificial Sequence
  RPE65 RNA guide
uuaacagaggauguagaaagua

SEQ ID NO: 10304 - RNA, 22 nt, Artificial Sequence
  RPE65 RNA guide
uuacuuucuacauccucuguua

SEQ ID NO: 10305 - RNA, 22 nt, Artificial Sequence
  RPE65 RNA guide
uucuacauccucuguuaaguuu

SEQ ID NO: 10306 - RNA, 22 nt, Artificial Sequence
  RPE65 RNA guide
uuucuacauccucuguuaaguu

SEQ ID NO: 10307 - RNA, 20 nt, Artificial Sequence
  RPE65 RNA guide
aaacaggucauuaaucaaug

SEQ ID NO: 10308 - RNA, 20 nt, Artificial Sequence
  RPE65 RNA guide
aaauucaagggucuuuccua

SEQ ID NO: 10309 - RNA, 20 nt, Artificial Sequence
  RPE65 RNA guide
aacaggucauuaaucaaugc

SEQ ID NO: 10310 - RNA, 20 nt, Artificial Sequence
  RPE65 RNA guide
aaggcauugauuaaugaccu

SEQ ID NO: 10311 - RNA, 20 nt, Artificial Sequence
  RPE65 RNA guide
aagggucuuuccuaaacagg

SEQ ID NO: 10312 - RNA, 20 nt, Artificial Sequence
  RPE65 RNA guide
aaugaccuguuuaggaaaga

SEQ ID NO: 10313 - RNA, 20 nt, Artificial Sequence
  RPE65 RNA guide
aauucaagggucuuuccuaa

SEQ ID NO: 10314 - RNA, 20 nt, Artificial Sequence
  RPE65 RNA guide
acaggucauuaaucaaugcc

SEQ ID NO: 10315 - RNA, 20 nt, Artificial Sequence
  RPE65 RNA guide
accuguuuaggaaagacccu

SEQ ID NO: 10316 - RNA, 20 nt, Artificial Sequence
  RPE65 RNA guide
agaaggcauugauuaaugac

SEQ ID NO: 10317 - RNA, 20 nt, Artificial Sequence
  RPE65 RNA guide
agagaaggcauugauuaaug

SEQ ID NO: 10318 - RNA, 20 nt, Artificial Sequence
  RPE65 RNA guide
aggcauugauuaaugaccug

SEQ ID NO: 10319 - RNA, 20 nt, Artificial Sequence
  RPE65 RNA guide
agggucuuuccuaaacaggu

SEQ ID NO: 10320 - RNA, 20 nt, Artificial Sequence
  RPE65 RNA guide
augaccuguuuaggaaagac

SEQ ID NO: 10321 - RNA, 20 nt, Artificial Sequence
  RPE65 RNA guide
auuaaugaccuguuuaggaa

SEQ ID NO: 10322 - RNA, 20 nt, Artificial Sequence
  RPE65 RNA guide
auucaagggucuuuccuaaa

SEQ ID NO: 10323 - RNA, 20 nt, Artificial Sequence
  RPE65 RNA guide
caagggucuuuccuaaacag

SEQ ID NO: 10324 - RNA, 20 nt, Artificial Sequence
  RPE65 RNA guide
caggucauuaaucaaugccu

SEQ ID NO: 10325 - RNA, 20 nt, Artificial Sequence
  RPE65 RNA guide
cauugauuaaugaccuguuu

SEQ ID NO: 10326 - RNA, 20 nt, Artificial Sequence
  RPE65 RNA guide
ccuaaacaggucauuaauca

SEQ ID NO: 10327 - RNA, 20 nt, Artificial Sequence
  RPE65 RNA guide
ccuguuuaggaaagacccuu

SEQ ID NO: 10328 - RNA, 20 nt, Artificial Sequence
  RPE65 RNA guide
cuaaacaggucauuaaucaa

SEQ ID NO: 10329 - RNA, 20 nt, Artificial Sequence
  RPE65 RNA guide
cuguuuaggaaagacccuug

SEQ ID NO: 10330 - RNA, 20 nt, Artificial Sequence
  RPE65 RNA guide
cuuuccuaaacaggucauua

SEQ ID NO: 10331 - RNA, 20 nt, Artificial Sequence
  RPE65 RNA guide
gaaggcauugauuaaugacc

SEQ ID NO: 10332 - RNA, 20 nt, Artificial Sequence
  RPE65 RNA guide
gaccuguuuaggaaagaccc

SEQ ID NO: 10333 - RNA, 20 nt, Artificial Sequence
  RPE65 RNA guide
gagaaggcauugauuaauga

SEQ ID NO: 10334 - RNA, 20 nt, Artificial Sequence
  RPE65 RNA guide
gauuaaugaccuguuuagga

SEQ ID NO: 10335 - RNA, 20 nt, Artificial Sequence
  RPE65 RNA guide
gcauugauuaaugaccuguu

SEQ ID NO: 10336 - RNA, 20 nt, Artificial Sequence
  RPE65 RNA guide
ggcauugauuaaugaccugu

SEQ ID NO: 10337 - RNA, 20 nt, Artificial Sequence
  RPE65 RNA guide
gggucuuuccuaaacagguc

SEQ ID NO: 10338 - RNA, 20 nt, Artificial Sequence
  RPE65 RNA guide
ggucuuuccuaaacagguca

SEQ ID NO: 10339 - RNA, 20 nt, Artificial Sequence
  RPE65 RNA guide
gucuuuccuaaacaggucau

SEQ ID NO: 10340 - RNA, 20 nt, Artificial Sequence
  RPE65 RNA guide
uaaugaccuguuuaggaaag

SEQ ID NO: 10341 - RNA, 20 nt, Artificial Sequence
  RPE65 RNA guide
ucaagggucuuuccuaaaca

SEQ ID NO: 10342 - RNA, 20 nt, Artificial Sequence
  RPE65 RNA guide
uccuaaacaggucauuaauc

SEQ ID NO: 10343 - RNA, 20 nt, Artificial Sequence
  RPE65 RNA guide
ucuuuccuaaacaggucauu

SEQ ID NO: 10344 - RNA, 20 nt, Artificial Sequence
  RPE65 RNA guide
ugaccuguuuaggaaagacc

SEQ ID NO: 10345 - RNA, 20 nt, Artificial Sequence
  RPE65 RNA guide
ugauuaaugaccuguuuagg

SEQ ID NO: 10346 - RNA, 20 nt, Artificial Sequence
  RPE65 RNA guide
uuaaugaccuguuuaggaaa

SEQ ID NO: 10347 - RNA, 20 nt, Artificial Sequence
  RPE65 RNA guide
uucaagggucuuuccuaaac

SEQ ID NO: 10348 - RNA, 20 nt, Artificial Sequence
  RPE65 RNA guide
uuccuaaacaggucauuaau

SEQ ID NO: 10349 - RNA, 20 nt, Artificial Sequence
  RPE65 RNA guide
uugauuaaugaccuguuuag

SEQ ID NO: 10350 - RNA, 20 nt, Artificial Sequence
  RPE65 RNA guide
uuuccuaaacaggucauuaa

SEQ ID NO: 10351 - RNA, 21 nt, Artificial Sequence
  RPE65 RNA guide
aaaauucaagggucuuuccua

SEQ ID NO: 10352 - RNA, 21 nt, Artificial Sequence
  RPE65 RNA guide
aaacaggucauuaaucaaugc

SEQ ID NO: 10353 - RNA, 21 nt, Artificial Sequence
  RPE65 RNA guide
aaauucaagggucuuuccuaa

SEQ ID NO: 10354 - RNA, 21 nt, Artificial Sequence
  RPE65 RNA guide
aacaggucauuaaucaaugcc

SEQ ID NO: 10355 - RNA, 21 nt, Artificial Sequence
  RPE65 RNA guide
aagagaaggcauugauuaaug

SEQ ID NO: 10356 - RNA, 21 nt, Artificial Sequence
  RPE65 RNA guide
aaggcauugauuaaugaccug

SEQ ID NO: 10357 - RNA, 21 nt, Artificial Sequence
  RPE65 RNA guide
aagggucuuuccuaaacaggu

SEQ ID NO: 10358 - RNA, 21 nt, Artificial Sequence
  RPE65 RNA guide
aaugaccuguuuaggaaagac

SEQ ID NO: 10359 - RNA, 21 nt, Artificial Sequence
  RPE65 RNA guide
aauucaagggucuuuccuaaa

SEQ ID NO: 10360 - RNA, 21 nt, Artificial Sequence
  RPE65 RNA guide
acaggucauuaaucaaugccu

SEQ ID NO: 10361 - RNA, 21 nt, Artificial Sequence
  RPE65 RNA guide
accuguuuaggaaagacccuu

SEQ ID NO: 10362 - RNA, 21 nt, Artificial Sequence
  RPE65 RNA guide
agaaggcauugauuaaugacc

SEQ ID NO: 10363 - RNA, 21 nt, Artificial Sequence
  RPE65 RNA guide
agagaaggcauugauuaauga

SEQ ID NO: 10364 - RNA, 21 nt, Artificial Sequence
  RPE65 RNA guide
aggcauugauuaaugaccugu

SEQ ID NO: 10365 - RNA, 21 nt, Artificial Sequence
  RPE65 RNA guide
agggucuuuccuaaacagguc

SEQ ID NO: 10366 - RNA, 21 nt, Artificial Sequence
  RPE65 RNA guide
augaccuguuuaggaaagacc

SEQ ID NO: 10367 - RNA, 21 nt, Artificial Sequence
  RPE65 RNA guide
auucaagggucuuuccuaaac

SEQ ID NO: 10368 - RNA, 21 nt, Artificial Sequence
  RPE65 RNA guide
caagggucuuuccuaaacagg

SEQ ID NO: 10369 - RNA, 21 nt, Artificial Sequence
  RPE65 RNA guide
caggucauuaaucaaugccuu

SEQ ID NO: 10370 - RNA, 21 nt, Artificial Sequence
  RPE65 RNA guide
ccuaaacaggucauuaaucaa

SEQ ID NO: 10371 - RNA, 21 nt, Artificial Sequence
  RPE65 RNA guide
ccuguuuaggaaagacccuug

SEQ ID NO: 10372 - RNA, 21 nt, Artificial Sequence
  RPE65 RNA guide
cuguuuaggaaagacccuuga

SEQ ID NO: 10373 - RNA, 21 nt, Artificial Sequence
  RPE65 RNA guide
cuuuccuaaacaggucauuaa

SEQ ID NO: 10374 - RNA, 21 nt, Artificial Sequence
  RPE65 RNA guide
gaaggcauugauuaaugaccu

SEQ ID NO: 10375 - RNA, 21 nt, Artificial Sequence
  RPE65 RNA guide
gaccuguuuaggaaagacccu

SEQ ID NO: 10376 - RNA, 21 nt, Artificial Sequence
  RPE65 RNA guide
gagaaggcauugauuaaugac

SEQ ID NO: 10377 - RNA, 21 nt, Artificial Sequence
  RPE65 RNA guide
gauuaaugaccuguuuaggaa

SEQ ID NO: 10378 - RNA, 21 nt, Artificial Sequence
  RPE65 RNA guide
gcauugauuaaugaccuguuu

SEQ ID NO: 10379 - RNA, 21 nt, Artificial Sequence
  RPE65 RNA guide
ggcauugauuaaugaccuguu

SEQ ID NO: 10380 - RNA, 21 nt, Artificial Sequence
  RPE65 RNA guide
gggucuuuccuaaacagguca

SEQ ID NO: 10381 - RNA, 21 nt, Artificial Sequence
  RPE65 RNA guide
ggucuuuccuaaacaggucau

SEQ ID NO: 10382 - RNA, 21 nt, Artificial Sequence
  RPE65 RNA guide
gucuuuccuaaacaggucauu

SEQ ID NO: 10383 - RNA, 21 nt, Artificial Sequence
  RPE65 RNA guide
uaaugaccuguuuaggaaaga

SEQ ID NO: 10384 - RNA, 21 nt, Artificial Sequence
  RPE65 RNA guide
ucaagggucuuuccuaaacag

SEQ ID NO: 10385 - RNA, 21 nt, Artificial Sequence
  RPE65 RNA guide
uccuaaacaggucauuaauca

SEQ ID NO: 10386 - RNA, 21 nt, Artificial Sequence
  RPE65 RNA guide
ucuuuccuaaacaggucauua

SEQ ID NO: 10387 - RNA, 21 nt, Artificial Sequence
  RPE65 RNA guide
ugaccuguuuaggaaagaccc

SEQ ID NO: 10388 - RNA, 21 nt, Artificial Sequence
  RPE65 RNA guide
ugauuaaugaccuguuuagga

SEQ ID NO: 10389 - RNA, 21 nt, Artificial Sequence
  RPE65 RNA guide
uuaaugaccuguuuaggaaag

SEQ ID NO: 10390 - RNA, 21 nt, Artificial Sequence
  RPE65 RNA guide
uucaagggucuuuccuaaaca

SEQ ID NO: 10391 - RNA, 21 nt, Artificial Sequence
  RPE65 RNA guide
uuccuaaacaggucauuaauc

SEQ ID NO: 10392 - RNA, 21 nt, Artificial Sequence
  RPE65 RNA guide
uugauuaaugaccuguuuagg

SEQ ID NO: 10393 - RNA, 22 nt, Artificial Sequence
  RPE65 RNA guide
aaaauucaagggucuuuccuaa

SEQ ID NO: 10394 - RNA, 22 nt, Artificial Sequence
  RPE65 RNA guide
aaacaggucauuaaucaaugcc

SEQ ID NO: 10395 - RNA, 22 nt, Artificial Sequence
  RPE65 RNA guide
aaauucaagggucuuuccuaaa

SEQ ID NO: 10396 - RNA, 22 nt, Artificial Sequence
  RPE65 RNA guide
aacaggucauuaaucaaugccu

SEQ ID NO: 10397 - RNA, 22 nt, Artificial Sequence
  RPE65 RNA guide
aagagaaggcauugauuaauga

SEQ ID NO: 10398 - RNA, 22 nt, Artificial Sequence
  RPE65 RNA guide
aaggcauugauuaaugaccugu

SEQ ID NO: 10399 - RNA, 22 nt, Artificial Sequence
  RPE65 RNA guide
aagggucuuuccuaaacagguc

SEQ ID NO: 10400 - RNA, 22 nt, Artificial Sequence
  RPE65 RNA guide
aaugaccuguuuaggaaagacc

SEQ ID NO: 10401 - RNA, 22 nt, Artificial Sequence
  RPE65 RNA guide
aauucaagggucuuuccuaaac

SEQ ID NO: 10402 - RNA, 22 nt, Artificial Sequence
  RPE65 RNA guide
acaggucauuaaucaaugccuu

SEQ ID NO: 10403 - RNA, 22 nt, Artificial Sequence
  RPE65 RNA guide
accuguuuaggaaagacccuug

SEQ ID NO: 10404 - RNA, 22 nt, Artificial Sequence
  RPE65 RNA guide
agaaggcauugauuaaugaccu

SEQ ID NO: 10405 - RNA, 22 nt, Artificial Sequence
  RPE65 RNA guide
agagaaggcauugauuaaugac

SEQ ID NO: 10406 - RNA, 22 nt, Artificial Sequence
  RPE65 RNA guide
aggcauugauuaaugaccuguu

SEQ ID NO: 10407 - RNA, 22 nt, Artificial Sequence
  RPE65 RNA guide
agggucuuuccuaaacagguca

SEQ ID NO: 10408 - RNA, 22 nt, Artificial Sequence
  RPE65 RNA guide
augaccuguuuaggaaagaccc

SEQ ID NO: 10409 - RNA, 22 nt, Artificial Sequence
  RPE65 RNA guide
auuaaugaccuguuuaggaaag

SEQ ID NO: 10410 - RNA, 22 nt, Artificial Sequence
  RPE65 RNA guide
auucaagggucuuuccuaaaca

SEQ ID NO: 10411 - RNA, 22 nt, Artificial Sequence
  RPE65 RNA guide
auugauuaaugaccuguuuagg

SEQ ID NO: 10412 - RNA, 22 nt, Artificial Sequence
  RPE65 RNA guide
caaaauucaagggucuuuccua

SEQ ID NO: 10413 - RNA, 22 nt, Artificial Sequence
  RPE65 RNA guide
caagggucuuuccuaaacaggu

SEQ ID NO: 10414 - RNA, 22 nt, Artificial Sequence
  RPE65 RNA guide
caggucauuaaucaaugccuuc

SEQ ID NO: 10415 - RNA, 22 nt, Artificial Sequence
  RPE65 RNA guide
cauugauuaaugaccuguuuag

SEQ ID NO: 10416 - RNA, 22 nt, Artificial Sequence
  RPE65 RNA guide
ccuaaacaggucauuaaucaau

SEQ ID NO: 10417 - RNA, 22 nt, Artificial Sequence
  RPE65 RNA guide
ccuguuuaggaaagacccuuga

SEQ ID NO: 10418 - RNA, 22 nt, Artificial Sequence
  RPE65 RNA guide
cuaaacaggucauuaaucaaug

SEQ ID NO: 10419 - RNA, 22 nt, Artificial Sequence
  RPE65 RNA guide
cuguuuaggaaagacccuugaa

SEQ ID NO: 10420 - RNA, 22 nt, Artificial Sequence
  RPE65 RNA guide
cuuuccuaaacaggucauuaau

SEQ ID NO: 10421 - RNA, 22 nt, Artificial Sequence
  RPE65 RNA guide
gaagagaaggcauugauuaaug

SEQ ID NO: 10422 - RNA, 22 nt, Artificial Sequence
  RPE65 RNA guide
gaaggcauugauuaaugaccug

SEQ ID NO: 10423 - RNA, 22 nt, Artificial Sequence
  RPE65 RNA guide
gaccuguuuaggaaagacccuu

SEQ ID NO: 10424 - RNA, 22 nt, Artificial Sequence
  RPE65 RNA guide
gagaaggcauugauuaaugacc

SEQ ID NO: 10425 - RNA, 22 nt, Artificial Sequence
  RPE65 RNA guide
gauuaaugaccuguuuaggaaa

SEQ ID NO: 10426 - RNA, 22 nt, Artificial Sequence
  RPE65 RNA guide
gcauugauuaaugaccuguuua

SEQ ID NO: 10427 - RNA, 22 nt, Artificial Sequence
  RPE65 RNA guide
ggcauugauuaaugaccuguuu

SEQ ID NO: 10428 - RNA, 22 nt, Artificial Sequence
  RPE65 RNA guide
gggucuuuccuaaacaggucau

SEQ ID NO: 10429 - RNA, 22 nt, Artificial Sequence
  RPE65 RNA guide
ggucuuuccuaaacaggucauu

SEQ ID NO: 10430 - RNA, 22 nt, Artificial Sequence
  RPE65 RNA guide
gucuuuccuaaacaggucauua

SEQ ID NO: 10431 - RNA, 22 nt, Artificial Sequence
  RPE65 RNA guide
uaaacaggucauuaaucaaugc

SEQ ID NO: 10432 - RNA, 22 nt, Artificial Sequence
  RPE65 RNA guide
uaaugaccuguuuaggaaagac

SEQ ID NO: 10433 - RNA, 22 nt, Artificial Sequence
  RPE65 RNA guide
ucaagggucuuuccuaaacagg

SEQ ID NO: 10434 - RNA, 22 nt, Artificial Sequence
  RPE65 RNA guide
uccuaaacaggucauuaaucaa

SEQ ID NO: 10435 - RNA, 22 nt, Artificial Sequence
  RPE65 RNA guide
ucuuuccuaaacaggucauuaa

SEQ ID NO: 10436 - RNA, 22 nt, Artificial Sequence
  RPE65 RNA guide
ugaccuguuuaggaaagacccu

SEQ ID NO: 10437 - RNA, 22 nt, Artificial Sequence
  RPE65 RNA guide
ugauuaaugaccuguuuaggaa

SEQ ID NO: 10438 - RNA, 22 nt, Artificial Sequence
  RPE65 RNA guide
uuaaugaccuguuuaggaaaga

SEQ ID NO: 10439 - RNA, 22 nt, Artificial Sequence
  RPE65 RNA guide
uucaagggucuuuccuaaacag

SEQ ID NO: 10440 - RNA, 22 nt, Artificial Sequence
  RPE65 RNA guide
uuccuaaacaggucauuaauca

SEQ ID NO: 10441 - RNA, 22 nt, Artificial Sequence
  RPE65 RNA guide
uugauuaaugaccuguuuagga

SEQ ID NO: 10442 - RNA, 22 nt, Artificial Sequence
  RPE65 RNA guide
uuuccuaaacaggucauuaauc

SEQ ID NO: 10443 - RNA, 20 nt, Artificial Sequence
  RPE65 RNA guide
aaacuggucauuaaucaaug

SEQ ID NO: 10444 - RNA, 20 nt, Artificial Sequence
  RPE65 RNA guide
aacuggucauuaaucaaugc

SEQ ID NO: 10445 - RNA, 20 nt, Artificial Sequence
  RPE65 RNA guide
aaggcauugauuaaugacca

SEQ ID NO: 10446 - RNA, 20 nt, Artificial Sequence
  RPE65 RNA guide
aagggucuuuccuaaacugg

SEQ ID NO: 10447 - RNA, 20 nt, Artificial Sequence
  RPE65 RNA guide
aaugaccaguuuaggaaaga

SEQ ID NO: 10448 - RNA, 20 nt, Artificial Sequence
  RPE65 RNA guide
accaguuuaggaaagacccu

SEQ ID NO: 10449 - RNA, 20 nt, Artificial Sequence
  RPE65 RNA guide
acuggucauuaaucaaugcc

SEQ ID NO: 10450 - RNA, 20 nt, Artificial Sequence
  RPE65 RNA guide
aggcauugauuaaugaccag

SEQ ID NO: 10451 - RNA, 20 nt, Artificial Sequence
  RPE65 RNA guide
agggucuuuccuaaacuggu

SEQ ID NO: 10452 - RNA, 20 nt, Artificial Sequence
  RPE65 RNA guide
augaccaguuuaggaaagac

SEQ ID NO: 10453 - RNA, 20 nt, Artificial Sequence
  RPE65 RNA guide
auuaaugaccaguuuaggaa

SEQ ID NO: 10454 - RNA, 20 nt, Artificial Sequence
  RPE65 RNA guide
caagggucuuuccuaaacug

SEQ ID NO: 10455 - RNA, 20 nt, Artificial Sequence
  RPE65 RNA guide
caguuuaggaaagacccuug

SEQ ID NO: 10456 - RNA, 20 nt, Artificial Sequence
  RPE65 RNA guide
cauugauuaaugaccaguuu

SEQ ID NO: 10457 - RNA, 20 nt, Artificial Sequence
  RPE65 RNA guide
ccaguuuaggaaagacccuu

SEQ ID NO: 10458 - RNA, 20 nt, Artificial Sequence
  RPE65 RNA guide
ccuaaacuggucauuaauca

SEQ ID NO: 10459 - RNA, 20 nt, Artificial Sequence
  RPE65 RNA guide
cuaaacuggucauuaaucaa

SEQ ID NO: 10460 - RNA, 20 nt, Artificial Sequence
  RPE65 RNA guide
cuggucauuaaucaaugccu

SEQ ID NO: 10461 - RNA, 20 nt, Artificial Sequence
  RPE65 RNA guide
cuuuccuaaacuggucauua

SEQ ID NO: 10462 - RNA, 20 nt, Artificial Sequence
  RPE65 RNA guide
gaccaguuuaggaaagaccc

SEQ ID NO: 10463 - RNA, 20 nt, Artificial Sequence
  RPE65 RNA guide
gauuaaugaccaguuuagga

SEQ ID NO: 10464 - RNA, 20 nt, Artificial Sequence
  RPE65 RNA guide
gcauugauuaaugaccaguu

SEQ ID NO: 10465 - RNA, 20 nt, Artificial Sequence
  RPE65 RNA guide
ggcauugauuaaugaccagu

SEQ ID NO: 10466 - RNA, 20 nt, Artificial Sequence
  RPE65 RNA guide
gggucuuuccuaaacugguc

SEQ ID NO: 10467 - RNA, 20 nt, Artificial Sequence
  RPE65 RNA guide
ggucuuuccuaaacugguca

SEQ ID NO: 10468 - RNA, 20 nt, Artificial Sequence
  RPE65 RNA guide
gucuuuccuaaacuggucau

SEQ ID NO: 10469 - RNA, 20 nt, Artificial Sequence
  RPE65 RNA guide
uaaugaccaguuuaggaaag

SEQ ID NO: 10470 - RNA, 20 nt, Artificial Sequence
  RPE65 RNA guide
ucaagggucuuuccuaaacu

SEQ ID NO: 10471 - RNA, 20 nt, Artificial Sequence
  RPE65 RNA guide
uccuaaacuggucauuaauc

SEQ ID NO: 10472 - RNA, 20 nt, Artificial Sequence
  RPE65 RNA guide
ucuuuccuaaacuggucauu

SEQ ID NO: 10473 - RNA, 20 nt, Artificial Sequence
  RPE65 RNA guide
ugaccaguuuaggaaagacc

SEQ ID NO: 10474 - RNA, 20 nt, Artificial Sequence
  RPE65 RNA guide
ugauuaaugaccaguuuagg

SEQ ID NO: 10475 - RNA, 20 nt, Artificial Sequence
  RPE65 RNA guide
uuaaugaccaguuuaggaaa

SEQ ID NO: 10476 - RNA, 20 nt, Artificial Sequence
  RPE65 RNA guide
uuccuaaacuggucauuaau

SEQ ID NO: 10477 - RNA, 20 nt, Artificial Sequence
  RPE65 RNA guide
uugauuaaugaccaguuuag

SEQ ID NO: 10478 - RNA, 20 nt, Artificial Sequence
  RPE65 RNA guide
uuuccuaaacuggucauuaa

SEQ ID NO: 10479 - RNA, 21 nt, Artificial Sequence
  RPE65 RNA guide
aaacuggucauuaaucaaugc

SEQ ID NO: 10480 - RNA, 21 nt, Artificial Sequence
  RPE65 RNA guide
aacuggucauuaaucaaugcc

SEQ ID NO: 10481 - RNA, 21 nt, Artificial Sequence
  RPE65 RNA guide
aaggcauugauuaaugaccag

SEQ ID NO: 10482 - RNA, 21 nt, Artificial Sequence
  RPE65 RNA guide
aagggucuuuccuaaacuggu

SEQ ID NO: 10483 - RNA, 21 nt, Artificial Sequence
  RPE65 RNA guide
aaugaccaguuuaggaaagac

SEQ ID NO: 10484 - RNA, 21 nt, Artificial Sequence
  RPE65 RNA guide
accaguuuaggaaagacccuu

SEQ ID NO: 10485 - RNA, 21 nt, Artificial Sequence
  RPE65 RNA guide
acuggucauuaaucaaugccu

SEQ ID NO: 10486 - RNA, 21 nt, Artificial Sequence
  RPE65 RNA guide
aggcauugauuaaugaccagu

SEQ ID NO: 10487 - RNA, 21 nt, Artificial Sequence
  RPE65 RNA guide
agggucuuuccuaaacugguc

SEQ ID NO: 10488 - RNA, 21 nt, Artificial Sequence
  RPE65 RNA guide
augaccaguuuaggaaagacc

SEQ ID NO: 10489 - RNA, 21 nt, Artificial Sequence
  RPE65 RNA guide
caagggucuuuccuaaacugg

SEQ ID NO: 10490 - RNA, 21 nt, Artificial Sequence
  RPE65 RNA guide
caguuuaggaaagacccuuga

SEQ ID NO: 10491 - RNA, 21 nt, Artificial Sequence
  RPE65 RNA guide
ccaguuuaggaaagacccuug

SEQ ID NO: 10492 - RNA, 21 nt, Artificial Sequence
  RPE65 RNA guide
ccuaaacuggucauuaaucaa

SEQ ID NO: 10493 - RNA, 21 nt, Artificial Sequence
  RPE65 RNA guide
cuggucauuaaucaaugccuu

SEQ ID NO: 10494 - RNA, 21 nt, Artificial Sequence
  RPE65 RNA guide
cuuuccuaaacuggucauuaa

SEQ ID NO: 10495 - RNA, 21 nt, Artificial Sequence
  RPE65 RNA guide
gaaggcauugauuaaugacca

SEQ ID NO: 10496 - RNA, 21 nt, Artificial Sequence
  RPE65 RNA guide
gaccaguuuaggaaagacccu

SEQ ID NO: 10497 - RNA, 21 nt, Artificial Sequence
  RPE65 RNA guide
gauuaaugaccaguuuaggaa

SEQ ID NO: 10498 - RNA, 21 nt, Artificial Sequence
  RPE65 RNA guide
gcauugauuaaugaccaguuu

SEQ ID NO: 10499 - RNA, 21 nt, Artificial Sequence
  RPE65 RNA guide
ggcauugauuaaugaccaguu

SEQ ID NO: 10500 - RNA, 21 nt, Artificial Sequence
  RPE65 RNA guide
gggucuuuccuaaacugguca

SEQ ID NO: 10501 - RNA, 21 nt, Artificial Sequence
  RPE65 RNA guide
ggucuuuccuaaacuggucau

SEQ ID NO: 10502 - RNA, 21 nt, Artificial Sequence
  RPE65 RNA guide
gucuuuccuaaacuggucauu

SEQ ID NO: 10503 - RNA, 21 nt, Artificial Sequence
  RPE65 RNA guide
uaaugaccaguuuaggaaaga

SEQ ID NO: 10504 - RNA, 21 nt, Artificial Sequence
  RPE65 RNA guide
ucaagggucuuuccuaaacug

SEQ ID NO: 10505 - RNA, 21 nt, Artificial Sequence
  RPE65 RNA guide
uccuaaacuggucauuaauca

SEQ ID NO: 10506 - RNA, 21 nt, Artificial Sequence
  RPE65 RNA guide
ucuuuccuaaacuggucauua

SEQ ID NO: 10507 - RNA, 21 nt, Artificial Sequence
  RPE65 RNA guide
ugaccaguuuaggaaagaccc

SEQ ID NO: 10508 - RNA, 21 nt, Artificial Sequence
  RPE65 RNA guide
ugauuaaugaccaguuuagga

SEQ ID NO: 10509 - RNA, 21 nt, Artificial Sequence
  RPE65 RNA guide
uuaaugaccaguuuaggaaag

SEQ ID NO: 10510 - RNA, 21 nt, Artificial Sequence
  RPE65 RNA guide
uucaagggucuuuccuaaacu

SEQ ID NO: 10511 - RNA, 21 nt, Artificial Sequence
  RPE65 RNA guide
uuccuaaacuggucauuaauc

SEQ ID NO: 10512 - RNA, 21 nt, Artificial Sequence
  RPE65 RNA guide
uugauuaaugaccaguuuagg

SEQ ID NO: 10513 - RNA, 22 nt, Artificial Sequence
  RPE65 RNA guide
aaacuggucauuaaucaaugcc

SEQ ID NO: 10514 - RNA, 22 nt, Artificial Sequence
  RPE65 RNA guide
aacuggucauuaaucaaugccu

SEQ ID NO: 10515 - RNA, 22 nt, Artificial Sequence
  RPE65 RNA guide
aaggcauugauuaaugaccagu

SEQ ID NO: 10516 - RNA, 22 nt, Artificial Sequence
  RPE65 RNA guide
aagggucuuuccuaaacugguc

SEQ ID NO: 10517 - RNA, 22 nt, Artificial Sequence
  RPE65 RNA guide
aaugaccaguuuaggaaagacc

SEQ ID NO: 10518 - RNA, 22 nt, Artificial Sequence
  RPE65 RNA guide
accaguuuaggaaagacccuug

SEQ ID NO: 10519 - RNA, 22 nt, Artificial Sequence
  RPE65 RNA guide
acuggucauuaaucaaugccuu

SEQ ID NO: 10520 - RNA, 22 nt, Artificial Sequence
  RPE65 RNA guide
agaaggcauugauuaaugacca

SEQ ID NO: 10521 - RNA, 22 nt, Artificial Sequence
  RPE65 RNA guide
aggcauugauuaaugaccaguu

SEQ ID NO: 10522 - RNA, 22 nt, Artificial Sequence
  RPE65 RNA guide
agggucuuuccuaaacugguca

SEQ ID NO: 10523 - RNA, 22 nt, Artificial Sequence
  RPE65 RNA guide
augaccaguuuaggaaagaccc

SEQ ID NO: 10524 - RNA, 22 nt, Artificial Sequence
  RPE65 RNA guide
auuaaugaccaguuuaggaaag

SEQ ID NO: 10525 - RNA, 22 nt, Artificial Sequence
  RPE65 RNA guide
auucaagggucuuuccuaaacu

SEQ ID NO: 10526 - RNA, 22 nt, Artificial Sequence
  RPE65 RNA guide
auugauuaaugaccaguuuagg

SEQ ID NO: 10527 - RNA, 22 nt, Artificial Sequence
  RPE65 RNA guide
caagggucuuuccuaaacuggu

SEQ ID NO: 10528 - RNA, 22 nt, Artificial Sequence
  RPE65 RNA guide
caguuuaggaaagacccuugaa

SEQ ID NO: 10529 - RNA, 22 nt, Artificial Sequence
  RPE65 RNA guide
cauugauuaaugaccaguuuag

SEQ ID NO: 10530 - RNA, 22 nt, Artificial Sequence
  RPE65 RNA guide
ccaguuuaggaaagacccuuga

SEQ ID NO: 10531 - RNA, 22 nt, Artificial Sequence
  RPE65 RNA guide
ccuaaacuggucauuaaucaau

SEQ ID NO: 10532 - RNA, 22 nt, Artificial Sequence
  RPE65 RNA guide
cuaaacuggucauuaaucaaug

SEQ ID NO: 10533 - RNA, 22 nt, Artificial Sequence
  RPE65 RNA guide
cuggucauuaaucaaugccuuc

SEQ ID NO: 10534 - RNA, 22 nt, Artificial Sequence
  RPE65 RNA guide
cuuuccuaaacuggucauuaau

SEQ ID NO: 10535 - RNA, 22 nt, Artificial Sequence
  RPE65 RNA guide
gaaggcauugauuaaugaccag

SEQ ID NO: 10536 - RNA, 22 nt, Artificial Sequence
  RPE65 RNA guide
gaccaguuuaggaaagacccuu

SEQ ID NO: 10537 - RNA, 22 nt, Artificial Sequence
  RPE65 RNA guide
gauuaaugaccaguuuaggaaa

SEQ ID NO: 10538 - RNA, 22 nt, Artificial Sequence
  RPE65 RNA guide
gcauugauuaaugaccaguuua

SEQ ID NO: 10539 - RNA, 22 nt, Artificial Sequence
  RPE65 RNA guide
ggcauugauuaaugaccaguuu

SEQ ID NO: 10540 - RNA, 22 nt, Artificial Sequence
  RPE65 RNA guide
gggucuuuccuaaacuggucau

SEQ ID NO: 10541 - RNA, 22 nt, Artificial Sequence
  RPE65 RNA guide
ggucuuuccuaaacuggucauu

SEQ ID NO: 10542 - RNA, 22 nt, Artificial Sequence
  RPE65 RNA guide
gucuuuccuaaacuggucauua

SEQ ID NO: 10543 - RNA, 22 nt, Artificial Sequence
  RPE65 RNA guide
uaaacuggucauuaaucaaugc

SEQ ID NO: 10544 - RNA, 22 nt, Artificial Sequence
  RPE65 RNA guide
uaaugaccaguuuaggaaagac

SEQ ID NO: 10545 - RNA, 22 nt, Artificial Sequence
  RPE65 RNA guide
ucaagggucuuuccuaaacugg

SEQ ID NO: 10546 - RNA, 22 nt, Artificial Sequence
  RPE65 RNA guide
uccuaaacuggucauuaaucaa

SEQ ID NO: 10547 - RNA, 22 nt, Artificial Sequence
  RPE65 RNA guide
ucuuuccuaaacuggucauuaa

SEQ ID NO: 10548 - RNA, 22 nt, Artificial Sequence
  RPE65 RNA guide
ugaccaguuuaggaaagacccu

SEQ ID NO: 10549 - RNA, 22 nt, Artificial Sequence
  RPE65 RNA guide
ugauuaaugaccaguuuaggaa

SEQ ID NO: 10550 - RNA, 22 nt, Artificial Sequence
  RPE65 RNA guide
uuaaugaccaguuuaggaaaga

SEQ ID NO: 10551 - RNA, 22 nt, Artificial Sequence
  RPE65 RNA guide
uucaagggucuuuccuaaacug

SEQ ID NO: 10552 - RNA, 22 nt, Artificial Sequence
  RPE65 RNA guide
uuccuaaacuggucauuaauca

SEQ ID NO: 10553 - RNA, 22 nt, Artificial Sequence
  RPE65 RNA guide
uugauuaaugaccaguuuagga

SEQ ID NO: 10554 - RNA, 22 nt, Artificial Sequence
  RPE65 RNA guide
uuuccuaaacuggucauuaauc

SEQ ID NO: 10555 - RNA, 20 nt, Artificial Sequence
  RPE65 RNA guide
aaacaaaguauucaaccaug

SEQ ID NO: 10556 - RNA, 20 nt, Artificial Sequence
  RPE65 RNA guide
aaacaugguugaauacuuug

SEQ ID NO: 10557 - RNA, 20 nt, Artificial Sequence
  RPE65 RNA guide
aaaguauucaaccauguuug

SEQ ID NO: 10558 - RNA, 20 nt, Artificial Sequence
  RPE65 RNA guide
aacaaaguauucaaccaugu

SEQ ID NO: 10559 - RNA, 20 nt, Artificial Sequence
  RPE65 RNA guide
aacaugguugaauacuuugu

SEQ ID NO: 10560 - RNA, 20 nt, Artificial Sequence
  RPE65 RNA guide
aaguauucaaccauguuuga

SEQ ID NO: 10561 - RNA, 20 nt, Artificial Sequence
  RPE65 RNA guide
aaucaaacaugguugaauac

SEQ ID NO: 10562 - RNA, 20 nt, Artificial Sequence
  RPE65 RNA guide
acaaaguauucaaccauguu

SEQ ID NO: 10563 - RNA, 20 nt, Artificial Sequence
  RPE65 RNA guide
acaugguugaauacuuuguu

SEQ ID NO: 10564 - RNA, 20 nt, Artificial Sequence
  RPE65 RNA guide
acuaaucaaacaugguugaa

SEQ ID NO: 10565 - RNA, 20 nt, Artificial Sequence
  RPE65 RNA guide
aguaaacaaaguauucaacc

SEQ ID NO: 10566 - RNA, 20 nt, Artificial Sequence
  RPE65 RNA guide
aguauucaaccauguuugau

SEQ ID NO: 10567 - RNA, 20 nt, Artificial Sequence
  RPE65 RNA guide
aucaaacaugguugaauacu

SEQ ID NO: 10568 - RNA, 20 nt, Artificial Sequence
  RPE65 RNA guide
caaacaugguugaauacuuu

SEQ ID NO: 10569 - RNA, 20 nt, Artificial Sequence
  RPE65 RNA guide
caaaguauucaaccauguuu

SEQ ID NO: 10570 - RNA, 20 nt, Artificial Sequence
  RPE65 RNA guide
cacuaaucaaacaugguuga

SEQ ID NO: 10571 - RNA, 20 nt, Artificial Sequence
  RPE65 RNA guide
caugguugaauacuuuguuu

SEQ ID NO: 10572 - RNA, 20 nt, Artificial Sequence
  RPE65 RNA guide
cuaaucaaacaugguugaau

SEQ ID NO: 10573 - RNA, 20 nt, Artificial Sequence
  RPE65 RNA guide
cuguaagaguuauaguaaac

SEQ ID NO: 10574 - RNA, 20 nt, Artificial Sequence
  RPE65 RNA guide
gguugaauacuuuguuuacu

SEQ ID NO: 10575 - RNA, 20 nt, Artificial Sequence
  RPE65 RNA guide
guaaacaaaguauucaacca

SEQ ID NO: 10576 - RNA, 20 nt, Artificial Sequence
  RPE65 RNA guide
ucaaacaugguugaauacuu

SEQ ID NO: 10577 - RNA, 20 nt, Artificial Sequence
  RPE65 RNA guide
ugguugaauacuuuguuuac

SEQ ID NO: 10578 - RNA, 21 nt, Artificial Sequence
  RPE65 RNA guide
caaacaugguugaauacuuug

SEQ ID NO: 10579 - RNA, 21 nt, Artificial Sequence
  RPE65 RNA guide
caaaguauucaaccauguuug

SEQ ID NO: 10580 - RNA, 21 nt, Artificial Sequence
  RPE65 RNA guide
cacuaaucaaacaugguugaa

SEQ ID NO: 10581 - RNA, 21 nt, Artificial Sequence
  RPE65 RNA guide
gcacuaaucaaacaugguuga

SEQ ID NO: 10582 - RNA, 22 nt, Artificial Sequence
  RPE65 RNA guide
acaaaguauucaaccauguuug

SEQ ID NO: 10583 - RNA, 22 nt, Artificial Sequence
  RPE65 RNA guide
agcacuaaucaaacaugguuga

SEQ ID NO: 10584 - RNA, 22 nt, Artificial Sequence
  RPE65 RNA guide
caaacaugguugaauacuuugu

SEQ ID NO: 10585 - RNA, 22 nt, Artificial Sequence
  RPE65 RNA guide
caaaguauucaaccauguuuga

SEQ ID NO: 10586 - RNA, 22 nt, Artificial Sequence
  RPE65 RNA guide
cacuaaucaaacaugguugaau

SEQ ID NO: 10587 - RNA, 22 nt, Artificial Sequence
  RPE65 RNA guide
caugguugaauacuuuguuuac

SEQ ID NO: 10588 - RNA, 22 nt, Artificial Sequence
  RPE65 RNA guide
cuaaucaaacaugguugaauac

SEQ ID NO: 10589 - RNA, 22 nt, Artificial Sequence
  RPE65 RNA guide
cucuguaagaguuauaguaaac

SEQ ID NO: 10590 - RNA, 22 nt, Artificial Sequence
  RPE65 RNA guide
gcacuaaucaaacaugguugaa

SEQ ID NO: 10591 - RNA, 22 nt, Artificial Sequence
  RPE65 RNA guide
guaaacaaaguauucaaccaug

SEQ ID NO: 10592 - RNA, 22 nt, Artificial Sequence
  RPE65 RNA guide
ucaaacaugguugaauacuuug

SEQ ID NO: 10593 - RNA, 20 nt, Artificial Sequence
  RPE65 RNA guide
aaacaaacuauucaaccaug

SEQ ID NO: 10594 - RNA, 20 nt, Artificial Sequence
  RPE65 RNA guide
aaacaugguugaauaguuug

SEQ ID NO: 10595 - RNA, 20 nt, Artificial Sequence
  RPE65 RNA guide
aaacuauucaaccauguuug

SEQ ID NO: 10596 - RNA, 20 nt, Artificial Sequence
  RPE65 RNA guide
aacaaacuauucaaccaugu

SEQ ID NO: 10597 - RNA, 20 nt, Artificial Sequence
  RPE65 RNA guide
aacaugguugaauaguuugu

SEQ ID NO: 10598 - RNA, 20 nt, Artificial Sequence
  RPE65 RNA guide
aacuauucaaccauguuuga

SEQ ID NO: 10599 - RNA, 20 nt, Artificial Sequence
  RPE65 RNA guide
aaucaaacaugguugaauag

SEQ ID NO: 10600 - RNA, 20 nt, Artificial Sequence
  RPE65 RNA guide
acaaacuauucaaccauguu

SEQ ID NO: 10601 - RNA, 20 nt, Artificial Sequence
  RPE65 RNA guide
acaugguugaauaguuuguu

SEQ ID NO: 10602 - RNA, 20 nt, Artificial Sequence
  RPE65 RNA guide
acuauucaaccauguuugau

SEQ ID NO: 10603 - RNA, 20 nt, Artificial Sequence
  RPE65 RNA guide
aguaaacaaacuauucaacc

SEQ ID NO: 10604 - RNA, 20 nt, Artificial Sequence
  RPE65 RNA guide
aucaaacaugguugaauagu

SEQ ID NO: 10605 - RNA, 20 nt, Artificial Sequence
  RPE65 RNA guide
caaacaugguugaauaguuu

SEQ ID NO: 10606 - RNA, 20 nt, Artificial Sequence
  RPE65 RNA guide
caaacuauucaaccauguuu

SEQ ID NO: 10607 - RNA, 20 nt, Artificial Sequence
  RPE65 RNA guide
caugguugaauaguuuguuu

SEQ ID NO: 10608 - RNA, 20 nt, Artificial Sequence
  RPE65 RNA guide
gguugaauaguuuguuuacu

SEQ ID NO: 10609 - RNA, 20 nt, Artificial Sequence
  RPE65 RNA guide
guaaacaaacuauucaacca

SEQ ID NO: 10610 - RNA, 20 nt, Artificial Sequence
  RPE65 RNA guide
ucaaacaugguugaauaguu

SEQ ID NO: 10611 - RNA, 20 nt, Artificial Sequence
  RPE65 RNA guide
ugguugaauaguuuguuuac

SEQ ID NO: 10612 - RNA, 21 nt, Artificial Sequence
  RPE65 RNA guide
caaacaugguugaauaguuug

SEQ ID NO: 10613 - RNA, 21 nt, Artificial Sequence
  RPE65 RNA guide
caaacuauucaaccauguuug

SEQ ID NO: 10614 - RNA, 22 nt, Artificial Sequence
  RPE65 RNA guide
acaaacuauucaaccauguuug

SEQ ID NO: 10615 - RNA, 22 nt, Artificial Sequence
  RPE65 RNA guide
caaacaugguugaauaguuugu

SEQ ID NO: 10616 - RNA, 22 nt, Artificial Sequence
  RPE65 RNA guide
caaacuauucaaccauguuuga

SEQ ID NO: 10617 - RNA, 22 nt, Artificial Sequence
  RPE65 RNA guide
caugguugaauaguuuguuuac

SEQ ID NO: 10618 - RNA, 22 nt, Artificial Sequence
  RPE65 RNA guide
cuaaucaaacaugguugaauag

SEQ ID NO: 10619 - RNA, 22 nt, Artificial Sequence
  RPE65 RNA guide
guaaacaaacuauucaaccaug

SEQ ID NO: 10620 - RNA, 22 nt, Artificial Sequence
  RPE65 RNA guide
ucaaacaugguugaauaguuug

SEQ ID NO: 10621 - RNA, 20 nt, Artificial Sequence
  RPE65 RNA guide
aaauuuagugugcaguuaug

SEQ ID NO: 10622 - RNA, 20 nt, Artificial Sequence
  RPE65 RNA guide
aagaccccuaggguaaguag

SEQ ID NO: 10623 - RNA, 20 nt, Artificial Sequence
  RPE65 RNA guide
aaguagccauaacugcacac

SEQ ID NO: 10624 - RNA, 20 nt, Artificial Sequence
  RPE65 RNA guide
aauuuagugugcaguuaugg

SEQ ID NO: 10625 - RNA, 20 nt, Artificial Sequence
  RPE65 RNA guide
accccuaggguaaguagcca

SEQ ID NO: 10626 - RNA, 20 nt, Artificial Sequence
  RPE65 RNA guide
agaccccuaggguaaguagc

SEQ ID NO: 10627 - RNA, 20 nt, Artificial Sequence
  RPE65 RNA guide
agccauaacugcacacuaaa

SEQ ID NO: 10628 - RNA, 20 nt, Artificial Sequence
  RPE65 RNA guide
aggguaaguagccauaacug

SEQ ID NO: 10629 - RNA, 20 nt, Artificial Sequence
  RPE65 RNA guide
aguagccauaacugcacacu

SEQ ID NO: 10630 - RNA, 20 nt, Artificial Sequence
  RPE65 RNA guide
agugugcaguuauggcuacu

SEQ ID NO: 10631 - RNA, 20 nt, Artificial Sequence
  RPE65 RNA guide
aguuauggcuacuuacccua

SEQ ID NO: 10632 - RNA, 20 nt, Artificial Sequence
  RPE65 RNA guide
auggcuacuuacccuagggg

SEQ ID NO: 10633 - RNA, 20 nt, Artificial Sequence
  RPE65 RNA guide
auuuagugugcaguuauggc

SEQ ID NO: 10634 - RNA, 20 nt, Artificial Sequence
  RPE65 RNA guide
caguuauggcuacuuacccu

SEQ ID NO: 10635 - RNA, 20 nt, Artificial Sequence
  RPE65 RNA guide
cauaacugcacacuaaauuu

SEQ ID NO: 10636 - RNA, 20 nt, Artificial Sequence
  RPE65 RNA guide
ccauaacugcacacuaaauu

SEQ ID NO: 10637 - RNA, 20 nt, Artificial Sequence
  RPE65 RNA guide
ccccuaggguaaguagccau

SEQ ID NO: 10638 - RNA, 20 nt, Artificial Sequence
  RPE65 RNA guide
cccuaggguaaguagccaua

SEQ ID NO: 10639 - RNA, 20 nt, Artificial Sequence
  RPE65 RNA guide
ccuaggguaaguagccauaa

SEQ ID NO: 10640 - RNA, 20 nt, Artificial Sequence
  RPE65 RNA guide
cuaggguaaguagccauaac

SEQ ID NO: 10641 - RNA, 20 nt, Artificial Sequence
  RPE65 RNA guide
gaagaccccuaggguaagua

SEQ ID NO: 10642 - RNA, 20 nt, Artificial Sequence
  RPE65 RNA guide
gaccccuaggguaaguagcc

SEQ ID NO: 10643 - RNA, 20 nt, Artificial Sequence
  RPE65 RNA guide
gcaguuauggcuacuuaccc

SEQ ID NO: 10644 - RNA, 20 nt, Artificial Sequence
  RPE65 RNA guide
gccauaacugcacacuaaau

SEQ ID NO: 10645 - RNA, 20 nt, Artificial Sequence
  RPE65 RNA guide
ggguaaguagccauaacugc

SEQ ID NO: 10646 - RNA, 20 nt, Artificial Sequence
  RPE65 RNA guide
gguaaguagccauaacugca

SEQ ID NO: 10647 - RNA, 20 nt, Artificial Sequence
  RPE65 RNA guide
guaaguagccauaacugcac

SEQ ID NO: 10648 - RNA, 20 nt, Artificial Sequence
  RPE65 RNA guide
guagccauaacugcacacua

SEQ ID NO: 10649 - RNA, 20 nt, Artificial Sequence
  RPE65 RNA guide
gugcaguuauggcuacuuac

SEQ ID NO: 10650 - RNA, 20 nt, Artificial Sequence
  RPE65 RNA guide
gugugcaguuauggcuacuu

SEQ ID NO: 10651 - RNA, 20 nt, Artificial Sequence
  RPE65 RNA guide
guuauggcuacuuacccuag

SEQ ID NO: 10652 - RNA, 20 nt, Artificial Sequence
  RPE65 RNA guide
uaaguagccauaacugcaca

SEQ ID NO: 10653 - RNA, 20 nt, Artificial Sequence
  RPE65 RNA guide
uagccauaacugcacacuaa

SEQ ID NO: 10654 - RNA, 20 nt, Artificial Sequence
  RPE65 RNA guide
uaggguaaguagccauaacu

SEQ ID NO: 10655 - RNA, 20 nt, Artificial Sequence
  RPE65 RNA guide
uagugugcaguuauggcuac

SEQ ID NO: 10656 - RNA, 20 nt, Artificial Sequence
  RPE65 RNA guide
uauggcuacuuacccuaggg

SEQ ID NO: 10657 - RNA, 20 nt, Artificial Sequence
  RPE65 RNA guide
ugcaguuauggcuacuuacc

SEQ ID NO: 10658 - RNA, 20 nt, Artificial Sequence
  RPE65 RNA guide
ugugcaguuauggcuacuua

SEQ ID NO: 10659 - RNA, 20 nt, Artificial Sequence
  RPE65 RNA guide
uuagugugcaguuauggcua

SEQ ID NO: 10660 - RNA, 20 nt, Artificial Sequence
  RPE65 RNA guide
uuauggcuacuuacccuagg

SEQ ID NO: 10661 - RNA, 20 nt, Artificial Sequence
  RPE65 RNA guide
uuuagugugcaguuauggcu

SEQ ID NO: 10662 - RNA, 21 nt, Artificial Sequence
  RPE65 RNA guide
aaauuuagugugcaguuaugg

SEQ ID NO: 10663 - RNA, 21 nt, Artificial Sequence
  RPE65 RNA guide
aagaccccuaggguaaguagc

SEQ ID NO: 10664 - RNA, 21 nt, Artificial Sequence
  RPE65 RNA guide
aaguagccauaacugcacacu

SEQ ID NO: 10665 - RNA, 21 nt, Artificial Sequence
  RPE65 RNA guide
aauuuagugugcaguuauggc

SEQ ID NO: 10666 - RNA, 21 nt, Artificial Sequence
  RPE65 RNA guide
accccuaggguaaguagccau

SEQ ID NO: 10667 - RNA, 21 nt, Artificial Sequence
  RPE65 RNA guide
agaagaccccuaggguaagua

SEQ ID NO: 10668 - RNA, 21 nt, Artificial Sequence
  RPE65 RNA guide
agaccccuaggguaaguagcc

SEQ ID NO: 10669 - RNA, 21 nt, Artificial Sequence
  RPE65 RNA guide
agccauaacugcacacuaaau

SEQ ID NO: 10670 - RNA, 21 nt, Artificial Sequence
  RPE65 RNA guide
aggguaaguagccauaacugc

SEQ ID NO: 10671 - RNA, 21 nt, Artificial Sequence
  RPE65 RNA guide
aguagccauaacugcacacua

SEQ ID NO: 10672 - RNA, 21 nt, Artificial Sequence
  RPE65 RNA guide
agugugcaguuauggcuacuu

SEQ ID NO: 10673 - RNA, 21 nt, Artificial Sequence
  RPE65 RNA guide
aguuauggcuacuuacccuag

SEQ ID NO: 10674 - RNA, 21 nt, Artificial Sequence
  RPE65 RNA guide
auggcuacuuacccuaggggu

SEQ ID NO: 10675 - RNA, 21 nt, Artificial Sequence
  RPE65 RNA guide
auuuagugugcaguuauggcu

SEQ ID NO: 10676 - RNA, 21 nt, Artificial Sequence
  RPE65 RNA guide
caguuauggcuacuuacccua

SEQ ID NO: 10677 - RNA, 21 nt, Artificial Sequence
  RPE65 RNA guide
ccauaacugcacacuaaauuu

SEQ ID NO: 10678 - RNA, 21 nt, Artificial Sequence
  RPE65 RNA guide
ccccuaggguaaguagccaua

SEQ ID NO: 10679 - RNA, 21 nt, Artificial Sequence
  RPE65 RNA guide
cccuaggguaaguagccauaa

SEQ ID NO: 10680 - RNA, 21 nt, Artificial Sequence
  RPE65 RNA guide
ccuaggguaaguagccauaac

SEQ ID NO: 10681 - RNA, 21 nt, Artificial Sequence
  RPE65 RNA guide
cuaggguaaguagccauaacu

SEQ ID NO: 10682 - RNA, 21 nt, Artificial Sequence
  RPE65 RNA guide
gaagaccccuaggguaaguag

SEQ ID NO: 10683 - RNA, 21 nt, Artificial Sequence
  RPE65 RNA guide
gaccccuaggguaaguagcca

SEQ ID NO: 10684 - RNA, 21 nt, Artificial Sequence
  RPE65 RNA guide
gcaguuauggcuacuuacccu

SEQ ID NO: 10685 - RNA, 21 nt, Artificial Sequence
  RPE65 RNA guide
gccauaacugcacacuaaauu

SEQ ID NO: 10686 - RNA, 21 nt, Artificial Sequence
  RPE65 RNA guide
ggguaaguagccauaacugca

SEQ ID NO: 10687 - RNA, 21 nt, Artificial Sequence
  RPE65 RNA guide
gguaaguagccauaacugcac

SEQ ID NO: 10688 - RNA, 21 nt, Artificial Sequence
  RPE65 RNA guide
guaaguagccauaacugcaca

SEQ ID NO: 10689 - RNA, 21 nt, Artificial Sequence
  RPE65 RNA guide
guagccauaacugcacacuaa

SEQ ID NO: 10690 - RNA, 21 nt, Artificial Sequence
  RPE65 RNA guide
gugcaguuauggcuacuuacc

SEQ ID NO: 10691 - RNA, 21 nt, Artificial Sequence
  RPE65 RNA guide
gugugcaguuauggcuacuua

SEQ ID NO: 10692 - RNA, 21 nt, Artificial Sequence
  RPE65 RNA guide
guuauggcuacuuacccuagg

SEQ ID NO: 10693 - RNA, 21 nt, Artificial Sequence
  RPE65 RNA guide
uaaguagccauaacugcacac

SEQ ID NO: 10694 - RNA, 21 nt, Artificial Sequence
  RPE65 RNA guide
uagccauaacugcacacuaaa

SEQ ID NO: 10695 - RNA, 21 nt, Artificial Sequence
  RPE65 RNA guide
uaggguaaguagccauaacug

SEQ ID NO: 10696 - RNA, 21 nt, Artificial Sequence
  RPE65 RNA guide
uagugugcaguuauggcuacu

SEQ ID NO: 10697 - RNA, 21 nt, Artificial Sequence
  RPE65 RNA guide
uauggcuacuuacccuagggg

SEQ ID NO: 10698 - RNA, 21 nt, Artificial Sequence
  RPE65 RNA guide
ugcaguuauggcuacuuaccc

SEQ ID NO: 10699 - RNA, 21 nt, Artificial Sequence
  RPE65 RNA guide
ugugcaguuauggcuacuuac

SEQ ID NO: 10700 - RNA, 21 nt, Artificial Sequence
  RPE65 RNA guide
uuagugugcaguuauggcuac

SEQ ID NO: 10701 - RNA, 21 nt, Artificial Sequence
  RPE65 RNA guide
uuauggcuacuuacccuaggg

SEQ ID NO: 10702 - RNA, 21 nt, Artificial Sequence
  RPE65 RNA guide
uuuagugugcaguuauggcua

SEQ ID NO: 10703 - RNA, 22 nt, Artificial Sequence
  RPE65 RNA guide
aaauuuagugugcaguuauggc

SEQ ID NO: 10704 - RNA, 22 nt, Artificial Sequence
  RPE65 RNA guide
aagaagaccccuaggguaagua

SEQ ID NO: 10705 - RNA, 22 nt, Artificial Sequence
  RPE65 RNA guide
aagaccccuaggguaaguagcc

SEQ ID NO: 10706 - RNA, 22 nt, Artificial Sequence
  RPE65 RNA guide
aaguagccauaacugcacacua

SEQ ID NO: 10707 - RNA, 22 nt, Artificial Sequence
  RPE65 RNA guide
aauuuagugugcaguuauggcu

SEQ ID NO: 10708 - RNA, 22 nt, Artificial Sequence
  RPE65 RNA guide
accccuaggguaaguagccaua

SEQ ID NO: 10709 - RNA, 22 nt, Artificial Sequence
  RPE65 RNA guide
agaagaccccuaggguaaguag

SEQ ID NO: 10710 - RNA, 22 nt, Artificial Sequence
  RPE65 RNA guide
agaccccuaggguaaguagcca

SEQ ID NO: 10711 - RNA, 22 nt, Artificial Sequence
  RPE65 RNA guide
agccauaacugcacacuaaauu

SEQ ID NO: 10712 - RNA, 22 nt, Artificial Sequence
  RPE65 RNA guide
aggguaaguagccauaacugca

SEQ ID NO: 10713 - RNA, 22 nt, Artificial Sequence
  RPE65 RNA guide
aguagccauaacugcacacuaa

SEQ ID NO: 10714 - RNA, 22 nt, Artificial Sequence
  RPE65 RNA guide
agugugcaguuauggcuacuua

SEQ ID NO: 10715 - RNA, 22 nt, Artificial Sequence
  RPE65 RNA guide
aguuauggcuacuuacccuagg

SEQ ID NO: 10716 - RNA, 22 nt, Artificial Sequence
  RPE65 RNA guide
auggcuacuuacccuagggguc

SEQ ID NO: 10717 - RNA, 22 nt, Artificial Sequence
  RPE65 RNA guide
auuuagugugcaguuauggcua

SEQ ID NO: 10718 - RNA, 22 nt, Artificial Sequence
  RPE65 RNA guide
caguuauggcuacuuacccuag

SEQ ID NO: 10719 - RNA, 22 nt, Artificial Sequence
  RPE65 RNA guide
ccauaacugcacacuaaauuua

SEQ ID NO: 10720 - RNA, 22 nt, Artificial Sequence
  RPE65 RNA guide
ccccuaggguaaguagccauaa

SEQ ID NO: 10721 - RNA, 22 nt, Artificial Sequence
  RPE65 RNA guide
cccuaggguaaguagccauaac

SEQ ID NO: 10722 - RNA, 22 nt, Artificial Sequence
  RPE65 RNA guide
ccuaggguaaguagccauaacu

SEQ ID NO: 10723 - RNA, 22 nt, Artificial Sequence
  RPE65 RNA guide
cuaggguaaguagccauaacug

SEQ ID NO: 10724 - RNA, 22 nt, Artificial Sequence
  RPE65 RNA guide
gaagaccccuaggguaaguagc

SEQ ID NO: 10725 - RNA, 22 nt, Artificial Sequence
  RPE65 RNA guide
gaccccuaggguaaguagccau

SEQ ID NO: 10726 - RNA, 22 nt, Artificial Sequence
  RPE65 RNA guide
gcaguuauggcuacuuacccua

SEQ ID NO: 10727 - RNA, 22 nt, Artificial Sequence
  RPE65 RNA guide
gccauaacugcacacuaaauuu

SEQ ID NO: 10728 - RNA, 22 nt, Artificial Sequence
  RPE65 RNA guide
ggguaaguagccauaacugcac

SEQ ID NO: 10729 - RNA, 22 nt, Artificial Sequence
  RPE65 RNA guide
gguaaguagccauaacugcaca

SEQ ID NO: 10730 - RNA, 22 nt, Artificial Sequence
  RPE65 RNA guide
guaaguagccauaacugcacac

SEQ ID NO: 10731 - RNA, 22 nt, Artificial Sequence
  RPE65 RNA guide
guagccauaacugcacacuaaa

SEQ ID NO: 10732 - RNA, 22 nt, Artificial Sequence
  RPE65 RNA guide
gugcaguuauggcuacuuaccc

SEQ ID NO: 10733 - RNA, 22 nt, Artificial Sequence
  RPE65 RNA guide
gugugcaguuauggcuacuuac

SEQ ID NO: 10734 - RNA, 22 nt, Artificial Sequence
  RPE65 RNA guide
guuauggcuacuuacccuaggg

SEQ ID NO: 10735 - RNA, 22 nt, Artificial Sequence
  RPE65 RNA guide
uaaauuuagugugcaguuaugg

SEQ ID NO: 10736 - RNA, 22 nt, Artificial Sequence
  RPE65 RNA guide
uaaguagccauaacugcacacu

SEQ ID NO: 10737 - RNA, 22 nt, Artificial Sequence
  RPE65 RNA guide
uagccauaacugcacacuaaau

SEQ ID NO: 10738 - RNA, 22 nt, Artificial Sequence
  RPE65 RNA guide
uaggguaaguagccauaacugc

SEQ ID NO: 10739 - RNA, 22 nt, Artificial Sequence
  RPE65 RNA guide
uagugugcaguuauggcuacuu

SEQ ID NO: 10740 - RNA, 22 nt, Artificial Sequence
  RPE65 RNA guide
uauggcuacuuacccuaggggu

SEQ ID NO: 10741 - RNA, 22 nt, Artificial Sequence
  RPE65 RNA guide
ugcaguuauggcuacuuacccu

SEQ ID NO: 10742 - RNA, 22 nt, Artificial Sequence
  RPE65 RNA guide
ugugcaguuauggcuacuuacc

SEQ ID NO: 10743 - RNA, 22 nt, Artificial Sequence
  RPE65 RNA guide
uuagugugcaguuauggcuacu

SEQ ID NO: 10744 - RNA, 22 nt, Artificial Sequence
  RPE65 RNA guide
uuauggcuacuuacccuagggg

SEQ ID NO: 10745 - RNA, 22 nt, Artificial Sequence
  RPE65 RNA guide
uuuagugugcaguuauggcuac

SEQ ID NO: 10746 - RNA, 20 nt, Artificial Sequence
  RPE65 RNA guide
aaauuuagugugcaguuacg

SEQ ID NO: 10747 - RNA, 20 nt, Artificial Sequence
  RPE65 RNA guide
aaguagccguaacugcacac

SEQ ID NO: 10748 - RNA, 20 nt, Artificial Sequence
  RPE65 RNA guide
aauuuagugugcaguuacgg

SEQ ID NO: 10749 - RNA, 20 nt, Artificial Sequence
  RPE65 RNA guide
accccuaggguaaguagccg

SEQ ID NO: 10750 - RNA, 20 nt, Artificial Sequence
  RPE65 RNA guide
acggcuacuuacccuagggg

SEQ ID NO: 10751 - RNA, 20 nt, Artificial Sequence
  RPE65 RNA guide
agccguaacugcacacuaaa

SEQ ID NO: 10752 - RNA, 20 nt, Artificial Sequence
  RPE65 RNA guide
aggguaaguagccguaacug

SEQ ID NO: 10753 - RNA, 20 nt, Artificial Sequence
  RPE65 RNA guide
aguagccguaacugcacacu

SEQ ID NO: 10754 - RNA, 20 nt, Artificial Sequence
  RPE65 RNA guide
agugugcaguuacggcuacu

SEQ ID NO: 10755 - RNA, 20 nt, Artificial Sequence
  RPE65 RNA guide
aguuacggcuacuuacccua

SEQ ID NO: 10756 - RNA, 20 nt, Artificial Sequence
  RPE65 RNA guide
auuuagugugcaguuacggc

SEQ ID NO: 10757 - RNA, 20 nt, Artificial Sequence
  RPE65 RNA guide
caguuacggcuacuuacccu

SEQ ID NO: 10758 - RNA, 20 nt, Artificial Sequence
  RPE65 RNA guide
ccccuaggguaaguagccgu

SEQ ID NO: 10759 - RNA, 20 nt, Artificial Sequence
  RPE65 RNA guide
cccuaggguaaguagccgua

SEQ ID NO: 10760 - RNA, 20 nt, Artificial Sequence
  RPE65 RNA guide
ccguaacugcacacuaaauu

SEQ ID NO: 10761 - RNA, 20 nt, Artificial Sequence
  RPE65 RNA guide
ccuaggguaaguagccguaa

SEQ ID NO: 10762 - RNA, 20 nt, Artificial Sequence
  RPE65 RNA guide
cguaacugcacacuaaauuu

SEQ ID NO: 10763 - RNA, 20 nt, Artificial Sequence
  RPE65 RNA guide
cuaggguaaguagccguaac

SEQ ID NO: 10764 - RNA, 20 nt, Artificial Sequence
  RPE65 RNA guide
gcaguuacggcuacuuaccc

SEQ ID NO: 10765 - RNA, 20 nt, Artificial Sequence
  RPE65 RNA guide
gccguaacugcacacuaaau

SEQ ID NO: 10766 - RNA, 20 nt, Artificial Sequence
  RPE65 RNA guide
ggguaaguagccguaacugc

SEQ ID NO: 10767 - RNA, 20 nt, Artificial Sequence
  RPE65 RNA guide
gguaaguagccguaacugca

SEQ ID NO: 10768 - RNA, 20 nt, Artificial Sequence
  RPE65 RNA guide
guaaguagccguaacugcac

SEQ ID NO: 10769 - RNA, 20 nt, Artificial Sequence
  RPE65 RNA guide
guagccguaacugcacacua

SEQ ID NO: 10770 - RNA, 20 nt, Artificial Sequence
  RPE65 RNA guide
gugcaguuacggcuacuuac

SEQ ID NO: 10771 - RNA, 20 nt, Artificial Sequence
  RPE65 RNA guide
gugugcaguuacggcuacuu

SEQ ID NO: 10772 - RNA, 20 nt, Artificial Sequence
  RPE65 RNA guide
guuacggcuacuuacccuag

SEQ ID NO: 10773 - RNA, 20 nt, Artificial Sequence
  RPE65 RNA guide
uaaauuuagugugcaguuac

SEQ ID NO: 10774 - RNA, 20 nt, Artificial Sequence
  RPE65 RNA guide
uaaguagccguaacugcaca

SEQ ID NO: 10775 - RNA, 20 nt, Artificial Sequence
  RPE65 RNA guide
uacggcuacuuacccuaggg

SEQ ID NO: 10776 - RNA, 20 nt, Artificial Sequence
  RPE65 RNA guide
uagccguaacugcacacuaa

SEQ ID NO: 10777 - RNA, 20 nt, Artificial Sequence
  RPE65 RNA guide
uaggguaaguagccguaacu

SEQ ID NO: 10778 - RNA, 20 nt, Artificial Sequence
  RPE65 RNA guide
uagugugcaguuacggcuac

SEQ ID NO: 10779 - RNA, 20 nt, Artificial Sequence
  RPE65 RNA guide
ugcaguuacggcuacuuacc

SEQ ID NO: 10780 - RNA, 20 nt, Artificial Sequence
  RPE65 RNA guide
ugugcaguuacggcuacuua

SEQ ID NO: 10781 - RNA, 20 nt, Artificial Sequence
  RPE65 RNA guide
uuacggcuacuuacccuagg

SEQ ID NO: 10782 - RNA, 20 nt, Artificial Sequence
  RPE65 RNA guide
uuagugugcaguuacggcua

SEQ ID NO: 10783 - RNA, 20 nt, Artificial Sequence
  RPE65 RNA guide
uuuagugugcaguuacggcu

SEQ ID NO: 10784 - RNA, 21 nt, Artificial Sequence
  RPE65 RNA guide
aaauuuagugugcaguuacgg

SEQ ID NO: 10785 - RNA, 21 nt, Artificial Sequence
  RPE65 RNA guide
aaguagccguaacugcacacu

SEQ ID NO: 10786 - RNA, 21 nt, Artificial Sequence
  RPE65 RNA guide
aauuuagugugcaguuacggc

SEQ ID NO: 10787 - RNA, 21 nt, Artificial Sequence
  RPE65 RNA guide
accccuaggguaaguagccgu

SEQ ID NO: 10788 - RNA, 21 nt, Artificial Sequence
  RPE65 RNA guide
acggcuacuuacccuaggggu

SEQ ID NO: 10789 - RNA, 21 nt, Artificial Sequence
  RPE65 RNA guide
agccguaacugcacacuaaau

SEQ ID NO: 10790 - RNA, 21 nt, Artificial Sequence
  RPE65 RNA guide
aggguaaguagccguaacugc

SEQ ID NO: 10791 - RNA, 21 nt, Artificial Sequence
  RPE65 RNA guide
aguagccguaacugcacacua

SEQ ID NO: 10792 - RNA, 21 nt, Artificial Sequence
  RPE65 RNA guide
agugugcaguuacggcuacuu

SEQ ID NO: 10793 - RNA, 21 nt, Artificial Sequence
  RPE65 RNA guide
aguuacggcuacuuacccuag

SEQ ID NO: 10794 - RNA, 21 nt, Artificial Sequence
  RPE65 RNA guide
auuuagugugcaguuacggcu

SEQ ID NO: 10795 - RNA, 21 nt, Artificial Sequence
  RPE65 RNA guide
caguuacggcuacuuacccua

SEQ ID NO: 10796 - RNA, 21 nt, Artificial Sequence
  RPE65 RNA guide
ccccuaggguaaguagccgua

SEQ ID NO: 10797 - RNA, 21 nt, Artificial Sequence
  RPE65 RNA guide
cccuaggguaaguagccguaa

SEQ ID NO: 10798 - RNA, 21 nt, Artificial Sequence
  RPE65 RNA guide
ccguaacugcacacuaaauuu

SEQ ID NO: 10799 - RNA, 21 nt, Artificial Sequence
  RPE65 RNA guide
ccuaggguaaguagccguaac

SEQ ID NO: 10800 - RNA, 21 nt, Artificial Sequence
  RPE65 RNA guide
cguaacugcacacuaaauuua

SEQ ID NO: 10801 - RNA, 21 nt, Artificial Sequence
  RPE65 RNA guide
cuaggguaaguagccguaacu

SEQ ID NO: 10802 - RNA, 21 nt, Artificial Sequence
  RPE65 RNA guide
gaccccuaggguaaguagccg

SEQ ID NO: 10803 - RNA, 21 nt, Artificial Sequence
  RPE65 RNA guide
gcaguuacggcuacuuacccu

SEQ ID NO: 10804 - RNA, 21 nt, Artificial Sequence
  RPE65 RNA guide
gccguaacugcacacuaaauu

SEQ ID NO: 10805 - RNA, 21 nt, Artificial Sequence
  RPE65 RNA guide
ggguaaguagccguaacugca

SEQ ID NO: 10806 - RNA, 21 nt, Artificial Sequence
  RPE65 RNA guide
gguaaguagccguaacugcac

SEQ ID NO: 10807 - RNA, 21 nt, Artificial Sequence
  RPE65 RNA guide
guaaguagccguaacugcaca

SEQ ID NO: 10808 - RNA, 21 nt, Artificial Sequence
  RPE65 RNA guide
guagccguaacugcacacuaa

SEQ ID NO: 10809 - RNA, 21 nt, Artificial Sequence
  RPE65 RNA guide
gugcaguuacggcuacuuacc

SEQ ID NO: 10810 - RNA, 21 nt, Artificial Sequence
  RPE65 RNA guide
gugugcaguuacggcuacuua

SEQ ID NO: 10811 - RNA, 21 nt, Artificial Sequence
  RPE65 RNA guide
guuacggcuacuuacccuagg

SEQ ID NO: 10812 - RNA, 21 nt, Artificial Sequence
  RPE65 RNA guide
uaaauuuagugugcaguuacg

SEQ ID NO: 10813 - RNA, 21 nt, Artificial Sequence
  RPE65 RNA guide
uaaguagccguaacugcacac

SEQ ID NO: 10814 - RNA, 21 nt, Artificial Sequence
  RPE65 RNA guide
uacggcuacuuacccuagggg

SEQ ID NO: 10815 - RNA, 21 nt, Artificial Sequence
  RPE65 RNA guide
uagccguaacugcacacuaaa

SEQ ID NO: 10816 - RNA, 21 nt, Artificial Sequence
  RPE65 RNA guide
uaggguaaguagccguaacug

SEQ ID NO: 10817 - RNA, 21 nt, Artificial Sequence
  RPE65 RNA guide
uagugugcaguuacggcuacu

SEQ ID NO: 10818 - RNA, 21 nt, Artificial Sequence
  RPE65 RNA guide
ugcaguuacggcuacuuaccc

SEQ ID NO: 10819 - RNA, 21 nt, Artificial Sequence
  RPE65 RNA guide
ugugcaguuacggcuacuuac

SEQ ID NO: 10820 - RNA, 21 nt, Artificial Sequence
  RPE65 RNA guide
uuacggcuacuuacccuaggg

SEQ ID NO: 10821 - RNA, 21 nt, Artificial Sequence
  RPE65 RNA guide
uuagugugcaguuacggcuac

SEQ ID NO: 10822 - RNA, 21 nt, Artificial Sequence
  RPE65 RNA guide
uuuagugugcaguuacggcua

SEQ ID NO: 10823 - RNA, 22 nt, Artificial Sequence
  RPE65 RNA guide
aaauuuagugugcaguuacggc

SEQ ID NO: 10824 - RNA, 22 nt, Artificial Sequence
  RPE65 RNA guide
aaguagccguaacugcacacua

SEQ ID NO: 10825 - RNA, 22 nt, Artificial Sequence
  RPE65 RNA guide
aauuuagugugcaguuacggcu

SEQ ID NO: 10826 - RNA, 22 nt, Artificial Sequence
  RPE65 RNA guide
accccuaggguaaguagccgua

SEQ ID NO: 10827 - RNA, 22 nt, Artificial Sequence
  RPE65 RNA guide
acggcuacuuacccuagggguc

SEQ ID NO: 10828 - RNA, 22 nt, Artificial Sequence
  RPE65 RNA guide
agaccccuaggguaaguagccg

SEQ ID NO: 10829 - RNA, 22 nt, Artificial Sequence
  RPE65 RNA guide
agccguaacugcacacuaaauu

SEQ ID NO: 10830 - RNA, 22 nt, Artificial Sequence
  RPE65 RNA guide
aggguaaguagccguaacugca

SEQ ID NO: 10831 - RNA, 22 nt, Artificial Sequence
  RPE65 RNA guide
aguagccguaacugcacacuaa

SEQ ID NO: 10832 - RNA, 22 nt, Artificial Sequence
  RPE65 RNA guide
agugugcaguuacggcuacuua

SEQ ID NO: 10833 - RNA, 22 nt, Artificial Sequence
  RPE65 RNA guide
aguuacggcuacuuacccuagg

SEQ ID NO: 10834 - RNA, 22 nt, Artificial Sequence
  RPE65 RNA guide
auuuagugugcaguuacggcua

SEQ ID NO: 10835 - RNA, 22 nt, Artificial Sequence
  RPE65 RNA guide
caguuacggcuacuuacccuag

SEQ ID NO: 10836 - RNA, 22 nt, Artificial Sequence
  RPE65 RNA guide
ccccuaggguaaguagccguaa

SEQ ID NO: 10837 - RNA, 22 nt, Artificial Sequence
  RPE65 RNA guide
cccuaggguaaguagccguaac

SEQ ID NO: 10838 - RNA, 22 nt, Artificial Sequence
  RPE65 RNA guide
ccguaacugcacacuaaauuua

SEQ ID NO: 10839 - RNA, 22 nt, Artificial Sequence
  RPE65 RNA guide
ccuaggguaaguagccguaacu

SEQ ID NO: 10840 - RNA, 22 nt, Artificial Sequence
  RPE65 RNA guide
cguaacugcacacuaaauuuaa

SEQ ID NO: 10841 - RNA, 22 nt, Artificial Sequence
  RPE65 RNA guide
cuaggguaaguagccguaacug

SEQ ID NO: 10842 - RNA, 22 nt, Artificial Sequence
  RPE65 RNA guide
gaccccuaggguaaguagccgu

SEQ ID NO: 10843 - RNA, 22 nt, Artificial Sequence
  RPE65 RNA guide
gcaguuacggcuacuuacccua

SEQ ID NO: 10844 - RNA, 22 nt, Artificial Sequence
  RPE65 RNA guide
gccguaacugcacacuaaauuu

SEQ ID NO: 10845 - RNA, 22 nt, Artificial Sequence
  RPE65 RNA guide
ggguaaguagccguaacugcac

SEQ ID NO: 10846 - RNA, 22 nt, Artificial Sequence
  RPE65 RNA guide
gguaaguagccguaacugcaca

SEQ ID NO: 10847 - RNA, 22 nt, Artificial Sequence
  RPE65 RNA guide
guaaguagccguaacugcacac

SEQ ID NO: 10848 - RNA, 22 nt, Artificial Sequence
  RPE65 RNA guide
guagccguaacugcacacuaaa

SEQ ID NO: 10849 - RNA, 22 nt, Artificial Sequence
  RPE65 RNA guide
gugcaguuacggcuacuuaccc

SEQ ID NO: 10850 - RNA, 22 nt, Artificial Sequence
  RPE65 RNA guide
gugugcaguuacggcuacuuac

SEQ ID NO: 10851 - RNA, 22 nt, Artificial Sequence
  RPE65 RNA guide
guuacggcuacuuacccuaggg

SEQ ID NO: 10852 - RNA, 22 nt, Artificial Sequence
  RPE65 RNA guide
uaaauuuagugugcaguuacgg

SEQ ID NO: 10853 - RNA, 22 nt, Artificial Sequence
  RPE65 RNA guide
uaaguagccguaacugcacacu

SEQ ID NO: 10854 - RNA, 22 nt, Artificial Sequence
  RPE65 RNA guide
uacggcuacuuacccuaggggu

SEQ ID NO: 10855 - RNA, 22 nt, Artificial Sequence
  RPE65 RNA guide
uagccguaacugcacacuaaau

SEQ ID NO: 10856 - RNA, 22 nt, Artificial Sequence
  RPE65 RNA guide
uaggguaaguagccguaacugc

SEQ ID NO: 10857 - RNA, 22 nt, Artificial Sequence
  RPE65 RNA guide
uagugugcaguuacggcuacuu

SEQ ID NO: 10858 - RNA, 22 nt, Artificial Sequence
  RPE65 RNA guide
ugcaguuacggcuacuuacccu

SEQ ID NO: 10859 - RNA, 22 nt, Artificial Sequence
  RPE65 RNA guide
ugugcaguuacggcuacuuacc

SEQ ID NO: 10860 - RNA, 22 nt, Artificial Sequence
  RPE65 RNA guide
uuaaauuuagugugcaguuacg

SEQ ID NO: 10861 - RNA, 22 nt, Artificial Sequence
  RPE65 RNA guide
uuacggcuacuuacccuagggg

SEQ ID NO: 10862 - RNA, 22 nt, Artificial Sequence
  RPE65 RNA guide
uuagugugcaguuacggcuacu

SEQ ID NO: 10863 - RNA, 22 nt, Artificial Sequence
  RPE65 RNA guide
uuuagugugcaguuacggcuac

SEQ ID NO: 10864 - RNA, 20 nt, Artificial Sequence
  RPE65 RNA guide
aacggguggagcccaucaca

SEQ ID NO: 10865 - RNA, 20 nt, Artificial Sequence
  RPE65 RNA guide
acggguggagcccaucacau

SEQ ID NO: 10866 - RNA, 20 nt, Artificial Sequence
  RPE65 RNA guide
acugucccuaacggguggag

SEQ ID NO: 10867 - RNA, 20 nt, Artificial Sequence
  RPE65 RNA guide
agcccaucacaugccuaugc

SEQ ID NO: 10868 - RNA, 20 nt, Artificial Sequence
  RPE65 RNA guide
aggcaugugaugggcuccac

SEQ ID NO: 10869 - RNA, 20 nt, Artificial Sequence
  RPE65 RNA guide
agggcauaggcaugugaugg

SEQ ID NO: 10870 - RNA, 20 nt, Artificial Sequence
  RPE65 RNA guide
agugagggcauaggcaugug

SEQ ID NO: 10871 - RNA, 20 nt, Artificial Sequence
  RPE65 RNA guide
auaggcaugugaugggcucc

SEQ ID NO: 10872 - RNA, 20 nt, Artificial Sequence
  RPE65 RNA guide
augggcuccacccguuaggg

SEQ ID NO: 10873 - RNA, 20 nt, Artificial Sequence
  RPE65 RNA guide
augugaugggcuccacccgu

SEQ ID NO: 10874 - RNA, 20 nt, Artificial Sequence
  RPE65 RNA guide
cacugucccuaacgggugga

SEQ ID NO: 10875 - RNA, 20 nt, Artificial Sequence
  RPE65 RNA guide
cagugagggcauaggcaugu

SEQ ID NO: 10876 - RNA, 20 nt, Artificial Sequence
  RPE65 RNA guide
cauaggcaugugaugggcuc

SEQ ID NO: 10877 - RNA, 20 nt, Artificial Sequence
  RPE65 RNA guide
caugugaugggcuccacccg

SEQ ID NO: 10878 - RNA, 20 nt, Artificial Sequence
  RPE65 RNA guide
ccaucacaugccuaugcccu

SEQ ID NO: 10879 - RNA, 20 nt, Artificial Sequence
  RPE65 RNA guide
cccaucacaugccuaugccc

SEQ ID NO: 10880 - RNA, 20 nt, Artificial Sequence
  RPE65 RNA guide
cccuaacggguggagcccau

SEQ ID NO: 10881 - RNA, 20 nt, Artificial Sequence
  RPE65 RNA guide
ccuaacggguggagcccauc

SEQ ID NO: 10882 - RNA, 20 nt, Artificial Sequence
  RPE65 RNA guide
cggguggagcccaucacaug

SEQ ID NO: 10883 - RNA, 20 nt, Artificial Sequence
  RPE65 RNA guide
cuaacggguggagcccauca

SEQ ID NO: 10884 - RNA, 20 nt, Artificial Sequence
  RPE65 RNA guide
cugucccuaacggguggagc

SEQ ID NO: 10885 - RNA, 20 nt, Artificial Sequence
  RPE65 RNA guide
gagcccaucacaugccuaug

SEQ ID NO: 10886 - RNA, 20 nt, Artificial Sequence
  RPE65 RNA guide
gagggcauaggcaugugaug

SEQ ID NO: 10887 - RNA, 20 nt, Artificial Sequence
  RPE65 RNA guide
gaugggcuccacccguuagg

SEQ ID NO: 10888 - RNA, 20 nt, Artificial Sequence
  RPE65 RNA guide
gcauaggcaugugaugggcu

SEQ ID NO: 10889 - RNA, 20 nt, Artificial Sequence
  RPE65 RNA guide
gcaugugaugggcuccaccc

SEQ ID NO: 10890 - RNA, 20 nt, Artificial Sequence
  RPE65 RNA guide
gcccaucacaugccuaugcc

SEQ ID NO: 10891 - RNA, 20 nt, Artificial Sequence
  RPE65 RNA guide
ggagcccaucacaugccuau

SEQ ID NO: 10892 - RNA, 20 nt, Artificial Sequence
  RPE65 RNA guide
ggcauaggcaugugaugggc

SEQ ID NO: 10893 - RNA, 20 nt, Artificial Sequence
  RPE65 RNA guide
ggcaugugaugggcuccacc

SEQ ID NO: 10894 - RNA, 20 nt, Artificial Sequence
  RPE65 RNA guide
gggcauaggcaugugauggg

SEQ ID NO: 10895 - RNA, 20 nt, Artificial Sequence
  RPE65 RNA guide
ggguggagcccaucacaugc

SEQ ID NO: 10896 - RNA, 20 nt, Artificial Sequence
  RPE65 RNA guide
gguggagcccaucacaugcc

SEQ ID NO: 10897 - RNA, 20 nt, Artificial Sequence
  RPE65 RNA guide
gucccuaacggguggagccc

SEQ ID NO: 10898 - RNA, 20 nt, Artificial Sequence
  RPE65 RNA guide
gugagggcauaggcauguga

SEQ ID NO: 10899 - RNA, 20 nt, Artificial Sequence
  RPE65 RNA guide
gugaugggcuccacccguua

SEQ ID NO: 10900 - RNA, 20 nt, Artificial Sequence
  RPE65 RNA guide
guggagcccaucacaugccu

SEQ ID NO: 10901 - RNA, 20 nt, Artificial Sequence
  RPE65 RNA guide
uaacggguggagcccaucac

SEQ ID NO: 10902 - RNA, 20 nt, Artificial Sequence
  RPE65 RNA guide
uaggcaugugaugggcucca

SEQ ID NO: 10903 - RNA, 20 nt, Artificial Sequence
  RPE65 RNA guide
ucccuaacggguggagccca

SEQ ID NO: 10904 - RNA, 20 nt, Artificial Sequence
  RPE65 RNA guide
ugagggcauaggcaugugau

SEQ ID NO: 10905 - RNA, 20 nt, Artificial Sequence
  RPE65 RNA guide
ugaugggcuccacccguuag

SEQ ID NO: 10906 - RNA, 20 nt, Artificial Sequence
  RPE65 RNA guide
uggagcccaucacaugccua

SEQ ID NO: 10907 - RNA, 20 nt, Artificial Sequence
  RPE65 RNA guide
ugggcuccacccguuaggga

SEQ ID NO: 10908 - RNA, 20 nt, Artificial Sequence
  RPE65 RNA guide
ugucccuaacggguggagcc

SEQ ID NO: 10909 - RNA, 20 nt, Artificial Sequence
  RPE65 RNA guide
ugugaugggcuccacccguu

SEQ ID NO: 10910 - RNA, 21 nt, Artificial Sequence
  RPE65 RNA guide
aacggguggagcccaucacau

SEQ ID NO: 10911 - RNA, 21 nt, Artificial Sequence
  RPE65 RNA guide
acagugagggcauaggcaugu

SEQ ID NO: 10912 - RNA, 21 nt, Artificial Sequence
  RPE65 RNA guide
acggguggagcccaucacaug

SEQ ID NO: 10913 - RNA, 21 nt, Artificial Sequence
  RPE65 RNA guide
acugucccuaacggguggagc

SEQ ID NO: 10914 - RNA, 21 nt, Artificial Sequence
  RPE65 RNA guide
agcccaucacaugccuaugcc

SEQ ID NO: 10915 - RNA, 21 nt, Artificial Sequence
  RPE65 RNA guide
aggcaugugaugggcuccacc

SEQ ID NO: 10916 - RNA, 21 nt, Artificial Sequence
  RPE65 RNA guide
agggcauaggcaugugauggg

SEQ ID NO: 10917 - RNA, 21 nt, Artificial Sequence
  RPE65 RNA guide
agugagggcauaggcauguga

SEQ ID NO: 10918 - RNA, 21 nt, Artificial Sequence
  RPE65 RNA guide
auaggcaugugaugggcucca

SEQ ID NO: 10919 - RNA, 21 nt, Artificial Sequence
  RPE65 RNA guide
augggcuccacccguuaggga

SEQ ID NO: 10920 - RNA, 21 nt, Artificial Sequence
  RPE65 RNA guide
augugaugggcuccacccguu

SEQ ID NO: 10921 - RNA, 21 nt, Artificial Sequence
  RPE65 RNA guide
cacugucccuaacggguggag

SEQ ID NO: 10922 - RNA, 21 nt, Artificial Sequence
  RPE65 RNA guide
cagugagggcauaggcaugug

SEQ ID NO: 10923 - RNA, 21 nt, Artificial Sequence
  RPE65 RNA guide
cauaggcaugugaugggcucc

SEQ ID NO: 10924 - RNA, 21 nt, Artificial Sequence
  RPE65 RNA guide
caugugaugggcuccacccgu

SEQ ID NO: 10925 - RNA, 21 nt, Artificial Sequence
  RPE65 RNA guide
ccacugucccuaacgggugga

SEQ ID NO: 10926 - RNA, 21 nt, Artificial Sequence
  RPE65 RNA guide
ccaucacaugccuaugcccuc

SEQ ID NO: 10927 - RNA, 21 nt, Artificial Sequence
  RPE65 RNA guide
cccaucacaugccuaugcccu

SEQ ID NO: 10928 - RNA, 21 nt, Artificial Sequence
  RPE65 RNA guide
cccuaacggguggagcccauc

SEQ ID NO: 10929 - RNA, 21 nt, Artificial Sequence
  RPE65 RNA guide
ccuaacggguggagcccauca

SEQ ID NO: 10930 - RNA, 21 nt, Artificial Sequence
  RPE65 RNA guide
cggguggagcccaucacaugc

SEQ ID NO: 10931 - RNA, 21 nt, Artificial Sequence
  RPE65 RNA guide
cuaacggguggagcccaucac

SEQ ID NO: 10932 - RNA, 21 nt, Artificial Sequence
  RPE65 RNA guide
cugucccuaacggguggagcc

SEQ ID NO: 10933 - RNA, 21 nt, Artificial Sequence
  RPE65 RNA guide
gagcccaucacaugccuaugc

SEQ ID NO: 10934 - RNA, 21 nt, Artificial Sequence
  RPE65 RNA guide
gagggcauaggcaugugaugg

SEQ ID NO: 10935 - RNA, 21 nt, Artificial Sequence
  RPE65 RNA guide
gaugggcuccacccguuaggg

SEQ ID NO: 10936 - RNA, 21 nt, Artificial Sequence
  RPE65 RNA guide
gcauaggcaugugaugggcuc

SEQ ID NO: 10937 - RNA, 21 nt, Artificial Sequence
  RPE65 RNA guide
gcaugugaugggcuccacccg

SEQ ID NO: 10938 - RNA, 21 nt, Artificial Sequence
  RPE65 RNA guide
gcccaucacaugccuaugccc

SEQ ID NO: 10939 - RNA, 21 nt, Artificial Sequence
  RPE65 RNA guide
ggagcccaucacaugccuaug

SEQ ID NO: 10940 - RNA, 21 nt, Artificial Sequence
  RPE65 RNA guide
ggcauaggcaugugaugggcu

SEQ ID NO: 10941 - RNA, 21 nt, Artificial Sequence
  RPE65 RNA guide
ggcaugugaugggcuccaccc

SEQ ID NO: 10942 - RNA, 21 nt, Artificial Sequence
  RPE65 RNA guide
gggcauaggcaugugaugggc

SEQ ID NO: 10943 - RNA, 21 nt, Artificial Sequence
  RPE65 RNA guide
ggguggagcccaucacaugcc

SEQ ID NO: 10944 - RNA, 21 nt, Artificial Sequence
  RPE65 RNA guide
gguggagcccaucacaugccu

SEQ ID NO: 10945 - RNA, 21 nt, Artificial Sequence
  RPE65 RNA guide
gucccuaacggguggagccca

SEQ ID NO: 10946 - RNA, 21 nt, Artificial Sequence
  RPE65 RNA guide
gugagggcauaggcaugugau

SEQ ID NO: 10947 - RNA, 21 nt, Artificial Sequence
  RPE65 RNA guide
gugaugggcuccacccguuag

SEQ ID NO: 10948 - RNA, 21 nt, Artificial Sequence
  RPE65 RNA guide
guggagcccaucacaugccua

SEQ ID NO: 10949 - RNA, 21 nt, Artificial Sequence
  RPE65 RNA guide
uaacggguggagcccaucaca

SEQ ID NO: 10950 - RNA, 21 nt, Artificial Sequence
  RPE65 RNA guide
uaggcaugugaugggcuccac

SEQ ID NO: 10951 - RNA, 21 nt, Artificial Sequence
  RPE65 RNA guide
ucccuaacggguggagcccau

SEQ ID NO: 10952 - RNA, 21 nt, Artificial Sequence
  RPE65 RNA guide
ugagggcauaggcaugugaug

SEQ ID NO: 10953 - RNA, 21 nt, Artificial Sequence
  RPE65 RNA guide
ugaugggcuccacccguuagg

SEQ ID NO: 10954 - RNA, 21 nt, Artificial Sequence
  RPE65 RNA guide
uggagcccaucacaugccuau

SEQ ID NO: 10955 - RNA, 21 nt, Artificial Sequence
  RPE65 RNA guide
ugggcuccacccguuagggac

SEQ ID NO: 10956 - RNA, 21 nt, Artificial Sequence
  RPE65 RNA guide
ugucccuaacggguggagccc

SEQ ID NO: 10957 - RNA, 21 nt, Artificial Sequence
  RPE65 RNA guide
ugugaugggcuccacccguua

SEQ ID NO: 10958 - RNA, 22 nt, Artificial Sequence
  RPE65 RNA guide
aacggguggagcccaucacaug

SEQ ID NO: 10959 - RNA, 22 nt, Artificial Sequence
  RPE65 RNA guide
acagugagggcauaggcaugug

SEQ ID NO: 10960 - RNA, 22 nt, Artificial Sequence
  RPE65 RNA guide
accacugucccuaacgggugga

SEQ ID NO: 10961 - RNA, 22 nt, Artificial Sequence
  RPE65 RNA guide
acggguggagcccaucacaugc

SEQ ID NO: 10962 - RNA, 22 nt, Artificial Sequence
  RPE65 RNA guide
acugucccuaacggguggagcc

SEQ ID NO: 10963 - RNA, 22 nt, Artificial Sequence
  RPE65 RNA guide
agcccaucacaugccuaugccc

SEQ ID NO: 10964 - RNA, 22 nt, Artificial Sequence
  RPE65 RNA guide
aggcaugugaugggcuccaccc

SEQ ID NO: 10965 - RNA, 22 nt, Artificial Sequence
  RPE65 RNA guide
agggcauaggcaugugaugggc

SEQ ID NO: 10966 - RNA, 22 nt, Artificial Sequence
  RPE65 RNA guide
agugagggcauaggcaugugau

SEQ ID NO: 10967 - RNA, 22 nt, Artificial Sequence
  RPE65 RNA guide
auaggcaugugaugggcuccac

SEQ ID NO: 10968 - RNA, 22 nt, Artificial Sequence
  RPE65 RNA guide
augggcuccacccguuagggac

SEQ ID NO: 10969 - RNA, 22 nt, Artificial Sequence
  RPE65 RNA guide
augugaugggcuccacccguua

SEQ ID NO: 10970 - RNA, 22 nt, Artificial Sequence
  RPE65 RNA guide
cacugucccuaacggguggagc

SEQ ID NO: 10971 - RNA, 22 nt, Artificial Sequence
  RPE65 RNA guide
cagugagggcauaggcauguga

SEQ ID NO: 10972 - RNA, 22 nt, Artificial Sequence
  RPE65 RNA guide
cauaggcaugugaugggcucca

SEQ ID NO: 10973 - RNA, 22 nt, Artificial Sequence
  RPE65 RNA guide
caugugaugggcuccacccguu

SEQ ID NO: 10974 - RNA, 22 nt, Artificial Sequence
  RPE65 RNA guide
ccacugucccuaacggguggag

SEQ ID NO: 10975 - RNA, 22 nt, Artificial Sequence
  RPE65 RNA guide
ccaucacaugccuaugcccuca

SEQ ID NO: 10976 - RNA, 22 nt, Artificial Sequence
  RPE65 RNA guide
cccaucacaugccuaugcccuc

SEQ ID NO: 10977 - RNA, 22 nt, Artificial Sequence
  RPE65 RNA guide
cccuaacggguggagcccauca

SEQ ID NO: 10978 - RNA, 22 nt, Artificial Sequence
  RPE65 RNA guide
ccuaacggguggagcccaucac

SEQ ID NO: 10979 - RNA, 22 nt, Artificial Sequence
  RPE65 RNA guide
cggguggagcccaucacaugcc

SEQ ID NO: 10980 - RNA, 22 nt, Artificial Sequence
  RPE65 RNA guide
cuaacggguggagcccaucaca

SEQ ID NO: 10981 - RNA, 22 nt, Artificial Sequence
  RPE65 RNA guide
cugucccuaacggguggagccc

SEQ ID NO: 10982 - RNA, 22 nt, Artificial Sequence
  RPE65 RNA guide
gagcccaucacaugccuaugcc

SEQ ID NO: 10983 - RNA, 22 nt, Artificial Sequence
  RPE65 RNA guide
gagggcauaggcaugugauggg

SEQ ID NO: 10984 - RNA, 22 nt, Artificial Sequence
  RPE65 RNA guide
gaugggcuccacccguuaggga

SEQ ID NO: 10985 - RNA, 22 nt, Artificial Sequence
  RPE65 RNA guide
gcauaggcaugugaugggcucc

SEQ ID NO: 10986 - RNA, 22 nt, Artificial Sequence
  RPE65 RNA guide
gcaugugaugggcuccacccgu

SEQ ID NO: 10987 - RNA, 22 nt, Artificial Sequence
  RPE65 RNA guide
gcccaucacaugccuaugcccu

SEQ ID NO: 10988 - RNA, 22 nt, Artificial Sequence
  RPE65 RNA guide
ggagcccaucacaugccuaugc

SEQ ID NO: 10989 - RNA, 22 nt, Artificial Sequence
  RPE65 RNA guide
ggcauaggcaugugaugggcuc

SEQ ID NO: 10990 - RNA, 22 nt, Artificial Sequence
  RPE65 RNA guide
ggcaugugaugggcuccacccg

SEQ ID NO: 10991 - RNA, 22 nt, Artificial Sequence
  RPE65 RNA guide
gggcauaggcaugugaugggcu

SEQ ID NO: 10992 - RNA, 22 nt, Artificial Sequence
  RPE65 RNA guide
ggguggagcccaucacaugccu

SEQ ID NO: 10993 - RNA, 22 nt, Artificial Sequence
  RPE65 RNA guide
gguggagcccaucacaugccua

SEQ ID NO: 10994 - RNA, 22 nt, Artificial Sequence
  RPE65 RNA guide
gucccuaacggguggagcccau

SEQ ID NO: 10995 - RNA, 22 nt, Artificial Sequence
  RPE65 RNA guide
gugagggcauaggcaugugaug

SEQ ID NO: 10996 - RNA, 22 nt, Artificial Sequence
  RPE65 RNA guide
gugaugggcuccacccguuagg

SEQ ID NO: 10997 - RNA, 22 nt, Artificial Sequence
  RPE65 RNA guide
guggagcccaucacaugccuau

SEQ ID NO: 10998 - RNA, 22 nt, Artificial Sequence
  RPE65 RNA guide
uaacggguggagcccaucacau

SEQ ID NO: 10999 - RNA, 22 nt, Artificial Sequence
  RPE65 RNA guide
uacagugagggcauaggcaugu

SEQ ID NO: 11000 - RNA, 22 nt, Artificial Sequence
  RPE65 RNA guide
uaggcaugugaugggcuccacc

SEQ ID NO: 11001 - RNA, 22 nt, Artificial Sequence
  RPE65 RNA guide
ucccuaacggguggagcccauc

SEQ ID NO: 11002 - RNA, 22 nt, Artificial Sequence
  RPE65 RNA guide
ugagggcauaggcaugugaugg

SEQ ID NO: 11003 - RNA, 22 nt, Artificial Sequence
  RPE65 RNA guide
ugaugggcuccacccguuaggg

SEQ ID NO: 11004 - RNA, 22 nt, Artificial Sequence
  RPE65 RNA guide
uggagcccaucacaugccuaug

SEQ ID NO: 11005 - RNA, 22 nt, Artificial Sequence
  RPE65 RNA guide
ugggcuccacccguuagggaca

SEQ ID NO: 11006 - RNA, 22 nt, Artificial Sequence
  RPE65 RNA guide
ugucccuaacggguggagccca

SEQ ID NO: 11007 - RNA, 22 nt, Artificial Sequence
  RPE65 RNA guide
ugugaugggcuccacccguuag

SEQ ID NO: 11008 - RNA, 20 nt, Artificial Sequence
  RPE65 RNA guide
aacggguggagccuaucaca

SEQ ID NO: 11009 - RNA, 20 nt, Artificial Sequence
  RPE65 RNA guide
acggguggagccuaucacau

SEQ ID NO: 11010 - RNA, 20 nt, Artificial Sequence
  RPE65 RNA guide
agccuaucacaugccuaugc

SEQ ID NO: 11011 - RNA, 20 nt, Artificial Sequence
  RPE65 RNA guide
aggcaugugauaggcuccac

SEQ ID NO: 11012 - RNA, 20 nt, Artificial Sequence
  RPE65 RNA guide
agggcauaggcaugugauag

SEQ ID NO: 11013 - RNA, 20 nt, Artificial Sequence
  RPE65 RNA guide
auaggcaugugauaggcucc

SEQ ID NO: 11014 - RNA, 20 nt, Artificial Sequence
  RPE65 RNA guide
auaggcuccacccguuaggg

SEQ ID NO: 11015 - RNA, 20 nt, Artificial Sequence
  RPE65 RNA guide
augugauaggcuccacccgu

SEQ ID NO: 11016 - RNA, 20 nt, Artificial Sequence
  RPE65 RNA guide
cauaggcaugugauaggcuc

SEQ ID NO: 11017 - RNA, 20 nt, Artificial Sequence
  RPE65 RNA guide
caugugauaggcuccacccg

SEQ ID NO: 11018 - RNA, 20 nt, Artificial Sequence
  RPE65 RNA guide
cccuaacggguggagccuau

SEQ ID NO: 11019 - RNA, 20 nt, Artificial Sequence
  RPE65 RNA guide
ccuaacggguggagccuauc

SEQ ID NO: 11020 - RNA, 20 nt, Artificial Sequence
  RPE65 RNA guide
ccuaucacaugccuaugccc

SEQ ID NO: 11021 - RNA, 20 nt, Artificial Sequence
  RPE65 RNA guide
cggguggagccuaucacaug

SEQ ID NO: 11022 - RNA, 20 nt, Artificial Sequence
  RPE65 RNA guide
cuaacggguggagccuauca

SEQ ID NO: 11023 - RNA, 20 nt, Artificial Sequence
  RPE65 RNA guide
cuaucacaugccuaugcccu

SEQ ID NO: 11024 - RNA, 20 nt, Artificial Sequence
  RPE65 RNA guide
gagccuaucacaugccuaug

SEQ ID NO: 11025 - RNA, 20 nt, Artificial Sequence
  RPE65 RNA guide
gagggcauaggcaugugaua

SEQ ID NO: 11026 - RNA, 20 nt, Artificial Sequence
  RPE65 RNA guide
gauaggcuccacccguuagg

SEQ ID NO: 11027 - RNA, 20 nt, Artificial Sequence
  RPE65 RNA guide
gcauaggcaugugauaggcu

SEQ ID NO: 11028 - RNA, 20 nt, Artificial Sequence
  RPE65 RNA guide
gcaugugauaggcuccaccc

SEQ ID NO: 11029 - RNA, 20 nt, Artificial Sequence
  RPE65 RNA guide
gccuaucacaugccuaugcc

SEQ ID NO: 11030 - RNA, 20 nt, Artificial Sequence
  RPE65 RNA guide
ggagccuaucacaugccuau

SEQ ID NO: 11031 - RNA, 20 nt, Artificial Sequence
  RPE65 RNA guide
ggcauaggcaugugauaggc

SEQ ID NO: 11032 - RNA, 20 nt, Artificial Sequence
  RPE65 RNA guide
ggcaugugauaggcuccacc

SEQ ID NO: 11033 - RNA, 20 nt, Artificial Sequence
  RPE65 RNA guide
gggcauaggcaugugauagg

SEQ ID NO: 11034 - RNA, 20 nt, Artificial Sequence
  RPE65 RNA guide
ggguggagccuaucacaugc

SEQ ID NO: 11035 - RNA, 20 nt, Artificial Sequence
  RPE65 RNA guide
gguggagccuaucacaugcc

SEQ ID NO: 11036 - RNA, 20 nt, Artificial Sequence
  RPE65 RNA guide
gucccuaacggguggagccu

SEQ ID NO: 11037 - RNA, 20 nt, Artificial Sequence
  RPE65 RNA guide
gugauaggcuccacccguua

SEQ ID NO: 11038 - RNA, 20 nt, Artificial Sequence
  RPE65 RNA guide
guggagccuaucacaugccu

SEQ ID NO: 11039 - RNA, 20 nt, Artificial Sequence
  RPE65 RNA guide
uaacggguggagccuaucac

SEQ ID NO: 11040 - RNA, 20 nt, Artificial Sequence
  RPE65 RNA guide
uaggcaugugauaggcucca

SEQ ID NO: 11041 - RNA, 20 nt, Artificial Sequence
  RPE65 RNA guide
uaggcuccacccguuaggga

SEQ ID NO: 11042 - RNA, 20 nt, Artificial Sequence
  RPE65 RNA guide
ucccuaacggguggagccua

SEQ ID NO: 11043 - RNA, 20 nt, Artificial Sequence
  RPE65 RNA guide
ugauaggcuccacccguuag

SEQ ID NO: 11044 - RNA, 20 nt, Artificial Sequence
  RPE65 RNA guide
uggagccuaucacaugccua

SEQ ID NO: 11045 - RNA, 20 nt, Artificial Sequence
  RPE65 RNA guide
ugugauaggcuccacccguu

SEQ ID NO: 11046 - RNA, 21 nt, Artificial Sequence
  RPE65 RNA guide
aacggguggagccuaucacau

SEQ ID NO: 11047 - RNA, 21 nt, Artificial Sequence
  RPE65 RNA guide
acggguggagccuaucacaug

SEQ ID NO: 11048 - RNA, 21 nt, Artificial Sequence
  RPE65 RNA guide
agccuaucacaugccuaugcc

SEQ ID NO: 11049 - RNA, 21 nt, Artificial Sequence
  RPE65 RNA guide
aggcaugugauaggcuccacc

SEQ ID NO: 11050 - RNA, 21 nt, Artificial Sequence
  RPE65 RNA guide
agggcauaggcaugugauagg

SEQ ID NO: 11051 - RNA, 21 nt, Artificial Sequence
  RPE65 RNA guide
auaggcaugugauaggcucca

SEQ ID NO: 11052 - RNA, 21 nt, Artificial Sequence
  RPE65 RNA guide
auaggcuccacccguuaggga

SEQ ID NO: 11053 - RNA, 21 nt, Artificial Sequence
  RPE65 RNA guide
augugauaggcuccacccguu

SEQ ID NO: 11054 - RNA, 21 nt, Artificial Sequence
  RPE65 RNA guide
cauaggcaugugauaggcucc

SEQ ID NO: 11055 - RNA, 21 nt, Artificial Sequence
  RPE65 RNA guide
caugugauaggcuccacccgu

SEQ ID NO: 11056 - RNA, 21 nt, Artificial Sequence
  RPE65 RNA guide
cccuaacggguggagccuauc

SEQ ID NO: 11057 - RNA, 21 nt, Artificial Sequence
  RPE65 RNA guide
ccuaacggguggagccuauca

SEQ ID NO: 11058 - RNA, 21 nt, Artificial Sequence
  RPE65 RNA guide
ccuaucacaugccuaugcccu

SEQ ID NO: 11059 - RNA, 21 nt, Artificial Sequence
  RPE65 RNA guide
cggguggagccuaucacaugc

SEQ ID NO: 11060 - RNA, 21 nt, Artificial Sequence
  RPE65 RNA guide
cuaacggguggagccuaucac

SEQ ID NO: 11061 - RNA, 21 nt, Artificial Sequence
  RPE65 RNA guide
cuaucacaugccuaugcccuc

SEQ ID NO: 11062 - RNA, 21 nt, Artificial Sequence
  RPE65 RNA guide
gagccuaucacaugccuaugc

SEQ ID NO: 11063 - RNA, 21 nt, Artificial Sequence
  RPE65 RNA guide
gagggcauaggcaugugauag

SEQ ID NO: 11064 - RNA, 21 nt, Artificial Sequence
  RPE65 RNA guide
gauaggcuccacccguuaggg

SEQ ID NO: 11065 - RNA, 21 nt, Artificial Sequence
  RPE65 RNA guide
gcauaggcaugugauaggcuc

SEQ ID NO: 11066 - RNA, 21 nt, Artificial Sequence
  RPE65 RNA guide
gcaugugauaggcuccacccg

SEQ ID NO: 11067 - RNA, 21 nt, Artificial Sequence
  RPE65 RNA guide
gccuaucacaugccuaugccc

SEQ ID NO: 11068 - RNA, 21 nt, Artificial Sequence
  RPE65 RNA guide
ggagccuaucacaugccuaug

SEQ ID NO: 11069 - RNA, 21 nt, Artificial Sequence
  RPE65 RNA guide
ggcauaggcaugugauaggcu

SEQ ID NO: 11070 - RNA, 21 nt, Artificial Sequence
  RPE65 RNA guide
ggcaugugauaggcuccaccc

SEQ ID NO: 11071 - RNA, 21 nt, Artificial Sequence
  RPE65 RNA guide
gggcauaggcaugugauaggc

SEQ ID NO: 11072 - RNA, 21 nt, Artificial Sequence
  RPE65 RNA guide
ggguggagccuaucacaugcc

SEQ ID NO: 11073 - RNA, 21 nt, Artificial Sequence
  RPE65 RNA guide
gguggagccuaucacaugccu

SEQ ID NO: 11074 - RNA, 21 nt, Artificial Sequence
  RPE65 RNA guide
gucccuaacggguggagccua

SEQ ID NO: 11075 - RNA, 21 nt, Artificial Sequence
  RPE65 RNA guide
gugauaggcuccacccguuag

SEQ ID NO: 11076 - RNA, 21 nt, Artificial Sequence
  RPE65 RNA guide
guggagccuaucacaugccua

SEQ ID NO: 11077 - RNA, 21 nt, Artificial Sequence
  RPE65 RNA guide
uaacggguggagccuaucaca

SEQ ID NO: 11078 - RNA, 21 nt, Artificial Sequence
  RPE65 RNA guide
uaggcaugugauaggcuccac

SEQ ID NO: 11079 - RNA, 21 nt, Artificial Sequence
  RPE65 RNA guide
uaggcuccacccguuagggac

SEQ ID NO: 11080 - RNA, 21 nt, Artificial Sequence
  RPE65 RNA guide
ucccuaacggguggagccuau

SEQ ID NO: 11081 - RNA, 21 nt, Artificial Sequence
  RPE65 RNA guide
ugagggcauaggcaugugaua

SEQ ID NO: 11082 - RNA, 21 nt, Artificial Sequence
  RPE65 RNA guide
ugauaggcuccacccguuagg

SEQ ID NO: 11083 - RNA, 21 nt, Artificial Sequence
  RPE65 RNA guide
uggagccuaucacaugccuau

SEQ ID NO: 11084 - RNA, 21 nt, Artificial Sequence
  RPE65 RNA guide
ugucccuaacggguggagccu

SEQ ID NO: 11085 - RNA, 21 nt, Artificial Sequence
  RPE65 RNA guide
ugugauaggcuccacccguua

SEQ ID NO: 11086 - RNA, 22 nt, Artificial Sequence
  RPE65 RNA guide
aacggguggagccuaucacaug

SEQ ID NO: 11087 - RNA, 22 nt, Artificial Sequence
  RPE65 RNA guide
acggguggagccuaucacaugc

SEQ ID NO: 11088 - RNA, 22 nt, Artificial Sequence
  RPE65 RNA guide
agccuaucacaugccuaugccc

SEQ ID NO: 11089 - RNA, 22 nt, Artificial Sequence
  RPE65 RNA guide
aggcaugugauaggcuccaccc

SEQ ID NO: 11090 - RNA, 22 nt, Artificial Sequence
  RPE65 RNA guide
agggcauaggcaugugauaggc

SEQ ID NO: 11091 - RNA, 22 nt, Artificial Sequence
  RPE65 RNA guide
auaggcaugugauaggcuccac

SEQ ID NO: 11092 - RNA, 22 nt, Artificial Sequence
  RPE65 RNA guide
auaggcuccacccguuagggac

SEQ ID NO: 11093 - RNA, 22 nt, Artificial Sequence
  RPE65 RNA guide
augugauaggcuccacccguua

SEQ ID NO: 11094 - RNA, 22 nt, Artificial Sequence
  RPE65 RNA guide
cauaggcaugugauaggcucca

SEQ ID NO: 11095 - RNA, 22 nt, Artificial Sequence
  RPE65 RNA guide
caugugauaggcuccacccguu

SEQ ID NO: 11096 - RNA, 22 nt, Artificial Sequence
  RPE65 RNA guide
cccuaacggguggagccuauca

SEQ ID NO: 11097 - RNA, 22 nt, Artificial Sequence
  RPE65 RNA guide
ccuaacggguggagccuaucac

SEQ ID NO: 11098 - RNA, 22 nt, Artificial Sequence
  RPE65 RNA guide
ccuaucacaugccuaugcccuc

SEQ ID NO: 11099 - RNA, 22 nt, Artificial Sequence
  RPE65 RNA guide
cggguggagccuaucacaugcc

SEQ ID NO: 11100 - RNA, 22 nt, Artificial Sequence
  RPE65 RNA guide
cuaacggguggagccuaucaca

SEQ ID NO: 11101 - RNA, 22 nt, Artificial Sequence
  RPE65 RNA guide
cuaucacaugccuaugcccuca

SEQ ID NO: 11102 - RNA, 22 nt, Artificial Sequence
  RPE65 RNA guide
cugucccuaacggguggagccu

SEQ ID NO: 11103 - RNA, 22 nt, Artificial Sequence
  RPE65 RNA guide
gagccuaucacaugccuaugcc

SEQ ID NO: 11104 - RNA, 22 nt, Artificial Sequence
  RPE65 RNA guide
gagggcauaggcaugugauagg

SEQ ID NO: 11105 - RNA, 22 nt, Artificial Sequence
  RPE65 RNA guide
gauaggcuccacccguuaggga

SEQ ID NO: 11106 - RNA, 22 nt, Artificial Sequence
  RPE65 RNA guide
gcauaggcaugugauaggcucc

SEQ ID NO: 11107 - RNA, 22 nt, Artificial Sequence
  RPE65 RNA guide
gcaugugauaggcuccacccgu

SEQ ID NO: 11108 - RNA, 22 nt, Artificial Sequence
  RPE65 RNA guide
gccuaucacaugccuaugcccu

SEQ ID NO: 11109 - RNA, 22 nt, Artificial Sequence
  RPE65 RNA guide
ggagccuaucacaugccuaugc

SEQ ID NO: 11110 - RNA, 22 nt, Artificial Sequence
  RPE65 RNA guide
ggcauaggcaugugauaggcuc

SEQ ID NO: 11111 - RNA, 22 nt, Artificial Sequence
  RPE65 RNA guide
ggcaugugauaggcuccacccg

SEQ ID NO: 11112 - RNA, 22 nt, Artificial Sequence
  RPE65 RNA guide
gggcauaggcaugugauaggcu

SEQ ID NO: 11113 - RNA, 22 nt, Artificial Sequence
  RPE65 RNA guide
ggguggagccuaucacaugccu

SEQ ID NO: 11114 - RNA, 22 nt, Artificial Sequence
  RPE65 RNA guide
gguggagccuaucacaugccua

SEQ ID NO: 11115 - RNA, 22 nt, Artificial Sequence
  RPE65 RNA guide
gucccuaacggguggagccuau

SEQ ID NO: 11116 - RNA, 22 nt, Artificial Sequence
  RPE65 RNA guide
gugagggcauaggcaugugaua

SEQ ID NO: 11117 - RNA, 22 nt, Artificial Sequence
  RPE65 RNA guide
gugauaggcuccacccguuagg

SEQ ID NO: 11118 - RNA, 22 nt, Artificial Sequence
  RPE65 RNA guide
guggagccuaucacaugccuau

SEQ ID NO: 11119 - RNA, 22 nt, Artificial Sequence
  RPE65 RNA guide
uaacggguggagccuaucacau

SEQ ID NO: 11120 - RNA, 22 nt, Artificial Sequence
  RPE65 RNA guide
uaggcaugugauaggcuccacc

SEQ ID NO: 11121 - RNA, 22 nt, Artificial Sequence
  RPE65 RNA guide
uaggcuccacccguuagggaca

SEQ ID NO: 11122 - RNA, 22 nt, Artificial Sequence
  RPE65 RNA guide
ucccuaacggguggagccuauc

SEQ ID NO: 11123 - RNA, 22 nt, Artificial Sequence
  RPE65 RNA guide
ugagggcauaggcaugugauag

SEQ ID NO: 11124 - RNA, 22 nt, Artificial Sequence
  RPE65 RNA guide
ugauaggcuccacccguuaggg

SEQ ID NO: 11125 - RNA, 22 nt, Artificial Sequence
  RPE65 RNA guide
uggagccuaucacaugccuaug

SEQ ID NO: 11126 - RNA, 22 nt, Artificial Sequence
  RPE65 RNA guide
ugucccuaacggguggagccua

SEQ ID NO: 11127 - RNA, 22 nt, Artificial Sequence
  RPE65 RNA guide
ugugauaggcuccacccguuag

SEQ ID NO: 11128 - RNA, 20 nt, Artificial Sequence
  RPE65 RNA guide
agagagcuaacaaucucugg

SEQ ID NO: 11129 - RNA, 20 nt, Artificial Sequence
  RPE65 RNA guide
agagauuguuagcucucuaa

SEQ ID NO: 11130 - RNA, 20 nt, Artificial Sequence
  RPE65 RNA guide
agagcuaacaaucucuggga

SEQ ID NO: 11131 - RNA, 20 nt, Artificial Sequence
  RPE65 RNA guide
agauuguuagcucucuaaua

SEQ ID NO: 11132 - RNA, 20 nt, Artificial Sequence
  RPE65 RNA guide
agccaucccagagauuguua

SEQ ID NO: 11133 - RNA, 20 nt, Artificial Sequence
  RPE65 RNA guide
agcuaacaaucucugggaug

SEQ ID NO: 11134 - RNA, 20 nt, Artificial Sequence
  RPE65 RNA guide
auauuagagagcuaacaauc

SEQ ID NO: 11135 - RNA, 20 nt, Artificial Sequence
  RPE65 RNA guide
aucccagagauuguuagcuc

SEQ ID NO: 11136 - RNA, 20 nt, Artificial Sequence
  RPE65 RNA guide
auuagagagcuaacaaucuc

SEQ ID NO: 11137 - RNA, 20 nt, Artificial Sequence
  RPE65 RNA guide
cagagauuguuagcucucua

SEQ ID NO: 11138 - RNA, 20 nt, Artificial Sequence
  RPE65 RNA guide
caucccagagauuguuagcu

SEQ ID NO: 11139 - RNA, 20 nt, Artificial Sequence
  RPE65 RNA guide
ccagagauuguuagcucucu

SEQ ID NO: 11140 - RNA, 20 nt, Artificial Sequence
  RPE65 RNA guide
ccaucccagagauuguuagc

SEQ ID NO: 11141 - RNA, 20 nt, Artificial Sequence
  RPE65 RNA guide
cccagagauuguuagcucuc

SEQ ID NO: 11142 - RNA, 20 nt, Artificial Sequence
  RPE65 RNA guide
gagagcuaacaaucucuggg

SEQ ID NO: 11143 - RNA, 20 nt, Artificial Sequence
  RPE65 RNA guide
gagauuguuagcucucuaau

SEQ ID NO: 11144 - RNA, 20 nt, Artificial Sequence
  RPE65 RNA guide
gagcuaacaaucucugggau

SEQ ID NO: 11145 - RNA, 20 nt, Artificial Sequence
  RPE65 RNA guide
gauuguuagcucucuaauau

SEQ ID NO: 11146 - RNA, 20 nt, Artificial Sequence
  RPE65 RNA guide
gccaucccagagauuguuag

SEQ ID NO: 11147 - RNA, 20 nt, Artificial Sequence
  RPE65 RNA guide
gcuaacaaucucugggaugg

SEQ ID NO: 11148 - RNA, 20 nt, Artificial Sequence
  RPE65 RNA guide
guaaauauuagagagcuaac

SEQ ID NO: 11149 - RNA, 20 nt, Artificial Sequence
  RPE65 RNA guide
guuagcucucuaauauuuac

SEQ ID NO: 11150 - RNA, 20 nt, Artificial Sequence
  RPE65 RNA guide
uagagagcuaacaaucucug

SEQ ID NO: 11151 - RNA, 20 nt, Artificial Sequence
  RPE65 RNA guide
uagccaucccagagauuguu

SEQ ID NO: 11152 - RNA, 20 nt, Artificial Sequence
  RPE65 RNA guide
uauuagagagcuaacaaucu

SEQ ID NO: 11153 - RNA, 20 nt, Artificial Sequence
  RPE65 RNA guide
ucccagagauuguuagcucu

SEQ ID NO: 11154 - RNA, 20 nt, Artificial Sequence
  RPE65 RNA guide
uuagagagcuaacaaucucu

SEQ ID NO: 11155 - RNA, 20 nt, Artificial Sequence
  RPE65 RNA guide
uuagccaucccagagauugu

SEQ ID NO: 11156 - RNA, 20 nt, Artificial Sequence
  RPE65 RNA guide
uuuagccaucccagagauug

SEQ ID NO: 11157 - RNA, 21 nt, Artificial Sequence
  RPE65 RNA guide
agagagcuaacaaucucuggg

SEQ ID NO: 11158 - RNA, 21 nt, Artificial Sequence
  RPE65 RNA guide
agagauuguuagcucucuaau

SEQ ID NO: 11159 - RNA, 21 nt, Artificial Sequence
  RPE65 RNA guide
agagcuaacaaucucugggau

SEQ ID NO: 11160 - RNA, 21 nt, Artificial Sequence
  RPE65 RNA guide
agccaucccagagauuguuag

SEQ ID NO: 11161 - RNA, 21 nt, Artificial Sequence
  RPE65 RNA guide
agcuaacaaucucugggaugg

SEQ ID NO: 11162 - RNA, 21 nt, Artificial Sequence
  RPE65 RNA guide
aucccagagauuguuagcucu

SEQ ID NO: 11163 - RNA, 21 nt, Artificial Sequence
  RPE65 RNA guide
auuagagagcuaacaaucucu

SEQ ID NO: 11164 - RNA, 21 nt, Artificial Sequence
  RPE65 RNA guide
cagagauuguuagcucucuaa

SEQ ID NO: 11165 - RNA, 21 nt, Artificial Sequence
  RPE65 RNA guide
caucccagagauuguuagcuc

SEQ ID NO: 11166 - RNA, 21 nt, Artificial Sequence
  RPE65 RNA guide
ccagagauuguuagcucucua

SEQ ID NO: 11167 - RNA, 21 nt, Artificial Sequence
  RPE65 RNA guide
ccaucccagagauuguuagcu

SEQ ID NO: 11168 - RNA, 21 nt, Artificial Sequence
  RPE65 RNA guide
cccagagauuguuagcucucu

SEQ ID NO: 11169 - RNA, 21 nt, Artificial Sequence
  RPE65 RNA guide
cuuuagccaucccagagauug

SEQ ID NO: 11170 - RNA, 21 nt, Artificial Sequence
  RPE65 RNA guide
gagagcuaacaaucucuggga

SEQ ID NO: 11171 - RNA, 21 nt, Artificial Sequence
  RPE65 RNA guide
gagauuguuagcucucuaaua

SEQ ID NO: 11172 - RNA, 21 nt, Artificial Sequence
  RPE65 RNA guide
gagcuaacaaucucugggaug

SEQ ID NO: 11173 - RNA, 21 nt, Artificial Sequence
  RPE65 RNA guide
gccaucccagagauuguuagc

SEQ ID NO: 11174 - RNA, 21 nt, Artificial Sequence
  RPE65 RNA guide
gcuaacaaucucugggauggc

SEQ ID NO: 11175 - RNA, 21 nt, Artificial Sequence
  RPE65 RNA guide
uagagagcuaacaaucucugg

SEQ ID NO: 11176 - RNA, 21 nt, Artificial Sequence
  RPE65 RNA guide
uagccaucccagagauuguua

SEQ ID NO: 11177 - RNA, 21 nt, Artificial Sequence
  RPE65 RNA guide
uauuagagagcuaacaaucuc

SEQ ID NO: 11178 - RNA, 21 nt, Artificial Sequence
  RPE65 RNA guide
ucccagagauuguuagcucuc

SEQ ID NO: 11179 - RNA, 21 nt, Artificial Sequence
  RPE65 RNA guide
uuagagagcuaacaaucucug

SEQ ID NO: 11180 - RNA, 21 nt, Artificial Sequence
  RPE65 RNA guide
uuagccaucccagagauuguu

SEQ ID NO: 11181 - RNA, 21 nt, Artificial Sequence
  RPE65 RNA guide
uuuagccaucccagagauugu

SEQ ID NO: 11182 - RNA, 22 nt, Artificial Sequence
  RPE65 RNA guide
agagagcuaacaaucucuggga

SEQ ID NO: 11183 - RNA, 22 nt, Artificial Sequence
  RPE65 RNA guide
agagauuguuagcucucuaaua

SEQ ID NO: 11184 - RNA, 22 nt, Artificial Sequence
  RPE65 RNA guide
agagcuaacaaucucugggaug

SEQ ID NO: 11185 - RNA, 22 nt, Artificial Sequence
  RPE65 RNA guide
agccaucccagagauuguuagc

SEQ ID NO: 11186 - RNA, 22 nt, Artificial Sequence
  RPE65 RNA guide
agcuaacaaucucugggauggc

SEQ ID NO: 11187 - RNA, 22 nt, Artificial Sequence
  RPE65 RNA guide
auauuagagagcuaacaaucuc

SEQ ID NO: 11188 - RNA, 22 nt, Artificial Sequence
  RPE65 RNA guide
aucccagagauuguuagcucuc

SEQ ID NO: 11189 - RNA, 22 nt, Artificial Sequence
  RPE65 RNA guide
auuagagagcuaacaaucucug

SEQ ID NO: 11190 - RNA, 22 nt, Artificial Sequence
  RPE65 RNA guide
cagagauuguuagcucucuaau

SEQ ID NO: 11191 - RNA, 22 nt, Artificial Sequence
  RPE65 RNA guide
caucccagagauuguuagcucu

SEQ ID NO: 11192 - RNA, 22 nt, Artificial Sequence
  RPE65 RNA guide
ccagagauuguuagcucucuaa

SEQ ID NO: 11193 - RNA, 22 nt, Artificial Sequence
  RPE65 RNA guide
ccaucccagagauuguuagcuc

SEQ ID NO: 11194 - RNA, 22 nt, Artificial Sequence
  RPE65 RNA guide
cccagagauuguuagcucucua

SEQ ID NO: 11195 - RNA, 22 nt, Artificial Sequence
  RPE65 RNA guide
ccuuuagccaucccagagauug

SEQ ID NO: 11196 - RNA, 22 nt, Artificial Sequence
  RPE65 RNA guide
cuuuagccaucccagagauugu

SEQ ID NO: 11197 - RNA, 22 nt, Artificial Sequence
  RPE65 RNA guide
gagagcuaacaaucucugggau

SEQ ID NO: 11198 - RNA, 22 nt, Artificial Sequence
  RPE65 RNA guide
gagauuguuagcucucuaauau

SEQ ID NO: 11199 - RNA, 22 nt, Artificial Sequence
  RPE65 RNA guide
gagcuaacaaucucugggaugg

SEQ ID NO: 11200 - RNA, 22 nt, Artificial Sequence
  RPE65 RNA guide
gccaucccagagauuguuagcu

SEQ ID NO: 11201 - RNA, 22 nt, Artificial Sequence
  RPE65 RNA guide
gcuaacaaucucugggauggcu

SEQ ID NO: 11202 - RNA, 22 nt, Artificial Sequence
  RPE65 RNA guide
uagagagcuaacaaucucuggg

SEQ ID NO: 11203 - RNA, 22 nt, Artificial Sequence
  RPE65 RNA guide
uagccaucccagagauuguuag

SEQ ID NO: 11204 - RNA, 22 nt, Artificial Sequence
  RPE65 RNA guide
uauuagagagcuaacaaucucu

SEQ ID NO: 11205 - RNA, 22 nt, Artificial Sequence
  RPE65 RNA guide
ucccagagauuguuagcucucu

SEQ ID NO: 11206 - RNA, 22 nt, Artificial Sequence
  RPE65 RNA guide
uuagagagcuaacaaucucugg

SEQ ID NO: 11207 - RNA, 22 nt, Artificial Sequence
  RPE65 RNA guide
uuagccaucccagagauuguua

SEQ ID NO: 11208 - RNA, 22 nt, Artificial Sequence
  RPE65 RNA guide
uuuagccaucccagagauuguu

SEQ ID NO: 11209 - RNA, 20 nt, Artificial Sequence
  RPE65 RNA guide
agagagauaacaaucucugg

SEQ ID NO: 11210 - RNA, 20 nt, Artificial Sequence
  RPE65 RNA guide
agagauaacaaucucuggga

SEQ ID NO: 11211 - RNA, 20 nt, Artificial Sequence
  RPE65 RNA guide
agagauuguuaucucucuaa

SEQ ID NO: 11212 - RNA, 20 nt, Artificial Sequence
  RPE65 RNA guide
agauaacaaucucugggaug

SEQ ID NO: 11213 - RNA, 20 nt, Artificial Sequence
  RPE65 RNA guide
aucccagagauuguuaucuc

SEQ ID NO: 11214 - RNA, 20 nt, Artificial Sequence
  RPE65 RNA guide
auuagagagauaacaaucuc

SEQ ID NO: 11215 - RNA, 20 nt, Artificial Sequence
  RPE65 RNA guide
cagagauuguuaucucucua

SEQ ID NO: 11216 - RNA, 20 nt, Artificial Sequence
  RPE65 RNA guide
caucccagagauuguuaucu

SEQ ID NO: 11217 - RNA, 20 nt, Artificial Sequence
  RPE65 RNA guide
ccagagauuguuaucucucu

SEQ ID NO: 11218 - RNA, 20 nt, Artificial Sequence
  RPE65 RNA guide
ccaucccagagauuguuauc

SEQ ID NO: 11219 - RNA, 20 nt, Artificial Sequence
  RPE65 RNA guide
cccagagauuguuaucucuc

SEQ ID NO: 11220 - RNA, 20 nt, Artificial Sequence
  RPE65 RNA guide
gagagauaacaaucucuggg

SEQ ID NO: 11221 - RNA, 20 nt, Artificial Sequence
  RPE65 RNA guide
gagauaacaaucucugggau

SEQ ID NO: 11222 - RNA, 20 nt, Artificial Sequence
  RPE65 RNA guide
gagauuguuaucucucuaau

SEQ ID NO: 11223 - RNA, 20 nt, Artificial Sequence
  RPE65 RNA guide
gauaacaaucucugggaugg

SEQ ID NO: 11224 - RNA, 20 nt, Artificial Sequence
  RPE65 RNA guide
gccaucccagagauuguuau

SEQ ID NO: 11225 - RNA, 20 nt, Artificial Sequence
  RPE65 RNA guide
uagagagauaacaaucucug

SEQ ID NO: 11226 - RNA, 20 nt, Artificial Sequence
  RPE65 RNA guide
ucccagagauuguuaucucu

SEQ ID NO: 11227 - RNA, 20 nt, Artificial Sequence
  RPE65 RNA guide
uuagagagauaacaaucucu

SEQ ID NO: 11228 - RNA, 21 nt, Artificial Sequence
  RPE65 RNA guide
agagagauaacaaucucuggg

SEQ ID NO: 11229 - RNA, 21 nt, Artificial Sequence
  RPE65 RNA guide
agagauaacaaucucugggau

SEQ ID NO: 11230 - RNA, 21 nt, Artificial Sequence
  RPE65 RNA guide
agauaacaaucucugggaugg

SEQ ID NO: 11231 - RNA, 21 nt, Artificial Sequence
  RPE65 RNA guide
agccaucccagagauuguuau

SEQ ID NO: 11232 - RNA, 21 nt, Artificial Sequence
  RPE65 RNA guide
aucccagagauuguuaucucu

SEQ ID NO: 11233 - RNA, 21 nt, Artificial Sequence
  RPE65 RNA guide
cagagauuguuaucucucuaa

SEQ ID NO: 11234 - RNA, 21 nt, Artificial Sequence
  RPE65 RNA guide
caucccagagauuguuaucuc

SEQ ID NO: 11235 - RNA, 21 nt, Artificial Sequence
  RPE65 RNA guide
ccagagauuguuaucucucua

SEQ ID NO: 11236 - RNA, 21 nt, Artificial Sequence
  RPE65 RNA guide
ccaucccagagauuguuaucu

SEQ ID NO: 11237 - RNA, 21 nt, Artificial Sequence
  RPE65 RNA guide
cccagagauuguuaucucucu

SEQ ID NO: 11238 - RNA, 21 nt, Artificial Sequence
  RPE65 RNA guide
gagagauaacaaucucuggga

SEQ ID NO: 11239 - RNA, 21 nt, Artificial Sequence
  RPE65 RNA guide
gagauaacaaucucugggaug

SEQ ID NO: 11240 - RNA, 21 nt, Artificial Sequence
  RPE65 RNA guide
gauaacaaucucugggauggc

SEQ ID NO: 11241 - RNA, 21 nt, Artificial Sequence
  RPE65 RNA guide
gccaucccagagauuguuauc

SEQ ID NO: 11242 - RNA, 21 nt, Artificial Sequence
  RPE65 RNA guide
uagagagauaacaaucucugg

SEQ ID NO: 11243 - RNA, 21 nt, Artificial Sequence
  RPE65 RNA guide
ucccagagauuguuaucucuc

SEQ ID NO: 11244 - RNA, 21 nt, Artificial Sequence
  RPE65 RNA guide
uuagagagauaacaaucucug

SEQ ID NO: 11245 - RNA, 22 nt, Artificial Sequence
  RPE65 RNA guide
agagagauaacaaucucuggga

SEQ ID NO: 11246 - RNA, 22 nt, Artificial Sequence
  RPE65 RNA guide
agagauaacaaucucugggaug

SEQ ID NO: 11247 - RNA, 22 nt, Artificial Sequence
  RPE65 RNA guide
agauaacaaucucugggauggc

SEQ ID NO: 11248 - RNA, 22 nt, Artificial Sequence
  RPE65 RNA guide
agccaucccagagauuguuauc

SEQ ID NO: 11249 - RNA, 22 nt, Artificial Sequence
  RPE65 RNA guide
aucccagagauuguuaucucuc

SEQ ID NO: 11250 - RNA, 22 nt, Artificial Sequence
  RPE65 RNA guide
auuagagagauaacaaucucug

SEQ ID NO: 11251 - RNA, 22 nt, Artificial Sequence
  RPE65 RNA guide
cagagauuguuaucucucuaau

SEQ ID NO: 11252 - RNA, 22 nt, Artificial Sequence
  RPE65 RNA guide
caucccagagauuguuaucucu

SEQ ID NO: 11253 - RNA, 22 nt, Artificial Sequence
  RPE65 RNA guide
ccagagauuguuaucucucuaa

SEQ ID NO: 11254 - RNA, 22 nt, Artificial Sequence
  RPE65 RNA guide
ccaucccagagauuguuaucuc

SEQ ID NO: 11255 - RNA, 22 nt, Artificial Sequence
  RPE65 RNA guide
cccagagauuguuaucucucua

SEQ ID NO: 11256 - RNA, 22 nt, Artificial Sequence
  RPE65 RNA guide
gagagauaacaaucucugggau

SEQ ID NO: 11257 - RNA, 22 nt, Artificial Sequence
  RPE65 RNA guide
gagauaacaaucucugggaugg

SEQ ID NO: 11258 - RNA, 22 nt, Artificial Sequence
  RPE65 RNA guide
gauaacaaucucugggauggcu

SEQ ID NO: 11259 - RNA, 22 nt, Artificial Sequence
  RPE65 RNA guide
gccaucccagagauuguuaucu

SEQ ID NO: 11260 - RNA, 22 nt, Artificial Sequence
  RPE65 RNA guide
uagagagauaacaaucucuggg

SEQ ID NO: 11261 - RNA, 22 nt, Artificial Sequence
  RPE65 RNA guide
uagccaucccagagauuguuau

SEQ ID NO: 11262 - RNA, 22 nt, Artificial Sequence
  RPE65 RNA guide
ucccagagauuguuaucucucu

SEQ ID NO: 11263 - RNA, 22 nt, Artificial Sequence
  RPE65 RNA guide
uuagagagauaacaaucucugg

SEQ ID NO: 11264 - RNA, 20 nt, Artificial Sequence
  RPE65 RNA guide
aaccauauacuaugaaagug

SEQ ID NO: 11265 - RNA, 20 nt, Artificial Sequence
  RPE65 RNA guide
aagcacuuucauaguauaug

SEQ ID NO: 11266 - RNA, 20 nt, Artificial Sequence
  RPE65 RNA guide
aaugcuuuauuaggcaaaac

SEQ ID NO: 11267 - RNA, 20 nt, Artificial Sequence
  RPE65 RNA guide
accauauacuaugaaagugc

SEQ ID NO: 11268 - RNA, 20 nt, Artificial Sequence
  RPE65 RNA guide
agcacuuucauaguauaugg

SEQ ID NO: 11269 - RNA, 20 nt, Artificial Sequence
  RPE65 RNA guide
aggcaaaaccauauacuaug

SEQ ID NO: 11270 - RNA, 20 nt, Artificial Sequence
  RPE65 RNA guide
aguauaugguuuugccuaau

SEQ ID NO: 11271 - RNA, 20 nt, Artificial Sequence
  RPE65 RNA guide
auaguauaugguuuugccua

SEQ ID NO: 11272 - RNA, 20 nt, Artificial Sequence
  RPE65 RNA guide
augcuuuauuaggcaaaacc

SEQ ID NO: 11273 - RNA, 20 nt, Artificial Sequence
  RPE65 RNA guide
auuaggcaaaaccauauacu

SEQ ID NO: 11274 - RNA, 20 nt, Artificial Sequence
  RPE65 RNA guide
cacuuucauaguauaugguu

SEQ ID NO: 11275 - RNA, 20 nt, Artificial Sequence
  RPE65 RNA guide
cauaguauaugguuuugccu

SEQ ID NO: 11276 - RNA, 20 nt, Artificial Sequence
  RPE65 RNA guide
cauauacuaugaaagugcuu

SEQ ID NO: 11277 - RNA, 20 nt, Artificial Sequence
  RPE65 RNA guide
ccauauacuaugaaagugcu

SEQ ID NO: 11278 - RNA, 20 nt, Artificial Sequence
  RPE65 RNA guide
cuuuauuaggcaaaaccaua

SEQ ID NO: 11279 - RNA, 20 nt, Artificial Sequence
  RPE65 RNA guide
gcaaaaccauauacuaugaa

SEQ ID NO: 11280 - RNA, 20 nt, Artificial Sequence
  RPE65 RNA guide
gcacuuucauaguauauggu

SEQ ID NO: 11281 - RNA, 20 nt, Artificial Sequence
  RPE65 RNA guide
gcuuuauuaggcaaaaccau

SEQ ID NO: 11282 - RNA, 20 nt, Artificial Sequence
  RPE65 RNA guide
ggcaaaaccauauacuauga

SEQ ID NO: 11283 - RNA, 20 nt, Artificial Sequence
  RPE65 RNA guide
guauaugguuuugccuaaua

SEQ ID NO: 11284 - RNA, 20 nt, Artificial Sequence
  RPE65 RNA guide
uaggcaaaaccauauacuau

SEQ ID NO: 11285 - RNA, 20 nt, Artificial Sequence
  RPE65 RNA guide
uaguauaugguuuugccuaa

SEQ ID NO: 11286 - RNA, 20 nt, Artificial Sequence
  RPE65 RNA guide
uauuaggcaaaaccauauac

SEQ ID NO: 11287 - RNA, 20 nt, Artificial Sequence
  RPE65 RNA guide
ucauaguauaugguuuugcc

SEQ ID NO: 11288 - RNA, 20 nt, Artificial Sequence
  RPE65 RNA guide
ugcuuuauuaggcaaaacca

SEQ ID NO: 11289 - RNA, 20 nt, Artificial Sequence
  RPE65 RNA guide
uuaggcaaaaccauauacua

SEQ ID NO: 11290 - RNA, 20 nt, Artificial Sequence
  RPE65 RNA guide
uucauaguauaugguuuugc

SEQ ID NO: 11291 - RNA, 21 nt, Artificial Sequence
  RPE65 RNA guide
aaccauauacuaugaaagugc

SEQ ID NO: 11292 - RNA, 21 nt, Artificial Sequence
  RPE65 RNA guide
aagcacuuucauaguauaugg

SEQ ID NO: 11293 - RNA, 21 nt, Artificial Sequence
  RPE65 RNA guide
aaugcuuuauuaggcaaaacc

SEQ ID NO: 11294 - RNA, 21 nt, Artificial Sequence
  RPE65 RNA guide
accauauacuaugaaagugcu

SEQ ID NO: 11295 - RNA, 21 nt, Artificial Sequence
  RPE65 RNA guide
agcacuuucauaguauauggu

SEQ ID NO: 11296 - RNA, 21 nt, Artificial Sequence
  RPE65 RNA guide
aggcaaaaccauauacuauga

SEQ ID NO: 11297 - RNA, 21 nt, Artificial Sequence
  RPE65 RNA guide
augcuuuauuaggcaaaacca

SEQ ID NO: 11298 - RNA, 21 nt, Artificial Sequence
  RPE65 RNA guide
cauaguauaugguuuugccua

SEQ ID NO: 11299 - RNA, 21 nt, Artificial Sequence
  RPE65 RNA guide
ccauauacuaugaaagugcuu

SEQ ID NO: 11300 - RNA, 21 nt, Artificial Sequence
  RPE65 RNA guide
gaaugcuuuauuaggcaaaac

SEQ ID NO: 11301 - RNA, 21 nt, Artificial Sequence
  RPE65 RNA guide
gcacuuucauaguauaugguu

SEQ ID NO: 11302 - RNA, 21 nt, Artificial Sequence
  RPE65 RNA guide
gcuuuauuaggcaaaaccaua

SEQ ID NO: 11303 - RNA, 21 nt, Artificial Sequence
  RPE65 RNA guide
ggcaaaaccauauacuaugaa

SEQ ID NO: 11304 - RNA, 21 nt, Artificial Sequence
  RPE65 RNA guide
uaggcaaaaccauauacuaug

SEQ ID NO: 11305 - RNA, 21 nt, Artificial Sequence
  RPE65 RNA guide
ucauaguauaugguuuugccu

SEQ ID NO: 11306 - RNA, 21 nt, Artificial Sequence
  RPE65 RNA guide
ugcuuuauuaggcaaaaccau

SEQ ID NO: 11307 - RNA, 21 nt, Artificial Sequence
  RPE65 RNA guide
uucauaguauaugguuuugcc

SEQ ID NO: 11308 - RNA, 22 nt, Artificial Sequence
  RPE65 RNA guide
aaaccauauacuaugaaagugc

SEQ ID NO: 11309 - RNA, 22 nt, Artificial Sequence
  RPE65 RNA guide
aaagcacuuucauaguauaugg

SEQ ID NO: 11310 - RNA, 22 nt, Artificial Sequence
  RPE65 RNA guide
aaccauauacuaugaaagugcu

SEQ ID NO: 11311 - RNA, 22 nt, Artificial Sequence
  RPE65 RNA guide
aagcacuuucauaguauauggu

SEQ ID NO: 11312 - RNA, 22 nt, Artificial Sequence
  RPE65 RNA guide
aaugcuuuauuaggcaaaacca

SEQ ID NO: 11313 - RNA, 22 nt, Artificial Sequence
  RPE65 RNA guide
accauauacuaugaaagugcuu

SEQ ID NO: 11314 - RNA, 22 nt, Artificial Sequence
  RPE65 RNA guide
agaaugcuuuauuaggcaaaac

SEQ ID NO: 11315 - RNA, 22 nt, Artificial Sequence
  RPE65 RNA guide
agcacuuucauaguauaugguu

SEQ ID NO: 11316 - RNA, 22 nt, Artificial Sequence
  RPE65 RNA guide
aggcaaaaccauauacuaugaa

SEQ ID NO: 11317 - RNA, 22 nt, Artificial Sequence
  RPE65 RNA guide
auaugguuuugccuaauaaagc

SEQ ID NO: 11318 - RNA, 22 nt, Artificial Sequence
  RPE65 RNA guide
augcuuuauuaggcaaaaccau

SEQ ID NO: 11319 - RNA, 22 nt, Artificial Sequence
  RPE65 RNA guide
cauaguauaugguuuugccuaa

SEQ ID NO: 11320 - RNA, 22 nt, Artificial Sequence
  RPE65 RNA guide
ccauauacuaugaaagugcuuu

SEQ ID NO: 11321 - RNA, 22 nt, Artificial Sequence
  RPE65 RNA guide
cuuucauaguauaugguuuugc

SEQ ID NO: 11322 - RNA, 22 nt, Artificial Sequence
  RPE65 RNA guide
gaaugcuuuauuaggcaaaacc

SEQ ID NO: 11323 - RNA, 22 nt, Artificial Sequence
  RPE65 RNA guide
gcaaaaccauauacuaugaaag

SEQ ID NO: 11324 - RNA, 22 nt, Artificial Sequence
  RPE65 RNA guide
gcacuuucauaguauaugguuu

SEQ ID NO: 11325 - RNA, 22 nt, Artificial Sequence
  RPE65 RNA guide
gcauuuuaaagcacuuucauag

SEQ ID NO: 11326 - RNA, 22 nt, Artificial Sequence
  RPE65 RNA guide
gcuuuauuaggcaaaaccauau

SEQ ID NO: 11327 - RNA, 22 nt, Artificial Sequence
  RPE65 RNA guide
ggcaaaaccauauacuaugaaa

SEQ ID NO: 11328 - RNA, 22 nt, Artificial Sequence
  RPE65 RNA guide
uaggcaaaaccauauacuauga

SEQ ID NO: 11329 - RNA, 22 nt, Artificial Sequence
  RPE65 RNA guide
ucauaguauaugguuuugccua

SEQ ID NO: 11330 - RNA, 22 nt, Artificial Sequence
  RPE65 RNA guide
ugcuuuauuaggcaaaaccaua

SEQ ID NO: 11331 - RNA, 22 nt, Artificial Sequence
  RPE65 RNA guide
uuaggcaaaaccauauacuaug

SEQ ID NO: 11332 - RNA, 22 nt, Artificial Sequence
  RPE65 RNA guide
uucauaguauaugguuuugccu

SEQ ID NO: 11333 - RNA, 22 nt, Artificial Sequence
  RPE65 RNA guide
uuucauaguauaugguuuugcc

SEQ ID NO: 11334 - RNA, 20 nt, Artificial Sequence
  RPE65 RNA guide
aaaaccauguacuaugaaag

SEQ ID NO: 11335 - RNA, 20 nt, Artificial Sequence
  RPE65 RNA guide
aaaccauguacuaugaaagu

SEQ ID NO: 11336 - RNA, 20 nt, Artificial Sequence
  RPE65 RNA guide
aaagcacuuucauaguacau

SEQ ID NO: 11337 - RNA, 20 nt, Artificial Sequence
  RPE65 RNA guide
aaccauguacuaugaaagug

SEQ ID NO: 11338 - RNA, 20 nt, Artificial Sequence
  RPE65 RNA guide
aagcacuuucauaguacaug

SEQ ID NO: 11339 - RNA, 20 nt, Artificial Sequence
  RPE65 RNA guide
acaugguuuugccuaauaaa

SEQ ID NO: 11340 - RNA, 20 nt, Artificial Sequence
  RPE65 RNA guide
accauguacuaugaaagugc

SEQ ID NO: 11341 - RNA, 20 nt, Artificial Sequence
  RPE65 RNA guide
acuuucauaguacaugguuu

SEQ ID NO: 11342 - RNA, 20 nt, Artificial Sequence
  RPE65 RNA guide
agcacuuucauaguacaugg

SEQ ID NO: 11343 - RNA, 20 nt, Artificial Sequence
  RPE65 RNA guide
aggcaaaaccauguacuaug

SEQ ID NO: 11344 - RNA, 20 nt, Artificial Sequence
  RPE65 RNA guide
aguacaugguuuugccuaau

SEQ ID NO: 11345 - RNA, 20 nt, Artificial Sequence
  RPE65 RNA guide
auaguacaugguuuugccua

SEQ ID NO: 11346 - RNA, 20 nt, Artificial Sequence
  RPE65 RNA guide
auguacuaugaaagugcuuu

SEQ ID NO: 11347 - RNA, 20 nt, Artificial Sequence
  RPE65 RNA guide
auuaggcaaaaccauguacu

SEQ ID NO: 11348 - RNA, 20 nt, Artificial Sequence
  RPE65 RNA guide
caaaaccauguacuaugaaa

SEQ ID NO: 11349 - RNA, 20 nt, Artificial Sequence
  RPE65 RNA guide
cacuuucauaguacaugguu

SEQ ID NO: 11350 - RNA, 20 nt, Artificial Sequence
  RPE65 RNA guide
cauaguacaugguuuugccu

SEQ ID NO: 11351 - RNA, 20 nt, Artificial Sequence
  RPE65 RNA guide
cauguacuaugaaagugcuu

SEQ ID NO: 11352 - RNA, 20 nt, Artificial Sequence
  RPE65 RNA guide
ccauguacuaugaaagugcu

SEQ ID NO: 11353 - RNA, 20 nt, Artificial Sequence
  RPE65 RNA guide
cuuuauuaggcaaaaccaug

SEQ ID NO: 11354 - RNA, 20 nt, Artificial Sequence
  RPE65 RNA guide
cuuucauaguacaugguuuu

SEQ ID NO: 11355 - RNA, 20 nt, Artificial Sequence
  RPE65 RNA guide
gcaaaaccauguacuaugaa

SEQ ID NO: 11356 - RNA, 20 nt, Artificial Sequence
  RPE65 RNA guide
gcacuuucauaguacauggu

SEQ ID NO: 11357 - RNA, 20 nt, Artificial Sequence
  RPE65 RNA guide
ggcaaaaccauguacuauga

SEQ ID NO: 11358 - RNA, 20 nt, Artificial Sequence
  RPE65 RNA guide
guacaugguuuugccuaaua

SEQ ID NO: 11359 - RNA, 20 nt, Artificial Sequence
  RPE65 RNA guide
uaaagcacuuucauaguaca

SEQ ID NO: 11360 - RNA, 20 nt, Artificial Sequence
  RPE65 RNA guide
uacaugguuuugccuaauaa

SEQ ID NO: 11361 - RNA, 20 nt, Artificial Sequence
  RPE65 RNA guide
uaggcaaaaccauguacuau

SEQ ID NO: 11362 - RNA, 20 nt, Artificial Sequence
  RPE65 RNA guide
uaguacaugguuuugccuaa

SEQ ID NO: 11363 - RNA, 20 nt, Artificial Sequence
  RPE65 RNA guide
uauuaggcaaaaccauguac

SEQ ID NO: 11364 - RNA, 20 nt, Artificial Sequence
  RPE65 RNA guide
ucauaguacaugguuuugcc

SEQ ID NO: 11365 - RNA, 20 nt, Artificial Sequence
  RPE65 RNA guide
uguacuaugaaagugcuuua

SEQ ID NO: 11366 - RNA, 20 nt, Artificial Sequence
  RPE65 RNA guide
uuaaagcacuuucauaguac

SEQ ID NO: 11367 - RNA, 20 nt, Artificial Sequence
  RPE65 RNA guide
uuaggcaaaaccauguacua

SEQ ID NO: 11368 - RNA, 20 nt, Artificial Sequence
  RPE65 RNA guide
uuauuaggcaaaaccaugua

SEQ ID NO: 11369 - RNA, 20 nt, Artificial Sequence
  RPE65 RNA guide
uucauaguacaugguuuugc

SEQ ID NO: 11370 - RNA, 20 nt, Artificial Sequence
  RPE65 RNA guide
uuuauuaggcaaaaccaugu

SEQ ID NO: 11371 - RNA, 20 nt, Artificial Sequence
  RPE65 RNA guide
uuucauaguacaugguuuug

SEQ ID NO: 11372 - RNA, 21 nt, Artificial Sequence
  RPE65 RNA guide
aaaccauguacuaugaaagug

SEQ ID NO: 11373 - RNA, 21 nt, Artificial Sequence
  RPE65 RNA guide
aaagcacuuucauaguacaug

SEQ ID NO: 11374 - RNA, 21 nt, Artificial Sequence
  RPE65 RNA guide
aaccauguacuaugaaagugc

SEQ ID NO: 11375 - RNA, 21 nt, Artificial Sequence
  RPE65 RNA guide
aagcacuuucauaguacaugg

SEQ ID NO: 11376 - RNA, 21 nt, Artificial Sequence
  RPE65 RNA guide
acaugguuuugccuaauaaag

SEQ ID NO: 11377 - RNA, 21 nt, Artificial Sequence
  RPE65 RNA guide
accauguacuaugaaagugcu

SEQ ID NO: 11378 - RNA, 21 nt, Artificial Sequence
  RPE65 RNA guide
agcacuuucauaguacauggu

SEQ ID NO: 11379 - RNA, 21 nt, Artificial Sequence
  RPE65 RNA guide
aggcaaaaccauguacuauga

SEQ ID NO: 11380 - RNA, 21 nt, Artificial Sequence
  RPE65 RNA guide
aguacaugguuuugccuaaua

SEQ ID NO: 11381 - RNA, 21 nt, Artificial Sequence
  RPE65 RNA guide
auaguacaugguuuugccuaa

SEQ ID NO: 11382 - RNA, 21 nt, Artificial Sequence
  RPE65 RNA guide
auuaggcaaaaccauguacua

SEQ ID NO: 11383 - RNA, 21 nt, Artificial Sequence
  RPE65 RNA guide
caaaaccauguacuaugaaag

SEQ ID NO: 11384 - RNA, 21 nt, Artificial Sequence
  RPE65 RNA guide
cacuuucauaguacaugguuu

SEQ ID NO: 11385 - RNA, 21 nt, Artificial Sequence
  RPE65 RNA guide
cauaguacaugguuuugccua

SEQ ID NO: 11386 - RNA, 21 nt, Artificial Sequence
  RPE65 RNA guide
cauguacuaugaaagugcuuu

SEQ ID NO: 11387 - RNA, 21 nt, Artificial Sequence
  RPE65 RNA guide
ccauguacuaugaaagugcuu

SEQ ID NO: 11388 - RNA, 21 nt, Artificial Sequence
  RPE65 RNA guide
cuuuauuaggcaaaaccaugu

SEQ ID NO: 11389 - RNA, 21 nt, Artificial Sequence
  RPE65 RNA guide
cuuucauaguacaugguuuug

SEQ ID NO: 11390 - RNA, 21 nt, Artificial Sequence
  RPE65 RNA guide
gcaaaaccauguacuaugaaa

SEQ ID NO: 11391 - RNA, 21 nt, Artificial Sequence
  RPE65 RNA guide
gcacuuucauaguacaugguu

SEQ ID NO: 11392 - RNA, 21 nt, Artificial Sequence
  RPE65 RNA guide
gcuuuauuaggcaaaaccaug

SEQ ID NO: 11393 - RNA, 21 nt, Artificial Sequence
  RPE65 RNA guide
ggcaaaaccauguacuaugaa

SEQ ID NO: 11394 - RNA, 21 nt, Artificial Sequence
  RPE65 RNA guide
guacaugguuuugccuaauaa

SEQ ID NO: 11395 - RNA, 21 nt, Artificial Sequence
  RPE65 RNA guide
uaggcaaaaccauguacuaug

SEQ ID NO: 11396 - RNA, 21 nt, Artificial Sequence
  RPE65 RNA guide
uaguacaugguuuugccuaau

SEQ ID NO: 11397 - RNA, 21 nt, Artificial Sequence
  RPE65 RNA guide
uauuaggcaaaaccauguacu

SEQ ID NO: 11398 - RNA, 21 nt, Artificial Sequence
  RPE65 RNA guide
ucauaguacaugguuuugccu

SEQ ID NO: 11399 - RNA, 21 nt, Artificial Sequence
  RPE65 RNA guide
uuaggcaaaaccauguacuau

SEQ ID NO: 11400 - RNA, 21 nt, Artificial Sequence
  RPE65 RNA guide
uuauuaggcaaaaccauguac

SEQ ID NO: 11401 - RNA, 21 nt, Artificial Sequence
  RPE65 RNA guide
uucauaguacaugguuuugcc

SEQ ID NO: 11402 - RNA, 21 nt, Artificial Sequence
  RPE65 RNA guide
uuucauaguacaugguuuugc

SEQ ID NO: 11403 - RNA, 22 nt, Artificial Sequence
  RPE65 RNA guide
aaaaccauguacuaugaaagug

SEQ ID NO: 11404 - RNA, 22 nt, Artificial Sequence
  RPE65 RNA guide
aaaccauguacuaugaaagugc

SEQ ID NO: 11405 - RNA, 22 nt, Artificial Sequence
  RPE65 RNA guide
aaagcacuuucauaguacaugg

SEQ ID NO: 11406 - RNA, 22 nt, Artificial Sequence
  RPE65 RNA guide
aaccauguacuaugaaagugcu

SEQ ID NO: 11407 - RNA, 22 nt, Artificial Sequence
  RPE65 RNA guide
aagcacuuucauaguacauggu

SEQ ID NO: 11408 - RNA, 22 nt, Artificial Sequence
  RPE65 RNA guide
acaugguuuugccuaauaaagc

SEQ ID NO: 11409 - RNA, 22 nt, Artificial Sequence
  RPE65 RNA guide
accauguacuaugaaagugcuu

SEQ ID NO: 11410 - RNA, 22 nt, Artificial Sequence
  RPE65 RNA guide
acuuucauaguacaugguuuug

SEQ ID NO: 11411 - RNA, 22 nt, Artificial Sequence
  RPE65 RNA guide
agcacuuucauaguacaugguu

SEQ ID NO: 11412 - RNA, 22 nt, Artificial Sequence
  RPE65 RNA guide
aggcaaaaccauguacuaugaa

SEQ ID NO: 11413 - RNA, 22 nt, Artificial Sequence
  RPE65 RNA guide
aguacaugguuuugccuaauaa

SEQ ID NO: 11414 - RNA, 22 nt, Artificial Sequence
  RPE65 RNA guide
auaguacaugguuuugccuaau

SEQ ID NO: 11415 - RNA, 22 nt, Artificial Sequence
  RPE65 RNA guide
auuaggcaaaaccauguacuau

SEQ ID NO: 11416 - RNA, 22 nt, Artificial Sequence
  RPE65 RNA guide
caaaaccauguacuaugaaagu

SEQ ID NO: 11417 - RNA, 22 nt, Artificial Sequence
  RPE65 RNA guide
cacuuucauaguacaugguuuu

SEQ ID NO: 11418 - RNA, 22 nt, Artificial Sequence
  RPE65 RNA guide
cauaguacaugguuuugccuaa

SEQ ID NO: 11419 - RNA, 22 nt, Artificial Sequence
  RPE65 RNA guide
cauguacuaugaaagugcuuua

SEQ ID NO: 11420 - RNA, 22 nt, Artificial Sequence
  RPE65 RNA guide
ccauguacuaugaaagugcuuu

SEQ ID NO: 11421 - RNA, 22 nt, Artificial Sequence
  RPE65 RNA guide
cuuuauuaggcaaaaccaugua

SEQ ID NO: 11422 - RNA, 22 nt, Artificial Sequence
  RPE65 RNA guide
cuuucauaguacaugguuuugc

SEQ ID NO: 11423 - RNA, 22 nt, Artificial Sequence
  RPE65 RNA guide
gcaaaaccauguacuaugaaag

SEQ ID NO: 11424 - RNA, 22 nt, Artificial Sequence
  RPE65 RNA guide
gcacuuucauaguacaugguuu

SEQ ID NO: 11425 - RNA, 22 nt, Artificial Sequence
  RPE65 RNA guide
gcuuuauuaggcaaaaccaugu

SEQ ID NO: 11426 - RNA, 22 nt, Artificial Sequence
  RPE65 RNA guide
ggcaaaaccauguacuaugaaa

SEQ ID NO: 11427 - RNA, 22 nt, Artificial Sequence
  RPE65 RNA guide
guacaugguuuugccuaauaaa

SEQ ID NO: 11428 - RNA, 22 nt, Artificial Sequence
  RPE65 RNA guide
uaaagcacuuucauaguacaug

SEQ ID NO: 11429 - RNA, 22 nt, Artificial Sequence
  RPE65 RNA guide
uacaugguuuugccuaauaaag

SEQ ID NO: 11430 - RNA, 22 nt, Artificial Sequence
  RPE65 RNA guide
uaggcaaaaccauguacuauga

SEQ ID NO: 11431 - RNA, 22 nt, Artificial Sequence
  RPE65 RNA guide
uaguacaugguuuugccuaaua

SEQ ID NO: 11432 - RNA, 22 nt, Artificial Sequence
  RPE65 RNA guide
uauuaggcaaaaccauguacua

SEQ ID NO: 11433 - RNA, 22 nt, Artificial Sequence
  RPE65 RNA guide
ucauaguacaugguuuugccua

SEQ ID NO: 11434 - RNA, 22 nt, Artificial Sequence
  RPE65 RNA guide
ugcuuuauuaggcaaaaccaug

SEQ ID NO: 11435 - RNA, 22 nt, Artificial Sequence
  RPE65 RNA guide
uuaggcaaaaccauguacuaug

SEQ ID NO: 11436 - RNA, 22 nt, Artificial Sequence
  RPE65 RNA guide
uuauuaggcaaaaccauguacu

SEQ ID NO: 11437 - RNA, 22 nt, Artificial Sequence
  RPE65 RNA guide
uucauaguacaugguuuugccu

SEQ ID NO: 11438 - RNA, 22 nt, Artificial Sequence
  RPE65 RNA guide
uuuauuaggcaaaaccauguac

SEQ ID NO: 11439 - RNA, 22 nt, Artificial Sequence
  RPE65 RNA guide
uuucauaguacaugguuuugcc

SEQ ID NO: 11440 - RNA, 20 nt, Artificial Sequence
  RPE65 RNA guide
accauauaauaugaaagugc

SEQ ID NO: 11441 - RNA, 20 nt, Artificial Sequence
  RPE65 RNA guide
agcacuuucauauuauaugg

SEQ ID NO: 11442 - RNA, 20 nt, Artificial Sequence
  RPE65 RNA guide
aggcaaaaccauauaauaug

SEQ ID NO: 11443 - RNA, 20 nt, Artificial Sequence
  RPE65 RNA guide
cauauuauaugguuuugccu

SEQ ID NO: 11444 - RNA, 20 nt, Artificial Sequence
  RPE65 RNA guide
ccauauaauaugaaagugcu

SEQ ID NO: 11445 - RNA, 20 nt, Artificial Sequence
  RPE65 RNA guide
gcacuuucauauuauauggu

SEQ ID NO: 11446 - RNA, 20 nt, Artificial Sequence
  RPE65 RNA guide
gcauuuuaaagcacuuucau

SEQ ID NO: 11447 - RNA, 20 nt, Artificial Sequence
  RPE65 RNA guide
ggcaaaaccauauaauauga

SEQ ID NO: 11448 - RNA, 20 nt, Artificial Sequence
  RPE65 RNA guide
ucauauuauaugguuuugcc

SEQ ID NO: 11449 - RNA, 20 nt, Artificial Sequence
  RPE65 RNA guide
ugcauuuuaaagcacuuuca

SEQ ID NO: 11450 - RNA, 20 nt, Artificial Sequence
  RPE65 RNA guide
uugcauuuuaaagcacuuuc

SEQ ID NO: 11451 - RNA, 21 nt, Artificial Sequence
  RPE65 RNA guide
guugcauuuuaaagcacuuuc

SEQ ID NO: 11452 - RNA, 22 nt, Artificial Sequence
  RPE65 RNA guide
guugcauuuuaaagcacuuuca

SEQ ID NO: 11453 - RNA, 22 nt, Artificial Sequence
  RPE65 RNA guide
uguugcauuuuaaagcacuuuc

SEQ ID NO: 11454 - RNA, 20 nt, Artificial Sequence
  RPE65 RNA guide
aacaagugccuagugacaca

SEQ ID NO: 11455 - RNA, 20 nt, Artificial Sequence
  RPE65 RNA guide
aagaacaagugccuagugac

SEQ ID NO: 11456 - RNA, 20 nt, Artificial Sequence
  RPE65 RNA guide
aagugccuagugacacaugg

SEQ ID NO: 11457 - RNA, 20 nt, Artificial Sequence
  RPE65 RNA guide
acaagugccuagugacacau

SEQ ID NO: 11458 - RNA, 20 nt, Artificial Sequence
  RPE65 RNA guide
acacauggauaucagaacac

SEQ ID NO: 11459 - RNA, 20 nt, Artificial Sequence
  RPE65 RNA guide
acauggauaucagaacacac

SEQ ID NO: 11460 - RNA, 20 nt, Artificial Sequence
  RPE65 RNA guide
acuugguguguucugauauc

SEQ ID NO: 11461 - RNA, 20 nt, Artificial Sequence
  RPE65 RNA guide
agaacaagugccuagugaca

SEQ ID NO: 11462 - RNA, 20 nt, Artificial Sequence
  RPE65 RNA guide
agugacacauggauaucaga

SEQ ID NO: 11463 - RNA, 20 nt, Artificial Sequence
  RPE65 RNA guide
agugccuagugacacaugga

SEQ ID NO: 11464 - RNA, 20 nt, Artificial Sequence
  RPE65 RNA guide
auauccaugugucacuaggc

SEQ ID NO: 11465 - RNA, 20 nt, Artificial Sequence
  RPE65 RNA guide
auccaugugucacuaggcac

SEQ ID NO: 11466 - RNA, 20 nt, Artificial Sequence
  RPE65 RNA guide
auggauaucagaacacacca

SEQ ID NO: 11467 - RNA, 20 nt, Artificial Sequence
  RPE65 RNA guide
caagugccuagugacacaug

SEQ ID NO: 11468 - RNA, 20 nt, Artificial Sequence
  RPE65 RNA guide
cacauggauaucagaacaca

SEQ ID NO: 11469 - RNA, 20 nt, Artificial Sequence
  RPE65 RNA guide
cauggauaucagaacacacc

SEQ ID NO: 11470 - RNA, 20 nt, Artificial Sequence
  RPE65 RNA guide
caugugucacuaggcacuug

SEQ ID NO: 11471 - RNA, 20 nt, Artificial Sequence
  RPE65 RNA guide
ccaugugucacuaggcacuu

SEQ ID NO: 11472 - RNA, 20 nt, Artificial Sequence
  RPE65 RNA guide
ccuagugacacauggauauc

SEQ ID NO: 11473 - RNA, 20 nt, Artificial Sequence
  RPE65 RNA guide
cuagugacacauggauauca

SEQ ID NO: 11474 - RNA, 20 nt, Artificial Sequence
  RPE65 RNA guide
cugauauccaugugucacua

SEQ ID NO: 11475 - RNA, 20 nt, Artificial Sequence
  RPE65 RNA guide
cuugguguguucugauaucc

SEQ ID NO: 11476 - RNA, 20 nt, Artificial Sequence
  RPE65 RNA guide
gaacaagugccuagugacac

SEQ ID NO: 11477 - RNA, 20 nt, Artificial Sequence
  RPE65 RNA guide
gacacauggauaucagaaca

SEQ ID NO: 11478 - RNA, 20 nt, Artificial Sequence
  RPE65 RNA guide
gauauccaugugucacuagg

SEQ ID NO: 11479 - RNA, 20 nt, Artificial Sequence
  RPE65 RNA guide
gccuagugacacauggauau

SEQ ID NO: 11480 - RNA, 20 nt, Artificial Sequence
  RPE65 RNA guide
gguguguucugauauccaug

SEQ ID NO: 11481 - RNA, 20 nt, Artificial Sequence
  RPE65 RNA guide
gugacacauggauaucagaa

SEQ ID NO: 11482 - RNA, 20 nt, Artificial Sequence
  RPE65 RNA guide
gugccuagugacacauggau

SEQ ID NO: 11483 - RNA, 20 nt, Artificial Sequence
  RPE65 RNA guide
guguguucugauauccaugu

SEQ ID NO: 11484 - RNA, 20 nt, Artificial Sequence
  RPE65 RNA guide
guguucugauauccaugugu

SEQ ID NO: 11485 - RNA, 20 nt, Artificial Sequence
  RPE65 RNA guide
guucugauauccauguguca

SEQ ID NO: 11486 - RNA, 20 nt, Artificial Sequence
  RPE65 RNA guide
uacuugguguguucugauau

SEQ ID NO: 11487 - RNA, 20 nt, Artificial Sequence
  RPE65 RNA guide
uagugacacauggauaucag

SEQ ID NO: 11488 - RNA, 20 nt, Artificial Sequence
  RPE65 RNA guide
uauccaugugucacuaggca

SEQ ID NO: 11489 - RNA, 20 nt, Artificial Sequence
  RPE65 RNA guide
uccaugugucacuaggcacu

SEQ ID NO: 11490 - RNA, 20 nt, Artificial Sequence
  RPE65 RNA guide
ucugauauccaugugucacu

SEQ ID NO: 11491 - RNA, 20 nt, Artificial Sequence
  RPE65 RNA guide
ugacacauggauaucagaac

SEQ ID NO: 11492 - RNA, 20 nt, Artificial Sequence
  RPE65 RNA guide
ugauauccaugugucacuag

SEQ ID NO: 11493 - RNA, 20 nt, Artificial Sequence
  RPE65 RNA guide
ugccuagugacacauggaua

SEQ ID NO: 11494 - RNA, 20 nt, Artificial Sequence
  RPE65 RNA guide
ugguguguucugauauccau

SEQ ID NO: 11495 - RNA, 20 nt, Artificial Sequence
  RPE65 RNA guide
uguguucugauauccaugug

SEQ ID NO: 11496 - RNA, 20 nt, Artificial Sequence
  RPE65 RNA guide
uguucugauauccauguguc

SEQ ID NO: 11497 - RNA, 20 nt, Artificial Sequence
  RPE65 RNA guide
uuacuugguguguucugaua

SEQ ID NO: 11498 - RNA, 20 nt, Artificial Sequence
  RPE65 RNA guide
uucugauauccaugugucac

SEQ ID NO: 11499 - RNA, 20 nt, Artificial Sequence
  RPE65 RNA guide
uugguguguucugauaucca

SEQ ID NO: 11500 - RNA, 21 nt, Artificial Sequence
  RPE65 RNA guide
aaagaacaagugccuagugac

SEQ ID NO: 11501 - RNA, 21 nt, Artificial Sequence
  RPE65 RNA guide
aacaagugccuagugacacau

SEQ ID NO: 11502 - RNA, 21 nt, Artificial Sequence
  RPE65 RNA guide
aagaacaagugccuagugaca

SEQ ID NO: 11503 - RNA, 21 nt, Artificial Sequence
  RPE65 RNA guide
aagugccuagugacacaugga

SEQ ID NO: 11504 - RNA, 21 nt, Artificial Sequence
  RPE65 RNA guide
acaagugccuagugacacaug

SEQ ID NO: 11505 - RNA, 21 nt, Artificial Sequence
  RPE65 RNA guide
acacauggauaucagaacaca

SEQ ID NO: 11506 - RNA, 21 nt, Artificial Sequence
  RPE65 RNA guide
acauggauaucagaacacacc

SEQ ID NO: 11507 - RNA, 21 nt, Artificial Sequence
  RPE65 RNA guide
acuugguguguucugauaucc

SEQ ID NO: 11508 - RNA, 21 nt, Artificial Sequence
  RPE65 RNA guide
agaacaagugccuagugacac

SEQ ID NO: 11509 - RNA, 21 nt, Artificial Sequence
  RPE65 RNA guide
agugacacauggauaucagaa

SEQ ID NO: 11510 - RNA, 21 nt, Artificial Sequence
  RPE65 RNA guide
agugccuagugacacauggau

SEQ ID NO: 11511 - RNA, 21 nt, Artificial Sequence
  RPE65 RNA guide
auauccaugugucacuaggca

SEQ ID NO: 11512 - RNA, 21 nt, Artificial Sequence
  RPE65 RNA guide
auccaugugucacuaggcacu

SEQ ID NO: 11513 - RNA, 21 nt, Artificial Sequence
  RPE65 RNA guide
auggauaucagaacacaccaa

SEQ ID NO: 11514 - RNA, 21 nt, Artificial Sequence
  RPE65 RNA guide
caagugccuagugacacaugg

SEQ ID NO: 11515 - RNA, 21 nt, Artificial Sequence
  RPE65 RNA guide
cacauggauaucagaacacac

SEQ ID NO: 11516 - RNA, 21 nt, Artificial Sequence
  RPE65 RNA guide
cauggauaucagaacacacca

SEQ ID NO: 11517 - RNA, 21 nt, Artificial Sequence
  RPE65 RNA guide
caugugucacuaggcacuugu

SEQ ID NO: 11518 - RNA, 21 nt, Artificial Sequence
  RPE65 RNA guide
ccaugugucacuaggcacuug

SEQ ID NO: 11519 - RNA, 21 nt, Artificial Sequence
  RPE65 RNA guide
ccuagugacacauggauauca

SEQ ID NO: 11520 - RNA, 21 nt, Artificial Sequence
  RPE65 RNA guide
cuagugacacauggauaucag

SEQ ID NO: 11521 - RNA, 21 nt, Artificial Sequence
  RPE65 RNA guide
cugauauccaugugucacuag

SEQ ID NO: 11522 - RNA, 21 nt, Artificial Sequence
  RPE65 RNA guide
cuugguguguucugauaucca

SEQ ID NO: 11523 - RNA, 21 nt, Artificial Sequence
  RPE65 RNA guide
gaacaagugccuagugacaca

SEQ ID NO: 11524 - RNA, 21 nt, Artificial Sequence
  RPE65 RNA guide
gacacauggauaucagaacac

SEQ ID NO: 11525 - RNA, 21 nt, Artificial Sequence
  RPE65 RNA guide
gauauccaugugucacuaggc

SEQ ID NO: 11526 - RNA, 21 nt, Artificial Sequence
  RPE65 RNA guide
gccuagugacacauggauauc

SEQ ID NO: 11527 - RNA, 21 nt, Artificial Sequence
  RPE65 RNA guide
gguguguucugauauccaugu

SEQ ID NO: 11528 - RNA, 21 nt, Artificial Sequence
  RPE65 RNA guide
gugacacauggauaucagaac

SEQ ID NO: 11529 - RNA, 21 nt, Artificial Sequence
  RPE65 RNA guide
gugccuagugacacauggaua

SEQ ID NO: 11530 - RNA, 21 nt, Artificial Sequence
  RPE65 RNA guide
guguguucugauauccaugug

SEQ ID NO: 11531 - RNA, 21 nt, Artificial Sequence
  RPE65 RNA guide
guguucugauauccauguguc

SEQ ID NO: 11532 - RNA, 21 nt, Artificial Sequence
  RPE65 RNA guide
guucugauauccaugugucac

SEQ ID NO: 11533 - RNA, 21 nt, Artificial Sequence
  RPE65 RNA guide
uacuugguguguucugauauc

SEQ ID NO: 11534 - RNA, 21 nt, Artificial Sequence
  RPE65 RNA guide
uagugacacauggauaucaga

SEQ ID NO: 11535 - RNA, 21 nt, Artificial Sequence
  RPE65 RNA guide
uauccaugugucacuaggcac

SEQ ID NO: 11536 - RNA, 21 nt, Artificial Sequence
  RPE65 RNA guide
uccaugugucacuaggcacuu

SEQ ID NO: 11537 - RNA, 21 nt, Artificial Sequence
  RPE65 RNA guide
ucugauauccaugugucacua

SEQ ID NO: 11538 - RNA, 21 nt, Artificial Sequence
  RPE65 RNA guide
ugacacauggauaucagaaca

SEQ ID NO: 11539 - RNA, 21 nt, Artificial Sequence
  RPE65 RNA guide
ugauauccaugugucacuagg

SEQ ID NO: 11540 - RNA, 21 nt, Artificial Sequence
  RPE65 RNA guide
ugccuagugacacauggauau

SEQ ID NO: 11541 - RNA, 21 nt, Artificial Sequence
  RPE65 RNA guide
ugguguguucugauauccaug

SEQ ID NO: 11542 - RNA, 21 nt, Artificial Sequence
  RPE65 RNA guide
uguguucugauauccaugugu

SEQ ID NO: 11543 - RNA, 21 nt, Artificial Sequence
  RPE65 RNA guide
uguucugauauccauguguca

SEQ ID NO: 11544 - RNA, 21 nt, Artificial Sequence
  RPE65 RNA guide
uuacuugguguguucugauau

SEQ ID NO: 11545 - RNA, 21 nt, Artificial Sequence
  RPE65 RNA guide
uucugauauccaugugucacu

SEQ ID NO: 11546 - RNA, 21 nt, Artificial Sequence
  RPE65 RNA guide
uugguguguucugauauccau

SEQ ID NO: 11547 - RNA, 21 nt, Artificial Sequence
  RPE65 RNA guide
uuuacuugguguguucugaua

SEQ ID NO: 11548 - RNA, 22 nt, Artificial Sequence
  RPE65 RNA guide
aaagaacaagugccuagugaca

SEQ ID NO: 11549 - RNA, 22 nt, Artificial Sequence
  RPE65 RNA guide
aacaagugccuagugacacaug

SEQ ID NO: 11550 - RNA, 22 nt, Artificial Sequence
  RPE65 RNA guide
aagaacaagugccuagugacac

SEQ ID NO: 11551 - RNA, 22 nt, Artificial Sequence
  RPE65 RNA guide
aagugccuagugacacauggau

SEQ ID NO: 11552 - RNA, 22 nt, Artificial Sequence
  RPE65 RNA guide
acaagugccuagugacacaugg

SEQ ID NO: 11553 - RNA, 22 nt, Artificial Sequence
  RPE65 RNA guide
acacauggauaucagaacacac

SEQ ID NO: 11554 - RNA, 22 nt, Artificial Sequence
  RPE65 RNA guide
acauggauaucagaacacacca

SEQ ID NO: 11555 - RNA, 22 nt, Artificial Sequence
  RPE65 RNA guide
acuugguguguucugauaucca

SEQ ID NO: 11556 - RNA, 22 nt, Artificial Sequence
  RPE65 RNA guide
agaacaagugccuagugacaca

SEQ ID NO: 11557 - RNA, 22 nt, Artificial Sequence
  RPE65 RNA guide
agugacacauggauaucagaac

SEQ ID NO: 11558 - RNA, 22 nt, Artificial Sequence
  RPE65 RNA guide
agugccuagugacacauggaua

SEQ ID NO: 11559 - RNA, 22 nt, Artificial Sequence
  RPE65 RNA guide
auauccaugugucacuaggcac

SEQ ID NO: 11560 - RNA, 22 nt, Artificial Sequence
  RPE65 RNA guide
auccaugugucacuaggcacuu

SEQ ID NO: 11561 - RNA, 22 nt, Artificial Sequence
  RPE65 RNA guide
auggauaucagaacacaccaag

SEQ ID NO: 11562 - RNA, 22 nt, Artificial Sequence
  RPE65 RNA guide
caaagaacaagugccuagugac

SEQ ID NO: 11563 - RNA, 22 nt, Artificial Sequence
  RPE65 RNA guide
caagugccuagugacacaugga

SEQ ID NO: 11564 - RNA, 22 nt, Artificial Sequence
  RPE65 RNA guide
cacauggauaucagaacacacc

SEQ ID NO: 11565 - RNA, 22 nt, Artificial Sequence
  RPE65 RNA guide
cauggauaucagaacacaccaa

SEQ ID NO: 11566 - RNA, 22 nt, Artificial Sequence
  RPE65 RNA guide
caugugucacuaggcacuuguu

SEQ ID NO: 11567 - RNA, 22 nt, Artificial Sequence
  RPE65 RNA guide
ccaugugucacuaggcacuugu

SEQ ID NO: 11568 - RNA, 22 nt, Artificial Sequence
  RPE65 RNA guide
ccuagugacacauggauaucag

SEQ ID NO: 11569 - RNA, 22 nt, Artificial Sequence
  RPE65 RNA guide
cuagugacacauggauaucaga

SEQ ID NO: 11570 - RNA, 22 nt, Artificial Sequence
  RPE65 RNA guide
cugauauccaugugucacuagg

SEQ ID NO: 11571 - RNA, 22 nt, Artificial Sequence
  RPE65 RNA guide
cuugguguguucugauauccau

SEQ ID NO: 11572 - RNA, 22 nt, Artificial Sequence
  RPE65 RNA guide
cuuuacuugguguguucugaua

SEQ ID NO: 11573 - RNA, 22 nt, Artificial Sequence
  RPE65 RNA guide
gaacaagugccuagugacacau

SEQ ID NO: 11574 - RNA, 22 nt, Artificial Sequence
  RPE65 RNA guide
gacacauggauaucagaacaca

SEQ ID NO: 11575 - RNA, 22 nt, Artificial Sequence
  RPE65 RNA guide
gauauccaugugucacuaggca

SEQ ID NO: 11576 - RNA, 22 nt, Artificial Sequence
  RPE65 RNA guide
gccuagugacacauggauauca

SEQ ID NO: 11577 - RNA, 22 nt, Artificial Sequence
  RPE65 RNA guide
gguguguucugauauccaugug

SEQ ID NO: 11578 - RNA, 22 nt, Artificial Sequence
  RPE65 RNA guide
gugacacauggauaucagaaca

SEQ ID NO: 11579 - RNA, 22 nt, Artificial Sequence
  RPE65 RNA guide
gugccuagugacacauggauau

SEQ ID NO: 11580 - RNA, 22 nt, Artificial Sequence
  RPE65 RNA guide
guguguucugauauccaugugu

SEQ ID NO: 11581 - RNA, 22 nt, Artificial Sequence
  RPE65 RNA guide
guguucugauauccauguguca

SEQ ID NO: 11582 - RNA, 22 nt, Artificial Sequence
  RPE65 RNA guide
guucugauauccaugugucacu

SEQ ID NO: 11583 - RNA, 22 nt, Artificial Sequence
  RPE65 RNA guide
uacuugguguguucugauaucc

SEQ ID NO: 11584 - RNA, 22 nt, Artificial Sequence
  RPE65 RNA guide
uagugacacauggauaucagaa

SEQ ID NO: 11585 - RNA, 22 nt, Artificial Sequence
  RPE65 RNA guide
uauccaugugucacuaggcacu

SEQ ID NO: 11586 - RNA, 22 nt, Artificial Sequence
  RPE65 RNA guide
uccaugugucacuaggcacuug

SEQ ID NO: 11587 - RNA, 22 nt, Artificial Sequence
  RPE65 RNA guide
ucugauauccaugugucacuag

SEQ ID NO: 11588 - RNA, 22 nt, Artificial Sequence
  RPE65 RNA guide
ugacacauggauaucagaacac

SEQ ID NO: 11589 - RNA, 22 nt, Artificial Sequence
  RPE65 RNA guide
ugauauccaugugucacuaggc

SEQ ID NO: 11590 - RNA, 22 nt, Artificial Sequence
  RPE65 RNA guide
ugccuagugacacauggauauc

SEQ ID NO: 11591 - RNA, 22 nt, Artificial Sequence
  RPE65 RNA guide
ugguguguucugauauccaugu

SEQ ID NO: 11592 - RNA, 22 nt, Artificial Sequence
  RPE65 RNA guide
uguguucugauauccauguguc

SEQ ID NO: 11593 - RNA, 22 nt, Artificial Sequence
  RPE65 RNA guide
uguucugauauccaugugucac

SEQ ID NO: 11594 - RNA, 22 nt, Artificial Sequence
  RPE65 RNA guide
uuacuugguguguucugauauc

SEQ ID NO: 11595 - RNA, 22 nt, Artificial Sequence
  RPE65 RNA guide
uucugauauccaugugucacua

SEQ ID NO: 11596 - RNA, 22 nt, Artificial Sequence
  RPE65 RNA guide
uugguguguucugauauccaug

SEQ ID NO: 11597 - RNA, 22 nt, Artificial Sequence
  RPE65 RNA guide
uuuacuugguguguucugauau

SEQ ID NO: 11598 - RNA, 20 nt, Artificial Sequence
  RPE65 RNA guide
aagugccuagugacacacgg

SEQ ID NO: 11599 - RNA, 20 nt, Artificial Sequence
  RPE65 RNA guide
acaagugccuagugacacac

SEQ ID NO: 11600 - RNA, 20 nt, Artificial Sequence
  RPE65 RNA guide
acacacggauaucagaacac

SEQ ID NO: 11601 - RNA, 20 nt, Artificial Sequence
  RPE65 RNA guide
acacggauaucagaacacac

SEQ ID NO: 11602 - RNA, 20 nt, Artificial Sequence
  RPE65 RNA guide
acggauaucagaacacacca

SEQ ID NO: 11603 - RNA, 20 nt, Artificial Sequence
  RPE65 RNA guide
agugacacacggauaucaga

SEQ ID NO: 11604 - RNA, 20 nt, Artificial Sequence
  RPE65 RNA guide
agugccuagugacacacgga

SEQ ID NO: 11605 - RNA, 20 nt, Artificial Sequence
  RPE65 RNA guide
auauccgugugucacuaggc

SEQ ID NO: 11606 - RNA, 20 nt, Artificial Sequence
  RPE65 RNA guide
auccgugugucacuaggcac

SEQ ID NO: 11607 - RNA, 20 nt, Artificial Sequence
  RPE65 RNA guide
caagugccuagugacacacg

SEQ ID NO: 11608 - RNA, 20 nt, Artificial Sequence
  RPE65 RNA guide
cacacggauaucagaacaca

SEQ ID NO: 11609 - RNA, 20 nt, Artificial Sequence
  RPE65 RNA guide
cacggauaucagaacacacc

SEQ ID NO: 11610 - RNA, 20 nt, Artificial Sequence
  RPE65 RNA guide
ccgugugucacuaggcacuu

SEQ ID NO: 11611 - RNA, 20 nt, Artificial Sequence
  RPE65 RNA guide
ccuagugacacacggauauc

SEQ ID NO: 11612 - RNA, 20 nt, Artificial Sequence
  RPE65 RNA guide
cgugugucacuaggcacuug

SEQ ID NO: 11613 - RNA, 20 nt, Artificial Sequence
  RPE65 RNA guide
cuagugacacacggauauca

SEQ ID NO: 11614 - RNA, 20 nt, Artificial Sequence
  RPE65 RNA guide
cugauauccgugugucacua

SEQ ID NO: 11615 - RNA, 20 nt, Artificial Sequence
  RPE65 RNA guide
gacacacggauaucagaaca

SEQ ID NO: 11616 - RNA, 20 nt, Artificial Sequence
  RPE65 RNA guide
gauauccgugugucacuagg

SEQ ID NO: 11617 - RNA, 20 nt, Artificial Sequence
  RPE65 RNA guide
gccuagugacacacggauau

SEQ ID NO: 11618 - RNA, 20 nt, Artificial Sequence
  RPE65 RNA guide
gguguguucugauauccgug

SEQ ID NO: 11619 - RNA, 20 nt, Artificial Sequence
  RPE65 RNA guide
gugacacacggauaucagaa

SEQ ID NO: 11620 - RNA, 20 nt, Artificial Sequence
  RPE65 RNA guide
gugccuagugacacacggau

SEQ ID NO: 11621 - RNA, 20 nt, Artificial Sequence
  RPE65 RNA guide
guguguucugauauccgugu

SEQ ID NO: 11622 - RNA, 20 nt, Artificial Sequence
  RPE65 RNA guide
guguucugauauccgugugu

SEQ ID NO: 11623 - RNA, 20 nt, Artificial Sequence
  RPE65 RNA guide
guucugauauccguguguca

SEQ ID NO: 11624 - RNA, 20 nt, Artificial Sequence
  RPE65 RNA guide
uagugacacacggauaucag

SEQ ID NO: 11625 - RNA, 20 nt, Artificial Sequence
  RPE65 RNA guide
uauccgugugucacuaggca

SEQ ID NO: 11626 - RNA, 20 nt, Artificial Sequence
  RPE65 RNA guide
uccgugugucacuaggcacu

SEQ ID NO: 11627 - RNA, 20 nt, Artificial Sequence
  RPE65 RNA guide
ucugauauccgugugucacu

SEQ ID NO: 11628 - RNA, 20 nt, Artificial Sequence
  RPE65 RNA guide
ugacacacggauaucagaac

SEQ ID NO: 11629 - RNA, 20 nt, Artificial Sequence
  RPE65 RNA guide
ugauauccgugugucacuag

SEQ ID NO: 11630 - RNA, 20 nt, Artificial Sequence
  RPE65 RNA guide
ugccuagugacacacggaua

SEQ ID NO: 11631 - RNA, 20 nt, Artificial Sequence
  RPE65 RNA guide
ugguguguucugauauccgu

SEQ ID NO: 11632 - RNA, 20 nt, Artificial Sequence
  RPE65 RNA guide
uguguucugauauccgugug

SEQ ID NO: 11633 - RNA, 20 nt, Artificial Sequence
  RPE65 RNA guide
uguucugauauccguguguc

SEQ ID NO: 11634 - RNA, 20 nt, Artificial Sequence
  RPE65 RNA guide
uucugauauccgugugucac

SEQ ID NO: 11635 - RNA, 20 nt, Artificial Sequence
  RPE65 RNA guide
uugguguguucugauauccg

SEQ ID NO: 11636 - RNA, 21 nt, Artificial Sequence
  RPE65 RNA guide
aacaagugccuagugacacac

SEQ ID NO: 11637 - RNA, 21 nt, Artificial Sequence
  RPE65 RNA guide
aagugccuagugacacacgga

SEQ ID NO: 11638 - RNA, 21 nt, Artificial Sequence
  RPE65 RNA guide
acaagugccuagugacacacg

SEQ ID NO: 11639 - RNA, 21 nt, Artificial Sequence
  RPE65 RNA guide
acacacggauaucagaacaca

SEQ ID NO: 11640 - RNA, 21 nt, Artificial Sequence
  RPE65 RNA guide
acacggauaucagaacacacc

SEQ ID NO: 11641 - RNA, 21 nt, Artificial Sequence
  RPE65 RNA guide
acggauaucagaacacaccaa

SEQ ID NO: 11642 - RNA, 21 nt, Artificial Sequence
  RPE65 RNA guide
agugacacacggauaucagaa

SEQ ID NO: 11643 - RNA, 21 nt, Artificial Sequence
  RPE65 RNA guide
agugccuagugacacacggau

SEQ ID NO: 11644 - RNA, 21 nt, Artificial Sequence
  RPE65 RNA guide
auauccgugugucacuaggca

SEQ ID NO: 11645 - RNA, 21 nt, Artificial Sequence
  RPE65 RNA guide
auccgugugucacuaggcacu

SEQ ID NO: 11646 - RNA, 21 nt, Artificial Sequence
  RPE65 RNA guide
caagugccuagugacacacgg

SEQ ID NO: 11647 - RNA, 21 nt, Artificial Sequence
  RPE65 RNA guide
cacacggauaucagaacacac

SEQ ID NO: 11648 - RNA, 21 nt, Artificial Sequence
  RPE65 RNA guide
cacggauaucagaacacacca

SEQ ID NO: 11649 - RNA, 21 nt, Artificial Sequence
  RPE65 RNA guide
ccgugugucacuaggcacuug

SEQ ID NO: 11650 - RNA, 21 nt, Artificial Sequence
  RPE65 RNA guide
ccuagugacacacggauauca

SEQ ID NO: 11651 - RNA, 21 nt, Artificial Sequence
  RPE65 RNA guide
cgugugucacuaggcacuugu

SEQ ID NO: 11652 - RNA, 21 nt, Artificial Sequence
  RPE65 RNA guide
cuagugacacacggauaucag

SEQ ID NO: 11653 - RNA, 21 nt, Artificial Sequence
  RPE65 RNA guide
cugauauccgugugucacuag

SEQ ID NO: 11654 - RNA, 21 nt, Artificial Sequence
  RPE65 RNA guide
cuugguguguucugauauccg

SEQ ID NO: 11655 - RNA, 21 nt, Artificial Sequence
  RPE65 RNA guide
gacacacggauaucagaacac

SEQ ID NO: 11656 - RNA, 21 nt, Artificial Sequence
  RPE65 RNA guide
gauauccgugugucacuaggc

SEQ ID NO: 11657 - RNA, 21 nt, Artificial Sequence
  RPE65 RNA guide
gccuagugacacacggauauc

SEQ ID NO: 11658 - RNA, 21 nt, Artificial Sequence
  RPE65 RNA guide
gguguguucugauauccgugu

SEQ ID NO: 11659 - RNA, 21 nt, Artificial Sequence
  RPE65 RNA guide
gugacacacggauaucagaac

SEQ ID NO: 11660 - RNA, 21 nt, Artificial Sequence
  RPE65 RNA guide
gugccuagugacacacggaua

SEQ ID NO: 11661 - RNA, 21 nt, Artificial Sequence
  RPE65 RNA guide
guguguucugauauccgugug

SEQ ID NO: 11662 - RNA, 21 nt, Artificial Sequence
  RPE65 RNA guide
guguucugauauccguguguc

SEQ ID NO: 11663 - RNA, 21 nt, Artificial Sequence
  RPE65 RNA guide
guucugauauccgugugucac

SEQ ID NO: 11664 - RNA, 21 nt, Artificial Sequence
  RPE65 RNA guide
uagugacacacggauaucaga

SEQ ID NO: 11665 - RNA, 21 nt, Artificial Sequence
  RPE65 RNA guide
uauccgugugucacuaggcac

SEQ ID NO: 11666 - RNA, 21 nt, Artificial Sequence
  RPE65 RNA guide
uccgugugucacuaggcacuu

SEQ ID NO: 11667 - RNA, 21 nt, Artificial Sequence
  RPE65 RNA guide
ucugauauccgugugucacua

SEQ ID NO: 11668 - RNA, 21 nt, Artificial Sequence
  RPE65 RNA guide
ugacacacggauaucagaaca

SEQ ID NO: 11669 - RNA, 21 nt, Artificial Sequence
  RPE65 RNA guide
ugauauccgugugucacuagg

SEQ ID NO: 11670 - RNA, 21 nt, Artificial Sequence
  RPE65 RNA guide
ugccuagugacacacggauau

SEQ ID NO: 11671 - RNA, 21 nt, Artificial Sequence
  RPE65 RNA guide
ugguguguucugauauccgug

SEQ ID NO: 11672 - RNA, 21 nt, Artificial Sequence
  RPE65 RNA guide
uguguucugauauccgugugu

SEQ ID NO: 11673 - RNA, 21 nt, Artificial Sequence
  RPE65 RNA guide
uguucugauauccguguguca

SEQ ID NO: 11674 - RNA, 21 nt, Artificial Sequence
  RPE65 RNA guide
uucugauauccgugugucacu

SEQ ID NO: 11675 - RNA, 21 nt, Artificial Sequence
  RPE65 RNA guide
uugguguguucugauauccgu

SEQ ID NO: 11676 - RNA, 22 nt, Artificial Sequence
  RPE65 RNA guide
aacaagugccuagugacacacg

SEQ ID NO: 11677 - RNA, 22 nt, Artificial Sequence
  RPE65 RNA guide
aagugccuagugacacacggau

SEQ ID NO: 11678 - RNA, 22 nt, Artificial Sequence
  RPE65 RNA guide
acaagugccuagugacacacgg

SEQ ID NO: 11679 - RNA, 22 nt, Artificial Sequence
  RPE65 RNA guide
acacacggauaucagaacacac

SEQ ID NO: 11680 - RNA, 22 nt, Artificial Sequence
  RPE65 RNA guide
acacggauaucagaacacacca

SEQ ID NO: 11681 - RNA, 22 nt, Artificial Sequence
  RPE65 RNA guide
acggauaucagaacacaccaag

SEQ ID NO: 11682 - RNA, 22 nt, Artificial Sequence
  RPE65 RNA guide
acuugguguguucugauauccg

SEQ ID NO: 11683 - RNA, 22 nt, Artificial Sequence
  RPE65 RNA guide
agugacacacggauaucagaac

SEQ ID NO: 11684 - RNA, 22 nt, Artificial Sequence
  RPE65 RNA guide
agugccuagugacacacggaua

SEQ ID NO: 11685 - RNA, 22 nt, Artificial Sequence
  RPE65 RNA guide
auauccgugugucacuaggcac

SEQ ID NO: 11686 - RNA, 22 nt, Artificial Sequence
  RPE65 RNA guide
auccgugugucacuaggcacuu

SEQ ID NO: 11687 - RNA, 22 nt, Artificial Sequence
  RPE65 RNA guide
caagugccuagugacacacgga

SEQ ID NO: 11688 - RNA, 22 nt, Artificial Sequence
  RPE65 RNA guide
cacacggauaucagaacacacc

SEQ ID NO: 11689 - RNA, 22 nt, Artificial Sequence
  RPE65 RNA guide
cacggauaucagaacacaccaa

SEQ ID NO: 11690 - RNA, 22 nt, Artificial Sequence
  RPE65 RNA guide
ccgugugucacuaggcacuugu

SEQ ID NO: 11691 - RNA, 22 nt, Artificial Sequence
  RPE65 RNA guide
ccuagugacacacggauaucag

SEQ ID NO: 11692 - RNA, 22 nt, Artificial Sequence
  RPE65 RNA guide
cgugugucacuaggcacuuguu

SEQ ID NO: 11693 - RNA, 22 nt, Artificial Sequence
  RPE65 RNA guide
cuagugacacacggauaucaga

SEQ ID NO: 11694 - RNA, 22 nt, Artificial Sequence
  RPE65 RNA guide
cugauauccgugugucacuagg

SEQ ID NO: 11695 - RNA, 22 nt, Artificial Sequence
  RPE65 RNA guide
cuugguguguucugauauccgu

SEQ ID NO: 11696 - RNA, 22 nt, Artificial Sequence
  RPE65 RNA guide
gaacaagugccuagugacacac

SEQ ID NO: 11697 - RNA, 22 nt, Artificial Sequence
  RPE65 RNA guide
gacacacggauaucagaacaca

SEQ ID NO: 11698 - RNA, 22 nt, Artificial Sequence
  RPE65 RNA guide
gauauccgugugucacuaggca

SEQ ID NO: 11699 - RNA, 22 nt, Artificial Sequence
  RPE65 RNA guide
gccuagugacacacggauauca

SEQ ID NO: 11700 - RNA, 22 nt, Artificial Sequence
  RPE65 RNA guide
gguguguucugauauccgugug

SEQ ID NO: 11701 - RNA, 22 nt, Artificial Sequence
  RPE65 RNA guide
gugacacacggauaucagaaca

SEQ ID NO: 11702 - RNA, 22 nt, Artificial Sequence
  RPE65 RNA guide
gugccuagugacacacggauau

SEQ ID NO: 11703 - RNA, 22 nt, Artificial Sequence
  RPE65 RNA guide
guguguucugauauccgugugu

SEQ ID NO: 11704 - RNA, 22 nt, Artificial Sequence
  RPE65 RNA guide
guguucugauauccguguguca

SEQ ID NO: 11705 - RNA, 22 nt, Artificial Sequence
  RPE65 RNA guide
guucugauauccgugugucacu

SEQ ID NO: 11706 - RNA, 22 nt, Artificial Sequence
  RPE65 RNA guide
uagugacacacggauaucagaa

SEQ ID NO: 11707 - RNA, 22 nt, Artificial Sequence
  RPE65 RNA guide
uauccgugugucacuaggcacu

SEQ ID NO: 11708 - RNA, 22 nt, Artificial Sequence
  RPE65 RNA guide
uccgugugucacuaggcacuug

SEQ ID NO: 11709 - RNA, 22 nt, Artificial Sequence
  RPE65 RNA guide
ucugauauccgugugucacuag

SEQ ID NO: 11710 - RNA, 22 nt, Artificial Sequence
  RPE65 RNA guide
ugacacacggauaucagaacac

SEQ ID NO: 11711 - RNA, 22 nt, Artificial Sequence
  RPE65 RNA guide
ugauauccgugugucacuaggc

SEQ ID NO: 11712 - RNA, 22 nt, Artificial Sequence
  RPE65 RNA guide
ugccuagugacacacggauauc

SEQ ID NO: 11713 - RNA, 22 nt, Artificial Sequence
  RPE65 RNA guide
ugguguguucugauauccgugu

SEQ ID NO: 11714 - RNA, 22 nt, Artificial Sequence
  RPE65 RNA guide
uguguucugauauccguguguc

SEQ ID NO: 11715 - RNA, 22 nt, Artificial Sequence
  RPE65 RNA guide
uguucugauauccgugugucac

SEQ ID NO: 11716 - RNA, 22 nt, Artificial Sequence
  RPE65 RNA guide
uucugauauccgugugucacua

SEQ ID NO: 11717 - RNA, 22 nt, Artificial Sequence
  RPE65 RNA guide
uugguguguucugauauccgug

SEQ ID NO: 11718 - RNA, 22 nt, Artificial Sequence
  RPE65 RNA guide
cggcccuuugggaggccgaggu

SEQ ID NO: 11719 - RNA, 22 nt, Artificial Sequence
  RPE65 RNA guide
gcccaccucggccucccaaagg

SEQ ID NO: 11720 - RNA, 22 nt, Artificial Sequence
  RPE65 RNA guide
ggcccuuugggaggccgaggug

SEQ ID NO: 11721 - RNA, 22 nt, Artificial Sequence
  RPE65 RNA guide
ugcccaccucggccucccaaag

SEQ ID NO: 11722 - RNA, 20 nt, Artificial Sequence
  RPE65 RNA guide
aaugcauucuaagucguccu

SEQ ID NO: 11723 - RNA, 20 nt, Artificial Sequence
  RPE65 RNA guide
acaaugcauucuaagucguc

SEQ ID NO: 11724 - RNA, 20 nt, Artificial Sequence
  RPE65 RNA guide
acgacuuagaaugcauugug

SEQ ID NO: 11725 - RNA, 20 nt, Artificial Sequence
  RPE65 RNA guide
acuuagaaugcauuguggau

SEQ ID NO: 11726 - RNA, 20 nt, Artificial Sequence
  RPE65 RNA guide
agaaugcauuguggauaaua

SEQ ID NO: 11727 - RNA, 20 nt, Artificial Sequence
  RPE65 RNA guide
aggacgacuuagaaugcauu

SEQ ID NO: 11728 - RNA, 20 nt, Artificial Sequence
  RPE65 RNA guide
aguaggacgacuuagaaugc

SEQ ID NO: 11729 - RNA, 20 nt, Artificial Sequence
  RPE65 RNA guide
aguauauuauccacaaugca

SEQ ID NO: 11730 - RNA, 20 nt, Artificial Sequence
  RPE65 RNA guide
auauuauccacaaugcauuc

SEQ ID NO: 11731 - RNA, 20 nt, Artificial Sequence
  RPE65 RNA guide
auccacaaugcauucuaagu

SEQ ID NO: 11732 - RNA, 20 nt, Artificial Sequence
  RPE65 RNA guide
augcauucuaagucguccua

SEQ ID NO: 11733 - RNA, 20 nt, Artificial Sequence
  RPE65 RNA guide
augcauuguggauaauauac

SEQ ID NO: 11734 - RNA, 20 nt, Artificial Sequence
  RPE65 RNA guide
auuauccacaaugcauucua

SEQ ID NO: 11735 - RNA, 20 nt, Artificial Sequence
  RPE65 RNA guide
auuccaguauauuauccaca

SEQ ID NO: 11736 - RNA, 20 nt, Artificial Sequence
  RPE65 RNA guide
auuuuaguaggacgacuuag

SEQ ID NO: 11737 - RNA, 20 nt, Artificial Sequence
  RPE65 RNA guide
caaugcauucuaagucgucc

SEQ ID NO: 11738 - RNA, 20 nt, Artificial Sequence
  RPE65 RNA guide
cacaaugcauucuaagucgu

SEQ ID NO: 11739 - RNA, 20 nt, Artificial Sequence
  RPE65 RNA guide
caguauauuauccacaaugc

SEQ ID NO: 11740 - RNA, 20 nt, Artificial Sequence
  RPE65 RNA guide
ccacaaugcauucuaagucg

SEQ ID NO: 11741 - RNA, 20 nt, Artificial Sequence
  RPE65 RNA guide
ccaguauauuauccacaaug

SEQ ID NO: 11742 - RNA, 20 nt, Artificial Sequence
  RPE65 RNA guide
cgacuuagaaugcauugugg

SEQ ID NO: 11743 - RNA, 20 nt, Artificial Sequence
  RPE65 RNA guide
cuuagaaugcauuguggaua

SEQ ID NO: 11744 - RNA, 20 nt, Artificial Sequence
  RPE65 RNA guide
gaaugcauuguggauaauau

SEQ ID NO: 11745 - RNA, 20 nt, Artificial Sequence
  RPE65 RNA guide
gacgacuuagaaugcauugu

SEQ ID NO: 11746 - RNA, 20 nt, Artificial Sequence
  RPE65 RNA guide
gacuuagaaugcauugugga

SEQ ID NO: 11747 - RNA, 20 nt, Artificial Sequence
  RPE65 RNA guide
gcauucuaagucguccuacu

SEQ ID NO: 11748 - RNA, 20 nt, Artificial Sequence
  RPE65 RNA guide
ggacgacuuagaaugcauug

SEQ ID NO: 11749 - RNA, 20 nt, Artificial Sequence
  RPE65 RNA guide
guaggacgacuuagaaugca

SEQ ID NO: 11750 - RNA, 20 nt, Artificial Sequence
  RPE65 RNA guide
guauauuauccacaaugcau

SEQ ID NO: 11751 - RNA, 20 nt, Artificial Sequence
  RPE65 RNA guide
uagaaugcauuguggauaau

SEQ ID NO: 11752 - RNA, 20 nt, Artificial Sequence
  RPE65 RNA guide
uaggacgacuuagaaugcau

SEQ ID NO: 11753 - RNA, 20 nt, Artificial Sequence
  RPE65 RNA guide
uaguaggacgacuuagaaug

SEQ ID NO: 11754 - RNA, 20 nt, Artificial Sequence
  RPE65 RNA guide
uauccacaaugcauucuaag

SEQ ID NO: 11755 - RNA, 20 nt, Artificial Sequence
  RPE65 RNA guide
uauuauccacaaugcauucu

SEQ ID NO: 11756 - RNA, 20 nt, Artificial Sequence
  RPE65 RNA guide
uccacaaugcauucuaaguc

SEQ ID NO: 11757 - RNA, 20 nt, Artificial Sequence
  RPE65 RNA guide
uccaguauauuauccacaau

SEQ ID NO: 11758 - RNA, 20 nt, Artificial Sequence
  RPE65 RNA guide
ugcauucuaagucguccuac

SEQ ID NO: 11759 - RNA, 20 nt, Artificial Sequence
  RPE65 RNA guide
ugcauuguggauaauauacu

SEQ ID NO: 11760 - RNA, 20 nt, Artificial Sequence
  RPE65 RNA guide
uuagaaugcauuguggauaa

SEQ ID NO: 11761 - RNA, 20 nt, Artificial Sequence
  RPE65 RNA guide
uuaguaggacgacuuagaau

SEQ ID NO: 11762 - RNA, 20 nt, Artificial Sequence
  RPE65 RNA guide
uuauccacaaugcauucuaa

SEQ ID NO: 11763 - RNA, 20 nt, Artificial Sequence
  RPE65 RNA guide
uuccaguauauuauccacaa

SEQ ID NO: 11764 - RNA, 20 nt, Artificial Sequence
  RPE65 RNA guide
uuuaguaggacgacuuagaa

SEQ ID NO: 11765 - RNA, 20 nt, Artificial Sequence
  RPE65 RNA guide
uuuuaguaggacgacuuaga

SEQ ID NO: 11766 - RNA, 21 nt, Artificial Sequence
  RPE65 RNA guide
aaugcauucuaagucguccua

SEQ ID NO: 11767 - RNA, 21 nt, Artificial Sequence
  RPE65 RNA guide
acaaugcauucuaagucgucc

SEQ ID NO: 11768 - RNA, 21 nt, Artificial Sequence
  RPE65 RNA guide
acgacuuagaaugcauugugg

SEQ ID NO: 11769 - RNA, 21 nt, Artificial Sequence
  RPE65 RNA guide
acuuagaaugcauuguggaua

SEQ ID NO: 11770 - RNA, 21 nt, Artificial Sequence
  RPE65 RNA guide
aggacgacuuagaaugcauug

SEQ ID NO: 11771 - RNA, 21 nt, Artificial Sequence
  RPE65 RNA guide
aguaggacgacuuagaaugca

SEQ ID NO: 11772 - RNA, 21 nt, Artificial Sequence
  RPE65 RNA guide
auccacaaugcauucuaaguc

SEQ ID NO: 11773 - RNA, 21 nt, Artificial Sequence
  RPE65 RNA guide
augcauucuaagucguccuac

SEQ ID NO: 11774 - RNA, 21 nt, Artificial Sequence
  RPE65 RNA guide
auuuuaguaggacgacuuaga

SEQ ID NO: 11775 - RNA, 21 nt, Artificial Sequence
  RPE65 RNA guide
caaugcauucuaagucguccu

SEQ ID NO: 11776 - RNA, 21 nt, Artificial Sequence
  RPE65 RNA guide
cacaaugcauucuaagucguc

SEQ ID NO: 11777 - RNA, 21 nt, Artificial Sequence
  RPE65 RNA guide
caguauauuauccacaaugca

SEQ ID NO: 11778 - RNA, 21 nt, Artificial Sequence
  RPE65 RNA guide
cauuuuaguaggacgacuuag

SEQ ID NO: 11779 - RNA, 21 nt, Artificial Sequence
  RPE65 RNA guide
ccacaaugcauucuaagucgu

SEQ ID NO: 11780 - RNA, 21 nt, Artificial Sequence
  RPE65 RNA guide
ccaguauauuauccacaaugc

SEQ ID NO: 11781 - RNA, 21 nt, Artificial Sequence
  RPE65 RNA guide
cgacuuagaaugcauugugga

SEQ ID NO: 11782 - RNA, 21 nt, Artificial Sequence
  RPE65 RNA guide
cuuagaaugcauuguggauaa

SEQ ID NO: 11783 - RNA, 21 nt, Artificial Sequence
  RPE65 RNA guide
gacgacuuagaaugcauugug

SEQ ID NO: 11784 - RNA, 21 nt, Artificial Sequence
  RPE65 RNA guide
gacuuagaaugcauuguggau

SEQ ID NO: 11785 - RNA, 21 nt, Artificial Sequence
  RPE65 RNA guide
gcauucuaagucguccuacua

SEQ ID NO: 11786 - RNA, 21 nt, Artificial Sequence
  RPE65 RNA guide
ggacgacuuagaaugcauugu

SEQ ID NO: 11787 - RNA, 21 nt, Artificial Sequence
  RPE65 RNA guide
guaggacgacuuagaaugcau

SEQ ID NO: 11788 - RNA, 21 nt, Artificial Sequence
  RPE65 RNA guide
uaggacgacuuagaaugcauu

SEQ ID NO: 11789 - RNA, 21 nt, Artificial Sequence
  RPE65 RNA guide
uaguaggacgacuuagaaugc

SEQ ID NO: 11790 - RNA, 21 nt, Artificial Sequence
  RPE65 RNA guide
uauccacaaugcauucuaagu

SEQ ID NO: 11791 - RNA, 21 nt, Artificial Sequence
  RPE65 RNA guide
uccacaaugcauucuaagucg

SEQ ID NO: 11792 - RNA, 21 nt, Artificial Sequence
  RPE65 RNA guide
uccaguauauuauccacaaug

SEQ ID NO: 11793 - RNA, 21 nt, Artificial Sequence
  RPE65 RNA guide
ugcauucuaagucguccuacu

SEQ ID NO: 11794 - RNA, 21 nt, Artificial Sequence
  RPE65 RNA guide
ugcauuguggauaauauacug

SEQ ID NO: 11795 - RNA, 21 nt, Artificial Sequence
  RPE65 RNA guide
uuaguaggacgacuuagaaug

SEQ ID NO: 11796 - RNA, 21 nt, Artificial Sequence
  RPE65 RNA guide
uuauccacaaugcauucuaag

SEQ ID NO: 11797 - RNA, 21 nt, Artificial Sequence
  RPE65 RNA guide
uuuaguaggacgacuuagaau

SEQ ID NO: 11798 - RNA, 21 nt, Artificial Sequence
  RPE65 RNA guide
uuuuaguaggacgacuuagaa

SEQ ID NO: 11799 - RNA, 22 nt, Artificial Sequence
  RPE65 RNA guide
aaugcauucuaagucguccuac

SEQ ID NO: 11800 - RNA, 22 nt, Artificial Sequence
  RPE65 RNA guide
acaaugcauucuaagucguccu

SEQ ID NO: 11801 - RNA, 22 nt, Artificial Sequence
  RPE65 RNA guide
acgacuuagaaugcauugugga

SEQ ID NO: 11802 - RNA, 22 nt, Artificial Sequence
  RPE65 RNA guide
acuuagaaugcauuguggauaa

SEQ ID NO: 11803 - RNA, 22 nt, Artificial Sequence
  RPE65 RNA guide
aggacgacuuagaaugcauugu

SEQ ID NO: 11804 - RNA, 22 nt, Artificial Sequence
  RPE65 RNA guide
aguaggacgacuuagaaugcau

SEQ ID NO: 11805 - RNA, 22 nt, Artificial Sequence
  RPE65 RNA guide
auccacaaugcauucuaagucg

SEQ ID NO: 11806 - RNA, 22 nt, Artificial Sequence
  RPE65 RNA guide
augcauucuaagucguccuacu

SEQ ID NO: 11807 - RNA, 22 nt, Artificial Sequence
  RPE65 RNA guide
augcauuguggauaauauacug

SEQ ID NO: 11808 - RNA, 22 nt, Artificial Sequence
  RPE65 RNA guide
auuauccacaaugcauucuaag

SEQ ID NO: 11809 - RNA, 22 nt, Artificial Sequence
  RPE65 RNA guide
auuuuaguaggacgacuuagaa

SEQ ID NO: 11810 - RNA, 22 nt, Artificial Sequence
  RPE65 RNA guide
caaugcauucuaagucguccua

SEQ ID NO: 11811 - RNA, 22 nt, Artificial Sequence
  RPE65 RNA guide
cacaaugcauucuaagucgucc

SEQ ID NO: 11812 - RNA, 22 nt, Artificial Sequence
  RPE65 RNA guide
caguauauuauccacaaugcau

SEQ ID NO: 11813 - RNA, 22 nt, Artificial Sequence
  RPE65 RNA guide
cauuuuaguaggacgacuuaga

SEQ ID NO: 11814 - RNA, 22 nt, Artificial Sequence
  RPE65 RNA guide
ccacaaugcauucuaagucguc

SEQ ID NO: 11815 - RNA, 22 nt, Artificial Sequence
  RPE65 RNA guide
ccaguauauuauccacaaugca

SEQ ID NO: 11816 - RNA, 22 nt, Artificial Sequence
  RPE65 RNA guide
cgacuuagaaugcauuguggau

SEQ ID NO: 11817 - RNA, 22 nt, Artificial Sequence
  RPE65 RNA guide
cuauuccaguauauuauccaca

SEQ ID NO: 11818 - RNA, 22 nt, Artificial Sequence
  RPE65 RNA guide
cuuagaaugcauuguggauaau

SEQ ID NO: 11819 - RNA, 22 nt, Artificial Sequence
  RPE65 RNA guide
gaaugcauuguggauaauauac

SEQ ID NO: 11820 - RNA, 22 nt, Artificial Sequence
  RPE65 RNA guide
gacgacuuagaaugcauugugg

SEQ ID NO: 11821 - RNA, 22 nt, Artificial Sequence
  RPE65 RNA guide
gacuuagaaugcauuguggaua

SEQ ID NO: 11822 - RNA, 22 nt, Artificial Sequence
  RPE65 RNA guide
gcauucuaagucguccuacuaa

SEQ ID NO: 11823 - RNA, 22 nt, Artificial Sequence
  RPE65 RNA guide
gcauuuuaguaggacgacuuag

SEQ ID NO: 11824 - RNA, 22 nt, Artificial Sequence
  RPE65 RNA guide
ggacgacuuagaaugcauugug

SEQ ID NO: 11825 - RNA, 22 nt, Artificial Sequence
  RPE65 RNA guide
guaggacgacuuagaaugcauu

SEQ ID NO: 11826 - RNA, 22 nt, Artificial Sequence
  RPE65 RNA guide
guauauuauccacaaugcauuc

SEQ ID NO: 11827 - RNA, 22 nt, Artificial Sequence
  RPE65 RNA guide
uaggacgacuuagaaugcauug

SEQ ID NO: 11828 - RNA, 22 nt, Artificial Sequence
  RPE65 RNA guide
uaguaggacgacuuagaaugca

SEQ ID NO: 11829 - RNA, 22 nt, Artificial Sequence
  RPE65 RNA guide
uauccacaaugcauucuaaguc

SEQ ID NO: 11830 - RNA, 22 nt, Artificial Sequence
  RPE65 RNA guide
uccacaaugcauucuaagucgu

SEQ ID NO: 11831 - RNA, 22 nt, Artificial Sequence
  RPE65 RNA guide
uccaguauauuauccacaaugc

SEQ ID NO: 11832 - RNA, 22 nt, Artificial Sequence
  RPE65 RNA guide
ugcauucuaagucguccuacua

SEQ ID NO: 11833 - RNA, 22 nt, Artificial Sequence
  RPE65 RNA guide
ugcauuguggauaauauacugg

SEQ ID NO: 11834 - RNA, 22 nt, Artificial Sequence
  RPE65 RNA guide
uuaguaggacgacuuagaaugc

SEQ ID NO: 11835 - RNA, 22 nt, Artificial Sequence
  RPE65 RNA guide
uuauccacaaugcauucuaagu

SEQ ID NO: 11836 - RNA, 22 nt, Artificial Sequence
  RPE65 RNA guide
uuccaguauauuauccacaaug

SEQ ID NO: 11837 - RNA, 22 nt, Artificial Sequence
  RPE65 RNA guide
uuuaguaggacgacuuagaaug

SEQ ID NO: 11838 - RNA, 22 nt, Artificial Sequence
  RPE65 RNA guide
uuuuaguaggacgacuuagaau

SEQ ID NO: 11839 - RNA, 20 nt, Artificial Sequence
  RPE65 RNA guide
aauguauucuaagucguccu

SEQ ID NO: 11840 - RNA, 20 nt, Artificial Sequence
  RPE65 RNA guide
acaauguauucuaagucguc

SEQ ID NO: 11841 - RNA, 20 nt, Artificial Sequence
  RPE65 RNA guide
acgacuuagaauacauugug

SEQ ID NO: 11842 - RNA, 20 nt, Artificial Sequence
  RPE65 RNA guide
acuuagaauacauuguggau

SEQ ID NO: 11843 - RNA, 20 nt, Artificial Sequence
  RPE65 RNA guide
aggacgacuuagaauacauu

SEQ ID NO: 11844 - RNA, 20 nt, Artificial Sequence
  RPE65 RNA guide
aguaggacgacuuagaauac

SEQ ID NO: 11845 - RNA, 20 nt, Artificial Sequence
  RPE65 RNA guide
auccacaauguauucuaagu

SEQ ID NO: 11846 - RNA, 20 nt, Artificial Sequence
  RPE65 RNA guide
auguauucuaagucguccua

SEQ ID NO: 11847 - RNA, 20 nt, Artificial Sequence
  RPE65 RNA guide
caauguauucuaagucgucc

SEQ ID NO: 11848 - RNA, 20 nt, Artificial Sequence
  RPE65 RNA guide
cacaauguauucuaagucgu

SEQ ID NO: 11849 - RNA, 20 nt, Artificial Sequence
  RPE65 RNA guide
caguauauuauccacaaugu

SEQ ID NO: 11850 - RNA, 20 nt, Artificial Sequence
  RPE65 RNA guide
ccacaauguauucuaagucg

SEQ ID NO: 11851 - RNA, 20 nt, Artificial Sequence
  RPE65 RNA guide
cgacuuagaauacauugugg

SEQ ID NO: 11852 - RNA, 20 nt, Artificial Sequence
  RPE65 RNA guide
cuuagaauacauuguggaua

SEQ ID NO: 11853 - RNA, 20 nt, Artificial Sequence
  RPE65 RNA guide
gacgacuuagaauacauugu

SEQ ID NO: 11854 - RNA, 20 nt, Artificial Sequence
  RPE65 RNA guide
gacuuagaauacauugugga

SEQ ID NO: 11855 - RNA, 20 nt, Artificial Sequence
  RPE65 RNA guide
ggacgacuuagaauacauug

SEQ ID NO: 11856 - RNA, 20 nt, Artificial Sequence
  RPE65 RNA guide
guaggacgacuuagaauaca

SEQ ID NO: 11857 - RNA, 20 nt, Artificial Sequence
  RPE65 RNA guide
guauucuaagucguccuacu

SEQ ID NO: 11858 - RNA, 20 nt, Artificial Sequence
  RPE65 RNA guide
uaggacgacuuagaauacau

SEQ ID NO: 11859 - RNA, 20 nt, Artificial Sequence
  RPE65 RNA guide
uaguaggacgacuuagaaua

SEQ ID NO: 11860 - RNA, 20 nt, Artificial Sequence
  RPE65 RNA guide
uauccacaauguauucuaag

SEQ ID NO: 11861 - RNA, 20 nt, Artificial Sequence
  RPE65 RNA guide
uccacaauguauucuaaguc

SEQ ID NO: 11862 - RNA, 20 nt, Artificial Sequence
  RPE65 RNA guide
uguauucuaagucguccuac

SEQ ID NO: 11863 - RNA, 21 nt, Artificial Sequence
  RPE65 RNA guide
aauguauucuaagucguccua

SEQ ID NO: 11864 - RNA, 21 nt, Artificial Sequence
  RPE65 RNA guide
acaauguauucuaagucgucc

SEQ ID NO: 11865 - RNA, 21 nt, Artificial Sequence
  RPE65 RNA guide
acgacuuagaauacauugugg

SEQ ID NO: 11866 - RNA, 21 nt, Artificial Sequence
  RPE65 RNA guide
aggacgacuuagaauacauug

SEQ ID NO: 11867 - RNA, 21 nt, Artificial Sequence
  RPE65 RNA guide
aguaggacgacuuagaauaca

SEQ ID NO: 11868 - RNA, 21 nt, Artificial Sequence
  RPE65 RNA guide
auccacaauguauucuaaguc

SEQ ID NO: 11869 - RNA, 21 nt, Artificial Sequence
  RPE65 RNA guide
auguauucuaagucguccuac

SEQ ID NO: 11870 - RNA, 21 nt, Artificial Sequence
  RPE65 RNA guide
caauguauucuaagucguccu

SEQ ID NO: 11871 - RNA, 21 nt, Artificial Sequence
  RPE65 RNA guide
cacaauguauucuaagucguc

SEQ ID NO: 11872 - RNA, 21 nt, Artificial Sequence
  RPE65 RNA guide
ccacaauguauucuaagucgu

SEQ ID NO: 11873 - RNA, 21 nt, Artificial Sequence
  RPE65 RNA guide
ccaguauauuauccacaaugu

SEQ ID NO: 11874 - RNA, 21 nt, Artificial Sequence
  RPE65 RNA guide
cgacuuagaauacauugugga

SEQ ID NO: 11875 - RNA, 21 nt, Artificial Sequence
  RPE65 RNA guide
gacgacuuagaauacauugug

SEQ ID NO: 11876 - RNA, 21 nt, Artificial Sequence
  RPE65 RNA guide
gacuuagaauacauuguggau

SEQ ID NO: 11877 - RNA, 21 nt, Artificial Sequence
  RPE65 RNA guide
ggacgacuuagaauacauugu

SEQ ID NO: 11878 - RNA, 21 nt, Artificial Sequence
  RPE65 RNA guide
guaggacgacuuagaauacau

SEQ ID NO: 11879 - RNA, 21 nt, Artificial Sequence
  RPE65 RNA guide
guauucuaagucguccuacua

SEQ ID NO: 11880 - RNA, 21 nt, Artificial Sequence
  RPE65 RNA guide
uaggacgacuuagaauacauu

SEQ ID NO: 11881 - RNA, 21 nt, Artificial Sequence
  RPE65 RNA guide
uaguaggacgacuuagaauac

SEQ ID NO: 11882 - RNA, 21 nt, Artificial Sequence
  RPE65 RNA guide
uccacaauguauucuaagucg

SEQ ID NO: 11883 - RNA, 21 nt, Artificial Sequence
  RPE65 RNA guide
uguauucuaagucguccuacu

SEQ ID NO: 11884 - RNA, 21 nt, Artificial Sequence
  RPE65 RNA guide
uuaguaggacgacuuagaaua

SEQ ID NO: 11885 - RNA, 22 nt, Artificial Sequence
  RPE65 RNA guide
aauguauucuaagucguccuac

SEQ ID NO: 11886 - RNA, 22 nt, Artificial Sequence
  RPE65 RNA guide
acaauguauucuaagucguccu

SEQ ID NO: 11887 - RNA, 22 nt, Artificial Sequence
  RPE65 RNA guide
acgacuuagaauacauugugga

SEQ ID NO: 11888 - RNA, 22 nt, Artificial Sequence
  RPE65 RNA guide
aggacgacuuagaauacauugu

SEQ ID NO: 11889 - RNA, 22 nt, Artificial Sequence
  RPE65 RNA guide
aguaggacgacuuagaauacau

SEQ ID NO: 11890 - RNA, 22 nt, Artificial Sequence
  RPE65 RNA guide
auccacaauguauucuaagucg

SEQ ID NO: 11891 - RNA, 22 nt, Artificial Sequence
  RPE65 RNA guide
auguauucuaagucguccuacu

SEQ ID NO: 11892 - RNA, 22 nt, Artificial Sequence
  RPE65 RNA guide
caauguauucuaagucguccua

SEQ ID NO: 11893 - RNA, 22 nt, Artificial Sequence
  RPE65 RNA guide
cacaauguauucuaagucgucc

SEQ ID NO: 11894 - RNA, 22 nt, Artificial Sequence
  RPE65 RNA guide
ccacaauguauucuaagucguc

SEQ ID NO: 11895 - RNA, 22 nt, Artificial Sequence
  RPE65 RNA guide
ccaguauauuauccacaaugua

SEQ ID NO: 11896 - RNA, 22 nt, Artificial Sequence
  RPE65 RNA guide
cgacuuagaauacauuguggau

SEQ ID NO: 11897 - RNA, 22 nt, Artificial Sequence
  RPE65 RNA guide
gacgacuuagaauacauugugg

SEQ ID NO: 11898 - RNA, 22 nt, Artificial Sequence
  RPE65 RNA guide
gacuuagaauacauuguggaua

SEQ ID NO: 11899 - RNA, 22 nt, Artificial Sequence
  RPE65 RNA guide
ggacgacuuagaauacauugug

SEQ ID NO: 11900 - RNA, 22 nt, Artificial Sequence
  RPE65 RNA guide
guaggacgacuuagaauacauu

SEQ ID NO: 11901 - RNA, 22 nt, Artificial Sequence
  RPE65 RNA guide
guauucuaagucguccuacuaa

SEQ ID NO: 11902 - RNA, 22 nt, Artificial Sequence
  RPE65 RNA guide
uacauuguggauaauauacugg

SEQ ID NO: 11903 - RNA, 22 nt, Artificial Sequence
  RPE65 RNA guide
uaggacgacuuagaauacauug

SEQ ID NO: 11904 - RNA, 22 nt, Artificial Sequence
  RPE65 RNA guide
uaguaggacgacuuagaauaca

SEQ ID NO: 11905 - RNA, 22 nt, Artificial Sequence
  RPE65 RNA guide
uauccacaauguauucuaaguc

SEQ ID NO: 11906 - RNA, 22 nt, Artificial Sequence
  RPE65 RNA guide
uccacaauguauucuaagucgu

SEQ ID NO: 11907 - RNA, 22 nt, Artificial Sequence
  RPE65 RNA guide
uccaguauauuauccacaaugu

SEQ ID NO: 11908 - RNA, 22 nt, Artificial Sequence
  RPE65 RNA guide
uguauucuaagucguccuacua

SEQ ID NO: 11909 - RNA, 22 nt, Artificial Sequence
  RPE65 RNA guide
uuaguaggacgacuuagaauac

SEQ ID NO: 11910 - RNA, 22 nt, Artificial Sequence
  RPE65 RNA guide
uuuaguaggacgacuuagaaua

SEQ ID NO: 11911 - RNA, 20 nt, Artificial Sequence
  RPE65 RNA guide
auuguggauaauauacugga

SEQ ID NO: 11912 - RNA, 20 nt, Artificial Sequence
  RPE65 RNA guide
cauuguggauaauauacugg

SEQ ID NO: 11913 - RNA, 20 nt, Artificial Sequence
  RPE65 RNA guide
ccuauuccaguauauuaucc

SEQ ID NO: 11914 - RNA, 20 nt, Artificial Sequence
  RPE65 RNA guide
cuauuccaguauauuaucca

SEQ ID NO: 11915 - RNA, 20 nt, Artificial Sequence
  RPE65 RNA guide
gcauuguggauaauauacug

SEQ ID NO: 11916 - RNA, 20 nt, Artificial Sequence
  RPE65 RNA guide
uauuccaguauauuauccac

SEQ ID NO: 11917 - RNA, 21 nt, Artificial Sequence
  RPE65 RNA guide
cauuguggauaauauacugga

SEQ ID NO: 11918 - RNA, 21 nt, Artificial Sequence
  RPE65 RNA guide
ccuauuccaguauauuaucca

SEQ ID NO: 11919 - RNA, 21 nt, Artificial Sequence
  RPE65 RNA guide
cuauuccaguauauuauccac

SEQ ID NO: 11920 - RNA, 21 nt, Artificial Sequence
  RPE65 RNA guide
gcauuguggauaauauacugg

SEQ ID NO: 11921 - RNA, 21 nt, Artificial Sequence
  RPE65 RNA guide
uccuauuccaguauauuaucc

SEQ ID NO: 11922 - RNA, 22 nt, Artificial Sequence
  RPE65 RNA guide
cauuguggauaauauacuggaa

SEQ ID NO: 11923 - RNA, 22 nt, Artificial Sequence
  RPE65 RNA guide
ccuauuccaguauauuauccac

SEQ ID NO: 11924 - RNA, 22 nt, Artificial Sequence
  RPE65 RNA guide
cuccuauuccaguauauuaucc

SEQ ID NO: 11925 - RNA, 22 nt, Artificial Sequence
  RPE65 RNA guide
gcauuguggauaauauacugga

SEQ ID NO: 11926 - RNA, 22 nt, Artificial Sequence
  RPE65 RNA guide
uccuauuccaguauauuaucca

SEQ ID NO: 11927 - RNA, 20 nt, Artificial Sequence
  RPE65 RNA guide
aaugcacuguggauaauaua

SEQ ID NO: 11928 - RNA, 20 nt, Artificial Sequence
  RPE65 RNA guide
acagugcauucuaagucguc

SEQ ID NO: 11929 - RNA, 20 nt, Artificial Sequence
  RPE65 RNA guide
acgacuuagaaugcacugug

SEQ ID NO: 11930 - RNA, 20 nt, Artificial Sequence
  RPE65 RNA guide
acuguggauaauauacugga

SEQ ID NO: 11931 - RNA, 20 nt, Artificial Sequence
  RPE65 RNA guide
acuuagaaugcacuguggau

SEQ ID NO: 11932 - RNA, 20 nt, Artificial Sequence
  RPE65 RNA guide
agaaugcacuguggauaaua

SEQ ID NO: 11933 - RNA, 20 nt, Artificial Sequence
  RPE65 RNA guide
aggacgacuuagaaugcacu

SEQ ID NO: 11934 - RNA, 20 nt, Artificial Sequence
  RPE65 RNA guide
aguauauuauccacagugca

SEQ ID NO: 11935 - RNA, 20 nt, Artificial Sequence
  RPE65 RNA guide
agugcauucuaagucguccu

SEQ ID NO: 11936 - RNA, 20 nt, Artificial Sequence
  RPE65 RNA guide
auauuauccacagugcauuc

SEQ ID NO: 11937 - RNA, 20 nt, Artificial Sequence
  RPE65 RNA guide
auccacagugcauucuaagu

SEQ ID NO: 11938 - RNA, 20 nt, Artificial Sequence
  RPE65 RNA guide
augcacuguggauaauauac

SEQ ID NO: 11939 - RNA, 20 nt, Artificial Sequence
  RPE65 RNA guide
auuauccacagugcauucua

SEQ ID NO: 11940 - RNA, 20 nt, Artificial Sequence
  RPE65 RNA guide
cacagugcauucuaagucgu

SEQ ID NO: 11941 - RNA, 20 nt, Artificial Sequence
  RPE65 RNA guide
cacuguggauaauauacugg

SEQ ID NO: 11942 - RNA, 20 nt, Artificial Sequence
  RPE65 RNA guide
caguauauuauccacagugc

SEQ ID NO: 11943 - RNA, 20 nt, Artificial Sequence
  RPE65 RNA guide
cagugcauucuaagucgucc

SEQ ID NO: 11944 - RNA, 20 nt, Artificial Sequence
  RPE65 RNA guide
ccacagugcauucuaagucg

SEQ ID NO: 11945 - RNA, 20 nt, Artificial Sequence
  RPE65 RNA guide
ccaguauauuauccacagug

SEQ ID NO: 11946 - RNA, 20 nt, Artificial Sequence
  RPE65 RNA guide
cgacuuagaaugcacugugg

SEQ ID NO: 11947 - RNA, 20 nt, Artificial Sequence
  RPE65 RNA guide
cuuagaaugcacuguggaua

SEQ ID NO: 11948 - RNA, 20 nt, Artificial Sequence
  RPE65 RNA guide
gaaugcacuguggauaauau

SEQ ID NO: 11949 - RNA, 20 nt, Artificial Sequence
  RPE65 RNA guide
gacgacuuagaaugcacugu

SEQ ID NO: 11950 - RNA, 20 nt, Artificial Sequence
  RPE65 RNA guide
gacuuagaaugcacugugga

SEQ ID NO: 11951 - RNA, 20 nt, Artificial Sequence
  RPE65 RNA guide
gcacuguggauaauauacug

SEQ ID NO: 11952 - RNA, 20 nt, Artificial Sequence
  RPE65 RNA guide
ggacgacuuagaaugcacug

SEQ ID NO: 11953 - RNA, 20 nt, Artificial Sequence
  RPE65 RNA guide
guauauuauccacagugcau

SEQ ID NO: 11954 - RNA, 20 nt, Artificial Sequence
  RPE65 RNA guide
uagaaugcacuguggauaau

SEQ ID NO: 11955 - RNA, 20 nt, Artificial Sequence
  RPE65 RNA guide
uaggacgacuuagaaugcac

SEQ ID NO: 11956 - RNA, 20 nt, Artificial Sequence
  RPE65 RNA guide
uauauuauccacagugcauu

SEQ ID NO: 11957 - RNA, 20 nt, Artificial Sequence
  RPE65 RNA guide
uauccacagugcauucuaag

SEQ ID NO: 11958 - RNA, 20 nt, Artificial Sequence
  RPE65 RNA guide
uauuauccacagugcauucu

SEQ ID NO: 11959 - RNA, 20 nt, Artificial Sequence
  RPE65 RNA guide
uccacagugcauucuaaguc

SEQ ID NO: 11960 - RNA, 20 nt, Artificial Sequence
  RPE65 RNA guide
uccaguauauuauccacagu

SEQ ID NO: 11961 - RNA, 20 nt, Artificial Sequence
  RPE65 RNA guide
ugcacuguggauaauauacu

SEQ ID NO: 11962 - RNA, 20 nt, Artificial Sequence
  RPE65 RNA guide
uuagaaugcacuguggauaa

SEQ ID NO: 11963 - RNA, 20 nt, Artificial Sequence
  RPE65 RNA guide
uuauccacagugcauucuaa

SEQ ID NO: 11964 - RNA, 20 nt, Artificial Sequence
  RPE65 RNA guide
uuccaguauauuauccacag

SEQ ID NO: 11965 - RNA, 21 nt, Artificial Sequence
  RPE65 RNA guide
aaugcacuguggauaauauac

SEQ ID NO: 11966 - RNA, 21 nt, Artificial Sequence
  RPE65 RNA guide
acagugcauucuaagucgucc

SEQ ID NO: 11967 - RNA, 21 nt, Artificial Sequence
  RPE65 RNA guide
acgacuuagaaugcacugugg

SEQ ID NO: 11968 - RNA, 21 nt, Artificial Sequence
  RPE65 RNA guide
acuguggauaauauacuggaa

SEQ ID NO: 11969 - RNA, 21 nt, Artificial Sequence
  RPE65 RNA guide
acuuagaaugcacuguggaua

SEQ ID NO: 11970 - RNA, 21 nt, Artificial Sequence
  RPE65 RNA guide
agaaugcacuguggauaauau

SEQ ID NO: 11971 - RNA, 21 nt, Artificial Sequence
  RPE65 RNA guide
aggacgacuuagaaugcacug

SEQ ID NO: 11972 - RNA, 21 nt, Artificial Sequence
  RPE65 RNA guide
aguauauuauccacagugcau

SEQ ID NO: 11973 - RNA, 21 nt, Artificial Sequence
  RPE65 RNA guide
agugcauucuaagucguccua

SEQ ID NO: 11974 - RNA, 21 nt, Artificial Sequence
  RPE65 RNA guide
auauuauccacagugcauucu

SEQ ID NO: 11975 - RNA, 21 nt, Artificial Sequence
  RPE65 RNA guide
auccacagugcauucuaaguc

SEQ ID NO: 11976 - RNA, 21 nt, Artificial Sequence
  RPE65 RNA guide
augcacuguggauaauauacu

SEQ ID NO: 11977 - RNA, 21 nt, Artificial Sequence
  RPE65 RNA guide
auuauccacagugcauucuaa

SEQ ID NO: 11978 - RNA, 21 nt, Artificial Sequence
  RPE65 RNA guide
auuccaguauauuauccacag

SEQ ID NO: 11979 - RNA, 21 nt, Artificial Sequence
  RPE65 RNA guide
cacagugcauucuaagucguc

SEQ ID NO: 11980 - RNA, 21 nt, Artificial Sequence
  RPE65 RNA guide
cacuguggauaauauacugga

SEQ ID NO: 11981 - RNA, 21 nt, Artificial Sequence
  RPE65 RNA guide
caguauauuauccacagugca

SEQ ID NO: 11982 - RNA, 21 nt, Artificial Sequence
  RPE65 RNA guide
cagugcauucuaagucguccu

SEQ ID NO: 11983 - RNA, 21 nt, Artificial Sequence
  RPE65 RNA guide
ccacagugcauucuaagucgu

SEQ ID NO: 11984 - RNA, 21 nt, Artificial Sequence
  RPE65 RNA guide
ccaguauauuauccacagugc

SEQ ID NO: 11985 - RNA, 21 nt, Artificial Sequence
  RPE65 RNA guide
cgacuuagaaugcacugugga

SEQ ID NO: 11986 - RNA, 21 nt, Artificial Sequence
  RPE65 RNA guide
cuuagaaugcacuguggauaa

SEQ ID NO: 11987 - RNA, 21 nt, Artificial Sequence
  RPE65 RNA guide
gaaugcacuguggauaauaua

SEQ ID NO: 11988 - RNA, 21 nt, Artificial Sequence
  RPE65 RNA guide
gacgacuuagaaugcacugug

SEQ ID NO: 11989 - RNA, 21 nt, Artificial Sequence
  RPE65 RNA guide
gacuuagaaugcacuguggau

SEQ ID NO: 11990 - RNA, 21 nt, Artificial Sequence
  RPE65 RNA guide
gcacuguggauaauauacugg

SEQ ID NO: 11991 - RNA, 21 nt, Artificial Sequence
  RPE65 RNA guide
ggacgacuuagaaugcacugu

SEQ ID NO: 11992 - RNA, 21 nt, Artificial Sequence
  RPE65 RNA guide
guaggacgacuuagaaugcac

SEQ ID NO: 11993 - RNA, 21 nt, Artificial Sequence
  RPE65 RNA guide
guauauuauccacagugcauu

SEQ ID NO: 11994 - RNA, 21 nt, Artificial Sequence
  RPE65 RNA guide
uagaaugcacuguggauaaua

SEQ ID NO: 11995 - RNA, 21 nt, Artificial Sequence
  RPE65 RNA guide
uaggacgacuuagaaugcacu

SEQ ID NO: 11996 - RNA, 21 nt, Artificial Sequence
  RPE65 RNA guide
uauauuauccacagugcauuc

SEQ ID NO: 11997 - RNA, 21 nt, Artificial Sequence
  RPE65 RNA guide
uauccacagugcauucuaagu

SEQ ID NO: 11998 - RNA, 21 nt, Artificial Sequence
  RPE65 RNA guide
uauuauccacagugcauucua

SEQ ID NO: 11999 - RNA, 21 nt, Artificial Sequence
  RPE65 RNA guide
uccacagugcauucuaagucg

SEQ ID NO: 12000 - RNA, 21 nt, Artificial Sequence
  RPE65 RNA guide
uccaguauauuauccacagug

SEQ ID NO: 12001 - RNA, 21 nt, Artificial Sequence
  RPE65 RNA guide
ugcacuguggauaauauacug

SEQ ID NO: 12002 - RNA, 21 nt, Artificial Sequence
  RPE65 RNA guide
uuagaaugcacuguggauaau

SEQ ID NO: 12003 - RNA, 21 nt, Artificial Sequence
  RPE65 RNA guide
uuauccacagugcauucuaag

SEQ ID NO: 12004 - RNA, 21 nt, Artificial Sequence
  RPE65 RNA guide
uuccaguauauuauccacagu

SEQ ID NO: 12005 - RNA, 22 nt, Artificial Sequence
  RPE65 RNA guide
aaugcacuguggauaauauacu

SEQ ID NO: 12006 - RNA, 22 nt, Artificial Sequence
  RPE65 RNA guide
acagugcauucuaagucguccu

SEQ ID NO: 12007 - RNA, 22 nt, Artificial Sequence
  RPE65 RNA guide
acgacuuagaaugcacugugga

SEQ ID NO: 12008 - RNA, 22 nt, Artificial Sequence
  RPE65 RNA guide
acuguggauaauauacuggaau

SEQ ID NO: 12009 - RNA, 22 nt, Artificial Sequence
  RPE65 RNA guide
acuuagaaugcacuguggauaa

SEQ ID NO: 12010 - RNA, 22 nt, Artificial Sequence
  RPE65 RNA guide
agaaugcacuguggauaauaua

SEQ ID NO: 12011 - RNA, 22 nt, Artificial Sequence
  RPE65 RNA guide
aggacgacuuagaaugcacugu

SEQ ID NO: 12012 - RNA, 22 nt, Artificial Sequence
  RPE65 RNA guide
aguaggacgacuuagaaugcac

SEQ ID NO: 12013 - RNA, 22 nt, Artificial Sequence
  RPE65 RNA guide
aguauauuauccacagugcauu

SEQ ID NO: 12014 - RNA, 22 nt, Artificial Sequence
  RPE65 RNA guide
agugcauucuaagucguccuac

SEQ ID NO: 12015 - RNA, 22 nt, Artificial Sequence
  RPE65 RNA guide
auauuauccacagugcauucua

SEQ ID NO: 12016 - RNA, 22 nt, Artificial Sequence
  RPE65 RNA guide
auccacagugcauucuaagucg

SEQ ID NO: 12017 - RNA, 22 nt, Artificial Sequence
  RPE65 RNA guide
augcacuguggauaauauacug

SEQ ID NO: 12018 - RNA, 22 nt, Artificial Sequence
  RPE65 RNA guide
auuauccacagugcauucuaag

SEQ ID NO: 12019 - RNA, 22 nt, Artificial Sequence
  RPE65 RNA guide
auuccaguauauuauccacagu

SEQ ID NO: 12020 - RNA, 22 nt, Artificial Sequence
  RPE65 RNA guide
cacagugcauucuaagucgucc

SEQ ID NO: 12021 - RNA, 22 nt, Artificial Sequence
  RPE65 RNA guide
cacuguggauaauauacuggaa

SEQ ID NO: 12022 - RNA, 22 nt, Artificial Sequence
  RPE65 RNA guide
caguauauuauccacagugcau

SEQ ID NO: 12023 - RNA, 22 nt, Artificial Sequence
  RPE65 RNA guide
cagugcauucuaagucguccua

SEQ ID NO: 12024 - RNA, 22 nt, Artificial Sequence
  RPE65 RNA guide
ccacagugcauucuaagucguc

SEQ ID NO: 12025 - RNA, 22 nt, Artificial Sequence
  RPE65 RNA guide
ccaguauauuauccacagugca

SEQ ID NO: 12026 - RNA, 22 nt, Artificial Sequence
  RPE65 RNA guide
cgacuuagaaugcacuguggau

SEQ ID NO: 12027 - RNA, 22 nt, Artificial Sequence
  RPE65 RNA guide
cuuagaaugcacuguggauaau

SEQ ID NO: 12028 - RNA, 22 nt, Artificial Sequence
  RPE65 RNA guide
gaaugcacuguggauaauauac

SEQ ID NO: 12029 - RNA, 22 nt, Artificial Sequence
  RPE65 RNA guide
gacgacuuagaaugcacugugg

SEQ ID NO: 12030 - RNA, 22 nt, Artificial Sequence
  RPE65 RNA guide
gacuuagaaugcacuguggaua

SEQ ID NO: 12031 - RNA, 22 nt, Artificial Sequence
  RPE65 RNA guide
gcacuguggauaauauacugga

SEQ ID NO: 12032 - RNA, 22 nt, Artificial Sequence
  RPE65 RNA guide
ggacgacuuagaaugcacugug

SEQ ID NO: 12033 - RNA, 22 nt, Artificial Sequence
  RPE65 RNA guide
guaggacgacuuagaaugcacu

SEQ ID NO: 12034 - RNA, 22 nt, Artificial Sequence
  RPE65 RNA guide
guauauuauccacagugcauuc

SEQ ID NO: 12035 - RNA, 22 nt, Artificial Sequence
  RPE65 RNA guide
uagaaugcacuguggauaauau

SEQ ID NO: 12036 - RNA, 22 nt, Artificial Sequence
  RPE65 RNA guide
uaggacgacuuagaaugcacug

SEQ ID NO: 12037 - RNA, 22 nt, Artificial Sequence
  RPE65 RNA guide
uauauuauccacagugcauucu

SEQ ID NO: 12038 - RNA, 22 nt, Artificial Sequence
  RPE65 RNA guide
uauccacagugcauucuaaguc

SEQ ID NO: 12039 - RNA, 22 nt, Artificial Sequence
  RPE65 RNA guide
uauuauccacagugcauucuaa

SEQ ID NO: 12040 - RNA, 22 nt, Artificial Sequence
  RPE65 RNA guide
uauuccaguauauuauccacag

SEQ ID NO: 12041 - RNA, 22 nt, Artificial Sequence
  RPE65 RNA guide
uccacagugcauucuaagucgu

SEQ ID NO: 12042 - RNA, 22 nt, Artificial Sequence
  RPE65 RNA guide
uccaguauauuauccacagugc

SEQ ID NO: 12043 - RNA, 22 nt, Artificial Sequence
  RPE65 RNA guide
ugcacuguggauaauauacugg

SEQ ID NO: 12044 - RNA, 22 nt, Artificial Sequence
  RPE65 RNA guide
uuagaaugcacuguggauaaua

SEQ ID NO: 12045 - RNA, 22 nt, Artificial Sequence
  RPE65 RNA guide
uuauccacagugcauucuaagu

SEQ ID NO: 12046 - RNA, 22 nt, Artificial Sequence
  RPE65 RNA guide
uuccaguauauuauccacagug

SEQ ID NO: 12047 - RNA, 20 nt, Artificial Sequence
  RPE65 RNA guide
aaaaaaggauuaccgguggg

SEQ ID NO: 12048 - RNA, 20 nt, Artificial Sequence
  RPE65 RNA guide
aaaaaggauuaccggugggu

SEQ ID NO: 12049 - RNA, 20 nt, Artificial Sequence
  RPE65 RNA guide
aaaaggauuaccgguggguu

SEQ ID NO: 12050 - RNA, 20 nt, Artificial Sequence
  RPE65 RNA guide
aaaccagaaacccaccggua

SEQ ID NO: 12051 - RNA, 20 nt, Artificial Sequence
  RPE65 RNA guide
aaacccaccgguaauccuuu

SEQ ID NO: 12052 - RNA, 20 nt, Artificial Sequence
  RPE65 RNA guide
aaaggauuaccgguggguuu

SEQ ID NO: 12053 - RNA, 20 nt, Artificial Sequence
  RPE65 RNA guide
aaccagaaacccaccgguaa

SEQ ID NO: 12054 - RNA, 20 nt, Artificial Sequence
  RPE65 RNA guide
aacccaccgguaauccuuuu

SEQ ID NO: 12055 - RNA, 20 nt, Artificial Sequence
  RPE65 RNA guide
aaggauuaccgguggguuuc

SEQ ID NO: 12056 - RNA, 20 nt, Artificial Sequence
  RPE65 RNA guide
aaggcauaaaaaaggauuac

SEQ ID NO: 12057 - RNA, 20 nt, Artificial Sequence
  RPE65 RNA guide
accagaaaccagaaacccac

SEQ ID NO: 12058 - RNA, 20 nt, Artificial Sequence
  RPE65 RNA guide
accagaaacccaccgguaau

SEQ ID NO: 12059 - RNA, 20 nt, Artificial Sequence
  RPE65 RNA guide
acccaccgguaauccuuuuu

SEQ ID NO: 12060 - RNA, 20 nt, Artificial Sequence
  RPE65 RNA guide
accgguaauccuuuuuuaug

SEQ ID NO: 12061 - RNA, 20 nt, Artificial Sequence
  RPE65 RNA guide
accgguggguuucugguuuc

SEQ ID NO: 12062 - RNA, 20 nt, Artificial Sequence
  RPE65 RNA guide
agaaaccagaaacccaccgg

SEQ ID NO: 12063 - RNA, 20 nt, Artificial Sequence
  RPE65 RNA guide
agaaacccaccgguaauccu

SEQ ID NO: 12064 - RNA, 20 nt, Artificial Sequence
  RPE65 RNA guide
aggauuaccgguggguuucu

SEQ ID NO: 12065 - RNA, 20 nt, Artificial Sequence
  RPE65 RNA guide
aggcauaaaaaaggauuacc

SEQ ID NO: 12066 - RNA, 20 nt, Artificial Sequence
  RPE65 RNA guide
auaaaaaaggauuaccggug

SEQ ID NO: 12067 - RNA, 20 nt, Artificial Sequence
  RPE65 RNA guide
auuaccgguggguuucuggu

SEQ ID NO: 12068 - RNA, 20 nt, Artificial Sequence
  RPE65 RNA guide
caccgguaauccuuuuuuau

SEQ ID NO: 12069 - RNA, 20 nt, Artificial Sequence
  RPE65 RNA guide
cagaaaccagaaacccaccg

SEQ ID NO: 12070 - RNA, 20 nt, Artificial Sequence
  RPE65 RNA guide
cagaaacccaccgguaaucc

SEQ ID NO: 12071 - RNA, 20 nt, Artificial Sequence
  RPE65 RNA guide
cauaaaaaaggauuaccggu

SEQ ID NO: 12072 - RNA, 20 nt, Artificial Sequence
  RPE65 RNA guide
ccaccgguaauccuuuuuua

SEQ ID NO: 12073 - RNA, 20 nt, Artificial Sequence
  RPE65 RNA guide
ccagaaaccagaaacccacc

SEQ ID NO: 12074 - RNA, 20 nt, Artificial Sequence
  RPE65 RNA guide
ccagaaacccaccgguaauc

SEQ ID NO: 12075 - RNA, 20 nt, Artificial Sequence
  RPE65 RNA guide
cccaccgguaauccuuuuuu

SEQ ID NO: 12076 - RNA, 20 nt, Artificial Sequence
  RPE65 RNA guide
ccgguaauccuuuuuuaugc

SEQ ID NO: 12077 - RNA, 20 nt, Artificial Sequence
  RPE65 RNA guide
ccgguggguuucugguuucu

SEQ ID NO: 12078 - RNA, 20 nt, Artificial Sequence
  RPE65 RNA guide
cgguaauccuuuuuuaugcc

SEQ ID NO: 12079 - RNA, 20 nt, Artificial Sequence
  RPE65 RNA guide
gaaaccagaaacccaccggu

SEQ ID NO: 12080 - RNA, 20 nt, Artificial Sequence
  RPE65 RNA guide
gaaacccaccgguaauccuu

SEQ ID NO: 12081 - RNA, 20 nt, Artificial Sequence
  RPE65 RNA guide
gauuaccgguggguuucugg

SEQ ID NO: 12082 - RNA, 20 nt, Artificial Sequence
  RPE65 RNA guide
gcauaaaaaaggauuaccgg

SEQ ID NO: 12083 - RNA, 20 nt, Artificial Sequence
  RPE65 RNA guide
ggauuaccgguggguuucug

SEQ ID NO: 12084 - RNA, 20 nt, Artificial Sequence
  RPE65 RNA guide
ggcauaaaaaaggauuaccg

SEQ ID NO: 12085 - RNA, 20 nt, Artificial Sequence
  RPE65 RNA guide
guaccagaaaccagaaaccc

SEQ ID NO: 12086 - RNA, 20 nt, Artificial Sequence
  RPE65 RNA guide
uaaaaaaggauuaccggugg

SEQ ID NO: 12087 - RNA, 20 nt, Artificial Sequence
  RPE65 RNA guide
uaccagaaaccagaaaccca

SEQ ID NO: 12088 - RNA, 20 nt, Artificial Sequence
  RPE65 RNA guide
uaccgguggguuucugguuu

SEQ ID NO: 12089 - RNA, 20 nt, Artificial Sequence
  RPE65 RNA guide
uuaccgguggguuucugguu

SEQ ID NO: 12090 - RNA, 21 nt, Artificial Sequence
  RPE65 RNA guide
aaaaaaggauuaccggugggu

SEQ ID NO: 12091 - RNA, 21 nt, Artificial Sequence
  RPE65 RNA guide
aaaaaggauuaccgguggguu

SEQ ID NO: 12092 - RNA, 21 nt, Artificial Sequence
  RPE65 RNA guide
aaaaggauuaccgguggguuu

SEQ ID NO: 12093 - RNA, 21 nt, Artificial Sequence
  RPE65 RNA guide
aaaccagaaacccaccgguaa

SEQ ID NO: 12094 - RNA, 21 nt, Artificial Sequence
  RPE65 RNA guide
aaacccaccgguaauccuuuu

SEQ ID NO: 12095 - RNA, 21 nt, Artificial Sequence
  RPE65 RNA guide
aaaggauuaccgguggguuuc

SEQ ID NO: 12096 - RNA, 21 nt, Artificial Sequence
  RPE65 RNA guide
aaccagaaacccaccgguaau

SEQ ID NO: 12097 - RNA, 21 nt, Artificial Sequence
  RPE65 RNA guide
aacccaccgguaauccuuuuu

SEQ ID NO: 12098 - RNA, 21 nt, Artificial Sequence
  RPE65 RNA guide
aaggauuaccgguggguuucu

SEQ ID NO: 12099 - RNA, 21 nt, Artificial Sequence
  RPE65 RNA guide
aaggcauaaaaaaggauuacc

SEQ ID NO: 12100 - RNA, 21 nt, Artificial Sequence
  RPE65 RNA guide
accagaaaccagaaacccacc

SEQ ID NO: 12101 - RNA, 21 nt, Artificial Sequence
  RPE65 RNA guide
accagaaacccaccgguaauc

SEQ ID NO: 12102 - RNA, 21 nt, Artificial Sequence
  RPE65 RNA guide
acccaccgguaauccuuuuuu

SEQ ID NO: 12103 - RNA, 21 nt, Artificial Sequence
  RPE65 RNA guide
accgguaauccuuuuuuaugc

SEQ ID NO: 12104 - RNA, 21 nt, Artificial Sequence
  RPE65 RNA guide
accgguggguuucugguuucu

SEQ ID NO: 12105 - RNA, 21 nt, Artificial Sequence
  RPE65 RNA guide
agaaaccagaaacccaccggu

SEQ ID NO: 12106 - RNA, 21 nt, Artificial Sequence
  RPE65 RNA guide
agaaacccaccgguaauccuu

SEQ ID NO: 12107 - RNA, 21 nt, Artificial Sequence
  RPE65 RNA guide
aggauuaccgguggguuucug

SEQ ID NO: 12108 - RNA, 21 nt, Artificial Sequence
  RPE65 RNA guide
aggcauaaaaaaggauuaccg

SEQ ID NO: 12109 - RNA, 21 nt, Artificial Sequence
  RPE65 RNA guide
auaaaaaaggauuaccggugg

SEQ ID NO: 12110 - RNA, 21 nt, Artificial Sequence
  RPE65 RNA guide
auuaccgguggguuucugguu

SEQ ID NO: 12111 - RNA, 21 nt, Artificial Sequence
  RPE65 RNA guide
caccgguaauccuuuuuuaug

SEQ ID NO: 12112 - RNA, 21 nt, Artificial Sequence
  RPE65 RNA guide
cagaaaccagaaacccaccgg

SEQ ID NO: 12113 - RNA, 21 nt, Artificial Sequence
  RPE65 RNA guide
cagaaacccaccgguaauccu

SEQ ID NO: 12114 - RNA, 21 nt, Artificial Sequence
  RPE65 RNA guide
cauaaaaaaggauuaccggug

SEQ ID NO: 12115 - RNA, 21 nt, Artificial Sequence
  RPE65 RNA guide
ccaccgguaauccuuuuuuau

SEQ ID NO: 12116 - RNA, 21 nt, Artificial Sequence
  RPE65 RNA guide
ccagaaaccagaaacccaccg

SEQ ID NO: 12117 - RNA, 21 nt, Artificial Sequence
  RPE65 RNA guide
ccagaaacccaccgguaaucc

SEQ ID NO: 12118 - RNA, 21 nt, Artificial Sequence
  RPE65 RNA guide
cccaccgguaauccuuuuuua

SEQ ID NO: 12119 - RNA, 21 nt, Artificial Sequence
  RPE65 RNA guide
ccgguaauccuuuuuuaugcc

SEQ ID NO: 12120 - RNA, 21 nt, Artificial Sequence
  RPE65 RNA guide
ccgguggguuucugguuucug

SEQ ID NO: 12121 - RNA, 21 nt, Artificial Sequence
  RPE65 RNA guide
cgguaauccuuuuuuaugccu

SEQ ID NO: 12122 - RNA, 21 nt, Artificial Sequence
  RPE65 RNA guide
gaaaccagaaacccaccggua

SEQ ID NO: 12123 - RNA, 21 nt, Artificial Sequence
  RPE65 RNA guide
gaaacccaccgguaauccuuu

SEQ ID NO: 12124 - RNA, 21 nt, Artificial Sequence
  RPE65 RNA guide
gauuaccgguggguuucuggu

SEQ ID NO: 12125 - RNA, 21 nt, Artificial Sequence
  RPE65 RNA guide
gcauaaaaaaggauuaccggu

SEQ ID NO: 12126 - RNA, 21 nt, Artificial Sequence
  RPE65 RNA guide
ggauuaccgguggguuucugg

SEQ ID NO: 12127 - RNA, 21 nt, Artificial Sequence
  RPE65 RNA guide
ggcauaaaaaaggauuaccgg

SEQ ID NO: 12128 - RNA, 21 nt, Artificial Sequence
  RPE65 RNA guide
guaccagaaaccagaaaccca

SEQ ID NO: 12129 - RNA, 21 nt, Artificial Sequence
  RPE65 RNA guide
uaaaaaaggauuaccgguggg

SEQ ID NO: 12130 - RNA, 21 nt, Artificial Sequence
  RPE65 RNA guide
uaccagaaaccagaaacccac

SEQ ID NO: 12131 - RNA, 21 nt, Artificial Sequence
  RPE65 RNA guide
uaccgguggguuucugguuuc

SEQ ID NO: 12132 - RNA, 21 nt, Artificial Sequence
  RPE65 RNA guide
uguaccagaaaccagaaaccc

SEQ ID NO: 12133 - RNA, 21 nt, Artificial Sequence
  RPE65 RNA guide
uuaccgguggguuucugguuu

SEQ ID NO: 12134 - RNA, 22 nt, Artificial Sequence
  RPE65 RNA guide
aaaaaaggauuaccgguggguu

SEQ ID NO: 12135 - RNA, 22 nt, Artificial Sequence
  RPE65 RNA guide
aaaaaggauuaccgguggguuu

SEQ ID NO: 12136 - RNA, 22 nt, Artificial Sequence
  RPE65 RNA guide
aaaaggauuaccgguggguuuc

SEQ ID NO: 12137 - RNA, 22 nt, Artificial Sequence
  RPE65 RNA guide
aaaccagaaacccaccgguaau

SEQ ID NO: 12138 - RNA, 22 nt, Artificial Sequence
  RPE65 RNA guide
aaacccaccgguaauccuuuuu

SEQ ID NO: 12139 - RNA, 22 nt, Artificial Sequence
  RPE65 RNA guide
aaaggauuaccgguggguuucu

SEQ ID NO: 12140 - RNA, 22 nt, Artificial Sequence
  RPE65 RNA guide
aaaggcauaaaaaaggauuacc

SEQ ID NO: 12141 - RNA, 22 nt, Artificial Sequence
  RPE65 RNA guide
aaccagaaacccaccgguaauc

SEQ ID NO: 12142 - RNA, 22 nt, Artificial Sequence
  RPE65 RNA guide
aacccaccgguaauccuuuuuu

SEQ ID NO: 12143 - RNA, 22 nt, Artificial Sequence
  RPE65 RNA guide
aaggauuaccgguggguuucug

SEQ ID NO: 12144 - RNA, 22 nt, Artificial Sequence
  RPE65 RNA guide
aaggcauaaaaaaggauuaccg

SEQ ID NO: 12145 - RNA, 22 nt, Artificial Sequence
  RPE65 RNA guide
accagaaaccagaaacccaccg

SEQ ID NO: 12146 - RNA, 22 nt, Artificial Sequence
  RPE65 RNA guide
accagaaacccaccgguaaucc

SEQ ID NO: 12147 - RNA, 22 nt, Artificial Sequence
  RPE65 RNA guide
acccaccgguaauccuuuuuua

SEQ ID NO: 12148 - RNA, 22 nt, Artificial Sequence
  RPE65 RNA guide
accgguaauccuuuuuuaugcc

SEQ ID NO: 12149 - RNA, 22 nt, Artificial Sequence
  RPE65 RNA guide
accgguggguuucugguuucug

SEQ ID NO: 12150 - RNA, 22 nt, Artificial Sequence
  RPE65 RNA guide
agaaaccagaaacccaccggua

SEQ ID NO: 12151 - RNA, 22 nt, Artificial Sequence
  RPE65 RNA guide
agaaacccaccgguaauccuuu

SEQ ID NO: 12152 - RNA, 22 nt, Artificial Sequence
  RPE65 RNA guide
aggauuaccgguggguuucugg

SEQ ID NO: 12153 - RNA, 22 nt, Artificial Sequence
  RPE65 RNA guide
aggcauaaaaaaggauuaccgg

SEQ ID NO: 12154 - RNA, 22 nt, Artificial Sequence
  RPE65 RNA guide
auaaaaaaggauuaccgguggg

SEQ ID NO: 12155 - RNA, 22 nt, Artificial Sequence
  RPE65 RNA guide
auuaccgguggguuucugguuu

SEQ ID NO: 12156 - RNA, 22 nt, Artificial Sequence
  RPE65 RNA guide
caccgguaauccuuuuuuaugc

SEQ ID NO: 12157 - RNA, 22 nt, Artificial Sequence
  RPE65 RNA guide
cagaaaccagaaacccaccggu

SEQ ID NO: 12158 - RNA, 22 nt, Artificial Sequence
  RPE65 RNA guide
cagaaacccaccgguaauccuu

SEQ ID NO: 12159 - RNA, 22 nt, Artificial Sequence
  RPE65 RNA guide
cauaaaaaaggauuaccggugg

SEQ ID NO: 12160 - RNA, 22 nt, Artificial Sequence
  RPE65 RNA guide
ccaccgguaauccuuuuuuaug

SEQ ID NO: 12161 - RNA, 22 nt, Artificial Sequence
  RPE65 RNA guide
ccagaaaccagaaacccaccgg

SEQ ID NO: 12162 - RNA, 22 nt, Artificial Sequence
  RPE65 RNA guide
ccagaaacccaccgguaauccu

SEQ ID NO: 12163 - RNA, 22 nt, Artificial Sequence
  RPE65 RNA guide
cccaccgguaauccuuuuuuau

SEQ ID NO: 12164 - RNA, 22 nt, Artificial Sequence
  RPE65 RNA guide
ccgguaauccuuuuuuaugccu

SEQ ID NO: 12165 - RNA, 22 nt, Artificial Sequence
  RPE65 RNA guide
ccgguggguuucugguuucugg

SEQ ID NO: 12166 - RNA, 22 nt, Artificial Sequence
  RPE65 RNA guide
cgguaauccuuuuuuaugccuu

SEQ ID NO: 12167 - RNA, 22 nt, Artificial Sequence
  RPE65 RNA guide
gaaaccagaaacccaccgguaa

SEQ ID NO: 12168 - RNA, 22 nt, Artificial Sequence
  RPE65 RNA guide
gaaacccaccgguaauccuuuu

SEQ ID NO: 12169 - RNA, 22 nt, Artificial Sequence
  RPE65 RNA guide
gauuaccgguggguuucugguu

SEQ ID NO: 12170 - RNA, 22 nt, Artificial Sequence
  RPE65 RNA guide
gcauaaaaaaggauuaccggug

SEQ ID NO: 12171 - RNA, 22 nt, Artificial Sequence
  RPE65 RNA guide
ggauuaccgguggguuucuggu

SEQ ID NO: 12172 - RNA, 22 nt, Artificial Sequence
  RPE65 RNA guide
ggcauaaaaaaggauuaccggu

SEQ ID NO: 12173 - RNA, 22 nt, Artificial Sequence
  RPE65 RNA guide
guaccagaaaccagaaacccac

SEQ ID NO: 12174 - RNA, 22 nt, Artificial Sequence
  RPE65 RNA guide
uaaaaaaggauuaccggugggu

SEQ ID NO: 12175 - RNA, 22 nt, Artificial Sequence
  RPE65 RNA guide
uaccagaaaccagaaacccacc

SEQ ID NO: 12176 - RNA, 22 nt, Artificial Sequence
  RPE65 RNA guide
uaccgguggguuucugguuucu

SEQ ID NO: 12177 - RNA, 22 nt, Artificial Sequence
  RPE65 RNA guide
uguaccagaaaccagaaaccca

SEQ ID NO: 12178 - RNA, 22 nt, Artificial Sequence
  RPE65 RNA guide
uuaccgguggguuucugguuuc

SEQ ID NO: 12179 - RNA, 22 nt, Artificial Sequence
  RPE65 RNA guide
uuguaccagaaaccagaaaccc

SEQ ID NO: 12180 - RNA, 20 nt, Artificial Sequence
  RPE65 RNA guide
aaaaaaggauuacugguggg

SEQ ID NO: 12181 - RNA, 20 nt, Artificial Sequence
  RPE65 RNA guide
aaaaaggauuacuggugggu

SEQ ID NO: 12182 - RNA, 20 nt, Artificial Sequence
  RPE65 RNA guide
aaaaggauuacugguggguu

SEQ ID NO: 12183 - RNA, 20 nt, Artificial Sequence
  RPE65 RNA guide
aaaccagaaacccaccagua

SEQ ID NO: 12184 - RNA, 20 nt, Artificial Sequence
  RPE65 RNA guide
aaacccaccaguaauccuuu

SEQ ID NO: 12185 - RNA, 20 nt, Artificial Sequence
  RPE65 RNA guide
aaaggauuacugguggguuu

SEQ ID NO: 12186 - RNA, 20 nt, Artificial Sequence
  RPE65 RNA guide
aaccagaaacccaccaguaa

SEQ ID NO: 12187 - RNA, 20 nt, Artificial Sequence
  RPE65 RNA guide
aacccaccaguaauccuuuu

SEQ ID NO: 12188 - RNA, 20 nt, Artificial Sequence
  RPE65 RNA guide
aaggauuacugguggguuuc

SEQ ID NO: 12189 - RNA, 20 nt, Artificial Sequence
  RPE65 RNA guide
accagaaacccaccaguaau

SEQ ID NO: 12190 - RNA, 20 nt, Artificial Sequence
  RPE65 RNA guide
accaguaauccuuuuuuaug

SEQ ID NO: 12191 - RNA, 20 nt, Artificial Sequence
  RPE65 RNA guide
acccaccaguaauccuuuuu

SEQ ID NO: 12192 - RNA, 20 nt, Artificial Sequence
  RPE65 RNA guide
acugguggguuucugguuuc

SEQ ID NO: 12193 - RNA, 20 nt, Artificial Sequence
  RPE65 RNA guide
agaaaccagaaacccaccag

SEQ ID NO: 12194 - RNA, 20 nt, Artificial Sequence
  RPE65 RNA guide
agaaacccaccaguaauccu

SEQ ID NO: 12195 - RNA, 20 nt, Artificial Sequence
  RPE65 RNA guide
aggauuacugguggguuucu

SEQ ID NO: 12196 - RNA, 20 nt, Artificial Sequence
  RPE65 RNA guide
aggcauaaaaaaggauuacu

SEQ ID NO: 12197 - RNA, 20 nt, Artificial Sequence
  RPE65 RNA guide
auaaaaaaggauuacuggug

SEQ ID NO: 12198 - RNA, 20 nt, Artificial Sequence
  RPE65 RNA guide
auuacugguggguuucuggu

SEQ ID NO: 12199 - RNA, 20 nt, Artificial Sequence
  RPE65 RNA guide
caccaguaauccuuuuuuau

SEQ ID NO: 12200 - RNA, 20 nt, Artificial Sequence
  RPE65 RNA guide
cagaaaccagaaacccacca

SEQ ID NO: 12201 - RNA, 20 nt, Artificial Sequence
  RPE65 RNA guide
cagaaacccaccaguaaucc

SEQ ID NO: 12202 - RNA, 20 nt, Artificial Sequence
  RPE65 RNA guide
caguaauccuuuuuuaugcc

SEQ ID NO: 12203 - RNA, 20 nt, Artificial Sequence
  RPE65 RNA guide
cauaaaaaaggauuacuggu

SEQ ID NO: 12204 - RNA, 20 nt, Artificial Sequence
  RPE65 RNA guide
ccaccaguaauccuuuuuua

SEQ ID NO: 12205 - RNA, 20 nt, Artificial Sequence
  RPE65 RNA guide
ccagaaacccaccaguaauc

SEQ ID NO: 12206 - RNA, 20 nt, Artificial Sequence
  RPE65 RNA guide
ccaguaauccuuuuuuaugc

SEQ ID NO: 12207 - RNA, 20 nt, Artificial Sequence
  RPE65 RNA guide
cccaccaguaauccuuuuuu

SEQ ID NO: 12208 - RNA, 20 nt, Artificial Sequence
  RPE65 RNA guide
cugguggguuucugguuucu

SEQ ID NO: 12209 - RNA, 20 nt, Artificial Sequence
  RPE65 RNA guide
gaaaccagaaacccaccagu

SEQ ID NO: 12210 - RNA, 20 nt, Artificial Sequence
  RPE65 RNA guide
gaaacccaccaguaauccuu

SEQ ID NO: 12211 - RNA, 20 nt, Artificial Sequence
  RPE65 RNA guide
gauuacugguggguuucugg

SEQ ID NO: 12212 - RNA, 20 nt, Artificial Sequence
  RPE65 RNA guide
gcauaaaaaaggauuacugg

SEQ ID NO: 12213 - RNA, 20 nt, Artificial Sequence
  RPE65 RNA guide
ggauuacugguggguuucug

SEQ ID NO: 12214 - RNA, 20 nt, Artificial Sequence
  RPE65 RNA guide
ggcauaaaaaaggauuacug

SEQ ID NO: 12215 - RNA, 20 nt, Artificial Sequence
  RPE65 RNA guide
uaaaaaaggauuacuggugg

SEQ ID NO: 12216 - RNA, 20 nt, Artificial Sequence
  RPE65 RNA guide
uacugguggguuucugguuu

SEQ ID NO: 12217 - RNA, 20 nt, Artificial Sequence
  RPE65 RNA guide
uuacugguggguuucugguu

SEQ ID NO: 12218 - RNA, 21 nt, Artificial Sequence
  RPE65 RNA guide
aaaaaaggauuacuggugggu

SEQ ID NO: 12219 - RNA, 21 nt, Artificial Sequence
  RPE65 RNA guide
aaaaaggauuacugguggguu

SEQ ID NO: 12220 - RNA, 21 nt, Artificial Sequence
  RPE65 RNA guide
aaaaggauuacugguggguuu

SEQ ID NO: 12221 - RNA, 21 nt, Artificial Sequence
  RPE65 RNA guide
aaaccagaaacccaccaguaa

SEQ ID NO: 12222 - RNA, 21 nt, Artificial Sequence
  RPE65 RNA guide
aaacccaccaguaauccuuuu

SEQ ID NO: 12223 - RNA, 21 nt, Artificial Sequence
  RPE65 RNA guide
aaaggauuacugguggguuuc

SEQ ID NO: 12224 - RNA, 21 nt, Artificial Sequence
  RPE65 RNA guide
aaccagaaacccaccaguaau

SEQ ID NO: 12225 - RNA, 21 nt, Artificial Sequence
  RPE65 RNA guide
aacccaccaguaauccuuuuu

SEQ ID NO: 12226 - RNA, 21 nt, Artificial Sequence
  RPE65 RNA guide
aaggauuacugguggguuucu

SEQ ID NO: 12227 - RNA, 21 nt, Artificial Sequence
  RPE65 RNA guide
accagaaacccaccaguaauc

SEQ ID NO: 12228 - RNA, 21 nt, Artificial Sequence
  RPE65 RNA guide
accaguaauccuuuuuuaugc

SEQ ID NO: 12229 - RNA, 21 nt, Artificial Sequence
  RPE65 RNA guide
acccaccaguaauccuuuuuu

SEQ ID NO: 12230 - RNA, 21 nt, Artificial Sequence
  RPE65 RNA guide
acugguggguuucugguuucu

SEQ ID NO: 12231 - RNA, 21 nt, Artificial Sequence
  RPE65 RNA guide
agaaaccagaaacccaccagu

SEQ ID NO: 12232 - RNA, 21 nt, Artificial Sequence
  RPE65 RNA guide
agaaacccaccaguaauccuu

SEQ ID NO: 12233 - RNA, 21 nt, Artificial Sequence
  RPE65 RNA guide
aggauuacugguggguuucug

SEQ ID NO: 12234 - RNA, 21 nt, Artificial Sequence
  RPE65 RNA guide
aggcauaaaaaaggauuacug

SEQ ID NO: 12235 - RNA, 21 nt, Artificial Sequence
  RPE65 RNA guide
auaaaaaaggauuacuggugg

SEQ ID NO: 12236 - RNA, 21 nt, Artificial Sequence
  RPE65 RNA guide
auuacugguggguuucugguu

SEQ ID NO: 12237 - RNA, 21 nt, Artificial Sequence
  RPE65 RNA guide
caccaguaauccuuuuuuaug

SEQ ID NO: 12238 - RNA, 21 nt, Artificial Sequence
  RPE65 RNA guide
cagaaaccagaaacccaccag

SEQ ID NO: 12239 - RNA, 21 nt, Artificial Sequence
  RPE65 RNA guide
cagaaacccaccaguaauccu

SEQ ID NO: 12240 - RNA, 21 nt, Artificial Sequence
  RPE65 RNA guide
caguaauccuuuuuuaugccu

SEQ ID NO: 12241 - RNA, 21 nt, Artificial Sequence
  RPE65 RNA guide
cauaaaaaaggauuacuggug

SEQ ID NO: 12242 - RNA, 21 nt, Artificial Sequence
  RPE65 RNA guide
ccaccaguaauccuuuuuuau

SEQ ID NO: 12243 - RNA, 21 nt, Artificial Sequence
  RPE65 RNA guide
ccagaaaccagaaacccacca

SEQ ID NO: 12244 - RNA, 21 nt, Artificial Sequence
  RPE65 RNA guide
ccagaaacccaccaguaaucc

SEQ ID NO: 12245 - RNA, 21 nt, Artificial Sequence
  RPE65 RNA guide
ccaguaauccuuuuuuaugcc

SEQ ID NO: 12246 - RNA, 21 nt, Artificial Sequence
  RPE65 RNA guide
cccaccaguaauccuuuuuua

SEQ ID NO: 12247 - RNA, 21 nt, Artificial Sequence
  RPE65 RNA guide
cugguggguuucugguuucug

SEQ ID NO: 12248 - RNA, 21 nt, Artificial Sequence
  RPE65 RNA guide
gaaaccagaaacccaccagua

SEQ ID NO: 12249 - RNA, 21 nt, Artificial Sequence
  RPE65 RNA guide
gaaacccaccaguaauccuuu

SEQ ID NO: 12250 - RNA, 21 nt, Artificial Sequence
  RPE65 RNA guide
gauuacugguggguuucuggu

SEQ ID NO: 12251 - RNA, 21 nt, Artificial Sequence
  RPE65 RNA guide
gcauaaaaaaggauuacuggu

SEQ ID NO: 12252 - RNA, 21 nt, Artificial Sequence
  RPE65 RNA guide
ggauuacugguggguuucugg

SEQ ID NO: 12253 - RNA, 21 nt, Artificial Sequence
  RPE65 RNA guide
ggcauaaaaaaggauuacugg

SEQ ID NO: 12254 - RNA, 21 nt, Artificial Sequence
  RPE65 RNA guide
uaaaaaaggauuacugguggg

SEQ ID NO: 12255 - RNA, 21 nt, Artificial Sequence
  RPE65 RNA guide
uacugguggguuucugguuuc

SEQ ID NO: 12256 - RNA, 21 nt, Artificial Sequence
  RPE65 RNA guide
uuacugguggguuucugguuu

SEQ ID NO: 12257 - RNA, 22 nt, Artificial Sequence
  RPE65 RNA guide
aaaaaaggauuacugguggguu

SEQ ID NO: 12258 - RNA, 22 nt, Artificial Sequence
  RPE65 RNA guide
aaaaaggauuacugguggguuu

SEQ ID NO: 12259 - RNA, 22 nt, Artificial Sequence
  RPE65 RNA guide
aaaaggauuacugguggguuuc

SEQ ID NO: 12260 - RNA, 22 nt, Artificial Sequence
  RPE65 RNA guide
aaaccagaaacccaccaguaau

SEQ ID NO: 12261 - RNA, 22 nt, Artificial Sequence
  RPE65 RNA guide
aaacccaccaguaauccuuuuu

SEQ ID NO: 12262 - RNA, 22 nt, Artificial Sequence
  RPE65 RNA guide
aaaggauuacugguggguuucu

SEQ ID NO: 12263 - RNA, 22 nt, Artificial Sequence
  RPE65 RNA guide
aaccagaaacccaccaguaauc

SEQ ID NO: 12264 - RNA, 22 nt, Artificial Sequence
  RPE65 RNA guide
aacccaccaguaauccuuuuuu

SEQ ID NO: 12265 - RNA, 22 nt, Artificial Sequence
  RPE65 RNA guide
aaggauuacugguggguuucug

SEQ ID NO: 12266 - RNA, 22 nt, Artificial Sequence
  RPE65 RNA guide
aaggcauaaaaaaggauuacug

SEQ ID NO: 12267 - RNA, 22 nt, Artificial Sequence
  RPE65 RNA guide
accagaaaccagaaacccacca

SEQ ID NO: 12268 - RNA, 22 nt, Artificial Sequence
  RPE65 RNA guide
accagaaacccaccaguaaucc

SEQ ID NO: 12269 - RNA, 22 nt, Artificial Sequence
  RPE65 RNA guide
accaguaauccuuuuuuaugcc

SEQ ID NO: 12270 - RNA, 22 nt, Artificial Sequence
  RPE65 RNA guide
acccaccaguaauccuuuuuua

SEQ ID NO: 12271 - RNA, 22 nt, Artificial Sequence
  RPE65 RNA guide
acugguggguuucugguuucug

SEQ ID NO: 12272 - RNA, 22 nt, Artificial Sequence
  RPE65 RNA guide
agaaaccagaaacccaccagua

SEQ ID NO: 12273 - RNA, 22 nt, Artificial Sequence
  RPE65 RNA guide
agaaacccaccaguaauccuuu

SEQ ID NO: 12274 - RNA, 22 nt, Artificial Sequence
  RPE65 RNA guide
aggauuacugguggguuucugg

SEQ ID NO: 12275 - RNA, 22 nt, Artificial Sequence
  RPE65 RNA guide
aggcauaaaaaaggauuacugg

SEQ ID NO: 12276 - RNA, 22 nt, Artificial Sequence
  RPE65 RNA guide
auaaaaaaggauuacugguggg

SEQ ID NO: 12277 - RNA, 22 nt, Artificial Sequence
  RPE65 RNA guide
auuacugguggguuucugguuu

SEQ ID NO: 12278 - RNA, 22 nt, Artificial Sequence
  RPE65 RNA guide
caccaguaauccuuuuuuaugc

SEQ ID NO: 12279 - RNA, 22 nt, Artificial Sequence
  RPE65 RNA guide
cagaaaccagaaacccaccagu

SEQ ID NO: 12280 - RNA, 22 nt, Artificial Sequence
  RPE65 RNA guide
cagaaacccaccaguaauccuu

SEQ ID NO: 12281 - RNA, 22 nt, Artificial Sequence
  RPE65 RNA guide
caguaauccuuuuuuaugccuu

SEQ ID NO: 12282 - RNA, 22 nt, Artificial Sequence
  RPE65 RNA guide
cauaaaaaaggauuacuggugg

SEQ ID NO: 12283 - RNA, 22 nt, Artificial Sequence
  RPE65 RNA guide
ccaccaguaauccuuuuuuaug

SEQ ID NO: 12284 - RNA, 22 nt, Artificial Sequence
  RPE65 RNA guide
ccagaaaccagaaacccaccag

SEQ ID NO: 12285 - RNA, 22 nt, Artificial Sequence
  RPE65 RNA guide
ccagaaacccaccaguaauccu

SEQ ID NO: 12286 - RNA, 22 nt, Artificial Sequence
  RPE65 RNA guide
ccaguaauccuuuuuuaugccu

SEQ ID NO: 12287 - RNA, 22 nt, Artificial Sequence
  RPE65 RNA guide
cccaccaguaauccuuuuuuau

SEQ ID NO: 12288 - RNA, 22 nt, Artificial Sequence
  RPE65 RNA guide
cugguggguuucugguuucugg

SEQ ID NO: 12289 - RNA, 22 nt, Artificial Sequence
  RPE65 RNA guide
gaaaccagaaacccaccaguaa

SEQ ID NO: 12290 - RNA, 22 nt, Artificial Sequence
  RPE65 RNA guide
gaaacccaccaguaauccuuuu

SEQ ID NO: 12291 - RNA, 22 nt, Artificial Sequence
  RPE65 RNA guide
gauuacugguggguuucugguu

SEQ ID NO: 12292 - RNA, 22 nt, Artificial Sequence
  RPE65 RNA guide
gcauaaaaaaggauuacuggug

SEQ ID NO: 12293 - RNA, 22 nt, Artificial Sequence
  RPE65 RNA guide
ggauuacugguggguuucuggu

SEQ ID NO: 12294 - RNA, 22 nt, Artificial Sequence
  RPE65 RNA guide
ggcauaaaaaaggauuacuggu

SEQ ID NO: 12295 - RNA, 22 nt, Artificial Sequence
  RPE65 RNA guide
uaaaaaaggauuacuggugggu

SEQ ID NO: 12296 - RNA, 22 nt, Artificial Sequence
  RPE65 RNA guide
uacugguggguuucugguuucu

SEQ ID NO: 12297 - RNA, 22 nt, Artificial Sequence
  RPE65 RNA guide
uuacugguggguuucugguuuc

SEQ ID NO: 12298 - RNA, 20 nt, Artificial Sequence
  RPE65 RNA guide
aaugcacaccgugugugugu

SEQ ID NO: 12299 - RNA, 20 nt, Artificial Sequence
  RPE65 RNA guide
aauucauucagauaaugcac

SEQ ID NO: 12300 - RNA, 20 nt, Artificial Sequence
  RPE65 RNA guide
acacacacacggugugcauu

SEQ ID NO: 12301 - RNA, 20 nt, Artificial Sequence
  RPE65 RNA guide
acacacacggugugcauuau

SEQ ID NO: 12302 - RNA, 20 nt, Artificial Sequence
  RPE65 RNA guide
acacacggugugcauuaucu

SEQ ID NO: 12303 - RNA, 20 nt, Artificial Sequence
  RPE65 RNA guide
acacggugugcauuaucuga

SEQ ID NO: 12304 - RNA, 20 nt, Artificial Sequence
  RPE65 RNA guide
acggugugcauuaucugaau

SEQ ID NO: 12305 - RNA, 20 nt, Artificial Sequence
  RPE65 RNA guide
agauaaugcacaccgugugu

SEQ ID NO: 12306 - RNA, 20 nt, Artificial Sequence
  RPE65 RNA guide
auaaugcacaccgugugugu

SEQ ID NO: 12307 - RNA, 20 nt, Artificial Sequence
  RPE65 RNA guide
auucagauaaugcacaccgu

SEQ ID NO: 12308 - RNA, 20 nt, Artificial Sequence
  RPE65 RNA guide
auucauucagauaaugcaca

SEQ ID NO: 12309 - RNA, 20 nt, Artificial Sequence
  RPE65 RNA guide
caauucauucagauaaugca

SEQ ID NO: 12310 - RNA, 20 nt, Artificial Sequence
  RPE65 RNA guide
cacacacacacggugugcau

SEQ ID NO: 12311 - RNA, 20 nt, Artificial Sequence
  RPE65 RNA guide
cacacacacggugugcauua

SEQ ID NO: 12312 - RNA, 20 nt, Artificial Sequence
  RPE65 RNA guide
cacacacggugugcauuauc

SEQ ID NO: 12313 - RNA, 20 nt, Artificial Sequence
  RPE65 RNA guide
cacacggugugcauuaucug

SEQ ID NO: 12314 - RNA, 20 nt, Artificial Sequence
  RPE65 RNA guide
cacggugugcauuaucugaa

SEQ ID NO: 12315 - RNA, 20 nt, Artificial Sequence
  RPE65 RNA guide
cagauaaugcacaccgugug

SEQ ID NO: 12316 - RNA, 20 nt, Artificial Sequence
  RPE65 RNA guide
cauucagauaaugcacaccg

SEQ ID NO: 12317 - RNA, 20 nt, Artificial Sequence
  RPE65 RNA guide
cggugugcauuaucugaaug

SEQ ID NO: 12318 - RNA, 20 nt, Artificial Sequence
  RPE65 RNA guide
gauaaugcacaccgugugug

SEQ ID NO: 12319 - RNA, 20 nt, Artificial Sequence
  RPE65 RNA guide
uaaugcacaccgugugugug

SEQ ID NO: 12320 - RNA, 20 nt, Artificial Sequence
  RPE65 RNA guide
ucagauaaugcacaccgugu

SEQ ID NO: 12321 - RNA, 20 nt, Artificial Sequence
  RPE65 RNA guide
ucauucagauaaugcacacc

SEQ ID NO: 12322 - RNA, 20 nt, Artificial Sequence
  RPE65 RNA guide
uucagauaaugcacaccgug

SEQ ID NO: 12323 - RNA, 20 nt, Artificial Sequence
  RPE65 RNA guide
uucauucagauaaugcacac

SEQ ID NO: 12324 - RNA, 21 nt, Artificial Sequence
  RPE65 RNA guide
aaugcacaccgugugugugug

SEQ ID NO: 12325 - RNA, 21 nt, Artificial Sequence
  RPE65 RNA guide
acacacacacggugugcauua

SEQ ID NO: 12326 - RNA, 21 nt, Artificial Sequence
  RPE65 RNA guide
acacacacggugugcauuauc

SEQ ID NO: 12327 - RNA, 21 nt, Artificial Sequence
  RPE65 RNA guide
acacacggugugcauuaucug

SEQ ID NO: 12328 - RNA, 21 nt, Artificial Sequence
  RPE65 RNA guide
acacggugugcauuaucugaa

SEQ ID NO: 12329 - RNA, 21 nt, Artificial Sequence
  RPE65 RNA guide
acggugugcauuaucugaaug

SEQ ID NO: 12330 - RNA, 21 nt, Artificial Sequence
  RPE65 RNA guide
agauaaugcacaccgugugug

SEQ ID NO: 12331 - RNA, 21 nt, Artificial Sequence
  RPE65 RNA guide
auaaugcacaccgugugugug

SEQ ID NO: 12332 - RNA, 21 nt, Artificial Sequence
  RPE65 RNA guide
auucagauaaugcacaccgug

SEQ ID NO: 12333 - RNA, 21 nt, Artificial Sequence
  RPE65 RNA guide
auucauucagauaaugcacac

SEQ ID NO: 12334 - RNA, 21 nt, Artificial Sequence
  RPE65 RNA guide
caauucauucagauaaugcac

SEQ ID NO: 12335 - RNA, 21 nt, Artificial Sequence
  RPE65 RNA guide
cacacacacacggugugcauu

SEQ ID NO: 12336 - RNA, 21 nt, Artificial Sequence
  RPE65 RNA guide
cacacacacggugugcauuau

SEQ ID NO: 12337 - RNA, 21 nt, Artificial Sequence
  RPE65 RNA guide
cacacacggugugcauuaucu

SEQ ID NO: 12338 - RNA, 21 nt, Artificial Sequence
  RPE65 RNA guide
cacacggugugcauuaucuga

SEQ ID NO: 12339 - RNA, 21 nt, Artificial Sequence
  RPE65 RNA guide
cacggugugcauuaucugaau

SEQ ID NO: 12340 - RNA, 21 nt, Artificial Sequence
  RPE65 RNA guide
cagauaaugcacaccgugugu

SEQ ID NO: 12341 - RNA, 21 nt, Artificial Sequence
  RPE65 RNA guide
cauucagauaaugcacaccgu

SEQ ID NO: 12342 - RNA, 21 nt, Artificial Sequence
  RPE65 RNA guide
cggugugcauuaucugaauga

SEQ ID NO: 12343 - RNA, 21 nt, Artificial Sequence
  RPE65 RNA guide
gauaaugcacaccgugugugu

SEQ ID NO: 12344 - RNA, 21 nt, Artificial Sequence
  RPE65 RNA guide
uaaugcacaccgugugugugu

SEQ ID NO: 12345 - RNA, 21 nt, Artificial Sequence
  RPE65 RNA guide
ucagauaaugcacaccgugug

SEQ ID NO: 12346 - RNA, 21 nt, Artificial Sequence
  RPE65 RNA guide
ucauucagauaaugcacaccg

SEQ ID NO: 12347 - RNA, 21 nt, Artificial Sequence
  RPE65 RNA guide
uucagauaaugcacaccgugu

SEQ ID NO: 12348 - RNA, 21 nt, Artificial Sequence
  RPE65 RNA guide
uucauucagauaaugcacacc

SEQ ID NO: 12349 - RNA, 22 nt, Artificial Sequence
  RPE65 RNA guide
aauucauucagauaaugcacac

SEQ ID NO: 12350 - RNA, 22 nt, Artificial Sequence
  RPE65 RNA guide
acaauucauucagauaaugcac

SEQ ID NO: 12351 - RNA, 22 nt, Artificial Sequence
  RPE65 RNA guide
acacacacacggugugcauuau

SEQ ID NO: 12352 - RNA, 22 nt, Artificial Sequence
  RPE65 RNA guide
acacacacggugugcauuaucu

SEQ ID NO: 12353 - RNA, 22 nt, Artificial Sequence
  RPE65 RNA guide
acacacggugugcauuaucuga

SEQ ID NO: 12354 - RNA, 22 nt, Artificial Sequence
  RPE65 RNA guide
acacggugugcauuaucugaau

SEQ ID NO: 12355 - RNA, 22 nt, Artificial Sequence
  RPE65 RNA guide
acggugugcauuaucugaauga

SEQ ID NO: 12356 - RNA, 22 nt, Artificial Sequence
  RPE65 RNA guide
agauaaugcacaccgugugugu

SEQ ID NO: 12357 - RNA, 22 nt, Artificial Sequence
  RPE65 RNA guide
auaaugcacaccgugugugugu

SEQ ID NO: 12358 - RNA, 22 nt, Artificial Sequence
  RPE65 RNA guide
auucagauaaugcacaccgugu

SEQ ID NO: 12359 - RNA, 22 nt, Artificial Sequence
  RPE65 RNA guide
auucauucagauaaugcacacc

SEQ ID NO: 12360 - RNA, 22 nt, Artificial Sequence
  RPE65 RNA guide
caauucauucagauaaugcaca

SEQ ID NO: 12361 - RNA, 22 nt, Artificial Sequence
  RPE65 RNA guide
cacacacacacggugugcauua

SEQ ID NO: 12362 - RNA, 22 nt, Artificial Sequence
  RPE65 RNA guide
cacacacacggugugcauuauc

SEQ ID NO: 12363 - RNA, 22 nt, Artificial Sequence
  RPE65 RNA guide
cacacacggugugcauuaucug

SEQ ID NO: 12364 - RNA, 22 nt, Artificial Sequence
  RPE65 RNA guide
cacacggugugcauuaucugaa

SEQ ID NO: 12365 - RNA, 22 nt, Artificial Sequence
  RPE65 RNA guide
cacggugugcauuaucugaaug

SEQ ID NO: 12366 - RNA, 22 nt, Artificial Sequence
  RPE65 RNA guide
cagauaaugcacaccgugugug

SEQ ID NO: 12367 - RNA, 22 nt, Artificial Sequence
  RPE65 RNA guide
cauucagauaaugcacaccgug

SEQ ID NO: 12368 - RNA, 22 nt, Artificial Sequence
  RPE65 RNA guide
cggugugcauuaucugaaugaa

SEQ ID NO: 12369 - RNA, 22 nt, Artificial Sequence
  RPE65 RNA guide
gauaaugcacaccgugugugug

SEQ ID NO: 12370 - RNA, 22 nt, Artificial Sequence
  RPE65 RNA guide
uaaugcacaccgugugugugug

SEQ ID NO: 12371 - RNA, 22 nt, Artificial Sequence
  RPE65 RNA guide
ucagauaaugcacaccgugugu

SEQ ID NO: 12372 - RNA, 22 nt, Artificial Sequence
  RPE65 RNA guide
ucauucagauaaugcacaccgu

SEQ ID NO: 12373 - RNA, 22 nt, Artificial Sequence
  RPE65 RNA guide
uucagauaaugcacaccgugug

SEQ ID NO: 12374 - RNA, 22 nt, Artificial Sequence
  RPE65 RNA guide
uucauucagauaaugcacaccg

SEQ ID NO: 12375 - RNA, 20 nt, Artificial Sequence
  RPE65 RNA guide
aaaaauguuaagguuguuag

SEQ ID NO: 12376 - RNA, 20 nt, Artificial Sequence
  RPE65 RNA guide
aaaauguuaagguuguuagc

SEQ ID NO: 12377 - RNA, 20 nt, Artificial Sequence
  RPE65 RNA guide
aaagaaguccuuggaaaaca

SEQ ID NO: 12378 - RNA, 20 nt, Artificial Sequence
  RPE65 RNA guide
aaaggauggagcuuggaggc

SEQ ID NO: 12379 - RNA, 20 nt, Artificial Sequence
  RPE65 RNA guide
aaauguuaagguuguuagcu

SEQ ID NO: 12380 - RNA, 20 nt, Artificial Sequence
  RPE65 RNA guide
aacaauauuccgggcuccac

SEQ ID NO: 12381 - RNA, 20 nt, Artificial Sequence
  RPE65 RNA guide
aacaauuaauccaagugcuu

SEQ ID NO: 12382 - RNA, 20 nt, Artificial Sequence
  RPE65 RNA guide
aacaggcaagauauauacua

SEQ ID NO: 12383 - RNA, 20 nt, Artificial Sequence
  RPE65 RNA guide
aacaguagcuucauuuccuu

SEQ ID NO: 12384 - RNA, 20 nt, Artificial Sequence
  RPE65 RNA guide
aacaguggagcccggaauau

SEQ ID NO: 12385 - RNA, 20 nt, Artificial Sequence
  RPE65 RNA guide
aacugccuuggaugggcaga

SEQ ID NO: 12386 - RNA, 20 nt, Artificial Sequence
  RPE65 RNA guide
aagaagaccccuaggguaag

SEQ ID NO: 12387 - RNA, 20 nt, Artificial Sequence
  RPE65 RNA guide
aagaaguccuuggaaaacag

SEQ ID NO: 12388 - RNA, 20 nt, Artificial Sequence
  RPE65 RNA guide
aagcaacugagacuuaauga

SEQ ID NO: 12389 - RNA, 20 nt, Artificial Sequence
  RPE65 RNA guide
aagccccaggugcuaccauu

SEQ ID NO: 12390 - RNA, 20 nt, Artificial Sequence
  RPE65 RNA guide
aagcuacuguuguauaucuu

SEQ ID NO: 12391 - RNA, 20 nt, Artificial Sequence
  RPE65 RNA guide
aaggaaaugaagcuacuguu

SEQ ID NO: 12392 - RNA, 20 nt, Artificial Sequence
  RPE65 RNA guide
aaggacuucuuugggcagua

SEQ ID NO: 12393 - RNA, 20 nt, Artificial Sequence
  RPE65 RNA guide
aaggauggagcuuggaggcu

SEQ ID NO: 12394 - RNA, 20 nt, Artificial Sequence
  RPE65 RNA guide
aaggcaguuguagugucucc

SEQ ID NO: 12395 - RNA, 20 nt, Artificial Sequence
  RPE65 RNA guide
aagguacugcccaaagaagu

SEQ ID NO: 12396 - RNA, 20 nt, Artificial Sequence
  RPE65 RNA guide
aagguuguuagcugguauag

SEQ ID NO: 12397 - RNA, 20 nt, Artificial Sequence
  RPE65 RNA guide
aaguccuaaugguagcaccu

SEQ ID NO: 12398 - RNA, 20 nt, Artificial Sequence
  RPE65 RNA guide
aaguccuuggaaaacaggca

SEQ ID NO: 12399 - RNA, 20 nt, Artificial Sequence
  RPE65 RNA guide
aagucucaguugcuugccag

SEQ ID NO: 12400 - RNA, 20 nt, Artificial Sequence
  RPE65 RNA guide
aagugcuucccaagauauac

SEQ ID NO: 12401 - RNA, 20 nt, Artificial Sequence
  RPE65 RNA guide
aauaucucugcccauccaag

SEQ ID NO: 12402 - RNA, 20 nt, Artificial Sequence
  RPE65 RNA guide
aauauuccgggcuccacugu

SEQ ID NO: 12403 - RNA, 20 nt, Artificial Sequence
  RPE65 RNA guide
aauauuguuacuggcugggu

SEQ ID NO: 12404 - RNA, 20 nt, Artificial Sequence
  RPE65 RNA guide
aauccaagugcuucccaaga

SEQ ID NO: 12405 - RNA, 20 nt, Artificial Sequence
  RPE65 RNA guide
aaugaauugaugcuguauac

SEQ ID NO: 12406 - RNA, 20 nt, Artificial Sequence
  RPE65 RNA guide
aauggagacacuacaacugc

SEQ ID NO: 12407 - RNA, 20 nt, Artificial Sequence
  RPE65 RNA guide
aaugguagcaccuggggcuu

SEQ ID NO: 12408 - RNA, 20 nt, Artificial Sequence
  RPE65 RNA guide
aauguuaagguuguuagcug

SEQ ID NO: 12409 - RNA, 20 nt, Artificial Sequence
  RPE65 RNA guide
aauuaauccaagugcuuccc

SEQ ID NO: 12410 - RNA, 20 nt, Artificial Sequence
  RPE65 RNA guide
aauugaugcuguauacucuc

SEQ ID NO: 12411 - RNA, 20 nt, Artificial Sequence
  RPE65 RNA guide
acaacaguagcuucauuucc

SEQ ID NO: 12412 - RNA, 20 nt, Artificial Sequence
  RPE65 RNA guide
acaacugccuuggaugggca

SEQ ID NO: 12413 - RNA, 20 nt, Artificial Sequence
  RPE65 RNA guide
acaagguacugcccaaagaa

SEQ ID NO: 12414 - RNA, 20 nt, Artificial Sequence
  RPE65 RNA guide
acaauauuccgggcuccacu

SEQ ID NO: 12415 - RNA, 20 nt, Artificial Sequence
  RPE65 RNA guide
acaauuaauccaagugcuuc

SEQ ID NO: 12416 - RNA, 20 nt, Artificial Sequence
  RPE65 RNA guide
acacuacaacugccuuggau

SEQ ID NO: 12417 - RNA, 20 nt, Artificial Sequence
  RPE65 RNA guide
acagacaagguacugcccaa

SEQ ID NO: 12418 - RNA, 20 nt, Artificial Sequence
  RPE65 RNA guide
acagcaucaauucauucaua

SEQ ID NO: 12419 - RNA, 20 nt, Artificial Sequence
  RPE65 RNA guide
acaggcaagauauauacuau

SEQ ID NO: 12420 - RNA, 20 nt, Artificial Sequence
  RPE65 RNA guide
acaguagcuucauuuccuua

SEQ ID NO: 12421 - RNA, 20 nt, Artificial Sequence
  RPE65 RNA guide
acagugagggcauaggcaug

SEQ ID NO: 12422 - RNA, 20 nt, Artificial Sequence
  RPE65 RNA guide
acaguggagcccggaauauu

SEQ ID NO: 12423 - RNA, 20 nt, Artificial Sequence
  RPE65 RNA guide
acagugguagaaguccuaau

SEQ ID NO: 12424 - RNA, 20 nt, Artificial Sequence
  RPE65 RNA guide
acaguuuuguugaagaagac

SEQ ID NO: 12425 - RNA, 20 nt, Artificial Sequence
  RPE65 RNA guide
acaugccuaugcccucacug

SEQ ID NO: 12426 - RNA, 20 nt, Artificial Sequence
  RPE65 RNA guide
accacugucccuaacgggug

SEQ ID NO: 12427 - RNA, 20 nt, Artificial Sequence
  RPE65 RNA guide
accagcuaacaaccuuaaca

SEQ ID NO: 12428 - RNA, 20 nt, Artificial Sequence
  RPE65 RNA guide
accauuaggacuucuaccac

SEQ ID NO: 12429 - RNA, 20 nt, Artificial Sequence
  RPE65 RNA guide
acccagccaguaacaauauu

SEQ ID NO: 12430 - RNA, 20 nt, Artificial Sequence
  RPE65 RNA guide
acccguuagggacaguggua

SEQ ID NO: 12431 - RNA, 20 nt, Artificial Sequence
  RPE65 RNA guide
acccuaggggucuucuucaa

SEQ ID NO: 12432 - RNA, 20 nt, Artificial Sequence
  RPE65 RNA guide
accuggggcuuagcauccau

SEQ ID NO: 12433 - RNA, 20 nt, Artificial Sequence
  RPE65 RNA guide
accuugucugugcuggcaag

SEQ ID NO: 12434 - RNA, 20 nt, Artificial Sequence
  RPE65 RNA guide
acuacaacugccuuggaugg

SEQ ID NO: 12435 - RNA, 20 nt, Artificial Sequence
  RPE65 RNA guide
acuauaccagcuaacaaccu

SEQ ID NO: 12436 - RNA, 20 nt, Artificial Sequence
  RPE65 RNA guide
acucucagagugccaaacau

SEQ ID NO: 12437 - RNA, 20 nt, Artificial Sequence
  RPE65 RNA guide
acucugagaguauacagcau

SEQ ID NO: 12438 - RNA, 20 nt, Artificial Sequence
  RPE65 RNA guide
acucuuucauuaagucucag

SEQ ID NO: 12439 - RNA, 20 nt, Artificial Sequence
  RPE65 RNA guide
acugcccaaagaaguccuug

SEQ ID NO: 12440 - RNA, 20 nt, Artificial Sequence
  RPE65 RNA guide
acugccuuggaugggcagag

SEQ ID NO: 12441 - RNA, 20 nt, Artificial Sequence
  RPE65 RNA guide
acuggcuggguagccuccaa

SEQ ID NO: 12442 - RNA, 20 nt, Artificial Sequence
  RPE65 RNA guide
acuguaaggaaaugaagcua

SEQ ID NO: 12443 - RNA, 20 nt, Artificial Sequence
  RPE65 RNA guide
acuguugaauggagacacua

SEQ ID NO: 12444 - RNA, 20 nt, Artificial Sequence
  RPE65 RNA guide
acuguuguauaucuugggaa

SEQ ID NO: 12445 - RNA, 20 nt, Artificial Sequence
  RPE65 RNA guide
acuuacccuaggggucuucu

SEQ ID NO: 12446 - RNA, 20 nt, Artificial Sequence
  RPE65 RNA guide
acuucuaccacugucccuaa

SEQ ID NO: 12447 - RNA, 20 nt, Artificial Sequence
  RPE65 RNA guide
acuucuuugggcaguaccuu

SEQ ID NO: 12448 - RNA, 20 nt, Artificial Sequence
  RPE65 RNA guide
agaagaccccuaggguaagu

SEQ ID NO: 12449 - RNA, 20 nt, Artificial Sequence
  RPE65 RNA guide
agaaguccuaaugguagcac

SEQ ID NO: 12450 - RNA, 20 nt, Artificial Sequence
  RPE65 RNA guide
agaaguccuuggaaaacagg

SEQ ID NO: 12451 - RNA, 20 nt, Artificial Sequence
  RPE65 RNA guide
agacaagguacugcccaaag

SEQ ID NO: 12452 - RNA, 20 nt, Artificial Sequence
  RPE65 RNA guide
agacacuacaacugccuugg

SEQ ID NO: 12453 - RNA, 20 nt, Artificial Sequence
  RPE65 RNA guide
agacuuaaugaaagaguauu

SEQ ID NO: 12454 - RNA, 20 nt, Artificial Sequence
  RPE65 RNA guide
agagauauuauggaugcuaa

SEQ ID NO: 12455 - RNA, 20 nt, Artificial Sequence
  RPE65 RNA guide
agaguauacagcaucaauuc

SEQ ID NO: 12456 - RNA, 20 nt, Artificial Sequence
  RPE65 RNA guide
agagugccaaacauauacca

SEQ ID NO: 12457 - RNA, 20 nt, Artificial Sequence
  RPE65 RNA guide
agauauuauggaugcuaagc

SEQ ID NO: 12458 - RNA, 20 nt, Artificial Sequence
  RPE65 RNA guide
agcaacugagacuuaaugaa

SEQ ID NO: 12459 - RNA, 20 nt, Artificial Sequence
  RPE65 RNA guide
agcacagacaagguacugcc

SEQ ID NO: 12460 - RNA, 20 nt, Artificial Sequence
  RPE65 RNA guide
agcaccuggggcuuagcauc

SEQ ID NO: 12461 - RNA, 20 nt, Artificial Sequence
  RPE65 RNA guide
agcaucaauucauucauauc

SEQ ID NO: 12462 - RNA, 20 nt, Artificial Sequence
  RPE65 RNA guide
agcauccauaauaucucugc

SEQ ID NO: 12463 - RNA, 20 nt, Artificial Sequence
  RPE65 RNA guide
agccaguaacaauauuccgg

SEQ ID NO: 12464 - RNA, 20 nt, Artificial Sequence
  RPE65 RNA guide
agccccaggugcuaccauua

SEQ ID NO: 12465 - RNA, 20 nt, Artificial Sequence
  RPE65 RNA guide
agcccggaauauuguuacug

SEQ ID NO: 12466 - RNA, 20 nt, Artificial Sequence
  RPE65 RNA guide
agccuccaagcuccauccuu

SEQ ID NO: 12467 - RNA, 20 nt, Artificial Sequence
  RPE65 RNA guide
agcuacuguuguauaucuug

SEQ ID NO: 12468 - RNA, 20 nt, Artificial Sequence
  RPE65 RNA guide
agcugguauaguauauaucu

SEQ ID NO: 12469 - RNA, 20 nt, Artificial Sequence
  RPE65 RNA guide
agcuucauuuccuuacagug

SEQ ID NO: 12470 - RNA, 20 nt, Artificial Sequence
  RPE65 RNA guide
agcuuggaggcuacccagcc

SEQ ID NO: 12471 - RNA, 20 nt, Artificial Sequence
  RPE65 RNA guide
aggaaaugaagcuacuguug

SEQ ID NO: 12472 - RNA, 20 nt, Artificial Sequence
  RPE65 RNA guide
aggacuucuaccacuguccc

SEQ ID NO: 12473 - RNA, 20 nt, Artificial Sequence
  RPE65 RNA guide
aggacuucuuugggcaguac

SEQ ID NO: 12474 - RNA, 20 nt, Artificial Sequence
  RPE65 RNA guide
aggauggagcuuggaggcua

SEQ ID NO: 12475 - RNA, 20 nt, Artificial Sequence
  RPE65 RNA guide
aggcaagauauauacuauac

SEQ ID NO: 12476 - RNA, 20 nt, Artificial Sequence
  RPE65 RNA guide
aggcaguuguagugucucca

SEQ ID NO: 12477 - RNA, 20 nt, Artificial Sequence
  RPE65 RNA guide
aggcuacccagccaguaaca

SEQ ID NO: 12478 - RNA, 20 nt, Artificial Sequence
  RPE65 RNA guide
agggacagugguagaagucc

SEQ ID NO: 12479 - RNA, 20 nt, Artificial Sequence
  RPE65 RNA guide
aggggucuucuucaacaaaa

SEQ ID NO: 12480 - RNA, 20 nt, Artificial Sequence
  RPE65 RNA guide
agguacugcccaaagaaguc

SEQ ID NO: 12481 - RNA, 20 nt, Artificial Sequence
  RPE65 RNA guide
aggugcuaccauuaggacuu

SEQ ID NO: 12482 - RNA, 20 nt, Artificial Sequence
  RPE65 RNA guide
agguuguuagcugguauagu

SEQ ID NO: 12483 - RNA, 20 nt, Artificial Sequence
  RPE65 RNA guide
aguaacaauauuccgggcuc

SEQ ID NO: 12484 - RNA, 20 nt, Artificial Sequence
  RPE65 RNA guide
aguaccuugucugugcuggc

SEQ ID NO: 12485 - RNA, 20 nt, Artificial Sequence
  RPE65 RNA guide
aguagcuucauuuccuuaca

SEQ ID NO: 12486 - RNA, 20 nt, Artificial Sequence
  RPE65 RNA guide
aguauauaucuugccuguuu

SEQ ID NO: 12487 - RNA, 20 nt, Artificial Sequence
  RPE65 RNA guide
aguccuaaugguagcaccug

SEQ ID NO: 12488 - RNA, 20 nt, Artificial Sequence
  RPE65 RNA guide
aguccuuggaaaacaggcaa

SEQ ID NO: 12489 - RNA, 20 nt, Artificial Sequence
  RPE65 RNA guide
agucucaguugcuugccagc

SEQ ID NO: 12490 - RNA, 20 nt, Artificial Sequence
  RPE65 RNA guide
agugcuucccaagauauaca

SEQ ID NO: 12491 - RNA, 20 nt, Artificial Sequence
  RPE65 RNA guide
aguggagcccggaauauugu

SEQ ID NO: 12492 - RNA, 20 nt, Artificial Sequence
  RPE65 RNA guide
agugguagaaguccuaaugg

SEQ ID NO: 12493 - RNA, 20 nt, Artificial Sequence
  RPE65 RNA guide
agugucuccauucaacagug

SEQ ID NO: 12494 - RNA, 20 nt, Artificial Sequence
  RPE65 RNA guide
aguugcuugccagcacagac

SEQ ID NO: 12495 - RNA, 20 nt, Artificial Sequence
  RPE65 RNA guide
aguuguagugucuccauuca

SEQ ID NO: 12496 - RNA, 20 nt, Artificial Sequence
  RPE65 RNA guide
aguuuuguugaagaagaccc

SEQ ID NO: 12497 - RNA, 20 nt, Artificial Sequence
  RPE65 RNA guide
auaacaauuaauccaagugc

SEQ ID NO: 12498 - RNA, 20 nt, Artificial Sequence
  RPE65 RNA guide
auaauaucucugcccaucca

SEQ ID NO: 12499 - RNA, 20 nt, Artificial Sequence
  RPE65 RNA guide
auacaacaguagcuucauuu

SEQ ID NO: 12500 - RNA, 20 nt, Artificial Sequence
  RPE65 RNA guide
auacaguuuuguugaagaag

SEQ ID NO: 12501 - RNA, 20 nt, Artificial Sequence
  RPE65 RNA guide
auaccagcuaacaaccuuaa

SEQ ID NO: 12502 - RNA, 20 nt, Artificial Sequence
  RPE65 RNA guide
auacuauaccagcuaacaac

SEQ ID NO: 12503 - RNA, 20 nt, Artificial Sequence
  RPE65 RNA guide
auacucucagagugccaaac

SEQ ID NO: 12504 - RNA, 20 nt, Artificial Sequence
  RPE65 RNA guide
auauacaacaguagcuucau

SEQ ID NO: 12505 - RNA, 20 nt, Artificial Sequence
  RPE65 RNA guide
auauacuauaccagcuaaca

SEQ ID NO: 12506 - RNA, 20 nt, Artificial Sequence
  RPE65 RNA guide
auauaucuugccuguuuucc

SEQ ID NO: 12507 - RNA, 20 nt, Artificial Sequence
  RPE65 RNA guide
auaucucugcccauccaagg

SEQ ID NO: 12508 - RNA, 20 nt, Artificial Sequence
  RPE65 RNA guide
auaucuugccuguuuuccaa

SEQ ID NO: 12509 - RNA, 20 nt, Artificial Sequence
  RPE65 RNA guide
auaucuugggaagcacuugg

SEQ ID NO: 12510 - RNA, 20 nt, Artificial Sequence
  RPE65 RNA guide
auauguuuggcacucugaga

SEQ ID NO: 12511 - RNA, 20 nt, Artificial Sequence
  RPE65 RNA guide
auauuauggaugcuaagccc

SEQ ID NO: 12512 - RNA, 20 nt, Artificial Sequence
  RPE65 RNA guide
auauuccgggcuccacuguu

SEQ ID NO: 12513 - RNA, 20 nt, Artificial Sequence
  RPE65 RNA guide
auauuguuacuggcugggua

SEQ ID NO: 12514 - RNA, 20 nt, Artificial Sequence
  RPE65 RNA guide
aucacaugccuaugcccuca

SEQ ID NO: 12515 - RNA, 20 nt, Artificial Sequence
  RPE65 RNA guide
auccaaggcaguuguagugu

SEQ ID NO: 12516 - RNA, 20 nt, Artificial Sequence
  RPE65 RNA guide
auccaagugcuucccaagau

SEQ ID NO: 12517 - RNA, 20 nt, Artificial Sequence
  RPE65 RNA guide
auccauaauaucucugccca

SEQ ID NO: 12518 - RNA, 20 nt, Artificial Sequence
  RPE65 RNA guide
aucucugcccauccaaggca

SEQ ID NO: 12519 - RNA, 20 nt, Artificial Sequence
  RPE65 RNA guide
aucuugccuguuuuccaagg

SEQ ID NO: 12520 - RNA, 20 nt, Artificial Sequence
  RPE65 RNA guide
aucuugggaagcacuuggau

SEQ ID NO: 12521 - RNA, 20 nt, Artificial Sequence
  RPE65 RNA guide
augaagcuacuguuguauau

SEQ ID NO: 12522 - RNA, 20 nt, Artificial Sequence
  RPE65 RNA guide
augaauugaugcuguauacu

SEQ ID NO: 12523 - RNA, 20 nt, Artificial Sequence
  RPE65 RNA guide
augcccucacuguaaggaaa

SEQ ID NO: 12524 - RNA, 20 nt, Artificial Sequence
  RPE65 RNA guide
augccuaugcccucacugua

SEQ ID NO: 12525 - RNA, 20 nt, Artificial Sequence
  RPE65 RNA guide
augcuaagccccaggugcua

SEQ ID NO: 12526 - RNA, 20 nt, Artificial Sequence
  RPE65 RNA guide
augcuguauacucucagagu

SEQ ID NO: 12527 - RNA, 20 nt, Artificial Sequence
  RPE65 RNA guide
auggagacacuacaacugcc

SEQ ID NO: 12528 - RNA, 20 nt, Artificial Sequence
  RPE65 RNA guide
auggagcuuggaggcuaccc

SEQ ID NO: 12529 - RNA, 20 nt, Artificial Sequence
  RPE65 RNA guide
auggaugcuaagccccaggu

SEQ ID NO: 12530 - RNA, 20 nt, Artificial Sequence
  RPE65 RNA guide
auggcuaaaggauggagcuu

SEQ ID NO: 12531 - RNA, 20 nt, Artificial Sequence
  RPE65 RNA guide
augggcagagauauuaugga

SEQ ID NO: 12532 - RNA, 20 nt, Artificial Sequence
  RPE65 RNA guide
augguagcaccuggggcuua

SEQ ID NO: 12533 - RNA, 20 nt, Artificial Sequence
  RPE65 RNA guide
auguuaagguuguuagcugg

SEQ ID NO: 12534 - RNA, 20 nt, Artificial Sequence
  RPE65 RNA guide
auguuuggcacucugagagu

SEQ ID NO: 12535 - RNA, 20 nt, Artificial Sequence
  RPE65 RNA guide
auuaagucucaguugcuugc

SEQ ID NO: 12536 - RNA, 20 nt, Artificial Sequence
  RPE65 RNA guide
auuaauccaagugcuuccca

SEQ ID NO: 12537 - RNA, 20 nt, Artificial Sequence
  RPE65 RNA guide
auuaggacuucuaccacugu

SEQ ID NO: 12538 - RNA, 20 nt, Artificial Sequence
  RPE65 RNA guide
auuauggaugcuaagcccca

SEQ ID NO: 12539 - RNA, 20 nt, Artificial Sequence
  RPE65 RNA guide
auucaacaguggagcccgga

SEQ ID NO: 12540 - RNA, 20 nt, Artificial Sequence
  RPE65 RNA guide
auuccgggcuccacuguuga

SEQ ID NO: 12541 - RNA, 20 nt, Artificial Sequence
  RPE65 RNA guide
auugaugcuguauacucuca

SEQ ID NO: 12542 - RNA, 20 nt, Artificial Sequence
  RPE65 RNA guide
auugguauauguuuggcacu

SEQ ID NO: 12543 - RNA, 20 nt, Artificial Sequence
  RPE65 RNA guide
auuguuacuggcuggguagc

SEQ ID NO: 12544 - RNA, 20 nt, Artificial Sequence
  RPE65 RNA guide
auuuccuuacagugagggca

SEQ ID NO: 12545 - RNA, 20 nt, Artificial Sequence
  RPE65 RNA guide
caaagaaguccuuggaaaac

SEQ ID NO: 12546 - RNA, 20 nt, Artificial Sequence
  RPE65 RNA guide
caacaguagcuucauuuccu

SEQ ID NO: 12547 - RNA, 20 nt, Artificial Sequence
  RPE65 RNA guide
caacaguggagcccggaaua

SEQ ID NO: 12548 - RNA, 20 nt, Artificial Sequence
  RPE65 RNA guide
caacugagacuuaaugaaag

SEQ ID NO: 12549 - RNA, 20 nt, Artificial Sequence
  RPE65 RNA guide
caacugccuuggaugggcag

SEQ ID NO: 12550 - RNA, 20 nt, Artificial Sequence
  RPE65 RNA guide
caagauauacaacaguagcu

SEQ ID NO: 12551 - RNA, 20 nt, Artificial Sequence
  RPE65 RNA guide
caagcaacugagacuuaaug

SEQ ID NO: 12552 - RNA, 20 nt, Artificial Sequence
  RPE65 RNA guide
caaggacuucuuugggcagu

SEQ ID NO: 12553 - RNA, 20 nt, Artificial Sequence
  RPE65 RNA guide
caaggcaguuguagugucuc

SEQ ID NO: 12554 - RNA, 20 nt, Artificial Sequence
  RPE65 RNA guide
caagguacugcccaaagaag

SEQ ID NO: 12555 - RNA, 20 nt, Artificial Sequence
  RPE65 RNA guide
caagugcuucccaagauaua

SEQ ID NO: 12556 - RNA, 20 nt, Artificial Sequence
  RPE65 RNA guide
caauacucuuucauuaaguc

SEQ ID NO: 12557 - RNA, 20 nt, Artificial Sequence
  RPE65 RNA guide
caauauuccgggcuccacug

SEQ ID NO: 12558 - RNA, 20 nt, Artificial Sequence
  RPE65 RNA guide
caauuaauccaagugcuucc

SEQ ID NO: 12559 - RNA, 20 nt, Artificial Sequence
  RPE65 RNA guide
cacagacaagguacugccca

SEQ ID NO: 12560 - RNA, 20 nt, Artificial Sequence
  RPE65 RNA guide
cacaugccuaugcccucacu

SEQ ID NO: 12561 - RNA, 20 nt, Artificial Sequence
  RPE65 RNA guide
cacccguuagggacaguggu

SEQ ID NO: 12562 - RNA, 20 nt, Artificial Sequence
  RPE65 RNA guide
caccuggggcuuagcaucca

SEQ ID NO: 12563 - RNA, 20 nt, Artificial Sequence
  RPE65 RNA guide
cacuacaacugccuuggaug

SEQ ID NO: 12564 - RNA, 20 nt, Artificial Sequence
  RPE65 RNA guide
cacucugagaguauacagca

SEQ ID NO: 12565 - RNA, 20 nt, Artificial Sequence
  RPE65 RNA guide
cacuguaaggaaaugaagcu

SEQ ID NO: 12566 - RNA, 20 nt, Artificial Sequence
  RPE65 RNA guide
cacuguugaauggagacacu

SEQ ID NO: 12567 - RNA, 20 nt, Artificial Sequence
  RPE65 RNA guide
cagacaagguacugcccaaa

SEQ ID NO: 12568 - RNA, 20 nt, Artificial Sequence
  RPE65 RNA guide
cagagauauuauggaugcua

SEQ ID NO: 12569 - RNA, 20 nt, Artificial Sequence
  RPE65 RNA guide
cagagugccaaacauauacc

SEQ ID NO: 12570 - RNA, 20 nt, Artificial Sequence
  RPE65 RNA guide
cagcacagacaagguacugc

SEQ ID NO: 12571 - RNA, 20 nt, Artificial Sequence
  RPE65 RNA guide
cagcaucaauucauucauau

SEQ ID NO: 12572 - RNA, 20 nt, Artificial Sequence
  RPE65 RNA guide
cagccaguaacaauauuccg

SEQ ID NO: 12573 - RNA, 20 nt, Artificial Sequence
  RPE65 RNA guide
caggcaagauauauacuaua

SEQ ID NO: 12574 - RNA, 20 nt, Artificial Sequence
  RPE65 RNA guide
caggugcuaccauuaggacu

SEQ ID NO: 12575 - RNA, 20 nt, Artificial Sequence
  RPE65 RNA guide
caguaacaauauuccgggcu

SEQ ID NO: 12576 - RNA, 20 nt, Artificial Sequence
  RPE65 RNA guide
caguaccuugucugugcugg

SEQ ID NO: 12577 - RNA, 20 nt, Artificial Sequence
  RPE65 RNA guide
caguagcuucauuuccuuac

SEQ ID NO: 12578 - RNA, 20 nt, Artificial Sequence
  RPE65 RNA guide
caguggagcccggaauauug

SEQ ID NO: 12579 - RNA, 20 nt, Artificial Sequence
  RPE65 RNA guide
cagugguagaaguccuaaug

SEQ ID NO: 12580 - RNA, 20 nt, Artificial Sequence
  RPE65 RNA guide
caguugcuugccagcacaga

SEQ ID NO: 12581 - RNA, 20 nt, Artificial Sequence
  RPE65 RNA guide
caguuguagugucuccauuc

SEQ ID NO: 12582 - RNA, 20 nt, Artificial Sequence
  RPE65 RNA guide
caguuuuguugaagaagacc

SEQ ID NO: 12583 - RNA, 20 nt, Artificial Sequence
  RPE65 RNA guide
cauaauaucucugcccaucc

SEQ ID NO: 12584 - RNA, 20 nt, Artificial Sequence
  RPE65 RNA guide
caucacaugccuaugcccuc

SEQ ID NO: 12585 - RNA, 20 nt, Artificial Sequence
  RPE65 RNA guide
cauccaaggcaguuguagug

SEQ ID NO: 12586 - RNA, 20 nt, Artificial Sequence
  RPE65 RNA guide
cauccauaauaucucugccc

SEQ ID NO: 12587 - RNA, 20 nt, Artificial Sequence
  RPE65 RNA guide
caugccuaugcccucacugu

SEQ ID NO: 12588 - RNA, 20 nt, Artificial Sequence
  RPE65 RNA guide
cauuaagucucaguugcuug

SEQ ID NO: 12589 - RNA, 20 nt, Artificial Sequence
  RPE65 RNA guide
cauuaggacuucuaccacug

SEQ ID NO: 12590 - RNA, 20 nt, Artificial Sequence
  RPE65 RNA guide
cauucaacaguggagcccgg

SEQ ID NO: 12591 - RNA, 20 nt, Artificial Sequence
  RPE65 RNA guide
cauucauaucuccaauacuc

SEQ ID NO: 12592 - RNA, 20 nt, Artificial Sequence
  RPE65 RNA guide
cauugguauauguuuggcac

SEQ ID NO: 12593 - RNA, 20 nt, Artificial Sequence
  RPE65 RNA guide
cauuuccuuacagugagggc

SEQ ID NO: 12594 - RNA, 20 nt, Artificial Sequence
  RPE65 RNA guide
ccaaagaaguccuuggaaaa

SEQ ID NO: 12595 - RNA, 20 nt, Artificial Sequence
  RPE65 RNA guide
ccaagauauacaacaguagc

SEQ ID NO: 12596 - RNA, 20 nt, Artificial Sequence
  RPE65 RNA guide
ccaagcuccauccuuuagcc

SEQ ID NO: 12597 - RNA, 20 nt, Artificial Sequence
  RPE65 RNA guide
ccaaggacuucuuugggcag

SEQ ID NO: 12598 - RNA, 20 nt, Artificial Sequence
  RPE65 RNA guide
ccaaggcaguuguagugucu

SEQ ID NO: 12599 - RNA, 20 nt, Artificial Sequence
  RPE65 RNA guide
ccaagugcuucccaagauau

SEQ ID NO: 12600 - RNA, 20 nt, Artificial Sequence
  RPE65 RNA guide
ccaauacucuuucauuaagu

SEQ ID NO: 12601 - RNA, 20 nt, Artificial Sequence
  RPE65 RNA guide
ccacccguuagggacagugg

SEQ ID NO: 12602 - RNA, 20 nt, Artificial Sequence
  RPE65 RNA guide
ccacugucccuaacgggugg

SEQ ID NO: 12603 - RNA, 20 nt, Artificial Sequence
  RPE65 RNA guide
ccacuguugaauggagacac

SEQ ID NO: 12604 - RNA, 20 nt, Artificial Sequence
  RPE65 RNA guide
ccagcacagacaagguacug

SEQ ID NO: 12605 - RNA, 20 nt, Artificial Sequence
  RPE65 RNA guide
ccagccaguaacaauauucc

SEQ ID NO: 12606 - RNA, 20 nt, Artificial Sequence
  RPE65 RNA guide
ccagcuaacaaccuuaacau

SEQ ID NO: 12607 - RNA, 20 nt, Artificial Sequence
  RPE65 RNA guide
ccaggugcuaccauuaggac

SEQ ID NO: 12608 - RNA, 20 nt, Artificial Sequence
  RPE65 RNA guide
ccaguaacaauauuccgggc

SEQ ID NO: 12609 - RNA, 20 nt, Artificial Sequence
  RPE65 RNA guide
ccauaauaucucugcccauc

SEQ ID NO: 12610 - RNA, 20 nt, Artificial Sequence
  RPE65 RNA guide
ccauccaaggcaguuguagu

SEQ ID NO: 12611 - RNA, 20 nt, Artificial Sequence
  RPE65 RNA guide
ccauuaggacuucuaccacu

SEQ ID NO: 12612 - RNA, 20 nt, Artificial Sequence
  RPE65 RNA guide
ccauucaacaguggagcccg

SEQ ID NO: 12613 - RNA, 20 nt, Artificial Sequence
  RPE65 RNA guide
ccauugguauauguuuggca

SEQ ID NO: 12614 - RNA, 20 nt, Artificial Sequence
  RPE65 RNA guide
cccaaagaaguccuuggaaa

SEQ ID NO: 12615 - RNA, 20 nt, Artificial Sequence
  RPE65 RNA guide
cccaagauauacaacaguag

SEQ ID NO: 12616 - RNA, 20 nt, Artificial Sequence
  RPE65 RNA guide
cccagccaguaacaauauuc

SEQ ID NO: 12617 - RNA, 20 nt, Artificial Sequence
  RPE65 RNA guide
cccaggugcuaccauuagga

SEQ ID NO: 12618 - RNA, 20 nt, Artificial Sequence
  RPE65 RNA guide
cccauccaaggcaguuguag

SEQ ID NO: 12619 - RNA, 20 nt, Artificial Sequence
  RPE65 RNA guide
ccccaggugcuaccauuagg

SEQ ID NO: 12620 - RNA, 20 nt, Artificial Sequence
  RPE65 RNA guide
cccggaauauuguuacuggc

SEQ ID NO: 12621 - RNA, 20 nt, Artificial Sequence
  RPE65 RNA guide
cccguuagggacagugguag

SEQ ID NO: 12622 - RNA, 20 nt, Artificial Sequence
  RPE65 RNA guide
cccuaggggucuucuucaac

SEQ ID NO: 12623 - RNA, 20 nt, Artificial Sequence
  RPE65 RNA guide
cccucacuguaaggaaauga

SEQ ID NO: 12624 - RNA, 20 nt, Artificial Sequence
  RPE65 RNA guide
ccggaauauuguuacuggcu

SEQ ID NO: 12625 - RNA, 20 nt, Artificial Sequence
  RPE65 RNA guide
ccgggcuccacuguugaaug

SEQ ID NO: 12626 - RNA, 20 nt, Artificial Sequence
  RPE65 RNA guide
ccguuagggacagugguaga

SEQ ID NO: 12627 - RNA, 20 nt, Artificial Sequence
  RPE65 RNA guide
ccuaaugguagcaccugggg

SEQ ID NO: 12628 - RNA, 20 nt, Artificial Sequence
  RPE65 RNA guide
ccuaggggucuucuucaaca

SEQ ID NO: 12629 - RNA, 20 nt, Artificial Sequence
  RPE65 RNA guide
ccuaugcccucacuguaagg

SEQ ID NO: 12630 - RNA, 20 nt, Artificial Sequence
  RPE65 RNA guide
ccucacuguaaggaaaugaa

SEQ ID NO: 12631 - RNA, 20 nt, Artificial Sequence
  RPE65 RNA guide
ccuccaagcuccauccuuua

SEQ ID NO: 12632 - RNA, 20 nt, Artificial Sequence
  RPE65 RNA guide
ccuggggcuuagcauccaua

SEQ ID NO: 12633 - RNA, 20 nt, Artificial Sequence
  RPE65 RNA guide
ccuguuuuccaaggacuucu

SEQ ID NO: 12634 - RNA, 20 nt, Artificial Sequence
  RPE65 RNA guide
ccuuacagugagggcauagg

SEQ ID NO: 12635 - RNA, 20 nt, Artificial Sequence
  RPE65 RNA guide
ccuuggaaaacaggcaagau

SEQ ID NO: 12636 - RNA, 20 nt, Artificial Sequence
  RPE65 RNA guide
ccuuggaugggcagagauau

SEQ ID NO: 12637 - RNA, 20 nt, Artificial Sequence
  RPE65 RNA guide
ccuugucugugcuggcaagc

SEQ ID NO: 12638 - RNA, 20 nt, Artificial Sequence
  RPE65 RNA guide
cggaauauuguuacuggcug

SEQ ID NO: 12639 - RNA, 20 nt, Artificial Sequence
  RPE65 RNA guide
cgggcuccacuguugaaugg

SEQ ID NO: 12640 - RNA, 20 nt, Artificial Sequence
  RPE65 RNA guide
cguuagggacagugguagaa

SEQ ID NO: 12641 - RNA, 20 nt, Artificial Sequence
  RPE65 RNA guide
cuaaaggauggagcuuggag

SEQ ID NO: 12642 - RNA, 20 nt, Artificial Sequence
  RPE65 RNA guide
cuaagccccaggugcuacca

SEQ ID NO: 12643 - RNA, 20 nt, Artificial Sequence
  RPE65 RNA guide
cuaaugguagcaccuggggc

SEQ ID NO: 12644 - RNA, 20 nt, Artificial Sequence
  RPE65 RNA guide
cuacaacugccuuggauggg

SEQ ID NO: 12645 - RNA, 20 nt, Artificial Sequence
  RPE65 RNA guide
cuaccacugucccuaacggg

SEQ ID NO: 12646 - RNA, 20 nt, Artificial Sequence
  RPE65 RNA guide
cuaccauuaggacuucuacc

SEQ ID NO: 12647 - RNA, 20 nt, Artificial Sequence
  RPE65 RNA guide
cuacccagccaguaacaaua

SEQ ID NO: 12648 - RNA, 20 nt, Artificial Sequence
  RPE65 RNA guide
cuacuguuguauaucuuggg

SEQ ID NO: 12649 - RNA, 20 nt, Artificial Sequence
  RPE65 RNA guide
cuacuuacccuaggggucuu

SEQ ID NO: 12650 - RNA, 20 nt, Artificial Sequence
  RPE65 RNA guide
cuaggggucuucuucaacaa

SEQ ID NO: 12651 - RNA, 20 nt, Artificial Sequence
  RPE65 RNA guide
cuauaccagcuaacaaccuu

SEQ ID NO: 12652 - RNA, 20 nt, Artificial Sequence
  RPE65 RNA guide
cuaugcccucacuguaagga

SEQ ID NO: 12653 - RNA, 20 nt, Artificial Sequence
  RPE65 RNA guide
cucacuguaaggaaaugaag

SEQ ID NO: 12654 - RNA, 20 nt, Artificial Sequence
  RPE65 RNA guide
cucagagugccaaacauaua

SEQ ID NO: 12655 - RNA, 20 nt, Artificial Sequence
  RPE65 RNA guide
cucaguugcuugccagcaca

SEQ ID NO: 12656 - RNA, 20 nt, Artificial Sequence
  RPE65 RNA guide
cuccaagcuccauccuuuag

SEQ ID NO: 12657 - RNA, 20 nt, Artificial Sequence
  RPE65 RNA guide
cuccaauacucuuucauuaa

SEQ ID NO: 12658 - RNA, 20 nt, Artificial Sequence
  RPE65 RNA guide
cuccacccguuagggacagu

SEQ ID NO: 12659 - RNA, 20 nt, Artificial Sequence
  RPE65 RNA guide
cuccacuguugaauggagac

SEQ ID NO: 12660 - RNA, 20 nt, Artificial Sequence
  RPE65 RNA guide
cuccauucaacaguggagcc

SEQ ID NO: 12661 - RNA, 20 nt, Artificial Sequence
  RPE65 RNA guide
cucucagagugccaaacaua

SEQ ID NO: 12662 - RNA, 20 nt, Artificial Sequence
  RPE65 RNA guide
cucugagaguauacagcauc

SEQ ID NO: 12663 - RNA, 20 nt, Artificial Sequence
  RPE65 RNA guide
cucugcccauccaaggcagu

SEQ ID NO: 12664 - RNA, 20 nt, Artificial Sequence
  RPE65 RNA guide
cucuuucauuaagucucagu

SEQ ID NO: 12665 - RNA, 20 nt, Artificial Sequence
  RPE65 RNA guide
cugagacuuaaugaaagagu

SEQ ID NO: 12666 - RNA, 20 nt, Artificial Sequence
  RPE65 RNA guide
cugagaguauacagcaucaa

SEQ ID NO: 12667 - RNA, 20 nt, Artificial Sequence
  RPE65 RNA guide
cugcccaaagaaguccuugg

SEQ ID NO: 12668 - RNA, 20 nt, Artificial Sequence
  RPE65 RNA guide
cugcccauccaaggcaguug

SEQ ID NO: 12669 - RNA, 20 nt, Artificial Sequence
  RPE65 RNA guide
cugccuuggaugggcagaga

SEQ ID NO: 12670 - RNA, 20 nt, Artificial Sequence
  RPE65 RNA guide
cuggcaagcaacugagacuu

SEQ ID NO: 12671 - RNA, 20 nt, Artificial Sequence
  RPE65 RNA guide
cuggcuggguagccuccaag

SEQ ID NO: 12672 - RNA, 20 nt, Artificial Sequence
  RPE65 RNA guide
cuggggcuuagcauccauaa

SEQ ID NO: 12673 - RNA, 20 nt, Artificial Sequence
  RPE65 RNA guide
cuggguagccuccaagcucc

SEQ ID NO: 12674 - RNA, 20 nt, Artificial Sequence
  RPE65 RNA guide
cugguauaguauauaucuug

SEQ ID NO: 12675 - RNA, 20 nt, Artificial Sequence
  RPE65 RNA guide
cuguaaggaaaugaagcuac

SEQ ID NO: 12676 - RNA, 20 nt, Artificial Sequence
  RPE65 RNA guide
cuguauaacaauuaauccaa

SEQ ID NO: 12677 - RNA, 20 nt, Artificial Sequence
  RPE65 RNA guide
cuguauacucucagagugcc

SEQ ID NO: 12678 - RNA, 20 nt, Artificial Sequence
  RPE65 RNA guide
cugugcuggcaagcaacuga

SEQ ID NO: 12679 - RNA, 20 nt, Artificial Sequence
  RPE65 RNA guide
cuguugaauggagacacuac

SEQ ID NO: 12680 - RNA, 20 nt, Artificial Sequence
  RPE65 RNA guide
cuguuguauaucuugggaag

SEQ ID NO: 12681 - RNA, 20 nt, Artificial Sequence
  RPE65 RNA guide
cuguuuuccaaggacuucuu

SEQ ID NO: 12682 - RNA, 20 nt, Artificial Sequence
  RPE65 RNA guide
cuuacagugagggcauaggc

SEQ ID NO: 12683 - RNA, 20 nt, Artificial Sequence
  RPE65 RNA guide
cuuacccuaggggucuucuu

SEQ ID NO: 12684 - RNA, 20 nt, Artificial Sequence
  RPE65 RNA guide
cuuagcauccauaauaucuc

SEQ ID NO: 12685 - RNA, 20 nt, Artificial Sequence
  RPE65 RNA guide
cuucauuuccuuacagugag

SEQ ID NO: 12686 - RNA, 20 nt, Artificial Sequence
  RPE65 RNA guide
cuucccaagauauacaacag

SEQ ID NO: 12687 - RNA, 20 nt, Artificial Sequence
  RPE65 RNA guide
cuucuaccacugucccuaac

SEQ ID NO: 12688 - RNA, 20 nt, Artificial Sequence
  RPE65 RNA guide
cuucuuugggcaguaccuug

SEQ ID NO: 12689 - RNA, 20 nt, Artificial Sequence
  RPE65 RNA guide
cuugccagcacagacaaggu

SEQ ID NO: 12690 - RNA, 20 nt, Artificial Sequence
  RPE65 RNA guide
cuugccuguuuuccaaggac

SEQ ID NO: 12691 - RNA, 20 nt, Artificial Sequence
  RPE65 RNA guide
cuuggaaaacaggcaagaua

SEQ ID NO: 12692 - RNA, 20 nt, Artificial Sequence
  RPE65 RNA guide
cuuggaggcuacccagccag

SEQ ID NO: 12693 - RNA, 20 nt, Artificial Sequence
  RPE65 RNA guide
cuuggaugggcagagauauu

SEQ ID NO: 12694 - RNA, 20 nt, Artificial Sequence
  RPE65 RNA guide
cuugggaagcacuuggauua

SEQ ID NO: 12695 - RNA, 20 nt, Artificial Sequence
  RPE65 RNA guide
cuugucugugcuggcaagca

SEQ ID NO: 12696 - RNA, 20 nt, Artificial Sequence
  RPE65 RNA guide
cuuucauuaagucucaguug

SEQ ID NO: 12697 - RNA, 20 nt, Artificial Sequence
  RPE65 RNA guide
cuuugggcaguaccuugucu

SEQ ID NO: 12698 - RNA, 20 nt, Artificial Sequence
  RPE65 RNA guide
gaaagaguauuggagauaug

SEQ ID NO: 12699 - RNA, 20 nt, Artificial Sequence
  RPE65 RNA guide
gaaaugaagcuacuguugua

SEQ ID NO: 12700 - RNA, 20 nt, Artificial Sequence
  RPE65 RNA guide
gaagaagaccccuaggguaa

SEQ ID NO: 12701 - RNA, 20 nt, Artificial Sequence
  RPE65 RNA guide
gaagcuacuguuguauaucu

SEQ ID NO: 12702 - RNA, 20 nt, Artificial Sequence
  RPE65 RNA guide
gaaguccuaaugguagcacc

SEQ ID NO: 12703 - RNA, 20 nt, Artificial Sequence
  RPE65 RNA guide
gaaguccuuggaaaacaggc

SEQ ID NO: 12704 - RNA, 20 nt, Artificial Sequence
  RPE65 RNA guide
gaauauuguuacuggcuggg

SEQ ID NO: 12705 - RNA, 20 nt, Artificial Sequence
  RPE65 RNA guide
gaaugaauugaugcuguaua

SEQ ID NO: 12706 - RNA, 20 nt, Artificial Sequence
  RPE65 RNA guide
gaauggagacacuacaacug

SEQ ID NO: 12707 - RNA, 20 nt, Artificial Sequence
  RPE65 RNA guide
gaauugaugcuguauacucu

SEQ ID NO: 12708 - RNA, 20 nt, Artificial Sequence
  RPE65 RNA guide
gacaagguacugcccaaaga

SEQ ID NO: 12709 - RNA, 20 nt, Artificial Sequence
  RPE65 RNA guide
gacacuacaacugccuugga

SEQ ID NO: 12710 - RNA, 20 nt, Artificial Sequence
  RPE65 RNA guide
gacagugguagaaguccuaa

SEQ ID NO: 12711 - RNA, 20 nt, Artificial Sequence
  RPE65 RNA guide
gacuuaaugaaagaguauug

SEQ ID NO: 12712 - RNA, 20 nt, Artificial Sequence
  RPE65 RNA guide
gacuucuaccacugucccua

SEQ ID NO: 12713 - RNA, 20 nt, Artificial Sequence
  RPE65 RNA guide
gacuucuuugggcaguaccu

SEQ ID NO: 12714 - RNA, 20 nt, Artificial Sequence
  RPE65 RNA guide
gagacacuacaacugccuug

SEQ ID NO: 12715 - RNA, 20 nt, Artificial Sequence
  RPE65 RNA guide
gagacuuaaugaaagaguau

SEQ ID NO: 12716 - RNA, 20 nt, Artificial Sequence
  RPE65 RNA guide
gagaguauacagcaucaauu

SEQ ID NO: 12717 - RNA, 20 nt, Artificial Sequence
  RPE65 RNA guide
gagauaugaaugaauugaug

SEQ ID NO: 12718 - RNA, 20 nt, Artificial Sequence
  RPE65 RNA guide
gagauauuauggaugcuaag

SEQ ID NO: 12719 - RNA, 20 nt, Artificial Sequence
  RPE65 RNA guide
gagcccggaauauuguuacu

SEQ ID NO: 12720 - RNA, 20 nt, Artificial Sequence
  RPE65 RNA guide
gagcuuggaggcuacccagc

SEQ ID NO: 12721 - RNA, 20 nt, Artificial Sequence
  RPE65 RNA guide
gaggcuacccagccaguaac

SEQ ID NO: 12722 - RNA, 20 nt, Artificial Sequence
  RPE65 RNA guide
gaguauacagcaucaauuca

SEQ ID NO: 12723 - RNA, 20 nt, Artificial Sequence
  RPE65 RNA guide
gagugccaaacauauaccaa

SEQ ID NO: 12724 - RNA, 20 nt, Artificial Sequence
  RPE65 RNA guide
gauauacaacaguagcuuca

SEQ ID NO: 12725 - RNA, 20 nt, Artificial Sequence
  RPE65 RNA guide
gauauuauggaugcuaagcc

SEQ ID NO: 12726 - RNA, 20 nt, Artificial Sequence
  RPE65 RNA guide
gaugcuaagccccaggugcu

SEQ ID NO: 12727 - RNA, 20 nt, Artificial Sequence
  RPE65 RNA guide
gaugcuguauacucucagag

SEQ ID NO: 12728 - RNA, 20 nt, Artificial Sequence
  RPE65 RNA guide
gauggagcuuggaggcuacc

SEQ ID NO: 12729 - RNA, 20 nt, Artificial Sequence
  RPE65 RNA guide
gauggcuaaaggauggagcu

SEQ ID NO: 12730 - RNA, 20 nt, Artificial Sequence
  RPE65 RNA guide
gaugggcagagauauuaugg

SEQ ID NO: 12731 - RNA, 20 nt, Artificial Sequence
  RPE65 RNA guide
gcaacugagacuuaaugaaa

SEQ ID NO: 12732 - RNA, 20 nt, Artificial Sequence
  RPE65 RNA guide
gcaagauauauacuauacca

SEQ ID NO: 12733 - RNA, 20 nt, Artificial Sequence
  RPE65 RNA guide
gcaagcaacugagacuuaau

SEQ ID NO: 12734 - RNA, 20 nt, Artificial Sequence
  RPE65 RNA guide
gcacagacaagguacugccc

SEQ ID NO: 12735 - RNA, 20 nt, Artificial Sequence
  RPE65 RNA guide
gcaccuggggcuuagcaucc

SEQ ID NO: 12736 - RNA, 20 nt, Artificial Sequence
  RPE65 RNA guide
gcacucugagaguauacagc

SEQ ID NO: 12737 - RNA, 20 nt, Artificial Sequence
  RPE65 RNA guide
gcacuuggauuaauuguuau

SEQ ID NO: 12738 - RNA, 20 nt, Artificial Sequence
  RPE65 RNA guide
gcagagauauuauggaugcu

SEQ ID NO: 12739 - RNA, 20 nt, Artificial Sequence
  RPE65 RNA guide
gcaguaccuugucugugcug

SEQ ID NO: 12740 - RNA, 20 nt, Artificial Sequence
  RPE65 RNA guide
gcaguuguagugucuccauu

SEQ ID NO: 12741 - RNA, 20 nt, Artificial Sequence
  RPE65 RNA guide
gcaucaauucauucauaucu

SEQ ID NO: 12742 - RNA, 20 nt, Artificial Sequence
  RPE65 RNA guide
gcauccauaauaucucugcc

SEQ ID NO: 12743 - RNA, 20 nt, Artificial Sequence
  RPE65 RNA guide
gccagcacagacaagguacu

SEQ ID NO: 12744 - RNA, 20 nt, Artificial Sequence
  RPE65 RNA guide
gccaguaacaauauuccggg

SEQ ID NO: 12745 - RNA, 20 nt, Artificial Sequence
  RPE65 RNA guide
gcccaaagaaguccuuggaa

SEQ ID NO: 12746 - RNA, 20 nt, Artificial Sequence
  RPE65 RNA guide
gcccauccaaggcaguugua

SEQ ID NO: 12747 - RNA, 20 nt, Artificial Sequence
  RPE65 RNA guide
gccccaggugcuaccauuag

SEQ ID NO: 12748 - RNA, 20 nt, Artificial Sequence
  RPE65 RNA guide
gcccggaauauuguuacugg

SEQ ID NO: 12749 - RNA, 20 nt, Artificial Sequence
  RPE65 RNA guide
gcccucacuguaaggaaaug

SEQ ID NO: 12750 - RNA, 20 nt, Artificial Sequence
  RPE65 RNA guide
gccuaugcccucacuguaag

SEQ ID NO: 12751 - RNA, 20 nt, Artificial Sequence
  RPE65 RNA guide
gccuccaagcuccauccuuu

SEQ ID NO: 12752 - RNA, 20 nt, Artificial Sequence
  RPE65 RNA guide
gccuguuuuccaaggacuuc

SEQ ID NO: 12753 - RNA, 20 nt, Artificial Sequence
  RPE65 RNA guide
gccuuggaugggcagagaua

SEQ ID NO: 12754 - RNA, 20 nt, Artificial Sequence
  RPE65 RNA guide
gcuaaaggauggagcuugga

SEQ ID NO: 12755 - RNA, 20 nt, Artificial Sequence
  RPE65 RNA guide
gcuaagccccaggugcuacc

SEQ ID NO: 12756 - RNA, 20 nt, Artificial Sequence
  RPE65 RNA guide
gcuaccauuaggacuucuac

SEQ ID NO: 12757 - RNA, 20 nt, Artificial Sequence
  RPE65 RNA guide
gcuacccagccaguaacaau

SEQ ID NO: 12758 - RNA, 20 nt, Artificial Sequence
  RPE65 RNA guide
gcuacuguuguauaucuugg

SEQ ID NO: 12759 - RNA, 20 nt, Artificial Sequence
  RPE65 RNA guide
gcuacuuacccuaggggucu

SEQ ID NO: 12760 - RNA, 20 nt, Artificial Sequence
  RPE65 RNA guide
gcuccacccguuagggacag

SEQ ID NO: 12761 - RNA, 20 nt, Artificial Sequence
  RPE65 RNA guide
gcuccacuguugaauggaga

SEQ ID NO: 12762 - RNA, 20 nt, Artificial Sequence
  RPE65 RNA guide
gcuggcaagcaacugagacu

SEQ ID NO: 12763 - RNA, 20 nt, Artificial Sequence
  RPE65 RNA guide
gcuggguagccuccaagcuc

SEQ ID NO: 12764 - RNA, 20 nt, Artificial Sequence
  RPE65 RNA guide
gcugguauaguauauaucuu

SEQ ID NO: 12765 - RNA, 20 nt, Artificial Sequence
  RPE65 RNA guide
gcuguauacucucagagugc

SEQ ID NO: 12766 - RNA, 20 nt, Artificial Sequence
  RPE65 RNA guide
gcuuagcauccauaauaucu

SEQ ID NO: 12767 - RNA, 20 nt, Artificial Sequence
  RPE65 RNA guide
gcuucauuuccuuacaguga

SEQ ID NO: 12768 - RNA, 20 nt, Artificial Sequence
  RPE65 RNA guide
gcuucccaagauauacaaca

SEQ ID NO: 12769 - RNA, 20 nt, Artificial Sequence
  RPE65 RNA guide
gcuugccagcacagacaagg

SEQ ID NO: 12770 - RNA, 20 nt, Artificial Sequence
  RPE65 RNA guide
gcuuggaggcuacccagcca

SEQ ID NO: 12771 - RNA, 20 nt, Artificial Sequence
  RPE65 RNA guide
ggaaaacaggcaagauauau

SEQ ID NO: 12772 - RNA, 20 nt, Artificial Sequence
  RPE65 RNA guide
ggaaaugaagcuacuguugu

SEQ ID NO: 12773 - RNA, 20 nt, Artificial Sequence
  RPE65 RNA guide
ggaagcacuuggauuaauug

SEQ ID NO: 12774 - RNA, 20 nt, Artificial Sequence
  RPE65 RNA guide
ggaauauuguuacuggcugg

SEQ ID NO: 12775 - RNA, 20 nt, Artificial Sequence
  RPE65 RNA guide
ggacagugguagaaguccua

SEQ ID NO: 12776 - RNA, 20 nt, Artificial Sequence
  RPE65 RNA guide
ggacuucuaccacugucccu

SEQ ID NO: 12777 - RNA, 20 nt, Artificial Sequence
  RPE65 RNA guide
ggacuucuuugggcaguacc

SEQ ID NO: 12778 - RNA, 20 nt, Artificial Sequence
  RPE65 RNA guide
ggagacacuacaacugccuu

SEQ ID NO: 12779 - RNA, 20 nt, Artificial Sequence
  RPE65 RNA guide
ggagauaugaaugaauugau

SEQ ID NO: 12780 - RNA, 20 nt, Artificial Sequence
  RPE65 RNA guide
ggagcccggaauauuguuac

SEQ ID NO: 12781 - RNA, 20 nt, Artificial Sequence
  RPE65 RNA guide
ggagcuuggaggcuacccag

SEQ ID NO: 12782 - RNA, 20 nt, Artificial Sequence
  RPE65 RNA guide
ggaggcuacccagccaguaa

SEQ ID NO: 12783 - RNA, 20 nt, Artificial Sequence
  RPE65 RNA guide
ggaugcuaagccccaggugc

SEQ ID NO: 12784 - RNA, 20 nt, Artificial Sequence
  RPE65 RNA guide
ggauggagcuuggaggcuac

SEQ ID NO: 12785 - RNA, 20 nt, Artificial Sequence
  RPE65 RNA guide
ggauggcuaaaggauggagc

SEQ ID NO: 12786 - RNA, 20 nt, Artificial Sequence
  RPE65 RNA guide
ggaugggcagagauauuaug

SEQ ID NO: 12787 - RNA, 20 nt, Artificial Sequence
  RPE65 RNA guide
ggcaagauauauacuauacc

SEQ ID NO: 12788 - RNA, 20 nt, Artificial Sequence
  RPE65 RNA guide
ggcaagcaacugagacuuaa

SEQ ID NO: 12789 - RNA, 20 nt, Artificial Sequence
  RPE65 RNA guide
ggcacucugagaguauacag

SEQ ID NO: 12790 - RNA, 20 nt, Artificial Sequence
  RPE65 RNA guide
ggcagagauauuauggaugc

SEQ ID NO: 12791 - RNA, 20 nt, Artificial Sequence
  RPE65 RNA guide
ggcaguaccuugucugugcu

SEQ ID NO: 12792 - RNA, 20 nt, Artificial Sequence
  RPE65 RNA guide
ggcaguuguagugucuccau

SEQ ID NO: 12793 - RNA, 20 nt, Artificial Sequence
  RPE65 RNA guide
ggcuaaaggauggagcuugg

SEQ ID NO: 12794 - RNA, 20 nt, Artificial Sequence
  RPE65 RNA guide
ggcuacccagccaguaacaa

SEQ ID NO: 12795 - RNA, 20 nt, Artificial Sequence
  RPE65 RNA guide
ggcuacuuacccuagggguc

SEQ ID NO: 12796 - RNA, 20 nt, Artificial Sequence
  RPE65 RNA guide
ggcuccacccguuagggaca

SEQ ID NO: 12797 - RNA, 20 nt, Artificial Sequence
  RPE65 RNA guide
ggcuccacuguugaauggag

SEQ ID NO: 12798 - RNA, 20 nt, Artificial Sequence
  RPE65 RNA guide
ggcuggguagccuccaagcu

SEQ ID NO: 12799 - RNA, 20 nt, Artificial Sequence
  RPE65 RNA guide
ggcuuagcauccauaauauc

SEQ ID NO: 12800 - RNA, 20 nt, Artificial Sequence
  RPE65 RNA guide
gggaagcacuuggauuaauu

SEQ ID NO: 12801 - RNA, 20 nt, Artificial Sequence
  RPE65 RNA guide
gggacagugguagaaguccu

SEQ ID NO: 12802 - RNA, 20 nt, Artificial Sequence
  RPE65 RNA guide
gggcagagauauuauggaug

SEQ ID NO: 12803 - RNA, 20 nt, Artificial Sequence
  RPE65 RNA guide
gggcaguaccuugucugugc

SEQ ID NO: 12804 - RNA, 20 nt, Artificial Sequence
  RPE65 RNA guide
gggcuccacccguuagggac

SEQ ID NO: 12805 - RNA, 20 nt, Artificial Sequence
  RPE65 RNA guide
gggcuccacuguugaaugga

SEQ ID NO: 12806 - RNA, 20 nt, Artificial Sequence
  RPE65 RNA guide
gggcuuagcauccauaauau

SEQ ID NO: 12807 - RNA, 20 nt, Artificial Sequence
  RPE65 RNA guide
ggggcuuagcauccauaaua

SEQ ID NO: 12808 - RNA, 20 nt, Artificial Sequence
  RPE65 RNA guide
ggggucuucuucaacaaaac

SEQ ID NO: 12809 - RNA, 20 nt, Artificial Sequence
  RPE65 RNA guide
ggguagccuccaagcuccau

SEQ ID NO: 12810 - RNA, 20 nt, Artificial Sequence
  RPE65 RNA guide
gggucuucuucaacaaaacu

SEQ ID NO: 12811 - RNA, 20 nt, Artificial Sequence
  RPE65 RNA guide
gguacugcccaaagaagucc

SEQ ID NO: 12812 - RNA, 20 nt, Artificial Sequence
  RPE65 RNA guide
gguagaaguccuaaugguag

SEQ ID NO: 12813 - RNA, 20 nt, Artificial Sequence
  RPE65 RNA guide
gguagcaccuggggcuuagc

SEQ ID NO: 12814 - RNA, 20 nt, Artificial Sequence
  RPE65 RNA guide
gguagccuccaagcuccauc

SEQ ID NO: 12815 - RNA, 20 nt, Artificial Sequence
  RPE65 RNA guide
gguauaguauauaucuugcc

SEQ ID NO: 12816 - RNA, 20 nt, Artificial Sequence
  RPE65 RNA guide
gguauauguuuggcacucug

SEQ ID NO: 12817 - RNA, 20 nt, Artificial Sequence
  RPE65 RNA guide
ggucuucuucaacaaaacug

SEQ ID NO: 12818 - RNA, 20 nt, Artificial Sequence
  RPE65 RNA guide
ggugcuaccauuaggacuuc

SEQ ID NO: 12819 - RNA, 20 nt, Artificial Sequence
  RPE65 RNA guide
gguuguuagcugguauagua

SEQ ID NO: 12820 - RNA, 20 nt, Artificial Sequence
  RPE65 RNA guide
guaacaauauuccgggcucc

SEQ ID NO: 12821 - RNA, 20 nt, Artificial Sequence
  RPE65 RNA guide
guaaggaaaugaagcuacug

SEQ ID NO: 12822 - RNA, 20 nt, Artificial Sequence
  RPE65 RNA guide
guaccuugucugugcuggca

SEQ ID NO: 12823 - RNA, 20 nt, Artificial Sequence
  RPE65 RNA guide
guacugcccaaagaaguccu

SEQ ID NO: 12824 - RNA, 20 nt, Artificial Sequence
  RPE65 RNA guide
guagaaguccuaaugguagc

SEQ ID NO: 12825 - RNA, 20 nt, Artificial Sequence
  RPE65 RNA guide
guagcaccuggggcuuagca

SEQ ID NO: 12826 - RNA, 20 nt, Artificial Sequence
  RPE65 RNA guide
guagccuccaagcuccaucc

SEQ ID NO: 12827 - RNA, 20 nt, Artificial Sequence
  RPE65 RNA guide
guagcuucauuuccuuacag

SEQ ID NO: 12828 - RNA, 20 nt, Artificial Sequence
  RPE65 RNA guide
guagugucuccauucaacag

SEQ ID NO: 12829 - RNA, 20 nt, Artificial Sequence
  RPE65 RNA guide
guauacucucagagugccaa

SEQ ID NO: 12830 - RNA, 20 nt, Artificial Sequence
  RPE65 RNA guide
guauauaucuugccuguuuu

SEQ ID NO: 12831 - RNA, 20 nt, Artificial Sequence
  RPE65 RNA guide
guauaucuugggaagcacuu

SEQ ID NO: 12832 - RNA, 20 nt, Artificial Sequence
  RPE65 RNA guide
guauauguuuggcacucuga

SEQ ID NO: 12833 - RNA, 20 nt, Artificial Sequence
  RPE65 RNA guide
guccuaaugguagcaccugg

SEQ ID NO: 12834 - RNA, 20 nt, Artificial Sequence
  RPE65 RNA guide
guccuuggaaaacaggcaag

SEQ ID NO: 12835 - RNA, 20 nt, Artificial Sequence
  RPE65 RNA guide
gucucaguugcuugccagca

SEQ ID NO: 12836 - RNA, 20 nt, Artificial Sequence
  RPE65 RNA guide
gucuccauucaacaguggag

SEQ ID NO: 12837 - RNA, 20 nt, Artificial Sequence
  RPE65 RNA guide
gucugugcuggcaagcaacu

SEQ ID NO: 12838 - RNA, 20 nt, Artificial Sequence
  RPE65 RNA guide
gugcuaccauuaggacuucu

SEQ ID NO: 12839 - RNA, 20 nt, Artificial Sequence
  RPE65 RNA guide
gugcuggcaagcaacugaga

SEQ ID NO: 12840 - RNA, 20 nt, Artificial Sequence
  RPE65 RNA guide
gugcuucccaagauauacaa

SEQ ID NO: 12841 - RNA, 20 nt, Artificial Sequence
  RPE65 RNA guide
guggagcccggaauauuguu

SEQ ID NO: 12842 - RNA, 20 nt, Artificial Sequence
  RPE65 RNA guide
gugguagaaguccuaauggu

SEQ ID NO: 12843 - RNA, 20 nt, Artificial Sequence
  RPE65 RNA guide
gugucuccauucaacagugg

SEQ ID NO: 12844 - RNA, 20 nt, Artificial Sequence
  RPE65 RNA guide
guuaagguuguuagcuggua

SEQ ID NO: 12845 - RNA, 20 nt, Artificial Sequence
  RPE65 RNA guide
guuacuggcuggguagccuc

SEQ ID NO: 12846 - RNA, 20 nt, Artificial Sequence
  RPE65 RNA guide
guuagggacagugguagaag

SEQ ID NO: 12847 - RNA, 20 nt, Artificial Sequence
  RPE65 RNA guide
guugaagaagaccccuaggg

SEQ ID NO: 12848 - RNA, 20 nt, Artificial Sequence
  RPE65 RNA guide
guugaauggagacacuacaa

SEQ ID NO: 12849 - RNA, 20 nt, Artificial Sequence
  RPE65 RNA guide
guugcuugccagcacagaca

SEQ ID NO: 12850 - RNA, 20 nt, Artificial Sequence
  RPE65 RNA guide
guuguagugucuccauucaa

SEQ ID NO: 12851 - RNA, 20 nt, Artificial Sequence
  RPE65 RNA guide
guuguauaucuugggaagca

SEQ ID NO: 12852 - RNA, 20 nt, Artificial Sequence
  RPE65 RNA guide
guuuggcacucugagaguau

SEQ ID NO: 12853 - RNA, 20 nt, Artificial Sequence
  RPE65 RNA guide
guuuuccaaggacuucuuug

SEQ ID NO: 12854 - RNA, 20 nt, Artificial Sequence
  RPE65 RNA guide
guuuuguugaagaagacccc

SEQ ID NO: 12855 - RNA, 20 nt, Artificial Sequence
  RPE65 RNA guide
uaaaggauggagcuuggagg

SEQ ID NO: 12856 - RNA, 20 nt, Artificial Sequence
  RPE65 RNA guide
uaaauuuagugugcaguuau

SEQ ID NO: 12857 - RNA, 20 nt, Artificial Sequence
  RPE65 RNA guide
uaacaauauuccgggcucca

SEQ ID NO: 12858 - RNA, 20 nt, Artificial Sequence
  RPE65 RNA guide
uaacaauuaauccaagugcu

SEQ ID NO: 12859 - RNA, 20 nt, Artificial Sequence
  RPE65 RNA guide
uaagccccaggugcuaccau

SEQ ID NO: 12860 - RNA, 20 nt, Artificial Sequence
  RPE65 RNA guide
uaaggaaaugaagcuacugu

SEQ ID NO: 12861 - RNA, 20 nt, Artificial Sequence
  RPE65 RNA guide
uaagguuguuagcugguaua

SEQ ID NO: 12862 - RNA, 20 nt, Artificial Sequence
  RPE65 RNA guide
uaagucucaguugcuugcca

SEQ ID NO: 12863 - RNA, 20 nt, Artificial Sequence
  RPE65 RNA guide
uaauaucucugcccauccaa

SEQ ID NO: 12864 - RNA, 20 nt, Artificial Sequence
  RPE65 RNA guide
uaauccaagugcuucccaag

SEQ ID NO: 12865 - RNA, 20 nt, Artificial Sequence
  RPE65 RNA guide
uaaugguagcaccuggggcu

SEQ ID NO: 12866 - RNA, 20 nt, Artificial Sequence
  RPE65 RNA guide
uacaacaguagcuucauuuc

SEQ ID NO: 12867 - RNA, 20 nt, Artificial Sequence
  RPE65 RNA guide
uacaacugccuuggaugggc

SEQ ID NO: 12868 - RNA, 20 nt, Artificial Sequence
  RPE65 RNA guide
uacagugagggcauaggcau

SEQ ID NO: 12869 - RNA, 20 nt, Artificial Sequence
  RPE65 RNA guide
uacaguuuuguugaagaaga

SEQ ID NO: 12870 - RNA, 20 nt, Artificial Sequence
  RPE65 RNA guide
uaccacugucccuaacgggu

SEQ ID NO: 12871 - RNA, 20 nt, Artificial Sequence
  RPE65 RNA guide
uaccagcuaacaaccuuaac

SEQ ID NO: 12872 - RNA, 20 nt, Artificial Sequence
  RPE65 RNA guide
uaccauuaggacuucuacca

SEQ ID NO: 12873 - RNA, 20 nt, Artificial Sequence
  RPE65 RNA guide
uacccagccaguaacaauau

SEQ ID NO: 12874 - RNA, 20 nt, Artificial Sequence
  RPE65 RNA guide
uacccuaggggucuucuuca

SEQ ID NO: 12875 - RNA, 20 nt, Artificial Sequence
  RPE65 RNA guide
uaccuugucugugcuggcaa

SEQ ID NO: 12876 - RNA, 20 nt, Artificial Sequence
  RPE65 RNA guide
uacuauaccagcuaacaacc

SEQ ID NO: 12877 - RNA, 20 nt, Artificial Sequence
  RPE65 RNA guide
uacucucagagugccaaaca

SEQ ID NO: 12878 - RNA, 20 nt, Artificial Sequence
  RPE65 RNA guide
uacucuuucauuaagucuca

SEQ ID NO: 12879 - RNA, 20 nt, Artificial Sequence
  RPE65 RNA guide
uacugcccaaagaaguccuu

SEQ ID NO: 12880 - RNA, 20 nt, Artificial Sequence
  RPE65 RNA guide
uacuggcuggguagccucca

SEQ ID NO: 12881 - RNA, 20 nt, Artificial Sequence
  RPE65 RNA guide
uacuguuguauaucuuggga

SEQ ID NO: 12882 - RNA, 20 nt, Artificial Sequence
  RPE65 RNA guide
uacuuacccuaggggucuuc

SEQ ID NO: 12883 - RNA, 20 nt, Artificial Sequence
  RPE65 RNA guide
uagaaguccuaaugguagca

SEQ ID NO: 12884 - RNA, 20 nt, Artificial Sequence
  RPE65 RNA guide
uagcaccuggggcuuagcau

SEQ ID NO: 12885 - RNA, 20 nt, Artificial Sequence
  RPE65 RNA guide
uagcauccauaauaucucug

SEQ ID NO: 12886 - RNA, 20 nt, Artificial Sequence
  RPE65 RNA guide
uagccuccaagcuccauccu

SEQ ID NO: 12887 - RNA, 20 nt, Artificial Sequence
  RPE65 RNA guide
uagcugguauaguauauauc

SEQ ID NO: 12888 - RNA, 20 nt, Artificial Sequence
  RPE65 RNA guide
uagcuucauuuccuuacagu

SEQ ID NO: 12889 - RNA, 20 nt, Artificial Sequence
  RPE65 RNA guide
uaggacuucuaccacugucc

SEQ ID NO: 12890 - RNA, 20 nt, Artificial Sequence
  RPE65 RNA guide
uagggacagugguagaaguc

SEQ ID NO: 12891 - RNA, 20 nt, Artificial Sequence
  RPE65 RNA guide
uaggggucuucuucaacaaa

SEQ ID NO: 12892 - RNA, 20 nt, Artificial Sequence
  RPE65 RNA guide
uaguauauaucuugccuguu

SEQ ID NO: 12893 - RNA, 20 nt, Artificial Sequence
  RPE65 RNA guide
uagugucuccauucaacagu

SEQ ID NO: 12894 - RNA, 20 nt, Artificial Sequence
  RPE65 RNA guide
uauacaacaguagcuucauu

SEQ ID NO: 12895 - RNA, 20 nt, Artificial Sequence
  RPE65 RNA guide
uauacaguuuuguugaagaa

SEQ ID NO: 12896 - RNA, 20 nt, Artificial Sequence
  RPE65 RNA guide
uauaccagcuaacaaccuua

SEQ ID NO: 12897 - RNA, 20 nt, Artificial Sequence
  RPE65 RNA guide
uauacuauaccagcuaacaa

SEQ ID NO: 12898 - RNA, 20 nt, Artificial Sequence
  RPE65 RNA guide
uauacucucagagugccaaa

SEQ ID NO: 12899 - RNA, 20 nt, Artificial Sequence
  RPE65 RNA guide
uauauacuauaccagcuaac

SEQ ID NO: 12900 - RNA, 20 nt, Artificial Sequence
  RPE65 RNA guide
uauauaucuugccuguuuuc

SEQ ID NO: 12901 - RNA, 20 nt, Artificial Sequence
  RPE65 RNA guide
uauaucuugccuguuuucca

SEQ ID NO: 12902 - RNA, 20 nt, Artificial Sequence
  RPE65 RNA guide
uauaucuugggaagcacuug

SEQ ID NO: 12903 - RNA, 20 nt, Artificial Sequence
  RPE65 RNA guide
uauauguuuggcacucugag

SEQ ID NO: 12904 - RNA, 20 nt, Artificial Sequence
  RPE65 RNA guide
uaucucugcccauccaaggc

SEQ ID NO: 12905 - RNA, 20 nt, Artificial Sequence
  RPE65 RNA guide
uaucuugccuguuuuccaag

SEQ ID NO: 12906 - RNA, 20 nt, Artificial Sequence
  RPE65 RNA guide
uaucuugggaagcacuugga

SEQ ID NO: 12907 - RNA, 20 nt, Artificial Sequence
  RPE65 RNA guide
uaugcccucacuguaaggaa

SEQ ID NO: 12908 - RNA, 20 nt, Artificial Sequence
  RPE65 RNA guide
uauggaugcuaagccccagg

SEQ ID NO: 12909 - RNA, 20 nt, Artificial Sequence
  RPE65 RNA guide
uauguuuggcacucugagag

SEQ ID NO: 12910 - RNA, 20 nt, Artificial Sequence
  RPE65 RNA guide
uauuauggaugcuaagcccc

SEQ ID NO: 12911 - RNA, 20 nt, Artificial Sequence
  RPE65 RNA guide
uauuccgggcuccacuguug

SEQ ID NO: 12912 - RNA, 20 nt, Artificial Sequence
  RPE65 RNA guide
uauuguuacuggcuggguag

SEQ ID NO: 12913 - RNA, 20 nt, Artificial Sequence
  RPE65 RNA guide
ucaacaguggagcccggaau

SEQ ID NO: 12914 - RNA, 20 nt, Artificial Sequence
  RPE65 RNA guide
ucacaugccuaugcccucac

SEQ ID NO: 12915 - RNA, 20 nt, Artificial Sequence
  RPE65 RNA guide
ucacuguaaggaaaugaagc

SEQ ID NO: 12916 - RNA, 20 nt, Artificial Sequence
  RPE65 RNA guide
ucagagugccaaacauauac

SEQ ID NO: 12917 - RNA, 20 nt, Artificial Sequence
  RPE65 RNA guide
ucaguugcuugccagcacag

SEQ ID NO: 12918 - RNA, 20 nt, Artificial Sequence
  RPE65 RNA guide
ucauuaagucucaguugcuu

SEQ ID NO: 12919 - RNA, 20 nt, Artificial Sequence
  RPE65 RNA guide
ucauuuccuuacagugaggg

SEQ ID NO: 12920 - RNA, 20 nt, Artificial Sequence
  RPE65 RNA guide
uccaagcuccauccuuuagc

SEQ ID NO: 12921 - RNA, 20 nt, Artificial Sequence
  RPE65 RNA guide
uccaaggacuucuuugggca

SEQ ID NO: 12922 - RNA, 20 nt, Artificial Sequence
  RPE65 RNA guide
uccaaggcaguuguaguguc

SEQ ID NO: 12923 - RNA, 20 nt, Artificial Sequence
  RPE65 RNA guide
uccaagugcuucccaagaua

SEQ ID NO: 12924 - RNA, 20 nt, Artificial Sequence
  RPE65 RNA guide
uccaauacucuuucauuaag

SEQ ID NO: 12925 - RNA, 20 nt, Artificial Sequence
  RPE65 RNA guide
uccacccguuagggacagug

SEQ ID NO: 12926 - RNA, 20 nt, Artificial Sequence
  RPE65 RNA guide
uccacuguugaauggagaca

SEQ ID NO: 12927 - RNA, 20 nt, Artificial Sequence
  RPE65 RNA guide
uccauaauaucucugcccau

SEQ ID NO: 12928 - RNA, 20 nt, Artificial Sequence
  RPE65 RNA guide
uccauucaacaguggagccc

SEQ ID NO: 12929 - RNA, 20 nt, Artificial Sequence
  RPE65 RNA guide
uccauugguauauguuuggc

SEQ ID NO: 12930 - RNA, 20 nt, Artificial Sequence
  RPE65 RNA guide
ucccaagauauacaacagua

SEQ ID NO: 12931 - RNA, 20 nt, Artificial Sequence
  RPE65 RNA guide
uccgggcuccacuguugaau

SEQ ID NO: 12932 - RNA, 20 nt, Artificial Sequence
  RPE65 RNA guide
uccuaaugguagcaccuggg

SEQ ID NO: 12933 - RNA, 20 nt, Artificial Sequence
  RPE65 RNA guide
uccuuacagugagggcauag

SEQ ID NO: 12934 - RNA, 20 nt, Artificial Sequence
  RPE65 RNA guide
uccuuggaaaacaggcaaga

SEQ ID NO: 12935 - RNA, 20 nt, Artificial Sequence
  RPE65 RNA guide
ucuaccacugucccuaacgg

SEQ ID NO: 12936 - RNA, 20 nt, Artificial Sequence
  RPE65 RNA guide
ucucagagugccaaacauau

SEQ ID NO: 12937 - RNA, 20 nt, Artificial Sequence
  RPE65 RNA guide
ucucaguugcuugccagcac

SEQ ID NO: 12938 - RNA, 20 nt, Artificial Sequence
  RPE65 RNA guide
ucuccaauacucuuucauua

SEQ ID NO: 12939 - RNA, 20 nt, Artificial Sequence
  RPE65 RNA guide
ucuccauucaacaguggagc

SEQ ID NO: 12940 - RNA, 20 nt, Artificial Sequence
  RPE65 RNA guide
ucucugcccauccaaggcag

SEQ ID NO: 12941 - RNA, 20 nt, Artificial Sequence
  RPE65 RNA guide
ucugagaguauacagcauca

SEQ ID NO: 12942 - RNA, 20 nt, Artificial Sequence
  RPE65 RNA guide
ucugcccauccaaggcaguu

SEQ ID NO: 12943 - RNA, 20 nt, Artificial Sequence
  RPE65 RNA guide
ucugugcuggcaagcaacug

SEQ ID NO: 12944 - RNA, 20 nt, Artificial Sequence
  RPE65 RNA guide
ucuugccuguuuuccaagga

SEQ ID NO: 12945 - RNA, 20 nt, Artificial Sequence
  RPE65 RNA guide
ucuugggaagcacuuggauu

SEQ ID NO: 12946 - RNA, 20 nt, Artificial Sequence
  RPE65 RNA guide
ucuuucauuaagucucaguu

SEQ ID NO: 12947 - RNA, 20 nt, Artificial Sequence
  RPE65 RNA guide
ucuuugggcaguaccuuguc

SEQ ID NO: 12948 - RNA, 20 nt, Artificial Sequence
  RPE65 RNA guide
ugaagaagaccccuagggua

SEQ ID NO: 12949 - RNA, 20 nt, Artificial Sequence
  RPE65 RNA guide
ugaagcuacuguuguauauc

SEQ ID NO: 12950 - RNA, 20 nt, Artificial Sequence
  RPE65 RNA guide
ugaaugaauugaugcuguau

SEQ ID NO: 12951 - RNA, 20 nt, Artificial Sequence
  RPE65 RNA guide
ugaauggagacacuacaacu

SEQ ID NO: 12952 - RNA, 20 nt, Artificial Sequence
  RPE65 RNA guide
ugaauugaugcuguauacuc

SEQ ID NO: 12953 - RNA, 20 nt, Artificial Sequence
  RPE65 RNA guide
ugagacuuaaugaaagagua

SEQ ID NO: 12954 - RNA, 20 nt, Artificial Sequence
  RPE65 RNA guide
ugagaguauacagcaucaau

SEQ ID NO: 12955 - RNA, 20 nt, Artificial Sequence
  RPE65 RNA guide
ugaugcuguauacucucaga

SEQ ID NO: 12956 - RNA, 20 nt, Artificial Sequence
  RPE65 RNA guide
ugccagcacagacaagguac

SEQ ID NO: 12957 - RNA, 20 nt, Artificial Sequence
  RPE65 RNA guide
ugcccaaagaaguccuugga

SEQ ID NO: 12958 - RNA, 20 nt, Artificial Sequence
  RPE65 RNA guide
ugcccauccaaggcaguugu

SEQ ID NO: 12959 - RNA, 20 nt, Artificial Sequence
  RPE65 RNA guide
ugcccucacuguaaggaaau

SEQ ID NO: 12960 - RNA, 20 nt, Artificial Sequence
  RPE65 RNA guide
ugccuaugcccucacuguaa

SEQ ID NO: 12961 - RNA, 20 nt, Artificial Sequence
  RPE65 RNA guide
ugccuguuuuccaaggacuu

SEQ ID NO: 12962 - RNA, 20 nt, Artificial Sequence
  RPE65 RNA guide
ugccuuggaugggcagagau

SEQ ID NO: 12963 - RNA, 20 nt, Artificial Sequence
  RPE65 RNA guide
ugcuaagccccaggugcuac

SEQ ID NO: 12964 - RNA, 20 nt, Artificial Sequence
  RPE65 RNA guide
ugcuaccauuaggacuucua

SEQ ID NO: 12965 - RNA, 20 nt, Artificial Sequence
  RPE65 RNA guide
ugcuggcaagcaacugagac

SEQ ID NO: 12966 - RNA, 20 nt, Artificial Sequence
  RPE65 RNA guide
ugcuguauacucucagagug

SEQ ID NO: 12967 - RNA, 20 nt, Artificial Sequence
  RPE65 RNA guide
ugcuucccaagauauacaac

SEQ ID NO: 12968 - RNA, 20 nt, Artificial Sequence
  RPE65 RNA guide
ugcuugccagcacagacaag

SEQ ID NO: 12969 - RNA, 20 nt, Artificial Sequence
  RPE65 RNA guide
uggaaaacaggcaagauaua

SEQ ID NO: 12970 - RNA, 20 nt, Artificial Sequence
  RPE65 RNA guide
uggagacacuacaacugccu

SEQ ID NO: 12971 - RNA, 20 nt, Artificial Sequence
  RPE65 RNA guide
uggagauaugaaugaauuga

SEQ ID NO: 12972 - RNA, 20 nt, Artificial Sequence
  RPE65 RNA guide
uggagcccggaauauuguua

SEQ ID NO: 12973 - RNA, 20 nt, Artificial Sequence
  RPE65 RNA guide
uggagcuuggaggcuaccca

SEQ ID NO: 12974 - RNA, 20 nt, Artificial Sequence
  RPE65 RNA guide
uggaggcuacccagccagua

SEQ ID NO: 12975 - RNA, 20 nt, Artificial Sequence
  RPE65 RNA guide
uggaugcuaagccccaggug

SEQ ID NO: 12976 - RNA, 20 nt, Artificial Sequence
  RPE65 RNA guide
uggaugggcagagauauuau

SEQ ID NO: 12977 - RNA, 20 nt, Artificial Sequence
  RPE65 RNA guide
uggcaagcaacugagacuua

SEQ ID NO: 12978 - RNA, 20 nt, Artificial Sequence
  RPE65 RNA guide
uggcacucugagaguauaca

SEQ ID NO: 12979 - RNA, 20 nt, Artificial Sequence
  RPE65 RNA guide
uggcuaaaggauggagcuug

SEQ ID NO: 12980 - RNA, 20 nt, Artificial Sequence
  RPE65 RNA guide
uggcuacuuacccuaggggu

SEQ ID NO: 12981 - RNA, 20 nt, Artificial Sequence
  RPE65 RNA guide
uggcuggguagccuccaagc

SEQ ID NO: 12982 - RNA, 20 nt, Artificial Sequence
  RPE65 RNA guide
ugggaagcacuuggauuaau

SEQ ID NO: 12983 - RNA, 20 nt, Artificial Sequence
  RPE65 RNA guide
ugggcagagauauuauggau

SEQ ID NO: 12984 - RNA, 20 nt, Artificial Sequence
  RPE65 RNA guide
ugggcaguaccuugucugug

SEQ ID NO: 12985 - RNA, 20 nt, Artificial Sequence
  RPE65 RNA guide
uggggcuuagcauccauaau

SEQ ID NO: 12986 - RNA, 20 nt, Artificial Sequence
  RPE65 RNA guide
uggguagccuccaagcucca

SEQ ID NO: 12987 - RNA, 20 nt, Artificial Sequence
  RPE65 RNA guide
ugguagaaguccuaauggua

SEQ ID NO: 12988 - RNA, 20 nt, Artificial Sequence
  RPE65 RNA guide
ugguagcaccuggggcuuag

SEQ ID NO: 12989 - RNA, 20 nt, Artificial Sequence
  RPE65 RNA guide
ugguauaguauauaucuugc

SEQ ID NO: 12990 - RNA, 20 nt, Artificial Sequence
  RPE65 RNA guide
ugguauauguuuggcacucu

SEQ ID NO: 12991 - RNA, 20 nt, Artificial Sequence
  RPE65 RNA guide
uguaaggaaaugaagcuacu

SEQ ID NO: 12992 - RNA, 20 nt, Artificial Sequence
  RPE65 RNA guide
uguagugucuccauucaaca

SEQ ID NO: 12993 - RNA, 20 nt, Artificial Sequence
  RPE65 RNA guide
uguauacucucagagugcca

SEQ ID NO: 12994 - RNA, 20 nt, Artificial Sequence
  RPE65 RNA guide
uguauaucuugggaagcacu

SEQ ID NO: 12995 - RNA, 20 nt, Artificial Sequence
  RPE65 RNA guide
ugucuccauucaacagugga

SEQ ID NO: 12996 - RNA, 20 nt, Artificial Sequence
  RPE65 RNA guide
ugucugugcuggcaagcaac

SEQ ID NO: 12997 - RNA, 20 nt, Artificial Sequence
  RPE65 RNA guide
ugugcuggcaagcaacugag

SEQ ID NO: 12998 - RNA, 20 nt, Artificial Sequence
  RPE65 RNA guide
uguuaagguuguuagcuggu

SEQ ID NO: 12999 - RNA, 20 nt, Artificial Sequence
  RPE65 RNA guide
uguuacuggcuggguagccu

SEQ ID NO: 13000 - RNA, 20 nt, Artificial Sequence
  RPE65 RNA guide
uguugaagaagaccccuagg

SEQ ID NO: 13001 - RNA, 20 nt, Artificial Sequence
  RPE65 RNA guide
uguugaauggagacacuaca

SEQ ID NO: 13002 - RNA, 20 nt, Artificial Sequence
  RPE65 RNA guide
uguuguauaucuugggaagc

SEQ ID NO: 13003 - RNA, 20 nt, Artificial Sequence
  RPE65 RNA guide
uguuuggcacucugagagua

SEQ ID NO: 13004 - RNA, 20 nt, Artificial Sequence
  RPE65 RNA guide
uguuuuccaaggacuucuuu

SEQ ID NO: 13005 - RNA, 20 nt, Artificial Sequence
  RPE65 RNA guide
uuaaauuuagugugcaguua

SEQ ID NO: 13006 - RNA, 20 nt, Artificial Sequence
  RPE65 RNA guide
uuaagguuguuagcugguau

SEQ ID NO: 13007 - RNA, 20 nt, Artificial Sequence
  RPE65 RNA guide
uuaagucucaguugcuugcc

SEQ ID NO: 13008 - RNA, 20 nt, Artificial Sequence
  RPE65 RNA guide
uuaauccaagugcuucccaa

SEQ ID NO: 13009 - RNA, 20 nt, Artificial Sequence
  RPE65 RNA guide
uuacagugagggcauaggca

SEQ ID NO: 13010 - RNA, 20 nt, Artificial Sequence
  RPE65 RNA guide
uuacccuaggggucuucuuc

SEQ ID NO: 13011 - RNA, 20 nt, Artificial Sequence
  RPE65 RNA guide
uuacuggcuggguagccucc

SEQ ID NO: 13012 - RNA, 20 nt, Artificial Sequence
  RPE65 RNA guide
uuagcauccauaauaucucu

SEQ ID NO: 13013 - RNA, 20 nt, Artificial Sequence
  RPE65 RNA guide
uuaggacuucuaccacuguc

SEQ ID NO: 13014 - RNA, 20 nt, Artificial Sequence
  RPE65 RNA guide
uuagggacagugguagaagu

SEQ ID NO: 13015 - RNA, 20 nt, Artificial Sequence
  RPE65 RNA guide
uuauggaugcuaagccccag

SEQ ID NO: 13016 - RNA, 20 nt, Artificial Sequence
  RPE65 RNA guide
uucaacaguggagcccggaa

SEQ ID NO: 13017 - RNA, 20 nt, Artificial Sequence
  RPE65 RNA guide
uucauuaagucucaguugcu

SEQ ID NO: 13018 - RNA, 20 nt, Artificial Sequence
  RPE65 RNA guide
uucauuuccuuacagugagg

SEQ ID NO: 13019 - RNA, 20 nt, Artificial Sequence
  RPE65 RNA guide
uuccaaggacuucuuugggc

SEQ ID NO: 13020 - RNA, 20 nt, Artificial Sequence
  RPE65 RNA guide
uucccaagauauacaacagu

SEQ ID NO: 13021 - RNA, 20 nt, Artificial Sequence
  RPE65 RNA guide
uuccgggcuccacuguugaa

SEQ ID NO: 13022 - RNA, 20 nt, Artificial Sequence
  RPE65 RNA guide
uuccuuacagugagggcaua

SEQ ID NO: 13023 - RNA, 20 nt, Artificial Sequence
  RPE65 RNA guide
uucuaccacugucccuaacg

SEQ ID NO: 13024 - RNA, 20 nt, Artificial Sequence
  RPE65 RNA guide
uucuuugggcaguaccuugu

SEQ ID NO: 13025 - RNA, 20 nt, Artificial Sequence
  RPE65 RNA guide
uugaagaagaccccuagggu

SEQ ID NO: 13026 - RNA, 20 nt, Artificial Sequence
  RPE65 RNA guide
uugaauggagacacuacaac

SEQ ID NO: 13027 - RNA, 20 nt, Artificial Sequence
  RPE65 RNA guide
uugaugcuguauacucucag

SEQ ID NO: 13028 - RNA, 20 nt, Artificial Sequence
  RPE65 RNA guide
uugccagcacagacaaggua

SEQ ID NO: 13029 - RNA, 20 nt, Artificial Sequence
  RPE65 RNA guide
uugccuguuuuccaaggacu

SEQ ID NO: 13030 - RNA, 20 nt, Artificial Sequence
  RPE65 RNA guide
uugcuugccagcacagacaa

SEQ ID NO: 13031 - RNA, 20 nt, Artificial Sequence
  RPE65 RNA guide
uuggaaaacaggcaagauau

SEQ ID NO: 13032 - RNA, 20 nt, Artificial Sequence
  RPE65 RNA guide
uuggagauaugaaugaauug

SEQ ID NO: 13033 - RNA, 20 nt, Artificial Sequence
  RPE65 RNA guide
uuggaggcuacccagccagu

SEQ ID NO: 13034 - RNA, 20 nt, Artificial Sequence
  RPE65 RNA guide
uuggaugggcagagauauua

SEQ ID NO: 13035 - RNA, 20 nt, Artificial Sequence
  RPE65 RNA guide
uuggcacucugagaguauac

SEQ ID NO: 13036 - RNA, 20 nt, Artificial Sequence
  RPE65 RNA guide
uugggaagcacuuggauuaa

SEQ ID NO: 13037 - RNA, 20 nt, Artificial Sequence
  RPE65 RNA guide
uugggcaguaccuugucugu

SEQ ID NO: 13038 - RNA, 20 nt, Artificial Sequence
  RPE65 RNA guide
uugguauauguuuggcacuc

SEQ ID NO: 13039 - RNA, 20 nt, Artificial Sequence
  RPE65 RNA guide
uuguagugucuccauucaac

SEQ ID NO: 13040 - RNA, 20 nt, Artificial Sequence
  RPE65 RNA guide
uuguauaucuugggaagcac

SEQ ID NO: 13041 - RNA, 20 nt, Artificial Sequence
  RPE65 RNA guide
uugucugugcuggcaagcaa

SEQ ID NO: 13042 - RNA, 20 nt, Artificial Sequence
  RPE65 RNA guide
uuguuacuggcuggguagcc

SEQ ID NO: 13043 - RNA, 20 nt, Artificial Sequence
  RPE65 RNA guide
uuguugaagaagaccccuag

SEQ ID NO: 13044 - RNA, 20 nt, Artificial Sequence
  RPE65 RNA guide
uuucauuaagucucaguugc

SEQ ID NO: 13045 - RNA, 20 nt, Artificial Sequence
  RPE65 RNA guide
uuuccaaggacuucuuuggg

SEQ ID NO: 13046 - RNA, 20 nt, Artificial Sequence
  RPE65 RNA guide
uuuccuuacagugagggcau

SEQ ID NO: 13047 - RNA, 20 nt, Artificial Sequence
  RPE65 RNA guide
uuuggcacucugagaguaua

SEQ ID NO: 13048 - RNA, 20 nt, Artificial Sequence
  RPE65 RNA guide
uuugggcaguaccuugucug

SEQ ID NO: 13049 - RNA, 20 nt, Artificial Sequence
  RPE65 RNA guide
uuuguugaagaagaccccua

SEQ ID NO: 13050 - RNA, 20 nt, Artificial Sequence
  RPE65 RNA guide
uuuuccaaggacuucuuugg

SEQ ID NO: 13051 - RNA, 20 nt, Artificial Sequence
  RPE65 RNA guide
uuuuguugaagaagaccccu

SEQ ID NO: 13052 - RNA, 21 nt, Artificial Sequence
  RPE65 RNA guide
aaaaaauguuaagguuguuag

SEQ ID NO: 13053 - RNA, 21 nt, Artificial Sequence
  RPE65 RNA guide
aaaaauguuaagguuguuagc

SEQ ID NO: 13054 - RNA, 21 nt, Artificial Sequence
  RPE65 RNA guide
aaaauguuaagguuguuagcu

SEQ ID NO: 13055 - RNA, 21 nt, Artificial Sequence
  RPE65 RNA guide
aaacaggcaagauauauacua

SEQ ID NO: 13056 - RNA, 21 nt, Artificial Sequence
  RPE65 RNA guide
aaagaaguccuuggaaaacag

SEQ ID NO: 13057 - RNA, 21 nt, Artificial Sequence
  RPE65 RNA guide
aaaggauggagcuuggaggcu

SEQ ID NO: 13058 - RNA, 21 nt, Artificial Sequence
  RPE65 RNA guide
aaauguuaagguuguuagcug

SEQ ID NO: 13059 - RNA, 21 nt, Artificial Sequence
  RPE65 RNA guide
aacaauauuccgggcuccacu

SEQ ID NO: 13060 - RNA, 21 nt, Artificial Sequence
  RPE65 RNA guide
aacaauuaauccaagugcuuc

SEQ ID NO: 13061 - RNA, 21 nt, Artificial Sequence
  RPE65 RNA guide
aacaggcaagauauauacuau

SEQ ID NO: 13062 - RNA, 21 nt, Artificial Sequence
  RPE65 RNA guide
aacaguagcuucauuuccuua

SEQ ID NO: 13063 - RNA, 21 nt, Artificial Sequence
  RPE65 RNA guide
aacaguggagcccggaauauu

SEQ ID NO: 13064 - RNA, 21 nt, Artificial Sequence
  RPE65 RNA guide
aacugccuuggaugggcagag

SEQ ID NO: 13065 - RNA, 21 nt, Artificial Sequence
  RPE65 RNA guide
aagaagaccccuaggguaagu

SEQ ID NO: 13066 - RNA, 21 nt, Artificial Sequence
  RPE65 RNA guide
aagaaguccuuggaaaacagg

SEQ ID NO: 13067 - RNA, 21 nt, Artificial Sequence
  RPE65 RNA guide
aagcaacugagacuuaaugaa

SEQ ID NO: 13068 - RNA, 21 nt, Artificial Sequence
  RPE65 RNA guide
aagccccaggugcuaccauua

SEQ ID NO: 13069 - RNA, 21 nt, Artificial Sequence
  RPE65 RNA guide
aagcuacuguuguauaucuug

SEQ ID NO: 13070 - RNA, 21 nt, Artificial Sequence
  RPE65 RNA guide
aaggaaaugaagcuacuguug

SEQ ID NO: 13071 - RNA, 21 nt, Artificial Sequence
  RPE65 RNA guide
aaggacuucuuugggcaguac

SEQ ID NO: 13072 - RNA, 21 nt, Artificial Sequence
  RPE65 RNA guide
aaggauggagcuuggaggcua

SEQ ID NO: 13073 - RNA, 21 nt, Artificial Sequence
  RPE65 RNA guide
aaggcaguuguagugucucca

SEQ ID NO: 13074 - RNA, 21 nt, Artificial Sequence
  RPE65 RNA guide
aagguacugcccaaagaaguc

SEQ ID NO: 13075 - RNA, 21 nt, Artificial Sequence
  RPE65 RNA guide
aagguuguuagcugguauagu

SEQ ID NO: 13076 - RNA, 21 nt, Artificial Sequence
  RPE65 RNA guide
aaguccuaaugguagcaccug

SEQ ID NO: 13077 - RNA, 21 nt, Artificial Sequence
  RPE65 RNA guide
aaguccuuggaaaacaggcaa

SEQ ID NO: 13078 - RNA, 21 nt, Artificial Sequence
  RPE65 RNA guide
aagucucaguugcuugccagc

SEQ ID NO: 13079 - RNA, 21 nt, Artificial Sequence
  RPE65 RNA guide
aagugcuucccaagauauaca

SEQ ID NO: 13080 - RNA, 21 nt, Artificial Sequence
  RPE65 RNA guide
aauaucucugcccauccaagg

SEQ ID NO: 13081 - RNA, 21 nt, Artificial Sequence
  RPE65 RNA guide
aauauuccgggcuccacuguu

SEQ ID NO: 13082 - RNA, 21 nt, Artificial Sequence
  RPE65 RNA guide
aauauuguuacuggcugggua

SEQ ID NO: 13083 - RNA, 21 nt, Artificial Sequence
  RPE65 RNA guide
aauccaagugcuucccaagau

SEQ ID NO: 13084 - RNA, 21 nt, Artificial Sequence
  RPE65 RNA guide
aaugaagcuacuguuguauau

SEQ ID NO: 13085 - RNA, 21 nt, Artificial Sequence
  RPE65 RNA guide
aaugaauugaugcuguauacu

SEQ ID NO: 13086 - RNA, 21 nt, Artificial Sequence
  RPE65 RNA guide
aauggagacacuacaacugcc

SEQ ID NO: 13087 - RNA, 21 nt, Artificial Sequence
  RPE65 RNA guide
aaugguagcaccuggggcuua

SEQ ID NO: 13088 - RNA, 21 nt, Artificial Sequence
  RPE65 RNA guide
aauguuaagguuguuagcugg

SEQ ID NO: 13089 - RNA, 21 nt, Artificial Sequence
  RPE65 RNA guide
aauuaauccaagugcuuccca

SEQ ID NO: 13090 - RNA, 21 nt, Artificial Sequence
  RPE65 RNA guide
aauugaugcuguauacucuca

SEQ ID NO: 13091 - RNA, 21 nt, Artificial Sequence
  RPE65 RNA guide
acaacaguagcuucauuuccu

SEQ ID NO: 13092 - RNA, 21 nt, Artificial Sequence
  RPE65 RNA guide
acaacugccuuggaugggcag

SEQ ID NO: 13093 - RNA, 21 nt, Artificial Sequence
  RPE65 RNA guide
acaagguacugcccaaagaag

SEQ ID NO: 13094 - RNA, 21 nt, Artificial Sequence
  RPE65 RNA guide
acaauauuccgggcuccacug

SEQ ID NO: 13095 - RNA, 21 nt, Artificial Sequence
  RPE65 RNA guide
acaauuaauccaagugcuucc

SEQ ID NO: 13096 - RNA, 21 nt, Artificial Sequence
  RPE65 RNA guide
acacuacaacugccuuggaug

SEQ ID NO: 13097 - RNA, 21 nt, Artificial Sequence
  RPE65 RNA guide
acagacaagguacugcccaaa

SEQ ID NO: 13098 - RNA, 21 nt, Artificial Sequence
  RPE65 RNA guide
acagcaucaauucauucauau

SEQ ID NO: 13099 - RNA, 21 nt, Artificial Sequence
  RPE65 RNA guide
acaggcaagauauauacuaua

SEQ ID NO: 13100 - RNA, 21 nt, Artificial Sequence
  RPE65 RNA guide
acaguagcuucauuuccuuac

SEQ ID NO: 13101 - RNA, 21 nt, Artificial Sequence
  RPE65 RNA guide
acaguggagcccggaauauug

SEQ ID NO: 13102 - RNA, 21 nt, Artificial Sequence
  RPE65 RNA guide
acagugguagaaguccuaaug

SEQ ID NO: 13103 - RNA, 21 nt, Artificial Sequence
  RPE65 RNA guide
acaguuuuguugaagaagacc

SEQ ID NO: 13104 - RNA, 21 nt, Artificial Sequence
  RPE65 RNA guide
acaugccuaugcccucacugu

SEQ ID NO: 13105 - RNA, 21 nt, Artificial Sequence
  RPE65 RNA guide
accacugucccuaacgggugg

SEQ ID NO: 13106 - RNA, 21 nt, Artificial Sequence
  RPE65 RNA guide
accagcuaacaaccuuaacau

SEQ ID NO: 13107 - RNA, 21 nt, Artificial Sequence
  RPE65 RNA guide
accauuaggacuucuaccacu

SEQ ID NO: 13108 - RNA, 21 nt, Artificial Sequence
  RPE65 RNA guide
acccagccaguaacaauauuc

SEQ ID NO: 13109 - RNA, 21 nt, Artificial Sequence
  RPE65 RNA guide
acccguuagggacagugguag

SEQ ID NO: 13110 - RNA, 21 nt, Artificial Sequence
  RPE65 RNA guide
acccuaggggucuucuucaac

SEQ ID NO: 13111 - RNA, 21 nt, Artificial Sequence
  RPE65 RNA guide
accuggggcuuagcauccaua

SEQ ID NO: 13112 - RNA, 21 nt, Artificial Sequence
  RPE65 RNA guide
accuugucugugcuggcaagc

SEQ ID NO: 13113 - RNA, 21 nt, Artificial Sequence
  RPE65 RNA guide
acuacaacugccuuggauggg

SEQ ID NO: 13114 - RNA, 21 nt, Artificial Sequence
  RPE65 RNA guide
acuauaccagcuaacaaccuu

SEQ ID NO: 13115 - RNA, 21 nt, Artificial Sequence
  RPE65 RNA guide
acucucagagugccaaacaua

SEQ ID NO: 13116 - RNA, 21 nt, Artificial Sequence
  RPE65 RNA guide
acucugagaguauacagcauc

SEQ ID NO: 13117 - RNA, 21 nt, Artificial Sequence
  RPE65 RNA guide
acucuuucauuaagucucagu

SEQ ID NO: 13118 - RNA, 21 nt, Artificial Sequence
  RPE65 RNA guide
acugagacuuaaugaaagagu

SEQ ID NO: 13119 - RNA, 21 nt, Artificial Sequence
  RPE65 RNA guide
acugcccaaagaaguccuugg

SEQ ID NO: 13120 - RNA, 21 nt, Artificial Sequence
  RPE65 RNA guide
acugccuuggaugggcagaga

SEQ ID NO: 13121 - RNA, 21 nt, Artificial Sequence
  RPE65 RNA guide
acuggcuggguagccuccaag

SEQ ID NO: 13122 - RNA, 21 nt, Artificial Sequence
  RPE65 RNA guide
acuguaaggaaaugaagcuac

SEQ ID NO: 13123 - RNA, 21 nt, Artificial Sequence
  RPE65 RNA guide
acuguauaacaauuaauccaa

SEQ ID NO: 13124 - RNA, 21 nt, Artificial Sequence
  RPE65 RNA guide
acuguugaauggagacacuac

SEQ ID NO: 13125 - RNA, 21 nt, Artificial Sequence
  RPE65 RNA guide
acuguuguauaucuugggaag

SEQ ID NO: 13126 - RNA, 21 nt, Artificial Sequence
  RPE65 RNA guide
acuuacccuaggggucuucuu

SEQ ID NO: 13127 - RNA, 21 nt, Artificial Sequence
  RPE65 RNA guide
acuucuaccacugucccuaac

SEQ ID NO: 13128 - RNA, 21 nt, Artificial Sequence
  RPE65 RNA guide
acuucuuugggcaguaccuug

SEQ ID NO: 13129 - RNA, 21 nt, Artificial Sequence
  RPE65 RNA guide
agaaguccuaaugguagcacc

SEQ ID NO: 13130 - RNA, 21 nt, Artificial Sequence
  RPE65 RNA guide
agaaguccuuggaaaacaggc

SEQ ID NO: 13131 - RNA, 21 nt, Artificial Sequence
  RPE65 RNA guide
agacaagguacugcccaaaga

SEQ ID NO: 13132 - RNA, 21 nt, Artificial Sequence
  RPE65 RNA guide
agacacuacaacugccuugga

SEQ ID NO: 13133 - RNA, 21 nt, Artificial Sequence
  RPE65 RNA guide
agacuuaaugaaagaguauug

SEQ ID NO: 13134 - RNA, 21 nt, Artificial Sequence
  RPE65 RNA guide
agagauauuauggaugcuaag

SEQ ID NO: 13135 - RNA, 21 nt, Artificial Sequence
  RPE65 RNA guide
agaguauacagcaucaauuca

SEQ ID NO: 13136 - RNA, 21 nt, Artificial Sequence
  RPE65 RNA guide
agagugccaaacauauaccaa

SEQ ID NO: 13137 - RNA, 21 nt, Artificial Sequence
  RPE65 RNA guide
agauauacaacaguagcuuca

SEQ ID NO: 13138 - RNA, 21 nt, Artificial Sequence
  RPE65 RNA guide
agauauuauggaugcuaagcc

SEQ ID NO: 13139 - RNA, 21 nt, Artificial Sequence
  RPE65 RNA guide
agcaacugagacuuaaugaaa

SEQ ID NO: 13140 - RNA, 21 nt, Artificial Sequence
  RPE65 RNA guide
agcacagacaagguacugccc

SEQ ID NO: 13141 - RNA, 21 nt, Artificial Sequence
  RPE65 RNA guide
agcaccuggggcuuagcaucc

SEQ ID NO: 13142 - RNA, 21 nt, Artificial Sequence
  RPE65 RNA guide
agcacuuggauuaauuguuau

SEQ ID NO: 13143 - RNA, 21 nt, Artificial Sequence
  RPE65 RNA guide
agcaucaauucauucauaucu

SEQ ID NO: 13144 - RNA, 21 nt, Artificial Sequence
  RPE65 RNA guide
agcauccauaauaucucugcc

SEQ ID NO: 13145 - RNA, 21 nt, Artificial Sequence
  RPE65 RNA guide
agccaguaacaauauuccggg

SEQ ID NO: 13146 - RNA, 21 nt, Artificial Sequence
  RPE65 RNA guide
agccccaggugcuaccauuag

SEQ ID NO: 13147 - RNA, 21 nt, Artificial Sequence
  RPE65 RNA guide
agcccggaauauuguuacugg

SEQ ID NO: 13148 - RNA, 21 nt, Artificial Sequence
  RPE65 RNA guide
agccuccaagcuccauccuuu

SEQ ID NO: 13149 - RNA, 21 nt, Artificial Sequence
  RPE65 RNA guide
agcuacuguuguauaucuugg

SEQ ID NO: 13150 - RNA, 21 nt, Artificial Sequence
  RPE65 RNA guide
agcugguauaguauauaucuu

SEQ ID NO: 13151 - RNA, 21 nt, Artificial Sequence
  RPE65 RNA guide
agcuucauuuccuuacaguga

SEQ ID NO: 13152 - RNA, 21 nt, Artificial Sequence
  RPE65 RNA guide
agcuuggaggcuacccagcca

SEQ ID NO: 13153 - RNA, 21 nt, Artificial Sequence
  RPE65 RNA guide
aggaaaugaagcuacuguugu

SEQ ID NO: 13154 - RNA, 21 nt, Artificial Sequence
  RPE65 RNA guide
aggacuucuaccacugucccu

SEQ ID NO: 13155 - RNA, 21 nt, Artificial Sequence
  RPE65 RNA guide
aggacuucuuugggcaguacc

SEQ ID NO: 13156 - RNA, 21 nt, Artificial Sequence
  RPE65 RNA guide
aggauggagcuuggaggcuac

SEQ ID NO: 13157 - RNA, 21 nt, Artificial Sequence
  RPE65 RNA guide
aggcaagauauauacuauacc

SEQ ID NO: 13158 - RNA, 21 nt, Artificial Sequence
  RPE65 RNA guide
aggcaguuguagugucuccau

SEQ ID NO: 13159 - RNA, 21 nt, Artificial Sequence
  RPE65 RNA guide
aggcuacccagccaguaacaa

SEQ ID NO: 13160 - RNA, 21 nt, Artificial Sequence
  RPE65 RNA guide
agggacagugguagaaguccu

SEQ ID NO: 13161 - RNA, 21 nt, Artificial Sequence
  RPE65 RNA guide
aggggucuucuucaacaaaac

SEQ ID NO: 13162 - RNA, 21 nt, Artificial Sequence
  RPE65 RNA guide
agguacugcccaaagaagucc

SEQ ID NO: 13163 - RNA, 21 nt, Artificial Sequence
  RPE65 RNA guide
aggugcuaccauuaggacuuc

SEQ ID NO: 13164 - RNA, 21 nt, Artificial Sequence
  RPE65 RNA guide
agguuguuagcugguauagua

SEQ ID NO: 13165 - RNA, 21 nt, Artificial Sequence
  RPE65 RNA guide
aguaacaauauuccgggcucc

SEQ ID NO: 13166 - RNA, 21 nt, Artificial Sequence
  RPE65 RNA guide
aguaccuugucugugcuggca

SEQ ID NO: 13167 - RNA, 21 nt, Artificial Sequence
  RPE65 RNA guide
aguagcuucauuuccuuacag

SEQ ID NO: 13168 - RNA, 21 nt, Artificial Sequence
  RPE65 RNA guide
aguauauaucuugccuguuuu

SEQ ID NO: 13169 - RNA, 21 nt, Artificial Sequence
  RPE65 RNA guide
aguccuaaugguagcaccugg

SEQ ID NO: 13170 - RNA, 21 nt, Artificial Sequence
  RPE65 RNA guide
aguccuuggaaaacaggcaag

SEQ ID NO: 13171 - RNA, 21 nt, Artificial Sequence
  RPE65 RNA guide
agucucaguugcuugccagca

SEQ ID NO: 13172 - RNA, 21 nt, Artificial Sequence
  RPE65 RNA guide
agugcuucccaagauauacaa

SEQ ID NO: 13173 - RNA, 21 nt, Artificial Sequence
  RPE65 RNA guide
aguggagcccggaauauuguu

SEQ ID NO: 13174 - RNA, 21 nt, Artificial Sequence
  RPE65 RNA guide
agugguagaaguccuaauggu

SEQ ID NO: 13175 - RNA, 21 nt, Artificial Sequence
  RPE65 RNA guide
agugucuccauucaacagugg

SEQ ID NO: 13176 - RNA, 21 nt, Artificial Sequence
  RPE65 RNA guide
aguugcuugccagcacagaca

SEQ ID NO: 13177 - RNA, 21 nt, Artificial Sequence
  RPE65 RNA guide
aguuguagugucuccauucaa

SEQ ID NO: 13178 - RNA, 21 nt, Artificial Sequence
  RPE65 RNA guide
aguuuuguugaagaagacccc

SEQ ID NO: 13179 - RNA, 21 nt, Artificial Sequence
  RPE65 RNA guide
auaacaauuaauccaagugcu

SEQ ID NO: 13180 - RNA, 21 nt, Artificial Sequence
  RPE65 RNA guide
auaauaucucugcccauccaa

SEQ ID NO: 13181 - RNA, 21 nt, Artificial Sequence
  RPE65 RNA guide
auacaacaguagcuucauuuc

SEQ ID NO: 13182 - RNA, 21 nt, Artificial Sequence
  RPE65 RNA guide
auacaguuuuguugaagaaga

SEQ ID NO: 13183 - RNA, 21 nt, Artificial Sequence
  RPE65 RNA guide
auaccagcuaacaaccuuaac

SEQ ID NO: 13184 - RNA, 21 nt, Artificial Sequence
  RPE65 RNA guide
auacuauaccagcuaacaacc

SEQ ID NO: 13185 - RNA, 21 nt, Artificial Sequence
  RPE65 RNA guide
auacucucagagugccaaaca

SEQ ID NO: 13186 - RNA, 21 nt, Artificial Sequence
  RPE65 RNA guide
auacucuuucauuaagucuca

SEQ ID NO: 13187 - RNA, 21 nt, Artificial Sequence
  RPE65 RNA guide
auaguauauaucuugccuguu

SEQ ID NO: 13188 - RNA, 21 nt, Artificial Sequence
  RPE65 RNA guide
auauacaacaguagcuucauu

SEQ ID NO: 13189 - RNA, 21 nt, Artificial Sequence
  RPE65 RNA guide
auauacuauaccagcuaacaa

SEQ ID NO: 13190 - RNA, 21 nt, Artificial Sequence
  RPE65 RNA guide
auauauacuauaccagcuaac

SEQ ID NO: 13191 - RNA, 21 nt, Artificial Sequence
  RPE65 RNA guide
auauaucuugccuguuuucca

SEQ ID NO: 13192 - RNA, 21 nt, Artificial Sequence
  RPE65 RNA guide
auaucucugcccauccaaggc

SEQ ID NO: 13193 - RNA, 21 nt, Artificial Sequence
  RPE65 RNA guide
auaucuugccuguuuuccaag

SEQ ID NO: 13194 - RNA, 21 nt, Artificial Sequence
  RPE65 RNA guide
auaucuugggaagcacuugga

SEQ ID NO: 13195 - RNA, 21 nt, Artificial Sequence
  RPE65 RNA guide
auauguuuggcacucugagag

SEQ ID NO: 13196 - RNA, 21 nt, Artificial Sequence
  RPE65 RNA guide
auauuauggaugcuaagcccc

SEQ ID NO: 13197 - RNA, 21 nt, Artificial Sequence
  RPE65 RNA guide
auauuccgggcuccacuguug

SEQ ID NO: 13198 - RNA, 21 nt, Artificial Sequence
  RPE65 RNA guide
auauuguuacuggcuggguag

SEQ ID NO: 13199 - RNA, 21 nt, Artificial Sequence
  RPE65 RNA guide
aucacaugccuaugcccucac

SEQ ID NO: 13200 - RNA, 21 nt, Artificial Sequence
  RPE65 RNA guide
auccaaggcaguuguaguguc

SEQ ID NO: 13201 - RNA, 21 nt, Artificial Sequence
  RPE65 RNA guide
auccaagugcuucccaagaua

SEQ ID NO: 13202 - RNA, 21 nt, Artificial Sequence
  RPE65 RNA guide
auccauaauaucucugcccau

SEQ ID NO: 13203 - RNA, 21 nt, Artificial Sequence
  RPE65 RNA guide
aucuccaauacucuuucauua

SEQ ID NO: 13204 - RNA, 21 nt, Artificial Sequence
  RPE65 RNA guide
aucucugcccauccaaggcag

SEQ ID NO: 13205 - RNA, 21 nt, Artificial Sequence
  RPE65 RNA guide
aucuugccuguuuuccaagga

SEQ ID NO: 13206 - RNA, 21 nt, Artificial Sequence
  RPE65 RNA guide
aucuugggaagcacuuggauu

SEQ ID NO: 13207 - RNA, 21 nt, Artificial Sequence
  RPE65 RNA guide
augaagcuacuguuguauauc

SEQ ID NO: 13208 - RNA, 21 nt, Artificial Sequence
  RPE65 RNA guide
augaaugaauugaugcuguau

SEQ ID NO: 13209 - RNA, 21 nt, Artificial Sequence
  RPE65 RNA guide
augaauugaugcuguauacuc

SEQ ID NO: 13210 - RNA, 21 nt, Artificial Sequence
  RPE65 RNA guide
augcccucacuguaaggaaau

SEQ ID NO: 13211 - RNA, 21 nt, Artificial Sequence
  RPE65 RNA guide
augccuaugcccucacuguaa

SEQ ID NO: 13212 - RNA, 21 nt, Artificial Sequence
  RPE65 RNA guide
augcuaagccccaggugcuac

SEQ ID NO: 13213 - RNA, 21 nt, Artificial Sequence
  RPE65 RNA guide
augcuguauacucucagagug

SEQ ID NO: 13214 - RNA, 21 nt, Artificial Sequence
  RPE65 RNA guide
auggagacacuacaacugccu

SEQ ID NO: 13215 - RNA, 21 nt, Artificial Sequence
  RPE65 RNA guide
auggagcuuggaggcuaccca

SEQ ID NO: 13216 - RNA, 21 nt, Artificial Sequence
  RPE65 RNA guide
auggaugcuaagccccaggug

SEQ ID NO: 13217 - RNA, 21 nt, Artificial Sequence
  RPE65 RNA guide
auggcuaaaggauggagcuug

SEQ ID NO: 13218 - RNA, 21 nt, Artificial Sequence
  RPE65 RNA guide
augggcagagauauuauggau

SEQ ID NO: 13219 - RNA, 21 nt, Artificial Sequence
  RPE65 RNA guide
augguagcaccuggggcuuag

SEQ ID NO: 13220 - RNA, 21 nt, Artificial Sequence
  RPE65 RNA guide
auguuaagguuguuagcuggu

SEQ ID NO: 13221 - RNA, 21 nt, Artificial Sequence
  RPE65 RNA guide
auguuuggcacucugagagua

SEQ ID NO: 13222 - RNA, 21 nt, Artificial Sequence
  RPE65 RNA guide
auuaagucucaguugcuugcc

SEQ ID NO: 13223 - RNA, 21 nt, Artificial Sequence
  RPE65 RNA guide
auuaauccaagugcuucccaa

SEQ ID NO: 13224 - RNA, 21 nt, Artificial Sequence
  RPE65 RNA guide
auuaggacuucuaccacuguc

SEQ ID NO: 13225 - RNA, 21 nt, Artificial Sequence
  RPE65 RNA guide
auuauggaugcuaagccccag

SEQ ID NO: 13226 - RNA, 21 nt, Artificial Sequence
  RPE65 RNA guide
auucaacaguggagcccggaa

SEQ ID NO: 13227 - RNA, 21 nt, Artificial Sequence
  RPE65 RNA guide
auuccgggcuccacuguugaa

SEQ ID NO: 13228 - RNA, 21 nt, Artificial Sequence
  RPE65 RNA guide
auugaugcuguauacucucag

SEQ ID NO: 13229 - RNA, 21 nt, Artificial Sequence
  RPE65 RNA guide
auuggagauaugaaugaauug

SEQ ID NO: 13230 - RNA, 21 nt, Artificial Sequence
  RPE65 RNA guide
auugguauauguuuggcacuc

SEQ ID NO: 13231 - RNA, 21 nt, Artificial Sequence
  RPE65 RNA guide
auuguuacuggcuggguagcc

SEQ ID NO: 13232 - RNA, 21 nt, Artificial Sequence
  RPE65 RNA guide
auuuccuuacagugagggcau

SEQ ID NO: 13233 - RNA, 21 nt, Artificial Sequence
  RPE65 RNA guide
caaagaaguccuuggaaaaca

SEQ ID NO: 13234 - RNA, 21 nt, Artificial Sequence
  RPE65 RNA guide
caacaguagcuucauuuccuu

SEQ ID NO: 13235 - RNA, 21 nt, Artificial Sequence
  RPE65 RNA guide
caacaguggagcccggaauau

SEQ ID NO: 13236 - RNA, 21 nt, Artificial Sequence
  RPE65 RNA guide
caacugagacuuaaugaaaga

SEQ ID NO: 13237 - RNA, 21 nt, Artificial Sequence
  RPE65 RNA guide
caacugccuuggaugggcaga

SEQ ID NO: 13238 - RNA, 21 nt, Artificial Sequence
  RPE65 RNA guide
caagauauacaacaguagcuu

SEQ ID NO: 13239 - RNA, 21 nt, Artificial Sequence
  RPE65 RNA guide
caagauauauacuauaccagc

SEQ ID NO: 13240 - RNA, 21 nt, Artificial Sequence
  RPE65 RNA guide
caagcaacugagacuuaauga

SEQ ID NO: 13241 - RNA, 21 nt, Artificial Sequence
  RPE65 RNA guide
caaggacuucuuugggcagua

SEQ ID NO: 13242 - RNA, 21 nt, Artificial Sequence
  RPE65 RNA guide
caaggcaguuguagugucucc

SEQ ID NO: 13243 - RNA, 21 nt, Artificial Sequence
  RPE65 RNA guide
caagguacugcccaaagaagu

SEQ ID NO: 13244 - RNA, 21 nt, Artificial Sequence
  RPE65 RNA guide
caagugcuucccaagauauac

SEQ ID NO: 13245 - RNA, 21 nt, Artificial Sequence
  RPE65 RNA guide
caauacucuuucauuaagucu

SEQ ID NO: 13246 - RNA, 21 nt, Artificial Sequence
  RPE65 RNA guide
caauauuccgggcuccacugu

SEQ ID NO: 13247 - RNA, 21 nt, Artificial Sequence
  RPE65 RNA guide
caauuaauccaagugcuuccc

SEQ ID NO: 13248 - RNA, 21 nt, Artificial Sequence
  RPE65 RNA guide
caauucauucauaucuccaau

SEQ ID NO: 13249 - RNA, 21 nt, Artificial Sequence
  RPE65 RNA guide
cacagacaagguacugcccaa

SEQ ID NO: 13250 - RNA, 21 nt, Artificial Sequence
  RPE65 RNA guide
cacaugccuaugcccucacug

SEQ ID NO: 13251 - RNA, 21 nt, Artificial Sequence
  RPE65 RNA guide
cacccguuagggacaguggua

SEQ ID NO: 13252 - RNA, 21 nt, Artificial Sequence
  RPE65 RNA guide
caccuggggcuuagcauccau

SEQ ID NO: 13253 - RNA, 21 nt, Artificial Sequence
  RPE65 RNA guide
cacuacaacugccuuggaugg

SEQ ID NO: 13254 - RNA, 21 nt, Artificial Sequence
  RPE65 RNA guide
cacucugagaguauacagcau

SEQ ID NO: 13255 - RNA, 21 nt, Artificial Sequence
  RPE65 RNA guide
cacuguaaggaaaugaagcua

SEQ ID NO: 13256 - RNA, 21 nt, Artificial Sequence
  RPE65 RNA guide
cacuguugaauggagacacua

SEQ ID NO: 13257 - RNA, 21 nt, Artificial Sequence
  RPE65 RNA guide
cagacaagguacugcccaaag

SEQ ID NO: 13258 - RNA, 21 nt, Artificial Sequence
  RPE65 RNA guide
cagagauauuauggaugcuaa

SEQ ID NO: 13259 - RNA, 21 nt, Artificial Sequence
  RPE65 RNA guide
cagagugccaaacauauacca

SEQ ID NO: 13260 - RNA, 21 nt, Artificial Sequence
  RPE65 RNA guide
cagcacagacaagguacugcc

SEQ ID NO: 13261 - RNA, 21 nt, Artificial Sequence
  RPE65 RNA guide
cagcaucaauucauucauauc

SEQ ID NO: 13262 - RNA, 21 nt, Artificial Sequence
  RPE65 RNA guide
cagccaguaacaauauuccgg

SEQ ID NO: 13263 - RNA, 21 nt, Artificial Sequence
  RPE65 RNA guide
caggcaagauauauacuauac

SEQ ID NO: 13264 - RNA, 21 nt, Artificial Sequence
  RPE65 RNA guide
caggugcuaccauuaggacuu

SEQ ID NO: 13265 - RNA, 21 nt, Artificial Sequence
  RPE65 RNA guide
caguaacaauauuccgggcuc

SEQ ID NO: 13266 - RNA, 21 nt, Artificial Sequence
  RPE65 RNA guide
caguaccuugucugugcuggc

SEQ ID NO: 13267 - RNA, 21 nt, Artificial Sequence
  RPE65 RNA guide
caguagcuucauuuccuuaca

SEQ ID NO: 13268 - RNA, 21 nt, Artificial Sequence
  RPE65 RNA guide
caguggagcccggaauauugu

SEQ ID NO: 13269 - RNA, 21 nt, Artificial Sequence
  RPE65 RNA guide
cagugguagaaguccuaaugg

SEQ ID NO: 13270 - RNA, 21 nt, Artificial Sequence
  RPE65 RNA guide
caguugcuugccagcacagac

SEQ ID NO: 13271 - RNA, 21 nt, Artificial Sequence
  RPE65 RNA guide
caguuguagugucuccauuca

SEQ ID NO: 13272 - RNA, 21 nt, Artificial Sequence
  RPE65 RNA guide
caguuuuguugaagaagaccc

SEQ ID NO: 13273 - RNA, 21 nt, Artificial Sequence
  RPE65 RNA guide
cauaauaucucugcccaucca

SEQ ID NO: 13274 - RNA, 21 nt, Artificial Sequence
  RPE65 RNA guide
caucacaugccuaugcccuca

SEQ ID NO: 13275 - RNA, 21 nt, Artificial Sequence
  RPE65 RNA guide
cauccaaggcaguuguagugu

SEQ ID NO: 13276 - RNA, 21 nt, Artificial Sequence
  RPE65 RNA guide
cauccauaauaucucugccca

SEQ ID NO: 13277 - RNA, 21 nt, Artificial Sequence
  RPE65 RNA guide
caugccuaugcccucacugua

SEQ ID NO: 13278 - RNA, 21 nt, Artificial Sequence
  RPE65 RNA guide
cauuaagucucaguugcuugc

SEQ ID NO: 13279 - RNA, 21 nt, Artificial Sequence
  RPE65 RNA guide
cauuaggacuucuaccacugu

SEQ ID NO: 13280 - RNA, 21 nt, Artificial Sequence
  RPE65 RNA guide
cauucaacaguggagcccgga

SEQ ID NO: 13281 - RNA, 21 nt, Artificial Sequence
  RPE65 RNA guide
cauucauaucuccaauacucu

SEQ ID NO: 13282 - RNA, 21 nt, Artificial Sequence
  RPE65 RNA guide
cauugguauauguuuggcacu

SEQ ID NO: 13283 - RNA, 21 nt, Artificial Sequence
  RPE65 RNA guide
cauuuccuuacagugagggca

SEQ ID NO: 13284 - RNA, 21 nt, Artificial Sequence
  RPE65 RNA guide
ccaaagaaguccuuggaaaac

SEQ ID NO: 13285 - RNA, 21 nt, Artificial Sequence
  RPE65 RNA guide
ccaagauauacaacaguagcu

SEQ ID NO: 13286 - RNA, 21 nt, Artificial Sequence
  RPE65 RNA guide
ccaaggacuucuuugggcagu

SEQ ID NO: 13287 - RNA, 21 nt, Artificial Sequence
  RPE65 RNA guide
ccaaggcaguuguagugucuc

SEQ ID NO: 13288 - RNA, 21 nt, Artificial Sequence
  RPE65 RNA guide
ccaagugcuucccaagauaua

SEQ ID NO: 13289 - RNA, 21 nt, Artificial Sequence
  RPE65 RNA guide
ccaauacucuuucauuaaguc

SEQ ID NO: 13290 - RNA, 21 nt, Artificial Sequence
  RPE65 RNA guide
ccacccguuagggacaguggu

SEQ ID NO: 13291 - RNA, 21 nt, Artificial Sequence
  RPE65 RNA guide
ccacuguugaauggagacacu

SEQ ID NO: 13292 - RNA, 21 nt, Artificial Sequence
  RPE65 RNA guide
ccagcacagacaagguacugc

SEQ ID NO: 13293 - RNA, 21 nt, Artificial Sequence
  RPE65 RNA guide
ccagccaguaacaauauuccg

SEQ ID NO: 13294 - RNA, 21 nt, Artificial Sequence
  RPE65 RNA guide
ccagcuaacaaccuuaacauu

SEQ ID NO: 13295 - RNA, 21 nt, Artificial Sequence
  RPE65 RNA guide
ccaggugcuaccauuaggacu

SEQ ID NO: 13296 - RNA, 21 nt, Artificial Sequence
  RPE65 RNA guide
ccaguaacaauauuccgggcu

SEQ ID NO: 13297 - RNA, 21 nt, Artificial Sequence
  RPE65 RNA guide
ccauaauaucucugcccaucc

SEQ ID NO: 13298 - RNA, 21 nt, Artificial Sequence
  RPE65 RNA guide
ccauccaaggcaguuguagug

SEQ ID NO: 13299 - RNA, 21 nt, Artificial Sequence
  RPE65 RNA guide
ccauuaggacuucuaccacug

SEQ ID NO: 13300 - RNA, 21 nt, Artificial Sequence
  RPE65 RNA guide
ccauucaacaguggagcccgg

SEQ ID NO: 13301 - RNA, 21 nt, Artificial Sequence
  RPE65 RNA guide
ccauugguauauguuuggcac

SEQ ID NO: 13302 - RNA, 21 nt, Artificial Sequence
  RPE65 RNA guide
cccaaagaaguccuuggaaaa

SEQ ID NO: 13303 - RNA, 21 nt, Artificial Sequence
  RPE65 RNA guide
cccaagauauacaacaguagc

SEQ ID NO: 13304 - RNA, 21 nt, Artificial Sequence
  RPE65 RNA guide
cccagccaguaacaauauucc

SEQ ID NO: 13305 - RNA, 21 nt, Artificial Sequence
  RPE65 RNA guide
cccaggugcuaccauuaggac

SEQ ID NO: 13306 - RNA, 21 nt, Artificial Sequence
  RPE65 RNA guide
cccauccaaggcaguuguagu

SEQ ID NO: 13307 - RNA, 21 nt, Artificial Sequence
  RPE65 RNA guide
ccccaggugcuaccauuagga

SEQ ID NO: 13308 - RNA, 21 nt, Artificial Sequence
  RPE65 RNA guide
cccggaauauuguuacuggcu

SEQ ID NO: 13309 - RNA, 21 nt, Artificial Sequence
  RPE65 RNA guide
cccguuagggacagugguaga

SEQ ID NO: 13310 - RNA, 21 nt, Artificial Sequence
  RPE65 RNA guide
cccuaggggucuucuucaaca

SEQ ID NO: 13311 - RNA, 21 nt, Artificial Sequence
  RPE65 RNA guide
cccucacuguaaggaaaugaa

SEQ ID NO: 13312 - RNA, 21 nt, Artificial Sequence
  RPE65 RNA guide
ccggaauauuguuacuggcug

SEQ ID NO: 13313 - RNA, 21 nt, Artificial Sequence
  RPE65 RNA guide
ccgggcuccacuguugaaugg

SEQ ID NO: 13314 - RNA, 21 nt, Artificial Sequence
  RPE65 RNA guide
ccguuagggacagugguagaa

SEQ ID NO: 13315 - RNA, 21 nt, Artificial Sequence
  RPE65 RNA guide
ccuaaugguagcaccuggggc

SEQ ID NO: 13316 - RNA, 21 nt, Artificial Sequence
  RPE65 RNA guide
ccuaggggucuucuucaacaa

SEQ ID NO: 13317 - RNA, 21 nt, Artificial Sequence
  RPE65 RNA guide
ccuaugcccucacuguaagga

SEQ ID NO: 13318 - RNA, 21 nt, Artificial Sequence
  RPE65 RNA guide
ccucacuguaaggaaaugaag

SEQ ID NO: 13319 - RNA, 21 nt, Artificial Sequence
  RPE65 RNA guide
ccuccaagcuccauccuuuag

SEQ ID NO: 13320 - RNA, 21 nt, Artificial Sequence
  RPE65 RNA guide
ccuggggcuuagcauccauaa

SEQ ID NO: 13321 - RNA, 21 nt, Artificial Sequence
  RPE65 RNA guide
ccuguuuuccaaggacuucuu

SEQ ID NO: 13322 - RNA, 21 nt, Artificial Sequence
  RPE65 RNA guide
ccuuacagugagggcauaggc

SEQ ID NO: 13323 - RNA, 21 nt, Artificial Sequence
  RPE65 RNA guide
ccuuggaaaacaggcaagaua

SEQ ID NO: 13324 - RNA, 21 nt, Artificial Sequence
  RPE65 RNA guide
ccuuggaugggcagagauauu

SEQ ID NO: 13325 - RNA, 21 nt, Artificial Sequence
  RPE65 RNA guide
ccuugucugugcuggcaagca

SEQ ID NO: 13326 - RNA, 21 nt, Artificial Sequence
  RPE65 RNA guide
cggaauauuguuacuggcugg

SEQ ID NO: 13327 - RNA, 21 nt, Artificial Sequence
  RPE65 RNA guide
cgggcuccacuguugaaugga

SEQ ID NO: 13328 - RNA, 21 nt, Artificial Sequence
  RPE65 RNA guide
cguuagggacagugguagaag

SEQ ID NO: 13329 - RNA, 21 nt, Artificial Sequence
  RPE65 RNA guide
cuaaaggauggagcuuggagg

SEQ ID NO: 13330 - RNA, 21 nt, Artificial Sequence
  RPE65 RNA guide
cuaagccccaggugcuaccau

SEQ ID NO: 13331 - RNA, 21 nt, Artificial Sequence
  RPE65 RNA guide
cuaaugguagcaccuggggcu

SEQ ID NO: 13332 - RNA, 21 nt, Artificial Sequence
  RPE65 RNA guide
cuacaacugccuuggaugggc

SEQ ID NO: 13333 - RNA, 21 nt, Artificial Sequence
  RPE65 RNA guide
cuaccacugucccuaacgggu

SEQ ID NO: 13334 - RNA, 21 nt, Artificial Sequence
  RPE65 RNA guide
cuaccauuaggacuucuacca

SEQ ID NO: 13335 - RNA, 21 nt, Artificial Sequence
  RPE65 RNA guide
cuacccagccaguaacaauau

SEQ ID NO: 13336 - RNA, 21 nt, Artificial Sequence
  RPE65 RNA guide
cuacuguuguauaucuuggga

SEQ ID NO: 13337 - RNA, 21 nt, Artificial Sequence
  RPE65 RNA guide
cuacuuacccuaggggucuuc

SEQ ID NO: 13338 - RNA, 21 nt, Artificial Sequence
  RPE65 RNA guide
cuaggggucuucuucaacaaa

SEQ ID NO: 13339 - RNA, 21 nt, Artificial Sequence
  RPE65 RNA guide
cuauaccagcuaacaaccuua

SEQ ID NO: 13340 - RNA, 21 nt, Artificial Sequence
  RPE65 RNA guide
cuaugcccucacuguaaggaa

SEQ ID NO: 13341 - RNA, 21 nt, Artificial Sequence
  RPE65 RNA guide
cucacuguaaggaaaugaagc

SEQ ID NO: 13342 - RNA, 21 nt, Artificial Sequence
  RPE65 RNA guide
cucagagugccaaacauauac

SEQ ID NO: 13343 - RNA, 21 nt, Artificial Sequence
  RPE65 RNA guide
cucaguugcuugccagcacag

SEQ ID NO: 13344 - RNA, 21 nt, Artificial Sequence
  RPE65 RNA guide
cuccaagcuccauccuuuagc

SEQ ID NO: 13345 - RNA, 21 nt, Artificial Sequence
  RPE65 RNA guide
cuccaauacucuuucauuaag

SEQ ID NO: 13346 - RNA, 21 nt, Artificial Sequence
  RPE65 RNA guide
cuccacccguuagggacagug

SEQ ID NO: 13347 - RNA, 21 nt, Artificial Sequence
  RPE65 RNA guide
cuccacuguugaauggagaca

SEQ ID NO: 13348 - RNA, 21 nt, Artificial Sequence
  RPE65 RNA guide
cuccauucaacaguggagccc

SEQ ID NO: 13349 - RNA, 21 nt, Artificial Sequence
  RPE65 RNA guide
cucucagagugccaaacauau

SEQ ID NO: 13350 - RNA, 21 nt, Artificial Sequence
  RPE65 RNA guide
cucugagaguauacagcauca

SEQ ID NO: 13351 - RNA, 21 nt, Artificial Sequence
  RPE65 RNA guide
cucugcccauccaaggcaguu

SEQ ID NO: 13352 - RNA, 21 nt, Artificial Sequence
  RPE65 RNA guide
cucuuucauuaagucucaguu

SEQ ID NO: 13353 - RNA, 21 nt, Artificial Sequence
  RPE65 RNA guide
cugagacuuaaugaaagagua

SEQ ID NO: 13354 - RNA, 21 nt, Artificial Sequence
  RPE65 RNA guide
cugagaguauacagcaucaau

SEQ ID NO: 13355 - RNA, 21 nt, Artificial Sequence
  RPE65 RNA guide
cugcccaaagaaguccuugga

SEQ ID NO: 13356 - RNA, 21 nt, Artificial Sequence
  RPE65 RNA guide
cugcccauccaaggcaguugu

SEQ ID NO: 13357 - RNA, 21 nt, Artificial Sequence
  RPE65 RNA guide
cugccuuggaugggcagagau

SEQ ID NO: 13358 - RNA, 21 nt, Artificial Sequence
  RPE65 RNA guide
cuggcaagcaacugagacuua

SEQ ID NO: 13359 - RNA, 21 nt, Artificial Sequence
  RPE65 RNA guide
cuggcuggguagccuccaagc

SEQ ID NO: 13360 - RNA, 21 nt, Artificial Sequence
  RPE65 RNA guide
cuggggcuuagcauccauaau

SEQ ID NO: 13361 - RNA, 21 nt, Artificial Sequence
  RPE65 RNA guide
cuggguagccuccaagcucca

SEQ ID NO: 13362 - RNA, 21 nt, Artificial Sequence
  RPE65 RNA guide
cugguauaguauauaucuugc

SEQ ID NO: 13363 - RNA, 21 nt, Artificial Sequence
  RPE65 RNA guide
cuguaaggaaaugaagcuacu

SEQ ID NO: 13364 - RNA, 21 nt, Artificial Sequence
  RPE65 RNA guide
cuguauaacaauuaauccaag

SEQ ID NO: 13365 - RNA, 21 nt, Artificial Sequence
  RPE65 RNA guide
cuguauacucucagagugcca

SEQ ID NO: 13366 - RNA, 21 nt, Artificial Sequence
  RPE65 RNA guide
cugugcuggcaagcaacugag

SEQ ID NO: 13367 - RNA, 21 nt, Artificial Sequence
  RPE65 RNA guide
cuguugaauggagacacuaca

SEQ ID NO: 13368 - RNA, 21 nt, Artificial Sequence
  RPE65 RNA guide
cuguuguauaucuugggaagc

SEQ ID NO: 13369 - RNA, 21 nt, Artificial Sequence
  RPE65 RNA guide
cuguuuuccaaggacuucuuu

SEQ ID NO: 13370 - RNA, 21 nt, Artificial Sequence
  RPE65 RNA guide
cuuacagugagggcauaggca

SEQ ID NO: 13371 - RNA, 21 nt, Artificial Sequence
  RPE65 RNA guide
cuuacccuaggggucuucuuc

SEQ ID NO: 13372 - RNA, 21 nt, Artificial Sequence
  RPE65 RNA guide
cuuagcauccauaauaucucu

SEQ ID NO: 13373 - RNA, 21 nt, Artificial Sequence
  RPE65 RNA guide
cuucauuuccuuacagugagg

SEQ ID NO: 13374 - RNA, 21 nt, Artificial Sequence
  RPE65 RNA guide
cuucccaagauauacaacagu

SEQ ID NO: 13375 - RNA, 21 nt, Artificial Sequence
  RPE65 RNA guide
cuucuaccacugucccuaacg

SEQ ID NO: 13376 - RNA, 21 nt, Artificial Sequence
  RPE65 RNA guide
cuucuuugggcaguaccuugu

SEQ ID NO: 13377 - RNA, 21 nt, Artificial Sequence
  RPE65 RNA guide
cuugccagcacagacaaggua

SEQ ID NO: 13378 - RNA, 21 nt, Artificial Sequence
  RPE65 RNA guide
cuugccuguuuuccaaggacu

SEQ ID NO: 13379 - RNA, 21 nt, Artificial Sequence
  RPE65 RNA guide
cuuggaaaacaggcaagauau

SEQ ID NO: 13380 - RNA, 21 nt, Artificial Sequence
  RPE65 RNA guide
cuuggaggcuacccagccagu

SEQ ID NO: 13381 - RNA, 21 nt, Artificial Sequence
  RPE65 RNA guide
cuuggaugggcagagauauua

SEQ ID NO: 13382 - RNA, 21 nt, Artificial Sequence
  RPE65 RNA guide
cuugggaagcacuuggauuaa

SEQ ID NO: 13383 - RNA, 21 nt, Artificial Sequence
  RPE65 RNA guide
cuugucugugcuggcaagcaa

SEQ ID NO: 13384 - RNA, 21 nt, Artificial Sequence
  RPE65 RNA guide
cuuucauuaagucucaguugc

SEQ ID NO: 13385 - RNA, 21 nt, Artificial Sequence
  RPE65 RNA guide
cuuugggcaguaccuugucug

SEQ ID NO: 13386 - RNA, 21 nt, Artificial Sequence
  RPE65 RNA guide
gaaagaguauuggagauauga

SEQ ID NO: 13387 - RNA, 21 nt, Artificial Sequence
  RPE65 RNA guide
gaaaugaagcuacuguuguau

SEQ ID NO: 13388 - RNA, 21 nt, Artificial Sequence
  RPE65 RNA guide
gaagaagaccccuaggguaag

SEQ ID NO: 13389 - RNA, 21 nt, Artificial Sequence
  RPE65 RNA guide
gaagcacuuggauuaauuguu

SEQ ID NO: 13390 - RNA, 21 nt, Artificial Sequence
  RPE65 RNA guide
gaagcuacuguuguauaucuu

SEQ ID NO: 13391 - RNA, 21 nt, Artificial Sequence
  RPE65 RNA guide
gaaguccuaaugguagcaccu

SEQ ID NO: 13392 - RNA, 21 nt, Artificial Sequence
  RPE65 RNA guide
gaaguccuuggaaaacaggca

SEQ ID NO: 13393 - RNA, 21 nt, Artificial Sequence
  RPE65 RNA guide
gaauauuguuacuggcugggu

SEQ ID NO: 13394 - RNA, 21 nt, Artificial Sequence
  RPE65 RNA guide
gaaugaauugaugcuguauac

SEQ ID NO: 13395 - RNA, 21 nt, Artificial Sequence
  RPE65 RNA guide
gaauggagacacuacaacugc

SEQ ID NO: 13396 - RNA, 21 nt, Artificial Sequence
  RPE65 RNA guide
gaauugaugcuguauacucuc

SEQ ID NO: 13397 - RNA, 21 nt, Artificial Sequence
  RPE65 RNA guide
gacaagguacugcccaaagaa

SEQ ID NO: 13398 - RNA, 21 nt, Artificial Sequence
  RPE65 RNA guide
gacacuacaacugccuuggau

SEQ ID NO: 13399 - RNA, 21 nt, Artificial Sequence
  RPE65 RNA guide
gacagugguagaaguccuaau

SEQ ID NO: 13400 - RNA, 21 nt, Artificial Sequence
  RPE65 RNA guide
gacuuaaugaaagaguauugg

SEQ ID NO: 13401 - RNA, 21 nt, Artificial Sequence
  RPE65 RNA guide
gacuucuaccacugucccuaa

SEQ ID NO: 13402 - RNA, 21 nt, Artificial Sequence
  RPE65 RNA guide
gacuucuuugggcaguaccuu

SEQ ID NO: 13403 - RNA, 21 nt, Artificial Sequence
  RPE65 RNA guide
gagacacuacaacugccuugg

SEQ ID NO: 13404 - RNA, 21 nt, Artificial Sequence
  RPE65 RNA guide
gagacuuaaugaaagaguauu

SEQ ID NO: 13405 - RNA, 21 nt, Artificial Sequence
  RPE65 RNA guide
gagaguauacagcaucaauuc

SEQ ID NO: 13406 - RNA, 21 nt, Artificial Sequence
  RPE65 RNA guide
gagauaugaaugaauugaugc

SEQ ID NO: 13407 - RNA, 21 nt, Artificial Sequence
  RPE65 RNA guide
gagauauuauggaugcuaagc

SEQ ID NO: 13408 - RNA, 21 nt, Artificial Sequence
  RPE65 RNA guide
gagcccggaauauuguuacug

SEQ ID NO: 13409 - RNA, 21 nt, Artificial Sequence
  RPE65 RNA guide
gagcuuggaggcuacccagcc

SEQ ID NO: 13410 - RNA, 21 nt, Artificial Sequence
  RPE65 RNA guide
gaggcuacccagccaguaaca

SEQ ID NO: 13411 - RNA, 21 nt, Artificial Sequence
  RPE65 RNA guide
gaguauacagcaucaauucau

SEQ ID NO: 13412 - RNA, 21 nt, Artificial Sequence
  RPE65 RNA guide
gaguauuggagauaugaauga

SEQ ID NO: 13413 - RNA, 21 nt, Artificial Sequence
  RPE65 RNA guide
gauauacaacaguagcuucau

SEQ ID NO: 13414 - RNA, 21 nt, Artificial Sequence
  RPE65 RNA guide
gauauauacuauaccagcuaa

SEQ ID NO: 13415 - RNA, 21 nt, Artificial Sequence
  RPE65 RNA guide
gauauuauggaugcuaagccc

SEQ ID NO: 13416 - RNA, 21 nt, Artificial Sequence
  RPE65 RNA guide
gaugcuaagccccaggugcua

SEQ ID NO: 13417 - RNA, 21 nt, Artificial Sequence
  RPE65 RNA guide
gaugcuguauacucucagagu

SEQ ID NO: 13418 - RNA, 21 nt, Artificial Sequence
  RPE65 RNA guide
gauggagcuuggaggcuaccc

SEQ ID NO: 13419 - RNA, 21 nt, Artificial Sequence
  RPE65 RNA guide
gauggcuaaaggauggagcuu

SEQ ID NO: 13420 - RNA, 21 nt, Artificial Sequence
  RPE65 RNA guide
gaugggcagagauauuaugga

SEQ ID NO: 13421 - RNA, 21 nt, Artificial Sequence
  RPE65 RNA guide
gcaacugagacuuaaugaaag

SEQ ID NO: 13422 - RNA, 21 nt, Artificial Sequence
  RPE65 RNA guide
gcaagauauauacuauaccag

SEQ ID NO: 13423 - RNA, 21 nt, Artificial Sequence
  RPE65 RNA guide
gcaagcaacugagacuuaaug

SEQ ID NO: 13424 - RNA, 21 nt, Artificial Sequence
  RPE65 RNA guide
gcacagacaagguacugccca

SEQ ID NO: 13425 - RNA, 21 nt, Artificial Sequence
  RPE65 RNA guide
gcaccuggggcuuagcaucca

SEQ ID NO: 13426 - RNA, 21 nt, Artificial Sequence
  RPE65 RNA guide
gcacucugagaguauacagca

SEQ ID NO: 13427 - RNA, 21 nt, Artificial Sequence
  RPE65 RNA guide
gcacuuggauuaauuguuaua

SEQ ID NO: 13428 - RNA, 21 nt, Artificial Sequence
  RPE65 RNA guide
gcagagauauuauggaugcua

SEQ ID NO: 13429 - RNA, 21 nt, Artificial Sequence
  RPE65 RNA guide
gcaguaccuugucugugcugg

SEQ ID NO: 13430 - RNA, 21 nt, Artificial Sequence
  RPE65 RNA guide
gcaguuguagugucuccauuc

SEQ ID NO: 13431 - RNA, 21 nt, Artificial Sequence
  RPE65 RNA guide
gcaucaauucauucauaucuc

SEQ ID NO: 13432 - RNA, 21 nt, Artificial Sequence
  RPE65 RNA guide
gcauccauaauaucucugccc

SEQ ID NO: 13433 - RNA, 21 nt, Artificial Sequence
  RPE65 RNA guide
gccagcacagacaagguacug

SEQ ID NO: 13434 - RNA, 21 nt, Artificial Sequence
  RPE65 RNA guide
gccaguaacaauauuccgggc

SEQ ID NO: 13435 - RNA, 21 nt, Artificial Sequence
  RPE65 RNA guide
gcccaaagaaguccuuggaaa

SEQ ID NO: 13436 - RNA, 21 nt, Artificial Sequence
  RPE65 RNA guide
gcccauccaaggcaguuguag

SEQ ID NO: 13437 - RNA, 21 nt, Artificial Sequence
  RPE65 RNA guide
gccccaggugcuaccauuagg

SEQ ID NO: 13438 - RNA, 21 nt, Artificial Sequence
  RPE65 RNA guide
gcccggaauauuguuacuggc

SEQ ID NO: 13439 - RNA, 21 nt, Artificial Sequence
  RPE65 RNA guide
gcccucacuguaaggaaauga

SEQ ID NO: 13440 - RNA, 21 nt, Artificial Sequence
  RPE65 RNA guide
gccuaugcccucacuguaagg

SEQ ID NO: 13441 - RNA, 21 nt, Artificial Sequence
  RPE65 RNA guide
gccuccaagcuccauccuuua

SEQ ID NO: 13442 - RNA, 21 nt, Artificial Sequence
  RPE65 RNA guide
gccuguuuuccaaggacuucu

SEQ ID NO: 13443 - RNA, 21 nt, Artificial Sequence
  RPE65 RNA guide
gccuuggaugggcagagauau

SEQ ID NO: 13444 - RNA, 21 nt, Artificial Sequence
  RPE65 RNA guide
gcuaaaggauggagcuuggag

SEQ ID NO: 13445 - RNA, 21 nt, Artificial Sequence
  RPE65 RNA guide
gcuaagccccaggugcuacca

SEQ ID NO: 13446 - RNA, 21 nt, Artificial Sequence
  RPE65 RNA guide
gcuaccauuaggacuucuacc

SEQ ID NO: 13447 - RNA, 21 nt, Artificial Sequence
  RPE65 RNA guide
gcuacccagccaguaacaaua

SEQ ID NO: 13448 - RNA, 21 nt, Artificial Sequence
  RPE65 RNA guide
gcuacuguuguauaucuuggg

SEQ ID NO: 13449 - RNA, 21 nt, Artificial Sequence
  RPE65 RNA guide
gcuacuuacccuaggggucuu

SEQ ID NO: 13450 - RNA, 21 nt, Artificial Sequence
  RPE65 RNA guide
gcuccacccguuagggacagu

SEQ ID NO: 13451 - RNA, 21 nt, Artificial Sequence
  RPE65 RNA guide
gcuccacuguugaauggagac

SEQ ID NO: 13452 - RNA, 21 nt, Artificial Sequence
  RPE65 RNA guide
gcuggcaagcaacugagacuu

SEQ ID NO: 13453 - RNA, 21 nt, Artificial Sequence
  RPE65 RNA guide
gcuggguagccuccaagcucc

SEQ ID NO: 13454 - RNA, 21 nt, Artificial Sequence
  RPE65 RNA guide
gcugguauaguauauaucuug

SEQ ID NO: 13455 - RNA, 21 nt, Artificial Sequence
  RPE65 RNA guide
gcuguauacucucagagugcc

SEQ ID NO: 13456 - RNA, 21 nt, Artificial Sequence
  RPE65 RNA guide
gcuuagcauccauaauaucuc

SEQ ID NO: 13457 - RNA, 21 nt, Artificial Sequence
  RPE65 RNA guide
gcuucauuuccuuacagugag

SEQ ID NO: 13458 - RNA, 21 nt, Artificial Sequence
  RPE65 RNA guide
gcuucccaagauauacaacag

SEQ ID NO: 13459 - RNA, 21 nt, Artificial Sequence
  RPE65 RNA guide
gcuugccagcacagacaaggu

SEQ ID NO: 13460 - RNA, 21 nt, Artificial Sequence
  RPE65 RNA guide
gcuuggaggcuacccagccag

SEQ ID NO: 13461 - RNA, 21 nt, Artificial Sequence
  RPE65 RNA guide
ggaaaacaggcaagauauaua

SEQ ID NO: 13462 - RNA, 21 nt, Artificial Sequence
  RPE65 RNA guide
ggaaaugaagcuacuguugua

SEQ ID NO: 13463 - RNA, 21 nt, Artificial Sequence
  RPE65 RNA guide
ggaagcacuuggauuaauugu

SEQ ID NO: 13464 - RNA, 21 nt, Artificial Sequence
  RPE65 RNA guide
ggaauauuguuacuggcuggg

SEQ ID NO: 13465 - RNA, 21 nt, Artificial Sequence
  RPE65 RNA guide
ggacagugguagaaguccuaa

SEQ ID NO: 13466 - RNA, 21 nt, Artificial Sequence
  RPE65 RNA guide
ggacuucuaccacugucccua

SEQ ID NO: 13467 - RNA, 21 nt, Artificial Sequence
  RPE65 RNA guide
ggacuucuuugggcaguaccu

SEQ ID NO: 13468 - RNA, 21 nt, Artificial Sequence
  RPE65 RNA guide
ggagacacuacaacugccuug

SEQ ID NO: 13469 - RNA, 21 nt, Artificial Sequence
  RPE65 RNA guide
ggagauaugaaugaauugaug

SEQ ID NO: 13470 - RNA, 21 nt, Artificial Sequence
  RPE65 RNA guide
ggagcccggaauauuguuacu

SEQ ID NO: 13471 - RNA, 21 nt, Artificial Sequence
  RPE65 RNA guide
ggagcuuggaggcuacccagc

SEQ ID NO: 13472 - RNA, 21 nt, Artificial Sequence
  RPE65 RNA guide
ggaggcuacccagccaguaac

SEQ ID NO: 13473 - RNA, 21 nt, Artificial Sequence
  RPE65 RNA guide
ggaugcuaagccccaggugcu

SEQ ID NO: 13474 - RNA, 21 nt, Artificial Sequence
  RPE65 RNA guide
ggauggagcuuggaggcuacc

SEQ ID NO: 13475 - RNA, 21 nt, Artificial Sequence
  RPE65 RNA guide
ggauggcuaaaggauggagcu

SEQ ID NO: 13476 - RNA, 21 nt, Artificial Sequence
  RPE65 RNA guide
ggaugggcagagauauuaugg

SEQ ID NO: 13477 - RNA, 21 nt, Artificial Sequence
  RPE65 RNA guide
ggcaagauauauacuauacca

SEQ ID NO: 13478 - RNA, 21 nt, Artificial Sequence
  RPE65 RNA guide
ggcaagcaacugagacuuaau

SEQ ID NO: 13479 - RNA, 21 nt, Artificial Sequence
  RPE65 RNA guide
ggcacucugagaguauacagc

SEQ ID NO: 13480 - RNA, 21 nt, Artificial Sequence
  RPE65 RNA guide
ggcagagauauuauggaugcu

SEQ ID NO: 13481 - RNA, 21 nt, Artificial Sequence
  RPE65 RNA guide
ggcaguaccuugucugugcug

SEQ ID NO: 13482 - RNA, 21 nt, Artificial Sequence
  RPE65 RNA guide
ggcaguuguagugucuccauu

SEQ ID NO: 13483 - RNA, 21 nt, Artificial Sequence
  RPE65 RNA guide
ggcuaaaggauggagcuugga

SEQ ID NO: 13484 - RNA, 21 nt, Artificial Sequence
  RPE65 RNA guide
ggcuacccagccaguaacaau

SEQ ID NO: 13485 - RNA, 21 nt, Artificial Sequence
  RPE65 RNA guide
ggcuacuuacccuaggggucu

SEQ ID NO: 13486 - RNA, 21 nt, Artificial Sequence
  RPE65 RNA guide
ggcuccacccguuagggacag

SEQ ID NO: 13487 - RNA, 21 nt, Artificial Sequence
  RPE65 RNA guide
ggcuccacuguugaauggaga

SEQ ID NO: 13488 - RNA, 21 nt, Artificial Sequence
  RPE65 RNA guide
ggcuggguagccuccaagcuc

SEQ ID NO: 13489 - RNA, 21 nt, Artificial Sequence
  RPE65 RNA guide
ggcuuagcauccauaauaucu

SEQ ID NO: 13490 - RNA, 21 nt, Artificial Sequence
  RPE65 RNA guide
gggaagcacuuggauuaauug

SEQ ID NO: 13491 - RNA, 21 nt, Artificial Sequence
  RPE65 RNA guide
gggacagugguagaaguccua

SEQ ID NO: 13492 - RNA, 21 nt, Artificial Sequence
  RPE65 RNA guide
gggcagagauauuauggaugc

SEQ ID NO: 13493 - RNA, 21 nt, Artificial Sequence
  RPE65 RNA guide
gggcaguaccuugucugugcu

SEQ ID NO: 13494 - RNA, 21 nt, Artificial Sequence
  RPE65 RNA guide
gggcuccacccguuagggaca

SEQ ID NO: 13495 - RNA, 21 nt, Artificial Sequence
  RPE65 RNA guide
gggcuccacuguugaauggag

SEQ ID NO: 13496 - RNA, 21 nt, Artificial Sequence
  RPE65 RNA guide
gggcuuagcauccauaauauc

SEQ ID NO: 13497 - RNA, 21 nt, Artificial Sequence
  RPE65 RNA guide
ggggcuuagcauccauaauau

SEQ ID NO: 13498 - RNA, 21 nt, Artificial Sequence
  RPE65 RNA guide
ggggucuucuucaacaaaacu

SEQ ID NO: 13499 - RNA, 21 nt, Artificial Sequence
  RPE65 RNA guide
ggguagccuccaagcuccauc

SEQ ID NO: 13500 - RNA, 21 nt, Artificial Sequence
  RPE65 RNA guide
gggucuucuucaacaaaacug

SEQ ID NO: 13501 - RNA, 21 nt, Artificial Sequence
  RPE65 RNA guide
gguacugcccaaagaaguccu

SEQ ID NO: 13502 - RNA, 21 nt, Artificial Sequence
  RPE65 RNA guide
gguagaaguccuaaugguagc

SEQ ID NO: 13503 - RNA, 21 nt, Artificial Sequence
  RPE65 RNA guide
gguagcaccuggggcuuagca

SEQ ID NO: 13504 - RNA, 21 nt, Artificial Sequence
  RPE65 RNA guide
gguagccuccaagcuccaucc

SEQ ID NO: 13505 - RNA, 21 nt, Artificial Sequence
  RPE65 RNA guide
gguauaguauauaucuugccu

SEQ ID NO: 13506 - RNA, 21 nt, Artificial Sequence
  RPE65 RNA guide
gguauauguuuggcacucuga

SEQ ID NO: 13507 - RNA, 21 nt, Artificial Sequence
  RPE65 RNA guide
ggucuucuucaacaaaacugu

SEQ ID NO: 13508 - RNA, 21 nt, Artificial Sequence
  RPE65 RNA guide
ggugcuaccauuaggacuucu

SEQ ID NO: 13509 - RNA, 21 nt, Artificial Sequence
  RPE65 RNA guide
gguuguuagcugguauaguau

SEQ ID NO: 13510 - RNA, 21 nt, Artificial Sequence
  RPE65 RNA guide
guaacaauauuccgggcucca

SEQ ID NO: 13511 - RNA, 21 nt, Artificial Sequence
  RPE65 RNA guide
guaaggaaaugaagcuacugu

SEQ ID NO: 13512 - RNA, 21 nt, Artificial Sequence
  RPE65 RNA guide
guaccuugucugugcuggcaa

SEQ ID NO: 13513 - RNA, 21 nt, Artificial Sequence
  RPE65 RNA guide
guacugcccaaagaaguccuu

SEQ ID NO: 13514 - RNA, 21 nt, Artificial Sequence
  RPE65 RNA guide
guagaaguccuaaugguagca

SEQ ID NO: 13515 - RNA, 21 nt, Artificial Sequence
  RPE65 RNA guide
guagcaccuggggcuuagcau

SEQ ID NO: 13516 - RNA, 21 nt, Artificial Sequence
  RPE65 RNA guide
guagccuccaagcuccauccu

SEQ ID NO: 13517 - RNA, 21 nt, Artificial Sequence
  RPE65 RNA guide
guagcuucauuuccuuacagu

SEQ ID NO: 13518 - RNA, 21 nt, Artificial Sequence
  RPE65 RNA guide
guagugucuccauucaacagu

SEQ ID NO: 13519 - RNA, 21 nt, Artificial Sequence
  RPE65 RNA guide
guauaacaauuaauccaagug

SEQ ID NO: 13520 - RNA, 21 nt, Artificial Sequence
  RPE65 RNA guide
guauacucucagagugccaaa

SEQ ID NO: 13521 - RNA, 21 nt, Artificial Sequence
  RPE65 RNA guide
guauauaucuugccuguuuuc

SEQ ID NO: 13522 - RNA, 21 nt, Artificial Sequence
  RPE65 RNA guide
guauaucuugggaagcacuug

SEQ ID NO: 13523 - RNA, 21 nt, Artificial Sequence
  RPE65 RNA guide
guauauguuuggcacucugag

SEQ ID NO: 13524 - RNA, 21 nt, Artificial Sequence
  RPE65 RNA guide
guccuaaugguagcaccuggg

SEQ ID NO: 13525 - RNA, 21 nt, Artificial Sequence
  RPE65 RNA guide
guccuuggaaaacaggcaaga

SEQ ID NO: 13526 - RNA, 21 nt, Artificial Sequence
  RPE65 RNA guide
gucucaguugcuugccagcac

SEQ ID NO: 13527 - RNA, 21 nt, Artificial Sequence
  RPE65 RNA guide
gucuccauucaacaguggagc

SEQ ID NO: 13528 - RNA, 21 nt, Artificial Sequence
  RPE65 RNA guide
gucugugcuggcaagcaacug

SEQ ID NO: 13529 - RNA, 21 nt, Artificial Sequence
  RPE65 RNA guide
gucuucuucaacaaaacugua

SEQ ID NO: 13530 - RNA, 21 nt, Artificial Sequence
  RPE65 RNA guide
gugcuaccauuaggacuucua

SEQ ID NO: 13531 - RNA, 21 nt, Artificial Sequence
  RPE65 RNA guide
gugcuggcaagcaacugagac

SEQ ID NO: 13532 - RNA, 21 nt, Artificial Sequence
  RPE65 RNA guide
gugcuucccaagauauacaac

SEQ ID NO: 13533 - RNA, 21 nt, Artificial Sequence
  RPE65 RNA guide
guggagcccggaauauuguua

SEQ ID NO: 13534 - RNA, 21 nt, Artificial Sequence
  RPE65 RNA guide
gugguagaaguccuaauggua

SEQ ID NO: 13535 - RNA, 21 nt, Artificial Sequence
  RPE65 RNA guide
gugucuccauucaacagugga

SEQ ID NO: 13536 - RNA, 21 nt, Artificial Sequence
  RPE65 RNA guide
guuaagguuguuagcugguau

SEQ ID NO: 13537 - RNA, 21 nt, Artificial Sequence
  RPE65 RNA guide
guuacuggcuggguagccucc

SEQ ID NO: 13538 - RNA, 21 nt, Artificial Sequence
  RPE65 RNA guide
guuagcugguauaguauauau

SEQ ID NO: 13539 - RNA, 21 nt, Artificial Sequence
  RPE65 RNA guide
guuagggacagugguagaagu

SEQ ID NO: 13540 - RNA, 21 nt, Artificial Sequence
  RPE65 RNA guide
guuauacaguuuuguugaaga

SEQ ID NO: 13541 - RNA, 21 nt, Artificial Sequence
  RPE65 RNA guide
guugaagaagaccccuagggu

SEQ ID NO: 13542 - RNA, 21 nt, Artificial Sequence
  RPE65 RNA guide
guugaauggagacacuacaac

SEQ ID NO: 13543 - RNA, 21 nt, Artificial Sequence
  RPE65 RNA guide
guugcuugccagcacagacaa

SEQ ID NO: 13544 - RNA, 21 nt, Artificial Sequence
  RPE65 RNA guide
guuguagugucuccauucaac

SEQ ID NO: 13545 - RNA, 21 nt, Artificial Sequence
  RPE65 RNA guide
guuguauaucuugggaagcac

SEQ ID NO: 13546 - RNA, 21 nt, Artificial Sequence
  RPE65 RNA guide
guuguuagcugguauaguaua

SEQ ID NO: 13547 - RNA, 21 nt, Artificial Sequence
  RPE65 RNA guide
guuuggcacucugagaguaua

SEQ ID NO: 13548 - RNA, 21 nt, Artificial Sequence
  RPE65 RNA guide
guuuuccaaggacuucuuugg

SEQ ID NO: 13549 - RNA, 21 nt, Artificial Sequence
  RPE65 RNA guide
guuuuguugaagaagaccccu

SEQ ID NO: 13550 - RNA, 21 nt, Artificial Sequence
  RPE65 RNA guide
uaaaggauggagcuuggaggc

SEQ ID NO: 13551 - RNA, 21 nt, Artificial Sequence
  RPE65 RNA guide
uaaauuuagugugcaguuaug

SEQ ID NO: 13552 - RNA, 21 nt, Artificial Sequence
  RPE65 RNA guide
uaacaauauuccgggcuccac

SEQ ID NO: 13553 - RNA, 21 nt, Artificial Sequence
  RPE65 RNA guide
uaacaauuaauccaagugcuu

SEQ ID NO: 13554 - RNA, 21 nt, Artificial Sequence
  RPE65 RNA guide
uaagccccaggugcuaccauu

SEQ ID NO: 13555 - RNA, 21 nt, Artificial Sequence
  RPE65 RNA guide
uaaggaaaugaagcuacuguu

SEQ ID NO: 13556 - RNA, 21 nt, Artificial Sequence
  RPE65 RNA guide
uaagguuguuagcugguauag

SEQ ID NO: 13557 - RNA, 21 nt, Artificial Sequence
  RPE65 RNA guide
uaagucucaguugcuugccag

SEQ ID NO: 13558 - RNA, 21 nt, Artificial Sequence
  RPE65 RNA guide
uaauaucucugcccauccaag

SEQ ID NO: 13559 - RNA, 21 nt, Artificial Sequence
  RPE65 RNA guide
uaauccaagugcuucccaaga

SEQ ID NO: 13560 - RNA, 21 nt, Artificial Sequence
  RPE65 RNA guide
uaaugguagcaccuggggcuu

SEQ ID NO: 13561 - RNA, 21 nt, Artificial Sequence
  RPE65 RNA guide
uacaacaguagcuucauuucc

SEQ ID NO: 13562 - RNA, 21 nt, Artificial Sequence
  RPE65 RNA guide
uacaacugccuuggaugggca

SEQ ID NO: 13563 - RNA, 21 nt, Artificial Sequence
  RPE65 RNA guide
uacagcaucaauucauucaua

SEQ ID NO: 13564 - RNA, 21 nt, Artificial Sequence
  RPE65 RNA guide
uacagugagggcauaggcaug

SEQ ID NO: 13565 - RNA, 21 nt, Artificial Sequence
  RPE65 RNA guide
uacaguuuuguugaagaagac

SEQ ID NO: 13566 - RNA, 21 nt, Artificial Sequence
  RPE65 RNA guide
uaccacugucccuaacgggug

SEQ ID NO: 13567 - RNA, 21 nt, Artificial Sequence
  RPE65 RNA guide
uaccagcuaacaaccuuaaca

SEQ ID NO: 13568 - RNA, 21 nt, Artificial Sequence
  RPE65 RNA guide
uaccauuaggacuucuaccac

SEQ ID NO: 13569 - RNA, 21 nt, Artificial Sequence
  RPE65 RNA guide
uacccagccaguaacaauauu

SEQ ID NO: 13570 - RNA, 21 nt, Artificial Sequence
  RPE65 RNA guide
uacccuaggggucuucuucaa

SEQ ID NO: 13571 - RNA, 21 nt, Artificial Sequence
  RPE65 RNA guide
uaccuugucugugcuggcaag

SEQ ID NO: 13572 - RNA, 21 nt, Artificial Sequence
  RPE65 RNA guide
uacuauaccagcuaacaaccu

SEQ ID NO: 13573 - RNA, 21 nt, Artificial Sequence
  RPE65 RNA guide
uacucucagagugccaaacau

SEQ ID NO: 13574 - RNA, 21 nt, Artificial Sequence
  RPE65 RNA guide
uacucuuucauuaagucucag

SEQ ID NO: 13575 - RNA, 21 nt, Artificial Sequence
  RPE65 RNA guide
uacugcccaaagaaguccuug

SEQ ID NO: 13576 - RNA, 21 nt, Artificial Sequence
  RPE65 RNA guide
uacuggcuggguagccuccaa

SEQ ID NO: 13577 - RNA, 21 nt, Artificial Sequence
  RPE65 RNA guide
uacuguuguauaucuugggaa

SEQ ID NO: 13578 - RNA, 21 nt, Artificial Sequence
  RPE65 RNA guide
uacuuacccuaggggucuucu

SEQ ID NO: 13579 - RNA, 21 nt, Artificial Sequence
  RPE65 RNA guide
uagaaguccuaaugguagcac

SEQ ID NO: 13580 - RNA, 21 nt, Artificial Sequence
  RPE65 RNA guide
uagcaccuggggcuuagcauc

SEQ ID NO: 13581 - RNA, 21 nt, Artificial Sequence
  RPE65 RNA guide
uagcauccauaauaucucugc

SEQ ID NO: 13582 - RNA, 21 nt, Artificial Sequence
  RPE65 RNA guide
uagccuccaagcuccauccuu

SEQ ID NO: 13583 - RNA, 21 nt, Artificial Sequence
  RPE65 RNA guide
uagcugguauaguauauaucu

SEQ ID NO: 13584 - RNA, 21 nt, Artificial Sequence
  RPE65 RNA guide
uagcuucauuuccuuacagug

SEQ ID NO: 13585 - RNA, 21 nt, Artificial Sequence
  RPE65 RNA guide
uaggacuucuaccacuguccc

SEQ ID NO: 13586 - RNA, 21 nt, Artificial Sequence
  RPE65 RNA guide
uagggacagugguagaagucc

SEQ ID NO: 13587 - RNA, 21 nt, Artificial Sequence
  RPE65 RNA guide
uaggggucuucuucaacaaaa

SEQ ID NO: 13588 - RNA, 21 nt, Artificial Sequence
  RPE65 RNA guide
uaguauauaucuugccuguuu

SEQ ID NO: 13589 - RNA, 21 nt, Artificial Sequence
  RPE65 RNA guide
uagugucuccauucaacagug

SEQ ID NO: 13590 - RNA, 21 nt, Artificial Sequence
  RPE65 RNA guide
uauaacaauuaauccaagugc

SEQ ID NO: 13591 - RNA, 21 nt, Artificial Sequence
  RPE65 RNA guide
uauacaacaguagcuucauuu

SEQ ID NO: 13592 - RNA, 21 nt, Artificial Sequence
  RPE65 RNA guide
uauacaguuuuguugaagaag

SEQ ID NO: 13593 - RNA, 21 nt, Artificial Sequence
  RPE65 RNA guide
uauaccagcuaacaaccuuaa

SEQ ID NO: 13594 - RNA, 21 nt, Artificial Sequence
  RPE65 RNA guide
uauacuauaccagcuaacaac

SEQ ID NO: 13595 - RNA, 21 nt, Artificial Sequence
  RPE65 RNA guide
uauacucucagagugccaaac

SEQ ID NO: 13596 - RNA, 21 nt, Artificial Sequence
  RPE65 RNA guide
uauauacuauaccagcuaaca

SEQ ID NO: 13597 - RNA, 21 nt, Artificial Sequence
  RPE65 RNA guide
uauauaucuugccuguuuucc

SEQ ID NO: 13598 - RNA, 21 nt, Artificial Sequence
  RPE65 RNA guide
uauaucuugccuguuuuccaa

SEQ ID NO: 13599 - RNA, 21 nt, Artificial Sequence
  RPE65 RNA guide
uauaucuugggaagcacuugg

SEQ ID NO: 13600 - RNA, 21 nt, Artificial Sequence
  RPE65 RNA guide
uauauguuuggcacucugaga

SEQ ID NO: 13601 - RNA, 21 nt, Artificial Sequence
  RPE65 RNA guide
uaucucugcccauccaaggca

SEQ ID NO: 13602 - RNA, 21 nt, Artificial Sequence
  RPE65 RNA guide
uaucuugccuguuuuccaagg

SEQ ID NO: 13603 - RNA, 21 nt, Artificial Sequence
  RPE65 RNA guide
uaucuugggaagcacuuggau

SEQ ID NO: 13604 - RNA, 21 nt, Artificial Sequence
  RPE65 RNA guide
uaugcccucacuguaaggaaa

SEQ ID NO: 13605 - RNA, 21 nt, Artificial Sequence
  RPE65 RNA guide
uauggaugcuaagccccaggu

SEQ ID NO: 13606 - RNA, 21 nt, Artificial Sequence
  RPE65 RNA guide
uauguuuggcacucugagagu

SEQ ID NO: 13607 - RNA, 21 nt, Artificial Sequence
  RPE65 RNA guide
uauuauggaugcuaagcccca

SEQ ID NO: 13608 - RNA, 21 nt, Artificial Sequence
  RPE65 RNA guide
uauuccgggcuccacuguuga

SEQ ID NO: 13609 - RNA, 21 nt, Artificial Sequence
  RPE65 RNA guide
uauuguuacuggcuggguagc

SEQ ID NO: 13610 - RNA, 21 nt, Artificial Sequence
  RPE65 RNA guide
ucaacaguggagcccggaaua

SEQ ID NO: 13611 - RNA, 21 nt, Artificial Sequence
  RPE65 RNA guide
ucacaugccuaugcccucacu

SEQ ID NO: 13612 - RNA, 21 nt, Artificial Sequence
  RPE65 RNA guide
ucacuguaaggaaaugaagcu

SEQ ID NO: 13613 - RNA, 21 nt, Artificial Sequence
  RPE65 RNA guide
ucagagugccaaacauauacc

SEQ ID NO: 13614 - RNA, 21 nt, Artificial Sequence
  RPE65 RNA guide
ucaguugcuugccagcacaga

SEQ ID NO: 13615 - RNA, 21 nt, Artificial Sequence
  RPE65 RNA guide
ucauuaagucucaguugcuug

SEQ ID NO: 13616 - RNA, 21 nt, Artificial Sequence
  RPE65 RNA guide
ucauucauaucuccaauacuc

SEQ ID NO: 13617 - RNA, 21 nt, Artificial Sequence
  RPE65 RNA guide
ucauuuccuuacagugagggc

SEQ ID NO: 13618 - RNA, 21 nt, Artificial Sequence
  RPE65 RNA guide
uccaagcuccauccuuuagcc

SEQ ID NO: 13619 - RNA, 21 nt, Artificial Sequence
  RPE65 RNA guide
uccaaggacuucuuugggcag

SEQ ID NO: 13620 - RNA, 21 nt, Artificial Sequence
  RPE65 RNA guide
uccaaggcaguuguagugucu

SEQ ID NO: 13621 - RNA, 21 nt, Artificial Sequence
  RPE65 RNA guide
uccaagugcuucccaagauau

SEQ ID NO: 13622 - RNA, 21 nt, Artificial Sequence
  RPE65 RNA guide
uccaauacucuuucauuaagu

SEQ ID NO: 13623 - RNA, 21 nt, Artificial Sequence
  RPE65 RNA guide
uccacccguuagggacagugg

SEQ ID NO: 13624 - RNA, 21 nt, Artificial Sequence
  RPE65 RNA guide
uccacuguugaauggagacac

SEQ ID NO: 13625 - RNA, 21 nt, Artificial Sequence
  RPE65 RNA guide
uccauaauaucucugcccauc

SEQ ID NO: 13626 - RNA, 21 nt, Artificial Sequence
  RPE65 RNA guide
uccauucaacaguggagcccg

SEQ ID NO: 13627 - RNA, 21 nt, Artificial Sequence
  RPE65 RNA guide
uccauugguauauguuuggca

SEQ ID NO: 13628 - RNA, 21 nt, Artificial Sequence
  RPE65 RNA guide
ucccaagauauacaacaguag

SEQ ID NO: 13629 - RNA, 21 nt, Artificial Sequence
  RPE65 RNA guide
uccgggcuccacuguugaaug

SEQ ID NO: 13630 - RNA, 21 nt, Artificial Sequence
  RPE65 RNA guide
uccuaaugguagcaccugggg

SEQ ID NO: 13631 - RNA, 21 nt, Artificial Sequence
  RPE65 RNA guide
uccuuacagugagggcauagg

SEQ ID NO: 13632 - RNA, 21 nt, Artificial Sequence
  RPE65 RNA guide
uccuuggaaaacaggcaagau

SEQ ID NO: 13633 - RNA, 21 nt, Artificial Sequence
  RPE65 RNA guide
ucuaccacugucccuaacggg

SEQ ID NO: 13634 - RNA, 21 nt, Artificial Sequence
  RPE65 RNA guide
ucucagagugccaaacauaua

SEQ ID NO: 13635 - RNA, 21 nt, Artificial Sequence
  RPE65 RNA guide
ucucaguugcuugccagcaca

SEQ ID NO: 13636 - RNA, 21 nt, Artificial Sequence
  RPE65 RNA guide
ucuccaauacucuuucauuaa

SEQ ID NO: 13637 - RNA, 21 nt, Artificial Sequence
  RPE65 RNA guide
ucuccauucaacaguggagcc

SEQ ID NO: 13638 - RNA, 21 nt, Artificial Sequence
  RPE65 RNA guide
ucucugcccauccaaggcagu

SEQ ID NO: 13639 - RNA, 21 nt, Artificial Sequence
  RPE65 RNA guide
ucugagaguauacagcaucaa

SEQ ID NO: 13640 - RNA, 21 nt, Artificial Sequence
  RPE65 RNA guide
ucugcccauccaaggcaguug

SEQ ID NO: 13641 - RNA, 21 nt, Artificial Sequence
  RPE65 RNA guide
ucugugcuggcaagcaacuga

SEQ ID NO: 13642 - RNA, 21 nt, Artificial Sequence
  RPE65 RNA guide
ucuugccuguuuuccaaggac

SEQ ID NO: 13643 - RNA, 21 nt, Artificial Sequence
  RPE65 RNA guide
ucuugggaagcacuuggauua

SEQ ID NO: 13644 - RNA, 21 nt, Artificial Sequence
  RPE65 RNA guide
ucuuucauuaagucucaguug

SEQ ID NO: 13645 - RNA, 21 nt, Artificial Sequence
  RPE65 RNA guide
ucuuugggcaguaccuugucu

SEQ ID NO: 13646 - RNA, 21 nt, Artificial Sequence
  RPE65 RNA guide
ugaaagaguauuggagauaug

SEQ ID NO: 13647 - RNA, 21 nt, Artificial Sequence
  RPE65 RNA guide
ugaagaagaccccuaggguaa

SEQ ID NO: 13648 - RNA, 21 nt, Artificial Sequence
  RPE65 RNA guide
ugaagcuacuguuguauaucu

SEQ ID NO: 13649 - RNA, 21 nt, Artificial Sequence
  RPE65 RNA guide
ugaaugaauugaugcuguaua

SEQ ID NO: 13650 - RNA, 21 nt, Artificial Sequence
  RPE65 RNA guide
ugaauggagacacuacaacug

SEQ ID NO: 13651 - RNA, 21 nt, Artificial Sequence
  RPE65 RNA guide
ugaauugaugcuguauacucu

SEQ ID NO: 13652 - RNA, 21 nt, Artificial Sequence
  RPE65 RNA guide
ugagacuuaaugaaagaguau

SEQ ID NO: 13653 - RNA, 21 nt, Artificial Sequence
  RPE65 RNA guide
ugagaguauacagcaucaauu

SEQ ID NO: 13654 - RNA, 21 nt, Artificial Sequence
  RPE65 RNA guide
ugaugcuguauacucucagag

SEQ ID NO: 13655 - RNA, 21 nt, Artificial Sequence
  RPE65 RNA guide
ugccagcacagacaagguacu

SEQ ID NO: 13656 - RNA, 21 nt, Artificial Sequence
  RPE65 RNA guide
ugcccaaagaaguccuuggaa

SEQ ID NO: 13657 - RNA, 21 nt, Artificial Sequence
  RPE65 RNA guide
ugcccauccaaggcaguugua

SEQ ID NO: 13658 - RNA, 21 nt, Artificial Sequence
  RPE65 RNA guide
ugcccucacuguaaggaaaug

SEQ ID NO: 13659 - RNA, 21 nt, Artificial Sequence
  RPE65 RNA guide
ugccuaugcccucacuguaag

SEQ ID NO: 13660 - RNA, 21 nt, Artificial Sequence
  RPE65 RNA guide
ugccuguuuuccaaggacuuc

SEQ ID NO: 13661 - RNA, 21 nt, Artificial Sequence
  RPE65 RNA guide
ugccuuggaugggcagagaua

SEQ ID NO: 13662 - RNA, 21 nt, Artificial Sequence
  RPE65 RNA guide
ugcuaagccccaggugcuacc

SEQ ID NO: 13663 - RNA, 21 nt, Artificial Sequence
  RPE65 RNA guide
ugcuaccauuaggacuucuac

SEQ ID NO: 13664 - RNA, 21 nt, Artificial Sequence
  RPE65 RNA guide
ugcuggcaagcaacugagacu

SEQ ID NO: 13665 - RNA, 21 nt, Artificial Sequence
  RPE65 RNA guide
ugcuguauacucucagagugc

SEQ ID NO: 13666 - RNA, 21 nt, Artificial Sequence
  RPE65 RNA guide
ugcuucccaagauauacaaca

SEQ ID NO: 13667 - RNA, 21 nt, Artificial Sequence
  RPE65 RNA guide
ugcuugccagcacagacaagg

SEQ ID NO: 13668 - RNA, 21 nt, Artificial Sequence
  RPE65 RNA guide
uggaaaacaggcaagauauau

SEQ ID NO: 13669 - RNA, 21 nt, Artificial Sequence
  RPE65 RNA guide
uggagacacuacaacugccuu

SEQ ID NO: 13670 - RNA, 21 nt, Artificial Sequence
  RPE65 RNA guide
uggagauaugaaugaauugau

SEQ ID NO: 13671 - RNA, 21 nt, Artificial Sequence
  RPE65 RNA guide
uggagcccggaauauuguuac

SEQ ID NO: 13672 - RNA, 21 nt, Artificial Sequence
  RPE65 RNA guide
uggagcuuggaggcuacccag

SEQ ID NO: 13673 - RNA, 21 nt, Artificial Sequence
  RPE65 RNA guide
uggaggcuacccagccaguaa

SEQ ID NO: 13674 - RNA, 21 nt, Artificial Sequence
  RPE65 RNA guide
uggaugcuaagccccaggugc

SEQ ID NO: 13675 - RNA, 21 nt, Artificial Sequence
  RPE65 RNA guide
uggaugggcagagauauuaug

SEQ ID NO: 13676 - RNA, 21 nt, Artificial Sequence
  RPE65 RNA guide
uggcaagcaacugagacuuaa

SEQ ID NO: 13677 - RNA, 21 nt, Artificial Sequence
  RPE65 RNA guide
uggcacucugagaguauacag

SEQ ID NO: 13678 - RNA, 21 nt, Artificial Sequence
  RPE65 RNA guide
uggcuaaaggauggagcuugg

SEQ ID NO: 13679 - RNA, 21 nt, Artificial Sequence
  RPE65 RNA guide
uggcuacuuacccuagggguc

SEQ ID NO: 13680 - RNA, 21 nt, Artificial Sequence
  RPE65 RNA guide
uggcuggguagccuccaagcu

SEQ ID NO: 13681 - RNA, 21 nt, Artificial Sequence
  RPE65 RNA guide
ugggaagcacuuggauuaauu

SEQ ID NO: 13682 - RNA, 21 nt, Artificial Sequence
  RPE65 RNA guide
ugggcagagauauuauggaug

SEQ ID NO: 13683 - RNA, 21 nt, Artificial Sequence
  RPE65 RNA guide
ugggcaguaccuugucugugc

SEQ ID NO: 13684 - RNA, 21 nt, Artificial Sequence
  RPE65 RNA guide
uggggcuuagcauccauaaua

SEQ ID NO: 13685 - RNA, 21 nt, Artificial Sequence
  RPE65 RNA guide
uggguagccuccaagcuccau

SEQ ID NO: 13686 - RNA, 21 nt, Artificial Sequence
  RPE65 RNA guide
ugguagaaguccuaaugguag

SEQ ID NO: 13687 - RNA, 21 nt, Artificial Sequence
  RPE65 RNA guide
ugguagcaccuggggcuuagc

SEQ ID NO: 13688 - RNA, 21 nt, Artificial Sequence
  RPE65 RNA guide
ugguauaguauauaucuugcc

SEQ ID NO: 13689 - RNA, 21 nt, Artificial Sequence
  RPE65 RNA guide
ugguauauguuuggcacucug

SEQ ID NO: 13690 - RNA, 21 nt, Artificial Sequence
  RPE65 RNA guide
uguaaggaaaugaagcuacug

SEQ ID NO: 13691 - RNA, 21 nt, Artificial Sequence
  RPE65 RNA guide
uguagugucuccauucaacag

SEQ ID NO: 13692 - RNA, 21 nt, Artificial Sequence
  RPE65 RNA guide
uguauacucucagagugccaa

SEQ ID NO: 13693 - RNA, 21 nt, Artificial Sequence
  RPE65 RNA guide
uguauaucuugggaagcacuu

SEQ ID NO: 13694 - RNA, 21 nt, Artificial Sequence
  RPE65 RNA guide
ugucuccauucaacaguggag

SEQ ID NO: 13695 - RNA, 21 nt, Artificial Sequence
  RPE65 RNA guide
ugucugugcuggcaagcaacu

SEQ ID NO: 13696 - RNA, 21 nt, Artificial Sequence
  RPE65 RNA guide
ugugcuggcaagcaacugaga

SEQ ID NO: 13697 - RNA, 21 nt, Artificial Sequence
  RPE65 RNA guide
uguuaagguuguuagcuggua

SEQ ID NO: 13698 - RNA, 21 nt, Artificial Sequence
  RPE65 RNA guide
uguuacuggcuggguagccuc

SEQ ID NO: 13699 - RNA, 21 nt, Artificial Sequence
  RPE65 RNA guide
uguugaagaagaccccuaggg

SEQ ID NO: 13700 - RNA, 21 nt, Artificial Sequence
  RPE65 RNA guide
uguugaauggagacacuacaa

SEQ ID NO: 13701 - RNA, 21 nt, Artificial Sequence
  RPE65 RNA guide
uguuguauaucuugggaagca

SEQ ID NO: 13702 - RNA, 21 nt, Artificial Sequence
  RPE65 RNA guide
uguuuggcacucugagaguau

SEQ ID NO: 13703 - RNA, 21 nt, Artificial Sequence
  RPE65 RNA guide
uguuuuccaaggacuucuuug

SEQ ID NO: 13704 - RNA, 21 nt, Artificial Sequence
  RPE65 RNA guide
uuaaauuuagugugcaguuau

SEQ ID NO: 13705 - RNA, 21 nt, Artificial Sequence
  RPE65 RNA guide
uuaagguuguuagcugguaua

SEQ ID NO: 13706 - RNA, 21 nt, Artificial Sequence
  RPE65 RNA guide
uuaagucucaguugcuugcca

SEQ ID NO: 13707 - RNA, 21 nt, Artificial Sequence
  RPE65 RNA guide
uuaauccaagugcuucccaag

SEQ ID NO: 13708 - RNA, 21 nt, Artificial Sequence
  RPE65 RNA guide
uuacagugagggcauaggcau

SEQ ID NO: 13709 - RNA, 21 nt, Artificial Sequence
  RPE65 RNA guide
uuacccuaggggucuucuuca

SEQ ID NO: 13710 - RNA, 21 nt, Artificial Sequence
  RPE65 RNA guide
uuacuggcuggguagccucca

SEQ ID NO: 13711 - RNA, 21 nt, Artificial Sequence
  RPE65 RNA guide
uuagcauccauaauaucucug

SEQ ID NO: 13712 - RNA, 21 nt, Artificial Sequence
  RPE65 RNA guide
uuagcugguauaguauauauc

SEQ ID NO: 13713 - RNA, 21 nt, Artificial Sequence
  RPE65 RNA guide
uuaggacuucuaccacugucc

SEQ ID NO: 13714 - RNA, 21 nt, Artificial Sequence
  RPE65 RNA guide
uuagggacagugguagaaguc

SEQ ID NO: 13715 - RNA, 21 nt, Artificial Sequence
  RPE65 RNA guide
uuauacaguuuuguugaagaa

SEQ ID NO: 13716 - RNA, 21 nt, Artificial Sequence
  RPE65 RNA guide
uuauggaugcuaagccccagg

SEQ ID NO: 13717 - RNA, 21 nt, Artificial Sequence
  RPE65 RNA guide
uucaacaguggagcccggaau

SEQ ID NO: 13718 - RNA, 21 nt, Artificial Sequence
  RPE65 RNA guide
uucauuaagucucaguugcuu

SEQ ID NO: 13719 - RNA, 21 nt, Artificial Sequence
  RPE65 RNA guide
uucauuuccuuacagugaggg

SEQ ID NO: 13720 - RNA, 21 nt, Artificial Sequence
  RPE65 RNA guide
uuccaaggacuucuuugggca

SEQ ID NO: 13721 - RNA, 21 nt, Artificial Sequence
  RPE65 RNA guide
uucccaagauauacaacagua

SEQ ID NO: 13722 - RNA, 21 nt, Artificial Sequence
  RPE65 RNA guide
uuccgggcuccacuguugaau

SEQ ID NO: 13723 - RNA, 21 nt, Artificial Sequence
  RPE65 RNA guide
uuccuuacagugagggcauag

SEQ ID NO: 13724 - RNA, 21 nt, Artificial Sequence
  RPE65 RNA guide
uucuaccacugucccuaacgg

SEQ ID NO: 13725 - RNA, 21 nt, Artificial Sequence
  RPE65 RNA guide
uucuuugggcaguaccuuguc

SEQ ID NO: 13726 - RNA, 21 nt, Artificial Sequence
  RPE65 RNA guide
uugaagaagaccccuagggua

SEQ ID NO: 13727 - RNA, 21 nt, Artificial Sequence
  RPE65 RNA guide
uugaauggagacacuacaacu

SEQ ID NO: 13728 - RNA, 21 nt, Artificial Sequence
  RPE65 RNA guide
uugaugcuguauacucucaga

SEQ ID NO: 13729 - RNA, 21 nt, Artificial Sequence
  RPE65 RNA guide
uugccagcacagacaagguac

SEQ ID NO: 13730 - RNA, 21 nt, Artificial Sequence
  RPE65 RNA guide
uugccuguuuuccaaggacuu

SEQ ID NO: 13731 - RNA, 21 nt, Artificial Sequence
  RPE65 RNA guide
uugcuugccagcacagacaag

SEQ ID NO: 13732 - RNA, 21 nt, Artificial Sequence
  RPE65 RNA guide
uuggaaaacaggcaagauaua

SEQ ID NO: 13733 - RNA, 21 nt, Artificial Sequence
  RPE65 RNA guide
uuggagauaugaaugaauuga

SEQ ID NO: 13734 - RNA, 21 nt, Artificial Sequence
  RPE65 RNA guide
uuggaggcuacccagccagua

SEQ ID NO: 13735 - RNA, 21 nt, Artificial Sequence
  RPE65 RNA guide
uuggaugggcagagauauuau

SEQ ID NO: 13736 - RNA, 21 nt, Artificial Sequence
  RPE65 RNA guide
uuggcacucugagaguauaca

SEQ ID NO: 13737 - RNA, 21 nt, Artificial Sequence
  RPE65 RNA guide
uugggaagcacuuggauuaau

SEQ ID NO: 13738 - RNA, 21 nt, Artificial Sequence
  RPE65 RNA guide
uugggcaguaccuugucugug

SEQ ID NO: 13739 - RNA, 21 nt, Artificial Sequence
  RPE65 RNA guide
uugguauauguuuggcacucu

SEQ ID NO: 13740 - RNA, 21 nt, Artificial Sequence
  RPE65 RNA guide
uuguagugucuccauucaaca

SEQ ID NO: 13741 - RNA, 21 nt, Artificial Sequence
  RPE65 RNA guide
uuguauaucuugggaagcacu

SEQ ID NO: 13742 - RNA, 21 nt, Artificial Sequence
  RPE65 RNA guide
uugucugugcuggcaagcaac

SEQ ID NO: 13743 - RNA, 21 nt, Artificial Sequence
  RPE65 RNA guide
uuguuacuggcuggguagccu

SEQ ID NO: 13744 - RNA, 21 nt, Artificial Sequence
  RPE65 RNA guide
uuguugaagaagaccccuagg

SEQ ID NO: 13745 - RNA, 21 nt, Artificial Sequence
  RPE65 RNA guide
uuuaaauuuagugugcaguua

SEQ ID NO: 13746 - RNA, 21 nt, Artificial Sequence
  RPE65 RNA guide
uuucauuaagucucaguugcu

SEQ ID NO: 13747 - RNA, 21 nt, Artificial Sequence
  RPE65 RNA guide
uuuccaaggacuucuuugggc

SEQ ID NO: 13748 - RNA, 21 nt, Artificial Sequence
  RPE65 RNA guide
uuuccuuacagugagggcaua

SEQ ID NO: 13749 - RNA, 21 nt, Artificial Sequence
  RPE65 RNA guide
uuuggcacucugagaguauac

SEQ ID NO: 13750 - RNA, 21 nt, Artificial Sequence
  RPE65 RNA guide
uuugggcaguaccuugucugu

SEQ ID NO: 13751 - RNA, 21 nt, Artificial Sequence
  RPE65 RNA guide
uuuguugaagaagaccccuag

SEQ ID NO: 13752 - RNA, 21 nt, Artificial Sequence
  RPE65 RNA guide
uuuuccaaggacuucuuuggg

SEQ ID NO: 13753 - RNA, 21 nt, Artificial Sequence
  RPE65 RNA guide
uuuuguugaagaagaccccua

SEQ ID NO: 13754 - RNA, 22 nt, Artificial Sequence
  RPE65 RNA guide
aaaaaauguuaagguuguuagc

SEQ ID NO: 13755 - RNA, 22 nt, Artificial Sequence
  RPE65 RNA guide
aaaaauguuaagguuguuagcu

SEQ ID NO: 13756 - RNA, 22 nt, Artificial Sequence
  RPE65 RNA guide
aaaacaggcaagauauauacua

SEQ ID NO: 13757 - RNA, 22 nt, Artificial Sequence
  RPE65 RNA guide
aaaauguuaagguuguuagcug

SEQ ID NO: 13758 - RNA, 22 nt, Artificial Sequence
  RPE65 RNA guide
aaacaggcaagauauauacuau

SEQ ID NO: 13759 - RNA, 22 nt, Artificial Sequence
  RPE65 RNA guide
aaagaaguccuuggaaaacagg

SEQ ID NO: 13760 - RNA, 22 nt, Artificial Sequence
  RPE65 RNA guide
aaaggauggagcuuggaggcua

SEQ ID NO: 13761 - RNA, 22 nt, Artificial Sequence
  RPE65 RNA guide
aaaugaagcuacuguuguauau

SEQ ID NO: 13762 - RNA, 22 nt, Artificial Sequence
  RPE65 RNA guide
aaauguuaagguuguuagcugg

SEQ ID NO: 13763 - RNA, 22 nt, Artificial Sequence
  RPE65 RNA guide
aacaauauuccgggcuccacug

SEQ ID NO: 13764 - RNA, 22 nt, Artificial Sequence
  RPE65 RNA guide
aacaauuaauccaagugcuucc

SEQ ID NO: 13765 - RNA, 22 nt, Artificial Sequence
  RPE65 RNA guide
aacaggcaagauauauacuaua

SEQ ID NO: 13766 - RNA, 22 nt, Artificial Sequence
  RPE65 RNA guide
aacaguagcuucauuuccuuac

SEQ ID NO: 13767 - RNA, 22 nt, Artificial Sequence
  RPE65 RNA guide
aacaguggagcccggaauauug

SEQ ID NO: 13768 - RNA, 22 nt, Artificial Sequence
  RPE65 RNA guide
aacugagacuuaaugaaagagu

SEQ ID NO: 13769 - RNA, 22 nt, Artificial Sequence
  RPE65 RNA guide
aacugccuuggaugggcagaga

SEQ ID NO: 13770 - RNA, 22 nt, Artificial Sequence
  RPE65 RNA guide
aacuguauaacaauuaauccaa

SEQ ID NO: 13771 - RNA, 22 nt, Artificial Sequence
  RPE65 RNA guide
aagaaguccuuggaaaacaggc

SEQ ID NO: 13772 - RNA, 22 nt, Artificial Sequence
  RPE65 RNA guide
aagauauacaacaguagcuuca

SEQ ID NO: 13773 - RNA, 22 nt, Artificial Sequence
  RPE65 RNA guide
aagcaacugagacuuaaugaaa

SEQ ID NO: 13774 - RNA, 22 nt, Artificial Sequence
  RPE65 RNA guide
aagcacuuggauuaauuguuau

SEQ ID NO: 13775 - RNA, 22 nt, Artificial Sequence
  RPE65 RNA guide
aagccccaggugcuaccauuag

SEQ ID NO: 13776 - RNA, 22 nt, Artificial Sequence
  RPE65 RNA guide
aagcuacuguuguauaucuugg

SEQ ID NO: 13777 - RNA, 22 nt, Artificial Sequence
  RPE65 RNA guide
aaggaaaugaagcuacuguugu

SEQ ID NO: 13778 - RNA, 22 nt, Artificial Sequence
  RPE65 RNA guide
aaggacuucuuugggcaguacc

SEQ ID NO: 13779 - RNA, 22 nt, Artificial Sequence
  RPE65 RNA guide
aaggauggagcuuggaggcuac

SEQ ID NO: 13780 - RNA, 22 nt, Artificial Sequence
  RPE65 RNA guide
aaggcaguuguagugucuccau

SEQ ID NO: 13781 - RNA, 22 nt, Artificial Sequence
  RPE65 RNA guide
aagguacugcccaaagaagucc

SEQ ID NO: 13782 - RNA, 22 nt, Artificial Sequence
  RPE65 RNA guide
aagguuguuagcugguauagua

SEQ ID NO: 13783 - RNA, 22 nt, Artificial Sequence
  RPE65 RNA guide
aaguccuaaugguagcaccugg

SEQ ID NO: 13784 - RNA, 22 nt, Artificial Sequence
  RPE65 RNA guide
aaguccuuggaaaacaggcaag

SEQ ID NO: 13785 - RNA, 22 nt, Artificial Sequence
  RPE65 RNA guide
aagucucaguugcuugccagca

SEQ ID NO: 13786 - RNA, 22 nt, Artificial Sequence
  RPE65 RNA guide
aagugcuucccaagauauacaa

SEQ ID NO: 13787 - RNA, 22 nt, Artificial Sequence
  RPE65 RNA guide
aauacucuuucauuaagucuca

SEQ ID NO: 13788 - RNA, 22 nt, Artificial Sequence
  RPE65 RNA guide
aauaucucugcccauccaaggc

SEQ ID NO: 13789 - RNA, 22 nt, Artificial Sequence
  RPE65 RNA guide
aauauuccgggcuccacuguug

SEQ ID NO: 13790 - RNA, 22 nt, Artificial Sequence
  RPE65 RNA guide
aauauuguuacuggcuggguag

SEQ ID NO: 13791 - RNA, 22 nt, Artificial Sequence
  RPE65 RNA guide
aauccaagugcuucccaagaua

SEQ ID NO: 13792 - RNA, 22 nt, Artificial Sequence
  RPE65 RNA guide
aaugaagcuacuguuguauauc

SEQ ID NO: 13793 - RNA, 22 nt, Artificial Sequence
  RPE65 RNA guide
aaugaauugaugcuguauacuc

SEQ ID NO: 13794 - RNA, 22 nt, Artificial Sequence
  RPE65 RNA guide
aauggagacacuacaacugccu

SEQ ID NO: 13795 - RNA, 22 nt, Artificial Sequence
  RPE65 RNA guide
aaugguagcaccuggggcuuag

SEQ ID NO: 13796 - RNA, 22 nt, Artificial Sequence
  RPE65 RNA guide
aauguuaagguuguuagcuggu

SEQ ID NO: 13797 - RNA, 22 nt, Artificial Sequence
  RPE65 RNA guide
aauuaauccaagugcuucccaa

SEQ ID NO: 13798 - RNA, 22 nt, Artificial Sequence
  RPE65 RNA guide
aauugaugcuguauacucucag

SEQ ID NO: 13799 - RNA, 22 nt, Artificial Sequence
  RPE65 RNA guide
acaacaguagcuucauuuccuu

SEQ ID NO: 13800 - RNA, 22 nt, Artificial Sequence
  RPE65 RNA guide
acaacugccuuggaugggcaga

SEQ ID NO: 13801 - RNA, 22 nt, Artificial Sequence
  RPE65 RNA guide
acaagguacugcccaaagaagu

SEQ ID NO: 13802 - RNA, 22 nt, Artificial Sequence
  RPE65 RNA guide
acaauauuccgggcuccacugu

SEQ ID NO: 13803 - RNA, 22 nt, Artificial Sequence
  RPE65 RNA guide
acaauuaauccaagugcuuccc

SEQ ID NO: 13804 - RNA, 22 nt, Artificial Sequence
  RPE65 RNA guide
acacuacaacugccuuggaugg

SEQ ID NO: 13805 - RNA, 22 nt, Artificial Sequence
  RPE65 RNA guide
acagacaagguacugcccaaag

SEQ ID NO: 13806 - RNA, 22 nt, Artificial Sequence
  RPE65 RNA guide
acagcaucaauucauucauauc

SEQ ID NO: 13807 - RNA, 22 nt, Artificial Sequence
  RPE65 RNA guide
acaggcaagauauauacuauac

SEQ ID NO: 13808 - RNA, 22 nt, Artificial Sequence
  RPE65 RNA guide
acaguagcuucauuuccuuaca

SEQ ID NO: 13809 - RNA, 22 nt, Artificial Sequence
  RPE65 RNA guide
acaguggagcccggaauauugu

SEQ ID NO: 13810 - RNA, 22 nt, Artificial Sequence
  RPE65 RNA guide
acagugguagaaguccuaaugg

SEQ ID NO: 13811 - RNA, 22 nt, Artificial Sequence
  RPE65 RNA guide
acaguuuuguugaagaagaccc

SEQ ID NO: 13812 - RNA, 22 nt, Artificial Sequence
  RPE65 RNA guide
acaugccuaugcccucacugua

SEQ ID NO: 13813 - RNA, 22 nt, Artificial Sequence
  RPE65 RNA guide
accagcuaacaaccuuaacauu

SEQ ID NO: 13814 - RNA, 22 nt, Artificial Sequence
  RPE65 RNA guide
accauuaggacuucuaccacug

SEQ ID NO: 13815 - RNA, 22 nt, Artificial Sequence
  RPE65 RNA guide
acccagccaguaacaauauucc

SEQ ID NO: 13816 - RNA, 22 nt, Artificial Sequence
  RPE65 RNA guide
acccguuagggacagugguaga

SEQ ID NO: 13817 - RNA, 22 nt, Artificial Sequence
  RPE65 RNA guide
acccuaggggucuucuucaaca

SEQ ID NO: 13818 - RNA, 22 nt, Artificial Sequence
  RPE65 RNA guide
accuggggcuuagcauccauaa

SEQ ID NO: 13819 - RNA, 22 nt, Artificial Sequence
  RPE65 RNA guide
accuugucugugcuggcaagca

SEQ ID NO: 13820 - RNA, 22 nt, Artificial Sequence
  RPE65 RNA guide
acuacaacugccuuggaugggc

SEQ ID NO: 13821 - RNA, 22 nt, Artificial Sequence
  RPE65 RNA guide
acuauaccagcuaacaaccuua

SEQ ID NO: 13822 - RNA, 22 nt, Artificial Sequence
  RPE65 RNA guide
acucucagagugccaaacauau

SEQ ID NO: 13823 - RNA, 22 nt, Artificial Sequence
  RPE65 RNA guide
acucugagaguauacagcauca

SEQ ID NO: 13824 - RNA, 22 nt, Artificial Sequence
  RPE65 RNA guide
acucuuucauuaagucucaguu

SEQ ID NO: 13825 - RNA, 22 nt, Artificial Sequence
  RPE65 RNA guide
acugagacuuaaugaaagagua

SEQ ID NO: 13826 - RNA, 22 nt, Artificial Sequence
  RPE65 RNA guide
acugcccaaagaaguccuugga

SEQ ID NO: 13827 - RNA, 22 nt, Artificial Sequence
  RPE65 RNA guide
acugccuuggaugggcagagau

SEQ ID NO: 13828 - RNA, 22 nt, Artificial Sequence
  RPE65 RNA guide
acuggcuggguagccuccaagc

SEQ ID NO: 13829 - RNA, 22 nt, Artificial Sequence
  RPE65 RNA guide
acuguaaggaaaugaagcuacu

SEQ ID NO: 13830 - RNA, 22 nt, Artificial Sequence
  RPE65 RNA guide
acuguauaacaauuaauccaag

SEQ ID NO: 13831 - RNA, 22 nt, Artificial Sequence
  RPE65 RNA guide
acuguugaauggagacacuaca

SEQ ID NO: 13832 - RNA, 22 nt, Artificial Sequence
  RPE65 RNA guide
acuguuguauaucuugggaagc

SEQ ID NO: 13833 - RNA, 22 nt, Artificial Sequence
  RPE65 RNA guide
acuuacccuaggggucuucuuc

SEQ ID NO: 13834 - RNA, 22 nt, Artificial Sequence
  RPE65 RNA guide
acuucuaccacugucccuaacg

SEQ ID NO: 13835 - RNA, 22 nt, Artificial Sequence
  RPE65 RNA guide
acuucuuugggcaguaccuugu

SEQ ID NO: 13836 - RNA, 22 nt, Artificial Sequence
  RPE65 RNA guide
agaaguccuaaugguagcaccu

SEQ ID NO: 13837 - RNA, 22 nt, Artificial Sequence
  RPE65 RNA guide
agaaguccuuggaaaacaggca

SEQ ID NO: 13838 - RNA, 22 nt, Artificial Sequence
  RPE65 RNA guide
agacaagguacugcccaaagaa

SEQ ID NO: 13839 - RNA, 22 nt, Artificial Sequence
  RPE65 RNA guide
agacacuacaacugccuuggau

SEQ ID NO: 13840 - RNA, 22 nt, Artificial Sequence
  RPE65 RNA guide
agacuuaaugaaagaguauugg

SEQ ID NO: 13841 - RNA, 22 nt, Artificial Sequence
  RPE65 RNA guide
agagauauuauggaugcuaagc

SEQ ID NO: 13842 - RNA, 22 nt, Artificial Sequence
  RPE65 RNA guide
agaguauacagcaucaauucau

SEQ ID NO: 13843 - RNA, 22 nt, Artificial Sequence
  RPE65 RNA guide
agaguauuggagauaugaauga

SEQ ID NO: 13844 - RNA, 22 nt, Artificial Sequence
  RPE65 RNA guide
agauauacaacaguagcuucau

SEQ ID NO: 13845 - RNA, 22 nt, Artificial Sequence
  RPE65 RNA guide
agauauauacuauaccagcuaa

SEQ ID NO: 13846 - RNA, 22 nt, Artificial Sequence
  RPE65 RNA guide
agauauuauggaugcuaagccc

SEQ ID NO: 13847 - RNA, 22 nt, Artificial Sequence
  RPE65 RNA guide
agcaacugagacuuaaugaaag

SEQ ID NO: 13848 - RNA, 22 nt, Artificial Sequence
  RPE65 RNA guide
agcacagacaagguacugccca

SEQ ID NO: 13849 - RNA, 22 nt, Artificial Sequence
  RPE65 RNA guide
agcaccuggggcuuagcaucca

SEQ ID NO: 13850 - RNA, 22 nt, Artificial Sequence
  RPE65 RNA guide
agcacuuggauuaauuguuaua

SEQ ID NO: 13851 - RNA, 22 nt, Artificial Sequence
  RPE65 RNA guide
agcaucaauucauucauaucuc

SEQ ID NO: 13852 - RNA, 22 nt, Artificial Sequence
  RPE65 RNA guide
agcauccauaauaucucugccc

SEQ ID NO: 13853 - RNA, 22 nt, Artificial Sequence
  RPE65 RNA guide
agccaguaacaauauuccgggc

SEQ ID NO: 13854 - RNA, 22 nt, Artificial Sequence
  RPE65 RNA guide
agccccaggugcuaccauuagg

SEQ ID NO: 13855 - RNA, 22 nt, Artificial Sequence
  RPE65 RNA guide
agcccggaauauuguuacuggc

SEQ ID NO: 13856 - RNA, 22 nt, Artificial Sequence
  RPE65 RNA guide
agccuccaagcuccauccuuua

SEQ ID NO: 13857 - RNA, 22 nt, Artificial Sequence
  RPE65 RNA guide
agcuacuguuguauaucuuggg

SEQ ID NO: 13858 - RNA, 22 nt, Artificial Sequence
  RPE65 RNA guide
agcugguauaguauauaucuug

SEQ ID NO: 13859 - RNA, 22 nt, Artificial Sequence
  RPE65 RNA guide
agcuucauuuccuuacagugag

SEQ ID NO: 13860 - RNA, 22 nt, Artificial Sequence
  RPE65 RNA guide
agcuuggaggcuacccagccag

SEQ ID NO: 13861 - RNA, 22 nt, Artificial Sequence
  RPE65 RNA guide
aggaaaugaagcuacuguugua

SEQ ID NO: 13862 - RNA, 22 nt, Artificial Sequence
  RPE65 RNA guide
aggacuucuaccacugucccua

SEQ ID NO: 13863 - RNA, 22 nt, Artificial Sequence
  RPE65 RNA guide
aggacuucuuugggcaguaccu

SEQ ID NO: 13864 - RNA, 22 nt, Artificial Sequence
  RPE65 RNA guide
aggauggagcuuggaggcuacc

SEQ ID NO: 13865 - RNA, 22 nt, Artificial Sequence
  RPE65 RNA guide
aggcaagauauauacuauacca

SEQ ID NO: 13866 - RNA, 22 nt, Artificial Sequence
  RPE65 RNA guide
aggcaguuguagugucuccauu

SEQ ID NO: 13867 - RNA, 22 nt, Artificial Sequence
  RPE65 RNA guide
aggcuacccagccaguaacaau

SEQ ID NO: 13868 - RNA, 22 nt, Artificial Sequence
  RPE65 RNA guide
agggacagugguagaaguccua

SEQ ID NO: 13869 - RNA, 22 nt, Artificial Sequence
  RPE65 RNA guide
aggggucuucuucaacaaaacu

SEQ ID NO: 13870 - RNA, 22 nt, Artificial Sequence
  RPE65 RNA guide
agguacugcccaaagaaguccu

SEQ ID NO: 13871 - RNA, 22 nt, Artificial Sequence
  RPE65 RNA guide
aggugcuaccauuaggacuucu

SEQ ID NO: 13872 - RNA, 22 nt, Artificial Sequence
  RPE65 RNA guide
agguuguuagcugguauaguau

SEQ ID NO: 13873 - RNA, 22 nt, Artificial Sequence
  RPE65 RNA guide
aguaacaauauuccgggcucca

SEQ ID NO: 13874 - RNA, 22 nt, Artificial Sequence
  RPE65 RNA guide
aguaccuugucugugcuggcaa

SEQ ID NO: 13875 - RNA, 22 nt, Artificial Sequence
  RPE65 RNA guide
aguagcuucauuuccuuacagu

SEQ ID NO: 13876 - RNA, 22 nt, Artificial Sequence
  RPE65 RNA guide
aguauauaucuugccuguuuuc

SEQ ID NO: 13877 - RNA, 22 nt, Artificial Sequence
  RPE65 RNA guide
aguccuaaugguagcaccuggg

SEQ ID NO: 13878 - RNA, 22 nt, Artificial Sequence
  RPE65 RNA guide
aguccuuggaaaacaggcaaga

SEQ ID NO: 13879 - RNA, 22 nt, Artificial Sequence
  RPE65 RNA guide
agucucaguugcuugccagcac

SEQ ID NO: 13880 - RNA, 22 nt, Artificial Sequence
  RPE65 RNA guide
agugcuucccaagauauacaac

SEQ ID NO: 13881 - RNA, 22 nt, Artificial Sequence
  RPE65 RNA guide
aguggagcccggaauauuguua

SEQ ID NO: 13882 - RNA, 22 nt, Artificial Sequence
  RPE65 RNA guide
agugguagaaguccuaauggua

SEQ ID NO: 13883 - RNA, 22 nt, Artificial Sequence
  RPE65 RNA guide
agugucuccauucaacagugga

SEQ ID NO: 13884 - RNA, 22 nt, Artificial Sequence
  RPE65 RNA guide
aguugcuugccagcacagacaa

SEQ ID NO: 13885 - RNA, 22 nt, Artificial Sequence
  RPE65 RNA guide
aguuguagugucuccauucaac

SEQ ID NO: 13886 - RNA, 22 nt, Artificial Sequence
  RPE65 RNA guide
aguuuuguugaagaagaccccu

SEQ ID NO: 13887 - RNA, 22 nt, Artificial Sequence
  RPE65 RNA guide
auaacaauuaauccaagugcuu

SEQ ID NO: 13888 - RNA, 22 nt, Artificial Sequence
  RPE65 RNA guide
auaauaucucugcccauccaag

SEQ ID NO: 13889 - RNA, 22 nt, Artificial Sequence
  RPE65 RNA guide
auacaacaguagcuucauuucc

SEQ ID NO: 13890 - RNA, 22 nt, Artificial Sequence
  RPE65 RNA guide
auacagcaucaauucauucaua

SEQ ID NO: 13891 - RNA, 22 nt, Artificial Sequence
  RPE65 RNA guide
auacaguuuuguugaagaagac

SEQ ID NO: 13892 - RNA, 22 nt, Artificial Sequence
  RPE65 RNA guide
auaccagcuaacaaccuuaaca

SEQ ID NO: 13893 - RNA, 22 nt, Artificial Sequence
  RPE65 RNA guide
auacuauaccagcuaacaaccu

SEQ ID NO: 13894 - RNA, 22 nt, Artificial Sequence
  RPE65 RNA guide
auacucucagagugccaaacau

SEQ ID NO: 13895 - RNA, 22 nt, Artificial Sequence
  RPE65 RNA guide
auacucuuucauuaagucucag

SEQ ID NO: 13896 - RNA, 22 nt, Artificial Sequence
  RPE65 RNA guide
auaguauauaucuugccuguuu

SEQ ID NO: 13897 - RNA, 22 nt, Artificial Sequence
  RPE65 RNA guide
auauacaacaguagcuucauuu

SEQ ID NO: 13898 - RNA, 22 nt, Artificial Sequence
  RPE65 RNA guide
auauacuauaccagcuaacaac

SEQ ID NO: 13899 - RNA, 22 nt, Artificial Sequence
  RPE65 RNA guide
auauauacuauaccagcuaaca

SEQ ID NO: 13900 - RNA, 22 nt, Artificial Sequence
  RPE65 RNA guide
auauaucuugccuguuuuccaa

SEQ ID NO: 13901 - RNA, 22 nt, Artificial Sequence
  RPE65 RNA guide
auaucucugcccauccaaggca

SEQ ID NO: 13902 - RNA, 22 nt, Artificial Sequence
  RPE65 RNA guide
auaucuugccuguuuuccaagg

SEQ ID NO: 13903 - RNA, 22 nt, Artificial Sequence
  RPE65 RNA guide
auaucuugggaagcacuuggau

SEQ ID NO: 13904 - RNA, 22 nt, Artificial Sequence
  RPE65 RNA guide
auauguuuggcacucugagagu

SEQ ID NO: 13905 - RNA, 22 nt, Artificial Sequence
  RPE65 RNA guide
auauuauggaugcuaagcccca

SEQ ID NO: 13906 - RNA, 22 nt, Artificial Sequence
  RPE65 RNA guide
auauuccgggcuccacuguuga

SEQ ID NO: 13907 - RNA, 22 nt, Artificial Sequence
  RPE65 RNA guide
auauuguuacuggcuggguagc

SEQ ID NO: 13908 - RNA, 22 nt, Artificial Sequence
  RPE65 RNA guide
aucacaugccuaugcccucacu

SEQ ID NO: 13909 - RNA, 22 nt, Artificial Sequence
  RPE65 RNA guide
auccaaggcaguuguagugucu

SEQ ID NO: 13910 - RNA, 22 nt, Artificial Sequence
  RPE65 RNA guide
auccaagugcuucccaagauau

SEQ ID NO: 13911 - RNA, 22 nt, Artificial Sequence
  RPE65 RNA guide
auccauaauaucucugcccauc

SEQ ID NO: 13912 - RNA, 22 nt, Artificial Sequence
  RPE65 RNA guide
aucuccaauacucuuucauuaa

SEQ ID NO: 13913 - RNA, 22 nt, Artificial Sequence
  RPE65 RNA guide
aucucugcccauccaaggcagu

SEQ ID NO: 13914 - RNA, 22 nt, Artificial Sequence
  RPE65 RNA guide
aucuugccuguuuuccaaggac

SEQ ID NO: 13915 - RNA, 22 nt, Artificial Sequence
  RPE65 RNA guide
aucuugggaagcacuuggauua

SEQ ID NO: 13916 - RNA, 22 nt, Artificial Sequence
  RPE65 RNA guide
augaaagaguauuggagauaug

SEQ ID NO: 13917 - RNA, 22 nt, Artificial Sequence
  RPE65 RNA guide
augaagcuacuguuguauaucu

SEQ ID NO: 13918 - RNA, 22 nt, Artificial Sequence
  RPE65 RNA guide
augaaugaauugaugcuguaua

SEQ ID NO: 13919 - RNA, 22 nt, Artificial Sequence
  RPE65 RNA guide
augaauugaugcuguauacucu

SEQ ID NO: 13920 - RNA, 22 nt, Artificial Sequence
  RPE65 RNA guide
augcccucacuguaaggaaaug

SEQ ID NO: 13921 - RNA, 22 nt, Artificial Sequence
  RPE65 RNA guide
augccuaugcccucacuguaag

SEQ ID NO: 13922 - RNA, 22 nt, Artificial Sequence
  RPE65 RNA guide
augcuaagccccaggugcuacc

SEQ ID NO: 13923 - RNA, 22 nt, Artificial Sequence
  RPE65 RNA guide
augcuguauacucucagagugc

SEQ ID NO: 13924 - RNA, 22 nt, Artificial Sequence
  RPE65 RNA guide
auggagacacuacaacugccuu

SEQ ID NO: 13925 - RNA, 22 nt, Artificial Sequence
  RPE65 RNA guide
auggagcuuggaggcuacccag

SEQ ID NO: 13926 - RNA, 22 nt, Artificial Sequence
  RPE65 RNA guide
auggaugcuaagccccaggugc

SEQ ID NO: 13927 - RNA, 22 nt, Artificial Sequence
  RPE65 RNA guide
auggcuaaaggauggagcuugg

SEQ ID NO: 13928 - RNA, 22 nt, Artificial Sequence
  RPE65 RNA guide
augggcagagauauuauggaug

SEQ ID NO: 13929 - RNA, 22 nt, Artificial Sequence
  RPE65 RNA guide
augguagcaccuggggcuuagc

SEQ ID NO: 13930 - RNA, 22 nt, Artificial Sequence
  RPE65 RNA guide
auguuaagguuguuagcuggua

SEQ ID NO: 13931 - RNA, 22 nt, Artificial Sequence
  RPE65 RNA guide
auguuuggcacucugagaguau

SEQ ID NO: 13932 - RNA, 22 nt, Artificial Sequence
  RPE65 RNA guide
auuaagucucaguugcuugcca

SEQ ID NO: 13933 - RNA, 22 nt, Artificial Sequence
  RPE65 RNA guide
auuaauccaagugcuucccaag

SEQ ID NO: 13934 - RNA, 22 nt, Artificial Sequence
  RPE65 RNA guide
auuaggacuucuaccacugucc

SEQ ID NO: 13935 - RNA, 22 nt, Artificial Sequence
  RPE65 RNA guide
auuauggaugcuaagccccagg

SEQ ID NO: 13936 - RNA, 22 nt, Artificial Sequence
  RPE65 RNA guide
auucaacaguggagcccggaau

SEQ ID NO: 13937 - RNA, 22 nt, Artificial Sequence
  RPE65 RNA guide
auuccgggcuccacuguugaau

SEQ ID NO: 13938 - RNA, 22 nt, Artificial Sequence
  RPE65 RNA guide
auugaugcuguauacucucaga

SEQ ID NO: 13939 - RNA, 22 nt, Artificial Sequence
  RPE65 RNA guide
auuggagauaugaaugaauuga

SEQ ID NO: 13940 - RNA, 22 nt, Artificial Sequence
  RPE65 RNA guide
auugguauauguuuggcacucu

SEQ ID NO: 13941 - RNA, 22 nt, Artificial Sequence
  RPE65 RNA guide
auuguuacuggcuggguagccu

SEQ ID NO: 13942 - RNA, 22 nt, Artificial Sequence
  RPE65 RNA guide
auuuccuuacagugagggcaua

SEQ ID NO: 13943 - RNA, 22 nt, Artificial Sequence
  RPE65 RNA guide
caaagaaguccuuggaaaacag

SEQ ID NO: 13944 - RNA, 22 nt, Artificial Sequence
  RPE65 RNA guide
caacaguagcuucauuuccuua

SEQ ID NO: 13945 - RNA, 22 nt, Artificial Sequence
  RPE65 RNA guide
caacaguggagcccggaauauu

SEQ ID NO: 13946 - RNA, 22 nt, Artificial Sequence
  RPE65 RNA guide
caacugagacuuaaugaaagag

SEQ ID NO: 13947 - RNA, 22 nt, Artificial Sequence
  RPE65 RNA guide
caacugccuuggaugggcagag

SEQ ID NO: 13948 - RNA, 22 nt, Artificial Sequence
  RPE65 RNA guide
caagauauacaacaguagcuuc

SEQ ID NO: 13949 - RNA, 22 nt, Artificial Sequence
  RPE65 RNA guide
caagauauauacuauaccagcu

SEQ ID NO: 13950 - RNA, 22 nt, Artificial Sequence
  RPE65 RNA guide
caagcaacugagacuuaaugaa

SEQ ID NO: 13951 - RNA, 22 nt, Artificial Sequence
  RPE65 RNA guide
caaggacuucuuugggcaguac

SEQ ID NO: 13952 - RNA, 22 nt, Artificial Sequence
  RPE65 RNA guide
caaggcaguuguagugucucca

SEQ ID NO: 13953 - RNA, 22 nt, Artificial Sequence
  RPE65 RNA guide
caagguacugcccaaagaaguc

SEQ ID NO: 13954 - RNA, 22 nt, Artificial Sequence
  RPE65 RNA guide
caagugcuucccaagauauaca

SEQ ID NO: 13955 - RNA, 22 nt, Artificial Sequence
  RPE65 RNA guide
caauacucuuucauuaagucuc

SEQ ID NO: 13956 - RNA, 22 nt, Artificial Sequence
  RPE65 RNA guide
caauauuccgggcuccacuguu

SEQ ID NO: 13957 - RNA, 22 nt, Artificial Sequence
  RPE65 RNA guide
caauuaauccaagugcuuccca

SEQ ID NO: 13958 - RNA, 22 nt, Artificial Sequence
  RPE65 RNA guide
caauucauucauaucuccaaua

SEQ ID NO: 13959 - RNA, 22 nt, Artificial Sequence
  RPE65 RNA guide
cacagacaagguacugcccaaa

SEQ ID NO: 13960 - RNA, 22 nt, Artificial Sequence
  RPE65 RNA guide
cacaugccuaugcccucacugu

SEQ ID NO: 13961 - RNA, 22 nt, Artificial Sequence
  RPE65 RNA guide
cacccguuagggacagugguag

SEQ ID NO: 13962 - RNA, 22 nt, Artificial Sequence
  RPE65 RNA guide
caccuggggcuuagcauccaua

SEQ ID NO: 13963 - RNA, 22 nt, Artificial Sequence
  RPE65 RNA guide
cacuacaacugccuuggauggg

SEQ ID NO: 13964 - RNA, 22 nt, Artificial Sequence
  RPE65 RNA guide
cacucugagaguauacagcauc

SEQ ID NO: 13965 - RNA, 22 nt, Artificial Sequence
  RPE65 RNA guide
cacuguaaggaaaugaagcuac

SEQ ID NO: 13966 - RNA, 22 nt, Artificial Sequence
  RPE65 RNA guide
cacuguugaauggagacacuac

SEQ ID NO: 13967 - RNA, 22 nt, Artificial Sequence
  RPE65 RNA guide
cagacaagguacugcccaaaga

SEQ ID NO: 13968 - RNA, 22 nt, Artificial Sequence
  RPE65 RNA guide
cagagauauuauggaugcuaag

SEQ ID NO: 13969 - RNA, 22 nt, Artificial Sequence
  RPE65 RNA guide
cagagugccaaacauauaccaa

SEQ ID NO: 13970 - RNA, 22 nt, Artificial Sequence
  RPE65 RNA guide
cagcacagacaagguacugccc

SEQ ID NO: 13971 - RNA, 22 nt, Artificial Sequence
  RPE65 RNA guide
cagcaucaauucauucauaucu

SEQ ID NO: 13972 - RNA, 22 nt, Artificial Sequence
  RPE65 RNA guide
cagccaguaacaauauuccggg

SEQ ID NO: 13973 - RNA, 22 nt, Artificial Sequence
  RPE65 RNA guide
caggcaagauauauacuauacc

SEQ ID NO: 13974 - RNA, 22 nt, Artificial Sequence
  RPE65 RNA guide
caggugcuaccauuaggacuuc

SEQ ID NO: 13975 - RNA, 22 nt, Artificial Sequence
  RPE65 RNA guide
caguaacaauauuccgggcucc

SEQ ID NO: 13976 - RNA, 22 nt, Artificial Sequence
  RPE65 RNA guide
caguaccuugucugugcuggca

SEQ ID NO: 13977 - RNA, 22 nt, Artificial Sequence
  RPE65 RNA guide
caguagcuucauuuccuuacag

SEQ ID NO: 13978 - RNA, 22 nt, Artificial Sequence
  RPE65 RNA guide
caguggagcccggaauauuguu

SEQ ID NO: 13979 - RNA, 22 nt, Artificial Sequence
  RPE65 RNA guide
cagugguagaaguccuaauggu

SEQ ID NO: 13980 - RNA, 22 nt, Artificial Sequence
  RPE65 RNA guide
caguugcuugccagcacagaca

SEQ ID NO: 13981 - RNA, 22 nt, Artificial Sequence
  RPE65 RNA guide
caguuguagugucuccauucaa

SEQ ID NO: 13982 - RNA, 22 nt, Artificial Sequence
  RPE65 RNA guide
caguuuuguugaagaagacccc

SEQ ID NO: 13983 - RNA, 22 nt, Artificial Sequence
  RPE65 RNA guide
cauaauaucucugcccauccaa

SEQ ID NO: 13984 - RNA, 22 nt, Artificial Sequence
  RPE65 RNA guide
cauaucuccaauacucuuucau

SEQ ID NO: 13985 - RNA, 22 nt, Artificial Sequence
  RPE65 RNA guide
caucaauucauucauaucucca

SEQ ID NO: 13986 - RNA, 22 nt, Artificial Sequence
  RPE65 RNA guide
caucacaugccuaugcccucac

SEQ ID NO: 13987 - RNA, 22 nt, Artificial Sequence
  RPE65 RNA guide
cauccaaggcaguuguaguguc

SEQ ID NO: 13988 - RNA, 22 nt, Artificial Sequence
  RPE65 RNA guide
cauccauaauaucucugcccau

SEQ ID NO: 13989 - RNA, 22 nt, Artificial Sequence
  RPE65 RNA guide
caugccuaugcccucacuguaa

SEQ ID NO: 13990 - RNA, 22 nt, Artificial Sequence
  RPE65 RNA guide
cauuaagucucaguugcuugcc

SEQ ID NO: 13991 - RNA, 22 nt, Artificial Sequence
  RPE65 RNA guide
cauuaggacuucuaccacuguc

SEQ ID NO: 13992 - RNA, 22 nt, Artificial Sequence
  RPE65 RNA guide
cauucaacaguggagcccggaa

SEQ ID NO: 13993 - RNA, 22 nt, Artificial Sequence
  RPE65 RNA guide
cauucauaucuccaauacucuu

SEQ ID NO: 13994 - RNA, 22 nt, Artificial Sequence
  RPE65 RNA guide
cauugguauauguuuggcacuc

SEQ ID NO: 13995 - RNA, 22 nt, Artificial Sequence
  RPE65 RNA guide
cauuuccuuacagugagggcau

SEQ ID NO: 13996 - RNA, 22 nt, Artificial Sequence
  RPE65 RNA guide
ccaaagaaguccuuggaaaaca

SEQ ID NO: 13997 - RNA, 22 nt, Artificial Sequence
  RPE65 RNA guide
ccaagauauacaacaguagcuu

SEQ ID NO: 13998 - RNA, 22 nt, Artificial Sequence
  RPE65 RNA guide
ccaaggacuucuuugggcagua

SEQ ID NO: 13999 - RNA, 22 nt, Artificial Sequence
  RPE65 RNA guide
ccaaggcaguuguagugucucc

SEQ ID NO: 14000 - RNA, 22 nt, Artificial Sequence
  RPE65 RNA guide
ccaagugcuucccaagauauac

SEQ ID NO: 14001 - RNA, 22 nt, Artificial Sequence
  RPE65 RNA guide
ccaauacucuuucauuaagucu

SEQ ID NO: 14002 - RNA, 22 nt, Artificial Sequence
  RPE65 RNA guide
ccacccguuagggacaguggua

SEQ ID NO: 14003 - RNA, 22 nt, Artificial Sequence
  RPE65 RNA guide
ccacuguugaauggagacacua

SEQ ID NO: 14004 - RNA, 22 nt, Artificial Sequence
  RPE65 RNA guide
ccagcacagacaagguacugcc

SEQ ID NO: 14005 - RNA, 22 nt, Artificial Sequence
  RPE65 RNA guide
ccagccaguaacaauauuccgg

SEQ ID NO: 14006 - RNA, 22 nt, Artificial Sequence
  RPE65 RNA guide
ccaggugcuaccauuaggacuu

SEQ ID NO: 14007 - RNA, 22 nt, Artificial Sequence
  RPE65 RNA guide
ccaguaacaauauuccgggcuc

SEQ ID NO: 14008 - RNA, 22 nt, Artificial Sequence
  RPE65 RNA guide
ccauaauaucucugcccaucca

SEQ ID NO: 14009 - RNA, 22 nt, Artificial Sequence
  RPE65 RNA guide
ccauccaaggcaguuguagugu

SEQ ID NO: 14010 - RNA, 22 nt, Artificial Sequence
  RPE65 RNA guide
ccauuaggacuucuaccacugu

SEQ ID NO: 14011 - RNA, 22 nt, Artificial Sequence
  RPE65 RNA guide
ccauucaacaguggagcccgga

SEQ ID NO: 14012 - RNA, 22 nt, Artificial Sequence
  RPE65 RNA guide
ccauugguauauguuuggcacu

SEQ ID NO: 14013 - RNA, 22 nt, Artificial Sequence
  RPE65 RNA guide
cccaaagaaguccuuggaaaac

SEQ ID NO: 14014 - RNA, 22 nt, Artificial Sequence
  RPE65 RNA guide
cccaagauauacaacaguagcu

SEQ ID NO: 14015 - RNA, 22 nt, Artificial Sequence
  RPE65 RNA guide
cccagccaguaacaauauuccg

SEQ ID NO: 14016 - RNA, 22 nt, Artificial Sequence
  RPE65 RNA guide
cccaggugcuaccauuaggacu

SEQ ID NO: 14017 - RNA, 22 nt, Artificial Sequence
  RPE65 RNA guide
cccauccaaggcaguuguagug

SEQ ID NO: 14018 - RNA, 22 nt, Artificial Sequence
  RPE65 RNA guide
ccccaggugcuaccauuaggac

SEQ ID NO: 14019 - RNA, 22 nt, Artificial Sequence
  RPE65 RNA guide
cccggaauauuguuacuggcug

SEQ ID NO: 14020 - RNA, 22 nt, Artificial Sequence
  RPE65 RNA guide
cccguuagggacagugguagaa

SEQ ID NO: 14021 - RNA, 22 nt, Artificial Sequence
  RPE65 RNA guide
cccuaggggucuucuucaacaa

SEQ ID NO: 14022 - RNA, 22 nt, Artificial Sequence
  RPE65 RNA guide
cccucacuguaaggaaaugaag

SEQ ID NO: 14023 - RNA, 22 nt, Artificial Sequence
  RPE65 RNA guide
ccggaauauuguuacuggcugg

SEQ ID NO: 14024 - RNA, 22 nt, Artificial Sequence
  RPE65 RNA guide
ccgggcuccacuguugaaugga

SEQ ID NO: 14025 - RNA, 22 nt, Artificial Sequence
  RPE65 RNA guide
ccguuagggacagugguagaag

SEQ ID NO: 14026 - RNA, 22 nt, Artificial Sequence
  RPE65 RNA guide
ccuaaugguagcaccuggggcu

SEQ ID NO: 14027 - RNA, 22 nt, Artificial Sequence
  RPE65 RNA guide
ccuaggggucuucuucaacaaa

SEQ ID NO: 14028 - RNA, 22 nt, Artificial Sequence
  RPE65 RNA guide
ccuaugcccucacuguaaggaa

SEQ ID NO: 14029 - RNA, 22 nt, Artificial Sequence
  RPE65 RNA guide
ccucacuguaaggaaaugaagc

SEQ ID NO: 14030 - RNA, 22 nt, Artificial Sequence
  RPE65 RNA guide
ccuccaagcuccauccuuuagc

SEQ ID NO: 14031 - RNA, 22 nt, Artificial Sequence
  RPE65 RNA guide
ccuggggcuuagcauccauaau

SEQ ID NO: 14032 - RNA, 22 nt, Artificial Sequence
  RPE65 RNA guide
ccuguuuuccaaggacuucuuu

SEQ ID NO: 14033 - RNA, 22 nt, Artificial Sequence
  RPE65 RNA guide
ccuuacagugagggcauaggca

SEQ ID NO: 14034 - RNA, 22 nt, Artificial Sequence
  RPE65 RNA guide
ccuuggaaaacaggcaagauau

SEQ ID NO: 14035 - RNA, 22 nt, Artificial Sequence
  RPE65 RNA guide
ccuuggaugggcagagauauua

SEQ ID NO: 14036 - RNA, 22 nt, Artificial Sequence
  RPE65 RNA guide
ccuugucugugcuggcaagcaa

SEQ ID NO: 14037 - RNA, 22 nt, Artificial Sequence
  RPE65 RNA guide
cggaauauuguuacuggcuggg

SEQ ID NO: 14038 - RNA, 22 nt, Artificial Sequence
  RPE65 RNA guide
cgggcuccacuguugaauggag

SEQ ID NO: 14039 - RNA, 22 nt, Artificial Sequence
  RPE65 RNA guide
cguuagggacagugguagaagu

SEQ ID NO: 14040 - RNA, 22 nt, Artificial Sequence
  RPE65 RNA guide
cuaaaggauggagcuuggaggc

SEQ ID NO: 14041 - RNA, 22 nt, Artificial Sequence
  RPE65 RNA guide
cuaagccccaggugcuaccauu

SEQ ID NO: 14042 - RNA, 22 nt, Artificial Sequence
  RPE65 RNA guide
cuaaugguagcaccuggggcuu

SEQ ID NO: 14043 - RNA, 22 nt, Artificial Sequence
  RPE65 RNA guide
cuacaacugccuuggaugggca

SEQ ID NO: 14044 - RNA, 22 nt, Artificial Sequence
  RPE65 RNA guide
cuaccacugucccuaacgggug

SEQ ID NO: 14045 - RNA, 22 nt, Artificial Sequence
  RPE65 RNA guide
cuaccauuaggacuucuaccac

SEQ ID NO: 14046 - RNA, 22 nt, Artificial Sequence
  RPE65 RNA guide
cuacccagccaguaacaauauu

SEQ ID NO: 14047 - RNA, 22 nt, Artificial Sequence
  RPE65 RNA guide
cuacuguuguauaucuugggaa

SEQ ID NO: 14048 - RNA, 22 nt, Artificial Sequence
  RPE65 RNA guide
cuacuuacccuaggggucuucu

SEQ ID NO: 14049 - RNA, 22 nt, Artificial Sequence
  RPE65 RNA guide
cuaggggucuucuucaacaaaa

SEQ ID NO: 14050 - RNA, 22 nt, Artificial Sequence
  RPE65 RNA guide
cuauaccagcuaacaaccuuaa

SEQ ID NO: 14051 - RNA, 22 nt, Artificial Sequence
  RPE65 RNA guide
cuaugcccucacuguaaggaaa

SEQ ID NO: 14052 - RNA, 22 nt, Artificial Sequence
  RPE65 RNA guide
cucacuguaaggaaaugaagcu

SEQ ID NO: 14053 - RNA, 22 nt, Artificial Sequence
  RPE65 RNA guide
cucagagugccaaacauauacc

SEQ ID NO: 14054 - RNA, 22 nt, Artificial Sequence
  RPE65 RNA guide
cucaguugcuugccagcacaga

SEQ ID NO: 14055 - RNA, 22 nt, Artificial Sequence
  RPE65 RNA guide
cuccaagcuccauccuuuagcc

SEQ ID NO: 14056 - RNA, 22 nt, Artificial Sequence
  RPE65 RNA guide
cuccaauacucuuucauuaagu

SEQ ID NO: 14057 - RNA, 22 nt, Artificial Sequence
  RPE65 RNA guide
cuccacccguuagggacagugg

SEQ ID NO: 14058 - RNA, 22 nt, Artificial Sequence
  RPE65 RNA guide
cuccacuguugaauggagacac

SEQ ID NO: 14059 - RNA, 22 nt, Artificial Sequence
  RPE65 RNA guide
cuccauucaacaguggagcccg

SEQ ID NO: 14060 - RNA, 22 nt, Artificial Sequence
  RPE65 RNA guide
cucucagagugccaaacauaua

SEQ ID NO: 14061 - RNA, 22 nt, Artificial Sequence
  RPE65 RNA guide
cucugagaguauacagcaucaa

SEQ ID NO: 14062 - RNA, 22 nt, Artificial Sequence
  RPE65 RNA guide
cucugcccauccaaggcaguug

SEQ ID NO: 14063 - RNA, 22 nt, Artificial Sequence
  RPE65 RNA guide
cucuuucauuaagucucaguug

SEQ ID NO: 14064 - RNA, 22 nt, Artificial Sequence
  RPE65 RNA guide
cugagacuuaaugaaagaguau

SEQ ID NO: 14065 - RNA, 22 nt, Artificial Sequence
  RPE65 RNA guide
cugagaguauacagcaucaauu

SEQ ID NO: 14066 - RNA, 22 nt, Artificial Sequence
  RPE65 RNA guide
cugcccaaagaaguccuuggaa

SEQ ID NO: 14067 - RNA, 22 nt, Artificial Sequence
  RPE65 RNA guide
cugcccauccaaggcaguugua

SEQ ID NO: 14068 - RNA, 22 nt, Artificial Sequence
  RPE65 RNA guide
cugccuuggaugggcagagaua

SEQ ID NO: 14069 - RNA, 22 nt, Artificial Sequence
  RPE65 RNA guide
cuggcaagcaacugagacuuaa

SEQ ID NO: 14070 - RNA, 22 nt, Artificial Sequence
  RPE65 RNA guide
cuggcuggguagccuccaagcu

SEQ ID NO: 14071 - RNA, 22 nt, Artificial Sequence
  RPE65 RNA guide
cuggggcuuagcauccauaaua

SEQ ID NO: 14072 - RNA, 22 nt, Artificial Sequence
  RPE65 RNA guide
cuggguagccuccaagcuccau

SEQ ID NO: 14073 - RNA, 22 nt, Artificial Sequence
  RPE65 RNA guide
cugguauaguauauaucuugcc

SEQ ID NO: 14074 - RNA, 22 nt, Artificial Sequence
  RPE65 RNA guide
cuguaaggaaaugaagcuacug

SEQ ID NO: 14075 - RNA, 22 nt, Artificial Sequence
  RPE65 RNA guide
cuguauaacaauuaauccaagu

SEQ ID NO: 14076 - RNA, 22 nt, Artificial Sequence
  RPE65 RNA guide
cuguauacucucagagugccaa

SEQ ID NO: 14077 - RNA, 22 nt, Artificial Sequence
  RPE65 RNA guide
cugugcuggcaagcaacugaga

SEQ ID NO: 14078 - RNA, 22 nt, Artificial Sequence
  RPE65 RNA guide
cuguugaauggagacacuacaa

SEQ ID NO: 14079 - RNA, 22 nt, Artificial Sequence
  RPE65 RNA guide
cuguuguauaucuugggaagca

SEQ ID NO: 14080 - RNA, 22 nt, Artificial Sequence
  RPE65 RNA guide
cuguuuuccaaggacuucuuug

SEQ ID NO: 14081 - RNA, 22 nt, Artificial Sequence
  RPE65 RNA guide
cuuaaugaaagaguauuggaga

SEQ ID NO: 14082 - RNA, 22 nt, Artificial Sequence
  RPE65 RNA guide
cuuacagugagggcauaggcau

SEQ ID NO: 14083 - RNA, 22 nt, Artificial Sequence
  RPE65 RNA guide
cuuacccuaggggucuucuuca

SEQ ID NO: 14084 - RNA, 22 nt, Artificial Sequence
  RPE65 RNA guide
cuuagcauccauaauaucucug

SEQ ID NO: 14085 - RNA, 22 nt, Artificial Sequence
  RPE65 RNA guide
cuucauuuccuuacagugaggg

SEQ ID NO: 14086 - RNA, 22 nt, Artificial Sequence
  RPE65 RNA guide
cuucccaagauauacaacagua

SEQ ID NO: 14087 - RNA, 22 nt, Artificial Sequence
  RPE65 RNA guide
cuucuaccacugucccuaacgg

SEQ ID NO: 14088 - RNA, 22 nt, Artificial Sequence
  RPE65 RNA guide
cuucuuugggcaguaccuuguc

SEQ ID NO: 14089 - RNA, 22 nt, Artificial Sequence
  RPE65 RNA guide
cuugccagcacagacaagguac

SEQ ID NO: 14090 - RNA, 22 nt, Artificial Sequence
  RPE65 RNA guide
cuugccuguuuuccaaggacuu

SEQ ID NO: 14091 - RNA, 22 nt, Artificial Sequence
  RPE65 RNA guide
cuuggaaaacaggcaagauaua

SEQ ID NO: 14092 - RNA, 22 nt, Artificial Sequence
  RPE65 RNA guide
cuuggaggcuacccagccagua

SEQ ID NO: 14093 - RNA, 22 nt, Artificial Sequence
  RPE65 RNA guide
cuuggaugggcagagauauuau

SEQ ID NO: 14094 - RNA, 22 nt, Artificial Sequence
  RPE65 RNA guide
cuugggaagcacuuggauuaau

SEQ ID NO: 14095 - RNA, 22 nt, Artificial Sequence
  RPE65 RNA guide
cuugucugugcuggcaagcaac

SEQ ID NO: 14096 - RNA, 22 nt, Artificial Sequence
  RPE65 RNA guide
cuuucauuaagucucaguugcu

SEQ ID NO: 14097 - RNA, 22 nt, Artificial Sequence
  RPE65 RNA guide
cuuugggcaguaccuugucugu

SEQ ID NO: 14098 - RNA, 22 nt, Artificial Sequence
  RPE65 RNA guide
gaaaacaggcaagauauauacu

SEQ ID NO: 14099 - RNA, 22 nt, Artificial Sequence
  RPE65 RNA guide
gaaagaguauuggagauaugaa

SEQ ID NO: 14100 - RNA, 22 nt, Artificial Sequence
  RPE65 RNA guide
gaaaugaagcuacuguuguaua

SEQ ID NO: 14101 - RNA, 22 nt, Artificial Sequence
  RPE65 RNA guide
gaagaagaccccuaggguaagu

SEQ ID NO: 14102 - RNA, 22 nt, Artificial Sequence
  RPE65 RNA guide
gaagcacuuggauuaauuguua

SEQ ID NO: 14103 - RNA, 22 nt, Artificial Sequence
  RPE65 RNA guide
gaagcuacuguuguauaucuug

SEQ ID NO: 14104 - RNA, 22 nt, Artificial Sequence
  RPE65 RNA guide
gaaguccuaaugguagcaccug

SEQ ID NO: 14105 - RNA, 22 nt, Artificial Sequence
  RPE65 RNA guide
gaaguccuuggaaaacaggcaa

SEQ ID NO: 14106 - RNA, 22 nt, Artificial Sequence
  RPE65 RNA guide
gaauauuguuacuggcugggua

SEQ ID NO: 14107 - RNA, 22 nt, Artificial Sequence
  RPE65 RNA guide
gaaugaauugaugcuguauacu

SEQ ID NO: 14108 - RNA, 22 nt, Artificial Sequence
  RPE65 RNA guide
gaauggagacacuacaacugcc

SEQ ID NO: 14109 - RNA, 22 nt, Artificial Sequence
  RPE65 RNA guide
gaauugaugcuguauacucuca

SEQ ID NO: 14110 - RNA, 22 nt, Artificial Sequence
  RPE65 RNA guide
gacaagguacugcccaaagaag

SEQ ID NO: 14111 - RNA, 22 nt, Artificial Sequence
  RPE65 RNA guide
gacacuacaacugccuuggaug

SEQ ID NO: 14112 - RNA, 22 nt, Artificial Sequence
  RPE65 RNA guide
gacagugguagaaguccuaaug

SEQ ID NO: 14113 - RNA, 22 nt, Artificial Sequence
  RPE65 RNA guide
gacuuaaugaaagaguauugga

SEQ ID NO: 14114 - RNA, 22 nt, Artificial Sequence
  RPE65 RNA guide
gacuucuaccacugucccuaac

SEQ ID NO: 14115 - RNA, 22 nt, Artificial Sequence
  RPE65 RNA guide
gacuucuuugggcaguaccuug

SEQ ID NO: 14116 - RNA, 22 nt, Artificial Sequence
  RPE65 RNA guide
gagacacuacaacugccuugga

SEQ ID NO: 14117 - RNA, 22 nt, Artificial Sequence
  RPE65 RNA guide
gagacuuaaugaaagaguauug

SEQ ID NO: 14118 - RNA, 22 nt, Artificial Sequence
  RPE65 RNA guide
gagaguauacagcaucaauuca

SEQ ID NO: 14119 - RNA, 22 nt, Artificial Sequence
  RPE65 RNA guide
gagauaugaaugaauugaugcu

SEQ ID NO: 14120 - RNA, 22 nt, Artificial Sequence
  RPE65 RNA guide
gagauauuauggaugcuaagcc

SEQ ID NO: 14121 - RNA, 22 nt, Artificial Sequence
  RPE65 RNA guide
gagcccggaauauuguuacugg

SEQ ID NO: 14122 - RNA, 22 nt, Artificial Sequence
  RPE65 RNA guide
gagcuuggaggcuacccagcca

SEQ ID NO: 14123 - RNA, 22 nt, Artificial Sequence
  RPE65 RNA guide
gaggcuacccagccaguaacaa

SEQ ID NO: 14124 - RNA, 22 nt, Artificial Sequence
  RPE65 RNA guide
gaguauacagcaucaauucauu

SEQ ID NO: 14125 - RNA, 22 nt, Artificial Sequence
  RPE65 RNA guide
gaguauuggagauaugaaugaa

SEQ ID NO: 14126 - RNA, 22 nt, Artificial Sequence
  RPE65 RNA guide
gauauacaacaguagcuucauu

SEQ ID NO: 14127 - RNA, 22 nt, Artificial Sequence
  RPE65 RNA guide
gauauauacuauaccagcuaac

SEQ ID NO: 14128 - RNA, 22 nt, Artificial Sequence
  RPE65 RNA guide
gauaugaaugaauugaugcugu

SEQ ID NO: 14129 - RNA, 22 nt, Artificial Sequence
  RPE65 RNA guide
gauauuauggaugcuaagcccc

SEQ ID NO: 14130 - RNA, 22 nt, Artificial Sequence
  RPE65 RNA guide
gaugcuaagccccaggugcuac

SEQ ID NO: 14131 - RNA, 22 nt, Artificial Sequence
  RPE65 RNA guide
gaugcuguauacucucagagug

SEQ ID NO: 14132 - RNA, 22 nt, Artificial Sequence
  RPE65 RNA guide
gauggagcuuggaggcuaccca

SEQ ID NO: 14133 - RNA, 22 nt, Artificial Sequence
  RPE65 RNA guide
gauggcuaaaggauggagcuug

SEQ ID NO: 14134 - RNA, 22 nt, Artificial Sequence
  RPE65 RNA guide
gaugggcagagauauuauggau

SEQ ID NO: 14135 - RNA, 22 nt, Artificial Sequence
  RPE65 RNA guide
gcaacugagacuuaaugaaaga

SEQ ID NO: 14136 - RNA, 22 nt, Artificial Sequence
  RPE65 RNA guide
gcaagauauauacuauaccagc

SEQ ID NO: 14137 - RNA, 22 nt, Artificial Sequence
  RPE65 RNA guide
gcaagcaacugagacuuaauga

SEQ ID NO: 14138 - RNA, 22 nt, Artificial Sequence
  RPE65 RNA guide
gcacagacaagguacugcccaa

SEQ ID NO: 14139 - RNA, 22 nt, Artificial Sequence
  RPE65 RNA guide
gcaccuggggcuuagcauccau

SEQ ID NO: 14140 - RNA, 22 nt, Artificial Sequence
  RPE65 RNA guide
gcacucugagaguauacagcau

SEQ ID NO: 14141 - RNA, 22 nt, Artificial Sequence
  RPE65 RNA guide
gcacuuggauuaauuguuauac

SEQ ID NO: 14142 - RNA, 22 nt, Artificial Sequence
  RPE65 RNA guide
gcagagauauuauggaugcuaa

SEQ ID NO: 14143 - RNA, 22 nt, Artificial Sequence
  RPE65 RNA guide
gcaguaccuugucugugcuggc

SEQ ID NO: 14144 - RNA, 22 nt, Artificial Sequence
  RPE65 RNA guide
gcaguuguagugucuccauuca

SEQ ID NO: 14145 - RNA, 22 nt, Artificial Sequence
  RPE65 RNA guide
gcaucaauucauucauaucucc

SEQ ID NO: 14146 - RNA, 22 nt, Artificial Sequence
  RPE65 RNA guide
gcauccauaauaucucugccca

SEQ ID NO: 14147 - RNA, 22 nt, Artificial Sequence
  RPE65 RNA guide
gccagcacagacaagguacugc

SEQ ID NO: 14148 - RNA, 22 nt, Artificial Sequence
  RPE65 RNA guide
gccaguaacaauauuccgggcu

SEQ ID NO: 14149 - RNA, 22 nt, Artificial Sequence
  RPE65 RNA guide
gcccaaagaaguccuuggaaaa

SEQ ID NO: 14150 - RNA, 22 nt, Artificial Sequence
  RPE65 RNA guide
gcccauccaaggcaguuguagu

SEQ ID NO: 14151 - RNA, 22 nt, Artificial Sequence
  RPE65 RNA guide
gccccaggugcuaccauuagga

SEQ ID NO: 14152 - RNA, 22 nt, Artificial Sequence
  RPE65 RNA guide
gcccggaauauuguuacuggcu

SEQ ID NO: 14153 - RNA, 22 nt, Artificial Sequence
  RPE65 RNA guide
gcccucacuguaaggaaaugaa

SEQ ID NO: 14154 - RNA, 22 nt, Artificial Sequence
  RPE65 RNA guide
gccuaugcccucacuguaagga

SEQ ID NO: 14155 - RNA, 22 nt, Artificial Sequence
  RPE65 RNA guide
gccuccaagcuccauccuuuag

SEQ ID NO: 14156 - RNA, 22 nt, Artificial Sequence
  RPE65 RNA guide
gccuguuuuccaaggacuucuu

SEQ ID NO: 14157 - RNA, 22 nt, Artificial Sequence
  RPE65 RNA guide
gccuuggaugggcagagauauu

SEQ ID NO: 14158 - RNA, 22 nt, Artificial Sequence
  RPE65 RNA guide
gcuaaaggauggagcuuggagg

SEQ ID NO: 14159 - RNA, 22 nt, Artificial Sequence
  RPE65 RNA guide
gcuaagccccaggugcuaccau

SEQ ID NO: 14160 - RNA, 22 nt, Artificial Sequence
  RPE65 RNA guide
gcuaccauuaggacuucuacca

SEQ ID NO: 14161 - RNA, 22 nt, Artificial Sequence
  RPE65 RNA guide
gcuacccagccaguaacaauau

SEQ ID NO: 14162 - RNA, 22 nt, Artificial Sequence
  RPE65 RNA guide
gcuacuguuguauaucuuggga

SEQ ID NO: 14163 - RNA, 22 nt, Artificial Sequence
  RPE65 RNA guide
gcuacuuacccuaggggucuuc

SEQ ID NO: 14164 - RNA, 22 nt, Artificial Sequence
  RPE65 RNA guide
gcuccacccguuagggacagug

SEQ ID NO: 14165 - RNA, 22 nt, Artificial Sequence
  RPE65 RNA guide
gcuccacuguugaauggagaca

SEQ ID NO: 14166 - RNA, 22 nt, Artificial Sequence
  RPE65 RNA guide
gcuggcaagcaacugagacuua

SEQ ID NO: 14167 - RNA, 22 nt, Artificial Sequence
  RPE65 RNA guide
gcuggguagccuccaagcucca

SEQ ID NO: 14168 - RNA, 22 nt, Artificial Sequence
  RPE65 RNA guide
gcugguauaguauauaucuugc

SEQ ID NO: 14169 - RNA, 22 nt, Artificial Sequence
  RPE65 RNA guide
gcuguauacucucagagugcca

SEQ ID NO: 14170 - RNA, 22 nt, Artificial Sequence
  RPE65 RNA guide
gcuuagcauccauaauaucucu

SEQ ID NO: 14171 - RNA, 22 nt, Artificial Sequence
  RPE65 RNA guide
gcuucauuuccuuacagugagg

SEQ ID NO: 14172 - RNA, 22 nt, Artificial Sequence
  RPE65 RNA guide
gcuucccaagauauacaacagu

SEQ ID NO: 14173 - RNA, 22 nt, Artificial Sequence
  RPE65 RNA guide
gcuugccagcacagacaaggua

SEQ ID NO: 14174 - RNA, 22 nt, Artificial Sequence
  RPE65 RNA guide
gcuuggaggcuacccagccagu

SEQ ID NO: 14175 - RNA, 22 nt, Artificial Sequence
  RPE65 RNA guide
ggaaaacaggcaagauauauac

SEQ ID NO: 14176 - RNA, 22 nt, Artificial Sequence
  RPE65 RNA guide
ggaaaugaagcuacuguuguau

SEQ ID NO: 14177 - RNA, 22 nt, Artificial Sequence
  RPE65 RNA guide
ggaagcacuuggauuaauuguu

SEQ ID NO: 14178 - RNA, 22 nt, Artificial Sequence
  RPE65 RNA guide
ggaauauuguuacuggcugggu

SEQ ID NO: 14179 - RNA, 22 nt, Artificial Sequence
  RPE65 RNA guide
ggacagugguagaaguccuaau

SEQ ID NO: 14180 - RNA, 22 nt, Artificial Sequence
  RPE65 RNA guide
ggacuucuaccacugucccuaa

SEQ ID NO: 14181 - RNA, 22 nt, Artificial Sequence
  RPE65 RNA guide
ggacuucuuugggcaguaccuu

SEQ ID NO: 14182 - RNA, 22 nt, Artificial Sequence
  RPE65 RNA guide
ggagacacuacaacugccuugg

SEQ ID NO: 14183 - RNA, 22 nt, Artificial Sequence
  RPE65 RNA guide
ggagauaugaaugaauugaugc

SEQ ID NO: 14184 - RNA, 22 nt, Artificial Sequence
  RPE65 RNA guide
ggagcccggaauauuguuacug

SEQ ID NO: 14185 - RNA, 22 nt, Artificial Sequence
  RPE65 RNA guide
ggagcuuggaggcuacccagcc

SEQ ID NO: 14186 - RNA, 22 nt, Artificial Sequence
  RPE65 RNA guide
ggaggcuacccagccaguaaca

SEQ ID NO: 14187 - RNA, 22 nt, Artificial Sequence
  RPE65 RNA guide
ggaugcuaagccccaggugcua

SEQ ID NO: 14188 - RNA, 22 nt, Artificial Sequence
  RPE65 RNA guide
ggauggagcuuggaggcuaccc

SEQ ID NO: 14189 - RNA, 22 nt, Artificial Sequence
  RPE65 RNA guide
ggauggcuaaaggauggagcuu

SEQ ID NO: 14190 - RNA, 22 nt, Artificial Sequence
  RPE65 RNA guide
ggaugggcagagauauuaugga

SEQ ID NO: 14191 - RNA, 22 nt, Artificial Sequence
  RPE65 RNA guide
ggcaagauauauacuauaccag

SEQ ID NO: 14192 - RNA, 22 nt, Artificial Sequence
  RPE65 RNA guide
ggcaagcaacugagacuuaaug

SEQ ID NO: 14193 - RNA, 22 nt, Artificial Sequence
  RPE65 RNA guide
ggcacucugagaguauacagca

SEQ ID NO: 14194 - RNA, 22 nt, Artificial Sequence
  RPE65 RNA guide
ggcagagauauuauggaugcua

SEQ ID NO: 14195 - RNA, 22 nt, Artificial Sequence
  RPE65 RNA guide
ggcaguaccuugucugugcugg

SEQ ID NO: 14196 - RNA, 22 nt, Artificial Sequence
  RPE65 RNA guide
ggcaguuguagugucuccauuc

SEQ ID NO: 14197 - RNA, 22 nt, Artificial Sequence
  RPE65 RNA guide
ggcuaaaggauggagcuuggag

SEQ ID NO: 14198 - RNA, 22 nt, Artificial Sequence
  RPE65 RNA guide
ggcuacccagccaguaacaaua

SEQ ID NO: 14199 - RNA, 22 nt, Artificial Sequence
  RPE65 RNA guide
ggcuacuuacccuaggggucuu

SEQ ID NO: 14200 - RNA, 22 nt, Artificial Sequence
  RPE65 RNA guide
ggcuccacccguuagggacagu

SEQ ID NO: 14201 - RNA, 22 nt, Artificial Sequence
  RPE65 RNA guide
ggcuccacuguugaauggagac

SEQ ID NO: 14202 - RNA, 22 nt, Artificial Sequence
  RPE65 RNA guide
ggcuggguagccuccaagcucc

SEQ ID NO: 14203 - RNA, 22 nt, Artificial Sequence
  RPE65 RNA guide
ggcuuagcauccauaauaucuc

SEQ ID NO: 14204 - RNA, 22 nt, Artificial Sequence
  RPE65 RNA guide
gggaagcacuuggauuaauugu

SEQ ID NO: 14205 - RNA, 22 nt, Artificial Sequence
  RPE65 RNA guide
gggacagugguagaaguccuaa

SEQ ID NO: 14206 - RNA, 22 nt, Artificial Sequence
  RPE65 RNA guide
gggcagagauauuauggaugcu

SEQ ID NO: 14207 - RNA, 22 nt, Artificial Sequence
  RPE65 RNA guide
gggcaguaccuugucugugcug

SEQ ID NO: 14208 - RNA, 22 nt, Artificial Sequence
  RPE65 RNA guide
gggcuccacccguuagggacag

SEQ ID NO: 14209 - RNA, 22 nt, Artificial Sequence
  RPE65 RNA guide
gggcuccacuguugaauggaga

SEQ ID NO: 14210 - RNA, 22 nt, Artificial Sequence
  RPE65 RNA guide
gggcuuagcauccauaauaucu

SEQ ID NO: 14211 - RNA, 22 nt, Artificial Sequence
  RPE65 RNA guide
ggggcuuagcauccauaauauc

SEQ ID NO: 14212 - RNA, 22 nt, Artificial Sequence
  RPE65 RNA guide
ggggucuucuucaacaaaacug

SEQ ID NO: 14213 - RNA, 22 nt, Artificial Sequence
  RPE65 RNA guide
ggguagccuccaagcuccaucc

SEQ ID NO: 14214 - RNA, 22 nt, Artificial Sequence
  RPE65 RNA guide
gggucuucuucaacaaaacugu

SEQ ID NO: 14215 - RNA, 22 nt, Artificial Sequence
  RPE65 RNA guide
gguacugcccaaagaaguccuu

SEQ ID NO: 14216 - RNA, 22 nt, Artificial Sequence
  RPE65 RNA guide
gguagaaguccuaaugguagca

SEQ ID NO: 14217 - RNA, 22 nt, Artificial Sequence
  RPE65 RNA guide
gguagcaccuggggcuuagcau

SEQ ID NO: 14218 - RNA, 22 nt, Artificial Sequence
  RPE65 RNA guide
gguagccuccaagcuccauccu

SEQ ID NO: 14219 - RNA, 22 nt, Artificial Sequence
  RPE65 RNA guide
gguauaguauauaucuugccug

SEQ ID NO: 14220 - RNA, 22 nt, Artificial Sequence
  RPE65 RNA guide
gguauauguuuggcacucugag

SEQ ID NO: 14221 - RNA, 22 nt, Artificial Sequence
  RPE65 RNA guide
ggucuucuucaacaaaacugua

SEQ ID NO: 14222 - RNA, 22 nt, Artificial Sequence
  RPE65 RNA guide
ggugcuaccauuaggacuucua

SEQ ID NO: 14223 - RNA, 22 nt, Artificial Sequence
  RPE65 RNA guide
gguuguuagcugguauaguaua

SEQ ID NO: 14224 - RNA, 22 nt, Artificial Sequence
  RPE65 RNA guide
guaacaauauuccgggcuccac

SEQ ID NO: 14225 - RNA, 22 nt, Artificial Sequence
  RPE65 RNA guide
guaaggaaaugaagcuacuguu

SEQ ID NO: 14226 - RNA, 22 nt, Artificial Sequence
  RPE65 RNA guide
guaccuugucugugcuggcaag

SEQ ID NO: 14227 - RNA, 22 nt, Artificial Sequence
  RPE65 RNA guide
guacugcccaaagaaguccuug

SEQ ID NO: 14228 - RNA, 22 nt, Artificial Sequence
  RPE65 RNA guide
guagaaguccuaaugguagcac

SEQ ID NO: 14229 - RNA, 22 nt, Artificial Sequence
  RPE65 RNA guide
guagcaccuggggcuuagcauc

SEQ ID NO: 14230 - RNA, 22 nt, Artificial Sequence
  RPE65 RNA guide
guagccuccaagcuccauccuu

SEQ ID NO: 14231 - RNA, 22 nt, Artificial Sequence
  RPE65 RNA guide
guagcuucauuuccuuacagug

SEQ ID NO: 14232 - RNA, 22 nt, Artificial Sequence
  RPE65 RNA guide
guagugucuccauucaacagug

SEQ ID NO: 14233 - RNA, 22 nt, Artificial Sequence
  RPE65 RNA guide
guauaacaauuaauccaagugc

SEQ ID NO: 14234 - RNA, 22 nt, Artificial Sequence
  RPE65 RNA guide
guauacagcaucaauucauuca

SEQ ID NO: 14235 - RNA, 22 nt, Artificial Sequence
  RPE65 RNA guide
guauacucucagagugccaaac

SEQ ID NO: 14236 - RNA, 22 nt, Artificial Sequence
  RPE65 RNA guide
guauaguauauaucuugccugu

SEQ ID NO: 14237 - RNA, 22 nt, Artificial Sequence
  RPE65 RNA guide
guauauaucuugccuguuuucc

SEQ ID NO: 14238 - RNA, 22 nt, Artificial Sequence
  RPE65 RNA guide
guauaucuugggaagcacuugg

SEQ ID NO: 14239 - RNA, 22 nt, Artificial Sequence
  RPE65 RNA guide
guauauguuuggcacucugaga

SEQ ID NO: 14240 - RNA, 22 nt, Artificial Sequence
  RPE65 RNA guide
guauuggagauaugaaugaauu

SEQ ID NO: 14241 - RNA, 22 nt, Artificial Sequence
  RPE65 RNA guide
guccuaaugguagcaccugggg

SEQ ID NO: 14242 - RNA, 22 nt, Artificial Sequence
  RPE65 RNA guide
guccuuggaaaacaggcaagau

SEQ ID NO: 14243 - RNA, 22 nt, Artificial Sequence
  RPE65 RNA guide
gucucaguugcuugccagcaca

SEQ ID NO: 14244 - RNA, 22 nt, Artificial Sequence
  RPE65 RNA guide
gucuccauucaacaguggagcc

SEQ ID NO: 14245 - RNA, 22 nt, Artificial Sequence
  RPE65 RNA guide
gucugugcuggcaagcaacuga

SEQ ID NO: 14246 - RNA, 22 nt, Artificial Sequence
  RPE65 RNA guide
gucuucuucaacaaaacuguau

SEQ ID NO: 14247 - RNA, 22 nt, Artificial Sequence
  RPE65 RNA guide
gugcuaccauuaggacuucuac

SEQ ID NO: 14248 - RNA, 22 nt, Artificial Sequence
  RPE65 RNA guide
gugcuggcaagcaacugagacu

SEQ ID NO: 14249 - RNA, 22 nt, Artificial Sequence
  RPE65 RNA guide
gugcuucccaagauauacaaca

SEQ ID NO: 14250 - RNA, 22 nt, Artificial Sequence
  RPE65 RNA guide
guggagcccggaauauuguuac

SEQ ID NO: 14251 - RNA, 22 nt, Artificial Sequence
  RPE65 RNA guide
gugguagaaguccuaaugguag

SEQ ID NO: 14252 - RNA, 22 nt, Artificial Sequence
  RPE65 RNA guide
gugucuccauucaacaguggag

SEQ ID NO: 14253 - RNA, 22 nt, Artificial Sequence
  RPE65 RNA guide
guuaagguuguuagcugguaua

SEQ ID NO: 14254 - RNA, 22 nt, Artificial Sequence
  RPE65 RNA guide
guuacuggcuggguagccucca

SEQ ID NO: 14255 - RNA, 22 nt, Artificial Sequence
  RPE65 RNA guide
guuagcugguauaguauauauc

SEQ ID NO: 14256 - RNA, 22 nt, Artificial Sequence
  RPE65 RNA guide
guuagggacagugguagaaguc

SEQ ID NO: 14257 - RNA, 22 nt, Artificial Sequence
  RPE65 RNA guide
guuauacaguuuuguugaagaa

SEQ ID NO: 14258 - RNA, 22 nt, Artificial Sequence
  RPE65 RNA guide
guugaagaagaccccuagggua

SEQ ID NO: 14259 - RNA, 22 nt, Artificial Sequence
  RPE65 RNA guide
guugaauggagacacuacaacu

SEQ ID NO: 14260 - RNA, 22 nt, Artificial Sequence
  RPE65 RNA guide
guugcuugccagcacagacaag

SEQ ID NO: 14261 - RNA, 22 nt, Artificial Sequence
  RPE65 RNA guide
guuguagugucuccauucaaca

SEQ ID NO: 14262 - RNA, 22 nt, Artificial Sequence
  RPE65 RNA guide
guuguauaucuugggaagcacu

SEQ ID NO: 14263 - RNA, 22 nt, Artificial Sequence
  RPE65 RNA guide
guuguuagcugguauaguauau

SEQ ID NO: 14264 - RNA, 22 nt, Artificial Sequence
  RPE65 RNA guide
guuuggcacucugagaguauac

SEQ ID NO: 14265 - RNA, 22 nt, Artificial Sequence
  RPE65 RNA guide
guuuuccaaggacuucuuuggg

SEQ ID NO: 14266 - RNA, 22 nt, Artificial Sequence
  RPE65 RNA guide
guuuuguugaagaagaccccua

SEQ ID NO: 14267 - RNA, 22 nt, Artificial Sequence
  RPE65 RNA guide
uaaaggauggagcuuggaggcu

SEQ ID NO: 14268 - RNA, 22 nt, Artificial Sequence
  RPE65 RNA guide
uaacaauauuccgggcuccacu

SEQ ID NO: 14269 - RNA, 22 nt, Artificial Sequence
  RPE65 RNA guide
uaacaauuaauccaagugcuuc

SEQ ID NO: 14270 - RNA, 22 nt, Artificial Sequence
  RPE65 RNA guide
uaagccccaggugcuaccauua

SEQ ID NO: 14271 - RNA, 22 nt, Artificial Sequence
  RPE65 RNA guide
uaaggaaaugaagcuacuguug

SEQ ID NO: 14272 - RNA, 22 nt, Artificial Sequence
  RPE65 RNA guide
uaagguuguuagcugguauagu

SEQ ID NO: 14273 - RNA, 22 nt, Artificial Sequence
  RPE65 RNA guide
uaagucucaguugcuugccagc

SEQ ID NO: 14274 - RNA, 22 nt, Artificial Sequence
  RPE65 RNA guide
uaauaucucugcccauccaagg

SEQ ID NO: 14275 - RNA, 22 nt, Artificial Sequence
  RPE65 RNA guide
uaauccaagugcuucccaagau

SEQ ID NO: 14276 - RNA, 22 nt, Artificial Sequence
  RPE65 RNA guide
uaaugguagcaccuggggcuua

SEQ ID NO: 14277 - RNA, 22 nt, Artificial Sequence
  RPE65 RNA guide
uacaacaguagcuucauuuccu

SEQ ID NO: 14278 - RNA, 22 nt, Artificial Sequence
  RPE65 RNA guide
uacaacugccuuggaugggcag

SEQ ID NO: 14279 - RNA, 22 nt, Artificial Sequence
  RPE65 RNA guide
uacagcaucaauucauucauau

SEQ ID NO: 14280 - RNA, 22 nt, Artificial Sequence
  RPE65 RNA guide
uacaguuuuguugaagaagacc

SEQ ID NO: 14281 - RNA, 22 nt, Artificial Sequence
  RPE65 RNA guide
uaccacugucccuaacgggugg

SEQ ID NO: 14282 - RNA, 22 nt, Artificial Sequence
  RPE65 RNA guide
uaccagcuaacaaccuuaacau

SEQ ID NO: 14283 - RNA, 22 nt, Artificial Sequence
  RPE65 RNA guide
uaccauuaggacuucuaccacu

SEQ ID NO: 14284 - RNA, 22 nt, Artificial Sequence
  RPE65 RNA guide
uacccagccaguaacaauauuc

SEQ ID NO: 14285 - RNA, 22 nt, Artificial Sequence
  RPE65 RNA guide
uacccuaggggucuucuucaac

SEQ ID NO: 14286 - RNA, 22 nt, Artificial Sequence
  RPE65 RNA guide
uaccuugucugugcuggcaagc

SEQ ID NO: 14287 - RNA, 22 nt, Artificial Sequence
  RPE65 RNA guide
uacuauaccagcuaacaaccuu

SEQ ID NO: 14288 - RNA, 22 nt, Artificial Sequence
  RPE65 RNA guide
uacucucagagugccaaacaua

SEQ ID NO: 14289 - RNA, 22 nt, Artificial Sequence
  RPE65 RNA guide
uacucuuucauuaagucucagu

SEQ ID NO: 14290 - RNA, 22 nt, Artificial Sequence
  RPE65 RNA guide
uacugcccaaagaaguccuugg

SEQ ID NO: 14291 - RNA, 22 nt, Artificial Sequence
  RPE65 RNA guide
uacuggcuggguagccuccaag

SEQ ID NO: 14292 - RNA, 22 nt, Artificial Sequence
  RPE65 RNA guide
uacuguuguauaucuugggaag

SEQ ID NO: 14293 - RNA, 22 nt, Artificial Sequence
  RPE65 RNA guide
uacuuacccuaggggucuucuu

SEQ ID NO: 14294 - RNA, 22 nt, Artificial Sequence
  RPE65 RNA guide
uagaaguccuaaugguagcacc

SEQ ID NO: 14295 - RNA, 22 nt, Artificial Sequence
  RPE65 RNA guide
uagcaccuggggcuuagcaucc

SEQ ID NO: 14296 - RNA, 22 nt, Artificial Sequence
  RPE65 RNA guide
uagcauccauaauaucucugcc

SEQ ID NO: 14297 - RNA, 22 nt, Artificial Sequence
  RPE65 RNA guide
uagccuccaagcuccauccuuu

SEQ ID NO: 14298 - RNA, 22 nt, Artificial Sequence
  RPE65 RNA guide
uagcugguauaguauauaucuu

SEQ ID NO: 14299 - RNA, 22 nt, Artificial Sequence
  RPE65 RNA guide
uagcuucauuuccuuacaguga

SEQ ID NO: 14300 - RNA, 22 nt, Artificial Sequence
  RPE65 RNA guide
uaggacuucuaccacugucccu

SEQ ID NO: 14301 - RNA, 22 nt, Artificial Sequence
  RPE65 RNA guide
uagggacagugguagaaguccu

SEQ ID NO: 14302 - RNA, 22 nt, Artificial Sequence
  RPE65 RNA guide
uaggggucuucuucaacaaaac

SEQ ID NO: 14303 - RNA, 22 nt, Artificial Sequence
  RPE65 RNA guide
uaguauauaucuugccuguuuu

SEQ ID NO: 14304 - RNA, 22 nt, Artificial Sequence
  RPE65 RNA guide
uagugucuccauucaacagugg

SEQ ID NO: 14305 - RNA, 22 nt, Artificial Sequence
  RPE65 RNA guide
uauaacaauuaauccaagugcu

SEQ ID NO: 14306 - RNA, 22 nt, Artificial Sequence
  RPE65 RNA guide
uauacaacaguagcuucauuuc

SEQ ID NO: 14307 - RNA, 22 nt, Artificial Sequence
  RPE65 RNA guide
uauacaguuuuguugaagaaga

SEQ ID NO: 14308 - RNA, 22 nt, Artificial Sequence
  RPE65 RNA guide
uauaccagcuaacaaccuuaac

SEQ ID NO: 14309 - RNA, 22 nt, Artificial Sequence
  RPE65 RNA guide
uauacuauaccagcuaacaacc

SEQ ID NO: 14310 - RNA, 22 nt, Artificial Sequence
  RPE65 RNA guide
uauacucucagagugccaaaca

SEQ ID NO: 14311 - RNA, 22 nt, Artificial Sequence
  RPE65 RNA guide
uauaguauauaucuugccuguu

SEQ ID NO: 14312 - RNA, 22 nt, Artificial Sequence
  RPE65 RNA guide
uauauacuauaccagcuaacaa

SEQ ID NO: 14313 - RNA, 22 nt, Artificial Sequence
  RPE65 RNA guide
uauauaucuugccuguuuucca

SEQ ID NO: 14314 - RNA, 22 nt, Artificial Sequence
  RPE65 RNA guide
uauaucuugccuguuuuccaag

SEQ ID NO: 14315 - RNA, 22 nt, Artificial Sequence
  RPE65 RNA guide
uauaucuugggaagcacuugga

SEQ ID NO: 14316 - RNA, 22 nt, Artificial Sequence
  RPE65 RNA guide
uauauguuuggcacucugagag

SEQ ID NO: 14317 - RNA, 22 nt, Artificial Sequence
  RPE65 RNA guide
uaucuccaauacucuuucauua

SEQ ID NO: 14318 - RNA, 22 nt, Artificial Sequence
  RPE65 RNA guide
uaucucugcccauccaaggcag

SEQ ID NO: 14319 - RNA, 22 nt, Artificial Sequence
  RPE65 RNA guide
uaucuugccuguuuuccaagga

SEQ ID NO: 14320 - RNA, 22 nt, Artificial Sequence
  RPE65 RNA guide
uaucuugggaagcacuuggauu

SEQ ID NO: 14321 - RNA, 22 nt, Artificial Sequence
  RPE65 RNA guide
uaugaaugaauugaugcuguau

SEQ ID NO: 14322 - RNA, 22 nt, Artificial Sequence
  RPE65 RNA guide
uaugcccucacuguaaggaaau

SEQ ID NO: 14323 - RNA, 22 nt, Artificial Sequence
  RPE65 RNA guide
uauggaugcuaagccccaggug

SEQ ID NO: 14324 - RNA, 22 nt, Artificial Sequence
  RPE65 RNA guide
uauguuuggcacucugagagua

SEQ ID NO: 14325 - RNA, 22 nt, Artificial Sequence
  RPE65 RNA guide
uauuauggaugcuaagccccag

SEQ ID NO: 14326 - RNA, 22 nt, Artificial Sequence
  RPE65 RNA guide
uauuccgggcuccacuguugaa

SEQ ID NO: 14327 - RNA, 22 nt, Artificial Sequence
  RPE65 RNA guide
uauuggagauaugaaugaauug

SEQ ID NO: 14328 - RNA, 22 nt, Artificial Sequence
  RPE65 RNA guide
uauuguuacuggcuggguagcc

SEQ ID NO: 14329 - RNA, 22 nt, Artificial Sequence
  RPE65 RNA guide
ucaacaguggagcccggaauau

SEQ ID NO: 14330 - RNA, 22 nt, Artificial Sequence
  RPE65 RNA guide
ucaauucauucauaucuccaau

SEQ ID NO: 14331 - RNA, 22 nt, Artificial Sequence
  RPE65 RNA guide
ucacaugccuaugcccucacug

SEQ ID NO: 14332 - RNA, 22 nt, Artificial Sequence
  RPE65 RNA guide
ucacuguaaggaaaugaagcua

SEQ ID NO: 14333 - RNA, 22 nt, Artificial Sequence
  RPE65 RNA guide
ucagagugccaaacauauacca

SEQ ID NO: 14334 - RNA, 22 nt, Artificial Sequence
  RPE65 RNA guide
ucaguugcuugccagcacagac

SEQ ID NO: 14335 - RNA, 22 nt, Artificial Sequence
  RPE65 RNA guide
ucauuaagucucaguugcuugc

SEQ ID NO: 14336 - RNA, 22 nt, Artificial Sequence
  RPE65 RNA guide
ucauucauaucuccaauacucu

SEQ ID NO: 14337 - RNA, 22 nt, Artificial Sequence
  RPE65 RNA guide
ucauuuccuuacagugagggca

SEQ ID NO: 14338 - RNA, 22 nt, Artificial Sequence
  RPE65 RNA guide
uccaaggacuucuuugggcagu

SEQ ID NO: 14339 - RNA, 22 nt, Artificial Sequence
  RPE65 RNA guide
uccaaggcaguuguagugucuc

SEQ ID NO: 14340 - RNA, 22 nt, Artificial Sequence
  RPE65 RNA guide
uccaagugcuucccaagauaua

SEQ ID NO: 14341 - RNA, 22 nt, Artificial Sequence
  RPE65 RNA guide
uccaauacucuuucauuaaguc

SEQ ID NO: 14342 - RNA, 22 nt, Artificial Sequence
  RPE65 RNA guide
uccacccguuagggacaguggu

SEQ ID NO: 14343 - RNA, 22 nt, Artificial Sequence
  RPE65 RNA guide
uccacuguugaauggagacacu

SEQ ID NO: 14344 - RNA, 22 nt, Artificial Sequence
  RPE65 RNA guide
uccauaauaucucugcccaucc

SEQ ID NO: 14345 - RNA, 22 nt, Artificial Sequence
  RPE65 RNA guide
uccauucaacaguggagcccgg

SEQ ID NO: 14346 - RNA, 22 nt, Artificial Sequence
  RPE65 RNA guide
uccauugguauauguuuggcac

SEQ ID NO: 14347 - RNA, 22 nt, Artificial Sequence
  RPE65 RNA guide
ucccaagauauacaacaguagc

SEQ ID NO: 14348 - RNA, 22 nt, Artificial Sequence
  RPE65 RNA guide
uccgggcuccacuguugaaugg

SEQ ID NO: 14349 - RNA, 22 nt, Artificial Sequence
  RPE65 RNA guide
uccuaaugguagcaccuggggc

SEQ ID NO: 14350 - RNA, 22 nt, Artificial Sequence
  RPE65 RNA guide
uccuuacagugagggcauaggc

SEQ ID NO: 14351 - RNA, 22 nt, Artificial Sequence
  RPE65 RNA guide
uccuuggaaaacaggcaagaua

SEQ ID NO: 14352 - RNA, 22 nt, Artificial Sequence
  RPE65 RNA guide
ucuaccacugucccuaacgggu

SEQ ID NO: 14353 - RNA, 22 nt, Artificial Sequence
  RPE65 RNA guide
ucucagagugccaaacauauac

SEQ ID NO: 14354 - RNA, 22 nt, Artificial Sequence
  RPE65 RNA guide
ucucaguugcuugccagcacag

SEQ ID NO: 14355 - RNA, 22 nt, Artificial Sequence
  RPE65 RNA guide
ucuccaauacucuuucauuaag

SEQ ID NO: 14356 - RNA, 22 nt, Artificial Sequence
  RPE65 RNA guide
ucuccauucaacaguggagccc

SEQ ID NO: 14357 - RNA, 22 nt, Artificial Sequence
  RPE65 RNA guide
ucucugcccauccaaggcaguu

SEQ ID NO: 14358 - RNA, 22 nt, Artificial Sequence
  RPE65 RNA guide
ucugagaguauacagcaucaau

SEQ ID NO: 14359 - RNA, 22 nt, Artificial Sequence
  RPE65 RNA guide
ucugcccauccaaggcaguugu

SEQ ID NO: 14360 - RNA, 22 nt, Artificial Sequence
  RPE65 RNA guide
ucugugcuggcaagcaacugag

SEQ ID NO: 14361 - RNA, 22 nt, Artificial Sequence
  RPE65 RNA guide
ucuugccuguuuuccaaggacu

SEQ ID NO: 14362 - RNA, 22 nt, Artificial Sequence
  RPE65 RNA guide
ucuugggaagcacuuggauuaa

SEQ ID NO: 14363 - RNA, 22 nt, Artificial Sequence
  RPE65 RNA guide
ucuuucauuaagucucaguugc

SEQ ID NO: 14364 - RNA, 22 nt, Artificial Sequence
  RPE65 RNA guide
ucuuugggcaguaccuugucug

SEQ ID NO: 14365 - RNA, 22 nt, Artificial Sequence
  RPE65 RNA guide
ugaaagaguauuggagauauga

SEQ ID NO: 14366 - RNA, 22 nt, Artificial Sequence
  RPE65 RNA guide
ugaagaagaccccuaggguaag

SEQ ID NO: 14367 - RNA, 22 nt, Artificial Sequence
  RPE65 RNA guide
ugaagcuacuguuguauaucuu

SEQ ID NO: 14368 - RNA, 22 nt, Artificial Sequence
  RPE65 RNA guide
ugaaugaauugaugcuguauac

SEQ ID NO: 14369 - RNA, 22 nt, Artificial Sequence
  RPE65 RNA guide
ugaauggagacacuacaacugc

SEQ ID NO: 14370 - RNA, 22 nt, Artificial Sequence
  RPE65 RNA guide
ugaauugaugcuguauacucuc

SEQ ID NO: 14371 - RNA, 22 nt, Artificial Sequence
  RPE65 RNA guide
ugagacuuaaugaaagaguauu

SEQ ID NO: 14372 - RNA, 22 nt, Artificial Sequence
  RPE65 RNA guide
ugagaguauacagcaucaauuc

SEQ ID NO: 14373 - RNA, 22 nt, Artificial Sequence
  RPE65 RNA guide
ugaugcuguauacucucagagu

SEQ ID NO: 14374 - RNA, 22 nt, Artificial Sequence
  RPE65 RNA guide
ugccagcacagacaagguacug

SEQ ID NO: 14375 - RNA, 22 nt, Artificial Sequence
  RPE65 RNA guide
ugcccaaagaaguccuuggaaa

SEQ ID NO: 14376 - RNA, 22 nt, Artificial Sequence
  RPE65 RNA guide
ugcccauccaaggcaguuguag

SEQ ID NO: 14377 - RNA, 22 nt, Artificial Sequence
  RPE65 RNA guide
ugcccucacuguaaggaaauga

SEQ ID NO: 14378 - RNA, 22 nt, Artificial Sequence
  RPE65 RNA guide
ugccuaugcccucacuguaagg

SEQ ID NO: 14379 - RNA, 22 nt, Artificial Sequence
  RPE65 RNA guide
ugccuguuuuccaaggacuucu

SEQ ID NO: 14380 - RNA, 22 nt, Artificial Sequence
  RPE65 RNA guide
ugccuuggaugggcagagauau

SEQ ID NO: 14381 - RNA, 22 nt, Artificial Sequence
  RPE65 RNA guide
ugcuaagccccaggugcuacca

SEQ ID NO: 14382 - RNA, 22 nt, Artificial Sequence
  RPE65 RNA guide
ugcuaccauuaggacuucuacc

SEQ ID NO: 14383 - RNA, 22 nt, Artificial Sequence
  RPE65 RNA guide
ugcuggcaagcaacugagacuu

SEQ ID NO: 14384 - RNA, 22 nt, Artificial Sequence
  RPE65 RNA guide
ugcuguauacucucagagugcc

SEQ ID NO: 14385 - RNA, 22 nt, Artificial Sequence
  RPE65 RNA guide
ugcuucccaagauauacaacag

SEQ ID NO: 14386 - RNA, 22 nt, Artificial Sequence
  RPE65 RNA guide
ugcuugccagcacagacaaggu

SEQ ID NO: 14387 - RNA, 22 nt, Artificial Sequence
  RPE65 RNA guide
uggaaaacaggcaagauauaua

SEQ ID NO: 14388 - RNA, 22 nt, Artificial Sequence
  RPE65 RNA guide
uggagacacuacaacugccuug

SEQ ID NO: 14389 - RNA, 22 nt, Artificial Sequence
  RPE65 RNA guide
uggagauaugaaugaauugaug

SEQ ID NO: 14390 - RNA, 22 nt, Artificial Sequence
  RPE65 RNA guide
uggagcccggaauauuguuacu

SEQ ID NO: 14391 - RNA, 22 nt, Artificial Sequence
  RPE65 RNA guide
uggagcuuggaggcuacccagc

SEQ ID NO: 14392 - RNA, 22 nt, Artificial Sequence
  RPE65 RNA guide
uggaggcuacccagccaguaac

SEQ ID NO: 14393 - RNA, 22 nt, Artificial Sequence
  RPE65 RNA guide
uggaugcuaagccccaggugcu

SEQ ID NO: 14394 - RNA, 22 nt, Artificial Sequence
  RPE65 RNA guide
uggaugggcagagauauuaugg

SEQ ID NO: 14395 - RNA, 22 nt, Artificial Sequence
  RPE65 RNA guide
uggcaagcaacugagacuuaau

SEQ ID NO: 14396 - RNA, 22 nt, Artificial Sequence
  RPE65 RNA guide
uggcacucugagaguauacagc

SEQ ID NO: 14397 - RNA, 22 nt, Artificial Sequence
  RPE65 RNA guide
uggcuaaaggauggagcuugga

SEQ ID NO: 14398 - RNA, 22 nt, Artificial Sequence
  RPE65 RNA guide
uggcuacuuacccuaggggucu

SEQ ID NO: 14399 - RNA, 22 nt, Artificial Sequence
  RPE65 RNA guide
uggcuggguagccuccaagcuc

SEQ ID NO: 14400 - RNA, 22 nt, Artificial Sequence
  RPE65 RNA guide
ugggaagcacuuggauuaauug

SEQ ID NO: 14401 - RNA, 22 nt, Artificial Sequence
  RPE65 RNA guide
ugggcagagauauuauggaugc

SEQ ID NO: 14402 - RNA, 22 nt, Artificial Sequence
  RPE65 RNA guide
ugggcaguaccuugucugugcu

SEQ ID NO: 14403 - RNA, 22 nt, Artificial Sequence
  RPE65 RNA guide
uggggcuuagcauccauaauau

SEQ ID NO: 14404 - RNA, 22 nt, Artificial Sequence
  RPE65 RNA guide
uggguagccuccaagcuccauc

SEQ ID NO: 14405 - RNA, 22 nt, Artificial Sequence
  RPE65 RNA guide
ugguagaaguccuaaugguagc

SEQ ID NO: 14406 - RNA, 22 nt, Artificial Sequence
  RPE65 RNA guide
ugguagcaccuggggcuuagca

SEQ ID NO: 14407 - RNA, 22 nt, Artificial Sequence
  RPE65 RNA guide
ugguauaguauauaucuugccu

SEQ ID NO: 14408 - RNA, 22 nt, Artificial Sequence
  RPE65 RNA guide
ugguauauguuuggcacucuga

SEQ ID NO: 14409 - RNA, 22 nt, Artificial Sequence
  RPE65 RNA guide
uguaaggaaaugaagcuacugu

SEQ ID NO: 14410 - RNA, 22 nt, Artificial Sequence
  RPE65 RNA guide
uguagugucuccauucaacagu

SEQ ID NO: 14411 - RNA, 22 nt, Artificial Sequence
  RPE65 RNA guide
uguauaacaauuaauccaagug

SEQ ID NO: 14412 - RNA, 22 nt, Artificial Sequence
  RPE65 RNA guide
uguauacucucagagugccaaa

SEQ ID NO: 14413 - RNA, 22 nt, Artificial Sequence
  RPE65 RNA guide
uguauaucuugggaagcacuug

SEQ ID NO: 14414 - RNA, 22 nt, Artificial Sequence
  RPE65 RNA guide
ugucuccauucaacaguggagc

SEQ ID NO: 14415 - RNA, 22 nt, Artificial Sequence
  RPE65 RNA guide
ugucugugcuggcaagcaacug

SEQ ID NO: 14416 - RNA, 22 nt, Artificial Sequence
  RPE65 RNA guide
ugugcuggcaagcaacugagac

SEQ ID NO: 14417 - RNA, 22 nt, Artificial Sequence
  RPE65 RNA guide
uguuaagguuguuagcugguau

SEQ ID NO: 14418 - RNA, 22 nt, Artificial Sequence
  RPE65 RNA guide
uguuacuggcuggguagccucc

SEQ ID NO: 14419 - RNA, 22 nt, Artificial Sequence
  RPE65 RNA guide
uguuagcugguauaguauauau

SEQ ID NO: 14420 - RNA, 22 nt, Artificial Sequence
  RPE65 RNA guide
uguuauacaguuuuguugaaga

SEQ ID NO: 14421 - RNA, 22 nt, Artificial Sequence
  RPE65 RNA guide
uguugaagaagaccccuagggu

SEQ ID NO: 14422 - RNA, 22 nt, Artificial Sequence
  RPE65 RNA guide
uguugaauggagacacuacaac

SEQ ID NO: 14423 - RNA, 22 nt, Artificial Sequence
  RPE65 RNA guide
uguuguauaucuugggaagcac

SEQ ID NO: 14424 - RNA, 22 nt, Artificial Sequence
  RPE65 RNA guide
uguuuggcacucugagaguaua

SEQ ID NO: 14425 - RNA, 22 nt, Artificial Sequence
  RPE65 RNA guide
uguuuuccaaggacuucuuugg

SEQ ID NO: 14426 - RNA, 22 nt, Artificial Sequence
  RPE65 RNA guide
uuaaauuuagugugcaguuaug

SEQ ID NO: 14427 - RNA, 22 nt, Artificial Sequence
  RPE65 RNA guide
uuaagguuguuagcugguauag

SEQ ID NO: 14428 - RNA, 22 nt, Artificial Sequence
  RPE65 RNA guide
uuaagucucaguugcuugccag

SEQ ID NO: 14429 - RNA, 22 nt, Artificial Sequence
  RPE65 RNA guide
uuaauccaagugcuucccaaga

SEQ ID NO: 14430 - RNA, 22 nt, Artificial Sequence
  RPE65 RNA guide
uuacagugagggcauaggcaug

SEQ ID NO: 14431 - RNA, 22 nt, Artificial Sequence
  RPE65 RNA guide
uuacccuaggggucuucuucaa

SEQ ID NO: 14432 - RNA, 22 nt, Artificial Sequence
  RPE65 RNA guide
uuacuggcuggguagccuccaa

SEQ ID NO: 14433 - RNA, 22 nt, Artificial Sequence
  RPE65 RNA guide
uuagcauccauaauaucucugc

SEQ ID NO: 14434 - RNA, 22 nt, Artificial Sequence
  RPE65 RNA guide
uuagcugguauaguauauaucu

SEQ ID NO: 14435 - RNA, 22 nt, Artificial Sequence
  RPE65 RNA guide
uuaggacuucuaccacuguccc

SEQ ID NO: 14436 - RNA, 22 nt, Artificial Sequence
  RPE65 RNA guide
uuagggacagugguagaagucc

SEQ ID NO: 14437 - RNA, 22 nt, Artificial Sequence
  RPE65 RNA guide
uuauacaguuuuguugaagaag

SEQ ID NO: 14438 - RNA, 22 nt, Artificial Sequence
  RPE65 RNA guide
uuauggaugcuaagccccaggu

SEQ ID NO: 14439 - RNA, 22 nt, Artificial Sequence
  RPE65 RNA guide
uucaacaguggagcccggaaua

SEQ ID NO: 14440 - RNA, 22 nt, Artificial Sequence
  RPE65 RNA guide
uucauuaagucucaguugcuug

SEQ ID NO: 14441 - RNA, 22 nt, Artificial Sequence
  RPE65 RNA guide
uucauucauaucuccaauacuc

SEQ ID NO: 14442 - RNA, 22 nt, Artificial Sequence
  RPE65 RNA guide
uucauuuccuuacagugagggc

SEQ ID NO: 14443 - RNA, 22 nt, Artificial Sequence
  RPE65 RNA guide
uuccaaggacuucuuugggcag

SEQ ID NO: 14444 - RNA, 22 nt, Artificial Sequence
  RPE65 RNA guide
uucccaagauauacaacaguag

SEQ ID NO: 14445 - RNA, 22 nt, Artificial Sequence
  RPE65 RNA guide
uuccgggcuccacuguugaaug

SEQ ID NO: 14446 - RNA, 22 nt, Artificial Sequence
  RPE65 RNA guide
uuccuuacagugagggcauagg

SEQ ID NO: 14447 - RNA, 22 nt, Artificial Sequence
  RPE65 RNA guide
uucuaccacugucccuaacggg

SEQ ID NO: 14448 - RNA, 22 nt, Artificial Sequence
  RPE65 RNA guide
uucuuugggcaguaccuugucu

SEQ ID NO: 14449 - RNA, 22 nt, Artificial Sequence
  RPE65 RNA guide
uugaagaagaccccuaggguaa

SEQ ID NO: 14450 - RNA, 22 nt, Artificial Sequence
  RPE65 RNA guide
uugaauggagacacuacaacug

SEQ ID NO: 14451 - RNA, 22 nt, Artificial Sequence
  RPE65 RNA guide
uugaugcuguauacucucagag

SEQ ID NO: 14452 - RNA, 22 nt, Artificial Sequence
  RPE65 RNA guide
uugccagcacagacaagguacu

SEQ ID NO: 14453 - RNA, 22 nt, Artificial Sequence
  RPE65 RNA guide
uugccuguuuuccaaggacuuc

SEQ ID NO: 14454 - RNA, 22 nt, Artificial Sequence
  RPE65 RNA guide
uugcuugccagcacagacaagg

SEQ ID NO: 14455 - RNA, 22 nt, Artificial Sequence
  RPE65 RNA guide
uuggaaaacaggcaagauauau

SEQ ID NO: 14456 - RNA, 22 nt, Artificial Sequence
  RPE65 RNA guide
uuggagauaugaaugaauugau

SEQ ID NO: 14457 - RNA, 22 nt, Artificial Sequence
  RPE65 RNA guide
uuggaggcuacccagccaguaa

SEQ ID NO: 14458 - RNA, 22 nt, Artificial Sequence
  RPE65 RNA guide
uuggaugggcagagauauuaug

SEQ ID NO: 14459 - RNA, 22 nt, Artificial Sequence
  RPE65 RNA guide
uuggcacucugagaguauacag

SEQ ID NO: 14460 - RNA, 22 nt, Artificial Sequence
  RPE65 RNA guide
uugggaagcacuuggauuaauu

SEQ ID NO: 14461 - RNA, 22 nt, Artificial Sequence
  RPE65 RNA guide
uugggcaguaccuugucugugc

SEQ ID NO: 14462 - RNA, 22 nt, Artificial Sequence
  RPE65 RNA guide
uugguauauguuuggcacucug

SEQ ID NO: 14463 - RNA, 22 nt, Artificial Sequence
  RPE65 RNA guide
uuguagugucuccauucaacag

SEQ ID NO: 14464 - RNA, 22 nt, Artificial Sequence
  RPE65 RNA guide
uuguauaucuugggaagcacuu

SEQ ID NO: 14465 - RNA, 22 nt, Artificial Sequence
  RPE65 RNA guide
uugucugugcuggcaagcaacu

SEQ ID NO: 14466 - RNA, 22 nt, Artificial Sequence
  RPE65 RNA guide
uuguuacuggcuggguagccuc

SEQ ID NO: 14467 - RNA, 22 nt, Artificial Sequence
  RPE65 RNA guide
uuguugaagaagaccccuaggg

SEQ ID NO: 14468 - RNA, 22 nt, Artificial Sequence
  RPE65 RNA guide
uuuaaauuuagugugcaguuau

SEQ ID NO: 14469 - RNA, 22 nt, Artificial Sequence
  RPE65 RNA guide
uuucauuaagucucaguugcuu

SEQ ID NO: 14470 - RNA, 22 nt, Artificial Sequence
  RPE65 RNA guide
uuuccaaggacuucuuugggca

SEQ ID NO: 14471 - RNA, 22 nt, Artificial Sequence
  RPE65 RNA guide
uuuccuuacagugagggcauag

SEQ ID NO: 14472 - RNA, 22 nt, Artificial Sequence
  RPE65 RNA guide
uuuggcacucugagaguauaca

SEQ ID NO: 14473 - RNA, 22 nt, Artificial Sequence
  RPE65 RNA guide
uuugggcaguaccuugucugug

SEQ ID NO: 14474 - RNA, 22 nt, Artificial Sequence
  RPE65 RNA guide
uuuguugaagaagaccccuagg

SEQ ID NO: 14475 - RNA, 22 nt, Artificial Sequence
  RPE65 RNA guide
uuuuaaauuuagugugcaguua

SEQ ID NO: 14476 - RNA, 22 nt, Artificial Sequence
  RPE65 RNA guide
uuuuccaaggacuucuuugggc

SEQ ID NO: 14477 - RNA, 22 nt, Artificial Sequence
  RPE65 RNA guide
uuuuguugaagaagaccccuag

SEQ ID NO: 14478 - RNA, 20 nt, Artificial Sequence
  RPE65 RNA guide
aaaaagaccaguacccaaau

SEQ ID NO: 14479 - RNA, 20 nt, Artificial Sequence
  RPE65 RNA guide
aaaaauagguugaaggaaca

SEQ ID NO: 14480 - RNA, 20 nt, Artificial Sequence
  RPE65 RNA guide
aaaacagaaagagaaugcca

SEQ ID NO: 14481 - RNA, 20 nt, Artificial Sequence
  RPE65 RNA guide
aaaagaagaaaaagaccagu

SEQ ID NO: 14482 - RNA, 20 nt, Artificial Sequence
  RPE65 RNA guide
aaaagaccaguacccaaauc

SEQ ID NO: 14483 - RNA, 20 nt, Artificial Sequence
  RPE65 RNA guide
aaaauagguugaaggaacag

SEQ ID NO: 14484 - RNA, 20 nt, Artificial Sequence
  RPE65 RNA guide
aaaaucauacagagcucauc

SEQ ID NO: 14485 - RNA, 20 nt, Artificial Sequence
  RPE65 RNA guide
aaacaccaugcugaucaucu

SEQ ID NO: 14486 - RNA, 20 nt, Artificial Sequence
  RPE65 RNA guide
aaacagaaagagaaugccag

SEQ ID NO: 14487 - RNA, 20 nt, Artificial Sequence
  RPE65 RNA guide
aaagaagaaaaagaccagua

SEQ ID NO: 14488 - RNA, 20 nt, Artificial Sequence
  RPE65 RNA guide
aaagaccaguacccaaaucu

SEQ ID NO: 14489 - RNA, 20 nt, Artificial Sequence
  RPE65 RNA guide
aaagagaaugccagggaacu

SEQ ID NO: 14490 - RNA, 20 nt, Artificial Sequence
  RPE65 RNA guide
aaagaucaaauggauacauc

SEQ ID NO: 14491 - RNA, 20 nt, Artificial Sequence
  RPE65 RNA guide
aaagcauuacagaucaugau

SEQ ID NO: 14492 - RNA, 20 nt, Artificial Sequence
  RPE65 RNA guide
aaauagguugaaggaacaga

SEQ ID NO: 14493 - RNA, 20 nt, Artificial Sequence
  RPE65 RNA guide
aaauaucaauccauugguuc

SEQ ID NO: 14494 - RNA, 20 nt, Artificial Sequence
  RPE65 RNA guide
aaaucauacagagcucaucu

SEQ ID NO: 14495 - RNA, 20 nt, Artificial Sequence
  RPE65 RNA guide
aaauggauacaucagguacc

SEQ ID NO: 14496 - RNA, 20 nt, Artificial Sequence
  RPE65 RNA guide
aacaccaugcugaucaucuu

SEQ ID NO: 14497 - RNA, 20 nt, Artificial Sequence
  RPE65 RNA guide
aacagaaagagaaugccagg

SEQ ID NO: 14498 - RNA, 20 nt, Artificial Sequence
  RPE65 RNA guide
aacagacugaccaggguacc

SEQ ID NO: 14499 - RNA, 20 nt, Artificial Sequence
  RPE65 RNA guide
aacugcauggaauaugucac

SEQ ID NO: 14500 - RNA, 20 nt, Artificial Sequence
  RPE65 RNA guide
aacugcucuuaagauuuggg

SEQ ID NO: 14501 - RNA, 20 nt, Artificial Sequence
  RPE65 RNA guide
aacuuagaugagcucuguau

SEQ ID NO: 14502 - RNA, 20 nt, Artificial Sequence
  RPE65 RNA guide
aagaaaaagaccaguaccca

SEQ ID NO: 14503 - RNA, 20 nt, Artificial Sequence
  RPE65 RNA guide
aagaagaaaaagaccaguac

SEQ ID NO: 14504 - RNA, 20 nt, Artificial Sequence
  RPE65 RNA guide
aagaccaguacccaaaucuu

SEQ ID NO: 14505 - RNA, 20 nt, Artificial Sequence
  RPE65 RNA guide
aagagaaugccagggaacug

SEQ ID NO: 14506 - RNA, 20 nt, Artificial Sequence
  RPE65 RNA guide
aagagcaguugaacuuagau

SEQ ID NO: 14507 - RNA, 20 nt, Artificial Sequence
  RPE65 RNA guide
aagaucaaauggauacauca

SEQ ID NO: 14508 - RNA, 20 nt, Artificial Sequence
  RPE65 RNA guide
aagaugaucagcaugguguu

SEQ ID NO: 14509 - RNA, 20 nt, Artificial Sequence
  RPE65 RNA guide
aagauuuggguacuggucuu

SEQ ID NO: 14510 - RNA, 20 nt, Artificial Sequence
  RPE65 RNA guide
aagcauuacagaucaugaua

SEQ ID NO: 14511 - RNA, 20 nt, Artificial Sequence
  RPE65 RNA guide
aaggaacagacugaccaggg

SEQ ID NO: 14512 - RNA, 20 nt, Artificial Sequence
  RPE65 RNA guide
aaguaaaaucauacagagcu

SEQ ID NO: 14513 - RNA, 20 nt, Artificial Sequence
  RPE65 RNA guide
aaguucaacugcucuuaaga

SEQ ID NO: 14514 - RNA, 20 nt, Artificial Sequence
  RPE65 RNA guide
aauagguugaaggaacagac

SEQ ID NO: 14515 - RNA, 20 nt, Artificial Sequence
  RPE65 RNA guide
aauaucaauccauugguucc

SEQ ID NO: 14516 - RNA, 20 nt, Artificial Sequence
  RPE65 RNA guide
aaucauacagagcucaucua

SEQ ID NO: 14517 - RNA, 20 nt, Artificial Sequence
  RPE65 RNA guide
aauccauugguuccugucuc

SEQ ID NO: 14518 - RNA, 20 nt, Artificial Sequence
  RPE65 RNA guide
aaucucaaaacagaaagaga

SEQ ID NO: 14519 - RNA, 20 nt, Artificial Sequence
  RPE65 RNA guide
aaucuuaagagcaguugaac

SEQ ID NO: 14520 - RNA, 20 nt, Artificial Sequence
  RPE65 RNA guide
aaugccagggaacugcaugg

SEQ ID NO: 14521 - RNA, 20 nt, Artificial Sequence
  RPE65 RNA guide
aauggauacaucagguaccc

SEQ ID NO: 14522 - RNA, 20 nt, Artificial Sequence
  RPE65 RNA guide
acaccaugcugaucaucuua

SEQ ID NO: 14523 - RNA, 20 nt, Artificial Sequence
  RPE65 RNA guide
acagaaagagaaugccaggg

SEQ ID NO: 14524 - RNA, 20 nt, Artificial Sequence
  RPE65 RNA guide
acagacugaccaggguaccu

SEQ ID NO: 14525 - RNA, 20 nt, Artificial Sequence
  RPE65 RNA guide
acagagcucaucuaaguuca

SEQ ID NO: 14526 - RNA, 20 nt, Artificial Sequence
  RPE65 RNA guide
acagaucaugauaccuaaga

SEQ ID NO: 14527 - RNA, 20 nt, Artificial Sequence
  RPE65 RNA guide
acaggaaccaauggauugau

SEQ ID NO: 14528 - RNA, 20 nt, Artificial Sequence
  RPE65 RNA guide
acagugacauauuccaugca

SEQ ID NO: 14529 - RNA, 20 nt, Artificial Sequence
  RPE65 RNA guide
acauauuccaugcaguuccc

SEQ ID NO: 14530 - RNA, 20 nt, Artificial Sequence
  RPE65 RNA guide
acaucagguacccuggucag

SEQ ID NO: 14531 - RNA, 20 nt, Artificial Sequence
  RPE65 RNA guide
accaggguaccugauguauc

SEQ ID NO: 14532 - RNA, 20 nt, Artificial Sequence
  RPE65 RNA guide
accaguacccaaaucuuaag

SEQ ID NO: 14533 - RNA, 20 nt, Artificial Sequence
  RPE65 RNA guide
accaugcugaucaucuuagg

SEQ ID NO: 14534 - RNA, 20 nt, Artificial Sequence
  RPE65 RNA guide
acccaaaucuuaagagcagu

SEQ ID NO: 14535 - RNA, 20 nt, Artificial Sequence
  RPE65 RNA guide
acccuggucagucuguuccu

SEQ ID NO: 14536 - RNA, 20 nt, Artificial Sequence
  RPE65 RNA guide
accuaagaugaucagcaugg

SEQ ID NO: 14537 - RNA, 20 nt, Artificial Sequence
  RPE65 RNA guide
accuagucaaacaccaugcu

SEQ ID NO: 14538 - RNA, 20 nt, Artificial Sequence
  RPE65 RNA guide
accuauuuuuaccuagucaa

SEQ ID NO: 14539 - RNA, 20 nt, Artificial Sequence
  RPE65 RNA guide
accugauguauccauuugau

SEQ ID NO: 14540 - RNA, 20 nt, Artificial Sequence
  RPE65 RNA guide
acuagguaaaaauagguuga

SEQ ID NO: 14541 - RNA, 20 nt, Artificial Sequence
  RPE65 RNA guide
acugaccaggguaccugaug

SEQ ID NO: 14542 - RNA, 20 nt, Artificial Sequence
  RPE65 RNA guide
acugcauggaauaugucacu

SEQ ID NO: 14543 - RNA, 20 nt, Artificial Sequence
  RPE65 RNA guide
acugcucuuaagauuugggu

SEQ ID NO: 14544 - RNA, 20 nt, Artificial Sequence
  RPE65 RNA guide
acuuagaugagcucuguaug

SEQ ID NO: 14545 - RNA, 20 nt, Artificial Sequence
  RPE65 RNA guide
agaaaaagaccaguacccaa

SEQ ID NO: 14546 - RNA, 20 nt, Artificial Sequence
  RPE65 RNA guide
agaaaagaagaaaaagacca

SEQ ID NO: 14547 - RNA, 20 nt, Artificial Sequence
  RPE65 RNA guide
agaaagagaaugccagggaa

SEQ ID NO: 14548 - RNA, 20 nt, Artificial Sequence
  RPE65 RNA guide
agaagaaaaagaccaguacc

SEQ ID NO: 14549 - RNA, 20 nt, Artificial Sequence
  RPE65 RNA guide
agaaugccagggaacugcau

SEQ ID NO: 14550 - RNA, 20 nt, Artificial Sequence
  RPE65 RNA guide
agacaggaaccaauggauug

SEQ ID NO: 14551 - RNA, 20 nt, Artificial Sequence
  RPE65 RNA guide
agaccaguacccaaaucuua

SEQ ID NO: 14552 - RNA, 20 nt, Artificial Sequence
  RPE65 RNA guide
agacugaccaggguaccuga

SEQ ID NO: 14553 - RNA, 20 nt, Artificial Sequence
  RPE65 RNA guide
agagaaugccagggaacugc

SEQ ID NO: 14554 - RNA, 20 nt, Artificial Sequence
  RPE65 RNA guide
agagacaggaaccaauggau

SEQ ID NO: 14555 - RNA, 20 nt, Artificial Sequence
  RPE65 RNA guide
agagcaguugaacuuagaug

SEQ ID NO: 14556 - RNA, 20 nt, Artificial Sequence
  RPE65 RNA guide
agagcucaucuaaguucaac

SEQ ID NO: 14557 - RNA, 20 nt, Artificial Sequence
  RPE65 RNA guide
agaucaaauggauacaucag

SEQ ID NO: 14558 - RNA, 20 nt, Artificial Sequence
  RPE65 RNA guide
agaucaugauaccuaagaug

SEQ ID NO: 14559 - RNA, 20 nt, Artificial Sequence
  RPE65 RNA guide
agaugagcucuguaugauuu

SEQ ID NO: 14560 - RNA, 20 nt, Artificial Sequence
  RPE65 RNA guide
agaugaucagcaugguguuu

SEQ ID NO: 14561 - RNA, 20 nt, Artificial Sequence
  RPE65 RNA guide
agauuuggguacuggucuuu

SEQ ID NO: 14562 - RNA, 20 nt, Artificial Sequence
  RPE65 RNA guide
agcaguugaacuuagaugag

SEQ ID NO: 14563 - RNA, 20 nt, Artificial Sequence
  RPE65 RNA guide
agcaugguguuugacuaggu

SEQ ID NO: 14564 - RNA, 20 nt, Artificial Sequence
  RPE65 RNA guide
agcauuacagaucaugauac

SEQ ID NO: 14565 - RNA, 20 nt, Artificial Sequence
  RPE65 RNA guide
agcucaucuaaguucaacug

SEQ ID NO: 14566 - RNA, 20 nt, Artificial Sequence
  RPE65 RNA guide
aggaacagacugaccagggu

SEQ ID NO: 14567 - RNA, 20 nt, Artificial Sequence
  RPE65 RNA guide
agggaacugcauggaauaug

SEQ ID NO: 14568 - RNA, 20 nt, Artificial Sequence
  RPE65 RNA guide
aggguaccugauguauccau

SEQ ID NO: 14569 - RNA, 20 nt, Artificial Sequence
  RPE65 RNA guide
agguaaaaauagguugaagg

SEQ ID NO: 14570 - RNA, 20 nt, Artificial Sequence
  RPE65 RNA guide
agguacccuggucagucugu

SEQ ID NO: 14571 - RNA, 20 nt, Artificial Sequence
  RPE65 RNA guide
agguaucaugaucuguaaug

SEQ ID NO: 14572 - RNA, 20 nt, Artificial Sequence
  RPE65 RNA guide
agguugaaggaacagacuga

SEQ ID NO: 14573 - RNA, 20 nt, Artificial Sequence
  RPE65 RNA guide
aguaaaaucauacagagcuc

SEQ ID NO: 14574 - RNA, 20 nt, Artificial Sequence
  RPE65 RNA guide
aguacccaaaucuuaagagc

SEQ ID NO: 14575 - RNA, 20 nt, Artificial Sequence
  RPE65 RNA guide
aguaucuguuuuaugcuuga

SEQ ID NO: 14576 - RNA, 20 nt, Artificial Sequence
  RPE65 RNA guide
agucaaacaccaugcugauc

SEQ ID NO: 14577 - RNA, 20 nt, Artificial Sequence
  RPE65 RNA guide
agucuguuccuucaaccuau

SEQ ID NO: 14578 - RNA, 20 nt, Artificial Sequence
  RPE65 RNA guide
agugacauauuccaugcagu

SEQ ID NO: 14579 - RNA, 20 nt, Artificial Sequence
  RPE65 RNA guide
aguucaacugcucuuaagau

SEQ ID NO: 14580 - RNA, 20 nt, Artificial Sequence
  RPE65 RNA guide
aguucccuggcauucucuuu

SEQ ID NO: 14581 - RNA, 20 nt, Artificial Sequence
  RPE65 RNA guide
aguugaacuuagaugagcuc

SEQ ID NO: 14582 - RNA, 20 nt, Artificial Sequence
  RPE65 RNA guide
auacagagcucaucuaaguu

SEQ ID NO: 14583 - RNA, 20 nt, Artificial Sequence
  RPE65 RNA guide
auacaucagguacccugguc

SEQ ID NO: 14584 - RNA, 20 nt, Artificial Sequence
  RPE65 RNA guide
auaccuaagaugaucagcau

SEQ ID NO: 14585 - RNA, 20 nt, Artificial Sequence
  RPE65 RNA guide
auagguugaaggaacagacu

SEQ ID NO: 14586 - RNA, 20 nt, Artificial Sequence
  RPE65 RNA guide
auauaucaugucuagagaca

SEQ ID NO: 14587 - RNA, 20 nt, Artificial Sequence
  RPE65 RNA guide
auaucaauccauugguuccu

SEQ ID NO: 14588 - RNA, 20 nt, Artificial Sequence
  RPE65 RNA guide
auaucaugucuagagacagg

SEQ ID NO: 14589 - RNA, 20 nt, Artificial Sequence
  RPE65 RNA guide
auauuccaugcaguucccug

SEQ ID NO: 14590 - RNA, 20 nt, Artificial Sequence
  RPE65 RNA guide
aucaaauggauacaucaggu

SEQ ID NO: 14591 - RNA, 20 nt, Artificial Sequence
  RPE65 RNA guide
aucaauccauugguuccugu

SEQ ID NO: 14592 - RNA, 20 nt, Artificial Sequence
  RPE65 RNA guide
aucagcaugguguuugacua

SEQ ID NO: 14593 - RNA, 20 nt, Artificial Sequence
  RPE65 RNA guide
aucagguacccuggucaguc

SEQ ID NO: 14594 - RNA, 20 nt, Artificial Sequence
  RPE65 RNA guide
aucauacagagcucaucuaa

SEQ ID NO: 14595 - RNA, 20 nt, Artificial Sequence
  RPE65 RNA guide
aucaucuuagguaucaugau

SEQ ID NO: 14596 - RNA, 20 nt, Artificial Sequence
  RPE65 RNA guide
aucaugauaccuaagaugau

SEQ ID NO: 14597 - RNA, 20 nt, Artificial Sequence
  RPE65 RNA guide
aucaugaucuguaaugcuuu

SEQ ID NO: 14598 - RNA, 20 nt, Artificial Sequence
  RPE65 RNA guide
aucaugucuagagacaggaa

SEQ ID NO: 14599 - RNA, 20 nt, Artificial Sequence
  RPE65 RNA guide
auccauugguuccugucucu

SEQ ID NO: 14600 - RNA, 20 nt, Artificial Sequence
  RPE65 RNA guide
aucuaaguucaacugcucuu

SEQ ID NO: 14601 - RNA, 20 nt, Artificial Sequence
  RPE65 RNA guide
aucuacagugacauauucca

SEQ ID NO: 14602 - RNA, 20 nt, Artificial Sequence
  RPE65 RNA guide
aucucaaaacagaaagagaa

SEQ ID NO: 14603 - RNA, 20 nt, Artificial Sequence
  RPE65 RNA guide
aucuuaagagcaguugaacu

SEQ ID NO: 14604 - RNA, 20 nt, Artificial Sequence
  RPE65 RNA guide
augauaccuaagaugaucag

SEQ ID NO: 14605 - RNA, 20 nt, Artificial Sequence
  RPE65 RNA guide
augaucagcaugguguuuga

SEQ ID NO: 14606 - RNA, 20 nt, Artificial Sequence
  RPE65 RNA guide
augaucuguaaugcuuucaa

SEQ ID NO: 14607 - RNA, 20 nt, Artificial Sequence
  RPE65 RNA guide
augcaguucccuggcauucu

SEQ ID NO: 14608 - RNA, 20 nt, Artificial Sequence
  RPE65 RNA guide
augccagggaacugcaugga

SEQ ID NO: 14609 - RNA, 20 nt, Artificial Sequence
  RPE65 RNA guide
augcugaucaucuuagguau

SEQ ID NO: 14610 - RNA, 20 nt, Artificial Sequence
  RPE65 RNA guide
augcuugaaagcauuacaga

SEQ ID NO: 14611 - RNA, 20 nt, Artificial Sequence
  RPE65 RNA guide
auggauacaucagguacccu

SEQ ID NO: 14612 - RNA, 20 nt, Artificial Sequence
  RPE65 RNA guide
augucuagagacaggaacca

SEQ ID NO: 14613 - RNA, 20 nt, Artificial Sequence
  RPE65 RNA guide
auuccaugcaguucccuggc

SEQ ID NO: 14614 - RNA, 20 nt, Artificial Sequence
  RPE65 RNA guide
auugguuccugucucuagac

SEQ ID NO: 14615 - RNA, 20 nt, Artificial Sequence
  RPE65 RNA guide
auuuggguacuggucuuuuu

SEQ ID NO: 14616 - RNA, 20 nt, Artificial Sequence
  RPE65 RNA guide
auuuuuaccuagucaaacac

SEQ ID NO: 14617 - RNA, 20 nt, Artificial Sequence
  RPE65 RNA guide
caaaacagaaagagaaugcc

SEQ ID NO: 14618 - RNA, 20 nt, Artificial Sequence
  RPE65 RNA guide
caaacaccaugcugaucauc

SEQ ID NO: 14619 - RNA, 20 nt, Artificial Sequence
  RPE65 RNA guide
caaaucuuaagagcaguuga

SEQ ID NO: 14620 - RNA, 20 nt, Artificial Sequence
  RPE65 RNA guide
caaauggauacaucagguac

SEQ ID NO: 14621 - RNA, 20 nt, Artificial Sequence
  RPE65 RNA guide
caaccuauuuuuaccuaguc

SEQ ID NO: 14622 - RNA, 20 nt, Artificial Sequence
  RPE65 RNA guide
caacugcucuuaagauuugg

SEQ ID NO: 14623 - RNA, 20 nt, Artificial Sequence
  RPE65 RNA guide
caauccauugguuccugucu

SEQ ID NO: 14624 - RNA, 20 nt, Artificial Sequence
  RPE65 RNA guide
caccaugcugaucaucuuag

SEQ ID NO: 14625 - RNA, 20 nt, Artificial Sequence
  RPE65 RNA guide
cagaaagagaaugccaggga

SEQ ID NO: 14626 - RNA, 20 nt, Artificial Sequence
  RPE65 RNA guide
cagacugaccaggguaccug

SEQ ID NO: 14627 - RNA, 20 nt, Artificial Sequence
  RPE65 RNA guide
cagagcucaucuaaguucaa

SEQ ID NO: 14628 - RNA, 20 nt, Artificial Sequence
  RPE65 RNA guide
cagaucaugauaccuaagau

SEQ ID NO: 14629 - RNA, 20 nt, Artificial Sequence
  RPE65 RNA guide
cagcaugguguuugacuagg

SEQ ID NO: 14630 - RNA, 20 nt, Artificial Sequence
  RPE65 RNA guide
caggaaccaauggauugaua

SEQ ID NO: 14631 - RNA, 20 nt, Artificial Sequence
  RPE65 RNA guide
cagggaacugcauggaauau

SEQ ID NO: 14632 - RNA, 20 nt, Artificial Sequence
  RPE65 RNA guide
caggguaccugauguaucca

SEQ ID NO: 14633 - RNA, 20 nt, Artificial Sequence
  RPE65 RNA guide
cagguacccuggucagucug

SEQ ID NO: 14634 - RNA, 20 nt, Artificial Sequence
  RPE65 RNA guide
caguacccaaaucuuaagag

SEQ ID NO: 14635 - RNA, 20 nt, Artificial Sequence
  RPE65 RNA guide
cagucuguuccuucaaccua

SEQ ID NO: 14636 - RNA, 20 nt, Artificial Sequence
  RPE65 RNA guide
cagugacauauuccaugcag

SEQ ID NO: 14637 - RNA, 20 nt, Artificial Sequence
  RPE65 RNA guide
caguucccuggcauucucuu

SEQ ID NO: 14638 - RNA, 20 nt, Artificial Sequence
  RPE65 RNA guide
caguugaacuuagaugagcu

SEQ ID NO: 14639 - RNA, 20 nt, Artificial Sequence
  RPE65 RNA guide
cauacagagcucaucuaagu

SEQ ID NO: 14640 - RNA, 20 nt, Artificial Sequence
  RPE65 RNA guide
cauauaucaugucuagagac

SEQ ID NO: 14641 - RNA, 20 nt, Artificial Sequence
  RPE65 RNA guide
cauauuccaugcaguucccu

SEQ ID NO: 14642 - RNA, 20 nt, Artificial Sequence
  RPE65 RNA guide
caucagguacccuggucagu

SEQ ID NO: 14643 - RNA, 20 nt, Artificial Sequence
  RPE65 RNA guide
caucuaaguucaacugcucu

SEQ ID NO: 14644 - RNA, 20 nt, Artificial Sequence
  RPE65 RNA guide
caucuuagguaucaugaucu

SEQ ID NO: 14645 - RNA, 20 nt, Artificial Sequence
  RPE65 RNA guide
caugauaccuaagaugauca

SEQ ID NO: 14646 - RNA, 20 nt, Artificial Sequence
  RPE65 RNA guide
caugauauaugaacagaauu

SEQ ID NO: 14647 - RNA, 20 nt, Artificial Sequence
  RPE65 RNA guide
caugaucuguaaugcuuuca

SEQ ID NO: 14648 - RNA, 20 nt, Artificial Sequence
  RPE65 RNA guide
caugcaguucccuggcauuc

SEQ ID NO: 14649 - RNA, 20 nt, Artificial Sequence
  RPE65 RNA guide
caugcugaucaucuuaggua

SEQ ID NO: 14650 - RNA, 20 nt, Artificial Sequence
  RPE65 RNA guide
cauggaauaugucacuguag

SEQ ID NO: 14651 - RNA, 20 nt, Artificial Sequence
  RPE65 RNA guide
caugguguuugacuagguaa

SEQ ID NO: 14652 - RNA, 20 nt, Artificial Sequence
  RPE65 RNA guide
caugucuagagacaggaacc

SEQ ID NO: 14653 - RNA, 20 nt, Artificial Sequence
  RPE65 RNA guide
cauuacagaucaugauaccu

SEQ ID NO: 14654 - RNA, 20 nt, Artificial Sequence
  RPE65 RNA guide
cauugguuccugucucuaga

SEQ ID NO: 14655 - RNA, 20 nt, Artificial Sequence
  RPE65 RNA guide
ccaaaucuuaagagcaguug

SEQ ID NO: 14656 - RNA, 20 nt, Artificial Sequence
  RPE65 RNA guide
ccagggaacugcauggaaua

SEQ ID NO: 14657 - RNA, 20 nt, Artificial Sequence
  RPE65 RNA guide
ccaggguaccugauguaucc

SEQ ID NO: 14658 - RNA, 20 nt, Artificial Sequence
  RPE65 RNA guide
ccaguacccaaaucuuaaga

SEQ ID NO: 14659 - RNA, 20 nt, Artificial Sequence
  RPE65 RNA guide
ccaucaguaauuacuagaua

SEQ ID NO: 14660 - RNA, 20 nt, Artificial Sequence
  RPE65 RNA guide
ccaugcaguucccuggcauu

SEQ ID NO: 14661 - RNA, 20 nt, Artificial Sequence
  RPE65 RNA guide
ccaugcugaucaucuuaggu

SEQ ID NO: 14662 - RNA, 20 nt, Artificial Sequence
  RPE65 RNA guide
ccauugguuccugucucuag

SEQ ID NO: 14663 - RNA, 20 nt, Artificial Sequence
  RPE65 RNA guide
cccaaaucuuaagagcaguu

SEQ ID NO: 14664 - RNA, 20 nt, Artificial Sequence
  RPE65 RNA guide
cccuggcauucucuuucugu

SEQ ID NO: 14665 - RNA, 20 nt, Artificial Sequence
  RPE65 RNA guide
cccuggucagucuguuccuu

SEQ ID NO: 14666 - RNA, 20 nt, Artificial Sequence
  RPE65 RNA guide
ccuaagaugaucagcauggu

SEQ ID NO: 14667 - RNA, 20 nt, Artificial Sequence
  RPE65 RNA guide
ccuagucaaacaccaugcug

SEQ ID NO: 14668 - RNA, 20 nt, Artificial Sequence
  RPE65 RNA guide
ccuauuuuuaccuagucaaa

SEQ ID NO: 14669 - RNA, 20 nt, Artificial Sequence
  RPE65 RNA guide
ccugauguauccauuugauc

SEQ ID NO: 14670 - RNA, 20 nt, Artificial Sequence
  RPE65 RNA guide
ccuggcauucucuuucuguu

SEQ ID NO: 14671 - RNA, 20 nt, Artificial Sequence
  RPE65 RNA guide
ccuggucagucuguuccuuc

SEQ ID NO: 14672 - RNA, 20 nt, Artificial Sequence
  RPE65 RNA guide
ccugucucuagacaugauau

SEQ ID NO: 14673 - RNA, 20 nt, Artificial Sequence
  RPE65 RNA guide
ccuucaaccuauuuuuaccu

SEQ ID NO: 14674 - RNA, 20 nt, Artificial Sequence
  RPE65 RNA guide
cuaagaugaucagcauggug

SEQ ID NO: 14675 - RNA, 20 nt, Artificial Sequence
  RPE65 RNA guide
cuaaguucaacugcucuuaa

SEQ ID NO: 14676 - RNA, 20 nt, Artificial Sequence
  RPE65 RNA guide
cuacagugacauauuccaug

SEQ ID NO: 14677 - RNA, 20 nt, Artificial Sequence
  RPE65 RNA guide
cuagagacaggaaccaaugg

SEQ ID NO: 14678 - RNA, 20 nt, Artificial Sequence
  RPE65 RNA guide
cuagguaaaaauagguugaa

SEQ ID NO: 14679 - RNA, 20 nt, Artificial Sequence
  RPE65 RNA guide
cuagucaaacaccaugcuga

SEQ ID NO: 14680 - RNA, 20 nt, Artificial Sequence
  RPE65 RNA guide
cuauuuuuaccuagucaaac

SEQ ID NO: 14681 - RNA, 20 nt, Artificial Sequence
  RPE65 RNA guide
cucaaaacagaaagagaaug

SEQ ID NO: 14682 - RNA, 20 nt, Artificial Sequence
  RPE65 RNA guide
cucaucuaaguucaacugcu

SEQ ID NO: 14683 - RNA, 20 nt, Artificial Sequence
  RPE65 RNA guide
cucuagacaugauauaugaa

SEQ ID NO: 14684 - RNA, 20 nt, Artificial Sequence
  RPE65 RNA guide
cucuuaagauuuggguacug

SEQ ID NO: 14685 - RNA, 20 nt, Artificial Sequence
  RPE65 RNA guide
cugaccaggguaccugaugu

SEQ ID NO: 14686 - RNA, 20 nt, Artificial Sequence
  RPE65 RNA guide
cugaucaucuuagguaucau

SEQ ID NO: 14687 - RNA, 20 nt, Artificial Sequence
  RPE65 RNA guide
cugcauggaauaugucacug

SEQ ID NO: 14688 - RNA, 20 nt, Artificial Sequence
  RPE65 RNA guide
cugcucuuaagauuugggua

SEQ ID NO: 14689 - RNA, 20 nt, Artificial Sequence
  RPE65 RNA guide
cuggcauucucuuucuguuu

SEQ ID NO: 14690 - RNA, 20 nt, Artificial Sequence
  RPE65 RNA guide
cuggucagucuguuccuuca

SEQ ID NO: 14691 - RNA, 20 nt, Artificial Sequence
  RPE65 RNA guide
cuguaaugcuuucaagcaua

SEQ ID NO: 14692 - RNA, 20 nt, Artificial Sequence
  RPE65 RNA guide
cugucucuagacaugauaua

SEQ ID NO: 14693 - RNA, 20 nt, Artificial Sequence
  RPE65 RNA guide
cuguucauauaucaugucua

SEQ ID NO: 14694 - RNA, 20 nt, Artificial Sequence
  RPE65 RNA guide
cuguuccuucaaccuauuuu

SEQ ID NO: 14695 - RNA, 20 nt, Artificial Sequence
  RPE65 RNA guide
cuguuuuaugcuugaaagca

SEQ ID NO: 14696 - RNA, 20 nt, Artificial Sequence
  RPE65 RNA guide
cuuaagagcaguugaacuua

SEQ ID NO: 14697 - RNA, 20 nt, Artificial Sequence
  RPE65 RNA guide
cuuaagauuuggguacuggu

SEQ ID NO: 14698 - RNA, 20 nt, Artificial Sequence
  RPE65 RNA guide
cuuagaugagcucuguauga

SEQ ID NO: 14699 - RNA, 20 nt, Artificial Sequence
  RPE65 RNA guide
cuuagguaucaugaucugua

SEQ ID NO: 14700 - RNA, 20 nt, Artificial Sequence
  RPE65 RNA guide
cuucaaccuauuuuuaccua

SEQ ID NO: 14701 - RNA, 20 nt, Artificial Sequence
  RPE65 RNA guide
cuugaaagcauuacagauca

SEQ ID NO: 14702 - RNA, 20 nt, Artificial Sequence
  RPE65 RNA guide
gaaaaagaccaguacccaaa

SEQ ID NO: 14703 - RNA, 20 nt, Artificial Sequence
  RPE65 RNA guide
gaaaagaagaaaaagaccag

SEQ ID NO: 14704 - RNA, 20 nt, Artificial Sequence
  RPE65 RNA guide
gaaagagaaugccagggaac

SEQ ID NO: 14705 - RNA, 20 nt, Artificial Sequence
  RPE65 RNA guide
gaaagcauuacagaucauga

SEQ ID NO: 14706 - RNA, 20 nt, Artificial Sequence
  RPE65 RNA guide
gaacagacugaccaggguac

SEQ ID NO: 14707 - RNA, 20 nt, Artificial Sequence
  RPE65 RNA guide
gaacugcauggaauauguca

SEQ ID NO: 14708 - RNA, 20 nt, Artificial Sequence
  RPE65 RNA guide
gaacuuagaugagcucugua

SEQ ID NO: 14709 - RNA, 20 nt, Artificial Sequence
  RPE65 RNA guide
gaagaaaaagaccaguaccc

SEQ ID NO: 14710 - RNA, 20 nt, Artificial Sequence
  RPE65 RNA guide
gaaggaacagacugaccagg

SEQ ID NO: 14711 - RNA, 20 nt, Artificial Sequence
  RPE65 RNA guide
gaaugccagggaacugcaug

SEQ ID NO: 14712 - RNA, 20 nt, Artificial Sequence
  RPE65 RNA guide
gacaggaaccaauggauuga

SEQ ID NO: 14713 - RNA, 20 nt, Artificial Sequence
  RPE65 RNA guide
gacauauuccaugcaguucc

SEQ ID NO: 14714 - RNA, 20 nt, Artificial Sequence
  RPE65 RNA guide
gacaugauauaugaacagaa

SEQ ID NO: 14715 - RNA, 20 nt, Artificial Sequence
  RPE65 RNA guide
gaccaggguaccugauguau

SEQ ID NO: 14716 - RNA, 20 nt, Artificial Sequence
  RPE65 RNA guide
gaccaguacccaaaucuuaa

SEQ ID NO: 14717 - RNA, 20 nt, Artificial Sequence
  RPE65 RNA guide
gacuagguaaaaauagguug

SEQ ID NO: 14718 - RNA, 20 nt, Artificial Sequence
  RPE65 RNA guide
gacugaccaggguaccugau

SEQ ID NO: 14719 - RNA, 20 nt, Artificial Sequence
  RPE65 RNA guide
gagaaugccagggaacugca

SEQ ID NO: 14720 - RNA, 20 nt, Artificial Sequence
  RPE65 RNA guide
gagacaggaaccaauggauu

SEQ ID NO: 14721 - RNA, 20 nt, Artificial Sequence
  RPE65 RNA guide
gagcaguugaacuuagauga

SEQ ID NO: 14722 - RNA, 20 nt, Artificial Sequence
  RPE65 RNA guide
gagcucaucuaaguucaacu

SEQ ID NO: 14723 - RNA, 20 nt, Artificial Sequence
  RPE65 RNA guide
gagcucuguaugauuuuacu

SEQ ID NO: 14724 - RNA, 20 nt, Artificial Sequence
  RPE65 RNA guide
gauaaauaucaauccauugg

SEQ ID NO: 14725 - RNA, 20 nt, Artificial Sequence
  RPE65 RNA guide
gauacaucagguacccuggu

SEQ ID NO: 14726 - RNA, 20 nt, Artificial Sequence
  RPE65 RNA guide
gauaccuaagaugaucagca

SEQ ID NO: 14727 - RNA, 20 nt, Artificial Sequence
  RPE65 RNA guide
gaucaaauggauacaucagg

SEQ ID NO: 14728 - RNA, 20 nt, Artificial Sequence
  RPE65 RNA guide
gaucagcaugguguuugacu

SEQ ID NO: 14729 - RNA, 20 nt, Artificial Sequence
  RPE65 RNA guide
gaucaucuuagguaucauga

SEQ ID NO: 14730 - RNA, 20 nt, Artificial Sequence
  RPE65 RNA guide
gaucaugauaccuaagauga

SEQ ID NO: 14731 - RNA, 20 nt, Artificial Sequence
  RPE65 RNA guide
gaucuguaaugcuuucaagc

SEQ ID NO: 14732 - RNA, 20 nt, Artificial Sequence
  RPE65 RNA guide
gaugagcucuguaugauuuu

SEQ ID NO: 14733 - RNA, 20 nt, Artificial Sequence
  RPE65 RNA guide
gaugaucagcaugguguuug

SEQ ID NO: 14734 - RNA, 20 nt, Artificial Sequence
  RPE65 RNA guide
gauuuggguacuggucuuuu

SEQ ID NO: 14735 - RNA, 20 nt, Artificial Sequence
  RPE65 RNA guide
gcaguucccuggcauucucu

SEQ ID NO: 14736 - RNA, 20 nt, Artificial Sequence
  RPE65 RNA guide
gcaguugaacuuagaugagc

SEQ ID NO: 14737 - RNA, 20 nt, Artificial Sequence
  RPE65 RNA guide
gcauggaauaugucacugua

SEQ ID NO: 14738 - RNA, 20 nt, Artificial Sequence
  RPE65 RNA guide
gcaugguguuugacuaggua

SEQ ID NO: 14739 - RNA, 20 nt, Artificial Sequence
  RPE65 RNA guide
gcauuacagaucaugauacc

SEQ ID NO: 14740 - RNA, 20 nt, Artificial Sequence
  RPE65 RNA guide
gcauucucuuucuguuuuga

SEQ ID NO: 14741 - RNA, 20 nt, Artificial Sequence
  RPE65 RNA guide
gccagggaacugcauggaau

SEQ ID NO: 14742 - RNA, 20 nt, Artificial Sequence
  RPE65 RNA guide
gcucaucuaaguucaacugc

SEQ ID NO: 14743 - RNA, 20 nt, Artificial Sequence
  RPE65 RNA guide
gcucuuaagauuuggguacu

SEQ ID NO: 14744 - RNA, 20 nt, Artificial Sequence
  RPE65 RNA guide
gcugaucaucuuagguauca

SEQ ID NO: 14745 - RNA, 20 nt, Artificial Sequence
  RPE65 RNA guide
gcuugaaagcauuacagauc

SEQ ID NO: 14746 - RNA, 20 nt, Artificial Sequence
  RPE65 RNA guide
gcuuucaagcauaaaacaga

SEQ ID NO: 14747 - RNA, 20 nt, Artificial Sequence
  RPE65 RNA guide
ggaacagacugaccagggua

SEQ ID NO: 14748 - RNA, 20 nt, Artificial Sequence
  RPE65 RNA guide
ggaaccaauggauugauauu

SEQ ID NO: 14749 - RNA, 20 nt, Artificial Sequence
  RPE65 RNA guide
ggaacugcauggaauauguc

SEQ ID NO: 14750 - RNA, 20 nt, Artificial Sequence
  RPE65 RNA guide
ggaauagaaaagaagaaaaa

SEQ ID NO: 14751 - RNA, 20 nt, Artificial Sequence
  RPE65 RNA guide
ggaauucuguucauauauca

SEQ ID NO: 14752 - RNA, 20 nt, Artificial Sequence
  RPE65 RNA guide
ggauacaucagguacccugg

SEQ ID NO: 14753 - RNA, 20 nt, Artificial Sequence
  RPE65 RNA guide
ggauugauauuuaucuacag

SEQ ID NO: 14754 - RNA, 20 nt, Artificial Sequence
  RPE65 RNA guide
ggcauucucuuucuguuuug

SEQ ID NO: 14755 - RNA, 20 nt, Artificial Sequence
  RPE65 RNA guide
gggaacugcauggaauaugu

SEQ ID NO: 14756 - RNA, 20 nt, Artificial Sequence
  RPE65 RNA guide
ggguaccugauguauccauu

SEQ ID NO: 14757 - RNA, 20 nt, Artificial Sequence
  RPE65 RNA guide
ggguacuggucuuuuucuuc

SEQ ID NO: 14758 - RNA, 20 nt, Artificial Sequence
  RPE65 RNA guide
gguaaaaauagguugaagga

SEQ ID NO: 14759 - RNA, 20 nt, Artificial Sequence
  RPE65 RNA guide
gguacccuggucagucuguu

SEQ ID NO: 14760 - RNA, 20 nt, Artificial Sequence
  RPE65 RNA guide
gguaccugauguauccauuu

SEQ ID NO: 14761 - RNA, 20 nt, Artificial Sequence
  RPE65 RNA guide
gguacuggucuuuuucuucu

SEQ ID NO: 14762 - RNA, 20 nt, Artificial Sequence
  RPE65 RNA guide
gguaucaugaucuguaaugc

SEQ ID NO: 14763 - RNA, 20 nt, Artificial Sequence
  RPE65 RNA guide
ggucagucuguuccuucaac

SEQ ID NO: 14764 - RNA, 20 nt, Artificial Sequence
  RPE65 RNA guide
ggucuuuuucuucuuuucua

SEQ ID NO: 14765 - RNA, 20 nt, Artificial Sequence
  RPE65 RNA guide
gguguuugacuagguaaaaa

SEQ ID NO: 14766 - RNA, 20 nt, Artificial Sequence
  RPE65 RNA guide
gguuccugucucuagacaug

SEQ ID NO: 14767 - RNA, 20 nt, Artificial Sequence
  RPE65 RNA guide
gguugaaggaacagacugac

SEQ ID NO: 14768 - RNA, 20 nt, Artificial Sequence
  RPE65 RNA guide
guaaaaauagguugaaggaa

SEQ ID NO: 14769 - RNA, 20 nt, Artificial Sequence
  RPE65 RNA guide
guaaaaucauacagagcuca

SEQ ID NO: 14770 - RNA, 20 nt, Artificial Sequence
  RPE65 RNA guide
guaaaguaaaaucauacaga

SEQ ID NO: 14771 - RNA, 20 nt, Artificial Sequence
  RPE65 RNA guide
guaaugcuuucaagcauaaa

SEQ ID NO: 14772 - RNA, 20 nt, Artificial Sequence
  RPE65 RNA guide
guacccaaaucuuaagagca

SEQ ID NO: 14773 - RNA, 20 nt, Artificial Sequence
  RPE65 RNA guide
guacccuggucagucuguuc

SEQ ID NO: 14774 - RNA, 20 nt, Artificial Sequence
  RPE65 RNA guide
guaccugauguauccauuug

SEQ ID NO: 14775 - RNA, 20 nt, Artificial Sequence
  RPE65 RNA guide
guacuggucuuuuucuucuu

SEQ ID NO: 14776 - RNA, 20 nt, Artificial Sequence
  RPE65 RNA guide
guaucaugaucuguaaugcu

SEQ ID NO: 14777 - RNA, 20 nt, Artificial Sequence
  RPE65 RNA guide
guaucuguuuuaugcuugaa

SEQ ID NO: 14778 - RNA, 20 nt, Artificial Sequence
  RPE65 RNA guide
gucaaacaccaugcugauca

SEQ ID NO: 14779 - RNA, 20 nt, Artificial Sequence
  RPE65 RNA guide
gucacuguagauaaauauca

SEQ ID NO: 14780 - RNA, 20 nt, Artificial Sequence
  RPE65 RNA guide
gucagucuguuccuucaacc

SEQ ID NO: 14781 - RNA, 20 nt, Artificial Sequence
  RPE65 RNA guide
gucuagagacaggaaccaau

SEQ ID NO: 14782 - RNA, 20 nt, Artificial Sequence
  RPE65 RNA guide
gucucuagacaugauauaug

SEQ ID NO: 14783 - RNA, 20 nt, Artificial Sequence
  RPE65 RNA guide
gucuguuccuucaaccuauu

SEQ ID NO: 14784 - RNA, 20 nt, Artificial Sequence
  RPE65 RNA guide
gugacauauuccaugcaguu

SEQ ID NO: 14785 - RNA, 20 nt, Artificial Sequence
  RPE65 RNA guide
guggaauucuguucauauau

SEQ ID NO: 14786 - RNA, 20 nt, Artificial Sequence
  RPE65 RNA guide
guguuugacuagguaaaaau

SEQ ID NO: 14787 - RNA, 20 nt, Artificial Sequence
  RPE65 RNA guide
guucaacugcucuuaagauu

SEQ ID NO: 14788 - RNA, 20 nt, Artificial Sequence
  RPE65 RNA guide
guucauauaucaugucuaga

SEQ ID NO: 14789 - RNA, 20 nt, Artificial Sequence
  RPE65 RNA guide
guucccuggcauucucuuuc

SEQ ID NO: 14790 - RNA, 20 nt, Artificial Sequence
  RPE65 RNA guide
guuccugucucuagacauga

SEQ ID NO: 14791 - RNA, 20 nt, Artificial Sequence
  RPE65 RNA guide
guuccuucaaccuauuuuua

SEQ ID NO: 14792 - RNA, 20 nt, Artificial Sequence
  RPE65 RNA guide
guucuaucuaguaauuacug

SEQ ID NO: 14793 - RNA, 20 nt, Artificial Sequence
  RPE65 RNA guide
guugaacuuagaugagcucu

SEQ ID NO: 14794 - RNA, 20 nt, Artificial Sequence
  RPE65 RNA guide
guugaaggaacagacugacc

SEQ ID NO: 14795 - RNA, 20 nt, Artificial Sequence
  RPE65 RNA guide
guuugacuagguaaaaauag

SEQ ID NO: 14796 - RNA, 20 nt, Artificial Sequence
  RPE65 RNA guide
guuuuaugcuugaaagcauu

SEQ ID NO: 14797 - RNA, 20 nt, Artificial Sequence
  RPE65 RNA guide
uaaaaauagguugaaggaac

SEQ ID NO: 14798 - RNA, 20 nt, Artificial Sequence
  RPE65 RNA guide
uaaagaucaaauggauacau

SEQ ID NO: 14799 - RNA, 20 nt, Artificial Sequence
  RPE65 RNA guide
uaaauaucaauccauugguu

SEQ ID NO: 14800 - RNA, 20 nt, Artificial Sequence
  RPE65 RNA guide
uaagagcaguugaacuuaga

SEQ ID NO: 14801 - RNA, 20 nt, Artificial Sequence
  RPE65 RNA guide
uaagaugaucagcauggugu

SEQ ID NO: 14802 - RNA, 20 nt, Artificial Sequence
  RPE65 RNA guide
uaagauuuggguacuggucu

SEQ ID NO: 14803 - RNA, 20 nt, Artificial Sequence
  RPE65 RNA guide
uacagagcucaucuaaguuc

SEQ ID NO: 14804 - RNA, 20 nt, Artificial Sequence
  RPE65 RNA guide
uacagaucaugauaccuaag

SEQ ID NO: 14805 - RNA, 20 nt, Artificial Sequence
  RPE65 RNA guide
uacagugacauauuccaugc

SEQ ID NO: 14806 - RNA, 20 nt, Artificial Sequence
  RPE65 RNA guide
uacaucagguacccugguca

SEQ ID NO: 14807 - RNA, 20 nt, Artificial Sequence
  RPE65 RNA guide
uacccaaaucuuaagagcag

SEQ ID NO: 14808 - RNA, 20 nt, Artificial Sequence
  RPE65 RNA guide
uacccuggucagucuguucc

SEQ ID NO: 14809 - RNA, 20 nt, Artificial Sequence
  RPE65 RNA guide
uaccuaagaugaucagcaug

SEQ ID NO: 14810 - RNA, 20 nt, Artificial Sequence
  RPE65 RNA guide
uaccuagucaaacaccaugc

SEQ ID NO: 14811 - RNA, 20 nt, Artificial Sequence
  RPE65 RNA guide
uaccugauguauccauuuga

SEQ ID NO: 14812 - RNA, 20 nt, Artificial Sequence
  RPE65 RNA guide
uagagacaggaaccaaugga

SEQ ID NO: 14813 - RNA, 20 nt, Artificial Sequence
  RPE65 RNA guide
uagaugagcucuguaugauu

SEQ ID NO: 14814 - RNA, 20 nt, Artificial Sequence
  RPE65 RNA guide
uagguaaaaauagguugaag

SEQ ID NO: 14815 - RNA, 20 nt, Artificial Sequence
  RPE65 RNA guide
uagguaucaugaucuguaau

SEQ ID NO: 14816 - RNA, 20 nt, Artificial Sequence
  RPE65 RNA guide
uagguugaaggaacagacug

SEQ ID NO: 14817 - RNA, 20 nt, Artificial Sequence
  RPE65 RNA guide
uagucaaacaccaugcugau

SEQ ID NO: 14818 - RNA, 20 nt, Artificial Sequence
  RPE65 RNA guide
uauaucaugucuagagacag

SEQ ID NO: 14819 - RNA, 20 nt, Artificial Sequence
  RPE65 RNA guide
uaucaauccauugguuccug

SEQ ID NO: 14820 - RNA, 20 nt, Artificial Sequence
  RPE65 RNA guide
uaucaugucuagagacagga

SEQ ID NO: 14821 - RNA, 20 nt, Artificial Sequence
  RPE65 RNA guide
uaucuacagugacauauucc

SEQ ID NO: 14822 - RNA, 20 nt, Artificial Sequence
  RPE65 RNA guide
uaugcuugaaagcauuacag

SEQ ID NO: 14823 - RNA, 20 nt, Artificial Sequence
  RPE65 RNA guide
uauuccaugcaguucccugg

SEQ ID NO: 14824 - RNA, 20 nt, Artificial Sequence
  RPE65 RNA guide
ucaaaacagaaagagaaugc

SEQ ID NO: 14825 - RNA, 20 nt, Artificial Sequence
  RPE65 RNA guide
ucaaacaccaugcugaucau

SEQ ID NO: 14826 - RNA, 20 nt, Artificial Sequence
  RPE65 RNA guide
ucaaauggauacaucaggua

SEQ ID NO: 14827 - RNA, 20 nt, Artificial Sequence
  RPE65 RNA guide
ucaacugcucuuaagauuug

SEQ ID NO: 14828 - RNA, 20 nt, Artificial Sequence
  RPE65 RNA guide
ucaauccauugguuccuguc

SEQ ID NO: 14829 - RNA, 20 nt, Artificial Sequence
  RPE65 RNA guide
ucagcaugguguuugacuag

SEQ ID NO: 14830 - RNA, 20 nt, Artificial Sequence
  RPE65 RNA guide
ucagguacccuggucagucu

SEQ ID NO: 14831 - RNA, 20 nt, Artificial Sequence
  RPE65 RNA guide
ucagucuguuccuucaaccu

SEQ ID NO: 14832 - RNA, 20 nt, Artificial Sequence
  RPE65 RNA guide
ucauacagagcucaucuaag

SEQ ID NO: 14833 - RNA, 20 nt, Artificial Sequence
  RPE65 RNA guide
ucauauaucaugucuagaga

SEQ ID NO: 14834 - RNA, 20 nt, Artificial Sequence
  RPE65 RNA guide
ucaucuaaguucaacugcuc

SEQ ID NO: 14835 - RNA, 20 nt, Artificial Sequence
  RPE65 RNA guide
ucaucuuagguaucaugauc

SEQ ID NO: 14836 - RNA, 20 nt, Artificial Sequence
  RPE65 RNA guide
ucaugauaccuaagaugauc

SEQ ID NO: 14837 - RNA, 20 nt, Artificial Sequence
  RPE65 RNA guide
ucaugaucuguaaugcuuuc

SEQ ID NO: 14838 - RNA, 20 nt, Artificial Sequence
  RPE65 RNA guide
ucaugucuagagacaggaac

SEQ ID NO: 14839 - RNA, 20 nt, Artificial Sequence
  RPE65 RNA guide
uccaugcaguucccuggcau

SEQ ID NO: 14840 - RNA, 20 nt, Artificial Sequence
  RPE65 RNA guide
uccauugguuccugucucua

SEQ ID NO: 14841 - RNA, 20 nt, Artificial Sequence
  RPE65 RNA guide
ucccuggcauucucuuucug

SEQ ID NO: 14842 - RNA, 20 nt, Artificial Sequence
  RPE65 RNA guide
uccugucucuagacaugaua

SEQ ID NO: 14843 - RNA, 20 nt, Artificial Sequence
  RPE65 RNA guide
uccuucaaccuauuuuuacc

SEQ ID NO: 14844 - RNA, 20 nt, Artificial Sequence
  RPE65 RNA guide
ucuaaguucaacugcucuua

SEQ ID NO: 14845 - RNA, 20 nt, Artificial Sequence
  RPE65 RNA guide
ucuacagugacauauuccau

SEQ ID NO: 14846 - RNA, 20 nt, Artificial Sequence
  RPE65 RNA guide
ucuagagacaggaaccaaug

SEQ ID NO: 14847 - RNA, 20 nt, Artificial Sequence
  RPE65 RNA guide
ucucaaaacagaaagagaau

SEQ ID NO: 14848 - RNA, 20 nt, Artificial Sequence
  RPE65 RNA guide
ucucuagacaugauauauga

SEQ ID NO: 14849 - RNA, 20 nt, Artificial Sequence
  RPE65 RNA guide
ucuguucauauaucaugucu

SEQ ID NO: 14850 - RNA, 20 nt, Artificial Sequence
  RPE65 RNA guide
ucuguuccuucaaccuauuu

SEQ ID NO: 14851 - RNA, 20 nt, Artificial Sequence
  RPE65 RNA guide
ucuuaagagcaguugaacuu

SEQ ID NO: 14852 - RNA, 20 nt, Artificial Sequence
  RPE65 RNA guide
ucuuaagauuuggguacugg

SEQ ID NO: 14853 - RNA, 20 nt, Artificial Sequence
  RPE65 RNA guide
ucuuagguaucaugaucugu

SEQ ID NO: 14854 - RNA, 20 nt, Artificial Sequence
  RPE65 RNA guide
ugaaagcauuacagaucaug

SEQ ID NO: 14855 - RNA, 20 nt, Artificial Sequence
  RPE65 RNA guide
ugaacuuagaugagcucugu

SEQ ID NO: 14856 - RNA, 20 nt, Artificial Sequence
  RPE65 RNA guide
ugaaggaacagacugaccag

SEQ ID NO: 14857 - RNA, 20 nt, Artificial Sequence
  RPE65 RNA guide
ugacauauuccaugcaguuc

SEQ ID NO: 14858 - RNA, 20 nt, Artificial Sequence
  RPE65 RNA guide
ugaccaggguaccugaugua

SEQ ID NO: 14859 - RNA, 20 nt, Artificial Sequence
  RPE65 RNA guide
ugacuagguaaaaauagguu

SEQ ID NO: 14860 - RNA, 20 nt, Artificial Sequence
  RPE65 RNA guide
ugauaccuaagaugaucagc

SEQ ID NO: 14861 - RNA, 20 nt, Artificial Sequence
  RPE65 RNA guide
ugaucagcaugguguuugac

SEQ ID NO: 14862 - RNA, 20 nt, Artificial Sequence
  RPE65 RNA guide
ugaucaucuuagguaucaug

SEQ ID NO: 14863 - RNA, 20 nt, Artificial Sequence
  RPE65 RNA guide
ugaucuguaaugcuuucaag

SEQ ID NO: 14864 - RNA, 20 nt, Artificial Sequence
  RPE65 RNA guide
ugcaguucccuggcauucuc

SEQ ID NO: 14865 - RNA, 20 nt, Artificial Sequence
  RPE65 RNA guide
ugcauggaauaugucacugu

SEQ ID NO: 14866 - RNA, 20 nt, Artificial Sequence
  RPE65 RNA guide
ugccagggaacugcauggaa

SEQ ID NO: 14867 - RNA, 20 nt, Artificial Sequence
  RPE65 RNA guide
ugcucuuaagauuuggguac

SEQ ID NO: 14868 - RNA, 20 nt, Artificial Sequence
  RPE65 RNA guide
ugcugaucaucuuagguauc

SEQ ID NO: 14869 - RNA, 20 nt, Artificial Sequence
  RPE65 RNA guide
ugcuugaaagcauuacagau

SEQ ID NO: 14870 - RNA, 20 nt, Artificial Sequence
  RPE65 RNA guide
ugcuuucaagcauaaaacag

SEQ ID NO: 14871 - RNA, 20 nt, Artificial Sequence
  RPE65 RNA guide
uggauacaucagguacccug

SEQ ID NO: 14872 - RNA, 20 nt, Artificial Sequence
  RPE65 RNA guide
uggcauucucuuucuguuuu

SEQ ID NO: 14873 - RNA, 20 nt, Artificial Sequence
  RPE65 RNA guide
uggguacuggucuuuuucuu

SEQ ID NO: 14874 - RNA, 20 nt, Artificial Sequence
  RPE65 RNA guide
uggucagucuguuccuucaa

SEQ ID NO: 14875 - RNA, 20 nt, Artificial Sequence
  RPE65 RNA guide
ugguguuugacuagguaaaa

SEQ ID NO: 14876 - RNA, 20 nt, Artificial Sequence
  RPE65 RNA guide
ugguuccugucucuagacau

SEQ ID NO: 14877 - RNA, 20 nt, Artificial Sequence
  RPE65 RNA guide
ugucuagagacaggaaccaa

SEQ ID NO: 14878 - RNA, 20 nt, Artificial Sequence
  RPE65 RNA guide
ugucucuagacaugauauau

SEQ ID NO: 14879 - RNA, 20 nt, Artificial Sequence
  RPE65 RNA guide
uguucauauaucaugucuag

SEQ ID NO: 14880 - RNA, 20 nt, Artificial Sequence
  RPE65 RNA guide
uguuccuucaaccuauuuuu

SEQ ID NO: 14881 - RNA, 20 nt, Artificial Sequence
  RPE65 RNA guide
uuaagagcaguugaacuuag

SEQ ID NO: 14882 - RNA, 20 nt, Artificial Sequence
  RPE65 RNA guide
uuaagauuuggguacugguc

SEQ ID NO: 14883 - RNA, 20 nt, Artificial Sequence
  RPE65 RNA guide
uuacagaucaugauaccuaa

SEQ ID NO: 14884 - RNA, 20 nt, Artificial Sequence
  RPE65 RNA guide
uuaccuagucaaacaccaug

SEQ ID NO: 14885 - RNA, 20 nt, Artificial Sequence
  RPE65 RNA guide
uuagguaucaugaucuguaa

SEQ ID NO: 14886 - RNA, 20 nt, Artificial Sequence
  RPE65 RNA guide
uuaucuacagugacauauuc

SEQ ID NO: 14887 - RNA, 20 nt, Artificial Sequence
  RPE65 RNA guide
uuaugcuugaaagcauuaca

SEQ ID NO: 14888 - RNA, 20 nt, Artificial Sequence
  RPE65 RNA guide
uucaacugcucuuaagauuu

SEQ ID NO: 14889 - RNA, 20 nt, Artificial Sequence
  RPE65 RNA guide
uucauauaucaugucuagag

SEQ ID NO: 14890 - RNA, 20 nt, Artificial Sequence
  RPE65 RNA guide
uuccaugcaguucccuggca

SEQ ID NO: 14891 - RNA, 20 nt, Artificial Sequence
  RPE65 RNA guide
uucccuggcauucucuuucu

SEQ ID NO: 14892 - RNA, 20 nt, Artificial Sequence
  RPE65 RNA guide
uuccugucucuagacaugau

SEQ ID NO: 14893 - RNA, 20 nt, Artificial Sequence
  RPE65 RNA guide
uuccuucaaccuauuuuuac

SEQ ID NO: 14894 - RNA, 20 nt, Artificial Sequence
  RPE65 RNA guide
uugaacuuagaugagcucug

SEQ ID NO: 14895 - RNA, 20 nt, Artificial Sequence
  RPE65 RNA guide
uugaaggaacagacugacca

SEQ ID NO: 14896 - RNA, 20 nt, Artificial Sequence
  RPE65 RNA guide
uuggguacuggucuuuuucu

SEQ ID NO: 14897 - RNA, 20 nt, Artificial Sequence
  RPE65 RNA guide
uugguuccugucucuagaca

SEQ ID NO: 14898 - RNA, 20 nt, Artificial Sequence
  RPE65 RNA guide
uuuaccuagucaaacaccau

SEQ ID NO: 14899 - RNA, 20 nt, Artificial Sequence
  RPE65 RNA guide
uuuggguacuggucuuuuuc

SEQ ID NO: 14900 - RNA, 20 nt, Artificial Sequence
  RPE65 RNA guide
uuuuaccuagucaaacacca

SEQ ID NO: 14901 - RNA, 20 nt, Artificial Sequence
  RPE65 RNA guide
uuuuuaccuagucaaacacc

SEQ ID NO: 14902 - RNA, 21 nt, Artificial Sequence
  RPE65 RNA guide
aaaaagaccaguacccaaauc

SEQ ID NO: 14903 - RNA, 21 nt, Artificial Sequence
  RPE65 RNA guide
aaaaauagguugaaggaacag

SEQ ID NO: 14904 - RNA, 21 nt, Artificial Sequence
  RPE65 RNA guide
aaaacagaaagagaaugccag

SEQ ID NO: 14905 - RNA, 21 nt, Artificial Sequence
  RPE65 RNA guide
aaaagaagaaaaagaccagua

SEQ ID NO: 14906 - RNA, 21 nt, Artificial Sequence
  RPE65 RNA guide
aaaagaccaguacccaaaucu

SEQ ID NO: 14907 - RNA, 21 nt, Artificial Sequence
  RPE65 RNA guide
aaaauagguugaaggaacaga

SEQ ID NO: 14908 - RNA, 21 nt, Artificial Sequence
  RPE65 RNA guide
aaaaucauacagagcucaucu

SEQ ID NO: 14909 - RNA, 21 nt, Artificial Sequence
  RPE65 RNA guide
aaacaccaugcugaucaucuu

SEQ ID NO: 14910 - RNA, 21 nt, Artificial Sequence
  RPE65 RNA guide
aaacagaaagagaaugccagg

SEQ ID NO: 14911 - RNA, 21 nt, Artificial Sequence
  RPE65 RNA guide
aaagaagaaaaagaccaguac

SEQ ID NO: 14912 - RNA, 21 nt, Artificial Sequence
  RPE65 RNA guide
aaagaccaguacccaaaucuu

SEQ ID NO: 14913 - RNA, 21 nt, Artificial Sequence
  RPE65 RNA guide
aaagagaaugccagggaacug

SEQ ID NO: 14914 - RNA, 21 nt, Artificial Sequence
  RPE65 RNA guide
aaagaucaaauggauacauca

SEQ ID NO: 14915 - RNA, 21 nt, Artificial Sequence
  RPE65 RNA guide
aaagcauuacagaucaugaua

SEQ ID NO: 14916 - RNA, 21 nt, Artificial Sequence
  RPE65 RNA guide
aaaguaaaaucauacagagcu

SEQ ID NO: 14917 - RNA, 21 nt, Artificial Sequence
  RPE65 RNA guide
aaauagguugaaggaacagac

SEQ ID NO: 14918 - RNA, 21 nt, Artificial Sequence
  RPE65 RNA guide
aaauaucaauccauugguucc

SEQ ID NO: 14919 - RNA, 21 nt, Artificial Sequence
  RPE65 RNA guide
aaaucauacagagcucaucua

SEQ ID NO: 14920 - RNA, 21 nt, Artificial Sequence
  RPE65 RNA guide
aaaucucaaaacagaaagaga

SEQ ID NO: 14921 - RNA, 21 nt, Artificial Sequence
  RPE65 RNA guide
aaaucuuaagagcaguugaac

SEQ ID NO: 14922 - RNA, 21 nt, Artificial Sequence
  RPE65 RNA guide
aaauggauacaucagguaccc

SEQ ID NO: 14923 - RNA, 21 nt, Artificial Sequence
  RPE65 RNA guide
aacaccaugcugaucaucuua

SEQ ID NO: 14924 - RNA, 21 nt, Artificial Sequence
  RPE65 RNA guide
aacagaaagagaaugccaggg

SEQ ID NO: 14925 - RNA, 21 nt, Artificial Sequence
  RPE65 RNA guide
aacagacugaccaggguaccu

SEQ ID NO: 14926 - RNA, 21 nt, Artificial Sequence
  RPE65 RNA guide
aaccuauuuuuaccuagucaa

SEQ ID NO: 14927 - RNA, 21 nt, Artificial Sequence
  RPE65 RNA guide
aacugcauggaauaugucacu

SEQ ID NO: 14928 - RNA, 21 nt, Artificial Sequence
  RPE65 RNA guide
aacugcucuuaagauuugggu

SEQ ID NO: 14929 - RNA, 21 nt, Artificial Sequence
  RPE65 RNA guide
aacuuagaugagcucuguaug

SEQ ID NO: 14930 - RNA, 21 nt, Artificial Sequence
  RPE65 RNA guide
aagaaaaagaccaguacccaa

SEQ ID NO: 14931 - RNA, 21 nt, Artificial Sequence
  RPE65 RNA guide
aagaagaaaaagaccaguacc

SEQ ID NO: 14932 - RNA, 21 nt, Artificial Sequence
  RPE65 RNA guide
aagaccaguacccaaaucuua

SEQ ID NO: 14933 - RNA, 21 nt, Artificial Sequence
  RPE65 RNA guide
aagagaaugccagggaacugc

SEQ ID NO: 14934 - RNA, 21 nt, Artificial Sequence
  RPE65 RNA guide
aagagcaguugaacuuagaug

SEQ ID NO: 14935 - RNA, 21 nt, Artificial Sequence
  RPE65 RNA guide
aagaucaaauggauacaucag

SEQ ID NO: 14936 - RNA, 21 nt, Artificial Sequence
  RPE65 RNA guide
aagaugaucagcaugguguuu

SEQ ID NO: 14937 - RNA, 21 nt, Artificial Sequence
  RPE65 RNA guide
aagauuuggguacuggucuuu

SEQ ID NO: 14938 - RNA, 21 nt, Artificial Sequence
  RPE65 RNA guide
aagcauuacagaucaugauac

SEQ ID NO: 14939 - RNA, 21 nt, Artificial Sequence
  RPE65 RNA guide
aaggaacagacugaccagggu

SEQ ID NO: 14940 - RNA, 21 nt, Artificial Sequence
  RPE65 RNA guide
aaguaaaaucauacagagcuc

SEQ ID NO: 14941 - RNA, 21 nt, Artificial Sequence
  RPE65 RNA guide
aaguucaacugcucuuaagau

SEQ ID NO: 14942 - RNA, 21 nt, Artificial Sequence
  RPE65 RNA guide
aauagguugaaggaacagacu

SEQ ID NO: 14943 - RNA, 21 nt, Artificial Sequence
  RPE65 RNA guide
aauaucaauccauugguuccu

SEQ ID NO: 14944 - RNA, 21 nt, Artificial Sequence
  RPE65 RNA guide
aaucauacagagcucaucuaa

SEQ ID NO: 14945 - RNA, 21 nt, Artificial Sequence
  RPE65 RNA guide
aauccauugguuccugucucu

SEQ ID NO: 14946 - RNA, 21 nt, Artificial Sequence
  RPE65 RNA guide
aaucucaaaacagaaagagaa

SEQ ID NO: 14947 - RNA, 21 nt, Artificial Sequence
  RPE65 RNA guide
aaucuuaagagcaguugaacu

SEQ ID NO: 14948 - RNA, 21 nt, Artificial Sequence
  RPE65 RNA guide
aaugccagggaacugcaugga

SEQ ID NO: 14949 - RNA, 21 nt, Artificial Sequence
  RPE65 RNA guide
aauggauacaucagguacccu

SEQ ID NO: 14950 - RNA, 21 nt, Artificial Sequence
  RPE65 RNA guide
acaccaugcugaucaucuuag

SEQ ID NO: 14951 - RNA, 21 nt, Artificial Sequence
  RPE65 RNA guide
acagaaagagaaugccaggga

SEQ ID NO: 14952 - RNA, 21 nt, Artificial Sequence
  RPE65 RNA guide
acagacugaccaggguaccug

SEQ ID NO: 14953 - RNA, 21 nt, Artificial Sequence
  RPE65 RNA guide
acagagcucaucuaaguucaa

SEQ ID NO: 14954 - RNA, 21 nt, Artificial Sequence
  RPE65 RNA guide
acagaucaugauaccuaagau

SEQ ID NO: 14955 - RNA, 21 nt, Artificial Sequence
  RPE65 RNA guide
acaggaaccaauggauugaua

SEQ ID NO: 14956 - RNA, 21 nt, Artificial Sequence
  RPE65 RNA guide
acagugacauauuccaugcag

SEQ ID NO: 14957 - RNA, 21 nt, Artificial Sequence
  RPE65 RNA guide
acauauuccaugcaguucccu

SEQ ID NO: 14958 - RNA, 21 nt, Artificial Sequence
  RPE65 RNA guide
acaucagguacccuggucagu

SEQ ID NO: 14959 - RNA, 21 nt, Artificial Sequence
  RPE65 RNA guide
acaugauauaugaacagaauu

SEQ ID NO: 14960 - RNA, 21 nt, Artificial Sequence
  RPE65 RNA guide
accaggguaccugauguaucc

SEQ ID NO: 14961 - RNA, 21 nt, Artificial Sequence
  RPE65 RNA guide
accaguacccaaaucuuaaga

SEQ ID NO: 14962 - RNA, 21 nt, Artificial Sequence
  RPE65 RNA guide
accaugcugaucaucuuaggu

SEQ ID NO: 14963 - RNA, 21 nt, Artificial Sequence
  RPE65 RNA guide
acccaaaucuuaagagcaguu

SEQ ID NO: 14964 - RNA, 21 nt, Artificial Sequence
  RPE65 RNA guide
acccuggucagucuguuccuu

SEQ ID NO: 14965 - RNA, 21 nt, Artificial Sequence
  RPE65 RNA guide
accuaagaugaucagcauggu

SEQ ID NO: 14966 - RNA, 21 nt, Artificial Sequence
  RPE65 RNA guide
accuagucaaacaccaugcug

SEQ ID NO: 14967 - RNA, 21 nt, Artificial Sequence
  RPE65 RNA guide
accuauuuuuaccuagucaaa

SEQ ID NO: 14968 - RNA, 21 nt, Artificial Sequence
  RPE65 RNA guide
accugauguauccauuugauc

SEQ ID NO: 14969 - RNA, 21 nt, Artificial Sequence
  RPE65 RNA guide
acuagguaaaaauagguugaa

SEQ ID NO: 14970 - RNA, 21 nt, Artificial Sequence
  RPE65 RNA guide
acugaccaggguaccugaugu

SEQ ID NO: 14971 - RNA, 21 nt, Artificial Sequence
  RPE65 RNA guide
acugcauggaauaugucacug

SEQ ID NO: 14972 - RNA, 21 nt, Artificial Sequence
  RPE65 RNA guide
acugcucuuaagauuugggua

SEQ ID NO: 14973 - RNA, 21 nt, Artificial Sequence
  RPE65 RNA guide
acuuagaugagcucuguauga

SEQ ID NO: 14974 - RNA, 21 nt, Artificial Sequence
  RPE65 RNA guide
agaaaaagaccaguacccaaa

SEQ ID NO: 14975 - RNA, 21 nt, Artificial Sequence
  RPE65 RNA guide
agaaaagaagaaaaagaccag

SEQ ID NO: 14976 - RNA, 21 nt, Artificial Sequence
  RPE65 RNA guide
agaaagagaaugccagggaac

SEQ ID NO: 14977 - RNA, 21 nt, Artificial Sequence
  RPE65 RNA guide
agaagaaaaagaccaguaccc

SEQ ID NO: 14978 - RNA, 21 nt, Artificial Sequence
  RPE65 RNA guide
agaaugccagggaacugcaug

SEQ ID NO: 14979 - RNA, 21 nt, Artificial Sequence
  RPE65 RNA guide
agacaggaaccaauggauuga

SEQ ID NO: 14980 - RNA, 21 nt, Artificial Sequence
  RPE65 RNA guide
agacaugauauaugaacagaa

SEQ ID NO: 14981 - RNA, 21 nt, Artificial Sequence
  RPE65 RNA guide
agaccaguacccaaaucuuaa

SEQ ID NO: 14982 - RNA, 21 nt, Artificial Sequence
  RPE65 RNA guide
agacugaccaggguaccugau

SEQ ID NO: 14983 - RNA, 21 nt, Artificial Sequence
  RPE65 RNA guide
agagaaugccagggaacugca

SEQ ID NO: 14984 - RNA, 21 nt, Artificial Sequence
  RPE65 RNA guide
agagacaggaaccaauggauu

SEQ ID NO: 14985 - RNA, 21 nt, Artificial Sequence
  RPE65 RNA guide
agagcaguugaacuuagauga

SEQ ID NO: 14986 - RNA, 21 nt, Artificial Sequence
  RPE65 RNA guide
agagcucaucuaaguucaacu

SEQ ID NO: 14987 - RNA, 21 nt, Artificial Sequence
  RPE65 RNA guide
agauaaauaucaauccauugg

SEQ ID NO: 14988 - RNA, 21 nt, Artificial Sequence
  RPE65 RNA guide
agaucaaauggauacaucagg

SEQ ID NO: 14989 - RNA, 21 nt, Artificial Sequence
  RPE65 RNA guide
agaucaugauaccuaagauga

SEQ ID NO: 14990 - RNA, 21 nt, Artificial Sequence
  RPE65 RNA guide
agaugagcucuguaugauuuu

SEQ ID NO: 14991 - RNA, 21 nt, Artificial Sequence
  RPE65 RNA guide
agaugaucagcaugguguuug

SEQ ID NO: 14992 - RNA, 21 nt, Artificial Sequence
  RPE65 RNA guide
agauuuggguacuggucuuuu

SEQ ID NO: 14993 - RNA, 21 nt, Artificial Sequence
  RPE65 RNA guide
agcaguugaacuuagaugagc

SEQ ID NO: 14994 - RNA, 21 nt, Artificial Sequence
  RPE65 RNA guide
agcaugguguuugacuaggua

SEQ ID NO: 14995 - RNA, 21 nt, Artificial Sequence
  RPE65 RNA guide
agcauuacagaucaugauacc

SEQ ID NO: 14996 - RNA, 21 nt, Artificial Sequence
  RPE65 RNA guide
agcucaucuaaguucaacugc

SEQ ID NO: 14997 - RNA, 21 nt, Artificial Sequence
  RPE65 RNA guide
aggaacagacugaccagggua

SEQ ID NO: 14998 - RNA, 21 nt, Artificial Sequence
  RPE65 RNA guide
aggaaccaauggauugauauu

SEQ ID NO: 14999 - RNA, 21 nt, Artificial Sequence
  RPE65 RNA guide
aggaauagaaaagaagaaaaa

SEQ ID NO: 15000 - RNA, 21 nt, Artificial Sequence
  RPE65 RNA guide
agggaacugcauggaauaugu

SEQ ID NO: 15001 - RNA, 21 nt, Artificial Sequence
  RPE65 RNA guide
aggguaccugauguauccauu

SEQ ID NO: 15002 - RNA, 21 nt, Artificial Sequence
  RPE65 RNA guide
agguaaaaauagguugaagga

SEQ ID NO: 15003 - RNA, 21 nt, Artificial Sequence
  RPE65 RNA guide
agguacccuggucagucuguu

SEQ ID NO: 15004 - RNA, 21 nt, Artificial Sequence
  RPE65 RNA guide
agguaucaugaucuguaaugc

SEQ ID NO: 15005 - RNA, 21 nt, Artificial Sequence
  RPE65 RNA guide
agguugaaggaacagacugac

SEQ ID NO: 15006 - RNA, 21 nt, Artificial Sequence
  RPE65 RNA guide
aguaaaaucauacagagcuca

SEQ ID NO: 15007 - RNA, 21 nt, Artificial Sequence
  RPE65 RNA guide
aguacccaaaucuuaagagca

SEQ ID NO: 15008 - RNA, 21 nt, Artificial Sequence
  RPE65 RNA guide
aguaucuguuuuaugcuugaa

SEQ ID NO: 15009 - RNA, 21 nt, Artificial Sequence
  RPE65 RNA guide
agucaaacaccaugcugauca

SEQ ID NO: 15010 - RNA, 21 nt, Artificial Sequence
  RPE65 RNA guide
agucuguuccuucaaccuauu

SEQ ID NO: 15011 - RNA, 21 nt, Artificial Sequence
  RPE65 RNA guide
agugacauauuccaugcaguu

SEQ ID NO: 15012 - RNA, 21 nt, Artificial Sequence
  RPE65 RNA guide
aguucaacugcucuuaagauu

SEQ ID NO: 15013 - RNA, 21 nt, Artificial Sequence
  RPE65 RNA guide
aguucccuggcauucucuuuc

SEQ ID NO: 15014 - RNA, 21 nt, Artificial Sequence
  RPE65 RNA guide
aguucuaucuaguaauuacug

SEQ ID NO: 15015 - RNA, 21 nt, Artificial Sequence
  RPE65 RNA guide
aguugaacuuagaugagcucu

SEQ ID NO: 15016 - RNA, 21 nt, Artificial Sequence
  RPE65 RNA guide
auaaagaucaaauggauacau

SEQ ID NO: 15017 - RNA, 21 nt, Artificial Sequence
  RPE65 RNA guide
auaaauaucaauccauugguu

SEQ ID NO: 15018 - RNA, 21 nt, Artificial Sequence
  RPE65 RNA guide
auacagagcucaucuaaguuc

SEQ ID NO: 15019 - RNA, 21 nt, Artificial Sequence
  RPE65 RNA guide
auacaucagguacccugguca

SEQ ID NO: 15020 - RNA, 21 nt, Artificial Sequence
  RPE65 RNA guide
auaccuaagaugaucagcaug

SEQ ID NO: 15021 - RNA, 21 nt, Artificial Sequence
  RPE65 RNA guide
auagguugaaggaacagacug

SEQ ID NO: 15022 - RNA, 21 nt, Artificial Sequence
  RPE65 RNA guide
auauaucaugucuagagacag

SEQ ID NO: 15023 - RNA, 21 nt, Artificial Sequence
  RPE65 RNA guide
auaucaauccauugguuccug

SEQ ID NO: 15024 - RNA, 21 nt, Artificial Sequence
  RPE65 RNA guide
auaucaugucuagagacagga

SEQ ID NO: 15025 - RNA, 21 nt, Artificial Sequence
  RPE65 RNA guide
auauuccaugcaguucccugg

SEQ ID NO: 15026 - RNA, 21 nt, Artificial Sequence
  RPE65 RNA guide
aucaaauggauacaucaggua

SEQ ID NO: 15027 - RNA, 21 nt, Artificial Sequence
  RPE65 RNA guide
aucaauccauugguuccuguc

SEQ ID NO: 15028 - RNA, 21 nt, Artificial Sequence
  RPE65 RNA guide
aucagcaugguguuugacuag

SEQ ID NO: 15029 - RNA, 21 nt, Artificial Sequence
  RPE65 RNA guide
aucagguacccuggucagucu

SEQ ID NO: 15030 - RNA, 21 nt, Artificial Sequence
  RPE65 RNA guide
aucauacagagcucaucuaag

SEQ ID NO: 15031 - RNA, 21 nt, Artificial Sequence
  RPE65 RNA guide
aucaucuuagguaucaugauc

SEQ ID NO: 15032 - RNA, 21 nt, Artificial Sequence
  RPE65 RNA guide
aucaugauaccuaagaugauc

SEQ ID NO: 15033 - RNA, 21 nt, Artificial Sequence
  RPE65 RNA guide
aucaugaucuguaaugcuuuc

SEQ ID NO: 15034 - RNA, 21 nt, Artificial Sequence
  RPE65 RNA guide
aucaugucuagagacaggaac

SEQ ID NO: 15035 - RNA, 21 nt, Artificial Sequence
  RPE65 RNA guide
auccauugguuccugucucua

SEQ ID NO: 15036 - RNA, 21 nt, Artificial Sequence
  RPE65 RNA guide
aucuaaguucaacugcucuua

SEQ ID NO: 15037 - RNA, 21 nt, Artificial Sequence
  RPE65 RNA guide
aucuacagugacauauuccau

SEQ ID NO: 15038 - RNA, 21 nt, Artificial Sequence
  RPE65 RNA guide
aucucaaaacagaaagagaau

SEQ ID NO: 15039 - RNA, 21 nt, Artificial Sequence
  RPE65 RNA guide
aucuuaagagcaguugaacuu

SEQ ID NO: 15040 - RNA, 21 nt, Artificial Sequence
  RPE65 RNA guide
aucuuagguaucaugaucugu

SEQ ID NO: 15041 - RNA, 21 nt, Artificial Sequence
  RPE65 RNA guide
augauaccuaagaugaucagc

SEQ ID NO: 15042 - RNA, 21 nt, Artificial Sequence
  RPE65 RNA guide
augaucagcaugguguuugac

SEQ ID NO: 15043 - RNA, 21 nt, Artificial Sequence
  RPE65 RNA guide
augaucuguaaugcuuucaag

SEQ ID NO: 15044 - RNA, 21 nt, Artificial Sequence
  RPE65 RNA guide
augcaguucccuggcauucuc

SEQ ID NO: 15045 - RNA, 21 nt, Artificial Sequence
  RPE65 RNA guide
augccagggaacugcauggaa

SEQ ID NO: 15046 - RNA, 21 nt, Artificial Sequence
  RPE65 RNA guide
augcugaucaucuuagguauc

SEQ ID NO: 15047 - RNA, 21 nt, Artificial Sequence
  RPE65 RNA guide
augcuugaaagcauuacagau

SEQ ID NO: 15048 - RNA, 21 nt, Artificial Sequence
  RPE65 RNA guide
augcuuucaagcauaaaacag

SEQ ID NO: 15049 - RNA, 21 nt, Artificial Sequence
  RPE65 RNA guide
auggauacaucagguacccug

SEQ ID NO: 15050 - RNA, 21 nt, Artificial Sequence
  RPE65 RNA guide
augguguuugacuagguaaaa

SEQ ID NO: 15051 - RNA, 21 nt, Artificial Sequence
  RPE65 RNA guide
augucuagagacaggaaccaa

SEQ ID NO: 15052 - RNA, 21 nt, Artificial Sequence
  RPE65 RNA guide
auuacagaucaugauaccuaa

SEQ ID NO: 15053 - RNA, 21 nt, Artificial Sequence
  RPE65 RNA guide
auuccaugcaguucccuggca

SEQ ID NO: 15054 - RNA, 21 nt, Artificial Sequence
  RPE65 RNA guide
auugguuccugucucuagaca

SEQ ID NO: 15055 - RNA, 21 nt, Artificial Sequence
  RPE65 RNA guide
auuuggguacuggucuuuuuc

SEQ ID NO: 15056 - RNA, 21 nt, Artificial Sequence
  RPE65 RNA guide
auuuuuaccuagucaaacacc

SEQ ID NO: 15057 - RNA, 21 nt, Artificial Sequence
  RPE65 RNA guide
caaaacagaaagagaaugcca

SEQ ID NO: 15058 - RNA, 21 nt, Artificial Sequence
  RPE65 RNA guide
caaacaccaugcugaucaucu

SEQ ID NO: 15059 - RNA, 21 nt, Artificial Sequence
  RPE65 RNA guide
caaaucuuaagagcaguugaa

SEQ ID NO: 15060 - RNA, 21 nt, Artificial Sequence
  RPE65 RNA guide
caaauggauacaucagguacc

SEQ ID NO: 15061 - RNA, 21 nt, Artificial Sequence
  RPE65 RNA guide
caaccuauuuuuaccuaguca

SEQ ID NO: 15062 - RNA, 21 nt, Artificial Sequence
  RPE65 RNA guide
caacugcucuuaagauuuggg

SEQ ID NO: 15063 - RNA, 21 nt, Artificial Sequence
  RPE65 RNA guide
caauccauugguuccugucuc

SEQ ID NO: 15064 - RNA, 21 nt, Artificial Sequence
  RPE65 RNA guide
caccaugcugaucaucuuagg

SEQ ID NO: 15065 - RNA, 21 nt, Artificial Sequence
  RPE65 RNA guide
cagaaagagaaugccagggaa

SEQ ID NO: 15066 - RNA, 21 nt, Artificial Sequence
  RPE65 RNA guide
cagacugaccaggguaccuga

SEQ ID NO: 15067 - RNA, 21 nt, Artificial Sequence
  RPE65 RNA guide
cagagcucaucuaaguucaac

SEQ ID NO: 15068 - RNA, 21 nt, Artificial Sequence
  RPE65 RNA guide
cagaucaugauaccuaagaug

SEQ ID NO: 15069 - RNA, 21 nt, Artificial Sequence
  RPE65 RNA guide
cagcaugguguuugacuaggu

SEQ ID NO: 15070 - RNA, 21 nt, Artificial Sequence
  RPE65 RNA guide
caggaaccaauggauugauau

SEQ ID NO: 15071 - RNA, 21 nt, Artificial Sequence
  RPE65 RNA guide
caggaauagaaaagaagaaaa

SEQ ID NO: 15072 - RNA, 21 nt, Artificial Sequence
  RPE65 RNA guide
cagggaacugcauggaauaug

SEQ ID NO: 15073 - RNA, 21 nt, Artificial Sequence
  RPE65 RNA guide
caggguaccugauguauccau

SEQ ID NO: 15074 - RNA, 21 nt, Artificial Sequence
  RPE65 RNA guide
cagguacccuggucagucugu

SEQ ID NO: 15075 - RNA, 21 nt, Artificial Sequence
  RPE65 RNA guide
caguacccaaaucuuaagagc

SEQ ID NO: 15076 - RNA, 21 nt, Artificial Sequence
  RPE65 RNA guide
cagucuguuccuucaaccuau

SEQ ID NO: 15077 - RNA, 21 nt, Artificial Sequence
  RPE65 RNA guide
cagugacauauuccaugcagu

SEQ ID NO: 15078 - RNA, 21 nt, Artificial Sequence
  RPE65 RNA guide
caguucccuggcauucucuuu

SEQ ID NO: 15079 - RNA, 21 nt, Artificial Sequence
  RPE65 RNA guide
caguugaacuuagaugagcuc

SEQ ID NO: 15080 - RNA, 21 nt, Artificial Sequence
  RPE65 RNA guide
cauacagagcucaucuaaguu

SEQ ID NO: 15081 - RNA, 21 nt, Artificial Sequence
  RPE65 RNA guide
cauauaucaugucuagagaca

SEQ ID NO: 15082 - RNA, 21 nt, Artificial Sequence
  RPE65 RNA guide
cauauuccaugcaguucccug

SEQ ID NO: 15083 - RNA, 21 nt, Artificial Sequence
  RPE65 RNA guide
caucagguacccuggucaguc

SEQ ID NO: 15084 - RNA, 21 nt, Artificial Sequence
  RPE65 RNA guide
caucuaaguucaacugcucuu

SEQ ID NO: 15085 - RNA, 21 nt, Artificial Sequence
  RPE65 RNA guide
caucuuagguaucaugaucug

SEQ ID NO: 15086 - RNA, 21 nt, Artificial Sequence
  RPE65 RNA guide
caugauaccuaagaugaucag

SEQ ID NO: 15087 - RNA, 21 nt, Artificial Sequence
  RPE65 RNA guide
caugauauaugaacagaauuc

SEQ ID NO: 15088 - RNA, 21 nt, Artificial Sequence
  RPE65 RNA guide
caugaucuguaaugcuuucaa

SEQ ID NO: 15089 - RNA, 21 nt, Artificial Sequence
  RPE65 RNA guide
caugcaguucccuggcauucu

SEQ ID NO: 15090 - RNA, 21 nt, Artificial Sequence
  RPE65 RNA guide
caugcugaucaucuuagguau

SEQ ID NO: 15091 - RNA, 21 nt, Artificial Sequence
  RPE65 RNA guide
cauggaauaugucacuguaga

SEQ ID NO: 15092 - RNA, 21 nt, Artificial Sequence
  RPE65 RNA guide
caugguguuugacuagguaaa

SEQ ID NO: 15093 - RNA, 21 nt, Artificial Sequence
  RPE65 RNA guide
caugucuagagacaggaacca

SEQ ID NO: 15094 - RNA, 21 nt, Artificial Sequence
  RPE65 RNA guide
cauuacagaucaugauaccua

SEQ ID NO: 15095 - RNA, 21 nt, Artificial Sequence
  RPE65 RNA guide
cauugguuccugucucuagac

SEQ ID NO: 15096 - RNA, 21 nt, Artificial Sequence
  RPE65 RNA guide
ccaaaucuuaagagcaguuga

SEQ ID NO: 15097 - RNA, 21 nt, Artificial Sequence
  RPE65 RNA guide
ccaauggauugauauuuaucu

SEQ ID NO: 15098 - RNA, 21 nt, Artificial Sequence
  RPE65 RNA guide
ccagggaacugcauggaauau

SEQ ID NO: 15099 - RNA, 21 nt, Artificial Sequence
  RPE65 RNA guide
ccaggguaccugauguaucca

SEQ ID NO: 15100 - RNA, 21 nt, Artificial Sequence
  RPE65 RNA guide
ccaguacccaaaucuuaagag

SEQ ID NO: 15101 - RNA, 21 nt, Artificial Sequence
  RPE65 RNA guide
ccaucaguaauuacuagauag

SEQ ID NO: 15102 - RNA, 21 nt, Artificial Sequence
  RPE65 RNA guide
ccaugcaguucccuggcauuc

SEQ ID NO: 15103 - RNA, 21 nt, Artificial Sequence
  RPE65 RNA guide
ccaugcugaucaucuuaggua

SEQ ID NO: 15104 - RNA, 21 nt, Artificial Sequence
  RPE65 RNA guide
ccauugguuccugucucuaga

SEQ ID NO: 15105 - RNA, 21 nt, Artificial Sequence
  RPE65 RNA guide
cccaaaucuuaagagcaguug

SEQ ID NO: 15106 - RNA, 21 nt, Artificial Sequence
  RPE65 RNA guide
cccuggcauucucuuucuguu

SEQ ID NO: 15107 - RNA, 21 nt, Artificial Sequence
  RPE65 RNA guide
cccuggucagucuguuccuuc

SEQ ID NO: 15108 - RNA, 21 nt, Artificial Sequence
  RPE65 RNA guide
ccuaagaugaucagcauggug

SEQ ID NO: 15109 - RNA, 21 nt, Artificial Sequence
  RPE65 RNA guide
ccuagucaaacaccaugcuga

SEQ ID NO: 15110 - RNA, 21 nt, Artificial Sequence
  RPE65 RNA guide
ccuauuuuuaccuagucaaac

SEQ ID NO: 15111 - RNA, 21 nt, Artificial Sequence
  RPE65 RNA guide
ccugauguauccauuugaucu

SEQ ID NO: 15112 - RNA, 21 nt, Artificial Sequence
  RPE65 RNA guide
ccuggcauucucuuucuguuu

SEQ ID NO: 15113 - RNA, 21 nt, Artificial Sequence
  RPE65 RNA guide
ccuggucagucuguuccuuca

SEQ ID NO: 15114 - RNA, 21 nt, Artificial Sequence
  RPE65 RNA guide
ccugucucuagacaugauaua

SEQ ID NO: 15115 - RNA, 21 nt, Artificial Sequence
  RPE65 RNA guide
ccuucaaccuauuuuuaccua

SEQ ID NO: 15116 - RNA, 21 nt, Artificial Sequence
  RPE65 RNA guide
cuaagaugaucagcauggugu

SEQ ID NO: 15117 - RNA, 21 nt, Artificial Sequence
  RPE65 RNA guide
cuaaguucaacugcucuuaag

SEQ ID NO: 15118 - RNA, 21 nt, Artificial Sequence
  RPE65 RNA guide
cuacagugacauauuccaugc

SEQ ID NO: 15119 - RNA, 21 nt, Artificial Sequence
  RPE65 RNA guide
cuagagacaggaaccaaugga

SEQ ID NO: 15120 - RNA, 21 nt, Artificial Sequence
  RPE65 RNA guide
cuagguaaaaauagguugaag

SEQ ID NO: 15121 - RNA, 21 nt, Artificial Sequence
  RPE65 RNA guide
cuaguaucuguuuuaugcuug

SEQ ID NO: 15122 - RNA, 21 nt, Artificial Sequence
  RPE65 RNA guide
cuagucaaacaccaugcugau

SEQ ID NO: 15123 - RNA, 21 nt, Artificial Sequence
  RPE65 RNA guide
cuauuuuuaccuagucaaaca

SEQ ID NO: 15124 - RNA, 21 nt, Artificial Sequence
  RPE65 RNA guide
cucaaaacagaaagagaaugc

SEQ ID NO: 15125 - RNA, 21 nt, Artificial Sequence
  RPE65 RNA guide
cucaucuaaguucaacugcuc

SEQ ID NO: 15126 - RNA, 21 nt, Artificial Sequence
  RPE65 RNA guide
cucuagacaugauauaugaac

SEQ ID NO: 15127 - RNA, 21 nt, Artificial Sequence
  RPE65 RNA guide
cucuuaagauuuggguacugg

SEQ ID NO: 15128 - RNA, 21 nt, Artificial Sequence
  RPE65 RNA guide
cugaccaggguaccugaugua

SEQ ID NO: 15129 - RNA, 21 nt, Artificial Sequence
  RPE65 RNA guide
cugaucaucuuagguaucaug

SEQ ID NO: 15130 - RNA, 21 nt, Artificial Sequence
  RPE65 RNA guide
cugcauggaauaugucacugu

SEQ ID NO: 15131 - RNA, 21 nt, Artificial Sequence
  RPE65 RNA guide
cugcucuuaagauuuggguac

SEQ ID NO: 15132 - RNA, 21 nt, Artificial Sequence
  RPE65 RNA guide
cuggcauucucuuucuguuuu

SEQ ID NO: 15133 - RNA, 21 nt, Artificial Sequence
  RPE65 RNA guide
cuggucagucuguuccuucaa

SEQ ID NO: 15134 - RNA, 21 nt, Artificial Sequence
  RPE65 RNA guide
cuggucuuuuucuucuuuucu

SEQ ID NO: 15135 - RNA, 21 nt, Artificial Sequence
  RPE65 RNA guide
cuguaaugcuuucaagcauaa

SEQ ID NO: 15136 - RNA, 21 nt, Artificial Sequence
  RPE65 RNA guide
cuguagauaaauaucaaucca

SEQ ID NO: 15137 - RNA, 21 nt, Artificial Sequence
  RPE65 RNA guide
cugucucuagacaugauauau

SEQ ID NO: 15138 - RNA, 21 nt, Artificial Sequence
  RPE65 RNA guide
cuguucauauaucaugucuag

SEQ ID NO: 15139 - RNA, 21 nt, Artificial Sequence
  RPE65 RNA guide
cuguuccuucaaccuauuuuu

SEQ ID NO: 15140 - RNA, 21 nt, Artificial Sequence
  RPE65 RNA guide
cuguuuuaugcuugaaagcau

SEQ ID NO: 15141 - RNA, 21 nt, Artificial Sequence
  RPE65 RNA guide
cuuaagagcaguugaacuuag

SEQ ID NO: 15142 - RNA, 21 nt, Artificial Sequence
  RPE65 RNA guide
cuuaagauuuggguacugguc

SEQ ID NO: 15143 - RNA, 21 nt, Artificial Sequence
  RPE65 RNA guide
cuuagaugagcucuguaugau

SEQ ID NO: 15144 - RNA, 21 nt, Artificial Sequence
  RPE65 RNA guide
cuuagguaucaugaucuguaa

SEQ ID NO: 15145 - RNA, 21 nt, Artificial Sequence
  RPE65 RNA guide
cuucaaccuauuuuuaccuag

SEQ ID NO: 15146 - RNA, 21 nt, Artificial Sequence
  RPE65 RNA guide
cuugaaagcauuacagaucau

SEQ ID NO: 15147 - RNA, 21 nt, Artificial Sequence
  RPE65 RNA guide
cuuucaagcauaaaacagaua

SEQ ID NO: 15148 - RNA, 21 nt, Artificial Sequence
  RPE65 RNA guide
cuuugaaaaguaugcuuuacu

SEQ ID NO: 15149 - RNA, 21 nt, Artificial Sequence
  RPE65 RNA guide
cuuuguggaauucuguucaua

SEQ ID NO: 15150 - RNA, 21 nt, Artificial Sequence
  RPE65 RNA guide
gaaaaagaccaguacccaaau

SEQ ID NO: 15151 - RNA, 21 nt, Artificial Sequence
  RPE65 RNA guide
gaaaagaagaaaaagaccagu

SEQ ID NO: 15152 - RNA, 21 nt, Artificial Sequence
  RPE65 RNA guide
gaaagagaaugccagggaacu

SEQ ID NO: 15153 - RNA, 21 nt, Artificial Sequence
  RPE65 RNA guide
gaaagcauuacagaucaugau

SEQ ID NO: 15154 - RNA, 21 nt, Artificial Sequence
  RPE65 RNA guide
gaacagacugaccaggguacc

SEQ ID NO: 15155 - RNA, 21 nt, Artificial Sequence
  RPE65 RNA guide
gaacugcauggaauaugucac

SEQ ID NO: 15156 - RNA, 21 nt, Artificial Sequence
  RPE65 RNA guide
gaacuuagaugagcucuguau

SEQ ID NO: 15157 - RNA, 21 nt, Artificial Sequence
  RPE65 RNA guide
gaagaaaaagaccaguaccca

SEQ ID NO: 15158 - RNA, 21 nt, Artificial Sequence
  RPE65 RNA guide
gaaggaacagacugaccaggg

SEQ ID NO: 15159 - RNA, 21 nt, Artificial Sequence
  RPE65 RNA guide
gaauagaaaagaagaaaaaga

SEQ ID NO: 15160 - RNA, 21 nt, Artificial Sequence
  RPE65 RNA guide
gaaugccagggaacugcaugg

SEQ ID NO: 15161 - RNA, 21 nt, Artificial Sequence
  RPE65 RNA guide
gacaggaaccaauggauugau

SEQ ID NO: 15162 - RNA, 21 nt, Artificial Sequence
  RPE65 RNA guide
gacauauuccaugcaguuccc

SEQ ID NO: 15163 - RNA, 21 nt, Artificial Sequence
  RPE65 RNA guide
gacaugauauaugaacagaau

SEQ ID NO: 15164 - RNA, 21 nt, Artificial Sequence
  RPE65 RNA guide
gaccaggguaccugauguauc

SEQ ID NO: 15165 - RNA, 21 nt, Artificial Sequence
  RPE65 RNA guide
gaccaguacccaaaucuuaag

SEQ ID NO: 15166 - RNA, 21 nt, Artificial Sequence
  RPE65 RNA guide
gacuagguaaaaauagguuga

SEQ ID NO: 15167 - RNA, 21 nt, Artificial Sequence
  RPE65 RNA guide
gacugaccaggguaccugaug

SEQ ID NO: 15168 - RNA, 21 nt, Artificial Sequence
  RPE65 RNA guide
gagaaugccagggaacugcau

SEQ ID NO: 15169 - RNA, 21 nt, Artificial Sequence
  RPE65 RNA guide
gagacaggaaccaauggauug

SEQ ID NO: 15170 - RNA, 21 nt, Artificial Sequence
  RPE65 RNA guide
gagcaguugaacuuagaugag

SEQ ID NO: 15171 - RNA, 21 nt, Artificial Sequence
  RPE65 RNA guide
gagcucaucuaaguucaacug

SEQ ID NO: 15172 - RNA, 21 nt, Artificial Sequence
  RPE65 RNA guide
gagcucuguaugauuuuacuu

SEQ ID NO: 15173 - RNA, 21 nt, Artificial Sequence
  RPE65 RNA guide
gauaaauaucaauccauuggu

SEQ ID NO: 15174 - RNA, 21 nt, Artificial Sequence
  RPE65 RNA guide
gauacaucagguacccugguc

SEQ ID NO: 15175 - RNA, 21 nt, Artificial Sequence
  RPE65 RNA guide
gauaccuaagaugaucagcau

SEQ ID NO: 15176 - RNA, 21 nt, Artificial Sequence
  RPE65 RNA guide
gauauaugaacagaauuccac

SEQ ID NO: 15177 - RNA, 21 nt, Artificial Sequence
  RPE65 RNA guide
gaucaaauggauacaucaggu

SEQ ID NO: 15178 - RNA, 21 nt, Artificial Sequence
  RPE65 RNA guide
gaucagcaugguguuugacua

SEQ ID NO: 15179 - RNA, 21 nt, Artificial Sequence
  RPE65 RNA guide
gaucaucuuagguaucaugau

SEQ ID NO: 15180 - RNA, 21 nt, Artificial Sequence
  RPE65 RNA guide
gaucaugauaccuaagaugau

SEQ ID NO: 15181 - RNA, 21 nt, Artificial Sequence
  RPE65 RNA guide
gaucuguaaugcuuucaagca

SEQ ID NO: 15182 - RNA, 21 nt, Artificial Sequence
  RPE65 RNA guide
gaugagcucuguaugauuuua

SEQ ID NO: 15183 - RNA, 21 nt, Artificial Sequence
  RPE65 RNA guide
gaugaucagcaugguguuuga

SEQ ID NO: 15184 - RNA, 21 nt, Artificial Sequence
  RPE65 RNA guide
gauuuggguacuggucuuuuu

SEQ ID NO: 15185 - RNA, 21 nt, Artificial Sequence
  RPE65 RNA guide
gcaguucccuggcauucucuu

SEQ ID NO: 15186 - RNA, 21 nt, Artificial Sequence
  RPE65 RNA guide
gcaguugaacuuagaugagcu

SEQ ID NO: 15187 - RNA, 21 nt, Artificial Sequence
  RPE65 RNA guide
gcauggaauaugucacuguag

SEQ ID NO: 15188 - RNA, 21 nt, Artificial Sequence
  RPE65 RNA guide
gcaugguguuugacuagguaa

SEQ ID NO: 15189 - RNA, 21 nt, Artificial Sequence
  RPE65 RNA guide
gcauuacagaucaugauaccu

SEQ ID NO: 15190 - RNA, 21 nt, Artificial Sequence
  RPE65 RNA guide
gcauucucuuucuguuuugag

SEQ ID NO: 15191 - RNA, 21 nt, Artificial Sequence
  RPE65 RNA guide
gccagggaacugcauggaaua

SEQ ID NO: 15192 - RNA, 21 nt, Artificial Sequence
  RPE65 RNA guide
gcucaucuaaguucaacugcu

SEQ ID NO: 15193 - RNA, 21 nt, Artificial Sequence
  RPE65 RNA guide
gcucuuaagauuuggguacug

SEQ ID NO: 15194 - RNA, 21 nt, Artificial Sequence
  RPE65 RNA guide
gcugaucaucuuagguaucau

SEQ ID NO: 15195 - RNA, 21 nt, Artificial Sequence
  RPE65 RNA guide
gcuugaaagcauuacagauca

SEQ ID NO: 15196 - RNA, 21 nt, Artificial Sequence
  RPE65 RNA guide
gcuuucaagcauaaaacagau

SEQ ID NO: 15197 - RNA, 21 nt, Artificial Sequence
  RPE65 RNA guide
ggaacagacugaccaggguac

SEQ ID NO: 15198 - RNA, 21 nt, Artificial Sequence
  RPE65 RNA guide
ggaaccaauggauugauauuu

SEQ ID NO: 15199 - RNA, 21 nt, Artificial Sequence
  RPE65 RNA guide
ggaacugcauggaauauguca

SEQ ID NO: 15200 - RNA, 21 nt, Artificial Sequence
  RPE65 RNA guide
ggaauagaaaagaagaaaaag

SEQ ID NO: 15201 - RNA, 21 nt, Artificial Sequence
  RPE65 RNA guide
ggaauucuguucauauaucau

SEQ ID NO: 15202 - RNA, 21 nt, Artificial Sequence
  RPE65 RNA guide
ggauacaucagguacccuggu

SEQ ID NO: 15203 - RNA, 21 nt, Artificial Sequence
  RPE65 RNA guide
ggauugauauuuaucuacagu

SEQ ID NO: 15204 - RNA, 21 nt, Artificial Sequence
  RPE65 RNA guide
ggcauucucuuucuguuuuga

SEQ ID NO: 15205 - RNA, 21 nt, Artificial Sequence
  RPE65 RNA guide
gggaacugcauggaauauguc

SEQ ID NO: 15206 - RNA, 21 nt, Artificial Sequence
  RPE65 RNA guide
ggguaccugauguauccauuu

SEQ ID NO: 15207 - RNA, 21 nt, Artificial Sequence
  RPE65 RNA guide
ggguacuggucuuuuucuucu

SEQ ID NO: 15208 - RNA, 21 nt, Artificial Sequence
  RPE65 RNA guide
gguaaaaauagguugaaggaa

SEQ ID NO: 15209 - RNA, 21 nt, Artificial Sequence
  RPE65 RNA guide
gguacccuggucagucuguuc

SEQ ID NO: 15210 - RNA, 21 nt, Artificial Sequence
  RPE65 RNA guide
gguaccugauguauccauuug

SEQ ID NO: 15211 - RNA, 21 nt, Artificial Sequence
  RPE65 RNA guide
gguacuggucuuuuucuucuu

SEQ ID NO: 15212 - RNA, 21 nt, Artificial Sequence
  RPE65 RNA guide
gguaucaugaucuguaaugcu

SEQ ID NO: 15213 - RNA, 21 nt, Artificial Sequence
  RPE65 RNA guide
ggucagucuguuccuucaacc

SEQ ID NO: 15214 - RNA, 21 nt, Artificial Sequence
  RPE65 RNA guide
ggucuuuuucuucuuuucuau

SEQ ID NO: 15215 - RNA, 21 nt, Artificial Sequence
  RPE65 RNA guide
gguguuugacuagguaaaaau

SEQ ID NO: 15216 - RNA, 21 nt, Artificial Sequence
  RPE65 RNA guide
gguuccugucucuagacauga

SEQ ID NO: 15217 - RNA, 21 nt, Artificial Sequence
  RPE65 RNA guide
gguugaaggaacagacugacc

SEQ ID NO: 15218 - RNA, 21 nt, Artificial Sequence
  RPE65 RNA guide
guaaaaauagguugaaggaac

SEQ ID NO: 15219 - RNA, 21 nt, Artificial Sequence
  RPE65 RNA guide
guaaaaucauacagagcucau

SEQ ID NO: 15220 - RNA, 21 nt, Artificial Sequence
  RPE65 RNA guide
guaaaguaaaaucauacagag

SEQ ID NO: 15221 - RNA, 21 nt, Artificial Sequence
  RPE65 RNA guide
guaaugcuuucaagcauaaaa

SEQ ID NO: 15222 - RNA, 21 nt, Artificial Sequence
  RPE65 RNA guide
guacccaaaucuuaagagcag

SEQ ID NO: 15223 - RNA, 21 nt, Artificial Sequence
  RPE65 RNA guide
guacccuggucagucuguucc

SEQ ID NO: 15224 - RNA, 21 nt, Artificial Sequence
  RPE65 RNA guide
guaccugauguauccauuuga

SEQ ID NO: 15225 - RNA, 21 nt, Artificial Sequence
  RPE65 RNA guide
guacuggucuuuuucuucuuu

SEQ ID NO: 15226 - RNA, 21 nt, Artificial Sequence
  RPE65 RNA guide
guaucaugaucuguaaugcuu

SEQ ID NO: 15227 - RNA, 21 nt, Artificial Sequence
  RPE65 RNA guide
guaucuguuuuaugcuugaaa

SEQ ID NO: 15228 - RNA, 21 nt, Artificial Sequence
  RPE65 RNA guide
gucaaacaccaugcugaucau

SEQ ID NO: 15229 - RNA, 21 nt, Artificial Sequence
  RPE65 RNA guide
gucacuguagauaaauaucaa

SEQ ID NO: 15230 - RNA, 21 nt, Artificial Sequence
  RPE65 RNA guide
gucagucuguuccuucaaccu

SEQ ID NO: 15231 - RNA, 21 nt, Artificial Sequence
  RPE65 RNA guide
gucuagagacaggaaccaaug

SEQ ID NO: 15232 - RNA, 21 nt, Artificial Sequence
  RPE65 RNA guide
gucucuagacaugauauauga

SEQ ID NO: 15233 - RNA, 21 nt, Artificial Sequence
  RPE65 RNA guide
gucuguuccuucaaccuauuu

SEQ ID NO: 15234 - RNA, 21 nt, Artificial Sequence
  RPE65 RNA guide
gucuuuuucuucuuuucuauu

SEQ ID NO: 15235 - RNA, 21 nt, Artificial Sequence
  RPE65 RNA guide
gugacauauuccaugcaguuc

SEQ ID NO: 15236 - RNA, 21 nt, Artificial Sequence
  RPE65 RNA guide
guggaauucuguucauauauc

SEQ ID NO: 15237 - RNA, 21 nt, Artificial Sequence
  RPE65 RNA guide
guguuugacuagguaaaaaua

SEQ ID NO: 15238 - RNA, 21 nt, Artificial Sequence
  RPE65 RNA guide
guucaacugcucuuaagauuu

SEQ ID NO: 15239 - RNA, 21 nt, Artificial Sequence
  RPE65 RNA guide
guucauauaucaugucuagag

SEQ ID NO: 15240 - RNA, 21 nt, Artificial Sequence
  RPE65 RNA guide
guucccuggcauucucuuucu

SEQ ID NO: 15241 - RNA, 21 nt, Artificial Sequence
  RPE65 RNA guide
guuccugucucuagacaugau

SEQ ID NO: 15242 - RNA, 21 nt, Artificial Sequence
  RPE65 RNA guide
guuccuucaaccuauuuuuac

SEQ ID NO: 15243 - RNA, 21 nt, Artificial Sequence
  RPE65 RNA guide
guucuaucuaguaauuacuga

SEQ ID NO: 15244 - RNA, 21 nt, Artificial Sequence
  RPE65 RNA guide
guugaacuuagaugagcucug

SEQ ID NO: 15245 - RNA, 21 nt, Artificial Sequence
  RPE65 RNA guide
guugaaggaacagacugacca

SEQ ID NO: 15246 - RNA, 21 nt, Artificial Sequence
  RPE65 RNA guide
guuugacuagguaaaaauagg

SEQ ID NO: 15247 - RNA, 21 nt, Artificial Sequence
  RPE65 RNA guide
guuuuaugcuugaaagcauua

SEQ ID NO: 15248 - RNA, 21 nt, Artificial Sequence
  RPE65 RNA guide
uaaaaauagguugaaggaaca

SEQ ID NO: 15249 - RNA, 21 nt, Artificial Sequence
  RPE65 RNA guide
uaaaaucauacagagcucauc

SEQ ID NO: 15250 - RNA, 21 nt, Artificial Sequence
  RPE65 RNA guide
uaaagaucaaauggauacauc

SEQ ID NO: 15251 - RNA, 21 nt, Artificial Sequence
  RPE65 RNA guide
uaaauaucaauccauugguuc

SEQ ID NO: 15252 - RNA, 21 nt, Artificial Sequence
  RPE65 RNA guide
uaagagcaguugaacuuagau

SEQ ID NO: 15253 - RNA, 21 nt, Artificial Sequence
  RPE65 RNA guide
uaagaugaucagcaugguguu

SEQ ID NO: 15254 - RNA, 21 nt, Artificial Sequence
  RPE65 RNA guide
uaagauuuggguacuggucuu

SEQ ID NO: 15255 - RNA, 21 nt, Artificial Sequence
  RPE65 RNA guide
uaaguucaacugcucuuaaga

SEQ ID NO: 15256 - RNA, 21 nt, Artificial Sequence
  RPE65 RNA guide
uacagagcucaucuaaguuca

SEQ ID NO: 15257 - RNA, 21 nt, Artificial Sequence
  RPE65 RNA guide
uacagaucaugauaccuaaga

SEQ ID NO: 15258 - RNA, 21 nt, Artificial Sequence
  RPE65 RNA guide
uacagugacauauuccaugca

SEQ ID NO: 15259 - RNA, 21 nt, Artificial Sequence
  RPE65 RNA guide
uacaucagguacccuggucag

SEQ ID NO: 15260 - RNA, 21 nt, Artificial Sequence
  RPE65 RNA guide
uacccaaaucuuaagagcagu

SEQ ID NO: 15261 - RNA, 21 nt, Artificial Sequence
  RPE65 RNA guide
uacccuggucagucuguuccu

SEQ ID NO: 15262 - RNA, 21 nt, Artificial Sequence
  RPE65 RNA guide
uaccuaagaugaucagcaugg

SEQ ID NO: 15263 - RNA, 21 nt, Artificial Sequence
  RPE65 RNA guide
uaccuagucaaacaccaugcu

SEQ ID NO: 15264 - RNA, 21 nt, Artificial Sequence
  RPE65 RNA guide
uaccugauguauccauuugau

SEQ ID NO: 15265 - RNA, 21 nt, Artificial Sequence
  RPE65 RNA guide
uagaaaagaagaaaaagacca

SEQ ID NO: 15266 - RNA, 21 nt, Artificial Sequence
  RPE65 RNA guide
uagagacaggaaccaauggau

SEQ ID NO: 15267 - RNA, 21 nt, Artificial Sequence
  RPE65 RNA guide
uagaugagcucuguaugauuu

SEQ ID NO: 15268 - RNA, 21 nt, Artificial Sequence
  RPE65 RNA guide
uagguaaaaauagguugaagg

SEQ ID NO: 15269 - RNA, 21 nt, Artificial Sequence
  RPE65 RNA guide
uagguaucaugaucuguaaug

SEQ ID NO: 15270 - RNA, 21 nt, Artificial Sequence
  RPE65 RNA guide
uagguugaaggaacagacuga

SEQ ID NO: 15271 - RNA, 21 nt, Artificial Sequence
  RPE65 RNA guide
uaguaucuguuuuaugcuuga

SEQ ID NO: 15272 - RNA, 21 nt, Artificial Sequence
  RPE65 RNA guide
uagucaaacaccaugcugauc

SEQ ID NO: 15273 - RNA, 21 nt, Artificial Sequence
  RPE65 RNA guide
uauaucaugucuagagacagg

SEQ ID NO: 15274 - RNA, 21 nt, Artificial Sequence
  RPE65 RNA guide
uaucaauccauugguuccugu

SEQ ID NO: 15275 - RNA, 21 nt, Artificial Sequence
  RPE65 RNA guide
uaucaugaucuguaaugcuuu

SEQ ID NO: 15276 - RNA, 21 nt, Artificial Sequence
  RPE65 RNA guide
uaucaugucuagagacaggaa

SEQ ID NO: 15277 - RNA, 21 nt, Artificial Sequence
  RPE65 RNA guide
uaucuacagugacauauucca

SEQ ID NO: 15278 - RNA, 21 nt, Artificial Sequence
  RPE65 RNA guide
uaugcuugaaagcauuacaga

SEQ ID NO: 15279 - RNA, 21 nt, Artificial Sequence
  RPE65 RNA guide
uauuccaugcaguucccuggc

SEQ ID NO: 15280 - RNA, 21 nt, Artificial Sequence
  RPE65 RNA guide
uauuuuuaccuagucaaacac

SEQ ID NO: 15281 - RNA, 21 nt, Artificial Sequence
  RPE65 RNA guide
ucaaaacagaaagagaaugcc

SEQ ID NO: 15282 - RNA, 21 nt, Artificial Sequence
  RPE65 RNA guide
ucaaacaccaugcugaucauc

SEQ ID NO: 15283 - RNA, 21 nt, Artificial Sequence
  RPE65 RNA guide
ucaaauggauacaucagguac

SEQ ID NO: 15284 - RNA, 21 nt, Artificial Sequence
  RPE65 RNA guide
ucaaccuauuuuuaccuaguc

SEQ ID NO: 15285 - RNA, 21 nt, Artificial Sequence
  RPE65 RNA guide
ucaacugcucuuaagauuugg

SEQ ID NO: 15286 - RNA, 21 nt, Artificial Sequence
  RPE65 RNA guide
ucaauccauugguuccugucu

SEQ ID NO: 15287 - RNA, 21 nt, Artificial Sequence
  RPE65 RNA guide
ucagcaugguguuugacuagg

SEQ ID NO: 15288 - RNA, 21 nt, Artificial Sequence
  RPE65 RNA guide
ucagguacccuggucagucug

SEQ ID NO: 15289 - RNA, 21 nt, Artificial Sequence
  RPE65 RNA guide
ucagucuguuccuucaaccua

SEQ ID NO: 15290 - RNA, 21 nt, Artificial Sequence
  RPE65 RNA guide
ucauacagagcucaucuaagu

SEQ ID NO: 15291 - RNA, 21 nt, Artificial Sequence
  RPE65 RNA guide
ucauauaucaugucuagagac

SEQ ID NO: 15292 - RNA, 21 nt, Artificial Sequence
  RPE65 RNA guide
ucaucuaaguucaacugcucu

SEQ ID NO: 15293 - RNA, 21 nt, Artificial Sequence
  RPE65 RNA guide
ucaucuuagguaucaugaucu

SEQ ID NO: 15294 - RNA, 21 nt, Artificial Sequence
  RPE65 RNA guide
ucaugauaccuaagaugauca

SEQ ID NO: 15295 - RNA, 21 nt, Artificial Sequence
  RPE65 RNA guide
ucaugaucuguaaugcuuuca

SEQ ID NO: 15296 - RNA, 21 nt, Artificial Sequence
  RPE65 RNA guide
ucaugucuagagacaggaacc

SEQ ID NO: 15297 - RNA, 21 nt, Artificial Sequence
  RPE65 RNA guide
uccaucaguaauuacuagaua

SEQ ID NO: 15298 - RNA, 21 nt, Artificial Sequence
  RPE65 RNA guide
uccaugcaguucccuggcauu

SEQ ID NO: 15299 - RNA, 21 nt, Artificial Sequence
  RPE65 RNA guide
uccauugguuccugucucuag

SEQ ID NO: 15300 - RNA, 21 nt, Artificial Sequence
  RPE65 RNA guide
ucccuggcauucucuuucugu

SEQ ID NO: 15301 - RNA, 21 nt, Artificial Sequence
  RPE65 RNA guide
uccugucucuagacaugauau

SEQ ID NO: 15302 - RNA, 21 nt, Artificial Sequence
  RPE65 RNA guide
uccuucaaccuauuuuuaccu

SEQ ID NO: 15303 - RNA, 21 nt, Artificial Sequence
  RPE65 RNA guide
ucuaaguucaacugcucuuaa

SEQ ID NO: 15304 - RNA, 21 nt, Artificial Sequence
  RPE65 RNA guide
ucuacagugacauauuccaug

SEQ ID NO: 15305 - RNA, 21 nt, Artificial Sequence
  RPE65 RNA guide
ucuagagacaggaaccaaugg

SEQ ID NO: 15306 - RNA, 21 nt, Artificial Sequence
  RPE65 RNA guide
ucucaaaacagaaagagaaug

SEQ ID NO: 15307 - RNA, 21 nt, Artificial Sequence
  RPE65 RNA guide
ucucuagacaugauauaugaa

SEQ ID NO: 15308 - RNA, 21 nt, Artificial Sequence
  RPE65 RNA guide
ucuguaaugcuuucaagcaua

SEQ ID NO: 15309 - RNA, 21 nt, Artificial Sequence
  RPE65 RNA guide
ucuguucauauaucaugucua

SEQ ID NO: 15310 - RNA, 21 nt, Artificial Sequence
  RPE65 RNA guide
ucuguuccuucaaccuauuuu

SEQ ID NO: 15311 - RNA, 21 nt, Artificial Sequence
  RPE65 RNA guide
ucuguuuuaugcuugaaagca

SEQ ID NO: 15312 - RNA, 21 nt, Artificial Sequence
  RPE65 RNA guide
ucuuaagagcaguugaacuua

SEQ ID NO: 15313 - RNA, 21 nt, Artificial Sequence
  RPE65 RNA guide
ucuuaagauuuggguacuggu

SEQ ID NO: 15314 - RNA, 21 nt, Artificial Sequence
  RPE65 RNA guide
ucuuagguaucaugaucugua

SEQ ID NO: 15315 - RNA, 21 nt, Artificial Sequence
  RPE65 RNA guide
ucuuugaaaaguaugcuuuac

SEQ ID NO: 15316 - RNA, 21 nt, Artificial Sequence
  RPE65 RNA guide
ugaaagcauuacagaucauga

SEQ ID NO: 15317 - RNA, 21 nt, Artificial Sequence
  RPE65 RNA guide
ugaacuuagaugagcucugua

SEQ ID NO: 15318 - RNA, 21 nt, Artificial Sequence
  RPE65 RNA guide
ugaaggaacagacugaccagg

SEQ ID NO: 15319 - RNA, 21 nt, Artificial Sequence
  RPE65 RNA guide
ugacauauuccaugcaguucc

SEQ ID NO: 15320 - RNA, 21 nt, Artificial Sequence
  RPE65 RNA guide
ugaccaggguaccugauguau

SEQ ID NO: 15321 - RNA, 21 nt, Artificial Sequence
  RPE65 RNA guide
ugacuagguaaaaauagguug

SEQ ID NO: 15322 - RNA, 21 nt, Artificial Sequence
  RPE65 RNA guide
ugagcucuguaugauuuuacu

SEQ ID NO: 15323 - RNA, 21 nt, Artificial Sequence
  RPE65 RNA guide
ugauaccuaagaugaucagca

SEQ ID NO: 15324 - RNA, 21 nt, Artificial Sequence
  RPE65 RNA guide
ugaucagcaugguguuugacu

SEQ ID NO: 15325 - RNA, 21 nt, Artificial Sequence
  RPE65 RNA guide
ugaucaucuuagguaucauga

SEQ ID NO: 15326 - RNA, 21 nt, Artificial Sequence
  RPE65 RNA guide
ugaucuguaaugcuuucaagc

SEQ ID NO: 15327 - RNA, 21 nt, Artificial Sequence
  RPE65 RNA guide
ugcaguucccuggcauucucu

SEQ ID NO: 15328 - RNA, 21 nt, Artificial Sequence
  RPE65 RNA guide
ugcauggaauaugucacugua

SEQ ID NO: 15329 - RNA, 21 nt, Artificial Sequence
  RPE65 RNA guide
ugccagggaacugcauggaau

SEQ ID NO: 15330 - RNA, 21 nt, Artificial Sequence
  RPE65 RNA guide
ugcucuuaagauuuggguacu

SEQ ID NO: 15331 - RNA, 21 nt, Artificial Sequence
  RPE65 RNA guide
ugcugaucaucuuagguauca

SEQ ID NO: 15332 - RNA, 21 nt, Artificial Sequence
  RPE65 RNA guide
ugcuugaaagcauuacagauc

SEQ ID NO: 15333 - RNA, 21 nt, Artificial Sequence
  RPE65 RNA guide
ugcuuucaagcauaaaacaga

SEQ ID NO: 15334 - RNA, 21 nt, Artificial Sequence
  RPE65 RNA guide
uggaauucuguucauauauca

SEQ ID NO: 15335 - RNA, 21 nt, Artificial Sequence
  RPE65 RNA guide
uggauacaucagguacccugg

SEQ ID NO: 15336 - RNA, 21 nt, Artificial Sequence
  RPE65 RNA guide
uggauugauauuuaucuacag

SEQ ID NO: 15337 - RNA, 21 nt, Artificial Sequence
  RPE65 RNA guide
uggcauucucuuucuguuuug

SEQ ID NO: 15338 - RNA, 21 nt, Artificial Sequence
  RPE65 RNA guide
uggguacuggucuuuuucuuc

SEQ ID NO: 15339 - RNA, 21 nt, Artificial Sequence
  RPE65 RNA guide
uggucagucuguuccuucaac

SEQ ID NO: 15340 - RNA, 21 nt, Artificial Sequence
  RPE65 RNA guide
uggucuuuuucuucuuuucua

SEQ ID NO: 15341 - RNA, 21 nt, Artificial Sequence
  RPE65 RNA guide
ugguguuugacuagguaaaaa

SEQ ID NO: 15342 - RNA, 21 nt, Artificial Sequence
  RPE65 RNA guide
ugguuccugucucuagacaug

SEQ ID NO: 15343 - RNA, 21 nt, Artificial Sequence
  RPE65 RNA guide
uguaaaguaaaaucauacaga

SEQ ID NO: 15344 - RNA, 21 nt, Artificial Sequence
  RPE65 RNA guide
uguaaugcuuucaagcauaaa

SEQ ID NO: 15345 - RNA, 21 nt, Artificial Sequence
  RPE65 RNA guide
ugucacuguagauaaauauca

SEQ ID NO: 15346 - RNA, 21 nt, Artificial Sequence
  RPE65 RNA guide
ugucuagagacaggaaccaau

SEQ ID NO: 15347 - RNA, 21 nt, Artificial Sequence
  RPE65 RNA guide
ugucucuagacaugauauaug

SEQ ID NO: 15348 - RNA, 21 nt, Artificial Sequence
  RPE65 RNA guide
uguggaauucuguucauauau

SEQ ID NO: 15349 - RNA, 21 nt, Artificial Sequence
  RPE65 RNA guide
uguucauauaucaugucuaga

SEQ ID NO: 15350 - RNA, 21 nt, Artificial Sequence
  RPE65 RNA guide
uguuccuucaaccuauuuuua

SEQ ID NO: 15351 - RNA, 21 nt, Artificial Sequence
  RPE65 RNA guide
uguuugacuagguaaaaauag

SEQ ID NO: 15352 - RNA, 21 nt, Artificial Sequence
  RPE65 RNA guide
uguuuuaugcuugaaagcauu

SEQ ID NO: 15353 - RNA, 21 nt, Artificial Sequence
  RPE65 RNA guide
uuaagagcaguugaacuuaga

SEQ ID NO: 15354 - RNA, 21 nt, Artificial Sequence
  RPE65 RNA guide
uuaagauuuggguacuggucu

SEQ ID NO: 15355 - RNA, 21 nt, Artificial Sequence
  RPE65 RNA guide
uuacagaucaugauaccuaag

SEQ ID NO: 15356 - RNA, 21 nt, Artificial Sequence
  RPE65 RNA guide
uuaccuagucaaacaccaugc

SEQ ID NO: 15357 - RNA, 21 nt, Artificial Sequence
  RPE65 RNA guide
uuagaugagcucuguaugauu

SEQ ID NO: 15358 - RNA, 21 nt, Artificial Sequence
  RPE65 RNA guide
uuagguaucaugaucuguaau

SEQ ID NO: 15359 - RNA, 21 nt, Artificial Sequence
  RPE65 RNA guide
uuaucuacagugacauauucc

SEQ ID NO: 15360 - RNA, 21 nt, Artificial Sequence
  RPE65 RNA guide
uuaugcuugaaagcauuacag

SEQ ID NO: 15361 - RNA, 21 nt, Artificial Sequence
  RPE65 RNA guide
uucaacugcucuuaagauuug

SEQ ID NO: 15362 - RNA, 21 nt, Artificial Sequence
  RPE65 RNA guide
uucauauaucaugucuagaga

SEQ ID NO: 15363 - RNA, 21 nt, Artificial Sequence
  RPE65 RNA guide
uuccaugcaguucccuggcau

SEQ ID NO: 15364 - RNA, 21 nt, Artificial Sequence
  RPE65 RNA guide
uucccuggcauucucuuucug

SEQ ID NO: 15365 - RNA, 21 nt, Artificial Sequence
  RPE65 RNA guide
uuccugucucuagacaugaua

SEQ ID NO: 15366 - RNA, 21 nt, Artificial Sequence
  RPE65 RNA guide
uuccuucaaccuauuuuuacc

SEQ ID NO: 15367 - RNA, 21 nt, Artificial Sequence
  RPE65 RNA guide
uucuguucauauaucaugucu

SEQ ID NO: 15368 - RNA, 21 nt, Artificial Sequence
  RPE65 RNA guide
uugaaagcauuacagaucaug

SEQ ID NO: 15369 - RNA, 21 nt, Artificial Sequence
  RPE65 RNA guide
uugaacuuagaugagcucugu

SEQ ID NO: 15370 - RNA, 21 nt, Artificial Sequence
  RPE65 RNA guide
uugaaggaacagacugaccag

SEQ ID NO: 15371 - RNA, 21 nt, Artificial Sequence
  RPE65 RNA guide
uugacuagguaaaaauagguu

SEQ ID NO: 15372 - RNA, 21 nt, Artificial Sequence
  RPE65 RNA guide
uuggguacuggucuuuuucuu

SEQ ID NO: 15373 - RNA, 21 nt, Artificial Sequence
  RPE65 RNA guide
uugguuccugucucuagacau

SEQ ID NO: 15374 - RNA, 21 nt, Artificial Sequence
  RPE65 RNA guide
uuuaccuagucaaacaccaug

SEQ ID NO: 15375 - RNA, 21 nt, Artificial Sequence
  RPE65 RNA guide
uuuaucuacagugacauauuc

SEQ ID NO: 15376 - RNA, 21 nt, Artificial Sequence
  RPE65 RNA guide
uuuaugcuugaaagcauuaca

SEQ ID NO: 15377 - RNA, 21 nt, Artificial Sequence
  RPE65 RNA guide
uuuggguacuggucuuuuucu

SEQ ID NO: 15378 - RNA, 21 nt, Artificial Sequence
  RPE65 RNA guide
uuuuaccuagucaaacaccau

SEQ ID NO: 15379 - RNA, 21 nt, Artificial Sequence
  RPE65 RNA guide
uuuuuaccuagucaaacacca

SEQ ID NO: 15380 - RNA, 22 nt, Artificial Sequence
  RPE65 RNA guide
aaaaagaccaguacccaaaucu

SEQ ID NO: 15381 - RNA, 22 nt, Artificial Sequence
  RPE65 RNA guide
aaaaauagguugaaggaacaga

SEQ ID NO: 15382 - RNA, 22 nt, Artificial Sequence
  RPE65 RNA guide
aaaacagaaagagaaugccagg

SEQ ID NO: 15383 - RNA, 22 nt, Artificial Sequence
  RPE65 RNA guide
aaaagaagaaaaagaccaguac

SEQ ID NO: 15384 - RNA, 22 nt, Artificial Sequence
  RPE65 RNA guide
aaaagaccaguacccaaaucuu

SEQ ID NO: 15385 - RNA, 22 nt, Artificial Sequence
  RPE65 RNA guide
aaaauagguugaaggaacagac

SEQ ID NO: 15386 - RNA, 22 nt, Artificial Sequence
  RPE65 RNA guide
aaaaucauacagagcucaucua

SEQ ID NO: 15387 - RNA, 22 nt, Artificial Sequence
  RPE65 RNA guide
aaaaucucaaaacagaaagaga

SEQ ID NO: 15388 - RNA, 22 nt, Artificial Sequence
  RPE65 RNA guide
aaacaccaugcugaucaucuua

SEQ ID NO: 15389 - RNA, 22 nt, Artificial Sequence
  RPE65 RNA guide
aaacagaaagagaaugccaggg

SEQ ID NO: 15390 - RNA, 22 nt, Artificial Sequence
  RPE65 RNA guide
aaagaagaaaaagaccaguacc

SEQ ID NO: 15391 - RNA, 22 nt, Artificial Sequence
  RPE65 RNA guide
aaagaccaguacccaaaucuua

SEQ ID NO: 15392 - RNA, 22 nt, Artificial Sequence
  RPE65 RNA guide
aaagagaaugccagggaacugc

SEQ ID NO: 15393 - RNA, 22 nt, Artificial Sequence
  RPE65 RNA guide
aaagaucaaauggauacaucag

SEQ ID NO: 15394 - RNA, 22 nt, Artificial Sequence
  RPE65 RNA guide
aaagcauuacagaucaugauac

SEQ ID NO: 15395 - RNA, 22 nt, Artificial Sequence
  RPE65 RNA guide
aaaguaaaaucauacagagcuc

SEQ ID NO: 15396 - RNA, 22 nt, Artificial Sequence
  RPE65 RNA guide
aaauagguugaaggaacagacu

SEQ ID NO: 15397 - RNA, 22 nt, Artificial Sequence
  RPE65 RNA guide
aaauaucaauccauugguuccu

SEQ ID NO: 15398 - RNA, 22 nt, Artificial Sequence
  RPE65 RNA guide
aaaucauacagagcucaucuaa

SEQ ID NO: 15399 - RNA, 22 nt, Artificial Sequence
  RPE65 RNA guide
aaaucucaaaacagaaagagaa

SEQ ID NO: 15400 - RNA, 22 nt, Artificial Sequence
  RPE65 RNA guide
aaaucuuaagagcaguugaacu

SEQ ID NO: 15401 - RNA, 22 nt, Artificial Sequence
  RPE65 RNA guide
aaauggauacaucagguacccu

SEQ ID NO: 15402 - RNA, 22 nt, Artificial Sequence
  RPE65 RNA guide
aacaccaugcugaucaucuuag

SEQ ID NO: 15403 - RNA, 22 nt, Artificial Sequence
  RPE65 RNA guide
aacagaaagagaaugccaggga

SEQ ID NO: 15404 - RNA, 22 nt, Artificial Sequence
  RPE65 RNA guide
aacagacugaccaggguaccug

SEQ ID NO: 15405 - RNA, 22 nt, Artificial Sequence
  RPE65 RNA guide
aaccuauuuuuaccuagucaaa

SEQ ID NO: 15406 - RNA, 22 nt, Artificial Sequence
  RPE65 RNA guide
aacugcauggaauaugucacug

SEQ ID NO: 15407 - RNA, 22 nt, Artificial Sequence
  RPE65 RNA guide
aacugcucuuaagauuugggua

SEQ ID NO: 15408 - RNA, 22 nt, Artificial Sequence
  RPE65 RNA guide
aacuuagaugagcucuguauga

SEQ ID NO: 15409 - RNA, 22 nt, Artificial Sequence
  RPE65 RNA guide
aagaaaaagaccaguacccaaa

SEQ ID NO: 15410 - RNA, 22 nt, Artificial Sequence
  RPE65 RNA guide
aagaagaaaaagaccaguaccc

SEQ ID NO: 15411 - RNA, 22 nt, Artificial Sequence
  RPE65 RNA guide
aagaccaguacccaaaucuuaa

SEQ ID NO: 15412 - RNA, 22 nt, Artificial Sequence
  RPE65 RNA guide
aagagaaugccagggaacugca

SEQ ID NO: 15413 - RNA, 22 nt, Artificial Sequence
  RPE65 RNA guide
aagagcaguugaacuuagauga

SEQ ID NO: 15414 - RNA, 22 nt, Artificial Sequence
  RPE65 RNA guide
aagaucaaauggauacaucagg

SEQ ID NO: 15415 - RNA, 22 nt, Artificial Sequence
  RPE65 RNA guide
aagaugaucagcaugguguuug

SEQ ID NO: 15416 - RNA, 22 nt, Artificial Sequence
  RPE65 RNA guide
aagauuuggguacuggucuuuu

SEQ ID NO: 15417 - RNA, 22 nt, Artificial Sequence
  RPE65 RNA guide
aagcauuacagaucaugauacc

SEQ ID NO: 15418 - RNA, 22 nt, Artificial Sequence
  RPE65 RNA guide
aaggaacagacugaccagggua

SEQ ID NO: 15419 - RNA, 22 nt, Artificial Sequence
  RPE65 RNA guide
aaguaaaaucauacagagcuca

SEQ ID NO: 15420 - RNA, 22 nt, Artificial Sequence
  RPE65 RNA guide
aaguucaacugcucuuaagauu

SEQ ID NO: 15421 - RNA, 22 nt, Artificial Sequence
  RPE65 RNA guide
aauaaagaucaaauggauacau

SEQ ID NO: 15422 - RNA, 22 nt, Artificial Sequence
  RPE65 RNA guide
aauagguugaaggaacagacug

SEQ ID NO: 15423 - RNA, 22 nt, Artificial Sequence
  RPE65 RNA guide
aauaucaauccauugguuccug

SEQ ID NO: 15424 - RNA, 22 nt, Artificial Sequence
  RPE65 RNA guide
aaucauacagagcucaucuaag

SEQ ID NO: 15425 - RNA, 22 nt, Artificial Sequence
  RPE65 RNA guide
aauccauugguuccugucucua

SEQ ID NO: 15426 - RNA, 22 nt, Artificial Sequence
  RPE65 RNA guide
aaucucaaaacagaaagagaau

SEQ ID NO: 15427 - RNA, 22 nt, Artificial Sequence
  RPE65 RNA guide
aaucuuaagagcaguugaacuu

SEQ ID NO: 15428 - RNA, 22 nt, Artificial Sequence
  RPE65 RNA guide
aaugccagggaacugcauggaa

SEQ ID NO: 15429 - RNA, 22 nt, Artificial Sequence
  RPE65 RNA guide
aaugcuuucaagcauaaaacag

SEQ ID NO: 15430 - RNA, 22 nt, Artificial Sequence
  RPE65 RNA guide
aauggauacaucagguacccug

SEQ ID NO: 15431 - RNA, 22 nt, Artificial Sequence
  RPE65 RNA guide
acaccaugcugaucaucuuagg

SEQ ID NO: 15432 - RNA, 22 nt, Artificial Sequence
  RPE65 RNA guide
acagaaagagaaugccagggaa

SEQ ID NO: 15433 - RNA, 22 nt, Artificial Sequence
  RPE65 RNA guide
acagacugaccaggguaccuga

SEQ ID NO: 15434 - RNA, 22 nt, Artificial Sequence
  RPE65 RNA guide
acagagcucaucuaaguucaac

SEQ ID NO: 15435 - RNA, 22 nt, Artificial Sequence
  RPE65 RNA guide
acagaucaugauaccuaagaug

SEQ ID NO: 15436 - RNA, 22 nt, Artificial Sequence
  RPE65 RNA guide
acaggaaccaauggauugauau

SEQ ID NO: 15437 - RNA, 22 nt, Artificial Sequence
  RPE65 RNA guide
acaggaauagaaaagaagaaaa

SEQ ID NO: 15438 - RNA, 22 nt, Artificial Sequence
  RPE65 RNA guide
acagugacauauuccaugcagu

SEQ ID NO: 15439 - RNA, 22 nt, Artificial Sequence
  RPE65 RNA guide
acauauuccaugcaguucccug

SEQ ID NO: 15440 - RNA, 22 nt, Artificial Sequence
  RPE65 RNA guide
acaucagguacccuggucaguc

SEQ ID NO: 15441 - RNA, 22 nt, Artificial Sequence
  RPE65 RNA guide
acaugauauaugaacagaauuc

SEQ ID NO: 15442 - RNA, 22 nt, Artificial Sequence
  RPE65 RNA guide
accaauggauugauauuuaucu

SEQ ID NO: 15443 - RNA, 22 nt, Artificial Sequence
  RPE65 RNA guide
accaggguaccugauguaucca

SEQ ID NO: 15444 - RNA, 22 nt, Artificial Sequence
  RPE65 RNA guide
accaguacccaaaucuuaagag

SEQ ID NO: 15445 - RNA, 22 nt, Artificial Sequence
  RPE65 RNA guide
accaugcugaucaucuuaggua

SEQ ID NO: 15446 - RNA, 22 nt, Artificial Sequence
  RPE65 RNA guide
acccaaaucuuaagagcaguug

SEQ ID NO: 15447 - RNA, 22 nt, Artificial Sequence
  RPE65 RNA guide
acccuggucagucuguuccuuc

SEQ ID NO: 15448 - RNA, 22 nt, Artificial Sequence
  RPE65 RNA guide
accuaagaugaucagcauggug

SEQ ID NO: 15449 - RNA, 22 nt, Artificial Sequence
  RPE65 RNA guide
accuagucaaacaccaugcuga

SEQ ID NO: 15450 - RNA, 22 nt, Artificial Sequence
  RPE65 RNA guide
accuauuuuuaccuagucaaac

SEQ ID NO: 15451 - RNA, 22 nt, Artificial Sequence
  RPE65 RNA guide
accugauguauccauuugaucu

SEQ ID NO: 15452 - RNA, 22 nt, Artificial Sequence
  RPE65 RNA guide
acuagguaaaaauagguugaag

SEQ ID NO: 15453 - RNA, 22 nt, Artificial Sequence
  RPE65 RNA guide
acugaccaggguaccugaugua

SEQ ID NO: 15454 - RNA, 22 nt, Artificial Sequence
  RPE65 RNA guide
acugcauggaauaugucacugu

SEQ ID NO: 15455 - RNA, 22 nt, Artificial Sequence
  RPE65 RNA guide
acugcucuuaagauuuggguac

SEQ ID NO: 15456 - RNA, 22 nt, Artificial Sequence
  RPE65 RNA guide
acuggucuuuuucuucuuuucu

SEQ ID NO: 15457 - RNA, 22 nt, Artificial Sequence
  RPE65 RNA guide
acuguagauaaauaucaaucca

SEQ ID NO: 15458 - RNA, 22 nt, Artificial Sequence
  RPE65 RNA guide
acuuagaugagcucuguaugau

SEQ ID NO: 15459 - RNA, 22 nt, Artificial Sequence
  RPE65 RNA guide
agaaaaagaccaguacccaaau

SEQ ID NO: 15460 - RNA, 22 nt, Artificial Sequence
  RPE65 RNA guide
agaaaagaagaaaaagaccagu

SEQ ID NO: 15461 - RNA, 22 nt, Artificial Sequence
  RPE65 RNA guide
agaaagagaaugccagggaacu

SEQ ID NO: 15462 - RNA, 22 nt, Artificial Sequence
  RPE65 RNA guide
agaagaaaaagaccaguaccca

SEQ ID NO: 15463 - RNA, 22 nt, Artificial Sequence
  RPE65 RNA guide
agaaugccagggaacugcaugg

SEQ ID NO: 15464 - RNA, 22 nt, Artificial Sequence
  RPE65 RNA guide
agacaggaaccaauggauugau

SEQ ID NO: 15465 - RNA, 22 nt, Artificial Sequence
  RPE65 RNA guide
agacaugauauaugaacagaau

SEQ ID NO: 15466 - RNA, 22 nt, Artificial Sequence
  RPE65 RNA guide
agaccaguacccaaaucuuaag

SEQ ID NO: 15467 - RNA, 22 nt, Artificial Sequence
  RPE65 RNA guide
agacugaccaggguaccugaug

SEQ ID NO: 15468 - RNA, 22 nt, Artificial Sequence
  RPE65 RNA guide
agagaaugccagggaacugcau

SEQ ID NO: 15469 - RNA, 22 nt, Artificial Sequence
  RPE65 RNA guide
agagacaggaaccaauggauug

SEQ ID NO: 15470 - RNA, 22 nt, Artificial Sequence
  RPE65 RNA guide
agagcaguugaacuuagaugag

SEQ ID NO: 15471 - RNA, 22 nt, Artificial Sequence
  RPE65 RNA guide
agagcucaucuaaguucaacug

SEQ ID NO: 15472 - RNA, 22 nt, Artificial Sequence
  RPE65 RNA guide
agauaaauaucaauccauuggu

SEQ ID NO: 15473 - RNA, 22 nt, Artificial Sequence
  RPE65 RNA guide
agaucaaauggauacaucaggu

SEQ ID NO: 15474 - RNA, 22 nt, Artificial Sequence
  RPE65 RNA guide
agaucaugauaccuaagaugau

SEQ ID NO: 15475 - RNA, 22 nt, Artificial Sequence
  RPE65 RNA guide
agaugagcucuguaugauuuua

SEQ ID NO: 15476 - RNA, 22 nt, Artificial Sequence
  RPE65 RNA guide
agaugaucagcaugguguuuga

SEQ ID NO: 15477 - RNA, 22 nt, Artificial Sequence
  RPE65 RNA guide
agauuuggguacuggucuuuuu

SEQ ID NO: 15478 - RNA, 22 nt, Artificial Sequence
  RPE65 RNA guide
agcaguugaacuuagaugagcu

SEQ ID NO: 15479 - RNA, 22 nt, Artificial Sequence
  RPE65 RNA guide
agcaugguguuugacuagguaa

SEQ ID NO: 15480 - RNA, 22 nt, Artificial Sequence
  RPE65 RNA guide
agcauuacagaucaugauaccu

SEQ ID NO: 15481 - RNA, 22 nt, Artificial Sequence
  RPE65 RNA guide
agcucaucuaaguucaacugcu

SEQ ID NO: 15482 - RNA, 22 nt, Artificial Sequence
  RPE65 RNA guide
aggaacagacugaccaggguac

SEQ ID NO: 15483 - RNA, 22 nt, Artificial Sequence
  RPE65 RNA guide
aggaaccaauggauugauauuu

SEQ ID NO: 15484 - RNA, 22 nt, Artificial Sequence
  RPE65 RNA guide
aggaauagaaaagaagaaaaag

SEQ ID NO: 15485 - RNA, 22 nt, Artificial Sequence
  RPE65 RNA guide
agggaacugcauggaauauguc

SEQ ID NO: 15486 - RNA, 22 nt, Artificial Sequence
  RPE65 RNA guide
aggguaccugauguauccauuu

SEQ ID NO: 15487 - RNA, 22 nt, Artificial Sequence
  RPE65 RNA guide
agguaaaaauagguugaaggaa

SEQ ID NO: 15488 - RNA, 22 nt, Artificial Sequence
  RPE65 RNA guide
agguacccuggucagucuguuc

SEQ ID NO: 15489 - RNA, 22 nt, Artificial Sequence
  RPE65 RNA guide
agguaucaugaucuguaaugcu

SEQ ID NO: 15490 - RNA, 22 nt, Artificial Sequence
  RPE65 RNA guide
agguugaaggaacagacugacc

SEQ ID NO: 15491 - RNA, 22 nt, Artificial Sequence
  RPE65 RNA guide
aguaaaaucauacagagcucau

SEQ ID NO: 15492 - RNA, 22 nt, Artificial Sequence
  RPE65 RNA guide
aguacccaaaucuuaagagcag

SEQ ID NO: 15493 - RNA, 22 nt, Artificial Sequence
  RPE65 RNA guide
aguaucuguuuuaugcuugaaa

SEQ ID NO: 15494 - RNA, 22 nt, Artificial Sequence
  RPE65 RNA guide
agucaaacaccaugcugaucau

SEQ ID NO: 15495 - RNA, 22 nt, Artificial Sequence
  RPE65 RNA guide
agucuguuccuucaaccuauuu

SEQ ID NO: 15496 - RNA, 22 nt, Artificial Sequence
  RPE65 RNA guide
agugacauauuccaugcaguuc

SEQ ID NO: 15497 - RNA, 22 nt, Artificial Sequence
  RPE65 RNA guide
aguucaacugcucuuaagauuu

SEQ ID NO: 15498 - RNA, 22 nt, Artificial Sequence
  RPE65 RNA guide
aguucccuggcauucucuuucu

SEQ ID NO: 15499 - RNA, 22 nt, Artificial Sequence
  RPE65 RNA guide
aguucuaucuaguaauuacuga

SEQ ID NO: 15500 - RNA, 22 nt, Artificial Sequence
  RPE65 RNA guide
aguugaacuuagaugagcucug

SEQ ID NO: 15501 - RNA, 22 nt, Artificial Sequence
  RPE65 RNA guide
auaaagaucaaauggauacauc

SEQ ID NO: 15502 - RNA, 22 nt, Artificial Sequence
  RPE65 RNA guide
auaaauaucaauccauugguuc

SEQ ID NO: 15503 - RNA, 22 nt, Artificial Sequence
  RPE65 RNA guide
auacagagcucaucuaaguuca

SEQ ID NO: 15504 - RNA, 22 nt, Artificial Sequence
  RPE65 RNA guide
auacaucagguacccuggucag

SEQ ID NO: 15505 - RNA, 22 nt, Artificial Sequence
  RPE65 RNA guide
auaccuaagaugaucagcaugg

SEQ ID NO: 15506 - RNA, 22 nt, Artificial Sequence
  RPE65 RNA guide
auagaaaagaagaaaaagacca

SEQ ID NO: 15507 - RNA, 22 nt, Artificial Sequence
  RPE65 RNA guide
auagguugaaggaacagacuga

SEQ ID NO: 15508 - RNA, 22 nt, Artificial Sequence
  RPE65 RNA guide
auauaucaugucuagagacagg

SEQ ID NO: 15509 - RNA, 22 nt, Artificial Sequence
  RPE65 RNA guide
auaucaauccauugguuccugu

SEQ ID NO: 15510 - RNA, 22 nt, Artificial Sequence
  RPE65 RNA guide
auaucaugucuagagacaggaa

SEQ ID NO: 15511 - RNA, 22 nt, Artificial Sequence
  RPE65 RNA guide
auauuccaugcaguucccuggc

SEQ ID NO: 15512 - RNA, 22 nt, Artificial Sequence
  RPE65 RNA guide
aucaaauggauacaucagguac

SEQ ID NO: 15513 - RNA, 22 nt, Artificial Sequence
  RPE65 RNA guide
aucaauccauugguuccugucu

SEQ ID NO: 15514 - RNA, 22 nt, Artificial Sequence
  RPE65 RNA guide
aucagcaugguguuugacuagg

SEQ ID NO: 15515 - RNA, 22 nt, Artificial Sequence
  RPE65 RNA guide
aucagguacccuggucagucug

SEQ ID NO: 15516 - RNA, 22 nt, Artificial Sequence
  RPE65 RNA guide
aucauacagagcucaucuaagu

SEQ ID NO: 15517 - RNA, 22 nt, Artificial Sequence
  RPE65 RNA guide
aucaucuuagguaucaugaucu

SEQ ID NO: 15518 - RNA, 22 nt, Artificial Sequence
  RPE65 RNA guide
aucaugauaccuaagaugauca

SEQ ID NO: 15519 - RNA, 22 nt, Artificial Sequence
  RPE65 RNA guide
aucaugaucuguaaugcuuuca

SEQ ID NO: 15520 - RNA, 22 nt, Artificial Sequence
  RPE65 RNA guide
aucaugucuagagacaggaacc

SEQ ID NO: 15521 - RNA, 22 nt, Artificial Sequence
  RPE65 RNA guide
auccauugguuccugucucuag

SEQ ID NO: 15522 - RNA, 22 nt, Artificial Sequence
  RPE65 RNA guide
aucuaaguucaacugcucuuaa

SEQ ID NO: 15523 - RNA, 22 nt, Artificial Sequence
  RPE65 RNA guide
aucuacagugacauauuccaug

SEQ ID NO: 15524 - RNA, 22 nt, Artificial Sequence
  RPE65 RNA guide
aucucaaaacagaaagagaaug

SEQ ID NO: 15525 - RNA, 22 nt, Artificial Sequence
  RPE65 RNA guide
aucuguaaugcuuucaagcaua

SEQ ID NO: 15526 - RNA, 22 nt, Artificial Sequence
  RPE65 RNA guide
aucuguuuuaugcuugaaagca

SEQ ID NO: 15527 - RNA, 22 nt, Artificial Sequence
  RPE65 RNA guide
aucuuaagagcaguugaacuua

SEQ ID NO: 15528 - RNA, 22 nt, Artificial Sequence
  RPE65 RNA guide
aucuuagguaucaugaucugua

SEQ ID NO: 15529 - RNA, 22 nt, Artificial Sequence
  RPE65 RNA guide
augagcucuguaugauuuuacu

SEQ ID NO: 15530 - RNA, 22 nt, Artificial Sequence
  RPE65 RNA guide
augauaccuaagaugaucagca

SEQ ID NO: 15531 - RNA, 22 nt, Artificial Sequence
  RPE65 RNA guide
augaucagcaugguguuugacu

SEQ ID NO: 15532 - RNA, 22 nt, Artificial Sequence
  RPE65 RNA guide
augaucuguaaugcuuucaagc

SEQ ID NO: 15533 - RNA, 22 nt, Artificial Sequence
  RPE65 RNA guide
augcaguucccuggcauucucu

SEQ ID NO: 15534 - RNA, 22 nt, Artificial Sequence
  RPE65 RNA guide
augccagggaacugcauggaau

SEQ ID NO: 15535 - RNA, 22 nt, Artificial Sequence
  RPE65 RNA guide
augcugaucaucuuagguauca

SEQ ID NO: 15536 - RNA, 22 nt, Artificial Sequence
  RPE65 RNA guide
augcuugaaagcauuacagauc

SEQ ID NO: 15537 - RNA, 22 nt, Artificial Sequence
  RPE65 RNA guide
augcuuucaagcauaaaacaga

SEQ ID NO: 15538 - RNA, 22 nt, Artificial Sequence
  RPE65 RNA guide
auggauacaucagguacccugg

SEQ ID NO: 15539 - RNA, 22 nt, Artificial Sequence
  RPE65 RNA guide
auggauugauauuuaucuacag

SEQ ID NO: 15540 - RNA, 22 nt, Artificial Sequence
  RPE65 RNA guide
augguguuugacuagguaaaaa

SEQ ID NO: 15541 - RNA, 22 nt, Artificial Sequence
  RPE65 RNA guide
augucacuguagauaaauauca

SEQ ID NO: 15542 - RNA, 22 nt, Artificial Sequence
  RPE65 RNA guide
augucuagagacaggaaccaau

SEQ ID NO: 15543 - RNA, 22 nt, Artificial Sequence
  RPE65 RNA guide
auuacagaucaugauaccuaag

SEQ ID NO: 15544 - RNA, 22 nt, Artificial Sequence
  RPE65 RNA guide
auuccaugcaguucccuggcau

SEQ ID NO: 15545 - RNA, 22 nt, Artificial Sequence
  RPE65 RNA guide
auucuguucauauaucaugucu

SEQ ID NO: 15546 - RNA, 22 nt, Artificial Sequence
  RPE65 RNA guide
auugguuccugucucuagacau

SEQ ID NO: 15547 - RNA, 22 nt, Artificial Sequence
  RPE65 RNA guide
auuuaucuacagugacauauuc

SEQ ID NO: 15548 - RNA, 22 nt, Artificial Sequence
  RPE65 RNA guide
auuuggguacuggucuuuuucu

SEQ ID NO: 15549 - RNA, 22 nt, Artificial Sequence
  RPE65 RNA guide
auuuuuaccuagucaaacacca

SEQ ID NO: 15550 - RNA, 22 nt, Artificial Sequence
  RPE65 RNA guide
caaaacagaaagagaaugccag

SEQ ID NO: 15551 - RNA, 22 nt, Artificial Sequence
  RPE65 RNA guide
caaacaccaugcugaucaucuu

SEQ ID NO: 15552 - RNA, 22 nt, Artificial Sequence
  RPE65 RNA guide
caaauacucaguaaagcauacu

SEQ ID NO: 15553 - RNA, 22 nt, Artificial Sequence
  RPE65 RNA guide
caaaucuuaagagcaguugaac

SEQ ID NO: 15554 - RNA, 22 nt, Artificial Sequence
  RPE65 RNA guide
caaauggauacaucagguaccc

SEQ ID NO: 15555 - RNA, 22 nt, Artificial Sequence
  RPE65 RNA guide
caaccuauuuuuaccuagucaa

SEQ ID NO: 15556 - RNA, 22 nt, Artificial Sequence
  RPE65 RNA guide
caacugcucuuaagauuugggu

SEQ ID NO: 15557 - RNA, 22 nt, Artificial Sequence
  RPE65 RNA guide
caauccauugguuccugucucu

SEQ ID NO: 15558 - RNA, 22 nt, Artificial Sequence
  RPE65 RNA guide
caauggauugauauuuaucuac

SEQ ID NO: 15559 - RNA, 22 nt, Artificial Sequence
  RPE65 RNA guide
caccaugcugaucaucuuaggu

SEQ ID NO: 15560 - RNA, 22 nt, Artificial Sequence
  RPE65 RNA guide
cacuguagauaaauaucaaucc

SEQ ID NO: 15561 - RNA, 22 nt, Artificial Sequence
  RPE65 RNA guide
cagaaagagaaugccagggaac

SEQ ID NO: 15562 - RNA, 22 nt, Artificial Sequence
  RPE65 RNA guide
cagacugaccaggguaccugau

SEQ ID NO: 15563 - RNA, 22 nt, Artificial Sequence
  RPE65 RNA guide
cagagcucaucuaaguucaacu

SEQ ID NO: 15564 - RNA, 22 nt, Artificial Sequence
  RPE65 RNA guide
cagaucaugauaccuaagauga

SEQ ID NO: 15565 - RNA, 22 nt, Artificial Sequence
  RPE65 RNA guide
cagcaugguguuugacuaggua

SEQ ID NO: 15566 - RNA, 22 nt, Artificial Sequence
  RPE65 RNA guide
caggaaccaauggauugauauu

SEQ ID NO: 15567 - RNA, 22 nt, Artificial Sequence
  RPE65 RNA guide
caggaauagaaaagaagaaaaa

SEQ ID NO: 15568 - RNA, 22 nt, Artificial Sequence
  RPE65 RNA guide
cagggaacugcauggaauaugu

SEQ ID NO: 15569 - RNA, 22 nt, Artificial Sequence
  RPE65 RNA guide
caggguaccugauguauccauu

SEQ ID NO: 15570 - RNA, 22 nt, Artificial Sequence
  RPE65 RNA guide
cagguacccuggucagucuguu

SEQ ID NO: 15571 - RNA, 22 nt, Artificial Sequence
  RPE65 RNA guide
caguacccaaaucuuaagagca

SEQ ID NO: 15572 - RNA, 22 nt, Artificial Sequence
  RPE65 RNA guide
cagucuguuccuucaaccuauu

SEQ ID NO: 15573 - RNA, 22 nt, Artificial Sequence
  RPE65 RNA guide
cagugacauauuccaugcaguu

SEQ ID NO: 15574 - RNA, 22 nt, Artificial Sequence
  RPE65 RNA guide
caguucccuggcauucucuuuc

SEQ ID NO: 15575 - RNA, 22 nt, Artificial Sequence
  RPE65 RNA guide
caguugaacuuagaugagcucu

SEQ ID NO: 15576 - RNA, 22 nt, Artificial Sequence
  RPE65 RNA guide
cauacagagcucaucuaaguuc

SEQ ID NO: 15577 - RNA, 22 nt, Artificial Sequence
  RPE65 RNA guide
cauauaucaugucuagagacag

SEQ ID NO: 15578 - RNA, 22 nt, Artificial Sequence
  RPE65 RNA guide
cauauuccaugcaguucccugg

SEQ ID NO: 15579 - RNA, 22 nt, Artificial Sequence
  RPE65 RNA guide
caucagguacccuggucagucu

SEQ ID NO: 15580 - RNA, 22 nt, Artificial Sequence
  RPE65 RNA guide
caucuaaguucaacugcucuua

SEQ ID NO: 15581 - RNA, 22 nt, Artificial Sequence
  RPE65 RNA guide
caucuuagguaucaugaucugu

SEQ ID NO: 15582 - RNA, 22 nt, Artificial Sequence
  RPE65 RNA guide
caugauaccuaagaugaucagc

SEQ ID NO: 15583 - RNA, 22 nt, Artificial Sequence
  RPE65 RNA guide
caugauauaugaacagaauucc

SEQ ID NO: 15584 - RNA, 22 nt, Artificial Sequence
  RPE65 RNA guide
caugaucuguaaugcuuucaag

SEQ ID NO: 15585 - RNA, 22 nt, Artificial Sequence
  RPE65 RNA guide
caugcaguucccuggcauucuc

SEQ ID NO: 15586 - RNA, 22 nt, Artificial Sequence
  RPE65 RNA guide
caugcugaucaucuuagguauc

SEQ ID NO: 15587 - RNA, 22 nt, Artificial Sequence
  RPE65 RNA guide
cauggaauaugucacuguagau

SEQ ID NO: 15588 - RNA, 22 nt, Artificial Sequence
  RPE65 RNA guide
caugguguuugacuagguaaaa

SEQ ID NO: 15589 - RNA, 22 nt, Artificial Sequence
  RPE65 RNA guide
caugucuagagacaggaaccaa

SEQ ID NO: 15590 - RNA, 22 nt, Artificial Sequence
  RPE65 RNA guide
cauuacagaucaugauaccuaa

SEQ ID NO: 15591 - RNA, 22 nt, Artificial Sequence
  RPE65 RNA guide
cauugguuccugucucuagaca

SEQ ID NO: 15592 - RNA, 22 nt, Artificial Sequence
  RPE65 RNA guide
ccaaaucuuaagagcaguugaa

SEQ ID NO: 15593 - RNA, 22 nt, Artificial Sequence
  RPE65 RNA guide
ccaauggauugauauuuaucua

SEQ ID NO: 15594 - RNA, 22 nt, Artificial Sequence
  RPE65 RNA guide
ccagggaacugcauggaauaug

SEQ ID NO: 15595 - RNA, 22 nt, Artificial Sequence
  RPE65 RNA guide
ccaggguaccugauguauccau

SEQ ID NO: 15596 - RNA, 22 nt, Artificial Sequence
  RPE65 RNA guide
ccaguacccaaaucuuaagagc

SEQ ID NO: 15597 - RNA, 22 nt, Artificial Sequence
  RPE65 RNA guide
ccaucaguaauuacuagauaga

SEQ ID NO: 15598 - RNA, 22 nt, Artificial Sequence
  RPE65 RNA guide
ccaugcaguucccuggcauucu

SEQ ID NO: 15599 - RNA, 22 nt, Artificial Sequence
  RPE65 RNA guide
ccaugcugaucaucuuagguau

SEQ ID NO: 15600 - RNA, 22 nt, Artificial Sequence
  RPE65 RNA guide
ccauugguuccugucucuagac

SEQ ID NO: 15601 - RNA, 22 nt, Artificial Sequence
  RPE65 RNA guide
cccaaaucuuaagagcaguuga

SEQ ID NO: 15602 - RNA, 22 nt, Artificial Sequence
  RPE65 RNA guide
cccuggcauucucuuucuguuu

SEQ ID NO: 15603 - RNA, 22 nt, Artificial Sequence
  RPE65 RNA guide
cccuggucagucuguuccuuca

SEQ ID NO: 15604 - RNA, 22 nt, Artificial Sequence
  RPE65 RNA guide
ccuaagaugaucagcauggugu

SEQ ID NO: 15605 - RNA, 22 nt, Artificial Sequence
  RPE65 RNA guide
ccuagucaaacaccaugcugau

SEQ ID NO: 15606 - RNA, 22 nt, Artificial Sequence
  RPE65 RNA guide
ccuauuuuuaccuagucaaaca

SEQ ID NO: 15607 - RNA, 22 nt, Artificial Sequence
  RPE65 RNA guide
ccugauguauccauuugaucuu

SEQ ID NO: 15608 - RNA, 22 nt, Artificial Sequence
  RPE65 RNA guide
ccuggcauucucuuucuguuuu

SEQ ID NO: 15609 - RNA, 22 nt, Artificial Sequence
  RPE65 RNA guide
ccuggucagucuguuccuucaa

SEQ ID NO: 15610 - RNA, 22 nt, Artificial Sequence
  RPE65 RNA guide
ccugucucuagacaugauauau

SEQ ID NO: 15611 - RNA, 22 nt, Artificial Sequence
  RPE65 RNA guide
ccuucaaccuauuuuuaccuag

SEQ ID NO: 15612 - RNA, 22 nt, Artificial Sequence
  RPE65 RNA guide
cuaagaugaucagcaugguguu

SEQ ID NO: 15613 - RNA, 22 nt, Artificial Sequence
  RPE65 RNA guide
cuaaguucaacugcucuuaaga

SEQ ID NO: 15614 - RNA, 22 nt, Artificial Sequence
  RPE65 RNA guide
cuacaggaauagaaaagaagaa

SEQ ID NO: 15615 - RNA, 22 nt, Artificial Sequence
  RPE65 RNA guide
cuacagugacauauuccaugca

SEQ ID NO: 15616 - RNA, 22 nt, Artificial Sequence
  RPE65 RNA guide
cuagacaugauauaugaacaga

SEQ ID NO: 15617 - RNA, 22 nt, Artificial Sequence
  RPE65 RNA guide
cuagagacaggaaccaauggau

SEQ ID NO: 15618 - RNA, 22 nt, Artificial Sequence
  RPE65 RNA guide
cuagguaaaaauagguugaagg

SEQ ID NO: 15619 - RNA, 22 nt, Artificial Sequence
  RPE65 RNA guide
cuaguaucuguuuuaugcuuga

SEQ ID NO: 15620 - RNA, 22 nt, Artificial Sequence
  RPE65 RNA guide
cuagucaaacaccaugcugauc

SEQ ID NO: 15621 - RNA, 22 nt, Artificial Sequence
  RPE65 RNA guide
cuauuuuuaccuagucaaacac

SEQ ID NO: 15622 - RNA, 22 nt, Artificial Sequence
  RPE65 RNA guide
cucaaaacagaaagagaaugcc

SEQ ID NO: 15623 - RNA, 22 nt, Artificial Sequence
  RPE65 RNA guide
cucaucuaaguucaacugcucu

SEQ ID NO: 15624 - RNA, 22 nt, Artificial Sequence
  RPE65 RNA guide
cucuagacaugauauaugaaca

SEQ ID NO: 15625 - RNA, 22 nt, Artificial Sequence
  RPE65 RNA guide
cucuuaagauuuggguacuggu

SEQ ID NO: 15626 - RNA, 22 nt, Artificial Sequence
  RPE65 RNA guide
cugaccaggguaccugauguau

SEQ ID NO: 15627 - RNA, 22 nt, Artificial Sequence
  RPE65 RNA guide
cugaucaucuuagguaucauga

SEQ ID NO: 15628 - RNA, 22 nt, Artificial Sequence
  RPE65 RNA guide
cugcauggaauaugucacugua

SEQ ID NO: 15629 - RNA, 22 nt, Artificial Sequence
  RPE65 RNA guide
cugcucuuaagauuuggguacu

SEQ ID NO: 15630 - RNA, 22 nt, Artificial Sequence
  RPE65 RNA guide
cuggcauucucuuucuguuuug

SEQ ID NO: 15631 - RNA, 22 nt, Artificial Sequence
  RPE65 RNA guide
cuggucagucuguuccuucaac

SEQ ID NO: 15632 - RNA, 22 nt, Artificial Sequence
  RPE65 RNA guide
cuggucuuuuucuucuuuucua

SEQ ID NO: 15633 - RNA, 22 nt, Artificial Sequence
  RPE65 RNA guide
cuguaaugcuuucaagcauaaa

SEQ ID NO: 15634 - RNA, 22 nt, Artificial Sequence
  RPE65 RNA guide
cuguagauaaauaucaauccau

SEQ ID NO: 15635 - RNA, 22 nt, Artificial Sequence
  RPE65 RNA guide
cugucucuagacaugauauaug

SEQ ID NO: 15636 - RNA, 22 nt, Artificial Sequence
  RPE65 RNA guide
cuguucauauaucaugucuaga

SEQ ID NO: 15637 - RNA, 22 nt, Artificial Sequence
  RPE65 RNA guide
cuguuccuucaaccuauuuuua

SEQ ID NO: 15638 - RNA, 22 nt, Artificial Sequence
  RPE65 RNA guide
cuguuuuaugcuugaaagcauu

SEQ ID NO: 15639 - RNA, 22 nt, Artificial Sequence
  RPE65 RNA guide
cuuaagagcaguugaacuuaga

SEQ ID NO: 15640 - RNA, 22 nt, Artificial Sequence
  RPE65 RNA guide
cuuaagauuuggguacuggucu

SEQ ID NO: 15641 - RNA, 22 nt, Artificial Sequence
  RPE65 RNA guide
cuuagaugagcucuguaugauu

SEQ ID NO: 15642 - RNA, 22 nt, Artificial Sequence
  RPE65 RNA guide
cuuagguaucaugaucuguaau

SEQ ID NO: 15643 - RNA, 22 nt, Artificial Sequence
  RPE65 RNA guide
cuucaaccuauuuuuaccuagu

SEQ ID NO: 15644 - RNA, 22 nt, Artificial Sequence
  RPE65 RNA guide
cuugaaagcauuacagaucaug

SEQ ID NO: 15645 - RNA, 22 nt, Artificial Sequence
  RPE65 RNA guide
cuuucaagcauaaaacagauac

SEQ ID NO: 15646 - RNA, 22 nt, Artificial Sequence
  RPE65 RNA guide
cuuuguggaauucuguucauau

SEQ ID NO: 15647 - RNA, 22 nt, Artificial Sequence
  RPE65 RNA guide
cuuuuucuucuuuucuauuccu

SEQ ID NO: 15648 - RNA, 22 nt, Artificial Sequence
  RPE65 RNA guide
gaaaaagaccaguacccaaauc

SEQ ID NO: 15649 - RNA, 22 nt, Artificial Sequence
  RPE65 RNA guide
gaaaagaagaaaaagaccagua

SEQ ID NO: 15650 - RNA, 22 nt, Artificial Sequence
  RPE65 RNA guide
gaaaaguaugcuuuacugagua

SEQ ID NO: 15651 - RNA, 22 nt, Artificial Sequence
  RPE65 RNA guide
gaaagagaaugccagggaacug

SEQ ID NO: 15652 - RNA, 22 nt, Artificial Sequence
  RPE65 RNA guide
gaaagcauuacagaucaugaua

SEQ ID NO: 15653 - RNA, 22 nt, Artificial Sequence
  RPE65 RNA guide
gaacagacugaccaggguaccu

SEQ ID NO: 15654 - RNA, 22 nt, Artificial Sequence
  RPE65 RNA guide
gaaccaauggauugauauuuau

SEQ ID NO: 15655 - RNA, 22 nt, Artificial Sequence
  RPE65 RNA guide
gaacugcauggaauaugucacu

SEQ ID NO: 15656 - RNA, 22 nt, Artificial Sequence
  RPE65 RNA guide
gaacuuagaugagcucuguaug

SEQ ID NO: 15657 - RNA, 22 nt, Artificial Sequence
  RPE65 RNA guide
gaagaaaaagaccaguacccaa

SEQ ID NO: 15658 - RNA, 22 nt, Artificial Sequence
  RPE65 RNA guide
gaaggaacagacugaccagggu

SEQ ID NO: 15659 - RNA, 22 nt, Artificial Sequence
  RPE65 RNA guide
gaauagaaaagaagaaaaagac

SEQ ID NO: 15660 - RNA, 22 nt, Artificial Sequence
  RPE65 RNA guide
gaaugccagggaacugcaugga

SEQ ID NO: 15661 - RNA, 22 nt, Artificial Sequence
  RPE65 RNA guide
gaauucuguucauauaucaugu

SEQ ID NO: 15662 - RNA, 22 nt, Artificial Sequence
  RPE65 RNA guide
gacaggaaccaauggauugaua

SEQ ID NO: 15663 - RNA, 22 nt, Artificial Sequence
  RPE65 RNA guide
gacauauuccaugcaguucccu

SEQ ID NO: 15664 - RNA, 22 nt, Artificial Sequence
  RPE65 RNA guide
gacaugauauaugaacagaauu

SEQ ID NO: 15665 - RNA, 22 nt, Artificial Sequence
  RPE65 RNA guide
gaccaggguaccugauguaucc

SEQ ID NO: 15666 - RNA, 22 nt, Artificial Sequence
  RPE65 RNA guide
gaccaguacccaaaucuuaaga

SEQ ID NO: 15667 - RNA, 22 nt, Artificial Sequence
  RPE65 RNA guide
gacuagguaaaaauagguugaa

SEQ ID NO: 15668 - RNA, 22 nt, Artificial Sequence
  RPE65 RNA guide
gacugaccaggguaccugaugu

SEQ ID NO: 15669 - RNA, 22 nt, Artificial Sequence
  RPE65 RNA guide
gagaaugccagggaacugcaug

SEQ ID NO: 15670 - RNA, 22 nt, Artificial Sequence
  RPE65 RNA guide
gagacaggaaccaauggauuga

SEQ ID NO: 15671 - RNA, 22 nt, Artificial Sequence
  RPE65 RNA guide
gagcaguugaacuuagaugagc

SEQ ID NO: 15672 - RNA, 22 nt, Artificial Sequence
  RPE65 RNA guide
gagcucaucuaaguucaacugc

SEQ ID NO: 15673 - RNA, 22 nt, Artificial Sequence
  RPE65 RNA guide
gagcucuguaugauuuuacuuu

SEQ ID NO: 15674 - RNA, 22 nt, Artificial Sequence
  RPE65 RNA guide
gauaaauaucaauccauugguu

SEQ ID NO: 15675 - RNA, 22 nt, Artificial Sequence
  RPE65 RNA guide
gauacaucagguacccugguca

SEQ ID NO: 15676 - RNA, 22 nt, Artificial Sequence
  RPE65 RNA guide
gauaccuaagaugaucagcaug

SEQ ID NO: 15677 - RNA, 22 nt, Artificial Sequence
  RPE65 RNA guide
gauauaugaacagaauuccaca

SEQ ID NO: 15678 - RNA, 22 nt, Artificial Sequence
  RPE65 RNA guide
gauauuuaucuacagugacaua

SEQ ID NO: 15679 - RNA, 22 nt, Artificial Sequence
  RPE65 RNA guide
gaucaaauggauacaucaggua

SEQ ID NO: 15680 - RNA, 22 nt, Artificial Sequence
  RPE65 RNA guide
gaucagcaugguguuugacuag

SEQ ID NO: 15681 - RNA, 22 nt, Artificial Sequence
  RPE65 RNA guide
gaucaucuuagguaucaugauc

SEQ ID NO: 15682 - RNA, 22 nt, Artificial Sequence
  RPE65 RNA guide
gaucaugauaccuaagaugauc

SEQ ID NO: 15683 - RNA, 22 nt, Artificial Sequence
  RPE65 RNA guide
gaucuguaaugcuuucaagcau

SEQ ID NO: 15684 - RNA, 22 nt, Artificial Sequence
  RPE65 RNA guide
gaugagcucuguaugauuuuac

SEQ ID NO: 15685 - RNA, 22 nt, Artificial Sequence
  RPE65 RNA guide
gaugaucagcaugguguuugac

SEQ ID NO: 15686 - RNA, 22 nt, Artificial Sequence
  RPE65 RNA guide
gauuuggguacuggucuuuuuc

SEQ ID NO: 15687 - RNA, 22 nt, Artificial Sequence
  RPE65 RNA guide
gcaguucccuggcauucucuuu

SEQ ID NO: 15688 - RNA, 22 nt, Artificial Sequence
  RPE65 RNA guide
gcaguugaacuuagaugagcuc

SEQ ID NO: 15689 - RNA, 22 nt, Artificial Sequence
  RPE65 RNA guide
gcauggaauaugucacuguaga

SEQ ID NO: 15690 - RNA, 22 nt, Artificial Sequence
  RPE65 RNA guide
gcaugguguuugacuagguaaa

SEQ ID NO: 15691 - RNA, 22 nt, Artificial Sequence
  RPE65 RNA guide
gcauuacagaucaugauaccua

SEQ ID NO: 15692 - RNA, 22 nt, Artificial Sequence
  RPE65 RNA guide
gcauucucuuucuguuuugaga

SEQ ID NO: 15693 - RNA, 22 nt, Artificial Sequence
  RPE65 RNA guide
gccagggaacugcauggaauau

SEQ ID NO: 15694 - RNA, 22 nt, Artificial Sequence
  RPE65 RNA guide
gcucaucuaaguucaacugcuc

SEQ ID NO: 15695 - RNA, 22 nt, Artificial Sequence
  RPE65 RNA guide
gcucuuaagauuuggguacugg

SEQ ID NO: 15696 - RNA, 22 nt, Artificial Sequence
  RPE65 RNA guide
gcugaucaucuuagguaucaug

SEQ ID NO: 15697 - RNA, 22 nt, Artificial Sequence
  RPE65 RNA guide
gcuugaaagcauuacagaucau

SEQ ID NO: 15698 - RNA, 22 nt, Artificial Sequence
  RPE65 RNA guide
gcuuucaagcauaaaacagaua

SEQ ID NO: 15699 - RNA, 22 nt, Artificial Sequence
  RPE65 RNA guide
ggaacagacugaccaggguacc

SEQ ID NO: 15700 - RNA, 22 nt, Artificial Sequence
  RPE65 RNA guide
ggaaccaauggauugauauuua

SEQ ID NO: 15701 - RNA, 22 nt, Artificial Sequence
  RPE65 RNA guide
ggaacugcauggaauaugucac

SEQ ID NO: 15702 - RNA, 22 nt, Artificial Sequence
  RPE65 RNA guide
ggaauagaaaagaagaaaaaga

SEQ ID NO: 15703 - RNA, 22 nt, Artificial Sequence
  RPE65 RNA guide
ggaauaugucacuguagauaaa

SEQ ID NO: 15704 - RNA, 22 nt, Artificial Sequence
  RPE65 RNA guide
ggaauucuguucauauaucaug

SEQ ID NO: 15705 - RNA, 22 nt, Artificial Sequence
  RPE65 RNA guide
ggauacaucagguacccugguc

SEQ ID NO: 15706 - RNA, 22 nt, Artificial Sequence
  RPE65 RNA guide
ggauugauauuuaucuacagug

SEQ ID NO: 15707 - RNA, 22 nt, Artificial Sequence
  RPE65 RNA guide
ggcauucucuuucuguuuugag

SEQ ID NO: 15708 - RNA, 22 nt, Artificial Sequence
  RPE65 RNA guide
gggaacugcauggaauauguca

SEQ ID NO: 15709 - RNA, 22 nt, Artificial Sequence
  RPE65 RNA guide
ggguaccugauguauccauuug

SEQ ID NO: 15710 - RNA, 22 nt, Artificial Sequence
  RPE65 RNA guide
ggguacuggucuuuuucuucuu

SEQ ID NO: 15711 - RNA, 22 nt, Artificial Sequence
  RPE65 RNA guide
gguaaaaauagguugaaggaac

SEQ ID NO: 15712 - RNA, 22 nt, Artificial Sequence
  RPE65 RNA guide
gguacccuggucagucuguucc

SEQ ID NO: 15713 - RNA, 22 nt, Artificial Sequence
  RPE65 RNA guide
gguaccugauguauccauuuga

SEQ ID NO: 15714 - RNA, 22 nt, Artificial Sequence
  RPE65 RNA guide
gguacuggucuuuuucuucuuu

SEQ ID NO: 15715 - RNA, 22 nt, Artificial Sequence
  RPE65 RNA guide
gguaucaugaucuguaaugcuu

SEQ ID NO: 15716 - RNA, 22 nt, Artificial Sequence
  RPE65 RNA guide
ggucagucuguuccuucaaccu

SEQ ID NO: 15717 - RNA, 22 nt, Artificial Sequence
  RPE65 RNA guide
ggucuuuuucuucuuuucuauu

SEQ ID NO: 15718 - RNA, 22 nt, Artificial Sequence
  RPE65 RNA guide
gguguuugacuagguaaaaaua

SEQ ID NO: 15719 - RNA, 22 nt, Artificial Sequence
  RPE65 RNA guide
gguuccugucucuagacaugau

SEQ ID NO: 15720 - RNA, 22 nt, Artificial Sequence
  RPE65 RNA guide
gguugaaggaacagacugacca

SEQ ID NO: 15721 - RNA, 22 nt, Artificial Sequence
  RPE65 RNA guide
guaaaaauagguugaaggaaca

SEQ ID NO: 15722 - RNA, 22 nt, Artificial Sequence
  RPE65 RNA guide
guaaaaucauacagagcucauc

SEQ ID NO: 15723 - RNA, 22 nt, Artificial Sequence
  RPE65 RNA guide
guaaaguaaaaucauacagagc

SEQ ID NO: 15724 - RNA, 22 nt, Artificial Sequence
  RPE65 RNA guide
guaaugcuuucaagcauaaaac

SEQ ID NO: 15725 - RNA, 22 nt, Artificial Sequence
  RPE65 RNA guide
guacccaaaucuuaagagcagu

SEQ ID NO: 15726 - RNA, 22 nt, Artificial Sequence
  RPE65 RNA guide
guacccuggucagucuguuccu

SEQ ID NO: 15727 - RNA, 22 nt, Artificial Sequence
  RPE65 RNA guide
guaccugauguauccauuugau

SEQ ID NO: 15728 - RNA, 22 nt, Artificial Sequence
  RPE65 RNA guide
guacuggucuuuuucuucuuuu

SEQ ID NO: 15729 - RNA, 22 nt, Artificial Sequence
  RPE65 RNA guide
guagauaaauaucaauccauug

SEQ ID NO: 15730 - RNA, 22 nt, Artificial Sequence
  RPE65 RNA guide
guaucaugaucuguaaugcuuu

SEQ ID NO: 15731 - RNA, 22 nt, Artificial Sequence
  RPE65 RNA guide
guaucuguuuuaugcuugaaag

SEQ ID NO: 15732 - RNA, 22 nt, Artificial Sequence
  RPE65 RNA guide
gucaaacaccaugcugaucauc

SEQ ID NO: 15733 - RNA, 22 nt, Artificial Sequence
  RPE65 RNA guide
gucacuguagauaaauaucaau

SEQ ID NO: 15734 - RNA, 22 nt, Artificial Sequence
  RPE65 RNA guide
gucagucuguuccuucaaccua

SEQ ID NO: 15735 - RNA, 22 nt, Artificial Sequence
  RPE65 RNA guide
gucuagagacaggaaccaaugg

SEQ ID NO: 15736 - RNA, 22 nt, Artificial Sequence
  RPE65 RNA guide
gucucuagacaugauauaugaa

SEQ ID NO: 15737 - RNA, 22 nt, Artificial Sequence
  RPE65 RNA guide
gucuguuccuucaaccuauuuu

SEQ ID NO: 15738 - RNA, 22 nt, Artificial Sequence
  RPE65 RNA guide
gucuuuuucuucuuuucuauuc

SEQ ID NO: 15739 - RNA, 22 nt, Artificial Sequence
  RPE65 RNA guide
gugacauauuccaugcaguucc

SEQ ID NO: 15740 - RNA, 22 nt, Artificial Sequence
  RPE65 RNA guide
guggaauucuguucauauauca

SEQ ID NO: 15741 - RNA, 22 nt, Artificial Sequence
  RPE65 RNA guide
guguuugacuagguaaaaauag

SEQ ID NO: 15742 - RNA, 22 nt, Artificial Sequence
  RPE65 RNA guide
guucaacugcucuuaagauuug

SEQ ID NO: 15743 - RNA, 22 nt, Artificial Sequence
  RPE65 RNA guide
guucauauaucaugucuagaga

SEQ ID NO: 15744 - RNA, 22 nt, Artificial Sequence
  RPE65 RNA guide
guucccuggcauucucuuucug

SEQ ID NO: 15745 - RNA, 22 nt, Artificial Sequence
  RPE65 RNA guide
guuccugucucuagacaugaua

SEQ ID NO: 15746 - RNA, 22 nt, Artificial Sequence
  RPE65 RNA guide
guuccuucaaccuauuuuuacc

SEQ ID NO: 15747 - RNA, 22 nt, Artificial Sequence
  RPE65 RNA guide
guucuaucuaguaauuacugau

SEQ ID NO: 15748 - RNA, 22 nt, Artificial Sequence
  RPE65 RNA guide
guugaacuuagaugagcucugu

SEQ ID NO: 15749 - RNA, 22 nt, Artificial Sequence
  RPE65 RNA guide
guugaaggaacagacugaccag

SEQ ID NO: 15750 - RNA, 22 nt, Artificial Sequence
  RPE65 RNA guide
guuugacuagguaaaaauaggu

SEQ ID NO: 15751 - RNA, 22 nt, Artificial Sequence
  RPE65 RNA guide
guuuuaugcuugaaagcauuac

SEQ ID NO: 15752 - RNA, 22 nt, Artificial Sequence
  RPE65 RNA guide
uaaaaauagguugaaggaacag

SEQ ID NO: 15753 - RNA, 22 nt, Artificial Sequence
  RPE65 RNA guide
uaaaaucauacagagcucaucu

SEQ ID NO: 15754 - RNA, 22 nt, Artificial Sequence
  RPE65 RNA guide
uaaagaucaaauggauacauca

SEQ ID NO: 15755 - RNA, 22 nt, Artificial Sequence
  RPE65 RNA guide
uaaaguaaaaucauacagagcu

SEQ ID NO: 15756 - RNA, 22 nt, Artificial Sequence
  RPE65 RNA guide
uaaauaucaauccauugguucc

SEQ ID NO: 15757 - RNA, 22 nt, Artificial Sequence
  RPE65 RNA guide
uaagagcaguugaacuuagaug

SEQ ID NO: 15758 - RNA, 22 nt, Artificial Sequence
  RPE65 RNA guide
uaagaugaucagcaugguguuu

SEQ ID NO: 15759 - RNA, 22 nt, Artificial Sequence
  RPE65 RNA guide
uaagauuuggguacuggucuuu

SEQ ID NO: 15760 - RNA, 22 nt, Artificial Sequence
  RPE65 RNA guide
uaaguucaacugcucuuaagau

SEQ ID NO: 15761 - RNA, 22 nt, Artificial Sequence
  RPE65 RNA guide
uacagagcucaucuaaguucaa

SEQ ID NO: 15762 - RNA, 22 nt, Artificial Sequence
  RPE65 RNA guide
uacagaucaugauaccuaagau

SEQ ID NO: 15763 - RNA, 22 nt, Artificial Sequence
  RPE65 RNA guide
uacagugacauauuccaugcag

SEQ ID NO: 15764 - RNA, 22 nt, Artificial Sequence
  RPE65 RNA guide
uacaucagguacccuggucagu

SEQ ID NO: 15765 - RNA, 22 nt, Artificial Sequence
  RPE65 RNA guide
uacccaaaucuuaagagcaguu

SEQ ID NO: 15766 - RNA, 22 nt, Artificial Sequence
  RPE65 RNA guide
uacccuggucagucuguuccuu

SEQ ID NO: 15767 - RNA, 22 nt, Artificial Sequence
  RPE65 RNA guide
uaccuaagaugaucagcauggu

SEQ ID NO: 15768 - RNA, 22 nt, Artificial Sequence
  RPE65 RNA guide
uaccuagucaaacaccaugcug

SEQ ID NO: 15769 - RNA, 22 nt, Artificial Sequence
  RPE65 RNA guide
uaccugauguauccauuugauc

SEQ ID NO: 15770 - RNA, 22 nt, Artificial Sequence
  RPE65 RNA guide
uagaaaagaagaaaaagaccag

SEQ ID NO: 15771 - RNA, 22 nt, Artificial Sequence
  RPE65 RNA guide
uagacaugauauaugaacagaa

SEQ ID NO: 15772 - RNA, 22 nt, Artificial Sequence
  RPE65 RNA guide
uagagacaggaaccaauggauu

SEQ ID NO: 15773 - RNA, 22 nt, Artificial Sequence
  RPE65 RNA guide
uagauaaauaucaauccauugg

SEQ ID NO: 15774 - RNA, 22 nt, Artificial Sequence
  RPE65 RNA guide
uagaugagcucuguaugauuuu

SEQ ID NO: 15775 - RNA, 22 nt, Artificial Sequence
  RPE65 RNA guide
uagguaaaaauagguugaagga

SEQ ID NO: 15776 - RNA, 22 nt, Artificial Sequence
  RPE65 RNA guide
uagguaucaugaucuguaaugc

SEQ ID NO: 15777 - RNA, 22 nt, Artificial Sequence
  RPE65 RNA guide
uagguugaaggaacagacugac

SEQ ID NO: 15778 - RNA, 22 nt, Artificial Sequence
  RPE65 RNA guide
uaguaucuguuuuaugcuugaa

SEQ ID NO: 15779 - RNA, 22 nt, Artificial Sequence
  RPE65 RNA guide
uagucaaacaccaugcugauca

SEQ ID NO: 15780 - RNA, 22 nt, Artificial Sequence
  RPE65 RNA guide
uaguucuaucuaguaauuacug

SEQ ID NO: 15781 - RNA, 22 nt, Artificial Sequence
  RPE65 RNA guide
uauaucaugucuagagacagga

SEQ ID NO: 15782 - RNA, 22 nt, Artificial Sequence
  RPE65 RNA guide
uaucaauccauugguuccuguc

SEQ ID NO: 15783 - RNA, 22 nt, Artificial Sequence
  RPE65 RNA guide
uaucaugaucuguaaugcuuuc

SEQ ID NO: 15784 - RNA, 22 nt, Artificial Sequence
  RPE65 RNA guide
uaucaugucuagagacaggaac

SEQ ID NO: 15785 - RNA, 22 nt, Artificial Sequence
  RPE65 RNA guide
uaucuacagugacauauuccau

SEQ ID NO: 15786 - RNA, 22 nt, Artificial Sequence
  RPE65 RNA guide
uaugcuugaaagcauuacagau

SEQ ID NO: 15787 - RNA, 22 nt, Artificial Sequence
  RPE65 RNA guide
uauuccaugcaguucccuggca

SEQ ID NO: 15788 - RNA, 22 nt, Artificial Sequence
  RPE65 RNA guide
uauuuuuaccuagucaaacacc

SEQ ID NO: 15789 - RNA, 22 nt, Artificial Sequence
  RPE65 RNA guide
ucaaaacagaaagagaaugcca

SEQ ID NO: 15790 - RNA, 22 nt, Artificial Sequence
  RPE65 RNA guide
ucaaacaccaugcugaucaucu

SEQ ID NO: 15791 - RNA, 22 nt, Artificial Sequence
  RPE65 RNA guide
ucaaauggauacaucagguacc

SEQ ID NO: 15792 - RNA, 22 nt, Artificial Sequence
  RPE65 RNA guide
ucaaccuauuuuuaccuaguca

SEQ ID NO: 15793 - RNA, 22 nt, Artificial Sequence
  RPE65 RNA guide
ucaacugcucuuaagauuuggg

SEQ ID NO: 15794 - RNA, 22 nt, Artificial Sequence
  RPE65 RNA guide
ucaauccauugguuccugucuc

SEQ ID NO: 15795 - RNA, 22 nt, Artificial Sequence
  RPE65 RNA guide
ucagcaugguguuugacuaggu

SEQ ID NO: 15796 - RNA, 22 nt, Artificial Sequence
  RPE65 RNA guide
ucagguacccuggucagucugu

SEQ ID NO: 15797 - RNA, 22 nt, Artificial Sequence
  RPE65 RNA guide
ucagucuguuccuucaaccuau

SEQ ID NO: 15798 - RNA, 22 nt, Artificial Sequence
  RPE65 RNA guide
ucauacagagcucaucuaaguu

SEQ ID NO: 15799 - RNA, 22 nt, Artificial Sequence
  RPE65 RNA guide
ucauauaucaugucuagagaca

SEQ ID NO: 15800 - RNA, 22 nt, Artificial Sequence
  RPE65 RNA guide
ucaucuaaguucaacugcucuu

SEQ ID NO: 15801 - RNA, 22 nt, Artificial Sequence
  RPE65 RNA guide
ucaucuuagguaucaugaucug

SEQ ID NO: 15802 - RNA, 22 nt, Artificial Sequence
  RPE65 RNA guide
ucaugauaccuaagaugaucag

SEQ ID NO: 15803 - RNA, 22 nt, Artificial Sequence
  RPE65 RNA guide
ucaugaucuguaaugcuuucaa

SEQ ID NO: 15804 - RNA, 22 nt, Artificial Sequence
  RPE65 RNA guide
ucaugucuagagacaggaacca

SEQ ID NO: 15805 - RNA, 22 nt, Artificial Sequence
  RPE65 RNA guide
uccaucaguaauuacuagauag

SEQ ID NO: 15806 - RNA, 22 nt, Artificial Sequence
  RPE65 RNA guide
uccaugcaguucccuggcauuc

SEQ ID NO: 15807 - RNA, 22 nt, Artificial Sequence
  RPE65 RNA guide
uccauugguuccugucucuaga

SEQ ID NO: 15808 - RNA, 22 nt, Artificial Sequence
  RPE65 RNA guide
ucccuggcauucucuuucuguu

SEQ ID NO: 15809 - RNA, 22 nt, Artificial Sequence
  RPE65 RNA guide
uccugucucuagacaugauaua

SEQ ID NO: 15810 - RNA, 22 nt, Artificial Sequence
  RPE65 RNA guide
uccuucaaccuauuuuuaccua

SEQ ID NO: 15811 - RNA, 22 nt, Artificial Sequence
  RPE65 RNA guide
ucuaaguucaacugcucuuaag

SEQ ID NO: 15812 - RNA, 22 nt, Artificial Sequence
  RPE65 RNA guide
ucuacagugacauauuccaugc

SEQ ID NO: 15813 - RNA, 22 nt, Artificial Sequence
  RPE65 RNA guide
ucuagagacaggaaccaaugga

SEQ ID NO: 15814 - RNA, 22 nt, Artificial Sequence
  RPE65 RNA guide
ucuaguaucuguuuuaugcuug

SEQ ID NO: 15815 - RNA, 22 nt, Artificial Sequence
  RPE65 RNA guide
ucucaaaacagaaagagaaugc

SEQ ID NO: 15816 - RNA, 22 nt, Artificial Sequence
  RPE65 RNA guide
ucucuagacaugauauaugaac

SEQ ID NO: 15817 - RNA, 22 nt, Artificial Sequence
  RPE65 RNA guide
ucuguaaugcuuucaagcauaa

SEQ ID NO: 15818 - RNA, 22 nt, Artificial Sequence
  RPE65 RNA guide
ucuguucauauaucaugucuag

SEQ ID NO: 15819 - RNA, 22 nt, Artificial Sequence
  RPE65 RNA guide
ucuguuccuucaaccuauuuuu

SEQ ID NO: 15820 - RNA, 22 nt, Artificial Sequence
  RPE65 RNA guide
ucuguuuuaugcuugaaagcau

SEQ ID NO: 15821 - RNA, 22 nt, Artificial Sequence
  RPE65 RNA guide
ucuuaagagcaguugaacuuag

SEQ ID NO: 15822 - RNA, 22 nt, Artificial Sequence
  RPE65 RNA guide
ucuuaagauuuggguacugguc

SEQ ID NO: 15823 - RNA, 22 nt, Artificial Sequence
  RPE65 RNA guide
ucuuagguaucaugaucuguaa

SEQ ID NO: 15824 - RNA, 22 nt, Artificial Sequence
  RPE65 RNA guide
ucuuugaaaaguaugcuuuacu

SEQ ID NO: 15825 - RNA, 22 nt, Artificial Sequence
  RPE65 RNA guide
ucuuuguggaauucuguucaua

SEQ ID NO: 15826 - RNA, 22 nt, Artificial Sequence
  RPE65 RNA guide
ugaaagcauuacagaucaugau

SEQ ID NO: 15827 - RNA, 22 nt, Artificial Sequence
  RPE65 RNA guide
ugaacuuagaugagcucuguau

SEQ ID NO: 15828 - RNA, 22 nt, Artificial Sequence
  RPE65 RNA guide
ugaaggaacagacugaccaggg

SEQ ID NO: 15829 - RNA, 22 nt, Artificial Sequence
  RPE65 RNA guide
ugacauauuccaugcaguuccc

SEQ ID NO: 15830 - RNA, 22 nt, Artificial Sequence
  RPE65 RNA guide
ugaccaggguaccugauguauc

SEQ ID NO: 15831 - RNA, 22 nt, Artificial Sequence
  RPE65 RNA guide
ugacuagguaaaaauagguuga

SEQ ID NO: 15832 - RNA, 22 nt, Artificial Sequence
  RPE65 RNA guide
ugagcucuguaugauuuuacuu

SEQ ID NO: 15833 - RNA, 22 nt, Artificial Sequence
  RPE65 RNA guide
ugauaccuaagaugaucagcau

SEQ ID NO: 15834 - RNA, 22 nt, Artificial Sequence
  RPE65 RNA guide
ugauauaugaacagaauuccac

SEQ ID NO: 15835 - RNA, 22 nt, Artificial Sequence
  RPE65 RNA guide
ugaucagcaugguguuugacua

SEQ ID NO: 15836 - RNA, 22 nt, Artificial Sequence
  RPE65 RNA guide
ugaucaucuuagguaucaugau

SEQ ID NO: 15837 - RNA, 22 nt, Artificial Sequence
  RPE65 RNA guide
ugaucuguaaugcuuucaagca

SEQ ID NO: 15838 - RNA, 22 nt, Artificial Sequence
  RPE65 RNA guide
ugcaguucccuggcauucucuu

SEQ ID NO: 15839 - RNA, 22 nt, Artificial Sequence
  RPE65 RNA guide
ugcauggaauaugucacuguag

SEQ ID NO: 15840 - RNA, 22 nt, Artificial Sequence
  RPE65 RNA guide
ugccagggaacugcauggaaua

SEQ ID NO: 15841 - RNA, 22 nt, Artificial Sequence
  RPE65 RNA guide
ugcucuuaagauuuggguacug

SEQ ID NO: 15842 - RNA, 22 nt, Artificial Sequence
  RPE65 RNA guide
ugcugaucaucuuagguaucau

SEQ ID NO: 15843 - RNA, 22 nt, Artificial Sequence
  RPE65 RNA guide
ugcuugaaagcauuacagauca

SEQ ID NO: 15844 - RNA, 22 nt, Artificial Sequence
  RPE65 RNA guide
ugcuuucaagcauaaaacagau

SEQ ID NO: 15845 - RNA, 22 nt, Artificial Sequence
  RPE65 RNA guide
uggaauucuguucauauaucau

SEQ ID NO: 15846 - RNA, 22 nt, Artificial Sequence
  RPE65 RNA guide
uggauacaucagguacccuggu

SEQ ID NO: 15847 - RNA, 22 nt, Artificial Sequence
  RPE65 RNA guide
uggauugauauuuaucuacagu

SEQ ID NO: 15848 - RNA, 22 nt, Artificial Sequence
  RPE65 RNA guide
uggcauucucuuucuguuuuga

SEQ ID NO: 15849 - RNA, 22 nt, Artificial Sequence
  RPE65 RNA guide
uggguacuggucuuuuucuucu

SEQ ID NO: 15850 - RNA, 22 nt, Artificial Sequence
  RPE65 RNA guide
uggucagucuguuccuucaacc

SEQ ID NO: 15851 - RNA, 22 nt, Artificial Sequence
  RPE65 RNA guide
uggucuuuuucuucuuuucuau

SEQ ID NO: 15852 - RNA, 22 nt, Artificial Sequence
  RPE65 RNA guide
ugguguuugacuagguaaaaau

SEQ ID NO: 15853 - RNA, 22 nt, Artificial Sequence
  RPE65 RNA guide
ugguuccugucucuagacauga

SEQ ID NO: 15854 - RNA, 22 nt, Artificial Sequence
  RPE65 RNA guide
uguaaaguaaaaucauacagag

SEQ ID NO: 15855 - RNA, 22 nt, Artificial Sequence
  RPE65 RNA guide
uguaaugcuuucaagcauaaaa

SEQ ID NO: 15856 - RNA, 22 nt, Artificial Sequence
  RPE65 RNA guide
ugucacuguagauaaauaucaa

SEQ ID NO: 15857 - RNA, 22 nt, Artificial Sequence
  RPE65 RNA guide
ugucuagagacaggaaccaaug

SEQ ID NO: 15858 - RNA, 22 nt, Artificial Sequence
  RPE65 RNA guide
ugucucuagacaugauauauga

SEQ ID NO: 15859 - RNA, 22 nt, Artificial Sequence
  RPE65 RNA guide
uguggaauucuguucauauauc

SEQ ID NO: 15860 - RNA, 22 nt, Artificial Sequence
  RPE65 RNA guide
uguucauauaucaugucuagag

SEQ ID NO: 15861 - RNA, 22 nt, Artificial Sequence
  RPE65 RNA guide
uguuccuucaaccuauuuuuac

SEQ ID NO: 15862 - RNA, 22 nt, Artificial Sequence
  RPE65 RNA guide
uguuugacuagguaaaaauagg

SEQ ID NO: 15863 - RNA, 22 nt, Artificial Sequence
  RPE65 RNA guide
uguuuuaugcuugaaagcauua

SEQ ID NO: 15864 - RNA, 22 nt, Artificial Sequence
  RPE65 RNA guide
uuaagagcaguugaacuuagau

SEQ ID NO: 15865 - RNA, 22 nt, Artificial Sequence
  RPE65 RNA guide
uuaagauuuggguacuggucuu

SEQ ID NO: 15866 - RNA, 22 nt, Artificial Sequence
  RPE65 RNA guide
uuacagaucaugauaccuaaga

SEQ ID NO: 15867 - RNA, 22 nt, Artificial Sequence
  RPE65 RNA guide
uuaccuagucaaacaccaugcu

SEQ ID NO: 15868 - RNA, 22 nt, Artificial Sequence
  RPE65 RNA guide
uuagaugagcucuguaugauuu

SEQ ID NO: 15869 - RNA, 22 nt, Artificial Sequence
  RPE65 RNA guide
uuagguaucaugaucuguaaug

SEQ ID NO: 15870 - RNA, 22 nt, Artificial Sequence
  RPE65 RNA guide
uuaucuacagugacauauucca

SEQ ID NO: 15871 - RNA, 22 nt, Artificial Sequence
  RPE65 RNA guide
uuaugcuugaaagcauuacaga

SEQ ID NO: 15872 - RNA, 22 nt, Artificial Sequence
  RPE65 RNA guide
uucaaccuauuuuuaccuaguc

SEQ ID NO: 15873 - RNA, 22 nt, Artificial Sequence
  RPE65 RNA guide
uucaacugcucuuaagauuugg

SEQ ID NO: 15874 - RNA, 22 nt, Artificial Sequence
  RPE65 RNA guide
uucauauaucaugucuagagac

SEQ ID NO: 15875 - RNA, 22 nt, Artificial Sequence
  RPE65 RNA guide
uuccaucaguaauuacuagaua

SEQ ID NO: 15876 - RNA, 22 nt, Artificial Sequence
  RPE65 RNA guide
uuccaugcaguucccuggcauu

SEQ ID NO: 15877 - RNA, 22 nt, Artificial Sequence
  RPE65 RNA guide
uucccuggcauucucuuucugu

SEQ ID NO: 15878 - RNA, 22 nt, Artificial Sequence
  RPE65 RNA guide
uuccugucucuagacaugauau

SEQ ID NO: 15879 - RNA, 22 nt, Artificial Sequence
  RPE65 RNA guide
uuccuucaaccuauuuuuaccu

SEQ ID NO: 15880 - RNA, 22 nt, Artificial Sequence
  RPE65 RNA guide
uucuguucauauaucaugucua

SEQ ID NO: 15881 - RNA, 22 nt, Artificial Sequence
  RPE65 RNA guide
uucuuugaaaaguaugcuuuac

SEQ ID NO: 15882 - RNA, 22 nt, Artificial Sequence
  RPE65 RNA guide
uugaaagcauuacagaucauga

SEQ ID NO: 15883 - RNA, 22 nt, Artificial Sequence
  RPE65 RNA guide
uugaacuuagaugagcucugua

SEQ ID NO: 15884 - RNA, 22 nt, Artificial Sequence
  RPE65 RNA guide
uugaaggaacagacugaccagg

SEQ ID NO: 15885 - RNA, 22 nt, Artificial Sequence
  RPE65 RNA guide
uugacuagguaaaaauagguug

SEQ ID NO: 15886 - RNA, 22 nt, Artificial Sequence
  RPE65 RNA guide
uuggguacuggucuuuuucuuc

SEQ ID NO: 15887 - RNA, 22 nt, Artificial Sequence
  RPE65 RNA guide
uugguuccugucucuagacaug

SEQ ID NO: 15888 - RNA, 22 nt, Artificial Sequence
  RPE65 RNA guide
uuguaaaguaaaaucauacaga

SEQ ID NO: 15889 - RNA, 22 nt, Artificial Sequence
  RPE65 RNA guide
uuguggaauucuguucauauau

SEQ ID NO: 15890 - RNA, 22 nt, Artificial Sequence
  RPE65 RNA guide
uuuaccuagucaaacaccaugc

SEQ ID NO: 15891 - RNA, 22 nt, Artificial Sequence
  RPE65 RNA guide
uuuaucuacagugacauauucc

SEQ ID NO: 15892 - RNA, 22 nt, Artificial Sequence
  RPE65 RNA guide
uuuaugcuugaaagcauuacag

SEQ ID NO: 15893 - RNA, 22 nt, Artificial Sequence
  RPE65 RNA guide
uuugacuagguaaaaauagguu

SEQ ID NO: 15894 - RNA, 22 nt, Artificial Sequence
  RPE65 RNA guide
uuuggguacuggucuuuuucuu

SEQ ID NO: 15895 - RNA, 22 nt, Artificial Sequence
  RPE65 RNA guide
uuuuaccuagucaaacaccaug

SEQ ID NO: 15896 - RNA, 22 nt, Artificial Sequence
  RPE65 RNA guide
uuuuaugcuugaaagcauuaca

SEQ ID NO: 15897 - RNA, 22 nt, Artificial Sequence
  RPE65 RNA guide
uuuuuaccuagucaaacaccau

SEQ ID NO: 15898 - RNA, 20 nt, Artificial Sequence
  RPE65 RNA guide
aaaaaccugguucuuauccu

SEQ ID NO: 15899 - RNA, 20 nt, Artificial Sequence
  RPE65 RNA guide
aaaaaguacucuuguaggga

SEQ ID NO: 15900 - RNA, 20 nt, Artificial Sequence
  RPE65 RNA guide
aaaaccugguucuuauccug

SEQ ID NO: 15901 - RNA, 20 nt, Artificial Sequence
  RPE65 RNA guide
aaaagcaacugcagcagagc

SEQ ID NO: 15902 - RNA, 20 nt, Artificial Sequence
  RPE65 RNA guide
aaaaguacucuuguagggaa

SEQ ID NO: 15903 - RNA, 20 nt, Artificial Sequence
  RPE65 RNA guide
aaaauaaugaacugguuucc

SEQ ID NO: 15904 - RNA, 20 nt, Artificial Sequence
  RPE65 RNA guide
aaaauauacuuccucgguga

SEQ ID NO: 15905 - RNA, 20 nt, Artificial Sequence
  RPE65 RNA guide
aaacaugaggcaggaggaca

SEQ ID NO: 15906 - RNA, 20 nt, Artificial Sequence
  RPE65 RNA guide
aaaccugguucuuauccugg

SEQ ID NO: 15907 - RNA, 20 nt, Artificial Sequence
  RPE65 RNA guide
aaacuaaagcucagaagagu

SEQ ID NO: 15908 - RNA, 20 nt, Artificial Sequence
  RPE65 RNA guide
aaagagaugacugucuauug

SEQ ID NO: 15909 - RNA, 20 nt, Artificial Sequence
  RPE65 RNA guide
aaagcaacugcagcagagcc

SEQ ID NO: 15910 - RNA, 20 nt, Artificial Sequence
  RPE65 RNA guide
aaagcucagaagaguacugu

SEQ ID NO: 15911 - RNA, 20 nt, Artificial Sequence
  RPE65 RNA guide
aaagcuccuucuagcucuca

SEQ ID NO: 15912 - RNA, 20 nt, Artificial Sequence
  RPE65 RNA guide
aaaguacucuuguagggaaa

SEQ ID NO: 15913 - RNA, 20 nt, Artificial Sequence
  RPE65 RNA guide
aaaguaucauaggaaucagu

SEQ ID NO: 15914 - RNA, 20 nt, Artificial Sequence
  RPE65 RNA guide
aaagucuugaaauuugagag

SEQ ID NO: 15915 - RNA, 20 nt, Artificial Sequence
  RPE65 RNA guide
aaauaaugaacugguuuccc

SEQ ID NO: 15916 - RNA, 20 nt, Artificial Sequence
  RPE65 RNA guide
aaauacaagaacggcagauu

SEQ ID NO: 15917 - RNA, 20 nt, Artificial Sequence
  RPE65 RNA guide
aaauauacuuccucggugaa

SEQ ID NO: 15918 - RNA, 20 nt, Artificial Sequence
  RPE65 RNA guide
aaaucugaaaucuacagaga

SEQ ID NO: 15919 - RNA, 20 nt, Artificial Sequence
  RPE65 RNA guide
aaaucugccguucuuguauu

SEQ ID NO: 15920 - RNA, 20 nt, Artificial Sequence
  RPE65 RNA guide
aaaugaaacuaaagcucaga

SEQ ID NO: 15921 - RNA, 20 nt, Artificial Sequence
  RPE65 RNA guide
aaauucuaaaucugccguuc

SEQ ID NO: 15922 - RNA, 20 nt, Artificial Sequence
  RPE65 RNA guide
aaauuugagagcuagaagga

SEQ ID NO: 15923 - RNA, 20 nt, Artificial Sequence
  RPE65 RNA guide
aacaugaggcaggaggacaa

SEQ ID NO: 15924 - RNA, 20 nt, Artificial Sequence
  RPE65 RNA guide
aaccaaaauaaugaacuggu

SEQ ID NO: 15925 - RNA, 20 nt, Artificial Sequence
  RPE65 RNA guide
aaccagaauguuucaucucu

SEQ ID NO: 15926 - RNA, 20 nt, Artificial Sequence
  RPE65 RNA guide
aaccugcuucucuguagauu

SEQ ID NO: 15927 - RNA, 20 nt, Artificial Sequence
  RPE65 RNA guide
aaccugguucuuauccuggc

SEQ ID NO: 15928 - RNA, 20 nt, Artificial Sequence
  RPE65 RNA guide
aacuaaagcucagaagagua

SEQ ID NO: 15929 - RNA, 20 nt, Artificial Sequence
  RPE65 RNA guide
aacugcagcagagccaggau

SEQ ID NO: 15930 - RNA, 20 nt, Artificial Sequence
  RPE65 RNA guide
aacugguuucccuacaagag

SEQ ID NO: 15931 - RNA, 20 nt, Artificial Sequence
  RPE65 RNA guide
aagagaugacugucuauugu

SEQ ID NO: 15932 - RNA, 20 nt, Artificial Sequence
  RPE65 RNA guide
aagaguacugugacuuagca

SEQ ID NO: 15933 - RNA, 20 nt, Artificial Sequence
  RPE65 RNA guide
aagaguacuuuuugaugcuu

SEQ ID NO: 15934 - RNA, 20 nt, Artificial Sequence
  RPE65 RNA guide
aagcaacugcagcagagcca

SEQ ID NO: 15935 - RNA, 20 nt, Artificial Sequence
  RPE65 RNA guide
aagcaucaaaaaguacucuu

SEQ ID NO: 15936 - RNA, 20 nt, Artificial Sequence
  RPE65 RNA guide
aagcucagaagaguacugug

SEQ ID NO: 15937 - RNA, 20 nt, Artificial Sequence
  RPE65 RNA guide
aagcuccuucuagcucucaa

SEQ ID NO: 15938 - RNA, 20 nt, Artificial Sequence
  RPE65 RNA guide
aaguacucuuguagggaaac

SEQ ID NO: 15939 - RNA, 20 nt, Artificial Sequence
  RPE65 RNA guide
aaguaucauaggaaucagug

SEQ ID NO: 15940 - RNA, 20 nt, Artificial Sequence
  RPE65 RNA guide
aagucacaguacucuucuga

SEQ ID NO: 15941 - RNA, 20 nt, Artificial Sequence
  RPE65 RNA guide
aagucuugaaauuugagagc

SEQ ID NO: 15942 - RNA, 20 nt, Artificial Sequence
  RPE65 RNA guide
aaguucuggagagaugaagc

SEQ ID NO: 15943 - RNA, 20 nt, Artificial Sequence
  RPE65 RNA guide
aauaaugaacugguuucccu

SEQ ID NO: 15944 - RNA, 20 nt, Artificial Sequence
  RPE65 RNA guide
aauacaagaacggcagauuu

SEQ ID NO: 15945 - RNA, 20 nt, Artificial Sequence
  RPE65 RNA guide
aauagugcagauccacugau

SEQ ID NO: 15946 - RNA, 20 nt, Artificial Sequence
  RPE65 RNA guide
aauauacuuccucggugaau

SEQ ID NO: 15947 - RNA, 20 nt, Artificial Sequence
  RPE65 RNA guide
aaucaguggaucugcacuau

SEQ ID NO: 15948 - RNA, 20 nt, Artificial Sequence
  RPE65 RNA guide
aaucugaaaucuacagagaa

SEQ ID NO: 15949 - RNA, 20 nt, Artificial Sequence
  RPE65 RNA guide
aaucugccguucuuguauuu

SEQ ID NO: 15950 - RNA, 20 nt, Artificial Sequence
  RPE65 RNA guide
aaugaaacuaaagcucagaa

SEQ ID NO: 15951 - RNA, 20 nt, Artificial Sequence
  RPE65 RNA guide
aaugaacugguuucccuaca

SEQ ID NO: 15952 - RNA, 20 nt, Artificial Sequence
  RPE65 RNA guide
aauguuucaucucucucagg

SEQ ID NO: 15953 - RNA, 20 nt, Artificial Sequence
  RPE65 RNA guide
aauuccugagagagaugaaa

SEQ ID NO: 15954 - RNA, 20 nt, Artificial Sequence
  RPE65 RNA guide
aauucuaaaucugccguucu

SEQ ID NO: 15955 - RNA, 20 nt, Artificial Sequence
  RPE65 RNA guide
aauuguccuccugccucaug

SEQ ID NO: 15956 - RNA, 20 nt, Artificial Sequence
  RPE65 RNA guide
aauuugaaguucuggagaga

SEQ ID NO: 15957 - RNA, 20 nt, Artificial Sequence
  RPE65 RNA guide
aauuugagagcuagaaggag

SEQ ID NO: 15958 - RNA, 20 nt, Artificial Sequence
  RPE65 RNA guide
acaaaugaaacuaaagcuca

SEQ ID NO: 15959 - RNA, 20 nt, Artificial Sequence
  RPE65 RNA guide
acaagaacggcagauuuaga

SEQ ID NO: 15960 - RNA, 20 nt, Artificial Sequence
  RPE65 RNA guide
acaagaguacuuuuugaugc

SEQ ID NO: 15961 - RNA, 20 nt, Artificial Sequence
  RPE65 RNA guide
acaauuccugagagagauga

SEQ ID NO: 15962 - RNA, 20 nt, Artificial Sequence
  RPE65 RNA guide
acaguacucuucugagcuuu

SEQ ID NO: 15963 - RNA, 20 nt, Artificial Sequence
  RPE65 RNA guide
acaugaggcaggaggacaau

SEQ ID NO: 15964 - RNA, 20 nt, Artificial Sequence
  RPE65 RNA guide
accaaaauaaugaacugguu

SEQ ID NO: 15965 - RNA, 20 nt, Artificial Sequence
  RPE65 RNA guide
accagaauguuucaucucuc

SEQ ID NO: 15966 - RNA, 20 nt, Artificial Sequence
  RPE65 RNA guide
accgaggaaguauauuuuaa

SEQ ID NO: 15967 - RNA, 20 nt, Artificial Sequence
  RPE65 RNA guide
accucuagugauauuuuuca

SEQ ID NO: 15968 - RNA, 20 nt, Artificial Sequence
  RPE65 RNA guide
accugcuucucuguagauuu

SEQ ID NO: 15969 - RNA, 20 nt, Artificial Sequence
  RPE65 RNA guide
accugguucuuauccuggcu

SEQ ID NO: 15970 - RNA, 20 nt, Artificial Sequence
  RPE65 RNA guide
acuaaagcucagaagaguac

SEQ ID NO: 15971 - RNA, 20 nt, Artificial Sequence
  RPE65 RNA guide
acuaacaauagacagucauc

SEQ ID NO: 15972 - RNA, 20 nt, Artificial Sequence
  RPE65 RNA guide
acuauucaccgaggaaguau

SEQ ID NO: 15973 - RNA, 20 nt, Artificial Sequence
  RPE65 RNA guide
acucuucugagcuuuaguuu

SEQ ID NO: 15974 - RNA, 20 nt, Artificial Sequence
  RPE65 RNA guide
acucuuguagggaaaccagu

SEQ ID NO: 15975 - RNA, 20 nt, Artificial Sequence
  RPE65 RNA guide
acugcagcagagccaggaua

SEQ ID NO: 15976 - RNA, 20 nt, Artificial Sequence
  RPE65 RNA guide
acugguuucccuacaagagu

SEQ ID NO: 15977 - RNA, 20 nt, Artificial Sequence
  RPE65 RNA guide
acugugacuuagcaaaagca

SEQ ID NO: 15978 - RNA, 20 nt, Artificial Sequence
  RPE65 RNA guide
acuuagcaaaagcaacugca

SEQ ID NO: 15979 - RNA, 20 nt, Artificial Sequence
  RPE65 RNA guide
acuuccucggugaauagugc

SEQ ID NO: 15980 - RNA, 20 nt, Artificial Sequence
  RPE65 RNA guide
acuuuauguauaaacaugag

SEQ ID NO: 15981 - RNA, 20 nt, Artificial Sequence
  RPE65 RNA guide
acuuuuugaugcuucaucuc

SEQ ID NO: 15982 - RNA, 20 nt, Artificial Sequence
  RPE65 RNA guide
agaagaguacugugacuuag

SEQ ID NO: 15983 - RNA, 20 nt, Artificial Sequence
  RPE65 RNA guide
agaaggagcuuuaaaaauag

SEQ ID NO: 15984 - RNA, 20 nt, Artificial Sequence
  RPE65 RNA guide
agaauguuucaucucucuca

SEQ ID NO: 15985 - RNA, 20 nt, Artificial Sequence
  RPE65 RNA guide
agacagucaucucuuuauuu

SEQ ID NO: 15986 - RNA, 20 nt, Artificial Sequence
  RPE65 RNA guide
agacuuuauguauaaacaug

SEQ ID NO: 15987 - RNA, 20 nt, Artificial Sequence
  RPE65 RNA guide
agagagaugaaacauucugg

SEQ ID NO: 15988 - RNA, 20 nt, Artificial Sequence
  RPE65 RNA guide
agagaugaagcaucaaaaag

SEQ ID NO: 15989 - RNA, 20 nt, Artificial Sequence
  RPE65 RNA guide
agagaugacugucuauuguu

SEQ ID NO: 15990 - RNA, 20 nt, Artificial Sequence
  RPE65 RNA guide
agagccaggauaagaaccag

SEQ ID NO: 15991 - RNA, 20 nt, Artificial Sequence
  RPE65 RNA guide
agagcuagaaggagcuuuaa

SEQ ID NO: 15992 - RNA, 20 nt, Artificial Sequence
  RPE65 RNA guide
agaguacugugacuuagcaa

SEQ ID NO: 15993 - RNA, 20 nt, Artificial Sequence
  RPE65 RNA guide
agaguacuuuuugaugcuuc

SEQ ID NO: 15994 - RNA, 20 nt, Artificial Sequence
  RPE65 RNA guide
agauccacugauuccuauga

SEQ ID NO: 15995 - RNA, 20 nt, Artificial Sequence
  RPE65 RNA guide
agaugaagcaucaaaaagua

SEQ ID NO: 15996 - RNA, 20 nt, Artificial Sequence
  RPE65 RNA guide
agcaaaagcaacugcagcag

SEQ ID NO: 15997 - RNA, 20 nt, Artificial Sequence
  RPE65 RNA guide
agcaacugcagcagagccag

SEQ ID NO: 15998 - RNA, 20 nt, Artificial Sequence
  RPE65 RNA guide
agcagagccaggauaagaac

SEQ ID NO: 15999 - RNA, 20 nt, Artificial Sequence
  RPE65 RNA guide
agcaucaaaaaguacucuug

SEQ ID NO: 16000 - RNA, 20 nt, Artificial Sequence
  RPE65 RNA guide
agccaggauaagaaccaggu

SEQ ID NO: 16001 - RNA, 20 nt, Artificial Sequence
  RPE65 RNA guide
agccuauuuuuaaagcuccu

SEQ ID NO: 16002 - RNA, 20 nt, Artificial Sequence
  RPE65 RNA guide
agcuagaaggagcuuuaaaa

SEQ ID NO: 16003 - RNA, 20 nt, Artificial Sequence
  RPE65 RNA guide
agcucagaagaguacuguga

SEQ ID NO: 16004 - RNA, 20 nt, Artificial Sequence
  RPE65 RNA guide
agcuccuucuagcucucaaa

SEQ ID NO: 16005 - RNA, 20 nt, Artificial Sequence
  RPE65 RNA guide
aggaaucaguggaucugcac

SEQ ID NO: 16006 - RNA, 20 nt, Artificial Sequence
  RPE65 RNA guide
aggaauuguccuccugccuc

SEQ ID NO: 16007 - RNA, 20 nt, Artificial Sequence
  RPE65 RNA guide
aggacaauuccugagagaga

SEQ ID NO: 16008 - RNA, 20 nt, Artificial Sequence
  RPE65 RNA guide
aggaggacaauuccugagag

SEQ ID NO: 16009 - RNA, 20 nt, Artificial Sequence
  RPE65 RNA guide
aggcaggaggacaauuccug

SEQ ID NO: 16010 - RNA, 20 nt, Artificial Sequence
  RPE65 RNA guide
agggaaaccaguucauuauu

SEQ ID NO: 16011 - RNA, 20 nt, Artificial Sequence
  RPE65 RNA guide
aguacucuucugagcuuuag

SEQ ID NO: 16012 - RNA, 20 nt, Artificial Sequence
  RPE65 RNA guide
aguacucuuguagggaaacc

SEQ ID NO: 16013 - RNA, 20 nt, Artificial Sequence
  RPE65 RNA guide
aguacugugacuuagcaaaa

SEQ ID NO: 16014 - RNA, 20 nt, Artificial Sequence
  RPE65 RNA guide
aguacuuuuugaugcuucau

SEQ ID NO: 16015 - RNA, 20 nt, Artificial Sequence
  RPE65 RNA guide
aguagaaauaaagagaugac

SEQ ID NO: 16016 - RNA, 20 nt, Artificial Sequence
  RPE65 RNA guide
aguaucauaggaaucagugg

SEQ ID NO: 16017 - RNA, 20 nt, Artificial Sequence
  RPE65 RNA guide
agucacaguacucuucugag

SEQ ID NO: 16018 - RNA, 20 nt, Artificial Sequence
  RPE65 RNA guide
agucuugaaauuugagagcu

SEQ ID NO: 16019 - RNA, 20 nt, Artificial Sequence
  RPE65 RNA guide
agugcagauccacugauucc

SEQ ID NO: 16020 - RNA, 20 nt, Artificial Sequence
  RPE65 RNA guide
aguggaucugcacuauucac

SEQ ID NO: 16021 - RNA, 20 nt, Artificial Sequence
  RPE65 RNA guide
aguucuggagagaugaagca

SEQ ID NO: 16022 - RNA, 20 nt, Artificial Sequence
  RPE65 RNA guide
aguugcuuuugcuaagucac

SEQ ID NO: 16023 - RNA, 20 nt, Artificial Sequence
  RPE65 RNA guide
auaaacaugaggcaggagga

SEQ ID NO: 16024 - RNA, 20 nt, Artificial Sequence
  RPE65 RNA guide
auaaaguaucauaggaauca

SEQ ID NO: 16025 - RNA, 20 nt, Artificial Sequence
  RPE65 RNA guide
auaaugaacugguuucccua

SEQ ID NO: 16026 - RNA, 20 nt, Artificial Sequence
  RPE65 RNA guide
auaauuugaaguucuggaga

SEQ ID NO: 16027 - RNA, 20 nt, Artificial Sequence
  RPE65 RNA guide
auacaagaacggcagauuua

SEQ ID NO: 16028 - RNA, 20 nt, Artificial Sequence
  RPE65 RNA guide
auacuuccucggugaauagu

SEQ ID NO: 16029 - RNA, 20 nt, Artificial Sequence
  RPE65 RNA guide
auaggaaucaguggaucugc

SEQ ID NO: 16030 - RNA, 20 nt, Artificial Sequence
  RPE65 RNA guide
auagugcagauccacugauu

SEQ ID NO: 16031 - RNA, 20 nt, Artificial Sequence
  RPE65 RNA guide
auauacuuccucggugaaua

SEQ ID NO: 16032 - RNA, 20 nt, Artificial Sequence
  RPE65 RNA guide
aucaaaaaguacucuuguag

SEQ ID NO: 16033 - RNA, 20 nt, Artificial Sequence
  RPE65 RNA guide
aucaguggaucugcacuauu

SEQ ID NO: 16034 - RNA, 20 nt, Artificial Sequence
  RPE65 RNA guide
aucauaggaaucaguggauc

SEQ ID NO: 16035 - RNA, 20 nt, Artificial Sequence
  RPE65 RNA guide
auccacugauuccuaugaua

SEQ ID NO: 16036 - RNA, 20 nt, Artificial Sequence
  RPE65 RNA guide
auccuggcucugcugcaguu

SEQ ID NO: 16037 - RNA, 20 nt, Artificial Sequence
  RPE65 RNA guide
aucucucucaggaauugucc

SEQ ID NO: 16038 - RNA, 20 nt, Artificial Sequence
  RPE65 RNA guide
aucugaaaucuacagagaag

SEQ ID NO: 16039 - RNA, 20 nt, Artificial Sequence
  RPE65 RNA guide
aucugcacuauucaccgagg

SEQ ID NO: 16040 - RNA, 20 nt, Artificial Sequence
  RPE65 RNA guide
aucugccguucuuguauuua

SEQ ID NO: 16041 - RNA, 20 nt, Artificial Sequence
  RPE65 RNA guide
augaaacuaaagcucagaag

SEQ ID NO: 16042 - RNA, 20 nt, Artificial Sequence
  RPE65 RNA guide
augaacugguuucccuacaa

SEQ ID NO: 16043 - RNA, 20 nt, Artificial Sequence
  RPE65 RNA guide
augaagcaucaaaaaguacu

SEQ ID NO: 16044 - RNA, 20 nt, Artificial Sequence
  RPE65 RNA guide
augaggcaggaggacaauuc

SEQ ID NO: 16045 - RNA, 20 nt, Artificial Sequence
  RPE65 RNA guide
augcuucaucucuccagaac

SEQ ID NO: 16046 - RNA, 20 nt, Artificial Sequence
  RPE65 RNA guide
auguauaaacaugaggcagg

SEQ ID NO: 16047 - RNA, 20 nt, Artificial Sequence
  RPE65 RNA guide
auguuucaucucucucagga

SEQ ID NO: 16048 - RNA, 20 nt, Artificial Sequence
  RPE65 RNA guide
auuccugagagagaugaaac

SEQ ID NO: 16049 - RNA, 20 nt, Artificial Sequence
  RPE65 RNA guide
auucuaaaucugccguucuu

SEQ ID NO: 16050 - RNA, 20 nt, Artificial Sequence
  RPE65 RNA guide
auuguccuccugccucaugu

SEQ ID NO: 16051 - RNA, 20 nt, Artificial Sequence
  RPE65 RNA guide
auuugaaguucuggagagau

SEQ ID NO: 16052 - RNA, 20 nt, Artificial Sequence
  RPE65 RNA guide
auuugagagcuagaaggagc

SEQ ID NO: 16053 - RNA, 20 nt, Artificial Sequence
  RPE65 RNA guide
auuuuguaaauacaagaacg

SEQ ID NO: 16054 - RNA, 20 nt, Artificial Sequence
  RPE65 RNA guide
auuuuuaaagcuccuucuag

SEQ ID NO: 16055 - RNA, 20 nt, Artificial Sequence
  RPE65 RNA guide
caaaaaguacucuuguaggg

SEQ ID NO: 16056 - RNA, 20 nt, Artificial Sequence
  RPE65 RNA guide
caaaagcaacugcagcagag

SEQ ID NO: 16057 - RNA, 20 nt, Artificial Sequence
  RPE65 RNA guide
caaaauaaugaacugguuuc

SEQ ID NO: 16058 - RNA, 20 nt, Artificial Sequence
  RPE65 RNA guide
caaaugaaacuaaagcucag

SEQ ID NO: 16059 - RNA, 20 nt, Artificial Sequence
  RPE65 RNA guide
caacugcagcagagccagga

SEQ ID NO: 16060 - RNA, 20 nt, Artificial Sequence
  RPE65 RNA guide
caagaacggcagauuuagaa

SEQ ID NO: 16061 - RNA, 20 nt, Artificial Sequence
  RPE65 RNA guide
caagaguacuuuuugaugcu

SEQ ID NO: 16062 - RNA, 20 nt, Artificial Sequence
  RPE65 RNA guide
caauuccugagagagaugaa

SEQ ID NO: 16063 - RNA, 20 nt, Artificial Sequence
  RPE65 RNA guide
caauuuuguaaauacaagaa

SEQ ID NO: 16064 - RNA, 20 nt, Artificial Sequence
  RPE65 RNA guide
cacaguacucuucugagcuu

SEQ ID NO: 16065 - RNA, 20 nt, Artificial Sequence
  RPE65 RNA guide
caccgaggaaguauauuuua

SEQ ID NO: 16066 - RNA, 20 nt, Artificial Sequence
  RPE65 RNA guide
cacuauucaccgaggaagua

SEQ ID NO: 16067 - RNA, 20 nt, Artificial Sequence
  RPE65 RNA guide
cacugauuccuaugauacuu

SEQ ID NO: 16068 - RNA, 20 nt, Artificial Sequence
  RPE65 RNA guide
cagaagaguacugugacuua

SEQ ID NO: 16069 - RNA, 20 nt, Artificial Sequence
  RPE65 RNA guide
cagaauguuucaucucucuc

SEQ ID NO: 16070 - RNA, 20 nt, Artificial Sequence
  RPE65 RNA guide
cagagccaggauaagaacca

SEQ ID NO: 16071 - RNA, 20 nt, Artificial Sequence
  RPE65 RNA guide
cagauccacugauuccuaug

SEQ ID NO: 16072 - RNA, 20 nt, Artificial Sequence
  RPE65 RNA guide
cagauuuaaccagaauguuu

SEQ ID NO: 16073 - RNA, 20 nt, Artificial Sequence
  RPE65 RNA guide
cagcagagccaggauaagaa

SEQ ID NO: 16074 - RNA, 20 nt, Artificial Sequence
  RPE65 RNA guide
caggaauuguccuccugccu

SEQ ID NO: 16075 - RNA, 20 nt, Artificial Sequence
  RPE65 RNA guide
caggaggacaauuccugaga

SEQ ID NO: 16076 - RNA, 20 nt, Artificial Sequence
  RPE65 RNA guide
caggauaagaaccagguuuu

SEQ ID NO: 16077 - RNA, 20 nt, Artificial Sequence
  RPE65 RNA guide
caguacucuucugagcuuua

SEQ ID NO: 16078 - RNA, 20 nt, Artificial Sequence
  RPE65 RNA guide
caguggaucugcacuauuca

SEQ ID NO: 16079 - RNA, 20 nt, Artificial Sequence
  RPE65 RNA guide
caguugcuuuugcuaaguca

SEQ ID NO: 16080 - RNA, 20 nt, Artificial Sequence
  RPE65 RNA guide
cauaaagucuugaaauuuga

SEQ ID NO: 16081 - RNA, 20 nt, Artificial Sequence
  RPE65 RNA guide
cauaggaaucaguggaucug

SEQ ID NO: 16082 - RNA, 20 nt, Artificial Sequence
  RPE65 RNA guide
caucaaaaaguacucuugua

SEQ ID NO: 16083 - RNA, 20 nt, Artificial Sequence
  RPE65 RNA guide
caucucuccagaacuucaaa

SEQ ID NO: 16084 - RNA, 20 nt, Artificial Sequence
  RPE65 RNA guide
caucucucucaggaauuguc

SEQ ID NO: 16085 - RNA, 20 nt, Artificial Sequence
  RPE65 RNA guide
caugaggcaggaggacaauu

SEQ ID NO: 16086 - RNA, 20 nt, Artificial Sequence
  RPE65 RNA guide
cauuacuaacaauagacagu

SEQ ID NO: 16087 - RNA, 20 nt, Artificial Sequence
  RPE65 RNA guide
ccaaaauaaugaacugguuu

SEQ ID NO: 16088 - RNA, 20 nt, Artificial Sequence
  RPE65 RNA guide
ccacugauuccuaugauacu

SEQ ID NO: 16089 - RNA, 20 nt, Artificial Sequence
  RPE65 RNA guide
ccagaauguuucaucucucu

SEQ ID NO: 16090 - RNA, 20 nt, Artificial Sequence
  RPE65 RNA guide
ccaggauaagaaccagguuu

SEQ ID NO: 16091 - RNA, 20 nt, Artificial Sequence
  RPE65 RNA guide
cccuacaagaguacuuuuug

SEQ ID NO: 16092 - RNA, 20 nt, Artificial Sequence
  RPE65 RNA guide
ccgaggaaguauauuuuaaa

SEQ ID NO: 16093 - RNA, 20 nt, Artificial Sequence
  RPE65 RNA guide
ccuacaagaguacuuuuuga

SEQ ID NO: 16094 - RNA, 20 nt, Artificial Sequence
  RPE65 RNA guide
ccuauuuuuaaagcuccuuc

SEQ ID NO: 16095 - RNA, 20 nt, Artificial Sequence
  RPE65 RNA guide
ccuccugccucauguuuaua

SEQ ID NO: 16096 - RNA, 20 nt, Artificial Sequence
  RPE65 RNA guide
ccucggugaauagugcagau

SEQ ID NO: 16097 - RNA, 20 nt, Artificial Sequence
  RPE65 RNA guide
ccucuagugauauuuuucag

SEQ ID NO: 16098 - RNA, 20 nt, Artificial Sequence
  RPE65 RNA guide
ccugagagagaugaaacauu

SEQ ID NO: 16099 - RNA, 20 nt, Artificial Sequence
  RPE65 RNA guide
ccugccucauguuuauacau

SEQ ID NO: 16100 - RNA, 20 nt, Artificial Sequence
  RPE65 RNA guide
ccugcuucucuguagauuuc

SEQ ID NO: 16101 - RNA, 20 nt, Artificial Sequence
  RPE65 RNA guide
ccuggcucugcugcaguugc

SEQ ID NO: 16102 - RNA, 20 nt, Artificial Sequence
  RPE65 RNA guide
ccugguucuuauccuggcuc

SEQ ID NO: 16103 - RNA, 20 nt, Artificial Sequence
  RPE65 RNA guide
ccuucuagcucucaaauuuc

SEQ ID NO: 16104 - RNA, 20 nt, Artificial Sequence
  RPE65 RNA guide
cggcagauuuagaauuuaaa

SEQ ID NO: 16105 - RNA, 20 nt, Artificial Sequence
  RPE65 RNA guide
cggugaauagugcagaucca

SEQ ID NO: 16106 - RNA, 20 nt, Artificial Sequence
  RPE65 RNA guide
cuaaagcucagaagaguacu

SEQ ID NO: 16107 - RNA, 20 nt, Artificial Sequence
  RPE65 RNA guide
cuaaaucugccguucuugua

SEQ ID NO: 16108 - RNA, 20 nt, Artificial Sequence
  RPE65 RNA guide
cuaacaauagacagucaucu

SEQ ID NO: 16109 - RNA, 20 nt, Artificial Sequence
  RPE65 RNA guide
cuaagucacaguacucuucu

SEQ ID NO: 16110 - RNA, 20 nt, Artificial Sequence
  RPE65 RNA guide
cuacaagaguacuuuuugau

SEQ ID NO: 16111 - RNA, 20 nt, Artificial Sequence
  RPE65 RNA guide
cuagaaggagcuuuaaaaau

SEQ ID NO: 16112 - RNA, 20 nt, Artificial Sequence
  RPE65 RNA guide
cuagcucucaaauuucaaga

SEQ ID NO: 16113 - RNA, 20 nt, Artificial Sequence
  RPE65 RNA guide
cuauucaccgaggaaguaua

SEQ ID NO: 16114 - RNA, 20 nt, Artificial Sequence
  RPE65 RNA guide
cuauuuuuaaagcuccuucu

SEQ ID NO: 16115 - RNA, 20 nt, Artificial Sequence
  RPE65 RNA guide
cucagaagaguacugugacu

SEQ ID NO: 16116 - RNA, 20 nt, Artificial Sequence
  RPE65 RNA guide
cucaggaauuguccuccugc

SEQ ID NO: 16117 - RNA, 20 nt, Artificial Sequence
  RPE65 RNA guide
cuccugccucauguuuauac

SEQ ID NO: 16118 - RNA, 20 nt, Artificial Sequence
  RPE65 RNA guide
cuccuucuagcucucaaauu

SEQ ID NO: 16119 - RNA, 20 nt, Artificial Sequence
  RPE65 RNA guide
cucggugaauagugcagauc

SEQ ID NO: 16120 - RNA, 20 nt, Artificial Sequence
  RPE65 RNA guide
cucucaggaauuguccuccu

SEQ ID NO: 16121 - RNA, 20 nt, Artificial Sequence
  RPE65 RNA guide
cucucucaggaauuguccuc

SEQ ID NO: 16122 - RNA, 20 nt, Artificial Sequence
  RPE65 RNA guide
cucugcugcaguugcuuuug

SEQ ID NO: 16123 - RNA, 20 nt, Artificial Sequence
  RPE65 RNA guide
cucuguagauuucagauuua

SEQ ID NO: 16124 - RNA, 20 nt, Artificial Sequence
  RPE65 RNA guide
cucuucugagcuuuaguuuc

SEQ ID NO: 16125 - RNA, 20 nt, Artificial Sequence
  RPE65 RNA guide
cucuuguagggaaaccaguu

SEQ ID NO: 16126 - RNA, 20 nt, Artificial Sequence
  RPE65 RNA guide
cugaaaucuacagagaagca

SEQ ID NO: 16127 - RNA, 20 nt, Artificial Sequence
  RPE65 RNA guide
cugagagagaugaaacauuc

SEQ ID NO: 16128 - RNA, 20 nt, Artificial Sequence
  RPE65 RNA guide
cugcacuauucaccgaggaa

SEQ ID NO: 16129 - RNA, 20 nt, Artificial Sequence
  RPE65 RNA guide
cugcagcagagccaggauaa

SEQ ID NO: 16130 - RNA, 20 nt, Artificial Sequence
  RPE65 RNA guide
cugcaguugcuuuugcuaag

SEQ ID NO: 16131 - RNA, 20 nt, Artificial Sequence
  RPE65 RNA guide
cugccguucuuguauuuaca

SEQ ID NO: 16132 - RNA, 20 nt, Artificial Sequence
  RPE65 RNA guide
cugccucauguuuauacaua

SEQ ID NO: 16133 - RNA, 20 nt, Artificial Sequence
  RPE65 RNA guide
cugcugcaguugcuuuugcu

SEQ ID NO: 16134 - RNA, 20 nt, Artificial Sequence
  RPE65 RNA guide
cugcuucucuguagauuuca

SEQ ID NO: 16135 - RNA, 20 nt, Artificial Sequence
  RPE65 RNA guide
cuggagagaugaagcaucaa

SEQ ID NO: 16136 - RNA, 20 nt, Artificial Sequence
  RPE65 RNA guide
cuggcucugcugcaguugcu

SEQ ID NO: 16137 - RNA, 20 nt, Artificial Sequence
  RPE65 RNA guide
cugguuaaaucugaaaucua

SEQ ID NO: 16138 - RNA, 20 nt, Artificial Sequence
  RPE65 RNA guide
cugguucuuauccuggcucu

SEQ ID NO: 16139 - RNA, 20 nt, Artificial Sequence
  RPE65 RNA guide
cugguuucccuacaagagua

SEQ ID NO: 16140 - RNA, 20 nt, Artificial Sequence
  RPE65 RNA guide
cuguagauuucagauuuaac

SEQ ID NO: 16141 - RNA, 20 nt, Artificial Sequence
  RPE65 RNA guide
cugugacuuagcaaaagcaa

SEQ ID NO: 16142 - RNA, 20 nt, Artificial Sequence
  RPE65 RNA guide
cuuagcaaaagcaacugcag

SEQ ID NO: 16143 - RNA, 20 nt, Artificial Sequence
  RPE65 RNA guide
cuuauccuggcucugcugca

SEQ ID NO: 16144 - RNA, 20 nt, Artificial Sequence
  RPE65 RNA guide
cuucaucucuccagaacuuc

SEQ ID NO: 16145 - RNA, 20 nt, Artificial Sequence
  RPE65 RNA guide
cuuccucggugaauagugca

SEQ ID NO: 16146 - RNA, 20 nt, Artificial Sequence
  RPE65 RNA guide
cuucuagcucucaaauuuca

SEQ ID NO: 16147 - RNA, 20 nt, Artificial Sequence
  RPE65 RNA guide
cuucugaaaaauaucacuag

SEQ ID NO: 16148 - RNA, 20 nt, Artificial Sequence
  RPE65 RNA guide
cuucugagcuuuaguuucau

SEQ ID NO: 16149 - RNA, 20 nt, Artificial Sequence
  RPE65 RNA guide
cuugaaauuugagagcuaga

SEQ ID NO: 16150 - RNA, 20 nt, Artificial Sequence
  RPE65 RNA guide
cuuguagggaaaccaguuca

SEQ ID NO: 16151 - RNA, 20 nt, Artificial Sequence
  RPE65 RNA guide
cuuuaaaauauacuuccucg

SEQ ID NO: 16152 - RNA, 20 nt, Artificial Sequence
  RPE65 RNA guide
cuuuauguauaaacaugagg

SEQ ID NO: 16153 - RNA, 20 nt, Artificial Sequence
  RPE65 RNA guide
cuuuugcuaagucacaguac

SEQ ID NO: 16154 - RNA, 20 nt, Artificial Sequence
  RPE65 RNA guide
cuuuuugaugcuucaucucu

SEQ ID NO: 16155 - RNA, 20 nt, Artificial Sequence
  RPE65 RNA guide
gaaacuaaagcucagaagag

SEQ ID NO: 16156 - RNA, 20 nt, Artificial Sequence
  RPE65 RNA guide
gaaaucuacagagaagcagg

SEQ ID NO: 16157 - RNA, 20 nt, Artificial Sequence
  RPE65 RNA guide
gaaauuugagagcuagaagg

SEQ ID NO: 16158 - RNA, 20 nt, Artificial Sequence
  RPE65 RNA guide
gaacugguuucccuacaaga

SEQ ID NO: 16159 - RNA, 20 nt, Artificial Sequence
  RPE65 RNA guide
gaagaguacugugacuuagc

SEQ ID NO: 16160 - RNA, 20 nt, Artificial Sequence
  RPE65 RNA guide
gaagcaucaaaaaguacucu

SEQ ID NO: 16161 - RNA, 20 nt, Artificial Sequence
  RPE65 RNA guide
gaaggagcuuuaaaaauagg

SEQ ID NO: 16162 - RNA, 20 nt, Artificial Sequence
  RPE65 RNA guide
gaaguucuggagagaugaag

SEQ ID NO: 16163 - RNA, 20 nt, Artificial Sequence
  RPE65 RNA guide
gaauagugcagauccacuga

SEQ ID NO: 16164 - RNA, 20 nt, Artificial Sequence
  RPE65 RNA guide
gaaucaguggaucugcacua

SEQ ID NO: 16165 - RNA, 20 nt, Artificial Sequence
  RPE65 RNA guide
gaauguuucaucucucucag

SEQ ID NO: 16166 - RNA, 20 nt, Artificial Sequence
  RPE65 RNA guide
gaauuguccuccugccucau

SEQ ID NO: 16167 - RNA, 20 nt, Artificial Sequence
  RPE65 RNA guide
gacaauuccugagagagaug

SEQ ID NO: 16168 - RNA, 20 nt, Artificial Sequence
  RPE65 RNA guide
gacagucaucucuuuauuuc

SEQ ID NO: 16169 - RNA, 20 nt, Artificial Sequence
  RPE65 RNA guide
gacuuagcaaaagcaacugc

SEQ ID NO: 16170 - RNA, 20 nt, Artificial Sequence
  RPE65 RNA guide
gacuuuauguauaaacauga

SEQ ID NO: 16171 - RNA, 20 nt, Artificial Sequence
  RPE65 RNA guide
gagagagaugaaacauucug

SEQ ID NO: 16172 - RNA, 20 nt, Artificial Sequence
  RPE65 RNA guide
gagagaugaaacauucuggu

SEQ ID NO: 16173 - RNA, 20 nt, Artificial Sequence
  RPE65 RNA guide
gagagaugaagcaucaaaaa

SEQ ID NO: 16174 - RNA, 20 nt, Artificial Sequence
  RPE65 RNA guide
gagagcuagaaggagcuuua

SEQ ID NO: 16175 - RNA, 20 nt, Artificial Sequence
  RPE65 RNA guide
gagaugaaacauucugguua

SEQ ID NO: 16176 - RNA, 20 nt, Artificial Sequence
  RPE65 RNA guide
gagaugaagcaucaaaaagu

SEQ ID NO: 16177 - RNA, 20 nt, Artificial Sequence
  RPE65 RNA guide
gagaugacugucuauuguua

SEQ ID NO: 16178 - RNA, 20 nt, Artificial Sequence
  RPE65 RNA guide
gagccaggauaagaaccagg

SEQ ID NO: 16179 - RNA, 20 nt, Artificial Sequence
  RPE65 RNA guide
gagcuagaaggagcuuuaaa

SEQ ID NO: 16180 - RNA, 20 nt, Artificial Sequence
  RPE65 RNA guide
gaggacaauuccugagagag

SEQ ID NO: 16181 - RNA, 20 nt, Artificial Sequence
  RPE65 RNA guide
gaggcaggaggacaauuccu

SEQ ID NO: 16182 - RNA, 20 nt, Artificial Sequence
  RPE65 RNA guide
gaguacugugacuuagcaaa

SEQ ID NO: 16183 - RNA, 20 nt, Artificial Sequence
  RPE65 RNA guide
gaguacuuuuugaugcuuca

SEQ ID NO: 16184 - RNA, 20 nt, Artificial Sequence
  RPE65 RNA guide
gauaaaguaucauaggaauc

SEQ ID NO: 16185 - RNA, 20 nt, Artificial Sequence
  RPE65 RNA guide
gauccacugauuccuaugau

SEQ ID NO: 16186 - RNA, 20 nt, Artificial Sequence
  RPE65 RNA guide
gaucugcacuauucaccgag

SEQ ID NO: 16187 - RNA, 20 nt, Artificial Sequence
  RPE65 RNA guide
gaugaaacauucugguuaaa

SEQ ID NO: 16188 - RNA, 20 nt, Artificial Sequence
  RPE65 RNA guide
gaugaagcaucaaaaaguac

SEQ ID NO: 16189 - RNA, 20 nt, Artificial Sequence
  RPE65 RNA guide
gaugacugucuauuguuagu

SEQ ID NO: 16190 - RNA, 20 nt, Artificial Sequence
  RPE65 RNA guide
gaugcuucaucucuccagaa

SEQ ID NO: 16191 - RNA, 20 nt, Artificial Sequence
  RPE65 RNA guide
gauuuaaccagaauguuuca

SEQ ID NO: 16192 - RNA, 20 nt, Artificial Sequence
  RPE65 RNA guide
gcaaaagcaacugcagcaga

SEQ ID NO: 16193 - RNA, 20 nt, Artificial Sequence
  RPE65 RNA guide
gcaacugcagcagagccagg

SEQ ID NO: 16194 - RNA, 20 nt, Artificial Sequence
  RPE65 RNA guide
gcacuauucaccgaggaagu

SEQ ID NO: 16195 - RNA, 20 nt, Artificial Sequence
  RPE65 RNA guide
gcagagccaggauaagaacc

SEQ ID NO: 16196 - RNA, 20 nt, Artificial Sequence
  RPE65 RNA guide
gcagauccacugauuccuau

SEQ ID NO: 16197 - RNA, 20 nt, Artificial Sequence
  RPE65 RNA guide
gcagcagagccaggauaaga

SEQ ID NO: 16198 - RNA, 20 nt, Artificial Sequence
  RPE65 RNA guide
gcaggaggacaauuccugag

SEQ ID NO: 16199 - RNA, 20 nt, Artificial Sequence
  RPE65 RNA guide
gcaguugcuuuugcuaaguc

SEQ ID NO: 16200 - RNA, 20 nt, Artificial Sequence
  RPE65 RNA guide
gcaucaaaaaguacucuugu

SEQ ID NO: 16201 - RNA, 20 nt, Artificial Sequence
  RPE65 RNA guide
gccaggauaagaaccagguu

SEQ ID NO: 16202 - RNA, 20 nt, Artificial Sequence
  RPE65 RNA guide
gccguucuuguauuuacaaa

SEQ ID NO: 16203 - RNA, 20 nt, Artificial Sequence
  RPE65 RNA guide
gccuauuuuuaaagcuccuu

SEQ ID NO: 16204 - RNA, 20 nt, Artificial Sequence
  RPE65 RNA guide
gccucauguuuauacauaaa

SEQ ID NO: 16205 - RNA, 20 nt, Artificial Sequence
  RPE65 RNA guide
gcuaagucacaguacucuuc

SEQ ID NO: 16206 - RNA, 20 nt, Artificial Sequence
  RPE65 RNA guide
gcuagaaggagcuuuaaaaa

SEQ ID NO: 16207 - RNA, 20 nt, Artificial Sequence
  RPE65 RNA guide
gcucagaagaguacugugac

SEQ ID NO: 16208 - RNA, 20 nt, Artificial Sequence
  RPE65 RNA guide
gcuccuucuagcucucaaau

SEQ ID NO: 16209 - RNA, 20 nt, Artificial Sequence
  RPE65 RNA guide
gcucucaaauuucaagacuu

SEQ ID NO: 16210 - RNA, 20 nt, Artificial Sequence
  RPE65 RNA guide
gcucugcugcaguugcuuuu

SEQ ID NO: 16211 - RNA, 20 nt, Artificial Sequence
  RPE65 RNA guide
gcugcaguugcuuuugcuaa

SEQ ID NO: 16212 - RNA, 20 nt, Artificial Sequence
  RPE65 RNA guide
gcuucaucucuccagaacuu

SEQ ID NO: 16213 - RNA, 20 nt, Artificial Sequence
  RPE65 RNA guide
gcuucucuguagauuucaga

SEQ ID NO: 16214 - RNA, 20 nt, Artificial Sequence
  RPE65 RNA guide
gcuuuugcuaagucacagua

SEQ ID NO: 16215 - RNA, 20 nt, Artificial Sequence
  RPE65 RNA guide
ggaaaccaguucauuauuuu

SEQ ID NO: 16216 - RNA, 20 nt, Artificial Sequence
  RPE65 RNA guide
ggaaucaguggaucugcacu

SEQ ID NO: 16217 - RNA, 20 nt, Artificial Sequence
  RPE65 RNA guide
ggaauuguccuccugccuca

SEQ ID NO: 16218 - RNA, 20 nt, Artificial Sequence
  RPE65 RNA guide
ggacaauuccugagagagau

SEQ ID NO: 16219 - RNA, 20 nt, Artificial Sequence
  RPE65 RNA guide
ggagagaugaagcaucaaaa

SEQ ID NO: 16220 - RNA, 20 nt, Artificial Sequence
  RPE65 RNA guide
ggaggacaauuccugagaga

SEQ ID NO: 16221 - RNA, 20 nt, Artificial Sequence
  RPE65 RNA guide
ggaucugcacuauucaccga

SEQ ID NO: 16222 - RNA, 20 nt, Artificial Sequence
  RPE65 RNA guide
ggcaggaggacaauuccuga

SEQ ID NO: 16223 - RNA, 20 nt, Artificial Sequence
  RPE65 RNA guide
ggcucugcugcaguugcuuu

SEQ ID NO: 16224 - RNA, 20 nt, Artificial Sequence
  RPE65 RNA guide
gggaaaccaguucauuauuu

SEQ ID NO: 16225 - RNA, 20 nt, Artificial Sequence
  RPE65 RNA guide
ggugaauagugcagauccac

SEQ ID NO: 16226 - RNA, 20 nt, Artificial Sequence
  RPE65 RNA guide
gguuaaaucugaaaucuaca

SEQ ID NO: 16227 - RNA, 20 nt, Artificial Sequence
  RPE65 RNA guide
gguucuuauccuggcucugc

SEQ ID NO: 16228 - RNA, 20 nt, Artificial Sequence
  RPE65 RNA guide
gguuucccuacaagaguacu

SEQ ID NO: 16229 - RNA, 20 nt, Artificial Sequence
  RPE65 RNA guide
gguuuuuaaauucuaaaucu

SEQ ID NO: 16230 - RNA, 20 nt, Artificial Sequence
  RPE65 RNA guide
guaaauacaagaacggcaga

SEQ ID NO: 16231 - RNA, 20 nt, Artificial Sequence
  RPE65 RNA guide
guaaccugcuucucuguaga

SEQ ID NO: 16232 - RNA, 20 nt, Artificial Sequence
  RPE65 RNA guide
guacucuucugagcuuuagu

SEQ ID NO: 16233 - RNA, 20 nt, Artificial Sequence
  RPE65 RNA guide
guacucuuguagggaaacca

SEQ ID NO: 16234 - RNA, 20 nt, Artificial Sequence
  RPE65 RNA guide
guacugugacuuagcaaaag

SEQ ID NO: 16235 - RNA, 20 nt, Artificial Sequence
  RPE65 RNA guide
guacuuuuugaugcuucauc

SEQ ID NO: 16236 - RNA, 20 nt, Artificial Sequence
  RPE65 RNA guide
guagaaauaaagagaugacu

SEQ ID NO: 16237 - RNA, 20 nt, Artificial Sequence
  RPE65 RNA guide
guagggaaaccaguucauua

SEQ ID NO: 16238 - RNA, 20 nt, Artificial Sequence
  RPE65 RNA guide
guauaaacaugaggcaggag

SEQ ID NO: 16239 - RNA, 20 nt, Artificial Sequence
  RPE65 RNA guide
guaucauaggaaucagugga

SEQ ID NO: 16240 - RNA, 20 nt, Artificial Sequence
  RPE65 RNA guide
gucacaguacucuucugagc

SEQ ID NO: 16241 - RNA, 20 nt, Artificial Sequence
  RPE65 RNA guide
guccuccugccucauguuua

SEQ ID NO: 16242 - RNA, 20 nt, Artificial Sequence
  RPE65 RNA guide
gucuugaaauuugagagcua

SEQ ID NO: 16243 - RNA, 20 nt, Artificial Sequence
  RPE65 RNA guide
gucuuuaaaauauacuuccu

SEQ ID NO: 16244 - RNA, 20 nt, Artificial Sequence
  RPE65 RNA guide
gugaauagugcagauccacu

SEQ ID NO: 16245 - RNA, 20 nt, Artificial Sequence
  RPE65 RNA guide
gugacuuagcaaaagcaacu

SEQ ID NO: 16246 - RNA, 20 nt, Artificial Sequence
  RPE65 RNA guide
gugcagauccacugauuccu

SEQ ID NO: 16247 - RNA, 20 nt, Artificial Sequence
  RPE65 RNA guide
guggaucugcacuauucacc

SEQ ID NO: 16248 - RNA, 20 nt, Artificial Sequence
  RPE65 RNA guide
guucuggagagaugaagcau

SEQ ID NO: 16249 - RNA, 20 nt, Artificial Sequence
  RPE65 RNA guide
guucuuauccuggcucugcu

SEQ ID NO: 16250 - RNA, 20 nt, Artificial Sequence
  RPE65 RNA guide
guugcuuuugcuaagucaca

SEQ ID NO: 16251 - RNA, 20 nt, Artificial Sequence
  RPE65 RNA guide
guuucaucucucucaggaau

SEQ ID NO: 16252 - RNA, 20 nt, Artificial Sequence
  RPE65 RNA guide
guuucccuacaagaguacuu

SEQ ID NO: 16253 - RNA, 20 nt, Artificial Sequence
  RPE65 RNA guide
uaaaaaccugguucuuaucc

SEQ ID NO: 16254 - RNA, 20 nt, Artificial Sequence
  RPE65 RNA guide
uaaacaugaggcaggaggac

SEQ ID NO: 16255 - RNA, 20 nt, Artificial Sequence
  RPE65 RNA guide
uaaagcucagaagaguacug

SEQ ID NO: 16256 - RNA, 20 nt, Artificial Sequence
  RPE65 RNA guide
uaaagcuccuucuagcucuc

SEQ ID NO: 16257 - RNA, 20 nt, Artificial Sequence
  RPE65 RNA guide
uaaaguaucauaggaaucag

SEQ ID NO: 16258 - RNA, 20 nt, Artificial Sequence
  RPE65 RNA guide
uaaauacaagaacggcagau

SEQ ID NO: 16259 - RNA, 20 nt, Artificial Sequence
  RPE65 RNA guide
uaaaucugaaaucuacagag

SEQ ID NO: 16260 - RNA, 20 nt, Artificial Sequence
  RPE65 RNA guide
uaaaucugccguucuuguau

SEQ ID NO: 16261 - RNA, 20 nt, Artificial Sequence
  RPE65 RNA guide
uaaauucuaaaucugccguu

SEQ ID NO: 16262 - RNA, 20 nt, Artificial Sequence
  RPE65 RNA guide
uaaccagaauguuucaucuc

SEQ ID NO: 16263 - RNA, 20 nt, Artificial Sequence
  RPE65 RNA guide
uaaccugcuucucuguagau

SEQ ID NO: 16264 - RNA, 20 nt, Artificial Sequence
  RPE65 RNA guide
uaagucacaguacucuucug

SEQ ID NO: 16265 - RNA, 20 nt, Artificial Sequence
  RPE65 RNA guide
uaaugaacugguuucccuac

SEQ ID NO: 16266 - RNA, 20 nt, Artificial Sequence
  RPE65 RNA guide
uaauuugaaguucuggagag

SEQ ID NO: 16267 - RNA, 20 nt, Artificial Sequence
  RPE65 RNA guide
uacaagaacggcagauuuag

SEQ ID NO: 16268 - RNA, 20 nt, Artificial Sequence
  RPE65 RNA guide
uacaagaguacuuuuugaug

SEQ ID NO: 16269 - RNA, 20 nt, Artificial Sequence
  RPE65 RNA guide
uacuaacaauagacagucau

SEQ ID NO: 16270 - RNA, 20 nt, Artificial Sequence
  RPE65 RNA guide
uacucuucugagcuuuaguu

SEQ ID NO: 16271 - RNA, 20 nt, Artificial Sequence
  RPE65 RNA guide
uacucuuguagggaaaccag

SEQ ID NO: 16272 - RNA, 20 nt, Artificial Sequence
  RPE65 RNA guide
uacugugacuuagcaaaagc

SEQ ID NO: 16273 - RNA, 20 nt, Artificial Sequence
  RPE65 RNA guide
uacuuccucggugaauagug

SEQ ID NO: 16274 - RNA, 20 nt, Artificial Sequence
  RPE65 RNA guide
uacuuuuugaugcuucaucu

SEQ ID NO: 16275 - RNA, 20 nt, Artificial Sequence
  RPE65 RNA guide
uagaaggagcuuuaaaaaua

SEQ ID NO: 16276 - RNA, 20 nt, Artificial Sequence
  RPE65 RNA guide
uagcaaaagcaacugcagca

SEQ ID NO: 16277 - RNA, 20 nt, Artificial Sequence
  RPE65 RNA guide
uagccuauuuuuaaagcucc

SEQ ID NO: 16278 - RNA, 20 nt, Artificial Sequence
  RPE65 RNA guide
uaggaaucaguggaucugca

SEQ ID NO: 16279 - RNA, 20 nt, Artificial Sequence
  RPE65 RNA guide
uagggaaaccaguucauuau

SEQ ID NO: 16280 - RNA, 20 nt, Artificial Sequence
  RPE65 RNA guide
uagugcagauccacugauuc

SEQ ID NO: 16281 - RNA, 20 nt, Artificial Sequence
  RPE65 RNA guide
uauaaacaugaggcaggagg

SEQ ID NO: 16282 - RNA, 20 nt, Artificial Sequence
  RPE65 RNA guide
uauacuuccucggugaauag

SEQ ID NO: 16283 - RNA, 20 nt, Artificial Sequence
  RPE65 RNA guide
uaucauaggaaucaguggau

SEQ ID NO: 16284 - RNA, 20 nt, Artificial Sequence
  RPE65 RNA guide
uauccuggcucugcugcagu

SEQ ID NO: 16285 - RNA, 20 nt, Artificial Sequence
  RPE65 RNA guide
uauguauaaacaugaggcag

SEQ ID NO: 16286 - RNA, 20 nt, Artificial Sequence
  RPE65 RNA guide
uauuuuuaaagcuccuucua

SEQ ID NO: 16287 - RNA, 20 nt, Artificial Sequence
  RPE65 RNA guide
ucaaaaaguacucuuguagg

SEQ ID NO: 16288 - RNA, 20 nt, Artificial Sequence
  RPE65 RNA guide
ucacaguacucuucugagcu

SEQ ID NO: 16289 - RNA, 20 nt, Artificial Sequence
  RPE65 RNA guide
ucaccgaggaaguauauuuu

SEQ ID NO: 16290 - RNA, 20 nt, Artificial Sequence
  RPE65 RNA guide
ucagaagaguacugugacuu

SEQ ID NO: 16291 - RNA, 20 nt, Artificial Sequence
  RPE65 RNA guide
ucaggaauuguccuccugcc

SEQ ID NO: 16292 - RNA, 20 nt, Artificial Sequence
  RPE65 RNA guide
ucaguggaucugcacuauuc

SEQ ID NO: 16293 - RNA, 20 nt, Artificial Sequence
  RPE65 RNA guide
ucauaggaaucaguggaucu

SEQ ID NO: 16294 - RNA, 20 nt, Artificial Sequence
  RPE65 RNA guide
ucaucucuccagaacuucaa

SEQ ID NO: 16295 - RNA, 20 nt, Artificial Sequence
  RPE65 RNA guide
ucaucucucucaggaauugu

SEQ ID NO: 16296 - RNA, 20 nt, Artificial Sequence
  RPE65 RNA guide
uccacugauuccuaugauac

SEQ ID NO: 16297 - RNA, 20 nt, Artificial Sequence
  RPE65 RNA guide
ucccuacaagaguacuuuuu

SEQ ID NO: 16298 - RNA, 20 nt, Artificial Sequence
  RPE65 RNA guide
uccuccugccucauguuuau

SEQ ID NO: 16299 - RNA, 20 nt, Artificial Sequence
  RPE65 RNA guide
uccucggugaauagugcaga

SEQ ID NO: 16300 - RNA, 20 nt, Artificial Sequence
  RPE65 RNA guide
uccugagagagaugaaacau

SEQ ID NO: 16301 - RNA, 20 nt, Artificial Sequence
  RPE65 RNA guide
uccugccucauguuuauaca

SEQ ID NO: 16302 - RNA, 20 nt, Artificial Sequence
  RPE65 RNA guide
uccuggcucugcugcaguug

SEQ ID NO: 16303 - RNA, 20 nt, Artificial Sequence
  RPE65 RNA guide
uccuucuagcucucaaauuu

SEQ ID NO: 16304 - RNA, 20 nt, Artificial Sequence
  RPE65 RNA guide
ucggugaauagugcagaucc

SEQ ID NO: 16305 - RNA, 20 nt, Artificial Sequence
  RPE65 RNA guide
ucuaaaucugccguucuugu

SEQ ID NO: 16306 - RNA, 20 nt, Artificial Sequence
  RPE65 RNA guide
ucuagcucucaaauuucaag

SEQ ID NO: 16307 - RNA, 20 nt, Artificial Sequence
  RPE65 RNA guide
ucucaggaauuguccuccug

SEQ ID NO: 16308 - RNA, 20 nt, Artificial Sequence
  RPE65 RNA guide
ucucucaggaauuguccucc

SEQ ID NO: 16309 - RNA, 20 nt, Artificial Sequence
  RPE65 RNA guide
ucucucucaggaauuguccu

SEQ ID NO: 16310 - RNA, 20 nt, Artificial Sequence
  RPE65 RNA guide
ucucuguagauuucagauuu

SEQ ID NO: 16311 - RNA, 20 nt, Artificial Sequence
  RPE65 RNA guide
ucugaaaucuacagagaagc

SEQ ID NO: 16312 - RNA, 20 nt, Artificial Sequence
  RPE65 RNA guide
ucugcacuauucaccgagga

SEQ ID NO: 16313 - RNA, 20 nt, Artificial Sequence
  RPE65 RNA guide
ucugccguucuuguauuuac

SEQ ID NO: 16314 - RNA, 20 nt, Artificial Sequence
  RPE65 RNA guide
ucugcugcaguugcuuuugc

SEQ ID NO: 16315 - RNA, 20 nt, Artificial Sequence
  RPE65 RNA guide
ucuggagagaugaagcauca

SEQ ID NO: 16316 - RNA, 20 nt, Artificial Sequence
  RPE65 RNA guide
ucugguuaaaucugaaaucu

SEQ ID NO: 16317 - RNA, 20 nt, Artificial Sequence
  RPE65 RNA guide
ucuguagauuucagauuuaa

SEQ ID NO: 16318 - RNA, 20 nt, Artificial Sequence
  RPE65 RNA guide
ucuuauccuggcucugcugc

SEQ ID NO: 16319 - RNA, 20 nt, Artificial Sequence
  RPE65 RNA guide
ucuucugaaaaauaucacua

SEQ ID NO: 16320 - RNA, 20 nt, Artificial Sequence
  RPE65 RNA guide
ucuucugagcuuuaguuuca

SEQ ID NO: 16321 - RNA, 20 nt, Artificial Sequence
  RPE65 RNA guide
ucuugaaauuugagagcuag

SEQ ID NO: 16322 - RNA, 20 nt, Artificial Sequence
  RPE65 RNA guide
ucuuguagggaaaccaguuc

SEQ ID NO: 16323 - RNA, 20 nt, Artificial Sequence
  RPE65 RNA guide
ucuuuaaaauauacuuccuc

SEQ ID NO: 16324 - RNA, 20 nt, Artificial Sequence
  RPE65 RNA guide
ugaaacuaaagcucagaaga

SEQ ID NO: 16325 - RNA, 20 nt, Artificial Sequence
  RPE65 RNA guide
ugaaaucuacagagaagcag

SEQ ID NO: 16326 - RNA, 20 nt, Artificial Sequence
  RPE65 RNA guide
ugaaauuugagagcuagaag

SEQ ID NO: 16327 - RNA, 20 nt, Artificial Sequence
  RPE65 RNA guide
ugaacugguuucccuacaag

SEQ ID NO: 16328 - RNA, 20 nt, Artificial Sequence
  RPE65 RNA guide
ugaagcaucaaaaaguacuc

SEQ ID NO: 16329 - RNA, 20 nt, Artificial Sequence
  RPE65 RNA guide
ugaaguucuggagagaugaa

SEQ ID NO: 16330 - RNA, 20 nt, Artificial Sequence
  RPE65 RNA guide
ugaauagugcagauccacug

SEQ ID NO: 16331 - RNA, 20 nt, Artificial Sequence
  RPE65 RNA guide
ugacuuagcaaaagcaacug

SEQ ID NO: 16332 - RNA, 20 nt, Artificial Sequence
  RPE65 RNA guide
ugagagagaugaaacauucu

SEQ ID NO: 16333 - RNA, 20 nt, Artificial Sequence
  RPE65 RNA guide
ugagagcuagaaggagcuuu

SEQ ID NO: 16334 - RNA, 20 nt, Artificial Sequence
  RPE65 RNA guide
ugaggcaggaggacaauucc

SEQ ID NO: 16335 - RNA, 20 nt, Artificial Sequence
  RPE65 RNA guide
ugaugcuucaucucuccaga

SEQ ID NO: 16336 - RNA, 20 nt, Artificial Sequence
  RPE65 RNA guide
ugcacuauucaccgaggaag

SEQ ID NO: 16337 - RNA, 20 nt, Artificial Sequence
  RPE65 RNA guide
ugcagauccacugauuccua

SEQ ID NO: 16338 - RNA, 20 nt, Artificial Sequence
  RPE65 RNA guide
ugcagcagagccaggauaag

SEQ ID NO: 16339 - RNA, 20 nt, Artificial Sequence
  RPE65 RNA guide
ugcaguugcuuuugcuaagu

SEQ ID NO: 16340 - RNA, 20 nt, Artificial Sequence
  RPE65 RNA guide
ugccucauguuuauacauaa

SEQ ID NO: 16341 - RNA, 20 nt, Artificial Sequence
  RPE65 RNA guide
ugcuaagucacaguacucuu

SEQ ID NO: 16342 - RNA, 20 nt, Artificial Sequence
  RPE65 RNA guide
ugcugcaguugcuuuugcua

SEQ ID NO: 16343 - RNA, 20 nt, Artificial Sequence
  RPE65 RNA guide
ugcuucaucucuccagaacu

SEQ ID NO: 16344 - RNA, 20 nt, Artificial Sequence
  RPE65 RNA guide
ugcuucucuguagauuucag

SEQ ID NO: 16345 - RNA, 20 nt, Artificial Sequence
  RPE65 RNA guide
ugcuuuugcuaagucacagu

SEQ ID NO: 16346 - RNA, 20 nt, Artificial Sequence
  RPE65 RNA guide
uggagagaugaagcaucaaa

SEQ ID NO: 16347 - RNA, 20 nt, Artificial Sequence
  RPE65 RNA guide
uggaucugcacuauucaccg

SEQ ID NO: 16348 - RNA, 20 nt, Artificial Sequence
  RPE65 RNA guide
uggcucugcugcaguugcuu

SEQ ID NO: 16349 - RNA, 20 nt, Artificial Sequence
  RPE65 RNA guide
ugguuaaaucugaaaucuac

SEQ ID NO: 16350 - RNA, 20 nt, Artificial Sequence
  RPE65 RNA guide
ugguucuuauccuggcucug

SEQ ID NO: 16351 - RNA, 20 nt, Artificial Sequence
  RPE65 RNA guide
ugguuucccuacaagaguac

SEQ ID NO: 16352 - RNA, 20 nt, Artificial Sequence
  RPE65 RNA guide
uguaaauacaagaacggcag

SEQ ID NO: 16353 - RNA, 20 nt, Artificial Sequence
  RPE65 RNA guide
uguagggaaaccaguucauu

SEQ ID NO: 16354 - RNA, 20 nt, Artificial Sequence
  RPE65 RNA guide
uguauaaacaugaggcagga

SEQ ID NO: 16355 - RNA, 20 nt, Artificial Sequence
  RPE65 RNA guide
uguccuccugccucauguuu

SEQ ID NO: 16356 - RNA, 20 nt, Artificial Sequence
  RPE65 RNA guide
ugucuuuaaaauauacuucc

SEQ ID NO: 16357 - RNA, 20 nt, Artificial Sequence
  RPE65 RNA guide
ugugacuuagcaaaagcaac

SEQ ID NO: 16358 - RNA, 20 nt, Artificial Sequence
  RPE65 RNA guide
uguuucaucucucucaggaa

SEQ ID NO: 16359 - RNA, 20 nt, Artificial Sequence
  RPE65 RNA guide
uuaaaaaccugguucuuauc

SEQ ID NO: 16360 - RNA, 20 nt, Artificial Sequence
  RPE65 RNA guide
uuaaagcuccuucuagcucu

SEQ ID NO: 16361 - RNA, 20 nt, Artificial Sequence
  RPE65 RNA guide
uuaaccagaauguuucaucu

SEQ ID NO: 16362 - RNA, 20 nt, Artificial Sequence
  RPE65 RNA guide
uuacuaacaauagacaguca

SEQ ID NO: 16363 - RNA, 20 nt, Artificial Sequence
  RPE65 RNA guide
uuagcaaaagcaacugcagc

SEQ ID NO: 16364 - RNA, 20 nt, Artificial Sequence
  RPE65 RNA guide
uuagccuauuuuuaaagcuc

SEQ ID NO: 16365 - RNA, 20 nt, Artificial Sequence
  RPE65 RNA guide
uuauccuggcucugcugcag

SEQ ID NO: 16366 - RNA, 20 nt, Artificial Sequence
  RPE65 RNA guide
uuauguauaaacaugaggca

SEQ ID NO: 16367 - RNA, 20 nt, Artificial Sequence
  RPE65 RNA guide
uucaucucuccagaacuuca

SEQ ID NO: 16368 - RNA, 20 nt, Artificial Sequence
  RPE65 RNA guide
uucaucucucucaggaauug

SEQ ID NO: 16369 - RNA, 20 nt, Artificial Sequence
  RPE65 RNA guide
uucccuacaagaguacuuuu

SEQ ID NO: 16370 - RNA, 20 nt, Artificial Sequence
  RPE65 RNA guide
uuccucggugaauagugcag

SEQ ID NO: 16371 - RNA, 20 nt, Artificial Sequence
  RPE65 RNA guide
uuccugagagagaugaaaca

SEQ ID NO: 16372 - RNA, 20 nt, Artificial Sequence
  RPE65 RNA guide
uucuaaaucugccguucuug

SEQ ID NO: 16373 - RNA, 20 nt, Artificial Sequence
  RPE65 RNA guide
uucuagcucucaaauuucaa

SEQ ID NO: 16374 - RNA, 20 nt, Artificial Sequence
  RPE65 RNA guide
uucuggagagaugaagcauc

SEQ ID NO: 16375 - RNA, 20 nt, Artificial Sequence
  RPE65 RNA guide
uucuuauccuggcucugcug

SEQ ID NO: 16376 - RNA, 20 nt, Artificial Sequence
  RPE65 RNA guide
uugaaauuugagagcuagaa

SEQ ID NO: 16377 - RNA, 20 nt, Artificial Sequence
  RPE65 RNA guide
uugaaguucuggagagauga

SEQ ID NO: 16378 - RNA, 20 nt, Artificial Sequence
  RPE65 RNA guide
uugagagcuagaaggagcuu

SEQ ID NO: 16379 - RNA, 20 nt, Artificial Sequence
  RPE65 RNA guide
uugaugcuucaucucuccag

SEQ ID NO: 16380 - RNA, 20 nt, Artificial Sequence
  RPE65 RNA guide
uugcuaagucacaguacucu

SEQ ID NO: 16381 - RNA, 20 nt, Artificial Sequence
  RPE65 RNA guide
uugcuuuugcuaagucacag

SEQ ID NO: 16382 - RNA, 20 nt, Artificial Sequence
  RPE65 RNA guide
uuguaaauacaagaacggca

SEQ ID NO: 16383 - RNA, 20 nt, Artificial Sequence
  RPE65 RNA guide
uuguagggaaaccaguucau

SEQ ID NO: 16384 - RNA, 20 nt, Artificial Sequence
  RPE65 RNA guide
uuguccuccugccucauguu

SEQ ID NO: 16385 - RNA, 20 nt, Artificial Sequence
  RPE65 RNA guide
uuuaaaaaccugguucuuau

SEQ ID NO: 16386 - RNA, 20 nt, Artificial Sequence
  RPE65 RNA guide
uuuaaagcuccuucuagcuc

SEQ ID NO: 16387 - RNA, 20 nt, Artificial Sequence
  RPE65 RNA guide
uuuaaccagaauguuucauc

SEQ ID NO: 16388 - RNA, 20 nt, Artificial Sequence
  RPE65 RNA guide
uuuauguauaaacaugaggc

SEQ ID NO: 16389 - RNA, 20 nt, Artificial Sequence
  RPE65 RNA guide
uuucaucucucucaggaauu

SEQ ID NO: 16390 - RNA, 20 nt, Artificial Sequence
  RPE65 RNA guide
uuucccuacaagaguacuuu

SEQ ID NO: 16391 - RNA, 20 nt, Artificial Sequence
  RPE65 RNA guide
uuugaaguucuggagagaug

SEQ ID NO: 16392 - RNA, 20 nt, Artificial Sequence
  RPE65 RNA guide
uuugagagcuagaaggagcu

SEQ ID NO: 16393 - RNA, 20 nt, Artificial Sequence
  RPE65 RNA guide
uuugaugcuucaucucucca

SEQ ID NO: 16394 - RNA, 20 nt, Artificial Sequence
  RPE65 RNA guide
uuugcuaagucacaguacuc

SEQ ID NO: 16395 - RNA, 20 nt, Artificial Sequence
  RPE65 RNA guide
uuuguaaauacaagaacggc

SEQ ID NO: 16396 - RNA, 20 nt, Artificial Sequence
  RPE65 RNA guide
uuuuaaagcuccuucuagcu

SEQ ID NO: 16397 - RNA, 20 nt, Artificial Sequence
  RPE65 RNA guide
uuuugaugcuucaucucucc

SEQ ID NO: 16398 - RNA, 20 nt, Artificial Sequence
  RPE65 RNA guide
uuuugcuaagucacaguacu

SEQ ID NO: 16399 - RNA, 20 nt, Artificial Sequence
  RPE65 RNA guide
uuuuguaaauacaagaacgg

SEQ ID NO: 16400 - RNA, 20 nt, Artificial Sequence
  RPE65 RNA guide
uuuuuaaagcuccuucuagc

SEQ ID NO: 16401 - RNA, 20 nt, Artificial Sequence
  RPE65 RNA guide
uuuuugaugcuucaucucuc

SEQ ID NO: 16402 - RNA, 21 nt, Artificial Sequence
  RPE65 RNA guide
aaaaaccugguucuuauccug

SEQ ID NO: 16403 - RNA, 21 nt, Artificial Sequence
  RPE65 RNA guide
aaaaaguacucuuguagggaa

SEQ ID NO: 16404 - RNA, 21 nt, Artificial Sequence
  RPE65 RNA guide
aaaaccugguucuuauccugg

SEQ ID NO: 16405 - RNA, 21 nt, Artificial Sequence
  RPE65 RNA guide
aaaagcaacugcagcagagcc

SEQ ID NO: 16406 - RNA, 21 nt, Artificial Sequence
  RPE65 RNA guide
aaaaguacucuuguagggaaa

SEQ ID NO: 16407 - RNA, 21 nt, Artificial Sequence
  RPE65 RNA guide
aaaauaaugaacugguuuccc

SEQ ID NO: 16408 - RNA, 21 nt, Artificial Sequence
  RPE65 RNA guide
aaaauauacuuccucggugaa

SEQ ID NO: 16409 - RNA, 21 nt, Artificial Sequence
  RPE65 RNA guide
aaacaugaggcaggaggacaa

SEQ ID NO: 16410 - RNA, 21 nt, Artificial Sequence
  RPE65 RNA guide
aaaccaaaauaaugaacuggu

SEQ ID NO: 16411 - RNA, 21 nt, Artificial Sequence
  RPE65 RNA guide
aaaccugguucuuauccuggc

SEQ ID NO: 16412 - RNA, 21 nt, Artificial Sequence
  RPE65 RNA guide
aaacuaaagcucagaagagua

SEQ ID NO: 16413 - RNA, 21 nt, Artificial Sequence
  RPE65 RNA guide
aaagagaugacugucuauugu

SEQ ID NO: 16414 - RNA, 21 nt, Artificial Sequence
  RPE65 RNA guide
aaagcaacugcagcagagcca

SEQ ID NO: 16415 - RNA, 21 nt, Artificial Sequence
  RPE65 RNA guide
aaagcucagaagaguacugug

SEQ ID NO: 16416 - RNA, 21 nt, Artificial Sequence
  RPE65 RNA guide
aaagcuccuucuagcucucaa

SEQ ID NO: 16417 - RNA, 21 nt, Artificial Sequence
  RPE65 RNA guide
aaaguacucuuguagggaaac

SEQ ID NO: 16418 - RNA, 21 nt, Artificial Sequence
  RPE65 RNA guide
aaaguaucauaggaaucagug

SEQ ID NO: 16419 - RNA, 21 nt, Artificial Sequence
  RPE65 RNA guide
aaagucuugaaauuugagagc

SEQ ID NO: 16420 - RNA, 21 nt, Artificial Sequence
  RPE65 RNA guide
aaauaaugaacugguuucccu

SEQ ID NO: 16421 - RNA, 21 nt, Artificial Sequence
  RPE65 RNA guide
aaauacaagaacggcagauuu

SEQ ID NO: 16422 - RNA, 21 nt, Artificial Sequence
  RPE65 RNA guide
aaauauacuuccucggugaau

SEQ ID NO: 16423 - RNA, 21 nt, Artificial Sequence
  RPE65 RNA guide
aaaucugaaaucuacagagaa

SEQ ID NO: 16424 - RNA, 21 nt, Artificial Sequence
  RPE65 RNA guide
aaaucugccguucuuguauuu

SEQ ID NO: 16425 - RNA, 21 nt, Artificial Sequence
  RPE65 RNA guide
aaaugaaacuaaagcucagaa

SEQ ID NO: 16426 - RNA, 21 nt, Artificial Sequence
  RPE65 RNA guide
aaauucuaaaucugccguucu

SEQ ID NO: 16427 - RNA, 21 nt, Artificial Sequence
  RPE65 RNA guide
aaauuugagagcuagaaggag

SEQ ID NO: 16428 - RNA, 21 nt, Artificial Sequence
  RPE65 RNA guide
aacaugaggcaggaggacaau

SEQ ID NO: 16429 - RNA, 21 nt, Artificial Sequence
  RPE65 RNA guide
aaccaaaauaaugaacugguu

SEQ ID NO: 16430 - RNA, 21 nt, Artificial Sequence
  RPE65 RNA guide
aaccagaauguuucaucucuc

SEQ ID NO: 16431 - RNA, 21 nt, Artificial Sequence
  RPE65 RNA guide
aaccucuagugauauuuuuca

SEQ ID NO: 16432 - RNA, 21 nt, Artificial Sequence
  RPE65 RNA guide
aaccugcuucucuguagauuu

SEQ ID NO: 16433 - RNA, 21 nt, Artificial Sequence
  RPE65 RNA guide
aaccugguucuuauccuggcu

SEQ ID NO: 16434 - RNA, 21 nt, Artificial Sequence
  RPE65 RNA guide
aacuaaagcucagaagaguac

SEQ ID NO: 16435 - RNA, 21 nt, Artificial Sequence
  RPE65 RNA guide
aacugcagcagagccaggaua

SEQ ID NO: 16436 - RNA, 21 nt, Artificial Sequence
  RPE65 RNA guide
aacugguuucccuacaagagu

SEQ ID NO: 16437 - RNA, 21 nt, Artificial Sequence
  RPE65 RNA guide
aagacuuuauguauaaacaug

SEQ ID NO: 16438 - RNA, 21 nt, Artificial Sequence
  RPE65 RNA guide
aagagaugacugucuauuguu

SEQ ID NO: 16439 - RNA, 21 nt, Artificial Sequence
  RPE65 RNA guide
aagaguacugugacuuagcaa

SEQ ID NO: 16440 - RNA, 21 nt, Artificial Sequence
  RPE65 RNA guide
aagaguacuuuuugaugcuuc

SEQ ID NO: 16441 - RNA, 21 nt, Artificial Sequence
  RPE65 RNA guide
aagcaacugcagcagagccag

SEQ ID NO: 16442 - RNA, 21 nt, Artificial Sequence
  RPE65 RNA guide
aagcaucaaaaaguacucuug

SEQ ID NO: 16443 - RNA, 21 nt, Artificial Sequence
  RPE65 RNA guide
aagcucagaagaguacuguga

SEQ ID NO: 16444 - RNA, 21 nt, Artificial Sequence
  RPE65 RNA guide
aagcuccuucuagcucucaaa

SEQ ID NO: 16445 - RNA, 21 nt, Artificial Sequence
  RPE65 RNA guide
aaguacucuuguagggaaacc

SEQ ID NO: 16446 - RNA, 21 nt, Artificial Sequence
  RPE65 RNA guide
aaguagaaauaaagagaugac

SEQ ID NO: 16447 - RNA, 21 nt, Artificial Sequence
  RPE65 RNA guide
aaguaucauaggaaucagugg

SEQ ID NO: 16448 - RNA, 21 nt, Artificial Sequence
  RPE65 RNA guide
aagucacaguacucuucugag

SEQ ID NO: 16449 - RNA, 21 nt, Artificial Sequence
  RPE65 RNA guide
aagucuugaaauuugagagcu

SEQ ID NO: 16450 - RNA, 21 nt, Artificial Sequence
  RPE65 RNA guide
aaguucuggagagaugaagca

SEQ ID NO: 16451 - RNA, 21 nt, Artificial Sequence
  RPE65 RNA guide
aauaaugaacugguuucccua

SEQ ID NO: 16452 - RNA, 21 nt, Artificial Sequence
  RPE65 RNA guide
aauaauuugaaguucuggaga

SEQ ID NO: 16453 - RNA, 21 nt, Artificial Sequence
  RPE65 RNA guide
aauacaagaacggcagauuua

SEQ ID NO: 16454 - RNA, 21 nt, Artificial Sequence
  RPE65 RNA guide
aauagugcagauccacugauu

SEQ ID NO: 16455 - RNA, 21 nt, Artificial Sequence
  RPE65 RNA guide
aauauacuuccucggugaaua

SEQ ID NO: 16456 - RNA, 21 nt, Artificial Sequence
  RPE65 RNA guide
aaucaguggaucugcacuauu

SEQ ID NO: 16457 - RNA, 21 nt, Artificial Sequence
  RPE65 RNA guide
aaucugaaaucuacagagaag

SEQ ID NO: 16458 - RNA, 21 nt, Artificial Sequence
  RPE65 RNA guide
aaucugccguucuuguauuua

SEQ ID NO: 16459 - RNA, 21 nt, Artificial Sequence
  RPE65 RNA guide
aaugaaacuaaagcucagaag

SEQ ID NO: 16460 - RNA, 21 nt, Artificial Sequence
  RPE65 RNA guide
aaugaacugguuucccuacaa

SEQ ID NO: 16461 - RNA, 21 nt, Artificial Sequence
  RPE65 RNA guide
aauguuucaucucucucagga

SEQ ID NO: 16462 - RNA, 21 nt, Artificial Sequence
  RPE65 RNA guide
aauuccugagagagaugaaac

SEQ ID NO: 16463 - RNA, 21 nt, Artificial Sequence
  RPE65 RNA guide
aauucuaaaucugccguucuu

SEQ ID NO: 16464 - RNA, 21 nt, Artificial Sequence
  RPE65 RNA guide
aauuguccuccugccucaugu

SEQ ID NO: 16465 - RNA, 21 nt, Artificial Sequence
  RPE65 RNA guide
aauuugaaguucuggagagau

SEQ ID NO: 16466 - RNA, 21 nt, Artificial Sequence
  RPE65 RNA guide
aauuugagagcuagaaggagc

SEQ ID NO: 16467 - RNA, 21 nt, Artificial Sequence
  RPE65 RNA guide
aauuuuguaaauacaagaacg

SEQ ID NO: 16468 - RNA, 21 nt, Artificial Sequence
  RPE65 RNA guide
acaaaugaaacuaaagcucag

SEQ ID NO: 16469 - RNA, 21 nt, Artificial Sequence
  RPE65 RNA guide
acaagaacggcagauuuagaa

SEQ ID NO: 16470 - RNA, 21 nt, Artificial Sequence
  RPE65 RNA guide
acaagaguacuuuuugaugcu

SEQ ID NO: 16471 - RNA, 21 nt, Artificial Sequence
  RPE65 RNA guide
acaauuccugagagagaugaa

SEQ ID NO: 16472 - RNA, 21 nt, Artificial Sequence
  RPE65 RNA guide
acaauuuuguaaauacaagaa

SEQ ID NO: 16473 - RNA, 21 nt, Artificial Sequence
  RPE65 RNA guide
acaguacucuucugagcuuua

SEQ ID NO: 16474 - RNA, 21 nt, Artificial Sequence
  RPE65 RNA guide
acauaaagucuugaaauuuga

SEQ ID NO: 16475 - RNA, 21 nt, Artificial Sequence
  RPE65 RNA guide
acaugaggcaggaggacaauu

SEQ ID NO: 16476 - RNA, 21 nt, Artificial Sequence
  RPE65 RNA guide
accaaaauaaugaacugguuu

SEQ ID NO: 16477 - RNA, 21 nt, Artificial Sequence
  RPE65 RNA guide
accagaauguuucaucucucu

SEQ ID NO: 16478 - RNA, 21 nt, Artificial Sequence
  RPE65 RNA guide
accgaggaaguauauuuuaaa

SEQ ID NO: 16479 - RNA, 21 nt, Artificial Sequence
  RPE65 RNA guide
accucuagugauauuuuucag

SEQ ID NO: 16480 - RNA, 21 nt, Artificial Sequence
  RPE65 RNA guide
accugcuucucuguagauuuc

SEQ ID NO: 16481 - RNA, 21 nt, Artificial Sequence
  RPE65 RNA guide
accugguucuuauccuggcuc

SEQ ID NO: 16482 - RNA, 21 nt, Artificial Sequence
  RPE65 RNA guide
acggcagauuuagaauuuaaa

SEQ ID NO: 16483 - RNA, 21 nt, Artificial Sequence
  RPE65 RNA guide
acuaaagcucagaagaguacu

SEQ ID NO: 16484 - RNA, 21 nt, Artificial Sequence
  RPE65 RNA guide
acuaacaauagacagucaucu

SEQ ID NO: 16485 - RNA, 21 nt, Artificial Sequence
  RPE65 RNA guide
acuauucaccgaggaaguaua

SEQ ID NO: 16486 - RNA, 21 nt, Artificial Sequence
  RPE65 RNA guide
acucuucugagcuuuaguuuc

SEQ ID NO: 16487 - RNA, 21 nt, Artificial Sequence
  RPE65 RNA guide
acucuuguagggaaaccaguu

SEQ ID NO: 16488 - RNA, 21 nt, Artificial Sequence
  RPE65 RNA guide
acugcagcagagccaggauaa

SEQ ID NO: 16489 - RNA, 21 nt, Artificial Sequence
  RPE65 RNA guide
acugguuucccuacaagagua

SEQ ID NO: 16490 - RNA, 21 nt, Artificial Sequence
  RPE65 RNA guide
acugugacuuagcaaaagcaa

SEQ ID NO: 16491 - RNA, 21 nt, Artificial Sequence
  RPE65 RNA guide
acuuagcaaaagcaacugcag

SEQ ID NO: 16492 - RNA, 21 nt, Artificial Sequence
  RPE65 RNA guide
acuuccucggugaauagugca

SEQ ID NO: 16493 - RNA, 21 nt, Artificial Sequence
  RPE65 RNA guide
acuuuauguauaaacaugagg

SEQ ID NO: 16494 - RNA, 21 nt, Artificial Sequence
  RPE65 RNA guide
acuuuuugaugcuucaucucu

SEQ ID NO: 16495 - RNA, 21 nt, Artificial Sequence
  RPE65 RNA guide
agaagaguacugugacuuagc

SEQ ID NO: 16496 - RNA, 21 nt, Artificial Sequence
  RPE65 RNA guide
agaaggagcuuuaaaaauagg

SEQ ID NO: 16497 - RNA, 21 nt, Artificial Sequence
  RPE65 RNA guide
agaauguuucaucucucucag

SEQ ID NO: 16498 - RNA, 21 nt, Artificial Sequence
  RPE65 RNA guide
agacagucaucucuuuauuuc

SEQ ID NO: 16499 - RNA, 21 nt, Artificial Sequence
  RPE65 RNA guide
agacuuuauguauaaacauga

SEQ ID NO: 16500 - RNA, 21 nt, Artificial Sequence
  RPE65 RNA guide
agagagaugaaacauucuggu

SEQ ID NO: 16501 - RNA, 21 nt, Artificial Sequence
  RPE65 RNA guide
agagaugaaacauucugguua

SEQ ID NO: 16502 - RNA, 21 nt, Artificial Sequence
  RPE65 RNA guide
agagaugaagcaucaaaaagu

SEQ ID NO: 16503 - RNA, 21 nt, Artificial Sequence
  RPE65 RNA guide
agagaugacugucuauuguua

SEQ ID NO: 16504 - RNA, 21 nt, Artificial Sequence
  RPE65 RNA guide
agagccaggauaagaaccagg

SEQ ID NO: 16505 - RNA, 21 nt, Artificial Sequence
  RPE65 RNA guide
agagcuagaaggagcuuuaaa

SEQ ID NO: 16506 - RNA, 21 nt, Artificial Sequence
  RPE65 RNA guide
agaguacugugacuuagcaaa

SEQ ID NO: 16507 - RNA, 21 nt, Artificial Sequence
  RPE65 RNA guide
agaguacuuuuugaugcuuca

SEQ ID NO: 16508 - RNA, 21 nt, Artificial Sequence
  RPE65 RNA guide
agauccacugauuccuaugau

SEQ ID NO: 16509 - RNA, 21 nt, Artificial Sequence
  RPE65 RNA guide
agaugaaacauucugguuaaa

SEQ ID NO: 16510 - RNA, 21 nt, Artificial Sequence
  RPE65 RNA guide
agaugaagcaucaaaaaguac

SEQ ID NO: 16511 - RNA, 21 nt, Artificial Sequence
  RPE65 RNA guide
agaugacugucuauuguuagu

SEQ ID NO: 16512 - RNA, 21 nt, Artificial Sequence
  RPE65 RNA guide
agauuuaaccagaauguuuca

SEQ ID NO: 16513 - RNA, 21 nt, Artificial Sequence
  RPE65 RNA guide
agcaaaagcaacugcagcaga

SEQ ID NO: 16514 - RNA, 21 nt, Artificial Sequence
  RPE65 RNA guide
agcaacugcagcagagccagg

SEQ ID NO: 16515 - RNA, 21 nt, Artificial Sequence
  RPE65 RNA guide
agcagagccaggauaagaacc

SEQ ID NO: 16516 - RNA, 21 nt, Artificial Sequence
  RPE65 RNA guide
agcaucaaaaaguacucuugu

SEQ ID NO: 16517 - RNA, 21 nt, Artificial Sequence
  RPE65 RNA guide
agccaggauaagaaccagguu

SEQ ID NO: 16518 - RNA, 21 nt, Artificial Sequence
  RPE65 RNA guide
agccuauuuuuaaagcuccuu

SEQ ID NO: 16519 - RNA, 21 nt, Artificial Sequence
  RPE65 RNA guide
agcuagaaggagcuuuaaaaa

SEQ ID NO: 16520 - RNA, 21 nt, Artificial Sequence
  RPE65 RNA guide
agcucagaagaguacugugac

SEQ ID NO: 16521 - RNA, 21 nt, Artificial Sequence
  RPE65 RNA guide
agcuccuucuagcucucaaau

SEQ ID NO: 16522 - RNA, 21 nt, Artificial Sequence
  RPE65 RNA guide
agcucucaaauuucaagacuu

SEQ ID NO: 16523 - RNA, 21 nt, Artificial Sequence
  RPE65 RNA guide
aggaaucaguggaucugcacu

SEQ ID NO: 16524 - RNA, 21 nt, Artificial Sequence
  RPE65 RNA guide
aggaauuguccuccugccuca

SEQ ID NO: 16525 - RNA, 21 nt, Artificial Sequence
  RPE65 RNA guide
aggacaauuccugagagagau

SEQ ID NO: 16526 - RNA, 21 nt, Artificial Sequence
  RPE65 RNA guide
aggaggacaauuccugagaga

SEQ ID NO: 16527 - RNA, 21 nt, Artificial Sequence
  RPE65 RNA guide
aggcaggaggacaauuccuga

SEQ ID NO: 16528 - RNA, 21 nt, Artificial Sequence
  RPE65 RNA guide
agggaaaccaguucauuauuu

SEQ ID NO: 16529 - RNA, 21 nt, Artificial Sequence
  RPE65 RNA guide
agguuuuuaaauucuaaaucu

SEQ ID NO: 16530 - RNA, 21 nt, Artificial Sequence
  RPE65 RNA guide
aguacucuucugagcuuuagu

SEQ ID NO: 16531 - RNA, 21 nt, Artificial Sequence
  RPE65 RNA guide
aguacucuuguagggaaacca

SEQ ID NO: 16532 - RNA, 21 nt, Artificial Sequence
  RPE65 RNA guide
aguacugugacuuagcaaaag

SEQ ID NO: 16533 - RNA, 21 nt, Artificial Sequence
  RPE65 RNA guide
aguacuuuuugaugcuucauc

SEQ ID NO: 16534 - RNA, 21 nt, Artificial Sequence
  RPE65 RNA guide
aguagaaauaaagagaugacu

SEQ ID NO: 16535 - RNA, 21 nt, Artificial Sequence
  RPE65 RNA guide
aguaucauaggaaucagugga

SEQ ID NO: 16536 - RNA, 21 nt, Artificial Sequence
  RPE65 RNA guide
agucacaguacucuucugagc

SEQ ID NO: 16537 - RNA, 21 nt, Artificial Sequence
  RPE65 RNA guide
agucuugaaauuugagagcua

SEQ ID NO: 16538 - RNA, 21 nt, Artificial Sequence
  RPE65 RNA guide
agugcagauccacugauuccu

SEQ ID NO: 16539 - RNA, 21 nt, Artificial Sequence
  RPE65 RNA guide
aguggaucugcacuauucacc

SEQ ID NO: 16540 - RNA, 21 nt, Artificial Sequence
  RPE65 RNA guide
aguucuggagagaugaagcau

SEQ ID NO: 16541 - RNA, 21 nt, Artificial Sequence
  RPE65 RNA guide
aguugcuuuugcuaagucaca

SEQ ID NO: 16542 - RNA, 21 nt, Artificial Sequence
  RPE65 RNA guide
auaaacaugaggcaggaggac

SEQ ID NO: 16543 - RNA, 21 nt, Artificial Sequence
  RPE65 RNA guide
auaaaguaucauaggaaucag

SEQ ID NO: 16544 - RNA, 21 nt, Artificial Sequence
  RPE65 RNA guide
auaaugaacugguuucccuac

SEQ ID NO: 16545 - RNA, 21 nt, Artificial Sequence
  RPE65 RNA guide
auaauuugaaguucuggagag

SEQ ID NO: 16546 - RNA, 21 nt, Artificial Sequence
  RPE65 RNA guide
auacaagaacggcagauuuag

SEQ ID NO: 16547 - RNA, 21 nt, Artificial Sequence
  RPE65 RNA guide
auacuuccucggugaauagug

SEQ ID NO: 16548 - RNA, 21 nt, Artificial Sequence
  RPE65 RNA guide
auaggaaucaguggaucugca

SEQ ID NO: 16549 - RNA, 21 nt, Artificial Sequence
  RPE65 RNA guide
auagugcagauccacugauuc

SEQ ID NO: 16550 - RNA, 21 nt, Artificial Sequence
  RPE65 RNA guide
auauacuuccucggugaauag

SEQ ID NO: 16551 - RNA, 21 nt, Artificial Sequence
  RPE65 RNA guide
aucaaaaaguacucuuguagg

SEQ ID NO: 16552 - RNA, 21 nt, Artificial Sequence
  RPE65 RNA guide
aucaguggaucugcacuauuc

SEQ ID NO: 16553 - RNA, 21 nt, Artificial Sequence
  RPE65 RNA guide
aucauaggaaucaguggaucu

SEQ ID NO: 16554 - RNA, 21 nt, Artificial Sequence
  RPE65 RNA guide
auccacugauuccuaugauac

SEQ ID NO: 16555 - RNA, 21 nt, Artificial Sequence
  RPE65 RNA guide
auccuggcucugcugcaguug

SEQ ID NO: 16556 - RNA, 21 nt, Artificial Sequence
  RPE65 RNA guide
aucucucucaggaauuguccu

SEQ ID NO: 16557 - RNA, 21 nt, Artificial Sequence
  RPE65 RNA guide
aucugaaaucuacagagaagc

SEQ ID NO: 16558 - RNA, 21 nt, Artificial Sequence
  RPE65 RNA guide
aucugcacuauucaccgagga

SEQ ID NO: 16559 - RNA, 21 nt, Artificial Sequence
  RPE65 RNA guide
aucugccguucuuguauuuac

SEQ ID NO: 16560 - RNA, 21 nt, Artificial Sequence
  RPE65 RNA guide
aucuucugaaaaauaucacua

SEQ ID NO: 16561 - RNA, 21 nt, Artificial Sequence
  RPE65 RNA guide
augaaacuaaagcucagaaga

SEQ ID NO: 16562 - RNA, 21 nt, Artificial Sequence
  RPE65 RNA guide
augaacugguuucccuacaag

SEQ ID NO: 16563 - RNA, 21 nt, Artificial Sequence
  RPE65 RNA guide
augaagcaucaaaaaguacuc

SEQ ID NO: 16564 - RNA, 21 nt, Artificial Sequence
  RPE65 RNA guide
augaggcaggaggacaauucc

SEQ ID NO: 16565 - RNA, 21 nt, Artificial Sequence
  RPE65 RNA guide
augcuucaucucuccagaacu

SEQ ID NO: 16566 - RNA, 21 nt, Artificial Sequence
  RPE65 RNA guide
auguauaaacaugaggcagga

SEQ ID NO: 16567 - RNA, 21 nt, Artificial Sequence
  RPE65 RNA guide
auguuucaucucucucaggaa

SEQ ID NO: 16568 - RNA, 21 nt, Artificial Sequence
  RPE65 RNA guide
auuacuaacaauagacaguca

SEQ ID NO: 16569 - RNA, 21 nt, Artificial Sequence
  RPE65 RNA guide
auuagccuauuuuuaaagcuc

SEQ ID NO: 16570 - RNA, 21 nt, Artificial Sequence
  RPE65 RNA guide
auuccugagagagaugaaaca

SEQ ID NO: 16571 - RNA, 21 nt, Artificial Sequence
  RPE65 RNA guide
auucuaaaucugccguucuug

SEQ ID NO: 16572 - RNA, 21 nt, Artificial Sequence
  RPE65 RNA guide
auuguccuccugccucauguu

SEQ ID NO: 16573 - RNA, 21 nt, Artificial Sequence
  RPE65 RNA guide
auuuaaaaaccugguucuuau

SEQ ID NO: 16574 - RNA, 21 nt, Artificial Sequence
  RPE65 RNA guide
auuuaaccagaauguuucauc

SEQ ID NO: 16575 - RNA, 21 nt, Artificial Sequence
  RPE65 RNA guide
auuugaaguucuggagagaug

SEQ ID NO: 16576 - RNA, 21 nt, Artificial Sequence
  RPE65 RNA guide
auuugagagcuagaaggagcu

SEQ ID NO: 16577 - RNA, 21 nt, Artificial Sequence
  RPE65 RNA guide
auuuuguaaauacaagaacgg

SEQ ID NO: 16578 - RNA, 21 nt, Artificial Sequence
  RPE65 RNA guide
auuuuuaaagcuccuucuagc

SEQ ID NO: 16579 - RNA, 21 nt, Artificial Sequence
  RPE65 RNA guide
caaaaaguacucuuguaggga

SEQ ID NO: 16580 - RNA, 21 nt, Artificial Sequence
  RPE65 RNA guide
caaaagcaacugcagcagagc

SEQ ID NO: 16581 - RNA, 21 nt, Artificial Sequence
  RPE65 RNA guide
caaaauaaugaacugguuucc

SEQ ID NO: 16582 - RNA, 21 nt, Artificial Sequence
  RPE65 RNA guide
caaaugaaacuaaagcucaga

SEQ ID NO: 16583 - RNA, 21 nt, Artificial Sequence
  RPE65 RNA guide
caacugcagcagagccaggau

SEQ ID NO: 16584 - RNA, 21 nt, Artificial Sequence
  RPE65 RNA guide
caagaacggcagauuuagaau

SEQ ID NO: 16585 - RNA, 21 nt, Artificial Sequence
  RPE65 RNA guide
caagacuuuauguauaaacau

SEQ ID NO: 16586 - RNA, 21 nt, Artificial Sequence
  RPE65 RNA guide
caagaguacuuuuugaugcuu

SEQ ID NO: 16587 - RNA, 21 nt, Artificial Sequence
  RPE65 RNA guide
caauagacagucaucucuuua

SEQ ID NO: 16588 - RNA, 21 nt, Artificial Sequence
  RPE65 RNA guide
caauuccugagagagaugaaa

SEQ ID NO: 16589 - RNA, 21 nt, Artificial Sequence
  RPE65 RNA guide
caauuuuguaaauacaagaac

SEQ ID NO: 16590 - RNA, 21 nt, Artificial Sequence
  RPE65 RNA guide
cacaguacucuucugagcuuu

SEQ ID NO: 16591 - RNA, 21 nt, Artificial Sequence
  RPE65 RNA guide
caccgaggaaguauauuuuaa

SEQ ID NO: 16592 - RNA, 21 nt, Artificial Sequence
  RPE65 RNA guide
cacuauucaccgaggaaguau

SEQ ID NO: 16593 - RNA, 21 nt, Artificial Sequence
  RPE65 RNA guide
cacugauuccuaugauacuuu

SEQ ID NO: 16594 - RNA, 21 nt, Artificial Sequence
  RPE65 RNA guide
cagaagaguacugugacuuag

SEQ ID NO: 16595 - RNA, 21 nt, Artificial Sequence
  RPE65 RNA guide
cagaauguuucaucucucuca

SEQ ID NO: 16596 - RNA, 21 nt, Artificial Sequence
  RPE65 RNA guide
cagagccaggauaagaaccag

SEQ ID NO: 16597 - RNA, 21 nt, Artificial Sequence
  RPE65 RNA guide
cagauccacugauuccuauga

SEQ ID NO: 16598 - RNA, 21 nt, Artificial Sequence
  RPE65 RNA guide
cagauuuaaccagaauguuuc

SEQ ID NO: 16599 - RNA, 21 nt, Artificial Sequence
  RPE65 RNA guide
cagcagagccaggauaagaac

SEQ ID NO: 16600 - RNA, 21 nt, Artificial Sequence
  RPE65 RNA guide
caggaauuguccuccugccuc

SEQ ID NO: 16601 - RNA, 21 nt, Artificial Sequence
  RPE65 RNA guide
caggaggacaauuccugagag

SEQ ID NO: 16602 - RNA, 21 nt, Artificial Sequence
  RPE65 RNA guide
caggauaagaaccagguuuuu

SEQ ID NO: 16603 - RNA, 21 nt, Artificial Sequence
  RPE65 RNA guide
cagguuuuuaaauucuaaauc

SEQ ID NO: 16604 - RNA, 21 nt, Artificial Sequence
  RPE65 RNA guide
caguacucuucugagcuuuag

SEQ ID NO: 16605 - RNA, 21 nt, Artificial Sequence
  RPE65 RNA guide
caguggaucugcacuauucac

SEQ ID NO: 16606 - RNA, 21 nt, Artificial Sequence
  RPE65 RNA guide
caguugcuuuugcuaagucac

SEQ ID NO: 16607 - RNA, 21 nt, Artificial Sequence
  RPE65 RNA guide
cauaaagucuugaaauuugag

SEQ ID NO: 16608 - RNA, 21 nt, Artificial Sequence
  RPE65 RNA guide
cauaggaaucaguggaucugc

SEQ ID NO: 16609 - RNA, 21 nt, Artificial Sequence
  RPE65 RNA guide
caucaaaaaguacucuuguag

SEQ ID NO: 16610 - RNA, 21 nt, Artificial Sequence
  RPE65 RNA guide
caucucuccagaacuucaaau

SEQ ID NO: 16611 - RNA, 21 nt, Artificial Sequence
  RPE65 RNA guide
caucucucucaggaauugucc

SEQ ID NO: 16612 - RNA, 21 nt, Artificial Sequence
  RPE65 RNA guide
caugaggcaggaggacaauuc

SEQ ID NO: 16613 - RNA, 21 nt, Artificial Sequence
  RPE65 RNA guide
cauuacuaacaauagacaguc

SEQ ID NO: 16614 - RNA, 21 nt, Artificial Sequence
  RPE65 RNA guide
cauucugguuaaaucugaaau

SEQ ID NO: 16615 - RNA, 21 nt, Artificial Sequence
  RPE65 RNA guide
ccaaaauaaugaacugguuuc

SEQ ID NO: 16616 - RNA, 21 nt, Artificial Sequence
  RPE65 RNA guide
ccacugauuccuaugauacuu

SEQ ID NO: 16617 - RNA, 21 nt, Artificial Sequence
  RPE65 RNA guide
ccagaauguuucaucucucuc

SEQ ID NO: 16618 - RNA, 21 nt, Artificial Sequence
  RPE65 RNA guide
ccaggauaagaaccagguuuu

SEQ ID NO: 16619 - RNA, 21 nt, Artificial Sequence
  RPE65 RNA guide
ccagguuuuuaaauucuaaau

SEQ ID NO: 16620 - RNA, 21 nt, Artificial Sequence
  RPE65 RNA guide
cccuacaagaguacuuuuuga

SEQ ID NO: 16621 - RNA, 21 nt, Artificial Sequence
  RPE65 RNA guide
ccgaggaaguauauuuuaaag

SEQ ID NO: 16622 - RNA, 21 nt, Artificial Sequence
  RPE65 RNA guide
ccguucuuguauuuacaaaau

SEQ ID NO: 16623 - RNA, 21 nt, Artificial Sequence
  RPE65 RNA guide
ccuacaagaguacuuuuugau

SEQ ID NO: 16624 - RNA, 21 nt, Artificial Sequence
  RPE65 RNA guide
ccuauuuuuaaagcuccuucu

SEQ ID NO: 16625 - RNA, 21 nt, Artificial Sequence
  RPE65 RNA guide
ccucauguuuauacauaaagu

SEQ ID NO: 16626 - RNA, 21 nt, Artificial Sequence
  RPE65 RNA guide
ccuccugccucauguuuauac

SEQ ID NO: 16627 - RNA, 21 nt, Artificial Sequence
  RPE65 RNA guide
ccucggugaauagugcagauc

SEQ ID NO: 16628 - RNA, 21 nt, Artificial Sequence
  RPE65 RNA guide
ccucuagugauauuuuucaga

SEQ ID NO: 16629 - RNA, 21 nt, Artificial Sequence
  RPE65 RNA guide
ccugagagagaugaaacauuc

SEQ ID NO: 16630 - RNA, 21 nt, Artificial Sequence
  RPE65 RNA guide
ccugccucauguuuauacaua

SEQ ID NO: 16631 - RNA, 21 nt, Artificial Sequence
  RPE65 RNA guide
ccugcuucucuguagauuuca

SEQ ID NO: 16632 - RNA, 21 nt, Artificial Sequence
  RPE65 RNA guide
ccuggcucugcugcaguugcu

SEQ ID NO: 16633 - RNA, 21 nt, Artificial Sequence
  RPE65 RNA guide
ccugguucuuauccuggcucu

SEQ ID NO: 16634 - RNA, 21 nt, Artificial Sequence
  RPE65 RNA guide
ccuucuagcucucaaauuuca

SEQ ID NO: 16635 - RNA, 21 nt, Artificial Sequence
  RPE65 RNA guide
cggcagauuuagaauuuaaaa

SEQ ID NO: 16636 - RNA, 21 nt, Artificial Sequence
  RPE65 RNA guide
cggugaauagugcagauccac

SEQ ID NO: 16637 - RNA, 21 nt, Artificial Sequence
  RPE65 RNA guide
cuaaagcucagaagaguacug

SEQ ID NO: 16638 - RNA, 21 nt, Artificial Sequence
  RPE65 RNA guide
cuaaaucugccguucuuguau

SEQ ID NO: 16639 - RNA, 21 nt, Artificial Sequence
  RPE65 RNA guide
cuaacaauagacagucaucuc

SEQ ID NO: 16640 - RNA, 21 nt, Artificial Sequence
  RPE65 RNA guide
cuaagucacaguacucuucug

SEQ ID NO: 16641 - RNA, 21 nt, Artificial Sequence
  RPE65 RNA guide
cuacaagaguacuuuuugaug

SEQ ID NO: 16642 - RNA, 21 nt, Artificial Sequence
  RPE65 RNA guide
cuagaaggagcuuuaaaaaua

SEQ ID NO: 16643 - RNA, 21 nt, Artificial Sequence
  RPE65 RNA guide
cuagcucucaaauuucaagac

SEQ ID NO: 16644 - RNA, 21 nt, Artificial Sequence
  RPE65 RNA guide
cuauucaccgaggaaguauau

SEQ ID NO: 16645 - RNA, 21 nt, Artificial Sequence
  RPE65 RNA guide
cuauuuuuaaagcuccuucua

SEQ ID NO: 16646 - RNA, 21 nt, Artificial Sequence
  RPE65 RNA guide
cucagaagaguacugugacuu

SEQ ID NO: 16647 - RNA, 21 nt, Artificial Sequence
  RPE65 RNA guide
cucaggaauuguccuccugcc

SEQ ID NO: 16648 - RNA, 21 nt, Artificial Sequence
  RPE65 RNA guide
cuccugccucauguuuauaca

SEQ ID NO: 16649 - RNA, 21 nt, Artificial Sequence
  RPE65 RNA guide
cuccuucuagcucucaaauuu

SEQ ID NO: 16650 - RNA, 21 nt, Artificial Sequence
  RPE65 RNA guide
cucggugaauagugcagaucc

SEQ ID NO: 16651 - RNA, 21 nt, Artificial Sequence
  RPE65 RNA guide
cucucaggaauuguccuccug

SEQ ID NO: 16652 - RNA, 21 nt, Artificial Sequence
  RPE65 RNA guide
cucucucaggaauuguccucc

SEQ ID NO: 16653 - RNA, 21 nt, Artificial Sequence
  RPE65 RNA guide
cucugcugcaguugcuuuugc

SEQ ID NO: 16654 - RNA, 21 nt, Artificial Sequence
  RPE65 RNA guide
cucuguagauuucagauuuaa

SEQ ID NO: 16655 - RNA, 21 nt, Artificial Sequence
  RPE65 RNA guide
cucuucugagcuuuaguuuca

SEQ ID NO: 16656 - RNA, 21 nt, Artificial Sequence
  RPE65 RNA guide
cucuuguagggaaaccaguuc

SEQ ID NO: 16657 - RNA, 21 nt, Artificial Sequence
  RPE65 RNA guide
cugaaaucuacagagaagcag

SEQ ID NO: 16658 - RNA, 21 nt, Artificial Sequence
  RPE65 RNA guide
cugagagagaugaaacauucu

SEQ ID NO: 16659 - RNA, 21 nt, Artificial Sequence
  RPE65 RNA guide
cugcacuauucaccgaggaag

SEQ ID NO: 16660 - RNA, 21 nt, Artificial Sequence
  RPE65 RNA guide
cugcagcagagccaggauaag

SEQ ID NO: 16661 - RNA, 21 nt, Artificial Sequence
  RPE65 RNA guide
cugcaguugcuuuugcuaagu

SEQ ID NO: 16662 - RNA, 21 nt, Artificial Sequence
  RPE65 RNA guide
cugccguucuuguauuuacaa

SEQ ID NO: 16663 - RNA, 21 nt, Artificial Sequence
  RPE65 RNA guide
cugccucauguuuauacauaa

SEQ ID NO: 16664 - RNA, 21 nt, Artificial Sequence
  RPE65 RNA guide
cugcugcaguugcuuuugcua

SEQ ID NO: 16665 - RNA, 21 nt, Artificial Sequence
  RPE65 RNA guide
cugcuucucuguagauuucag

SEQ ID NO: 16666 - RNA, 21 nt, Artificial Sequence
  RPE65 RNA guide
cuggagagaugaagcaucaaa

SEQ ID NO: 16667 - RNA, 21 nt, Artificial Sequence
  RPE65 RNA guide
cuggcucugcugcaguugcuu

SEQ ID NO: 16668 - RNA, 21 nt, Artificial Sequence
  RPE65 RNA guide
cugguuaaaucugaaaucuac

SEQ ID NO: 16669 - RNA, 21 nt, Artificial Sequence
  RPE65 RNA guide
cugguucuuauccuggcucug

SEQ ID NO: 16670 - RNA, 21 nt, Artificial Sequence
  RPE65 RNA guide
cugguuucccuacaagaguac

SEQ ID NO: 16671 - RNA, 21 nt, Artificial Sequence
  RPE65 RNA guide
cuguagauuucagauuuaacc

SEQ ID NO: 16672 - RNA, 21 nt, Artificial Sequence
  RPE65 RNA guide
cugugacuuagcaaaagcaac

SEQ ID NO: 16673 - RNA, 21 nt, Artificial Sequence
  RPE65 RNA guide
cuuagcaaaagcaacugcagc

SEQ ID NO: 16674 - RNA, 21 nt, Artificial Sequence
  RPE65 RNA guide
cuuauccuggcucugcugcag

SEQ ID NO: 16675 - RNA, 21 nt, Artificial Sequence
  RPE65 RNA guide
cuucaucucuccagaacuuca

SEQ ID NO: 16676 - RNA, 21 nt, Artificial Sequence
  RPE65 RNA guide
cuuccucggugaauagugcag

SEQ ID NO: 16677 - RNA, 21 nt, Artificial Sequence
  RPE65 RNA guide
cuucuagcucucaaauuucaa

SEQ ID NO: 16678 - RNA, 21 nt, Artificial Sequence
  RPE65 RNA guide
cuucucuguagauuucagauu

SEQ ID NO: 16679 - RNA, 21 nt, Artificial Sequence
  RPE65 RNA guide
cuucugaaaaauaucacuaga

SEQ ID NO: 16680 - RNA, 21 nt, Artificial Sequence
  RPE65 RNA guide
cuucugagcuuuaguuucauu

SEQ ID NO: 16681 - RNA, 21 nt, Artificial Sequence
  RPE65 RNA guide
cuugaaauuugagagcuagaa

SEQ ID NO: 16682 - RNA, 21 nt, Artificial Sequence
  RPE65 RNA guide
cuuguagggaaaccaguucau

SEQ ID NO: 16683 - RNA, 21 nt, Artificial Sequence
  RPE65 RNA guide
cuuuaaaauauacuuccucgg

SEQ ID NO: 16684 - RNA, 21 nt, Artificial Sequence
  RPE65 RNA guide
cuuuauguauaaacaugaggc

SEQ ID NO: 16685 - RNA, 21 nt, Artificial Sequence
  RPE65 RNA guide
cuuuugcuaagucacaguacu

SEQ ID NO: 16686 - RNA, 21 nt, Artificial Sequence
  RPE65 RNA guide
cuuuuugaugcuucaucucuc

SEQ ID NO: 16687 - RNA, 21 nt, Artificial Sequence
  RPE65 RNA guide
gaaacuaaagcucagaagagu

SEQ ID NO: 16688 - RNA, 21 nt, Artificial Sequence
  RPE65 RNA guide
gaaauaaagagaugacugucu

SEQ ID NO: 16689 - RNA, 21 nt, Artificial Sequence
  RPE65 RNA guide
gaaauuugagagcuagaagga

SEQ ID NO: 16690 - RNA, 21 nt, Artificial Sequence
  RPE65 RNA guide
gaacugguuucccuacaagag

SEQ ID NO: 16691 - RNA, 21 nt, Artificial Sequence
  RPE65 RNA guide
gaagaguacugugacuuagca

SEQ ID NO: 16692 - RNA, 21 nt, Artificial Sequence
  RPE65 RNA guide
gaagcaucaaaaaguacucuu

SEQ ID NO: 16693 - RNA, 21 nt, Artificial Sequence
  RPE65 RNA guide
gaaggagcuuuaaaaauaggc

SEQ ID NO: 16694 - RNA, 21 nt, Artificial Sequence
  RPE65 RNA guide
gaaguucuggagagaugaagc

SEQ ID NO: 16695 - RNA, 21 nt, Artificial Sequence
  RPE65 RNA guide
gaauagugcagauccacugau

SEQ ID NO: 16696 - RNA, 21 nt, Artificial Sequence
  RPE65 RNA guide
gaaucaguggaucugcacuau

SEQ ID NO: 16697 - RNA, 21 nt, Artificial Sequence
  RPE65 RNA guide
gaauguuucaucucucucagg

SEQ ID NO: 16698 - RNA, 21 nt, Artificial Sequence
  RPE65 RNA guide
gaauuguccuccugccucaug

SEQ ID NO: 16699 - RNA, 21 nt, Artificial Sequence
  RPE65 RNA guide
gaauuuaaaaaccugguucuu

SEQ ID NO: 16700 - RNA, 21 nt, Artificial Sequence
  RPE65 RNA guide
gacaauuccugagagagauga

SEQ ID NO: 16701 - RNA, 21 nt, Artificial Sequence
  RPE65 RNA guide
gacaauuuuguaaauacaaga

SEQ ID NO: 16702 - RNA, 21 nt, Artificial Sequence
  RPE65 RNA guide
gacagucaucucuuuauuucu

SEQ ID NO: 16703 - RNA, 21 nt, Artificial Sequence
  RPE65 RNA guide
gacuuagcaaaagcaacugca

SEQ ID NO: 16704 - RNA, 21 nt, Artificial Sequence
  RPE65 RNA guide
gacuuuauguauaaacaugag

SEQ ID NO: 16705 - RNA, 21 nt, Artificial Sequence
  RPE65 RNA guide
gagagagaugaaacauucugg

SEQ ID NO: 16706 - RNA, 21 nt, Artificial Sequence
  RPE65 RNA guide
gagagaugaaacauucugguu

SEQ ID NO: 16707 - RNA, 21 nt, Artificial Sequence
  RPE65 RNA guide
gagagaugaagcaucaaaaag

SEQ ID NO: 16708 - RNA, 21 nt, Artificial Sequence
  RPE65 RNA guide
gagagcuagaaggagcuuuaa

SEQ ID NO: 16709 - RNA, 21 nt, Artificial Sequence
  RPE65 RNA guide
gagaugaaacauucugguuaa

SEQ ID NO: 16710 - RNA, 21 nt, Artificial Sequence
  RPE65 RNA guide
gagaugaagcaucaaaaagua

SEQ ID NO: 16711 - RNA, 21 nt, Artificial Sequence
  RPE65 RNA guide
gagaugacugucuauuguuag

SEQ ID NO: 16712 - RNA, 21 nt, Artificial Sequence
  RPE65 RNA guide
gagccaggauaagaaccaggu

SEQ ID NO: 16713 - RNA, 21 nt, Artificial Sequence
  RPE65 RNA guide
gagcuagaaggagcuuuaaaa

SEQ ID NO: 16714 - RNA, 21 nt, Artificial Sequence
  RPE65 RNA guide
gaggacaauuccugagagaga

SEQ ID NO: 16715 - RNA, 21 nt, Artificial Sequence
  RPE65 RNA guide
gaggcaggaggacaauuccug

SEQ ID NO: 16716 - RNA, 21 nt, Artificial Sequence
  RPE65 RNA guide
gaguacugugacuuagcaaaa

SEQ ID NO: 16717 - RNA, 21 nt, Artificial Sequence
  RPE65 RNA guide
gaguacuuuuugaugcuucau

SEQ ID NO: 16718 - RNA, 21 nt, Artificial Sequence
  RPE65 RNA guide
gauaaaguaucauaggaauca

SEQ ID NO: 16719 - RNA, 21 nt, Artificial Sequence
  RPE65 RNA guide
gauccacugauuccuaugaua

SEQ ID NO: 16720 - RNA, 21 nt, Artificial Sequence
  RPE65 RNA guide
gaucugcacuauucaccgagg

SEQ ID NO: 16721 - RNA, 21 nt, Artificial Sequence
  RPE65 RNA guide
gaugaaacauucugguuaaau

SEQ ID NO: 16722 - RNA, 21 nt, Artificial Sequence
  RPE65 RNA guide
gaugaagcaucaaaaaguacu

SEQ ID NO: 16723 - RNA, 21 nt, Artificial Sequence
  RPE65 RNA guide
gaugacugucuauuguuagua

SEQ ID NO: 16724 - RNA, 21 nt, Artificial Sequence
  RPE65 RNA guide
gaugcuucaucucuccagaac

SEQ ID NO: 16725 - RNA, 21 nt, Artificial Sequence
  RPE65 RNA guide
gauuuaaccagaauguuucau

SEQ ID NO: 16726 - RNA, 21 nt, Artificial Sequence
  RPE65 RNA guide
gcaaaagcaacugcagcagag

SEQ ID NO: 16727 - RNA, 21 nt, Artificial Sequence
  RPE65 RNA guide
gcaacugcagcagagccagga

SEQ ID NO: 16728 - RNA, 21 nt, Artificial Sequence
  RPE65 RNA guide
gcacuauucaccgaggaagua

SEQ ID NO: 16729 - RNA, 21 nt, Artificial Sequence
  RPE65 RNA guide
gcagagccaggauaagaacca

SEQ ID NO: 16730 - RNA, 21 nt, Artificial Sequence
  RPE65 RNA guide
gcagauccacugauuccuaug

SEQ ID NO: 16731 - RNA, 21 nt, Artificial Sequence
  RPE65 RNA guide
gcagauuuagaauuuaaaaac

SEQ ID NO: 16732 - RNA, 21 nt, Artificial Sequence
  RPE65 RNA guide
gcagcagagccaggauaagaa

SEQ ID NO: 16733 - RNA, 21 nt, Artificial Sequence
  RPE65 RNA guide
gcaggaggacaauuccugaga

SEQ ID NO: 16734 - RNA, 21 nt, Artificial Sequence
  RPE65 RNA guide
gcaguugcuuuugcuaaguca

SEQ ID NO: 16735 - RNA, 21 nt, Artificial Sequence
  RPE65 RNA guide
gcaucaaaaaguacucuugua

SEQ ID NO: 16736 - RNA, 21 nt, Artificial Sequence
  RPE65 RNA guide
gccaggauaagaaccagguuu

SEQ ID NO: 16737 - RNA, 21 nt, Artificial Sequence
  RPE65 RNA guide
gccguucuuguauuuacaaaa

SEQ ID NO: 16738 - RNA, 21 nt, Artificial Sequence
  RPE65 RNA guide
gccuauuuuuaaagcuccuuc

SEQ ID NO: 16739 - RNA, 21 nt, Artificial Sequence
  RPE65 RNA guide
gccucauguuuauacauaaag

SEQ ID NO: 16740 - RNA, 21 nt, Artificial Sequence
  RPE65 RNA guide
gcuaagucacaguacucuucu

SEQ ID NO: 16741 - RNA, 21 nt, Artificial Sequence
  RPE65 RNA guide
gcuagaaggagcuuuaaaaau

SEQ ID NO: 16742 - RNA, 21 nt, Artificial Sequence
  RPE65 RNA guide
gcucagaagaguacugugacu

SEQ ID NO: 16743 - RNA, 21 nt, Artificial Sequence
  RPE65 RNA guide
gcuccuucuagcucucaaauu

SEQ ID NO: 16744 - RNA, 21 nt, Artificial Sequence
  RPE65 RNA guide
gcucucaaauuucaagacuuu

SEQ ID NO: 16745 - RNA, 21 nt, Artificial Sequence
  RPE65 RNA guide
gcucugcugcaguugcuuuug

SEQ ID NO: 16746 - RNA, 21 nt, Artificial Sequence
  RPE65 RNA guide
gcugcaguugcuuuugcuaag

SEQ ID NO: 16747 - RNA, 21 nt, Artificial Sequence
  RPE65 RNA guide
gcuucaucucuccagaacuuc

SEQ ID NO: 16748 - RNA, 21 nt, Artificial Sequence
  RPE65 RNA guide
gcuucucuguagauuucagau

SEQ ID NO: 16749 - RNA, 21 nt, Artificial Sequence
  RPE65 RNA guide
gcuuuugcuaagucacaguac

SEQ ID NO: 16750 - RNA, 21 nt, Artificial Sequence
  RPE65 RNA guide
ggaaaccaguucauuauuuug

SEQ ID NO: 16751 - RNA, 21 nt, Artificial Sequence
  RPE65 RNA guide
ggaaucaguggaucugcacua

SEQ ID NO: 16752 - RNA, 21 nt, Artificial Sequence
  RPE65 RNA guide
ggaauuguccuccugccucau

SEQ ID NO: 16753 - RNA, 21 nt, Artificial Sequence
  RPE65 RNA guide
ggacaauuccugagagagaug

SEQ ID NO: 16754 - RNA, 21 nt, Artificial Sequence
  RPE65 RNA guide
ggagagaugaagcaucaaaaa

SEQ ID NO: 16755 - RNA, 21 nt, Artificial Sequence
  RPE65 RNA guide
ggaggacaauuccugagagag

SEQ ID NO: 16756 - RNA, 21 nt, Artificial Sequence
  RPE65 RNA guide
ggauaagaaccagguuuuuaa

SEQ ID NO: 16757 - RNA, 21 nt, Artificial Sequence
  RPE65 RNA guide
ggaucugcacuauucaccgag

SEQ ID NO: 16758 - RNA, 21 nt, Artificial Sequence
  RPE65 RNA guide
ggcagauuuagaauuuaaaaa

SEQ ID NO: 16759 - RNA, 21 nt, Artificial Sequence
  RPE65 RNA guide
ggcaggaggacaauuccugag

SEQ ID NO: 16760 - RNA, 21 nt, Artificial Sequence
  RPE65 RNA guide
ggcucugcugcaguugcuuuu

SEQ ID NO: 16761 - RNA, 21 nt, Artificial Sequence
  RPE65 RNA guide
gggaaaccaguucauuauuuu

SEQ ID NO: 16762 - RNA, 21 nt, Artificial Sequence
  RPE65 RNA guide
ggugaauagugcagauccacu

SEQ ID NO: 16763 - RNA, 21 nt, Artificial Sequence
  RPE65 RNA guide
gguuaaaucugaaaucuacag

SEQ ID NO: 16764 - RNA, 21 nt, Artificial Sequence
  RPE65 RNA guide
gguucuuauccuggcucugcu

SEQ ID NO: 16765 - RNA, 21 nt, Artificial Sequence
  RPE65 RNA guide
gguuucccuacaagaguacuu

SEQ ID NO: 16766 - RNA, 21 nt, Artificial Sequence
  RPE65 RNA guide
gguuuuuaaauucuaaaucug

SEQ ID NO: 16767 - RNA, 21 nt, Artificial Sequence
  RPE65 RNA guide
guaaauacaagaacggcagau

SEQ ID NO: 16768 - RNA, 21 nt, Artificial Sequence
  RPE65 RNA guide
guaaccugcuucucuguagau

SEQ ID NO: 16769 - RNA, 21 nt, Artificial Sequence
  RPE65 RNA guide
guacucuucugagcuuuaguu

SEQ ID NO: 16770 - RNA, 21 nt, Artificial Sequence
  RPE65 RNA guide
guacucuuguagggaaaccag

SEQ ID NO: 16771 - RNA, 21 nt, Artificial Sequence
  RPE65 RNA guide
guacugugacuuagcaaaagc

SEQ ID NO: 16772 - RNA, 21 nt, Artificial Sequence
  RPE65 RNA guide
guacuuuuugaugcuucaucu

SEQ ID NO: 16773 - RNA, 21 nt, Artificial Sequence
  RPE65 RNA guide
guagaaauaaagagaugacug

SEQ ID NO: 16774 - RNA, 21 nt, Artificial Sequence
  RPE65 RNA guide
guagauuucagauuuaaccag

SEQ ID NO: 16775 - RNA, 21 nt, Artificial Sequence
  RPE65 RNA guide
guagggaaaccaguucauuau

SEQ ID NO: 16776 - RNA, 21 nt, Artificial Sequence
  RPE65 RNA guide
guauaaacaugaggcaggagg

SEQ ID NO: 16777 - RNA, 21 nt, Artificial Sequence
  RPE65 RNA guide
guaucauaggaaucaguggau

SEQ ID NO: 16778 - RNA, 21 nt, Artificial Sequence
  RPE65 RNA guide
gucacaguacucuucugagcu

SEQ ID NO: 16779 - RNA, 21 nt, Artificial Sequence
  RPE65 RNA guide
guccuccugccucauguuuau

SEQ ID NO: 16780 - RNA, 21 nt, Artificial Sequence
  RPE65 RNA guide
gucuugaaauuugagagcuag

SEQ ID NO: 16781 - RNA, 21 nt, Artificial Sequence
  RPE65 RNA guide
gucuuuaaaauauacuuccuc

SEQ ID NO: 16782 - RNA, 21 nt, Artificial Sequence
  RPE65 RNA guide
gugaauagugcagauccacug

SEQ ID NO: 16783 - RNA, 21 nt, Artificial Sequence
  RPE65 RNA guide
gugacuuagcaaaagcaacug

SEQ ID NO: 16784 - RNA, 21 nt, Artificial Sequence
  RPE65 RNA guide
gugcagauccacugauuccua

SEQ ID NO: 16785 - RNA, 21 nt, Artificial Sequence
  RPE65 RNA guide
guggaucugcacuauucaccg

SEQ ID NO: 16786 - RNA, 21 nt, Artificial Sequence
  RPE65 RNA guide
guuaaaucugaaaucuacaga

SEQ ID NO: 16787 - RNA, 21 nt, Artificial Sequence
  RPE65 RNA guide
guucuggagagaugaagcauc

SEQ ID NO: 16788 - RNA, 21 nt, Artificial Sequence
  RPE65 RNA guide
guucuuauccuggcucugcug

SEQ ID NO: 16789 - RNA, 21 nt, Artificial Sequence
  RPE65 RNA guide
guugcuuuugcuaagucacag

SEQ ID NO: 16790 - RNA, 21 nt, Artificial Sequence
  RPE65 RNA guide
guuucaucucucucaggaauu

SEQ ID NO: 16791 - RNA, 21 nt, Artificial Sequence
  RPE65 RNA guide
guuucccuacaagaguacuuu

SEQ ID NO: 16792 - RNA, 21 nt, Artificial Sequence
  RPE65 RNA guide
uaaaaaccugguucuuauccu

SEQ ID NO: 16793 - RNA, 21 nt, Artificial Sequence
  RPE65 RNA guide
uaaaauauacuuccucgguga

SEQ ID NO: 16794 - RNA, 21 nt, Artificial Sequence
  RPE65 RNA guide
uaaacaugaggcaggaggaca

SEQ ID NO: 16795 - RNA, 21 nt, Artificial Sequence
  RPE65 RNA guide
uaaagagaugacugucuauug

SEQ ID NO: 16796 - RNA, 21 nt, Artificial Sequence
  RPE65 RNA guide
uaaagcucagaagaguacugu

SEQ ID NO: 16797 - RNA, 21 nt, Artificial Sequence
  RPE65 RNA guide
uaaagcuccuucuagcucuca

SEQ ID NO: 16798 - RNA, 21 nt, Artificial Sequence
  RPE65 RNA guide
uaaaguaucauaggaaucagu

SEQ ID NO: 16799 - RNA, 21 nt, Artificial Sequence
  RPE65 RNA guide
uaaagucuugaaauuugagag

SEQ ID NO: 16800 - RNA, 21 nt, Artificial Sequence
  RPE65 RNA guide
uaaauacaagaacggcagauu

SEQ ID NO: 16801 - RNA, 21 nt, Artificial Sequence
  RPE65 RNA guide
uaaaucugaaaucuacagaga

SEQ ID NO: 16802 - RNA, 21 nt, Artificial Sequence
  RPE65 RNA guide
uaaaucugccguucuuguauu

SEQ ID NO: 16803 - RNA, 21 nt, Artificial Sequence
  RPE65 RNA guide
uaaauucuaaaucugccguuc

SEQ ID NO: 16804 - RNA, 21 nt, Artificial Sequence
  RPE65 RNA guide
uaaccagaauguuucaucucu

SEQ ID NO: 16805 - RNA, 21 nt, Artificial Sequence
  RPE65 RNA guide
uaaccugcuucucuguagauu

SEQ ID NO: 16806 - RNA, 21 nt, Artificial Sequence
  RPE65 RNA guide
uaagucacaguacucuucuga

SEQ ID NO: 16807 - RNA, 21 nt, Artificial Sequence
  RPE65 RNA guide
uaaugaacugguuucccuaca

SEQ ID NO: 16808 - RNA, 21 nt, Artificial Sequence
  RPE65 RNA guide
uaauuugaaguucuggagaga

SEQ ID NO: 16809 - RNA, 21 nt, Artificial Sequence
  RPE65 RNA guide
uacaaaugaaacuaaagcuca

SEQ ID NO: 16810 - RNA, 21 nt, Artificial Sequence
  RPE65 RNA guide
uacaagaacggcagauuuaga

SEQ ID NO: 16811 - RNA, 21 nt, Artificial Sequence
  RPE65 RNA guide
uacaagaguacuuuuugaugc

SEQ ID NO: 16812 - RNA, 21 nt, Artificial Sequence
  RPE65 RNA guide
uacuaacaauagacagucauc

SEQ ID NO: 16813 - RNA, 21 nt, Artificial Sequence
  RPE65 RNA guide
uacucuucugagcuuuaguuu

SEQ ID NO: 16814 - RNA, 21 nt, Artificial Sequence
  RPE65 RNA guide
uacucuuguagggaaaccagu

SEQ ID NO: 16815 - RNA, 21 nt, Artificial Sequence
  RPE65 RNA guide
uacugugacuuagcaaaagca

SEQ ID NO: 16816 - RNA, 21 nt, Artificial Sequence
  RPE65 RNA guide
uacuuccucggugaauagugc

SEQ ID NO: 16817 - RNA, 21 nt, Artificial Sequence
  RPE65 RNA guide
uacuuuuugaugcuucaucuc

SEQ ID NO: 16818 - RNA, 21 nt, Artificial Sequence
  RPE65 RNA guide
uagaaggagcuuuaaaaauag

SEQ ID NO: 16819 - RNA, 21 nt, Artificial Sequence
  RPE65 RNA guide
uagacagucaucucuuuauuu

SEQ ID NO: 16820 - RNA, 21 nt, Artificial Sequence
  RPE65 RNA guide
uagcaaaagcaacugcagcag

SEQ ID NO: 16821 - RNA, 21 nt, Artificial Sequence
  RPE65 RNA guide
uagccuauuuuuaaagcuccu

SEQ ID NO: 16822 - RNA, 21 nt, Artificial Sequence
  RPE65 RNA guide
uaggaaucaguggaucugcac

SEQ ID NO: 16823 - RNA, 21 nt, Artificial Sequence
  RPE65 RNA guide
uagggaaaccaguucauuauu

SEQ ID NO: 16824 - RNA, 21 nt, Artificial Sequence
  RPE65 RNA guide
uagugcagauccacugauucc

SEQ ID NO: 16825 - RNA, 21 nt, Artificial Sequence
  RPE65 RNA guide
uauaaacaugaggcaggagga

SEQ ID NO: 16826 - RNA, 21 nt, Artificial Sequence
  RPE65 RNA guide
uauacuuccucggugaauagu

SEQ ID NO: 16827 - RNA, 21 nt, Artificial Sequence
  RPE65 RNA guide
uaucauaggaaucaguggauc

SEQ ID NO: 16828 - RNA, 21 nt, Artificial Sequence
  RPE65 RNA guide
uauccuggcucugcugcaguu

SEQ ID NO: 16829 - RNA, 21 nt, Artificial Sequence
  RPE65 RNA guide
uauguauaaacaugaggcagg

SEQ ID NO: 16830 - RNA, 21 nt, Artificial Sequence
  RPE65 RNA guide
uauuuuuaaagcuccuucuag

SEQ ID NO: 16831 - RNA, 21 nt, Artificial Sequence
  RPE65 RNA guide
ucaaaaaguacucuuguaggg

SEQ ID NO: 16832 - RNA, 21 nt, Artificial Sequence
  RPE65 RNA guide
ucacaguacucuucugagcuu

SEQ ID NO: 16833 - RNA, 21 nt, Artificial Sequence
  RPE65 RNA guide
ucaccgaggaaguauauuuua

SEQ ID NO: 16834 - RNA, 21 nt, Artificial Sequence
  RPE65 RNA guide
ucagaagaguacugugacuua

SEQ ID NO: 16835 - RNA, 21 nt, Artificial Sequence
  RPE65 RNA guide
ucagauuuaaccagaauguuu

SEQ ID NO: 16836 - RNA, 21 nt, Artificial Sequence
  RPE65 RNA guide
ucaggaauuguccuccugccu

SEQ ID NO: 16837 - RNA, 21 nt, Artificial Sequence
  RPE65 RNA guide
ucaguggaucugcacuauuca

SEQ ID NO: 16838 - RNA, 21 nt, Artificial Sequence
  RPE65 RNA guide
ucauaggaaucaguggaucug

SEQ ID NO: 16839 - RNA, 21 nt, Artificial Sequence
  RPE65 RNA guide
ucaucucuccagaacuucaaa

SEQ ID NO: 16840 - RNA, 21 nt, Artificial Sequence
  RPE65 RNA guide
ucaucucucucaggaauuguc

SEQ ID NO: 16841 - RNA, 21 nt, Artificial Sequence
  RPE65 RNA guide
ucauuacuaacaauagacagu

SEQ ID NO: 16842 - RNA, 21 nt, Artificial Sequence
  RPE65 RNA guide
uccacugauuccuaugauacu

SEQ ID NO: 16843 - RNA, 21 nt, Artificial Sequence
  RPE65 RNA guide
ucccuacaagaguacuuuuug

SEQ ID NO: 16844 - RNA, 21 nt, Artificial Sequence
  RPE65 RNA guide
uccuccugccucauguuuaua

SEQ ID NO: 16845 - RNA, 21 nt, Artificial Sequence
  RPE65 RNA guide
uccucggugaauagugcagau

SEQ ID NO: 16846 - RNA, 21 nt, Artificial Sequence
  RPE65 RNA guide
uccugagagagaugaaacauu

SEQ ID NO: 16847 - RNA, 21 nt, Artificial Sequence
  RPE65 RNA guide
uccugccucauguuuauacau

SEQ ID NO: 16848 - RNA, 21 nt, Artificial Sequence
  RPE65 RNA guide
uccuggcucugcugcaguugc

SEQ ID NO: 16849 - RNA, 21 nt, Artificial Sequence
  RPE65 RNA guide
uccuucuagcucucaaauuuc

SEQ ID NO: 16850 - RNA, 21 nt, Artificial Sequence
  RPE65 RNA guide
ucggugaauagugcagaucca

SEQ ID NO: 16851 - RNA, 21 nt, Artificial Sequence
  RPE65 RNA guide
ucuaaaucugccguucuugua

SEQ ID NO: 16852 - RNA, 21 nt, Artificial Sequence
  RPE65 RNA guide
ucuagcucucaaauuucaaga

SEQ ID NO: 16853 - RNA, 21 nt, Artificial Sequence
  RPE65 RNA guide
ucucaggaauuguccuccugc

SEQ ID NO: 16854 - RNA, 21 nt, Artificial Sequence
  RPE65 RNA guide
ucucucaggaauuguccuccu

SEQ ID NO: 16855 - RNA, 21 nt, Artificial Sequence
  RPE65 RNA guide
ucucucucaggaauuguccuc

SEQ ID NO: 16856 - RNA, 21 nt, Artificial Sequence
  RPE65 RNA guide
ucucuguagauuucagauuua

SEQ ID NO: 16857 - RNA, 21 nt, Artificial Sequence
  RPE65 RNA guide
ucugaaaucuacagagaagca

SEQ ID NO: 16858 - RNA, 21 nt, Artificial Sequence
  RPE65 RNA guide
ucugcacuauucaccgaggaa

SEQ ID NO: 16859 - RNA, 21 nt, Artificial Sequence
  RPE65 RNA guide
ucugccguucuuguauuuaca

SEQ ID NO: 16860 - RNA, 21 nt, Artificial Sequence
  RPE65 RNA guide
ucugcugcaguugcuuuugcu

SEQ ID NO: 16861 - RNA, 21 nt, Artificial Sequence
  RPE65 RNA guide
ucuggagagaugaagcaucaa

SEQ ID NO: 16862 - RNA, 21 nt, Artificial Sequence
  RPE65 RNA guide
ucugguuaaaucugaaaucua

SEQ ID NO: 16863 - RNA, 21 nt, Artificial Sequence
  RPE65 RNA guide
ucuguagauuucagauuuaac

SEQ ID NO: 16864 - RNA, 21 nt, Artificial Sequence
  RPE65 RNA guide
ucuuauccuggcucugcugca

SEQ ID NO: 16865 - RNA, 21 nt, Artificial Sequence
  RPE65 RNA guide
ucuucugaaaaauaucacuag

SEQ ID NO: 16866 - RNA, 21 nt, Artificial Sequence
  RPE65 RNA guide
ucuucugagcuuuaguuucau

SEQ ID NO: 16867 - RNA, 21 nt, Artificial Sequence
  RPE65 RNA guide
ucuugaaauuugagagcuaga

SEQ ID NO: 16868 - RNA, 21 nt, Artificial Sequence
  RPE65 RNA guide
ucuuguagggaaaccaguuca

SEQ ID NO: 16869 - RNA, 21 nt, Artificial Sequence
  RPE65 RNA guide
ucuuuaaaauauacuuccucg

SEQ ID NO: 16870 - RNA, 21 nt, Artificial Sequence
  RPE65 RNA guide
ugaaacuaaagcucagaagag

SEQ ID NO: 16871 - RNA, 21 nt, Artificial Sequence
  RPE65 RNA guide
ugaaaucuacagagaagcagg

SEQ ID NO: 16872 - RNA, 21 nt, Artificial Sequence
  RPE65 RNA guide
ugaaauuugagagcuagaagg

SEQ ID NO: 16873 - RNA, 21 nt, Artificial Sequence
  RPE65 RNA guide
ugaacugguuucccuacaaga

SEQ ID NO: 16874 - RNA, 21 nt, Artificial Sequence
  RPE65 RNA guide
ugaagcaucaaaaaguacucu

SEQ ID NO: 16875 - RNA, 21 nt, Artificial Sequence
  RPE65 RNA guide
ugaaguucuggagagaugaag

SEQ ID NO: 16876 - RNA, 21 nt, Artificial Sequence
  RPE65 RNA guide
ugaauagugcagauccacuga

SEQ ID NO: 16877 - RNA, 21 nt, Artificial Sequence
  RPE65 RNA guide
ugacuuagcaaaagcaacugc

SEQ ID NO: 16878 - RNA, 21 nt, Artificial Sequence
  RPE65 RNA guide
ugagagagaugaaacauucug

SEQ ID NO: 16879 - RNA, 21 nt, Artificial Sequence
  RPE65 RNA guide
ugagagcuagaaggagcuuua

SEQ ID NO: 16880 - RNA, 21 nt, Artificial Sequence
  RPE65 RNA guide
ugaggcaggaggacaauuccu

SEQ ID NO: 16881 - RNA, 21 nt, Artificial Sequence
  RPE65 RNA guide
ugauaaaguaucauaggaauc

SEQ ID NO: 16882 - RNA, 21 nt, Artificial Sequence
  RPE65 RNA guide
ugaugcuucaucucuccagaa

SEQ ID NO: 16883 - RNA, 21 nt, Artificial Sequence
  RPE65 RNA guide
ugcacuauucaccgaggaagu

SEQ ID NO: 16884 - RNA, 21 nt, Artificial Sequence
  RPE65 RNA guide
ugcagauccacugauuccuau

SEQ ID NO: 16885 - RNA, 21 nt, Artificial Sequence
  RPE65 RNA guide
ugcagcagagccaggauaaga

SEQ ID NO: 16886 - RNA, 21 nt, Artificial Sequence
  RPE65 RNA guide
ugcaguugcuuuugcuaaguc

SEQ ID NO: 16887 - RNA, 21 nt, Artificial Sequence
  RPE65 RNA guide
ugccguucuuguauuuacaaa

SEQ ID NO: 16888 - RNA, 21 nt, Artificial Sequence
  RPE65 RNA guide
ugccucauguuuauacauaaa

SEQ ID NO: 16889 - RNA, 21 nt, Artificial Sequence
  RPE65 RNA guide
ugcuaagucacaguacucuuc

SEQ ID NO: 16890 - RNA, 21 nt, Artificial Sequence
  RPE65 RNA guide
ugcugcaguugcuuuugcuaa

SEQ ID NO: 16891 - RNA, 21 nt, Artificial Sequence
  RPE65 RNA guide
ugcuucaucucuccagaacuu

SEQ ID NO: 16892 - RNA, 21 nt, Artificial Sequence
  RPE65 RNA guide
ugcuucucuguagauuucaga

SEQ ID NO: 16893 - RNA, 21 nt, Artificial Sequence
  RPE65 RNA guide
ugcuuuugcuaagucacagua

SEQ ID NO: 16894 - RNA, 21 nt, Artificial Sequence
  RPE65 RNA guide
uggagagaugaagcaucaaaa

SEQ ID NO: 16895 - RNA, 21 nt, Artificial Sequence
  RPE65 RNA guide
uggaucugcacuauucaccga

SEQ ID NO: 16896 - RNA, 21 nt, Artificial Sequence
  RPE65 RNA guide
uggcucugcugcaguugcuuu

SEQ ID NO: 16897 - RNA, 21 nt, Artificial Sequence
  RPE65 RNA guide
ugguuaaaucugaaaucuaca

SEQ ID NO: 16898 - RNA, 21 nt, Artificial Sequence
  RPE65 RNA guide
ugguucuuauccuggcucugc

SEQ ID NO: 16899 - RNA, 21 nt, Artificial Sequence
  RPE65 RNA guide
ugguuucccuacaagaguacu

SEQ ID NO: 16900 - RNA, 21 nt, Artificial Sequence
  RPE65 RNA guide
uguaaauacaagaacggcaga

SEQ ID NO: 16901 - RNA, 21 nt, Artificial Sequence
  RPE65 RNA guide
uguagggaaaccaguucauua

SEQ ID NO: 16902 - RNA, 21 nt, Artificial Sequence
  RPE65 RNA guide
uguauaaacaugaggcaggag

SEQ ID NO: 16903 - RNA, 21 nt, Artificial Sequence
  RPE65 RNA guide
uguccuccugccucauguuua

SEQ ID NO: 16904 - RNA, 21 nt, Artificial Sequence
  RPE65 RNA guide
ugucuuuaaaauauacuuccu

SEQ ID NO: 16905 - RNA, 21 nt, Artificial Sequence
  RPE65 RNA guide
ugugacuuagcaaaagcaacu

SEQ ID NO: 16906 - RNA, 21 nt, Artificial Sequence
  RPE65 RNA guide
uguuucaucucucucaggaau

SEQ ID NO: 16907 - RNA, 21 nt, Artificial Sequence
  RPE65 RNA guide
uuaaaaaccugguucuuaucc

SEQ ID NO: 16908 - RNA, 21 nt, Artificial Sequence
  RPE65 RNA guide
uuaaagcuccuucuagcucuc

SEQ ID NO: 16909 - RNA, 21 nt, Artificial Sequence
  RPE65 RNA guide
uuaaaucugaaaucuacagag

SEQ ID NO: 16910 - RNA, 21 nt, Artificial Sequence
  RPE65 RNA guide
uuaaauucuaaaucugccguu

SEQ ID NO: 16911 - RNA, 21 nt, Artificial Sequence
  RPE65 RNA guide
uuaaccagaauguuucaucuc

SEQ ID NO: 16912 - RNA, 21 nt, Artificial Sequence
  RPE65 RNA guide
uuacuaacaauagacagucau

SEQ ID NO: 16913 - RNA, 21 nt, Artificial Sequence
  RPE65 RNA guide
uuagcaaaagcaacugcagca

SEQ ID NO: 16914 - RNA, 21 nt, Artificial Sequence
  RPE65 RNA guide
uuagccuauuuuuaaagcucc

SEQ ID NO: 16915 - RNA, 21 nt, Artificial Sequence
  RPE65 RNA guide
uuauccuggcucugcugcagu

SEQ ID NO: 16916 - RNA, 21 nt, Artificial Sequence
  RPE65 RNA guide
uuauguauaaacaugaggcag

SEQ ID NO: 16917 - RNA, 21 nt, Artificial Sequence
  RPE65 RNA guide
uucaccgaggaaguauauuuu

SEQ ID NO: 16918 - RNA, 21 nt, Artificial Sequence
  RPE65 RNA guide
uucaucucuccagaacuucaa

SEQ ID NO: 16919 - RNA, 21 nt, Artificial Sequence
  RPE65 RNA guide
uucaucucucucaggaauugu

SEQ ID NO: 16920 - RNA, 21 nt, Artificial Sequence
  RPE65 RNA guide
uucccuacaagaguacuuuuu

SEQ ID NO: 16921 - RNA, 21 nt, Artificial Sequence
  RPE65 RNA guide
uuccucggugaauagugcaga

SEQ ID NO: 16922 - RNA, 21 nt, Artificial Sequence
  RPE65 RNA guide
uuccugagagagaugaaacau

SEQ ID NO: 16923 - RNA, 21 nt, Artificial Sequence
  RPE65 RNA guide
uucuaaaucugccguucuugu

SEQ ID NO: 16924 - RNA, 21 nt, Artificial Sequence
  RPE65 RNA guide
uucuagcucucaaauuucaag

SEQ ID NO: 16925 - RNA, 21 nt, Artificial Sequence
  RPE65 RNA guide
uucucuguagauuucagauuu

SEQ ID NO: 16926 - RNA, 21 nt, Artificial Sequence
  RPE65 RNA guide
uucuggagagaugaagcauca

SEQ ID NO: 16927 - RNA, 21 nt, Artificial Sequence
  RPE65 RNA guide
uucugguuaaaucugaaaucu

SEQ ID NO: 16928 - RNA, 21 nt, Artificial Sequence
  RPE65 RNA guide
uucuuauccuggcucugcugc

SEQ ID NO: 16929 - RNA, 21 nt, Artificial Sequence
  RPE65 RNA guide
uugaaauuugagagcuagaag

SEQ ID NO: 16930 - RNA, 21 nt, Artificial Sequence
  RPE65 RNA guide
uugaaguucuggagagaugaa

SEQ ID NO: 16931 - RNA, 21 nt, Artificial Sequence
  RPE65 RNA guide
uugagagcuagaaggagcuuu

SEQ ID NO: 16932 - RNA, 21 nt, Artificial Sequence
  RPE65 RNA guide
uugaugcuucaucucuccaga

SEQ ID NO: 16933 - RNA, 21 nt, Artificial Sequence
  RPE65 RNA guide
uugcuaagucacaguacucuu

SEQ ID NO: 16934 - RNA, 21 nt, Artificial Sequence
  RPE65 RNA guide
uugcuuuugcuaagucacagu

SEQ ID NO: 16935 - RNA, 21 nt, Artificial Sequence
  RPE65 RNA guide
uuguaaauacaagaacggcag

SEQ ID NO: 16936 - RNA, 21 nt, Artificial Sequence
  RPE65 RNA guide
uuguagggaaaccaguucauu

SEQ ID NO: 16937 - RNA, 21 nt, Artificial Sequence
  RPE65 RNA guide
uuguccuccugccucauguuu

SEQ ID NO: 16938 - RNA, 21 nt, Artificial Sequence
  RPE65 RNA guide
uugucuuuaaaauauacuucc

SEQ ID NO: 16939 - RNA, 21 nt, Artificial Sequence
  RPE65 RNA guide
uuuaaaaaccugguucuuauc

SEQ ID NO: 16940 - RNA, 21 nt, Artificial Sequence
  RPE65 RNA guide
uuuaaagcuccuucuagcucu

SEQ ID NO: 16941 - RNA, 21 nt, Artificial Sequence
  RPE65 RNA guide
uuuaaccagaauguuucaucu

SEQ ID NO: 16942 - RNA, 21 nt, Artificial Sequence
  RPE65 RNA guide
uuuauguauaaacaugaggca

SEQ ID NO: 16943 - RNA, 21 nt, Artificial Sequence
  RPE65 RNA guide
uuucaucucucucaggaauug

SEQ ID NO: 16944 - RNA, 21 nt, Artificial Sequence
  RPE65 RNA guide
uuucccuacaagaguacuuuu

SEQ ID NO: 16945 - RNA, 21 nt, Artificial Sequence
  RPE65 RNA guide
uuugaaguucuggagagauga

SEQ ID NO: 16946 - RNA, 21 nt, Artificial Sequence
  RPE65 RNA guide
uuugagagcuagaaggagcuu

SEQ ID NO: 16947 - RNA, 21 nt, Artificial Sequence
  RPE65 RNA guide
uuugaugcuucaucucuccag

SEQ ID NO: 16948 - RNA, 21 nt, Artificial Sequence
  RPE65 RNA guide
uuugcuaagucacaguacucu

SEQ ID NO: 16949 - RNA, 21 nt, Artificial Sequence
  RPE65 RNA guide
uuuguaaauacaagaacggca

SEQ ID NO: 16950 - RNA, 21 nt, Artificial Sequence
  RPE65 RNA guide
uuuuaaagcuccuucuagcuc

SEQ ID NO: 16951 - RNA, 21 nt, Artificial Sequence
  RPE65 RNA guide
uuuugaugcuucaucucucca

SEQ ID NO: 16952 - RNA, 21 nt, Artificial Sequence
  RPE65 RNA guide
uuuugcuaagucacaguacuc

SEQ ID NO: 16953 - RNA, 21 nt, Artificial Sequence
  RPE65 RNA guide
uuuuguaaauacaagaacggc

SEQ ID NO: 16954 - RNA, 21 nt, Artificial Sequence
  RPE65 RNA guide
uuuuuaaagcuccuucuagcu

SEQ ID NO: 16955 - RNA, 21 nt, Artificial Sequence
  RPE65 RNA guide
uuuuugaugcuucaucucucc

SEQ ID NO: 16956 - RNA, 22 nt, Artificial Sequence
  RPE65 RNA guide
aaaaaccugguucuuauccugg

SEQ ID NO: 16957 - RNA, 22 nt, Artificial Sequence
  RPE65 RNA guide
aaaaaguacucuuguagggaaa

SEQ ID NO: 16958 - RNA, 22 nt, Artificial Sequence
  RPE65 RNA guide
aaaaccaaaauaaugaacuggu

SEQ ID NO: 16959 - RNA, 22 nt, Artificial Sequence
  RPE65 RNA guide
aaaaccugguucuuauccuggc

SEQ ID NO: 16960 - RNA, 22 nt, Artificial Sequence
  RPE65 RNA guide
aaaagcaacugcagcagagcca

SEQ ID NO: 16961 - RNA, 22 nt, Artificial Sequence
  RPE65 RNA guide
aaaaguacucuuguagggaaac

SEQ ID NO: 16962 - RNA, 22 nt, Artificial Sequence
  RPE65 RNA guide
aaaauaaugaacugguuucccu

SEQ ID NO: 16963 - RNA, 22 nt, Artificial Sequence
  RPE65 RNA guide
aaaauauacuuccucggugaau

SEQ ID NO: 16964 - RNA, 22 nt, Artificial Sequence
  RPE65 RNA guide
aaacaugaggcaggaggacaau

SEQ ID NO: 16965 - RNA, 22 nt, Artificial Sequence
  RPE65 RNA guide
aaaccaaaauaaugaacugguu

SEQ ID NO: 16966 - RNA, 22 nt, Artificial Sequence
  RPE65 RNA guide
aaaccugguucuuauccuggcu

SEQ ID NO: 16967 - RNA, 22 nt, Artificial Sequence
  RPE65 RNA guide
aaacuaaagcucagaagaguac

SEQ ID NO: 16968 - RNA, 22 nt, Artificial Sequence
  RPE65 RNA guide
aaagagaugacugucuauuguu

SEQ ID NO: 16969 - RNA, 22 nt, Artificial Sequence
  RPE65 RNA guide
aaagcaacugcagcagagccag

SEQ ID NO: 16970 - RNA, 22 nt, Artificial Sequence
  RPE65 RNA guide
aaagcucagaagaguacuguga

SEQ ID NO: 16971 - RNA, 22 nt, Artificial Sequence
  RPE65 RNA guide
aaagcuccuucuagcucucaaa

SEQ ID NO: 16972 - RNA, 22 nt, Artificial Sequence
  RPE65 RNA guide
aaaguacucuuguagggaaacc

SEQ ID NO: 16973 - RNA, 22 nt, Artificial Sequence
  RPE65 RNA guide
aaaguaucauaggaaucagugg

SEQ ID NO: 16974 - RNA, 22 nt, Artificial Sequence
  RPE65 RNA guide
aaagucuugaaauuugagagcu

SEQ ID NO: 16975 - RNA, 22 nt, Artificial Sequence
  RPE65 RNA guide
aaauaaugaacugguuucccua

SEQ ID NO: 16976 - RNA, 22 nt, Artificial Sequence
  RPE65 RNA guide
aaauaauuugaaguucuggaga

SEQ ID NO: 16977 - RNA, 22 nt, Artificial Sequence
  RPE65 RNA guide
aaauacaagaacggcagauuua

SEQ ID NO: 16978 - RNA, 22 nt, Artificial Sequence
  RPE65 RNA guide
aaauauacuuccucggugaaua

SEQ ID NO: 16979 - RNA, 22 nt, Artificial Sequence
  RPE65 RNA guide
aaaucugaaaucuacagagaag

SEQ ID NO: 16980 - RNA, 22 nt, Artificial Sequence
  RPE65 RNA guide
aaaucugccguucuuguauuua

SEQ ID NO: 16981 - RNA, 22 nt, Artificial Sequence
  RPE65 RNA guide
aaaugaaacuaaagcucagaag

SEQ ID NO: 16982 - RNA, 22 nt, Artificial Sequence
  RPE65 RNA guide
aaauucuaaaucugccguucuu

SEQ ID NO: 16983 - RNA, 22 nt, Artificial Sequence
  RPE65 RNA guide
aaauuugagagcuagaaggagc

SEQ ID NO: 16984 - RNA, 22 nt, Artificial Sequence
  RPE65 RNA guide
aacaugaggcaggaggacaauu

SEQ ID NO: 16985 - RNA, 22 nt, Artificial Sequence
  RPE65 RNA guide
aaccaaaauaaugaacugguuu

SEQ ID NO: 16986 - RNA, 22 nt, Artificial Sequence
  RPE65 RNA guide
aaccagaauguuucaucucucu

SEQ ID NO: 16987 - RNA, 22 nt, Artificial Sequence
  RPE65 RNA guide
aaccucuagugauauuuuucag

SEQ ID NO: 16988 - RNA, 22 nt, Artificial Sequence
  RPE65 RNA guide
aaccugcuucucuguagauuuc

SEQ ID NO: 16989 - RNA, 22 nt, Artificial Sequence
  RPE65 RNA guide
aaccugguucuuauccuggcuc

SEQ ID NO: 16990 - RNA, 22 nt, Artificial Sequence
  RPE65 RNA guide
aacggcagauuuagaauuuaaa

SEQ ID NO: 16991 - RNA, 22 nt, Artificial Sequence
  RPE65 RNA guide
aacuaaagcucagaagaguacu

SEQ ID NO: 16992 - RNA, 22 nt, Artificial Sequence
  RPE65 RNA guide
aacugcagcagagccaggauaa

SEQ ID NO: 16993 - RNA, 22 nt, Artificial Sequence
  RPE65 RNA guide
aacugguuucccuacaagagua

SEQ ID NO: 16994 - RNA, 22 nt, Artificial Sequence
  RPE65 RNA guide
aagacuuuauguauaaacauga

SEQ ID NO: 16995 - RNA, 22 nt, Artificial Sequence
  RPE65 RNA guide
aagagaugacugucuauuguua

SEQ ID NO: 16996 - RNA, 22 nt, Artificial Sequence
  RPE65 RNA guide
aagaguacugugacuuagcaaa

SEQ ID NO: 16997 - RNA, 22 nt, Artificial Sequence
  RPE65 RNA guide
aagaguacuuuuugaugcuuca

SEQ ID NO: 16998 - RNA, 22 nt, Artificial Sequence
  RPE65 RNA guide
aagcaacugcagcagagccagg

SEQ ID NO: 16999 - RNA, 22 nt, Artificial Sequence
  RPE65 RNA guide
aagcaucaaaaaguacucuugu

SEQ ID NO: 17000 - RNA, 22 nt, Artificial Sequence
  RPE65 RNA guide
aagcucagaagaguacugugac

SEQ ID NO: 17001 - RNA, 22 nt, Artificial Sequence
  RPE65 RNA guide
aagcuccuucuagcucucaaau

SEQ ID NO: 17002 - RNA, 22 nt, Artificial Sequence
  RPE65 RNA guide
aaguacucuuguagggaaacca

SEQ ID NO: 17003 - RNA, 22 nt, Artificial Sequence
  RPE65 RNA guide
aaguagaaauaaagagaugacu

SEQ ID NO: 17004 - RNA, 22 nt, Artificial Sequence
  RPE65 RNA guide
aaguaucauaggaaucagugga

SEQ ID NO: 17005 - RNA, 22 nt, Artificial Sequence
  RPE65 RNA guide
aagucacaguacucuucugagc

SEQ ID NO: 17006 - RNA, 22 nt, Artificial Sequence
  RPE65 RNA guide
aagucuugaaauuugagagcua

SEQ ID NO: 17007 - RNA, 22 nt, Artificial Sequence
  RPE65 RNA guide
aaguucuggagagaugaagcau

SEQ ID NO: 17008 - RNA, 22 nt, Artificial Sequence
  RPE65 RNA guide
aauaaugaacugguuucccuac

SEQ ID NO: 17009 - RNA, 22 nt, Artificial Sequence
  RPE65 RNA guide
aauaauuugaaguucuggagag

SEQ ID NO: 17010 - RNA, 22 nt, Artificial Sequence
  RPE65 RNA guide
aauacaagaacggcagauuuag

SEQ ID NO: 17011 - RNA, 22 nt, Artificial Sequence
  RPE65 RNA guide
aauagugcagauccacugauuc

SEQ ID NO: 17012 - RNA, 22 nt, Artificial Sequence
  RPE65 RNA guide
aauauacuuccucggugaauag

SEQ ID NO: 17013 - RNA, 22 nt, Artificial Sequence
  RPE65 RNA guide
aaucaguggaucugcacuauuc

SEQ ID NO: 17014 - RNA, 22 nt, Artificial Sequence
  RPE65 RNA guide
aaucugaaaucuacagagaagc

SEQ ID NO: 17015 - RNA, 22 nt, Artificial Sequence
  RPE65 RNA guide
aaucugccguucuuguauuuac

SEQ ID NO: 17016 - RNA, 22 nt, Artificial Sequence
  RPE65 RNA guide
aaucuucugaaaaauaucacua

SEQ ID NO: 17017 - RNA, 22 nt, Artificial Sequence
  RPE65 RNA guide
aaugaaacuaaagcucagaaga

SEQ ID NO: 17018 - RNA, 22 nt, Artificial Sequence
  RPE65 RNA guide
aaugaacugguuucccuacaag

SEQ ID NO: 17019 - RNA, 22 nt, Artificial Sequence
  RPE65 RNA guide
aauguuucaucucucucaggaa

SEQ ID NO: 17020 - RNA, 22 nt, Artificial Sequence
  RPE65 RNA guide
aauuagccuauuuuuaaagcuc

SEQ ID NO: 17021 - RNA, 22 nt, Artificial Sequence
  RPE65 RNA guide
aauuccugagagagaugaaaca

SEQ ID NO: 17022 - RNA, 22 nt, Artificial Sequence
  RPE65 RNA guide
aauucuaaaucugccguucuug

SEQ ID NO: 17023 - RNA, 22 nt, Artificial Sequence
  RPE65 RNA guide
aauuguccuccugccucauguu

SEQ ID NO: 17024 - RNA, 22 nt, Artificial Sequence
  RPE65 RNA guide
aauuuaaaaaccugguucuuau

SEQ ID NO: 17025 - RNA, 22 nt, Artificial Sequence
  RPE65 RNA guide
aauuugaaguucuggagagaug

SEQ ID NO: 17026 - RNA, 22 nt, Artificial Sequence
  RPE65 RNA guide
aauuugagagcuagaaggagcu

SEQ ID NO: 17027 - RNA, 22 nt, Artificial Sequence
  RPE65 RNA guide
aauuuuguaaauacaagaacgg

SEQ ID NO: 17028 - RNA, 22 nt, Artificial Sequence
  RPE65 RNA guide
acaaaugaaacuaaagcucaga

SEQ ID NO: 17029 - RNA, 22 nt, Artificial Sequence
  RPE65 RNA guide
acaagaacggcagauuuagaau

SEQ ID NO: 17030 - RNA, 22 nt, Artificial Sequence
  RPE65 RNA guide
acaagaguacuuuuugaugcuu

SEQ ID NO: 17031 - RNA, 22 nt, Artificial Sequence
  RPE65 RNA guide
acaauagacagucaucucuuua

SEQ ID NO: 17032 - RNA, 22 nt, Artificial Sequence
  RPE65 RNA guide
acaauuccugagagagaugaaa

SEQ ID NO: 17033 - RNA, 22 nt, Artificial Sequence
  RPE65 RNA guide
acaauuuuguaaauacaagaac

SEQ ID NO: 17034 - RNA, 22 nt, Artificial Sequence
  RPE65 RNA guide
acaguacucuucugagcuuuag

SEQ ID NO: 17035 - RNA, 22 nt, Artificial Sequence
  RPE65 RNA guide
acauaaagucuugaaauuugag

SEQ ID NO: 17036 - RNA, 22 nt, Artificial Sequence
  RPE65 RNA guide
acaugaggcaggaggacaauuc

SEQ ID NO: 17037 - RNA, 22 nt, Artificial Sequence
  RPE65 RNA guide
acauucugguuaaaucugaaau

SEQ ID NO: 17038 - RNA, 22 nt, Artificial Sequence
  RPE65 RNA guide
accaaaauaaugaacugguuuc

SEQ ID NO: 17039 - RNA, 22 nt, Artificial Sequence
  RPE65 RNA guide
accagaauguuucaucucucuc

SEQ ID NO: 17040 - RNA, 22 nt, Artificial Sequence
  RPE65 RNA guide
accagguuuuuaaauucuaaau

SEQ ID NO: 17041 - RNA, 22 nt, Artificial Sequence
  RPE65 RNA guide
accgaggaaguauauuuuaaag

SEQ ID NO: 17042 - RNA, 22 nt, Artificial Sequence
  RPE65 RNA guide
accucuagugauauuuuucaga

SEQ ID NO: 17043 - RNA, 22 nt, Artificial Sequence
  RPE65 RNA guide
accugcuucucuguagauuuca

SEQ ID NO: 17044 - RNA, 22 nt, Artificial Sequence
  RPE65 RNA guide
accugguucuuauccuggcucu

SEQ ID NO: 17045 - RNA, 22 nt, Artificial Sequence
  RPE65 RNA guide
acggcagauuuagaauuuaaaa

SEQ ID NO: 17046 - RNA, 22 nt, Artificial Sequence
  RPE65 RNA guide
acuaaagcucagaagaguacug

SEQ ID NO: 17047 - RNA, 22 nt, Artificial Sequence
  RPE65 RNA guide
acuaacaauagacagucaucuc

SEQ ID NO: 17048 - RNA, 22 nt, Artificial Sequence
  RPE65 RNA guide
acuauucaccgaggaaguauau

SEQ ID NO: 17049 - RNA, 22 nt, Artificial Sequence
  RPE65 RNA guide
acucuucugagcuuuaguuuca

SEQ ID NO: 17050 - RNA, 22 nt, Artificial Sequence
  RPE65 RNA guide
acucuuguagggaaaccaguuc

SEQ ID NO: 17051 - RNA, 22 nt, Artificial Sequence
  RPE65 RNA guide
acugcagcagagccaggauaag

SEQ ID NO: 17052 - RNA, 22 nt, Artificial Sequence
  RPE65 RNA guide
acugguuucccuacaagaguac

SEQ ID NO: 17053 - RNA, 22 nt, Artificial Sequence
  RPE65 RNA guide
acugugacuuagcaaaagcaac

SEQ ID NO: 17054 - RNA, 22 nt, Artificial Sequence
  RPE65 RNA guide
acuuagcaaaagcaacugcagc

SEQ ID NO: 17055 - RNA, 22 nt, Artificial Sequence
  RPE65 RNA guide
acuuccucggugaauagugcag

SEQ ID NO: 17056 - RNA, 22 nt, Artificial Sequence
  RPE65 RNA guide
acuuuauguauaaacaugaggc

SEQ ID NO: 17057 - RNA, 22 nt, Artificial Sequence
  RPE65 RNA guide
acuuuuugaugcuucaucucuc

SEQ ID NO: 17058 - RNA, 22 nt, Artificial Sequence
  RPE65 RNA guide
agaaauaaagagaugacugucu

SEQ ID NO: 17059 - RNA, 22 nt, Artificial Sequence
  RPE65 RNA guide
agaagaguacugugacuuagca

SEQ ID NO: 17060 - RNA, 22 nt, Artificial Sequence
  RPE65 RNA guide
agaaggagcuuuaaaaauaggc

SEQ ID NO: 17061 - RNA, 22 nt, Artificial Sequence
  RPE65 RNA guide
agaauguuucaucucucucagg

SEQ ID NO: 17062 - RNA, 22 nt, Artificial Sequence
  RPE65 RNA guide
agaauuuaaaaaccugguucuu

SEQ ID NO: 17063 - RNA, 22 nt, Artificial Sequence
  RPE65 RNA guide
agacaauuuuguaaauacaaga

SEQ ID NO: 17064 - RNA, 22 nt, Artificial Sequence
  RPE65 RNA guide
agacagucaucucuuuauuucu

SEQ ID NO: 17065 - RNA, 22 nt, Artificial Sequence
  RPE65 RNA guide
agacuuuauguauaaacaugag

SEQ ID NO: 17066 - RNA, 22 nt, Artificial Sequence
  RPE65 RNA guide
agagagaugaaacauucugguu

SEQ ID NO: 17067 - RNA, 22 nt, Artificial Sequence
  RPE65 RNA guide
agagaugaaacauucugguuaa

SEQ ID NO: 17068 - RNA, 22 nt, Artificial Sequence
  RPE65 RNA guide
agagaugaagcaucaaaaagua

SEQ ID NO: 17069 - RNA, 22 nt, Artificial Sequence
  RPE65 RNA guide
agagaugacugucuauuguuag

SEQ ID NO: 17070 - RNA, 22 nt, Artificial Sequence
  RPE65 RNA guide
agagccaggauaagaaccaggu

SEQ ID NO: 17071 - RNA, 22 nt, Artificial Sequence
  RPE65 RNA guide
agagcuagaaggagcuuuaaaa

SEQ ID NO: 17072 - RNA, 22 nt, Artificial Sequence
  RPE65 RNA guide
agaguacugugacuuagcaaaa

SEQ ID NO: 17073 - RNA, 22 nt, Artificial Sequence
  RPE65 RNA guide
agaguacuuuuugaugcuucau

SEQ ID NO: 17074 - RNA, 22 nt, Artificial Sequence
  RPE65 RNA guide
agauccacugauuccuaugaua

SEQ ID NO: 17075 - RNA, 22 nt, Artificial Sequence
  RPE65 RNA guide
agaugaaacauucugguuaaau

SEQ ID NO: 17076 - RNA, 22 nt, Artificial Sequence
  RPE65 RNA guide
agaugaagcaucaaaaaguacu

SEQ ID NO: 17077 - RNA, 22 nt, Artificial Sequence
  RPE65 RNA guide
agaugacugucuauuguuagua

SEQ ID NO: 17078 - RNA, 22 nt, Artificial Sequence
  RPE65 RNA guide
agauuuaaccagaauguuucau

SEQ ID NO: 17079 - RNA, 22 nt, Artificial Sequence
  RPE65 RNA guide
agcaaaagcaacugcagcagag

SEQ ID NO: 17080 - RNA, 22 nt, Artificial Sequence
  RPE65 RNA guide
agcaacugcagcagagccagga

SEQ ID NO: 17081 - RNA, 22 nt, Artificial Sequence
  RPE65 RNA guide
agcagagccaggauaagaacca

SEQ ID NO: 17082 - RNA, 22 nt, Artificial Sequence
  RPE65 RNA guide
agcaucaaaaaguacucuugua

SEQ ID NO: 17083 - RNA, 22 nt, Artificial Sequence
  RPE65 RNA guide
agccaggauaagaaccagguuu

SEQ ID NO: 17084 - RNA, 22 nt, Artificial Sequence
  RPE65 RNA guide
agccuauuuuuaaagcuccuuc

SEQ ID NO: 17085 - RNA, 22 nt, Artificial Sequence
  RPE65 RNA guide
agcuagaaggagcuuuaaaaau

SEQ ID NO: 17086 - RNA, 22 nt, Artificial Sequence
  RPE65 RNA guide
agcucagaagaguacugugacu

SEQ ID NO: 17087 - RNA, 22 nt, Artificial Sequence
  RPE65 RNA guide
agcuccuucuagcucucaaauu

SEQ ID NO: 17088 - RNA, 22 nt, Artificial Sequence
  RPE65 RNA guide
agcucucaaauuucaagacuuu

SEQ ID NO: 17089 - RNA, 22 nt, Artificial Sequence
  RPE65 RNA guide
aggaaucaguggaucugcacua

SEQ ID NO: 17090 - RNA, 22 nt, Artificial Sequence
  RPE65 RNA guide
aggaauuguccuccugccucau

SEQ ID NO: 17091 - RNA, 22 nt, Artificial Sequence
  RPE65 RNA guide
aggacaauuccugagagagaug

SEQ ID NO: 17092 - RNA, 22 nt, Artificial Sequence
  RPE65 RNA guide
aggaggacaauuccugagagag

SEQ ID NO: 17093 - RNA, 22 nt, Artificial Sequence
  RPE65 RNA guide
aggauaagaaccagguuuuuaa

SEQ ID NO: 17094 - RNA, 22 nt, Artificial Sequence
  RPE65 RNA guide
aggcaggaggacaauuccugag

SEQ ID NO: 17095 - RNA, 22 nt, Artificial Sequence
  RPE65 RNA guide
agggaaaccaguucauuauuuu

SEQ ID NO: 17096 - RNA, 22 nt, Artificial Sequence
  RPE65 RNA guide
agguuuuuaaauucuaaaucug

SEQ ID NO: 17097 - RNA, 22 nt, Artificial Sequence
  RPE65 RNA guide
aguacucuucugagcuuuaguu

SEQ ID NO: 17098 - RNA, 22 nt, Artificial Sequence
  RPE65 RNA guide
aguacucuuguagggaaaccag

SEQ ID NO: 17099 - RNA, 22 nt, Artificial Sequence
  RPE65 RNA guide
aguacugugacuuagcaaaagc

SEQ ID NO: 17100 - RNA, 22 nt, Artificial Sequence
  RPE65 RNA guide
aguacuuuuugaugcuucaucu

SEQ ID NO: 17101 - RNA, 22 nt, Artificial Sequence
  RPE65 RNA guide
aguagaaauaaagagaugacug

SEQ ID NO: 17102 - RNA, 22 nt, Artificial Sequence
  RPE65 RNA guide
aguaucauaggaaucaguggau

SEQ ID NO: 17103 - RNA, 22 nt, Artificial Sequence
  RPE65 RNA guide
agucacaguacucuucugagcu

SEQ ID NO: 17104 - RNA, 22 nt, Artificial Sequence
  RPE65 RNA guide
agucuugaaauuugagagcuag

SEQ ID NO: 17105 - RNA, 22 nt, Artificial Sequence
  RPE65 RNA guide
agugcagauccacugauuccua

SEQ ID NO: 17106 - RNA, 22 nt, Artificial Sequence
  RPE65 RNA guide
aguggaucugcacuauucaccg

SEQ ID NO: 17107 - RNA, 22 nt, Artificial Sequence
  RPE65 RNA guide
aguucuggagagaugaagcauc

SEQ ID NO: 17108 - RNA, 22 nt, Artificial Sequence
  RPE65 RNA guide
aguugcuuuugcuaagucacag

SEQ ID NO: 17109 - RNA, 22 nt, Artificial Sequence
  RPE65 RNA guide
auaaacaugaggcaggaggaca

SEQ ID NO: 17110 - RNA, 22 nt, Artificial Sequence
  RPE65 RNA guide
auaaagagaugacugucuauug

SEQ ID NO: 17111 - RNA, 22 nt, Artificial Sequence
  RPE65 RNA guide
auaaaguaucauaggaaucagu

SEQ ID NO: 17112 - RNA, 22 nt, Artificial Sequence
  RPE65 RNA guide
auaaagucuugaaauuugagag

SEQ ID NO: 17113 - RNA, 22 nt, Artificial Sequence
  RPE65 RNA guide
auaaugaacugguuucccuaca

SEQ ID NO: 17114 - RNA, 22 nt, Artificial Sequence
  RPE65 RNA guide
auaauuugaaguucuggagaga

SEQ ID NO: 17115 - RNA, 22 nt, Artificial Sequence
  RPE65 RNA guide
auacaagaacggcagauuuaga

SEQ ID NO: 17116 - RNA, 22 nt, Artificial Sequence
  RPE65 RNA guide
auacuuccucggugaauagugc

SEQ ID NO: 17117 - RNA, 22 nt, Artificial Sequence
  RPE65 RNA guide
auagacagucaucucuuuauuu

SEQ ID NO: 17118 - RNA, 22 nt, Artificial Sequence
  RPE65 RNA guide
auaggaaucaguggaucugcac

SEQ ID NO: 17119 - RNA, 22 nt, Artificial Sequence
  RPE65 RNA guide
auagugcagauccacugauucc

SEQ ID NO: 17120 - RNA, 22 nt, Artificial Sequence
  RPE65 RNA guide
auauacuuccucggugaauagu

SEQ ID NO: 17121 - RNA, 22 nt, Artificial Sequence
  RPE65 RNA guide
aucaaaaaguacucuuguaggg

SEQ ID NO: 17122 - RNA, 22 nt, Artificial Sequence
  RPE65 RNA guide
aucaguggaucugcacuauuca

SEQ ID NO: 17123 - RNA, 22 nt, Artificial Sequence
  RPE65 RNA guide
aucauaggaaucaguggaucug

SEQ ID NO: 17124 - RNA, 22 nt, Artificial Sequence
  RPE65 RNA guide
aucauuacuaacaauagacagu

SEQ ID NO: 17125 - RNA, 22 nt, Artificial Sequence
  RPE65 RNA guide
auccacugauuccuaugauacu

SEQ ID NO: 17126 - RNA, 22 nt, Artificial Sequence
  RPE65 RNA guide
auccuggcucugcugcaguugc

SEQ ID NO: 17127 - RNA, 22 nt, Artificial Sequence
  RPE65 RNA guide
aucucucucaggaauuguccuc

SEQ ID NO: 17128 - RNA, 22 nt, Artificial Sequence
  RPE65 RNA guide
aucugaaaucuacagagaagca

SEQ ID NO: 17129 - RNA, 22 nt, Artificial Sequence
  RPE65 RNA guide
aucugcacuauucaccgaggaa

SEQ ID NO: 17130 - RNA, 22 nt, Artificial Sequence
  RPE65 RNA guide
aucugccguucuuguauuuaca

SEQ ID NO: 17131 - RNA, 22 nt, Artificial Sequence
  RPE65 RNA guide
aucuucugaaaaauaucacuag

SEQ ID NO: 17132 - RNA, 22 nt, Artificial Sequence
  RPE65 RNA guide
augaaacuaaagcucagaagag

SEQ ID NO: 17133 - RNA, 22 nt, Artificial Sequence
  RPE65 RNA guide
augaacugguuucccuacaaga

SEQ ID NO: 17134 - RNA, 22 nt, Artificial Sequence
  RPE65 RNA guide
augaagcaucaaaaaguacucu

SEQ ID NO: 17135 - RNA, 22 nt, Artificial Sequence
  RPE65 RNA guide
augaggcaggaggacaauuccu

SEQ ID NO: 17136 - RNA, 22 nt, Artificial Sequence
  RPE65 RNA guide
augcuucaucucuccagaacuu

SEQ ID NO: 17137 - RNA, 22 nt, Artificial Sequence
  RPE65 RNA guide
auguauaaacaugaggcaggag

SEQ ID NO: 17138 - RNA, 22 nt, Artificial Sequence
  RPE65 RNA guide
auguuucaucucucucaggaau

SEQ ID NO: 17139 - RNA, 22 nt, Artificial Sequence
  RPE65 RNA guide
auuacuaacaauagacagucau

SEQ ID NO: 17140 - RNA, 22 nt, Artificial Sequence
  RPE65 RNA guide
auuagccuauuuuuaaagcucc

SEQ ID NO: 17141 - RNA, 22 nt, Artificial Sequence
  RPE65 RNA guide
auucaccgaggaaguauauuuu

SEQ ID NO: 17142 - RNA, 22 nt, Artificial Sequence
  RPE65 RNA guide
auuccugagagagaugaaacau

SEQ ID NO: 17143 - RNA, 22 nt, Artificial Sequence
  RPE65 RNA guide
auucuaaaucugccguucuugu

SEQ ID NO: 17144 - RNA, 22 nt, Artificial Sequence
  RPE65 RNA guide
auucugguuaaaucugaaaucu

SEQ ID NO: 17145 - RNA, 22 nt, Artificial Sequence
  RPE65 RNA guide
auuguccuccugccucauguuu

SEQ ID NO: 17146 - RNA, 22 nt, Artificial Sequence
  RPE65 RNA guide
auugucuuuaaaauauacuucc

SEQ ID NO: 17147 - RNA, 22 nt, Artificial Sequence
  RPE65 RNA guide
auuuaaaaaccugguucuuauc

SEQ ID NO: 17148 - RNA, 22 nt, Artificial Sequence
  RPE65 RNA guide
auuuaaccagaauguuucaucu

SEQ ID NO: 17149 - RNA, 22 nt, Artificial Sequence
  RPE65 RNA guide
auuugaaguucuggagagauga

SEQ ID NO: 17150 - RNA, 22 nt, Artificial Sequence
  RPE65 RNA guide
auuugagagcuagaaggagcuu

SEQ ID NO: 17151 - RNA, 22 nt, Artificial Sequence
  RPE65 RNA guide
auuuuguaaauacaagaacggc

SEQ ID NO: 17152 - RNA, 22 nt, Artificial Sequence
  RPE65 RNA guide
auuuuuaaagcuccuucuagcu

SEQ ID NO: 17153 - RNA, 22 nt, Artificial Sequence
  RPE65 RNA guide
caaaaaguacucuuguagggaa

SEQ ID NO: 17154 - RNA, 22 nt, Artificial Sequence
  RPE65 RNA guide
caaaagcaacugcagcagagcc

SEQ ID NO: 17155 - RNA, 22 nt, Artificial Sequence
  RPE65 RNA guide
caaaauaaugaacugguuuccc

SEQ ID NO: 17156 - RNA, 22 nt, Artificial Sequence
  RPE65 RNA guide
caaaugaaacuaaagcucagaa

SEQ ID NO: 17157 - RNA, 22 nt, Artificial Sequence
  RPE65 RNA guide
caacugcagcagagccaggaua

SEQ ID NO: 17158 - RNA, 22 nt, Artificial Sequence
  RPE65 RNA guide
caagaacggcagauuuagaauu

SEQ ID NO: 17159 - RNA, 22 nt, Artificial Sequence
  RPE65 RNA guide
caagacuuuauguauaaacaug

SEQ ID NO: 17160 - RNA, 22 nt, Artificial Sequence
  RPE65 RNA guide
caagaguacuuuuugaugcuuc

SEQ ID NO: 17161 - RNA, 22 nt, Artificial Sequence
  RPE65 RNA guide
caauagacagucaucucuuuau

SEQ ID NO: 17162 - RNA, 22 nt, Artificial Sequence
  RPE65 RNA guide
caauuccugagagagaugaaac

SEQ ID NO: 17163 - RNA, 22 nt, Artificial Sequence
  RPE65 RNA guide
caauuuuguaaauacaagaacg

SEQ ID NO: 17164 - RNA, 22 nt, Artificial Sequence
  RPE65 RNA guide
cacaguacucuucugagcuuua

SEQ ID NO: 17165 - RNA, 22 nt, Artificial Sequence
  RPE65 RNA guide
caccgaggaaguauauuuuaaa

SEQ ID NO: 17166 - RNA, 22 nt, Artificial Sequence
  RPE65 RNA guide
cacuauucaccgaggaaguaua

SEQ ID NO: 17167 - RNA, 22 nt, Artificial Sequence
  RPE65 RNA guide
cacugauuccuaugauacuuua

SEQ ID NO: 17168 - RNA, 22 nt, Artificial Sequence
  RPE65 RNA guide
cagaagaguacugugacuuagc

SEQ ID NO: 17169 - RNA, 22 nt, Artificial Sequence
  RPE65 RNA guide
cagaauguuucaucucucucag

SEQ ID NO: 17170 - RNA, 22 nt, Artificial Sequence
  RPE65 RNA guide
cagagccaggauaagaaccagg

SEQ ID NO: 17171 - RNA, 22 nt, Artificial Sequence
  RPE65 RNA guide
cagauccacugauuccuaugau

SEQ ID NO: 17172 - RNA, 22 nt, Artificial Sequence
  RPE65 RNA guide
cagauuuaaccagaauguuuca

SEQ ID NO: 17173 - RNA, 22 nt, Artificial Sequence
  RPE65 RNA guide
cagcagagccaggauaagaacc

SEQ ID NO: 17174 - RNA, 22 nt, Artificial Sequence
  RPE65 RNA guide
caggaauuguccuccugccuca

SEQ ID NO: 17175 - RNA, 22 nt, Artificial Sequence
  RPE65 RNA guide
caggaggacaauuccugagaga

SEQ ID NO: 17176 - RNA, 22 nt, Artificial Sequence
  RPE65 RNA guide
caggauaagaaccagguuuuua

SEQ ID NO: 17177 - RNA, 22 nt, Artificial Sequence
  RPE65 RNA guide
cagguuuuuaaauucuaaaucu

SEQ ID NO: 17178 - RNA, 22 nt, Artificial Sequence
  RPE65 RNA guide
caguacucuucugagcuuuagu

SEQ ID NO: 17179 - RNA, 22 nt, Artificial Sequence
  RPE65 RNA guide
caguggaucugcacuauucacc

SEQ ID NO: 17180 - RNA, 22 nt, Artificial Sequence
  RPE65 RNA guide
caguugcuuuugcuaagucaca

SEQ ID NO: 17181 - RNA, 22 nt, Artificial Sequence
  RPE65 RNA guide
cauaaagucuugaaauuugaga

SEQ ID NO: 17182 - RNA, 22 nt, Artificial Sequence
  RPE65 RNA guide
cauaggaaucaguggaucugca

SEQ ID NO: 17183 - RNA, 22 nt, Artificial Sequence
  RPE65 RNA guide
caucaaaaaguacucuuguagg

SEQ ID NO: 17184 - RNA, 22 nt, Artificial Sequence
  RPE65 RNA guide
caucucuccagaacuucaaauu

SEQ ID NO: 17185 - RNA, 22 nt, Artificial Sequence
  RPE65 RNA guide
caucucucucaggaauuguccu

SEQ ID NO: 17186 - RNA, 22 nt, Artificial Sequence
  RPE65 RNA guide
caugaggcaggaggacaauucc

SEQ ID NO: 17187 - RNA, 22 nt, Artificial Sequence
  RPE65 RNA guide
cauuacuaacaauagacaguca

SEQ ID NO: 17188 - RNA, 22 nt, Artificial Sequence
  RPE65 RNA guide
cauucugguuaaaucugaaauc

SEQ ID NO: 17189 - RNA, 22 nt, Artificial Sequence
  RPE65 RNA guide
ccaaaauaaugaacugguuucc

SEQ ID NO: 17190 - RNA, 22 nt, Artificial Sequence
  RPE65 RNA guide
ccacugauuccuaugauacuuu

SEQ ID NO: 17191 - RNA, 22 nt, Artificial Sequence
  RPE65 RNA guide
ccagaauguuucaucucucuca

SEQ ID NO: 17192 - RNA, 22 nt, Artificial Sequence
  RPE65 RNA guide
ccaggauaagaaccagguuuuu

SEQ ID NO: 17193 - RNA, 22 nt, Artificial Sequence
  RPE65 RNA guide
ccagguuuuuaaauucuaaauc

SEQ ID NO: 17194 - RNA, 22 nt, Artificial Sequence
  RPE65 RNA guide
cccuacaagaguacuuuuugau

SEQ ID NO: 17195 - RNA, 22 nt, Artificial Sequence
  RPE65 RNA guide
ccgaggaaguauauuuuaaaga

SEQ ID NO: 17196 - RNA, 22 nt, Artificial Sequence
  RPE65 RNA guide
ccguucuuguauuuacaaaauu

SEQ ID NO: 17197 - RNA, 22 nt, Artificial Sequence
  RPE65 RNA guide
ccuacaagaguacuuuuugaug

SEQ ID NO: 17198 - RNA, 22 nt, Artificial Sequence
  RPE65 RNA guide
ccuauuuuuaaagcuccuucua

SEQ ID NO: 17199 - RNA, 22 nt, Artificial Sequence
  RPE65 RNA guide
ccucauguuuauacauaaaguc

SEQ ID NO: 17200 - RNA, 22 nt, Artificial Sequence
  RPE65 RNA guide
ccuccugccucauguuuauaca

SEQ ID NO: 17201 - RNA, 22 nt, Artificial Sequence
  RPE65 RNA guide
ccucggugaauagugcagaucc

SEQ ID NO: 17202 - RNA, 22 nt, Artificial Sequence
  RPE65 RNA guide
ccucuagugauauuuuucagaa

SEQ ID NO: 17203 - RNA, 22 nt, Artificial Sequence
  RPE65 RNA guide
ccugagagagaugaaacauucu

SEQ ID NO: 17204 - RNA, 22 nt, Artificial Sequence
  RPE65 RNA guide
ccugccucauguuuauacauaa

SEQ ID NO: 17205 - RNA, 22 nt, Artificial Sequence
  RPE65 RNA guide
ccugcuucucuguagauuucag

SEQ ID NO: 17206 - RNA, 22 nt, Artificial Sequence
  RPE65 RNA guide
ccuggcucugcugcaguugcuu

SEQ ID NO: 17207 - RNA, 22 nt, Artificial Sequence
  RPE65 RNA guide
ccugguucuuauccuggcucug

SEQ ID NO: 17208 - RNA, 22 nt, Artificial Sequence
  RPE65 RNA guide
ccuucuagcucucaaauuucaa

SEQ ID NO: 17209 - RNA, 22 nt, Artificial Sequence
  RPE65 RNA guide
cggcagauuuagaauuuaaaaa

SEQ ID NO: 17210 - RNA, 22 nt, Artificial Sequence
  RPE65 RNA guide
cggugaauagugcagauccacu

SEQ ID NO: 17211 - RNA, 22 nt, Artificial Sequence
  RPE65 RNA guide
cuaaagcucagaagaguacugu

SEQ ID NO: 17212 - RNA, 22 nt, Artificial Sequence
  RPE65 RNA guide
cuaaaucugccguucuuguauu

SEQ ID NO: 17213 - RNA, 22 nt, Artificial Sequence
  RPE65 RNA guide
cuaacaauagacagucaucucu

SEQ ID NO: 17214 - RNA, 22 nt, Artificial Sequence
  RPE65 RNA guide
cuaagucacaguacucuucuga

SEQ ID NO: 17215 - RNA, 22 nt, Artificial Sequence
  RPE65 RNA guide
cuacaagaguacuuuuugaugc

SEQ ID NO: 17216 - RNA, 22 nt, Artificial Sequence
  RPE65 RNA guide
cuagaaggagcuuuaaaaauag

SEQ ID NO: 17217 - RNA, 22 nt, Artificial Sequence
  RPE65 RNA guide
cuagcucucaaauuucaagacu

SEQ ID NO: 17218 - RNA, 22 nt, Artificial Sequence
  RPE65 RNA guide
cuauucaccgaggaaguauauu

SEQ ID NO: 17219 - RNA, 22 nt, Artificial Sequence
  RPE65 RNA guide
cuauuuuuaaagcuccuucuag

SEQ ID NO: 17220 - RNA, 22 nt, Artificial Sequence
  RPE65 RNA guide
cucagaagaguacugugacuua

SEQ ID NO: 17221 - RNA, 22 nt, Artificial Sequence
  RPE65 RNA guide
cucaggaauuguccuccugccu

SEQ ID NO: 17222 - RNA, 22 nt, Artificial Sequence
  RPE65 RNA guide
cuccugccucauguuuauacau

SEQ ID NO: 17223 - RNA, 22 nt, Artificial Sequence
  RPE65 RNA guide
cuccuucuagcucucaaauuuc

SEQ ID NO: 17224 - RNA, 22 nt, Artificial Sequence
  RPE65 RNA guide
cucggugaauagugcagaucca

SEQ ID NO: 17225 - RNA, 22 nt, Artificial Sequence
  RPE65 RNA guide
cucucaggaauuguccuccugc

SEQ ID NO: 17226 - RNA, 22 nt, Artificial Sequence
  RPE65 RNA guide
cucucucaggaauuguccuccu

SEQ ID NO: 17227 - RNA, 22 nt, Artificial Sequence
  RPE65 RNA guide
cucugcugcaguugcuuuugcu

SEQ ID NO: 17228 - RNA, 22 nt, Artificial Sequence
  RPE65 RNA guide
cucuguagauuucagauuuaac

SEQ ID NO: 17229 - RNA, 22 nt, Artificial Sequence
  RPE65 RNA guide
cucuucugagcuuuaguuucau

SEQ ID NO: 17230 - RNA, 22 nt, Artificial Sequence
  RPE65 RNA guide
cucuuguagggaaaccaguuca

SEQ ID NO: 17231 - RNA, 22 nt, Artificial Sequence
  RPE65 RNA guide
cugaaaucuacagagaagcagg

SEQ ID NO: 17232 - RNA, 22 nt, Artificial Sequence
  RPE65 RNA guide
cugagagagaugaaacauucug

SEQ ID NO: 17233 - RNA, 22 nt, Artificial Sequence
  RPE65 RNA guide
cugcacuauucaccgaggaagu

SEQ ID NO: 17234 - RNA, 22 nt, Artificial Sequence
  RPE65 RNA guide
cugcagcagagccaggauaaga

SEQ ID NO: 17235 - RNA, 22 nt, Artificial Sequence
  RPE65 RNA guide
cugcaguugcuuuugcuaaguc

SEQ ID NO: 17236 - RNA, 22 nt, Artificial Sequence
  RPE65 RNA guide
cugccguucuuguauuuacaaa

SEQ ID NO: 17237 - RNA, 22 nt, Artificial Sequence
  RPE65 RNA guide
cugccucauguuuauacauaaa

SEQ ID NO: 17238 - RNA, 22 nt, Artificial Sequence
  RPE65 RNA guide
cugcugcaguugcuuuugcuaa

SEQ ID NO: 17239 - RNA, 22 nt, Artificial Sequence
  RPE65 RNA guide
cugcuucucuguagauuucaga

SEQ ID NO: 17240 - RNA, 22 nt, Artificial Sequence
  RPE65 RNA guide
cuggagagaugaagcaucaaaa

SEQ ID NO: 17241 - RNA, 22 nt, Artificial Sequence
  RPE65 RNA guide
cuggcucugcugcaguugcuuu

SEQ ID NO: 17242 - RNA, 22 nt, Artificial Sequence
  RPE65 RNA guide
cugguuaaaucugaaaucuaca

SEQ ID NO: 17243 - RNA, 22 nt, Artificial Sequence
  RPE65 RNA guide
cugguucuuauccuggcucugc

SEQ ID NO: 17244 - RNA, 22 nt, Artificial Sequence
  RPE65 RNA guide
cugguuucccuacaagaguacu

SEQ ID NO: 17245 - RNA, 22 nt, Artificial Sequence
  RPE65 RNA guide
cuguagauuucagauuuaacca

SEQ ID NO: 17246 - RNA, 22 nt, Artificial Sequence
  RPE65 RNA guide
cugugacuuagcaaaagcaacu

SEQ ID NO: 17247 - RNA, 22 nt, Artificial Sequence
  RPE65 RNA guide
cuuagcaaaagcaacugcagca

SEQ ID NO: 17248 - RNA, 22 nt, Artificial Sequence
  RPE65 RNA guide
cuuauccuggcucugcugcagu

SEQ ID NO: 17249 - RNA, 22 nt, Artificial Sequence
  RPE65 RNA guide
cuucaucucuccagaacuucaa

SEQ ID NO: 17250 - RNA, 22 nt, Artificial Sequence
  RPE65 RNA guide
cuuccucggugaauagugcaga

SEQ ID NO: 17251 - RNA, 22 nt, Artificial Sequence
  RPE65 RNA guide
cuucuagcucucaaauuucaag

SEQ ID NO: 17252 - RNA, 22 nt, Artificial Sequence
  RPE65 RNA guide
cuucucuguagauuucagauuu

SEQ ID NO: 17253 - RNA, 22 nt, Artificial Sequence
  RPE65 RNA guide
cuucugaaaaauaucacuagag

SEQ ID NO: 17254 - RNA, 22 nt, Artificial Sequence
  RPE65 RNA guide
cuucugagcuuuaguuucauuu

SEQ ID NO: 17255 - RNA, 22 nt, Artificial Sequence
  RPE65 RNA guide
cuugaaauuugagagcuagaag

SEQ ID NO: 17256 - RNA, 22 nt, Artificial Sequence
  RPE65 RNA guide
cuuguagggaaaccaguucauu

SEQ ID NO: 17257 - RNA, 22 nt, Artificial Sequence
  RPE65 RNA guide
cuuuaaaauauacuuccucggu

SEQ ID NO: 17258 - RNA, 22 nt, Artificial Sequence
  RPE65 RNA guide
cuuuauguauaaacaugaggca

SEQ ID NO: 17259 - RNA, 22 nt, Artificial Sequence
  RPE65 RNA guide
cuuuugcuaagucacaguacuc

SEQ ID NO: 17260 - RNA, 22 nt, Artificial Sequence
  RPE65 RNA guide
cuuuuugaugcuucaucucucc

SEQ ID NO: 17261 - RNA, 22 nt, Artificial Sequence
  RPE65 RNA guide
gaaaaccaaaauaaugaacugg

SEQ ID NO: 17262 - RNA, 22 nt, Artificial Sequence
  RPE65 RNA guide
gaaacauucugguuaaaucuga

SEQ ID NO: 17263 - RNA, 22 nt, Artificial Sequence
  RPE65 RNA guide
gaaaccaguucauuauuuuggu

SEQ ID NO: 17264 - RNA, 22 nt, Artificial Sequence
  RPE65 RNA guide
gaaacuaaagcucagaagagua

SEQ ID NO: 17265 - RNA, 22 nt, Artificial Sequence
  RPE65 RNA guide
gaaauaaagagaugacugucua

SEQ ID NO: 17266 - RNA, 22 nt, Artificial Sequence
  RPE65 RNA guide
gaaauuugagagcuagaaggag

SEQ ID NO: 17267 - RNA, 22 nt, Artificial Sequence
  RPE65 RNA guide
gaacggcagauuuagaauuuaa

SEQ ID NO: 17268 - RNA, 22 nt, Artificial Sequence
  RPE65 RNA guide
gaacugguuucccuacaagagu

SEQ ID NO: 17269 - RNA, 22 nt, Artificial Sequence
  RPE65 RNA guide
gaagaguacugugacuuagcaa

SEQ ID NO: 17270 - RNA, 22 nt, Artificial Sequence
  RPE65 RNA guide
gaagcaucaaaaaguacucuug

SEQ ID NO: 17271 - RNA, 22 nt, Artificial Sequence
  RPE65 RNA guide
gaaggagcuuuaaaaauaggcu

SEQ ID NO: 17272 - RNA, 22 nt, Artificial Sequence
  RPE65 RNA guide
gaaguucuggagagaugaagca

SEQ ID NO: 17273 - RNA, 22 nt, Artificial Sequence
  RPE65 RNA guide
gaauagugcagauccacugauu

SEQ ID NO: 17274 - RNA, 22 nt, Artificial Sequence
  RPE65 RNA guide
gaaucaguggaucugcacuauu

SEQ ID NO: 17275 - RNA, 22 nt, Artificial Sequence
  RPE65 RNA guide
gaauguuucaucucucucagga

SEQ ID NO: 17276 - RNA, 22 nt, Artificial Sequence
  RPE65 RNA guide
gaauuguccuccugccucaugu

SEQ ID NO: 17277 - RNA, 22 nt, Artificial Sequence
  RPE65 RNA guide
gaauuuaaaaaccugguucuua

SEQ ID NO: 17278 - RNA, 22 nt, Artificial Sequence
  RPE65 RNA guide
gacaauuccugagagagaugaa

SEQ ID NO: 17279 - RNA, 22 nt, Artificial Sequence
  RPE65 RNA guide
gacaauuuuguaaauacaagaa

SEQ ID NO: 17280 - RNA, 22 nt, Artificial Sequence
  RPE65 RNA guide
gacuuagcaaaagcaacugcag

SEQ ID NO: 17281 - RNA, 22 nt, Artificial Sequence
  RPE65 RNA guide
gacuuuauguauaaacaugagg

SEQ ID NO: 17282 - RNA, 22 nt, Artificial Sequence
  RPE65 RNA guide
gagagagaugaaacauucuggu

SEQ ID NO: 17283 - RNA, 22 nt, Artificial Sequence
  RPE65 RNA guide
gagagaugaaacauucugguua

SEQ ID NO: 17284 - RNA, 22 nt, Artificial Sequence
  RPE65 RNA guide
gagagaugaagcaucaaaaagu

SEQ ID NO: 17285 - RNA, 22 nt, Artificial Sequence
  RPE65 RNA guide
gagagcuagaaggagcuuuaaa

SEQ ID NO: 17286 - RNA, 22 nt, Artificial Sequence
  RPE65 RNA guide
gagaugaaacauucugguuaaa

SEQ ID NO: 17287 - RNA, 22 nt, Artificial Sequence
  RPE65 RNA guide
gagaugaagcaucaaaaaguac

SEQ ID NO: 17288 - RNA, 22 nt, Artificial Sequence
  RPE65 RNA guide
gagaugacugucuauuguuagu

SEQ ID NO: 17289 - RNA, 22 nt, Artificial Sequence
  RPE65 RNA guide
gagccaggauaagaaccagguu

SEQ ID NO: 17290 - RNA, 22 nt, Artificial Sequence
  RPE65 RNA guide
gagcuagaaggagcuuuaaaaa

SEQ ID NO: 17291 - RNA, 22 nt, Artificial Sequence
  RPE65 RNA guide
gaggacaauuccugagagagau

SEQ ID NO: 17292 - RNA, 22 nt, Artificial Sequence
  RPE65 RNA guide
gaggcaggaggacaauuccuga

SEQ ID NO: 17293 - RNA, 22 nt, Artificial Sequence
  RPE65 RNA guide
gaguacugugacuuagcaaaag

SEQ ID NO: 17294 - RNA, 22 nt, Artificial Sequence
  RPE65 RNA guide
gaguacuuuuugaugcuucauc

SEQ ID NO: 17295 - RNA, 22 nt, Artificial Sequence
  RPE65 RNA guide
gauaaaguaucauaggaaucag

SEQ ID NO: 17296 - RNA, 22 nt, Artificial Sequence
  RPE65 RNA guide
gauccacugauuccuaugauac

SEQ ID NO: 17297 - RNA, 22 nt, Artificial Sequence
  RPE65 RNA guide
gaucugcacuauucaccgagga

SEQ ID NO: 17298 - RNA, 22 nt, Artificial Sequence
  RPE65 RNA guide
gaugaaacauucugguuaaauc

SEQ ID NO: 17299 - RNA, 22 nt, Artificial Sequence
  RPE65 RNA guide
gaugaagcaucaaaaaguacuc

SEQ ID NO: 17300 - RNA, 22 nt, Artificial Sequence
  RPE65 RNA guide
gaugacugucuauuguuaguaa

SEQ ID NO: 17301 - RNA, 22 nt, Artificial Sequence
  RPE65 RNA guide
gaugcuucaucucuccagaacu

SEQ ID NO: 17302 - RNA, 22 nt, Artificial Sequence
  RPE65 RNA guide
gauuuaaccagaauguuucauc

SEQ ID NO: 17303 - RNA, 22 nt, Artificial Sequence
  RPE65 RNA guide
gauuucagauuuaaccagaaug

SEQ ID NO: 17304 - RNA, 22 nt, Artificial Sequence
  RPE65 RNA guide
gcaaaagcaacugcagcagagc

SEQ ID NO: 17305 - RNA, 22 nt, Artificial Sequence
  RPE65 RNA guide
gcaacugcagcagagccaggau

SEQ ID NO: 17306 - RNA, 22 nt, Artificial Sequence
  RPE65 RNA guide
gcacuauucaccgaggaaguau

SEQ ID NO: 17307 - RNA, 22 nt, Artificial Sequence
  RPE65 RNA guide
gcagagccaggauaagaaccag

SEQ ID NO: 17308 - RNA, 22 nt, Artificial Sequence
  RPE65 RNA guide
gcagauccacugauuccuauga

SEQ ID NO: 17309 - RNA, 22 nt, Artificial Sequence
  RPE65 RNA guide
gcagauuuagaauuuaaaaacc

SEQ ID NO: 17310 - RNA, 22 nt, Artificial Sequence
  RPE65 RNA guide
gcagcagagccaggauaagaac

SEQ ID NO: 17311 - RNA, 22 nt, Artificial Sequence
  RPE65 RNA guide
gcaggaggacaauuccugagag

SEQ ID NO: 17312 - RNA, 22 nt, Artificial Sequence
  RPE65 RNA guide
gcaguugcuuuugcuaagucac

SEQ ID NO: 17313 - RNA, 22 nt, Artificial Sequence
  RPE65 RNA guide
gcaucaaaaaguacucuuguag

SEQ ID NO: 17314 - RNA, 22 nt, Artificial Sequence
  RPE65 RNA guide
gccaggauaagaaccagguuuu

SEQ ID NO: 17315 - RNA, 22 nt, Artificial Sequence
  RPE65 RNA guide
gccguucuuguauuuacaaaau

SEQ ID NO: 17316 - RNA, 22 nt, Artificial Sequence
  RPE65 RNA guide
gccuauuuuuaaagcuccuucu

SEQ ID NO: 17317 - RNA, 22 nt, Artificial Sequence
  RPE65 RNA guide
gccucauguuuauacauaaagu

SEQ ID NO: 17318 - RNA, 22 nt, Artificial Sequence
  RPE65 RNA guide
gcuaagucacaguacucuucug

SEQ ID NO: 17319 - RNA, 22 nt, Artificial Sequence
  RPE65 RNA guide
gcuagaaggagcuuuaaaaaua

SEQ ID NO: 17320 - RNA, 22 nt, Artificial Sequence
  RPE65 RNA guide
gcucagaagaguacugugacuu

SEQ ID NO: 17321 - RNA, 22 nt, Artificial Sequence
  RPE65 RNA guide
gcuccuucuagcucucaaauuu

SEQ ID NO: 17322 - RNA, 22 nt, Artificial Sequence
  RPE65 RNA guide
gcucucaaauuucaagacuuua

SEQ ID NO: 17323 - RNA, 22 nt, Artificial Sequence
  RPE65 RNA guide
gcucugcugcaguugcuuuugc

SEQ ID NO: 17324 - RNA, 22 nt, Artificial Sequence
  RPE65 RNA guide
gcugcaguugcuuuugcuaagu

SEQ ID NO: 17325 - RNA, 22 nt, Artificial Sequence
  RPE65 RNA guide
gcuucaucucuccagaacuuca

SEQ ID NO: 17326 - RNA, 22 nt, Artificial Sequence
  RPE65 RNA guide
gcuucucuguagauuucagauu

SEQ ID NO: 17327 - RNA, 22 nt, Artificial Sequence
  RPE65 RNA guide
gcuuuugcuaagucacaguacu

SEQ ID NO: 17328 - RNA, 22 nt, Artificial Sequence
  RPE65 RNA guide
ggaaaccaguucauuauuuugg

SEQ ID NO: 17329 - RNA, 22 nt, Artificial Sequence
  RPE65 RNA guide
ggaaucaguggaucugcacuau

SEQ ID NO: 17330 - RNA, 22 nt, Artificial Sequence
  RPE65 RNA guide
ggaauuguccuccugccucaug

SEQ ID NO: 17331 - RNA, 22 nt, Artificial Sequence
  RPE65 RNA guide
ggacaauuccugagagagauga

SEQ ID NO: 17332 - RNA, 22 nt, Artificial Sequence
  RPE65 RNA guide
ggagagaugaagcaucaaaaag

SEQ ID NO: 17333 - RNA, 22 nt, Artificial Sequence
  RPE65 RNA guide
ggaggacaauuccugagagaga

SEQ ID NO: 17334 - RNA, 22 nt, Artificial Sequence
  RPE65 RNA guide
ggauaagaaccagguuuuuaaa

SEQ ID NO: 17335 - RNA, 22 nt, Artificial Sequence
  RPE65 RNA guide
ggaucugcacuauucaccgagg

SEQ ID NO: 17336 - RNA, 22 nt, Artificial Sequence
  RPE65 RNA guide
ggcagauuuagaauuuaaaaac

SEQ ID NO: 17337 - RNA, 22 nt, Artificial Sequence
  RPE65 RNA guide
ggcaggaggacaauuccugaga

SEQ ID NO: 17338 - RNA, 22 nt, Artificial Sequence
  RPE65 RNA guide
ggcuaauuaaacuuccuucauu

SEQ ID NO: 17339 - RNA, 22 nt, Artificial Sequence
  RPE65 RNA guide
ggcucugcugcaguugcuuuug

SEQ ID NO: 17340 - RNA, 22 nt, Artificial Sequence
  RPE65 RNA guide
gggaaaccaguucauuauuuug

SEQ ID NO: 17341 - RNA, 22 nt, Artificial Sequence
  RPE65 RNA guide
ggugaauagugcagauccacug

SEQ ID NO: 17342 - RNA, 22 nt, Artificial Sequence
  RPE65 RNA guide
gguuaaaucugaaaucuacaga

SEQ ID NO: 17343 - RNA, 22 nt, Artificial Sequence
  RPE65 RNA guide
gguucuuauccuggcucugcug

SEQ ID NO: 17344 - RNA, 22 nt, Artificial Sequence
  RPE65 RNA guide
gguuucccuacaagaguacuuu

SEQ ID NO: 17345 - RNA, 22 nt, Artificial Sequence
  RPE65 RNA guide
gguuuuuaaauucuaaaucugc

SEQ ID NO: 17346 - RNA, 22 nt, Artificial Sequence
  RPE65 RNA guide
guaaaaugaaggaaguuuaauu

SEQ ID NO: 17347 - RNA, 22 nt, Artificial Sequence
  RPE65 RNA guide
guaaauacaagaacggcagauu

SEQ ID NO: 17348 - RNA, 22 nt, Artificial Sequence
  RPE65 RNA guide
guaaccugcuucucuguagauu

SEQ ID NO: 17349 - RNA, 22 nt, Artificial Sequence
  RPE65 RNA guide
guacucuucugagcuuuaguuu

SEQ ID NO: 17350 - RNA, 22 nt, Artificial Sequence
  RPE65 RNA guide
guacucuuguagggaaaccagu

SEQ ID NO: 17351 - RNA, 22 nt, Artificial Sequence
  RPE65 RNA guide
guacugugacuuagcaaaagca

SEQ ID NO: 17352 - RNA, 22 nt, Artificial Sequence
  RPE65 RNA guide
guacuuuuugaugcuucaucuc

SEQ ID NO: 17353 - RNA, 22 nt, Artificial Sequence
  RPE65 RNA guide
guagaaauaaagagaugacugu

SEQ ID NO: 17354 - RNA, 22 nt, Artificial Sequence
  RPE65 RNA guide
guagauuucagauuuaaccaga

SEQ ID NO: 17355 - RNA, 22 nt, Artificial Sequence
  RPE65 RNA guide
guagggaaaccaguucauuauu

SEQ ID NO: 17356 - RNA, 22 nt, Artificial Sequence
  RPE65 RNA guide
guauaaacaugaggcaggagga

SEQ ID NO: 17357 - RNA, 22 nt, Artificial Sequence
  RPE65 RNA guide
guaucauaggaaucaguggauc

SEQ ID NO: 17358 - RNA, 22 nt, Artificial Sequence
  RPE65 RNA guide
gucacaguacucuucugagcuu

SEQ ID NO: 17359 - RNA, 22 nt, Artificial Sequence
  RPE65 RNA guide
guccuccugccucauguuuaua

SEQ ID NO: 17360 - RNA, 22 nt, Artificial Sequence
  RPE65 RNA guide
gucuugaaauuugagagcuaga

SEQ ID NO: 17361 - RNA, 22 nt, Artificial Sequence
  RPE65 RNA guide
gucuuuaaaauauacuuccucg

SEQ ID NO: 17362 - RNA, 22 nt, Artificial Sequence
  RPE65 RNA guide
gugaauagugcagauccacuga

SEQ ID NO: 17363 - RNA, 22 nt, Artificial Sequence
  RPE65 RNA guide
gugacuuagcaaaagcaacugc

SEQ ID NO: 17364 - RNA, 22 nt, Artificial Sequence
  RPE65 RNA guide
gugcagauccacugauuccuau

SEQ ID NO: 17365 - RNA, 22 nt, Artificial Sequence
  RPE65 RNA guide
guggaucugcacuauucaccga

SEQ ID NO: 17366 - RNA, 22 nt, Artificial Sequence
  RPE65 RNA guide
guuaaaucugaaaucuacagag

SEQ ID NO: 17367 - RNA, 22 nt, Artificial Sequence
  RPE65 RNA guide
guucuggagagaugaagcauca

SEQ ID NO: 17368 - RNA, 22 nt, Artificial Sequence
  RPE65 RNA guide
guucuuauccuggcucugcugc

SEQ ID NO: 17369 - RNA, 22 nt, Artificial Sequence
  RPE65 RNA guide
guugcuuuugcuaagucacagu

SEQ ID NO: 17370 - RNA, 22 nt, Artificial Sequence
  RPE65 RNA guide
guuucaucucucucaggaauug

SEQ ID NO: 17371 - RNA, 22 nt, Artificial Sequence
  RPE65 RNA guide
guuucccuacaagaguacuuuu

SEQ ID NO: 17372 - RNA, 22 nt, Artificial Sequence
  RPE65 RNA guide
guuuuuaaauucuaaaucugcc

SEQ ID NO: 17373 - RNA, 22 nt, Artificial Sequence
  RPE65 RNA guide
uaaaaaccugguucuuauccug

SEQ ID NO: 17374 - RNA, 22 nt, Artificial Sequence
  RPE65 RNA guide
uaaaauauacuuccucggugaa

SEQ ID NO: 17375 - RNA, 22 nt, Artificial Sequence
  RPE65 RNA guide
uaaacaugaggcaggaggacaa

SEQ ID NO: 17376 - RNA, 22 nt, Artificial Sequence
  RPE65 RNA guide
uaaagagaugacugucuauugu

SEQ ID NO: 17377 - RNA, 22 nt, Artificial Sequence
  RPE65 RNA guide
uaaagcucagaagaguacugug

SEQ ID NO: 17378 - RNA, 22 nt, Artificial Sequence
  RPE65 RNA guide
uaaagcuccuucuagcucucaa

SEQ ID NO: 17379 - RNA, 22 nt, Artificial Sequence
  RPE65 RNA guide
uaaaguaucauaggaaucagug

SEQ ID NO: 17380 - RNA, 22 nt, Artificial Sequence
  RPE65 RNA guide
uaaagucuugaaauuugagagc

SEQ ID NO: 17381 - RNA, 22 nt, Artificial Sequence
  RPE65 RNA guide
uaaauacaagaacggcagauuu

SEQ ID NO: 17382 - RNA, 22 nt, Artificial Sequence
  RPE65 RNA guide
uaaaucugaaaucuacagagaa

SEQ ID NO: 17383 - RNA, 22 nt, Artificial Sequence
  RPE65 RNA guide
uaaaucugccguucuuguauuu

SEQ ID NO: 17384 - RNA, 22 nt, Artificial Sequence
  RPE65 RNA guide
uaaauucuaaaucugccguucu

SEQ ID NO: 17385 - RNA, 22 nt, Artificial Sequence
  RPE65 RNA guide
uaaccagaauguuucaucucuc

SEQ ID NO: 17386 - RNA, 22 nt, Artificial Sequence
  RPE65 RNA guide
uaaccucuagugauauuuuuca

SEQ ID NO: 17387 - RNA, 22 nt, Artificial Sequence
  RPE65 RNA guide
uaaccugcuucucuguagauuu

SEQ ID NO: 17388 - RNA, 22 nt, Artificial Sequence
  RPE65 RNA guide
uaagucacaguacucuucugag

SEQ ID NO: 17389 - RNA, 22 nt, Artificial Sequence
  RPE65 RNA guide
uaaugaacugguuucccuacaa

SEQ ID NO: 17390 - RNA, 22 nt, Artificial Sequence
  RPE65 RNA guide
uaauuugaaguucuggagagau

SEQ ID NO: 17391 - RNA, 22 nt, Artificial Sequence
  RPE65 RNA guide
uacaaaugaaacuaaagcucag

SEQ ID NO: 17392 - RNA, 22 nt, Artificial Sequence
  RPE65 RNA guide
uacaagaacggcagauuuagaa

SEQ ID NO: 17393 - RNA, 22 nt, Artificial Sequence
  RPE65 RNA guide
uacaagaguacuuuuugaugcu

SEQ ID NO: 17394 - RNA, 22 nt, Artificial Sequence
  RPE65 RNA guide
uacauaaagucuugaaauuuga

SEQ ID NO: 17395 - RNA, 22 nt, Artificial Sequence
  RPE65 RNA guide
uacuaacaauagacagucaucu

SEQ ID NO: 17396 - RNA, 22 nt, Artificial Sequence
  RPE65 RNA guide
uacucuucugagcuuuaguuuc

SEQ ID NO: 17397 - RNA, 22 nt, Artificial Sequence
  RPE65 RNA guide
uacucuuguagggaaaccaguu

SEQ ID NO: 17398 - RNA, 22 nt, Artificial Sequence
  RPE65 RNA guide
uacugugacuuagcaaaagcaa

SEQ ID NO: 17399 - RNA, 22 nt, Artificial Sequence
  RPE65 RNA guide
uacuuccucggugaauagugca

SEQ ID NO: 17400 - RNA, 22 nt, Artificial Sequence
  RPE65 RNA guide
uacuuuuugaugcuucaucucu

SEQ ID NO: 17401 - RNA, 22 nt, Artificial Sequence
  RPE65 RNA guide
uagaaggagcuuuaaaaauagg

SEQ ID NO: 17402 - RNA, 22 nt, Artificial Sequence
  RPE65 RNA guide
uagacagucaucucuuuauuuc

SEQ ID NO: 17403 - RNA, 22 nt, Artificial Sequence
  RPE65 RNA guide
uagcaaaagcaacugcagcaga

SEQ ID NO: 17404 - RNA, 22 nt, Artificial Sequence
  RPE65 RNA guide
uagccuauuuuuaaagcuccuu

SEQ ID NO: 17405 - RNA, 22 nt, Artificial Sequence
  RPE65 RNA guide
uagcucucaaauuucaagacuu

SEQ ID NO: 17406 - RNA, 22 nt, Artificial Sequence
  RPE65 RNA guide
uaggaaucaguggaucugcacu

SEQ ID NO: 17407 - RNA, 22 nt, Artificial Sequence
  RPE65 RNA guide
uagggaaaccaguucauuauuu

SEQ ID NO: 17408 - RNA, 22 nt, Artificial Sequence
  RPE65 RNA guide
uagugcagauccacugauuccu

SEQ ID NO: 17409 - RNA, 22 nt, Artificial Sequence
  RPE65 RNA guide
uauaaacaugaggcaggaggac

SEQ ID NO: 17410 - RNA, 22 nt, Artificial Sequence
  RPE65 RNA guide
uauacuuccucggugaauagug

SEQ ID NO: 17411 - RNA, 22 nt, Artificial Sequence
  RPE65 RNA guide
uaucauaggaaucaguggaucu

SEQ ID NO: 17412 - RNA, 22 nt, Artificial Sequence
  RPE65 RNA guide
uauccuggcucugcugcaguug

SEQ ID NO: 17413 - RNA, 22 nt, Artificial Sequence
  RPE65 RNA guide
uauguauaaacaugaggcagga

SEQ ID NO: 17414 - RNA, 22 nt, Artificial Sequence
  RPE65 RNA guide
uauuuuuaaagcuccuucuagc

SEQ ID NO: 17415 - RNA, 22 nt, Artificial Sequence
  RPE65 RNA guide
ucaaaaaguacucuuguaggga

SEQ ID NO: 17416 - RNA, 22 nt, Artificial Sequence
  RPE65 RNA guide
ucaagacuuuauguauaaacau

SEQ ID NO: 17417 - RNA, 22 nt, Artificial Sequence
  RPE65 RNA guide
ucacaguacucuucugagcuuu

SEQ ID NO: 17418 - RNA, 22 nt, Artificial Sequence
  RPE65 RNA guide
ucaccgaggaaguauauuuuaa

SEQ ID NO: 17419 - RNA, 22 nt, Artificial Sequence
  RPE65 RNA guide
ucagaagaguacugugacuuag

SEQ ID NO: 17420 - RNA, 22 nt, Artificial Sequence
  RPE65 RNA guide
ucagauuuaaccagaauguuuc

SEQ ID NO: 17421 - RNA, 22 nt, Artificial Sequence
  RPE65 RNA guide
ucaggaauuguccuccugccuc

SEQ ID NO: 17422 - RNA, 22 nt, Artificial Sequence
  RPE65 RNA guide
ucaguggaucugcacuauucac

SEQ ID NO: 17423 - RNA, 22 nt, Artificial Sequence
  RPE65 RNA guide
ucauaggaaucaguggaucugc

SEQ ID NO: 17424 - RNA, 22 nt, Artificial Sequence
  RPE65 RNA guide
ucaucucuccagaacuucaaau

SEQ ID NO: 17425 - RNA, 22 nt, Artificial Sequence
  RPE65 RNA guide
ucaucucucucaggaauugucc

SEQ ID NO: 17426 - RNA, 22 nt, Artificial Sequence
  RPE65 RNA guide
ucauuacuaacaauagacaguc

SEQ ID NO: 17427 - RNA, 22 nt, Artificial Sequence
  RPE65 RNA guide
uccacugauuccuaugauacuu

SEQ ID NO: 17428 - RNA, 22 nt, Artificial Sequence
  RPE65 RNA guide
ucccuacaagaguacuuuuuga

SEQ ID NO: 17429 - RNA, 22 nt, Artificial Sequence
  RPE65 RNA guide
uccuccugccucauguuuauac

SEQ ID NO: 17430 - RNA, 22 nt, Artificial Sequence
  RPE65 RNA guide
uccucggugaauagugcagauc

SEQ ID NO: 17431 - RNA, 22 nt, Artificial Sequence
  RPE65 RNA guide
uccugagagagaugaaacauuc

SEQ ID NO: 17432 - RNA, 22 nt, Artificial Sequence
  RPE65 RNA guide
uccugccucauguuuauacaua

SEQ ID NO: 17433 - RNA, 22 nt, Artificial Sequence
  RPE65 RNA guide
uccuggcucugcugcaguugcu

SEQ ID NO: 17434 - RNA, 22 nt, Artificial Sequence
  RPE65 RNA guide
uccuucuagcucucaaauuuca

SEQ ID NO: 17435 - RNA, 22 nt, Artificial Sequence
  RPE65 RNA guide
ucggugaauagugcagauccac

SEQ ID NO: 17436 - RNA, 22 nt, Artificial Sequence
  RPE65 RNA guide
ucuaaaucugccguucuuguau

SEQ ID NO: 17437 - RNA, 22 nt, Artificial Sequence
  RPE65 RNA guide
ucuagcucucaaauuucaagac

SEQ ID NO: 17438 - RNA, 22 nt, Artificial Sequence
  RPE65 RNA guide
ucucaggaauuguccuccugcc

SEQ ID NO: 17439 - RNA, 22 nt, Artificial Sequence
  RPE65 RNA guide
ucucucaggaauuguccuccug

SEQ ID NO: 17440 - RNA, 22 nt, Artificial Sequence
  RPE65 RNA guide
ucucucucaggaauuguccucc

SEQ ID NO: 17441 - RNA, 22 nt, Artificial Sequence
  RPE65 RNA guide
ucucuguagauuucagauuuaa

SEQ ID NO: 17442 - RNA, 22 nt, Artificial Sequence
  RPE65 RNA guide
ucugaaaucuacagagaagcag

SEQ ID NO: 17443 - RNA, 22 nt, Artificial Sequence
  RPE65 RNA guide
ucugcacuauucaccgaggaag

SEQ ID NO: 17444 - RNA, 22 nt, Artificial Sequence
  RPE65 RNA guide
ucugccguucuuguauuuacaa

SEQ ID NO: 17445 - RNA, 22 nt, Artificial Sequence
  RPE65 RNA guide
ucugcugcaguugcuuuugcua

SEQ ID NO: 17446 - RNA, 22 nt, Artificial Sequence
  RPE65 RNA guide
ucuggagagaugaagcaucaaa

SEQ ID NO: 17447 - RNA, 22 nt, Artificial Sequence
  RPE65 RNA guide
ucugguuaaaucugaaaucuac

SEQ ID NO: 17448 - RNA, 22 nt, Artificial Sequence
  RPE65 RNA guide
ucuguagauuucagauuuaacc

SEQ ID NO: 17449 - RNA, 22 nt, Artificial Sequence
  RPE65 RNA guide
ucuuauccuggcucugcugcag

SEQ ID NO: 17450 - RNA, 22 nt, Artificial Sequence
  RPE65 RNA guide
ucuucugaaaaauaucacuaga

SEQ ID NO: 17451 - RNA, 22 nt, Artificial Sequence
  RPE65 RNA guide
ucuucugagcuuuaguuucauu

SEQ ID NO: 17452 - RNA, 22 nt, Artificial Sequence
  RPE65 RNA guide
ucuugaaauuugagagcuagaa

SEQ ID NO: 17453 - RNA, 22 nt, Artificial Sequence
  RPE65 RNA guide
ucuuguagggaaaccaguucau

SEQ ID NO: 17454 - RNA, 22 nt, Artificial Sequence
  RPE65 RNA guide
ucuuuaaaauauacuuccucgg

SEQ ID NO: 17455 - RNA, 22 nt, Artificial Sequence
  RPE65 RNA guide
ugaaacuaaagcucagaagagu

SEQ ID NO: 17456 - RNA, 22 nt, Artificial Sequence
  RPE65 RNA guide
ugaaauuugagagcuagaagga

SEQ ID NO: 17457 - RNA, 22 nt, Artificial Sequence
  RPE65 RNA guide
ugaacugguuucccuacaagag

SEQ ID NO: 17458 - RNA, 22 nt, Artificial Sequence
  RPE65 RNA guide
ugaagcaucaaaaaguacucuu

SEQ ID NO: 17459 - RNA, 22 nt, Artificial Sequence
  RPE65 RNA guide
ugaaguucuggagagaugaagc

SEQ ID NO: 17460 - RNA, 22 nt, Artificial Sequence
  RPE65 RNA guide
ugaauagugcagauccacugau

SEQ ID NO: 17461 - RNA, 22 nt, Artificial Sequence
  RPE65 RNA guide
ugacuuagcaaaagcaacugca

SEQ ID NO: 17462 - RNA, 22 nt, Artificial Sequence
  RPE65 RNA guide
ugagagagaugaaacauucugg

SEQ ID NO: 17463 - RNA, 22 nt, Artificial Sequence
  RPE65 RNA guide
ugagagcuagaaggagcuuuaa

SEQ ID NO: 17464 - RNA, 22 nt, Artificial Sequence
  RPE65 RNA guide
ugaggcaggaggacaauuccug

SEQ ID NO: 17465 - RNA, 22 nt, Artificial Sequence
  RPE65 RNA guide
ugauaaaguaucauaggaauca

SEQ ID NO: 17466 - RNA, 22 nt, Artificial Sequence
  RPE65 RNA guide
ugaugcuucaucucuccagaac

SEQ ID NO: 17467 - RNA, 22 nt, Artificial Sequence
  RPE65 RNA guide
ugcacuauucaccgaggaagua

SEQ ID NO: 17468 - RNA, 22 nt, Artificial Sequence
  RPE65 RNA guide
ugcagauccacugauuccuaug

SEQ ID NO: 17469 - RNA, 22 nt, Artificial Sequence
  RPE65 RNA guide
ugcagcagagccaggauaagaa

SEQ ID NO: 17470 - RNA, 22 nt, Artificial Sequence
  RPE65 RNA guide
ugcaguugcuuuugcuaaguca

SEQ ID NO: 17471 - RNA, 22 nt, Artificial Sequence
  RPE65 RNA guide
ugccguucuuguauuuacaaaa

SEQ ID NO: 17472 - RNA, 22 nt, Artificial Sequence
  RPE65 RNA guide
ugccucauguuuauacauaaag

SEQ ID NO: 17473 - RNA, 22 nt, Artificial Sequence
  RPE65 RNA guide
ugcuaagucacaguacucuucu

SEQ ID NO: 17474 - RNA, 22 nt, Artificial Sequence
  RPE65 RNA guide
ugcugcaguugcuuuugcuaag

SEQ ID NO: 17475 - RNA, 22 nt, Artificial Sequence
  RPE65 RNA guide
ugcuucaucucuccagaacuuc

SEQ ID NO: 17476 - RNA, 22 nt, Artificial Sequence
  RPE65 RNA guide
ugcuucucuguagauuucagau

SEQ ID NO: 17477 - RNA, 22 nt, Artificial Sequence
  RPE65 RNA guide
ugcuuuugcuaagucacaguac

SEQ ID NO: 17478 - RNA, 22 nt, Artificial Sequence
  RPE65 RNA guide
uggagagaugaagcaucaaaaa

SEQ ID NO: 17479 - RNA, 22 nt, Artificial Sequence
  RPE65 RNA guide
uggaucugcacuauucaccgag

SEQ ID NO: 17480 - RNA, 22 nt, Artificial Sequence
  RPE65 RNA guide
uggcucugcugcaguugcuuuu

SEQ ID NO: 17481 - RNA, 22 nt, Artificial Sequence
  RPE65 RNA guide
ugguuaaaucugaaaucuacag

SEQ ID NO: 17482 - RNA, 22 nt, Artificial Sequence
  RPE65 RNA guide
ugguucuuauccuggcucugcu

SEQ ID NO: 17483 - RNA, 22 nt, Artificial Sequence
  RPE65 RNA guide
ugguuucccuacaagaguacuu

SEQ ID NO: 17484 - RNA, 22 nt, Artificial Sequence
  RPE65 RNA guide
uguaaauacaagaacggcagau

SEQ ID NO: 17485 - RNA, 22 nt, Artificial Sequence
  RPE65 RNA guide
uguagauuucagauuuaaccag

SEQ ID NO: 17486 - RNA, 22 nt, Artificial Sequence
  RPE65 RNA guide
uguagggaaaccaguucauuau

SEQ ID NO: 17487 - RNA, 22 nt, Artificial Sequence
  RPE65 RNA guide
uguauaaacaugaggcaggagg

SEQ ID NO: 17488 - RNA, 22 nt, Artificial Sequence
  RPE65 RNA guide
uguccuccugccucauguuuau

SEQ ID NO: 17489 - RNA, 22 nt, Artificial Sequence
  RPE65 RNA guide
ugucuuuaaaauauacuuccuc

SEQ ID NO: 17490 - RNA, 22 nt, Artificial Sequence
  RPE65 RNA guide
ugugacuuagcaaaagcaacug

SEQ ID NO: 17491 - RNA, 22 nt, Artificial Sequence
  RPE65 RNA guide
uguuucaucucucucaggaauu

SEQ ID NO: 17492 - RNA, 22 nt, Artificial Sequence
  RPE65 RNA guide
uuaaaaaccugguucuuauccu

SEQ ID NO: 17493 - RNA, 22 nt, Artificial Sequence
  RPE65 RNA guide
uuaaaauauacuuccucgguga

SEQ ID NO: 17494 - RNA, 22 nt, Artificial Sequence
  RPE65 RNA guide
uuaaagcuccuucuagcucuca

SEQ ID NO: 17495 - RNA, 22 nt, Artificial Sequence
  RPE65 RNA guide
uuaaaucugaaaucuacagaga

SEQ ID NO: 17496 - RNA, 22 nt, Artificial Sequence
  RPE65 RNA guide
uuaaauucuaaaucugccguuc

SEQ ID NO: 17497 - RNA, 22 nt, Artificial Sequence
  RPE65 RNA guide
uuaaccagaauguuucaucucu

SEQ ID NO: 17498 - RNA, 22 nt, Artificial Sequence
  RPE65 RNA guide
uuacaaaugaaacuaaagcuca

SEQ ID NO: 17499 - RNA, 22 nt, Artificial Sequence
  RPE65 RNA guide
uuacuaacaauagacagucauc

SEQ ID NO: 17500 - RNA, 22 nt, Artificial Sequence
  RPE65 RNA guide
uuagcaaaagcaacugcagcag

SEQ ID NO: 17501 - RNA, 22 nt, Artificial Sequence
  RPE65 RNA guide
uuagccuauuuuuaaagcuccu

SEQ ID NO: 17502 - RNA, 22 nt, Artificial Sequence
  RPE65 RNA guide
uuauccuggcucugcugcaguu

SEQ ID NO: 17503 - RNA, 22 nt, Artificial Sequence
  RPE65 RNA guide
uuauguauaaacaugaggcagg

SEQ ID NO: 17504 - RNA, 22 nt, Artificial Sequence
  RPE65 RNA guide
uucaccgaggaaguauauuuua

SEQ ID NO: 17505 - RNA, 22 nt, Artificial Sequence
  RPE65 RNA guide
uucagauuuaaccagaauguuu

SEQ ID NO: 17506 - RNA, 22 nt, Artificial Sequence
  RPE65 RNA guide
uucaucucuccagaacuucaaa

SEQ ID NO: 17507 - RNA, 22 nt, Artificial Sequence
  RPE65 RNA guide
uucaucucucucaggaauuguc

SEQ ID NO: 17508 - RNA, 22 nt, Artificial Sequence
  RPE65 RNA guide
uucccuacaagaguacuuuuug

SEQ ID NO: 17509 - RNA, 22 nt, Artificial Sequence
  RPE65 RNA guide
uuccucggugaauagugcagau

SEQ ID NO: 17510 - RNA, 22 nt, Artificial Sequence
  RPE65 RNA guide
uuccugagagagaugaaacauu

SEQ ID NO: 17511 - RNA, 22 nt, Artificial Sequence
  RPE65 RNA guide
uucuaaaucugccguucuugua

SEQ ID NO: 17512 - RNA, 22 nt, Artificial Sequence
  RPE65 RNA guide
uucuagcucucaaauuucaaga

SEQ ID NO: 17513 - RNA, 22 nt, Artificial Sequence
  RPE65 RNA guide
uucucuguagauuucagauuua

SEQ ID NO: 17514 - RNA, 22 nt, Artificial Sequence
  RPE65 RNA guide
uucuggagagaugaagcaucaa

SEQ ID NO: 17515 - RNA, 22 nt, Artificial Sequence
  RPE65 RNA guide
uucugguuaaaucugaaaucua

SEQ ID NO: 17516 - RNA, 22 nt, Artificial Sequence
  RPE65 RNA guide
uucuuauccuggcucugcugca

SEQ ID NO: 17517 - RNA, 22 nt, Artificial Sequence
  RPE65 RNA guide
uugaaauuugagagcuagaagg

SEQ ID NO: 17518 - RNA, 22 nt, Artificial Sequence
  RPE65 RNA guide
uugaaguucuggagagaugaag

SEQ ID NO: 17519 - RNA, 22 nt, Artificial Sequence
  RPE65 RNA guide
uugagagcuagaaggagcuuua

SEQ ID NO: 17520 - RNA, 22 nt, Artificial Sequence
  RPE65 RNA guide
uugauaaaguaucauaggaauc

SEQ ID NO: 17521 - RNA, 22 nt, Artificial Sequence
  RPE65 RNA guide
uugaugcuucaucucuccagaa

SEQ ID NO: 17522 - RNA, 22 nt, Artificial Sequence
  RPE65 RNA guide
uugcuaagucacaguacucuuc

SEQ ID NO: 17523 - RNA, 22 nt, Artificial Sequence
  RPE65 RNA guide
uugcuuuugcuaagucacagua

SEQ ID NO: 17524 - RNA, 22 nt, Artificial Sequence
  RPE65 RNA guide
uuguaaauacaagaacggcaga

SEQ ID NO: 17525 - RNA, 22 nt, Artificial Sequence
  RPE65 RNA guide
uuguagggaaaccaguucauua

SEQ ID NO: 17526 - RNA, 22 nt, Artificial Sequence
  RPE65 RNA guide
uuguccuccugccucauguuua

SEQ ID NO: 17527 - RNA, 22 nt, Artificial Sequence
  RPE65 RNA guide
uugucuuuaaaauauacuuccu

SEQ ID NO: 17528 - RNA, 22 nt, Artificial Sequence
  RPE65 RNA guide
uuuaaaaaccugguucuuaucc

SEQ ID NO: 17529 - RNA, 22 nt, Artificial Sequence
  RPE65 RNA guide
uuuaaagcuccuucuagcucuc

SEQ ID NO: 17530 - RNA, 22 nt, Artificial Sequence
  RPE65 RNA guide
uuuaaauucuaaaucugccguu

SEQ ID NO: 17531 - RNA, 22 nt, Artificial Sequence
  RPE65 RNA guide
uuuaaccagaauguuucaucuc

SEQ ID NO: 17532 - RNA, 22 nt, Artificial Sequence
  RPE65 RNA guide
uuuauguauaaacaugaggcag

SEQ ID NO: 17533 - RNA, 22 nt, Artificial Sequence
  RPE65 RNA guide
uuucaucucucucaggaauugu

SEQ ID NO: 17534 - RNA, 22 nt, Artificial Sequence
  RPE65 RNA guide
uuucccuacaagaguacuuuuu

SEQ ID NO: 17535 - RNA, 22 nt, Artificial Sequence
  RPE65 RNA guide
uuugaaguucuggagagaugaa

SEQ ID NO: 17536 - RNA, 22 nt, Artificial Sequence
  RPE65 RNA guide
uuugagagcuagaaggagcuuu

SEQ ID NO: 17537 - RNA, 22 nt, Artificial Sequence
  RPE65 RNA guide
uuugaugcuucaucucuccaga

SEQ ID NO: 17538 - RNA, 22 nt, Artificial Sequence
  RPE65 RNA guide
uuugcuaagucacaguacucuu

SEQ ID NO: 17539 - RNA, 22 nt, Artificial Sequence
  RPE65 RNA guide
uuuguaaauacaagaacggcag

SEQ ID NO: 17540 - RNA, 22 nt, Artificial Sequence
  RPE65 RNA guide
uuuuaaagcuccuucuagcucu

SEQ ID NO: 17541 - RNA, 22 nt, Artificial Sequence
  RPE65 RNA guide
uuuugaugcuucaucucuccag

SEQ ID NO: 17542 - RNA, 22 nt, Artificial Sequence
  RPE65 RNA guide
uuuugcuaagucacaguacucu

SEQ ID NO: 17543 - RNA, 22 nt, Artificial Sequence
  RPE65 RNA guide
uuuuguaaauacaagaacggca

SEQ ID NO: 17544 - RNA, 22 nt, Artificial Sequence
  RPE65 RNA guide
uuuuuaaagcuccuucuagcuc

SEQ ID NO: 17545 - RNA, 22 nt, Artificial Sequence
  RPE65 RNA guide
uuuuugaugcuucaucucucca

SEQ ID NO: 17546 - RNA, 20 nt, Artificial Sequence
  RPE65 RNA guide
aaaaaagaacuuaggagcca

SEQ ID NO: 17547 - RNA, 20 nt, Artificial Sequence
  RPE65 RNA guide
aaaaagaacuuaggagccaa

SEQ ID NO: 17548 - RNA, 20 nt, Artificial Sequence
  RPE65 RNA guide
aaaacauauucuacguguga

SEQ ID NO: 17549 - RNA, 20 nt, Artificial Sequence
  RPE65 RNA guide
aaaagaacuuaggagccaag

SEQ ID NO: 17550 - RNA, 20 nt, Artificial Sequence
  RPE65 RNA guide
aaaaugagaccauccuugaa

SEQ ID NO: 17551 - RNA, 20 nt, Artificial Sequence
  RPE65 RNA guide
aaaauugauggccuaagagg

SEQ ID NO: 17552 - RNA, 20 nt, Artificial Sequence
  RPE65 RNA guide
aaaauuuagggcuccaaaga

SEQ ID NO: 17553 - RNA, 20 nt, Artificial Sequence
  RPE65 RNA guide
aaacagccagaaaugcagag

SEQ ID NO: 17554 - RNA, 20 nt, Artificial Sequence
  RPE65 RNA guide
aaacauauucuacgugugaa

SEQ ID NO: 17555 - RNA, 20 nt, Artificial Sequence
  RPE65 RNA guide
aaaccucagugagcaggaaa

SEQ ID NO: 17556 - RNA, 20 nt, Artificial Sequence
  RPE65 RNA guide
aaagaaaggccucugaaaaa

SEQ ID NO: 17557 - RNA, 20 nt, Artificial Sequence
  RPE65 RNA guide
aaagaacuuaggagccaaga

SEQ ID NO: 17558 - RNA, 20 nt, Artificial Sequence
  RPE65 RNA guide
aaagaauucaaacagccaga

SEQ ID NO: 17559 - RNA, 20 nt, Artificial Sequence
  RPE65 RNA guide
aaagacuucgacugccugag

SEQ ID NO: 17560 - RNA, 20 nt, Artificial Sequence
  RPE65 RNA guide
aaagucacauaaccucuuag

SEQ ID NO: 17561 - RNA, 20 nt, Artificial Sequence
  RPE65 RNA guide
aaaugagaccauccuugaag

SEQ ID NO: 17562 - RNA, 20 nt, Artificial Sequence
  RPE65 RNA guide
aaaugcagaguucuuaaguc

SEQ ID NO: 17563 - RNA, 20 nt, Artificial Sequence
  RPE65 RNA guide
aaauugauggccuaagaggu

SEQ ID NO: 17564 - RNA, 20 nt, Artificial Sequence
  RPE65 RNA guide
aaauuuagggcuccaaagaa

SEQ ID NO: 17565 - RNA, 20 nt, Artificial Sequence
  RPE65 RNA guide
aaauuuucuucaaggauggu

SEQ ID NO: 17566 - RNA, 20 nt, Artificial Sequence
  RPE65 RNA guide
aacaaagacuucgacugccu

SEQ ID NO: 17567 - RNA, 20 nt, Artificial Sequence
  RPE65 RNA guide
aacaacaaagacuucgacug

SEQ ID NO: 17568 - RNA, 20 nt, Artificial Sequence
  RPE65 RNA guide
aacagaaaccucagugagca

SEQ ID NO: 17569 - RNA, 20 nt, Artificial Sequence
  RPE65 RNA guide
aacagccagaaaugcagagu

SEQ ID NO: 17570 - RNA, 20 nt, Artificial Sequence
  RPE65 RNA guide
aacauauucuacgugugaac

SEQ ID NO: 17571 - RNA, 20 nt, Artificial Sequence
  RPE65 RNA guide
aacaugcagggaggaacugc

SEQ ID NO: 17572 - RNA, 20 nt, Artificial Sequence
  RPE65 RNA guide
aaccucagugagcaggaaag

SEQ ID NO: 17573 - RNA, 20 nt, Artificial Sequence
  RPE65 RNA guide
aaccucuuaggccaucaauu

SEQ ID NO: 17574 - RNA, 20 nt, Artificial Sequence
  RPE65 RNA guide
aacucugcauuucuggcugu

SEQ ID NO: 17575 - RNA, 20 nt, Artificial Sequence
  RPE65 RNA guide
aacugcaggaagcuauagau

SEQ ID NO: 17576 - RNA, 20 nt, Artificial Sequence
  RPE65 RNA guide
aacuuaggagccaagacuua

SEQ ID NO: 17577 - RNA, 20 nt, Artificial Sequence
  RPE65 RNA guide
aagaaaauuuagggcuccaa

SEQ ID NO: 17578 - RNA, 20 nt, Artificial Sequence
  RPE65 RNA guide
aagaaaggccucugaaaaac

SEQ ID NO: 17579 - RNA, 20 nt, Artificial Sequence
  RPE65 RNA guide
aagaacucugcauuucuggc

SEQ ID NO: 17580 - RNA, 20 nt, Artificial Sequence
  RPE65 RNA guide
aagaacuuaggagccaagac

SEQ ID NO: 17581 - RNA, 20 nt, Artificial Sequence
  RPE65 RNA guide
aagaauguauauuucguuca

SEQ ID NO: 17582 - RNA, 20 nt, Artificial Sequence
  RPE65 RNA guide
aagaauucaaacagccagaa

SEQ ID NO: 17583 - RNA, 20 nt, Artificial Sequence
  RPE65 RNA guide
aagacuuaagaacucugcau

SEQ ID NO: 17584 - RNA, 20 nt, Artificial Sequence
  RPE65 RNA guide
aagacuucgacugccugagg

SEQ ID NO: 17585 - RNA, 20 nt, Artificial Sequence
  RPE65 RNA guide
aagagaaaauugauggccua

SEQ ID NO: 17586 - RNA, 20 nt, Artificial Sequence
  RPE65 RNA guide
aagagguuaugugacuuucc

SEQ ID NO: 17587 - RNA, 20 nt, Artificial Sequence
  RPE65 RNA guide
aagauaacagaaaccucagu

SEQ ID NO: 17588 - RNA, 20 nt, Artificial Sequence
  RPE65 RNA guide
aagcuauagaugagggaccc

SEQ ID NO: 17589 - RNA, 20 nt, Artificial Sequence
  RPE65 RNA guide
aagcuaucugugccuguguc

SEQ ID NO: 17590 - RNA, 20 nt, Artificial Sequence
  RPE65 RNA guide
aaggauggucucauuuuacu

SEQ ID NO: 17591 - RNA, 20 nt, Artificial Sequence
  RPE65 RNA guide
aagucacauaaccucuuagg

SEQ ID NO: 17592 - RNA, 20 nt, Artificial Sequence
  RPE65 RNA guide
aagucuuggcuccuaaguuc

SEQ ID NO: 17593 - RNA, 20 nt, Artificial Sequence
  RPE65 RNA guide
aagucuuuguuguucugcag

SEQ ID NO: 17594 - RNA, 20 nt, Artificial Sequence
  RPE65 RNA guide
aaguucuuuuuuaggucaac

SEQ ID NO: 17595 - RNA, 20 nt, Artificial Sequence
  RPE65 RNA guide
aauauacauucuuucauccc

SEQ ID NO: 17596 - RNA, 20 nt, Artificial Sequence
  RPE65 RNA guide
aaugagaccauccuugaaga

SEQ ID NO: 17597 - RNA, 20 nt, Artificial Sequence
  RPE65 RNA guide
aaugcagaguucuuaagucu

SEQ ID NO: 17598 - RNA, 20 nt, Artificial Sequence
  RPE65 RNA guide
aauguauauuucguucacac

SEQ ID NO: 17599 - RNA, 20 nt, Artificial Sequence
  RPE65 RNA guide
aauucaaacagccagaaaug

SEQ ID NO: 17600 - RNA, 20 nt, Artificial Sequence
  RPE65 RNA guide
aauucuuuccugcucacuga

SEQ ID NO: 17601 - RNA, 20 nt, Artificial Sequence
  RPE65 RNA guide
aauugauggccuaagagguu

SEQ ID NO: 17602 - RNA, 20 nt, Artificial Sequence
  RPE65 RNA guide
aauuuagggcuccaaagaaa

SEQ ID NO: 17603 - RNA, 20 nt, Artificial Sequence
  RPE65 RNA guide
aauuuucuucaaggaugguc

SEQ ID NO: 17604 - RNA, 20 nt, Artificial Sequence
  RPE65 RNA guide
acaaagacuucgacugccug

SEQ ID NO: 17605 - RNA, 20 nt, Artificial Sequence
  RPE65 RNA guide
acaacaaagacuucgacugc

SEQ ID NO: 17606 - RNA, 20 nt, Artificial Sequence
  RPE65 RNA guide
acacaggcacagauagcuug

SEQ ID NO: 17607 - RNA, 20 nt, Artificial Sequence
  RPE65 RNA guide
acagaaaccucagugagcag

SEQ ID NO: 17608 - RNA, 20 nt, Artificial Sequence
  RPE65 RNA guide
acagauagcuugcccagucg

SEQ ID NO: 17609 - RNA, 20 nt, Artificial Sequence
  RPE65 RNA guide
acagccagaaaugcagaguu

SEQ ID NO: 17610 - RNA, 20 nt, Artificial Sequence
  RPE65 RNA guide
acaggcacagauagcuugcc

SEQ ID NO: 17611 - RNA, 20 nt, Artificial Sequence
  RPE65 RNA guide
acauaaccucuuaggccauc

SEQ ID NO: 17612 - RNA, 20 nt, Artificial Sequence
  RPE65 RNA guide
acauagccagugacugacac

SEQ ID NO: 17613 - RNA, 20 nt, Artificial Sequence
  RPE65 RNA guide
acauauucuacgugugaacg

SEQ ID NO: 17614 - RNA, 20 nt, Artificial Sequence
  RPE65 RNA guide
acaugcagggaggaacugca

SEQ ID NO: 17615 - RNA, 20 nt, Artificial Sequence
  RPE65 RNA guide
acauucuuucaucccucagg

SEQ ID NO: 17616 - RNA, 20 nt, Artificial Sequence
  RPE65 RNA guide
accauccuugaagaaaauuu

SEQ ID NO: 17617 - RNA, 20 nt, Artificial Sequence
  RPE65 RNA guide
acccugggacgcgacugggc

SEQ ID NO: 17618 - RNA, 20 nt, Artificial Sequence
  RPE65 RNA guide
accuaaaaaagaacuuagga

SEQ ID NO: 17619 - RNA, 20 nt, Artificial Sequence
  RPE65 RNA guide
accucagugagcaggaaaga

SEQ ID NO: 17620 - RNA, 20 nt, Artificial Sequence
  RPE65 RNA guide
accucuuaggccaucaauuu

SEQ ID NO: 17621 - RNA, 20 nt, Artificial Sequence
  RPE65 RNA guide
acgaaauauacauucuuuca

SEQ ID NO: 17622 - RNA, 20 nt, Artificial Sequence
  RPE65 RNA guide
acgcgacugggcaagcuauc

SEQ ID NO: 17623 - RNA, 20 nt, Artificial Sequence
  RPE65 RNA guide
acgugugaacgaaauauaca

SEQ ID NO: 17624 - RNA, 20 nt, Artificial Sequence
  RPE65 RNA guide
acucugcauuucuggcuguu

SEQ ID NO: 17625 - RNA, 20 nt, Artificial Sequence
  RPE65 RNA guide
acugaagagaaaauugaugg

SEQ ID NO: 17626 - RNA, 20 nt, Artificial Sequence
  RPE65 RNA guide
acugacacaggcacagauag

SEQ ID NO: 17627 - RNA, 20 nt, Artificial Sequence
  RPE65 RNA guide
acugagguuucuguuaucuu

SEQ ID NO: 17628 - RNA, 20 nt, Artificial Sequence
  RPE65 RNA guide
acugcaggaagcuauagaug

SEQ ID NO: 17629 - RNA, 20 nt, Artificial Sequence
  RPE65 RNA guide
acugccugagggaugaaaga

SEQ ID NO: 17630 - RNA, 20 nt, Artificial Sequence
  RPE65 RNA guide
acuggcuauguaucacuggg

SEQ ID NO: 17631 - RNA, 20 nt, Artificial Sequence
  RPE65 RNA guide
acugggaaagucacauaacc

SEQ ID NO: 17632 - RNA, 20 nt, Artificial Sequence
  RPE65 RNA guide
acugggcaagcuaucugugc

SEQ ID NO: 17633 - RNA, 20 nt, Artificial Sequence
  RPE65 RNA guide
acuuaagaacucugcauuuc

SEQ ID NO: 17634 - RNA, 20 nt, Artificial Sequence
  RPE65 RNA guide
acuuaggagccaagacuuaa

SEQ ID NO: 17635 - RNA, 20 nt, Artificial Sequence
  RPE65 RNA guide
acuucgacugccugagggau

SEQ ID NO: 17636 - RNA, 20 nt, Artificial Sequence
  RPE65 RNA guide
acuuucccagugauacauag

SEQ ID NO: 17637 - RNA, 20 nt, Artificial Sequence
  RPE65 RNA guide
agaaaauugauggccuaaga

SEQ ID NO: 17638 - RNA, 20 nt, Artificial Sequence
  RPE65 RNA guide
agaaaauuuagggcuccaaa

SEQ ID NO: 17639 - RNA, 20 nt, Artificial Sequence
  RPE65 RNA guide
agaaaccucagugagcagga

SEQ ID NO: 17640 - RNA, 20 nt, Artificial Sequence
  RPE65 RNA guide
agaaaggccucugaaaaaca

SEQ ID NO: 17641 - RNA, 20 nt, Artificial Sequence
  RPE65 RNA guide
agaaaugcagaguucuuaag

SEQ ID NO: 17642 - RNA, 20 nt, Artificial Sequence
  RPE65 RNA guide
agaacaacaaagacuucgac

SEQ ID NO: 17643 - RNA, 20 nt, Artificial Sequence
  RPE65 RNA guide
agaacucugcauuucuggcu

SEQ ID NO: 17644 - RNA, 20 nt, Artificial Sequence
  RPE65 RNA guide
agaacuuaggagccaagacu

SEQ ID NO: 17645 - RNA, 20 nt, Artificial Sequence
  RPE65 RNA guide
agaagauaacagaaaccuca

SEQ ID NO: 17646 - RNA, 20 nt, Artificial Sequence
  RPE65 RNA guide
agaauguauauuucguucac

SEQ ID NO: 17647 - RNA, 20 nt, Artificial Sequence
  RPE65 RNA guide
agaauucaaacagccagaaa

SEQ ID NO: 17648 - RNA, 20 nt, Artificial Sequence
  RPE65 RNA guide
agaccauccuugaagaaaau

SEQ ID NO: 17649 - RNA, 20 nt, Artificial Sequence
  RPE65 RNA guide
agacuuaagaacucugcauu

SEQ ID NO: 17650 - RNA, 20 nt, Artificial Sequence
  RPE65 RNA guide
agacuucgacugccugaggg

SEQ ID NO: 17651 - RNA, 20 nt, Artificial Sequence
  RPE65 RNA guide
agagaaaauugauggccuaa

SEQ ID NO: 17652 - RNA, 20 nt, Artificial Sequence
  RPE65 RNA guide
agagaagauaacagaaaccu

SEQ ID NO: 17653 - RNA, 20 nt, Artificial Sequence
  RPE65 RNA guide
agaggccuuucuuuggagcc

SEQ ID NO: 17654 - RNA, 20 nt, Artificial Sequence
  RPE65 RNA guide
agagguuaugugacuuuccc

SEQ ID NO: 17655 - RNA, 20 nt, Artificial Sequence
  RPE65 RNA guide
agaguucuuaagucuuggcu

SEQ ID NO: 17656 - RNA, 20 nt, Artificial Sequence
  RPE65 RNA guide
agauaacagaaaccucagug

SEQ ID NO: 17657 - RNA, 20 nt, Artificial Sequence
  RPE65 RNA guide
agauagcuugcccagucgcg

SEQ ID NO: 17658 - RNA, 20 nt, Artificial Sequence
  RPE65 RNA guide
agaugagggacccugggacg

SEQ ID NO: 17659 - RNA, 20 nt, Artificial Sequence
  RPE65 RNA guide
agcaggaaagaauucaaaca

SEQ ID NO: 17660 - RNA, 20 nt, Artificial Sequence
  RPE65 RNA guide
agccaagacuuaagaacucu

SEQ ID NO: 17661 - RNA, 20 nt, Artificial Sequence
  RPE65 RNA guide
agccagaaaugcagaguucu

SEQ ID NO: 17662 - RNA, 20 nt, Artificial Sequence
  RPE65 RNA guide
agccagugacugacacaggc

SEQ ID NO: 17663 - RNA, 20 nt, Artificial Sequence
  RPE65 RNA guide
agcccuaaauuuucuucaag

SEQ ID NO: 17664 - RNA, 20 nt, Artificial Sequence
  RPE65 RNA guide
agcuauagaugagggacccu

SEQ ID NO: 17665 - RNA, 20 nt, Artificial Sequence
  RPE65 RNA guide
agcuaucugugccuguguca

SEQ ID NO: 17666 - RNA, 20 nt, Artificial Sequence
  RPE65 RNA guide
agcuuccugcaguuccuccc

SEQ ID NO: 17667 - RNA, 20 nt, Artificial Sequence
  RPE65 RNA guide
agcuugcccagucgcguccc

SEQ ID NO: 17668 - RNA, 20 nt, Artificial Sequence
  RPE65 RNA guide
aggaaagaauucaaacagcc

SEQ ID NO: 17669 - RNA, 20 nt, Artificial Sequence
  RPE65 RNA guide
aggaacugcaggaagcuaua

SEQ ID NO: 17670 - RNA, 20 nt, Artificial Sequence
  RPE65 RNA guide
aggaagcuauagaugaggga

SEQ ID NO: 17671 - RNA, 20 nt, Artificial Sequence
  RPE65 RNA guide
aggagagaagauaacagaaa

SEQ ID NO: 17672 - RNA, 20 nt, Artificial Sequence
  RPE65 RNA guide
aggagccaagacuuaagaac

SEQ ID NO: 17673 - RNA, 20 nt, Artificial Sequence
  RPE65 RNA guide
aggauggucucauuuuacug

SEQ ID NO: 17674 - RNA, 20 nt, Artificial Sequence
  RPE65 RNA guide
aggcacagauagcuugccca

SEQ ID NO: 17675 - RNA, 20 nt, Artificial Sequence
  RPE65 RNA guide
aggcagucgaagucuuuguu

SEQ ID NO: 17676 - RNA, 20 nt, Artificial Sequence
  RPE65 RNA guide
aggccaucaauuuucucuuc

SEQ ID NO: 17677 - RNA, 20 nt, Artificial Sequence
  RPE65 RNA guide
aggccuuucuuuggagcccu

SEQ ID NO: 17678 - RNA, 20 nt, Artificial Sequence
  RPE65 RNA guide
agggacccugggacgcgacu

SEQ ID NO: 17679 - RNA, 20 nt, Artificial Sequence
  RPE65 RNA guide
agggaggaacugcaggaagc

SEQ ID NO: 17680 - RNA, 20 nt, Artificial Sequence
  RPE65 RNA guide
agggaugaaagaauguauau

SEQ ID NO: 17681 - RNA, 20 nt, Artificial Sequence
  RPE65 RNA guide
agggcuccaaagaaaggccu

SEQ ID NO: 17682 - RNA, 20 nt, Artificial Sequence
  RPE65 RNA guide
agggucccucaucuauagcu

SEQ ID NO: 17683 - RNA, 20 nt, Artificial Sequence
  RPE65 RNA guide
aggucaacaugcagggagga

SEQ ID NO: 17684 - RNA, 20 nt, Artificial Sequence
  RPE65 RNA guide
agguuaugugacuuucccag

SEQ ID NO: 17685 - RNA, 20 nt, Artificial Sequence
  RPE65 RNA guide
agguuucuguuaucuucucu

SEQ ID NO: 17686 - RNA, 20 nt, Artificial Sequence
  RPE65 RNA guide
aguaaaaugagaccauccuu

SEQ ID NO: 17687 - RNA, 20 nt, Artificial Sequence
  RPE65 RNA guide
agucacauaaccucuuaggc

SEQ ID NO: 17688 - RNA, 20 nt, Artificial Sequence
  RPE65 RNA guide
agucacuggcuauguaucac

SEQ ID NO: 17689 - RNA, 20 nt, Artificial Sequence
  RPE65 RNA guide
agucgaagucuuuguuguuc

SEQ ID NO: 17690 - RNA, 20 nt, Artificial Sequence
  RPE65 RNA guide
agucgcgucccagggucccu

SEQ ID NO: 17691 - RNA, 20 nt, Artificial Sequence
  RPE65 RNA guide
agucuuggcuccuaaguucu

SEQ ID NO: 17692 - RNA, 20 nt, Artificial Sequence
  RPE65 RNA guide
agucuuuguuguucugcaga

SEQ ID NO: 17693 - RNA, 20 nt, Artificial Sequence
  RPE65 RNA guide
agugacugacacaggcacag

SEQ ID NO: 17694 - RNA, 20 nt, Artificial Sequence
  RPE65 RNA guide
agugagcaggaaagaauuca

SEQ ID NO: 17695 - RNA, 20 nt, Artificial Sequence
  RPE65 RNA guide
agugauacauagccagugac

SEQ ID NO: 17696 - RNA, 20 nt, Artificial Sequence
  RPE65 RNA guide
aguuccucccugcauguuga

SEQ ID NO: 17697 - RNA, 20 nt, Artificial Sequence
  RPE65 RNA guide
aguucuuaagucuuggcucc

SEQ ID NO: 17698 - RNA, 20 nt, Artificial Sequence
  RPE65 RNA guide
aguucuuuuuuaggucaaca

SEQ ID NO: 17699 - RNA, 20 nt, Artificial Sequence
  RPE65 RNA guide
auaacagaaaccucagugag

SEQ ID NO: 17700 - RNA, 20 nt, Artificial Sequence
  RPE65 RNA guide
auaaccucuuaggccaucaa

SEQ ID NO: 17701 - RNA, 20 nt, Artificial Sequence
  RPE65 RNA guide
auacauagccagugacugac

SEQ ID NO: 17702 - RNA, 20 nt, Artificial Sequence
  RPE65 RNA guide
auacauucuuucaucccuca

SEQ ID NO: 17703 - RNA, 20 nt, Artificial Sequence
  RPE65 RNA guide
auagaugagggacccuggga

SEQ ID NO: 17704 - RNA, 20 nt, Artificial Sequence
  RPE65 RNA guide
auagccagugacugacacag

SEQ ID NO: 17705 - RNA, 20 nt, Artificial Sequence
  RPE65 RNA guide
auagcuuccugcaguuccuc

SEQ ID NO: 17706 - RNA, 20 nt, Artificial Sequence
  RPE65 RNA guide
auagcuugcccagucgcguc

SEQ ID NO: 17707 - RNA, 20 nt, Artificial Sequence
  RPE65 RNA guide
auauacauucuuucaucccu

SEQ ID NO: 17708 - RNA, 20 nt, Artificial Sequence
  RPE65 RNA guide
aucacugggaaagucacaua

SEQ ID NO: 17709 - RNA, 20 nt, Artificial Sequence
  RPE65 RNA guide
aucccucaggcagucgaagu

SEQ ID NO: 17710 - RNA, 20 nt, Artificial Sequence
  RPE65 RNA guide
auccuugaagaaaauuuagg

SEQ ID NO: 17711 - RNA, 20 nt, Artificial Sequence
  RPE65 RNA guide
aucuauagcuuccugcaguu

SEQ ID NO: 17712 - RNA, 20 nt, Artificial Sequence
  RPE65 RNA guide
aucugugccugugucaguca

SEQ ID NO: 17713 - RNA, 20 nt, Artificial Sequence
  RPE65 RNA guide
augagaccauccuugaagaa

SEQ ID NO: 17714 - RNA, 20 nt, Artificial Sequence
  RPE65 RNA guide
augagggacccugggacgcg

SEQ ID NO: 17715 - RNA, 20 nt, Artificial Sequence
  RPE65 RNA guide
augcagaguucuuaagucuu

SEQ ID NO: 17716 - RNA, 20 nt, Artificial Sequence
  RPE65 RNA guide
augcagggaggaacugcagg

SEQ ID NO: 17717 - RNA, 20 nt, Artificial Sequence
  RPE65 RNA guide
auggccuaagagguuaugug

SEQ ID NO: 17718 - RNA, 20 nt, Artificial Sequence
  RPE65 RNA guide
auggucucauuuuacugaag

SEQ ID NO: 17719 - RNA, 20 nt, Artificial Sequence
  RPE65 RNA guide
auguauauuucguucacacg

SEQ ID NO: 17720 - RNA, 20 nt, Artificial Sequence
  RPE65 RNA guide
auguaucacugggaaaguca

SEQ ID NO: 17721 - RNA, 20 nt, Artificial Sequence
  RPE65 RNA guide
augugacuuucccagugaua

SEQ ID NO: 17722 - RNA, 20 nt, Artificial Sequence
  RPE65 RNA guide
auguuuuucugcagaacaac

SEQ ID NO: 17723 - RNA, 20 nt, Artificial Sequence
  RPE65 RNA guide
auucaaacagccagaaaugc

SEQ ID NO: 17724 - RNA, 20 nt, Artificial Sequence
  RPE65 RNA guide
auucuacgugugaacgaaau

SEQ ID NO: 17725 - RNA, 20 nt, Artificial Sequence
  RPE65 RNA guide
auucuuucaucccucaggca

SEQ ID NO: 17726 - RNA, 20 nt, Artificial Sequence
  RPE65 RNA guide
auucuuuccugcucacugag

SEQ ID NO: 17727 - RNA, 20 nt, Artificial Sequence
  RPE65 RNA guide
auugauggccuaagagguua

SEQ ID NO: 17728 - RNA, 20 nt, Artificial Sequence
  RPE65 RNA guide
auuuagggcuccaaagaaag

SEQ ID NO: 17729 - RNA, 20 nt, Artificial Sequence
  RPE65 RNA guide
auuucguucacacguagaau

SEQ ID NO: 17730 - RNA, 20 nt, Artificial Sequence
  RPE65 RNA guide
auuucuggcuguuugaauuc

SEQ ID NO: 17731 - RNA, 20 nt, Artificial Sequence
  RPE65 RNA guide
auuuucuucaaggauggucu

SEQ ID NO: 17732 - RNA, 20 nt, Artificial Sequence
  RPE65 RNA guide
caaaacauauucuacgugug

SEQ ID NO: 17733 - RNA, 20 nt, Artificial Sequence
  RPE65 RNA guide
caaacagccagaaaugcaga

SEQ ID NO: 17734 - RNA, 20 nt, Artificial Sequence
  RPE65 RNA guide
caaagaaaggccucugaaaa

SEQ ID NO: 17735 - RNA, 20 nt, Artificial Sequence
  RPE65 RNA guide
caaagacuucgacugccuga

SEQ ID NO: 17736 - RNA, 20 nt, Artificial Sequence
  RPE65 RNA guide
caacaaagacuucgacugcc

SEQ ID NO: 17737 - RNA, 20 nt, Artificial Sequence
  RPE65 RNA guide
caacaugcagggaggaacug

SEQ ID NO: 17738 - RNA, 20 nt, Artificial Sequence
  RPE65 RNA guide
caagacuuaagaacucugca

SEQ ID NO: 17739 - RNA, 20 nt, Artificial Sequence
  RPE65 RNA guide
caagcuaucugugccugugu

SEQ ID NO: 17740 - RNA, 20 nt, Artificial Sequence
  RPE65 RNA guide
caaggauggucucauuuuac

SEQ ID NO: 17741 - RNA, 20 nt, Artificial Sequence
  RPE65 RNA guide
cacagauagcuugcccaguc

SEQ ID NO: 17742 - RNA, 20 nt, Artificial Sequence
  RPE65 RNA guide
cacaggcacagauagcuugc

SEQ ID NO: 17743 - RNA, 20 nt, Artificial Sequence
  RPE65 RNA guide
cacauaaccucuuaggccau

SEQ ID NO: 17744 - RNA, 20 nt, Artificial Sequence
  RPE65 RNA guide
cacugagguuucuguuaucu

SEQ ID NO: 17745 - RNA, 20 nt, Artificial Sequence
  RPE65 RNA guide
cacuggcuauguaucacugg

SEQ ID NO: 17746 - RNA, 20 nt, Artificial Sequence
  RPE65 RNA guide
cacugggaaagucacauaac

SEQ ID NO: 17747 - RNA, 20 nt, Artificial Sequence
  RPE65 RNA guide
cagaaaccucagugagcagg

SEQ ID NO: 17748 - RNA, 20 nt, Artificial Sequence
  RPE65 RNA guide
cagaaaugcagaguucuuaa

SEQ ID NO: 17749 - RNA, 20 nt, Artificial Sequence
  RPE65 RNA guide
cagaacaacaaagacuucga

SEQ ID NO: 17750 - RNA, 20 nt, Artificial Sequence
  RPE65 RNA guide
cagaggccuuucuuuggagc

SEQ ID NO: 17751 - RNA, 20 nt, Artificial Sequence
  RPE65 RNA guide
cagaguucuuaagucuuggc

SEQ ID NO: 17752 - RNA, 20 nt, Artificial Sequence
  RPE65 RNA guide
cagauagcuugcccagucgc

SEQ ID NO: 17753 - RNA, 20 nt, Artificial Sequence
  RPE65 RNA guide
cagccagaaaugcagaguuc

SEQ ID NO: 17754 - RNA, 20 nt, Artificial Sequence
  RPE65 RNA guide
caggaaagaauucaaacagc

SEQ ID NO: 17755 - RNA, 20 nt, Artificial Sequence
  RPE65 RNA guide
caggaagcuauagaugaggg

SEQ ID NO: 17756 - RNA, 20 nt, Artificial Sequence
  RPE65 RNA guide
caggcacagauagcuugccc

SEQ ID NO: 17757 - RNA, 20 nt, Artificial Sequence
  RPE65 RNA guide
caggcagucgaagucuuugu

SEQ ID NO: 17758 - RNA, 20 nt, Artificial Sequence
  RPE65 RNA guide
cagggaggaacugcaggaag

SEQ ID NO: 17759 - RNA, 20 nt, Artificial Sequence
  RPE65 RNA guide
cagggucccucaucuauagc

SEQ ID NO: 17760 - RNA, 20 nt, Artificial Sequence
  RPE65 RNA guide
caguaaaaugagaccauccu

SEQ ID NO: 17761 - RNA, 20 nt, Artificial Sequence
  RPE65 RNA guide
cagucacuggcuauguauca

SEQ ID NO: 17762 - RNA, 20 nt, Artificial Sequence
  RPE65 RNA guide
cagucgaagucuuuguuguu

SEQ ID NO: 17763 - RNA, 20 nt, Artificial Sequence
  RPE65 RNA guide
cagucgcgucccaggguccc

SEQ ID NO: 17764 - RNA, 20 nt, Artificial Sequence
  RPE65 RNA guide
cagugacugacacaggcaca

SEQ ID NO: 17765 - RNA, 20 nt, Artificial Sequence
  RPE65 RNA guide
cagugagcaggaaagaauuc

SEQ ID NO: 17766 - RNA, 20 nt, Artificial Sequence
  RPE65 RNA guide
cagugauacauagccaguga

SEQ ID NO: 17767 - RNA, 20 nt, Artificial Sequence
  RPE65 RNA guide
caguuccucccugcauguug

SEQ ID NO: 17768 - RNA, 20 nt, Artificial Sequence
  RPE65 RNA guide
cauaaccucuuaggccauca

SEQ ID NO: 17769 - RNA, 20 nt, Artificial Sequence
  RPE65 RNA guide
cauagccagugacugacaca

SEQ ID NO: 17770 - RNA, 20 nt, Artificial Sequence
  RPE65 RNA guide
cauauucuacgugugaacga

SEQ ID NO: 17771 - RNA, 20 nt, Artificial Sequence
  RPE65 RNA guide
caucccucaggcagucgaag

SEQ ID NO: 17772 - RNA, 20 nt, Artificial Sequence
  RPE65 RNA guide
cauccuugaagaaaauuuag

SEQ ID NO: 17773 - RNA, 20 nt, Artificial Sequence
  RPE65 RNA guide
caucuauagcuuccugcagu

SEQ ID NO: 17774 - RNA, 20 nt, Artificial Sequence
  RPE65 RNA guide
caugcagggaggaacugcag

SEQ ID NO: 17775 - RNA, 20 nt, Artificial Sequence
  RPE65 RNA guide
cauucuuucaucccucaggc

SEQ ID NO: 17776 - RNA, 20 nt, Artificial Sequence
  RPE65 RNA guide
cauuucuggcuguuugaauu

SEQ ID NO: 17777 - RNA, 20 nt, Artificial Sequence
  RPE65 RNA guide
ccaaagaaaggccucugaaa

SEQ ID NO: 17778 - RNA, 20 nt, Artificial Sequence
  RPE65 RNA guide
ccaagacuuaagaacucugc

SEQ ID NO: 17779 - RNA, 20 nt, Artificial Sequence
  RPE65 RNA guide
ccagaaaugcagaguucuua

SEQ ID NO: 17780 - RNA, 20 nt, Artificial Sequence
  RPE65 RNA guide
ccagggucccucaucuauag

SEQ ID NO: 17781 - RNA, 20 nt, Artificial Sequence
  RPE65 RNA guide
ccagucgcgucccagggucc

SEQ ID NO: 17782 - RNA, 20 nt, Artificial Sequence
  RPE65 RNA guide
ccagugacugacacaggcac

SEQ ID NO: 17783 - RNA, 20 nt, Artificial Sequence
  RPE65 RNA guide
ccagugauacauagccagug

SEQ ID NO: 17784 - RNA, 20 nt, Artificial Sequence
  RPE65 RNA guide
ccauccuugaagaaaauuua

SEQ ID NO: 17785 - RNA, 20 nt, Artificial Sequence
  RPE65 RNA guide
cccagggucccucaucuaua

SEQ ID NO: 17786 - RNA, 20 nt, Artificial Sequence
  RPE65 RNA guide
cccagucgcgucccaggguc

SEQ ID NO: 17787 - RNA, 20 nt, Artificial Sequence
  RPE65 RNA guide
cccagugauacauagccagu

SEQ ID NO: 17788 - RNA, 20 nt, Artificial Sequence
  RPE65 RNA guide
cccuaaauuuucuucaagga

SEQ ID NO: 17789 - RNA, 20 nt, Artificial Sequence
  RPE65 RNA guide
cccucaggcagucgaagucu

SEQ ID NO: 17790 - RNA, 20 nt, Artificial Sequence
  RPE65 RNA guide
cccucaucuauagcuuccug

SEQ ID NO: 17791 - RNA, 20 nt, Artificial Sequence
  RPE65 RNA guide
cccugcauguugaccuaaaa

SEQ ID NO: 17792 - RNA, 20 nt, Artificial Sequence
  RPE65 RNA guide
cccugggacgcgacugggca

SEQ ID NO: 17793 - RNA, 20 nt, Artificial Sequence
  RPE65 RNA guide
ccuaaaaaagaacuuaggag

SEQ ID NO: 17794 - RNA, 20 nt, Artificial Sequence
  RPE65 RNA guide
ccuaaauuuucuucaaggau

SEQ ID NO: 17795 - RNA, 20 nt, Artificial Sequence
  RPE65 RNA guide
ccuaagagguuaugugacuu

SEQ ID NO: 17796 - RNA, 20 nt, Artificial Sequence
  RPE65 RNA guide
ccuaaguucuuuuuuagguc

SEQ ID NO: 17797 - RNA, 20 nt, Artificial Sequence
  RPE65 RNA guide
ccucaggcagucgaagucuu

SEQ ID NO: 17798 - RNA, 20 nt, Artificial Sequence
  RPE65 RNA guide
ccucagugagcaggaaagaa

SEQ ID NO: 17799 - RNA, 20 nt, Artificial Sequence
  RPE65 RNA guide
ccucaucuauagcuuccugc

SEQ ID NO: 17800 - RNA, 20 nt, Artificial Sequence
  RPE65 RNA guide
ccucccugcauguugaccua

SEQ ID NO: 17801 - RNA, 20 nt, Artificial Sequence
  RPE65 RNA guide
ccucuuaggccaucaauuuu

SEQ ID NO: 17802 - RNA, 20 nt, Artificial Sequence
  RPE65 RNA guide
ccugagggaugaaagaaugu

SEQ ID NO: 17803 - RNA, 20 nt, Artificial Sequence
  RPE65 RNA guide
ccugcaguuccucccugcau

SEQ ID NO: 17804 - RNA, 20 nt, Artificial Sequence
  RPE65 RNA guide
ccugcauguugaccuaaaaa

SEQ ID NO: 17805 - RNA, 20 nt, Artificial Sequence
  RPE65 RNA guide
ccugcucacugagguuucug

SEQ ID NO: 17806 - RNA, 20 nt, Artificial Sequence
  RPE65 RNA guide
ccugggacgcgacugggcaa

SEQ ID NO: 17807 - RNA, 20 nt, Artificial Sequence
  RPE65 RNA guide
ccugugucagucacuggcua

SEQ ID NO: 17808 - RNA, 20 nt, Artificial Sequence
  RPE65 RNA guide
ccuuacaguuauguugacaa

SEQ ID NO: 17809 - RNA, 20 nt, Artificial Sequence
  RPE65 RNA guide
ccuugaagaaaauuuagggc

SEQ ID NO: 17810 - RNA, 20 nt, Artificial Sequence
  RPE65 RNA guide
ccuuucuuuggagcccuaaa

SEQ ID NO: 17811 - RNA, 20 nt, Artificial Sequence
  RPE65 RNA guide
cgaaauauacauucuuucau

SEQ ID NO: 17812 - RNA, 20 nt, Artificial Sequence
  RPE65 RNA guide
cgaagucuuuguuguucugc

SEQ ID NO: 17813 - RNA, 20 nt, Artificial Sequence
  RPE65 RNA guide
cgacugccugagggaugaaa

SEQ ID NO: 17814 - RNA, 20 nt, Artificial Sequence
  RPE65 RNA guide
cgacugggcaagcuaucugu

SEQ ID NO: 17815 - RNA, 20 nt, Artificial Sequence
  RPE65 RNA guide
cgcgacugggcaagcuaucu

SEQ ID NO: 17816 - RNA, 20 nt, Artificial Sequence
  RPE65 RNA guide
cgcgucccagggucccucau

SEQ ID NO: 17817 - RNA, 20 nt, Artificial Sequence
  RPE65 RNA guide
cgucccagggucccucaucu

SEQ ID NO: 17818 - RNA, 20 nt, Artificial Sequence
  RPE65 RNA guide
cgugugaacgaaauauacau

SEQ ID NO: 17819 - RNA, 20 nt, Artificial Sequence
  RPE65 RNA guide
cguucacacguagaauaugu

SEQ ID NO: 17820 - RNA, 20 nt, Artificial Sequence
  RPE65 RNA guide
cuaaaaaagaacuuaggagc

SEQ ID NO: 17821 - RNA, 20 nt, Artificial Sequence
  RPE65 RNA guide
cuaaauuuucuucaaggaug

SEQ ID NO: 17822 - RNA, 20 nt, Artificial Sequence
  RPE65 RNA guide
cuaagagguuaugugacuuu

SEQ ID NO: 17823 - RNA, 20 nt, Artificial Sequence
  RPE65 RNA guide
cuacgugugaacgaaauaua

SEQ ID NO: 17824 - RNA, 20 nt, Artificial Sequence
  RPE65 RNA guide
cuaggagagaagauaacaga

SEQ ID NO: 17825 - RNA, 20 nt, Artificial Sequence
  RPE65 RNA guide
cuauagaugagggacccugg

SEQ ID NO: 17826 - RNA, 20 nt, Artificial Sequence
  RPE65 RNA guide
cuauagcuuccugcaguucc

SEQ ID NO: 17827 - RNA, 20 nt, Artificial Sequence
  RPE65 RNA guide
cuaucugugccugugucagu

SEQ ID NO: 17828 - RNA, 20 nt, Artificial Sequence
  RPE65 RNA guide
cuauguaucacugggaaagu

SEQ ID NO: 17829 - RNA, 20 nt, Artificial Sequence
  RPE65 RNA guide
cucacugagguuucuguuau

SEQ ID NO: 17830 - RNA, 20 nt, Artificial Sequence
  RPE65 RNA guide
cucaggcagucgaagucuuu

SEQ ID NO: 17831 - RNA, 20 nt, Artificial Sequence
  RPE65 RNA guide
cucagugagcaggaaagaau

SEQ ID NO: 17832 - RNA, 20 nt, Artificial Sequence
  RPE65 RNA guide
cucaucuauagcuuccugca

SEQ ID NO: 17833 - RNA, 20 nt, Artificial Sequence
  RPE65 RNA guide
cuccaaagaaaggccucuga

SEQ ID NO: 17834 - RNA, 20 nt, Artificial Sequence
  RPE65 RNA guide
cucccugcauguugaccuaa

SEQ ID NO: 17835 - RNA, 20 nt, Artificial Sequence
  RPE65 RNA guide
cuccuaaguucuuuuuuagg

SEQ ID NO: 17836 - RNA, 20 nt, Artificial Sequence
  RPE65 RNA guide
cucugcauuucuggcuguuu

SEQ ID NO: 17837 - RNA, 20 nt, Artificial Sequence
  RPE65 RNA guide
cucuuaggccaucaauuuuc

SEQ ID NO: 17838 - RNA, 20 nt, Artificial Sequence
  RPE65 RNA guide
cucuucaguaaaaugagacc

SEQ ID NO: 17839 - RNA, 20 nt, Artificial Sequence
  RPE65 RNA guide
cugaagagaaaauugauggc

SEQ ID NO: 17840 - RNA, 20 nt, Artificial Sequence
  RPE65 RNA guide
cugacacaggcacagauagc

SEQ ID NO: 17841 - RNA, 20 nt, Artificial Sequence
  RPE65 RNA guide
cugagggaugaaagaaugua

SEQ ID NO: 17842 - RNA, 20 nt, Artificial Sequence
  RPE65 RNA guide
cugagguuucuguuaucuuc

SEQ ID NO: 17843 - RNA, 20 nt, Artificial Sequence
  RPE65 RNA guide
cugcagaacaacaaagacuu

SEQ ID NO: 17844 - RNA, 20 nt, Artificial Sequence
  RPE65 RNA guide
cugcaggaagcuauagauga

SEQ ID NO: 17845 - RNA, 20 nt, Artificial Sequence
  RPE65 RNA guide
cugcaguuccucccugcaug

SEQ ID NO: 17846 - RNA, 20 nt, Artificial Sequence
  RPE65 RNA guide
cugcauguugaccuaaaaaa

SEQ ID NO: 17847 - RNA, 20 nt, Artificial Sequence
  RPE65 RNA guide
cugcauuucuggcuguuuga

SEQ ID NO: 17848 - RNA, 20 nt, Artificial Sequence
  RPE65 RNA guide
cugccugagggaugaaagaa

SEQ ID NO: 17849 - RNA, 20 nt, Artificial Sequence
  RPE65 RNA guide
cugcucacugagguuucugu

SEQ ID NO: 17850 - RNA, 20 nt, Artificial Sequence
  RPE65 RNA guide
cuggcuauguaucacuggga

SEQ ID NO: 17851 - RNA, 20 nt, Artificial Sequence
  RPE65 RNA guide
cuggcuguuugaauucuuuc

SEQ ID NO: 17852 - RNA, 20 nt, Artificial Sequence
  RPE65 RNA guide
cugggaaagucacauaaccu

SEQ ID NO: 17853 - RNA, 20 nt, Artificial Sequence
  RPE65 RNA guide
cugggacgcgacugggcaag

SEQ ID NO: 17854 - RNA, 20 nt, Artificial Sequence
  RPE65 RNA guide
cugggcaagcuaucugugcc

SEQ ID NO: 17855 - RNA, 20 nt, Artificial Sequence
  RPE65 RNA guide
cugugccugugucagucacu

SEQ ID NO: 17856 - RNA, 20 nt, Artificial Sequence
  RPE65 RNA guide
cugugucagucacuggcuau

SEQ ID NO: 17857 - RNA, 20 nt, Artificial Sequence
  RPE65 RNA guide
cuguuugaauucuuuccugc

SEQ ID NO: 17858 - RNA, 20 nt, Artificial Sequence
  RPE65 RNA guide
cuuaagaacucugcauuucu

SEQ ID NO: 17859 - RNA, 20 nt, Artificial Sequence
  RPE65 RNA guide
cuuaagucuuggcuccuaag

SEQ ID NO: 17860 - RNA, 20 nt, Artificial Sequence
  RPE65 RNA guide
cuuaggagccaagacuuaag

SEQ ID NO: 17861 - RNA, 20 nt, Artificial Sequence
  RPE65 RNA guide
cuuaggccaucaauuuucuc

SEQ ID NO: 17862 - RNA, 20 nt, Artificial Sequence
  RPE65 RNA guide
cuucaaggauggucucauuu

SEQ ID NO: 17863 - RNA, 20 nt, Artificial Sequence
  RPE65 RNA guide
cuucaguaaaaugagaccau

SEQ ID NO: 17864 - RNA, 20 nt, Artificial Sequence
  RPE65 RNA guide
cuuccugcaguuccucccug

SEQ ID NO: 17865 - RNA, 20 nt, Artificial Sequence
  RPE65 RNA guide
cuucgacugccugagggaug

SEQ ID NO: 17866 - RNA, 20 nt, Artificial Sequence
  RPE65 RNA guide
cuugaagaaaauuuagggcu

SEQ ID NO: 17867 - RNA, 20 nt, Artificial Sequence
  RPE65 RNA guide
cuugcccagucgcgucccag

SEQ ID NO: 17868 - RNA, 20 nt, Artificial Sequence
  RPE65 RNA guide
cuuggcuccuaaguucuuuu

SEQ ID NO: 17869 - RNA, 20 nt, Artificial Sequence
  RPE65 RNA guide
cuuucaucccucaggcaguc

SEQ ID NO: 17870 - RNA, 20 nt, Artificial Sequence
  RPE65 RNA guide
cuuucccagugauacauagc

SEQ ID NO: 17871 - RNA, 20 nt, Artificial Sequence
  RPE65 RNA guide
cuuuccugcucacugagguu

SEQ ID NO: 17872 - RNA, 20 nt, Artificial Sequence
  RPE65 RNA guide
cuuucuuuggagcccuaaau

SEQ ID NO: 17873 - RNA, 20 nt, Artificial Sequence
  RPE65 RNA guide
cuuuggagcccuaaauuuuc

SEQ ID NO: 17874 - RNA, 20 nt, Artificial Sequence
  RPE65 RNA guide
cuuuguuguucugcagaaaa

SEQ ID NO: 17875 - RNA, 20 nt, Artificial Sequence
  RPE65 RNA guide
cuuuuugucaacauaacugu

SEQ ID NO: 17876 - RNA, 20 nt, Artificial Sequence
  RPE65 RNA guide
cuuuuuuaggucaacaugca

SEQ ID NO: 17877 - RNA, 20 nt, Artificial Sequence
  RPE65 RNA guide
gaaaauugauggccuaagag

SEQ ID NO: 17878 - RNA, 20 nt, Artificial Sequence
  RPE65 RNA guide
gaaaauuuagggcuccaaag

SEQ ID NO: 17879 - RNA, 20 nt, Artificial Sequence
  RPE65 RNA guide
gaaaccucagugagcaggaa

SEQ ID NO: 17880 - RNA, 20 nt, Artificial Sequence
  RPE65 RNA guide
gaaagaauucaaacagccag

SEQ ID NO: 17881 - RNA, 20 nt, Artificial Sequence
  RPE65 RNA guide
gaaaggccucugaaaaacaa

SEQ ID NO: 17882 - RNA, 20 nt, Artificial Sequence
  RPE65 RNA guide
gaaagucacauaaccucuua

SEQ ID NO: 17883 - RNA, 20 nt, Artificial Sequence
  RPE65 RNA guide
gaaauauacauucuuucauc

SEQ ID NO: 17884 - RNA, 20 nt, Artificial Sequence
  RPE65 RNA guide
gaaaugcagaguucuuaagu

SEQ ID NO: 17885 - RNA, 20 nt, Artificial Sequence
  RPE65 RNA guide
gaacaacaaagacuucgacu

SEQ ID NO: 17886 - RNA, 20 nt, Artificial Sequence
  RPE65 RNA guide
gaacucugcauuucuggcug

SEQ ID NO: 17887 - RNA, 20 nt, Artificial Sequence
  RPE65 RNA guide
gaacugcaggaagcuauaga

SEQ ID NO: 17888 - RNA, 20 nt, Artificial Sequence
  RPE65 RNA guide
gaacuuaggagccaagacuu

SEQ ID NO: 17889 - RNA, 20 nt, Artificial Sequence
  RPE65 RNA guide
gaagaaaauuuagggcucca

SEQ ID NO: 17890 - RNA, 20 nt, Artificial Sequence
  RPE65 RNA guide
gaagagaaaauugauggccu

SEQ ID NO: 17891 - RNA, 20 nt, Artificial Sequence
  RPE65 RNA guide
gaagauaacagaaaccucag

SEQ ID NO: 17892 - RNA, 20 nt, Artificial Sequence
  RPE65 RNA guide
gaagcuauagaugagggacc

SEQ ID NO: 17893 - RNA, 20 nt, Artificial Sequence
  RPE65 RNA guide
gaagucuuuguuguucugca

SEQ ID NO: 17894 - RNA, 20 nt, Artificial Sequence
  RPE65 RNA guide
gaauguauauuucguucaca

SEQ ID NO: 17895 - RNA, 20 nt, Artificial Sequence
  RPE65 RNA guide
gaauucaaacagccagaaau

SEQ ID NO: 17896 - RNA, 20 nt, Artificial Sequence
  RPE65 RNA guide
gaauucuuuccugcucacug

SEQ ID NO: 17897 - RNA, 20 nt, Artificial Sequence
  RPE65 RNA guide
gacacaggcacagauagcuu

SEQ ID NO: 17898 - RNA, 20 nt, Artificial Sequence
  RPE65 RNA guide
gaccauccuugaagaaaauu

SEQ ID NO: 17899 - RNA, 20 nt, Artificial Sequence
  RPE65 RNA guide
gacccugggacgcgacuggg

SEQ ID NO: 17900 - RNA, 20 nt, Artificial Sequence
  RPE65 RNA guide
gaccuaaaaaagaacuuagg

SEQ ID NO: 17901 - RNA, 20 nt, Artificial Sequence
  RPE65 RNA guide
gacgcgacugggcaagcuau

SEQ ID NO: 17902 - RNA, 20 nt, Artificial Sequence
  RPE65 RNA guide
gacugacacaggcacagaua

SEQ ID NO: 17903 - RNA, 20 nt, Artificial Sequence
  RPE65 RNA guide
gacugccugagggaugaaag

SEQ ID NO: 17904 - RNA, 20 nt, Artificial Sequence
  RPE65 RNA guide
gacugggcaagcuaucugug

SEQ ID NO: 17905 - RNA, 20 nt, Artificial Sequence
  RPE65 RNA guide
gacuuaagaacucugcauuu

SEQ ID NO: 17906 - RNA, 20 nt, Artificial Sequence
  RPE65 RNA guide
gacuucgacugccugaggga

SEQ ID NO: 17907 - RNA, 20 nt, Artificial Sequence
  RPE65 RNA guide
gacuuucccagugauacaua

SEQ ID NO: 17908 - RNA, 20 nt, Artificial Sequence
  RPE65 RNA guide
gagaaaauugauggccuaag

SEQ ID NO: 17909 - RNA, 20 nt, Artificial Sequence
  RPE65 RNA guide
gagaagauaacagaaaccuc

SEQ ID NO: 17910 - RNA, 20 nt, Artificial Sequence
  RPE65 RNA guide
gagaccauccuugaagaaaa

SEQ ID NO: 17911 - RNA, 20 nt, Artificial Sequence
  RPE65 RNA guide
gagagaagauaacagaaacc

SEQ ID NO: 17912 - RNA, 20 nt, Artificial Sequence
  RPE65 RNA guide
gagcaggaaagaauucaaac

SEQ ID NO: 17913 - RNA, 20 nt, Artificial Sequence
  RPE65 RNA guide
gagccaagacuuaagaacuc

SEQ ID NO: 17914 - RNA, 20 nt, Artificial Sequence
  RPE65 RNA guide
gagcccuaaauuuucuucaa

SEQ ID NO: 17915 - RNA, 20 nt, Artificial Sequence
  RPE65 RNA guide
gaggaacugcaggaagcuau

SEQ ID NO: 17916 - RNA, 20 nt, Artificial Sequence
  RPE65 RNA guide
gaggccuuucuuuggagccc

SEQ ID NO: 17917 - RNA, 20 nt, Artificial Sequence
  RPE65 RNA guide
gagggacccugggacgcgac

SEQ ID NO: 17918 - RNA, 20 nt, Artificial Sequence
  RPE65 RNA guide
gagggaugaaagaauguaua

SEQ ID NO: 17919 - RNA, 20 nt, Artificial Sequence
  RPE65 RNA guide
gagguuaugugacuuuccca

SEQ ID NO: 17920 - RNA, 20 nt, Artificial Sequence
  RPE65 RNA guide
gagguuucuguuaucuucuc

SEQ ID NO: 17921 - RNA, 20 nt, Artificial Sequence
  RPE65 RNA guide
gaguucuuaagucuuggcuc

SEQ ID NO: 17922 - RNA, 20 nt, Artificial Sequence
  RPE65 RNA guide
gauaacagaaaccucaguga

SEQ ID NO: 17923 - RNA, 20 nt, Artificial Sequence
  RPE65 RNA guide
gauacauagccagugacuga

SEQ ID NO: 17924 - RNA, 20 nt, Artificial Sequence
  RPE65 RNA guide
gauagcuugcccagucgcgu

SEQ ID NO: 17925 - RNA, 20 nt, Artificial Sequence
  RPE65 RNA guide
gaugagggacccugggacgc

SEQ ID NO: 17926 - RNA, 20 nt, Artificial Sequence
  RPE65 RNA guide
gauggccuaagagguuaugu

SEQ ID NO: 17927 - RNA, 20 nt, Artificial Sequence
  RPE65 RNA guide
gauggucucauuuuacugaa

SEQ ID NO: 17928 - RNA, 20 nt, Artificial Sequence
  RPE65 RNA guide
gcaagcuaucugugccugug

SEQ ID NO: 17929 - RNA, 20 nt, Artificial Sequence
  RPE65 RNA guide
gcacagauagcuugcccagu

SEQ ID NO: 17930 - RNA, 20 nt, Artificial Sequence
  RPE65 RNA guide
gcagaacaacaaagacuucg

SEQ ID NO: 17931 - RNA, 20 nt, Artificial Sequence
  RPE65 RNA guide
gcagaguucuuaagucuugg

SEQ ID NO: 17932 - RNA, 20 nt, Artificial Sequence
  RPE65 RNA guide
gcaggaaagaauucaaacag

SEQ ID NO: 17933 - RNA, 20 nt, Artificial Sequence
  RPE65 RNA guide
gcaggaagcuauagaugagg

SEQ ID NO: 17934 - RNA, 20 nt, Artificial Sequence
  RPE65 RNA guide
gcagggaggaacugcaggaa

SEQ ID NO: 17935 - RNA, 20 nt, Artificial Sequence
  RPE65 RNA guide
gcagucgaagucuuuguugu

SEQ ID NO: 17936 - RNA, 20 nt, Artificial Sequence
  RPE65 RNA guide
gcaguuccucccugcauguu

SEQ ID NO: 17937 - RNA, 20 nt, Artificial Sequence
  RPE65 RNA guide
gcauguugaccuaaaaaaga

SEQ ID NO: 17938 - RNA, 20 nt, Artificial Sequence
  RPE65 RNA guide
gcauuucuggcuguuugaau

SEQ ID NO: 17939 - RNA, 20 nt, Artificial Sequence
  RPE65 RNA guide
gccaagacuuaagaacucug

SEQ ID NO: 17940 - RNA, 20 nt, Artificial Sequence
  RPE65 RNA guide
gccagaaaugcagaguucuu

SEQ ID NO: 17941 - RNA, 20 nt, Artificial Sequence
  RPE65 RNA guide
gccagugacugacacaggca

SEQ ID NO: 17942 - RNA, 20 nt, Artificial Sequence
  RPE65 RNA guide
gccaucaauuuucucuucag

SEQ ID NO: 17943 - RNA, 20 nt, Artificial Sequence
  RPE65 RNA guide
gcccagucgcgucccagggu

SEQ ID NO: 17944 - RNA, 20 nt, Artificial Sequence
  RPE65 RNA guide
gcccuaaauuuucuucaagg

SEQ ID NO: 17945 - RNA, 20 nt, Artificial Sequence
  RPE65 RNA guide
gccuaagagguuaugugacu

SEQ ID NO: 17946 - RNA, 20 nt, Artificial Sequence
  RPE65 RNA guide
gccugagggaugaaagaaug

SEQ ID NO: 17947 - RNA, 20 nt, Artificial Sequence
  RPE65 RNA guide
gccugugucagucacuggcu

SEQ ID NO: 17948 - RNA, 20 nt, Artificial Sequence
  RPE65 RNA guide
gccuuucuuuggagcccuaa

SEQ ID NO: 17949 - RNA, 20 nt, Artificial Sequence
  RPE65 RNA guide
gcgacugggcaagcuaucug

SEQ ID NO: 17950 - RNA, 20 nt, Artificial Sequence
  RPE65 RNA guide
gcgucccagggucccucauc

SEQ ID NO: 17951 - RNA, 20 nt, Artificial Sequence
  RPE65 RNA guide
gcuauagaugagggacccug

SEQ ID NO: 17952 - RNA, 20 nt, Artificial Sequence
  RPE65 RNA guide
gcuaucugugccugugucag

SEQ ID NO: 17953 - RNA, 20 nt, Artificial Sequence
  RPE65 RNA guide
gcuauguaucacugggaaag

SEQ ID NO: 17954 - RNA, 20 nt, Artificial Sequence
  RPE65 RNA guide
gcucacugagguuucuguua

SEQ ID NO: 17955 - RNA, 20 nt, Artificial Sequence
  RPE65 RNA guide
gcuccaaagaaaggccucug

SEQ ID NO: 17956 - RNA, 20 nt, Artificial Sequence
  RPE65 RNA guide
gcuccuaaguucuuuuuuag

SEQ ID NO: 17957 - RNA, 20 nt, Artificial Sequence
  RPE65 RNA guide
gcuguuugaauucuuuccug

SEQ ID NO: 17958 - RNA, 20 nt, Artificial Sequence
  RPE65 RNA guide
gcuuccugcaguuccucccu

SEQ ID NO: 17959 - RNA, 20 nt, Artificial Sequence
  RPE65 RNA guide
gcuugcccagucgcguccca

SEQ ID NO: 17960 - RNA, 20 nt, Artificial Sequence
  RPE65 RNA guide
ggaaagaauucaaacagcca

SEQ ID NO: 17961 - RNA, 20 nt, Artificial Sequence
  RPE65 RNA guide
ggaaagucacauaaccucuu

SEQ ID NO: 17962 - RNA, 20 nt, Artificial Sequence
  RPE65 RNA guide
ggaacugcaggaagcuauag

SEQ ID NO: 17963 - RNA, 20 nt, Artificial Sequence
  RPE65 RNA guide
ggaagcuauagaugagggac

SEQ ID NO: 17964 - RNA, 20 nt, Artificial Sequence
  RPE65 RNA guide
ggacccugggacgcgacugg

SEQ ID NO: 17965 - RNA, 20 nt, Artificial Sequence
  RPE65 RNA guide
ggacgcgacugggcaagcua

SEQ ID NO: 17966 - RNA, 20 nt, Artificial Sequence
  RPE65 RNA guide
ggagagaagauaacagaaac

SEQ ID NO: 17967 - RNA, 20 nt, Artificial Sequence
  RPE65 RNA guide
ggagccaagacuuaagaacu

SEQ ID NO: 17968 - RNA, 20 nt, Artificial Sequence
  RPE65 RNA guide
ggagcccuaaauuuucuuca

SEQ ID NO: 17969 - RNA, 20 nt, Artificial Sequence
  RPE65 RNA guide
ggaggaacugcaggaagcua

SEQ ID NO: 17970 - RNA, 20 nt, Artificial Sequence
  RPE65 RNA guide
ggauggucucauuuuacuga

SEQ ID NO: 17971 - RNA, 20 nt, Artificial Sequence
  RPE65 RNA guide
ggcaagcuaucugugccugu

SEQ ID NO: 17972 - RNA, 20 nt, Artificial Sequence
  RPE65 RNA guide
ggcacagauagcuugcccag

SEQ ID NO: 17973 - RNA, 20 nt, Artificial Sequence
  RPE65 RNA guide
ggcagucgaagucuuuguug

SEQ ID NO: 17974 - RNA, 20 nt, Artificial Sequence
  RPE65 RNA guide
ggccaucaauuuucucuuca

SEQ ID NO: 17975 - RNA, 20 nt, Artificial Sequence
  RPE65 RNA guide
ggccuaagagguuaugugac

SEQ ID NO: 17976 - RNA, 20 nt, Artificial Sequence
  RPE65 RNA guide
ggccuuucuuuggagcccua

SEQ ID NO: 17977 - RNA, 20 nt, Artificial Sequence
  RPE65 RNA guide
ggcuauguaucacugggaaa

SEQ ID NO: 17978 - RNA, 20 nt, Artificial Sequence
  RPE65 RNA guide
ggcuccaaagaaaggccucu

SEQ ID NO: 17979 - RNA, 20 nt, Artificial Sequence
  RPE65 RNA guide
ggcuccuaaguucuuuuuua

SEQ ID NO: 17980 - RNA, 20 nt, Artificial Sequence
  RPE65 RNA guide
ggcuguuugaauucuuuccu

SEQ ID NO: 17981 - RNA, 20 nt, Artificial Sequence
  RPE65 RNA guide
gggaaagucacauaaccucu

SEQ ID NO: 17982 - RNA, 20 nt, Artificial Sequence
  RPE65 RNA guide
gggacccugggacgcgacug

SEQ ID NO: 17983 - RNA, 20 nt, Artificial Sequence
  RPE65 RNA guide
gggacgcgacugggcaagcu

SEQ ID NO: 17984 - RNA, 20 nt, Artificial Sequence
  RPE65 RNA guide
gggaggaacugcaggaagcu

SEQ ID NO: 17985 - RNA, 20 nt, Artificial Sequence
  RPE65 RNA guide
gggaugaaagaauguauauu

SEQ ID NO: 17986 - RNA, 20 nt, Artificial Sequence
  RPE65 RNA guide
gggcaagcuaucugugccug

SEQ ID NO: 17987 - RNA, 20 nt, Artificial Sequence
  RPE65 RNA guide
gggcuccaaagaaaggccuc

SEQ ID NO: 17988 - RNA, 20 nt, Artificial Sequence
  RPE65 RNA guide
gggucccucaucuauagcuu

SEQ ID NO: 17989 - RNA, 20 nt, Artificial Sequence
  RPE65 RNA guide
ggucaacaugcagggaggaa

SEQ ID NO: 17990 - RNA, 20 nt, Artificial Sequence
  RPE65 RNA guide
ggucccucaucuauagcuuc

SEQ ID NO: 17991 - RNA, 20 nt, Artificial Sequence
  RPE65 RNA guide
ggucucauuuuacugaagag

SEQ ID NO: 17992 - RNA, 20 nt, Artificial Sequence
  RPE65 RNA guide
gguuaugugacuuucccagu

SEQ ID NO: 17993 - RNA, 20 nt, Artificial Sequence
  RPE65 RNA guide
gguuucuguuaucuucucuc

SEQ ID NO: 17994 - RNA, 20 nt, Artificial Sequence
  RPE65 RNA guide
guaaaaugagaccauccuug

SEQ ID NO: 17995 - RNA, 20 nt, Artificial Sequence
  RPE65 RNA guide
guauauuucguucacacgua

SEQ ID NO: 17996 - RNA, 20 nt, Artificial Sequence
  RPE65 RNA guide
guaucacugggaaagucaca

SEQ ID NO: 17997 - RNA, 20 nt, Artificial Sequence
  RPE65 RNA guide
gucaacaugcagggaggaac

SEQ ID NO: 17998 - RNA, 20 nt, Artificial Sequence
  RPE65 RNA guide
gucacauaaccucuuaggcc

SEQ ID NO: 17999 - RNA, 20 nt, Artificial Sequence
  RPE65 RNA guide
gucacuggcuauguaucacu

SEQ ID NO: 18000 - RNA, 20 nt, Artificial Sequence
  RPE65 RNA guide
gucagucacuggcuauguau

SEQ ID NO: 18001 - RNA, 20 nt, Artificial Sequence
  RPE65 RNA guide
gucccagggucccucaucua

SEQ ID NO: 18002 - RNA, 20 nt, Artificial Sequence
  RPE65 RNA guide
gucccucaucuauagcuucc

SEQ ID NO: 18003 - RNA, 20 nt, Artificial Sequence
  RPE65 RNA guide
gucgaagucuuuguuguucu

SEQ ID NO: 18004 - RNA, 20 nt, Artificial Sequence
  RPE65 RNA guide
gucgcgucccagggucccuc

SEQ ID NO: 18005 - RNA, 20 nt, Artificial Sequence
  RPE65 RNA guide
gucuuggcuccuaaguucuu

SEQ ID NO: 18006 - RNA, 20 nt, Artificial Sequence
  RPE65 RNA guide
gucuuuguuguucugcagaa

SEQ ID NO: 18007 - RNA, 20 nt, Artificial Sequence
  RPE65 RNA guide
gugacugacacaggcacaga

SEQ ID NO: 18008 - RNA, 20 nt, Artificial Sequence
  RPE65 RNA guide
gugacuuucccagugauaca

SEQ ID NO: 18009 - RNA, 20 nt, Artificial Sequence
  RPE65 RNA guide
gugagcaggaaagaauucaa

SEQ ID NO: 18010 - RNA, 20 nt, Artificial Sequence
  RPE65 RNA guide
gugauacauagccagugacu

SEQ ID NO: 18011 - RNA, 20 nt, Artificial Sequence
  RPE65 RNA guide
gugccugugucagucacugg

SEQ ID NO: 18012 - RNA, 20 nt, Artificial Sequence
  RPE65 RNA guide
gugucagucacuggcuaugu

SEQ ID NO: 18013 - RNA, 20 nt, Artificial Sequence
  RPE65 RNA guide
guuaugugacuuucccagug

SEQ ID NO: 18014 - RNA, 20 nt, Artificial Sequence
  RPE65 RNA guide
guucacacguagaauauguu

SEQ ID NO: 18015 - RNA, 20 nt, Artificial Sequence
  RPE65 RNA guide
guuccucccugcauguugac

SEQ ID NO: 18016 - RNA, 20 nt, Artificial Sequence
  RPE65 RNA guide
guucuuaagucuuggcuccu

SEQ ID NO: 18017 - RNA, 20 nt, Artificial Sequence
  RPE65 RNA guide
guucuuuuuuaggucaacau

SEQ ID NO: 18018 - RNA, 20 nt, Artificial Sequence
  RPE65 RNA guide
guugaccuaaaaaagaacuu

SEQ ID NO: 18019 - RNA, 20 nt, Artificial Sequence
  RPE65 RNA guide
guuugaauucuuuccugcuc

SEQ ID NO: 18020 - RNA, 20 nt, Artificial Sequence
  RPE65 RNA guide
guuuuucagaggccuuucuu

SEQ ID NO: 18021 - RNA, 20 nt, Artificial Sequence
  RPE65 RNA guide
guuuuucugcagaacaacaa

SEQ ID NO: 18022 - RNA, 20 nt, Artificial Sequence
  RPE65 RNA guide
uaaaaaagaacuuaggagcc

SEQ ID NO: 18023 - RNA, 20 nt, Artificial Sequence
  RPE65 RNA guide
uaaaaugagaccauccuuga

SEQ ID NO: 18024 - RNA, 20 nt, Artificial Sequence
  RPE65 RNA guide
uaaauuuucuucaaggaugg

SEQ ID NO: 18025 - RNA, 20 nt, Artificial Sequence
  RPE65 RNA guide
uaacagaaaccucagugagc

SEQ ID NO: 18026 - RNA, 20 nt, Artificial Sequence
  RPE65 RNA guide
uaaccucuuaggccaucaau

SEQ ID NO: 18027 - RNA, 20 nt, Artificial Sequence
  RPE65 RNA guide
uaagaacucugcauuucugg

SEQ ID NO: 18028 - RNA, 20 nt, Artificial Sequence
  RPE65 RNA guide
uaagagguuaugugacuuuc

SEQ ID NO: 18029 - RNA, 20 nt, Artificial Sequence
  RPE65 RNA guide
uaagucuuggcuccuaaguu

SEQ ID NO: 18030 - RNA, 20 nt, Artificial Sequence
  RPE65 RNA guide
uacauagccagugacugaca

SEQ ID NO: 18031 - RNA, 20 nt, Artificial Sequence
  RPE65 RNA guide
uacauucuuucaucccucag

SEQ ID NO: 18032 - RNA, 20 nt, Artificial Sequence
  RPE65 RNA guide
uacgugugaacgaaauauac

SEQ ID NO: 18033 - RNA, 20 nt, Artificial Sequence
  RPE65 RNA guide
uacugaagagaaaauugaug

SEQ ID NO: 18034 - RNA, 20 nt, Artificial Sequence
  RPE65 RNA guide
uagaugagggacccugggac

SEQ ID NO: 18035 - RNA, 20 nt, Artificial Sequence
  RPE65 RNA guide
uagccagugacugacacagg

SEQ ID NO: 18036 - RNA, 20 nt, Artificial Sequence
  RPE65 RNA guide
uagcuuccugcaguuccucc

SEQ ID NO: 18037 - RNA, 20 nt, Artificial Sequence
  RPE65 RNA guide
uagcuugcccagucgcgucc

SEQ ID NO: 18038 - RNA, 20 nt, Artificial Sequence
  RPE65 RNA guide
uaggagagaagauaacagaa

SEQ ID NO: 18039 - RNA, 20 nt, Artificial Sequence
  RPE65 RNA guide
uaggagccaagacuuaagaa

SEQ ID NO: 18040 - RNA, 20 nt, Artificial Sequence
  RPE65 RNA guide
uaggccaucaauuuucucuu

SEQ ID NO: 18041 - RNA, 20 nt, Artificial Sequence
  RPE65 RNA guide
uagggcuccaaagaaaggcc

SEQ ID NO: 18042 - RNA, 20 nt, Artificial Sequence
  RPE65 RNA guide
uaggucaacaugcagggagg

SEQ ID NO: 18043 - RNA, 20 nt, Artificial Sequence
  RPE65 RNA guide
uauacauucuuucaucccuc

SEQ ID NO: 18044 - RNA, 20 nt, Artificial Sequence
  RPE65 RNA guide
uauagaugagggacccuggg

SEQ ID NO: 18045 - RNA, 20 nt, Artificial Sequence
  RPE65 RNA guide
uauagcuuccugcaguuccu

SEQ ID NO: 18046 - RNA, 20 nt, Artificial Sequence
  RPE65 RNA guide
uaucacugggaaagucacau

SEQ ID NO: 18047 - RNA, 20 nt, Artificial Sequence
  RPE65 RNA guide
uaucugugccugugucaguc

SEQ ID NO: 18048 - RNA, 20 nt, Artificial Sequence
  RPE65 RNA guide
uauguaucacugggaaaguc

SEQ ID NO: 18049 - RNA, 20 nt, Artificial Sequence
  RPE65 RNA guide
uaugugacuuucccagugau

SEQ ID NO: 18050 - RNA, 20 nt, Artificial Sequence
  RPE65 RNA guide
uauuucguucacacguagaa

SEQ ID NO: 18051 - RNA, 20 nt, Artificial Sequence
  RPE65 RNA guide
ucaaaacauauucuacgugu

SEQ ID NO: 18052 - RNA, 20 nt, Artificial Sequence
  RPE65 RNA guide
ucaaacagccagaaaugcag

SEQ ID NO: 18053 - RNA, 20 nt, Artificial Sequence
  RPE65 RNA guide
ucaacaugcagggaggaacu

SEQ ID NO: 18054 - RNA, 20 nt, Artificial Sequence
  RPE65 RNA guide
ucaaggauggucucauuuua

SEQ ID NO: 18055 - RNA, 20 nt, Artificial Sequence
  RPE65 RNA guide
ucacauaaccucuuaggcca

SEQ ID NO: 18056 - RNA, 20 nt, Artificial Sequence
  RPE65 RNA guide
ucacugagguuucuguuauc

SEQ ID NO: 18057 - RNA, 20 nt, Artificial Sequence
  RPE65 RNA guide
ucacuggcuauguaucacug

SEQ ID NO: 18058 - RNA, 20 nt, Artificial Sequence
  RPE65 RNA guide
ucacugggaaagucacauaa

SEQ ID NO: 18059 - RNA, 20 nt, Artificial Sequence
  RPE65 RNA guide
ucagaggccuuucuuuggag

SEQ ID NO: 18060 - RNA, 20 nt, Artificial Sequence
  RPE65 RNA guide
ucaggcagucgaagucuuug

SEQ ID NO: 18061 - RNA, 20 nt, Artificial Sequence
  RPE65 RNA guide
ucaguaaaaugagaccaucc

SEQ ID NO: 18062 - RNA, 20 nt, Artificial Sequence
  RPE65 RNA guide
ucagucacuggcuauguauc

SEQ ID NO: 18063 - RNA, 20 nt, Artificial Sequence
  RPE65 RNA guide
ucagugagcaggaaagaauu

SEQ ID NO: 18064 - RNA, 20 nt, Artificial Sequence
  RPE65 RNA guide
ucaucccucaggcagucgaa

SEQ ID NO: 18065 - RNA, 20 nt, Artificial Sequence
  RPE65 RNA guide
ucaucuauagcuuccugcag

SEQ ID NO: 18066 - RNA, 20 nt, Artificial Sequence
  RPE65 RNA guide
uccaaagaaaggccucugaa

SEQ ID NO: 18067 - RNA, 20 nt, Artificial Sequence
  RPE65 RNA guide
ucccagggucccucaucuau

SEQ ID NO: 18068 - RNA, 20 nt, Artificial Sequence
  RPE65 RNA guide
ucccagugauacauagccag

SEQ ID NO: 18069 - RNA, 20 nt, Artificial Sequence
  RPE65 RNA guide
ucccucaggcagucgaaguc

SEQ ID NO: 18070 - RNA, 20 nt, Artificial Sequence
  RPE65 RNA guide
ucccucaucuauagcuuccu

SEQ ID NO: 18071 - RNA, 20 nt, Artificial Sequence
  RPE65 RNA guide
ucccugcauguugaccuaaa

SEQ ID NO: 18072 - RNA, 20 nt, Artificial Sequence
  RPE65 RNA guide
uccuaaguucuuuuuuaggu

SEQ ID NO: 18073 - RNA, 20 nt, Artificial Sequence
  RPE65 RNA guide
uccucccugcauguugaccu

SEQ ID NO: 18074 - RNA, 20 nt, Artificial Sequence
  RPE65 RNA guide
uccugcaguuccucccugca

SEQ ID NO: 18075 - RNA, 20 nt, Artificial Sequence
  RPE65 RNA guide
uccugcucacugagguuucu

SEQ ID NO: 18076 - RNA, 20 nt, Artificial Sequence
  RPE65 RNA guide
uccuugaagaaaauuuaggg

SEQ ID NO: 18077 - RNA, 20 nt, Artificial Sequence
  RPE65 RNA guide
ucgaagucuuuguuguucug

SEQ ID NO: 18078 - RNA, 20 nt, Artificial Sequence
  RPE65 RNA guide
ucgacugccugagggaugaa

SEQ ID NO: 18079 - RNA, 20 nt, Artificial Sequence
  RPE65 RNA guide
ucgcgucccagggucccuca

SEQ ID NO: 18080 - RNA, 20 nt, Artificial Sequence
  RPE65 RNA guide
ucguucacacguagaauaug

SEQ ID NO: 18081 - RNA, 20 nt, Artificial Sequence
  RPE65 RNA guide
ucuacgugugaacgaaauau

SEQ ID NO: 18082 - RNA, 20 nt, Artificial Sequence
  RPE65 RNA guide
ucuauagcuuccugcaguuc

SEQ ID NO: 18083 - RNA, 20 nt, Artificial Sequence
  RPE65 RNA guide
ucucuucaguaaaaugagac

SEQ ID NO: 18084 - RNA, 20 nt, Artificial Sequence
  RPE65 RNA guide
ucugcagaacaacaaagacu

SEQ ID NO: 18085 - RNA, 20 nt, Artificial Sequence
  RPE65 RNA guide
ucugcauuucuggcuguuug

SEQ ID NO: 18086 - RNA, 20 nt, Artificial Sequence
  RPE65 RNA guide
ucuggcuguuugaauucuuu

SEQ ID NO: 18087 - RNA, 20 nt, Artificial Sequence
  RPE65 RNA guide
ucugugccugugucagucac

SEQ ID NO: 18088 - RNA, 20 nt, Artificial Sequence
  RPE65 RNA guide
ucuuaagucuuggcuccuaa

SEQ ID NO: 18089 - RNA, 20 nt, Artificial Sequence
  RPE65 RNA guide
ucuuaggccaucaauuuucu

SEQ ID NO: 18090 - RNA, 20 nt, Artificial Sequence
  RPE65 RNA guide
ucuucaaggauggucucauu

SEQ ID NO: 18091 - RNA, 20 nt, Artificial Sequence
  RPE65 RNA guide
ucuucaguaaaaugagacca

SEQ ID NO: 18092 - RNA, 20 nt, Artificial Sequence
  RPE65 RNA guide
ucuuggcuccuaaguucuuu

SEQ ID NO: 18093 - RNA, 20 nt, Artificial Sequence
  RPE65 RNA guide
ucuuucaucccucaggcagu

SEQ ID NO: 18094 - RNA, 20 nt, Artificial Sequence
  RPE65 RNA guide
ucuuuccugcucacugaggu

SEQ ID NO: 18095 - RNA, 20 nt, Artificial Sequence
  RPE65 RNA guide
ucuuuggagcccuaaauuuu

SEQ ID NO: 18096 - RNA, 20 nt, Artificial Sequence
  RPE65 RNA guide
ucuuuguuguucugcagaaa

SEQ ID NO: 18097 - RNA, 20 nt, Artificial Sequence
  RPE65 RNA guide
ucuuuuuuaggucaacaugc

SEQ ID NO: 18098 - RNA, 20 nt, Artificial Sequence
  RPE65 RNA guide
ugaagaaaauuuagggcucc

SEQ ID NO: 18099 - RNA, 20 nt, Artificial Sequence
  RPE65 RNA guide
ugaagagaaaauugauggcc

SEQ ID NO: 18100 - RNA, 20 nt, Artificial Sequence
  RPE65 RNA guide
ugaauucuuuccugcucacu

SEQ ID NO: 18101 - RNA, 20 nt, Artificial Sequence
  RPE65 RNA guide
ugacacaggcacagauagcu

SEQ ID NO: 18102 - RNA, 20 nt, Artificial Sequence
  RPE65 RNA guide
ugaccuaaaaaagaacuuag

SEQ ID NO: 18103 - RNA, 20 nt, Artificial Sequence
  RPE65 RNA guide
ugacugacacaggcacagau

SEQ ID NO: 18104 - RNA, 20 nt, Artificial Sequence
  RPE65 RNA guide
ugacuuucccagugauacau

SEQ ID NO: 18105 - RNA, 20 nt, Artificial Sequence
  RPE65 RNA guide
ugagaccauccuugaagaaa

SEQ ID NO: 18106 - RNA, 20 nt, Artificial Sequence
  RPE65 RNA guide
ugagcaggaaagaauucaaa

SEQ ID NO: 18107 - RNA, 20 nt, Artificial Sequence
  RPE65 RNA guide
ugagggacccugggacgcga

SEQ ID NO: 18108 - RNA, 20 nt, Artificial Sequence
  RPE65 RNA guide
ugagguuucuguuaucuucu

SEQ ID NO: 18109 - RNA, 20 nt, Artificial Sequence
  RPE65 RNA guide
ugauacauagccagugacug

SEQ ID NO: 18110 - RNA, 20 nt, Artificial Sequence
  RPE65 RNA guide
ugauggccuaagagguuaug

SEQ ID NO: 18111 - RNA, 20 nt, Artificial Sequence
  RPE65 RNA guide
ugcagaacaacaaagacuuc

SEQ ID NO: 18112 - RNA, 20 nt, Artificial Sequence
  RPE65 RNA guide
ugcagaguucuuaagucuug

SEQ ID NO: 18113 - RNA, 20 nt, Artificial Sequence
  RPE65 RNA guide
ugcaggaagcuauagaugag

SEQ ID NO: 18114 - RNA, 20 nt, Artificial Sequence
  RPE65 RNA guide
ugcagggaggaacugcagga

SEQ ID NO: 18115 - RNA, 20 nt, Artificial Sequence
  RPE65 RNA guide
ugcaguuccucccugcaugu

SEQ ID NO: 18116 - RNA, 20 nt, Artificial Sequence
  RPE65 RNA guide
ugcauguugaccuaaaaaag

SEQ ID NO: 18117 - RNA, 20 nt, Artificial Sequence
  RPE65 RNA guide
ugcauuucuggcuguuugaa

SEQ ID NO: 18118 - RNA, 20 nt, Artificial Sequence
  RPE65 RNA guide
ugcccagucgcgucccaggg

SEQ ID NO: 18119 - RNA, 20 nt, Artificial Sequence
  RPE65 RNA guide
ugccugagggaugaaagaau

SEQ ID NO: 18120 - RNA, 20 nt, Artificial Sequence
  RPE65 RNA guide
ugccugugucagucacuggc

SEQ ID NO: 18121 - RNA, 20 nt, Artificial Sequence
  RPE65 RNA guide
ugcucacugagguuucuguu

SEQ ID NO: 18122 - RNA, 20 nt, Artificial Sequence
  RPE65 RNA guide
uggagcccuaaauuuucuuc

SEQ ID NO: 18123 - RNA, 20 nt, Artificial Sequence
  RPE65 RNA guide
uggccuaagagguuauguga

SEQ ID NO: 18124 - RNA, 20 nt, Artificial Sequence
  RPE65 RNA guide
uggcuauguaucacugggaa

SEQ ID NO: 18125 - RNA, 20 nt, Artificial Sequence
  RPE65 RNA guide
uggcuccuaaguucuuuuuu

SEQ ID NO: 18126 - RNA, 20 nt, Artificial Sequence
  RPE65 RNA guide
uggcuguuugaauucuuucc

SEQ ID NO: 18127 - RNA, 20 nt, Artificial Sequence
  RPE65 RNA guide
ugggaaagucacauaaccuc

SEQ ID NO: 18128 - RNA, 20 nt, Artificial Sequence
  RPE65 RNA guide
ugggacgcgacugggcaagc

SEQ ID NO: 18129 - RNA, 20 nt, Artificial Sequence
  RPE65 RNA guide
ugggcaagcuaucugugccu

SEQ ID NO: 18130 - RNA, 20 nt, Artificial Sequence
  RPE65 RNA guide
uggucucauuuuacugaaga

SEQ ID NO: 18131 - RNA, 20 nt, Artificial Sequence
  RPE65 RNA guide
uguauauuucguucacacgu

SEQ ID NO: 18132 - RNA, 20 nt, Artificial Sequence
  RPE65 RNA guide
uguaucacugggaaagucac

SEQ ID NO: 18133 - RNA, 20 nt, Artificial Sequence
  RPE65 RNA guide
ugucagucacuggcuaugua

SEQ ID NO: 18134 - RNA, 20 nt, Artificial Sequence
  RPE65 RNA guide
ugugacuuucccagugauac

SEQ ID NO: 18135 - RNA, 20 nt, Artificial Sequence
  RPE65 RNA guide
ugugccugugucagucacug

SEQ ID NO: 18136 - RNA, 20 nt, Artificial Sequence
  RPE65 RNA guide
ugugucagucacuggcuaug

SEQ ID NO: 18137 - RNA, 20 nt, Artificial Sequence
  RPE65 RNA guide
uguugaccuaaaaaagaacu

SEQ ID NO: 18138 - RNA, 20 nt, Artificial Sequence
  RPE65 RNA guide
uguuugaauucuuuccugcu

SEQ ID NO: 18139 - RNA, 20 nt, Artificial Sequence
  RPE65 RNA guide
uguuuuucagaggccuuucu

SEQ ID NO: 18140 - RNA, 20 nt, Artificial Sequence
  RPE65 RNA guide
uguuuuucugcagaacaaca

SEQ ID NO: 18141 - RNA, 20 nt, Artificial Sequence
  RPE65 RNA guide
uuaagaacucugcauuucug

SEQ ID NO: 18142 - RNA, 20 nt, Artificial Sequence
  RPE65 RNA guide
uuaagucuuggcuccuaagu

SEQ ID NO: 18143 - RNA, 20 nt, Artificial Sequence
  RPE65 RNA guide
uuacugaagagaaaauugau

SEQ ID NO: 18144 - RNA, 20 nt, Artificial Sequence
  RPE65 RNA guide
uuaggagccaagacuuaaga

SEQ ID NO: 18145 - RNA, 20 nt, Artificial Sequence
  RPE65 RNA guide
uuaggccaucaauuuucucu

SEQ ID NO: 18146 - RNA, 20 nt, Artificial Sequence
  RPE65 RNA guide
uuagggcuccaaagaaaggc

SEQ ID NO: 18147 - RNA, 20 nt, Artificial Sequence
  RPE65 RNA guide
uuaggucaacaugcagggag

SEQ ID NO: 18148 - RNA, 20 nt, Artificial Sequence
  RPE65 RNA guide
uuaugugacuuucccaguga

SEQ ID NO: 18149 - RNA, 20 nt, Artificial Sequence
  RPE65 RNA guide
uucaaacagccagaaaugca

SEQ ID NO: 18150 - RNA, 20 nt, Artificial Sequence
  RPE65 RNA guide
uucaaggauggucucauuuu

SEQ ID NO: 18151 - RNA, 20 nt, Artificial Sequence
  RPE65 RNA guide
uucagaggccuuucuuugga

SEQ ID NO: 18152 - RNA, 20 nt, Artificial Sequence
  RPE65 RNA guide
uucaguaaaaugagaccauc

SEQ ID NO: 18153 - RNA, 20 nt, Artificial Sequence
  RPE65 RNA guide
uucaucccucaggcagucga

SEQ ID NO: 18154 - RNA, 20 nt, Artificial Sequence
  RPE65 RNA guide
uucccagugauacauagcca

SEQ ID NO: 18155 - RNA, 20 nt, Artificial Sequence
  RPE65 RNA guide
uuccucccugcauguugacc

SEQ ID NO: 18156 - RNA, 20 nt, Artificial Sequence
  RPE65 RNA guide
uuccugcaguuccucccugc

SEQ ID NO: 18157 - RNA, 20 nt, Artificial Sequence
  RPE65 RNA guide
uuccugcucacugagguuuc

SEQ ID NO: 18158 - RNA, 20 nt, Artificial Sequence
  RPE65 RNA guide
uucgacugccugagggauga

SEQ ID NO: 18159 - RNA, 20 nt, Artificial Sequence
  RPE65 RNA guide
uucguucacacguagaauau

SEQ ID NO: 18160 - RNA, 20 nt, Artificial Sequence
  RPE65 RNA guide
uucuacgugugaacgaaaua

SEQ ID NO: 18161 - RNA, 20 nt, Artificial Sequence
  RPE65 RNA guide
uucucuucaguaaaaugaga

SEQ ID NO: 18162 - RNA, 20 nt, Artificial Sequence
  RPE65 RNA guide
uucugcagaacaacaaagac

SEQ ID NO: 18163 - RNA, 20 nt, Artificial Sequence
  RPE65 RNA guide
uucuggcuguuugaauucuu

SEQ ID NO: 18164 - RNA, 20 nt, Artificial Sequence
  RPE65 RNA guide
uucuuaagucuuggcuccua

SEQ ID NO: 18165 - RNA, 20 nt, Artificial Sequence
  RPE65 RNA guide
uucuucaaggauggucucau

SEQ ID NO: 18166 - RNA, 20 nt, Artificial Sequence
  RPE65 RNA guide
uucuuucaucccucaggcag

SEQ ID NO: 18167 - RNA, 20 nt, Artificial Sequence
  RPE65 RNA guide
uucuuuccugcucacugagg

SEQ ID NO: 18168 - RNA, 20 nt, Artificial Sequence
  RPE65 RNA guide
uucuuuggagcccuaaauuu

SEQ ID NO: 18169 - RNA, 20 nt, Artificial Sequence
  RPE65 RNA guide
uucuuuuuuaggucaacaug

SEQ ID NO: 18170 - RNA, 20 nt, Artificial Sequence
  RPE65 RNA guide
uugaagaaaauuuagggcuc

SEQ ID NO: 18171 - RNA, 20 nt, Artificial Sequence
  RPE65 RNA guide
uugaauucuuuccugcucac

SEQ ID NO: 18172 - RNA, 20 nt, Artificial Sequence
  RPE65 RNA guide
uugaccuaaaaaagaacuua

SEQ ID NO: 18173 - RNA, 20 nt, Artificial Sequence
  RPE65 RNA guide
uugauggccuaagagguuau

SEQ ID NO: 18174 - RNA, 20 nt, Artificial Sequence
  RPE65 RNA guide
uugcccagucgcgucccagg

SEQ ID NO: 18175 - RNA, 20 nt, Artificial Sequence
  RPE65 RNA guide
uuggagcccuaaauuuucuu

SEQ ID NO: 18176 - RNA, 20 nt, Artificial Sequence
  RPE65 RNA guide
uuggcuccuaaguucuuuuu

SEQ ID NO: 18177 - RNA, 20 nt, Artificial Sequence
  RPE65 RNA guide
uuguuuuucagaggccuuuc

SEQ ID NO: 18178 - RNA, 20 nt, Artificial Sequence
  RPE65 RNA guide
uuuacugaagagaaaauuga

SEQ ID NO: 18179 - RNA, 20 nt, Artificial Sequence
  RPE65 RNA guide
uuuagggcuccaaagaaagg

SEQ ID NO: 18180 - RNA, 20 nt, Artificial Sequence
  RPE65 RNA guide
uuuaggucaacaugcaggga

SEQ ID NO: 18181 - RNA, 20 nt, Artificial Sequence
  RPE65 RNA guide
uuucagaggccuuucuuugg

SEQ ID NO: 18182 - RNA, 20 nt, Artificial Sequence
  RPE65 RNA guide
uuucaucccucaggcagucg

SEQ ID NO: 18183 - RNA, 20 nt, Artificial Sequence
  RPE65 RNA guide
uuucccagugauacauagcc

SEQ ID NO: 18184 - RNA, 20 nt, Artificial Sequence
  RPE65 RNA guide
uuuccugcucacugagguuu

SEQ ID NO: 18185 - RNA, 20 nt, Artificial Sequence
  RPE65 RNA guide
uuucguucacacguagaaua

SEQ ID NO: 18186 - RNA, 20 nt, Artificial Sequence
  RPE65 RNA guide
uuucucuucaguaaaaugag

SEQ ID NO: 18187 - RNA, 20 nt, Artificial Sequence
  RPE65 RNA guide
uuucugcagaacaacaaaga

SEQ ID NO: 18188 - RNA, 20 nt, Artificial Sequence
  RPE65 RNA guide
uuucuggcuguuugaauucu

SEQ ID NO: 18189 - RNA, 20 nt, Artificial Sequence
  RPE65 RNA guide
uuucuucaaggauggucuca

SEQ ID NO: 18190 - RNA, 20 nt, Artificial Sequence
  RPE65 RNA guide
uuucuuuggagcccuaaauu

SEQ ID NO: 18191 - RNA, 20 nt, Artificial Sequence
  RPE65 RNA guide
uuugaauucuuuccugcuca

SEQ ID NO: 18192 - RNA, 20 nt, Artificial Sequence
  RPE65 RNA guide
uuuggagcccuaaauuuucu

SEQ ID NO: 18193 - RNA, 20 nt, Artificial Sequence
  RPE65 RNA guide
uuuguuuuucagaggccuuu

SEQ ID NO: 18194 - RNA, 20 nt, Artificial Sequence
  RPE65 RNA guide
uuuuaggucaacaugcaggg

SEQ ID NO: 18195 - RNA, 20 nt, Artificial Sequence
  RPE65 RNA guide
uuuucagaggccuuucuuug

SEQ ID NO: 18196 - RNA, 20 nt, Artificial Sequence
  RPE65 RNA guide
uuuucucuucaguaaaauga

SEQ ID NO: 18197 - RNA, 20 nt, Artificial Sequence
  RPE65 RNA guide
uuuucugcagaacaacaaag

SEQ ID NO: 18198 - RNA, 20 nt, Artificial Sequence
  RPE65 RNA guide
uuuucuucaaggauggucuc

SEQ ID NO: 18199 - RNA, 20 nt, Artificial Sequence
  RPE65 RNA guide
uuuuguuuuucagaggccuu

SEQ ID NO: 18200 - RNA, 20 nt, Artificial Sequence
  RPE65 RNA guide
uuuuuaggucaacaugcagg

SEQ ID NO: 18201 - RNA, 20 nt, Artificial Sequence
  RPE65 RNA guide
uuuuucagaggccuuucuuu

SEQ ID NO: 18202 - RNA, 20 nt, Artificial Sequence
  RPE65 RNA guide
uuuuucugcagaacaacaaa

SEQ ID NO: 18203 - RNA, 20 nt, Artificial Sequence
  RPE65 RNA guide
uuuuuguuuuucagaggccu

SEQ ID NO: 18204 - RNA, 20 nt, Artificial Sequence
  RPE65 RNA guide
uuuuuuaggucaacaugcag

SEQ ID NO: 18205 - RNA, 20 nt, Artificial Sequence
  RPE65 RNA guide
uuuuuuguuuuucagaggcc

SEQ ID NO: 18206 - RNA, 21 nt, Artificial Sequence
  RPE65 RNA guide
aaaaaagaacuuaggagccaa

SEQ ID NO: 18207 - RNA, 21 nt, Artificial Sequence
  RPE65 RNA guide
aaaaagaacuuaggagccaag

SEQ ID NO: 18208 - RNA, 21 nt, Artificial Sequence
  RPE65 RNA guide
aaaacauauucuacgugugaa

SEQ ID NO: 18209 - RNA, 21 nt, Artificial Sequence
  RPE65 RNA guide
aaaagaacuuaggagccaaga

SEQ ID NO: 18210 - RNA, 21 nt, Artificial Sequence
  RPE65 RNA guide
aaaaugagaccauccuugaag

SEQ ID NO: 18211 - RNA, 21 nt, Artificial Sequence
  RPE65 RNA guide
aaaauugauggccuaagaggu

SEQ ID NO: 18212 - RNA, 21 nt, Artificial Sequence
  RPE65 RNA guide
aaaauuuagggcuccaaagaa

SEQ ID NO: 18213 - RNA, 21 nt, Artificial Sequence
  RPE65 RNA guide
aaacagccagaaaugcagagu

SEQ ID NO: 18214 - RNA, 21 nt, Artificial Sequence
  RPE65 RNA guide
aaacauauucuacgugugaac

SEQ ID NO: 18215 - RNA, 21 nt, Artificial Sequence
  RPE65 RNA guide
aaaccucagugagcaggaaag

SEQ ID NO: 18216 - RNA, 21 nt, Artificial Sequence
  RPE65 RNA guide
aaagaaaggccucugaaaaac

SEQ ID NO: 18217 - RNA, 21 nt, Artificial Sequence
  RPE65 RNA guide
aaagaacuuaggagccaagac

SEQ ID NO: 18218 - RNA, 21 nt, Artificial Sequence
  RPE65 RNA guide
aaagaauguauauuucguuca

SEQ ID NO: 18219 - RNA, 21 nt, Artificial Sequence
  RPE65 RNA guide
aaagaauucaaacagccagaa

SEQ ID NO: 18220 - RNA, 21 nt, Artificial Sequence
  RPE65 RNA guide
aaagacuucgacugccugagg

SEQ ID NO: 18221 - RNA, 21 nt, Artificial Sequence
  RPE65 RNA guide
aaagucacauaaccucuuagg

SEQ ID NO: 18222 - RNA, 21 nt, Artificial Sequence
  RPE65 RNA guide
aaauauacauucuuucauccc

SEQ ID NO: 18223 - RNA, 21 nt, Artificial Sequence
  RPE65 RNA guide
aaaugagaccauccuugaaga

SEQ ID NO: 18224 - RNA, 21 nt, Artificial Sequence
  RPE65 RNA guide
aaaugcagaguucuuaagucu

SEQ ID NO: 18225 - RNA, 21 nt, Artificial Sequence
  RPE65 RNA guide
aaauugauggccuaagagguu

SEQ ID NO: 18226 - RNA, 21 nt, Artificial Sequence
  RPE65 RNA guide
aaauuuagggcuccaaagaaa

SEQ ID NO: 18227 - RNA, 21 nt, Artificial Sequence
  RPE65 RNA guide
aaauuuucuucaaggaugguc

SEQ ID NO: 18228 - RNA, 21 nt, Artificial Sequence
  RPE65 RNA guide
aacaaagacuucgacugccug

SEQ ID NO: 18229 - RNA, 21 nt, Artificial Sequence
  RPE65 RNA guide
aacaacaaagacuucgacugc

SEQ ID NO: 18230 - RNA, 21 nt, Artificial Sequence
  RPE65 RNA guide
aacagaaaccucagugagcag

SEQ ID NO: 18231 - RNA, 21 nt, Artificial Sequence
  RPE65 RNA guide
aacagccagaaaugcagaguu

SEQ ID NO: 18232 - RNA, 21 nt, Artificial Sequence
  RPE65 RNA guide
aacauauucuacgugugaacg

SEQ ID NO: 18233 - RNA, 21 nt, Artificial Sequence
  RPE65 RNA guide
aacaugcagggaggaacugca

SEQ ID NO: 18234 - RNA, 21 nt, Artificial Sequence
  RPE65 RNA guide
aaccucagugagcaggaaaga

SEQ ID NO: 18235 - RNA, 21 nt, Artificial Sequence
  RPE65 RNA guide
aaccucuuaggccaucaauuu

SEQ ID NO: 18236 - RNA, 21 nt, Artificial Sequence
  RPE65 RNA guide
aacgaaauauacauucuuuca

SEQ ID NO: 18237 - RNA, 21 nt, Artificial Sequence
  RPE65 RNA guide
aacucugcauuucuggcuguu

SEQ ID NO: 18238 - RNA, 21 nt, Artificial Sequence
  RPE65 RNA guide
aacugcaggaagcuauagaug

SEQ ID NO: 18239 - RNA, 21 nt, Artificial Sequence
  RPE65 RNA guide
aacuuaggagccaagacuuaa

SEQ ID NO: 18240 - RNA, 21 nt, Artificial Sequence
  RPE65 RNA guide
aagaaaauuuagggcuccaaa

SEQ ID NO: 18241 - RNA, 21 nt, Artificial Sequence
  RPE65 RNA guide
aagaaaggccucugaaaaaca

SEQ ID NO: 18242 - RNA, 21 nt, Artificial Sequence
  RPE65 RNA guide
aagaacucugcauuucuggcu

SEQ ID NO: 18243 - RNA, 21 nt, Artificial Sequence
  RPE65 RNA guide
aagaacuuaggagccaagacu

SEQ ID NO: 18244 - RNA, 21 nt, Artificial Sequence
  RPE65 RNA guide
aagaauguauauuucguucac

SEQ ID NO: 18245 - RNA, 21 nt, Artificial Sequence
  RPE65 RNA guide
aagaauucaaacagccagaaa

SEQ ID NO: 18246 - RNA, 21 nt, Artificial Sequence
  RPE65 RNA guide
aagacuuaagaacucugcauu

SEQ ID NO: 18247 - RNA, 21 nt, Artificial Sequence
  RPE65 RNA guide
aagacuucgacugccugaggg

SEQ ID NO: 18248 - RNA, 21 nt, Artificial Sequence
  RPE65 RNA guide
aagagaaaauugauggccuaa

SEQ ID NO: 18249 - RNA, 21 nt, Artificial Sequence
  RPE65 RNA guide
aagagguuaugugacuuuccc

SEQ ID NO: 18250 - RNA, 21 nt, Artificial Sequence
  RPE65 RNA guide
aagauaacagaaaccucagug

SEQ ID NO: 18251 - RNA, 21 nt, Artificial Sequence
  RPE65 RNA guide
aagcuauagaugagggacccu

SEQ ID NO: 18252 - RNA, 21 nt, Artificial Sequence
  RPE65 RNA guide
aagcuaucugugccuguguca

SEQ ID NO: 18253 - RNA, 21 nt, Artificial Sequence
  RPE65 RNA guide
aaggauggucucauuuuacug

SEQ ID NO: 18254 - RNA, 21 nt, Artificial Sequence
  RPE65 RNA guide
aagucacauaaccucuuaggc

SEQ ID NO: 18255 - RNA, 21 nt, Artificial Sequence
  RPE65 RNA guide
aagucuuggcuccuaaguucu

SEQ ID NO: 18256 - RNA, 21 nt, Artificial Sequence
  RPE65 RNA guide
aagucuuuguuguucugcaga

SEQ ID NO: 18257 - RNA, 21 nt, Artificial Sequence
  RPE65 RNA guide
aaguucuuuuuuaggucaaca

SEQ ID NO: 18258 - RNA, 21 nt, Artificial Sequence
  RPE65 RNA guide
aauauacauucuuucaucccu

SEQ ID NO: 18259 - RNA, 21 nt, Artificial Sequence
  RPE65 RNA guide
aaugagaccauccuugaagaa

SEQ ID NO: 18260 - RNA, 21 nt, Artificial Sequence
  RPE65 RNA guide
aaugcagaguucuuaagucuu

SEQ ID NO: 18261 - RNA, 21 nt, Artificial Sequence
  RPE65 RNA guide
aauguauauuucguucacacg

SEQ ID NO: 18262 - RNA, 21 nt, Artificial Sequence
  RPE65 RNA guide
aauguuuuucugcagaacaac

SEQ ID NO: 18263 - RNA, 21 nt, Artificial Sequence
  RPE65 RNA guide
aauucaaacagccagaaaugc

SEQ ID NO: 18264 - RNA, 21 nt, Artificial Sequence
  RPE65 RNA guide
aauucuuuccugcucacugag

SEQ ID NO: 18265 - RNA, 21 nt, Artificial Sequence
  RPE65 RNA guide
aauugauggccuaagagguua

SEQ ID NO: 18266 - RNA, 21 nt, Artificial Sequence
  RPE65 RNA guide
aauuuagggcuccaaagaaag

SEQ ID NO: 18267 - RNA, 21 nt, Artificial Sequence
  RPE65 RNA guide
aauuuucuucaaggauggucu

SEQ ID NO: 18268 - RNA, 21 nt, Artificial Sequence
  RPE65 RNA guide
acaaagacuucgacugccuga

SEQ ID NO: 18269 - RNA, 21 nt, Artificial Sequence
  RPE65 RNA guide
acaacaaagacuucgacugcc

SEQ ID NO: 18270 - RNA, 21 nt, Artificial Sequence
  RPE65 RNA guide
acacaggcacagauagcuugc

SEQ ID NO: 18271 - RNA, 21 nt, Artificial Sequence
  RPE65 RNA guide
acagaaaccucagugagcagg

SEQ ID NO: 18272 - RNA, 21 nt, Artificial Sequence
  RPE65 RNA guide
acagauagcuugcccagucgc

SEQ ID NO: 18273 - RNA, 21 nt, Artificial Sequence
  RPE65 RNA guide
acagccagaaaugcagaguuc

SEQ ID NO: 18274 - RNA, 21 nt, Artificial Sequence
  RPE65 RNA guide
acaggcacagauagcuugccc

SEQ ID NO: 18275 - RNA, 21 nt, Artificial Sequence
  RPE65 RNA guide
acauaaccucuuaggccauca

SEQ ID NO: 18276 - RNA, 21 nt, Artificial Sequence
  RPE65 RNA guide
acauagccagugacugacaca

SEQ ID NO: 18277 - RNA, 21 nt, Artificial Sequence
  RPE65 RNA guide
acauauucuacgugugaacga

SEQ ID NO: 18278 - RNA, 21 nt, Artificial Sequence
  RPE65 RNA guide
acaugcagggaggaacugcag

SEQ ID NO: 18279 - RNA, 21 nt, Artificial Sequence
  RPE65 RNA guide
acauucuuucaucccucaggc

SEQ ID NO: 18280 - RNA, 21 nt, Artificial Sequence
  RPE65 RNA guide
accauccuugaagaaaauuua

SEQ ID NO: 18281 - RNA, 21 nt, Artificial Sequence
  RPE65 RNA guide
acccugggacgcgacugggca

SEQ ID NO: 18282 - RNA, 21 nt, Artificial Sequence
  RPE65 RNA guide
accuaaaaaagaacuuaggag

SEQ ID NO: 18283 - RNA, 21 nt, Artificial Sequence
  RPE65 RNA guide
accucagugagcaggaaagaa

SEQ ID NO: 18284 - RNA, 21 nt, Artificial Sequence
  RPE65 RNA guide
accucuuaggccaucaauuuu

SEQ ID NO: 18285 - RNA, 21 nt, Artificial Sequence
  RPE65 RNA guide
acgaaauauacauucuuucau

SEQ ID NO: 18286 - RNA, 21 nt, Artificial Sequence
  RPE65 RNA guide
acgcgacugggcaagcuaucu

SEQ ID NO: 18287 - RNA, 21 nt, Artificial Sequence
  RPE65 RNA guide
acgugugaacgaaauauacau

SEQ ID NO: 18288 - RNA, 21 nt, Artificial Sequence
  RPE65 RNA guide
acucugcauuucuggcuguuu

SEQ ID NO: 18289 - RNA, 21 nt, Artificial Sequence
  RPE65 RNA guide
acugaagagaaaauugauggc

SEQ ID NO: 18290 - RNA, 21 nt, Artificial Sequence
  RPE65 RNA guide
acugacacaggcacagauagc

SEQ ID NO: 18291 - RNA, 21 nt, Artificial Sequence
  RPE65 RNA guide
acugagguuucuguuaucuuc

SEQ ID NO: 18292 - RNA, 21 nt, Artificial Sequence
  RPE65 RNA guide
acugcaggaagcuauagauga

SEQ ID NO: 18293 - RNA, 21 nt, Artificial Sequence
  RPE65 RNA guide
acugccugagggaugaaagaa

SEQ ID NO: 18294 - RNA, 21 nt, Artificial Sequence
  RPE65 RNA guide
acuggcuauguaucacuggga

SEQ ID NO: 18295 - RNA, 21 nt, Artificial Sequence
  RPE65 RNA guide
acugggaaagucacauaaccu

SEQ ID NO: 18296 - RNA, 21 nt, Artificial Sequence
  RPE65 RNA guide
acugggcaagcuaucugugcc

SEQ ID NO: 18297 - RNA, 21 nt, Artificial Sequence
  RPE65 RNA guide
acuuaagaacucugcauuucu

SEQ ID NO: 18298 - RNA, 21 nt, Artificial Sequence
  RPE65 RNA guide
acuuaggagccaagacuuaag

SEQ ID NO: 18299 - RNA, 21 nt, Artificial Sequence
  RPE65 RNA guide
acuucgacugccugagggaug

SEQ ID NO: 18300 - RNA, 21 nt, Artificial Sequence
  RPE65 RNA guide
acuuucccagugauacauagc

SEQ ID NO: 18301 - RNA, 21 nt, Artificial Sequence
  RPE65 RNA guide
agaaaauugauggccuaagag

SEQ ID NO: 18302 - RNA, 21 nt, Artificial Sequence
  RPE65 RNA guide
agaaaauuuagggcuccaaag

SEQ ID NO: 18303 - RNA, 21 nt, Artificial Sequence
  RPE65 RNA guide
agaaaccucagugagcaggaa

SEQ ID NO: 18304 - RNA, 21 nt, Artificial Sequence
  RPE65 RNA guide
agaaaggccucugaaaaacaa

SEQ ID NO: 18305 - RNA, 21 nt, Artificial Sequence
  RPE65 RNA guide
agaaaugcagaguucuuaagu

SEQ ID NO: 18306 - RNA, 21 nt, Artificial Sequence
  RPE65 RNA guide
agaacaacaaagacuucgacu

SEQ ID NO: 18307 - RNA, 21 nt, Artificial Sequence
  RPE65 RNA guide
agaacucugcauuucuggcug

SEQ ID NO: 18308 - RNA, 21 nt, Artificial Sequence
  RPE65 RNA guide
agaacuuaggagccaagacuu

SEQ ID NO: 18309 - RNA, 21 nt, Artificial Sequence
  RPE65 RNA guide
agaagauaacagaaaccucag

SEQ ID NO: 18310 - RNA, 21 nt, Artificial Sequence
  RPE65 RNA guide
agaauguauauuucguucaca

SEQ ID NO: 18311 - RNA, 21 nt, Artificial Sequence
  RPE65 RNA guide
agaauucaaacagccagaaau

SEQ ID NO: 18312 - RNA, 21 nt, Artificial Sequence
  RPE65 RNA guide
agaccauccuugaagaaaauu

SEQ ID NO: 18313 - RNA, 21 nt, Artificial Sequence
  RPE65 RNA guide
agacuuaagaacucugcauuu

SEQ ID NO: 18314 - RNA, 21 nt, Artificial Sequence
  RPE65 RNA guide
agacuucgacugccugaggga

SEQ ID NO: 18315 - RNA, 21 nt, Artificial Sequence
  RPE65 RNA guide
agagaaaauugauggccuaag

SEQ ID NO: 18316 - RNA, 21 nt, Artificial Sequence
  RPE65 RNA guide
agagaagauaacagaaaccuc

SEQ ID NO: 18317 - RNA, 21 nt, Artificial Sequence
  RPE65 RNA guide
agaggccuuucuuuggagccc

SEQ ID NO: 18318 - RNA, 21 nt, Artificial Sequence
  RPE65 RNA guide
agagguuaugugacuuuccca

SEQ ID NO: 18319 - RNA, 21 nt, Artificial Sequence
  RPE65 RNA guide
agaguucuuaagucuuggcuc

SEQ ID NO: 18320 - RNA, 21 nt, Artificial Sequence
  RPE65 RNA guide
agauaacagaaaccucaguga

SEQ ID NO: 18321 - RNA, 21 nt, Artificial Sequence
  RPE65 RNA guide
agauagcuugcccagucgcgu

SEQ ID NO: 18322 - RNA, 21 nt, Artificial Sequence
  RPE65 RNA guide
agaugagggacccugggacgc

SEQ ID NO: 18323 - RNA, 21 nt, Artificial Sequence
  RPE65 RNA guide
agcaggaaagaauucaaacag

SEQ ID NO: 18324 - RNA, 21 nt, Artificial Sequence
  RPE65 RNA guide
agccaagacuuaagaacucug

SEQ ID NO: 18325 - RNA, 21 nt, Artificial Sequence
  RPE65 RNA guide
agccagaaaugcagaguucuu

SEQ ID NO: 18326 - RNA, 21 nt, Artificial Sequence
  RPE65 RNA guide
agccagugacugacacaggca

SEQ ID NO: 18327 - RNA, 21 nt, Artificial Sequence
  RPE65 RNA guide
agcccuaaauuuucuucaagg

SEQ ID NO: 18328 - RNA, 21 nt, Artificial Sequence
  RPE65 RNA guide
agcuauagaugagggacccug

SEQ ID NO: 18329 - RNA, 21 nt, Artificial Sequence
  RPE65 RNA guide
agcuaucugugccugugucag

SEQ ID NO: 18330 - RNA, 21 nt, Artificial Sequence
  RPE65 RNA guide
agcuuccugcaguuccucccu

SEQ ID NO: 18331 - RNA, 21 nt, Artificial Sequence
  RPE65 RNA guide
agcuugcccagucgcguccca

SEQ ID NO: 18332 - RNA, 21 nt, Artificial Sequence
  RPE65 RNA guide
aggaaagaauucaaacagcca

SEQ ID NO: 18333 - RNA, 21 nt, Artificial Sequence
  RPE65 RNA guide
aggaacugcaggaagcuauag

SEQ ID NO: 18334 - RNA, 21 nt, Artificial Sequence
  RPE65 RNA guide
aggaagcuauagaugagggac

SEQ ID NO: 18335 - RNA, 21 nt, Artificial Sequence
  RPE65 RNA guide
aggagagaagauaacagaaac

SEQ ID NO: 18336 - RNA, 21 nt, Artificial Sequence
  RPE65 RNA guide
aggagccaagacuuaagaacu

SEQ ID NO: 18337 - RNA, 21 nt, Artificial Sequence
  RPE65 RNA guide
aggauggucucauuuuacuga

SEQ ID NO: 18338 - RNA, 21 nt, Artificial Sequence
  RPE65 RNA guide
aggcacagauagcuugcccag

SEQ ID NO: 18339 - RNA, 21 nt, Artificial Sequence
  RPE65 RNA guide
aggcagucgaagucuuuguug

SEQ ID NO: 18340 - RNA, 21 nt, Artificial Sequence
  RPE65 RNA guide
aggccaucaauuuucucuuca

SEQ ID NO: 18341 - RNA, 21 nt, Artificial Sequence
  RPE65 RNA guide
aggccuuucuuuggagcccua

SEQ ID NO: 18342 - RNA, 21 nt, Artificial Sequence
  RPE65 RNA guide
agggacccugggacgcgacug

SEQ ID NO: 18343 - RNA, 21 nt, Artificial Sequence
  RPE65 RNA guide
agggaggaacugcaggaagcu

SEQ ID NO: 18344 - RNA, 21 nt, Artificial Sequence
  RPE65 RNA guide
agggaugaaagaauguauauu

SEQ ID NO: 18345 - RNA, 21 nt, Artificial Sequence
  RPE65 RNA guide
agggcuccaaagaaaggccuc

SEQ ID NO: 18346 - RNA, 21 nt, Artificial Sequence
  RPE65 RNA guide
agggucccucaucuauagcuu

SEQ ID NO: 18347 - RNA, 21 nt, Artificial Sequence
  RPE65 RNA guide
aggucaacaugcagggaggaa

SEQ ID NO: 18348 - RNA, 21 nt, Artificial Sequence
  RPE65 RNA guide
agguuaugugacuuucccagu

SEQ ID NO: 18349 - RNA, 21 nt, Artificial Sequence
  RPE65 RNA guide
agguuucuguuaucuucucuc

SEQ ID NO: 18350 - RNA, 21 nt, Artificial Sequence
  RPE65 RNA guide
aguaaaaugagaccauccuug

SEQ ID NO: 18351 - RNA, 21 nt, Artificial Sequence
  RPE65 RNA guide
agucacauaaccucuuaggcc

SEQ ID NO: 18352 - RNA, 21 nt, Artificial Sequence
  RPE65 RNA guide
agucacuggcuauguaucacu

SEQ ID NO: 18353 - RNA, 21 nt, Artificial Sequence
  RPE65 RNA guide
agucgaagucuuuguuguucu

SEQ ID NO: 18354 - RNA, 21 nt, Artificial Sequence
  RPE65 RNA guide
agucgcgucccagggucccuc

SEQ ID NO: 18355 - RNA, 21 nt, Artificial Sequence
  RPE65 RNA guide
agucuuggcuccuaaguucuu

SEQ ID NO: 18356 - RNA, 21 nt, Artificial Sequence
  RPE65 RNA guide
agucuuuguuguucugcagaa

SEQ ID NO: 18357 - RNA, 21 nt, Artificial Sequence
  RPE65 RNA guide
agugacugacacaggcacaga

SEQ ID NO: 18358 - RNA, 21 nt, Artificial Sequence
  RPE65 RNA guide
agugagcaggaaagaauucaa

SEQ ID NO: 18359 - RNA, 21 nt, Artificial Sequence
  RPE65 RNA guide
agugauacauagccagugacu

SEQ ID NO: 18360 - RNA, 21 nt, Artificial Sequence
  RPE65 RNA guide
aguuccucccugcauguugac

SEQ ID NO: 18361 - RNA, 21 nt, Artificial Sequence
  RPE65 RNA guide
aguucuuaagucuuggcuccu

SEQ ID NO: 18362 - RNA, 21 nt, Artificial Sequence
  RPE65 RNA guide
aguucuuuuuuaggucaacau

SEQ ID NO: 18363 - RNA, 21 nt, Artificial Sequence
  RPE65 RNA guide
auaacagaaaccucagugagc

SEQ ID NO: 18364 - RNA, 21 nt, Artificial Sequence
  RPE65 RNA guide
auaaccucuuaggccaucaau

SEQ ID NO: 18365 - RNA, 21 nt, Artificial Sequence
  RPE65 RNA guide
auacauagccagugacugaca

SEQ ID NO: 18366 - RNA, 21 nt, Artificial Sequence
  RPE65 RNA guide
auacauucuuucaucccucag

SEQ ID NO: 18367 - RNA, 21 nt, Artificial Sequence
  RPE65 RNA guide
auagaugagggacccugggac

SEQ ID NO: 18368 - RNA, 21 nt, Artificial Sequence
  RPE65 RNA guide
auagccagugacugacacagg

SEQ ID NO: 18369 - RNA, 21 nt, Artificial Sequence
  RPE65 RNA guide
auagcuuccugcaguuccucc

SEQ ID NO: 18370 - RNA, 21 nt, Artificial Sequence
  RPE65 RNA guide
auagcuugcccagucgcgucc

SEQ ID NO: 18371 - RNA, 21 nt, Artificial Sequence
  RPE65 RNA guide
auauacauucuuucaucccuc

SEQ ID NO: 18372 - RNA, 21 nt, Artificial Sequence
  RPE65 RNA guide
auauuucguucacacguagaa

SEQ ID NO: 18373 - RNA, 21 nt, Artificial Sequence
  RPE65 RNA guide
aucaaaacauauucuacgugu

SEQ ID NO: 18374 - RNA, 21 nt, Artificial Sequence
  RPE65 RNA guide
aucacugggaaagucacauaa

SEQ ID NO: 18375 - RNA, 21 nt, Artificial Sequence
  RPE65 RNA guide
aucccucaggcagucgaaguc

SEQ ID NO: 18376 - RNA, 21 nt, Artificial Sequence
  RPE65 RNA guide
auccuugaagaaaauuuaggg

SEQ ID NO: 18377 - RNA, 21 nt, Artificial Sequence
  RPE65 RNA guide
aucuauagcuuccugcaguuc

SEQ ID NO: 18378 - RNA, 21 nt, Artificial Sequence
  RPE65 RNA guide
aucugugccugugucagucac

SEQ ID NO: 18379 - RNA, 21 nt, Artificial Sequence
  RPE65 RNA guide
augagaccauccuugaagaaa

SEQ ID NO: 18380 - RNA, 21 nt, Artificial Sequence
  RPE65 RNA guide
augagggacccugggacgcga

SEQ ID NO: 18381 - RNA, 21 nt, Artificial Sequence
  RPE65 RNA guide
augcagaguucuuaagucuug

SEQ ID NO: 18382 - RNA, 21 nt, Artificial Sequence
  RPE65 RNA guide
augcagggaggaacugcagga

SEQ ID NO: 18383 - RNA, 21 nt, Artificial Sequence
  RPE65 RNA guide
auggccuaagagguuauguga

SEQ ID NO: 18384 - RNA, 21 nt, Artificial Sequence
  RPE65 RNA guide
auggucucauuuuacugaaga

SEQ ID NO: 18385 - RNA, 21 nt, Artificial Sequence
  RPE65 RNA guide
auguauauuucguucacacgu

SEQ ID NO: 18386 - RNA, 21 nt, Artificial Sequence
  RPE65 RNA guide
auguaucacugggaaagucac

SEQ ID NO: 18387 - RNA, 21 nt, Artificial Sequence
  RPE65 RNA guide
augugacuuucccagugauac

SEQ ID NO: 18388 - RNA, 21 nt, Artificial Sequence
  RPE65 RNA guide
auguugaccuaaaaaagaacu

SEQ ID NO: 18389 - RNA, 21 nt, Artificial Sequence
  RPE65 RNA guide
auguuuuucugcagaacaaca

SEQ ID NO: 18390 - RNA, 21 nt, Artificial Sequence
  RPE65 RNA guide
auucaaacagccagaaaugca

SEQ ID NO: 18391 - RNA, 21 nt, Artificial Sequence
  RPE65 RNA guide
auucuacgugugaacgaaaua

SEQ ID NO: 18392 - RNA, 21 nt, Artificial Sequence
  RPE65 RNA guide
auucuuucaucccucaggcag

SEQ ID NO: 18393 - RNA, 21 nt, Artificial Sequence
  RPE65 RNA guide
auucuuuccugcucacugagg

SEQ ID NO: 18394 - RNA, 21 nt, Artificial Sequence
  RPE65 RNA guide
auugauggccuaagagguuau

SEQ ID NO: 18395 - RNA, 21 nt, Artificial Sequence
  RPE65 RNA guide
auuuagggcuccaaagaaagg

SEQ ID NO: 18396 - RNA, 21 nt, Artificial Sequence
  RPE65 RNA guide
auuucguucacacguagaaua

SEQ ID NO: 18397 - RNA, 21 nt, Artificial Sequence
  RPE65 RNA guide
auuucuggcuguuugaauucu

SEQ ID NO: 18398 - RNA, 21 nt, Artificial Sequence
  RPE65 RNA guide
auuuucucuucaguaaaauga

SEQ ID NO: 18399 - RNA, 21 nt, Artificial Sequence
  RPE65 RNA guide
auuuucuucaaggauggucuc

SEQ ID NO: 18400 - RNA, 21 nt, Artificial Sequence
  RPE65 RNA guide
caaaacauauucuacguguga

SEQ ID NO: 18401 - RNA, 21 nt, Artificial Sequence
  RPE65 RNA guide
caaacagccagaaaugcagag

SEQ ID NO: 18402 - RNA, 21 nt, Artificial Sequence
  RPE65 RNA guide
caaagaaaggccucugaaaaa

SEQ ID NO: 18403 - RNA, 21 nt, Artificial Sequence
  RPE65 RNA guide
caaagacuucgacugccugag

SEQ ID NO: 18404 - RNA, 21 nt, Artificial Sequence
  RPE65 RNA guide
caacaaagacuucgacugccu

SEQ ID NO: 18405 - RNA, 21 nt, Artificial Sequence
  RPE65 RNA guide
caacaugcagggaggaacugc

SEQ ID NO: 18406 - RNA, 21 nt, Artificial Sequence
  RPE65 RNA guide
caagacuuaagaacucugcau

SEQ ID NO: 18407 - RNA, 21 nt, Artificial Sequence
  RPE65 RNA guide
caagcuaucugugccuguguc

SEQ ID NO: 18408 - RNA, 21 nt, Artificial Sequence
  RPE65 RNA guide
caaggauggucucauuuuacu

SEQ ID NO: 18409 - RNA, 21 nt, Artificial Sequence
  RPE65 RNA guide
cacagauagcuugcccagucg

SEQ ID NO: 18410 - RNA, 21 nt, Artificial Sequence
  RPE65 RNA guide
cacaggcacagauagcuugcc

SEQ ID NO: 18411 - RNA, 21 nt, Artificial Sequence
  RPE65 RNA guide
cacauaaccucuuaggccauc

SEQ ID NO: 18412 - RNA, 21 nt, Artificial Sequence
  RPE65 RNA guide
cacguagaauauguuuugauu

SEQ ID NO: 18413 - RNA, 21 nt, Artificial Sequence
  RPE65 RNA guide
cacugagguuucuguuaucuu

SEQ ID NO: 18414 - RNA, 21 nt, Artificial Sequence
  RPE65 RNA guide
cacuggcuauguaucacuggg

SEQ ID NO: 18415 - RNA, 21 nt, Artificial Sequence
  RPE65 RNA guide
cacugggaaagucacauaacc

SEQ ID NO: 18416 - RNA, 21 nt, Artificial Sequence
  RPE65 RNA guide
cagaaaccucagugagcagga

SEQ ID NO: 18417 - RNA, 21 nt, Artificial Sequence
  RPE65 RNA guide
cagaaaugcagaguucuuaag

SEQ ID NO: 18418 - RNA, 21 nt, Artificial Sequence
  RPE65 RNA guide
cagaacaacaaagacuucgac

SEQ ID NO: 18419 - RNA, 21 nt, Artificial Sequence
  RPE65 RNA guide
cagaggccuuucuuuggagcc

SEQ ID NO: 18420 - RNA, 21 nt, Artificial Sequence
  RPE65 RNA guide
cagaguucuuaagucuuggcu

SEQ ID NO: 18421 - RNA, 21 nt, Artificial Sequence
  RPE65 RNA guide
cagauagcuugcccagucgcg

SEQ ID NO: 18422 - RNA, 21 nt, Artificial Sequence
  RPE65 RNA guide
cagccagaaaugcagaguucu

SEQ ID NO: 18423 - RNA, 21 nt, Artificial Sequence
  RPE65 RNA guide
caggaaagaauucaaacagcc

SEQ ID NO: 18424 - RNA, 21 nt, Artificial Sequence
  RPE65 RNA guide
caggaagcuauagaugaggga

SEQ ID NO: 18425 - RNA, 21 nt, Artificial Sequence
  RPE65 RNA guide
caggcacagauagcuugccca

SEQ ID NO: 18426 - RNA, 21 nt, Artificial Sequence
  RPE65 RNA guide
caggcagucgaagucuuuguu

SEQ ID NO: 18427 - RNA, 21 nt, Artificial Sequence
  RPE65 RNA guide
cagggaggaacugcaggaagc

SEQ ID NO: 18428 - RNA, 21 nt, Artificial Sequence
  RPE65 RNA guide
cagggucccucaucuauagcu

SEQ ID NO: 18429 - RNA, 21 nt, Artificial Sequence
  RPE65 RNA guide
caguaaaaugagaccauccuu

SEQ ID NO: 18430 - RNA, 21 nt, Artificial Sequence
  RPE65 RNA guide
cagucacuggcuauguaucac

SEQ ID NO: 18431 - RNA, 21 nt, Artificial Sequence
  RPE65 RNA guide
cagucgaagucuuuguuguuc

SEQ ID NO: 18432 - RNA, 21 nt, Artificial Sequence
  RPE65 RNA guide
cagucgcgucccagggucccu

SEQ ID NO: 18433 - RNA, 21 nt, Artificial Sequence
  RPE65 RNA guide
cagugacugacacaggcacag

SEQ ID NO: 18434 - RNA, 21 nt, Artificial Sequence
  RPE65 RNA guide
cagugagcaggaaagaauuca

SEQ ID NO: 18435 - RNA, 21 nt, Artificial Sequence
  RPE65 RNA guide
cagugauacauagccagugac

SEQ ID NO: 18436 - RNA, 21 nt, Artificial Sequence
  RPE65 RNA guide
caguuccucccugcauguuga

SEQ ID NO: 18437 - RNA, 21 nt, Artificial Sequence
  RPE65 RNA guide
cauaaccucuuaggccaucaa

SEQ ID NO: 18438 - RNA, 21 nt, Artificial Sequence
  RPE65 RNA guide
cauagccagugacugacacag

SEQ ID NO: 18439 - RNA, 21 nt, Artificial Sequence
  RPE65 RNA guide
cauauucuacgugugaacgaa

SEQ ID NO: 18440 - RNA, 21 nt, Artificial Sequence
  RPE65 RNA guide
caucccucaggcagucgaagu

SEQ ID NO: 18441 - RNA, 21 nt, Artificial Sequence
  RPE65 RNA guide
cauccuugaagaaaauuuagg

SEQ ID NO: 18442 - RNA, 21 nt, Artificial Sequence
  RPE65 RNA guide
caucuauagcuuccugcaguu

SEQ ID NO: 18443 - RNA, 21 nt, Artificial Sequence
  RPE65 RNA guide
caugcagggaggaacugcagg

SEQ ID NO: 18444 - RNA, 21 nt, Artificial Sequence
  RPE65 RNA guide
cauguugaccuaaaaaagaac

SEQ ID NO: 18445 - RNA, 21 nt, Artificial Sequence
  RPE65 RNA guide
cauucuuucaucccucaggca

SEQ ID NO: 18446 - RNA, 21 nt, Artificial Sequence
  RPE65 RNA guide
cauuucuggcuguuugaauuc

SEQ ID NO: 18447 - RNA, 21 nt, Artificial Sequence
  RPE65 RNA guide
ccaaagaaaggccucugaaaa

SEQ ID NO: 18448 - RNA, 21 nt, Artificial Sequence
  RPE65 RNA guide
ccaagacuuaagaacucugca

SEQ ID NO: 18449 - RNA, 21 nt, Artificial Sequence
  RPE65 RNA guide
ccagaaaugcagaguucuuaa

SEQ ID NO: 18450 - RNA, 21 nt, Artificial Sequence
  RPE65 RNA guide
ccagggucccucaucuauagc

SEQ ID NO: 18451 - RNA, 21 nt, Artificial Sequence
  RPE65 RNA guide
ccagucgcgucccaggguccc

SEQ ID NO: 18452 - RNA, 21 nt, Artificial Sequence
  RPE65 RNA guide
ccagugacugacacaggcaca

SEQ ID NO: 18453 - RNA, 21 nt, Artificial Sequence
  RPE65 RNA guide
ccagugauacauagccaguga

SEQ ID NO: 18454 - RNA, 21 nt, Artificial Sequence
  RPE65 RNA guide
ccauccuugaagaaaauuuag

SEQ ID NO: 18455 - RNA, 21 nt, Artificial Sequence
  RPE65 RNA guide
cccagggucccucaucuauag

SEQ ID NO: 18456 - RNA, 21 nt, Artificial Sequence
  RPE65 RNA guide
cccagucgcgucccagggucc

SEQ ID NO: 18457 - RNA, 21 nt, Artificial Sequence
  RPE65 RNA guide
cccagugauacauagccagug

SEQ ID NO: 18458 - RNA, 21 nt, Artificial Sequence
  RPE65 RNA guide
cccuaaauuuucuucaaggau

SEQ ID NO: 18459 - RNA, 21 nt, Artificial Sequence
  RPE65 RNA guide
cccucaggcagucgaagucuu

SEQ ID NO: 18460 - RNA, 21 nt, Artificial Sequence
  RPE65 RNA guide
cccucaucuauagcuuccugc

SEQ ID NO: 18461 - RNA, 21 nt, Artificial Sequence
  RPE65 RNA guide
cccugcauguugaccuaaaaa

SEQ ID NO: 18462 - RNA, 21 nt, Artificial Sequence
  RPE65 RNA guide
cccugggacgcgacugggcaa

SEQ ID NO: 18463 - RNA, 21 nt, Artificial Sequence
  RPE65 RNA guide
ccuaaaaaagaacuuaggagc

SEQ ID NO: 18464 - RNA, 21 nt, Artificial Sequence
  RPE65 RNA guide
ccuaaauuuucuucaaggaug

SEQ ID NO: 18465 - RNA, 21 nt, Artificial Sequence
  RPE65 RNA guide
ccuaagagguuaugugacuuu

SEQ ID NO: 18466 - RNA, 21 nt, Artificial Sequence
  RPE65 RNA guide
ccuaaguucuuuuuuagguca

SEQ ID NO: 18467 - RNA, 21 nt, Artificial Sequence
  RPE65 RNA guide
ccucaggcagucgaagucuuu

SEQ ID NO: 18468 - RNA, 21 nt, Artificial Sequence
  RPE65 RNA guide
ccucagugagcaggaaagaau

SEQ ID NO: 18469 - RNA, 21 nt, Artificial Sequence
  RPE65 RNA guide
ccucaucuauagcuuccugca

SEQ ID NO: 18470 - RNA, 21 nt, Artificial Sequence
  RPE65 RNA guide
ccucccugcauguugaccuaa

SEQ ID NO: 18471 - RNA, 21 nt, Artificial Sequence
  RPE65 RNA guide
ccucuuaggccaucaauuuuc

SEQ ID NO: 18472 - RNA, 21 nt, Artificial Sequence
  RPE65 RNA guide
ccugagggaugaaagaaugua

SEQ ID NO: 18473 - RNA, 21 nt, Artificial Sequence
  RPE65 RNA guide
ccugcaguuccucccugcaug

SEQ ID NO: 18474 - RNA, 21 nt, Artificial Sequence
  RPE65 RNA guide
ccugcauguugaccuaaaaaa

SEQ ID NO: 18475 - RNA, 21 nt, Artificial Sequence
  RPE65 RNA guide
ccugcucacugagguuucugu

SEQ ID NO: 18476 - RNA, 21 nt, Artificial Sequence
  RPE65 RNA guide
ccugggacgcgacugggcaag

SEQ ID NO: 18477 - RNA, 21 nt, Artificial Sequence
  RPE65 RNA guide
ccugugucagucacuggcuau

SEQ ID NO: 18478 - RNA, 21 nt, Artificial Sequence
  RPE65 RNA guide
ccuuacaguuauguugacaaa

SEQ ID NO: 18479 - RNA, 21 nt, Artificial Sequence
  RPE65 RNA guide
ccuugaagaaaauuuagggcu

SEQ ID NO: 18480 - RNA, 21 nt, Artificial Sequence
  RPE65 RNA guide
ccuuucuuuggagcccuaaau

SEQ ID NO: 18481 - RNA, 21 nt, Artificial Sequence
  RPE65 RNA guide
cgaaauauacauucuuucauc

SEQ ID NO: 18482 - RNA, 21 nt, Artificial Sequence
  RPE65 RNA guide
cgaagucuuuguuguucugca

SEQ ID NO: 18483 - RNA, 21 nt, Artificial Sequence
  RPE65 RNA guide
cgacugccugagggaugaaag

SEQ ID NO: 18484 - RNA, 21 nt, Artificial Sequence
  RPE65 RNA guide
cgacugggcaagcuaucugug

SEQ ID NO: 18485 - RNA, 21 nt, Artificial Sequence
  RPE65 RNA guide
cgcgacugggcaagcuaucug

SEQ ID NO: 18486 - RNA, 21 nt, Artificial Sequence
  RPE65 RNA guide
cgcgucccagggucccucauc

SEQ ID NO: 18487 - RNA, 21 nt, Artificial Sequence
  RPE65 RNA guide
cgucccagggucccucaucua

SEQ ID NO: 18488 - RNA, 21 nt, Artificial Sequence
  RPE65 RNA guide
cgugugaacgaaauauacauu

SEQ ID NO: 18489 - RNA, 21 nt, Artificial Sequence
  RPE65 RNA guide
cguucacacguagaauauguu

SEQ ID NO: 18490 - RNA, 21 nt, Artificial Sequence
  RPE65 RNA guide
cuaaaaaagaacuuaggagcc

SEQ ID NO: 18491 - RNA, 21 nt, Artificial Sequence
  RPE65 RNA guide
cuaaauuuucuucaaggaugg

SEQ ID NO: 18492 - RNA, 21 nt, Artificial Sequence
  RPE65 RNA guide
cuaagagguuaugugacuuuc

SEQ ID NO: 18493 - RNA, 21 nt, Artificial Sequence
  RPE65 RNA guide
cuaaguucuuuuuuaggucaa

SEQ ID NO: 18494 - RNA, 21 nt, Artificial Sequence
  RPE65 RNA guide
cuacgugugaacgaaauauac

SEQ ID NO: 18495 - RNA, 21 nt, Artificial Sequence
  RPE65 RNA guide
cuaggagagaagauaacagaa

SEQ ID NO: 18496 - RNA, 21 nt, Artificial Sequence
  RPE65 RNA guide
cuauagaugagggacccuggg

SEQ ID NO: 18497 - RNA, 21 nt, Artificial Sequence
  RPE65 RNA guide
cuauagcuuccugcaguuccu

SEQ ID NO: 18498 - RNA, 21 nt, Artificial Sequence
  RPE65 RNA guide
cuaucugugccugugucaguc

SEQ ID NO: 18499 - RNA, 21 nt, Artificial Sequence
  RPE65 RNA guide
cuauguaucacugggaaaguc

SEQ ID NO: 18500 - RNA, 21 nt, Artificial Sequence
  RPE65 RNA guide
cucacugagguuucuguuauc

SEQ ID NO: 18501 - RNA, 21 nt, Artificial Sequence
  RPE65 RNA guide
cucaggcagucgaagucuuug

SEQ ID NO: 18502 - RNA, 21 nt, Artificial Sequence
  RPE65 RNA guide
cucagugagcaggaaagaauu

SEQ ID NO: 18503 - RNA, 21 nt, Artificial Sequence
  RPE65 RNA guide
cucaucuauagcuuccugcag

SEQ ID NO: 18504 - RNA, 21 nt, Artificial Sequence
  RPE65 RNA guide
cuccaaagaaaggccucugaa

SEQ ID NO: 18505 - RNA, 21 nt, Artificial Sequence
  RPE65 RNA guide
cucccugcauguugaccuaaa

SEQ ID NO: 18506 - RNA, 21 nt, Artificial Sequence
  RPE65 RNA guide
cuccuaaguucuuuuuuaggu

SEQ ID NO: 18507 - RNA, 21 nt, Artificial Sequence
  RPE65 RNA guide
cucugcauuucuggcuguuug

SEQ ID NO: 18508 - RNA, 21 nt, Artificial Sequence
  RPE65 RNA guide
cucuuaggccaucaauuuucu

SEQ ID NO: 18509 - RNA, 21 nt, Artificial Sequence
  RPE65 RNA guide
cucuucaguaaaaugagacca

SEQ ID NO: 18510 - RNA, 21 nt, Artificial Sequence
  RPE65 RNA guide
cugaagagaaaauugauggcc

SEQ ID NO: 18511 - RNA, 21 nt, Artificial Sequence
  RPE65 RNA guide
cugacacaggcacagauagcu

SEQ ID NO: 18512 - RNA, 21 nt, Artificial Sequence
  RPE65 RNA guide
cugagggaugaaagaauguau

SEQ ID NO: 18513 - RNA, 21 nt, Artificial Sequence
  RPE65 RNA guide
cugagguuucuguuaucuucu

SEQ ID NO: 18514 - RNA, 21 nt, Artificial Sequence
  RPE65 RNA guide
cugcagaacaacaaagacuuc

SEQ ID NO: 18515 - RNA, 21 nt, Artificial Sequence
  RPE65 RNA guide
cugcaggaagcuauagaugag

SEQ ID NO: 18516 - RNA, 21 nt, Artificial Sequence
  RPE65 RNA guide
cugcaguuccucccugcaugu

SEQ ID NO: 18517 - RNA, 21 nt, Artificial Sequence
  RPE65 RNA guide
cugcauguugaccuaaaaaag

SEQ ID NO: 18518 - RNA, 21 nt, Artificial Sequence
  RPE65 RNA guide
cugcauuucuggcuguuugaa

SEQ ID NO: 18519 - RNA, 21 nt, Artificial Sequence
  RPE65 RNA guide
cugccugagggaugaaagaau

SEQ ID NO: 18520 - RNA, 21 nt, Artificial Sequence
  RPE65 RNA guide
cugcucacugagguuucuguu

SEQ ID NO: 18521 - RNA, 21 nt, Artificial Sequence
  RPE65 RNA guide
cuggcuauguaucacugggaa

SEQ ID NO: 18522 - RNA, 21 nt, Artificial Sequence
  RPE65 RNA guide
cuggcuguuugaauucuuucc

SEQ ID NO: 18523 - RNA, 21 nt, Artificial Sequence
  RPE65 RNA guide
cugggaaagucacauaaccuc

SEQ ID NO: 18524 - RNA, 21 nt, Artificial Sequence
  RPE65 RNA guide
cugggacgcgacugggcaagc

SEQ ID NO: 18525 - RNA, 21 nt, Artificial Sequence
  RPE65 RNA guide
cugggcaagcuaucugugccu

SEQ ID NO: 18526 - RNA, 21 nt, Artificial Sequence
  RPE65 RNA guide
cugugccugugucagucacug

SEQ ID NO: 18527 - RNA, 21 nt, Artificial Sequence
  RPE65 RNA guide
cugugucagucacuggcuaug

SEQ ID NO: 18528 - RNA, 21 nt, Artificial Sequence
  RPE65 RNA guide
cuguuugaauucuuuccugcu

SEQ ID NO: 18529 - RNA, 21 nt, Artificial Sequence
  RPE65 RNA guide
cuuaagaacucugcauuucug

SEQ ID NO: 18530 - RNA, 21 nt, Artificial Sequence
  RPE65 RNA guide
cuuaagucuuggcuccuaagu

SEQ ID NO: 18531 - RNA, 21 nt, Artificial Sequence
  RPE65 RNA guide
cuuaggagccaagacuuaaga

SEQ ID NO: 18532 - RNA, 21 nt, Artificial Sequence
  RPE65 RNA guide
cuuaggccaucaauuuucucu

SEQ ID NO: 18533 - RNA, 21 nt, Artificial Sequence
  RPE65 RNA guide
cuucaaggauggucucauuuu

SEQ ID NO: 18534 - RNA, 21 nt, Artificial Sequence
  RPE65 RNA guide
cuucaguaaaaugagaccauc

SEQ ID NO: 18535 - RNA, 21 nt, Artificial Sequence
  RPE65 RNA guide
cuuccugcaguuccucccugc

SEQ ID NO: 18536 - RNA, 21 nt, Artificial Sequence
  RPE65 RNA guide
cuucgacugccugagggauga

SEQ ID NO: 18537 - RNA, 21 nt, Artificial Sequence
  RPE65 RNA guide
cuugaagaaaauuuagggcuc

SEQ ID NO: 18538 - RNA, 21 nt, Artificial Sequence
  RPE65 RNA guide
cuugcccagucgcgucccagg

SEQ ID NO: 18539 - RNA, 21 nt, Artificial Sequence
  RPE65 RNA guide
cuuggcuccuaaguucuuuuu

SEQ ID NO: 18540 - RNA, 21 nt, Artificial Sequence
  RPE65 RNA guide
cuuucaucccucaggcagucg

SEQ ID NO: 18541 - RNA, 21 nt, Artificial Sequence
  RPE65 RNA guide
cuuucccagugauacauagcc

SEQ ID NO: 18542 - RNA, 21 nt, Artificial Sequence
  RPE65 RNA guide
cuuuccugcucacugagguuu

SEQ ID NO: 18543 - RNA, 21 nt, Artificial Sequence
  RPE65 RNA guide
cuuucuuuggagcccuaaauu

SEQ ID NO: 18544 - RNA, 21 nt, Artificial Sequence
  RPE65 RNA guide
cuuuggagcccuaaauuuucu

SEQ ID NO: 18545 - RNA, 21 nt, Artificial Sequence
  RPE65 RNA guide
cuuuguuguucugcagaaaaa

SEQ ID NO: 18546 - RNA, 21 nt, Artificial Sequence
  RPE65 RNA guide
cuuuuugucaacauaacugua

SEQ ID NO: 18547 - RNA, 21 nt, Artificial Sequence
  RPE65 RNA guide
cuuuuuuaggucaacaugcag

SEQ ID NO: 18548 - RNA, 21 nt, Artificial Sequence
  RPE65 RNA guide
gaaaauugauggccuaagagg

SEQ ID NO: 18549 - RNA, 21 nt, Artificial Sequence
  RPE65 RNA guide
gaaaauuuagggcuccaaaga

SEQ ID NO: 18550 - RNA, 21 nt, Artificial Sequence
  RPE65 RNA guide
gaaaccucagugagcaggaaa

SEQ ID NO: 18551 - RNA, 21 nt, Artificial Sequence
  RPE65 RNA guide
gaaagaauguauauuucguuc

SEQ ID NO: 18552 - RNA, 21 nt, Artificial Sequence
  RPE65 RNA guide
gaaagaauucaaacagccaga

SEQ ID NO: 18553 - RNA, 21 nt, Artificial Sequence
  RPE65 RNA guide
gaaagucacauaaccucuuag

SEQ ID NO: 18554 - RNA, 21 nt, Artificial Sequence
  RPE65 RNA guide
gaaauauacauucuuucaucc

SEQ ID NO: 18555 - RNA, 21 nt, Artificial Sequence
  RPE65 RNA guide
gaaaugcagaguucuuaaguc

SEQ ID NO: 18556 - RNA, 21 nt, Artificial Sequence
  RPE65 RNA guide
gaacaacaaagacuucgacug

SEQ ID NO: 18557 - RNA, 21 nt, Artificial Sequence
  RPE65 RNA guide
gaacgaaauauacauucuuuc

SEQ ID NO: 18558 - RNA, 21 nt, Artificial Sequence
  RPE65 RNA guide
gaacucugcauuucuggcugu

SEQ ID NO: 18559 - RNA, 21 nt, Artificial Sequence
  RPE65 RNA guide
gaacugcaggaagcuauagau

SEQ ID NO: 18560 - RNA, 21 nt, Artificial Sequence
  RPE65 RNA guide
gaacuuaggagccaagacuua

SEQ ID NO: 18561 - RNA, 21 nt, Artificial Sequence
  RPE65 RNA guide
gaagaaaauuuagggcuccaa

SEQ ID NO: 18562 - RNA, 21 nt, Artificial Sequence
  RPE65 RNA guide
gaagagaaaauugauggccua

SEQ ID NO: 18563 - RNA, 21 nt, Artificial Sequence
  RPE65 RNA guide
gaagauaacagaaaccucagu

SEQ ID NO: 18564 - RNA, 21 nt, Artificial Sequence
  RPE65 RNA guide
gaagcuauagaugagggaccc

SEQ ID NO: 18565 - RNA, 21 nt, Artificial Sequence
  RPE65 RNA guide
gaagucuuuguuguucugcag

SEQ ID NO: 18566 - RNA, 21 nt, Artificial Sequence
  RPE65 RNA guide
gaauguauauuucguucacac

SEQ ID NO: 18567 - RNA, 21 nt, Artificial Sequence
  RPE65 RNA guide
gaauucaaacagccagaaaug

SEQ ID NO: 18568 - RNA, 21 nt, Artificial Sequence
  RPE65 RNA guide
gaauucuuuccugcucacuga

SEQ ID NO: 18569 - RNA, 21 nt, Artificial Sequence
  RPE65 RNA guide
gacacaggcacagauagcuug

SEQ ID NO: 18570 - RNA, 21 nt, Artificial Sequence
  RPE65 RNA guide
gaccauccuugaagaaaauuu

SEQ ID NO: 18571 - RNA, 21 nt, Artificial Sequence
  RPE65 RNA guide
gacccugggacgcgacugggc

SEQ ID NO: 18572 - RNA, 21 nt, Artificial Sequence
  RPE65 RNA guide
gaccuaaaaaagaacuuagga

SEQ ID NO: 18573 - RNA, 21 nt, Artificial Sequence
  RPE65 RNA guide
gacgcgacugggcaagcuauc

SEQ ID NO: 18574 - RNA, 21 nt, Artificial Sequence
  RPE65 RNA guide
gacugacacaggcacagauag

SEQ ID NO: 18575 - RNA, 21 nt, Artificial Sequence
  RPE65 RNA guide
gacugccugagggaugaaaga

SEQ ID NO: 18576 - RNA, 21 nt, Artificial Sequence
  RPE65 RNA guide
gacugggcaagcuaucugugc

SEQ ID NO: 18577 - RNA, 21 nt, Artificial Sequence
  RPE65 RNA guide
gacuuaagaacucugcauuuc

SEQ ID NO: 18578 - RNA, 21 nt, Artificial Sequence
  RPE65 RNA guide
gacuucgacugccugagggau

SEQ ID NO: 18579 - RNA, 21 nt, Artificial Sequence
  RPE65 RNA guide
gacuuucccagugauacauag

SEQ ID NO: 18580 - RNA, 21 nt, Artificial Sequence
  RPE65 RNA guide
gagaaaauugauggccuaaga

SEQ ID NO: 18581 - RNA, 21 nt, Artificial Sequence
  RPE65 RNA guide
gagaagauaacagaaaccuca

SEQ ID NO: 18582 - RNA, 21 nt, Artificial Sequence
  RPE65 RNA guide
gagaccauccuugaagaaaau

SEQ ID NO: 18583 - RNA, 21 nt, Artificial Sequence
  RPE65 RNA guide
gagagaagauaacagaaaccu

SEQ ID NO: 18584 - RNA, 21 nt, Artificial Sequence
  RPE65 RNA guide
gagcaggaaagaauucaaaca

SEQ ID NO: 18585 - RNA, 21 nt, Artificial Sequence
  RPE65 RNA guide
gagccaagacuuaagaacucu

SEQ ID NO: 18586 - RNA, 21 nt, Artificial Sequence
  RPE65 RNA guide
gagcccuaaauuuucuucaag

SEQ ID NO: 18587 - RNA, 21 nt, Artificial Sequence
  RPE65 RNA guide
gaggaacugcaggaagcuaua

SEQ ID NO: 18588 - RNA, 21 nt, Artificial Sequence
  RPE65 RNA guide
gaggccuuucuuuggagcccu

SEQ ID NO: 18589 - RNA, 21 nt, Artificial Sequence
  RPE65 RNA guide
gagggacccugggacgcgacu

SEQ ID NO: 18590 - RNA, 21 nt, Artificial Sequence
  RPE65 RNA guide
gagggaugaaagaauguauau

SEQ ID NO: 18591 - RNA, 21 nt, Artificial Sequence
  RPE65 RNA guide
gagguuaugugacuuucccag

SEQ ID NO: 18592 - RNA, 21 nt, Artificial Sequence
  RPE65 RNA guide
gagguuucuguuaucuucucu

SEQ ID NO: 18593 - RNA, 21 nt, Artificial Sequence
  RPE65 RNA guide
gaguucuuaagucuuggcucc

SEQ ID NO: 18594 - RNA, 21 nt, Artificial Sequence
  RPE65 RNA guide
gauaacagaaaccucagugag

SEQ ID NO: 18595 - RNA, 21 nt, Artificial Sequence
  RPE65 RNA guide
gauacauagccagugacugac

SEQ ID NO: 18596 - RNA, 21 nt, Artificial Sequence
  RPE65 RNA guide
gauagcuugcccagucgcguc

SEQ ID NO: 18597 - RNA, 21 nt, Artificial Sequence
  RPE65 RNA guide
gaugagggacccugggacgcg

SEQ ID NO: 18598 - RNA, 21 nt, Artificial Sequence
  RPE65 RNA guide
gauggccuaagagguuaugug

SEQ ID NO: 18599 - RNA, 21 nt, Artificial Sequence
  RPE65 RNA guide
gauggucucauuuuacugaag

SEQ ID NO: 18600 - RNA, 21 nt, Artificial Sequence
  RPE65 RNA guide
gcaaaaucaaaacauauucua

SEQ ID NO: 18601 - RNA, 21 nt, Artificial Sequence
  RPE65 RNA guide
gcaagcuaucugugccugugu

SEQ ID NO: 18602 - RNA, 21 nt, Artificial Sequence
  RPE65 RNA guide
gcacagauagcuugcccaguc

SEQ ID NO: 18603 - RNA, 21 nt, Artificial Sequence
  RPE65 RNA guide
gcagaacaacaaagacuucga

SEQ ID NO: 18604 - RNA, 21 nt, Artificial Sequence
  RPE65 RNA guide
gcagaguucuuaagucuuggc

SEQ ID NO: 18605 - RNA, 21 nt, Artificial Sequence
  RPE65 RNA guide
gcaggaaagaauucaaacagc

SEQ ID NO: 18606 - RNA, 21 nt, Artificial Sequence
  RPE65 RNA guide
gcaggaagcuauagaugaggg

SEQ ID NO: 18607 - RNA, 21 nt, Artificial Sequence
  RPE65 RNA guide
gcagggaggaacugcaggaag

SEQ ID NO: 18608 - RNA, 21 nt, Artificial Sequence
  RPE65 RNA guide
gcagucgaagucuuuguuguu

SEQ ID NO: 18609 - RNA, 21 nt, Artificial Sequence
  RPE65 RNA guide
gcaguuccucccugcauguug

SEQ ID NO: 18610 - RNA, 21 nt, Artificial Sequence
  RPE65 RNA guide
gcauguugaccuaaaaaagaa

SEQ ID NO: 18611 - RNA, 21 nt, Artificial Sequence
  RPE65 RNA guide
gcauuucuggcuguuugaauu

SEQ ID NO: 18612 - RNA, 21 nt, Artificial Sequence
  RPE65 RNA guide
gccaagacuuaagaacucugc

SEQ ID NO: 18613 - RNA, 21 nt, Artificial Sequence
  RPE65 RNA guide
gccagaaaugcagaguucuua

SEQ ID NO: 18614 - RNA, 21 nt, Artificial Sequence
  RPE65 RNA guide
gccagugacugacacaggcac

SEQ ID NO: 18615 - RNA, 21 nt, Artificial Sequence
  RPE65 RNA guide
gccaucaauuuucucuucagu

SEQ ID NO: 18616 - RNA, 21 nt, Artificial Sequence
  RPE65 RNA guide
gcccagucgcgucccaggguc

SEQ ID NO: 18617 - RNA, 21 nt, Artificial Sequence
  RPE65 RNA guide
gcccuaaauuuucuucaagga

SEQ ID NO: 18618 - RNA, 21 nt, Artificial Sequence
  RPE65 RNA guide
gccuaagagguuaugugacuu

SEQ ID NO: 18619 - RNA, 21 nt, Artificial Sequence
  RPE65 RNA guide
gccugagggaugaaagaaugu

SEQ ID NO: 18620 - RNA, 21 nt, Artificial Sequence
  RPE65 RNA guide
gccugugucagucacuggcua

SEQ ID NO: 18621 - RNA, 21 nt, Artificial Sequence
  RPE65 RNA guide
gccuuucuuuggagcccuaaa

SEQ ID NO: 18622 - RNA, 21 nt, Artificial Sequence
  RPE65 RNA guide
gcgacugggcaagcuaucugu

SEQ ID NO: 18623 - RNA, 21 nt, Artificial Sequence
  RPE65 RNA guide
gcgucccagggucccucaucu

SEQ ID NO: 18624 - RNA, 21 nt, Artificial Sequence
  RPE65 RNA guide
gcuauagaugagggacccugg

SEQ ID NO: 18625 - RNA, 21 nt, Artificial Sequence
  RPE65 RNA guide
gcuaucugugccugugucagu

SEQ ID NO: 18626 - RNA, 21 nt, Artificial Sequence
  RPE65 RNA guide
gcuauguaucacugggaaagu

SEQ ID NO: 18627 - RNA, 21 nt, Artificial Sequence
  RPE65 RNA guide
gcucacugagguuucuguuau

SEQ ID NO: 18628 - RNA, 21 nt, Artificial Sequence
  RPE65 RNA guide
gcuccaaagaaaggccucuga

SEQ ID NO: 18629 - RNA, 21 nt, Artificial Sequence
  RPE65 RNA guide
gcuccuaaguucuuuuuuagg

SEQ ID NO: 18630 - RNA, 21 nt, Artificial Sequence
  RPE65 RNA guide
gcuguuugaauucuuuccugc

SEQ ID NO: 18631 - RNA, 21 nt, Artificial Sequence
  RPE65 RNA guide
gcuuccugcaguuccucccug

SEQ ID NO: 18632 - RNA, 21 nt, Artificial Sequence
  RPE65 RNA guide
gcuugcccagucgcgucccag

SEQ ID NO: 18633 - RNA, 21 nt, Artificial Sequence
  RPE65 RNA guide
ggaaagaauucaaacagccag

SEQ ID NO: 18634 - RNA, 21 nt, Artificial Sequence
  RPE65 RNA guide
ggaaagucacauaaccucuua

SEQ ID NO: 18635 - RNA, 21 nt, Artificial Sequence
  RPE65 RNA guide
ggaacugcaggaagcuauaga

SEQ ID NO: 18636 - RNA, 21 nt, Artificial Sequence
  RPE65 RNA guide
ggaagcuauagaugagggacc

SEQ ID NO: 18637 - RNA, 21 nt, Artificial Sequence
  RPE65 RNA guide
ggacccugggacgcgacuggg

SEQ ID NO: 18638 - RNA, 21 nt, Artificial Sequence
  RPE65 RNA guide
ggacgcgacugggcaagcuau

SEQ ID NO: 18639 - RNA, 21 nt, Artificial Sequence
  RPE65 RNA guide
ggagagaagauaacagaaacc

SEQ ID NO: 18640 - RNA, 21 nt, Artificial Sequence
  RPE65 RNA guide
ggagccaagacuuaagaacuc

SEQ ID NO: 18641 - RNA, 21 nt, Artificial Sequence
  RPE65 RNA guide
ggagcccuaaauuuucuucaa

SEQ ID NO: 18642 - RNA, 21 nt, Artificial Sequence
  RPE65 RNA guide
ggaggaacugcaggaagcuau

SEQ ID NO: 18643 - RNA, 21 nt, Artificial Sequence
  RPE65 RNA guide
ggaugaaagaauguauauuuc

SEQ ID NO: 18644 - RNA, 21 nt, Artificial Sequence
  RPE65 RNA guide
ggauggucucauuuuacugaa

SEQ ID NO: 18645 - RNA, 21 nt, Artificial Sequence
  RPE65 RNA guide
ggcaagcuaucugugccugug

SEQ ID NO: 18646 - RNA, 21 nt, Artificial Sequence
  RPE65 RNA guide
ggcacagauagcuugcccagu

SEQ ID NO: 18647 - RNA, 21 nt, Artificial Sequence
  RPE65 RNA guide
ggcagucgaagucuuuguugu

SEQ ID NO: 18648 - RNA, 21 nt, Artificial Sequence
  RPE65 RNA guide
ggccaucaauuuucucuucag

SEQ ID NO: 18649 - RNA, 21 nt, Artificial Sequence
  RPE65 RNA guide
ggccuaagagguuaugugacu

SEQ ID NO: 18650 - RNA, 21 nt, Artificial Sequence
  RPE65 RNA guide
ggccuuucuuuggagcccuaa

SEQ ID NO: 18651 - RNA, 21 nt, Artificial Sequence
  RPE65 RNA guide
ggcuauguaucacugggaaag

SEQ ID NO: 18652 - RNA, 21 nt, Artificial Sequence
  RPE65 RNA guide
ggcuccaaagaaaggccucug

SEQ ID NO: 18653 - RNA, 21 nt, Artificial Sequence
  RPE65 RNA guide
ggcuccuaaguucuuuuuuag

SEQ ID NO: 18654 - RNA, 21 nt, Artificial Sequence
  RPE65 RNA guide
ggcuguuugaauucuuuccug

SEQ ID NO: 18655 - RNA, 21 nt, Artificial Sequence
  RPE65 RNA guide
gggaaagucacauaaccucuu

SEQ ID NO: 18656 - RNA, 21 nt, Artificial Sequence
  RPE65 RNA guide
gggacccugggacgcgacugg

SEQ ID NO: 18657 - RNA, 21 nt, Artificial Sequence
  RPE65 RNA guide
gggacgcgacugggcaagcua

SEQ ID NO: 18658 - RNA, 21 nt, Artificial Sequence
  RPE65 RNA guide
gggaggaacugcaggaagcua

SEQ ID NO: 18659 - RNA, 21 nt, Artificial Sequence
  RPE65 RNA guide
gggaugaaagaauguauauuu

SEQ ID NO: 18660 - RNA, 21 nt, Artificial Sequence
  RPE65 RNA guide
gggcaagcuaucugugccugu

SEQ ID NO: 18661 - RNA, 21 nt, Artificial Sequence
  RPE65 RNA guide
gggcuccaaagaaaggccucu

SEQ ID NO: 18662 - RNA, 21 nt, Artificial Sequence
  RPE65 RNA guide
gggucccucaucuauagcuuc

SEQ ID NO: 18663 - RNA, 21 nt, Artificial Sequence
  RPE65 RNA guide
ggucaacaugcagggaggaac

SEQ ID NO: 18664 - RNA, 21 nt, Artificial Sequence
  RPE65 RNA guide
ggucccucaucuauagcuucc

SEQ ID NO: 18665 - RNA, 21 nt, Artificial Sequence
  RPE65 RNA guide
ggucucauuuuacugaagaga

SEQ ID NO: 18666 - RNA, 21 nt, Artificial Sequence
  RPE65 RNA guide
gguuaugugacuuucccagug

SEQ ID NO: 18667 - RNA, 21 nt, Artificial Sequence
  RPE65 RNA guide
guaaaaugagaccauccuuga

SEQ ID NO: 18668 - RNA, 21 nt, Artificial Sequence
  RPE65 RNA guide
guauauuucguucacacguag

SEQ ID NO: 18669 - RNA, 21 nt, Artificial Sequence
  RPE65 RNA guide
guaucacugggaaagucacau

SEQ ID NO: 18670 - RNA, 21 nt, Artificial Sequence
  RPE65 RNA guide
gucaacaugcagggaggaacu

SEQ ID NO: 18671 - RNA, 21 nt, Artificial Sequence
  RPE65 RNA guide
gucacauaaccucuuaggcca

SEQ ID NO: 18672 - RNA, 21 nt, Artificial Sequence
  RPE65 RNA guide
gucacuggcuauguaucacug

SEQ ID NO: 18673 - RNA, 21 nt, Artificial Sequence
  RPE65 RNA guide
gucagucacuggcuauguauc

SEQ ID NO: 18674 - RNA, 21 nt, Artificial Sequence
  RPE65 RNA guide
gucccagggucccucaucuau

SEQ ID NO: 18675 - RNA, 21 nt, Artificial Sequence
  RPE65 RNA guide
gucccucaucuauagcuuccu

SEQ ID NO: 18676 - RNA, 21 nt, Artificial Sequence
  RPE65 RNA guide
gucgaagucuuuguuguucug

SEQ ID NO: 18677 - RNA, 21 nt, Artificial Sequence
  RPE65 RNA guide
gucgcgucccagggucccuca

SEQ ID NO: 18678 - RNA, 21 nt, Artificial Sequence
  RPE65 RNA guide
gucuuggcuccuaaguucuuu

SEQ ID NO: 18679 - RNA, 21 nt, Artificial Sequence
  RPE65 RNA guide
gucuuuguuguucugcagaaa

SEQ ID NO: 18680 - RNA, 21 nt, Artificial Sequence
  RPE65 RNA guide
gugacugacacaggcacagau

SEQ ID NO: 18681 - RNA, 21 nt, Artificial Sequence
  RPE65 RNA guide
gugacuuucccagugauacau

SEQ ID NO: 18682 - RNA, 21 nt, Artificial Sequence
  RPE65 RNA guide
gugagcaggaaagaauucaaa

SEQ ID NO: 18683 - RNA, 21 nt, Artificial Sequence
  RPE65 RNA guide
gugauacauagccagugacug

SEQ ID NO: 18684 - RNA, 21 nt, Artificial Sequence
  RPE65 RNA guide
gugccugugucagucacuggc

SEQ ID NO: 18685 - RNA, 21 nt, Artificial Sequence
  RPE65 RNA guide
gugucagucacuggcuaugua

SEQ ID NO: 18686 - RNA, 21 nt, Artificial Sequence
  RPE65 RNA guide
gugugaacgaaauauacauuc

SEQ ID NO: 18687 - RNA, 21 nt, Artificial Sequence
  RPE65 RNA guide
guuaugugacuuucccaguga

SEQ ID NO: 18688 - RNA, 21 nt, Artificial Sequence
  RPE65 RNA guide
guucacacguagaauauguuu

SEQ ID NO: 18689 - RNA, 21 nt, Artificial Sequence
  RPE65 RNA guide
guuccucccugcauguugacc

SEQ ID NO: 18690 - RNA, 21 nt, Artificial Sequence
  RPE65 RNA guide
guucuuaagucuuggcuccua

SEQ ID NO: 18691 - RNA, 21 nt, Artificial Sequence
  RPE65 RNA guide
guucuuuuuuaggucaacaug

SEQ ID NO: 18692 - RNA, 21 nt, Artificial Sequence
  RPE65 RNA guide
guugaccuaaaaaagaacuua

SEQ ID NO: 18693 - RNA, 21 nt, Artificial Sequence
  RPE65 RNA guide
guuugaauucuuuccugcuca

SEQ ID NO: 18694 - RNA, 21 nt, Artificial Sequence
  RPE65 RNA guide
guuuuucagaggccuuucuuu

SEQ ID NO: 18695 - RNA, 21 nt, Artificial Sequence
  RPE65 RNA guide
guuuuucugcagaacaacaaa

SEQ ID NO: 18696 - RNA, 21 nt, Artificial Sequence
  RPE65 RNA guide
uaaaaaagaacuuaggagcca

SEQ ID NO: 18697 - RNA, 21 nt, Artificial Sequence
  RPE65 RNA guide
uaaaaugagaccauccuugaa

SEQ ID NO: 18698 - RNA, 21 nt, Artificial Sequence
  RPE65 RNA guide
uaaauuuucuucaaggauggu

SEQ ID NO: 18699 - RNA, 21 nt, Artificial Sequence
  RPE65 RNA guide
uaacagaaaccucagugagca

SEQ ID NO: 18700 - RNA, 21 nt, Artificial Sequence
  RPE65 RNA guide
uaaccucuuaggccaucaauu

SEQ ID NO: 18701 - RNA, 21 nt, Artificial Sequence
  RPE65 RNA guide
uaagaacucugcauuucuggc

SEQ ID NO: 18702 - RNA, 21 nt, Artificial Sequence
  RPE65 RNA guide
uaagagguuaugugacuuucc

SEQ ID NO: 18703 - RNA, 21 nt, Artificial Sequence
  RPE65 RNA guide
uaagucuuggcuccuaaguuc

SEQ ID NO: 18704 - RNA, 21 nt, Artificial Sequence
  RPE65 RNA guide
uaaguucuuuuuuaggucaac

SEQ ID NO: 18705 - RNA, 21 nt, Artificial Sequence
  RPE65 RNA guide
uacauagccagugacugacac

SEQ ID NO: 18706 - RNA, 21 nt, Artificial Sequence
  RPE65 RNA guide
uacauucuuucaucccucagg

SEQ ID NO: 18707 - RNA, 21 nt, Artificial Sequence
  RPE65 RNA guide
uacgugugaacgaaauauaca

SEQ ID NO: 18708 - RNA, 21 nt, Artificial Sequence
  RPE65 RNA guide
uacugaagagaaaauugaugg

SEQ ID NO: 18709 - RNA, 21 nt, Artificial Sequence
  RPE65 RNA guide
uagaugagggacccugggacg

SEQ ID NO: 18710 - RNA, 21 nt, Artificial Sequence
  RPE65 RNA guide
uagccagugacugacacaggc

SEQ ID NO: 18711 - RNA, 21 nt, Artificial Sequence
  RPE65 RNA guide
uagcuuccugcaguuccuccc

SEQ ID NO: 18712 - RNA, 21 nt, Artificial Sequence
  RPE65 RNA guide
uagcuugcccagucgcguccc

SEQ ID NO: 18713 - RNA, 21 nt, Artificial Sequence
  RPE65 RNA guide
uaggagagaagauaacagaaa

SEQ ID NO: 18714 - RNA, 21 nt, Artificial Sequence
  RPE65 RNA guide
uaggagccaagacuuaagaac

SEQ ID NO: 18715 - RNA, 21 nt, Artificial Sequence
  RPE65 RNA guide
uaggccaucaauuuucucuuc

SEQ ID NO: 18716 - RNA, 21 nt, Artificial Sequence
  RPE65 RNA guide
uagggcuccaaagaaaggccu

SEQ ID NO: 18717 - RNA, 21 nt, Artificial Sequence
  RPE65 RNA guide
uaggucaacaugcagggagga

SEQ ID NO: 18718 - RNA, 21 nt, Artificial Sequence
  RPE65 RNA guide
uauacauucuuucaucccuca

SEQ ID NO: 18719 - RNA, 21 nt, Artificial Sequence
  RPE65 RNA guide
uauagaugagggacccuggga

SEQ ID NO: 18720 - RNA, 21 nt, Artificial Sequence
  RPE65 RNA guide
uauagcuuccugcaguuccuc

SEQ ID NO: 18721 - RNA, 21 nt, Artificial Sequence
  RPE65 RNA guide
uaucacugggaaagucacaua

SEQ ID NO: 18722 - RNA, 21 nt, Artificial Sequence
  RPE65 RNA guide
uaucugugccugugucaguca

SEQ ID NO: 18723 - RNA, 21 nt, Artificial Sequence
  RPE65 RNA guide
uauguaucacugggaaaguca

SEQ ID NO: 18724 - RNA, 21 nt, Artificial Sequence
  RPE65 RNA guide
uaugugacuuucccagugaua

SEQ ID NO: 18725 - RNA, 21 nt, Artificial Sequence
  RPE65 RNA guide
uauucuacgugugaacgaaau

SEQ ID NO: 18726 - RNA, 21 nt, Artificial Sequence
  RPE65 RNA guide
uauuucguucacacguagaau

SEQ ID NO: 18727 - RNA, 21 nt, Artificial Sequence
  RPE65 RNA guide
ucaaaacauauucuacgugug

SEQ ID NO: 18728 - RNA, 21 nt, Artificial Sequence
  RPE65 RNA guide
ucaaacagccagaaaugcaga

SEQ ID NO: 18729 - RNA, 21 nt, Artificial Sequence
  RPE65 RNA guide
ucaacaugcagggaggaacug

SEQ ID NO: 18730 - RNA, 21 nt, Artificial Sequence
  RPE65 RNA guide
ucaaggauggucucauuuuac

SEQ ID NO: 18731 - RNA, 21 nt, Artificial Sequence
  RPE65 RNA guide
ucacauaaccucuuaggccau

SEQ ID NO: 18732 - RNA, 21 nt, Artificial Sequence
  RPE65 RNA guide
ucacugagguuucuguuaucu

SEQ ID NO: 18733 - RNA, 21 nt, Artificial Sequence
  RPE65 RNA guide
ucacuggcuauguaucacugg

SEQ ID NO: 18734 - RNA, 21 nt, Artificial Sequence
  RPE65 RNA guide
ucacugggaaagucacauaac

SEQ ID NO: 18735 - RNA, 21 nt, Artificial Sequence
  RPE65 RNA guide
ucagaggccuuucuuuggagc

SEQ ID NO: 18736 - RNA, 21 nt, Artificial Sequence
  RPE65 RNA guide
ucaggcagucgaagucuuugu

SEQ ID NO: 18737 - RNA, 21 nt, Artificial Sequence
  RPE65 RNA guide
ucaguaaaaugagaccauccu

SEQ ID NO: 18738 - RNA, 21 nt, Artificial Sequence
  RPE65 RNA guide
ucagucacuggcuauguauca

SEQ ID NO: 18739 - RNA, 21 nt, Artificial Sequence
  RPE65 RNA guide
ucagugagcaggaaagaauuc

SEQ ID NO: 18740 - RNA, 21 nt, Artificial Sequence
  RPE65 RNA guide
ucaucccucaggcagucgaag

SEQ ID NO: 18741 - RNA, 21 nt, Artificial Sequence
  RPE65 RNA guide
ucaucuauagcuuccugcagu

SEQ ID NO: 18742 - RNA, 21 nt, Artificial Sequence
  RPE65 RNA guide
uccaaagaaaggccucugaaa

SEQ ID NO: 18743 - RNA, 21 nt, Artificial Sequence
  RPE65 RNA guide
ucccagggucccucaucuaua

SEQ ID NO: 18744 - RNA, 21 nt, Artificial Sequence
  RPE65 RNA guide
ucccagugauacauagccagu

SEQ ID NO: 18745 - RNA, 21 nt, Artificial Sequence
  RPE65 RNA guide
ucccucaggcagucgaagucu

SEQ ID NO: 18746 - RNA, 21 nt, Artificial Sequence
  RPE65 RNA guide
ucccucaucuauagcuuccug

SEQ ID NO: 18747 - RNA, 21 nt, Artificial Sequence
  RPE65 RNA guide
ucccugcauguugaccuaaaa

SEQ ID NO: 18748 - RNA, 21 nt, Artificial Sequence
  RPE65 RNA guide
uccuaaguucuuuuuuagguc

SEQ ID NO: 18749 - RNA, 21 nt, Artificial Sequence
  RPE65 RNA guide
uccucccugcauguugaccua

SEQ ID NO: 18750 - RNA, 21 nt, Artificial Sequence
  RPE65 RNA guide
uccugcaguuccucccugcau

SEQ ID NO: 18751 - RNA, 21 nt, Artificial Sequence
  RPE65 RNA guide
uccugcucacugagguuucug

SEQ ID NO: 18752 - RNA, 21 nt, Artificial Sequence
  RPE65 RNA guide
uccuuacaguuauguugacaa

SEQ ID NO: 18753 - RNA, 21 nt, Artificial Sequence
  RPE65 RNA guide
uccuugaagaaaauuuagggc

SEQ ID NO: 18754 - RNA, 21 nt, Artificial Sequence
  RPE65 RNA guide
ucgaagucuuuguuguucugc

SEQ ID NO: 18755 - RNA, 21 nt, Artificial Sequence
  RPE65 RNA guide
ucgacugccugagggaugaaa

SEQ ID NO: 18756 - RNA, 21 nt, Artificial Sequence
  RPE65 RNA guide
ucgcgucccagggucccucau

SEQ ID NO: 18757 - RNA, 21 nt, Artificial Sequence
  RPE65 RNA guide
ucguucacacguagaauaugu

SEQ ID NO: 18758 - RNA, 21 nt, Artificial Sequence
  RPE65 RNA guide
ucuacgugugaacgaaauaua

SEQ ID NO: 18759 - RNA, 21 nt, Artificial Sequence
  RPE65 RNA guide
ucuauagcuuccugcaguucc

SEQ ID NO: 18760 - RNA, 21 nt, Artificial Sequence
  RPE65 RNA guide
ucucuucaguaaaaugagacc

SEQ ID NO: 18761 - RNA, 21 nt, Artificial Sequence
  RPE65 RNA guide
ucugcagaacaacaaagacuu

SEQ ID NO: 18762 - RNA, 21 nt, Artificial Sequence
  RPE65 RNA guide
ucugcauuucuggcuguuuga

SEQ ID NO: 18763 - RNA, 21 nt, Artificial Sequence
  RPE65 RNA guide
ucuggcuguuugaauucuuuc

SEQ ID NO: 18764 - RNA, 21 nt, Artificial Sequence
  RPE65 RNA guide
ucugugccugugucagucacu

SEQ ID NO: 18765 - RNA, 21 nt, Artificial Sequence
  RPE65 RNA guide
ucuuaagucuuggcuccuaag

SEQ ID NO: 18766 - RNA, 21 nt, Artificial Sequence
  RPE65 RNA guide
ucuuaggccaucaauuuucuc

SEQ ID NO: 18767 - RNA, 21 nt, Artificial Sequence
  RPE65 RNA guide
ucuucaaggauggucucauuu

SEQ ID NO: 18768 - RNA, 21 nt, Artificial Sequence
  RPE65 RNA guide
ucuucaguaaaaugagaccau

SEQ ID NO: 18769 - RNA, 21 nt, Artificial Sequence
  RPE65 RNA guide
ucuuggcuccuaaguucuuuu

SEQ ID NO: 18770 - RNA, 21 nt, Artificial Sequence
  RPE65 RNA guide
ucuuucaucccucaggcaguc

SEQ ID NO: 18771 - RNA, 21 nt, Artificial Sequence
  RPE65 RNA guide
ucuuuccugcucacugagguu

SEQ ID NO: 18772 - RNA, 21 nt, Artificial Sequence
  RPE65 RNA guide
ucuuuggagcccuaaauuuuc

SEQ ID NO: 18773 - RNA, 21 nt, Artificial Sequence
  RPE65 RNA guide
ucuuuguuguucugcagaaaa

SEQ ID NO: 18774 - RNA, 21 nt, Artificial Sequence
  RPE65 RNA guide
ucuuuuugucaacauaacugu

SEQ ID NO: 18775 - RNA, 21 nt, Artificial Sequence
  RPE65 RNA guide
ucuuuuuuaggucaacaugca

SEQ ID NO: 18776 - RNA, 21 nt, Artificial Sequence
  RPE65 RNA guide
ugaagaaaauuuagggcucca

SEQ ID NO: 18777 - RNA, 21 nt, Artificial Sequence
  RPE65 RNA guide
ugaagagaaaauugauggccu

SEQ ID NO: 18778 - RNA, 21 nt, Artificial Sequence
  RPE65 RNA guide
ugaauucuuuccugcucacug

SEQ ID NO: 18779 - RNA, 21 nt, Artificial Sequence
  RPE65 RNA guide
ugacacaggcacagauagcuu

SEQ ID NO: 18780 - RNA, 21 nt, Artificial Sequence
  RPE65 RNA guide
ugaccuaaaaaagaacuuagg

SEQ ID NO: 18781 - RNA, 21 nt, Artificial Sequence
  RPE65 RNA guide
ugacugacacaggcacagaua

SEQ ID NO: 18782 - RNA, 21 nt, Artificial Sequence
  RPE65 RNA guide
ugacuuucccagugauacaua

SEQ ID NO: 18783 - RNA, 21 nt, Artificial Sequence
  RPE65 RNA guide
ugagaccauccuugaagaaaa

SEQ ID NO: 18784 - RNA, 21 nt, Artificial Sequence
  RPE65 RNA guide
ugagcaggaaagaauucaaac

SEQ ID NO: 18785 - RNA, 21 nt, Artificial Sequence
  RPE65 RNA guide
ugagggacccugggacgcgac

SEQ ID NO: 18786 - RNA, 21 nt, Artificial Sequence
  RPE65 RNA guide
ugagggaugaaagaauguaua

SEQ ID NO: 18787 - RNA, 21 nt, Artificial Sequence
  RPE65 RNA guide
ugagguuucuguuaucuucuc

SEQ ID NO: 18788 - RNA, 21 nt, Artificial Sequence
  RPE65 RNA guide
ugauacauagccagugacuga

SEQ ID NO: 18789 - RNA, 21 nt, Artificial Sequence
  RPE65 RNA guide
ugauggccuaagagguuaugu

SEQ ID NO: 18790 - RNA, 21 nt, Artificial Sequence
  RPE65 RNA guide
ugcagaacaacaaagacuucg

SEQ ID NO: 18791 - RNA, 21 nt, Artificial Sequence
  RPE65 RNA guide
ugcagaguucuuaagucuugg

SEQ ID NO: 18792 - RNA, 21 nt, Artificial Sequence
  RPE65 RNA guide
ugcaggaagcuauagaugagg

SEQ ID NO: 18793 - RNA, 21 nt, Artificial Sequence
  RPE65 RNA guide
ugcagggaggaacugcaggaa

SEQ ID NO: 18794 - RNA, 21 nt, Artificial Sequence
  RPE65 RNA guide
ugcaguuccucccugcauguu

SEQ ID NO: 18795 - RNA, 21 nt, Artificial Sequence
  RPE65 RNA guide
ugcauguugaccuaaaaaaga

SEQ ID NO: 18796 - RNA, 21 nt, Artificial Sequence
  RPE65 RNA guide
ugcauuucuggcuguuugaau

SEQ ID NO: 18797 - RNA, 21 nt, Artificial Sequence
  RPE65 RNA guide
ugcccagucgcgucccagggu

SEQ ID NO: 18798 - RNA, 21 nt, Artificial Sequence
  RPE65 RNA guide
ugccugagggaugaaagaaug

SEQ ID NO: 18799 - RNA, 21 nt, Artificial Sequence
  RPE65 RNA guide
ugccugugucagucacuggcu

SEQ ID NO: 18800 - RNA, 21 nt, Artificial Sequence
  RPE65 RNA guide
ugcucacugagguuucuguua

SEQ ID NO: 18801 - RNA, 21 nt, Artificial Sequence
  RPE65 RNA guide
uggagcccuaaauuuucuuca

SEQ ID NO: 18802 - RNA, 21 nt, Artificial Sequence
  RPE65 RNA guide
uggccuaagagguuaugugac

SEQ ID NO: 18803 - RNA, 21 nt, Artificial Sequence
  RPE65 RNA guide
uggcuauguaucacugggaaa

SEQ ID NO: 18804 - RNA, 21 nt, Artificial Sequence
  RPE65 RNA guide
uggcuccuaaguucuuuuuua

SEQ ID NO: 18805 - RNA, 21 nt, Artificial Sequence
  RPE65 RNA guide
uggcuguuugaauucuuuccu

SEQ ID NO: 18806 - RNA, 21 nt, Artificial Sequence
  RPE65 RNA guide
ugggaaagucacauaaccucu

SEQ ID NO: 18807 - RNA, 21 nt, Artificial Sequence
  RPE65 RNA guide
ugggacgcgacugggcaagcu

SEQ ID NO: 18808 - RNA, 21 nt, Artificial Sequence
  RPE65 RNA guide
ugggcaagcuaucugugccug

SEQ ID NO: 18809 - RNA, 21 nt, Artificial Sequence
  RPE65 RNA guide
uggucucauuuuacugaagag

SEQ ID NO: 18810 - RNA, 21 nt, Artificial Sequence
  RPE65 RNA guide
uguauauuucguucacacgua

SEQ ID NO: 18811 - RNA, 21 nt, Artificial Sequence
  RPE65 RNA guide
uguaucacugggaaagucaca

SEQ ID NO: 18812 - RNA, 21 nt, Artificial Sequence
  RPE65 RNA guide
ugucagucacuggcuauguau

SEQ ID NO: 18813 - RNA, 21 nt, Artificial Sequence
  RPE65 RNA guide
ugugacuuucccagugauaca

SEQ ID NO: 18814 - RNA, 21 nt, Artificial Sequence
  RPE65 RNA guide
ugugccugugucagucacugg

SEQ ID NO: 18815 - RNA, 21 nt, Artificial Sequence
  RPE65 RNA guide
ugugucagucacuggcuaugu

SEQ ID NO: 18816 - RNA, 21 nt, Artificial Sequence
  RPE65 RNA guide
uguugaccuaaaaaagaacuu

SEQ ID NO: 18817 - RNA, 21 nt, Artificial Sequence
  RPE65 RNA guide
uguuugaauucuuuccugcuc

SEQ ID NO: 18818 - RNA, 21 nt, Artificial Sequence
  RPE65 RNA guide
uguuuuucagaggccuuucuu

SEQ ID NO: 18819 - RNA, 21 nt, Artificial Sequence
  RPE65 RNA guide
uguuuuucugcagaacaacaa

SEQ ID NO: 18820 - RNA, 21 nt, Artificial Sequence
  RPE65 RNA guide
uuaagaacucugcauuucugg

SEQ ID NO: 18821 - RNA, 21 nt, Artificial Sequence
  RPE65 RNA guide
uuaagucuuggcuccuaaguu

SEQ ID NO: 18822 - RNA, 21 nt, Artificial Sequence
  RPE65 RNA guide
uuacugaagagaaaauugaug

SEQ ID NO: 18823 - RNA, 21 nt, Artificial Sequence
  RPE65 RNA guide
uuaggagccaagacuuaagaa

SEQ ID NO: 18824 - RNA, 21 nt, Artificial Sequence
  RPE65 RNA guide
uuaggccaucaauuuucucuu

SEQ ID NO: 18825 - RNA, 21 nt, Artificial Sequence
  RPE65 RNA guide
uuagggcuccaaagaaaggcc

SEQ ID NO: 18826 - RNA, 21 nt, Artificial Sequence
  RPE65 RNA guide
uuaggucaacaugcagggagg

SEQ ID NO: 18827 - RNA, 21 nt, Artificial Sequence
  RPE65 RNA guide
uuaugugacuuucccagugau

SEQ ID NO: 18828 - RNA, 21 nt, Artificial Sequence
  RPE65 RNA guide
uucaaacagccagaaaugcag

SEQ ID NO: 18829 - RNA, 21 nt, Artificial Sequence
  RPE65 RNA guide
uucaaggauggucucauuuua

SEQ ID NO: 18830 - RNA, 21 nt, Artificial Sequence
  RPE65 RNA guide
uucagaggccuuucuuuggag

SEQ ID NO: 18831 - RNA, 21 nt, Artificial Sequence
  RPE65 RNA guide
uucaguaaaaugagaccaucc

SEQ ID NO: 18832 - RNA, 21 nt, Artificial Sequence
  RPE65 RNA guide
uucaucccucaggcagucgaa

SEQ ID NO: 18833 - RNA, 21 nt, Artificial Sequence
  RPE65 RNA guide
uucccagugauacauagccag

SEQ ID NO: 18834 - RNA, 21 nt, Artificial Sequence
  RPE65 RNA guide
uuccucccugcauguugaccu

SEQ ID NO: 18835 - RNA, 21 nt, Artificial Sequence
  RPE65 RNA guide
uuccugcaguuccucccugca

SEQ ID NO: 18836 - RNA, 21 nt, Artificial Sequence
  RPE65 RNA guide
uuccugcucacugagguuucu

SEQ ID NO: 18837 - RNA, 21 nt, Artificial Sequence
  RPE65 RNA guide
uucgacugccugagggaugaa

SEQ ID NO: 18838 - RNA, 21 nt, Artificial Sequence
  RPE65 RNA guide
uucguucacacguagaauaug

SEQ ID NO: 18839 - RNA, 21 nt, Artificial Sequence
  RPE65 RNA guide
uucuacgugugaacgaaauau

SEQ ID NO: 18840 - RNA, 21 nt, Artificial Sequence
  RPE65 RNA guide
uucucuucaguaaaaugagac

SEQ ID NO: 18841 - RNA, 21 nt, Artificial Sequence
  RPE65 RNA guide
uucugcagaacaacaaagacu

SEQ ID NO: 18842 - RNA, 21 nt, Artificial Sequence
  RPE65 RNA guide
uucuggcuguuugaauucuuu

SEQ ID NO: 18843 - RNA, 21 nt, Artificial Sequence
  RPE65 RNA guide
uucuuaagucuuggcuccuaa

SEQ ID NO: 18844 - RNA, 21 nt, Artificial Sequence
  RPE65 RNA guide
uucuucaaggauggucucauu

SEQ ID NO: 18845 - RNA, 21 nt, Artificial Sequence
  RPE65 RNA guide
uucuuucaucccucaggcagu

SEQ ID NO: 18846 - RNA, 21 nt, Artificial Sequence
  RPE65 RNA guide
uucuuuccugcucacugaggu

SEQ ID NO: 18847 - RNA, 21 nt, Artificial Sequence
  RPE65 RNA guide
uucuuuggagcccuaaauuuu

SEQ ID NO: 18848 - RNA, 21 nt, Artificial Sequence
  RPE65 RNA guide
uucuuuuuuaggucaacaugc

SEQ ID NO: 18849 - RNA, 21 nt, Artificial Sequence
  RPE65 RNA guide
uugaagaaaauuuagggcucc

SEQ ID NO: 18850 - RNA, 21 nt, Artificial Sequence
  RPE65 RNA guide
uugaauucuuuccugcucacu

SEQ ID NO: 18851 - RNA, 21 nt, Artificial Sequence
  RPE65 RNA guide
uugaccuaaaaaagaacuuag

SEQ ID NO: 18852 - RNA, 21 nt, Artificial Sequence
  RPE65 RNA guide
uugauggccuaagagguuaug

SEQ ID NO: 18853 - RNA, 21 nt, Artificial Sequence
  RPE65 RNA guide
uugcccagucgcgucccaggg

SEQ ID NO: 18854 - RNA, 21 nt, Artificial Sequence
  RPE65 RNA guide
uuggagcccuaaauuuucuuc

SEQ ID NO: 18855 - RNA, 21 nt, Artificial Sequence
  RPE65 RNA guide
uuggcuccuaaguucuuuuuu

SEQ ID NO: 18856 - RNA, 21 nt, Artificial Sequence
  RPE65 RNA guide
uuguuuuucagaggccuuucu

SEQ ID NO: 18857 - RNA, 21 nt, Artificial Sequence
  RPE65 RNA guide
uuuacugaagagaaaauugau

SEQ ID NO: 18858 - RNA, 21 nt, Artificial Sequence
  RPE65 RNA guide
uuuagggcuccaaagaaaggc

SEQ ID NO: 18859 - RNA, 21 nt, Artificial Sequence
  RPE65 RNA guide
uuuaggucaacaugcagggag

SEQ ID NO: 18860 - RNA, 21 nt, Artificial Sequence
  RPE65 RNA guide
uuucagaggccuuucuuugga

SEQ ID NO: 18861 - RNA, 21 nt, Artificial Sequence
  RPE65 RNA guide
uuucaucccucaggcagucga

SEQ ID NO: 18862 - RNA, 21 nt, Artificial Sequence
  RPE65 RNA guide
uuucccagugauacauagcca

SEQ ID NO: 18863 - RNA, 21 nt, Artificial Sequence
  RPE65 RNA guide
uuuccugcucacugagguuuc

SEQ ID NO: 18864 - RNA, 21 nt, Artificial Sequence
  RPE65 RNA guide
uuucguucacacguagaauau

SEQ ID NO: 18865 - RNA, 21 nt, Artificial Sequence
  RPE65 RNA guide
uuucucuucaguaaaaugaga

SEQ ID NO: 18866 - RNA, 21 nt, Artificial Sequence
  RPE65 RNA guide
uuucugcagaacaacaaagac

SEQ ID NO: 18867 - RNA, 21 nt, Artificial Sequence
  RPE65 RNA guide
uuucuggcuguuugaauucuu

SEQ ID NO: 18868 - RNA, 21 nt, Artificial Sequence
  RPE65 RNA guide
uuucuucaaggauggucucau

SEQ ID NO: 18869 - RNA, 21 nt, Artificial Sequence
  RPE65 RNA guide
uuucuuuggagcccuaaauuu

SEQ ID NO: 18870 - RNA, 21 nt, Artificial Sequence
  RPE65 RNA guide
uuugaauucuuuccugcucac

SEQ ID NO: 18871 - RNA, 21 nt, Artificial Sequence
  RPE65 RNA guide
uuuggagcccuaaauuuucuu

SEQ ID NO: 18872 - RNA, 21 nt, Artificial Sequence
  RPE65 RNA guide
uuuguuuuucagaggccuuuc

SEQ ID NO: 18873 - RNA, 21 nt, Artificial Sequence
  RPE65 RNA guide
uuuuacugaagagaaaauuga

SEQ ID NO: 18874 - RNA, 21 nt, Artificial Sequence
  RPE65 RNA guide
uuuuaggucaacaugcaggga

SEQ ID NO: 18875 - RNA, 21 nt, Artificial Sequence
  RPE65 RNA guide
uuuucagaggccuuucuuugg

SEQ ID NO: 18876 - RNA, 21 nt, Artificial Sequence
  RPE65 RNA guide
uuuucucuucaguaaaaugag

SEQ ID NO: 18877 - RNA, 21 nt, Artificial Sequence
  RPE65 RNA guide
uuuucugcagaacaacaaaga

SEQ ID NO: 18878 - RNA, 21 nt, Artificial Sequence
  RPE65 RNA guide
uuuucuucaaggauggucuca

SEQ ID NO: 18879 - RNA, 21 nt, Artificial Sequence
  RPE65 RNA guide
uuuuguuuuucagaggccuuu

SEQ ID NO: 18880 - RNA, 21 nt, Artificial Sequence
  RPE65 RNA guide
uuuuuaggucaacaugcaggg

SEQ ID NO: 18881 - RNA, 21 nt, Artificial Sequence
  RPE65 RNA guide
uuuuucagaggccuuucuuug

SEQ ID NO: 18882 - RNA, 21 nt, Artificial Sequence
  RPE65 RNA guide
uuuuucugcagaacaacaaag

SEQ ID NO: 18883 - RNA, 21 nt, Artificial Sequence
  RPE65 RNA guide
uuuuuguuuuucagaggccuu

SEQ ID NO: 18884 - RNA, 21 nt, Artificial Sequence
  RPE65 RNA guide
uuuuuuaggucaacaugcagg

SEQ ID NO: 18885 - RNA, 21 nt, Artificial Sequence
  RPE65 RNA guide
uuuuuuguuuuucagaggccu

SEQ ID NO: 18886 - RNA, 22 nt, Artificial Sequence
  RPE65 RNA guide
aaaaaagaacuuaggagccaag

SEQ ID NO: 18887 - RNA, 22 nt, Artificial Sequence
  RPE65 RNA guide
aaaaagaacuuaggagccaaga

SEQ ID NO: 18888 - RNA, 22 nt, Artificial Sequence
  RPE65 RNA guide
aaaacauauucuacgugugaac

SEQ ID NO: 18889 - RNA, 22 nt, Artificial Sequence
  RPE65 RNA guide
aaaagaacuuaggagccaagac

SEQ ID NO: 18890 - RNA, 22 nt, Artificial Sequence
  RPE65 RNA guide
aaaaugagaccauccuugaaga

SEQ ID NO: 18891 - RNA, 22 nt, Artificial Sequence
  RPE65 RNA guide
aaaauugauggccuaagagguu

SEQ ID NO: 18892 - RNA, 22 nt, Artificial Sequence
  RPE65 RNA guide
aaaauuuagggcuccaaagaaa

SEQ ID NO: 18893 - RNA, 22 nt, Artificial Sequence
  RPE65 RNA guide
aaacagccagaaaugcagaguu

SEQ ID NO: 18894 - RNA, 22 nt, Artificial Sequence
  RPE65 RNA guide
aaacauauucuacgugugaacg

SEQ ID NO: 18895 - RNA, 22 nt, Artificial Sequence
  RPE65 RNA guide
aaaccucagugagcaggaaaga

SEQ ID NO: 18896 - RNA, 22 nt, Artificial Sequence
  RPE65 RNA guide
aaagaaaggccucugaaaaaca

SEQ ID NO: 18897 - RNA, 22 nt, Artificial Sequence
  RPE65 RNA guide
aaagaacuuaggagccaagacu

SEQ ID NO: 18898 - RNA, 22 nt, Artificial Sequence
  RPE65 RNA guide
aaagaauguauauuucguucac

SEQ ID NO: 18899 - RNA, 22 nt, Artificial Sequence
  RPE65 RNA guide
aaagaauucaaacagccagaaa

SEQ ID NO: 18900 - RNA, 22 nt, Artificial Sequence
  RPE65 RNA guide
aaagacuucgacugccugaggg

SEQ ID NO: 18901 - RNA, 22 nt, Artificial Sequence
  RPE65 RNA guide
aaagucacauaaccucuuaggc

SEQ ID NO: 18902 - RNA, 22 nt, Artificial Sequence
  RPE65 RNA guide
aaauauacauucuuucaucccu

SEQ ID NO: 18903 - RNA, 22 nt, Artificial Sequence
  RPE65 RNA guide
aaaugagaccauccuugaagaa

SEQ ID NO: 18904 - RNA, 22 nt, Artificial Sequence
  RPE65 RNA guide
aaaugcagaguucuuaagucuu

SEQ ID NO: 18905 - RNA, 22 nt, Artificial Sequence
  RPE65 RNA guide
aaauugauggccuaagagguua

SEQ ID NO: 18906 - RNA, 22 nt, Artificial Sequence
  RPE65 RNA guide
aaauuuagggcuccaaagaaag

SEQ ID NO: 18907 - RNA, 22 nt, Artificial Sequence
  RPE65 RNA guide
aaauuuucuucaaggauggucu

SEQ ID NO: 18908 - RNA, 22 nt, Artificial Sequence
  RPE65 RNA guide
aacaaagacuucgacugccuga

SEQ ID NO: 18909 - RNA, 22 nt, Artificial Sequence
  RPE65 RNA guide
aacaacaaagacuucgacugcc

SEQ ID NO: 18910 - RNA, 22 nt, Artificial Sequence
  RPE65 RNA guide
aacagaaaccucagugagcagg

SEQ ID NO: 18911 - RNA, 22 nt, Artificial Sequence
  RPE65 RNA guide
aacagccagaaaugcagaguuc

SEQ ID NO: 18912 - RNA, 22 nt, Artificial Sequence
  RPE65 RNA guide
aacauauucuacgugugaacga

SEQ ID NO: 18913 - RNA, 22 nt, Artificial Sequence
  RPE65 RNA guide
aacaugcagggaggaacugcag

SEQ ID NO: 18914 - RNA, 22 nt, Artificial Sequence
  RPE65 RNA guide
aaccucagugagcaggaaagaa

SEQ ID NO: 18915 - RNA, 22 nt, Artificial Sequence
  RPE65 RNA guide
aaccucuuaggccaucaauuuu

SEQ ID NO: 18916 - RNA, 22 nt, Artificial Sequence
  RPE65 RNA guide
aacgaaauauacauucuuucau

SEQ ID NO: 18917 - RNA, 22 nt, Artificial Sequence
  RPE65 RNA guide
aacucugcauuucuggcuguuu

SEQ ID NO: 18918 - RNA, 22 nt, Artificial Sequence
  RPE65 RNA guide
aacugcaggaagcuauagauga

SEQ ID NO: 18919 - RNA, 22 nt, Artificial Sequence
  RPE65 RNA guide
aacuuaggagccaagacuuaag

SEQ ID NO: 18920 - RNA, 22 nt, Artificial Sequence
  RPE65 RNA guide
aagaaaauuuagggcuccaaag

SEQ ID NO: 18921 - RNA, 22 nt, Artificial Sequence
  RPE65 RNA guide
aagaaaggccucugaaaaacaa

SEQ ID NO: 18922 - RNA, 22 nt, Artificial Sequence
  RPE65 RNA guide
aagaacucugcauuucuggcug

SEQ ID NO: 18923 - RNA, 22 nt, Artificial Sequence
  RPE65 RNA guide
aagaacuuaggagccaagacuu

SEQ ID NO: 18924 - RNA, 22 nt, Artificial Sequence
  RPE65 RNA guide
aagaauguauauuucguucaca

SEQ ID NO: 18925 - RNA, 22 nt, Artificial Sequence
  RPE65 RNA guide
aagaauucaaacagccagaaau

SEQ ID NO: 18926 - RNA, 22 nt, Artificial Sequence
  RPE65 RNA guide
aagacuuaagaacucugcauuu

SEQ ID NO: 18927 - RNA, 22 nt, Artificial Sequence
  RPE65 RNA guide
aagacuucgacugccugaggga

SEQ ID NO: 18928 - RNA, 22 nt, Artificial Sequence
  RPE65 RNA guide
aagagaaaauugauggccuaag

SEQ ID NO: 18929 - RNA, 22 nt, Artificial Sequence
  RPE65 RNA guide
aagagguuaugugacuuuccca

SEQ ID NO: 18930 - RNA, 22 nt, Artificial Sequence
  RPE65 RNA guide
aagauaacagaaaccucaguga

SEQ ID NO: 18931 - RNA, 22 nt, Artificial Sequence
  RPE65 RNA guide
aagcuauagaugagggacccug

SEQ ID NO: 18932 - RNA, 22 nt, Artificial Sequence
  RPE65 RNA guide
aagcuaucugugccugugucag

SEQ ID NO: 18933 - RNA, 22 nt, Artificial Sequence
  RPE65 RNA guide
aaggauggucucauuuuacuga

SEQ ID NO: 18934 - RNA, 22 nt, Artificial Sequence
  RPE65 RNA guide
aagucacauaaccucuuaggcc

SEQ ID NO: 18935 - RNA, 22 nt, Artificial Sequence
  RPE65 RNA guide
aagucuuggcuccuaaguucuu

SEQ ID NO: 18936 - RNA, 22 nt, Artificial Sequence
  RPE65 RNA guide
aagucuuuguuguucugcagaa

SEQ ID NO: 18937 - RNA, 22 nt, Artificial Sequence
  RPE65 RNA guide
aaguucuuuuuuaggucaacau

SEQ ID NO: 18938 - RNA, 22 nt, Artificial Sequence
  RPE65 RNA guide
aauauacauucuuucaucccuc

SEQ ID NO: 18939 - RNA, 22 nt, Artificial Sequence
  RPE65 RNA guide
aaucaaaacauauucuacgugu

SEQ ID NO: 18940 - RNA, 22 nt, Artificial Sequence
  RPE65 RNA guide
aaugagaccauccuugaagaaa

SEQ ID NO: 18941 - RNA, 22 nt, Artificial Sequence
  RPE65 RNA guide
aaugcagaguucuuaagucuug

SEQ ID NO: 18942 - RNA, 22 nt, Artificial Sequence
  RPE65 RNA guide
aauguauauuucguucacacgu

SEQ ID NO: 18943 - RNA, 22 nt, Artificial Sequence
  RPE65 RNA guide
aauguuuuucugcagaacaaca

SEQ ID NO: 18944 - RNA, 22 nt, Artificial Sequence
  RPE65 RNA guide
aauucaaacagccagaaaugca

SEQ ID NO: 18945 - RNA, 22 nt, Artificial Sequence
  RPE65 RNA guide
aauucuuuccugcucacugagg

SEQ ID NO: 18946 - RNA, 22 nt, Artificial Sequence
  RPE65 RNA guide
aauugauggccuaagagguuau

SEQ ID NO: 18947 - RNA, 22 nt, Artificial Sequence
  RPE65 RNA guide
aauuuagggcuccaaagaaagg

SEQ ID NO: 18948 - RNA, 22 nt, Artificial Sequence
  RPE65 RNA guide
aauuuucucuucaguaaaauga

SEQ ID NO: 18949 - RNA, 22 nt, Artificial Sequence
  RPE65 RNA guide
aauuuucuucaaggauggucuc

SEQ ID NO: 18950 - RNA, 22 nt, Artificial Sequence
  RPE65 RNA guide
acaaagacuucgacugccugag

SEQ ID NO: 18951 - RNA, 22 nt, Artificial Sequence
  RPE65 RNA guide
acaacaaagacuucgacugccu

SEQ ID NO: 18952 - RNA, 22 nt, Artificial Sequence
  RPE65 RNA guide
acacaggcacagauagcuugcc

SEQ ID NO: 18953 - RNA, 22 nt, Artificial Sequence
  RPE65 RNA guide
acacguagaauauguuuugauu

SEQ ID NO: 18954 - RNA, 22 nt, Artificial Sequence
  RPE65 RNA guide
acagaaaccucagugagcagga

SEQ ID NO: 18955 - RNA, 22 nt, Artificial Sequence
  RPE65 RNA guide
acagauagcuugcccagucgcg

SEQ ID NO: 18956 - RNA, 22 nt, Artificial Sequence
  RPE65 RNA guide
acagccagaaaugcagaguucu

SEQ ID NO: 18957 - RNA, 22 nt, Artificial Sequence
  RPE65 RNA guide
acaggcacagauagcuugccca

SEQ ID NO: 18958 - RNA, 22 nt, Artificial Sequence
  RPE65 RNA guide
acauaaccucuuaggccaucaa

SEQ ID NO: 18959 - RNA, 22 nt, Artificial Sequence
  RPE65 RNA guide
acauagccagugacugacacag

SEQ ID NO: 18960 - RNA, 22 nt, Artificial Sequence
  RPE65 RNA guide
acauauucuacgugugaacgaa

SEQ ID NO: 18961 - RNA, 22 nt, Artificial Sequence
  RPE65 RNA guide
acaugcagggaggaacugcagg

SEQ ID NO: 18962 - RNA, 22 nt, Artificial Sequence
  RPE65 RNA guide
acauucuuucaucccucaggca

SEQ ID NO: 18963 - RNA, 22 nt, Artificial Sequence
  RPE65 RNA guide
accauccuugaagaaaauuuag

SEQ ID NO: 18964 - RNA, 22 nt, Artificial Sequence
  RPE65 RNA guide
acccugggacgcgacugggcaa

SEQ ID NO: 18965 - RNA, 22 nt, Artificial Sequence
  RPE65 RNA guide
accuaaaaaagaacuuaggagc

SEQ ID NO: 18966 - RNA, 22 nt, Artificial Sequence
  RPE65 RNA guide
accucagugagcaggaaagaau

SEQ ID NO: 18967 - RNA, 22 nt, Artificial Sequence
  RPE65 RNA guide
accucuuaggccaucaauuuuc

SEQ ID NO: 18968 - RNA, 22 nt, Artificial Sequence
  RPE65 RNA guide
acgaaauauacauucuuucauc

SEQ ID NO: 18969 - RNA, 22 nt, Artificial Sequence
  RPE65 RNA guide
acgcgacugggcaagcuaucug

SEQ ID NO: 18970 - RNA, 22 nt, Artificial Sequence
  RPE65 RNA guide
acgugugaacgaaauauacauu

SEQ ID NO: 18971 - RNA, 22 nt, Artificial Sequence
  RPE65 RNA guide
acucugcauuucuggcuguuug

SEQ ID NO: 18972 - RNA, 22 nt, Artificial Sequence
  RPE65 RNA guide
acugaagagaaaauugauggcc

SEQ ID NO: 18973 - RNA, 22 nt, Artificial Sequence
  RPE65 RNA guide
acugacacaggcacagauagcu

SEQ ID NO: 18974 - RNA, 22 nt, Artificial Sequence
  RPE65 RNA guide
acugagguuucuguuaucuucu

SEQ ID NO: 18975 - RNA, 22 nt, Artificial Sequence
  RPE65 RNA guide
acugcaggaagcuauagaugag

SEQ ID NO: 18976 - RNA, 22 nt, Artificial Sequence
  RPE65 RNA guide
acugccugagggaugaaagaau

SEQ ID NO: 18977 - RNA, 22 nt, Artificial Sequence
  RPE65 RNA guide
acuggcuauguaucacugggaa

SEQ ID NO: 18978 - RNA, 22 nt, Artificial Sequence
  RPE65 RNA guide
acugggaaagucacauaaccuc

SEQ ID NO: 18979 - RNA, 22 nt, Artificial Sequence
  RPE65 RNA guide
acugggcaagcuaucugugccu

SEQ ID NO: 18980 - RNA, 22 nt, Artificial Sequence
  RPE65 RNA guide
acuuaagaacucugcauuucug

SEQ ID NO: 18981 - RNA, 22 nt, Artificial Sequence
  RPE65 RNA guide
acuuaggagccaagacuuaaga

SEQ ID NO: 18982 - RNA, 22 nt, Artificial Sequence
  RPE65 RNA guide
acuucgacugccugagggauga

SEQ ID NO: 18983 - RNA, 22 nt, Artificial Sequence
  RPE65 RNA guide
acuuucccagugauacauagcc

SEQ ID NO: 18984 - RNA, 22 nt, Artificial Sequence
  RPE65 RNA guide
agaaaauugauggccuaagagg

SEQ ID NO: 18985 - RNA, 22 nt, Artificial Sequence
  RPE65 RNA guide
agaaaauuuagggcuccaaaga

SEQ ID NO: 18986 - RNA, 22 nt, Artificial Sequence
  RPE65 RNA guide
agaaaccucagugagcaggaaa

SEQ ID NO: 18987 - RNA, 22 nt, Artificial Sequence
  RPE65 RNA guide
agaaaugcagaguucuuaaguc

SEQ ID NO: 18988 - RNA, 22 nt, Artificial Sequence
  RPE65 RNA guide
agaacaacaaagacuucgacug

SEQ ID NO: 18989 - RNA, 22 nt, Artificial Sequence
  RPE65 RNA guide
agaacucugcauuucuggcugu

SEQ ID NO: 18990 - RNA, 22 nt, Artificial Sequence
  RPE65 RNA guide
agaacuuaggagccaagacuua

SEQ ID NO: 18991 - RNA, 22 nt, Artificial Sequence
  RPE65 RNA guide
agaagauaacagaaaccucagu

SEQ ID NO: 18992 - RNA, 22 nt, Artificial Sequence
  RPE65 RNA guide
agaauguauauuucguucacac

SEQ ID NO: 18993 - RNA, 22 nt, Artificial Sequence
  RPE65 RNA guide
agaauucaaacagccagaaaug

SEQ ID NO: 18994 - RNA, 22 nt, Artificial Sequence
  RPE65 RNA guide
agaccauccuugaagaaaauuu

SEQ ID NO: 18995 - RNA, 22 nt, Artificial Sequence
  RPE65 RNA guide
agacuuaagaacucugcauuuc

SEQ ID NO: 18996 - RNA, 22 nt, Artificial Sequence
  RPE65 RNA guide
agacuucgacugccugagggau

SEQ ID NO: 18997 - RNA, 22 nt, Artificial Sequence
  RPE65 RNA guide
agagaaaauugauggccuaaga

SEQ ID NO: 18998 - RNA, 22 nt, Artificial Sequence
  RPE65 RNA guide
agagaagauaacagaaaccuca

SEQ ID NO: 18999 - RNA, 22 nt, Artificial Sequence
  RPE65 RNA guide
agaggccuuucuuuggagcccu

SEQ ID NO: 19000 - RNA, 22 nt, Artificial Sequence
  RPE65 RNA guide
agagguuaugugacuuucccag

SEQ ID NO: 19001 - RNA, 22 nt, Artificial Sequence
  RPE65 RNA guide
agaguucuuaagucuuggcucc

SEQ ID NO: 19002 - RNA, 22 nt, Artificial Sequence
  RPE65 RNA guide
agauaacagaaaccucagugag

SEQ ID NO: 19003 - RNA, 22 nt, Artificial Sequence
  RPE65 RNA guide
agauagcuugcccagucgcguc

SEQ ID NO: 19004 - RNA, 22 nt, Artificial Sequence
  RPE65 RNA guide
agaugagggacccugggacgcg

SEQ ID NO: 19005 - RNA, 22 nt, Artificial Sequence
  RPE65 RNA guide
agcaaaaucaaaacauauucua

SEQ ID NO: 19006 - RNA, 22 nt, Artificial Sequence
  RPE65 RNA guide
agcaggaaagaauucaaacagc

SEQ ID NO: 19007 - RNA, 22 nt, Artificial Sequence
  RPE65 RNA guide
agccaagacuuaagaacucugc

SEQ ID NO: 19008 - RNA, 22 nt, Artificial Sequence
  RPE65 RNA guide
agccagaaaugcagaguucuua

SEQ ID NO: 19009 - RNA, 22 nt, Artificial Sequence
  RPE65 RNA guide
agccagugacugacacaggcac

SEQ ID NO: 19010 - RNA, 22 nt, Artificial Sequence
  RPE65 RNA guide
agcccuaaauuuucuucaagga

SEQ ID NO: 19011 - RNA, 22 nt, Artificial Sequence
  RPE65 RNA guide
agcuauagaugagggacccugg

SEQ ID NO: 19012 - RNA, 22 nt, Artificial Sequence
  RPE65 RNA guide
agcuaucugugccugugucagu

SEQ ID NO: 19013 - RNA, 22 nt, Artificial Sequence
  RPE65 RNA guide
agcuuccugcaguuccucccug

SEQ ID NO: 19014 - RNA, 22 nt, Artificial Sequence
  RPE65 RNA guide
agcuugcccagucgcgucccag

SEQ ID NO: 19015 - RNA, 22 nt, Artificial Sequence
  RPE65 RNA guide
aggaaagaauucaaacagccag

SEQ ID NO: 19016 - RNA, 22 nt, Artificial Sequence
  RPE65 RNA guide
aggaacugcaggaagcuauaga

SEQ ID NO: 19017 - RNA, 22 nt, Artificial Sequence
  RPE65 RNA guide
aggaagcuauagaugagggacc

SEQ ID NO: 19018 - RNA, 22 nt, Artificial Sequence
  RPE65 RNA guide
aggagagaagauaacagaaacc

SEQ ID NO: 19019 - RNA, 22 nt, Artificial Sequence
  RPE65 RNA guide
aggagccaagacuuaagaacuc

SEQ ID NO: 19020 - RNA, 22 nt, Artificial Sequence
  RPE65 RNA guide
aggauggucucauuuuacugaa

SEQ ID NO: 19021 - RNA, 22 nt, Artificial Sequence
  RPE65 RNA guide
aggcacagauagcuugcccagu

SEQ ID NO: 19022 - RNA, 22 nt, Artificial Sequence
  RPE65 RNA guide
aggcagucgaagucuuuguugu

SEQ ID NO: 19023 - RNA, 22 nt, Artificial Sequence
  RPE65 RNA guide
aggccaucaauuuucucuucag

SEQ ID NO: 19024 - RNA, 22 nt, Artificial Sequence
  RPE65 RNA guide
aggccuuucuuuggagcccuaa

SEQ ID NO: 19025 - RNA, 22 nt, Artificial Sequence
  RPE65 RNA guide
agggacccugggacgcgacugg

SEQ ID NO: 19026 - RNA, 22 nt, Artificial Sequence
  RPE65 RNA guide
agggaggaacugcaggaagcua

SEQ ID NO: 19027 - RNA, 22 nt, Artificial Sequence
  RPE65 RNA guide
agggaugaaagaauguauauuu

SEQ ID NO: 19028 - RNA, 22 nt, Artificial Sequence
  RPE65 RNA guide
agggcuccaaagaaaggccucu

SEQ ID NO: 19029 - RNA, 22 nt, Artificial Sequence
  RPE65 RNA guide
agggucccucaucuauagcuuc

SEQ ID NO: 19030 - RNA, 22 nt, Artificial Sequence
  RPE65 RNA guide
aggucaacaugcagggaggaac

SEQ ID NO: 19031 - RNA, 22 nt, Artificial Sequence
  RPE65 RNA guide
agguuaugugacuuucccagug

SEQ ID NO: 19032 - RNA, 22 nt, Artificial Sequence
  RPE65 RNA guide
aguaaaaugagaccauccuuga

SEQ ID NO: 19033 - RNA, 22 nt, Artificial Sequence
  RPE65 RNA guide
agucacauaaccucuuaggcca

SEQ ID NO: 19034 - RNA, 22 nt, Artificial Sequence
  RPE65 RNA guide
agucacuggcuauguaucacug

SEQ ID NO: 19035 - RNA, 22 nt, Artificial Sequence
  RPE65 RNA guide
agucgaagucuuuguuguucug

SEQ ID NO: 19036 - RNA, 22 nt, Artificial Sequence
  RPE65 RNA guide
agucgcgucccagggucccuca

SEQ ID NO: 19037 - RNA, 22 nt, Artificial Sequence
  RPE65 RNA guide
agucuuggcuccuaaguucuuu

SEQ ID NO: 19038 - RNA, 22 nt, Artificial Sequence
  RPE65 RNA guide
agucuuuguuguucugcagaaa

SEQ ID NO: 19039 - RNA, 22 nt, Artificial Sequence
  RPE65 RNA guide
agugacugacacaggcacagau

SEQ ID NO: 19040 - RNA, 22 nt, Artificial Sequence
  RPE65 RNA guide
agugagcaggaaagaauucaaa

SEQ ID NO: 19041 - RNA, 22 nt, Artificial Sequence
  RPE65 RNA guide
agugauacauagccagugacug

SEQ ID NO: 19042 - RNA, 22 nt, Artificial Sequence
  RPE65 RNA guide
aguuccucccugcauguugacc

SEQ ID NO: 19043 - RNA, 22 nt, Artificial Sequence
  RPE65 RNA guide
aguucuuaagucuuggcuccua

SEQ ID NO: 19044 - RNA, 22 nt, Artificial Sequence
  RPE65 RNA guide
aguucuuuuuuaggucaacaug

SEQ ID NO: 19045 - RNA, 22 nt, Artificial Sequence
  RPE65 RNA guide
auaacagaaaccucagugagca

SEQ ID NO: 19046 - RNA, 22 nt, Artificial Sequence
  RPE65 RNA guide
auaaccucuuaggccaucaauu

SEQ ID NO: 19047 - RNA, 22 nt, Artificial Sequence
  RPE65 RNA guide
auacauagccagugacugacac

SEQ ID NO: 19048 - RNA, 22 nt, Artificial Sequence
  RPE65 RNA guide
auacauucuuucaucccucagg

SEQ ID NO: 19049 - RNA, 22 nt, Artificial Sequence
  RPE65 RNA guide
auagaugagggacccugggacg

SEQ ID NO: 19050 - RNA, 22 nt, Artificial Sequence
  RPE65 RNA guide
auagccagugacugacacaggc

SEQ ID NO: 19051 - RNA, 22 nt, Artificial Sequence
  RPE65 RNA guide
auagcuuccugcaguuccuccc

SEQ ID NO: 19052 - RNA, 22 nt, Artificial Sequence
  RPE65 RNA guide
auagcuugcccagucgcguccc

SEQ ID NO: 19053 - RNA, 22 nt, Artificial Sequence
  RPE65 RNA guide
auauacauucuuucaucccuca

SEQ ID NO: 19054 - RNA, 22 nt, Artificial Sequence
  RPE65 RNA guide
auauucuacgugugaacgaaau

SEQ ID NO: 19055 - RNA, 22 nt, Artificial Sequence
  RPE65 RNA guide
auauuucguucacacguagaau

SEQ ID NO: 19056 - RNA, 22 nt, Artificial Sequence
  RPE65 RNA guide
aucaaaacauauucuacgugug

SEQ ID NO: 19057 - RNA, 22 nt, Artificial Sequence
  RPE65 RNA guide
aucacugggaaagucacauaac

SEQ ID NO: 19058 - RNA, 22 nt, Artificial Sequence
  RPE65 RNA guide
aucccucaggcagucgaagucu

SEQ ID NO: 19059 - RNA, 22 nt, Artificial Sequence
  RPE65 RNA guide
auccuuacaguuauguugacaa

SEQ ID NO: 19060 - RNA, 22 nt, Artificial Sequence
  RPE65 RNA guide
auccuugaagaaaauuuagggc

SEQ ID NO: 19061 - RNA, 22 nt, Artificial Sequence
  RPE65 RNA guide
aucuauagcuuccugcaguucc

SEQ ID NO: 19062 - RNA, 22 nt, Artificial Sequence
  RPE65 RNA guide
aucugugccugugucagucacu

SEQ ID NO: 19063 - RNA, 22 nt, Artificial Sequence
  RPE65 RNA guide
augagaccauccuugaagaaaa

SEQ ID NO: 19064 - RNA, 22 nt, Artificial Sequence
  RPE65 RNA guide
augagggacccugggacgcgac

SEQ ID NO: 19065 - RNA, 22 nt, Artificial Sequence
  RPE65 RNA guide
augcagaguucuuaagucuugg

SEQ ID NO: 19066 - RNA, 22 nt, Artificial Sequence
  RPE65 RNA guide
augcagggaggaacugcaggaa

SEQ ID NO: 19067 - RNA, 22 nt, Artificial Sequence
  RPE65 RNA guide
auggccuaagagguuaugugac

SEQ ID NO: 19068 - RNA, 22 nt, Artificial Sequence
  RPE65 RNA guide
auggucucauuuuacugaagag

SEQ ID NO: 19069 - RNA, 22 nt, Artificial Sequence
  RPE65 RNA guide
auguauauuucguucacacgua

SEQ ID NO: 19070 - RNA, 22 nt, Artificial Sequence
  RPE65 RNA guide
auguaucacugggaaagucaca

SEQ ID NO: 19071 - RNA, 22 nt, Artificial Sequence
  RPE65 RNA guide
augugacuuucccagugauaca

SEQ ID NO: 19072 - RNA, 22 nt, Artificial Sequence
  RPE65 RNA guide
auguugaccuaaaaaagaacuu

SEQ ID NO: 19073 - RNA, 22 nt, Artificial Sequence
  RPE65 RNA guide
auguuuuucugcagaacaacaa

SEQ ID NO: 19074 - RNA, 22 nt, Artificial Sequence
  RPE65 RNA guide
auucaaacagccagaaaugcag

SEQ ID NO: 19075 - RNA, 22 nt, Artificial Sequence
  RPE65 RNA guide
auucuacgugugaacgaaauau

SEQ ID NO: 19076 - RNA, 22 nt, Artificial Sequence
  RPE65 RNA guide
auucuuucaucccucaggcagu

SEQ ID NO: 19077 - RNA, 22 nt, Artificial Sequence
  RPE65 RNA guide
auucuuuccugcucacugaggu

SEQ ID NO: 19078 - RNA, 22 nt, Artificial Sequence
  RPE65 RNA guide
auugauggccuaagagguuaug

SEQ ID NO: 19079 - RNA, 22 nt, Artificial Sequence
  RPE65 RNA guide
auuuagggcuccaaagaaaggc

SEQ ID NO: 19080 - RNA, 22 nt, Artificial Sequence
  RPE65 RNA guide
auuucguucacacguagaauau

SEQ ID NO: 19081 - RNA, 22 nt, Artificial Sequence
  RPE65 RNA guide
auuucuggcuguuugaauucuu

SEQ ID NO: 19082 - RNA, 22 nt, Artificial Sequence
  RPE65 RNA guide
auuuuacugaagagaaaauuga

SEQ ID NO: 19083 - RNA, 22 nt, Artificial Sequence
  RPE65 RNA guide
auuuucucuucaguaaaaugag

SEQ ID NO: 19084 - RNA, 22 nt, Artificial Sequence
  RPE65 RNA guide
auuuucuucaaggauggucuca

SEQ ID NO: 19085 - RNA, 22 nt, Artificial Sequence
  RPE65 RNA guide
caaaacauauucuacgugugaa

SEQ ID NO: 19086 - RNA, 22 nt, Artificial Sequence
  RPE65 RNA guide
caaaaucaaaacauauucuacg

SEQ ID NO: 19087 - RNA, 22 nt, Artificial Sequence
  RPE65 RNA guide
caaacagccagaaaugcagagu

SEQ ID NO: 19088 - RNA, 22 nt, Artificial Sequence
  RPE65 RNA guide
caaagaaaggccucugaaaaac

SEQ ID NO: 19089 - RNA, 22 nt, Artificial Sequence
  RPE65 RNA guide
caaagacuucgacugccugagg

SEQ ID NO: 19090 - RNA, 22 nt, Artificial Sequence
  RPE65 RNA guide
caacaaagacuucgacugccug

SEQ ID NO: 19091 - RNA, 22 nt, Artificial Sequence
  RPE65 RNA guide
caacaugcagggaggaacugca

SEQ ID NO: 19092 - RNA, 22 nt, Artificial Sequence
  RPE65 RNA guide
caagacuuaagaacucugcauu

SEQ ID NO: 19093 - RNA, 22 nt, Artificial Sequence
  RPE65 RNA guide
caagcaaaaucaaaacauauuc

SEQ ID NO: 19094 - RNA, 22 nt, Artificial Sequence
  RPE65 RNA guide
caagcuaucugugccuguguca

SEQ ID NO: 19095 - RNA, 22 nt, Artificial Sequence
  RPE65 RNA guide
caaggauggucucauuuuacug

SEQ ID NO: 19096 - RNA, 22 nt, Artificial Sequence
  RPE65 RNA guide
caauuuucucuucaguaaaaug

SEQ ID NO: 19097 - RNA, 22 nt, Artificial Sequence
  RPE65 RNA guide
cacacguagaauauguuuugau

SEQ ID NO: 19098 - RNA, 22 nt, Artificial Sequence
  RPE65 RNA guide
cacagauagcuugcccagucgc

SEQ ID NO: 19099 - RNA, 22 nt, Artificial Sequence
  RPE65 RNA guide
cacaggcacagauagcuugccc

SEQ ID NO: 19100 - RNA, 22 nt, Artificial Sequence
  RPE65 RNA guide
cacauaaccucuuaggccauca

SEQ ID NO: 19101 - RNA, 22 nt, Artificial Sequence
  RPE65 RNA guide
cacguagaauauguuuugauuu

SEQ ID NO: 19102 - RNA, 22 nt, Artificial Sequence
  RPE65 RNA guide
cacugagguuucuguuaucuuc

SEQ ID NO: 19103 - RNA, 22 nt, Artificial Sequence
  RPE65 RNA guide
cacuggcuauguaucacuggga

SEQ ID NO: 19104 - RNA, 22 nt, Artificial Sequence
  RPE65 RNA guide
cacugggaaagucacauaaccu

SEQ ID NO: 19105 - RNA, 22 nt, Artificial Sequence
  RPE65 RNA guide
cagaaaccucagugagcaggaa

SEQ ID NO: 19106 - RNA, 22 nt, Artificial Sequence
  RPE65 RNA guide
cagaaaugcagaguucuuaagu

SEQ ID NO: 19107 - RNA, 22 nt, Artificial Sequence
  RPE65 RNA guide
cagaacaacaaagacuucgacu

SEQ ID NO: 19108 - RNA, 22 nt, Artificial Sequence
  RPE65 RNA guide
cagaggccuuucuuuggagccc

SEQ ID NO: 19109 - RNA, 22 nt, Artificial Sequence
  RPE65 RNA guide
cagaguucuuaagucuuggcuc

SEQ ID NO: 19110 - RNA, 22 nt, Artificial Sequence
  RPE65 RNA guide
cagauagcuugcccagucgcgu

SEQ ID NO: 19111 - RNA, 22 nt, Artificial Sequence
  RPE65 RNA guide
cagccagaaaugcagaguucuu

SEQ ID NO: 19112 - RNA, 22 nt, Artificial Sequence
  RPE65 RNA guide
caggaaagaauucaaacagcca

SEQ ID NO: 19113 - RNA, 22 nt, Artificial Sequence
  RPE65 RNA guide
caggaagcuauagaugagggac

SEQ ID NO: 19114 - RNA, 22 nt, Artificial Sequence
  RPE65 RNA guide
caggcacagauagcuugcccag

SEQ ID NO: 19115 - RNA, 22 nt, Artificial Sequence
  RPE65 RNA guide
caggcagucgaagucuuuguug

SEQ ID NO: 19116 - RNA, 22 nt, Artificial Sequence
  RPE65 RNA guide
cagggaggaacugcaggaagcu

SEQ ID NO: 19117 - RNA, 22 nt, Artificial Sequence
  RPE65 RNA guide
cagggucccucaucuauagcuu

SEQ ID NO: 19118 - RNA, 22 nt, Artificial Sequence
  RPE65 RNA guide
caguaaaaugagaccauccuug

SEQ ID NO: 19119 - RNA, 22 nt, Artificial Sequence
  RPE65 RNA guide
cagucacuggcuauguaucacu

SEQ ID NO: 19120 - RNA, 22 nt, Artificial Sequence
  RPE65 RNA guide
cagucgaagucuuuguuguucu

SEQ ID NO: 19121 - RNA, 22 nt, Artificial Sequence
  RPE65 RNA guide
cagucgcgucccagggucccuc

SEQ ID NO: 19122 - RNA, 22 nt, Artificial Sequence
  RPE65 RNA guide
cagugacugacacaggcacaga

SEQ ID NO: 19123 - RNA, 22 nt, Artificial Sequence
  RPE65 RNA guide
cagugagcaggaaagaauucaa

SEQ ID NO: 19124 - RNA, 22 nt, Artificial Sequence
  RPE65 RNA guide
cagugauacauagccagugacu

SEQ ID NO: 19125 - RNA, 22 nt, Artificial Sequence
  RPE65 RNA guide
caguuccucccugcauguugac

SEQ ID NO: 19126 - RNA, 22 nt, Artificial Sequence
  RPE65 RNA guide
cauaaccucuuaggccaucaau

SEQ ID NO: 19127 - RNA, 22 nt, Artificial Sequence
  RPE65 RNA guide
cauagccagugacugacacagg

SEQ ID NO: 19128 - RNA, 22 nt, Artificial Sequence
  RPE65 RNA guide
cauauucuacgugugaacgaaa

SEQ ID NO: 19129 - RNA, 22 nt, Artificial Sequence
  RPE65 RNA guide
caucccucaggcagucgaaguc

SEQ ID NO: 19130 - RNA, 22 nt, Artificial Sequence
  RPE65 RNA guide
cauccuugaagaaaauuuaggg

SEQ ID NO: 19131 - RNA, 22 nt, Artificial Sequence
  RPE65 RNA guide
caucuauagcuuccugcaguuc

SEQ ID NO: 19132 - RNA, 22 nt, Artificial Sequence
  RPE65 RNA guide
caugcagggaggaacugcagga

SEQ ID NO: 19133 - RNA, 22 nt, Artificial Sequence
  RPE65 RNA guide
cauguugaccuaaaaaagaacu

SEQ ID NO: 19134 - RNA, 22 nt, Artificial Sequence
  RPE65 RNA guide
cauucuuucaucccucaggcag

SEQ ID NO: 19135 - RNA, 22 nt, Artificial Sequence
  RPE65 RNA guide
cauuucuggcuguuugaauucu

SEQ ID NO: 19136 - RNA, 22 nt, Artificial Sequence
  RPE65 RNA guide
cauuuuacugaagagaaaauug

SEQ ID NO: 19137 - RNA, 22 nt, Artificial Sequence
  RPE65 RNA guide
ccaaagaaaggccucugaaaaa

SEQ ID NO: 19138 - RNA, 22 nt, Artificial Sequence
  RPE65 RNA guide
ccaagacuuaagaacucugcau

SEQ ID NO: 19139 - RNA, 22 nt, Artificial Sequence
  RPE65 RNA guide
ccagaaaugcagaguucuuaag

SEQ ID NO: 19140 - RNA, 22 nt, Artificial Sequence
  RPE65 RNA guide
ccagggucccucaucuauagcu

SEQ ID NO: 19141 - RNA, 22 nt, Artificial Sequence
  RPE65 RNA guide
ccagucgcgucccagggucccu

SEQ ID NO: 19142 - RNA, 22 nt, Artificial Sequence
  RPE65 RNA guide
ccagugacugacacaggcacag

SEQ ID NO: 19143 - RNA, 22 nt, Artificial Sequence
  RPE65 RNA guide
ccagugauacauagccagugac

SEQ ID NO: 19144 - RNA, 22 nt, Artificial Sequence
  RPE65 RNA guide
ccaucaauuuucucuucaguaa

SEQ ID NO: 19145 - RNA, 22 nt, Artificial Sequence
  RPE65 RNA guide
ccauccuugaagaaaauuuagg

SEQ ID NO: 19146 - RNA, 22 nt, Artificial Sequence
  RPE65 RNA guide
cccagggucccucaucuauagc

SEQ ID NO: 19147 - RNA, 22 nt, Artificial Sequence
  RPE65 RNA guide
cccagucgcgucccaggguccc

SEQ ID NO: 19148 - RNA, 22 nt, Artificial Sequence
  RPE65 RNA guide
cccagugauacauagccaguga

SEQ ID NO: 19149 - RNA, 22 nt, Artificial Sequence
  RPE65 RNA guide
cccuaaauuuucuucaaggaug

SEQ ID NO: 19150 - RNA, 22 nt, Artificial Sequence
  RPE65 RNA guide
cccucaggcagucgaagucuuu

SEQ ID NO: 19151 - RNA, 22 nt, Artificial Sequence
  RPE65 RNA guide
cccucaucuauagcuuccugca

SEQ ID NO: 19152 - RNA, 22 nt, Artificial Sequence
  RPE65 RNA guide
cccugcauguugaccuaaaaaa

SEQ ID NO: 19153 - RNA, 22 nt, Artificial Sequence
  RPE65 RNA guide
cccugggacgcgacugggcaag

SEQ ID NO: 19154 - RNA, 22 nt, Artificial Sequence
  RPE65 RNA guide
ccuaaaaaagaacuuaggagcc

SEQ ID NO: 19155 - RNA, 22 nt, Artificial Sequence
  RPE65 RNA guide
ccuaaauuuucuucaaggaugg

SEQ ID NO: 19156 - RNA, 22 nt, Artificial Sequence
  RPE65 RNA guide
ccuaagagguuaugugacuuuc

SEQ ID NO: 19157 - RNA, 22 nt, Artificial Sequence
  RPE65 RNA guide
ccuaaguucuuuuuuaggucaa

SEQ ID NO: 19158 - RNA, 22 nt, Artificial Sequence
  RPE65 RNA guide
ccucaggcagucgaagucuuug

SEQ ID NO: 19159 - RNA, 22 nt, Artificial Sequence
  RPE65 RNA guide
ccucagugagcaggaaagaauu

SEQ ID NO: 19160 - RNA, 22 nt, Artificial Sequence
  RPE65 RNA guide
ccucaucuauagcuuccugcag

SEQ ID NO: 19161 - RNA, 22 nt, Artificial Sequence
  RPE65 RNA guide
ccucccugcauguugaccuaaa

SEQ ID NO: 19162 - RNA, 22 nt, Artificial Sequence
  RPE65 RNA guide
ccucuuaggccaucaauuuucu

SEQ ID NO: 19163 - RNA, 22 nt, Artificial Sequence
  RPE65 RNA guide
ccugagggaugaaagaauguau

SEQ ID NO: 19164 - RNA, 22 nt, Artificial Sequence
  RPE65 RNA guide
ccugcaguuccucccugcaugu

SEQ ID NO: 19165 - RNA, 22 nt, Artificial Sequence
  RPE65 RNA guide
ccugcauguugaccuaaaaaag

SEQ ID NO: 19166 - RNA, 22 nt, Artificial Sequence
  RPE65 RNA guide
ccugcucacugagguuucuguu

SEQ ID NO: 19167 - RNA, 22 nt, Artificial Sequence
  RPE65 RNA guide
ccugggacgcgacugggcaagc

SEQ ID NO: 19168 - RNA, 22 nt, Artificial Sequence
  RPE65 RNA guide
ccugugucagucacuggcuaug

SEQ ID NO: 19169 - RNA, 22 nt, Artificial Sequence
  RPE65 RNA guide
ccuuacaguuauguugacaaaa

SEQ ID NO: 19170 - RNA, 22 nt, Artificial Sequence
  RPE65 RNA guide
ccuugaagaaaauuuagggcuc

SEQ ID NO: 19171 - RNA, 22 nt, Artificial Sequence
  RPE65 RNA guide
ccuuucuuuggagcccuaaauu

SEQ ID NO: 19172 - RNA, 22 nt, Artificial Sequence
  RPE65 RNA guide
cgaaauauacauucuuucaucc

SEQ ID NO: 19173 - RNA, 22 nt, Artificial Sequence
  RPE65 RNA guide
cgaagucuuuguuguucugcag

SEQ ID NO: 19174 - RNA, 22 nt, Artificial Sequence
  RPE65 RNA guide
cgacugccugagggaugaaaga

SEQ ID NO: 19175 - RNA, 22 nt, Artificial Sequence
  RPE65 RNA guide
cgacugggcaagcuaucugugc

SEQ ID NO: 19176 - RNA, 22 nt, Artificial Sequence
  RPE65 RNA guide
cgcgacugggcaagcuaucugu

SEQ ID NO: 19177 - RNA, 22 nt, Artificial Sequence
  RPE65 RNA guide
cgcgucccagggucccucaucu

SEQ ID NO: 19178 - RNA, 22 nt, Artificial Sequence
  RPE65 RNA guide
cguagaauauguuuugauuuug

SEQ ID NO: 19179 - RNA, 22 nt, Artificial Sequence
  RPE65 RNA guide
cgucccagggucccucaucuau

SEQ ID NO: 19180 - RNA, 22 nt, Artificial Sequence
  RPE65 RNA guide
cgugugaacgaaauauacauuc

SEQ ID NO: 19181 - RNA, 22 nt, Artificial Sequence
  RPE65 RNA guide
cguucacacguagaauauguuu

SEQ ID NO: 19182 - RNA, 22 nt, Artificial Sequence
  RPE65 RNA guide
cuaaaaaagaacuuaggagcca

SEQ ID NO: 19183 - RNA, 22 nt, Artificial Sequence
  RPE65 RNA guide
cuaaauuuucuucaaggauggu

SEQ ID NO: 19184 - RNA, 22 nt, Artificial Sequence
  RPE65 RNA guide
cuaagagguuaugugacuuucc

SEQ ID NO: 19185 - RNA, 22 nt, Artificial Sequence
  RPE65 RNA guide
cuaaguucuuuuuuaggucaac

SEQ ID NO: 19186 - RNA, 22 nt, Artificial Sequence
  RPE65 RNA guide
cuacgugugaacgaaauauaca

SEQ ID NO: 19187 - RNA, 22 nt, Artificial Sequence
  RPE65 RNA guide
cuaggagagaagauaacagaaa

SEQ ID NO: 19188 - RNA, 22 nt, Artificial Sequence
  RPE65 RNA guide
cuauagaugagggacccuggga

SEQ ID NO: 19189 - RNA, 22 nt, Artificial Sequence
  RPE65 RNA guide
cuauagcuuccugcaguuccuc

SEQ ID NO: 19190 - RNA, 22 nt, Artificial Sequence
  RPE65 RNA guide
cuaucugugccugugucaguca

SEQ ID NO: 19191 - RNA, 22 nt, Artificial Sequence
  RPE65 RNA guide
cuauguaucacugggaaaguca

SEQ ID NO: 19192 - RNA, 22 nt, Artificial Sequence
  RPE65 RNA guide
cucacugagguuucuguuaucu

SEQ ID NO: 19193 - RNA, 22 nt, Artificial Sequence
  RPE65 RNA guide
cucaggcagucgaagucuuugu

SEQ ID NO: 19194 - RNA, 22 nt, Artificial Sequence
  RPE65 RNA guide
cucagugagcaggaaagaauuc

SEQ ID NO: 19195 - RNA, 22 nt, Artificial Sequence
  RPE65 RNA guide
cucaucuauagcuuccugcagu

SEQ ID NO: 19196 - RNA, 22 nt, Artificial Sequence
  RPE65 RNA guide
cuccaaagaaaggccucugaaa

SEQ ID NO: 19197 - RNA, 22 nt, Artificial Sequence
  RPE65 RNA guide
cucccugcauguugaccuaaaa

SEQ ID NO: 19198 - RNA, 22 nt, Artificial Sequence
  RPE65 RNA guide
cuccuaaguucuuuuuuagguc

SEQ ID NO: 19199 - RNA, 22 nt, Artificial Sequence
  RPE65 RNA guide
cucugcauuucuggcuguuuga

SEQ ID NO: 19200 - RNA, 22 nt, Artificial Sequence
  RPE65 RNA guide
cucuuaggccaucaauuuucuc

SEQ ID NO: 19201 - RNA, 22 nt, Artificial Sequence
  RPE65 RNA guide
cucuucaguaaaaugagaccau

SEQ ID NO: 19202 - RNA, 22 nt, Artificial Sequence
  RPE65 RNA guide
cugaagagaaaauugauggccu

SEQ ID NO: 19203 - RNA, 22 nt, Artificial Sequence
  RPE65 RNA guide
cugacacaggcacagauagcuu

SEQ ID NO: 19204 - RNA, 22 nt, Artificial Sequence
  RPE65 RNA guide
cugagggaugaaagaauguaua

SEQ ID NO: 19205 - RNA, 22 nt, Artificial Sequence
  RPE65 RNA guide
cugagguuucuguuaucuucuc

SEQ ID NO: 19206 - RNA, 22 nt, Artificial Sequence
  RPE65 RNA guide
cugcagaacaacaaagacuucg

SEQ ID NO: 19207 - RNA, 22 nt, Artificial Sequence
  RPE65 RNA guide
cugcaggaagcuauagaugagg

SEQ ID NO: 19208 - RNA, 22 nt, Artificial Sequence
  RPE65 RNA guide
cugcaguuccucccugcauguu

SEQ ID NO: 19209 - RNA, 22 nt, Artificial Sequence
  RPE65 RNA guide
cugcauguugaccuaaaaaaga

SEQ ID NO: 19210 - RNA, 22 nt, Artificial Sequence
  RPE65 RNA guide
cugcauuucuggcuguuugaau

SEQ ID NO: 19211 - RNA, 22 nt, Artificial Sequence
  RPE65 RNA guide
cugccugagggaugaaagaaug

SEQ ID NO: 19212 - RNA, 22 nt, Artificial Sequence
  RPE65 RNA guide
cugcucacugagguuucuguua

SEQ ID NO: 19213 - RNA, 22 nt, Artificial Sequence
  RPE65 RNA guide
cuggcuauguaucacugggaaa

SEQ ID NO: 19214 - RNA, 22 nt, Artificial Sequence
  RPE65 RNA guide
cuggcuguuugaauucuuuccu

SEQ ID NO: 19215 - RNA, 22 nt, Artificial Sequence
  RPE65 RNA guide
cugggaaagucacauaaccucu

SEQ ID NO: 19216 - RNA, 22 nt, Artificial Sequence
  RPE65 RNA guide
cugggacgcgacugggcaagcu

SEQ ID NO: 19217 - RNA, 22 nt, Artificial Sequence
  RPE65 RNA guide
cugggcaagcuaucugugccug

SEQ ID NO: 19218 - RNA, 22 nt, Artificial Sequence
  RPE65 RNA guide
cugugccugugucagucacugg

SEQ ID NO: 19219 - RNA, 22 nt, Artificial Sequence
  RPE65 RNA guide
cugugucagucacuggcuaugu

SEQ ID NO: 19220 - RNA, 22 nt, Artificial Sequence
  RPE65 RNA guide
cuguuugaauucuuuccugcuc

SEQ ID NO: 19221 - RNA, 22 nt, Artificial Sequence
  RPE65 RNA guide
cuuaagaacucugcauuucugg

SEQ ID NO: 19222 - RNA, 22 nt, Artificial Sequence
  RPE65 RNA guide
cuuaagucuuggcuccuaaguu

SEQ ID NO: 19223 - RNA, 22 nt, Artificial Sequence
  RPE65 RNA guide
cuuaggagccaagacuuaagaa

SEQ ID NO: 19224 - RNA, 22 nt, Artificial Sequence
  RPE65 RNA guide
cuuaggccaucaauuuucucuu

SEQ ID NO: 19225 - RNA, 22 nt, Artificial Sequence
  RPE65 RNA guide
cuucaaggauggucucauuuua

SEQ ID NO: 19226 - RNA, 22 nt, Artificial Sequence
  RPE65 RNA guide
cuucaguaaaaugagaccaucc

SEQ ID NO: 19227 - RNA, 22 nt, Artificial Sequence
  RPE65 RNA guide
cuuccugcaguuccucccugca

SEQ ID NO: 19228 - RNA, 22 nt, Artificial Sequence
  RPE65 RNA guide
cuucgacugccugagggaugaa

SEQ ID NO: 19229 - RNA, 22 nt, Artificial Sequence
  RPE65 RNA guide
cuugaagaaaauuuagggcucc

SEQ ID NO: 19230 - RNA, 22 nt, Artificial Sequence
  RPE65 RNA guide
cuugcccagucgcgucccaggg

SEQ ID NO: 19231 - RNA, 22 nt, Artificial Sequence
  RPE65 RNA guide
cuuggcuccuaaguucuuuuuu

SEQ ID NO: 19232 - RNA, 22 nt, Artificial Sequence
  RPE65 RNA guide
cuuucaucccucaggcagucga

SEQ ID NO: 19233 - RNA, 22 nt, Artificial Sequence
  RPE65 RNA guide
cuuucccagugauacauagcca

SEQ ID NO: 19234 - RNA, 22 nt, Artificial Sequence
  RPE65 RNA guide
cuuuccugcucacugagguuuc

SEQ ID NO: 19235 - RNA, 22 nt, Artificial Sequence
  RPE65 RNA guide
cuuucuuuggagcccuaaauuu

SEQ ID NO: 19236 - RNA, 22 nt, Artificial Sequence
  RPE65 RNA guide
cuuuggagcccuaaauuuucuu

SEQ ID NO: 19237 - RNA, 22 nt, Artificial Sequence
  RPE65 RNA guide
cuuuguuguucugcagaaaaac

SEQ ID NO: 19238 - RNA, 22 nt, Artificial Sequence
  RPE65 RNA guide
cuuuuugucaacauaacuguaa

SEQ ID NO: 19239 - RNA, 22 nt, Artificial Sequence
  RPE65 RNA guide
cuuuuuuaggucaacaugcagg

SEQ ID NO: 19240 - RNA, 22 nt, Artificial Sequence
  RPE65 RNA guide
gaaaauugauggccuaagaggu

SEQ ID NO: 19241 - RNA, 22 nt, Artificial Sequence
  RPE65 RNA guide
gaaaauuuagggcuccaaagaa

SEQ ID NO: 19242 - RNA, 22 nt, Artificial Sequence
  RPE65 RNA guide
gaaaccucagugagcaggaaag

SEQ ID NO: 19243 - RNA, 22 nt, Artificial Sequence
  RPE65 RNA guide
gaaagaauguauauuucguuca

SEQ ID NO: 19244 - RNA, 22 nt, Artificial Sequence
  RPE65 RNA guide
gaaagaauucaaacagccagaa

SEQ ID NO: 19245 - RNA, 22 nt, Artificial Sequence
  RPE65 RNA guide
gaaagucacauaaccucuuagg

SEQ ID NO: 19246 - RNA, 22 nt, Artificial Sequence
  RPE65 RNA guide
gaaauauacauucuuucauccc

SEQ ID NO: 19247 - RNA, 22 nt, Artificial Sequence
  RPE65 RNA guide
gaaaugcagaguucuuaagucu

SEQ ID NO: 19248 - RNA, 22 nt, Artificial Sequence
  RPE65 RNA guide
gaacaacaaagacuucgacugc

SEQ ID NO: 19249 - RNA, 22 nt, Artificial Sequence
  RPE65 RNA guide
gaacgaaauauacauucuuuca

SEQ ID NO: 19250 - RNA, 22 nt, Artificial Sequence
  RPE65 RNA guide
gaacucugcauuucuggcuguu

SEQ ID NO: 19251 - RNA, 22 nt, Artificial Sequence
  RPE65 RNA guide
gaacugcaggaagcuauagaug

SEQ ID NO: 19252 - RNA, 22 nt, Artificial Sequence
  RPE65 RNA guide
gaacuuaggagccaagacuuaa

SEQ ID NO: 19253 - RNA, 22 nt, Artificial Sequence
  RPE65 RNA guide
gaagaaaauuuagggcuccaaa

SEQ ID NO: 19254 - RNA, 22 nt, Artificial Sequence
  RPE65 RNA guide
gaagagaaaauugauggccuaa

SEQ ID NO: 19255 - RNA, 22 nt, Artificial Sequence
  RPE65 RNA guide
gaagauaacagaaaccucagug

SEQ ID NO: 19256 - RNA, 22 nt, Artificial Sequence
  RPE65 RNA guide
gaagcuauagaugagggacccu

SEQ ID NO: 19257 - RNA, 22 nt, Artificial Sequence
  RPE65 RNA guide
gaagucuuuguuguucugcaga

SEQ ID NO: 19258 - RNA, 22 nt, Artificial Sequence
  RPE65 RNA guide
gaauguauauuucguucacacg

SEQ ID NO: 19259 - RNA, 22 nt, Artificial Sequence
  RPE65 RNA guide
gaauucaaacagccagaaaugc

SEQ ID NO: 19260 - RNA, 22 nt, Artificial Sequence
  RPE65 RNA guide
gaauucuuuccugcucacugag

SEQ ID NO: 19261 - RNA, 22 nt, Artificial Sequence
  RPE65 RNA guide
gacacaggcacagauagcuugc

SEQ ID NO: 19262 - RNA, 22 nt, Artificial Sequence
  RPE65 RNA guide
gaccauccuugaagaaaauuua

SEQ ID NO: 19263 - RNA, 22 nt, Artificial Sequence
  RPE65 RNA guide
gacccugggacgcgacugggca

SEQ ID NO: 19264 - RNA, 22 nt, Artificial Sequence
  RPE65 RNA guide
gaccuaaaaaagaacuuaggag

SEQ ID NO: 19265 - RNA, 22 nt, Artificial Sequence
  RPE65 RNA guide
gacgcgacugggcaagcuaucu

SEQ ID NO: 19266 - RNA, 22 nt, Artificial Sequence
  RPE65 RNA guide
gacugacacaggcacagauagc

SEQ ID NO: 19267 - RNA, 22 nt, Artificial Sequence
  RPE65 RNA guide
gacugccugagggaugaaagaa

SEQ ID NO: 19268 - RNA, 22 nt, Artificial Sequence
  RPE65 RNA guide
gacugggcaagcuaucugugcc

SEQ ID NO: 19269 - RNA, 22 nt, Artificial Sequence
  RPE65 RNA guide
gacuuaagaacucugcauuucu

SEQ ID NO: 19270 - RNA, 22 nt, Artificial Sequence
  RPE65 RNA guide
gacuucgacugccugagggaug

SEQ ID NO: 19271 - RNA, 22 nt, Artificial Sequence
  RPE65 RNA guide
gacuuucccagugauacauagc

SEQ ID NO: 19272 - RNA, 22 nt, Artificial Sequence
  RPE65 RNA guide
gagaaaauugauggccuaagag

SEQ ID NO: 19273 - RNA, 22 nt, Artificial Sequence
  RPE65 RNA guide
gagaagauaacagaaaccucag

SEQ ID NO: 19274 - RNA, 22 nt, Artificial Sequence
  RPE65 RNA guide
gagaccauccuugaagaaaauu

SEQ ID NO: 19275 - RNA, 22 nt, Artificial Sequence
  RPE65 RNA guide
gagagaagauaacagaaaccuc

SEQ ID NO: 19276 - RNA, 22 nt, Artificial Sequence
  RPE65 RNA guide
gagcaggaaagaauucaaacag

SEQ ID NO: 19277 - RNA, 22 nt, Artificial Sequence
  RPE65 RNA guide
gagccaagacuuaagaacucug

SEQ ID NO: 19278 - RNA, 22 nt, Artificial Sequence
  RPE65 RNA guide
gagcccuaaauuuucuucaagg

SEQ ID NO: 19279 - RNA, 22 nt, Artificial Sequence
  RPE65 RNA guide
gaggaacugcaggaagcuauag

SEQ ID NO: 19280 - RNA, 22 nt, Artificial Sequence
  RPE65 RNA guide
gaggccuuucuuuggagcccua

SEQ ID NO: 19281 - RNA, 22 nt, Artificial Sequence
  RPE65 RNA guide
gagggacccugggacgcgacug

SEQ ID NO: 19282 - RNA, 22 nt, Artificial Sequence
  RPE65 RNA guide
gagggaugaaagaauguauauu

SEQ ID NO: 19283 - RNA, 22 nt, Artificial Sequence
  RPE65 RNA guide
gagguuaugugacuuucccagu

SEQ ID NO: 19284 - RNA, 22 nt, Artificial Sequence
  RPE65 RNA guide
gagguuucuguuaucuucucuc

SEQ ID NO: 19285 - RNA, 22 nt, Artificial Sequence
  RPE65 RNA guide
gaguucuuaagucuuggcuccu

SEQ ID NO: 19286 - RNA, 22 nt, Artificial Sequence
  RPE65 RNA guide
gauaacagaaaccucagugagc

SEQ ID NO: 19287 - RNA, 22 nt, Artificial Sequence
  RPE65 RNA guide
gauacauagccagugacugaca

SEQ ID NO: 19288 - RNA, 22 nt, Artificial Sequence
  RPE65 RNA guide
gauagcuugcccagucgcgucc

SEQ ID NO: 19289 - RNA, 22 nt, Artificial Sequence
  RPE65 RNA guide
gaugaaagaauguauauuucgu

SEQ ID NO: 19290 - RNA, 22 nt, Artificial Sequence
  RPE65 RNA guide
gaugagggacccugggacgcga

SEQ ID NO: 19291 - RNA, 22 nt, Artificial Sequence
  RPE65 RNA guide
gauggccuaagagguuauguga

SEQ ID NO: 19292 - RNA, 22 nt, Artificial Sequence
  RPE65 RNA guide
gauggucucauuuuacugaaga

SEQ ID NO: 19293 - RNA, 22 nt, Artificial Sequence
  RPE65 RNA guide
gcaaaaucaaaacauauucuac

SEQ ID NO: 19294 - RNA, 22 nt, Artificial Sequence
  RPE65 RNA guide
gcaagcuaucugugccuguguc

SEQ ID NO: 19295 - RNA, 22 nt, Artificial Sequence
  RPE65 RNA guide
gcacagauagcuugcccagucg

SEQ ID NO: 19296 - RNA, 22 nt, Artificial Sequence
  RPE65 RNA guide
gcagaacaacaaagacuucgac

SEQ ID NO: 19297 - RNA, 22 nt, Artificial Sequence
  RPE65 RNA guide
gcagaguucuuaagucuuggcu

SEQ ID NO: 19298 - RNA, 22 nt, Artificial Sequence
  RPE65 RNA guide
gcaggaaagaauucaaacagcc

SEQ ID NO: 19299 - RNA, 22 nt, Artificial Sequence
  RPE65 RNA guide
gcaggaagcuauagaugaggga

SEQ ID NO: 19300 - RNA, 22 nt, Artificial Sequence
  RPE65 RNA guide
gcagggaggaacugcaggaagc

SEQ ID NO: 19301 - RNA, 22 nt, Artificial Sequence
  RPE65 RNA guide
gcagucgaagucuuuguuguuc

SEQ ID NO: 19302 - RNA, 22 nt, Artificial Sequence
  RPE65 RNA guide
gcaguuccucccugcauguuga

SEQ ID NO: 19303 - RNA, 22 nt, Artificial Sequence
  RPE65 RNA guide
gcauguugaccuaaaaaagaac

SEQ ID NO: 19304 - RNA, 22 nt, Artificial Sequence
  RPE65 RNA guide
gcauuucuggcuguuugaauuc

SEQ ID NO: 19305 - RNA, 22 nt, Artificial Sequence
  RPE65 RNA guide
gccaagacuuaagaacucugca

SEQ ID NO: 19306 - RNA, 22 nt, Artificial Sequence
  RPE65 RNA guide
gccagaaaugcagaguucuuaa

SEQ ID NO: 19307 - RNA, 22 nt, Artificial Sequence
  RPE65 RNA guide
gccagugacugacacaggcaca

SEQ ID NO: 19308 - RNA, 22 nt, Artificial Sequence
  RPE65 RNA guide
gccaucaauuuucucuucagua

SEQ ID NO: 19309 - RNA, 22 nt, Artificial Sequence
  RPE65 RNA guide
gcccagucgcgucccagggucc

SEQ ID NO: 19310 - RNA, 22 nt, Artificial Sequence
  RPE65 RNA guide
gcccuaaauuuucuucaaggau

SEQ ID NO: 19311 - RNA, 22 nt, Artificial Sequence
  RPE65 RNA guide
gccuaagagguuaugugacuuu

SEQ ID NO: 19312 - RNA, 22 nt, Artificial Sequence
  RPE65 RNA guide
gccugagggaugaaagaaugua

SEQ ID NO: 19313 - RNA, 22 nt, Artificial Sequence
  RPE65 RNA guide
gccugugucagucacuggcuau

SEQ ID NO: 19314 - RNA, 22 nt, Artificial Sequence
  RPE65 RNA guide
gccuuucuuuggagcccuaaau

SEQ ID NO: 19315 - RNA, 22 nt, Artificial Sequence
  RPE65 RNA guide
gcgacugggcaagcuaucugug

SEQ ID NO: 19316 - RNA, 22 nt, Artificial Sequence
  RPE65 RNA guide
gcgucccagggucccucaucua

SEQ ID NO: 19317 - RNA, 22 nt, Artificial Sequence
  RPE65 RNA guide
gcuauagaugagggacccuggg

SEQ ID NO: 19318 - RNA, 22 nt, Artificial Sequence
  RPE65 RNA guide
gcuaucugugccugugucaguc

SEQ ID NO: 19319 - RNA, 22 nt, Artificial Sequence
  RPE65 RNA guide
gcuauguaucacugggaaaguc

SEQ ID NO: 19320 - RNA, 22 nt, Artificial Sequence
  RPE65 RNA guide
gcucacugagguuucuguuauc

SEQ ID NO: 19321 - RNA, 22 nt, Artificial Sequence
  RPE65 RNA guide
gcuccaaagaaaggccucugaa

SEQ ID NO: 19322 - RNA, 22 nt, Artificial Sequence
  RPE65 RNA guide
gcuccuaaguucuuuuuuaggu

SEQ ID NO: 19323 - RNA, 22 nt, Artificial Sequence
  RPE65 RNA guide
gcuguuugaauucuuuccugcu

SEQ ID NO: 19324 - RNA, 22 nt, Artificial Sequence
  RPE65 RNA guide
gcuuccugcaguuccucccugc

SEQ ID NO: 19325 - RNA, 22 nt, Artificial Sequence
  RPE65 RNA guide
gcuugcccagucgcgucccagg

SEQ ID NO: 19326 - RNA, 22 nt, Artificial Sequence
  RPE65 RNA guide
ggaaagaauucaaacagccaga

SEQ ID NO: 19327 - RNA, 22 nt, Artificial Sequence
  RPE65 RNA guide
ggaaagucacauaaccucuuag

SEQ ID NO: 19328 - RNA, 22 nt, Artificial Sequence
  RPE65 RNA guide
ggaacugcaggaagcuauagau

SEQ ID NO: 19329 - RNA, 22 nt, Artificial Sequence
  RPE65 RNA guide
ggaagcuauagaugagggaccc

SEQ ID NO: 19330 - RNA, 22 nt, Artificial Sequence
  RPE65 RNA guide
ggacccugggacgcgacugggc

SEQ ID NO: 19331 - RNA, 22 nt, Artificial Sequence
  RPE65 RNA guide
ggacgcgacugggcaagcuauc

SEQ ID NO: 19332 - RNA, 22 nt, Artificial Sequence
  RPE65 RNA guide
ggagagaagauaacagaaaccu

SEQ ID NO: 19333 - RNA, 22 nt, Artificial Sequence
  RPE65 RNA guide
ggagccaagacuuaagaacucu

SEQ ID NO: 19334 - RNA, 22 nt, Artificial Sequence
  RPE65 RNA guide
ggagcccuaaauuuucuucaag

SEQ ID NO: 19335 - RNA, 22 nt, Artificial Sequence
  RPE65 RNA guide
ggaggaacugcaggaagcuaua

SEQ ID NO: 19336 - RNA, 22 nt, Artificial Sequence
  RPE65 RNA guide
ggaugaaagaauguauauuucg

SEQ ID NO: 19337 - RNA, 22 nt, Artificial Sequence
  RPE65 RNA guide
ggauggucucauuuuacugaag

SEQ ID NO: 19338 - RNA, 22 nt, Artificial Sequence
  RPE65 RNA guide
ggcaagcuaucugugccugugu

SEQ ID NO: 19339 - RNA, 22 nt, Artificial Sequence
  RPE65 RNA guide
ggcacagauagcuugcccaguc

SEQ ID NO: 19340 - RNA, 22 nt, Artificial Sequence
  RPE65 RNA guide
ggcagucgaagucuuuguuguu

SEQ ID NO: 19341 - RNA, 22 nt, Artificial Sequence
  RPE65 RNA guide
ggccaucaauuuucucuucagu

SEQ ID NO: 19342 - RNA, 22 nt, Artificial Sequence
  RPE65 RNA guide
ggccuaagagguuaugugacuu

SEQ ID NO: 19343 - RNA, 22 nt, Artificial Sequence
  RPE65 RNA guide
ggccuuucuuuggagcccuaaa

SEQ ID NO: 19344 - RNA, 22 nt, Artificial Sequence
  RPE65 RNA guide
ggcuauguaucacugggaaagu

SEQ ID NO: 19345 - RNA, 22 nt, Artificial Sequence
  RPE65 RNA guide
ggcuccaaagaaaggccucuga

SEQ ID NO: 19346 - RNA, 22 nt, Artificial Sequence
  RPE65 RNA guide
ggcuccuaaguucuuuuuuagg

SEQ ID NO: 19347 - RNA, 22 nt, Artificial Sequence
  RPE65 RNA guide
ggcuguuugaauucuuuccugc

SEQ ID NO: 19348 - RNA, 22 nt, Artificial Sequence
  RPE65 RNA guide
gggaaagucacauaaccucuua

SEQ ID NO: 19349 - RNA, 22 nt, Artificial Sequence
  RPE65 RNA guide
gggacccugggacgcgacuggg

SEQ ID NO: 19350 - RNA, 22 nt, Artificial Sequence
  RPE65 RNA guide
gggacgcgacugggcaagcuau

SEQ ID NO: 19351 - RNA, 22 nt, Artificial Sequence
  RPE65 RNA guide
gggaggaacugcaggaagcuau

SEQ ID NO: 19352 - RNA, 22 nt, Artificial Sequence
  RPE65 RNA guide
gggaugaaagaauguauauuuc

SEQ ID NO: 19353 - RNA, 22 nt, Artificial Sequence
  RPE65 RNA guide
gggcaagcuaucugugccugug

SEQ ID NO: 19354 - RNA, 22 nt, Artificial Sequence
  RPE65 RNA guide
gggcuccaaagaaaggccucug

SEQ ID NO: 19355 - RNA, 22 nt, Artificial Sequence
  RPE65 RNA guide
gggucccucaucuauagcuucc

SEQ ID NO: 19356 - RNA, 22 nt, Artificial Sequence
  RPE65 RNA guide
ggucaacaugcagggaggaacu

SEQ ID NO: 19357 - RNA, 22 nt, Artificial Sequence
  RPE65 RNA guide
ggucccucaucuauagcuuccu

SEQ ID NO: 19358 - RNA, 22 nt, Artificial Sequence
  RPE65 RNA guide
ggucucauuuuacugaagagaa

SEQ ID NO: 19359 - RNA, 22 nt, Artificial Sequence
  RPE65 RNA guide
gguuaugugacuuucccaguga

SEQ ID NO: 19360 - RNA, 22 nt, Artificial Sequence
  RPE65 RNA guide
guaaaaugagaccauccuugaa

SEQ ID NO: 19361 - RNA, 22 nt, Artificial Sequence
  RPE65 RNA guide
guauauuucguucacacguaga

SEQ ID NO: 19362 - RNA, 22 nt, Artificial Sequence
  RPE65 RNA guide
guaucacugggaaagucacaua

SEQ ID NO: 19363 - RNA, 22 nt, Artificial Sequence
  RPE65 RNA guide
gucaacaugcagggaggaacug

SEQ ID NO: 19364 - RNA, 22 nt, Artificial Sequence
  RPE65 RNA guide
gucacauaaccucuuaggccau

SEQ ID NO: 19365 - RNA, 22 nt, Artificial Sequence
  RPE65 RNA guide
gucacuggcuauguaucacugg

SEQ ID NO: 19366 - RNA, 22 nt, Artificial Sequence
  RPE65 RNA guide
gucagucacuggcuauguauca

SEQ ID NO: 19367 - RNA, 22 nt, Artificial Sequence
  RPE65 RNA guide
gucccagggucccucaucuaua

SEQ ID NO: 19368 - RNA, 22 nt, Artificial Sequence
  RPE65 RNA guide
gucccucaucuauagcuuccug

SEQ ID NO: 19369 - RNA, 22 nt, Artificial Sequence
  RPE65 RNA guide
gucgaagucuuuguuguucugc

SEQ ID NO: 19370 - RNA, 22 nt, Artificial Sequence
  RPE65 RNA guide
gucgcgucccagggucccucau

SEQ ID NO: 19371 - RNA, 22 nt, Artificial Sequence
  RPE65 RNA guide
gucucauuuuacugaagagaaa

SEQ ID NO: 19372 - RNA, 22 nt, Artificial Sequence
  RPE65 RNA guide
gucuuggcuccuaaguucuuuu

SEQ ID NO: 19373 - RNA, 22 nt, Artificial Sequence
  RPE65 RNA guide
gucuuuguuguucugcagaaaa

SEQ ID NO: 19374 - RNA, 22 nt, Artificial Sequence
  RPE65 RNA guide
gugaacgaaauauacauucuuu

SEQ ID NO: 19375 - RNA, 22 nt, Artificial Sequence
  RPE65 RNA guide
gugacugacacaggcacagaua

SEQ ID NO: 19376 - RNA, 22 nt, Artificial Sequence
  RPE65 RNA guide
gugacuuucccagugauacaua

SEQ ID NO: 19377 - RNA, 22 nt, Artificial Sequence
  RPE65 RNA guide
gugagcaggaaagaauucaaac

SEQ ID NO: 19378 - RNA, 22 nt, Artificial Sequence
  RPE65 RNA guide
gugauacauagccagugacuga

SEQ ID NO: 19379 - RNA, 22 nt, Artificial Sequence
  RPE65 RNA guide
gugccugugucagucacuggcu

SEQ ID NO: 19380 - RNA, 22 nt, Artificial Sequence
  RPE65 RNA guide
gugucagucacuggcuauguau

SEQ ID NO: 19381 - RNA, 22 nt, Artificial Sequence
  RPE65 RNA guide
gugugaacgaaauauacauucu

SEQ ID NO: 19382 - RNA, 22 nt, Artificial Sequence
  RPE65 RNA guide
guuaugugacuuucccagugau

SEQ ID NO: 19383 - RNA, 22 nt, Artificial Sequence
  RPE65 RNA guide
guucacacguagaauauguuuu

SEQ ID NO: 19384 - RNA, 22 nt, Artificial Sequence
  RPE65 RNA guide
guuccucccugcauguugaccu

SEQ ID NO: 19385 - RNA, 22 nt, Artificial Sequence
  RPE65 RNA guide
guucuuaagucuuggcuccuaa

SEQ ID NO: 19386 - RNA, 22 nt, Artificial Sequence
  RPE65 RNA guide
guucuuuuuuaggucaacaugc

SEQ ID NO: 19387 - RNA, 22 nt, Artificial Sequence
  RPE65 RNA guide
guugaccuaaaaaagaacuuag

SEQ ID NO: 19388 - RNA, 22 nt, Artificial Sequence
  RPE65 RNA guide
guuugaauucuuuccugcucac

SEQ ID NO: 19389 - RNA, 22 nt, Artificial Sequence
  RPE65 RNA guide
guuuuucagaggccuuucuuug

SEQ ID NO: 19390 - RNA, 22 nt, Artificial Sequence
  RPE65 RNA guide
guuuuucugcagaacaacaaag

SEQ ID NO: 19391 - RNA, 22 nt, Artificial Sequence
  RPE65 RNA guide
uaaaaaagaacuuaggagccaa

SEQ ID NO: 19392 - RNA, 22 nt, Artificial Sequence
  RPE65 RNA guide
uaaaaugagaccauccuugaag

SEQ ID NO: 19393 - RNA, 22 nt, Artificial Sequence
  RPE65 RNA guide
uaaauuuucuucaaggaugguc

SEQ ID NO: 19394 - RNA, 22 nt, Artificial Sequence
  RPE65 RNA guide
uaacagaaaccucagugagcag

SEQ ID NO: 19395 - RNA, 22 nt, Artificial Sequence
  RPE65 RNA guide
uaaccucuuaggccaucaauuu

SEQ ID NO: 19396 - RNA, 22 nt, Artificial Sequence
  RPE65 RNA guide
uaagaacucugcauuucuggcu

SEQ ID NO: 19397 - RNA, 22 nt, Artificial Sequence
  RPE65 RNA guide
uaagagguuaugugacuuuccc

SEQ ID NO: 19398 - RNA, 22 nt, Artificial Sequence
  RPE65 RNA guide
uaagucuuggcuccuaaguucu

SEQ ID NO: 19399 - RNA, 22 nt, Artificial Sequence
  RPE65 RNA guide
uaaguucuuuuuuaggucaaca

SEQ ID NO: 19400 - RNA, 22 nt, Artificial Sequence
  RPE65 RNA guide
uaauguuuuucugcagaacaac

SEQ ID NO: 19401 - RNA, 22 nt, Artificial Sequence
  RPE65 RNA guide
uacauagccagugacugacaca

SEQ ID NO: 19402 - RNA, 22 nt, Artificial Sequence
  RPE65 RNA guide
uacauucuuucaucccucaggc

SEQ ID NO: 19403 - RNA, 22 nt, Artificial Sequence
  RPE65 RNA guide
uacgugugaacgaaauauacau

SEQ ID NO: 19404 - RNA, 22 nt, Artificial Sequence
  RPE65 RNA guide
uacugaagagaaaauugauggc

SEQ ID NO: 19405 - RNA, 22 nt, Artificial Sequence
  RPE65 RNA guide
uagaugagggacccugggacgc

SEQ ID NO: 19406 - RNA, 22 nt, Artificial Sequence
  RPE65 RNA guide
uagccagugacugacacaggca

SEQ ID NO: 19407 - RNA, 22 nt, Artificial Sequence
  RPE65 RNA guide
uagcuuccugcaguuccucccu

SEQ ID NO: 19408 - RNA, 22 nt, Artificial Sequence
  RPE65 RNA guide
uagcuugcccagucgcguccca

SEQ ID NO: 19409 - RNA, 22 nt, Artificial Sequence
  RPE65 RNA guide
uaggagagaagauaacagaaac

SEQ ID NO: 19410 - RNA, 22 nt, Artificial Sequence
  RPE65 RNA guide
uaggagccaagacuuaagaacu

SEQ ID NO: 19411 - RNA, 22 nt, Artificial Sequence
  RPE65 RNA guide
uaggccaucaauuuucucuuca

SEQ ID NO: 19412 - RNA, 22 nt, Artificial Sequence
  RPE65 RNA guide
uagggcuccaaagaaaggccuc

SEQ ID NO: 19413 - RNA, 22 nt, Artificial Sequence
  RPE65 RNA guide
uaggucaacaugcagggaggaa

SEQ ID NO: 19414 - RNA, 22 nt, Artificial Sequence
  RPE65 RNA guide
uauacauucuuucaucccucag

SEQ ID NO: 19415 - RNA, 22 nt, Artificial Sequence
  RPE65 RNA guide
uauagaugagggacccugggac

SEQ ID NO: 19416 - RNA, 22 nt, Artificial Sequence
  RPE65 RNA guide
uauagcuuccugcaguuccucc

SEQ ID NO: 19417 - RNA, 22 nt, Artificial Sequence
  RPE65 RNA guide
uauauuucguucacacguagaa

SEQ ID NO: 19418 - RNA, 22 nt, Artificial Sequence
  RPE65 RNA guide
uaucacugggaaagucacauaa

SEQ ID NO: 19419 - RNA, 22 nt, Artificial Sequence
  RPE65 RNA guide
uaucugugccugugucagucac

SEQ ID NO: 19420 - RNA, 22 nt, Artificial Sequence
  RPE65 RNA guide
uauguaucacugggaaagucac

SEQ ID NO: 19421 - RNA, 22 nt, Artificial Sequence
  RPE65 RNA guide
uaugugacuuucccagugauac

SEQ ID NO: 19422 - RNA, 22 nt, Artificial Sequence
  RPE65 RNA guide
uauucuacgugugaacgaaaua

SEQ ID NO: 19423 - RNA, 22 nt, Artificial Sequence
  RPE65 RNA guide
uauuucguucacacguagaaua

SEQ ID NO: 19424 - RNA, 22 nt, Artificial Sequence
  RPE65 RNA guide
ucaaaacauauucuacguguga

SEQ ID NO: 19425 - RNA, 22 nt, Artificial Sequence
  RPE65 RNA guide
ucaaacagccagaaaugcagag

SEQ ID NO: 19426 - RNA, 22 nt, Artificial Sequence
  RPE65 RNA guide
ucaacaugcagggaggaacugc

SEQ ID NO: 19427 - RNA, 22 nt, Artificial Sequence
  RPE65 RNA guide
ucaaggauggucucauuuuacu

SEQ ID NO: 19428 - RNA, 22 nt, Artificial Sequence
  RPE65 RNA guide
ucacauaaccucuuaggccauc

SEQ ID NO: 19429 - RNA, 22 nt, Artificial Sequence
  RPE65 RNA guide
ucacugagguuucuguuaucuu

SEQ ID NO: 19430 - RNA, 22 nt, Artificial Sequence
  RPE65 RNA guide
ucacuggcuauguaucacuggg

SEQ ID NO: 19431 - RNA, 22 nt, Artificial Sequence
  RPE65 RNA guide
ucacugggaaagucacauaacc

SEQ ID NO: 19432 - RNA, 22 nt, Artificial Sequence
  RPE65 RNA guide
ucagaggccuuucuuuggagcc

SEQ ID NO: 19433 - RNA, 22 nt, Artificial Sequence
  RPE65 RNA guide
ucaggcagucgaagucuuuguu

SEQ ID NO: 19434 - RNA, 22 nt, Artificial Sequence
  RPE65 RNA guide
ucaguaaaaugagaccauccuu

SEQ ID NO: 19435 - RNA, 22 nt, Artificial Sequence
  RPE65 RNA guide
ucagucacuggcuauguaucac

SEQ ID NO: 19436 - RNA, 22 nt, Artificial Sequence
  RPE65 RNA guide
ucagugagcaggaaagaauuca

SEQ ID NO: 19437 - RNA, 22 nt, Artificial Sequence
  RPE65 RNA guide
ucaucccucaggcagucgaagu

SEQ ID NO: 19438 - RNA, 22 nt, Artificial Sequence
  RPE65 RNA guide
ucaucuauagcuuccugcaguu

SEQ ID NO: 19439 - RNA, 22 nt, Artificial Sequence
  RPE65 RNA guide
uccaaagaaaggccucugaaaa

SEQ ID NO: 19440 - RNA, 22 nt, Artificial Sequence
  RPE65 RNA guide
ucccagggucccucaucuauag

SEQ ID NO: 19441 - RNA, 22 nt, Artificial Sequence
  RPE65 RNA guide
ucccagugauacauagccagug

SEQ ID NO: 19442 - RNA, 22 nt, Artificial Sequence
  RPE65 RNA guide
ucccucaggcagucgaagucuu

SEQ ID NO: 19443 - RNA, 22 nt, Artificial Sequence
  RPE65 RNA guide
ucccucaucuauagcuuccugc

SEQ ID NO: 19444 - RNA, 22 nt, Artificial Sequence
  RPE65 RNA guide
ucccugcauguugaccuaaaaa

SEQ ID NO: 19445 - RNA, 22 nt, Artificial Sequence
  RPE65 RNA guide
uccuaaguucuuuuuuagguca

SEQ ID NO: 19446 - RNA, 22 nt, Artificial Sequence
  RPE65 RNA guide
uccucccugcauguugaccuaa

SEQ ID NO: 19447 - RNA, 22 nt, Artificial Sequence
  RPE65 RNA guide
uccugcaguuccucccugcaug

SEQ ID NO: 19448 - RNA, 22 nt, Artificial Sequence
  RPE65 RNA guide
uccugcucacugagguuucugu

SEQ ID NO: 19449 - RNA, 22 nt, Artificial Sequence
  RPE65 RNA guide
uccuuacaguuauguugacaaa

SEQ ID NO: 19450 - RNA, 22 nt, Artificial Sequence
  RPE65 RNA guide
uccuugaagaaaauuuagggcu

SEQ ID NO: 19451 - RNA, 22 nt, Artificial Sequence
  RPE65 RNA guide
ucgaagucuuuguuguucugca

SEQ ID NO: 19452 - RNA, 22 nt, Artificial Sequence
  RPE65 RNA guide
ucgacugccugagggaugaaag

SEQ ID NO: 19453 - RNA, 22 nt, Artificial Sequence
  RPE65 RNA guide
ucgcgucccagggucccucauc

SEQ ID NO: 19454 - RNA, 22 nt, Artificial Sequence
  RPE65 RNA guide
ucguucacacguagaauauguu

SEQ ID NO: 19455 - RNA, 22 nt, Artificial Sequence
  RPE65 RNA guide
ucuacgugugaacgaaauauac

SEQ ID NO: 19456 - RNA, 22 nt, Artificial Sequence
  RPE65 RNA guide
ucuauagcuuccugcaguuccu

SEQ ID NO: 19457 - RNA, 22 nt, Artificial Sequence
  RPE65 RNA guide
ucucuucaguaaaaugagacca

SEQ ID NO: 19458 - RNA, 22 nt, Artificial Sequence
  RPE65 RNA guide
ucugcagaacaacaaagacuuc

SEQ ID NO: 19459 - RNA, 22 nt, Artificial Sequence
  RPE65 RNA guide
ucugcauuucuggcuguuugaa

SEQ ID NO: 19460 - RNA, 22 nt, Artificial Sequence
  RPE65 RNA guide
ucuggcuguuugaauucuuucc

SEQ ID NO: 19461 - RNA, 22 nt, Artificial Sequence
  RPE65 RNA guide
ucugugccugugucagucacug

SEQ ID NO: 19462 - RNA, 22 nt, Artificial Sequence
  RPE65 RNA guide
ucuuaagucuuggcuccuaagu

SEQ ID NO: 19463 - RNA, 22 nt, Artificial Sequence
  RPE65 RNA guide
ucuuaggccaucaauuuucucu

SEQ ID NO: 19464 - RNA, 22 nt, Artificial Sequence
  RPE65 RNA guide
ucuucaaggauggucucauuuu

SEQ ID NO: 19465 - RNA, 22 nt, Artificial Sequence
  RPE65 RNA guide
ucuucaguaaaaugagaccauc

SEQ ID NO: 19466 - RNA, 22 nt, Artificial Sequence
  RPE65 RNA guide
ucuuggcuccuaaguucuuuuu

SEQ ID NO: 19467 - RNA, 22 nt, Artificial Sequence
  RPE65 RNA guide
ucuuucaucccucaggcagucg

SEQ ID NO: 19468 - RNA, 22 nt, Artificial Sequence
  RPE65 RNA guide
ucuuuccugcucacugagguuu

SEQ ID NO: 19469 - RNA, 22 nt, Artificial Sequence
  RPE65 RNA guide
ucuuuggagcccuaaauuuucu

SEQ ID NO: 19470 - RNA, 22 nt, Artificial Sequence
  RPE65 RNA guide
ucuuuguuguucugcagaaaaa

SEQ ID NO: 19471 - RNA, 22 nt, Artificial Sequence
  RPE65 RNA guide
ucuuuuugucaacauaacugua

SEQ ID NO: 19472 - RNA, 22 nt, Artificial Sequence
  RPE65 RNA guide
ucuuuuuuaggucaacaugcag

SEQ ID NO: 19473 - RNA, 22 nt, Artificial Sequence
  RPE65 RNA guide
ugaaagaauguauauuucguuc

SEQ ID NO: 19474 - RNA, 22 nt, Artificial Sequence
  RPE65 RNA guide
ugaacgaaauauacauucuuuc

SEQ ID NO: 19475 - RNA, 22 nt, Artificial Sequence
  RPE65 RNA guide
ugaagaaaauuuagggcuccaa

SEQ ID NO: 19476 - RNA, 22 nt, Artificial Sequence
  RPE65 RNA guide
ugaagagaaaauugauggccua

SEQ ID NO: 19477 - RNA, 22 nt, Artificial Sequence
  RPE65 RNA guide
ugaauucuuuccugcucacuga

SEQ ID NO: 19478 - RNA, 22 nt, Artificial Sequence
  RPE65 RNA guide
ugacacaggcacagauagcuug

SEQ ID NO: 19479 - RNA, 22 nt, Artificial Sequence
  RPE65 RNA guide
ugaccuaaaaaagaacuuagga

SEQ ID NO: 19480 - RNA, 22 nt, Artificial Sequence
  RPE65 RNA guide
ugacugacacaggcacagauag

SEQ ID NO: 19481 - RNA, 22 nt, Artificial Sequence
  RPE65 RNA guide
ugacuuucccagugauacauag

SEQ ID NO: 19482 - RNA, 22 nt, Artificial Sequence
  RPE65 RNA guide
ugagaccauccuugaagaaaau

SEQ ID NO: 19483 - RNA, 22 nt, Artificial Sequence
  RPE65 RNA guide
ugagcaggaaagaauucaaaca

SEQ ID NO: 19484 - RNA, 22 nt, Artificial Sequence
  RPE65 RNA guide
ugagggacccugggacgcgacu

SEQ ID NO: 19485 - RNA, 22 nt, Artificial Sequence
  RPE65 RNA guide
ugagggaugaaagaauguauau

SEQ ID NO: 19486 - RNA, 22 nt, Artificial Sequence
  RPE65 RNA guide
ugagguuucuguuaucuucucu

SEQ ID NO: 19487 - RNA, 22 nt, Artificial Sequence
  RPE65 RNA guide
ugauacauagccagugacugac

SEQ ID NO: 19488 - RNA, 22 nt, Artificial Sequence
  RPE65 RNA guide
ugauggccuaagagguuaugug

SEQ ID NO: 19489 - RNA, 22 nt, Artificial Sequence
  RPE65 RNA guide
ugcagaacaacaaagacuucga

SEQ ID NO: 19490 - RNA, 22 nt, Artificial Sequence
  RPE65 RNA guide
ugcagaguucuuaagucuuggc

SEQ ID NO: 19491 - RNA, 22 nt, Artificial Sequence
  RPE65 RNA guide
ugcaggaagcuauagaugaggg

SEQ ID NO: 19492 - RNA, 22 nt, Artificial Sequence
  RPE65 RNA guide
ugcagggaggaacugcaggaag

SEQ ID NO: 19493 - RNA, 22 nt, Artificial Sequence
  RPE65 RNA guide
ugcaguuccucccugcauguug

SEQ ID NO: 19494 - RNA, 22 nt, Artificial Sequence
  RPE65 RNA guide
ugcauguugaccuaaaaaagaa

SEQ ID NO: 19495 - RNA, 22 nt, Artificial Sequence
  RPE65 RNA guide
ugcauuucuggcuguuugaauu

SEQ ID NO: 19496 - RNA, 22 nt, Artificial Sequence
  RPE65 RNA guide
ugcccagucgcgucccaggguc

SEQ ID NO: 19497 - RNA, 22 nt, Artificial Sequence
  RPE65 RNA guide
ugccugagggaugaaagaaugu

SEQ ID NO: 19498 - RNA, 22 nt, Artificial Sequence
  RPE65 RNA guide
ugccugugucagucacuggcua

SEQ ID NO: 19499 - RNA, 22 nt, Artificial Sequence
  RPE65 RNA guide
ugcucacugagguuucuguuau

SEQ ID NO: 19500 - RNA, 22 nt, Artificial Sequence
  RPE65 RNA guide
uggagcccuaaauuuucuucaa

SEQ ID NO: 19501 - RNA, 22 nt, Artificial Sequence
  RPE65 RNA guide
uggccuaagagguuaugugacu

SEQ ID NO: 19502 - RNA, 22 nt, Artificial Sequence
  RPE65 RNA guide
uggcuauguaucacugggaaag

SEQ ID NO: 19503 - RNA, 22 nt, Artificial Sequence
  RPE65 RNA guide
uggcuccuaaguucuuuuuuag

SEQ ID NO: 19504 - RNA, 22 nt, Artificial Sequence
  RPE65 RNA guide
uggcuguuugaauucuuuccug

SEQ ID NO: 19505 - RNA, 22 nt, Artificial Sequence
  RPE65 RNA guide
ugggaaagucacauaaccucuu

SEQ ID NO: 19506 - RNA, 22 nt, Artificial Sequence
  RPE65 RNA guide
ugggacgcgacugggcaagcua

SEQ ID NO: 19507 - RNA, 22 nt, Artificial Sequence
  RPE65 RNA guide
ugggcaagcuaucugugccugu

SEQ ID NO: 19508 - RNA, 22 nt, Artificial Sequence
  RPE65 RNA guide
uggucucauuuuacugaagaga

SEQ ID NO: 19509 - RNA, 22 nt, Artificial Sequence
  RPE65 RNA guide
uguauauuucguucacacguag

SEQ ID NO: 19510 - RNA, 22 nt, Artificial Sequence
  RPE65 RNA guide
uguaucacugggaaagucacau

SEQ ID NO: 19511 - RNA, 22 nt, Artificial Sequence
  RPE65 RNA guide
ugucagucacuggcuauguauc

SEQ ID NO: 19512 - RNA, 22 nt, Artificial Sequence
  RPE65 RNA guide
ugugacuuucccagugauacau

SEQ ID NO: 19513 - RNA, 22 nt, Artificial Sequence
  RPE65 RNA guide
ugugccugugucagucacuggc

SEQ ID NO: 19514 - RNA, 22 nt, Artificial Sequence
  RPE65 RNA guide
ugugucagucacuggcuaugua

SEQ ID NO: 19515 - RNA, 22 nt, Artificial Sequence
  RPE65 RNA guide
uguugaccuaaaaaagaacuua

SEQ ID NO: 19516 - RNA, 22 nt, Artificial Sequence
  RPE65 RNA guide
uguuugaauucuuuccugcuca

SEQ ID NO: 19517 - RNA, 22 nt, Artificial Sequence
  RPE65 RNA guide
uguuuuucagaggccuuucuuu

SEQ ID NO: 19518 - RNA, 22 nt, Artificial Sequence
  RPE65 RNA guide
uguuuuucugcagaacaacaaa

SEQ ID NO: 19519 - RNA, 22 nt, Artificial Sequence
  RPE65 RNA guide
uuaagaacucugcauuucuggc

SEQ ID NO: 19520 - RNA, 22 nt, Artificial Sequence
  RPE65 RNA guide
uuaagucuuggcuccuaaguuc

SEQ ID NO: 19521 - RNA, 22 nt, Artificial Sequence
  RPE65 RNA guide
uuacugaagagaaaauugaugg

SEQ ID NO: 19522 - RNA, 22 nt, Artificial Sequence
  RPE65 RNA guide
uuaggagccaagacuuaagaac

SEQ ID NO: 19523 - RNA, 22 nt, Artificial Sequence
  RPE65 RNA guide
uuaggccaucaauuuucucuuc

SEQ ID NO: 19524 - RNA, 22 nt, Artificial Sequence
  RPE65 RNA guide
uuagggcuccaaagaaaggccu

SEQ ID NO: 19525 - RNA, 22 nt, Artificial Sequence
  RPE65 RNA guide
uuaggucaacaugcagggagga

SEQ ID NO: 19526 - RNA, 22 nt, Artificial Sequence
  RPE65 RNA guide
uuaugugacuuucccagugaua

SEQ ID NO: 19527 - RNA, 22 nt, Artificial Sequence
  RPE65 RNA guide
uucaaacagccagaaaugcaga

SEQ ID NO: 19528 - RNA, 22 nt, Artificial Sequence
  RPE65 RNA guide
uucaaggauggucucauuuuac

SEQ ID NO: 19529 - RNA, 22 nt, Artificial Sequence
  RPE65 RNA guide
uucagaggccuuucuuuggagc

SEQ ID NO: 19530 - RNA, 22 nt, Artificial Sequence
  RPE65 RNA guide
uucaguaaaaugagaccauccu

SEQ ID NO: 19531 - RNA, 22 nt, Artificial Sequence
  RPE65 RNA guide
uucaucccucaggcagucgaag

SEQ ID NO: 19532 - RNA, 22 nt, Artificial Sequence
  RPE65 RNA guide
uucccagugauacauagccagu

SEQ ID NO: 19533 - RNA, 22 nt, Artificial Sequence
  RPE65 RNA guide
uuccucccugcauguugaccua

SEQ ID NO: 19534 - RNA, 22 nt, Artificial Sequence
  RPE65 RNA guide
uuccugcaguuccucccugcau

SEQ ID NO: 19535 - RNA, 22 nt, Artificial Sequence
  RPE65 RNA guide
uuccugcucacugagguuucug

SEQ ID NO: 19536 - RNA, 22 nt, Artificial Sequence
  RPE65 RNA guide
uucgacugccugagggaugaaa

SEQ ID NO: 19537 - RNA, 22 nt, Artificial Sequence
  RPE65 RNA guide
uucguucacacguagaauaugu

SEQ ID NO: 19538 - RNA, 22 nt, Artificial Sequence
  RPE65 RNA guide
uucuacgugugaacgaaauaua

SEQ ID NO: 19539 - RNA, 22 nt, Artificial Sequence
  RPE65 RNA guide
uucucuucaguaaaaugagacc

SEQ ID NO: 19540 - RNA, 22 nt, Artificial Sequence
  RPE65 RNA guide
uucugcagaacaacaaagacuu

SEQ ID NO: 19541 - RNA, 22 nt, Artificial Sequence
  RPE65 RNA guide
uucuggcuguuugaauucuuuc

SEQ ID NO: 19542 - RNA, 22 nt, Artificial Sequence
  RPE65 RNA guide
uucuuaagucuuggcuccuaag

SEQ ID NO: 19543 - RNA, 22 nt, Artificial Sequence
  RPE65 RNA guide
uucuucaaggauggucucauuu

SEQ ID NO: 19544 - RNA, 22 nt, Artificial Sequence
  RPE65 RNA guide
uucuuucaucccucaggcaguc

SEQ ID NO: 19545 - RNA, 22 nt, Artificial Sequence
  RPE65 RNA guide
uucuuuccugcucacugagguu

SEQ ID NO: 19546 - RNA, 22 nt, Artificial Sequence
  RPE65 RNA guide
uucuuuggagcccuaaauuuuc

SEQ ID NO: 19547 - RNA, 22 nt, Artificial Sequence
  RPE65 RNA guide
uucuuuuugucaacauaacugu

SEQ ID NO: 19548 - RNA, 22 nt, Artificial Sequence
  RPE65 RNA guide
uucuuuuuuaggucaacaugca

SEQ ID NO: 19549 - RNA, 22 nt, Artificial Sequence
  RPE65 RNA guide
uugaagaaaauuuagggcucca

SEQ ID NO: 19550 - RNA, 22 nt, Artificial Sequence
  RPE65 RNA guide
uugaauucuuuccugcucacug

SEQ ID NO: 19551 - RNA, 22 nt, Artificial Sequence
  RPE65 RNA guide
uugaccuaaaaaagaacuuagg

SEQ ID NO: 19552 - RNA, 22 nt, Artificial Sequence
  RPE65 RNA guide
uugauggccuaagagguuaugu

SEQ ID NO: 19553 - RNA, 22 nt, Artificial Sequence
  RPE65 RNA guide
uugcccagucgcgucccagggu

SEQ ID NO: 19554 - RNA, 22 nt, Artificial Sequence
  RPE65 RNA guide
uuggagcccuaaauuuucuuca

SEQ ID NO: 19555 - RNA, 22 nt, Artificial Sequence
  RPE65 RNA guide
uuggcuccuaaguucuuuuuua

SEQ ID NO: 19556 - RNA, 22 nt, Artificial Sequence
  RPE65 RNA guide
uuguuuuucagaggccuuucuu

SEQ ID NO: 19557 - RNA, 22 nt, Artificial Sequence
  RPE65 RNA guide
uuuacugaagagaaaauugaug

SEQ ID NO: 19558 - RNA, 22 nt, Artificial Sequence
  RPE65 RNA guide
uuuagggcuccaaagaaaggcc

SEQ ID NO: 19559 - RNA, 22 nt, Artificial Sequence
  RPE65 RNA guide
uuuaggucaacaugcagggagg

SEQ ID NO: 19560 - RNA, 22 nt, Artificial Sequence
  RPE65 RNA guide
uuucagaggccuuucuuuggag

SEQ ID NO: 19561 - RNA, 22 nt, Artificial Sequence
  RPE65 RNA guide
uuucaucccucaggcagucgaa

SEQ ID NO: 19562 - RNA, 22 nt, Artificial Sequence
  RPE65 RNA guide
uuucccagugauacauagccag

SEQ ID NO: 19563 - RNA, 22 nt, Artificial Sequence
  RPE65 RNA guide
uuuccugcucacugagguuucu

SEQ ID NO: 19564 - RNA, 22 nt, Artificial Sequence
  RPE65 RNA guide
uuucguucacacguagaauaug

SEQ ID NO: 19565 - RNA, 22 nt, Artificial Sequence
  RPE65 RNA guide
uuucucuucaguaaaaugagac

SEQ ID NO: 19566 - RNA, 22 nt, Artificial Sequence
  RPE65 RNA guide
uuucugcagaacaacaaagacu

SEQ ID NO: 19567 - RNA, 22 nt, Artificial Sequence
  RPE65 RNA guide
uuucuggcuguuugaauucuuu

SEQ ID NO: 19568 - RNA, 22 nt, Artificial Sequence
  RPE65 RNA guide
uuucuucaaggauggucucauu

SEQ ID NO: 19569 - RNA, 22 nt, Artificial Sequence
  RPE65 RNA guide
uuucuuuggagcccuaaauuuu

SEQ ID NO: 19570 - RNA, 22 nt, Artificial Sequence
  RPE65 RNA guide
uuugaauucuuuccugcucacu

SEQ ID NO: 19571 - RNA, 22 nt, Artificial Sequence
  RPE65 RNA guide
uuuggagcccuaaauuuucuuc

SEQ ID NO: 19572 - RNA, 22 nt, Artificial Sequence
  RPE65 RNA guide
uuuguuuuucagaggccuuucu

SEQ ID NO: 19573 - RNA, 22 nt, Artificial Sequence
  RPE65 RNA guide
uuuuacugaagagaaaauugau

SEQ ID NO: 19574 - RNA, 22 nt, Artificial Sequence
  RPE65 RNA guide
uuuuaggucaacaugcagggag

SEQ ID NO: 19575 - RNA, 22 nt, Artificial Sequence
  RPE65 RNA guide
uuuucagaggccuuucuuugga

SEQ ID NO: 19576 - RNA, 22 nt, Artificial Sequence
  RPE65 RNA guide
uuuucucuucaguaaaaugaga

SEQ ID NO: 19577 - RNA, 22 nt, Artificial Sequence
  RPE65 RNA guide
uuuucugcagaacaacaaagac

SEQ ID NO: 19578 - RNA, 22 nt, Artificial Sequence
  RPE65 RNA guide
uuuucuucaaggauggucucau

SEQ ID NO: 19579 - RNA, 22 nt, Artificial Sequence
  RPE65 RNA guide
uuuuguuuuucagaggccuuuc

SEQ ID NO: 19580 - RNA, 22 nt, Artificial Sequence
  RPE65 RNA guide
uuuuuaggucaacaugcaggga

SEQ ID NO: 19581 - RNA, 22 nt, Artificial Sequence
  RPE65 RNA guide
uuuuucagaggccuuucuuugg

SEQ ID NO: 19582 - RNA, 22 nt, Artificial Sequence
  RPE65 RNA guide
uuuuucugcagaacaacaaaga

SEQ ID NO: 19583 - RNA, 22 nt, Artificial Sequence
  RPE65 RNA guide
uuuuuguuuuucagaggccuuu

SEQ ID NO: 19584 - RNA, 22 nt, Artificial Sequence
  RPE65 RNA guide
uuuuuuaggucaacaugcaggg

SEQ ID NO: 19585 - RNA, 22 nt, Artificial Sequence
  RPE65 RNA guide
uuuuuuguuuuucagaggccuu

SEQ ID NO: 19586 - RNA, 20 nt, Artificial Sequence
  RPE65 RNA guide
aaaacuucacacgggaguga

SEQ ID NO: 19587 - RNA, 20 nt, Artificial Sequence
  RPE65 RNA guide
aaacauuuguucacucccgu

SEQ ID NO: 19588 - RNA, 20 nt, Artificial Sequence
  RPE65 RNA guide
aaacuucacacgggagugaa

SEQ ID NO: 19589 - RNA, 20 nt, Artificial Sequence
  RPE65 RNA guide
aaagaaacauuuguucacuc

SEQ ID NO: 19590 - RNA, 20 nt, Artificial Sequence
  RPE65 RNA guide
aaauagagcacaugcuuagg

SEQ ID NO: 19591 - RNA, 20 nt, Artificial Sequence
  RPE65 RNA guide
aacauuuguucacucccgug

SEQ ID NO: 19592 - RNA, 20 nt, Artificial Sequence
  RPE65 RNA guide
aacuucacacgggagugaac

SEQ ID NO: 19593 - RNA, 20 nt, Artificial Sequence
  RPE65 RNA guide
aagaaacauuuguucacucc

SEQ ID NO: 19594 - RNA, 20 nt, Artificial Sequence
  RPE65 RNA guide
aagagauuaagaguuuuccu

SEQ ID NO: 19595 - RNA, 20 nt, Artificial Sequence
  RPE65 RNA guide
aagaguuuuccuaagcaugu

SEQ ID NO: 19596 - RNA, 20 nt, Artificial Sequence
  RPE65 RNA guide
aauagagcacaugcuuagga

SEQ ID NO: 19597 - RNA, 20 nt, Artificial Sequence
  RPE65 RNA guide
acacgggagugaacaaaugu

SEQ ID NO: 19598 - RNA, 20 nt, Artificial Sequence
  RPE65 RNA guide
acaugcuuaggaaaacucuu

SEQ ID NO: 19599 - RNA, 20 nt, Artificial Sequence
  RPE65 RNA guide
acauuuguucacucccgugu

SEQ ID NO: 19600 - RNA, 20 nt, Artificial Sequence
  RPE65 RNA guide
acgaaauagagcacaugcuu

SEQ ID NO: 19601 - RNA, 20 nt, Artificial Sequence
  RPE65 RNA guide
acgggagugaacaaauguuu

SEQ ID NO: 19602 - RNA, 20 nt, Artificial Sequence
  RPE65 RNA guide
acucccgugugaaguuuucu

SEQ ID NO: 19603 - RNA, 20 nt, Artificial Sequence
  RPE65 RNA guide
acuucacacgggagugaaca

SEQ ID NO: 19604 - RNA, 20 nt, Artificial Sequence
  RPE65 RNA guide
agaaaacuucacacgggagu

SEQ ID NO: 19605 - RNA, 20 nt, Artificial Sequence
  RPE65 RNA guide
agaaacauuuguucacuccc

SEQ ID NO: 19606 - RNA, 20 nt, Artificial Sequence
  RPE65 RNA guide
agagaaaacuucacacggga

SEQ ID NO: 19607 - RNA, 20 nt, Artificial Sequence
  RPE65 RNA guide
agagauuaagaguuuuccua

SEQ ID NO: 19608 - RNA, 20 nt, Artificial Sequence
  RPE65 RNA guide
agagcacaugcuuaggaaaa

SEQ ID NO: 19609 - RNA, 20 nt, Artificial Sequence
  RPE65 RNA guide
agaguuuuccuaagcaugug

SEQ ID NO: 19610 - RNA, 20 nt, Artificial Sequence
  RPE65 RNA guide
agaugaucuagagaaaacuu

SEQ ID NO: 19611 - RNA, 20 nt, Artificial Sequence
  RPE65 RNA guide
agauuaagaguuuuccuaag

SEQ ID NO: 19612 - RNA, 20 nt, Artificial Sequence
  RPE65 RNA guide
agcacaugcuuaggaaaacu

SEQ ID NO: 19613 - RNA, 20 nt, Artificial Sequence
  RPE65 RNA guide
aguuuuccuaagcaugugcu

SEQ ID NO: 19614 - RNA, 20 nt, Artificial Sequence
  RPE65 RNA guide
auagagcacaugcuuaggaa

SEQ ID NO: 19615 - RNA, 20 nt, Artificial Sequence
  RPE65 RNA guide
aucuagagaaaacuucacac

SEQ ID NO: 19616 - RNA, 20 nt, Artificial Sequence
  RPE65 RNA guide
augaucuagagaaaacuuca

SEQ ID NO: 19617 - RNA, 20 nt, Artificial Sequence
  RPE65 RNA guide
augcuuaggaaaacucuuaa

SEQ ID NO: 19618 - RNA, 20 nt, Artificial Sequence
  RPE65 RNA guide
auuaagaguuuuccuaagca

SEQ ID NO: 19619 - RNA, 20 nt, Artificial Sequence
  RPE65 RNA guide
auuuguucacucccguguga

SEQ ID NO: 19620 - RNA, 20 nt, Artificial Sequence
  RPE65 RNA guide
cacacgggagugaacaaaug

SEQ ID NO: 19621 - RNA, 20 nt, Artificial Sequence
  RPE65 RNA guide
cacaugcuuaggaaaacucu

SEQ ID NO: 19622 - RNA, 20 nt, Artificial Sequence
  RPE65 RNA guide
cacgggagugaacaaauguu

SEQ ID NO: 19623 - RNA, 20 nt, Artificial Sequence
  RPE65 RNA guide
cacucccgugugaaguuuuc

SEQ ID NO: 19624 - RNA, 20 nt, Artificial Sequence
  RPE65 RNA guide
caugcuuaggaaaacucuua

SEQ ID NO: 19625 - RNA, 20 nt, Artificial Sequence
  RPE65 RNA guide
cauuuguucacucccgugug

SEQ ID NO: 19626 - RNA, 20 nt, Artificial Sequence
  RPE65 RNA guide
cccgugugaaguuuucucua

SEQ ID NO: 19627 - RNA, 20 nt, Artificial Sequence
  RPE65 RNA guide
ccgugugaaguuuucucuag

SEQ ID NO: 19628 - RNA, 20 nt, Artificial Sequence
  RPE65 RNA guide
ccuaagcaugugcucuauuu

SEQ ID NO: 19629 - RNA, 20 nt, Artificial Sequence
  RPE65 RNA guide
cgaaauagagcacaugcuua

SEQ ID NO: 19630 - RNA, 20 nt, Artificial Sequence
  RPE65 RNA guide
cgggagugaacaaauguuuc

SEQ ID NO: 19631 - RNA, 20 nt, Artificial Sequence
  RPE65 RNA guide
cgugugaaguuuucucuaga

SEQ ID NO: 19632 - RNA, 20 nt, Artificial Sequence
  RPE65 RNA guide
cuaagcaugugcucuauuuc

SEQ ID NO: 19633 - RNA, 20 nt, Artificial Sequence
  RPE65 RNA guide
cuacgaaauagagcacaugc

SEQ ID NO: 19634 - RNA, 20 nt, Artificial Sequence
  RPE65 RNA guide
cuagagaaaacuucacacgg

SEQ ID NO: 19635 - RNA, 20 nt, Artificial Sequence
  RPE65 RNA guide
cucccgugugaaguuuucuc

SEQ ID NO: 19636 - RNA, 20 nt, Artificial Sequence
  RPE65 RNA guide
cuucacacgggagugaacaa

SEQ ID NO: 19637 - RNA, 20 nt, Artificial Sequence
  RPE65 RNA guide
gaaaacuucacacgggagug

SEQ ID NO: 19638 - RNA, 20 nt, Artificial Sequence
  RPE65 RNA guide
gaaacauuuguucacucccg

SEQ ID NO: 19639 - RNA, 20 nt, Artificial Sequence
  RPE65 RNA guide
gaaagaaacauuuguucacu

SEQ ID NO: 19640 - RNA, 20 nt, Artificial Sequence
  RPE65 RNA guide
gaaauagagcacaugcuuag

SEQ ID NO: 19641 - RNA, 20 nt, Artificial Sequence
  RPE65 RNA guide
gagaaaacuucacacgggag

SEQ ID NO: 19642 - RNA, 20 nt, Artificial Sequence
  RPE65 RNA guide
gagaugaucuagagaaaacu

SEQ ID NO: 19643 - RNA, 20 nt, Artificial Sequence
  RPE65 RNA guide
gagauuaagaguuuuccuaa

SEQ ID NO: 19644 - RNA, 20 nt, Artificial Sequence
  RPE65 RNA guide
gagcacaugcuuaggaaaac

SEQ ID NO: 19645 - RNA, 20 nt, Artificial Sequence
  RPE65 RNA guide
gaguuuuccuaagcaugugc

SEQ ID NO: 19646 - RNA, 20 nt, Artificial Sequence
  RPE65 RNA guide
gaucuagagaaaacuucaca

SEQ ID NO: 19647 - RNA, 20 nt, Artificial Sequence
  RPE65 RNA guide
gaugaucuagagaaaacuuc

SEQ ID NO: 19648 - RNA, 20 nt, Artificial Sequence
  RPE65 RNA guide
gauuaagaguuuuccuaagc

SEQ ID NO: 19649 - RNA, 20 nt, Artificial Sequence
  RPE65 RNA guide
gcacaugcuuaggaaaacuc

SEQ ID NO: 19650 - RNA, 20 nt, Artificial Sequence
  RPE65 RNA guide
gcuuaggaaaacucuuaauc

SEQ ID NO: 19651 - RNA, 20 nt, Artificial Sequence
  RPE65 RNA guide
ggagugaacaaauguuucuu

SEQ ID NO: 19652 - RNA, 20 nt, Artificial Sequence
  RPE65 RNA guide
gggagugaacaaauguuucu

SEQ ID NO: 19653 - RNA, 20 nt, Artificial Sequence
  RPE65 RNA guide
gugaaguuuucucuagauca

SEQ ID NO: 19654 - RNA, 20 nt, Artificial Sequence
  RPE65 RNA guide
gugugaaguuuucucuagau

SEQ ID NO: 19655 - RNA, 20 nt, Artificial Sequence
  RPE65 RNA guide
guucacucccgugugaaguu

SEQ ID NO: 19656 - RNA, 20 nt, Artificial Sequence
  RPE65 RNA guide
guuuuccuaagcaugugcuc

SEQ ID NO: 19657 - RNA, 20 nt, Artificial Sequence
  RPE65 RNA guide
uaagaguuuuccuaagcaug

SEQ ID NO: 19658 - RNA, 20 nt, Artificial Sequence
  RPE65 RNA guide
uacgaaauagagcacaugcu

SEQ ID NO: 19659 - RNA, 20 nt, Artificial Sequence
  RPE65 RNA guide
uagagaaaacuucacacggg

SEQ ID NO: 19660 - RNA, 20 nt, Artificial Sequence
  RPE65 RNA guide
uagagcacaugcuuaggaaa

SEQ ID NO: 19661 - RNA, 20 nt, Artificial Sequence
  RPE65 RNA guide
ucacacgggagugaacaaau

SEQ ID NO: 19662 - RNA, 20 nt, Artificial Sequence
  RPE65 RNA guide
ucacucccgugugaaguuuu

SEQ ID NO: 19663 - RNA, 20 nt, Artificial Sequence
  RPE65 RNA guide
ucccgugugaaguuuucucu

SEQ ID NO: 19664 - RNA, 20 nt, Artificial Sequence
  RPE65 RNA guide
uccuaagcaugugcucuauu

SEQ ID NO: 19665 - RNA, 20 nt, Artificial Sequence
  RPE65 RNA guide
ucuagagaaaacuucacacg

SEQ ID NO: 19666 - RNA, 20 nt, Artificial Sequence
  RPE65 RNA guide
ugaaagaaacauuuguucac

SEQ ID NO: 19667 - RNA, 20 nt, Artificial Sequence
  RPE65 RNA guide
ugaaguuuucucuagaucau

SEQ ID NO: 19668 - RNA, 20 nt, Artificial Sequence
  RPE65 RNA guide
ugagaugaucuagagaaaac

SEQ ID NO: 19669 - RNA, 20 nt, Artificial Sequence
  RPE65 RNA guide
ugaucuagagaaaacuucac

SEQ ID NO: 19670 - RNA, 20 nt, Artificial Sequence
  RPE65 RNA guide
ugcuuaggaaaacucuuaau

SEQ ID NO: 19671 - RNA, 20 nt, Artificial Sequence
  RPE65 RNA guide
ugugaaguuuucucuagauc

SEQ ID NO: 19672 - RNA, 20 nt, Artificial Sequence
  RPE65 RNA guide
uguucacucccgugugaagu

SEQ ID NO: 19673 - RNA, 20 nt, Artificial Sequence
  RPE65 RNA guide
uuaagaguuuuccuaagcau

SEQ ID NO: 19674 - RNA, 20 nt, Artificial Sequence
  RPE65 RNA guide
uucacacgggagugaacaaa

SEQ ID NO: 19675 - RNA, 20 nt, Artificial Sequence
  RPE65 RNA guide
uucacucccgugugaaguuu

SEQ ID NO: 19676 - RNA, 20 nt, Artificial Sequence
  RPE65 RNA guide
uuccuaagcaugugcucuau

SEQ ID NO: 19677 - RNA, 20 nt, Artificial Sequence
  RPE65 RNA guide
uugaaagaaacauuuguuca

SEQ ID NO: 19678 - RNA, 20 nt, Artificial Sequence
  RPE65 RNA guide
uuguucacucccgugugaag

SEQ ID NO: 19679 - RNA, 20 nt, Artificial Sequence
  RPE65 RNA guide
uuuccuaagcaugugcucua

SEQ ID NO: 19680 - RNA, 20 nt, Artificial Sequence
  RPE65 RNA guide
uuuguucacucccgugugaa

SEQ ID NO: 19681 - RNA, 20 nt, Artificial Sequence
  RPE65 RNA guide
uuuuccuaagcaugugcucu

SEQ ID NO: 19682 - RNA, 21 nt, Artificial Sequence
  RPE65 RNA guide
aaaacuucacacgggagugaa

SEQ ID NO: 19683 - RNA, 21 nt, Artificial Sequence
  RPE65 RNA guide
aaacauuuguucacucccgug

SEQ ID NO: 19684 - RNA, 21 nt, Artificial Sequence
  RPE65 RNA guide
aaacuucacacgggagugaac

SEQ ID NO: 19685 - RNA, 21 nt, Artificial Sequence
  RPE65 RNA guide
aaagaaacauuuguucacucc

SEQ ID NO: 19686 - RNA, 21 nt, Artificial Sequence
  RPE65 RNA guide
aaagagauuaagaguuuuccu

SEQ ID NO: 19687 - RNA, 21 nt, Artificial Sequence
  RPE65 RNA guide
aaauagagcacaugcuuagga

SEQ ID NO: 19688 - RNA, 21 nt, Artificial Sequence
  RPE65 RNA guide
aacauuuguucacucccgugu

SEQ ID NO: 19689 - RNA, 21 nt, Artificial Sequence
  RPE65 RNA guide
aacuucacacgggagugaaca

SEQ ID NO: 19690 - RNA, 21 nt, Artificial Sequence
  RPE65 RNA guide
aagaaacauuuguucacuccc

SEQ ID NO: 19691 - RNA, 21 nt, Artificial Sequence
  RPE65 RNA guide
aagagauuaagaguuuuccua

SEQ ID NO: 19692 - RNA, 21 nt, Artificial Sequence
  RPE65 RNA guide
aagaguuuuccuaagcaugug

SEQ ID NO: 19693 - RNA, 21 nt, Artificial Sequence
  RPE65 RNA guide
aauagagcacaugcuuaggaa

SEQ ID NO: 19694 - RNA, 21 nt, Artificial Sequence
  RPE65 RNA guide
acacgggagugaacaaauguu

SEQ ID NO: 19695 - RNA, 21 nt, Artificial Sequence
  RPE65 RNA guide
acaugcuuaggaaaacucuua

SEQ ID NO: 19696 - RNA, 21 nt, Artificial Sequence
  RPE65 RNA guide
acauuuguucacucccgugug

SEQ ID NO: 19697 - RNA, 21 nt, Artificial Sequence
  RPE65 RNA guide
acgaaauagagcacaugcuua

SEQ ID NO: 19698 - RNA, 21 nt, Artificial Sequence
  RPE65 RNA guide
acgggagugaacaaauguuuc

SEQ ID NO: 19699 - RNA, 21 nt, Artificial Sequence
  RPE65 RNA guide
acucccgugugaaguuuucuc

SEQ ID NO: 19700 - RNA, 21 nt, Artificial Sequence
  RPE65 RNA guide
acuucacacgggagugaacaa

SEQ ID NO: 19701 - RNA, 21 nt, Artificial Sequence
  RPE65 RNA guide
agaaaacuucacacgggagug

SEQ ID NO: 19702 - RNA, 21 nt, Artificial Sequence
  RPE65 RNA guide
agaaacauuuguucacucccg

SEQ ID NO: 19703 - RNA, 21 nt, Artificial Sequence
  RPE65 RNA guide
agagaaaacuucacacgggag

SEQ ID NO: 19704 - RNA, 21 nt, Artificial Sequence
  RPE65 RNA guide
agagauuaagaguuuuccuaa

SEQ ID NO: 19705 - RNA, 21 nt, Artificial Sequence
  RPE65 RNA guide
agagcacaugcuuaggaaaac

SEQ ID NO: 19706 - RNA, 21 nt, Artificial Sequence
  RPE65 RNA guide
agaguuuuccuaagcaugugc

SEQ ID NO: 19707 - RNA, 21 nt, Artificial Sequence
  RPE65 RNA guide
agaugaucuagagaaaacuuc

SEQ ID NO: 19708 - RNA, 21 nt, Artificial Sequence
  RPE65 RNA guide
agauuaagaguuuuccuaagc

SEQ ID NO: 19709 - RNA, 21 nt, Artificial Sequence
  RPE65 RNA guide
agcacaugcuuaggaaaacuc

SEQ ID NO: 19710 - RNA, 21 nt, Artificial Sequence
  RPE65 RNA guide
aguuuuccuaagcaugugcuc

SEQ ID NO: 19711 - RNA, 21 nt, Artificial Sequence
  RPE65 RNA guide
auagagcacaugcuuaggaaa

SEQ ID NO: 19712 - RNA, 21 nt, Artificial Sequence
  RPE65 RNA guide
aucuagagaaaacuucacacg

SEQ ID NO: 19713 - RNA, 21 nt, Artificial Sequence
  RPE65 RNA guide
augaucuagagaaaacuucac

SEQ ID NO: 19714 - RNA, 21 nt, Artificial Sequence
  RPE65 RNA guide
augcuuaggaaaacucuuaau

SEQ ID NO: 19715 - RNA, 21 nt, Artificial Sequence
  RPE65 RNA guide
auuaagaguuuuccuaagcau

SEQ ID NO: 19716 - RNA, 21 nt, Artificial Sequence
  RPE65 RNA guide
auuuguucacucccgugugaa

SEQ ID NO: 19717 - RNA, 21 nt, Artificial Sequence
  RPE65 RNA guide
caaagagauuaagaguuuucc

SEQ ID NO: 19718 - RNA, 21 nt, Artificial Sequence
  RPE65 RNA guide
cacacgggagugaacaaaugu

SEQ ID NO: 19719 - RNA, 21 nt, Artificial Sequence
  RPE65 RNA guide
cacaugcuuaggaaaacucuu

SEQ ID NO: 19720 - RNA, 21 nt, Artificial Sequence
  RPE65 RNA guide
cacgggagugaacaaauguuu

SEQ ID NO: 19721 - RNA, 21 nt, Artificial Sequence
  RPE65 RNA guide
cacucccgugugaaguuuucu

SEQ ID NO: 19722 - RNA, 21 nt, Artificial Sequence
  RPE65 RNA guide
caugcuuaggaaaacucuuaa

SEQ ID NO: 19723 - RNA, 21 nt, Artificial Sequence
  RPE65 RNA guide
cauuuguucacucccguguga

SEQ ID NO: 19724 - RNA, 21 nt, Artificial Sequence
  RPE65 RNA guide
cccgugugaaguuuucucuag

SEQ ID NO: 19725 - RNA, 21 nt, Artificial Sequence
  RPE65 RNA guide
ccgugugaaguuuucucuaga

SEQ ID NO: 19726 - RNA, 21 nt, Artificial Sequence
  RPE65 RNA guide
ccuaagcaugugcucuauuuc

SEQ ID NO: 19727 - RNA, 21 nt, Artificial Sequence
  RPE65 RNA guide
cgaaauagagcacaugcuuag

SEQ ID NO: 19728 - RNA, 21 nt, Artificial Sequence
  RPE65 RNA guide
cgggagugaacaaauguuucu

SEQ ID NO: 19729 - RNA, 21 nt, Artificial Sequence
  RPE65 RNA guide
cgugugaaguuuucucuagau

SEQ ID NO: 19730 - RNA, 21 nt, Artificial Sequence
  RPE65 RNA guide
cuacgaaauagagcacaugcu

SEQ ID NO: 19731 - RNA, 21 nt, Artificial Sequence
  RPE65 RNA guide
cuagagaaaacuucacacggg

SEQ ID NO: 19732 - RNA, 21 nt, Artificial Sequence
  RPE65 RNA guide
cucccgugugaaguuuucucu

SEQ ID NO: 19733 - RNA, 21 nt, Artificial Sequence
  RPE65 RNA guide
cucuuugaaagaaacauuugu

SEQ ID NO: 19734 - RNA, 21 nt, Artificial Sequence
  RPE65 RNA guide
cuuaggaaaacucuuaaucuc

SEQ ID NO: 19735 - RNA, 21 nt, Artificial Sequence
  RPE65 RNA guide
cuucacacgggagugaacaaa

SEQ ID NO: 19736 - RNA, 21 nt, Artificial Sequence
  RPE65 RNA guide
cuuucaaagagauuaagaguu

SEQ ID NO: 19737 - RNA, 21 nt, Artificial Sequence
  RPE65 RNA guide
cuuugaaagaaacauuuguuc

SEQ ID NO: 19738 - RNA, 21 nt, Artificial Sequence
  RPE65 RNA guide
gaaaacuucacacgggaguga

SEQ ID NO: 19739 - RNA, 21 nt, Artificial Sequence
  RPE65 RNA guide
gaaacauuuguucacucccgu

SEQ ID NO: 19740 - RNA, 21 nt, Artificial Sequence
  RPE65 RNA guide
gaaagaaacauuuguucacuc

SEQ ID NO: 19741 - RNA, 21 nt, Artificial Sequence
  RPE65 RNA guide
gaaauagagcacaugcuuagg

SEQ ID NO: 19742 - RNA, 21 nt, Artificial Sequence
  RPE65 RNA guide
gagaaaacuucacacgggagu

SEQ ID NO: 19743 - RNA, 21 nt, Artificial Sequence
  RPE65 RNA guide
gagaugaucuagagaaaacuu

SEQ ID NO: 19744 - RNA, 21 nt, Artificial Sequence
  RPE65 RNA guide
gagauuaagaguuuuccuaag

SEQ ID NO: 19745 - RNA, 21 nt, Artificial Sequence
  RPE65 RNA guide
gagcacaugcuuaggaaaacu

SEQ ID NO: 19746 - RNA, 21 nt, Artificial Sequence
  RPE65 RNA guide
gagugaacaaauguuucuuuc

SEQ ID NO: 19747 - RNA, 21 nt, Artificial Sequence
  RPE65 RNA guide
gaguuuuccuaagcaugugcu

SEQ ID NO: 19748 - RNA, 21 nt, Artificial Sequence
  RPE65 RNA guide
gaucuagagaaaacuucacac

SEQ ID NO: 19749 - RNA, 21 nt, Artificial Sequence
  RPE65 RNA guide
gaugaucuagagaaaacuuca

SEQ ID NO: 19750 - RNA, 21 nt, Artificial Sequence
  RPE65 RNA guide
gauuaagaguuuuccuaagca

SEQ ID NO: 19751 - RNA, 21 nt, Artificial Sequence
  RPE65 RNA guide
gcacaugcuuaggaaaacucu

SEQ ID NO: 19752 - RNA, 21 nt, Artificial Sequence
  RPE65 RNA guide
gcuuaggaaaacucuuaaucu

SEQ ID NO: 19753 - RNA, 21 nt, Artificial Sequence
  RPE65 RNA guide
ggaaaacucuuaaucucuuug

SEQ ID NO: 19754 - RNA, 21 nt, Artificial Sequence
  RPE65 RNA guide
ggagugaacaaauguuucuuu

SEQ ID NO: 19755 - RNA, 21 nt, Artificial Sequence
  RPE65 RNA guide
gggagugaacaaauguuucuu

SEQ ID NO: 19756 - RNA, 21 nt, Artificial Sequence
  RPE65 RNA guide
gugaacaaauguuucuuucaa

SEQ ID NO: 19757 - RNA, 21 nt, Artificial Sequence
  RPE65 RNA guide
gugaaguuuucucuagaucau

SEQ ID NO: 19758 - RNA, 21 nt, Artificial Sequence
  RPE65 RNA guide
gugugaaguuuucucuagauc

SEQ ID NO: 19759 - RNA, 21 nt, Artificial Sequence
  RPE65 RNA guide
guucacucccgugugaaguuu

SEQ ID NO: 19760 - RNA, 21 nt, Artificial Sequence
  RPE65 RNA guide
guuuuccuaagcaugugcucu

SEQ ID NO: 19761 - RNA, 21 nt, Artificial Sequence
  RPE65 RNA guide
uaagaguuuuccuaagcaugu

SEQ ID NO: 19762 - RNA, 21 nt, Artificial Sequence
  RPE65 RNA guide
uacgaaauagagcacaugcuu

SEQ ID NO: 19763 - RNA, 21 nt, Artificial Sequence
  RPE65 RNA guide
uagagaaaacuucacacggga

SEQ ID NO: 19764 - RNA, 21 nt, Artificial Sequence
  RPE65 RNA guide
uagagcacaugcuuaggaaaa

SEQ ID NO: 19765 - RNA, 21 nt, Artificial Sequence
  RPE65 RNA guide
ucacacgggagugaacaaaug

SEQ ID NO: 19766 - RNA, 21 nt, Artificial Sequence
  RPE65 RNA guide
ucacucccgugugaaguuuuc

SEQ ID NO: 19767 - RNA, 21 nt, Artificial Sequence
  RPE65 RNA guide
ucccgugugaaguuuucucua

SEQ ID NO: 19768 - RNA, 21 nt, Artificial Sequence
  RPE65 RNA guide
uccuaagcaugugcucuauuu

SEQ ID NO: 19769 - RNA, 21 nt, Artificial Sequence
  RPE65 RNA guide
ucuagagaaaacuucacacgg

SEQ ID NO: 19770 - RNA, 21 nt, Artificial Sequence
  RPE65 RNA guide
ugaaagaaacauuuguucacu

SEQ ID NO: 19771 - RNA, 21 nt, Artificial Sequence
  RPE65 RNA guide
ugagaugaucuagagaaaacu

SEQ ID NO: 19772 - RNA, 21 nt, Artificial Sequence
  RPE65 RNA guide
ugaucuagagaaaacuucaca

SEQ ID NO: 19773 - RNA, 21 nt, Artificial Sequence
  RPE65 RNA guide
ugcuuaggaaaacucuuaauc

SEQ ID NO: 19774 - RNA, 21 nt, Artificial Sequence
  RPE65 RNA guide
ugugaaguuuucucuagauca

SEQ ID NO: 19775 - RNA, 21 nt, Artificial Sequence
  RPE65 RNA guide
uguucacucccgugugaaguu

SEQ ID NO: 19776 - RNA, 21 nt, Artificial Sequence
  RPE65 RNA guide
uuaagaguuuuccuaagcaug

SEQ ID NO: 19777 - RNA, 21 nt, Artificial Sequence
  RPE65 RNA guide
uucacacgggagugaacaaau

SEQ ID NO: 19778 - RNA, 21 nt, Artificial Sequence
  RPE65 RNA guide
uucacucccgugugaaguuuu

SEQ ID NO: 19779 - RNA, 21 nt, Artificial Sequence
  RPE65 RNA guide
uuccuaagcaugugcucuauu

SEQ ID NO: 19780 - RNA, 21 nt, Artificial Sequence
  RPE65 RNA guide
uugaaagaaacauuuguucac

SEQ ID NO: 19781 - RNA, 21 nt, Artificial Sequence
  RPE65 RNA guide
uuguucacucccgugugaagu

SEQ ID NO: 19782 - RNA, 21 nt, Artificial Sequence
  RPE65 RNA guide
uuuccuaagcaugugcucuau

SEQ ID NO: 19783 - RNA, 21 nt, Artificial Sequence
  RPE65 RNA guide
uuugaaagaaacauuuguuca

SEQ ID NO: 19784 - RNA, 21 nt, Artificial Sequence
  RPE65 RNA guide
uuuguucacucccgugugaag

SEQ ID NO: 19785 - RNA, 21 nt, Artificial Sequence
  RPE65 RNA guide
uuuuccuaagcaugugcucua

SEQ ID NO: 19786 - RNA, 22 nt, Artificial Sequence
  RPE65 RNA guide
aaaacuucacacgggagugaac

SEQ ID NO: 19787 - RNA, 22 nt, Artificial Sequence
  RPE65 RNA guide
aaacauuuguucacucccgugu

SEQ ID NO: 19788 - RNA, 22 nt, Artificial Sequence
  RPE65 RNA guide
aaacuucacacgggagugaaca

SEQ ID NO: 19789 - RNA, 22 nt, Artificial Sequence
  RPE65 RNA guide
aaagaaacauuuguucacuccc

SEQ ID NO: 19790 - RNA, 22 nt, Artificial Sequence
  RPE65 RNA guide
aaagagauuaagaguuuuccua

SEQ ID NO: 19791 - RNA, 22 nt, Artificial Sequence
  RPE65 RNA guide
aaauagagcacaugcuuaggaa

SEQ ID NO: 19792 - RNA, 22 nt, Artificial Sequence
  RPE65 RNA guide
aacauuuguucacucccgugug

SEQ ID NO: 19793 - RNA, 22 nt, Artificial Sequence
  RPE65 RNA guide
aacuucacacgggagugaacaa

SEQ ID NO: 19794 - RNA, 22 nt, Artificial Sequence
  RPE65 RNA guide
aagaaacauuuguucacucccg

SEQ ID NO: 19795 - RNA, 22 nt, Artificial Sequence
  RPE65 RNA guide
aagagauuaagaguuuuccuaa

SEQ ID NO: 19796 - RNA, 22 nt, Artificial Sequence
  RPE65 RNA guide
aagaguuuuccuaagcaugugc

SEQ ID NO: 19797 - RNA, 22 nt, Artificial Sequence
  RPE65 RNA guide
aauagagcacaugcuuaggaaa

SEQ ID NO: 19798 - RNA, 22 nt, Artificial Sequence
  RPE65 RNA guide
acacgggagugaacaaauguuu

SEQ ID NO: 19799 - RNA, 22 nt, Artificial Sequence
  RPE65 RNA guide
acaugcuuaggaaaacucuuaa

SEQ ID NO: 19800 - RNA, 22 nt, Artificial Sequence
  RPE65 RNA guide
acauuuguucacucccguguga

SEQ ID NO: 19801 - RNA, 22 nt, Artificial Sequence
  RPE65 RNA guide
acgaaauagagcacaugcuuag

SEQ ID NO: 19802 - RNA, 22 nt, Artificial Sequence
  RPE65 RNA guide
acgggagugaacaaauguuucu

SEQ ID NO: 19803 - RNA, 22 nt, Artificial Sequence
  RPE65 RNA guide
acucccgugugaaguuuucucu

SEQ ID NO: 19804 - RNA, 22 nt, Artificial Sequence
  RPE65 RNA guide
acuucacacgggagugaacaaa

SEQ ID NO: 19805 - RNA, 22 nt, Artificial Sequence
  RPE65 RNA guide
agaaaacuucacacgggaguga

SEQ ID NO: 19806 - RNA, 22 nt, Artificial Sequence
  RPE65 RNA guide
agaaacauuuguucacucccgu

SEQ ID NO: 19807 - RNA, 22 nt, Artificial Sequence
  RPE65 RNA guide
agagaaaacuucacacgggagu

SEQ ID NO: 19808 - RNA, 22 nt, Artificial Sequence
  RPE65 RNA guide
agagauuaagaguuuuccuaag

SEQ ID NO: 19809 - RNA, 22 nt, Artificial Sequence
  RPE65 RNA guide
agagcacaugcuuaggaaaacu

SEQ ID NO: 19810 - RNA, 22 nt, Artificial Sequence
  RPE65 RNA guide
agaguuuuccuaagcaugugcu

SEQ ID NO: 19811 - RNA, 22 nt, Artificial Sequence
  RPE65 RNA guide
agaugaucuagagaaaacuuca

SEQ ID NO: 19812 - RNA, 22 nt, Artificial Sequence
  RPE65 RNA guide
agauuaagaguuuuccuaagca

SEQ ID NO: 19813 - RNA, 22 nt, Artificial Sequence
  RPE65 RNA guide
agcacaugcuuaggaaaacucu

SEQ ID NO: 19814 - RNA, 22 nt, Artificial Sequence
  RPE65 RNA guide
aggaaaacucuuaaucucuuug

SEQ ID NO: 19815 - RNA, 22 nt, Artificial Sequence
  RPE65 RNA guide
agugaacaaauguuucuuucaa

SEQ ID NO: 19816 - RNA, 22 nt, Artificial Sequence
  RPE65 RNA guide
aguuuuccuaagcaugugcucu

SEQ ID NO: 19817 - RNA, 22 nt, Artificial Sequence
  RPE65 RNA guide
auagagcacaugcuuaggaaaa

SEQ ID NO: 19818 - RNA, 22 nt, Artificial Sequence
  RPE65 RNA guide
aucuagagaaaacuucacacgg

SEQ ID NO: 19819 - RNA, 22 nt, Artificial Sequence
  RPE65 RNA guide
augaucuagagaaaacuucaca

SEQ ID NO: 19820 - RNA, 22 nt, Artificial Sequence
  RPE65 RNA guide
augcuuaggaaaacucuuaauc

SEQ ID NO: 19821 - RNA, 22 nt, Artificial Sequence
  RPE65 RNA guide
auuaagaguuuuccuaagcaug

SEQ ID NO: 19822 - RNA, 22 nt, Artificial Sequence
  RPE65 RNA guide
auuuguucacucccgugugaag

SEQ ID NO: 19823 - RNA, 22 nt, Artificial Sequence
  RPE65 RNA guide
caaagagauuaagaguuuuccu

SEQ ID NO: 19824 - RNA, 22 nt, Artificial Sequence
  RPE65 RNA guide
cacacgggagugaacaaauguu

SEQ ID NO: 19825 - RNA, 22 nt, Artificial Sequence
  RPE65 RNA guide
cacaugcuuaggaaaacucuua

SEQ ID NO: 19826 - RNA, 22 nt, Artificial Sequence
  RPE65 RNA guide
cacgggagugaacaaauguuuc

SEQ ID NO: 19827 - RNA, 22 nt, Artificial Sequence
  RPE65 RNA guide
cacucccgugugaaguuuucuc

SEQ ID NO: 19828 - RNA, 22 nt, Artificial Sequence
  RPE65 RNA guide
caugcuuaggaaaacucuuaau

SEQ ID NO: 19829 - RNA, 22 nt, Artificial Sequence
  RPE65 RNA guide
cauuuguucacucccgugugaa

SEQ ID NO: 19830 - RNA, 22 nt, Artificial Sequence
  RPE65 RNA guide
cccgugugaaguuuucucuaga

SEQ ID NO: 19831 - RNA, 22 nt, Artificial Sequence
  RPE65 RNA guide
ccgugugaaguuuucucuagau

SEQ ID NO: 19832 - RNA, 22 nt, Artificial Sequence
  RPE65 RNA guide
cgaaauagagcacaugcuuagg

SEQ ID NO: 19833 - RNA, 22 nt, Artificial Sequence
  RPE65 RNA guide
cgggagugaacaaauguuucuu

SEQ ID NO: 19834 - RNA, 22 nt, Artificial Sequence
  RPE65 RNA guide
cgugugaaguuuucucuagauc

SEQ ID NO: 19835 - RNA, 22 nt, Artificial Sequence
  RPE65 RNA guide
cuacgaaauagagcacaugcuu

SEQ ID NO: 19836 - RNA, 22 nt, Artificial Sequence
  RPE65 RNA guide
cuagagaaaacuucacacggga

SEQ ID NO: 19837 - RNA, 22 nt, Artificial Sequence
  RPE65 RNA guide
cucccgugugaaguuuucucua

SEQ ID NO: 19838 - RNA, 22 nt, Artificial Sequence
  RPE65 RNA guide
cucuuugaaagaaacauuuguu

SEQ ID NO: 19839 - RNA, 22 nt, Artificial Sequence
  RPE65 RNA guide
cuuaggaaaacucuuaaucucu

SEQ ID NO: 19840 - RNA, 22 nt, Artificial Sequence
  RPE65 RNA guide
cuucacacgggagugaacaaau

SEQ ID NO: 19841 - RNA, 22 nt, Artificial Sequence
  RPE65 RNA guide
cuuucaaagagauuaagaguuu

SEQ ID NO: 19842 - RNA, 22 nt, Artificial Sequence
  RPE65 RNA guide
cuuugaaagaaacauuuguuca

SEQ ID NO: 19843 - RNA, 22 nt, Artificial Sequence
  RPE65 RNA guide
gaaaacuucacacgggagugaa

SEQ ID NO: 19844 - RNA, 22 nt, Artificial Sequence
  RPE65 RNA guide
gaaacauuuguucacucccgug

SEQ ID NO: 19845 - RNA, 22 nt, Artificial Sequence
  RPE65 RNA guide
gaaagaaacauuuguucacucc

SEQ ID NO: 19846 - RNA, 22 nt, Artificial Sequence
  RPE65 RNA guide
gaaauagagcacaugcuuagga

SEQ ID NO: 19847 - RNA, 22 nt, Artificial Sequence
  RPE65 RNA guide
gagaaaacuucacacgggagug

SEQ ID NO: 19848 - RNA, 22 nt, Artificial Sequence
  RPE65 RNA guide
gagaugaucuagagaaaacuuc

SEQ ID NO: 19849 - RNA, 22 nt, Artificial Sequence
  RPE65 RNA guide
gagauuaagaguuuuccuaagc

SEQ ID NO: 19850 - RNA, 22 nt, Artificial Sequence
  RPE65 RNA guide
gagcacaugcuuaggaaaacuc

SEQ ID NO: 19851 - RNA, 22 nt, Artificial Sequence
  RPE65 RNA guide
gagugaacaaauguuucuuuca

SEQ ID NO: 19852 - RNA, 22 nt, Artificial Sequence
  RPE65 RNA guide
gaguuuuccuaagcaugugcuc

SEQ ID NO: 19853 - RNA, 22 nt, Artificial Sequence
  RPE65 RNA guide
gaucuagagaaaacuucacacg

SEQ ID NO: 19854 - RNA, 22 nt, Artificial Sequence
  RPE65 RNA guide
gaugaucuagagaaaacuucac

SEQ ID NO: 19855 - RNA, 22 nt, Artificial Sequence
  RPE65 RNA guide
gauuaagaguuuuccuaagcau

SEQ ID NO: 19856 - RNA, 22 nt, Artificial Sequence
  RPE65 RNA guide
gcacaugcuuaggaaaacucuu

SEQ ID NO: 19857 - RNA, 22 nt, Artificial Sequence
  RPE65 RNA guide
gcuuaggaaaacucuuaaucuc

SEQ ID NO: 19858 - RNA, 22 nt, Artificial Sequence
  RPE65 RNA guide
ggaaaacucuuaaucucuuuga

SEQ ID NO: 19859 - RNA, 22 nt, Artificial Sequence
  RPE65 RNA guide
ggagugaacaaauguuucuuuc

SEQ ID NO: 19860 - RNA, 22 nt, Artificial Sequence
  RPE65 RNA guide
gggagugaacaaauguuucuuu

SEQ ID NO: 19861 - RNA, 22 nt, Artificial Sequence
  RPE65 RNA guide
gugaacaaauguuucuuucaaa

SEQ ID NO: 19862 - RNA, 22 nt, Artificial Sequence
  RPE65 RNA guide
gugugaaguuuucucuagauca

SEQ ID NO: 19863 - RNA, 22 nt, Artificial Sequence
  RPE65 RNA guide
guucacucccgugugaaguuuu

SEQ ID NO: 19864 - RNA, 22 nt, Artificial Sequence
  RPE65 RNA guide
guuuuccuaagcaugugcucua

SEQ ID NO: 19865 - RNA, 22 nt, Artificial Sequence
  RPE65 RNA guide
uaagaguuuuccuaagcaugug

SEQ ID NO: 19866 - RNA, 22 nt, Artificial Sequence
  RPE65 RNA guide
uacgaaauagagcacaugcuua

SEQ ID NO: 19867 - RNA, 22 nt, Artificial Sequence
  RPE65 RNA guide
uagagaaaacuucacacgggag

SEQ ID NO: 19868 - RNA, 22 nt, Artificial Sequence
  RPE65 RNA guide
uagagcacaugcuuaggaaaac

SEQ ID NO: 19869 - RNA, 22 nt, Artificial Sequence
  RPE65 RNA guide
ucaaagagauuaagaguuuucc

SEQ ID NO: 19870 - RNA, 22 nt, Artificial Sequence
  RPE65 RNA guide
ucacacgggagugaacaaaugu

SEQ ID NO: 19871 - RNA, 22 nt, Artificial Sequence
  RPE65 RNA guide
ucacucccgugugaaguuuucu

SEQ ID NO: 19872 - RNA, 22 nt, Artificial Sequence
  RPE65 RNA guide
ucccgugugaaguuuucucuag

SEQ ID NO: 19873 - RNA, 22 nt, Artificial Sequence
  RPE65 RNA guide
uccuaagcaugugcucuauuuc

SEQ ID NO: 19874 - RNA, 22 nt, Artificial Sequence
  RPE65 RNA guide
ucuagagaaaacuucacacggg

SEQ ID NO: 19875 - RNA, 22 nt, Artificial Sequence
  RPE65 RNA guide
ucucuuugaaagaaacauuugu

SEQ ID NO: 19876 - RNA, 22 nt, Artificial Sequence
  RPE65 RNA guide
ucuuucaaagagauuaagaguu

SEQ ID NO: 19877 - RNA, 22 nt, Artificial Sequence
  RPE65 RNA guide
ucuuugaaagaaacauuuguuc

SEQ ID NO: 19878 - RNA, 22 nt, Artificial Sequence
  RPE65 RNA guide
ugaaagaaacauuuguucacuc

SEQ ID NO: 19879 - RNA, 22 nt, Artificial Sequence
  RPE65 RNA guide
ugagaugaucuagagaaaacuu

SEQ ID NO: 19880 - RNA, 22 nt, Artificial Sequence
  RPE65 RNA guide
ugaucuagagaaaacuucacac

SEQ ID NO: 19881 - RNA, 22 nt, Artificial Sequence
  RPE65 RNA guide
ugcuuaggaaaacucuuaaucu

SEQ ID NO: 19882 - RNA, 22 nt, Artificial Sequence
  RPE65 RNA guide
ugugaaguuuucucuagaucau

SEQ ID NO: 19883 - RNA, 22 nt, Artificial Sequence
  RPE65 RNA guide
uguucacucccgugugaaguuu

SEQ ID NO: 19884 - RNA, 22 nt, Artificial Sequence
  RPE65 RNA guide
uuaagaguuuuccuaagcaugu

SEQ ID NO: 19885 - RNA, 22 nt, Artificial Sequence
  RPE65 RNA guide
uucacacgggagugaacaaaug

SEQ ID NO: 19886 - RNA, 22 nt, Artificial Sequence
  RPE65 RNA guide
uucacucccgugugaaguuuuc

SEQ ID NO: 19887 - RNA, 22 nt, Artificial Sequence
  RPE65 RNA guide
uuccuaagcaugugcucuauuu

SEQ ID NO: 19888 - RNA, 22 nt, Artificial Sequence
  RPE65 RNA guide
uugaaagaaacauuuguucacu

SEQ ID NO: 19889 - RNA, 22 nt, Artificial Sequence
  RPE65 RNA guide
uuguucacucccgugugaaguu

SEQ ID NO: 19890 - RNA, 22 nt, Artificial Sequence
  RPE65 RNA guide
uuuccuaagcaugugcucuauu

SEQ ID NO: 19891 - RNA, 22 nt, Artificial Sequence
  RPE65 RNA guide
uuugaaagaaacauuuguucac

SEQ ID NO: 19892 - RNA, 22 nt, Artificial Sequence
  RPE65 RNA guide
uuuguucacucccgugugaagu

SEQ ID NO: 19893 - RNA, 22 nt, Artificial Sequence
  RPE65 RNA guide
uuuuccuaagcaugugcucuau

SEQ ID NO: 19894 - RNA, 20 nt, Artificial Sequence
  RPE65 RNA guide
aaagcauauugacugauugc

SEQ ID NO: 19895 - RNA, 20 nt, Artificial Sequence
  RPE65 RNA guide
aacagugcuuugaguauaug

SEQ ID NO: 19896 - RNA, 20 nt, Artificial Sequence
  RPE65 RNA guide
aagcaaucagucaauaugcu

SEQ ID NO: 19897 - RNA, 20 nt, Artificial Sequence
  RPE65 RNA guide
aagcauauugacugauugcu

SEQ ID NO: 19898 - RNA, 20 nt, Artificial Sequence
  RPE65 RNA guide
aaguaaagcauauugacuga

SEQ ID NO: 19899 - RNA, 20 nt, Artificial Sequence
  RPE65 RNA guide
aaucaagcaaucagucaaua

SEQ ID NO: 19900 - RNA, 20 nt, Artificial Sequence
  RPE65 RNA guide
acagugcuuugaguauaugc

SEQ ID NO: 19901 - RNA, 20 nt, Artificial Sequence
  RPE65 RNA guide
acuagcauauacucaaagca

SEQ ID NO: 19902 - RNA, 20 nt, Artificial Sequence
  RPE65 RNA guide
acuugacuagcauauacuca

SEQ ID NO: 19903 - RNA, 20 nt, Artificial Sequence
  RPE65 RNA guide
agcaaucagucaauaugcuu

SEQ ID NO: 19904 - RNA, 20 nt, Artificial Sequence
  RPE65 RNA guide
agcauauacucaaagcacug

SEQ ID NO: 19905 - RNA, 20 nt, Artificial Sequence
  RPE65 RNA guide
agcauauugacugauugcuu

SEQ ID NO: 19906 - RNA, 20 nt, Artificial Sequence
  RPE65 RNA guide
aguaaagcauauugacugau

SEQ ID NO: 19907 - RNA, 20 nt, Artificial Sequence
  RPE65 RNA guide
aguauaugcuagucaaguaa

SEQ ID NO: 19908 - RNA, 20 nt, Artificial Sequence
  RPE65 RNA guide
agucaaguaaagcauauuga

SEQ ID NO: 19909 - RNA, 20 nt, Artificial Sequence
  RPE65 RNA guide
agucaauaugcuuuacuuga

SEQ ID NO: 19910 - RNA, 20 nt, Artificial Sequence
  RPE65 RNA guide
agugcuuugaguauaugcua

SEQ ID NO: 19911 - RNA, 20 nt, Artificial Sequence
  RPE65 RNA guide
aucaagcaaucagucaauau

SEQ ID NO: 19912 - RNA, 20 nt, Artificial Sequence
  RPE65 RNA guide
aucagucaauaugcuuuacu

SEQ ID NO: 19913 - RNA, 20 nt, Artificial Sequence
  RPE65 RNA guide
augcuagucaaguaaagcau

SEQ ID NO: 19914 - RNA, 20 nt, Artificial Sequence
  RPE65 RNA guide
augcuuuacuugacuagcau

SEQ ID NO: 19915 - RNA, 20 nt, Artificial Sequence
  RPE65 RNA guide
caagcaaucagucaauaugc

SEQ ID NO: 19916 - RNA, 20 nt, Artificial Sequence
  RPE65 RNA guide
caaguaaagcauauugacug

SEQ ID NO: 19917 - RNA, 20 nt, Artificial Sequence
  RPE65 RNA guide
caauaugcuuuacuugacua

SEQ ID NO: 19918 - RNA, 20 nt, Artificial Sequence
  RPE65 RNA guide
caaucaagcaaucagucaau

SEQ ID NO: 19919 - RNA, 20 nt, Artificial Sequence
  RPE65 RNA guide
caaucagucaauaugcuuua

SEQ ID NO: 19920 - RNA, 20 nt, Artificial Sequence
  RPE65 RNA guide
cagucaauaugcuuuacuug

SEQ ID NO: 19921 - RNA, 20 nt, Artificial Sequence
  RPE65 RNA guide
cagugcuuugaguauaugcu

SEQ ID NO: 19922 - RNA, 20 nt, Artificial Sequence
  RPE65 RNA guide
cauauacucaaagcacuguu

SEQ ID NO: 19923 - RNA, 20 nt, Artificial Sequence
  RPE65 RNA guide
cauauugacugauugcuuga

SEQ ID NO: 19924 - RNA, 20 nt, Artificial Sequence
  RPE65 RNA guide
cuaauauuugaacagugcuu

SEQ ID NO: 19925 - RNA, 20 nt, Artificial Sequence
  RPE65 RNA guide
cuagcauauacucaaagcac

SEQ ID NO: 19926 - RNA, 20 nt, Artificial Sequence
  RPE65 RNA guide
cuagucaaguaaagcauauu

SEQ ID NO: 19927 - RNA, 20 nt, Artificial Sequence
  RPE65 RNA guide
cucaaagcacuguucaaaua

SEQ ID NO: 19928 - RNA, 20 nt, Artificial Sequence
  RPE65 RNA guide
cuugacuagcauauacucaa

SEQ ID NO: 19929 - RNA, 20 nt, Artificial Sequence
  RPE65 RNA guide
cuuuacuugacuagcauaua

SEQ ID NO: 19930 - RNA, 20 nt, Artificial Sequence
  RPE65 RNA guide
cuuugaguauaugcuaguca

SEQ ID NO: 19931 - RNA, 20 nt, Artificial Sequence
  RPE65 RNA guide
gaaaaaucaaucaagcaauc

SEQ ID NO: 19932 - RNA, 20 nt, Artificial Sequence
  RPE65 RNA guide
gaacagugcuuugaguauau

SEQ ID NO: 19933 - RNA, 20 nt, Artificial Sequence
  RPE65 RNA guide
gacuagcauauacucaaagc

SEQ ID NO: 19934 - RNA, 20 nt, Artificial Sequence
  RPE65 RNA guide
gacugauugcuugauugauu

SEQ ID NO: 19935 - RNA, 20 nt, Artificial Sequence
  RPE65 RNA guide
gaguauaugcuagucaagua

SEQ ID NO: 19936 - RNA, 20 nt, Artificial Sequence
  RPE65 RNA guide
gcaaucagucaauaugcuuu

SEQ ID NO: 19937 - RNA, 20 nt, Artificial Sequence
  RPE65 RNA guide
gcauauacucaaagcacugu

SEQ ID NO: 19938 - RNA, 20 nt, Artificial Sequence
  RPE65 RNA guide
gcauauugacugauugcuug

SEQ ID NO: 19939 - RNA, 20 nt, Artificial Sequence
  RPE65 RNA guide
gcuagucaaguaaagcauau

SEQ ID NO: 19940 - RNA, 20 nt, Artificial Sequence
  RPE65 RNA guide
gcuugauugauuuuucuuuc

SEQ ID NO: 19941 - RNA, 20 nt, Artificial Sequence
  RPE65 RNA guide
gcuuuacuugacuagcauau

SEQ ID NO: 19942 - RNA, 20 nt, Artificial Sequence
  RPE65 RNA guide
gcuuugaguauaugcuaguc

SEQ ID NO: 19943 - RNA, 20 nt, Artificial Sequence
  RPE65 RNA guide
guaaagcauauugacugauu

SEQ ID NO: 19944 - RNA, 20 nt, Artificial Sequence
  RPE65 RNA guide
guauaugcuagucaaguaaa

SEQ ID NO: 19945 - RNA, 20 nt, Artificial Sequence
  RPE65 RNA guide
gucaaguaaagcauauugac

SEQ ID NO: 19946 - RNA, 20 nt, Artificial Sequence
  RPE65 RNA guide
gucaauaugcuuuacuugac

SEQ ID NO: 19947 - RNA, 20 nt, Artificial Sequence
  RPE65 RNA guide
gugagaaagaaaaaucaauc

SEQ ID NO: 19948 - RNA, 20 nt, Artificial Sequence
  RPE65 RNA guide
gugcuuugaguauaugcuag

SEQ ID NO: 19949 - RNA, 20 nt, Artificial Sequence
  RPE65 RNA guide
uaaagcauauugacugauug

SEQ ID NO: 19950 - RNA, 20 nt, Artificial Sequence
  RPE65 RNA guide
uacuugacuagcauauacuc

SEQ ID NO: 19951 - RNA, 20 nt, Artificial Sequence
  RPE65 RNA guide
uagcauauacucaaagcacu

SEQ ID NO: 19952 - RNA, 20 nt, Artificial Sequence
  RPE65 RNA guide
uagucaaguaaagcauauug

SEQ ID NO: 19953 - RNA, 20 nt, Artificial Sequence
  RPE65 RNA guide
ucaagcaaucagucaauaug

SEQ ID NO: 19954 - RNA, 20 nt, Artificial Sequence
  RPE65 RNA guide
ucaauaugcuuuacuugacu

SEQ ID NO: 19955 - RNA, 20 nt, Artificial Sequence
  RPE65 RNA guide
ucaaucaagcaaucagucaa

SEQ ID NO: 19956 - RNA, 20 nt, Artificial Sequence
  RPE65 RNA guide
ucagucaauaugcuuuacuu

SEQ ID NO: 19957 - RNA, 20 nt, Artificial Sequence
  RPE65 RNA guide
ugaacagugcuuugaguaua

SEQ ID NO: 19958 - RNA, 20 nt, Artificial Sequence
  RPE65 RNA guide
ugacuagcauauacucaaag

SEQ ID NO: 19959 - RNA, 20 nt, Artificial Sequence
  RPE65 RNA guide
ugaguauaugcuagucaagu

SEQ ID NO: 19960 - RNA, 20 nt, Artificial Sequence
  RPE65 RNA guide
ugcuagucaaguaaagcaua

SEQ ID NO: 19961 - RNA, 20 nt, Artificial Sequence
  RPE65 RNA guide
ugcuuuacuugacuagcaua

SEQ ID NO: 19962 - RNA, 20 nt, Artificial Sequence
  RPE65 RNA guide
ugcuuugaguauaugcuagu

SEQ ID NO: 19963 - RNA, 20 nt, Artificial Sequence
  RPE65 RNA guide
uugaacagugcuuugaguau

SEQ ID NO: 19964 - RNA, 20 nt, Artificial Sequence
  RPE65 RNA guide
uugacuagcauauacucaaa

SEQ ID NO: 19965 - RNA, 20 nt, Artificial Sequence
  RPE65 RNA guide
uuugaacagugcuuugagua

SEQ ID NO: 19966 - RNA, 21 nt, Artificial Sequence
  RPE65 RNA guide
aaagcauauugacugauugcu

SEQ ID NO: 19967 - RNA, 21 nt, Artificial Sequence
  RPE65 RNA guide
aacagugcuuugaguauaugc

SEQ ID NO: 19968 - RNA, 21 nt, Artificial Sequence
  RPE65 RNA guide
aagcaaucagucaauaugcuu

SEQ ID NO: 19969 - RNA, 21 nt, Artificial Sequence
  RPE65 RNA guide
aagcauauugacugauugcuu

SEQ ID NO: 19970 - RNA, 21 nt, Artificial Sequence
  RPE65 RNA guide
aaguaaagcauauugacugau

SEQ ID NO: 19971 - RNA, 21 nt, Artificial Sequence
  RPE65 RNA guide
aaucaagcaaucagucaauau

SEQ ID NO: 19972 - RNA, 21 nt, Artificial Sequence
  RPE65 RNA guide
aaucagucaauaugcuuuacu

SEQ ID NO: 19973 - RNA, 21 nt, Artificial Sequence
  RPE65 RNA guide
acagugcuuugaguauaugcu

SEQ ID NO: 19974 - RNA, 21 nt, Artificial Sequence
  RPE65 RNA guide
acuaauauuugaacagugcuu

SEQ ID NO: 19975 - RNA, 21 nt, Artificial Sequence
  RPE65 RNA guide
acuagcauauacucaaagcac

SEQ ID NO: 19976 - RNA, 21 nt, Artificial Sequence
  RPE65 RNA guide
acucaaagcacuguucaaaua

SEQ ID NO: 19977 - RNA, 21 nt, Artificial Sequence
  RPE65 RNA guide
acuugacuagcauauacucaa

SEQ ID NO: 19978 - RNA, 21 nt, Artificial Sequence
  RPE65 RNA guide
agaaaaaucaaucaagcaauc

SEQ ID NO: 19979 - RNA, 21 nt, Artificial Sequence
  RPE65 RNA guide
agcaaucagucaauaugcuuu

SEQ ID NO: 19980 - RNA, 21 nt, Artificial Sequence
  RPE65 RNA guide
agcauauacucaaagcacugu

SEQ ID NO: 19981 - RNA, 21 nt, Artificial Sequence
  RPE65 RNA guide
agcauauugacugauugcuug

SEQ ID NO: 19982 - RNA, 21 nt, Artificial Sequence
  RPE65 RNA guide
aguaaagcauauugacugauu

SEQ ID NO: 19983 - RNA, 21 nt, Artificial Sequence
  RPE65 RNA guide
aguauaugcuagucaaguaaa

SEQ ID NO: 19984 - RNA, 21 nt, Artificial Sequence
  RPE65 RNA guide
agucaaguaaagcauauugac

SEQ ID NO: 19985 - RNA, 21 nt, Artificial Sequence
  RPE65 RNA guide
agucaauaugcuuuacuugac

SEQ ID NO: 19986 - RNA, 21 nt, Artificial Sequence
  RPE65 RNA guide
agugcuuugaguauaugcuag

SEQ ID NO: 19987 - RNA, 21 nt, Artificial Sequence
  RPE65 RNA guide
aucaagcaaucagucaauaug

SEQ ID NO: 19988 - RNA, 21 nt, Artificial Sequence
  RPE65 RNA guide
aucaaucaagcaaucagucaa

SEQ ID NO: 19989 - RNA, 21 nt, Artificial Sequence
  RPE65 RNA guide
aucagucaauaugcuuuacuu

SEQ ID NO: 19990 - RNA, 21 nt, Artificial Sequence
  RPE65 RNA guide
augcuagucaaguaaagcaua

SEQ ID NO: 19991 - RNA, 21 nt, Artificial Sequence
  RPE65 RNA guide
augcuuuacuugacuagcaua

SEQ ID NO: 19992 - RNA, 21 nt, Artificial Sequence
  RPE65 RNA guide
auuugaacagugcuuugagua

SEQ ID NO: 19993 - RNA, 21 nt, Artificial Sequence
  RPE65 RNA guide
caagcaaucagucaauaugcu

SEQ ID NO: 19994 - RNA, 21 nt, Artificial Sequence
  RPE65 RNA guide
caaguaaagcauauugacuga

SEQ ID NO: 19995 - RNA, 21 nt, Artificial Sequence
  RPE65 RNA guide
caauaugcuuuacuugacuag

SEQ ID NO: 19996 - RNA, 21 nt, Artificial Sequence
  RPE65 RNA guide
caaucaagcaaucagucaaua

SEQ ID NO: 19997 - RNA, 21 nt, Artificial Sequence
  RPE65 RNA guide
caaucagucaauaugcuuuac

SEQ ID NO: 19998 - RNA, 21 nt, Artificial Sequence
  RPE65 RNA guide
cacuguucaaauauuaguaag

SEQ ID NO: 19999 - RNA, 21 nt, Artificial Sequence
  RPE65 RNA guide
cagucaauaugcuuuacuuga

SEQ ID NO: 20000 - RNA, 21 nt, Artificial Sequence
  RPE65 RNA guide
cagugcuuugaguauaugcua

SEQ ID NO: 20001 - RNA, 21 nt, Artificial Sequence
  RPE65 RNA guide
cauauacucaaagcacuguuc

SEQ ID NO: 20002 - RNA, 21 nt, Artificial Sequence
  RPE65 RNA guide
cauauugacugauugcuugau

SEQ ID NO: 20003 - RNA, 21 nt, Artificial Sequence
  RPE65 RNA guide
ccuucuuacuaauauuugaac

SEQ ID NO: 20004 - RNA, 21 nt, Artificial Sequence
  RPE65 RNA guide
cuaauauuugaacagugcuuu

SEQ ID NO: 20005 - RNA, 21 nt, Artificial Sequence
  RPE65 RNA guide
cuagcauauacucaaagcacu

SEQ ID NO: 20006 - RNA, 21 nt, Artificial Sequence
  RPE65 RNA guide
cuagucaaguaaagcauauug

SEQ ID NO: 20007 - RNA, 21 nt, Artificial Sequence
  RPE65 RNA guide
cucaaagcacuguucaaauau

SEQ ID NO: 20008 - RNA, 21 nt, Artificial Sequence
  RPE65 RNA guide
cuucuuacuaauauuugaaca

SEQ ID NO: 20009 - RNA, 21 nt, Artificial Sequence
  RPE65 RNA guide
cuugacuagcauauacucaaa

SEQ ID NO: 20010 - RNA, 21 nt, Artificial Sequence
  RPE65 RNA guide
cuuuacuugacuagcauauac

SEQ ID NO: 20011 - RNA, 21 nt, Artificial Sequence
  RPE65 RNA guide
cuuugaguauaugcuagucaa

SEQ ID NO: 20012 - RNA, 21 nt, Artificial Sequence
  RPE65 RNA guide
gaaaaaucaaucaagcaauca

SEQ ID NO: 20013 - RNA, 21 nt, Artificial Sequence
  RPE65 RNA guide
gaacagugcuuugaguauaug

SEQ ID NO: 20014 - RNA, 21 nt, Artificial Sequence
  RPE65 RNA guide
gacuagcauauacucaaagca

SEQ ID NO: 20015 - RNA, 21 nt, Artificial Sequence
  RPE65 RNA guide
gacugauugcuugauugauuu

SEQ ID NO: 20016 - RNA, 21 nt, Artificial Sequence
  RPE65 RNA guide
gaguauaugcuagucaaguaa

SEQ ID NO: 20017 - RNA, 21 nt, Artificial Sequence
  RPE65 RNA guide
gcaaucagucaauaugcuuua

SEQ ID NO: 20018 - RNA, 21 nt, Artificial Sequence
  RPE65 RNA guide
gcacuguucaaauauuaguaa

SEQ ID NO: 20019 - RNA, 21 nt, Artificial Sequence
  RPE65 RNA guide
gcauauacucaaagcacuguu

SEQ ID NO: 20020 - RNA, 21 nt, Artificial Sequence
  RPE65 RNA guide
gcauauugacugauugcuuga

SEQ ID NO: 20021 - RNA, 21 nt, Artificial Sequence
  RPE65 RNA guide
gcuagucaaguaaagcauauu

SEQ ID NO: 20022 - RNA, 21 nt, Artificial Sequence
  RPE65 RNA guide
gcuugauugauuuuucuuucu

SEQ ID NO: 20023 - RNA, 21 nt, Artificial Sequence
  RPE65 RNA guide
gcuuuacuugacuagcauaua

SEQ ID NO: 20024 - RNA, 21 nt, Artificial Sequence
  RPE65 RNA guide
gcuuugaguauaugcuaguca

SEQ ID NO: 20025 - RNA, 21 nt, Artificial Sequence
  RPE65 RNA guide
guaaagcauauugacugauug

SEQ ID NO: 20026 - RNA, 21 nt, Artificial Sequence
  RPE65 RNA guide
guauaugcuagucaaguaaag

SEQ ID NO: 20027 - RNA, 21 nt, Artificial Sequence
  RPE65 RNA guide
gucaaguaaagcauauugacu

SEQ ID NO: 20028 - RNA, 21 nt, Artificial Sequence
  RPE65 RNA guide
gucaauaugcuuuacuugacu

SEQ ID NO: 20029 - RNA, 21 nt, Artificial Sequence
  RPE65 RNA guide
gugagaaagaaaaaucaauca

SEQ ID NO: 20030 - RNA, 21 nt, Artificial Sequence
  RPE65 RNA guide
gugcuuugaguauaugcuagu

SEQ ID NO: 20031 - RNA, 21 nt, Artificial Sequence
  RPE65 RNA guide
uaaagcauauugacugauugc

SEQ ID NO: 20032 - RNA, 21 nt, Artificial Sequence
  RPE65 RNA guide
uacuugacuagcauauacuca

SEQ ID NO: 20033 - RNA, 21 nt, Artificial Sequence
  RPE65 RNA guide
uagcauauacucaaagcacug

SEQ ID NO: 20034 - RNA, 21 nt, Artificial Sequence
  RPE65 RNA guide
uagucaaguaaagcauauuga

SEQ ID NO: 20035 - RNA, 21 nt, Artificial Sequence
  RPE65 RNA guide
uaugcuagucaaguaaagcau

SEQ ID NO: 20036 - RNA, 21 nt, Artificial Sequence
  RPE65 RNA guide
uaugcuuuacuugacuagcau

SEQ ID NO: 20037 - RNA, 21 nt, Artificial Sequence
  RPE65 RNA guide
ucaagcaaucagucaauaugc

SEQ ID NO: 20038 - RNA, 21 nt, Artificial Sequence
  RPE65 RNA guide
ucaaguaaagcauauugacug

SEQ ID NO: 20039 - RNA, 21 nt, Artificial Sequence
  RPE65 RNA guide
ucaauaugcuuuacuugacua

SEQ ID NO: 20040 - RNA, 21 nt, Artificial Sequence
  RPE65 RNA guide
ucaaucaagcaaucagucaau

SEQ ID NO: 20041 - RNA, 21 nt, Artificial Sequence
  RPE65 RNA guide
ucagucaauaugcuuuacuug

SEQ ID NO: 20042 - RNA, 21 nt, Artificial Sequence
  RPE65 RNA guide
ugaacagugcuuugaguauau

SEQ ID NO: 20043 - RNA, 21 nt, Artificial Sequence
  RPE65 RNA guide
ugacuagcauauacucaaagc

SEQ ID NO: 20044 - RNA, 21 nt, Artificial Sequence
  RPE65 RNA guide
ugacugauugcuugauugauu

SEQ ID NO: 20045 - RNA, 21 nt, Artificial Sequence
  RPE65 RNA guide
ugaguauaugcuagucaagua

SEQ ID NO: 20046 - RNA, 21 nt, Artificial Sequence
  RPE65 RNA guide
ugcuagucaaguaaagcauau

SEQ ID NO: 20047 - RNA, 21 nt, Artificial Sequence
  RPE65 RNA guide
ugcuugauugauuuuucuuuc

SEQ ID NO: 20048 - RNA, 21 nt, Artificial Sequence
  RPE65 RNA guide
ugcuuuacuugacuagcauau

SEQ ID NO: 20049 - RNA, 21 nt, Artificial Sequence
  RPE65 RNA guide
ugcuuugaguauaugcuaguc

SEQ ID NO: 20050 - RNA, 21 nt, Artificial Sequence
  RPE65 RNA guide
ugugagaaagaaaaaucaauc

SEQ ID NO: 20051 - RNA, 21 nt, Artificial Sequence
  RPE65 RNA guide
uuacuugacuagcauauacuc

SEQ ID NO: 20052 - RNA, 21 nt, Artificial Sequence
  RPE65 RNA guide
uugaacagugcuuugaguaua

SEQ ID NO: 20053 - RNA, 21 nt, Artificial Sequence
  RPE65 RNA guide
uugacuagcauauacucaaag

SEQ ID NO: 20054 - RNA, 21 nt, Artificial Sequence
  RPE65 RNA guide
uugaguauaugcuagucaagu

SEQ ID NO: 20055 - RNA, 21 nt, Artificial Sequence
  RPE65 RNA guide
uuugaacagugcuuugaguau

SEQ ID NO: 20056 - RNA, 22 nt, Artificial Sequence
  RPE65 RNA guide
aaagcauauugacugauugcuu

SEQ ID NO: 20057 - RNA, 22 nt, Artificial Sequence
  RPE65 RNA guide
aacagugcuuugaguauaugcu

SEQ ID NO: 20058 - RNA, 22 nt, Artificial Sequence
  RPE65 RNA guide
aagaaaaaucaaucaagcaauc

SEQ ID NO: 20059 - RNA, 22 nt, Artificial Sequence
  RPE65 RNA guide
aagcaaucagucaauaugcuuu

SEQ ID NO: 20060 - RNA, 22 nt, Artificial Sequence
  RPE65 RNA guide
aagcauauugacugauugcuug

SEQ ID NO: 20061 - RNA, 22 nt, Artificial Sequence
  RPE65 RNA guide
aaguaaagcauauugacugauu

SEQ ID NO: 20062 - RNA, 22 nt, Artificial Sequence
  RPE65 RNA guide
aaucaagcaaucagucaauaug

SEQ ID NO: 20063 - RNA, 22 nt, Artificial Sequence
  RPE65 RNA guide
aaucaaucaagcaaucagucaa

SEQ ID NO: 20064 - RNA, 22 nt, Artificial Sequence
  RPE65 RNA guide
aaucagucaauaugcuuuacuu

SEQ ID NO: 20065 - RNA, 22 nt, Artificial Sequence
  RPE65 RNA guide
acagugcuuugaguauaugcua

SEQ ID NO: 20066 - RNA, 22 nt, Artificial Sequence
  RPE65 RNA guide
acuaauauuugaacagugcuuu

SEQ ID NO: 20067 - RNA, 22 nt, Artificial Sequence
  RPE65 RNA guide
acuagcauauacucaaagcacu

SEQ ID NO: 20068 - RNA, 22 nt, Artificial Sequence
  RPE65 RNA guide
acucaaagcacuguucaaauau

SEQ ID NO: 20069 - RNA, 22 nt, Artificial Sequence
  RPE65 RNA guide
acuugacuagcauauacucaaa

SEQ ID NO: 20070 - RNA, 22 nt, Artificial Sequence
  RPE65 RNA guide
agaaaaaucaaucaagcaauca

SEQ ID NO: 20071 - RNA, 22 nt, Artificial Sequence
  RPE65 RNA guide
agcaaucagucaauaugcuuua

SEQ ID NO: 20072 - RNA, 22 nt, Artificial Sequence
  RPE65 RNA guide
agcacuguucaaauauuaguaa

SEQ ID NO: 20073 - RNA, 22 nt, Artificial Sequence
  RPE65 RNA guide
agcauauacucaaagcacuguu

SEQ ID NO: 20074 - RNA, 22 nt, Artificial Sequence
  RPE65 RNA guide
agcauauugacugauugcuuga

SEQ ID NO: 20075 - RNA, 22 nt, Artificial Sequence
  RPE65 RNA guide
aguaaagcauauugacugauug

SEQ ID NO: 20076 - RNA, 22 nt, Artificial Sequence
  RPE65 RNA guide
aguauaugcuagucaaguaaag

SEQ ID NO: 20077 - RNA, 22 nt, Artificial Sequence
  RPE65 RNA guide
agucaaguaaagcauauugacu

SEQ ID NO: 20078 - RNA, 22 nt, Artificial Sequence
  RPE65 RNA guide
agucaauaugcuuuacuugacu

SEQ ID NO: 20079 - RNA, 22 nt, Artificial Sequence
  RPE65 RNA guide
agugcuuugaguauaugcuagu

SEQ ID NO: 20080 - RNA, 22 nt, Artificial Sequence
  RPE65 RNA guide
auaugcuagucaaguaaagcau

SEQ ID NO: 20081 - RNA, 22 nt, Artificial Sequence
  RPE65 RNA guide
auaugcuuuacuugacuagcau

SEQ ID NO: 20082 - RNA, 22 nt, Artificial Sequence
  RPE65 RNA guide
aucaagcaaucagucaauaugc

SEQ ID NO: 20083 - RNA, 22 nt, Artificial Sequence
  RPE65 RNA guide
aucaaucaagcaaucagucaau

SEQ ID NO: 20084 - RNA, 22 nt, Artificial Sequence
  RPE65 RNA guide
aucagucaauaugcuuuacuug

SEQ ID NO: 20085 - RNA, 22 nt, Artificial Sequence
  RPE65 RNA guide
augcuagucaaguaaagcauau

SEQ ID NO: 20086 - RNA, 22 nt, Artificial Sequence
  RPE65 RNA guide
augcuuuacuugacuagcauau

SEQ ID NO: 20087 - RNA, 22 nt, Artificial Sequence
  RPE65 RNA guide
auuugaacagugcuuugaguau

SEQ ID NO: 20088 - RNA, 22 nt, Artificial Sequence
  RPE65 RNA guide
caaagcacuguucaaauauuag

SEQ ID NO: 20089 - RNA, 22 nt, Artificial Sequence
  RPE65 RNA guide
caagcaaucagucaauaugcuu

SEQ ID NO: 20090 - RNA, 22 nt, Artificial Sequence
  RPE65 RNA guide
caaguaaagcauauugacugau

SEQ ID NO: 20091 - RNA, 22 nt, Artificial Sequence
  RPE65 RNA guide
caauaugcuuuacuugacuagc

SEQ ID NO: 20092 - RNA, 22 nt, Artificial Sequence
  RPE65 RNA guide
caaucaagcaaucagucaauau

SEQ ID NO: 20093 - RNA, 22 nt, Artificial Sequence
  RPE65 RNA guide
caaucagucaauaugcuuuacu

SEQ ID NO: 20094 - RNA, 22 nt, Artificial Sequence
  RPE65 RNA guide
cacuguucaaauauuaguaaga

SEQ ID NO: 20095 - RNA, 22 nt, Artificial Sequence
  RPE65 RNA guide
cagucaauaugcuuuacuugac

SEQ ID NO: 20096 - RNA, 22 nt, Artificial Sequence
  RPE65 RNA guide
cagugcuuugaguauaugcuag

SEQ ID NO: 20097 - RNA, 22 nt, Artificial Sequence
  RPE65 RNA guide
cauauacucaaagcacuguuca

SEQ ID NO: 20098 - RNA, 22 nt, Artificial Sequence
  RPE65 RNA guide
cauauugacugauugcuugauu

SEQ ID NO: 20099 - RNA, 22 nt, Artificial Sequence
  RPE65 RNA guide
ccuucuuacuaauauuugaaca

SEQ ID NO: 20100 - RNA, 22 nt, Artificial Sequence
  RPE65 RNA guide
cuaauauuugaacagugcuuug

SEQ ID NO: 20101 - RNA, 22 nt, Artificial Sequence
  RPE65 RNA guide
cuagcauauacucaaagcacug

SEQ ID NO: 20102 - RNA, 22 nt, Artificial Sequence
  RPE65 RNA guide
cuagucaaguaaagcauauuga

SEQ ID NO: 20103 - RNA, 22 nt, Artificial Sequence
  RPE65 RNA guide
cucaaagcacuguucaaauauu

SEQ ID NO: 20104 - RNA, 22 nt, Artificial Sequence
  RPE65 RNA guide
cugauugcuugauugauuuuuc

SEQ ID NO: 20105 - RNA, 22 nt, Artificial Sequence
  RPE65 RNA guide
cuguuugugagaaagaaaaauc

SEQ ID NO: 20106 - RNA, 22 nt, Artificial Sequence
  RPE65 RNA guide
cuuacuaauauuugaacagugc

SEQ ID NO: 20107 - RNA, 22 nt, Artificial Sequence
  RPE65 RNA guide
cuucuuacuaauauuugaacag

SEQ ID NO: 20108 - RNA, 22 nt, Artificial Sequence
  RPE65 RNA guide
cuugacuagcauauacucaaag

SEQ ID NO: 20109 - RNA, 22 nt, Artificial Sequence
  RPE65 RNA guide
cuuuacuugacuagcauauacu

SEQ ID NO: 20110 - RNA, 22 nt, Artificial Sequence
  RPE65 RNA guide
cuuugaguauaugcuagucaag

SEQ ID NO: 20111 - RNA, 22 nt, Artificial Sequence
  RPE65 RNA guide
gaaaaaucaaucaagcaaucag

SEQ ID NO: 20112 - RNA, 22 nt, Artificial Sequence
  RPE65 RNA guide
gaaagaaaaaucaaucaagcaa

SEQ ID NO: 20113 - RNA, 22 nt, Artificial Sequence
  RPE65 RNA guide
gaacagugcuuugaguauaugc

SEQ ID NO: 20114 - RNA, 22 nt, Artificial Sequence
  RPE65 RNA guide
gacuagcauauacucaaagcac

SEQ ID NO: 20115 - RNA, 22 nt, Artificial Sequence
  RPE65 RNA guide
gacugauugcuugauugauuuu

SEQ ID NO: 20116 - RNA, 22 nt, Artificial Sequence
  RPE65 RNA guide
gagaaagaaaaaucaaucaagc

SEQ ID NO: 20117 - RNA, 22 nt, Artificial Sequence
  RPE65 RNA guide
gaguauaugcuagucaaguaaa

SEQ ID NO: 20118 - RNA, 22 nt, Artificial Sequence
  RPE65 RNA guide
gauugauuuuucuuucucacaa

SEQ ID NO: 20119 - RNA, 22 nt, Artificial Sequence
  RPE65 RNA guide
gauugcuugauugauuuuucuu

SEQ ID NO: 20120 - RNA, 22 nt, Artificial Sequence
  RPE65 RNA guide
gcaaucagucaauaugcuuuac

SEQ ID NO: 20121 - RNA, 22 nt, Artificial Sequence
  RPE65 RNA guide
gcacuguucaaauauuaguaag

SEQ ID NO: 20122 - RNA, 22 nt, Artificial Sequence
  RPE65 RNA guide
gcauauacucaaagcacuguuc

SEQ ID NO: 20123 - RNA, 22 nt, Artificial Sequence
  RPE65 RNA guide
gcauauugacugauugcuugau

SEQ ID NO: 20124 - RNA, 22 nt, Artificial Sequence
  RPE65 RNA guide
gcuagucaaguaaagcauauug

SEQ ID NO: 20125 - RNA, 22 nt, Artificial Sequence
  RPE65 RNA guide
gcuugauugauuuuucuuucuc

SEQ ID NO: 20126 - RNA, 22 nt, Artificial Sequence
  RPE65 RNA guide
gcuuuacuugacuagcauauac

SEQ ID NO: 20127 - RNA, 22 nt, Artificial Sequence
  RPE65 RNA guide
gcuuugaguauaugcuagucaa

SEQ ID NO: 20128 - RNA, 22 nt, Artificial Sequence
  RPE65 RNA guide
guaaagcauauugacugauugc

SEQ ID NO: 20129 - RNA, 22 nt, Artificial Sequence
  RPE65 RNA guide
guauaugcuagucaaguaaagc

SEQ ID NO: 20130 - RNA, 22 nt, Artificial Sequence
  RPE65 RNA guide
gucaaguaaagcauauugacug

SEQ ID NO: 20131 - RNA, 22 nt, Artificial Sequence
  RPE65 RNA guide
gucaauaugcuuuacuugacua

SEQ ID NO: 20132 - RNA, 22 nt, Artificial Sequence
  RPE65 RNA guide
gugagaaagaaaaaucaaucaa

SEQ ID NO: 20133 - RNA, 22 nt, Artificial Sequence
  RPE65 RNA guide
gugcuuugaguauaugcuaguc

SEQ ID NO: 20134 - RNA, 22 nt, Artificial Sequence
  RPE65 RNA guide
uaaagcauauugacugauugcu

SEQ ID NO: 20135 - RNA, 22 nt, Artificial Sequence
  RPE65 RNA guide
uacuaauauuugaacagugcuu

SEQ ID NO: 20136 - RNA, 22 nt, Artificial Sequence
  RPE65 RNA guide
uacucaaagcacuguucaaaua

SEQ ID NO: 20137 - RNA, 22 nt, Artificial Sequence
  RPE65 RNA guide
uacuugacuagcauauacucaa

SEQ ID NO: 20138 - RNA, 22 nt, Artificial Sequence
  RPE65 RNA guide
uagcauauacucaaagcacugu

SEQ ID NO: 20139 - RNA, 22 nt, Artificial Sequence
  RPE65 RNA guide
uagucaaguaaagcauauugac

SEQ ID NO: 20140 - RNA, 22 nt, Artificial Sequence
  RPE65 RNA guide
uaugcuagucaaguaaagcaua

SEQ ID NO: 20141 - RNA, 22 nt, Artificial Sequence
  RPE65 RNA guide
uaugcuuuacuugacuagcaua

SEQ ID NO: 20142 - RNA, 22 nt, Artificial Sequence
  RPE65 RNA guide
uauuugaacagugcuuugagua

SEQ ID NO: 20143 - RNA, 22 nt, Artificial Sequence
  RPE65 RNA guide
ucaagcaaucagucaauaugcu

SEQ ID NO: 20144 - RNA, 22 nt, Artificial Sequence
  RPE65 RNA guide
ucaaguaaagcauauugacuga

SEQ ID NO: 20145 - RNA, 22 nt, Artificial Sequence
  RPE65 RNA guide
ucaauaugcuuuacuugacuag

SEQ ID NO: 20146 - RNA, 22 nt, Artificial Sequence
  RPE65 RNA guide
ucaaucaagcaaucagucaaua

SEQ ID NO: 20147 - RNA, 22 nt, Artificial Sequence
  RPE65 RNA guide
ucagucaauaugcuuuacuuga

SEQ ID NO: 20148 - RNA, 22 nt, Artificial Sequence
  RPE65 RNA guide
uccuucuuacuaauauuugaac

SEQ ID NO: 20149 - RNA, 22 nt, Artificial Sequence
  RPE65 RNA guide
ugaacagugcuuugaguauaug

SEQ ID NO: 20150 - RNA, 22 nt, Artificial Sequence
  RPE65 RNA guide
ugacuagcauauacucaaagca

SEQ ID NO: 20151 - RNA, 22 nt, Artificial Sequence
  RPE65 RNA guide
ugacugauugcuugauugauuu

SEQ ID NO: 20152 - RNA, 22 nt, Artificial Sequence
  RPE65 RNA guide
ugaguauaugcuagucaaguaa

SEQ ID NO: 20153 - RNA, 22 nt, Artificial Sequence
  RPE65 RNA guide
ugcuagucaaguaaagcauauu

SEQ ID NO: 20154 - RNA, 22 nt, Artificial Sequence
  RPE65 RNA guide
ugcuugauugauuuuucuuucu

SEQ ID NO: 20155 - RNA, 22 nt, Artificial Sequence
  RPE65 RNA guide
ugcuuuacuugacuagcauaua

SEQ ID NO: 20156 - RNA, 22 nt, Artificial Sequence
  RPE65 RNA guide
ugcuuugaguauaugcuaguca

SEQ ID NO: 20157 - RNA, 22 nt, Artificial Sequence
  RPE65 RNA guide
ugugagaaagaaaaaucaauca

SEQ ID NO: 20158 - RNA, 22 nt, Artificial Sequence
  RPE65 RNA guide
uuacuugacuagcauauacuca

SEQ ID NO: 20159 - RNA, 22 nt, Artificial Sequence
  RPE65 RNA guide
uugaacagugcuuugaguauau

SEQ ID NO: 20160 - RNA, 22 nt, Artificial Sequence
  RPE65 RNA guide
uugacuagcauauacucaaagc

SEQ ID NO: 20161 - RNA, 22 nt, Artificial Sequence
  RPE65 RNA guide
uugacugauugcuugauugauu

SEQ ID NO: 20162 - RNA, 22 nt, Artificial Sequence
  RPE65 RNA guide
uugaguauaugcuagucaagua

SEQ ID NO: 20163 - RNA, 22 nt, Artificial Sequence
  RPE65 RNA guide
uugcuugauugauuuuucuuuc

SEQ ID NO: 20164 - RNA, 22 nt, Artificial Sequence
  RPE65 RNA guide
uugugagaaagaaaaaucaauc

SEQ ID NO: 20165 - RNA, 22 nt, Artificial Sequence
  RPE65 RNA guide
uuuacuugacuagcauauacuc

SEQ ID NO: 20166 - RNA, 22 nt, Artificial Sequence
  RPE65 RNA guide
uuugaacagugcuuugaguaua

SEQ ID NO: 20167 - RNA, 22 nt, Artificial Sequence
  RPE65 RNA guide
uuugaguauaugcuagucaagu

SEQ ID NO: 20168 - RNA, 20 nt, Artificial Sequence
  RPE65 RNA guide
aaaaaagacccagagccaca

SEQ ID NO: 20169 - RNA, 20 nt, Artificial Sequence
  RPE65 RNA guide
aaaaaauggcaacaugaauu

SEQ ID NO: 20170 - RNA, 20 nt, Artificial Sequence
  RPE65 RNA guide
aaaaaaugucaaagcaccau

SEQ ID NO: 20171 - RNA, 20 nt, Artificial Sequence
  RPE65 RNA guide
aaaaaccuggaauucauguu

SEQ ID NO: 20172 - RNA, 20 nt, Artificial Sequence
  RPE65 RNA guide
aaaaagacccagagccacac

SEQ ID NO: 20173 - RNA, 20 nt, Artificial Sequence
  RPE65 RNA guide
aaaaauggcaacaugaauuc

SEQ ID NO: 20174 - RNA, 20 nt, Artificial Sequence
  RPE65 RNA guide
aaaaaugucaaagcaccauu

SEQ ID NO: 20175 - RNA, 20 nt, Artificial Sequence
  RPE65 RNA guide
aaaaccuggaauucauguug

SEQ ID NO: 20176 - RNA, 20 nt, Artificial Sequence
  RPE65 RNA guide
aaaacuauucacagaccugc

SEQ ID NO: 20177 - RNA, 20 nt, Artificial Sequence
  RPE65 RNA guide
aaaagacccagagccacacc

SEQ ID NO: 20178 - RNA, 20 nt, Artificial Sequence
  RPE65 RNA guide
aaaauggcaacaugaauucc

SEQ ID NO: 20179 - RNA, 20 nt, Artificial Sequence
  RPE65 RNA guide
aaaaugucaaagcaccauuu

SEQ ID NO: 20180 - RNA, 20 nt, Artificial Sequence
  RPE65 RNA guide
aaaccuggaauucauguugc

SEQ ID NO: 20181 - RNA, 20 nt, Artificial Sequence
  RPE65 RNA guide
aaacuauucacagaccugcc

SEQ ID NO: 20182 - RNA, 20 nt, Artificial Sequence
  RPE65 RNA guide
aaagacccagagccacacca

SEQ ID NO: 20183 - RNA, 20 nt, Artificial Sequence
  RPE65 RNA guide
aaagcaauuguugugucuga

SEQ ID NO: 20184 - RNA, 20 nt, Artificial Sequence
  RPE65 RNA guide
aaagcaccauuuggugucac

SEQ ID NO: 20185 - RNA, 20 nt, Artificial Sequence
  RPE65 RNA guide
aaaggaguaagguugauuau

SEQ ID NO: 20186 - RNA, 20 nt, Artificial Sequence
  RPE65 RNA guide
aaauagcaauucuaagaagg

SEQ ID NO: 20187 - RNA, 20 nt, Artificial Sequence
  RPE65 RNA guide
aaauaugucuucgucaggga

SEQ ID NO: 20188 - RNA, 20 nt, Artificial Sequence
  RPE65 RNA guide
aaaugaaaacuauucacaga

SEQ ID NO: 20189 - RNA, 20 nt, Artificial Sequence
  RPE65 RNA guide
aaauggcaacaugaauucca

SEQ ID NO: 20190 - RNA, 20 nt, Artificial Sequence
  RPE65 RNA guide
aaaugucaaagcaccauuug

SEQ ID NO: 20191 - RNA, 20 nt, Artificial Sequence
  RPE65 RNA guide
aacaagaccugaucaaaaga

SEQ ID NO: 20192 - RNA, 20 nt, Artificial Sequence
  RPE65 RNA guide
aacauacagaacugcaguaa

SEQ ID NO: 20193 - RNA, 20 nt, Artificial Sequence
  RPE65 RNA guide
aacaugaauuccagguuuuu

SEQ ID NO: 20194 - RNA, 20 nt, Artificial Sequence
  RPE65 RNA guide
aaccuggaauucauguugcc

SEQ ID NO: 20195 - RNA, 20 nt, Artificial Sequence
  RPE65 RNA guide
aaccuuacuccuuuccuaac

SEQ ID NO: 20196 - RNA, 20 nt, Artificial Sequence
  RPE65 RNA guide
aacgaacuaacauacagaac

SEQ ID NO: 20197 - RNA, 20 nt, Artificial Sequence
  RPE65 RNA guide
aacuaacauacagaacugca

SEQ ID NO: 20198 - RNA, 20 nt, Artificial Sequence
  RPE65 RNA guide
aacuauucacagaccugccu

SEQ ID NO: 20199 - RNA, 20 nt, Artificial Sequence
  RPE65 RNA guide
aacucagauacagcaacuca

SEQ ID NO: 20200 - RNA, 20 nt, Artificial Sequence
  RPE65 RNA guide
aacugcaguaagaagaguau

SEQ ID NO: 20201 - RNA, 20 nt, Artificial Sequence
  RPE65 RNA guide
aagaagaguauucagacaca

SEQ ID NO: 20202 - RNA, 20 nt, Artificial Sequence
  RPE65 RNA guide
aagaagggaagcuaaguauu

SEQ ID NO: 20203 - RNA, 20 nt, Artificial Sequence
  RPE65 RNA guide
aagacccagagccacaccag

SEQ ID NO: 20204 - RNA, 20 nt, Artificial Sequence
  RPE65 RNA guide
aagagaaugagaaggcaggu

SEQ ID NO: 20205 - RNA, 20 nt, Artificial Sequence
  RPE65 RNA guide
aagaguauucagacacaaca

SEQ ID NO: 20206 - RNA, 20 nt, Artificial Sequence
  RPE65 RNA guide
aagcaauuguugugucugaa

SEQ ID NO: 20207 - RNA, 20 nt, Artificial Sequence
  RPE65 RNA guide
aagcaccauuuggugucacg

SEQ ID NO: 20208 - RNA, 20 nt, Artificial Sequence
  RPE65 RNA guide
aagcccuagcuuaccgaaag

SEQ ID NO: 20209 - RNA, 20 nt, Artificial Sequence
  RPE65 RNA guide
aagcuagggcuugaaaaaag

SEQ ID NO: 20210 - RNA, 20 nt, Artificial Sequence
  RPE65 RNA guide
aaggaagaaaaaauggcaac

SEQ ID NO: 20211 - RNA, 20 nt, Artificial Sequence
  RPE65 RNA guide
aaggaguaagguugauuauu

SEQ ID NO: 20212 - RNA, 20 nt, Artificial Sequence
  RPE65 RNA guide
aaggcaaaaaccuggaauuc

SEQ ID NO: 20213 - RNA, 20 nt, Artificial Sequence
  RPE65 RNA guide
aaggcaggucugugaauagu

SEQ ID NO: 20214 - RNA, 20 nt, Artificial Sequence
  RPE65 RNA guide
aagggaagcuaaguauuaua

SEQ ID NO: 20215 - RNA, 20 nt, Artificial Sequence
  RPE65 RNA guide
aagguugauuauuccguaau

SEQ ID NO: 20216 - RNA, 20 nt, Artificial Sequence
  RPE65 RNA guide
aauaaucaaccuuacuccuu

SEQ ID NO: 20217 - RNA, 20 nt, Artificial Sequence
  RPE65 RNA guide
aauacucuucuuacugcagu

SEQ ID NO: 20218 - RNA, 20 nt, Artificial Sequence
  RPE65 RNA guide
aauacuuagcuucccuucuu

SEQ ID NO: 20219 - RNA, 20 nt, Artificial Sequence
  RPE65 RNA guide
aauagcaauucuaagaaggg

SEQ ID NO: 20220 - RNA, 20 nt, Artificial Sequence
  RPE65 RNA guide
aauaugucuucgucagggaa

SEQ ID NO: 20221 - RNA, 20 nt, Artificial Sequence
  RPE65 RNA guide
aaucaacaagaccugaucaa

SEQ ID NO: 20222 - RNA, 20 nt, Artificial Sequence
  RPE65 RNA guide
aaucaaccuuacuccuuucc

SEQ ID NO: 20223 - RNA, 20 nt, Artificial Sequence
  RPE65 RNA guide
aaugaaaacuauucacagac

SEQ ID NO: 20224 - RNA, 20 nt, Artificial Sequence
  RPE65 RNA guide
aaugaaagcaauuguugugu

SEQ ID NO: 20225 - RNA, 20 nt, Artificial Sequence
  RPE65 RNA guide
aaugagaaggcaggucugug

SEQ ID NO: 20226 - RNA, 20 nt, Artificial Sequence
  RPE65 RNA guide
aauggcaacaugaauuccag

SEQ ID NO: 20227 - RNA, 20 nt, Artificial Sequence
  RPE65 RNA guide
aaugucaaagcaccauuugg

SEQ ID NO: 20228 - RNA, 20 nt, Artificial Sequence
  RPE65 RNA guide
aaugucugcucuagaugagg

SEQ ID NO: 20229 - RNA, 20 nt, Artificial Sequence
  RPE65 RNA guide
aauuccagguuuuugccuuc

SEQ ID NO: 20230 - RNA, 20 nt, Artificial Sequence
  RPE65 RNA guide
aauucuaagaagggaagcua

SEQ ID NO: 20231 - RNA, 20 nt, Artificial Sequence
  RPE65 RNA guide
aauuguugugucugaauacu

SEQ ID NO: 20232 - RNA, 20 nt, Artificial Sequence
  RPE65 RNA guide
aauuugaguugcuguaucug

SEQ ID NO: 20233 - RNA, 20 nt, Artificial Sequence
  RPE65 RNA guide
acaaaugaaaacuauucaca

SEQ ID NO: 20234 - RNA, 20 nt, Artificial Sequence
  RPE65 RNA guide
acaagaccugaucaaaagau

SEQ ID NO: 20235 - RNA, 20 nt, Artificial Sequence
  RPE65 RNA guide
acaagagaaugagaaggcag

SEQ ID NO: 20236 - RNA, 20 nt, Artificial Sequence
  RPE65 RNA guide
acaccaaauggugcuuugac

SEQ ID NO: 20237 - RNA, 20 nt, Artificial Sequence
  RPE65 RNA guide
acaccagcaacucagauaca

SEQ ID NO: 20238 - RNA, 20 nt, Artificial Sequence
  RPE65 RNA guide
acagaacugcaguaagaaga

SEQ ID NO: 20239 - RNA, 20 nt, Artificial Sequence
  RPE65 RNA guide
acagaccugccuucucauuc

SEQ ID NO: 20240 - RNA, 20 nt, Artificial Sequence
  RPE65 RNA guide
acagcaacucaaauuacaaa

SEQ ID NO: 20241 - RNA, 20 nt, Artificial Sequence
  RPE65 RNA guide
acauacagaacugcaguaag

SEQ ID NO: 20242 - RNA, 20 nt, Artificial Sequence
  RPE65 RNA guide
acaugaauuccagguuuuug

SEQ ID NO: 20243 - RNA, 20 nt, Artificial Sequence
  RPE65 RNA guide
acauugaugcuccaucguga

SEQ ID NO: 20244 - RNA, 20 nt, Artificial Sequence
  RPE65 RNA guide
accaaauggugcuuugacau

SEQ ID NO: 20245 - RNA, 20 nt, Artificial Sequence
  RPE65 RNA guide
accagcaacucagauacagc

SEQ ID NO: 20246 - RNA, 20 nt, Artificial Sequence
  RPE65 RNA guide
accauuuggugucacgaugg

SEQ ID NO: 20247 - RNA, 20 nt, Artificial Sequence
  RPE65 RNA guide
acccagagccacaccagcaa

SEQ ID NO: 20248 - RNA, 20 nt, Artificial Sequence
  RPE65 RNA guide
accugccuucucauucucuu

SEQ ID NO: 20249 - RNA, 20 nt, Artificial Sequence
  RPE65 RNA guide
accuggaauucauguugcca

SEQ ID NO: 20250 - RNA, 20 nt, Artificial Sequence
  RPE65 RNA guide
accuuacuccuuuccuaacg

SEQ ID NO: 20251 - RNA, 20 nt, Artificial Sequence
  RPE65 RNA guide
acgaacuaacauacagaacu

SEQ ID NO: 20252 - RNA, 20 nt, Artificial Sequence
  RPE65 RNA guide
acgauggagcaucaaugucu

SEQ ID NO: 20253 - RNA, 20 nt, Artificial Sequence
  RPE65 RNA guide
acggaauaaucaaccuuacu

SEQ ID NO: 20254 - RNA, 20 nt, Artificial Sequence
  RPE65 RNA guide
acuaacauacagaacugcag

SEQ ID NO: 20255 - RNA, 20 nt, Artificial Sequence
  RPE65 RNA guide
acuauaaauagagcaguacu

SEQ ID NO: 20256 - RNA, 20 nt, Artificial Sequence
  RPE65 RNA guide
acuauucacagaccugccuu

SEQ ID NO: 20257 - RNA, 20 nt, Artificial Sequence
  RPE65 RNA guide
acucagauacagcaacucaa

SEQ ID NO: 20258 - RNA, 20 nt, Artificial Sequence
  RPE65 RNA guide
acuccuuuccuaacgaacua

SEQ ID NO: 20259 - RNA, 20 nt, Artificial Sequence
  RPE65 RNA guide
acucuucuuacugcaguucu

SEQ ID NO: 20260 - RNA, 20 nt, Artificial Sequence
  RPE65 RNA guide
acugcaguaagaagaguauu

SEQ ID NO: 20261 - RNA, 20 nt, Artificial Sequence
  RPE65 RNA guide
acugcaguucuguauguuag

SEQ ID NO: 20262 - RNA, 20 nt, Artificial Sequence
  RPE65 RNA guide
acugguaaucaacaagaccu

SEQ ID NO: 20263 - RNA, 20 nt, Artificial Sequence
  RPE65 RNA guide
acuuagcuucccuucuuaga

SEQ ID NO: 20264 - RNA, 20 nt, Artificial Sequence
  RPE65 RNA guide
agaaaaaauggcaacaugaa

SEQ ID NO: 20265 - RNA, 20 nt, Artificial Sequence
  RPE65 RNA guide
agaaauaugucuucgucagg

SEQ ID NO: 20266 - RNA, 20 nt, Artificial Sequence
  RPE65 RNA guide
agaacugcaguaagaagagu

SEQ ID NO: 20267 - RNA, 20 nt, Artificial Sequence
  RPE65 RNA guide
agaagaguauucagacacaa

SEQ ID NO: 20268 - RNA, 20 nt, Artificial Sequence
  RPE65 RNA guide
agaaggaagaaaaaauggca

SEQ ID NO: 20269 - RNA, 20 nt, Artificial Sequence
  RPE65 RNA guide
agaaggcaggucugugaaua

SEQ ID NO: 20270 - RNA, 20 nt, Artificial Sequence
  RPE65 RNA guide
agaagggaagcuaaguauua

SEQ ID NO: 20271 - RNA, 20 nt, Artificial Sequence
  RPE65 RNA guide
agaaugagaaggcaggucug

SEQ ID NO: 20272 - RNA, 20 nt, Artificial Sequence
  RPE65 RNA guide
agacacaacaauugcuuuca

SEQ ID NO: 20273 - RNA, 20 nt, Artificial Sequence
  RPE65 RNA guide
agacauugaugcuccaucgu

SEQ ID NO: 20274 - RNA, 20 nt, Artificial Sequence
  RPE65 RNA guide
agacccagagccacaccagc

SEQ ID NO: 20275 - RNA, 20 nt, Artificial Sequence
  RPE65 RNA guide
agaccugccuucucauucuc

SEQ ID NO: 20276 - RNA, 20 nt, Artificial Sequence
  RPE65 RNA guide
agagaaggaagaaaaaaugg

SEQ ID NO: 20277 - RNA, 20 nt, Artificial Sequence
  RPE65 RNA guide
agagaaugagaaggcagguc

SEQ ID NO: 20278 - RNA, 20 nt, Artificial Sequence
  RPE65 RNA guide
agagcagacauugaugcucc

SEQ ID NO: 20279 - RNA, 20 nt, Artificial Sequence
  RPE65 RNA guide
agagcaguacugaagaauua

SEQ ID NO: 20280 - RNA, 20 nt, Artificial Sequence
  RPE65 RNA guide
agagccacaccagcaacuca

SEQ ID NO: 20281 - RNA, 20 nt, Artificial Sequence
  RPE65 RNA guide
agaguauucagacacaacaa

SEQ ID NO: 20282 - RNA, 20 nt, Artificial Sequence
  RPE65 RNA guide
agauacaagagaaugagaag

SEQ ID NO: 20283 - RNA, 20 nt, Artificial Sequence
  RPE65 RNA guide
agaugagggagagaaggaag

SEQ ID NO: 20284 - RNA, 20 nt, Artificial Sequence
  RPE65 RNA guide
agcaacucaaauuacaaauc

SEQ ID NO: 20285 - RNA, 20 nt, Artificial Sequence
  RPE65 RNA guide
agcaacucagauacagcaac

SEQ ID NO: 20286 - RNA, 20 nt, Artificial Sequence
  RPE65 RNA guide
agcaauucuaagaagggaag

SEQ ID NO: 20287 - RNA, 20 nt, Artificial Sequence
  RPE65 RNA guide
agcaauuguugugucugaau

SEQ ID NO: 20288 - RNA, 20 nt, Artificial Sequence
  RPE65 RNA guide
agcaccauuuggugucacga

SEQ ID NO: 20289 - RNA, 20 nt, Artificial Sequence
  RPE65 RNA guide
agcagacauugaugcuccau

SEQ ID NO: 20290 - RNA, 20 nt, Artificial Sequence
  RPE65 RNA guide
agcagauacaagagaaugag

SEQ ID NO: 20291 - RNA, 20 nt, Artificial Sequence
  RPE65 RNA guide
agcaucaaugucugcucuag

SEQ ID NO: 20292 - RNA, 20 nt, Artificial Sequence
  RPE65 RNA guide
agccacaccagcaacucaga

SEQ ID NO: 20293 - RNA, 20 nt, Artificial Sequence
  RPE65 RNA guide
agcccuagcuuaccgaaaga

SEQ ID NO: 20294 - RNA, 20 nt, Artificial Sequence
  RPE65 RNA guide
agcuagggcuugaaaaaaga

SEQ ID NO: 20295 - RNA, 20 nt, Artificial Sequence
  RPE65 RNA guide
agcuuaccgaaagaacaaau

SEQ ID NO: 20296 - RNA, 20 nt, Artificial Sequence
  RPE65 RNA guide
agcuucccuucuuagaauug

SEQ ID NO: 20297 - RNA, 20 nt, Artificial Sequence
  RPE65 RNA guide
aggaaaggaguaagguugau

SEQ ID NO: 20298 - RNA, 20 nt, Artificial Sequence
  RPE65 RNA guide
aggaagaaaaaauggcaaca

SEQ ID NO: 20299 - RNA, 20 nt, Artificial Sequence
  RPE65 RNA guide
aggaguaagguugauuauuc

SEQ ID NO: 20300 - RNA, 20 nt, Artificial Sequence
  RPE65 RNA guide
aggcaaaaaccuggaauuca

SEQ ID NO: 20301 - RNA, 20 nt, Artificial Sequence
  RPE65 RNA guide
aggcaggucugugaauaguu

SEQ ID NO: 20302 - RNA, 20 nt, Artificial Sequence
  RPE65 RNA guide
agggaagcuaaguauuauag

SEQ ID NO: 20303 - RNA, 20 nt, Artificial Sequence
  RPE65 RNA guide
agggaaggcaaaaaccugga

SEQ ID NO: 20304 - RNA, 20 nt, Artificial Sequence
  RPE65 RNA guide
agggagagaaggaagaaaaa

SEQ ID NO: 20305 - RNA, 20 nt, Artificial Sequence
  RPE65 RNA guide
agggcuugaaaaaagaccca

SEQ ID NO: 20306 - RNA, 20 nt, Artificial Sequence
  RPE65 RNA guide
aggucugugaauaguuuuca

SEQ ID NO: 20307 - RNA, 20 nt, Artificial Sequence
  RPE65 RNA guide
aggucuuguugauuaccagu

SEQ ID NO: 20308 - RNA, 20 nt, Artificial Sequence
  RPE65 RNA guide
agguugauuauuccguaaua

SEQ ID NO: 20309 - RNA, 20 nt, Artificial Sequence
  RPE65 RNA guide
agguuuuugccuucccugac

SEQ ID NO: 20310 - RNA, 20 nt, Artificial Sequence
  RPE65 RNA guide
aguaagaagaguauucagac

SEQ ID NO: 20311 - RNA, 20 nt, Artificial Sequence
  RPE65 RNA guide
aguauucagacacaacaauu

SEQ ID NO: 20312 - RNA, 20 nt, Artificial Sequence
  RPE65 RNA guide
aguucguuaggaaaggagua

SEQ ID NO: 20313 - RNA, 20 nt, Artificial Sequence
  RPE65 RNA guide
aguucuguauguuaguucgu

SEQ ID NO: 20314 - RNA, 20 nt, Artificial Sequence
  RPE65 RNA guide
aguugcugguguggcucugg

SEQ ID NO: 20315 - RNA, 20 nt, Artificial Sequence
  RPE65 RNA guide
aguugcuguaucugaguugc

SEQ ID NO: 20316 - RNA, 20 nt, Artificial Sequence
  RPE65 RNA guide
aguuuuaauucuucaguacu

SEQ ID NO: 20317 - RNA, 20 nt, Artificial Sequence
  RPE65 RNA guide
auaauacuuagcuucccuuc

SEQ ID NO: 20318 - RNA, 20 nt, Artificial Sequence
  RPE65 RNA guide
auaaucaaccuuacuccuuu

SEQ ID NO: 20319 - RNA, 20 nt, Artificial Sequence
  RPE65 RNA guide
auacaagagaaugagaaggc

SEQ ID NO: 20320 - RNA, 20 nt, Artificial Sequence
  RPE65 RNA guide
auacagaacugcaguaagaa

SEQ ID NO: 20321 - RNA, 20 nt, Artificial Sequence
  RPE65 RNA guide
auacucuucuuacugcaguu

SEQ ID NO: 20322 - RNA, 20 nt, Artificial Sequence
  RPE65 RNA guide
auacuuagcuucccuucuua

SEQ ID NO: 20323 - RNA, 20 nt, Artificial Sequence
  RPE65 RNA guide
auagcaauucuaagaaggga

SEQ ID NO: 20324 - RNA, 20 nt, Artificial Sequence
  RPE65 RNA guide
auagcagauacaagagaaug

SEQ ID NO: 20325 - RNA, 20 nt, Artificial Sequence
  RPE65 RNA guide
auaugucuucgucagggaag

SEQ ID NO: 20326 - RNA, 20 nt, Artificial Sequence
  RPE65 RNA guide
aucaacaagaccugaucaaa

SEQ ID NO: 20327 - RNA, 20 nt, Artificial Sequence
  RPE65 RNA guide
aucaaccuuacuccuuuccu

SEQ ID NO: 20328 - RNA, 20 nt, Artificial Sequence
  RPE65 RNA guide
aucaaugucugcucuagaug

SEQ ID NO: 20329 - RNA, 20 nt, Artificial Sequence
  RPE65 RNA guide
aucaggucuuguugauuacc

SEQ ID NO: 20330 - RNA, 20 nt, Artificial Sequence
  RPE65 RNA guide
aucgugacaccaaauggugc

SEQ ID NO: 20331 - RNA, 20 nt, Artificial Sequence
  RPE65 RNA guide
aucuagagcagacauugaug

SEQ ID NO: 20332 - RNA, 20 nt, Artificial Sequence
  RPE65 RNA guide
aucugaguugcugguguggc

SEQ ID NO: 20333 - RNA, 20 nt, Artificial Sequence
  RPE65 RNA guide
aucugcuauaauacuuagcu

SEQ ID NO: 20334 - RNA, 20 nt, Artificial Sequence
  RPE65 RNA guide
aucuuuugaucaggucuugu

SEQ ID NO: 20335 - RNA, 20 nt, Artificial Sequence
  RPE65 RNA guide
augaaaacuauucacagacc

SEQ ID NO: 20336 - RNA, 20 nt, Artificial Sequence
  RPE65 RNA guide
augaaagcaauuguuguguc

SEQ ID NO: 20337 - RNA, 20 nt, Artificial Sequence
  RPE65 RNA guide
augaauuccagguuuuugcc

SEQ ID NO: 20338 - RNA, 20 nt, Artificial Sequence
  RPE65 RNA guide
augagaaggcaggucuguga

SEQ ID NO: 20339 - RNA, 20 nt, Artificial Sequence
  RPE65 RNA guide
augagggagagaaggaagaa

SEQ ID NO: 20340 - RNA, 20 nt, Artificial Sequence
  RPE65 RNA guide
augcuccaucgugacaccaa

SEQ ID NO: 20341 - RNA, 20 nt, Artificial Sequence
  RPE65 RNA guide
auggagcaucaaugucugcu

SEQ ID NO: 20342 - RNA, 20 nt, Artificial Sequence
  RPE65 RNA guide
auggcaacaugaauuccagg

SEQ ID NO: 20343 - RNA, 20 nt, Artificial Sequence
  RPE65 RNA guide
augucaaagcaccauuuggu

SEQ ID NO: 20344 - RNA, 20 nt, Artificial Sequence
  RPE65 RNA guide
augucugcucuagaugaggg

SEQ ID NO: 20345 - RNA, 20 nt, Artificial Sequence
  RPE65 RNA guide
augucuucgucagggaaggc

SEQ ID NO: 20346 - RNA, 20 nt, Artificial Sequence
  RPE65 RNA guide
auguuaguucguuaggaaag

SEQ ID NO: 20347 - RNA, 20 nt, Artificial Sequence
  RPE65 RNA guide
auguugccauuuuuucuucc

SEQ ID NO: 20348 - RNA, 20 nt, Artificial Sequence
  RPE65 RNA guide
auuacggaauaaucaaccuu

SEQ ID NO: 20349 - RNA, 20 nt, Artificial Sequence
  RPE65 RNA guide
auucacagaccugccuucuc

SEQ ID NO: 20350 - RNA, 20 nt, Artificial Sequence
  RPE65 RNA guide
auucagacacaacaauugcu

SEQ ID NO: 20351 - RNA, 20 nt, Artificial Sequence
  RPE65 RNA guide
auucauguugccauuuuuuc

SEQ ID NO: 20352 - RNA, 20 nt, Artificial Sequence
  RPE65 RNA guide
auuccagguuuuugccuucc

SEQ ID NO: 20353 - RNA, 20 nt, Artificial Sequence
  RPE65 RNA guide
auucuaagaagggaagcuaa

SEQ ID NO: 20354 - RNA, 20 nt, Artificial Sequence
  RPE65 RNA guide
auugaugcuccaucgugaca

SEQ ID NO: 20355 - RNA, 20 nt, Artificial Sequence
  RPE65 RNA guide
auuguugugucugaauacuc

SEQ ID NO: 20356 - RNA, 20 nt, Artificial Sequence
  RPE65 RNA guide
auuugaguugcuguaucuga

SEQ ID NO: 20357 - RNA, 20 nt, Artificial Sequence
  RPE65 RNA guide
auuuggugucacgauggagc

SEQ ID NO: 20358 - RNA, 20 nt, Artificial Sequence
  RPE65 RNA guide
auuuguucuuucgguaagcu

SEQ ID NO: 20359 - RNA, 20 nt, Artificial Sequence
  RPE65 RNA guide
auuuuuucuuccuucucucc

SEQ ID NO: 20360 - RNA, 20 nt, Artificial Sequence
  RPE65 RNA guide
caaaaaccuggaauucaugu

SEQ ID NO: 20361 - RNA, 20 nt, Artificial Sequence
  RPE65 RNA guide
caaagcaccauuugguguca

SEQ ID NO: 20362 - RNA, 20 nt, Artificial Sequence
  RPE65 RNA guide
caaaugaaaacuauucacag

SEQ ID NO: 20363 - RNA, 20 nt, Artificial Sequence
  RPE65 RNA guide
caacaagaccugaucaaaag

SEQ ID NO: 20364 - RNA, 20 nt, Artificial Sequence
  RPE65 RNA guide
caacaugaauuccagguuuu

SEQ ID NO: 20365 - RNA, 20 nt, Artificial Sequence
  RPE65 RNA guide
caaccuuacuccuuuccuaa

SEQ ID NO: 20366 - RNA, 20 nt, Artificial Sequence
  RPE65 RNA guide
caacucagauacagcaacuc

SEQ ID NO: 20367 - RNA, 20 nt, Artificial Sequence
  RPE65 RNA guide
caagaccugaucaaaagaug

SEQ ID NO: 20368 - RNA, 20 nt, Artificial Sequence
  RPE65 RNA guide
caagagaaugagaaggcagg

SEQ ID NO: 20369 - RNA, 20 nt, Artificial Sequence
  RPE65 RNA guide
caagcccuagcuuaccgaaa

SEQ ID NO: 20370 - RNA, 20 nt, Artificial Sequence
  RPE65 RNA guide
caaugucugcucuagaugag

SEQ ID NO: 20371 - RNA, 20 nt, Artificial Sequence
  RPE65 RNA guide
caauucuaagaagggaagcu

SEQ ID NO: 20372 - RNA, 20 nt, Artificial Sequence
  RPE65 RNA guide
caauuguugugucugaauac

SEQ ID NO: 20373 - RNA, 20 nt, Artificial Sequence
  RPE65 RNA guide
cacaccagcaacucagauac

SEQ ID NO: 20374 - RNA, 20 nt, Artificial Sequence
  RPE65 RNA guide
cacagaccugccuucucauu

SEQ ID NO: 20375 - RNA, 20 nt, Artificial Sequence
  RPE65 RNA guide
caccaaauggugcuuugaca

SEQ ID NO: 20376 - RNA, 20 nt, Artificial Sequence
  RPE65 RNA guide
caccagcaacucagauacag

SEQ ID NO: 20377 - RNA, 20 nt, Artificial Sequence
  RPE65 RNA guide
caccauuuggugucacgaug

SEQ ID NO: 20378 - RNA, 20 nt, Artificial Sequence
  RPE65 RNA guide
cacgauggagcaucaauguc

SEQ ID NO: 20379 - RNA, 20 nt, Artificial Sequence
  RPE65 RNA guide
cagaacugcaguaagaagag

SEQ ID NO: 20380 - RNA, 20 nt, Artificial Sequence
  RPE65 RNA guide
cagacacaacaauugcuuuc

SEQ ID NO: 20381 - RNA, 20 nt, Artificial Sequence
  RPE65 RNA guide
cagacauugaugcuccaucg

SEQ ID NO: 20382 - RNA, 20 nt, Artificial Sequence
  RPE65 RNA guide
cagaccugccuucucauucu

SEQ ID NO: 20383 - RNA, 20 nt, Artificial Sequence
  RPE65 RNA guide
cagagccacaccagcaacuc

SEQ ID NO: 20384 - RNA, 20 nt, Artificial Sequence
  RPE65 RNA guide
cagauacaagagaaugagaa

SEQ ID NO: 20385 - RNA, 20 nt, Artificial Sequence
  RPE65 RNA guide
cagauacagcaacucaaauu

SEQ ID NO: 20386 - RNA, 20 nt, Artificial Sequence
  RPE65 RNA guide
cagcaacucaaauuacaaau

SEQ ID NO: 20387 - RNA, 20 nt, Artificial Sequence
  RPE65 RNA guide
cagcaacucagauacagcaa

SEQ ID NO: 20388 - RNA, 20 nt, Artificial Sequence
  RPE65 RNA guide
cagggaaggcaaaaaccugg

SEQ ID NO: 20389 - RNA, 20 nt, Artificial Sequence
  RPE65 RNA guide
caggucugugaauaguuuuc

SEQ ID NO: 20390 - RNA, 20 nt, Artificial Sequence
  RPE65 RNA guide
caggucuuguugauuaccag

SEQ ID NO: 20391 - RNA, 20 nt, Artificial Sequence
  RPE65 RNA guide
cagguuuuugccuucccuga

SEQ ID NO: 20392 - RNA, 20 nt, Artificial Sequence
  RPE65 RNA guide
caguaagaagaguauucaga

SEQ ID NO: 20393 - RNA, 20 nt, Artificial Sequence
  RPE65 RNA guide
caguucuguauguuaguucg

SEQ ID NO: 20394 - RNA, 20 nt, Artificial Sequence
  RPE65 RNA guide
cauacagaacugcaguaaga

SEQ ID NO: 20395 - RNA, 20 nt, Artificial Sequence
  RPE65 RNA guide
caucaaugucugcucuagau

SEQ ID NO: 20396 - RNA, 20 nt, Artificial Sequence
  RPE65 RNA guide
caucgugacaccaaauggug

SEQ ID NO: 20397 - RNA, 20 nt, Artificial Sequence
  RPE65 RNA guide
caucuagagcagacauugau

SEQ ID NO: 20398 - RNA, 20 nt, Artificial Sequence
  RPE65 RNA guide
caucuuuugaucaggucuug

SEQ ID NO: 20399 - RNA, 20 nt, Artificial Sequence
  RPE65 RNA guide
caugaauuccagguuuuugc

SEQ ID NO: 20400 - RNA, 20 nt, Artificial Sequence
  RPE65 RNA guide
cauguugccauuuuuucuuc

SEQ ID NO: 20401 - RNA, 20 nt, Artificial Sequence
  RPE65 RNA guide
cauugaugcuccaucgugac

SEQ ID NO: 20402 - RNA, 20 nt, Artificial Sequence
  RPE65 RNA guide
cauuuggugucacgauggag

SEQ ID NO: 20403 - RNA, 20 nt, Artificial Sequence
  RPE65 RNA guide
cauuuguucuuucgguaagc

SEQ ID NO: 20404 - RNA, 20 nt, Artificial Sequence
  RPE65 RNA guide
cauuuuuucuuccuucucuc

SEQ ID NO: 20405 - RNA, 20 nt, Artificial Sequence
  RPE65 RNA guide
ccaaauggugcuuugacauu

SEQ ID NO: 20406 - RNA, 20 nt, Artificial Sequence
  RPE65 RNA guide
ccacaccagcaacucagaua

SEQ ID NO: 20407 - RNA, 20 nt, Artificial Sequence
  RPE65 RNA guide
ccagagccacaccagcaacu

SEQ ID NO: 20408 - RNA, 20 nt, Artificial Sequence
  RPE65 RNA guide
ccagcaacucagauacagca

SEQ ID NO: 20409 - RNA, 20 nt, Artificial Sequence
  RPE65 RNA guide
ccagguuuuugccuucccug

SEQ ID NO: 20410 - RNA, 20 nt, Artificial Sequence
  RPE65 RNA guide
ccaucgugacaccaaauggu

SEQ ID NO: 20411 - RNA, 20 nt, Artificial Sequence
  RPE65 RNA guide
ccauuuggugucacgaugga

SEQ ID NO: 20412 - RNA, 20 nt, Artificial Sequence
  RPE65 RNA guide
ccauuuuuucuuccuucucu

SEQ ID NO: 20413 - RNA, 20 nt, Artificial Sequence
  RPE65 RNA guide
cccagagccacaccagcaac

SEQ ID NO: 20414 - RNA, 20 nt, Artificial Sequence
  RPE65 RNA guide
cccuagcuuaccgaaagaac

SEQ ID NO: 20415 - RNA, 20 nt, Artificial Sequence
  RPE65 RNA guide
cccucaucuagagcagacau

SEQ ID NO: 20416 - RNA, 20 nt, Artificial Sequence
  RPE65 RNA guide
cccugacgaagacauauuuc

SEQ ID NO: 20417 - RNA, 20 nt, Artificial Sequence
  RPE65 RNA guide
ccuaacgaacuaacauacag

SEQ ID NO: 20418 - RNA, 20 nt, Artificial Sequence
  RPE65 RNA guide
ccuagcuuaccgaaagaaca

SEQ ID NO: 20419 - RNA, 20 nt, Artificial Sequence
  RPE65 RNA guide
ccucaucuagagcagacauu

SEQ ID NO: 20420 - RNA, 20 nt, Artificial Sequence
  RPE65 RNA guide
ccugacgaagacauauuucu

SEQ ID NO: 20421 - RNA, 20 nt, Artificial Sequence
  RPE65 RNA guide
ccugccuucucauucucuug

SEQ ID NO: 20422 - RNA, 20 nt, Artificial Sequence
  RPE65 RNA guide
ccuggaauucauguugccau

SEQ ID NO: 20423 - RNA, 20 nt, Artificial Sequence
  RPE65 RNA guide
ccuuacuccuuuccuaacga

SEQ ID NO: 20424 - RNA, 20 nt, Artificial Sequence
  RPE65 RNA guide
ccuucccugacgaagacaua

SEQ ID NO: 20425 - RNA, 20 nt, Artificial Sequence
  RPE65 RNA guide
ccuucucauucucuuguauc

SEQ ID NO: 20426 - RNA, 20 nt, Artificial Sequence
  RPE65 RNA guide
ccuucucucccucaucuaga

SEQ ID NO: 20427 - RNA, 20 nt, Artificial Sequence
  RPE65 RNA guide
ccuuuccuaacgaacuaaca

SEQ ID NO: 20428 - RNA, 20 nt, Artificial Sequence
  RPE65 RNA guide
cgaacuaacauacagaacug

SEQ ID NO: 20429 - RNA, 20 nt, Artificial Sequence
  RPE65 RNA guide
cgauggagcaucaaugucug

SEQ ID NO: 20430 - RNA, 20 nt, Artificial Sequence
  RPE65 RNA guide
cggaauaaucaaccuuacuc

SEQ ID NO: 20431 - RNA, 20 nt, Artificial Sequence
  RPE65 RNA guide
cgguaagcuagggcuugaaa

SEQ ID NO: 20432 - RNA, 20 nt, Artificial Sequence
  RPE65 RNA guide
cgucagggaaggcaaaaacc

SEQ ID NO: 20433 - RNA, 20 nt, Artificial Sequence
  RPE65 RNA guide
cgugacaccaaauggugcuu

SEQ ID NO: 20434 - RNA, 20 nt, Artificial Sequence
  RPE65 RNA guide
cguuaggaaaggaguaaggu

SEQ ID NO: 20435 - RNA, 20 nt, Artificial Sequence
  RPE65 RNA guide
cuaacauacagaacugcagu

SEQ ID NO: 20436 - RNA, 20 nt, Artificial Sequence
  RPE65 RNA guide
cuaacgaacuaacauacaga

SEQ ID NO: 20437 - RNA, 20 nt, Artificial Sequence
  RPE65 RNA guide
cuaagaagggaagcuaagua

SEQ ID NO: 20438 - RNA, 20 nt, Artificial Sequence
  RPE65 RNA guide
cuacugguaaucaacaagac

SEQ ID NO: 20439 - RNA, 20 nt, Artificial Sequence
  RPE65 RNA guide
cuagagcagacauugaugcu

SEQ ID NO: 20440 - RNA, 20 nt, Artificial Sequence
  RPE65 RNA guide
cuagaugagggagagaagga

SEQ ID NO: 20441 - RNA, 20 nt, Artificial Sequence
  RPE65 RNA guide
cuagcuuaccgaaagaacaa

SEQ ID NO: 20442 - RNA, 20 nt, Artificial Sequence
  RPE65 RNA guide
cuagggcuugaaaaaagacc

SEQ ID NO: 20443 - RNA, 20 nt, Artificial Sequence
  RPE65 RNA guide
cuauaaauagagcaguacug

SEQ ID NO: 20444 - RNA, 20 nt, Artificial Sequence
  RPE65 RNA guide
cuauaauacuuagcuucccu

SEQ ID NO: 20445 - RNA, 20 nt, Artificial Sequence
  RPE65 RNA guide
cuauucacagaccugccuuc

SEQ ID NO: 20446 - RNA, 20 nt, Artificial Sequence
  RPE65 RNA guide
cucagauacagcaacucaaa

SEQ ID NO: 20447 - RNA, 20 nt, Artificial Sequence
  RPE65 RNA guide
cucaucuagagcagacauug

SEQ ID NO: 20448 - RNA, 20 nt, Artificial Sequence
  RPE65 RNA guide
cucauucucuuguaucugcu

SEQ ID NO: 20449 - RNA, 20 nt, Artificial Sequence
  RPE65 RNA guide
cuccaucgugacaccaaaug

SEQ ID NO: 20450 - RNA, 20 nt, Artificial Sequence
  RPE65 RNA guide
cucccucaucuagagcagac

SEQ ID NO: 20451 - RNA, 20 nt, Artificial Sequence
  RPE65 RNA guide
cuccuuuccuaacgaacuaa

SEQ ID NO: 20452 - RNA, 20 nt, Artificial Sequence
  RPE65 RNA guide
cucuagaugagggagagaag

SEQ ID NO: 20453 - RNA, 20 nt, Artificial Sequence
  RPE65 RNA guide
cucucccucaucuagagcag

SEQ ID NO: 20454 - RNA, 20 nt, Artificial Sequence
  RPE65 RNA guide
cucugggucuuuuuucaagc

SEQ ID NO: 20455 - RNA, 20 nt, Artificial Sequence
  RPE65 RNA guide
cucuucuuacugcaguucug

SEQ ID NO: 20456 - RNA, 20 nt, Artificial Sequence
  RPE65 RNA guide
cugaauacucuucuuacugc

SEQ ID NO: 20457 - RNA, 20 nt, Artificial Sequence
  RPE65 RNA guide
cugaguugcugguguggcuc

SEQ ID NO: 20458 - RNA, 20 nt, Artificial Sequence
  RPE65 RNA guide
cugauuuguaauuugaguug

SEQ ID NO: 20459 - RNA, 20 nt, Artificial Sequence
  RPE65 RNA guide
cugcaguaagaagaguauuc

SEQ ID NO: 20460 - RNA, 20 nt, Artificial Sequence
  RPE65 RNA guide
cugcaguucuguauguuagu

SEQ ID NO: 20461 - RNA, 20 nt, Artificial Sequence
  RPE65 RNA guide
cugccuucucauucucuugu

SEQ ID NO: 20462 - RNA, 20 nt, Artificial Sequence
  RPE65 RNA guide
cugcuauaauacuuagcuuc

SEQ ID NO: 20463 - RNA, 20 nt, Artificial Sequence
  RPE65 RNA guide
cugcucuagaugagggagag

SEQ ID NO: 20464 - RNA, 20 nt, Artificial Sequence
  RPE65 RNA guide
cugcugauuuguaauuugag

SEQ ID NO: 20465 - RNA, 20 nt, Artificial Sequence
  RPE65 RNA guide
cuggaauucauguugccauu

SEQ ID NO: 20466 - RNA, 20 nt, Artificial Sequence
  RPE65 RNA guide
cugggucuuuuuucaagccc

SEQ ID NO: 20467 - RNA, 20 nt, Artificial Sequence
  RPE65 RNA guide
cugguaaucaacaagaccug

SEQ ID NO: 20468 - RNA, 20 nt, Artificial Sequence
  RPE65 RNA guide
cugguguggcucugggucuu

SEQ ID NO: 20469 - RNA, 20 nt, Artificial Sequence
  RPE65 RNA guide
cuguaucugaguugcuggug

SEQ ID NO: 20470 - RNA, 20 nt, Artificial Sequence
  RPE65 RNA guide
cuguauguuaguucguuagg

SEQ ID NO: 20471 - RNA, 20 nt, Artificial Sequence
  RPE65 RNA guide
cuuaccgaaagaacaaauga

SEQ ID NO: 20472 - RNA, 20 nt, Artificial Sequence
  RPE65 RNA guide
cuuacuccuuuccuaacgaa

SEQ ID NO: 20473 - RNA, 20 nt, Artificial Sequence
  RPE65 RNA guide
cuuacugcaguucuguaugu

SEQ ID NO: 20474 - RNA, 20 nt, Artificial Sequence
  RPE65 RNA guide
cuuagcuucccuucuuagaa

SEQ ID NO: 20475 - RNA, 20 nt, Artificial Sequence
  RPE65 RNA guide
cuucaguacugcucuauuua

SEQ ID NO: 20476 - RNA, 20 nt, Artificial Sequence
  RPE65 RNA guide
cuucccugacgaagacauau

SEQ ID NO: 20477 - RNA, 20 nt, Artificial Sequence
  RPE65 RNA guide
cuucccuucuuagaauugcu

SEQ ID NO: 20478 - RNA, 20 nt, Artificial Sequence
  RPE65 RNA guide
cuuccuucucucccucaucu

SEQ ID NO: 20479 - RNA, 20 nt, Artificial Sequence
  RPE65 RNA guide
cuucgucagggaaggcaaaa

SEQ ID NO: 20480 - RNA, 20 nt, Artificial Sequence
  RPE65 RNA guide
cuucucauucucuuguaucu

SEQ ID NO: 20481 - RNA, 20 nt, Artificial Sequence
  RPE65 RNA guide
cuucucucccucaucuagag

SEQ ID NO: 20482 - RNA, 20 nt, Artificial Sequence
  RPE65 RNA guide
cuucuuacugcaguucugua

SEQ ID NO: 20483 - RNA, 20 nt, Artificial Sequence
  RPE65 RNA guide
cuugaaaaaagacccagagc

SEQ ID NO: 20484 - RNA, 20 nt, Artificial Sequence
  RPE65 RNA guide
cuuguaucugcuauaauacu

SEQ ID NO: 20485 - RNA, 20 nt, Artificial Sequence
  RPE65 RNA guide
cuuuccuaacgaacuaacau

SEQ ID NO: 20486 - RNA, 20 nt, Artificial Sequence
  RPE65 RNA guide
cuuucgguaagcuagggcuu

SEQ ID NO: 20487 - RNA, 20 nt, Artificial Sequence
  RPE65 RNA guide
cuuuugaucaggucuuguug

SEQ ID NO: 20488 - RNA, 20 nt, Artificial Sequence
  RPE65 RNA guide
cuuuuuucaagcccuagcuu

SEQ ID NO: 20489 - RNA, 20 nt, Artificial Sequence
  RPE65 RNA guide
gaaaaaagacccagagccac

SEQ ID NO: 20490 - RNA, 20 nt, Artificial Sequence
  RPE65 RNA guide
gaaaaaauggcaacaugaau

SEQ ID NO: 20491 - RNA, 20 nt, Artificial Sequence
  RPE65 RNA guide
gaaaacuauucacagaccug

SEQ ID NO: 20492 - RNA, 20 nt, Artificial Sequence
  RPE65 RNA guide
gaaagcaauuguugugucug

SEQ ID NO: 20493 - RNA, 20 nt, Artificial Sequence
  RPE65 RNA guide
gaaaggaguaagguugauua

SEQ ID NO: 20494 - RNA, 20 nt, Artificial Sequence
  RPE65 RNA guide
gaaauaugucuucgucaggg

SEQ ID NO: 20495 - RNA, 20 nt, Artificial Sequence
  RPE65 RNA guide
gaacuaacauacagaacugc

SEQ ID NO: 20496 - RNA, 20 nt, Artificial Sequence
  RPE65 RNA guide
gaacugcaguaagaagagua

SEQ ID NO: 20497 - RNA, 20 nt, Artificial Sequence
  RPE65 RNA guide
gaagaguauucagacacaac

SEQ ID NO: 20498 - RNA, 20 nt, Artificial Sequence
  RPE65 RNA guide
gaagcuaaguauuauagcag

SEQ ID NO: 20499 - RNA, 20 nt, Artificial Sequence
  RPE65 RNA guide
gaaggaagaaaaaauggcaa

SEQ ID NO: 20500 - RNA, 20 nt, Artificial Sequence
  RPE65 RNA guide
gaaggcaaaaaccuggaauu

SEQ ID NO: 20501 - RNA, 20 nt, Artificial Sequence
  RPE65 RNA guide
gaaggcaggucugugaauag

SEQ ID NO: 20502 - RNA, 20 nt, Artificial Sequence
  RPE65 RNA guide
gaagggaagcuaaguauuau

SEQ ID NO: 20503 - RNA, 20 nt, Artificial Sequence
  RPE65 RNA guide
gaauaaucaaccuuacuccu

SEQ ID NO: 20504 - RNA, 20 nt, Artificial Sequence
  RPE65 RNA guide
gaauacucuucuuacugcag

SEQ ID NO: 20505 - RNA, 20 nt, Artificial Sequence
  RPE65 RNA guide
gaaugagaaggcaggucugu

SEQ ID NO: 20506 - RNA, 20 nt, Artificial Sequence
  RPE65 RNA guide
gaauuccagguuuuugccuu

SEQ ID NO: 20507 - RNA, 20 nt, Artificial Sequence
  RPE65 RNA guide
gaauuuucaucuuuugauca

SEQ ID NO: 20508 - RNA, 20 nt, Artificial Sequence
  RPE65 RNA guide
gacaccaaauggugcuuuga

SEQ ID NO: 20509 - RNA, 20 nt, Artificial Sequence
  RPE65 RNA guide
gacauugaugcuccaucgug

SEQ ID NO: 20510 - RNA, 20 nt, Artificial Sequence
  RPE65 RNA guide
gacccagagccacaccagca

SEQ ID NO: 20511 - RNA, 20 nt, Artificial Sequence
  RPE65 RNA guide
gaccugaucaaaagaugaaa

SEQ ID NO: 20512 - RNA, 20 nt, Artificial Sequence
  RPE65 RNA guide
gaccugccuucucauucucu

SEQ ID NO: 20513 - RNA, 20 nt, Artificial Sequence
  RPE65 RNA guide
gagaaggaagaaaaaauggc

SEQ ID NO: 20514 - RNA, 20 nt, Artificial Sequence
  RPE65 RNA guide
gagaaggcaggucugugaau

SEQ ID NO: 20515 - RNA, 20 nt, Artificial Sequence
  RPE65 RNA guide
gagaaugagaaggcaggucu

SEQ ID NO: 20516 - RNA, 20 nt, Artificial Sequence
  RPE65 RNA guide
gagagaaggaagaaaaaaug

SEQ ID NO: 20517 - RNA, 20 nt, Artificial Sequence
  RPE65 RNA guide
gagcagacauugaugcucca

SEQ ID NO: 20518 - RNA, 20 nt, Artificial Sequence
  RPE65 RNA guide
gagcaguacugaagaauuaa

SEQ ID NO: 20519 - RNA, 20 nt, Artificial Sequence
  RPE65 RNA guide
gagcaucaaugucugcucua

SEQ ID NO: 20520 - RNA, 20 nt, Artificial Sequence
  RPE65 RNA guide
gagccacaccagcaacucag

SEQ ID NO: 20521 - RNA, 20 nt, Artificial Sequence
  RPE65 RNA guide
gagggagagaaggaagaaaa

SEQ ID NO: 20522 - RNA, 20 nt, Artificial Sequence
  RPE65 RNA guide
gaguaagguugauuauuccg

SEQ ID NO: 20523 - RNA, 20 nt, Artificial Sequence
  RPE65 RNA guide
gaguauuacggaauaaucaa

SEQ ID NO: 20524 - RNA, 20 nt, Artificial Sequence
  RPE65 RNA guide
gaguauucagacacaacaau

SEQ ID NO: 20525 - RNA, 20 nt, Artificial Sequence
  RPE65 RNA guide
gaguugcugguguggcucug

SEQ ID NO: 20526 - RNA, 20 nt, Artificial Sequence
  RPE65 RNA guide
gaguugcuguaucugaguug

SEQ ID NO: 20527 - RNA, 20 nt, Artificial Sequence
  RPE65 RNA guide
gauacaagagaaugagaagg

SEQ ID NO: 20528 - RNA, 20 nt, Artificial Sequence
  RPE65 RNA guide
gaucaggucuuguugauuac

SEQ ID NO: 20529 - RNA, 20 nt, Artificial Sequence
  RPE65 RNA guide
gaugagggagagaaggaaga

SEQ ID NO: 20530 - RNA, 20 nt, Artificial Sequence
  RPE65 RNA guide
gaugcuccaucgugacacca

SEQ ID NO: 20531 - RNA, 20 nt, Artificial Sequence
  RPE65 RNA guide
gauggagcaucaaugucugc

SEQ ID NO: 20532 - RNA, 20 nt, Artificial Sequence
  RPE65 RNA guide
gcaaaaaccuggaauucaug

SEQ ID NO: 20533 - RNA, 20 nt, Artificial Sequence
  RPE65 RNA guide
gcaacaugaauuccagguuu

SEQ ID NO: 20534 - RNA, 20 nt, Artificial Sequence
  RPE65 RNA guide
gcaacucaaauuacaaauca

SEQ ID NO: 20535 - RNA, 20 nt, Artificial Sequence
  RPE65 RNA guide
gcaacucagauacagcaacu

SEQ ID NO: 20536 - RNA, 20 nt, Artificial Sequence
  RPE65 RNA guide
gcaauucuaagaagggaagc

SEQ ID NO: 20537 - RNA, 20 nt, Artificial Sequence
  RPE65 RNA guide
gcaauuguugugucugaaua

SEQ ID NO: 20538 - RNA, 20 nt, Artificial Sequence
  RPE65 RNA guide
gcaccauuuggugucacgau

SEQ ID NO: 20539 - RNA, 20 nt, Artificial Sequence
  RPE65 RNA guide
gcagacauugaugcuccauc

SEQ ID NO: 20540 - RNA, 20 nt, Artificial Sequence
  RPE65 RNA guide
gcagauacaagagaaugaga

SEQ ID NO: 20541 - RNA, 20 nt, Artificial Sequence
  RPE65 RNA guide
gcaggucugugaauaguuuu

SEQ ID NO: 20542 - RNA, 20 nt, Artificial Sequence
  RPE65 RNA guide
gcaguaagaagaguauucag

SEQ ID NO: 20543 - RNA, 20 nt, Artificial Sequence
  RPE65 RNA guide
gcaguucuguauguuaguuc

SEQ ID NO: 20544 - RNA, 20 nt, Artificial Sequence
  RPE65 RNA guide
gcaucaaugucugcucuaga

SEQ ID NO: 20545 - RNA, 20 nt, Artificial Sequence
  RPE65 RNA guide
gccacaccagcaacucagau

SEQ ID NO: 20546 - RNA, 20 nt, Artificial Sequence
  RPE65 RNA guide
gccauuuuuucuuccuucuc

SEQ ID NO: 20547 - RNA, 20 nt, Artificial Sequence
  RPE65 RNA guide
gcccuagcuuaccgaaagaa

SEQ ID NO: 20548 - RNA, 20 nt, Artificial Sequence
  RPE65 RNA guide
gccuucccugacgaagacau

SEQ ID NO: 20549 - RNA, 20 nt, Artificial Sequence
  RPE65 RNA guide
gccuucucauucucuuguau

SEQ ID NO: 20550 - RNA, 20 nt, Artificial Sequence
  RPE65 RNA guide
gcuaaguauuauagcagaua

SEQ ID NO: 20551 - RNA, 20 nt, Artificial Sequence
  RPE65 RNA guide
gcuagggcuugaaaaaagac

SEQ ID NO: 20552 - RNA, 20 nt, Artificial Sequence
  RPE65 RNA guide
gcuauaauacuuagcuuccc

SEQ ID NO: 20553 - RNA, 20 nt, Artificial Sequence
  RPE65 RNA guide
gcuccaucgugacaccaaau

SEQ ID NO: 20554 - RNA, 20 nt, Artificial Sequence
  RPE65 RNA guide
gcucuagaugagggagagaa

SEQ ID NO: 20555 - RNA, 20 nt, Artificial Sequence
  RPE65 RNA guide
gcucugggucuuuuuucaag

SEQ ID NO: 20556 - RNA, 20 nt, Artificial Sequence
  RPE65 RNA guide
gcugauuuguaauuugaguu

SEQ ID NO: 20557 - RNA, 20 nt, Artificial Sequence
  RPE65 RNA guide
gcugguguggcucugggucu

SEQ ID NO: 20558 - RNA, 20 nt, Artificial Sequence
  RPE65 RNA guide
gcuguaucugaguugcuggu

SEQ ID NO: 20559 - RNA, 20 nt, Artificial Sequence
  RPE65 RNA guide
gcuuaccgaaagaacaaaug

SEQ ID NO: 20560 - RNA, 20 nt, Artificial Sequence
  RPE65 RNA guide
gcuucccuucuuagaauugc

SEQ ID NO: 20561 - RNA, 20 nt, Artificial Sequence
  RPE65 RNA guide
gcuugaaaaaagacccagag

SEQ ID NO: 20562 - RNA, 20 nt, Artificial Sequence
  RPE65 RNA guide
ggaaaggaguaagguugauu

SEQ ID NO: 20563 - RNA, 20 nt, Artificial Sequence
  RPE65 RNA guide
ggaagaaaaaauggcaacau

SEQ ID NO: 20564 - RNA, 20 nt, Artificial Sequence
  RPE65 RNA guide
ggaagcuaaguauuauagca

SEQ ID NO: 20565 - RNA, 20 nt, Artificial Sequence
  RPE65 RNA guide
ggaaggcaaaaaccuggaau

SEQ ID NO: 20566 - RNA, 20 nt, Artificial Sequence
  RPE65 RNA guide
ggaauaaucaaccuuacucc

SEQ ID NO: 20567 - RNA, 20 nt, Artificial Sequence
  RPE65 RNA guide
ggaauucauguugccauuuu

SEQ ID NO: 20568 - RNA, 20 nt, Artificial Sequence
  RPE65 RNA guide
ggagagaaggaagaaaaaau

SEQ ID NO: 20569 - RNA, 20 nt, Artificial Sequence
  RPE65 RNA guide
ggagcaucaaugucugcucu

SEQ ID NO: 20570 - RNA, 20 nt, Artificial Sequence
  RPE65 RNA guide
ggaguaagguugauuauucc

SEQ ID NO: 20571 - RNA, 20 nt, Artificial Sequence
  RPE65 RNA guide
ggcaaaaaccuggaauucau

SEQ ID NO: 20572 - RNA, 20 nt, Artificial Sequence
  RPE65 RNA guide
ggcaacaugaauuccagguu

SEQ ID NO: 20573 - RNA, 20 nt, Artificial Sequence
  RPE65 RNA guide
ggcaggucugugaauaguuu

SEQ ID NO: 20574 - RNA, 20 nt, Artificial Sequence
  RPE65 RNA guide
ggcucugggucuuuuuucaa

SEQ ID NO: 20575 - RNA, 20 nt, Artificial Sequence
  RPE65 RNA guide
ggcuugaaaaaagacccaga

SEQ ID NO: 20576 - RNA, 20 nt, Artificial Sequence
  RPE65 RNA guide
gggaagcuaaguauuauagc

SEQ ID NO: 20577 - RNA, 20 nt, Artificial Sequence
  RPE65 RNA guide
gggaaggcaaaaaccuggaa

SEQ ID NO: 20578 - RNA, 20 nt, Artificial Sequence
  RPE65 RNA guide
gggagagaaggaagaaaaaa

SEQ ID NO: 20579 - RNA, 20 nt, Artificial Sequence
  RPE65 RNA guide
gggcuugaaaaaagacccag

SEQ ID NO: 20580 - RNA, 20 nt, Artificial Sequence
  RPE65 RNA guide
gggucuuuuuucaagcccua

SEQ ID NO: 20581 - RNA, 20 nt, Artificial Sequence
  RPE65 RNA guide
gguaagcuagggcuugaaaa

SEQ ID NO: 20582 - RNA, 20 nt, Artificial Sequence
  RPE65 RNA guide
gguaaucaacaagaccugau

SEQ ID NO: 20583 - RNA, 20 nt, Artificial Sequence
  RPE65 RNA guide
ggucugugaauaguuuucau

SEQ ID NO: 20584 - RNA, 20 nt, Artificial Sequence
  RPE65 RNA guide
ggucuuguugauuaccagua

SEQ ID NO: 20585 - RNA, 20 nt, Artificial Sequence
  RPE65 RNA guide
ggucuuuuuucaagcccuag

SEQ ID NO: 20586 - RNA, 20 nt, Artificial Sequence
  RPE65 RNA guide
ggugucacgauggagcauca

SEQ ID NO: 20587 - RNA, 20 nt, Artificial Sequence
  RPE65 RNA guide
gguguggcucugggucuuuu

SEQ ID NO: 20588 - RNA, 20 nt, Artificial Sequence
  RPE65 RNA guide
gguugauuauuccguaauac

SEQ ID NO: 20589 - RNA, 20 nt, Artificial Sequence
  RPE65 RNA guide
gguuuuugccuucccugacg

SEQ ID NO: 20590 - RNA, 20 nt, Artificial Sequence
  RPE65 RNA guide
guaagaagaguauucagaca

SEQ ID NO: 20591 - RNA, 20 nt, Artificial Sequence
  RPE65 RNA guide
guaagcuagggcuugaaaaa

SEQ ID NO: 20592 - RNA, 20 nt, Artificial Sequence
  RPE65 RNA guide
guaagguugauuauuccgua

SEQ ID NO: 20593 - RNA, 20 nt, Artificial Sequence
  RPE65 RNA guide
guaaucaacaagaccugauc

SEQ ID NO: 20594 - RNA, 20 nt, Artificial Sequence
  RPE65 RNA guide
guaaugaaagcaauuguugu

SEQ ID NO: 20595 - RNA, 20 nt, Artificial Sequence
  RPE65 RNA guide
guaauuugaguugcuguauc

SEQ ID NO: 20596 - RNA, 20 nt, Artificial Sequence
  RPE65 RNA guide
guaucugaguugcuggugug

SEQ ID NO: 20597 - RNA, 20 nt, Artificial Sequence
  RPE65 RNA guide
guaucugcuauaauacuuag

SEQ ID NO: 20598 - RNA, 20 nt, Artificial Sequence
  RPE65 RNA guide
guauguuaguucguuaggaa

SEQ ID NO: 20599 - RNA, 20 nt, Artificial Sequence
  RPE65 RNA guide
guauuacggaauaaucaacc

SEQ ID NO: 20600 - RNA, 20 nt, Artificial Sequence
  RPE65 RNA guide
guauucagacacaacaauug

SEQ ID NO: 20601 - RNA, 20 nt, Artificial Sequence
  RPE65 RNA guide
gucaaagcaccauuuggugu

SEQ ID NO: 20602 - RNA, 20 nt, Artificial Sequence
  RPE65 RNA guide
gucacgauggagcaucaaug

SEQ ID NO: 20603 - RNA, 20 nt, Artificial Sequence
  RPE65 RNA guide
gucagggaaggcaaaaaccu

SEQ ID NO: 20604 - RNA, 20 nt, Artificial Sequence
  RPE65 RNA guide
gucugaauacucuucuuacu

SEQ ID NO: 20605 - RNA, 20 nt, Artificial Sequence
  RPE65 RNA guide
gucugcucuagaugagggag

SEQ ID NO: 20606 - RNA, 20 nt, Artificial Sequence
  RPE65 RNA guide
gucuucgucagggaaggcaa

SEQ ID NO: 20607 - RNA, 20 nt, Artificial Sequence
  RPE65 RNA guide
gucuuguugauuaccaguag

SEQ ID NO: 20608 - RNA, 20 nt, Artificial Sequence
  RPE65 RNA guide
gucuuuuuucaagcccuagc

SEQ ID NO: 20609 - RNA, 20 nt, Artificial Sequence
  RPE65 RNA guide
gugacaccaaauggugcuuu

SEQ ID NO: 20610 - RNA, 20 nt, Artificial Sequence
  RPE65 RNA guide
guggcucugggucuuuuuuc

SEQ ID NO: 20611 - RNA, 20 nt, Artificial Sequence
  RPE65 RNA guide
gugucacgauggagcaucaa

SEQ ID NO: 20612 - RNA, 20 nt, Artificial Sequence
  RPE65 RNA guide
gugucugaauacucuucuua

SEQ ID NO: 20613 - RNA, 20 nt, Artificial Sequence
  RPE65 RNA guide
guguggcucugggucuuuuu

SEQ ID NO: 20614 - RNA, 20 nt, Artificial Sequence
  RPE65 RNA guide
guuaggaaaggaguaagguu

SEQ ID NO: 20615 - RNA, 20 nt, Artificial Sequence
  RPE65 RNA guide
guuaguucguuaggaaagga

SEQ ID NO: 20616 - RNA, 20 nt, Artificial Sequence
  RPE65 RNA guide
guucguuaggaaaggaguaa

SEQ ID NO: 20617 - RNA, 20 nt, Artificial Sequence
  RPE65 RNA guide
guucuguauguuaguucguu

SEQ ID NO: 20618 - RNA, 20 nt, Artificial Sequence
  RPE65 RNA guide
guucuuucgguaagcuaggg

SEQ ID NO: 20619 - RNA, 20 nt, Artificial Sequence
  RPE65 RNA guide
guugccauuuuuucuuccuu

SEQ ID NO: 20620 - RNA, 20 nt, Artificial Sequence
  RPE65 RNA guide
guugcugguguggcucuggg

SEQ ID NO: 20621 - RNA, 20 nt, Artificial Sequence
  RPE65 RNA guide
guugcuguaucugaguugcu

SEQ ID NO: 20622 - RNA, 20 nt, Artificial Sequence
  RPE65 RNA guide
guugugucugaauacucuuc

SEQ ID NO: 20623 - RNA, 20 nt, Artificial Sequence
  RPE65 RNA guide
guuuuaauucuucaguacug

SEQ ID NO: 20624 - RNA, 20 nt, Artificial Sequence
  RPE65 RNA guide
guuuucauuuguucuuucgg

SEQ ID NO: 20625 - RNA, 20 nt, Artificial Sequence
  RPE65 RNA guide
guuuuugccuucccugacga

SEQ ID NO: 20626 - RNA, 20 nt, Artificial Sequence
  RPE65 RNA guide
uaacauacagaacugcagua

SEQ ID NO: 20627 - RNA, 20 nt, Artificial Sequence
  RPE65 RNA guide
uaacgaacuaacauacagaa

SEQ ID NO: 20628 - RNA, 20 nt, Artificial Sequence
  RPE65 RNA guide
uaagaagaguauucagacac

SEQ ID NO: 20629 - RNA, 20 nt, Artificial Sequence
  RPE65 RNA guide
uaagcuagggcuugaaaaaa

SEQ ID NO: 20630 - RNA, 20 nt, Artificial Sequence
  RPE65 RNA guide
uaauacuuagcuucccuucu

SEQ ID NO: 20631 - RNA, 20 nt, Artificial Sequence
  RPE65 RNA guide
uaaucaacaagaccugauca

SEQ ID NO: 20632 - RNA, 20 nt, Artificial Sequence
  RPE65 RNA guide
uaaucaaccuuacuccuuuc

SEQ ID NO: 20633 - RNA, 20 nt, Artificial Sequence
  RPE65 RNA guide
uaaugaaagcaauuguugug

SEQ ID NO: 20634 - RNA, 20 nt, Artificial Sequence
  RPE65 RNA guide
uaauuugaguugcuguaucu

SEQ ID NO: 20635 - RNA, 20 nt, Artificial Sequence
  RPE65 RNA guide
uacaagagaaugagaaggca

SEQ ID NO: 20636 - RNA, 20 nt, Artificial Sequence
  RPE65 RNA guide
uacagaacugcaguaagaag

SEQ ID NO: 20637 - RNA, 20 nt, Artificial Sequence
  RPE65 RNA guide
uacggaauaaucaaccuuac

SEQ ID NO: 20638 - RNA, 20 nt, Artificial Sequence
  RPE65 RNA guide
uacuccuuuccuaacgaacu

SEQ ID NO: 20639 - RNA, 20 nt, Artificial Sequence
  RPE65 RNA guide
uacucuucuuacugcaguuc

SEQ ID NO: 20640 - RNA, 20 nt, Artificial Sequence
  RPE65 RNA guide
uacugcaguucuguauguua

SEQ ID NO: 20641 - RNA, 20 nt, Artificial Sequence
  RPE65 RNA guide
uacugguaaucaacaagacc

SEQ ID NO: 20642 - RNA, 20 nt, Artificial Sequence
  RPE65 RNA guide
uacuuagcuucccuucuuag

SEQ ID NO: 20643 - RNA, 20 nt, Artificial Sequence
  RPE65 RNA guide
uagaaauaugucuucgucag

SEQ ID NO: 20644 - RNA, 20 nt, Artificial Sequence
  RPE65 RNA guide
uagagcagacauugaugcuc

SEQ ID NO: 20645 - RNA, 20 nt, Artificial Sequence
  RPE65 RNA guide
uagaugagggagagaaggaa

SEQ ID NO: 20646 - RNA, 20 nt, Artificial Sequence
  RPE65 RNA guide
uagcaauucuaagaagggaa

SEQ ID NO: 20647 - RNA, 20 nt, Artificial Sequence
  RPE65 RNA guide
uagcagauacaagagaauga

SEQ ID NO: 20648 - RNA, 20 nt, Artificial Sequence
  RPE65 RNA guide
uagcuuaccgaaagaacaaa

SEQ ID NO: 20649 - RNA, 20 nt, Artificial Sequence
  RPE65 RNA guide
uagcuucccuucuuagaauu

SEQ ID NO: 20650 - RNA, 20 nt, Artificial Sequence
  RPE65 RNA guide
uaggaaaggaguaagguuga

SEQ ID NO: 20651 - RNA, 20 nt, Artificial Sequence
  RPE65 RNA guide
uagggcuugaaaaaagaccc

SEQ ID NO: 20652 - RNA, 20 nt, Artificial Sequence
  RPE65 RNA guide
uaguucguuaggaaaggagu

SEQ ID NO: 20653 - RNA, 20 nt, Artificial Sequence
  RPE65 RNA guide
uauagcagauacaagagaau

SEQ ID NO: 20654 - RNA, 20 nt, Artificial Sequence
  RPE65 RNA guide
uaucugaguugcuggugugg

SEQ ID NO: 20655 - RNA, 20 nt, Artificial Sequence
  RPE65 RNA guide
uaucugcuauaauacuuagc

SEQ ID NO: 20656 - RNA, 20 nt, Artificial Sequence
  RPE65 RNA guide
uaugucuucgucagggaagg

SEQ ID NO: 20657 - RNA, 20 nt, Artificial Sequence
  RPE65 RNA guide
uauguuaguucguuaggaaa

SEQ ID NO: 20658 - RNA, 20 nt, Artificial Sequence
  RPE65 RNA guide
uauucacagaccugccuucu

SEQ ID NO: 20659 - RNA, 20 nt, Artificial Sequence
  RPE65 RNA guide
uauucagacacaacaauugc

SEQ ID NO: 20660 - RNA, 20 nt, Artificial Sequence
  RPE65 RNA guide
ucaaagcaccauuugguguc

SEQ ID NO: 20661 - RNA, 20 nt, Artificial Sequence
  RPE65 RNA guide
ucaacaagaccugaucaaaa

SEQ ID NO: 20662 - RNA, 20 nt, Artificial Sequence
  RPE65 RNA guide
ucaaccuuacuccuuuccua

SEQ ID NO: 20663 - RNA, 20 nt, Artificial Sequence
  RPE65 RNA guide
ucaagcccuagcuuaccgaa

SEQ ID NO: 20664 - RNA, 20 nt, Artificial Sequence
  RPE65 RNA guide
ucaaugucugcucuagauga

SEQ ID NO: 20665 - RNA, 20 nt, Artificial Sequence
  RPE65 RNA guide
ucacagaccugccuucucau

SEQ ID NO: 20666 - RNA, 20 nt, Artificial Sequence
  RPE65 RNA guide
ucacgauggagcaucaaugu

SEQ ID NO: 20667 - RNA, 20 nt, Artificial Sequence
  RPE65 RNA guide
ucagacacaacaauugcuuu

SEQ ID NO: 20668 - RNA, 20 nt, Artificial Sequence
  RPE65 RNA guide
ucagauacagcaacucaaau

SEQ ID NO: 20669 - RNA, 20 nt, Artificial Sequence
  RPE65 RNA guide
ucagggaaggcaaaaaccug

SEQ ID NO: 20670 - RNA, 20 nt, Artificial Sequence
  RPE65 RNA guide
ucaggucuuguugauuacca

SEQ ID NO: 20671 - RNA, 20 nt, Artificial Sequence
  RPE65 RNA guide
ucaucuagagcagacauuga

SEQ ID NO: 20672 - RNA, 20 nt, Artificial Sequence
  RPE65 RNA guide
ucaucuuuugaucaggucuu

SEQ ID NO: 20673 - RNA, 20 nt, Artificial Sequence
  RPE65 RNA guide
ucauguugccauuuuuucuu

SEQ ID NO: 20674 - RNA, 20 nt, Artificial Sequence
  RPE65 RNA guide
ucauuuguucuuucgguaag

SEQ ID NO: 20675 - RNA, 20 nt, Artificial Sequence
  RPE65 RNA guide
uccagguuuuugccuucccu

SEQ ID NO: 20676 - RNA, 20 nt, Artificial Sequence
  RPE65 RNA guide
uccaucgugacaccaaaugg

SEQ ID NO: 20677 - RNA, 20 nt, Artificial Sequence
  RPE65 RNA guide
ucccucaucuagagcagaca

SEQ ID NO: 20678 - RNA, 20 nt, Artificial Sequence
  RPE65 RNA guide
ucccugacgaagacauauuu

SEQ ID NO: 20679 - RNA, 20 nt, Artificial Sequence
  RPE65 RNA guide
uccuaacgaacuaacauaca

SEQ ID NO: 20680 - RNA, 20 nt, Artificial Sequence
  RPE65 RNA guide
uccuucucucccucaucuag

SEQ ID NO: 20681 - RNA, 20 nt, Artificial Sequence
  RPE65 RNA guide
uccuuuccuaacgaacuaac

SEQ ID NO: 20682 - RNA, 20 nt, Artificial Sequence
  RPE65 RNA guide
ucgguaagcuagggcuugaa

SEQ ID NO: 20683 - RNA, 20 nt, Artificial Sequence
  RPE65 RNA guide
ucgucagggaaggcaaaaac

SEQ ID NO: 20684 - RNA, 20 nt, Artificial Sequence
  RPE65 RNA guide
ucgugacaccaaauggugcu

SEQ ID NO: 20685 - RNA, 20 nt, Artificial Sequence
  RPE65 RNA guide
ucguuaggaaaggaguaagg

SEQ ID NO: 20686 - RNA, 20 nt, Artificial Sequence
  RPE65 RNA guide
ucuaagaagggaagcuaagu

SEQ ID NO: 20687 - RNA, 20 nt, Artificial Sequence
  RPE65 RNA guide
ucuacugguaaucaacaaga

SEQ ID NO: 20688 - RNA, 20 nt, Artificial Sequence
  RPE65 RNA guide
ucuagagcagacauugaugc

SEQ ID NO: 20689 - RNA, 20 nt, Artificial Sequence
  RPE65 RNA guide
ucuagaugagggagagaagg

SEQ ID NO: 20690 - RNA, 20 nt, Artificial Sequence
  RPE65 RNA guide
ucucauucucuuguaucugc

SEQ ID NO: 20691 - RNA, 20 nt, Artificial Sequence
  RPE65 RNA guide
ucucccucaucuagagcaga

SEQ ID NO: 20692 - RNA, 20 nt, Artificial Sequence
  RPE65 RNA guide
ucucucccucaucuagagca

SEQ ID NO: 20693 - RNA, 20 nt, Artificial Sequence
  RPE65 RNA guide
ucugaauacucuucuuacug

SEQ ID NO: 20694 - RNA, 20 nt, Artificial Sequence
  RPE65 RNA guide
ucugaguugcugguguggcu

SEQ ID NO: 20695 - RNA, 20 nt, Artificial Sequence
  RPE65 RNA guide
ucugcuauaauacuuagcuu

SEQ ID NO: 20696 - RNA, 20 nt, Artificial Sequence
  RPE65 RNA guide
ucugcucuagaugagggaga

SEQ ID NO: 20697 - RNA, 20 nt, Artificial Sequence
  RPE65 RNA guide
ucugggucuuuuuucaagcc

SEQ ID NO: 20698 - RNA, 20 nt, Artificial Sequence
  RPE65 RNA guide
ucuguauguuaguucguuag

SEQ ID NO: 20699 - RNA, 20 nt, Artificial Sequence
  RPE65 RNA guide
ucuuacugcaguucuguaug

SEQ ID NO: 20700 - RNA, 20 nt, Artificial Sequence
  RPE65 RNA guide
ucuucaguacugcucuauuu

SEQ ID NO: 20701 - RNA, 20 nt, Artificial Sequence
  RPE65 RNA guide
ucuuccuucucucccucauc

SEQ ID NO: 20702 - RNA, 20 nt, Artificial Sequence
  RPE65 RNA guide
ucuucgucagggaaggcaaa

SEQ ID NO: 20703 - RNA, 20 nt, Artificial Sequence
  RPE65 RNA guide
ucuucuuacugcaguucugu

SEQ ID NO: 20704 - RNA, 20 nt, Artificial Sequence
  RPE65 RNA guide
ucuuucgguaagcuagggcu

SEQ ID NO: 20705 - RNA, 20 nt, Artificial Sequence
  RPE65 RNA guide
ucuuuugaucaggucuuguu

SEQ ID NO: 20706 - RNA, 20 nt, Artificial Sequence
  RPE65 RNA guide
ucuuuuuucaagcccuagcu

SEQ ID NO: 20707 - RNA, 20 nt, Artificial Sequence
  RPE65 RNA guide
ugaaaaaagacccagagcca

SEQ ID NO: 20708 - RNA, 20 nt, Artificial Sequence
  RPE65 RNA guide
ugaaaacuauucacagaccu

SEQ ID NO: 20709 - RNA, 20 nt, Artificial Sequence
  RPE65 RNA guide
ugaaagcaauuguugugucu

SEQ ID NO: 20710 - RNA, 20 nt, Artificial Sequence
  RPE65 RNA guide
ugaauacucuucuuacugca

SEQ ID NO: 20711 - RNA, 20 nt, Artificial Sequence
  RPE65 RNA guide
ugaauuccagguuuuugccu

SEQ ID NO: 20712 - RNA, 20 nt, Artificial Sequence
  RPE65 RNA guide
ugacaccaaauggugcuuug

SEQ ID NO: 20713 - RNA, 20 nt, Artificial Sequence
  RPE65 RNA guide
ugagaaggcaggucugugaa

SEQ ID NO: 20714 - RNA, 20 nt, Artificial Sequence
  RPE65 RNA guide
ugagggagagaaggaagaaa

SEQ ID NO: 20715 - RNA, 20 nt, Artificial Sequence
  RPE65 RNA guide
ugaguauuacggaauaauca

SEQ ID NO: 20716 - RNA, 20 nt, Artificial Sequence
  RPE65 RNA guide
ugaguugcugguguggcucu

SEQ ID NO: 20717 - RNA, 20 nt, Artificial Sequence
  RPE65 RNA guide
ugaguugcuguaucugaguu

SEQ ID NO: 20718 - RNA, 20 nt, Artificial Sequence
  RPE65 RNA guide
ugaucaggucuuguugauua

SEQ ID NO: 20719 - RNA, 20 nt, Artificial Sequence
  RPE65 RNA guide
ugaugcuccaucgugacacc

SEQ ID NO: 20720 - RNA, 20 nt, Artificial Sequence
  RPE65 RNA guide
ugcaguaagaagaguauuca

SEQ ID NO: 20721 - RNA, 20 nt, Artificial Sequence
  RPE65 RNA guide
ugcaguucuguauguuaguu

SEQ ID NO: 20722 - RNA, 20 nt, Artificial Sequence
  RPE65 RNA guide
ugccauuuuuucuuccuucu

SEQ ID NO: 20723 - RNA, 20 nt, Artificial Sequence
  RPE65 RNA guide
ugccuucccugacgaagaca

SEQ ID NO: 20724 - RNA, 20 nt, Artificial Sequence
  RPE65 RNA guide
ugccuucucauucucuugua

SEQ ID NO: 20725 - RNA, 20 nt, Artificial Sequence
  RPE65 RNA guide
ugcuauaauacuuagcuucc

SEQ ID NO: 20726 - RNA, 20 nt, Artificial Sequence
  RPE65 RNA guide
ugcuccaucgugacaccaaa

SEQ ID NO: 20727 - RNA, 20 nt, Artificial Sequence
  RPE65 RNA guide
ugcucuagaugagggagaga

SEQ ID NO: 20728 - RNA, 20 nt, Artificial Sequence
  RPE65 RNA guide
ugcugauuuguaauuugagu

SEQ ID NO: 20729 - RNA, 20 nt, Artificial Sequence
  RPE65 RNA guide
ugcugguguggcucuggguc

SEQ ID NO: 20730 - RNA, 20 nt, Artificial Sequence
  RPE65 RNA guide
ugcuguaucugaguugcugg

SEQ ID NO: 20731 - RNA, 20 nt, Artificial Sequence
  RPE65 RNA guide
uggaauucauguugccauuu

SEQ ID NO: 20732 - RNA, 20 nt, Artificial Sequence
  RPE65 RNA guide
uggagcaucaaugucugcuc

SEQ ID NO: 20733 - RNA, 20 nt, Artificial Sequence
  RPE65 RNA guide
uggcaacaugaauuccaggu

SEQ ID NO: 20734 - RNA, 20 nt, Artificial Sequence
  RPE65 RNA guide
uggcucugggucuuuuuuca

SEQ ID NO: 20735 - RNA, 20 nt, Artificial Sequence
  RPE65 RNA guide
ugggucuuuuuucaagcccu

SEQ ID NO: 20736 - RNA, 20 nt, Artificial Sequence
  RPE65 RNA guide
ugguaaucaacaagaccuga

SEQ ID NO: 20737 - RNA, 20 nt, Artificial Sequence
  RPE65 RNA guide
uggugucacgauggagcauc

SEQ ID NO: 20738 - RNA, 20 nt, Artificial Sequence
  RPE65 RNA guide
ugguguggcucugggucuuu

SEQ ID NO: 20739 - RNA, 20 nt, Artificial Sequence
  RPE65 RNA guide
uguaauuugaguugcuguau

SEQ ID NO: 20740 - RNA, 20 nt, Artificial Sequence
  RPE65 RNA guide
uguaucugaguugcuggugu

SEQ ID NO: 20741 - RNA, 20 nt, Artificial Sequence
  RPE65 RNA guide
uguauguuaguucguuagga

SEQ ID NO: 20742 - RNA, 20 nt, Artificial Sequence
  RPE65 RNA guide
ugucaaagcaccauuuggug

SEQ ID NO: 20743 - RNA, 20 nt, Artificial Sequence
  RPE65 RNA guide
ugucacgauggagcaucaau

SEQ ID NO: 20744 - RNA, 20 nt, Artificial Sequence
  RPE65 RNA guide
ugucugaauacucuucuuac

SEQ ID NO: 20745 - RNA, 20 nt, Artificial Sequence
  RPE65 RNA guide
ugucugcucuagaugaggga

SEQ ID NO: 20746 - RNA, 20 nt, Artificial Sequence
  RPE65 RNA guide
ugucuucgucagggaaggca

SEQ ID NO: 20747 - RNA, 20 nt, Artificial Sequence
  RPE65 RNA guide
uguggcucugggucuuuuuu

SEQ ID NO: 20748 - RNA, 20 nt, Artificial Sequence
  RPE65 RNA guide
ugugucugaauacucuucuu

SEQ ID NO: 20749 - RNA, 20 nt, Artificial Sequence
  RPE65 RNA guide
uguuaguucguuaggaaagg

SEQ ID NO: 20750 - RNA, 20 nt, Artificial Sequence
  RPE65 RNA guide
uguucuuucgguaagcuagg

SEQ ID NO: 20751 - RNA, 20 nt, Artificial Sequence
  RPE65 RNA guide
uguugccauuuuuucuuccu

SEQ ID NO: 20752 - RNA, 20 nt, Artificial Sequence
  RPE65 RNA guide
uguugugucugaauacucuu

SEQ ID NO: 20753 - RNA, 20 nt, Artificial Sequence
  RPE65 RNA guide
uuacggaauaaucaaccuua

SEQ ID NO: 20754 - RNA, 20 nt, Artificial Sequence
  RPE65 RNA guide
uuacuccuuuccuaacgaac

SEQ ID NO: 20755 - RNA, 20 nt, Artificial Sequence
  RPE65 RNA guide
uuacugcaguucuguauguu

SEQ ID NO: 20756 - RNA, 20 nt, Artificial Sequence
  RPE65 RNA guide
uuagaaauaugucuucguca

SEQ ID NO: 20757 - RNA, 20 nt, Artificial Sequence
  RPE65 RNA guide
uuagcuucccuucuuagaau

SEQ ID NO: 20758 - RNA, 20 nt, Artificial Sequence
  RPE65 RNA guide
uuaggaaaggaguaagguug

SEQ ID NO: 20759 - RNA, 20 nt, Artificial Sequence
  RPE65 RNA guide
uuaguucguuaggaaaggag

SEQ ID NO: 20760 - RNA, 20 nt, Artificial Sequence
  RPE65 RNA guide
uuauagcagauacaagagaa

SEQ ID NO: 20761 - RNA, 20 nt, Artificial Sequence
  RPE65 RNA guide
uucaagcccuagcuuaccga

SEQ ID NO: 20762 - RNA, 20 nt, Artificial Sequence
  RPE65 RNA guide
uucacagaccugccuucuca

SEQ ID NO: 20763 - RNA, 20 nt, Artificial Sequence
  RPE65 RNA guide
uucagacacaacaauugcuu

SEQ ID NO: 20764 - RNA, 20 nt, Artificial Sequence
  RPE65 RNA guide
uucaucuuuugaucaggucu

SEQ ID NO: 20765 - RNA, 20 nt, Artificial Sequence
  RPE65 RNA guide
uucauguugccauuuuuucu

SEQ ID NO: 20766 - RNA, 20 nt, Artificial Sequence
  RPE65 RNA guide
uucauuuguucuuucgguaa

SEQ ID NO: 20767 - RNA, 20 nt, Artificial Sequence
  RPE65 RNA guide
uuccagguuuuugccuuccc

SEQ ID NO: 20768 - RNA, 20 nt, Artificial Sequence
  RPE65 RNA guide
uucccugacgaagacauauu

SEQ ID NO: 20769 - RNA, 20 nt, Artificial Sequence
  RPE65 RNA guide
uuccuaacgaacuaacauac

SEQ ID NO: 20770 - RNA, 20 nt, Artificial Sequence
  RPE65 RNA guide
uuccuucucucccucaucua

SEQ ID NO: 20771 - RNA, 20 nt, Artificial Sequence
  RPE65 RNA guide
uucgguaagcuagggcuuga

SEQ ID NO: 20772 - RNA, 20 nt, Artificial Sequence
  RPE65 RNA guide
uucgucagggaaggcaaaaa

SEQ ID NO: 20773 - RNA, 20 nt, Artificial Sequence
  RPE65 RNA guide
uucguuaggaaaggaguaag

SEQ ID NO: 20774 - RNA, 20 nt, Artificial Sequence
  RPE65 RNA guide
uucuaagaagggaagcuaag

SEQ ID NO: 20775 - RNA, 20 nt, Artificial Sequence
  RPE65 RNA guide
uucuacugguaaucaacaag

SEQ ID NO: 20776 - RNA, 20 nt, Artificial Sequence
  RPE65 RNA guide
uucucauucucuuguaucug

SEQ ID NO: 20777 - RNA, 20 nt, Artificial Sequence
  RPE65 RNA guide
uucucucccucaucuagagc

SEQ ID NO: 20778 - RNA, 20 nt, Artificial Sequence
  RPE65 RNA guide
uucuguauguuaguucguua

SEQ ID NO: 20779 - RNA, 20 nt, Artificial Sequence
  RPE65 RNA guide
uucuuacugcaguucuguau

SEQ ID NO: 20780 - RNA, 20 nt, Artificial Sequence
  RPE65 RNA guide
uucuuccuucucucccucau

SEQ ID NO: 20781 - RNA, 20 nt, Artificial Sequence
  RPE65 RNA guide
uucuuucgguaagcuagggc

SEQ ID NO: 20782 - RNA, 20 nt, Artificial Sequence
  RPE65 RNA guide
uugaaaaaagacccagagcc

SEQ ID NO: 20783 - RNA, 20 nt, Artificial Sequence
  RPE65 RNA guide
uugaguauuacggaauaauc

SEQ ID NO: 20784 - RNA, 20 nt, Artificial Sequence
  RPE65 RNA guide
uugaguugcuguaucugagu

SEQ ID NO: 20785 - RNA, 20 nt, Artificial Sequence
  RPE65 RNA guide
uugaucaggucuuguugauu

SEQ ID NO: 20786 - RNA, 20 nt, Artificial Sequence
  RPE65 RNA guide
uugaugcuccaucgugacac

SEQ ID NO: 20787 - RNA, 20 nt, Artificial Sequence
  RPE65 RNA guide
uugccauuuuuucuuccuuc

SEQ ID NO: 20788 - RNA, 20 nt, Artificial Sequence
  RPE65 RNA guide
uugccuucccugacgaagac

SEQ ID NO: 20789 - RNA, 20 nt, Artificial Sequence
  RPE65 RNA guide
uugcugguguggcucugggu

SEQ ID NO: 20790 - RNA, 20 nt, Artificial Sequence
  RPE65 RNA guide
uugcuguaucugaguugcug

SEQ ID NO: 20791 - RNA, 20 nt, Artificial Sequence
  RPE65 RNA guide
uuggugucacgauggagcau

SEQ ID NO: 20792 - RNA, 20 nt, Artificial Sequence
  RPE65 RNA guide
uuguaauuugaguugcugua

SEQ ID NO: 20793 - RNA, 20 nt, Artificial Sequence
  RPE65 RNA guide
uugugucugaauacucuucu

SEQ ID NO: 20794 - RNA, 20 nt, Artificial Sequence
  RPE65 RNA guide
uuguucuuucgguaagcuag

SEQ ID NO: 20795 - RNA, 20 nt, Artificial Sequence
  RPE65 RNA guide
uuguugugucugaauacucu

SEQ ID NO: 20796 - RNA, 20 nt, Artificial Sequence
  RPE65 RNA guide
uuuagaaauaugucuucguc

SEQ ID NO: 20797 - RNA, 20 nt, Artificial Sequence
  RPE65 RNA guide
uuucaagcccuagcuuaccg

SEQ ID NO: 20798 - RNA, 20 nt, Artificial Sequence
  RPE65 RNA guide
uuucaucuuuugaucagguc

SEQ ID NO: 20799 - RNA, 20 nt, Artificial Sequence
  RPE65 RNA guide
uuucauuuguucuuucggua

SEQ ID NO: 20800 - RNA, 20 nt, Artificial Sequence
  RPE65 RNA guide
uuuccuaacgaacuaacaua

SEQ ID NO: 20801 - RNA, 20 nt, Artificial Sequence
  RPE65 RNA guide
uuucgguaagcuagggcuug

SEQ ID NO: 20802 - RNA, 20 nt, Artificial Sequence
  RPE65 RNA guide
uuucuacugguaaucaacaa

SEQ ID NO: 20803 - RNA, 20 nt, Artificial Sequence
  RPE65 RNA guide
uuucuuccuucucucccuca

SEQ ID NO: 20804 - RNA, 20 nt, Artificial Sequence
  RPE65 RNA guide
uuugaguugcuguaucugag

SEQ ID NO: 20805 - RNA, 20 nt, Artificial Sequence
  RPE65 RNA guide
uuugaucaggucuuguugau

SEQ ID NO: 20806 - RNA, 20 nt, Artificial Sequence
  RPE65 RNA guide
uuugccuucccugacgaaga

SEQ ID NO: 20807 - RNA, 20 nt, Artificial Sequence
  RPE65 RNA guide
uuuggugucacgauggagca

SEQ ID NO: 20808 - RNA, 20 nt, Artificial Sequence
  RPE65 RNA guide
uuuguucuuucgguaagcua

SEQ ID NO: 20809 - RNA, 20 nt, Artificial Sequence
  RPE65 RNA guide
uuuuagaaauaugucuucgu

SEQ ID NO: 20810 - RNA, 20 nt, Artificial Sequence
  RPE65 RNA guide
uuuucaagcccuagcuuacc

SEQ ID NO: 20811 - RNA, 20 nt, Artificial Sequence
  RPE65 RNA guide
uuuucaucuuuugaucaggu

SEQ ID NO: 20812 - RNA, 20 nt, Artificial Sequence
  RPE65 RNA guide
uuuucauuuguucuuucggu

SEQ ID NO: 20813 - RNA, 20 nt, Artificial Sequence
  RPE65 RNA guide
uuuucuacugguaaucaaca

SEQ ID NO: 20814 - RNA, 20 nt, Artificial Sequence
  RPE65 RNA guide
uuuucuuccuucucucccuc

SEQ ID NO: 20815 - RNA, 20 nt, Artificial Sequence
  RPE65 RNA guide
uuuugaucaggucuuguuga

SEQ ID NO: 20816 - RNA, 20 nt, Artificial Sequence
  RPE65 RNA guide
uuuugccuucccugacgaag

SEQ ID NO: 20817 - RNA, 20 nt, Artificial Sequence
  RPE65 RNA guide
uuuuucaagcccuagcuuac

SEQ ID NO: 20818 - RNA, 20 nt, Artificial Sequence
  RPE65 RNA guide
uuuuucuuccuucucucccu

SEQ ID NO: 20819 - RNA, 20 nt, Artificial Sequence
  RPE65 RNA guide
uuuuugccuucccugacgaa

SEQ ID NO: 20820 - RNA, 20 nt, Artificial Sequence
  RPE65 RNA guide
uuuuuucaagcccuagcuua

SEQ ID NO: 20821 - RNA, 20 nt, Artificial Sequence
  RPE65 RNA guide
uuuuuucuuccuucucuccc

SEQ ID NO: 20822 - RNA, 21 nt, Artificial Sequence
  RPE65 RNA guide
aaaaaagacccagagccacac

SEQ ID NO: 20823 - RNA, 21 nt, Artificial Sequence
  RPE65 RNA guide
aaaaaauggcaacaugaauuc

SEQ ID NO: 20824 - RNA, 21 nt, Artificial Sequence
  RPE65 RNA guide
aaaaaaugucaaagcaccauu

SEQ ID NO: 20825 - RNA, 21 nt, Artificial Sequence
  RPE65 RNA guide
aaaaaccuggaauucauguug

SEQ ID NO: 20826 - RNA, 21 nt, Artificial Sequence
  RPE65 RNA guide
aaaaagacccagagccacacc

SEQ ID NO: 20827 - RNA, 21 nt, Artificial Sequence
  RPE65 RNA guide
aaaaauggcaacaugaauucc

SEQ ID NO: 20828 - RNA, 21 nt, Artificial Sequence
  RPE65 RNA guide
aaaaaugucaaagcaccauuu

SEQ ID NO: 20829 - RNA, 21 nt, Artificial Sequence
  RPE65 RNA guide
aaaaccuggaauucauguugc

SEQ ID NO: 20830 - RNA, 21 nt, Artificial Sequence
  RPE65 RNA guide
aaaacuauucacagaccugcc

SEQ ID NO: 20831 - RNA, 21 nt, Artificial Sequence
  RPE65 RNA guide
aaaagacccagagccacacca

SEQ ID NO: 20832 - RNA, 21 nt, Artificial Sequence
  RPE65 RNA guide
aaaauagcaauucuaagaagg

SEQ ID NO: 20833 - RNA, 21 nt, Artificial Sequence
  RPE65 RNA guide
aaaauggcaacaugaauucca

SEQ ID NO: 20834 - RNA, 21 nt, Artificial Sequence
  RPE65 RNA guide
aaaaugucaaagcaccauuug

SEQ ID NO: 20835 - RNA, 21 nt, Artificial Sequence
  RPE65 RNA guide
aaaccuggaauucauguugcc

SEQ ID NO: 20836 - RNA, 21 nt, Artificial Sequence
  RPE65 RNA guide
aaacuauucacagaccugccu

SEQ ID NO: 20837 - RNA, 21 nt, Artificial Sequence
  RPE65 RNA guide
aaagacccagagccacaccag

SEQ ID NO: 20838 - RNA, 21 nt, Artificial Sequence
  RPE65 RNA guide
aaagcaauuguugugucugaa

SEQ ID NO: 20839 - RNA, 21 nt, Artificial Sequence
  RPE65 RNA guide
aaagcaccauuuggugucacg

SEQ ID NO: 20840 - RNA, 21 nt, Artificial Sequence
  RPE65 RNA guide
aaaggaguaagguugauuauu

SEQ ID NO: 20841 - RNA, 21 nt, Artificial Sequence
  RPE65 RNA guide
aaauagcaauucuaagaaggg

SEQ ID NO: 20842 - RNA, 21 nt, Artificial Sequence
  RPE65 RNA guide
aaauaugucuucgucagggaa

SEQ ID NO: 20843 - RNA, 21 nt, Artificial Sequence
  RPE65 RNA guide
aaaugaaaacuauucacagac

SEQ ID NO: 20844 - RNA, 21 nt, Artificial Sequence
  RPE65 RNA guide
aaauggcaacaugaauuccag

SEQ ID NO: 20845 - RNA, 21 nt, Artificial Sequence
  RPE65 RNA guide
aaaugucaaagcaccauuugg

SEQ ID NO: 20846 - RNA, 21 nt, Artificial Sequence
  RPE65 RNA guide
aacaaaugaaaacuauucaca

SEQ ID NO: 20847 - RNA, 21 nt, Artificial Sequence
  RPE65 RNA guide
aacaagaccugaucaaaagau

SEQ ID NO: 20848 - RNA, 21 nt, Artificial Sequence
  RPE65 RNA guide
aacauacagaacugcaguaag

SEQ ID NO: 20849 - RNA, 21 nt, Artificial Sequence
  RPE65 RNA guide
aacaugaauuccagguuuuug

SEQ ID NO: 20850 - RNA, 21 nt, Artificial Sequence
  RPE65 RNA guide
aaccuggaauucauguugcca

SEQ ID NO: 20851 - RNA, 21 nt, Artificial Sequence
  RPE65 RNA guide
aaccuuacuccuuuccuaacg

SEQ ID NO: 20852 - RNA, 21 nt, Artificial Sequence
  RPE65 RNA guide
aacgaacuaacauacagaacu

SEQ ID NO: 20853 - RNA, 21 nt, Artificial Sequence
  RPE65 RNA guide
aacuaacauacagaacugcag

SEQ ID NO: 20854 - RNA, 21 nt, Artificial Sequence
  RPE65 RNA guide
aacuauucacagaccugccuu

SEQ ID NO: 20855 - RNA, 21 nt, Artificial Sequence
  RPE65 RNA guide
aacucagauacagcaacucaa

SEQ ID NO: 20856 - RNA, 21 nt, Artificial Sequence
  RPE65 RNA guide
aacugcaguaagaagaguauu

SEQ ID NO: 20857 - RNA, 21 nt, Artificial Sequence
  RPE65 RNA guide
aagaaaaaauggcaacaugaa

SEQ ID NO: 20858 - RNA, 21 nt, Artificial Sequence
  RPE65 RNA guide
aagaagaguauucagacacaa

SEQ ID NO: 20859 - RNA, 21 nt, Artificial Sequence
  RPE65 RNA guide
aagaagggaagcuaaguauua

SEQ ID NO: 20860 - RNA, 21 nt, Artificial Sequence
  RPE65 RNA guide
aagacccagagccacaccagc

SEQ ID NO: 20861 - RNA, 21 nt, Artificial Sequence
  RPE65 RNA guide
aagagaaugagaaggcagguc

SEQ ID NO: 20862 - RNA, 21 nt, Artificial Sequence
  RPE65 RNA guide
aagaguauucagacacaacaa

SEQ ID NO: 20863 - RNA, 21 nt, Artificial Sequence
  RPE65 RNA guide
aagcaauuguugugucugaau

SEQ ID NO: 20864 - RNA, 21 nt, Artificial Sequence
  RPE65 RNA guide
aagcaccauuuggugucacga

SEQ ID NO: 20865 - RNA, 21 nt, Artificial Sequence
  RPE65 RNA guide
aagcccuagcuuaccgaaaga

SEQ ID NO: 20866 - RNA, 21 nt, Artificial Sequence
  RPE65 RNA guide
aagcuagggcuugaaaaaaga

SEQ ID NO: 20867 - RNA, 21 nt, Artificial Sequence
  RPE65 RNA guide
aaggaagaaaaaauggcaaca

SEQ ID NO: 20868 - RNA, 21 nt, Artificial Sequence
  RPE65 RNA guide
aaggaguaagguugauuauuc

SEQ ID NO: 20869 - RNA, 21 nt, Artificial Sequence
  RPE65 RNA guide
aaggaucguuuuugaguauua

SEQ ID NO: 20870 - RNA, 21 nt, Artificial Sequence
  RPE65 RNA guide
aaggcaaaaaccuggaauuca

SEQ ID NO: 20871 - RNA, 21 nt, Artificial Sequence
  RPE65 RNA guide
aaggcaggucugugaauaguu

SEQ ID NO: 20872 - RNA, 21 nt, Artificial Sequence
  RPE65 RNA guide
aagggaagcuaaguauuauag

SEQ ID NO: 20873 - RNA, 21 nt, Artificial Sequence
  RPE65 RNA guide
aagguugauuauuccguaaua

SEQ ID NO: 20874 - RNA, 21 nt, Artificial Sequence
  RPE65 RNA guide
aauaaucaaccuuacuccuuu

SEQ ID NO: 20875 - RNA, 21 nt, Artificial Sequence
  RPE65 RNA guide
aauacucuucuuacugcaguu

SEQ ID NO: 20876 - RNA, 21 nt, Artificial Sequence
  RPE65 RNA guide
aauacuuagcuucccuucuua

SEQ ID NO: 20877 - RNA, 21 nt, Artificial Sequence
  RPE65 RNA guide
aauagcaauucuaagaaggga

SEQ ID NO: 20878 - RNA, 21 nt, Artificial Sequence
  RPE65 RNA guide
aauaugucuucgucagggaag

SEQ ID NO: 20879 - RNA, 21 nt, Artificial Sequence
  RPE65 RNA guide
aaucaacaagaccugaucaaa

SEQ ID NO: 20880 - RNA, 21 nt, Artificial Sequence
  RPE65 RNA guide
aaucaaccuuacuccuuuccu

SEQ ID NO: 20881 - RNA, 21 nt, Artificial Sequence
  RPE65 RNA guide
aaugaaaacuauucacagacc

SEQ ID NO: 20882 - RNA, 21 nt, Artificial Sequence
  RPE65 RNA guide
aaugaaagcaauuguuguguc

SEQ ID NO: 20883 - RNA, 21 nt, Artificial Sequence
  RPE65 RNA guide
aaugagaaggcaggucuguga

SEQ ID NO: 20884 - RNA, 21 nt, Artificial Sequence
  RPE65 RNA guide
aauggcaacaugaauuccagg

SEQ ID NO: 20885 - RNA, 21 nt, Artificial Sequence
  RPE65 RNA guide
aaugucaaagcaccauuuggu

SEQ ID NO: 20886 - RNA, 21 nt, Artificial Sequence
  RPE65 RNA guide
aaugucugcucuagaugaggg

SEQ ID NO: 20887 - RNA, 21 nt, Artificial Sequence
  RPE65 RNA guide
aauucauguugccauuuuuuc

SEQ ID NO: 20888 - RNA, 21 nt, Artificial Sequence
  RPE65 RNA guide
aauuccagguuuuugccuucc

SEQ ID NO: 20889 - RNA, 21 nt, Artificial Sequence
  RPE65 RNA guide
aauucuaagaagggaagcuaa

SEQ ID NO: 20890 - RNA, 21 nt, Artificial Sequence
  RPE65 RNA guide
aauuguugugucugaauacuc

SEQ ID NO: 20891 - RNA, 21 nt, Artificial Sequence
  RPE65 RNA guide
aauuugaguugcuguaucuga

SEQ ID NO: 20892 - RNA, 21 nt, Artificial Sequence
  RPE65 RNA guide
acaaaugaaaacuauucacag

SEQ ID NO: 20893 - RNA, 21 nt, Artificial Sequence
  RPE65 RNA guide
acaagaccugaucaaaagaug

SEQ ID NO: 20894 - RNA, 21 nt, Artificial Sequence
  RPE65 RNA guide
acaagagaaugagaaggcagg

SEQ ID NO: 20895 - RNA, 21 nt, Artificial Sequence
  RPE65 RNA guide
acaccaaauggugcuuugaca

SEQ ID NO: 20896 - RNA, 21 nt, Artificial Sequence
  RPE65 RNA guide
acaccagcaacucagauacag

SEQ ID NO: 20897 - RNA, 21 nt, Artificial Sequence
  RPE65 RNA guide
acagaacugcaguaagaagag

SEQ ID NO: 20898 - RNA, 21 nt, Artificial Sequence
  RPE65 RNA guide
acagaccugccuucucauucu

SEQ ID NO: 20899 - RNA, 21 nt, Artificial Sequence
  RPE65 RNA guide
acagcaacucaaauuacaaau

SEQ ID NO: 20900 - RNA, 21 nt, Artificial Sequence
  RPE65 RNA guide
acauacagaacugcaguaaga

SEQ ID NO: 20901 - RNA, 21 nt, Artificial Sequence
  RPE65 RNA guide
acaugaauuccagguuuuugc

SEQ ID NO: 20902 - RNA, 21 nt, Artificial Sequence
  RPE65 RNA guide
acauugaugcuccaucgugac

SEQ ID NO: 20903 - RNA, 21 nt, Artificial Sequence
  RPE65 RNA guide
accaaauggugcuuugacauu

SEQ ID NO: 20904 - RNA, 21 nt, Artificial Sequence
  RPE65 RNA guide
accagcaacucagauacagca

SEQ ID NO: 20905 - RNA, 21 nt, Artificial Sequence
  RPE65 RNA guide
accauuuggugucacgaugga

SEQ ID NO: 20906 - RNA, 21 nt, Artificial Sequence
  RPE65 RNA guide
acccagagccacaccagcaac

SEQ ID NO: 20907 - RNA, 21 nt, Artificial Sequence
  RPE65 RNA guide
accugccuucucauucucuug

SEQ ID NO: 20908 - RNA, 21 nt, Artificial Sequence
  RPE65 RNA guide
accuggaauucauguugccau

SEQ ID NO: 20909 - RNA, 21 nt, Artificial Sequence
  RPE65 RNA guide
accuuacuccuuuccuaacga

SEQ ID NO: 20910 - RNA, 21 nt, Artificial Sequence
  RPE65 RNA guide
acgaacuaacauacagaacug

SEQ ID NO: 20911 - RNA, 21 nt, Artificial Sequence
  RPE65 RNA guide
acgauggagcaucaaugucug

SEQ ID NO: 20912 - RNA, 21 nt, Artificial Sequence
  RPE65 RNA guide
acggaauaaucaaccuuacuc

SEQ ID NO: 20913 - RNA, 21 nt, Artificial Sequence
  RPE65 RNA guide
acuaacauacagaacugcagu

SEQ ID NO: 20914 - RNA, 21 nt, Artificial Sequence
  RPE65 RNA guide
acuauaaauagagcaguacug

SEQ ID NO: 20915 - RNA, 21 nt, Artificial Sequence
  RPE65 RNA guide
acuauucacagaccugccuuc

SEQ ID NO: 20916 - RNA, 21 nt, Artificial Sequence
  RPE65 RNA guide
acucagauacagcaacucaaa

SEQ ID NO: 20917 - RNA, 21 nt, Artificial Sequence
  RPE65 RNA guide
acuccuuuccuaacgaacuaa

SEQ ID NO: 20918 - RNA, 21 nt, Artificial Sequence
  RPE65 RNA guide
acucuucuuacugcaguucug

SEQ ID NO: 20919 - RNA, 21 nt, Artificial Sequence
  RPE65 RNA guide
acugcaguaagaagaguauuc

SEQ ID NO: 20920 - RNA, 21 nt, Artificial Sequence
  RPE65 RNA guide
acugcaguucuguauguuagu

SEQ ID NO: 20921 - RNA, 21 nt, Artificial Sequence
  RPE65 RNA guide
acugguaaucaacaagaccug

SEQ ID NO: 20922 - RNA, 21 nt, Artificial Sequence
  RPE65 RNA guide
acuuagcuucccuucuuagaa

SEQ ID NO: 20923 - RNA, 21 nt, Artificial Sequence
  RPE65 RNA guide
agaaaaaauggcaacaugaau

SEQ ID NO: 20924 - RNA, 21 nt, Artificial Sequence
  RPE65 RNA guide
agaaauaugucuucgucaggg

SEQ ID NO: 20925 - RNA, 21 nt, Artificial Sequence
  RPE65 RNA guide
agaacugcaguaagaagagua

SEQ ID NO: 20926 - RNA, 21 nt, Artificial Sequence
  RPE65 RNA guide
agaagaguauucagacacaac

SEQ ID NO: 20927 - RNA, 21 nt, Artificial Sequence
  RPE65 RNA guide
agaaggaagaaaaaauggcaa

SEQ ID NO: 20928 - RNA, 21 nt, Artificial Sequence
  RPE65 RNA guide
agaaggcaggucugugaauag

SEQ ID NO: 20929 - RNA, 21 nt, Artificial Sequence
  RPE65 RNA guide
agaagggaagcuaaguauuau

SEQ ID NO: 20930 - RNA, 21 nt, Artificial Sequence
  RPE65 RNA guide
agaaugagaaggcaggucugu

SEQ ID NO: 20931 - RNA, 21 nt, Artificial Sequence
  RPE65 RNA guide
agaauuuucaucuuuugauca

SEQ ID NO: 20932 - RNA, 21 nt, Artificial Sequence
  RPE65 RNA guide
agacauugaugcuccaucgug

SEQ ID NO: 20933 - RNA, 21 nt, Artificial Sequence
  RPE65 RNA guide
agacccagagccacaccagca

SEQ ID NO: 20934 - RNA, 21 nt, Artificial Sequence
  RPE65 RNA guide
agaccugaucaaaagaugaaa

SEQ ID NO: 20935 - RNA, 21 nt, Artificial Sequence
  RPE65 RNA guide
agaccugccuucucauucucu

SEQ ID NO: 20936 - RNA, 21 nt, Artificial Sequence
  RPE65 RNA guide
agagaaggaagaaaaaauggc

SEQ ID NO: 20937 - RNA, 21 nt, Artificial Sequence
  RPE65 RNA guide
agagaaugagaaggcaggucu

SEQ ID NO: 20938 - RNA, 21 nt, Artificial Sequence
  RPE65 RNA guide
agagcagacauugaugcucca

SEQ ID NO: 20939 - RNA, 21 nt, Artificial Sequence
  RPE65 RNA guide
agagcaguacugaagaauuaa

SEQ ID NO: 20940 - RNA, 21 nt, Artificial Sequence
  RPE65 RNA guide
agagccacaccagcaacucag

SEQ ID NO: 20941 - RNA, 21 nt, Artificial Sequence
  RPE65 RNA guide
agaguauucagacacaacaau

SEQ ID NO: 20942 - RNA, 21 nt, Artificial Sequence
  RPE65 RNA guide
agauacaagagaaugagaagg

SEQ ID NO: 20943 - RNA, 21 nt, Artificial Sequence
  RPE65 RNA guide
agaugagggagagaaggaaga

SEQ ID NO: 20944 - RNA, 21 nt, Artificial Sequence
  RPE65 RNA guide
agcaacucaaauuacaaauca

SEQ ID NO: 20945 - RNA, 21 nt, Artificial Sequence
  RPE65 RNA guide
agcaacucagauacagcaacu

SEQ ID NO: 20946 - RNA, 21 nt, Artificial Sequence
  RPE65 RNA guide
agcaauucuaagaagggaagc

SEQ ID NO: 20947 - RNA, 21 nt, Artificial Sequence
  RPE65 RNA guide
agcaauuguugugucugaaua

SEQ ID NO: 20948 - RNA, 21 nt, Artificial Sequence
  RPE65 RNA guide
agcaccauuuggugucacgau

SEQ ID NO: 20949 - RNA, 21 nt, Artificial Sequence
  RPE65 RNA guide
agcagacauugaugcuccauc

SEQ ID NO: 20950 - RNA, 21 nt, Artificial Sequence
  RPE65 RNA guide
agcagauacaagagaaugaga

SEQ ID NO: 20951 - RNA, 21 nt, Artificial Sequence
  RPE65 RNA guide
agcaucaaugucugcucuaga

SEQ ID NO: 20952 - RNA, 21 nt, Artificial Sequence
  RPE65 RNA guide
agccacaccagcaacucagau

SEQ ID NO: 20953 - RNA, 21 nt, Artificial Sequence
  RPE65 RNA guide
agcccuagcuuaccgaaagaa

SEQ ID NO: 20954 - RNA, 21 nt, Artificial Sequence
  RPE65 RNA guide
agcuaaguauuauagcagaua

SEQ ID NO: 20955 - RNA, 21 nt, Artificial Sequence
  RPE65 RNA guide
agcuagggcuugaaaaaagac

SEQ ID NO: 20956 - RNA, 21 nt, Artificial Sequence
  RPE65 RNA guide
agcuuaccgaaagaacaaaug

SEQ ID NO: 20957 - RNA, 21 nt, Artificial Sequence
  RPE65 RNA guide
agcuucccuucuuagaauugc

SEQ ID NO: 20958 - RNA, 21 nt, Artificial Sequence
  RPE65 RNA guide
aggaaaggaguaagguugauu

SEQ ID NO: 20959 - RNA, 21 nt, Artificial Sequence
  RPE65 RNA guide
aggaagaaaaaauggcaacau

SEQ ID NO: 20960 - RNA, 21 nt, Artificial Sequence
  RPE65 RNA guide
aggaguaagguugauuauucc

SEQ ID NO: 20961 - RNA, 21 nt, Artificial Sequence
  RPE65 RNA guide
aggcaaaaaccuggaauucau

SEQ ID NO: 20962 - RNA, 21 nt, Artificial Sequence
  RPE65 RNA guide
aggcaggucugugaauaguuu

SEQ ID NO: 20963 - RNA, 21 nt, Artificial Sequence
  RPE65 RNA guide
agggaagcuaaguauuauagc

SEQ ID NO: 20964 - RNA, 21 nt, Artificial Sequence
  RPE65 RNA guide
agggaaggcaaaaaccuggaa

SEQ ID NO: 20965 - RNA, 21 nt, Artificial Sequence
  RPE65 RNA guide
agggagagaaggaagaaaaaa

SEQ ID NO: 20966 - RNA, 21 nt, Artificial Sequence
  RPE65 RNA guide
agggcuugaaaaaagacccag

SEQ ID NO: 20967 - RNA, 21 nt, Artificial Sequence
  RPE65 RNA guide
aggucugugaauaguuuucau

SEQ ID NO: 20968 - RNA, 21 nt, Artificial Sequence
  RPE65 RNA guide
aggucuuguugauuaccagua

SEQ ID NO: 20969 - RNA, 21 nt, Artificial Sequence
  RPE65 RNA guide
agguugauuauuccguaauac

SEQ ID NO: 20970 - RNA, 21 nt, Artificial Sequence
  RPE65 RNA guide
agguuuuugccuucccugacg

SEQ ID NO: 20971 - RNA, 21 nt, Artificial Sequence
  RPE65 RNA guide
aguaagaagaguauucagaca

SEQ ID NO: 20972 - RNA, 21 nt, Artificial Sequence
  RPE65 RNA guide
aguaagguugauuauuccgua

SEQ ID NO: 20973 - RNA, 21 nt, Artificial Sequence
  RPE65 RNA guide
aguauuacggaauaaucaacc

SEQ ID NO: 20974 - RNA, 21 nt, Artificial Sequence
  RPE65 RNA guide
aguauucagacacaacaauug

SEQ ID NO: 20975 - RNA, 21 nt, Artificial Sequence
  RPE65 RNA guide
aguucguuaggaaaggaguaa

SEQ ID NO: 20976 - RNA, 21 nt, Artificial Sequence
  RPE65 RNA guide
aguucuguauguuaguucguu

SEQ ID NO: 20977 - RNA, 21 nt, Artificial Sequence
  RPE65 RNA guide
aguugcugguguggcucuggg

SEQ ID NO: 20978 - RNA, 21 nt, Artificial Sequence
  RPE65 RNA guide
aguugcuguaucugaguugcu

SEQ ID NO: 20979 - RNA, 21 nt, Artificial Sequence
  RPE65 RNA guide
aguuuuaauucuucaguacug

SEQ ID NO: 20980 - RNA, 21 nt, Artificial Sequence
  RPE65 RNA guide
aguuuucauuuguucuuucgg

SEQ ID NO: 20981 - RNA, 21 nt, Artificial Sequence
  RPE65 RNA guide
auaauacuuagcuucccuucu

SEQ ID NO: 20982 - RNA, 21 nt, Artificial Sequence
  RPE65 RNA guide
auaaucaaccuuacuccuuuc

SEQ ID NO: 20983 - RNA, 21 nt, Artificial Sequence
  RPE65 RNA guide
auacaagagaaugagaaggca

SEQ ID NO: 20984 - RNA, 21 nt, Artificial Sequence
  RPE65 RNA guide
auacagaacugcaguaagaag

SEQ ID NO: 20985 - RNA, 21 nt, Artificial Sequence
  RPE65 RNA guide
auacucuucuuacugcaguuc

SEQ ID NO: 20986 - RNA, 21 nt, Artificial Sequence
  RPE65 RNA guide
auacuuagcuucccuucuuag

SEQ ID NO: 20987 - RNA, 21 nt, Artificial Sequence
  RPE65 RNA guide
auagcaauucuaagaagggaa

SEQ ID NO: 20988 - RNA, 21 nt, Artificial Sequence
  RPE65 RNA guide
auagcagauacaagagaauga

SEQ ID NO: 20989 - RNA, 21 nt, Artificial Sequence
  RPE65 RNA guide
auaugucuucgucagggaagg

SEQ ID NO: 20990 - RNA, 21 nt, Artificial Sequence
  RPE65 RNA guide
aucaacaagaccugaucaaaa

SEQ ID NO: 20991 - RNA, 21 nt, Artificial Sequence
  RPE65 RNA guide
aucaaccuuacuccuuuccua

SEQ ID NO: 20992 - RNA, 21 nt, Artificial Sequence
  RPE65 RNA guide
aucaaugucugcucuagauga

SEQ ID NO: 20993 - RNA, 21 nt, Artificial Sequence
  RPE65 RNA guide
aucaggucuuguugauuacca

SEQ ID NO: 20994 - RNA, 21 nt, Artificial Sequence
  RPE65 RNA guide
aucgugacaccaaauggugcu

SEQ ID NO: 20995 - RNA, 21 nt, Artificial Sequence
  RPE65 RNA guide
aucuagagcagacauugaugc

SEQ ID NO: 20996 - RNA, 21 nt, Artificial Sequence
  RPE65 RNA guide
aucugaguugcugguguggcu

SEQ ID NO: 20997 - RNA, 21 nt, Artificial Sequence
  RPE65 RNA guide
aucugcuauaauacuuagcuu

SEQ ID NO: 20998 - RNA, 21 nt, Artificial Sequence
  RPE65 RNA guide
aucuuuugaucaggucuuguu

SEQ ID NO: 20999 - RNA, 21 nt, Artificial Sequence
  RPE65 RNA guide
augaaaacuauucacagaccu

SEQ ID NO: 21000 - RNA, 21 nt, Artificial Sequence
  RPE65 RNA guide
augaaagcaauuguugugucu

SEQ ID NO: 21001 - RNA, 21 nt, Artificial Sequence
  RPE65 RNA guide
augaauuccagguuuuugccu

SEQ ID NO: 21002 - RNA, 21 nt, Artificial Sequence
  RPE65 RNA guide
augagaaggcaggucugugaa

SEQ ID NO: 21003 - RNA, 21 nt, Artificial Sequence
  RPE65 RNA guide
augagggagagaaggaagaaa

SEQ ID NO: 21004 - RNA, 21 nt, Artificial Sequence
  RPE65 RNA guide
augcuccaucgugacaccaaa

SEQ ID NO: 21005 - RNA, 21 nt, Artificial Sequence
  RPE65 RNA guide
auggagcaucaaugucugcuc

SEQ ID NO: 21006 - RNA, 21 nt, Artificial Sequence
  RPE65 RNA guide
auggcaacaugaauuccaggu

SEQ ID NO: 21007 - RNA, 21 nt, Artificial Sequence
  RPE65 RNA guide
augucaaagcaccauuuggug

SEQ ID NO: 21008 - RNA, 21 nt, Artificial Sequence
  RPE65 RNA guide
augucugcucuagaugaggga

SEQ ID NO: 21009 - RNA, 21 nt, Artificial Sequence
  RPE65 RNA guide
augucuucgucagggaaggca

SEQ ID NO: 21010 - RNA, 21 nt, Artificial Sequence
  RPE65 RNA guide
auguuaguucguuaggaaagg

SEQ ID NO: 21011 - RNA, 21 nt, Artificial Sequence
  RPE65 RNA guide
auguugccauuuuuucuuccu

SEQ ID NO: 21012 - RNA, 21 nt, Artificial Sequence
  RPE65 RNA guide
auuacggaauaaucaaccuua

SEQ ID NO: 21013 - RNA, 21 nt, Artificial Sequence
  RPE65 RNA guide
auuauagcagauacaagagaa

SEQ ID NO: 21014 - RNA, 21 nt, Artificial Sequence
  RPE65 RNA guide
auucacagaccugccuucuca

SEQ ID NO: 21015 - RNA, 21 nt, Artificial Sequence
  RPE65 RNA guide
auucagacacaacaauugcuu

SEQ ID NO: 21016 - RNA, 21 nt, Artificial Sequence
  RPE65 RNA guide
auucauguugccauuuuuucu

SEQ ID NO: 21017 - RNA, 21 nt, Artificial Sequence
  RPE65 RNA guide
auuccagguuuuugccuuccc

SEQ ID NO: 21018 - RNA, 21 nt, Artificial Sequence
  RPE65 RNA guide
auucuaagaagggaagcuaag

SEQ ID NO: 21019 - RNA, 21 nt, Artificial Sequence
  RPE65 RNA guide
auugaugcuccaucgugacac

SEQ ID NO: 21020 - RNA, 21 nt, Artificial Sequence
  RPE65 RNA guide
auuguugugucugaauacucu

SEQ ID NO: 21021 - RNA, 21 nt, Artificial Sequence
  RPE65 RNA guide
auuugaguugcuguaucugag

SEQ ID NO: 21022 - RNA, 21 nt, Artificial Sequence
  RPE65 RNA guide
auuuggugucacgauggagca

SEQ ID NO: 21023 - RNA, 21 nt, Artificial Sequence
  RPE65 RNA guide
auuuguucuuucgguaagcua

SEQ ID NO: 21024 - RNA, 21 nt, Artificial Sequence
  RPE65 RNA guide
auuuucaucuuuugaucaggu

SEQ ID NO: 21025 - RNA, 21 nt, Artificial Sequence
  RPE65 RNA guide
auuuuuucuuccuucucuccc

SEQ ID NO: 21026 - RNA, 21 nt, Artificial Sequence
  RPE65 RNA guide
caaaaaccuggaauucauguu

SEQ ID NO: 21027 - RNA, 21 nt, Artificial Sequence
  RPE65 RNA guide
caaagcaccauuuggugucac

SEQ ID NO: 21028 - RNA, 21 nt, Artificial Sequence
  RPE65 RNA guide
caaaugaaaacuauucacaga

SEQ ID NO: 21029 - RNA, 21 nt, Artificial Sequence
  RPE65 RNA guide
caacaagaccugaucaaaaga

SEQ ID NO: 21030 - RNA, 21 nt, Artificial Sequence
  RPE65 RNA guide
caacaugaauuccagguuuuu

SEQ ID NO: 21031 - RNA, 21 nt, Artificial Sequence
  RPE65 RNA guide
caaccuuacuccuuuccuaac

SEQ ID NO: 21032 - RNA, 21 nt, Artificial Sequence
  RPE65 RNA guide
caacucagauacagcaacuca

SEQ ID NO: 21033 - RNA, 21 nt, Artificial Sequence
  RPE65 RNA guide
caagaccugaucaaaagauga

SEQ ID NO: 21034 - RNA, 21 nt, Artificial Sequence
  RPE65 RNA guide
caagagaaugagaaggcaggu

SEQ ID NO: 21035 - RNA, 21 nt, Artificial Sequence
  RPE65 RNA guide
caagcccuagcuuaccgaaag

SEQ ID NO: 21036 - RNA, 21 nt, Artificial Sequence
  RPE65 RNA guide
caaugucugcucuagaugagg

SEQ ID NO: 21037 - RNA, 21 nt, Artificial Sequence
  RPE65 RNA guide
caauucuaagaagggaagcua

SEQ ID NO: 21038 - RNA, 21 nt, Artificial Sequence
  RPE65 RNA guide
caauuguugugucugaauacu

SEQ ID NO: 21039 - RNA, 21 nt, Artificial Sequence
  RPE65 RNA guide
cacaccagcaacucagauaca

SEQ ID NO: 21040 - RNA, 21 nt, Artificial Sequence
  RPE65 RNA guide
cacagaccugccuucucauuc

SEQ ID NO: 21041 - RNA, 21 nt, Artificial Sequence
  RPE65 RNA guide
caccaaauggugcuuugacau

SEQ ID NO: 21042 - RNA, 21 nt, Artificial Sequence
  RPE65 RNA guide
caccagcaacucagauacagc

SEQ ID NO: 21043 - RNA, 21 nt, Artificial Sequence
  RPE65 RNA guide
caccauuuggugucacgaugg

SEQ ID NO: 21044 - RNA, 21 nt, Artificial Sequence
  RPE65 RNA guide
cacgauggagcaucaaugucu

SEQ ID NO: 21045 - RNA, 21 nt, Artificial Sequence
  RPE65 RNA guide
cagaacugcaguaagaagagu

SEQ ID NO: 21046 - RNA, 21 nt, Artificial Sequence
  RPE65 RNA guide
cagacacaacaauugcuuuca

SEQ ID NO: 21047 - RNA, 21 nt, Artificial Sequence
  RPE65 RNA guide
cagacauugaugcuccaucgu

SEQ ID NO: 21048 - RNA, 21 nt, Artificial Sequence
  RPE65 RNA guide
cagaccugccuucucauucuc

SEQ ID NO: 21049 - RNA, 21 nt, Artificial Sequence
  RPE65 RNA guide
cagagccacaccagcaacuca

SEQ ID NO: 21050 - RNA, 21 nt, Artificial Sequence
  RPE65 RNA guide
cagauacaagagaaugagaag

SEQ ID NO: 21051 - RNA, 21 nt, Artificial Sequence
  RPE65 RNA guide
cagauacagcaacucaaauua

SEQ ID NO: 21052 - RNA, 21 nt, Artificial Sequence
  RPE65 RNA guide
cagcaacucaaauuacaaauc

SEQ ID NO: 21053 - RNA, 21 nt, Artificial Sequence
  RPE65 RNA guide
cagcaacucagauacagcaac

SEQ ID NO: 21054 - RNA, 21 nt, Artificial Sequence
  RPE65 RNA guide
cagggaaggcaaaaaccugga

SEQ ID NO: 21055 - RNA, 21 nt, Artificial Sequence
  RPE65 RNA guide
caggucugugaauaguuuuca

SEQ ID NO: 21056 - RNA, 21 nt, Artificial Sequence
  RPE65 RNA guide
caggucuuguugauuaccagu

SEQ ID NO: 21057 - RNA, 21 nt, Artificial Sequence
  RPE65 RNA guide
cagguuuuugccuucccugac

SEQ ID NO: 21058 - RNA, 21 nt, Artificial Sequence
  RPE65 RNA guide
caguaagaagaguauucagac

SEQ ID NO: 21059 - RNA, 21 nt, Artificial Sequence
  RPE65 RNA guide
caguucuguauguuaguucgu

SEQ ID NO: 21060 - RNA, 21 nt, Artificial Sequence
  RPE65 RNA guide
cauacagaacugcaguaagaa

SEQ ID NO: 21061 - RNA, 21 nt, Artificial Sequence
  RPE65 RNA guide
caucaaugucugcucuagaug

SEQ ID NO: 21062 - RNA, 21 nt, Artificial Sequence
  RPE65 RNA guide
caucgugacaccaaauggugc

SEQ ID NO: 21063 - RNA, 21 nt, Artificial Sequence
  RPE65 RNA guide
caucuagagcagacauugaug

SEQ ID NO: 21064 - RNA, 21 nt, Artificial Sequence
  RPE65 RNA guide
caucuuuugaucaggucuugu

SEQ ID NO: 21065 - RNA, 21 nt, Artificial Sequence
  RPE65 RNA guide
caugaauuccagguuuuugcc

SEQ ID NO: 21066 - RNA, 21 nt, Artificial Sequence
  RPE65 RNA guide
cauguugccauuuuuucuucc

SEQ ID NO: 21067 - RNA, 21 nt, Artificial Sequence
  RPE65 RNA guide
cauucucuuguaucugcuaua

SEQ ID NO: 21068 - RNA, 21 nt, Artificial Sequence
  RPE65 RNA guide
cauugaugcuccaucgugaca

SEQ ID NO: 21069 - RNA, 21 nt, Artificial Sequence
  RPE65 RNA guide
cauuuggugucacgauggagc

SEQ ID NO: 21070 - RNA, 21 nt, Artificial Sequence
  RPE65 RNA guide
cauuuguucuuucgguaagcu

SEQ ID NO: 21071 - RNA, 21 nt, Artificial Sequence
  RPE65 RNA guide
cauuuuuucuuccuucucucc

SEQ ID NO: 21072 - RNA, 21 nt, Artificial Sequence
  RPE65 RNA guide
ccacaccagcaacucagauac

SEQ ID NO: 21073 - RNA, 21 nt, Artificial Sequence
  RPE65 RNA guide
ccagagccacaccagcaacuc

SEQ ID NO: 21074 - RNA, 21 nt, Artificial Sequence
  RPE65 RNA guide
ccagcaacucagauacagcaa

SEQ ID NO: 21075 - RNA, 21 nt, Artificial Sequence
  RPE65 RNA guide
ccagguuuuugccuucccuga

SEQ ID NO: 21076 - RNA, 21 nt, Artificial Sequence
  RPE65 RNA guide
ccaucgugacaccaaauggug

SEQ ID NO: 21077 - RNA, 21 nt, Artificial Sequence
  RPE65 RNA guide
ccauuuggugucacgauggag

SEQ ID NO: 21078 - RNA, 21 nt, Artificial Sequence
  RPE65 RNA guide
ccauuuuuucuuccuucucuc

SEQ ID NO: 21079 - RNA, 21 nt, Artificial Sequence
  RPE65 RNA guide
cccagagccacaccagcaacu

SEQ ID NO: 21080 - RNA, 21 nt, Artificial Sequence
  RPE65 RNA guide
cccuagcuuaccgaaagaaca

SEQ ID NO: 21081 - RNA, 21 nt, Artificial Sequence
  RPE65 RNA guide
cccucaucuagagcagacauu

SEQ ID NO: 21082 - RNA, 21 nt, Artificial Sequence
  RPE65 RNA guide
cccugacgaagacauauuucu

SEQ ID NO: 21083 - RNA, 21 nt, Artificial Sequence
  RPE65 RNA guide
ccgaaagaacaaaugaaaacu

SEQ ID NO: 21084 - RNA, 21 nt, Artificial Sequence
  RPE65 RNA guide
ccuaacgaacuaacauacaga

SEQ ID NO: 21085 - RNA, 21 nt, Artificial Sequence
  RPE65 RNA guide
ccuagcuuaccgaaagaacaa

SEQ ID NO: 21086 - RNA, 21 nt, Artificial Sequence
  RPE65 RNA guide
ccucaucuagagcagacauug

SEQ ID NO: 21087 - RNA, 21 nt, Artificial Sequence
  RPE65 RNA guide
ccugacgaagacauauuucua

SEQ ID NO: 21088 - RNA, 21 nt, Artificial Sequence
  RPE65 RNA guide
ccugccuucucauucucuugu

SEQ ID NO: 21089 - RNA, 21 nt, Artificial Sequence
  RPE65 RNA guide
ccuggaauucauguugccauu

SEQ ID NO: 21090 - RNA, 21 nt, Artificial Sequence
  RPE65 RNA guide
ccuuacuccuuuccuaacgaa

SEQ ID NO: 21091 - RNA, 21 nt, Artificial Sequence
  RPE65 RNA guide
ccuucccugacgaagacauau

SEQ ID NO: 21092 - RNA, 21 nt, Artificial Sequence
  RPE65 RNA guide
ccuucucauucucuuguaucu

SEQ ID NO: 21093 - RNA, 21 nt, Artificial Sequence
  RPE65 RNA guide
ccuucucucccucaucuagag

SEQ ID NO: 21094 - RNA, 21 nt, Artificial Sequence
  RPE65 RNA guide
ccuuuccuaacgaacuaacau

SEQ ID NO: 21095 - RNA, 21 nt, Artificial Sequence
  RPE65 RNA guide
cgaacuaacauacagaacugc

SEQ ID NO: 21096 - RNA, 21 nt, Artificial Sequence
  RPE65 RNA guide
cgauccuuaauacuauaaaua

SEQ ID NO: 21097 - RNA, 21 nt, Artificial Sequence
  RPE65 RNA guide
cgauggagcaucaaugucugc

SEQ ID NO: 21098 - RNA, 21 nt, Artificial Sequence
  RPE65 RNA guide
cggaauaaucaaccuuacucc

SEQ ID NO: 21099 - RNA, 21 nt, Artificial Sequence
  RPE65 RNA guide
cgguaagcuagggcuugaaaa

SEQ ID NO: 21100 - RNA, 21 nt, Artificial Sequence
  RPE65 RNA guide
cgucagggaaggcaaaaaccu

SEQ ID NO: 21101 - RNA, 21 nt, Artificial Sequence
  RPE65 RNA guide
cgugacaccaaauggugcuuu

SEQ ID NO: 21102 - RNA, 21 nt, Artificial Sequence
  RPE65 RNA guide
cguuaggaaaggaguaagguu

SEQ ID NO: 21103 - RNA, 21 nt, Artificial Sequence
  RPE65 RNA guide
cuaacauacagaacugcagua

SEQ ID NO: 21104 - RNA, 21 nt, Artificial Sequence
  RPE65 RNA guide
cuaacgaacuaacauacagaa

SEQ ID NO: 21105 - RNA, 21 nt, Artificial Sequence
  RPE65 RNA guide
cuaagaagggaagcuaaguau

SEQ ID NO: 21106 - RNA, 21 nt, Artificial Sequence
  RPE65 RNA guide
cuaaguauuauagcagauaca

SEQ ID NO: 21107 - RNA, 21 nt, Artificial Sequence
  RPE65 RNA guide
cuacugguaaucaacaagacc

SEQ ID NO: 21108 - RNA, 21 nt, Artificial Sequence
  RPE65 RNA guide
cuagagcagacauugaugcuc

SEQ ID NO: 21109 - RNA, 21 nt, Artificial Sequence
  RPE65 RNA guide
cuagaugagggagagaaggaa

SEQ ID NO: 21110 - RNA, 21 nt, Artificial Sequence
  RPE65 RNA guide
cuagcuuaccgaaagaacaaa

SEQ ID NO: 21111 - RNA, 21 nt, Artificial Sequence
  RPE65 RNA guide
cuagggcuugaaaaaagaccc

SEQ ID NO: 21112 - RNA, 21 nt, Artificial Sequence
  RPE65 RNA guide
cuauaaauagagcaguacuga

SEQ ID NO: 21113 - RNA, 21 nt, Artificial Sequence
  RPE65 RNA guide
cuauaauacuuagcuucccuu

SEQ ID NO: 21114 - RNA, 21 nt, Artificial Sequence
  RPE65 RNA guide
cuauucacagaccugccuucu

SEQ ID NO: 21115 - RNA, 21 nt, Artificial Sequence
  RPE65 RNA guide
cucagauacagcaacucaaau

SEQ ID NO: 21116 - RNA, 21 nt, Artificial Sequence
  RPE65 RNA guide
cucaucuagagcagacauuga

SEQ ID NO: 21117 - RNA, 21 nt, Artificial Sequence
  RPE65 RNA guide
cucauucucuuguaucugcua

SEQ ID NO: 21118 - RNA, 21 nt, Artificial Sequence
  RPE65 RNA guide
cuccaucgugacaccaaaugg

SEQ ID NO: 21119 - RNA, 21 nt, Artificial Sequence
  RPE65 RNA guide
cucccucaucuagagcagaca

SEQ ID NO: 21120 - RNA, 21 nt, Artificial Sequence
  RPE65 RNA guide
cuccuuuccuaacgaacuaac

SEQ ID NO: 21121 - RNA, 21 nt, Artificial Sequence
  RPE65 RNA guide
cucuagaugagggagagaagg

SEQ ID NO: 21122 - RNA, 21 nt, Artificial Sequence
  RPE65 RNA guide
cucucccucaucuagagcaga

SEQ ID NO: 21123 - RNA, 21 nt, Artificial Sequence
  RPE65 RNA guide
cucugggucuuuuuucaagcc

SEQ ID NO: 21124 - RNA, 21 nt, Artificial Sequence
  RPE65 RNA guide
cucuucuuacugcaguucugu

SEQ ID NO: 21125 - RNA, 21 nt, Artificial Sequence
  RPE65 RNA guide
cucuuguaucugcuauaauac

SEQ ID NO: 21126 - RNA, 21 nt, Artificial Sequence
  RPE65 RNA guide
cugaauacucuucuuacugca

SEQ ID NO: 21127 - RNA, 21 nt, Artificial Sequence
  RPE65 RNA guide
cugaguugcugguguggcucu

SEQ ID NO: 21128 - RNA, 21 nt, Artificial Sequence
  RPE65 RNA guide
cugauuuguaauuugaguugc

SEQ ID NO: 21129 - RNA, 21 nt, Artificial Sequence
  RPE65 RNA guide
cugcaguaagaagaguauuca

SEQ ID NO: 21130 - RNA, 21 nt, Artificial Sequence
  RPE65 RNA guide
cugcaguucuguauguuaguu

SEQ ID NO: 21131 - RNA, 21 nt, Artificial Sequence
  RPE65 RNA guide
cugccuucucauucucuugua

SEQ ID NO: 21132 - RNA, 21 nt, Artificial Sequence
  RPE65 RNA guide
cugcuauaauacuuagcuucc

SEQ ID NO: 21133 - RNA, 21 nt, Artificial Sequence
  RPE65 RNA guide
cugcucuagaugagggagaga

SEQ ID NO: 21134 - RNA, 21 nt, Artificial Sequence
  RPE65 RNA guide
cugcugauuuguaauuugagu

SEQ ID NO: 21135 - RNA, 21 nt, Artificial Sequence
  RPE65 RNA guide
cuggaauucauguugccauuu

SEQ ID NO: 21136 - RNA, 21 nt, Artificial Sequence
  RPE65 RNA guide
cugggucuuuuuucaagcccu

SEQ ID NO: 21137 - RNA, 21 nt, Artificial Sequence
  RPE65 RNA guide
cugguaaucaacaagaccuga

SEQ ID NO: 21138 - RNA, 21 nt, Artificial Sequence
  RPE65 RNA guide
cugguguggcucugggucuuu

SEQ ID NO: 21139 - RNA, 21 nt, Artificial Sequence
  RPE65 RNA guide
cuguaucugaguugcuggugu

SEQ ID NO: 21140 - RNA, 21 nt, Artificial Sequence
  RPE65 RNA guide
cuguauguuaguucguuagga

SEQ ID NO: 21141 - RNA, 21 nt, Artificial Sequence
  RPE65 RNA guide
cuuaccgaaagaacaaaugaa

SEQ ID NO: 21142 - RNA, 21 nt, Artificial Sequence
  RPE65 RNA guide
cuuacuccuuuccuaacgaac

SEQ ID NO: 21143 - RNA, 21 nt, Artificial Sequence
  RPE65 RNA guide
cuuacugcaguucuguauguu

SEQ ID NO: 21144 - RNA, 21 nt, Artificial Sequence
  RPE65 RNA guide
cuuagcuucccuucuuagaau

SEQ ID NO: 21145 - RNA, 21 nt, Artificial Sequence
  RPE65 RNA guide
cuucaguacugcucuauuuau

SEQ ID NO: 21146 - RNA, 21 nt, Artificial Sequence
  RPE65 RNA guide
cuucccugacgaagacauauu

SEQ ID NO: 21147 - RNA, 21 nt, Artificial Sequence
  RPE65 RNA guide
cuucccuucuuagaauugcua

SEQ ID NO: 21148 - RNA, 21 nt, Artificial Sequence
  RPE65 RNA guide
cuuccuucucucccucaucua

SEQ ID NO: 21149 - RNA, 21 nt, Artificial Sequence
  RPE65 RNA guide
cuucgucagggaaggcaaaaa

SEQ ID NO: 21150 - RNA, 21 nt, Artificial Sequence
  RPE65 RNA guide
cuucucauucucuuguaucug

SEQ ID NO: 21151 - RNA, 21 nt, Artificial Sequence
  RPE65 RNA guide
cuucucucccucaucuagagc

SEQ ID NO: 21152 - RNA, 21 nt, Artificial Sequence
  RPE65 RNA guide
cuucuuacugcaguucuguau

SEQ ID NO: 21153 - RNA, 21 nt, Artificial Sequence
  RPE65 RNA guide
cuugaaaaaagacccagagcc

SEQ ID NO: 21154 - RNA, 21 nt, Artificial Sequence
  RPE65 RNA guide
cuuguaucugcuauaauacuu

SEQ ID NO: 21155 - RNA, 21 nt, Artificial Sequence
  RPE65 RNA guide
cuuuccuaacgaacuaacaua

SEQ ID NO: 21156 - RNA, 21 nt, Artificial Sequence
  RPE65 RNA guide
cuuucgguaagcuagggcuug

SEQ ID NO: 21157 - RNA, 21 nt, Artificial Sequence
  RPE65 RNA guide
cuuuugaucaggucuuguuga

SEQ ID NO: 21158 - RNA, 21 nt, Artificial Sequence
  RPE65 RNA guide
cuuuuuucaagcccuagcuua

SEQ ID NO: 21159 - RNA, 21 nt, Artificial Sequence
  RPE65 RNA guide
gaaaaaagacccagagccaca

SEQ ID NO: 21160 - RNA, 21 nt, Artificial Sequence
  RPE65 RNA guide
gaaaaaauggcaacaugaauu

SEQ ID NO: 21161 - RNA, 21 nt, Artificial Sequence
  RPE65 RNA guide
gaaaacuauucacagaccugc

SEQ ID NO: 21162 - RNA, 21 nt, Artificial Sequence
  RPE65 RNA guide
gaaagcaauuguugugucuga

SEQ ID NO: 21163 - RNA, 21 nt, Artificial Sequence
  RPE65 RNA guide
gaaaggaguaagguugauuau

SEQ ID NO: 21164 - RNA, 21 nt, Artificial Sequence
  RPE65 RNA guide
gaaauaugucuucgucaggga

SEQ ID NO: 21165 - RNA, 21 nt, Artificial Sequence
  RPE65 RNA guide
gaacaaaugaaaacuauucac

SEQ ID NO: 21166 - RNA, 21 nt, Artificial Sequence
  RPE65 RNA guide
gaacuaacauacagaacugca

SEQ ID NO: 21167 - RNA, 21 nt, Artificial Sequence
  RPE65 RNA guide
gaacugcaguaagaagaguau

SEQ ID NO: 21168 - RNA, 21 nt, Artificial Sequence
  RPE65 RNA guide
gaagaaaaaauggcaacauga

SEQ ID NO: 21169 - RNA, 21 nt, Artificial Sequence
  RPE65 RNA guide
gaagaguauucagacacaaca

SEQ ID NO: 21170 - RNA, 21 nt, Artificial Sequence
  RPE65 RNA guide
gaagcuaaguauuauagcaga

SEQ ID NO: 21171 - RNA, 21 nt, Artificial Sequence
  RPE65 RNA guide
gaaggaagaaaaaauggcaac

SEQ ID NO: 21172 - RNA, 21 nt, Artificial Sequence
  RPE65 RNA guide
gaaggcaaaaaccuggaauuc

SEQ ID NO: 21173 - RNA, 21 nt, Artificial Sequence
  RPE65 RNA guide
gaaggcaggucugugaauagu

SEQ ID NO: 21174 - RNA, 21 nt, Artificial Sequence
  RPE65 RNA guide
gaagggaagcuaaguauuaua

SEQ ID NO: 21175 - RNA, 21 nt, Artificial Sequence
  RPE65 RNA guide
gaauaaucaaccuuacuccuu

SEQ ID NO: 21176 - RNA, 21 nt, Artificial Sequence
  RPE65 RNA guide
gaauacucuucuuacugcagu

SEQ ID NO: 21177 - RNA, 21 nt, Artificial Sequence
  RPE65 RNA guide
gaauaguuuucauuuguucuu

SEQ ID NO: 21178 - RNA, 21 nt, Artificial Sequence
  RPE65 RNA guide
gaaugagaaggcaggucugug

SEQ ID NO: 21179 - RNA, 21 nt, Artificial Sequence
  RPE65 RNA guide
gaauucauguugccauuuuuu

SEQ ID NO: 21180 - RNA, 21 nt, Artificial Sequence
  RPE65 RNA guide
gaauuccagguuuuugccuuc

SEQ ID NO: 21181 - RNA, 21 nt, Artificial Sequence
  RPE65 RNA guide
gaauuuucaucuuuugaucag

SEQ ID NO: 21182 - RNA, 21 nt, Artificial Sequence
  RPE65 RNA guide
gacaccaaauggugcuuugac

SEQ ID NO: 21183 - RNA, 21 nt, Artificial Sequence
  RPE65 RNA guide
gacauugaugcuccaucguga

SEQ ID NO: 21184 - RNA, 21 nt, Artificial Sequence
  RPE65 RNA guide
gacccagagccacaccagcaa

SEQ ID NO: 21185 - RNA, 21 nt, Artificial Sequence
  RPE65 RNA guide
gaccugaucaaaagaugaaaa

SEQ ID NO: 21186 - RNA, 21 nt, Artificial Sequence
  RPE65 RNA guide
gaccugccuucucauucucuu

SEQ ID NO: 21187 - RNA, 21 nt, Artificial Sequence
  RPE65 RNA guide
gagaaggaagaaaaaauggca

SEQ ID NO: 21188 - RNA, 21 nt, Artificial Sequence
  RPE65 RNA guide
gagaaggcaggucugugaaua

SEQ ID NO: 21189 - RNA, 21 nt, Artificial Sequence
  RPE65 RNA guide
gagaaugagaaggcaggucug

SEQ ID NO: 21190 - RNA, 21 nt, Artificial Sequence
  RPE65 RNA guide
gagagaaggaagaaaaaaugg

SEQ ID NO: 21191 - RNA, 21 nt, Artificial Sequence
  RPE65 RNA guide
gagcagacauugaugcuccau

SEQ ID NO: 21192 - RNA, 21 nt, Artificial Sequence
  RPE65 RNA guide
gagcaguacugaagaauuaaa

SEQ ID NO: 21193 - RNA, 21 nt, Artificial Sequence
  RPE65 RNA guide
gagcaucaaugucugcucuag

SEQ ID NO: 21194 - RNA, 21 nt, Artificial Sequence
  RPE65 RNA guide
gagccacaccagcaacucaga

SEQ ID NO: 21195 - RNA, 21 nt, Artificial Sequence
  RPE65 RNA guide
gagggagagaaggaagaaaaa

SEQ ID NO: 21196 - RNA, 21 nt, Artificial Sequence
  RPE65 RNA guide
gaguaagguugauuauuccgu

SEQ ID NO: 21197 - RNA, 21 nt, Artificial Sequence
  RPE65 RNA guide
gaguauuacggaauaaucaac

SEQ ID NO: 21198 - RNA, 21 nt, Artificial Sequence
  RPE65 RNA guide
gaguauucagacacaacaauu

SEQ ID NO: 21199 - RNA, 21 nt, Artificial Sequence
  RPE65 RNA guide
gaguugcugguguggcucugg

SEQ ID NO: 21200 - RNA, 21 nt, Artificial Sequence
  RPE65 RNA guide
gaguugcuguaucugaguugc

SEQ ID NO: 21201 - RNA, 21 nt, Artificial Sequence
  RPE65 RNA guide
gauacaagagaaugagaaggc

SEQ ID NO: 21202 - RNA, 21 nt, Artificial Sequence
  RPE65 RNA guide
gauacagcaacucaaauuaca

SEQ ID NO: 21203 - RNA, 21 nt, Artificial Sequence
  RPE65 RNA guide
gaucaggucuuguugauuacc

SEQ ID NO: 21204 - RNA, 21 nt, Artificial Sequence
  RPE65 RNA guide
gaugagggagagaaggaagaa

SEQ ID NO: 21205 - RNA, 21 nt, Artificial Sequence
  RPE65 RNA guide
gaugcuccaucgugacaccaa

SEQ ID NO: 21206 - RNA, 21 nt, Artificial Sequence
  RPE65 RNA guide
gauggagcaucaaugucugcu

SEQ ID NO: 21207 - RNA, 21 nt, Artificial Sequence
  RPE65 RNA guide
gauuauuccguaauacucaaa

SEQ ID NO: 21208 - RNA, 21 nt, Artificial Sequence
  RPE65 RNA guide
gauuuguaauuugaguugcug

SEQ ID NO: 21209 - RNA, 21 nt, Artificial Sequence
  RPE65 RNA guide
gcaaaaaccuggaauucaugu

SEQ ID NO: 21210 - RNA, 21 nt, Artificial Sequence
  RPE65 RNA guide
gcaacaugaauuccagguuuu

SEQ ID NO: 21211 - RNA, 21 nt, Artificial Sequence
  RPE65 RNA guide
gcaacucagauacagcaacuc

SEQ ID NO: 21212 - RNA, 21 nt, Artificial Sequence
  RPE65 RNA guide
gcaauucuaagaagggaagcu

SEQ ID NO: 21213 - RNA, 21 nt, Artificial Sequence
  RPE65 RNA guide
gcaauuguugugucugaauac

SEQ ID NO: 21214 - RNA, 21 nt, Artificial Sequence
  RPE65 RNA guide
gcaccauuuggugucacgaug

SEQ ID NO: 21215 - RNA, 21 nt, Artificial Sequence
  RPE65 RNA guide
gcagacauugaugcuccaucg

SEQ ID NO: 21216 - RNA, 21 nt, Artificial Sequence
  RPE65 RNA guide
gcagauacaagagaaugagaa

SEQ ID NO: 21217 - RNA, 21 nt, Artificial Sequence
  RPE65 RNA guide
gcaggucugugaauaguuuuc

SEQ ID NO: 21218 - RNA, 21 nt, Artificial Sequence
  RPE65 RNA guide
gcaguaagaagaguauucaga

SEQ ID NO: 21219 - RNA, 21 nt, Artificial Sequence
  RPE65 RNA guide
gcaguucuguauguuaguucg

SEQ ID NO: 21220 - RNA, 21 nt, Artificial Sequence
  RPE65 RNA guide
gcaucaaugucugcucuagau

SEQ ID NO: 21221 - RNA, 21 nt, Artificial Sequence
  RPE65 RNA guide
gccacaccagcaacucagaua

SEQ ID NO: 21222 - RNA, 21 nt, Artificial Sequence
  RPE65 RNA guide
gccauuuuuucuuccuucucu

SEQ ID NO: 21223 - RNA, 21 nt, Artificial Sequence
  RPE65 RNA guide
gcccuagcuuaccgaaagaac

SEQ ID NO: 21224 - RNA, 21 nt, Artificial Sequence
  RPE65 RNA guide
gccuucccugacgaagacaua

SEQ ID NO: 21225 - RNA, 21 nt, Artificial Sequence
  RPE65 RNA guide
gccuucucauucucuuguauc

SEQ ID NO: 21226 - RNA, 21 nt, Artificial Sequence
  RPE65 RNA guide
gcuaaguauuauagcagauac

SEQ ID NO: 21227 - RNA, 21 nt, Artificial Sequence
  RPE65 RNA guide
gcuagggcuugaaaaaagacc

SEQ ID NO: 21228 - RNA, 21 nt, Artificial Sequence
  RPE65 RNA guide
gcuauaauacuuagcuucccu

SEQ ID NO: 21229 - RNA, 21 nt, Artificial Sequence
  RPE65 RNA guide
gcuccaucgugacaccaaaug

SEQ ID NO: 21230 - RNA, 21 nt, Artificial Sequence
  RPE65 RNA guide
gcucuagaugagggagagaag

SEQ ID NO: 21231 - RNA, 21 nt, Artificial Sequence
  RPE65 RNA guide
gcucuauuuauaguauuaagg

SEQ ID NO: 21232 - RNA, 21 nt, Artificial Sequence
  RPE65 RNA guide
gcucugggucuuuuuucaagc

SEQ ID NO: 21233 - RNA, 21 nt, Artificial Sequence
  RPE65 RNA guide
gcugauuuguaauuugaguug

SEQ ID NO: 21234 - RNA, 21 nt, Artificial Sequence
  RPE65 RNA guide
gcugguguggcucugggucuu

SEQ ID NO: 21235 - RNA, 21 nt, Artificial Sequence
  RPE65 RNA guide
gcuguaucugaguugcuggug

SEQ ID NO: 21236 - RNA, 21 nt, Artificial Sequence
  RPE65 RNA guide
gcuuaccgaaagaacaaauga

SEQ ID NO: 21237 - RNA, 21 nt, Artificial Sequence
  RPE65 RNA guide
gcuucccuucuuagaauugcu

SEQ ID NO: 21238 - RNA, 21 nt, Artificial Sequence
  RPE65 RNA guide
gcuugaaaaaagacccagagc

SEQ ID NO: 21239 - RNA, 21 nt, Artificial Sequence
  RPE65 RNA guide
ggaaaggaguaagguugauua

SEQ ID NO: 21240 - RNA, 21 nt, Artificial Sequence
  RPE65 RNA guide
ggaagaaaaaauggcaacaug

SEQ ID NO: 21241 - RNA, 21 nt, Artificial Sequence
  RPE65 RNA guide
ggaagcuaaguauuauagcag

SEQ ID NO: 21242 - RNA, 21 nt, Artificial Sequence
  RPE65 RNA guide
ggaaggcaaaaaccuggaauu

SEQ ID NO: 21243 - RNA, 21 nt, Artificial Sequence
  RPE65 RNA guide
ggaauaaucaaccuuacuccu

SEQ ID NO: 21244 - RNA, 21 nt, Artificial Sequence
  RPE65 RNA guide
ggaauucauguugccauuuuu

SEQ ID NO: 21245 - RNA, 21 nt, Artificial Sequence
  RPE65 RNA guide
ggagagaaggaagaaaaaaug

SEQ ID NO: 21246 - RNA, 21 nt, Artificial Sequence
  RPE65 RNA guide
ggagcaucaaugucugcucua

SEQ ID NO: 21247 - RNA, 21 nt, Artificial Sequence
  RPE65 RNA guide
ggaguaagguugauuauuccg

SEQ ID NO: 21248 - RNA, 21 nt, Artificial Sequence
  RPE65 RNA guide
ggcaaaaaccuggaauucaug

SEQ ID NO: 21249 - RNA, 21 nt, Artificial Sequence
  RPE65 RNA guide
ggcaacaugaauuccagguuu

SEQ ID NO: 21250 - RNA, 21 nt, Artificial Sequence
  RPE65 RNA guide
ggcaggucugugaauaguuuu

SEQ ID NO: 21251 - RNA, 21 nt, Artificial Sequence
  RPE65 RNA guide
ggcucugggucuuuuuucaag

SEQ ID NO: 21252 - RNA, 21 nt, Artificial Sequence
  RPE65 RNA guide
ggcuugaaaaaagacccagag

SEQ ID NO: 21253 - RNA, 21 nt, Artificial Sequence
  RPE65 RNA guide
gggaagcuaaguauuauagca

SEQ ID NO: 21254 - RNA, 21 nt, Artificial Sequence
  RPE65 RNA guide
gggaaggcaaaaaccuggaau

SEQ ID NO: 21255 - RNA, 21 nt, Artificial Sequence
  RPE65 RNA guide
gggagagaaggaagaaaaaau

SEQ ID NO: 21256 - RNA, 21 nt, Artificial Sequence
  RPE65 RNA guide
gggcuugaaaaaagacccaga

SEQ ID NO: 21257 - RNA, 21 nt, Artificial Sequence
  RPE65 RNA guide
gggucuuuuuucaagcccuag

SEQ ID NO: 21258 - RNA, 21 nt, Artificial Sequence
  RPE65 RNA guide
gguaagcuagggcuugaaaaa

SEQ ID NO: 21259 - RNA, 21 nt, Artificial Sequence
  RPE65 RNA guide
gguaaucaacaagaccugauc

SEQ ID NO: 21260 - RNA, 21 nt, Artificial Sequence
  RPE65 RNA guide
ggucugugaauaguuuucauu

SEQ ID NO: 21261 - RNA, 21 nt, Artificial Sequence
  RPE65 RNA guide
ggucuuguugauuaccaguag

SEQ ID NO: 21262 - RNA, 21 nt, Artificial Sequence
  RPE65 RNA guide
ggucuuuuuucaagcccuagc

SEQ ID NO: 21263 - RNA, 21 nt, Artificial Sequence
  RPE65 RNA guide
ggugucacgauggagcaucaa

SEQ ID NO: 21264 - RNA, 21 nt, Artificial Sequence
  RPE65 RNA guide
gguguggcucugggucuuuuu

SEQ ID NO: 21265 - RNA, 21 nt, Artificial Sequence
  RPE65 RNA guide
gguugauuauuccguaauacu

SEQ ID NO: 21266 - RNA, 21 nt, Artificial Sequence
  RPE65 RNA guide
gguuuuugccuucccugacga

SEQ ID NO: 21267 - RNA, 21 nt, Artificial Sequence
  RPE65 RNA guide
guaagaagaguauucagacac

SEQ ID NO: 21268 - RNA, 21 nt, Artificial Sequence
  RPE65 RNA guide
guaagcuagggcuugaaaaaa

SEQ ID NO: 21269 - RNA, 21 nt, Artificial Sequence
  RPE65 RNA guide
guaagguugauuauuccguaa

SEQ ID NO: 21270 - RNA, 21 nt, Artificial Sequence
  RPE65 RNA guide
guaaucaacaagaccugauca

SEQ ID NO: 21271 - RNA, 21 nt, Artificial Sequence
  RPE65 RNA guide
guaaugaaagcaauuguugug

SEQ ID NO: 21272 - RNA, 21 nt, Artificial Sequence
  RPE65 RNA guide
guaauuugaguugcuguaucu

SEQ ID NO: 21273 - RNA, 21 nt, Artificial Sequence
  RPE65 RNA guide
guaucugaguugcuggugugg

SEQ ID NO: 21274 - RNA, 21 nt, Artificial Sequence
  RPE65 RNA guide
guaucugcuauaauacuuagc

SEQ ID NO: 21275 - RNA, 21 nt, Artificial Sequence
  RPE65 RNA guide
guauguuaguucguuaggaaa

SEQ ID NO: 21276 - RNA, 21 nt, Artificial Sequence
  RPE65 RNA guide
guauuacggaauaaucaaccu

SEQ ID NO: 21277 - RNA, 21 nt, Artificial Sequence
  RPE65 RNA guide
guauuauagcagauacaagag

SEQ ID NO: 21278 - RNA, 21 nt, Artificial Sequence
  RPE65 RNA guide
guauucagacacaacaauugc

SEQ ID NO: 21279 - RNA, 21 nt, Artificial Sequence
  RPE65 RNA guide
gucaaagcaccauuugguguc

SEQ ID NO: 21280 - RNA, 21 nt, Artificial Sequence
  RPE65 RNA guide
gucacgauggagcaucaaugu

SEQ ID NO: 21281 - RNA, 21 nt, Artificial Sequence
  RPE65 RNA guide
gucagggaaggcaaaaaccug

SEQ ID NO: 21282 - RNA, 21 nt, Artificial Sequence
  RPE65 RNA guide
gucugaauacucuucuuacug

SEQ ID NO: 21283 - RNA, 21 nt, Artificial Sequence
  RPE65 RNA guide
gucugcucuagaugagggaga

SEQ ID NO: 21284 - RNA, 21 nt, Artificial Sequence
  RPE65 RNA guide
gucugugaauaguuuucauuu

SEQ ID NO: 21285 - RNA, 21 nt, Artificial Sequence
  RPE65 RNA guide
gucuucgucagggaaggcaaa

SEQ ID NO: 21286 - RNA, 21 nt, Artificial Sequence
  RPE65 RNA guide
gucuuguugauuaccaguaga

SEQ ID NO: 21287 - RNA, 21 nt, Artificial Sequence
  RPE65 RNA guide
gucuuuuuucaagcccuagcu

SEQ ID NO: 21288 - RNA, 21 nt, Artificial Sequence
  RPE65 RNA guide
gugacaccaaauggugcuuug

SEQ ID NO: 21289 - RNA, 21 nt, Artificial Sequence
  RPE65 RNA guide
guggcucugggucuuuuuuca

SEQ ID NO: 21290 - RNA, 21 nt, Artificial Sequence
  RPE65 RNA guide
gugucacgauggagcaucaau

SEQ ID NO: 21291 - RNA, 21 nt, Artificial Sequence
  RPE65 RNA guide
gugucugaauacucuucuuac

SEQ ID NO: 21292 - RNA, 21 nt, Artificial Sequence
  RPE65 RNA guide
guguggcucugggucuuuuuu

SEQ ID NO: 21293 - RNA, 21 nt, Artificial Sequence
  RPE65 RNA guide
guuaggaaaggaguaagguug

SEQ ID NO: 21294 - RNA, 21 nt, Artificial Sequence
  RPE65 RNA guide
guuaguucguuaggaaaggag

SEQ ID NO: 21295 - RNA, 21 nt, Artificial Sequence
  RPE65 RNA guide
guucguuaggaaaggaguaag

SEQ ID NO: 21296 - RNA, 21 nt, Artificial Sequence
  RPE65 RNA guide
guucuguauguuaguucguua

SEQ ID NO: 21297 - RNA, 21 nt, Artificial Sequence
  RPE65 RNA guide
guucuuucgguaagcuagggc

SEQ ID NO: 21298 - RNA, 21 nt, Artificial Sequence
  RPE65 RNA guide
guugccauuuuuucuuccuuc

SEQ ID NO: 21299 - RNA, 21 nt, Artificial Sequence
  RPE65 RNA guide
guugcugguguggcucugggu

SEQ ID NO: 21300 - RNA, 21 nt, Artificial Sequence
  RPE65 RNA guide
guugcuguaucugaguugcug

SEQ ID NO: 21301 - RNA, 21 nt, Artificial Sequence
  RPE65 RNA guide
guugugucugaauacucuucu

SEQ ID NO: 21302 - RNA, 21 nt, Artificial Sequence
  RPE65 RNA guide
guuuuaauucuucaguacugc

SEQ ID NO: 21303 - RNA, 21 nt, Artificial Sequence
  RPE65 RNA guide
guuuucauuuguucuuucggu

SEQ ID NO: 21304 - RNA, 21 nt, Artificial Sequence
  RPE65 RNA guide
guuuuugccuucccugacgaa

SEQ ID NO: 21305 - RNA, 21 nt, Artificial Sequence
  RPE65 RNA guide
uaacauacagaacugcaguaa

SEQ ID NO: 21306 - RNA, 21 nt, Artificial Sequence
  RPE65 RNA guide
uaacgaacuaacauacagaac

SEQ ID NO: 21307 - RNA, 21 nt, Artificial Sequence
  RPE65 RNA guide
uaagaagaguauucagacaca

SEQ ID NO: 21308 - RNA, 21 nt, Artificial Sequence
  RPE65 RNA guide
uaagaagggaagcuaaguauu

SEQ ID NO: 21309 - RNA, 21 nt, Artificial Sequence
  RPE65 RNA guide
uaagcuagggcuugaaaaaag

SEQ ID NO: 21310 - RNA, 21 nt, Artificial Sequence
  RPE65 RNA guide
uaaggaucguuuuugaguauu

SEQ ID NO: 21311 - RNA, 21 nt, Artificial Sequence
  RPE65 RNA guide
uaagguugauuauuccguaau

SEQ ID NO: 21312 - RNA, 21 nt, Artificial Sequence
  RPE65 RNA guide
uaauacuuagcuucccuucuu

SEQ ID NO: 21313 - RNA, 21 nt, Artificial Sequence
  RPE65 RNA guide
uaaucaacaagaccugaucaa

SEQ ID NO: 21314 - RNA, 21 nt, Artificial Sequence
  RPE65 RNA guide
uaaucaaccuuacuccuuucc

SEQ ID NO: 21315 - RNA, 21 nt, Artificial Sequence
  RPE65 RNA guide
uaaugaaagcaauuguugugu

SEQ ID NO: 21316 - RNA, 21 nt, Artificial Sequence
  RPE65 RNA guide
uaauuugaguugcuguaucug

SEQ ID NO: 21317 - RNA, 21 nt, Artificial Sequence
  RPE65 RNA guide
uacaagagaaugagaaggcag

SEQ ID NO: 21318 - RNA, 21 nt, Artificial Sequence
  RPE65 RNA guide
uacagaacugcaguaagaaga

SEQ ID NO: 21319 - RNA, 21 nt, Artificial Sequence
  RPE65 RNA guide
uacagcaacucaaauuacaaa

SEQ ID NO: 21320 - RNA, 21 nt, Artificial Sequence
  RPE65 RNA guide
uacggaauaaucaaccuuacu

SEQ ID NO: 21321 - RNA, 21 nt, Artificial Sequence
  RPE65 RNA guide
uacuauaaauagagcaguacu

SEQ ID NO: 21322 - RNA, 21 nt, Artificial Sequence
  RPE65 RNA guide
uacuccuuuccuaacgaacua

SEQ ID NO: 21323 - RNA, 21 nt, Artificial Sequence
  RPE65 RNA guide
uacucuucuuacugcaguucu

SEQ ID NO: 21324 - RNA, 21 nt, Artificial Sequence
  RPE65 RNA guide
uacugcaguucuguauguuag

SEQ ID NO: 21325 - RNA, 21 nt, Artificial Sequence
  RPE65 RNA guide
uacugguaaucaacaagaccu

SEQ ID NO: 21326 - RNA, 21 nt, Artificial Sequence
  RPE65 RNA guide
uacuuagcuucccuucuuaga

SEQ ID NO: 21327 - RNA, 21 nt, Artificial Sequence
  RPE65 RNA guide
uagaaauaugucuucgucagg

SEQ ID NO: 21328 - RNA, 21 nt, Artificial Sequence
  RPE65 RNA guide
uagagcagacauugaugcucc

SEQ ID NO: 21329 - RNA, 21 nt, Artificial Sequence
  RPE65 RNA guide
uagagcaguacugaagaauua

SEQ ID NO: 21330 - RNA, 21 nt, Artificial Sequence
  RPE65 RNA guide
uagaugagggagagaaggaag

SEQ ID NO: 21331 - RNA, 21 nt, Artificial Sequence
  RPE65 RNA guide
uagcaauucuaagaagggaag

SEQ ID NO: 21332 - RNA, 21 nt, Artificial Sequence
  RPE65 RNA guide
uagcagauacaagagaaugag

SEQ ID NO: 21333 - RNA, 21 nt, Artificial Sequence
  RPE65 RNA guide
uagcuuaccgaaagaacaaau

SEQ ID NO: 21334 - RNA, 21 nt, Artificial Sequence
  RPE65 RNA guide
uagcuucccuucuuagaauug

SEQ ID NO: 21335 - RNA, 21 nt, Artificial Sequence
  RPE65 RNA guide
uaggaaaggaguaagguugau

SEQ ID NO: 21336 - RNA, 21 nt, Artificial Sequence
  RPE65 RNA guide
uagggcuugaaaaaagaccca

SEQ ID NO: 21337 - RNA, 21 nt, Artificial Sequence
  RPE65 RNA guide
uaguucguuaggaaaggagua

SEQ ID NO: 21338 - RNA, 21 nt, Artificial Sequence
  RPE65 RNA guide
uaguuuuaauucuucaguacu

SEQ ID NO: 21339 - RNA, 21 nt, Artificial Sequence
  RPE65 RNA guide
uauaauacuuagcuucccuuc

SEQ ID NO: 21340 - RNA, 21 nt, Artificial Sequence
  RPE65 RNA guide
uauagcagauacaagagaaug

SEQ ID NO: 21341 - RNA, 21 nt, Artificial Sequence
  RPE65 RNA guide
uaucugaguugcugguguggc

SEQ ID NO: 21342 - RNA, 21 nt, Artificial Sequence
  RPE65 RNA guide
uaucugcuauaauacuuagcu

SEQ ID NO: 21343 - RNA, 21 nt, Artificial Sequence
  RPE65 RNA guide
uaugucuucgucagggaaggc

SEQ ID NO: 21344 - RNA, 21 nt, Artificial Sequence
  RPE65 RNA guide
uauguuaguucguuaggaaag

SEQ ID NO: 21345 - RNA, 21 nt, Artificial Sequence
  RPE65 RNA guide
uauuacggaauaaucaaccuu

SEQ ID NO: 21346 - RNA, 21 nt, Artificial Sequence
  RPE65 RNA guide
uauucacagaccugccuucuc

SEQ ID NO: 21347 - RNA, 21 nt, Artificial Sequence
  RPE65 RNA guide
uauucagacacaacaauugcu

SEQ ID NO: 21348 - RNA, 21 nt, Artificial Sequence
  RPE65 RNA guide
uauuccguaauacucaaaaac

SEQ ID NO: 21349 - RNA, 21 nt, Artificial Sequence
  RPE65 RNA guide
ucaaagcaccauuugguguca

SEQ ID NO: 21350 - RNA, 21 nt, Artificial Sequence
  RPE65 RNA guide
ucaacaagaccugaucaaaag

SEQ ID NO: 21351 - RNA, 21 nt, Artificial Sequence
  RPE65 RNA guide
ucaaccuuacuccuuuccuaa

SEQ ID NO: 21352 - RNA, 21 nt, Artificial Sequence
  RPE65 RNA guide
ucaagcccuagcuuaccgaaa

SEQ ID NO: 21353 - RNA, 21 nt, Artificial Sequence
  RPE65 RNA guide
ucaaugucugcucuagaugag

SEQ ID NO: 21354 - RNA, 21 nt, Artificial Sequence
  RPE65 RNA guide
ucacagaccugccuucucauu

SEQ ID NO: 21355 - RNA, 21 nt, Artificial Sequence
  RPE65 RNA guide
ucacgauggagcaucaauguc

SEQ ID NO: 21356 - RNA, 21 nt, Artificial Sequence
  RPE65 RNA guide
ucagacacaacaauugcuuuc

SEQ ID NO: 21357 - RNA, 21 nt, Artificial Sequence
  RPE65 RNA guide
ucagauacagcaacucaaauu

SEQ ID NO: 21358 - RNA, 21 nt, Artificial Sequence
  RPE65 RNA guide
ucagggaaggcaaaaaccugg

SEQ ID NO: 21359 - RNA, 21 nt, Artificial Sequence
  RPE65 RNA guide
ucaggucuuguugauuaccag

SEQ ID NO: 21360 - RNA, 21 nt, Artificial Sequence
  RPE65 RNA guide
ucaucuagagcagacauugau

SEQ ID NO: 21361 - RNA, 21 nt, Artificial Sequence
  RPE65 RNA guide
ucaucuuuugaucaggucuug

SEQ ID NO: 21362 - RNA, 21 nt, Artificial Sequence
  RPE65 RNA guide
ucauguugccauuuuuucuuc

SEQ ID NO: 21363 - RNA, 21 nt, Artificial Sequence
  RPE65 RNA guide
ucauuuguucuuucgguaagc

SEQ ID NO: 21364 - RNA, 21 nt, Artificial Sequence
  RPE65 RNA guide
uccagguuuuugccuucccug

SEQ ID NO: 21365 - RNA, 21 nt, Artificial Sequence
  RPE65 RNA guide
uccaucgugacaccaaauggu

SEQ ID NO: 21366 - RNA, 21 nt, Artificial Sequence
  RPE65 RNA guide
ucccucaucuagagcagacau

SEQ ID NO: 21367 - RNA, 21 nt, Artificial Sequence
  RPE65 RNA guide
ucccugacgaagacauauuuc

SEQ ID NO: 21368 - RNA, 21 nt, Artificial Sequence
  RPE65 RNA guide
uccuaacgaacuaacauacag

SEQ ID NO: 21369 - RNA, 21 nt, Artificial Sequence
  RPE65 RNA guide
uccuucucucccucaucuaga

SEQ ID NO: 21370 - RNA, 21 nt, Artificial Sequence
  RPE65 RNA guide
uccuuuccuaacgaacuaaca

SEQ ID NO: 21371 - RNA, 21 nt, Artificial Sequence
  RPE65 RNA guide
ucgguaagcuagggcuugaaa

SEQ ID NO: 21372 - RNA, 21 nt, Artificial Sequence
  RPE65 RNA guide
ucgucagggaaggcaaaaacc

SEQ ID NO: 21373 - RNA, 21 nt, Artificial Sequence
  RPE65 RNA guide
ucgugacaccaaauggugcuu

SEQ ID NO: 21374 - RNA, 21 nt, Artificial Sequence
  RPE65 RNA guide
ucguuaggaaaggaguaaggu

SEQ ID NO: 21375 - RNA, 21 nt, Artificial Sequence
  RPE65 RNA guide
ucuaagaagggaagcuaagua

SEQ ID NO: 21376 - RNA, 21 nt, Artificial Sequence
  RPE65 RNA guide
ucuacugguaaucaacaagac

SEQ ID NO: 21377 - RNA, 21 nt, Artificial Sequence
  RPE65 RNA guide
ucuagagcagacauugaugcu

SEQ ID NO: 21378 - RNA, 21 nt, Artificial Sequence
  RPE65 RNA guide
ucuagaugagggagagaagga

SEQ ID NO: 21379 - RNA, 21 nt, Artificial Sequence
  RPE65 RNA guide
ucucauucucuuguaucugcu

SEQ ID NO: 21380 - RNA, 21 nt, Artificial Sequence
  RPE65 RNA guide
ucucccucaucuagagcagac

SEQ ID NO: 21381 - RNA, 21 nt, Artificial Sequence
  RPE65 RNA guide
ucucucccucaucuagagcag

SEQ ID NO: 21382 - RNA, 21 nt, Artificial Sequence
  RPE65 RNA guide
ucugaauacucuucuuacugc

SEQ ID NO: 21383 - RNA, 21 nt, Artificial Sequence
  RPE65 RNA guide
ucugaguugcugguguggcuc

SEQ ID NO: 21384 - RNA, 21 nt, Artificial Sequence
  RPE65 RNA guide
ucugcuauaauacuuagcuuc

SEQ ID NO: 21385 - RNA, 21 nt, Artificial Sequence
  RPE65 RNA guide
ucugcucuagaugagggagag

SEQ ID NO: 21386 - RNA, 21 nt, Artificial Sequence
  RPE65 RNA guide
ucugggucuuuuuucaagccc

SEQ ID NO: 21387 - RNA, 21 nt, Artificial Sequence
  RPE65 RNA guide
ucuguauguuaguucguuagg

SEQ ID NO: 21388 - RNA, 21 nt, Artificial Sequence
  RPE65 RNA guide
ucuuacugcaguucuguaugu

SEQ ID NO: 21389 - RNA, 21 nt, Artificial Sequence
  RPE65 RNA guide
ucuucaguacugcucuauuua

SEQ ID NO: 21390 - RNA, 21 nt, Artificial Sequence
  RPE65 RNA guide
ucuuccuucucucccucaucu

SEQ ID NO: 21391 - RNA, 21 nt, Artificial Sequence
  RPE65 RNA guide
ucuucgucagggaaggcaaaa

SEQ ID NO: 21392 - RNA, 21 nt, Artificial Sequence
  RPE65 RNA guide
ucuucuuacugcaguucugua

SEQ ID NO: 21393 - RNA, 21 nt, Artificial Sequence
  RPE65 RNA guide
ucuuguaucugcuauaauacu

SEQ ID NO: 21394 - RNA, 21 nt, Artificial Sequence
  RPE65 RNA guide
ucuuucgguaagcuagggcuu

SEQ ID NO: 21395 - RNA, 21 nt, Artificial Sequence
  RPE65 RNA guide
ucuuuugaucaggucuuguug

SEQ ID NO: 21396 - RNA, 21 nt, Artificial Sequence
  RPE65 RNA guide
ucuuuuuucaagcccuagcuu

SEQ ID NO: 21397 - RNA, 21 nt, Artificial Sequence
  RPE65 RNA guide
ugaaaaaagacccagagccac

SEQ ID NO: 21398 - RNA, 21 nt, Artificial Sequence
  RPE65 RNA guide
ugaaaacuauucacagaccug

SEQ ID NO: 21399 - RNA, 21 nt, Artificial Sequence
  RPE65 RNA guide
ugaaagcaauuguugugucug

SEQ ID NO: 21400 - RNA, 21 nt, Artificial Sequence
  RPE65 RNA guide
ugaauacucuucuuacugcag

SEQ ID NO: 21401 - RNA, 21 nt, Artificial Sequence
  RPE65 RNA guide
ugaauuccagguuuuugccuu

SEQ ID NO: 21402 - RNA, 21 nt, Artificial Sequence
  RPE65 RNA guide
ugacaccaaauggugcuuuga

SEQ ID NO: 21403 - RNA, 21 nt, Artificial Sequence
  RPE65 RNA guide
ugagaaggcaggucugugaau

SEQ ID NO: 21404 - RNA, 21 nt, Artificial Sequence
  RPE65 RNA guide
ugagggagagaaggaagaaaa

SEQ ID NO: 21405 - RNA, 21 nt, Artificial Sequence
  RPE65 RNA guide
ugaguauuacggaauaaucaa

SEQ ID NO: 21406 - RNA, 21 nt, Artificial Sequence
  RPE65 RNA guide
ugaguugcugguguggcucug

SEQ ID NO: 21407 - RNA, 21 nt, Artificial Sequence
  RPE65 RNA guide
ugaguugcuguaucugaguug

SEQ ID NO: 21408 - RNA, 21 nt, Artificial Sequence
  RPE65 RNA guide
ugaucaggucuuguugauuac

SEQ ID NO: 21409 - RNA, 21 nt, Artificial Sequence
  RPE65 RNA guide
ugaugcuccaucgugacacca

SEQ ID NO: 21410 - RNA, 21 nt, Artificial Sequence
  RPE65 RNA guide
ugcaguaagaagaguauucag

SEQ ID NO: 21411 - RNA, 21 nt, Artificial Sequence
  RPE65 RNA guide
ugcaguucuguauguuaguuc

SEQ ID NO: 21412 - RNA, 21 nt, Artificial Sequence
  RPE65 RNA guide
ugccauuuuuucuuccuucuc

SEQ ID NO: 21413 - RNA, 21 nt, Artificial Sequence
  RPE65 RNA guide
ugccuucccugacgaagacau

SEQ ID NO: 21414 - RNA, 21 nt, Artificial Sequence
  RPE65 RNA guide
ugccuucucauucucuuguau

SEQ ID NO: 21415 - RNA, 21 nt, Artificial Sequence
  RPE65 RNA guide
ugcuauaauacuuagcuuccc

SEQ ID NO: 21416 - RNA, 21 nt, Artificial Sequence
  RPE65 RNA guide
ugcuccaucgugacaccaaau

SEQ ID NO: 21417 - RNA, 21 nt, Artificial Sequence
  RPE65 RNA guide
ugcucuagaugagggagagaa

SEQ ID NO: 21418 - RNA, 21 nt, Artificial Sequence
  RPE65 RNA guide
ugcugauuuguaauuugaguu

SEQ ID NO: 21419 - RNA, 21 nt, Artificial Sequence
  RPE65 RNA guide
ugcugguguggcucugggucu

SEQ ID NO: 21420 - RNA, 21 nt, Artificial Sequence
  RPE65 RNA guide
ugcuguaucugaguugcuggu

SEQ ID NO: 21421 - RNA, 21 nt, Artificial Sequence
  RPE65 RNA guide
uggaauucauguugccauuuu

SEQ ID NO: 21422 - RNA, 21 nt, Artificial Sequence
  RPE65 RNA guide
uggagcaucaaugucugcucu

SEQ ID NO: 21423 - RNA, 21 nt, Artificial Sequence
  RPE65 RNA guide
uggcaacaugaauuccagguu

SEQ ID NO: 21424 - RNA, 21 nt, Artificial Sequence
  RPE65 RNA guide
uggcucugggucuuuuuucaa

SEQ ID NO: 21425 - RNA, 21 nt, Artificial Sequence
  RPE65 RNA guide
ugggucuuuuuucaagcccua

SEQ ID NO: 21426 - RNA, 21 nt, Artificial Sequence
  RPE65 RNA guide
ugguaaucaacaagaccugau

SEQ ID NO: 21427 - RNA, 21 nt, Artificial Sequence
  RPE65 RNA guide
uggugucacgauggagcauca

SEQ ID NO: 21428 - RNA, 21 nt, Artificial Sequence
  RPE65 RNA guide
ugguguggcucugggucuuuu

SEQ ID NO: 21429 - RNA, 21 nt, Artificial Sequence
  RPE65 RNA guide
uguaauuugaguugcuguauc

SEQ ID NO: 21430 - RNA, 21 nt, Artificial Sequence
  RPE65 RNA guide
uguaucugaguugcuggugug

SEQ ID NO: 21431 - RNA, 21 nt, Artificial Sequence
  RPE65 RNA guide
uguaucugcuauaauacuuag

SEQ ID NO: 21432 - RNA, 21 nt, Artificial Sequence
  RPE65 RNA guide
uguauguuaguucguuaggaa

SEQ ID NO: 21433 - RNA, 21 nt, Artificial Sequence
  RPE65 RNA guide
ugucaaagcaccauuuggugu

SEQ ID NO: 21434 - RNA, 21 nt, Artificial Sequence
  RPE65 RNA guide
ugucacgauggagcaucaaug

SEQ ID NO: 21435 - RNA, 21 nt, Artificial Sequence
  RPE65 RNA guide
ugucugaauacucuucuuacu

SEQ ID NO: 21436 - RNA, 21 nt, Artificial Sequence
  RPE65 RNA guide
ugucugcucuagaugagggag

SEQ ID NO: 21437 - RNA, 21 nt, Artificial Sequence
  RPE65 RNA guide
ugucuucgucagggaaggcaa

SEQ ID NO: 21438 - RNA, 21 nt, Artificial Sequence
  RPE65 RNA guide
uguggcucugggucuuuuuuc

SEQ ID NO: 21439 - RNA, 21 nt, Artificial Sequence
  RPE65 RNA guide
ugugucugaauacucuucuua

SEQ ID NO: 21440 - RNA, 21 nt, Artificial Sequence
  RPE65 RNA guide
uguuaguucguuaggaaagga

SEQ ID NO: 21441 - RNA, 21 nt, Artificial Sequence
  RPE65 RNA guide
uguucuuucgguaagcuaggg

SEQ ID NO: 21442 - RNA, 21 nt, Artificial Sequence
  RPE65 RNA guide
uguugccauuuuuucuuccuu

SEQ ID NO: 21443 - RNA, 21 nt, Artificial Sequence
  RPE65 RNA guide
uguugugucugaauacucuuc

SEQ ID NO: 21444 - RNA, 21 nt, Artificial Sequence
  RPE65 RNA guide
uuaaggaucguuuuugaguau

SEQ ID NO: 21445 - RNA, 21 nt, Artificial Sequence
  RPE65 RNA guide
uuacggaauaaucaaccuuac

SEQ ID NO: 21446 - RNA, 21 nt, Artificial Sequence
  RPE65 RNA guide
uuacuccuuuccuaacgaacu

SEQ ID NO: 21447 - RNA, 21 nt, Artificial Sequence
  RPE65 RNA guide
uuacugcaguucuguauguua

SEQ ID NO: 21448 - RNA, 21 nt, Artificial Sequence
  RPE65 RNA guide
uuagaaauaugucuucgucag

SEQ ID NO: 21449 - RNA, 21 nt, Artificial Sequence
  RPE65 RNA guide
uuagcuucccuucuuagaauu

SEQ ID NO: 21450 - RNA, 21 nt, Artificial Sequence
  RPE65 RNA guide
uuaggaaaggaguaagguuga

SEQ ID NO: 21451 - RNA, 21 nt, Artificial Sequence
  RPE65 RNA guide
uuaguucguuaggaaaggagu

SEQ ID NO: 21452 - RNA, 21 nt, Artificial Sequence
  RPE65 RNA guide
uuauagcagauacaagagaau

SEQ ID NO: 21453 - RNA, 21 nt, Artificial Sequence
  RPE65 RNA guide
uucaagcccuagcuuaccgaa

SEQ ID NO: 21454 - RNA, 21 nt, Artificial Sequence
  RPE65 RNA guide
uucacagaccugccuucucau

SEQ ID NO: 21455 - RNA, 21 nt, Artificial Sequence
  RPE65 RNA guide
uucagacacaacaauugcuuu

SEQ ID NO: 21456 - RNA, 21 nt, Artificial Sequence
  RPE65 RNA guide
uucaucuuuugaucaggucuu

SEQ ID NO: 21457 - RNA, 21 nt, Artificial Sequence
  RPE65 RNA guide
uucauguugccauuuuuucuu

SEQ ID NO: 21458 - RNA, 21 nt, Artificial Sequence
  RPE65 RNA guide
uucauuuguucuuucgguaag

SEQ ID NO: 21459 - RNA, 21 nt, Artificial Sequence
  RPE65 RNA guide
uuccagguuuuugccuucccu

SEQ ID NO: 21460 - RNA, 21 nt, Artificial Sequence
  RPE65 RNA guide
uucccugacgaagacauauuu

SEQ ID NO: 21461 - RNA, 21 nt, Artificial Sequence
  RPE65 RNA guide
uuccuaacgaacuaacauaca

SEQ ID NO: 21462 - RNA, 21 nt, Artificial Sequence
  RPE65 RNA guide
uuccuucucucccucaucuag

SEQ ID NO: 21463 - RNA, 21 nt, Artificial Sequence
  RPE65 RNA guide
uucgguaagcuagggcuugaa

SEQ ID NO: 21464 - RNA, 21 nt, Artificial Sequence
  RPE65 RNA guide
uucgucagggaaggcaaaaac

SEQ ID NO: 21465 - RNA, 21 nt, Artificial Sequence
  RPE65 RNA guide
uucguuaggaaaggaguaagg

SEQ ID NO: 21466 - RNA, 21 nt, Artificial Sequence
  RPE65 RNA guide
uucuaagaagggaagcuaagu

SEQ ID NO: 21467 - RNA, 21 nt, Artificial Sequence
  RPE65 RNA guide
uucuacugguaaucaacaaga

SEQ ID NO: 21468 - RNA, 21 nt, Artificial Sequence
  RPE65 RNA guide
uucucauucucuuguaucugc

SEQ ID NO: 21469 - RNA, 21 nt, Artificial Sequence
  RPE65 RNA guide
uucucucccucaucuagagca

SEQ ID NO: 21470 - RNA, 21 nt, Artificial Sequence
  RPE65 RNA guide
uucuguauguuaguucguuag

SEQ ID NO: 21471 - RNA, 21 nt, Artificial Sequence
  RPE65 RNA guide
uucuuacugcaguucuguaug

SEQ ID NO: 21472 - RNA, 21 nt, Artificial Sequence
  RPE65 RNA guide
uucuucaguacugcucuauuu

SEQ ID NO: 21473 - RNA, 21 nt, Artificial Sequence
  RPE65 RNA guide
uucuuccuucucucccucauc

SEQ ID NO: 21474 - RNA, 21 nt, Artificial Sequence
  RPE65 RNA guide
uucuuucgguaagcuagggcu

SEQ ID NO: 21475 - RNA, 21 nt, Artificial Sequence
  RPE65 RNA guide
uugaaaaaagacccagagcca

SEQ ID NO: 21476 - RNA, 21 nt, Artificial Sequence
  RPE65 RNA guide
uugaguauuacggaauaauca

SEQ ID NO: 21477 - RNA, 21 nt, Artificial Sequence
  RPE65 RNA guide
uugaguugcuguaucugaguu

SEQ ID NO: 21478 - RNA, 21 nt, Artificial Sequence
  RPE65 RNA guide
uugaucaggucuuguugauua

SEQ ID NO: 21479 - RNA, 21 nt, Artificial Sequence
  RPE65 RNA guide
uugaugcuccaucgugacacc

SEQ ID NO: 21480 - RNA, 21 nt, Artificial Sequence
  RPE65 RNA guide
uugccauuuuuucuuccuucu

SEQ ID NO: 21481 - RNA, 21 nt, Artificial Sequence
  RPE65 RNA guide
uugccuucccugacgaagaca

SEQ ID NO: 21482 - RNA, 21 nt, Artificial Sequence
  RPE65 RNA guide
uugcugguguggcucuggguc

SEQ ID NO: 21483 - RNA, 21 nt, Artificial Sequence
  RPE65 RNA guide
uugcuguaucugaguugcugg

SEQ ID NO: 21484 - RNA, 21 nt, Artificial Sequence
  RPE65 RNA guide
uuggugucacgauggagcauc

SEQ ID NO: 21485 - RNA, 21 nt, Artificial Sequence
  RPE65 RNA guide
uuguaauuugaguugcuguau

SEQ ID NO: 21486 - RNA, 21 nt, Artificial Sequence
  RPE65 RNA guide
uugugucugaauacucuucuu

SEQ ID NO: 21487 - RNA, 21 nt, Artificial Sequence
  RPE65 RNA guide
uuguucuuucgguaagcuagg

SEQ ID NO: 21488 - RNA, 21 nt, Artificial Sequence
  RPE65 RNA guide
uuguugugucugaauacucuu

SEQ ID NO: 21489 - RNA, 21 nt, Artificial Sequence
  RPE65 RNA guide
uuuagaaauaugucuucguca

SEQ ID NO: 21490 - RNA, 21 nt, Artificial Sequence
  RPE65 RNA guide
uuucaagcccuagcuuaccga

SEQ ID NO: 21491 - RNA, 21 nt, Artificial Sequence
  RPE65 RNA guide
uuucaucuuuugaucaggucu

SEQ ID NO: 21492 - RNA, 21 nt, Artificial Sequence
  RPE65 RNA guide
uuucauuuguucuuucgguaa

SEQ ID NO: 21493 - RNA, 21 nt, Artificial Sequence
  RPE65 RNA guide
uuuccuaacgaacuaacauac

SEQ ID NO: 21494 - RNA, 21 nt, Artificial Sequence
  RPE65 RNA guide
uuucgguaagcuagggcuuga

SEQ ID NO: 21495 - RNA, 21 nt, Artificial Sequence
  RPE65 RNA guide
uuucuacugguaaucaacaag

SEQ ID NO: 21496 - RNA, 21 nt, Artificial Sequence
  RPE65 RNA guide
uuucuuccuucucucccucau

SEQ ID NO: 21497 - RNA, 21 nt, Artificial Sequence
  RPE65 RNA guide
uuugaguauuacggaauaauc

SEQ ID NO: 21498 - RNA, 21 nt, Artificial Sequence
  RPE65 RNA guide
uuugaguugcuguaucugagu

SEQ ID NO: 21499 - RNA, 21 nt, Artificial Sequence
  RPE65 RNA guide
uuugaucaggucuuguugauu

SEQ ID NO: 21500 - RNA, 21 nt, Artificial Sequence
  RPE65 RNA guide
uuugccuucccugacgaagac

SEQ ID NO: 21501 - RNA, 21 nt, Artificial Sequence
  RPE65 RNA guide
uuuggugucacgauggagcau

SEQ ID NO: 21502 - RNA, 21 nt, Artificial Sequence
  RPE65 RNA guide
uuuguaauuugaguugcugua

SEQ ID NO: 21503 - RNA, 21 nt, Artificial Sequence
  RPE65 RNA guide
uuuguucuuucgguaagcuag

SEQ ID NO: 21504 - RNA, 21 nt, Artificial Sequence
  RPE65 RNA guide
uuuuagaaauaugucuucguc

SEQ ID NO: 21505 - RNA, 21 nt, Artificial Sequence
  RPE65 RNA guide
uuuucaagcccuagcuuaccg

SEQ ID NO: 21506 - RNA, 21 nt, Artificial Sequence
  RPE65 RNA guide
uuuucaucuuuugaucagguc

SEQ ID NO: 21507 - RNA, 21 nt, Artificial Sequence
  RPE65 RNA guide
uuuucauuuguucuuucggua

SEQ ID NO: 21508 - RNA, 21 nt, Artificial Sequence
  RPE65 RNA guide
uuuucuacugguaaucaacaa

SEQ ID NO: 21509 - RNA, 21 nt, Artificial Sequence
  RPE65 RNA guide
uuuucuuccuucucucccuca

SEQ ID NO: 21510 - RNA, 21 nt, Artificial Sequence
  RPE65 RNA guide
uuuugaucaggucuuguugau

SEQ ID NO: 21511 - RNA, 21 nt, Artificial Sequence
  RPE65 RNA guide
uuuugccuucccugacgaaga

SEQ ID NO: 21512 - RNA, 21 nt, Artificial Sequence
  RPE65 RNA guide
uuuuuagaaauaugucuucgu

SEQ ID NO: 21513 - RNA, 21 nt, Artificial Sequence
  RPE65 RNA guide
uuuuucaagcccuagcuuacc

SEQ ID NO: 21514 - RNA, 21 nt, Artificial Sequence
  RPE65 RNA guide
uuuuucuacugguaaucaaca

SEQ ID NO: 21515 - RNA, 21 nt, Artificial Sequence
  RPE65 RNA guide
uuuuucuuccuucucucccuc

SEQ ID NO: 21516 - RNA, 21 nt, Artificial Sequence
  RPE65 RNA guide
uuuuugccuucccugacgaag

SEQ ID NO: 21517 - RNA, 21 nt, Artificial Sequence
  RPE65 RNA guide
uuuuuucaagcccuagcuuac

SEQ ID NO: 21518 - RNA, 21 nt, Artificial Sequence
  RPE65 RNA guide
uuuuuucuuccuucucucccu

SEQ ID NO: 21519 - RNA, 22 nt, Artificial Sequence
  RPE65 RNA guide
aaaaaagacccagagccacacc

SEQ ID NO: 21520 - RNA, 22 nt, Artificial Sequence
  RPE65 RNA guide
aaaaaauggcaacaugaauucc

SEQ ID NO: 21521 - RNA, 22 nt, Artificial Sequence
  RPE65 RNA guide
aaaaaaugucaaagcaccauuu

SEQ ID NO: 21522 - RNA, 22 nt, Artificial Sequence
  RPE65 RNA guide
aaaaaccuggaauucauguugc

SEQ ID NO: 21523 - RNA, 22 nt, Artificial Sequence
  RPE65 RNA guide
aaaaagacccagagccacacca

SEQ ID NO: 21524 - RNA, 22 nt, Artificial Sequence
  RPE65 RNA guide
aaaaauagcaauucuaagaagg

SEQ ID NO: 21525 - RNA, 22 nt, Artificial Sequence
  RPE65 RNA guide
aaaaauggcaacaugaauucca

SEQ ID NO: 21526 - RNA, 22 nt, Artificial Sequence
  RPE65 RNA guide
aaaaaugucaaagcaccauuug

SEQ ID NO: 21527 - RNA, 22 nt, Artificial Sequence
  RPE65 RNA guide
aaaaccuggaauucauguugcc

SEQ ID NO: 21528 - RNA, 22 nt, Artificial Sequence
  RPE65 RNA guide
aaaacuauucacagaccugccu

SEQ ID NO: 21529 - RNA, 22 nt, Artificial Sequence
  RPE65 RNA guide
aaaagacccagagccacaccag

SEQ ID NO: 21530 - RNA, 22 nt, Artificial Sequence
  RPE65 RNA guide
aaaauagcaauucuaagaaggg

SEQ ID NO: 21531 - RNA, 22 nt, Artificial Sequence
  RPE65 RNA guide
aaaauggcaacaugaauuccag

SEQ ID NO: 21532 - RNA, 22 nt, Artificial Sequence
  RPE65 RNA guide
aaaaugucaaagcaccauuugg

SEQ ID NO: 21533 - RNA, 22 nt, Artificial Sequence
  RPE65 RNA guide
aaaccuggaauucauguugcca

SEQ ID NO: 21534 - RNA, 22 nt, Artificial Sequence
  RPE65 RNA guide
aaacuauucacagaccugccuu

SEQ ID NO: 21535 - RNA, 22 nt, Artificial Sequence
  RPE65 RNA guide
aaagacccagagccacaccagc

SEQ ID NO: 21536 - RNA, 22 nt, Artificial Sequence
  RPE65 RNA guide
aaagcaauuguugugucugaau

SEQ ID NO: 21537 - RNA, 22 nt, Artificial Sequence
  RPE65 RNA guide
aaagcaccauuuggugucacga

SEQ ID NO: 21538 - RNA, 22 nt, Artificial Sequence
  RPE65 RNA guide
aaaggaguaagguugauuauuc

SEQ ID NO: 21539 - RNA, 22 nt, Artificial Sequence
  RPE65 RNA guide
aaauagcaauucuaagaaggga

SEQ ID NO: 21540 - RNA, 22 nt, Artificial Sequence
  RPE65 RNA guide
aaauaugucuucgucagggaag

SEQ ID NO: 21541 - RNA, 22 nt, Artificial Sequence
  RPE65 RNA guide
aaaugaaaacuauucacagacc

SEQ ID NO: 21542 - RNA, 22 nt, Artificial Sequence
  RPE65 RNA guide
aaauggcaacaugaauuccagg

SEQ ID NO: 21543 - RNA, 22 nt, Artificial Sequence
  RPE65 RNA guide
aaaugucaaagcaccauuuggu

SEQ ID NO: 21544 - RNA, 22 nt, Artificial Sequence
  RPE65 RNA guide
aacaaaugaaaacuauucacag

SEQ ID NO: 21545 - RNA, 22 nt, Artificial Sequence
  RPE65 RNA guide
aacaagaccugaucaaaagaug

SEQ ID NO: 21546 - RNA, 22 nt, Artificial Sequence
  RPE65 RNA guide
aacauacagaacugcaguaaga

SEQ ID NO: 21547 - RNA, 22 nt, Artificial Sequence
  RPE65 RNA guide
aacaugaauuccagguuuuugc

SEQ ID NO: 21548 - RNA, 22 nt, Artificial Sequence
  RPE65 RNA guide
aaccuggaauucauguugccau

SEQ ID NO: 21549 - RNA, 22 nt, Artificial Sequence
  RPE65 RNA guide
aaccuuacuccuuuccuaacga

SEQ ID NO: 21550 - RNA, 22 nt, Artificial Sequence
  RPE65 RNA guide
aacgaacuaacauacagaacug

SEQ ID NO: 21551 - RNA, 22 nt, Artificial Sequence
  RPE65 RNA guide
aacuaacauacagaacugcagu

SEQ ID NO: 21552 - RNA, 22 nt, Artificial Sequence
  RPE65 RNA guide
aacuauucacagaccugccuuc

SEQ ID NO: 21553 - RNA, 22 nt, Artificial Sequence
  RPE65 RNA guide
aacucagauacagcaacucaaa

SEQ ID NO: 21554 - RNA, 22 nt, Artificial Sequence
  RPE65 RNA guide
aacugcaguaagaagaguauuc

SEQ ID NO: 21555 - RNA, 22 nt, Artificial Sequence
  RPE65 RNA guide
aagaaaaaauggcaacaugaau

SEQ ID NO: 21556 - RNA, 22 nt, Artificial Sequence
  RPE65 RNA guide
aagaagaguauucagacacaac

SEQ ID NO: 21557 - RNA, 22 nt, Artificial Sequence
  RPE65 RNA guide
aagaagggaagcuaaguauuau

SEQ ID NO: 21558 - RNA, 22 nt, Artificial Sequence
  RPE65 RNA guide
aagaauuuucaucuuuugauca

SEQ ID NO: 21559 - RNA, 22 nt, Artificial Sequence
  RPE65 RNA guide
aagacccagagccacaccagca

SEQ ID NO: 21560 - RNA, 22 nt, Artificial Sequence
  RPE65 RNA guide
aagaccugaucaaaagaugaaa

SEQ ID NO: 21561 - RNA, 22 nt, Artificial Sequence
  RPE65 RNA guide
aagagaaugagaaggcaggucu

SEQ ID NO: 21562 - RNA, 22 nt, Artificial Sequence
  RPE65 RNA guide
aagaguauucagacacaacaau

SEQ ID NO: 21563 - RNA, 22 nt, Artificial Sequence
  RPE65 RNA guide
aagcaauuguugugucugaaua

SEQ ID NO: 21564 - RNA, 22 nt, Artificial Sequence
  RPE65 RNA guide
aagcaccauuuggugucacgau

SEQ ID NO: 21565 - RNA, 22 nt, Artificial Sequence
  RPE65 RNA guide
aagcccuagcuuaccgaaagaa

SEQ ID NO: 21566 - RNA, 22 nt, Artificial Sequence
  RPE65 RNA guide
aagcuaaguauuauagcagaua

SEQ ID NO: 21567 - RNA, 22 nt, Artificial Sequence
  RPE65 RNA guide
aagcuagggcuugaaaaaagac

SEQ ID NO: 21568 - RNA, 22 nt, Artificial Sequence
  RPE65 RNA guide
aaggaagaaaaaauggcaacau

SEQ ID NO: 21569 - RNA, 22 nt, Artificial Sequence
  RPE65 RNA guide
aaggaguaagguugauuauucc

SEQ ID NO: 21570 - RNA, 22 nt, Artificial Sequence
  RPE65 RNA guide
aaggcaaaaaccuggaauucau

SEQ ID NO: 21571 - RNA, 22 nt, Artificial Sequence
  RPE65 RNA guide
aaggcaggucugugaauaguuu

SEQ ID NO: 21572 - RNA, 22 nt, Artificial Sequence
  RPE65 RNA guide
aagggaagcuaaguauuauagc

SEQ ID NO: 21573 - RNA, 22 nt, Artificial Sequence
  RPE65 RNA guide
aagguugauuauuccguaauac

SEQ ID NO: 21574 - RNA, 22 nt, Artificial Sequence
  RPE65 RNA guide
aauaaucaaccuuacuccuuuc

SEQ ID NO: 21575 - RNA, 22 nt, Artificial Sequence
  RPE65 RNA guide
aauacucuucuuacugcaguuc

SEQ ID NO: 21576 - RNA, 22 nt, Artificial Sequence
  RPE65 RNA guide
aauacuuagcuucccuucuuag

SEQ ID NO: 21577 - RNA, 22 nt, Artificial Sequence
  RPE65 RNA guide
aauagcaauucuaagaagggaa

SEQ ID NO: 21578 - RNA, 22 nt, Artificial Sequence
  RPE65 RNA guide
aauaugucuucgucagggaagg

SEQ ID NO: 21579 - RNA, 22 nt, Artificial Sequence
  RPE65 RNA guide
aaucaacaagaccugaucaaaa

SEQ ID NO: 21580 - RNA, 22 nt, Artificial Sequence
  RPE65 RNA guide
aaucaaccuuacuccuuuccua

SEQ ID NO: 21581 - RNA, 22 nt, Artificial Sequence
  RPE65 RNA guide
aaugaaaacuauucacagaccu

SEQ ID NO: 21582 - RNA, 22 nt, Artificial Sequence
  RPE65 RNA guide
aaugaaagcaauuguugugucu

SEQ ID NO: 21583 - RNA, 22 nt, Artificial Sequence
  RPE65 RNA guide
aaugagaaggcaggucugugaa

SEQ ID NO: 21584 - RNA, 22 nt, Artificial Sequence
  RPE65 RNA guide
aauggcaacaugaauuccaggu

SEQ ID NO: 21585 - RNA, 22 nt, Artificial Sequence
  RPE65 RNA guide
aaugucaaagcaccauuuggug

SEQ ID NO: 21586 - RNA, 22 nt, Artificial Sequence
  RPE65 RNA guide
aaugucugcucuagaugaggga

SEQ ID NO: 21587 - RNA, 22 nt, Artificial Sequence
  RPE65 RNA guide
aauucauguugccauuuuuucu

SEQ ID NO: 21588 - RNA, 22 nt, Artificial Sequence
  RPE65 RNA guide
aauuccagguuuuugccuuccc

SEQ ID NO: 21589 - RNA, 22 nt, Artificial Sequence
  RPE65 RNA guide
aauucuaagaagggaagcuaag

SEQ ID NO: 21590 - RNA, 22 nt, Artificial Sequence
  RPE65 RNA guide
aauuguugugucugaauacucu

SEQ ID NO: 21591 - RNA, 22 nt, Artificial Sequence
  RPE65 RNA guide
aauuugaguugcuguaucugag

SEQ ID NO: 21592 - RNA, 22 nt, Artificial Sequence
  RPE65 RNA guide
aauuuucaucuuuugaucaggu

SEQ ID NO: 21593 - RNA, 22 nt, Artificial Sequence
  RPE65 RNA guide
acaaaugaaaacuauucacaga

SEQ ID NO: 21594 - RNA, 22 nt, Artificial Sequence
  RPE65 RNA guide
acaagaccugaucaaaagauga

SEQ ID NO: 21595 - RNA, 22 nt, Artificial Sequence
  RPE65 RNA guide
acaagagaaugagaaggcaggu

SEQ ID NO: 21596 - RNA, 22 nt, Artificial Sequence
  RPE65 RNA guide
acaccaaauggugcuuugacau

SEQ ID NO: 21597 - RNA, 22 nt, Artificial Sequence
  RPE65 RNA guide
acaccagcaacucagauacagc

SEQ ID NO: 21598 - RNA, 22 nt, Artificial Sequence
  RPE65 RNA guide
acagaacugcaguaagaagagu

SEQ ID NO: 21599 - RNA, 22 nt, Artificial Sequence
  RPE65 RNA guide
acagaccugccuucucauucuc

SEQ ID NO: 21600 - RNA, 22 nt, Artificial Sequence
  RPE65 RNA guide
acagcaacucaaauuacaaauc

SEQ ID NO: 21601 - RNA, 22 nt, Artificial Sequence
  RPE65 RNA guide
acauacagaacugcaguaagaa

SEQ ID NO: 21602 - RNA, 22 nt, Artificial Sequence
  RPE65 RNA guide
acaugaauuccagguuuuugcc

SEQ ID NO: 21603 - RNA, 22 nt, Artificial Sequence
  RPE65 RNA guide
acauugaugcuccaucgugaca

SEQ ID NO: 21604 - RNA, 22 nt, Artificial Sequence
  RPE65 RNA guide
accagcaacucagauacagcaa

SEQ ID NO: 21605 - RNA, 22 nt, Artificial Sequence
  RPE65 RNA guide
accauuuggugucacgauggag

SEQ ID NO: 21606 - RNA, 22 nt, Artificial Sequence
  RPE65 RNA guide
acccagagccacaccagcaacu

SEQ ID NO: 21607 - RNA, 22 nt, Artificial Sequence
  RPE65 RNA guide
accgaaagaacaaaugaaaacu

SEQ ID NO: 21608 - RNA, 22 nt, Artificial Sequence
  RPE65 RNA guide
accugccuucucauucucuugu

SEQ ID NO: 21609 - RNA, 22 nt, Artificial Sequence
  RPE65 RNA guide
accuggaauucauguugccauu

SEQ ID NO: 21610 - RNA, 22 nt, Artificial Sequence
  RPE65 RNA guide
accuuacuccuuuccuaacgaa

SEQ ID NO: 21611 - RNA, 22 nt, Artificial Sequence
  RPE65 RNA guide
acgaacuaacauacagaacugc

SEQ ID NO: 21612 - RNA, 22 nt, Artificial Sequence
  RPE65 RNA guide
acgauccuuaauacuauaaaua

SEQ ID NO: 21613 - RNA, 22 nt, Artificial Sequence
  RPE65 RNA guide
acgauggagcaucaaugucugc

SEQ ID NO: 21614 - RNA, 22 nt, Artificial Sequence
  RPE65 RNA guide
acggaauaaucaaccuuacucc

SEQ ID NO: 21615 - RNA, 22 nt, Artificial Sequence
  RPE65 RNA guide
acuaacauacagaacugcagua

SEQ ID NO: 21616 - RNA, 22 nt, Artificial Sequence
  RPE65 RNA guide
acuauaaauagagcaguacuga

SEQ ID NO: 21617 - RNA, 22 nt, Artificial Sequence
  RPE65 RNA guide
acuauucacagaccugccuucu

SEQ ID NO: 21618 - RNA, 22 nt, Artificial Sequence
  RPE65 RNA guide
acucagauacagcaacucaaau

SEQ ID NO: 21619 - RNA, 22 nt, Artificial Sequence
  RPE65 RNA guide
acuccuuuccuaacgaacuaac

SEQ ID NO: 21620 - RNA, 22 nt, Artificial Sequence
  RPE65 RNA guide
acucuucuuacugcaguucugu

SEQ ID NO: 21621 - RNA, 22 nt, Artificial Sequence
  RPE65 RNA guide
acugcaguaagaagaguauuca

SEQ ID NO: 21622 - RNA, 22 nt, Artificial Sequence
  RPE65 RNA guide
acugcaguucuguauguuaguu

SEQ ID NO: 21623 - RNA, 22 nt, Artificial Sequence
  RPE65 RNA guide
acugguaaucaacaagaccuga

SEQ ID NO: 21624 - RNA, 22 nt, Artificial Sequence
  RPE65 RNA guide
acuuagcuucccuucuuagaau

SEQ ID NO: 21625 - RNA, 22 nt, Artificial Sequence
  RPE65 RNA guide
agaaaaaauggcaacaugaauu

SEQ ID NO: 21626 - RNA, 22 nt, Artificial Sequence
  RPE65 RNA guide
agaaauaugucuucgucaggga

SEQ ID NO: 21627 - RNA, 22 nt, Artificial Sequence
  RPE65 RNA guide
agaacaaaugaaaacuauucac

SEQ ID NO: 21628 - RNA, 22 nt, Artificial Sequence
  RPE65 RNA guide
agaacugcaguaagaagaguau

SEQ ID NO: 21629 - RNA, 22 nt, Artificial Sequence
  RPE65 RNA guide
agaagaguauucagacacaaca

SEQ ID NO: 21630 - RNA, 22 nt, Artificial Sequence
  RPE65 RNA guide
agaaggaagaaaaaauggcaac

SEQ ID NO: 21631 - RNA, 22 nt, Artificial Sequence
  RPE65 RNA guide
agaaggcaggucugugaauagu

SEQ ID NO: 21632 - RNA, 22 nt, Artificial Sequence
  RPE65 RNA guide
agaagggaagcuaaguauuaua

SEQ ID NO: 21633 - RNA, 22 nt, Artificial Sequence
  RPE65 RNA guide
agaaugagaaggcaggucugug

SEQ ID NO: 21634 - RNA, 22 nt, Artificial Sequence
  RPE65 RNA guide
agaauuuucaucuuuugaucag

SEQ ID NO: 21635 - RNA, 22 nt, Artificial Sequence
  RPE65 RNA guide
agacauugaugcuccaucguga

SEQ ID NO: 21636 - RNA, 22 nt, Artificial Sequence
  RPE65 RNA guide
agacccagagccacaccagcaa

SEQ ID NO: 21637 - RNA, 22 nt, Artificial Sequence
  RPE65 RNA guide
agaccugaucaaaagaugaaaa

SEQ ID NO: 21638 - RNA, 22 nt, Artificial Sequence
  RPE65 RNA guide
agaccugccuucucauucucuu

SEQ ID NO: 21639 - RNA, 22 nt, Artificial Sequence
  RPE65 RNA guide
agagaaggaagaaaaaauggca

SEQ ID NO: 21640 - RNA, 22 nt, Artificial Sequence
  RPE65 RNA guide
agagaaugagaaggcaggucug

SEQ ID NO: 21641 - RNA, 22 nt, Artificial Sequence
  RPE65 RNA guide
agagcagacauugaugcuccau

SEQ ID NO: 21642 - RNA, 22 nt, Artificial Sequence
  RPE65 RNA guide
agagcaguacugaagaauuaaa

SEQ ID NO: 21643 - RNA, 22 nt, Artificial Sequence
  RPE65 RNA guide
agagccacaccagcaacucaga

SEQ ID NO: 21644 - RNA, 22 nt, Artificial Sequence
  RPE65 RNA guide
agaguauucagacacaacaauu

SEQ ID NO: 21645 - RNA, 22 nt, Artificial Sequence
  RPE65 RNA guide
agauacaagagaaugagaaggc

SEQ ID NO: 21646 - RNA, 22 nt, Artificial Sequence
  RPE65 RNA guide
agauacagcaacucaaauuaca

SEQ ID NO: 21647 - RNA, 22 nt, Artificial Sequence
  RPE65 RNA guide
agaugagggagagaaggaagaa

SEQ ID NO: 21648 - RNA, 22 nt, Artificial Sequence
  RPE65 RNA guide
agcaacucagauacagcaacuc

SEQ ID NO: 21649 - RNA, 22 nt, Artificial Sequence
  RPE65 RNA guide
agcaauucuaagaagggaagcu

SEQ ID NO: 21650 - RNA, 22 nt, Artificial Sequence
  RPE65 RNA guide
agcaauuguugugucugaauac

SEQ ID NO: 21651 - RNA, 22 nt, Artificial Sequence
  RPE65 RNA guide
agcaccauuuggugucacgaug

SEQ ID NO: 21652 - RNA, 22 nt, Artificial Sequence
  RPE65 RNA guide
agcagacauugaugcuccaucg

SEQ ID NO: 21653 - RNA, 22 nt, Artificial Sequence
  RPE65 RNA guide
agcagauacaagagaaugagaa

SEQ ID NO: 21654 - RNA, 22 nt, Artificial Sequence
  RPE65 RNA guide
agcaucaaugucugcucuagau

SEQ ID NO: 21655 - RNA, 22 nt, Artificial Sequence
  RPE65 RNA guide
agccacaccagcaacucagaua

SEQ ID NO: 21656 - RNA, 22 nt, Artificial Sequence
  RPE65 RNA guide
agcccuagcuuaccgaaagaac

SEQ ID NO: 21657 - RNA, 22 nt, Artificial Sequence
  RPE65 RNA guide
agcuaaguauuauagcagauac

SEQ ID NO: 21658 - RNA, 22 nt, Artificial Sequence
  RPE65 RNA guide
agcuagggcuugaaaaaagacc

SEQ ID NO: 21659 - RNA, 22 nt, Artificial Sequence
  RPE65 RNA guide
agcuuaccgaaagaacaaauga

SEQ ID NO: 21660 - RNA, 22 nt, Artificial Sequence
  RPE65 RNA guide
agcuucccuucuuagaauugcu

SEQ ID NO: 21661 - RNA, 22 nt, Artificial Sequence
  RPE65 RNA guide
aggaaaggaguaagguugauua

SEQ ID NO: 21662 - RNA, 22 nt, Artificial Sequence
  RPE65 RNA guide
aggaagaaaaaauggcaacaug

SEQ ID NO: 21663 - RNA, 22 nt, Artificial Sequence
  RPE65 RNA guide
aggaguaagguugauuauuccg

SEQ ID NO: 21664 - RNA, 22 nt, Artificial Sequence
  RPE65 RNA guide
aggcaaaaaccuggaauucaug

SEQ ID NO: 21665 - RNA, 22 nt, Artificial Sequence
  RPE65 RNA guide
aggcaggucugugaauaguuuu

SEQ ID NO: 21666 - RNA, 22 nt, Artificial Sequence
  RPE65 RNA guide
agggaagcuaaguauuauagca

SEQ ID NO: 21667 - RNA, 22 nt, Artificial Sequence
  RPE65 RNA guide
agggaaggcaaaaaccuggaau

SEQ ID NO: 21668 - RNA, 22 nt, Artificial Sequence
  RPE65 RNA guide
agggagagaaggaagaaaaaau

SEQ ID NO: 21669 - RNA, 22 nt, Artificial Sequence
  RPE65 RNA guide
agggcuugaaaaaagacccaga

SEQ ID NO: 21670 - RNA, 22 nt, Artificial Sequence
  RPE65 RNA guide
aggucugugaauaguuuucauu

SEQ ID NO: 21671 - RNA, 22 nt, Artificial Sequence
  RPE65 RNA guide
aggucuuguugauuaccaguag

SEQ ID NO: 21672 - RNA, 22 nt, Artificial Sequence
  RPE65 RNA guide
agguugauuauuccguaauacu

SEQ ID NO: 21673 - RNA, 22 nt, Artificial Sequence
  RPE65 RNA guide
agguuuuugccuucccugacga

SEQ ID NO: 21674 - RNA, 22 nt, Artificial Sequence
  RPE65 RNA guide
aguaagaagaguauucagacac

SEQ ID NO: 21675 - RNA, 22 nt, Artificial Sequence
  RPE65 RNA guide
aguaagguugauuauuccguaa

SEQ ID NO: 21676 - RNA, 22 nt, Artificial Sequence
  RPE65 RNA guide
aguauuacggaauaaucaaccu

SEQ ID NO: 21677 - RNA, 22 nt, Artificial Sequence
  RPE65 RNA guide
aguauuauagcagauacaagag

SEQ ID NO: 21678 - RNA, 22 nt, Artificial Sequence
  RPE65 RNA guide
aguauucagacacaacaauugc

SEQ ID NO: 21679 - RNA, 22 nt, Artificial Sequence
  RPE65 RNA guide
aguucguuaggaaaggaguaag

SEQ ID NO: 21680 - RNA, 22 nt, Artificial Sequence
  RPE65 RNA guide
aguucuguauguuaguucguua

SEQ ID NO: 21681 - RNA, 22 nt, Artificial Sequence
  RPE65 RNA guide
aguugcugguguggcucugggu

SEQ ID NO: 21682 - RNA, 22 nt, Artificial Sequence
  RPE65 RNA guide
aguugcuguaucugaguugcug

SEQ ID NO: 21683 - RNA, 22 nt, Artificial Sequence
  RPE65 RNA guide
aguuuuaauucuucaguacugc

SEQ ID NO: 21684 - RNA, 22 nt, Artificial Sequence
  RPE65 RNA guide
aguuuucauuuguucuuucggu

SEQ ID NO: 21685 - RNA, 22 nt, Artificial Sequence
  RPE65 RNA guide
auaauacuuagcuucccuucuu

SEQ ID NO: 21686 - RNA, 22 nt, Artificial Sequence
  RPE65 RNA guide
auaaucaaccuuacuccuuucc

SEQ ID NO: 21687 - RNA, 22 nt, Artificial Sequence
  RPE65 RNA guide
auacaagagaaugagaaggcag

SEQ ID NO: 21688 - RNA, 22 nt, Artificial Sequence
  RPE65 RNA guide
auacagaacugcaguaagaaga

SEQ ID NO: 21689 - RNA, 22 nt, Artificial Sequence
  RPE65 RNA guide
auacagcaacucaaauuacaaa

SEQ ID NO: 21690 - RNA, 22 nt, Artificial Sequence
  RPE65 RNA guide
auacuauaaauagagcaguacu

SEQ ID NO: 21691 - RNA, 22 nt, Artificial Sequence
  RPE65 RNA guide
auacucuucuuacugcaguucu

SEQ ID NO: 21692 - RNA, 22 nt, Artificial Sequence
  RPE65 RNA guide
auacuuagcuucccuucuuaga

SEQ ID NO: 21693 - RNA, 22 nt, Artificial Sequence
  RPE65 RNA guide
auagagcaguacugaagaauua

SEQ ID NO: 21694 - RNA, 22 nt, Artificial Sequence
  RPE65 RNA guide
auagcaauucuaagaagggaag

SEQ ID NO: 21695 - RNA, 22 nt, Artificial Sequence
  RPE65 RNA guide
auagcagauacaagagaaugag

SEQ ID NO: 21696 - RNA, 22 nt, Artificial Sequence
  RPE65 RNA guide
auaguuuuaauucuucaguacu

SEQ ID NO: 21697 - RNA, 22 nt, Artificial Sequence
  RPE65 RNA guide
auaugucuucgucagggaaggc

SEQ ID NO: 21698 - RNA, 22 nt, Artificial Sequence
  RPE65 RNA guide
aucaacaagaccugaucaaaag

SEQ ID NO: 21699 - RNA, 22 nt, Artificial Sequence
  RPE65 RNA guide
aucaaccuuacuccuuuccuaa

SEQ ID NO: 21700 - RNA, 22 nt, Artificial Sequence
  RPE65 RNA guide
aucaaugucugcucuagaugag

SEQ ID NO: 21701 - RNA, 22 nt, Artificial Sequence
  RPE65 RNA guide
aucaggucuuguugauuaccag

SEQ ID NO: 21702 - RNA, 22 nt, Artificial Sequence
  RPE65 RNA guide
aucgugacaccaaauggugcuu

SEQ ID NO: 21703 - RNA, 22 nt, Artificial Sequence
  RPE65 RNA guide
aucuagagcagacauugaugcu

SEQ ID NO: 21704 - RNA, 22 nt, Artificial Sequence
  RPE65 RNA guide
aucugaguugcugguguggcuc

SEQ ID NO: 21705 - RNA, 22 nt, Artificial Sequence
  RPE65 RNA guide
aucugcuauaauacuuagcuuc

SEQ ID NO: 21706 - RNA, 22 nt, Artificial Sequence
  RPE65 RNA guide
aucuuuugaucaggucuuguug

SEQ ID NO: 21707 - RNA, 22 nt, Artificial Sequence
  RPE65 RNA guide
augaaaacuauucacagaccug

SEQ ID NO: 21708 - RNA, 22 nt, Artificial Sequence
  RPE65 RNA guide
augaaagcaauuguugugucug

SEQ ID NO: 21709 - RNA, 22 nt, Artificial Sequence
  RPE65 RNA guide
augaauuccagguuuuugccuu

SEQ ID NO: 21710 - RNA, 22 nt, Artificial Sequence
  RPE65 RNA guide
augagaaggcaggucugugaau

SEQ ID NO: 21711 - RNA, 22 nt, Artificial Sequence
  RPE65 RNA guide
augagggagagaaggaagaaaa

SEQ ID NO: 21712 - RNA, 22 nt, Artificial Sequence
  RPE65 RNA guide
augcuccaucgugacaccaaau

SEQ ID NO: 21713 - RNA, 22 nt, Artificial Sequence
  RPE65 RNA guide
auggagcaucaaugucugcucu

SEQ ID NO: 21714 - RNA, 22 nt, Artificial Sequence
  RPE65 RNA guide
auggcaacaugaauuccagguu

SEQ ID NO: 21715 - RNA, 22 nt, Artificial Sequence
  RPE65 RNA guide
augucaaagcaccauuuggugu

SEQ ID NO: 21716 - RNA, 22 nt, Artificial Sequence
  RPE65 RNA guide
augucugcucuagaugagggag

SEQ ID NO: 21717 - RNA, 22 nt, Artificial Sequence
  RPE65 RNA guide
augucuucgucagggaaggcaa

SEQ ID NO: 21718 - RNA, 22 nt, Artificial Sequence
  RPE65 RNA guide
auguuaguucguuaggaaagga

SEQ ID NO: 21719 - RNA, 22 nt, Artificial Sequence
  RPE65 RNA guide
auguugccauuuuuucuuccuu

SEQ ID NO: 21720 - RNA, 22 nt, Artificial Sequence
  RPE65 RNA guide
auuaaggaucguuuuugaguau

SEQ ID NO: 21721 - RNA, 22 nt, Artificial Sequence
  RPE65 RNA guide
auuacggaauaaucaaccuuac

SEQ ID NO: 21722 - RNA, 22 nt, Artificial Sequence
  RPE65 RNA guide
auuauagcagauacaagagaau

SEQ ID NO: 21723 - RNA, 22 nt, Artificial Sequence
  RPE65 RNA guide
auucacagaccugccuucucau

SEQ ID NO: 21724 - RNA, 22 nt, Artificial Sequence
  RPE65 RNA guide
auucagacacaacaauugcuuu

SEQ ID NO: 21725 - RNA, 22 nt, Artificial Sequence
  RPE65 RNA guide
auucauguugccauuuuuucuu

SEQ ID NO: 21726 - RNA, 22 nt, Artificial Sequence
  RPE65 RNA guide
auuccagguuuuugccuucccu

SEQ ID NO: 21727 - RNA, 22 nt, Artificial Sequence
  RPE65 RNA guide
auucuaagaagggaagcuaagu

SEQ ID NO: 21728 - RNA, 22 nt, Artificial Sequence
  RPE65 RNA guide
auucuucaguacugcucuauuu

SEQ ID NO: 21729 - RNA, 22 nt, Artificial Sequence
  RPE65 RNA guide
auugaugcuccaucgugacacc

SEQ ID NO: 21730 - RNA, 22 nt, Artificial Sequence
  RPE65 RNA guide
auuguugugucugaauacucuu

SEQ ID NO: 21731 - RNA, 22 nt, Artificial Sequence
  RPE65 RNA guide
auuugaguugcuguaucugagu

SEQ ID NO: 21732 - RNA, 22 nt, Artificial Sequence
  RPE65 RNA guide
auuuggugucacgauggagcau

SEQ ID NO: 21733 - RNA, 22 nt, Artificial Sequence
  RPE65 RNA guide
auuuguaauuugaguugcugua

SEQ ID NO: 21734 - RNA, 22 nt, Artificial Sequence
  RPE65 RNA guide
auuuguucuuucgguaagcuag

SEQ ID NO: 21735 - RNA, 22 nt, Artificial Sequence
  RPE65 RNA guide
auuuucaucuuuugaucagguc

SEQ ID NO: 21736 - RNA, 22 nt, Artificial Sequence
  RPE65 RNA guide
auuuuuucuuccuucucucccu

SEQ ID NO: 21737 - RNA, 22 nt, Artificial Sequence
  RPE65 RNA guide
caaaaaccuggaauucauguug

SEQ ID NO: 21738 - RNA, 22 nt, Artificial Sequence
  RPE65 RNA guide
caaagcaccauuuggugucacg

SEQ ID NO: 21739 - RNA, 22 nt, Artificial Sequence
  RPE65 RNA guide
caaaugaaaacuauucacagac

SEQ ID NO: 21740 - RNA, 22 nt, Artificial Sequence
  RPE65 RNA guide
caacaagaccugaucaaaagau

SEQ ID NO: 21741 - RNA, 22 nt, Artificial Sequence
  RPE65 RNA guide
caacaugaauuccagguuuuug

SEQ ID NO: 21742 - RNA, 22 nt, Artificial Sequence
  RPE65 RNA guide
caaccuuacuccuuuccuaacg

SEQ ID NO: 21743 - RNA, 22 nt, Artificial Sequence
  RPE65 RNA guide
caacucagauacagcaacucaa

SEQ ID NO: 21744 - RNA, 22 nt, Artificial Sequence
  RPE65 RNA guide
caagaccugaucaaaagaugaa

SEQ ID NO: 21745 - RNA, 22 nt, Artificial Sequence
  RPE65 RNA guide
caagagaaugagaaggcagguc

SEQ ID NO: 21746 - RNA, 22 nt, Artificial Sequence
  RPE65 RNA guide
caagcccuagcuuaccgaaaga

SEQ ID NO: 21747 - RNA, 22 nt, Artificial Sequence
  RPE65 RNA guide
caaugucugcucuagaugaggg

SEQ ID NO: 21748 - RNA, 22 nt, Artificial Sequence
  RPE65 RNA guide
caauucuaagaagggaagcuaa

SEQ ID NO: 21749 - RNA, 22 nt, Artificial Sequence
  RPE65 RNA guide
caauuguugugucugaauacuc

SEQ ID NO: 21750 - RNA, 22 nt, Artificial Sequence
  RPE65 RNA guide
cacaccagcaacucagauacag

SEQ ID NO: 21751 - RNA, 22 nt, Artificial Sequence
  RPE65 RNA guide
cacagaccugccuucucauucu

SEQ ID NO: 21752 - RNA, 22 nt, Artificial Sequence
  RPE65 RNA guide
caccaaauggugcuuugacauu

SEQ ID NO: 21753 - RNA, 22 nt, Artificial Sequence
  RPE65 RNA guide
caccagcaacucagauacagca

SEQ ID NO: 21754 - RNA, 22 nt, Artificial Sequence
  RPE65 RNA guide
caccauuuggugucacgaugga

SEQ ID NO: 21755 - RNA, 22 nt, Artificial Sequence
  RPE65 RNA guide
cacgauggagcaucaaugucug

SEQ ID NO: 21756 - RNA, 22 nt, Artificial Sequence
  RPE65 RNA guide
cagaacugcaguaagaagagua

SEQ ID NO: 21757 - RNA, 22 nt, Artificial Sequence
  RPE65 RNA guide
cagacauugaugcuccaucgug

SEQ ID NO: 21758 - RNA, 22 nt, Artificial Sequence
  RPE65 RNA guide
cagaccugccuucucauucucu

SEQ ID NO: 21759 - RNA, 22 nt, Artificial Sequence
  RPE65 RNA guide
cagagccacaccagcaacucag

SEQ ID NO: 21760 - RNA, 22 nt, Artificial Sequence
  RPE65 RNA guide
cagauacaagagaaugagaagg

SEQ ID NO: 21761 - RNA, 22 nt, Artificial Sequence
  RPE65 RNA guide
cagauacagcaacucaaauuac

SEQ ID NO: 21762 - RNA, 22 nt, Artificial Sequence
  RPE65 RNA guide
cagcaacucaaauuacaaauca

SEQ ID NO: 21763 - RNA, 22 nt, Artificial Sequence
  RPE65 RNA guide
cagcaacucagauacagcaacu

SEQ ID NO: 21764 - RNA, 22 nt, Artificial Sequence
  RPE65 RNA guide
cagggaaggcaaaaaccuggaa

SEQ ID NO: 21765 - RNA, 22 nt, Artificial Sequence
  RPE65 RNA guide
caggucugugaauaguuuucau

SEQ ID NO: 21766 - RNA, 22 nt, Artificial Sequence
  RPE65 RNA guide
caggucuuguugauuaccagua

SEQ ID NO: 21767 - RNA, 22 nt, Artificial Sequence
  RPE65 RNA guide
cagguuuuugccuucccugacg

SEQ ID NO: 21768 - RNA, 22 nt, Artificial Sequence
  RPE65 RNA guide
caguaagaagaguauucagaca

SEQ ID NO: 21769 - RNA, 22 nt, Artificial Sequence
  RPE65 RNA guide
caguucuguauguuaguucguu

SEQ ID NO: 21770 - RNA, 22 nt, Artificial Sequence
  RPE65 RNA guide
cauacagaacugcaguaagaag

SEQ ID NO: 21771 - RNA, 22 nt, Artificial Sequence
  RPE65 RNA guide
caucaaugucugcucuagauga

SEQ ID NO: 21772 - RNA, 22 nt, Artificial Sequence
  RPE65 RNA guide
caucgugacaccaaauggugcu

SEQ ID NO: 21773 - RNA, 22 nt, Artificial Sequence
  RPE65 RNA guide
caucuagagcagacauugaugc

SEQ ID NO: 21774 - RNA, 22 nt, Artificial Sequence
  RPE65 RNA guide
caucuuuugaucaggucuuguu

SEQ ID NO: 21775 - RNA, 22 nt, Artificial Sequence
  RPE65 RNA guide
caugaauuccagguuuuugccu

SEQ ID NO: 21776 - RNA, 22 nt, Artificial Sequence
  RPE65 RNA guide
cauguugccauuuuuucuuccu

SEQ ID NO: 21777 - RNA, 22 nt, Artificial Sequence
  RPE65 RNA guide
cauucucuuguaucugcuauaa

SEQ ID NO: 21778 - RNA, 22 nt, Artificial Sequence
  RPE65 RNA guide
cauugaugcuccaucgugacac

SEQ ID NO: 21779 - RNA, 22 nt, Artificial Sequence
  RPE65 RNA guide
cauuuggugucacgauggagca

SEQ ID NO: 21780 - RNA, 22 nt, Artificial Sequence
  RPE65 RNA guide
cauuuguucuuucgguaagcua

SEQ ID NO: 21781 - RNA, 22 nt, Artificial Sequence
  RPE65 RNA guide
cauuuuuucuuccuucucuccc

SEQ ID NO: 21782 - RNA, 22 nt, Artificial Sequence
  RPE65 RNA guide
ccacaccagcaacucagauaca

SEQ ID NO: 21783 - RNA, 22 nt, Artificial Sequence
  RPE65 RNA guide
ccagagccacaccagcaacuca

SEQ ID NO: 21784 - RNA, 22 nt, Artificial Sequence
  RPE65 RNA guide
ccagcaacucagauacagcaac

SEQ ID NO: 21785 - RNA, 22 nt, Artificial Sequence
  RPE65 RNA guide
ccagguuuuugccuucccugac

SEQ ID NO: 21786 - RNA, 22 nt, Artificial Sequence
  RPE65 RNA guide
ccaucgugacaccaaauggugc

SEQ ID NO: 21787 - RNA, 22 nt, Artificial Sequence
  RPE65 RNA guide
ccauuuggugucacgauggagc

SEQ ID NO: 21788 - RNA, 22 nt, Artificial Sequence
  RPE65 RNA guide
ccauuuuuucuuccuucucucc

SEQ ID NO: 21789 - RNA, 22 nt, Artificial Sequence
  RPE65 RNA guide
cccagagccacaccagcaacuc

SEQ ID NO: 21790 - RNA, 22 nt, Artificial Sequence
  RPE65 RNA guide
cccuagcuuaccgaaagaacaa

SEQ ID NO: 21791 - RNA, 22 nt, Artificial Sequence
  RPE65 RNA guide
cccucaucuagagcagacauug

SEQ ID NO: 21792 - RNA, 22 nt, Artificial Sequence
  RPE65 RNA guide
cccugacgaagacauauuucua

SEQ ID NO: 21793 - RNA, 22 nt, Artificial Sequence
  RPE65 RNA guide
ccgaaagaacaaaugaaaacua

SEQ ID NO: 21794 - RNA, 22 nt, Artificial Sequence
  RPE65 RNA guide
ccuaacgaacuaacauacagaa

SEQ ID NO: 21795 - RNA, 22 nt, Artificial Sequence
  RPE65 RNA guide
ccuagcuuaccgaaagaacaaa

SEQ ID NO: 21796 - RNA, 22 nt, Artificial Sequence
  RPE65 RNA guide
ccucaucuagagcagacauuga

SEQ ID NO: 21797 - RNA, 22 nt, Artificial Sequence
  RPE65 RNA guide
ccugacgaagacauauuucuaa

SEQ ID NO: 21798 - RNA, 22 nt, Artificial Sequence
  RPE65 RNA guide
ccugccuucucauucucuugua

SEQ ID NO: 21799 - RNA, 22 nt, Artificial Sequence
  RPE65 RNA guide
ccuggaauucauguugccauuu

SEQ ID NO: 21800 - RNA, 22 nt, Artificial Sequence
  RPE65 RNA guide
ccuuaauacuauaaauagagca

SEQ ID NO: 21801 - RNA, 22 nt, Artificial Sequence
  RPE65 RNA guide
ccuuacuccuuuccuaacgaac

SEQ ID NO: 21802 - RNA, 22 nt, Artificial Sequence
  RPE65 RNA guide
ccuucccugacgaagacauauu

SEQ ID NO: 21803 - RNA, 22 nt, Artificial Sequence
  RPE65 RNA guide
ccuucucauucucuuguaucug

SEQ ID NO: 21804 - RNA, 22 nt, Artificial Sequence
  RPE65 RNA guide
ccuucucucccucaucuagagc

SEQ ID NO: 21805 - RNA, 22 nt, Artificial Sequence
  RPE65 RNA guide
ccuuuccuaacgaacuaacaua

SEQ ID NO: 21806 - RNA, 22 nt, Artificial Sequence
  RPE65 RNA guide
cgaaagaacaaaugaaaacuau

SEQ ID NO: 21807 - RNA, 22 nt, Artificial Sequence
  RPE65 RNA guide
cgaacuaacauacagaacugca

SEQ ID NO: 21808 - RNA, 22 nt, Artificial Sequence
  RPE65 RNA guide
cgauccuuaauacuauaaauag

SEQ ID NO: 21809 - RNA, 22 nt, Artificial Sequence
  RPE65 RNA guide
cgauggagcaucaaugucugcu

SEQ ID NO: 21810 - RNA, 22 nt, Artificial Sequence
  RPE65 RNA guide
cggaauaaucaaccuuacuccu

SEQ ID NO: 21811 - RNA, 22 nt, Artificial Sequence
  RPE65 RNA guide
cgguaagcuagggcuugaaaaa

SEQ ID NO: 21812 - RNA, 22 nt, Artificial Sequence
  RPE65 RNA guide
cgucagggaaggcaaaaaccug

SEQ ID NO: 21813 - RNA, 22 nt, Artificial Sequence
  RPE65 RNA guide
cgugacaccaaauggugcuuug

SEQ ID NO: 21814 - RNA, 22 nt, Artificial Sequence
  RPE65 RNA guide
cguuaggaaaggaguaagguug

SEQ ID NO: 21815 - RNA, 22 nt, Artificial Sequence
  RPE65 RNA guide
cuaacauacagaacugcaguaa

SEQ ID NO: 21816 - RNA, 22 nt, Artificial Sequence
  RPE65 RNA guide
cuaacgaacuaacauacagaac

SEQ ID NO: 21817 - RNA, 22 nt, Artificial Sequence
  RPE65 RNA guide
cuaagaagggaagcuaaguauu

SEQ ID NO: 21818 - RNA, 22 nt, Artificial Sequence
  RPE65 RNA guide
cuaaguauuauagcagauacaa

SEQ ID NO: 21819 - RNA, 22 nt, Artificial Sequence
  RPE65 RNA guide
cuacugguaaucaacaagaccu

SEQ ID NO: 21820 - RNA, 22 nt, Artificial Sequence
  RPE65 RNA guide
cuagagcagacauugaugcucc

SEQ ID NO: 21821 - RNA, 22 nt, Artificial Sequence
  RPE65 RNA guide
cuagaugagggagagaaggaag

SEQ ID NO: 21822 - RNA, 22 nt, Artificial Sequence
  RPE65 RNA guide
cuagcuuaccgaaagaacaaau

SEQ ID NO: 21823 - RNA, 22 nt, Artificial Sequence
  RPE65 RNA guide
cuagggcuugaaaaaagaccca

SEQ ID NO: 21824 - RNA, 22 nt, Artificial Sequence
  RPE65 RNA guide
cuauaaauagagcaguacugaa

SEQ ID NO: 21825 - RNA, 22 nt, Artificial Sequence
  RPE65 RNA guide
cuauaauacuuagcuucccuuc

SEQ ID NO: 21826 - RNA, 22 nt, Artificial Sequence
  RPE65 RNA guide
cuauucacagaccugccuucuc

SEQ ID NO: 21827 - RNA, 22 nt, Artificial Sequence
  RPE65 RNA guide
cucagauacagcaacucaaauu

SEQ ID NO: 21828 - RNA, 22 nt, Artificial Sequence
  RPE65 RNA guide
cucaucuagagcagacauugau

SEQ ID NO: 21829 - RNA, 22 nt, Artificial Sequence
  RPE65 RNA guide
cucauucucuuguaucugcuau

SEQ ID NO: 21830 - RNA, 22 nt, Artificial Sequence
  RPE65 RNA guide
cuccaucgugacaccaaauggu

SEQ ID NO: 21831 - RNA, 22 nt, Artificial Sequence
  RPE65 RNA guide
cucccucaucuagagcagacau

SEQ ID NO: 21832 - RNA, 22 nt, Artificial Sequence
  RPE65 RNA guide
cuccuuuccuaacgaacuaaca

SEQ ID NO: 21833 - RNA, 22 nt, Artificial Sequence
  RPE65 RNA guide
cucuagaugagggagagaagga

SEQ ID NO: 21834 - RNA, 22 nt, Artificial Sequence
  RPE65 RNA guide
cucucccucaucuagagcagac

SEQ ID NO: 21835 - RNA, 22 nt, Artificial Sequence
  RPE65 RNA guide
cucugggucuuuuuucaagccc

SEQ ID NO: 21836 - RNA, 22 nt, Artificial Sequence
  RPE65 RNA guide
cucuucuuacugcaguucugua

SEQ ID NO: 21837 - RNA, 22 nt, Artificial Sequence
  RPE65 RNA guide
cucuuguaucugcuauaauacu

SEQ ID NO: 21838 - RNA, 22 nt, Artificial Sequence
  RPE65 RNA guide
cugaauacucuucuuacugcag

SEQ ID NO: 21839 - RNA, 22 nt, Artificial Sequence
  RPE65 RNA guide
cugaguugcugguguggcucug

SEQ ID NO: 21840 - RNA, 22 nt, Artificial Sequence
  RPE65 RNA guide
cugauuuguaauuugaguugcu

SEQ ID NO: 21841 - RNA, 22 nt, Artificial Sequence
  RPE65 RNA guide
cugcaguaagaagaguauucag

SEQ ID NO: 21842 - RNA, 22 nt, Artificial Sequence
  RPE65 RNA guide
cugcaguucuguauguuaguuc

SEQ ID NO: 21843 - RNA, 22 nt, Artificial Sequence
  RPE65 RNA guide
cugccuucucauucucuuguau

SEQ ID NO: 21844 - RNA, 22 nt, Artificial Sequence
  RPE65 RNA guide
cugcuauaauacuuagcuuccc

SEQ ID NO: 21845 - RNA, 22 nt, Artificial Sequence
  RPE65 RNA guide
cugcucuagaugagggagagaa

SEQ ID NO: 21846 - RNA, 22 nt, Artificial Sequence
  RPE65 RNA guide
cugcucuauuuauaguauuaag

SEQ ID NO: 21847 - RNA, 22 nt, Artificial Sequence
  RPE65 RNA guide
cugcugauuuguaauuugaguu

SEQ ID NO: 21848 - RNA, 22 nt, Artificial Sequence
  RPE65 RNA guide
cuggaauucauguugccauuuu

SEQ ID NO: 21849 - RNA, 22 nt, Artificial Sequence
  RPE65 RNA guide
cugggucuuuuuucaagcccua

SEQ ID NO: 21850 - RNA, 22 nt, Artificial Sequence
  RPE65 RNA guide
cugguaaucaacaagaccugau

SEQ ID NO: 21851 - RNA, 22 nt, Artificial Sequence
  RPE65 RNA guide
cugguguggcucugggucuuuu

SEQ ID NO: 21852 - RNA, 22 nt, Artificial Sequence
  RPE65 RNA guide
cuguaucugaguugcuggugug

SEQ ID NO: 21853 - RNA, 22 nt, Artificial Sequence
  RPE65 RNA guide
cuguauguuaguucguuaggaa

SEQ ID NO: 21854 - RNA, 22 nt, Artificial Sequence
  RPE65 RNA guide
cuuaccgaaagaacaaaugaaa

SEQ ID NO: 21855 - RNA, 22 nt, Artificial Sequence
  RPE65 RNA guide
cuuacuccuuuccuaacgaacu

SEQ ID NO: 21856 - RNA, 22 nt, Artificial Sequence
  RPE65 RNA guide
cuuacugcaguucuguauguua

SEQ ID NO: 21857 - RNA, 22 nt, Artificial Sequence
  RPE65 RNA guide
cuuagcuucccuucuuagaauu

SEQ ID NO: 21858 - RNA, 22 nt, Artificial Sequence
  RPE65 RNA guide
cuucaguacugcucuauuuaua

SEQ ID NO: 21859 - RNA, 22 nt, Artificial Sequence
  RPE65 RNA guide
cuucccugacgaagacauauuu

SEQ ID NO: 21860 - RNA, 22 nt, Artificial Sequence
  RPE65 RNA guide
cuucccuucuuagaauugcuau

SEQ ID NO: 21861 - RNA, 22 nt, Artificial Sequence
  RPE65 RNA guide
cuuccuucucucccucaucuag

SEQ ID NO: 21862 - RNA, 22 nt, Artificial Sequence
  RPE65 RNA guide
cuucgucagggaaggcaaaaac

SEQ ID NO: 21863 - RNA, 22 nt, Artificial Sequence
  RPE65 RNA guide
cuucucauucucuuguaucugc

SEQ ID NO: 21864 - RNA, 22 nt, Artificial Sequence
  RPE65 RNA guide
cuucucucccucaucuagagca

SEQ ID NO: 21865 - RNA, 22 nt, Artificial Sequence
  RPE65 RNA guide
cuucuuacugcaguucuguaug

SEQ ID NO: 21866 - RNA, 22 nt, Artificial Sequence
  RPE65 RNA guide
cuugaaaaaagacccagagcca

SEQ ID NO: 21867 - RNA, 22 nt, Artificial Sequence
  RPE65 RNA guide
cuuguaucugcuauaauacuua

SEQ ID NO: 21868 - RNA, 22 nt, Artificial Sequence
  RPE65 RNA guide
cuuuccuaacgaacuaacauac

SEQ ID NO: 21869 - RNA, 22 nt, Artificial Sequence
  RPE65 RNA guide
cuuucgguaagcuagggcuuga

SEQ ID NO: 21870 - RNA, 22 nt, Artificial Sequence
  RPE65 RNA guide
cuuuugaucaggucuuguugau

SEQ ID NO: 21871 - RNA, 22 nt, Artificial Sequence
  RPE65 RNA guide
cuuuuuucaagcccuagcuuac

SEQ ID NO: 21872 - RNA, 22 nt, Artificial Sequence
  RPE65 RNA guide
gaaaaaagacccagagccacac

SEQ ID NO: 21873 - RNA, 22 nt, Artificial Sequence
  RPE65 RNA guide
gaaaaaauggcaacaugaauuc

SEQ ID NO: 21874 - RNA, 22 nt, Artificial Sequence
  RPE65 RNA guide
gaaaacuauucacagaccugcc

SEQ ID NO: 21875 - RNA, 22 nt, Artificial Sequence
  RPE65 RNA guide
gaaagcaauuguugugucugaa

SEQ ID NO: 21876 - RNA, 22 nt, Artificial Sequence
  RPE65 RNA guide
gaaaggaguaagguugauuauu

SEQ ID NO: 21877 - RNA, 22 nt, Artificial Sequence
  RPE65 RNA guide
gaaauaugucuucgucagggaa

SEQ ID NO: 21878 - RNA, 22 nt, Artificial Sequence
  RPE65 RNA guide
gaacaaaugaaaacuauucaca

SEQ ID NO: 21879 - RNA, 22 nt, Artificial Sequence
  RPE65 RNA guide
gaacuaacauacagaacugcag

SEQ ID NO: 21880 - RNA, 22 nt, Artificial Sequence
  RPE65 RNA guide
gaacugcaguaagaagaguauu

SEQ ID NO: 21881 - RNA, 22 nt, Artificial Sequence
  RPE65 RNA guide
gaagaaaaaauggcaacaugaa

SEQ ID NO: 21882 - RNA, 22 nt, Artificial Sequence
  RPE65 RNA guide
gaagaguauucagacacaacaa

SEQ ID NO: 21883 - RNA, 22 nt, Artificial Sequence
  RPE65 RNA guide
gaagcuaaguauuauagcagau

SEQ ID NO: 21884 - RNA, 22 nt, Artificial Sequence
  RPE65 RNA guide
gaaggaagaaaaaauggcaaca

SEQ ID NO: 21885 - RNA, 22 nt, Artificial Sequence
  RPE65 RNA guide
gaaggcaaaaaccuggaauuca

SEQ ID NO: 21886 - RNA, 22 nt, Artificial Sequence
  RPE65 RNA guide
gaaggcaggucugugaauaguu

SEQ ID NO: 21887 - RNA, 22 nt, Artificial Sequence
  RPE65 RNA guide
gaagggaagcuaaguauuauag

SEQ ID NO: 21888 - RNA, 22 nt, Artificial Sequence
  RPE65 RNA guide
gaauaaucaaccuuacuccuuu

SEQ ID NO: 21889 - RNA, 22 nt, Artificial Sequence
  RPE65 RNA guide
gaauacucuucuuacugcaguu

SEQ ID NO: 21890 - RNA, 22 nt, Artificial Sequence
  RPE65 RNA guide
gaauaguuuucauuuguucuuu

SEQ ID NO: 21891 - RNA, 22 nt, Artificial Sequence
  RPE65 RNA guide
gaaugagaaggcaggucuguga

SEQ ID NO: 21892 - RNA, 22 nt, Artificial Sequence
  RPE65 RNA guide
gaauucauguugccauuuuuuc

SEQ ID NO: 21893 - RNA, 22 nt, Artificial Sequence
  RPE65 RNA guide
gaauuccagguuuuugccuucc

SEQ ID NO: 21894 - RNA, 22 nt, Artificial Sequence
  RPE65 RNA guide
gaauuuucaucuuuugaucagg

SEQ ID NO: 21895 - RNA, 22 nt, Artificial Sequence
  RPE65 RNA guide
gacaccaaauggugcuuugaca

SEQ ID NO: 21896 - RNA, 22 nt, Artificial Sequence
  RPE65 RNA guide
gacauugaugcuccaucgugac

SEQ ID NO: 21897 - RNA, 22 nt, Artificial Sequence
  RPE65 RNA guide
gacccagagccacaccagcaac

SEQ ID NO: 21898 - RNA, 22 nt, Artificial Sequence
  RPE65 RNA guide
gaccugaucaaaagaugaaaau

SEQ ID NO: 21899 - RNA, 22 nt, Artificial Sequence
  RPE65 RNA guide
gaccugccuucucauucucuug

SEQ ID NO: 21900 - RNA, 22 nt, Artificial Sequence
  RPE65 RNA guide
gagaaggaagaaaaaauggcaa

SEQ ID NO: 21901 - RNA, 22 nt, Artificial Sequence
  RPE65 RNA guide
gagaaggcaggucugugaauag

SEQ ID NO: 21902 - RNA, 22 nt, Artificial Sequence
  RPE65 RNA guide
gagaaugagaaggcaggucugu

SEQ ID NO: 21903 - RNA, 22 nt, Artificial Sequence
  RPE65 RNA guide
gagagaaggaagaaaaaauggc

SEQ ID NO: 21904 - RNA, 22 nt, Artificial Sequence
  RPE65 RNA guide
gagcagacauugaugcuccauc

SEQ ID NO: 21905 - RNA, 22 nt, Artificial Sequence
  RPE65 RNA guide
gagcaguacugaagaauuaaaa

SEQ ID NO: 21906 - RNA, 22 nt, Artificial Sequence
  RPE65 RNA guide
gagcaucaaugucugcucuaga

SEQ ID NO: 21907 - RNA, 22 nt, Artificial Sequence
  RPE65 RNA guide
gagccacaccagcaacucagau

SEQ ID NO: 21908 - RNA, 22 nt, Artificial Sequence
  RPE65 RNA guide
gagggagagaaggaagaaaaaa

SEQ ID NO: 21909 - RNA, 22 nt, Artificial Sequence
  RPE65 RNA guide
gaguaagguugauuauuccgua

SEQ ID NO: 21910 - RNA, 22 nt, Artificial Sequence
  RPE65 RNA guide
gaguauuacggaauaaucaacc

SEQ ID NO: 21911 - RNA, 22 nt, Artificial Sequence
  RPE65 RNA guide
gaguauucagacacaacaauug

SEQ ID NO: 21912 - RNA, 22 nt, Artificial Sequence
  RPE65 RNA guide
gaguugcugguguggcucuggg

SEQ ID NO: 21913 - RNA, 22 nt, Artificial Sequence
  RPE65 RNA guide
gaguugcuguaucugaguugcu

SEQ ID NO: 21914 - RNA, 22 nt, Artificial Sequence
  RPE65 RNA guide
gauacaagagaaugagaaggca

SEQ ID NO: 21915 - RNA, 22 nt, Artificial Sequence
  RPE65 RNA guide
gauacagcaacucaaauuacaa

SEQ ID NO: 21916 - RNA, 22 nt, Artificial Sequence
  RPE65 RNA guide
gaucaggucuuguugauuacca

SEQ ID NO: 21917 - RNA, 22 nt, Artificial Sequence
  RPE65 RNA guide
gauccuuaauacuauaaauaga

SEQ ID NO: 21918 - RNA, 22 nt, Artificial Sequence
  RPE65 RNA guide
gaugagggagagaaggaagaaa

SEQ ID NO: 21919 - RNA, 22 nt, Artificial Sequence
  RPE65 RNA guide
gaugcuccaucgugacaccaaa

SEQ ID NO: 21920 - RNA, 22 nt, Artificial Sequence
  RPE65 RNA guide
gauggagcaucaaugucugcuc

SEQ ID NO: 21921 - RNA, 22 nt, Artificial Sequence
  RPE65 RNA guide
gauuauuccguaauacucaaaa

SEQ ID NO: 21922 - RNA, 22 nt, Artificial Sequence
  RPE65 RNA guide
gauuuguaauuugaguugcugu

SEQ ID NO: 21923 - RNA, 22 nt, Artificial Sequence
  RPE65 RNA guide
gcaaaaaccuggaauucauguu

SEQ ID NO: 21924 - RNA, 22 nt, Artificial Sequence
  RPE65 RNA guide
gcaacaugaauuccagguuuuu

SEQ ID NO: 21925 - RNA, 22 nt, Artificial Sequence
  RPE65 RNA guide
gcaacucagauacagcaacuca

SEQ ID NO: 21926 - RNA, 22 nt, Artificial Sequence
  RPE65 RNA guide
gcaauucuaagaagggaagcua

SEQ ID NO: 21927 - RNA, 22 nt, Artificial Sequence
  RPE65 RNA guide
gcaauuguugugucugaauacu

SEQ ID NO: 21928 - RNA, 22 nt, Artificial Sequence
  RPE65 RNA guide
gcaccauuuggugucacgaugg

SEQ ID NO: 21929 - RNA, 22 nt, Artificial Sequence
  RPE65 RNA guide
gcagacauugaugcuccaucgu

SEQ ID NO: 21930 - RNA, 22 nt, Artificial Sequence
  RPE65 RNA guide
gcagauacaagagaaugagaag

SEQ ID NO: 21931 - RNA, 22 nt, Artificial Sequence
  RPE65 RNA guide
gcaggucugugaauaguuuuca

SEQ ID NO: 21932 - RNA, 22 nt, Artificial Sequence
  RPE65 RNA guide
gcaguaagaagaguauucagac

SEQ ID NO: 21933 - RNA, 22 nt, Artificial Sequence
  RPE65 RNA guide
gcaguucuguauguuaguucgu

SEQ ID NO: 21934 - RNA, 22 nt, Artificial Sequence
  RPE65 RNA guide
gcaucaaugucugcucuagaug

SEQ ID NO: 21935 - RNA, 22 nt, Artificial Sequence
  RPE65 RNA guide
gccacaccagcaacucagauac

SEQ ID NO: 21936 - RNA, 22 nt, Artificial Sequence
  RPE65 RNA guide
gccauuuuuucuuccuucucuc

SEQ ID NO: 21937 - RNA, 22 nt, Artificial Sequence
  RPE65 RNA guide
gcccuagcuuaccgaaagaaca

SEQ ID NO: 21938 - RNA, 22 nt, Artificial Sequence
  RPE65 RNA guide
gccuucccugacgaagacauau

SEQ ID NO: 21939 - RNA, 22 nt, Artificial Sequence
  RPE65 RNA guide
gccuucucauucucuuguaucu

SEQ ID NO: 21940 - RNA, 22 nt, Artificial Sequence
  RPE65 RNA guide
gcuaaguauuauagcagauaca

SEQ ID NO: 21941 - RNA, 22 nt, Artificial Sequence
  RPE65 RNA guide
gcuagggcuugaaaaaagaccc

SEQ ID NO: 21942 - RNA, 22 nt, Artificial Sequence
  RPE65 RNA guide
gcuauaauacuuagcuucccuu

SEQ ID NO: 21943 - RNA, 22 nt, Artificial Sequence
  RPE65 RNA guide
gcuccaucgugacaccaaaugg

SEQ ID NO: 21944 - RNA, 22 nt, Artificial Sequence
  RPE65 RNA guide
gcucuagaugagggagagaagg

SEQ ID NO: 21945 - RNA, 22 nt, Artificial Sequence
  RPE65 RNA guide
gcucuauuuauaguauuaagga

SEQ ID NO: 21946 - RNA, 22 nt, Artificial Sequence
  RPE65 RNA guide
gcucugggucuuuuuucaagcc

SEQ ID NO: 21947 - RNA, 22 nt, Artificial Sequence
  RPE65 RNA guide
gcugauuuguaauuugaguugc

SEQ ID NO: 21948 - RNA, 22 nt, Artificial Sequence
  RPE65 RNA guide
gcugguguggcucugggucuuu

SEQ ID NO: 21949 - RNA, 22 nt, Artificial Sequence
  RPE65 RNA guide
gcuguaucugaguugcuggugu

SEQ ID NO: 21950 - RNA, 22 nt, Artificial Sequence
  RPE65 RNA guide
gcuuaccgaaagaacaaaugaa

SEQ ID NO: 21951 - RNA, 22 nt, Artificial Sequence
  RPE65 RNA guide
gcuucccuucuuagaauugcua

SEQ ID NO: 21952 - RNA, 22 nt, Artificial Sequence
  RPE65 RNA guide
gcuugaaaaaagacccagagcc

SEQ ID NO: 21953 - RNA, 22 nt, Artificial Sequence
  RPE65 RNA guide
ggaaaggaguaagguugauuau

SEQ ID NO: 21954 - RNA, 22 nt, Artificial Sequence
  RPE65 RNA guide
ggaagaaaaaauggcaacauga

SEQ ID NO: 21955 - RNA, 22 nt, Artificial Sequence
  RPE65 RNA guide
ggaagcuaaguauuauagcaga

SEQ ID NO: 21956 - RNA, 22 nt, Artificial Sequence
  RPE65 RNA guide
ggaaggcaaaaaccuggaauuc

SEQ ID NO: 21957 - RNA, 22 nt, Artificial Sequence
  RPE65 RNA guide
ggaauaaucaaccuuacuccuu

SEQ ID NO: 21958 - RNA, 22 nt, Artificial Sequence
  RPE65 RNA guide
ggaauucauguugccauuuuuu

SEQ ID NO: 21959 - RNA, 22 nt, Artificial Sequence
  RPE65 RNA guide
ggagagaaggaagaaaaaaugg

SEQ ID NO: 21960 - RNA, 22 nt, Artificial Sequence
  RPE65 RNA guide
ggagcaucaaugucugcucuag

SEQ ID NO: 21961 - RNA, 22 nt, Artificial Sequence
  RPE65 RNA guide
ggaguaagguugauuauuccgu

SEQ ID NO: 21962 - RNA, 22 nt, Artificial Sequence
  RPE65 RNA guide
ggcaaaaaccuggaauucaugu

SEQ ID NO: 21963 - RNA, 22 nt, Artificial Sequence
  RPE65 RNA guide
ggcaacaugaauuccagguuuu

SEQ ID NO: 21964 - RNA, 22 nt, Artificial Sequence
  RPE65 RNA guide
ggcaggucugugaauaguuuuc

SEQ ID NO: 21965 - RNA, 22 nt, Artificial Sequence
  RPE65 RNA guide
ggcucugggucuuuuuucaagc

SEQ ID NO: 21966 - RNA, 22 nt, Artificial Sequence
  RPE65 RNA guide
ggcuugaaaaaagacccagagc

SEQ ID NO: 21967 - RNA, 22 nt, Artificial Sequence
  RPE65 RNA guide
gggaagcuaaguauuauagcag

SEQ ID NO: 21968 - RNA, 22 nt, Artificial Sequence
  RPE65 RNA guide
gggaaggcaaaaaccuggaauu

SEQ ID NO: 21969 - RNA, 22 nt, Artificial Sequence
  RPE65 RNA guide
gggagagaaggaagaaaaaaug

SEQ ID NO: 21970 - RNA, 22 nt, Artificial Sequence
  RPE65 RNA guide
gggcuugaaaaaagacccagag

SEQ ID NO: 21971 - RNA, 22 nt, Artificial Sequence
  RPE65 RNA guide
gggucuuuuuucaagcccuagc

SEQ ID NO: 21972 - RNA, 22 nt, Artificial Sequence
  RPE65 RNA guide
gguaagcuagggcuugaaaaaa

SEQ ID NO: 21973 - RNA, 22 nt, Artificial Sequence
  RPE65 RNA guide
gguaaucaacaagaccugauca

SEQ ID NO: 21974 - RNA, 22 nt, Artificial Sequence
  RPE65 RNA guide
ggucugugaauaguuuucauuu

SEQ ID NO: 21975 - RNA, 22 nt, Artificial Sequence
  RPE65 RNA guide
ggucuuguugauuaccaguaga

SEQ ID NO: 21976 - RNA, 22 nt, Artificial Sequence
  RPE65 RNA guide
ggucuuuuuucaagcccuagcu

SEQ ID NO: 21977 - RNA, 22 nt, Artificial Sequence
  RPE65 RNA guide
ggugucacgauggagcaucaau

SEQ ID NO: 21978 - RNA, 22 nt, Artificial Sequence
  RPE65 RNA guide
gguguggcucugggucuuuuuu

SEQ ID NO: 21979 - RNA, 22 nt, Artificial Sequence
  RPE65 RNA guide
gguugauuauuccguaauacuc

SEQ ID NO: 21980 - RNA, 22 nt, Artificial Sequence
  RPE65 RNA guide
gguuuuugccuucccugacgaa

SEQ ID NO: 21981 - RNA, 22 nt, Artificial Sequence
  RPE65 RNA guide
guaagaagaguauucagacaca

SEQ ID NO: 21982 - RNA, 22 nt, Artificial Sequence
  RPE65 RNA guide
guaagcuagggcuugaaaaaag

SEQ ID NO: 21983 - RNA, 22 nt, Artificial Sequence
  RPE65 RNA guide
guaagguugauuauuccguaau

SEQ ID NO: 21984 - RNA, 22 nt, Artificial Sequence
  RPE65 RNA guide
guaaucaacaagaccugaucaa

SEQ ID NO: 21985 - RNA, 22 nt, Artificial Sequence
  RPE65 RNA guide
guaaugaaagcaauuguugugu

SEQ ID NO: 21986 - RNA, 22 nt, Artificial Sequence
  RPE65 RNA guide
guaauuugaguugcuguaucug

SEQ ID NO: 21987 - RNA, 22 nt, Artificial Sequence
  RPE65 RNA guide
guacugcucuauuuauaguauu

SEQ ID NO: 21988 - RNA, 22 nt, Artificial Sequence
  RPE65 RNA guide
guaucugaguugcugguguggc

SEQ ID NO: 21989 - RNA, 22 nt, Artificial Sequence
  RPE65 RNA guide
guaucugcuauaauacuuagcu

SEQ ID NO: 21990 - RNA, 22 nt, Artificial Sequence
  RPE65 RNA guide
guauguuaguucguuaggaaag

SEQ ID NO: 21991 - RNA, 22 nt, Artificial Sequence
  RPE65 RNA guide
guauuacggaauaaucaaccuu

SEQ ID NO: 21992 - RNA, 22 nt, Artificial Sequence
  RPE65 RNA guide
guauuauagcagauacaagaga

SEQ ID NO: 21993 - RNA, 22 nt, Artificial Sequence
  RPE65 RNA guide
guauucagacacaacaauugcu

SEQ ID NO: 21994 - RNA, 22 nt, Artificial Sequence
  RPE65 RNA guide
gucaaagcaccauuugguguca

SEQ ID NO: 21995 - RNA, 22 nt, Artificial Sequence
  RPE65 RNA guide
gucacgauggagcaucaauguc

SEQ ID NO: 21996 - RNA, 22 nt, Artificial Sequence
  RPE65 RNA guide
gucagggaaggcaaaaaccugg

SEQ ID NO: 21997 - RNA, 22 nt, Artificial Sequence
  RPE65 RNA guide
gucugaauacucuucuuacugc

SEQ ID NO: 21998 - RNA, 22 nt, Artificial Sequence
  RPE65 RNA guide
gucugcucuagaugagggagag

SEQ ID NO: 21999 - RNA, 22 nt, Artificial Sequence
  RPE65 RNA guide
gucugugaauaguuuucauuug

SEQ ID NO: 22000 - RNA, 22 nt, Artificial Sequence
  RPE65 RNA guide
gucuucgucagggaaggcaaaa

SEQ ID NO: 22001 - RNA, 22 nt, Artificial Sequence
  RPE65 RNA guide
gucuuguugauuaccaguagaa

SEQ ID NO: 22002 - RNA, 22 nt, Artificial Sequence
  RPE65 RNA guide
gucuuuuuucaagcccuagcuu

SEQ ID NO: 22003 - RNA, 22 nt, Artificial Sequence
  RPE65 RNA guide
gugaauaguuuucauuuguucu

SEQ ID NO: 22004 - RNA, 22 nt, Artificial Sequence
  RPE65 RNA guide
gugacaccaaauggugcuuuga

SEQ ID NO: 22005 - RNA, 22 nt, Artificial Sequence
  RPE65 RNA guide
guggcucugggucuuuuuucaa

SEQ ID NO: 22006 - RNA, 22 nt, Artificial Sequence
  RPE65 RNA guide
gugucacgauggagcaucaaug

SEQ ID NO: 22007 - RNA, 22 nt, Artificial Sequence
  RPE65 RNA guide
gugucugaauacucuucuuacu

SEQ ID NO: 22008 - RNA, 22 nt, Artificial Sequence
  RPE65 RNA guide
guguggcucugggucuuuuuuc

SEQ ID NO: 22009 - RNA, 22 nt, Artificial Sequence
  RPE65 RNA guide
guuaggaaaggaguaagguuga

SEQ ID NO: 22010 - RNA, 22 nt, Artificial Sequence
  RPE65 RNA guide
guuaguucguuaggaaaggagu

SEQ ID NO: 22011 - RNA, 22 nt, Artificial Sequence
  RPE65 RNA guide
guucguuaggaaaggaguaagg

SEQ ID NO: 22012 - RNA, 22 nt, Artificial Sequence
  RPE65 RNA guide
guucuguauguuaguucguuag

SEQ ID NO: 22013 - RNA, 22 nt, Artificial Sequence
  RPE65 RNA guide
guucuuucgguaagcuagggcu

SEQ ID NO: 22014 - RNA, 22 nt, Artificial Sequence
  RPE65 RNA guide
guugccauuuuuucuuccuucu

SEQ ID NO: 22015 - RNA, 22 nt, Artificial Sequence
  RPE65 RNA guide
guugcugguguggcucuggguc

SEQ ID NO: 22016 - RNA, 22 nt, Artificial Sequence
  RPE65 RNA guide
guugcuguaucugaguugcugg

SEQ ID NO: 22017 - RNA, 22 nt, Artificial Sequence
  RPE65 RNA guide
guugugucugaauacucuucuu

SEQ ID NO: 22018 - RNA, 22 nt, Artificial Sequence
  RPE65 RNA guide
guuuuaauucuucaguacugcu

SEQ ID NO: 22019 - RNA, 22 nt, Artificial Sequence
  RPE65 RNA guide
guuuucauuuguucuuucggua

SEQ ID NO: 22020 - RNA, 22 nt, Artificial Sequence
  RPE65 RNA guide
guuuuugccuucccugacgaag

SEQ ID NO: 22021 - RNA, 22 nt, Artificial Sequence
  RPE65 RNA guide
uaacauacagaacugcaguaag

SEQ ID NO: 22022 - RNA, 22 nt, Artificial Sequence
  RPE65 RNA guide
uaacgaacuaacauacagaacu

SEQ ID NO: 22023 - RNA, 22 nt, Artificial Sequence
  RPE65 RNA guide
uaagaagaguauucagacacaa

SEQ ID NO: 22024 - RNA, 22 nt, Artificial Sequence
  RPE65 RNA guide
uaagaagggaagcuaaguauua

SEQ ID NO: 22025 - RNA, 22 nt, Artificial Sequence
  RPE65 RNA guide
uaagcuagggcuugaaaaaaga

SEQ ID NO: 22026 - RNA, 22 nt, Artificial Sequence
  RPE65 RNA guide
uaaggaucguuuuugaguauua

SEQ ID NO: 22027 - RNA, 22 nt, Artificial Sequence
  RPE65 RNA guide
uaagguugauuauuccguaaua

SEQ ID NO: 22028 - RNA, 22 nt, Artificial Sequence
  RPE65 RNA guide
uaauacuuagcuucccuucuua

SEQ ID NO: 22029 - RNA, 22 nt, Artificial Sequence
  RPE65 RNA guide
uaaucaacaagaccugaucaaa

SEQ ID NO: 22030 - RNA, 22 nt, Artificial Sequence
  RPE65 RNA guide
uaaucaaccuuacuccuuuccu

SEQ ID NO: 22031 - RNA, 22 nt, Artificial Sequence
  RPE65 RNA guide
uaaugaaagcaauuguuguguc

SEQ ID NO: 22032 - RNA, 22 nt, Artificial Sequence
  RPE65 RNA guide
uaauuugaguugcuguaucuga

SEQ ID NO: 22033 - RNA, 22 nt, Artificial Sequence
  RPE65 RNA guide
uacaagagaaugagaaggcagg

SEQ ID NO: 22034 - RNA, 22 nt, Artificial Sequence
  RPE65 RNA guide
uacagaacugcaguaagaagag

SEQ ID NO: 22035 - RNA, 22 nt, Artificial Sequence
  RPE65 RNA guide
uacagcaacucaaauuacaaau

SEQ ID NO: 22036 - RNA, 22 nt, Artificial Sequence
  RPE65 RNA guide
uacggaauaaucaaccuuacuc

SEQ ID NO: 22037 - RNA, 22 nt, Artificial Sequence
  RPE65 RNA guide
uacuauaaauagagcaguacug

SEQ ID NO: 22038 - RNA, 22 nt, Artificial Sequence
  RPE65 RNA guide
uacuccuuuccuaacgaacuaa

SEQ ID NO: 22039 - RNA, 22 nt, Artificial Sequence
  RPE65 RNA guide
uacucuucuuacugcaguucug

SEQ ID NO: 22040 - RNA, 22 nt, Artificial Sequence
  RPE65 RNA guide
uacugcaguucuguauguuagu

SEQ ID NO: 22041 - RNA, 22 nt, Artificial Sequence
  RPE65 RNA guide
uacugguaaucaacaagaccug

SEQ ID NO: 22042 - RNA, 22 nt, Artificial Sequence
  RPE65 RNA guide
uacuuagcuucccuucuuagaa

SEQ ID NO: 22043 - RNA, 22 nt, Artificial Sequence
  RPE65 RNA guide
uagaaauaugucuucgucaggg

SEQ ID NO: 22044 - RNA, 22 nt, Artificial Sequence
  RPE65 RNA guide
uagagcagacauugaugcucca

SEQ ID NO: 22045 - RNA, 22 nt, Artificial Sequence
  RPE65 RNA guide
uagagcaguacugaagaauuaa

SEQ ID NO: 22046 - RNA, 22 nt, Artificial Sequence
  RPE65 RNA guide
uagaugagggagagaaggaaga

SEQ ID NO: 22047 - RNA, 22 nt, Artificial Sequence
  RPE65 RNA guide
uagcaauucuaagaagggaagc

SEQ ID NO: 22048 - RNA, 22 nt, Artificial Sequence
  RPE65 RNA guide
uagcagauacaagagaaugaga

SEQ ID NO: 22049 - RNA, 22 nt, Artificial Sequence
  RPE65 RNA guide
uagcuuaccgaaagaacaaaug

SEQ ID NO: 22050 - RNA, 22 nt, Artificial Sequence
  RPE65 RNA guide
uagcuucccuucuuagaauugc

SEQ ID NO: 22051 - RNA, 22 nt, Artificial Sequence
  RPE65 RNA guide
uaggaaaggaguaagguugauu

SEQ ID NO: 22052 - RNA, 22 nt, Artificial Sequence
  RPE65 RNA guide
uagggcuugaaaaaagacccag

SEQ ID NO: 22053 - RNA, 22 nt, Artificial Sequence
  RPE65 RNA guide
uaguucguuaggaaaggaguaa

SEQ ID NO: 22054 - RNA, 22 nt, Artificial Sequence
  RPE65 RNA guide
uaguuuuaauucuucaguacug

SEQ ID NO: 22055 - RNA, 22 nt, Artificial Sequence
  RPE65 RNA guide
uaguuuucauuuguucuuucgg

SEQ ID NO: 22056 - RNA, 22 nt, Artificial Sequence
  RPE65 RNA guide
uauaauacuuagcuucccuucu

SEQ ID NO: 22057 - RNA, 22 nt, Artificial Sequence
  RPE65 RNA guide
uauagcagauacaagagaauga

SEQ ID NO: 22058 - RNA, 22 nt, Artificial Sequence
  RPE65 RNA guide
uaucugaguugcugguguggcu

SEQ ID NO: 22059 - RNA, 22 nt, Artificial Sequence
  RPE65 RNA guide
uaucugcuauaauacuuagcuu

SEQ ID NO: 22060 - RNA, 22 nt, Artificial Sequence
  RPE65 RNA guide
uaugucuucgucagggaaggca

SEQ ID NO: 22061 - RNA, 22 nt, Artificial Sequence
  RPE65 RNA guide
uauguuaguucguuaggaaagg

SEQ ID NO: 22062 - RNA, 22 nt, Artificial Sequence
  RPE65 RNA guide
uauuacggaauaaucaaccuua

SEQ ID NO: 22063 - RNA, 22 nt, Artificial Sequence
  RPE65 RNA guide
uauuauagcagauacaagagaa

SEQ ID NO: 22064 - RNA, 22 nt, Artificial Sequence
  RPE65 RNA guide
uauucacagaccugccuucuca

SEQ ID NO: 22065 - RNA, 22 nt, Artificial Sequence
  RPE65 RNA guide
uauucagacacaacaauugcuu

SEQ ID NO: 22066 - RNA, 22 nt, Artificial Sequence
  RPE65 RNA guide
ucaaagcaccauuuggugucac

SEQ ID NO: 22067 - RNA, 22 nt, Artificial Sequence
  RPE65 RNA guide
ucaacaagaccugaucaaaaga

SEQ ID NO: 22068 - RNA, 22 nt, Artificial Sequence
  RPE65 RNA guide
ucaaccuuacuccuuuccuaac

SEQ ID NO: 22069 - RNA, 22 nt, Artificial Sequence
  RPE65 RNA guide
ucaagcccuagcuuaccgaaag

SEQ ID NO: 22070 - RNA, 22 nt, Artificial Sequence
  RPE65 RNA guide
ucaaugucugcucuagaugagg

SEQ ID NO: 22071 - RNA, 22 nt, Artificial Sequence
  RPE65 RNA guide
ucacagaccugccuucucauuc

SEQ ID NO: 22072 - RNA, 22 nt, Artificial Sequence
  RPE65 RNA guide
ucacgauggagcaucaaugucu

SEQ ID NO: 22073 - RNA, 22 nt, Artificial Sequence
  RPE65 RNA guide
ucagacacaacaauugcuuuca

SEQ ID NO: 22074 - RNA, 22 nt, Artificial Sequence
  RPE65 RNA guide
ucagauacagcaacucaaauua

SEQ ID NO: 22075 - RNA, 22 nt, Artificial Sequence
  RPE65 RNA guide
ucagggaaggcaaaaaccugga

SEQ ID NO: 22076 - RNA, 22 nt, Artificial Sequence
  RPE65 RNA guide
ucaggucuuguugauuaccagu

SEQ ID NO: 22077 - RNA, 22 nt, Artificial Sequence
  RPE65 RNA guide
ucaucuagagcagacauugaug

SEQ ID NO: 22078 - RNA, 22 nt, Artificial Sequence
  RPE65 RNA guide
ucaucuuuugaucaggucuugu

SEQ ID NO: 22079 - RNA, 22 nt, Artificial Sequence
  RPE65 RNA guide
ucauguugccauuuuuucuucc

SEQ ID NO: 22080 - RNA, 22 nt, Artificial Sequence
  RPE65 RNA guide
ucauucucuuguaucugcuaua

SEQ ID NO: 22081 - RNA, 22 nt, Artificial Sequence
  RPE65 RNA guide
ucauuuguucuuucgguaagcu

SEQ ID NO: 22082 - RNA, 22 nt, Artificial Sequence
  RPE65 RNA guide
uccagguuuuugccuucccuga

SEQ ID NO: 22083 - RNA, 22 nt, Artificial Sequence
  RPE65 RNA guide
uccaucgugacaccaaauggug

SEQ ID NO: 22084 - RNA, 22 nt, Artificial Sequence
  RPE65 RNA guide
ucccucaucuagagcagacauu

SEQ ID NO: 22085 - RNA, 22 nt, Artificial Sequence
  RPE65 RNA guide
ucccugacgaagacauauuucu

SEQ ID NO: 22086 - RNA, 22 nt, Artificial Sequence
  RPE65 RNA guide
uccuaacgaacuaacauacaga

SEQ ID NO: 22087 - RNA, 22 nt, Artificial Sequence
  RPE65 RNA guide
uccuucucucccucaucuagag

SEQ ID NO: 22088 - RNA, 22 nt, Artificial Sequence
  RPE65 RNA guide
uccuuuccuaacgaacuaacau

SEQ ID NO: 22089 - RNA, 22 nt, Artificial Sequence
  RPE65 RNA guide
ucgguaagcuagggcuugaaaa

SEQ ID NO: 22090 - RNA, 22 nt, Artificial Sequence
  RPE65 RNA guide
ucgucagggaaggcaaaaaccu

SEQ ID NO: 22091 - RNA, 22 nt, Artificial Sequence
  RPE65 RNA guide
ucgugacaccaaauggugcuuu

SEQ ID NO: 22092 - RNA, 22 nt, Artificial Sequence
  RPE65 RNA guide
ucguuaggaaaggaguaagguu

SEQ ID NO: 22093 - RNA, 22 nt, Artificial Sequence
  RPE65 RNA guide
ucuaagaagggaagcuaaguau

SEQ ID NO: 22094 - RNA, 22 nt, Artificial Sequence
  RPE65 RNA guide
ucuacugguaaucaacaagacc

SEQ ID NO: 22095 - RNA, 22 nt, Artificial Sequence
  RPE65 RNA guide
ucuagagcagacauugaugcuc

SEQ ID NO: 22096 - RNA, 22 nt, Artificial Sequence
  RPE65 RNA guide
ucuagaugagggagagaaggaa

SEQ ID NO: 22097 - RNA, 22 nt, Artificial Sequence
  RPE65 RNA guide
ucucauucucuuguaucugcua

SEQ ID NO: 22098 - RNA, 22 nt, Artificial Sequence
  RPE65 RNA guide
ucucccucaucuagagcagaca

SEQ ID NO: 22099 - RNA, 22 nt, Artificial Sequence
  RPE65 RNA guide
ucucucccucaucuagagcaga

SEQ ID NO: 22100 - RNA, 22 nt, Artificial Sequence
  RPE65 RNA guide
ucucuuguaucugcuauaauac

SEQ ID NO: 22101 - RNA, 22 nt, Artificial Sequence
  RPE65 RNA guide
ucugaauacucuucuuacugca

SEQ ID NO: 22102 - RNA, 22 nt, Artificial Sequence
  RPE65 RNA guide
ucugaguugcugguguggcucu

SEQ ID NO: 22103 - RNA, 22 nt, Artificial Sequence
  RPE65 RNA guide
ucugcuauaauacuuagcuucc

SEQ ID NO: 22104 - RNA, 22 nt, Artificial Sequence
  RPE65 RNA guide
ucugcucuagaugagggagaga

SEQ ID NO: 22105 - RNA, 22 nt, Artificial Sequence
  RPE65 RNA guide
ucugggucuuuuuucaagcccu

SEQ ID NO: 22106 - RNA, 22 nt, Artificial Sequence
  RPE65 RNA guide
ucuguauguuaguucguuagga

SEQ ID NO: 22107 - RNA, 22 nt, Artificial Sequence
  RPE65 RNA guide
ucuuacugcaguucuguauguu

SEQ ID NO: 22108 - RNA, 22 nt, Artificial Sequence
  RPE65 RNA guide
ucuucaguacugcucuauuuau

SEQ ID NO: 22109 - RNA, 22 nt, Artificial Sequence
  RPE65 RNA guide
ucuuccuucucucccucaucua

SEQ ID NO: 22110 - RNA, 22 nt, Artificial Sequence
  RPE65 RNA guide
ucuucgucagggaaggcaaaaa

SEQ ID NO: 22111 - RNA, 22 nt, Artificial Sequence
  RPE65 RNA guide
ucuucuuacugcaguucuguau

SEQ ID NO: 22112 - RNA, 22 nt, Artificial Sequence
  RPE65 RNA guide
ucuuguaucugcuauaauacuu

SEQ ID NO: 22113 - RNA, 22 nt, Artificial Sequence
  RPE65 RNA guide
ucuuucgguaagcuagggcuug

SEQ ID NO: 22114 - RNA, 22 nt, Artificial Sequence
  RPE65 RNA guide
ucuuuugaucaggucuuguuga

SEQ ID NO: 22115 - RNA, 22 nt, Artificial Sequence
  RPE65 RNA guide
ucuuuuuucaagcccuagcuua

SEQ ID NO: 22116 - RNA, 22 nt, Artificial Sequence
  RPE65 RNA guide
ugaaaaaagacccagagccaca

SEQ ID NO: 22117 - RNA, 22 nt, Artificial Sequence
  RPE65 RNA guide
ugaaaacuauucacagaccugc

SEQ ID NO: 22118 - RNA, 22 nt, Artificial Sequence
  RPE65 RNA guide
ugaaagcaauuguugugucuga

SEQ ID NO: 22119 - RNA, 22 nt, Artificial Sequence
  RPE65 RNA guide
ugaauacucuucuuacugcagu

SEQ ID NO: 22120 - RNA, 22 nt, Artificial Sequence
  RPE65 RNA guide
ugaauaguuuucauuuguucuu

SEQ ID NO: 22121 - RNA, 22 nt, Artificial Sequence
  RPE65 RNA guide
ugaauuccagguuuuugccuuc

SEQ ID NO: 22122 - RNA, 22 nt, Artificial Sequence
  RPE65 RNA guide
ugacaccaaauggugcuuugac

SEQ ID NO: 22123 - RNA, 22 nt, Artificial Sequence
  RPE65 RNA guide
ugagaaggcaggucugugaaua

SEQ ID NO: 22124 - RNA, 22 nt, Artificial Sequence
  RPE65 RNA guide
ugagggagagaaggaagaaaaa

SEQ ID NO: 22125 - RNA, 22 nt, Artificial Sequence
  RPE65 RNA guide
ugaguauuacggaauaaucaac

SEQ ID NO: 22126 - RNA, 22 nt, Artificial Sequence
  RPE65 RNA guide
ugaguugcugguguggcucugg

SEQ ID NO: 22127 - RNA, 22 nt, Artificial Sequence
  RPE65 RNA guide
ugaguugcuguaucugaguugc

SEQ ID NO: 22128 - RNA, 22 nt, Artificial Sequence
  RPE65 RNA guide
ugaucaggucuuguugauuacc

SEQ ID NO: 22129 - RNA, 22 nt, Artificial Sequence
  RPE65 RNA guide
ugaugcuccaucgugacaccaa

SEQ ID NO: 22130 - RNA, 22 nt, Artificial Sequence
  RPE65 RNA guide
ugauuauuccguaauacucaaa

SEQ ID NO: 22131 - RNA, 22 nt, Artificial Sequence
  RPE65 RNA guide
ugauuuguaauuugaguugcug

SEQ ID NO: 22132 - RNA, 22 nt, Artificial Sequence
  RPE65 RNA guide
ugcaguaagaagaguauucaga

SEQ ID NO: 22133 - RNA, 22 nt, Artificial Sequence
  RPE65 RNA guide
ugcaguucuguauguuaguucg

SEQ ID NO: 22134 - RNA, 22 nt, Artificial Sequence
  RPE65 RNA guide
ugccauuuuuucuuccuucucu

SEQ ID NO: 22135 - RNA, 22 nt, Artificial Sequence
  RPE65 RNA guide
ugccuucccugacgaagacaua

SEQ ID NO: 22136 - RNA, 22 nt, Artificial Sequence
  RPE65 RNA guide
ugccuucucauucucuuguauc

SEQ ID NO: 22137 - RNA, 22 nt, Artificial Sequence
  RPE65 RNA guide
ugcuauaauacuuagcuucccu

SEQ ID NO: 22138 - RNA, 22 nt, Artificial Sequence
  RPE65 RNA guide
ugcuccaucgugacaccaaaug

SEQ ID NO: 22139 - RNA, 22 nt, Artificial Sequence
  RPE65 RNA guide
ugcucuagaugagggagagaag

SEQ ID NO: 22140 - RNA, 22 nt, Artificial Sequence
  RPE65 RNA guide
ugcucuauuuauaguauuaagg

SEQ ID NO: 22141 - RNA, 22 nt, Artificial Sequence
  RPE65 RNA guide
ugcugauuuguaauuugaguug

SEQ ID NO: 22142 - RNA, 22 nt, Artificial Sequence
  RPE65 RNA guide
ugcugguguggcucugggucuu

SEQ ID NO: 22143 - RNA, 22 nt, Artificial Sequence
  RPE65 RNA guide
ugcuguaucugaguugcuggug

SEQ ID NO: 22144 - RNA, 22 nt, Artificial Sequence
  RPE65 RNA guide
uggaauucauguugccauuuuu

SEQ ID NO: 22145 - RNA, 22 nt, Artificial Sequence
  RPE65 RNA guide
uggagcaucaaugucugcucua

SEQ ID NO: 22146 - RNA, 22 nt, Artificial Sequence
  RPE65 RNA guide
uggcaacaugaauuccagguuu

SEQ ID NO: 22147 - RNA, 22 nt, Artificial Sequence
  RPE65 RNA guide
uggcucugggucuuuuuucaag

SEQ ID NO: 22148 - RNA, 22 nt, Artificial Sequence
  RPE65 RNA guide
ugggucuuuuuucaagcccuag

SEQ ID NO: 22149 - RNA, 22 nt, Artificial Sequence
  RPE65 RNA guide
ugguaaucaacaagaccugauc

SEQ ID NO: 22150 - RNA, 22 nt, Artificial Sequence
  RPE65 RNA guide
uggugucacgauggagcaucaa

SEQ ID NO: 22151 - RNA, 22 nt, Artificial Sequence
  RPE65 RNA guide
ugguguggcucugggucuuuuu

SEQ ID NO: 22152 - RNA, 22 nt, Artificial Sequence
  RPE65 RNA guide
uguaauuugaguugcuguaucu

SEQ ID NO: 22153 - RNA, 22 nt, Artificial Sequence
  RPE65 RNA guide
uguaucugaguugcuggugugg

SEQ ID NO: 22154 - RNA, 22 nt, Artificial Sequence
  RPE65 RNA guide
uguaucugcuauaauacuuagc

SEQ ID NO: 22155 - RNA, 22 nt, Artificial Sequence
  RPE65 RNA guide
uguauguuaguucguuaggaaa

SEQ ID NO: 22156 - RNA, 22 nt, Artificial Sequence
  RPE65 RNA guide
ugucaaagcaccauuugguguc

SEQ ID NO: 22157 - RNA, 22 nt, Artificial Sequence
  RPE65 RNA guide
ugucacgauggagcaucaaugu

SEQ ID NO: 22158 - RNA, 22 nt, Artificial Sequence
  RPE65 RNA guide
ugucugaauacucuucuuacug

SEQ ID NO: 22159 - RNA, 22 nt, Artificial Sequence
  RPE65 RNA guide
ugucugcucuagaugagggaga

SEQ ID NO: 22160 - RNA, 22 nt, Artificial Sequence
  RPE65 RNA guide
ugucuucgucagggaaggcaaa

SEQ ID NO: 22161 - RNA, 22 nt, Artificial Sequence
  RPE65 RNA guide
uguggcucugggucuuuuuuca

SEQ ID NO: 22162 - RNA, 22 nt, Artificial Sequence
  RPE65 RNA guide
ugugucugaauacucuucuuac

SEQ ID NO: 22163 - RNA, 22 nt, Artificial Sequence
  RPE65 RNA guide
uguuaguucguuaggaaaggag

SEQ ID NO: 22164 - RNA, 22 nt, Artificial Sequence
  RPE65 RNA guide
uguucuuucgguaagcuagggc

SEQ ID NO: 22165 - RNA, 22 nt, Artificial Sequence
  RPE65 RNA guide
uguugccauuuuuucuuccuuc

SEQ ID NO: 22166 - RNA, 22 nt, Artificial Sequence
  RPE65 RNA guide
uguugugucugaauacucuucu

SEQ ID NO: 22167 - RNA, 22 nt, Artificial Sequence
  RPE65 RNA guide
uuaaggaucguuuuugaguauu

SEQ ID NO: 22168 - RNA, 22 nt, Artificial Sequence
  RPE65 RNA guide
uuacggaauaaucaaccuuacu

SEQ ID NO: 22169 - RNA, 22 nt, Artificial Sequence
  RPE65 RNA guide
uuacuccuuuccuaacgaacua

SEQ ID NO: 22170 - RNA, 22 nt, Artificial Sequence
  RPE65 RNA guide
uuacugcaguucuguauguuag

SEQ ID NO: 22171 - RNA, 22 nt, Artificial Sequence
  RPE65 RNA guide
uuagaaauaugucuucgucagg

SEQ ID NO: 22172 - RNA, 22 nt, Artificial Sequence
  RPE65 RNA guide
uuagcuucccuucuuagaauug

SEQ ID NO: 22173 - RNA, 22 nt, Artificial Sequence
  RPE65 RNA guide
uuaggaaaggaguaagguugau

SEQ ID NO: 22174 - RNA, 22 nt, Artificial Sequence
  RPE65 RNA guide
uuaguucguuaggaaaggagua

SEQ ID NO: 22175 - RNA, 22 nt, Artificial Sequence
  RPE65 RNA guide
uuauagcagauacaagagaaug

SEQ ID NO: 22176 - RNA, 22 nt, Artificial Sequence
  RPE65 RNA guide
uuauuccguaauacucaaaaac

SEQ ID NO: 22177 - RNA, 22 nt, Artificial Sequence
  RPE65 RNA guide
uucaagcccuagcuuaccgaaa

SEQ ID NO: 22178 - RNA, 22 nt, Artificial Sequence
  RPE65 RNA guide
uucacagaccugccuucucauu

SEQ ID NO: 22179 - RNA, 22 nt, Artificial Sequence
  RPE65 RNA guide
uucagacacaacaauugcuuuc

SEQ ID NO: 22180 - RNA, 22 nt, Artificial Sequence
  RPE65 RNA guide
uucaucuuuugaucaggucuug

SEQ ID NO: 22181 - RNA, 22 nt, Artificial Sequence
  RPE65 RNA guide
uucauguugccauuuuuucuuc

SEQ ID NO: 22182 - RNA, 22 nt, Artificial Sequence
  RPE65 RNA guide
uucauuuguucuuucgguaagc

SEQ ID NO: 22183 - RNA, 22 nt, Artificial Sequence
  RPE65 RNA guide
uuccagguuuuugccuucccug

SEQ ID NO: 22184 - RNA, 22 nt, Artificial Sequence
  RPE65 RNA guide
uucccugacgaagacauauuuc

SEQ ID NO: 22185 - RNA, 22 nt, Artificial Sequence
  RPE65 RNA guide
uuccuaacgaacuaacauacag

SEQ ID NO: 22186 - RNA, 22 nt, Artificial Sequence
  RPE65 RNA guide
uuccuucucucccucaucuaga

SEQ ID NO: 22187 - RNA, 22 nt, Artificial Sequence
  RPE65 RNA guide
uucgguaagcuagggcuugaaa

SEQ ID NO: 22188 - RNA, 22 nt, Artificial Sequence
  RPE65 RNA guide
uucgucagggaaggcaaaaacc

SEQ ID NO: 22189 - RNA, 22 nt, Artificial Sequence
  RPE65 RNA guide
uucguuaggaaaggaguaaggu

SEQ ID NO: 22190 - RNA, 22 nt, Artificial Sequence
  RPE65 RNA guide
uucuaagaagggaagcuaagua

SEQ ID NO: 22191 - RNA, 22 nt, Artificial Sequence
  RPE65 RNA guide
uucuacugguaaucaacaagac

SEQ ID NO: 22192 - RNA, 22 nt, Artificial Sequence
  RPE65 RNA guide
uucucauucucuuguaucugcu

SEQ ID NO: 22193 - RNA, 22 nt, Artificial Sequence
  RPE65 RNA guide
uucucucccucaucuagagcag

SEQ ID NO: 22194 - RNA, 22 nt, Artificial Sequence
  RPE65 RNA guide
uucuguauguuaguucguuagg

SEQ ID NO: 22195 - RNA, 22 nt, Artificial Sequence
  RPE65 RNA guide
uucuuacugcaguucuguaugu

SEQ ID NO: 22196 - RNA, 22 nt, Artificial Sequence
  RPE65 RNA guide
uucuucaguacugcucuauuua

SEQ ID NO: 22197 - RNA, 22 nt, Artificial Sequence
  RPE65 RNA guide
uucuuccuucucucccucaucu

SEQ ID NO: 22198 - RNA, 22 nt, Artificial Sequence
  RPE65 RNA guide
uucuuucgguaagcuagggcuu

SEQ ID NO: 22199 - RNA, 22 nt, Artificial Sequence
  RPE65 RNA guide
uugaaaaaagacccagagccac

SEQ ID NO: 22200 - RNA, 22 nt, Artificial Sequence
  RPE65 RNA guide
uugaguauuacggaauaaucaa

SEQ ID NO: 22201 - RNA, 22 nt, Artificial Sequence
  RPE65 RNA guide
uugaguugcuguaucugaguug

SEQ ID NO: 22202 - RNA, 22 nt, Artificial Sequence
  RPE65 RNA guide
uugaucaggucuuguugauuac

SEQ ID NO: 22203 - RNA, 22 nt, Artificial Sequence
  RPE65 RNA guide
uugaugcuccaucgugacacca

SEQ ID NO: 22204 - RNA, 22 nt, Artificial Sequence
  RPE65 RNA guide
uugccauuuuuucuuccuucuc

SEQ ID NO: 22205 - RNA, 22 nt, Artificial Sequence
  RPE65 RNA guide
uugccuucccugacgaagacau

SEQ ID NO: 22206 - RNA, 22 nt, Artificial Sequence
  RPE65 RNA guide
uugcugguguggcucugggucu

SEQ ID NO: 22207 - RNA, 22 nt, Artificial Sequence
  RPE65 RNA guide
uugcuguaucugaguugcuggu

SEQ ID NO: 22208 - RNA, 22 nt, Artificial Sequence
  RPE65 RNA guide
uuggugucacgauggagcauca

SEQ ID NO: 22209 - RNA, 22 nt, Artificial Sequence
  RPE65 RNA guide
uuguaauuugaguugcuguauc

SEQ ID NO: 22210 - RNA, 22 nt, Artificial Sequence
  RPE65 RNA guide
uuguaucugcuauaauacuuag

SEQ ID NO: 22211 - RNA, 22 nt, Artificial Sequence
  RPE65 RNA guide
uugugucugaauacucuucuua

SEQ ID NO: 22212 - RNA, 22 nt, Artificial Sequence
  RPE65 RNA guide
uuguucuuucgguaagcuaggg

SEQ ID NO: 22213 - RNA, 22 nt, Artificial Sequence
  RPE65 RNA guide
uuguugugucugaauacucuuc

SEQ ID NO: 22214 - RNA, 22 nt, Artificial Sequence
  RPE65 RNA guide
uuuagaaauaugucuucgucag

SEQ ID NO: 22215 - RNA, 22 nt, Artificial Sequence
  RPE65 RNA guide
uuucaagcccuagcuuaccgaa

SEQ ID NO: 22216 - RNA, 22 nt, Artificial Sequence
  RPE65 RNA guide
uuucaucuuuugaucaggucuu

SEQ ID NO: 22217 - RNA, 22 nt, Artificial Sequence
  RPE65 RNA guide
uuucauuuguucuuucgguaag

SEQ ID NO: 22218 - RNA, 22 nt, Artificial Sequence
  RPE65 RNA guide
uuuccuaacgaacuaacauaca

SEQ ID NO: 22219 - RNA, 22 nt, Artificial Sequence
  RPE65 RNA guide
uuucgguaagcuagggcuugaa

SEQ ID NO: 22220 - RNA, 22 nt, Artificial Sequence
  RPE65 RNA guide
uuucuacugguaaucaacaaga

SEQ ID NO: 22221 - RNA, 22 nt, Artificial Sequence
  RPE65 RNA guide
uuucuuccuucucucccucauc

SEQ ID NO: 22222 - RNA, 22 nt, Artificial Sequence
  RPE65 RNA guide
uuugaguauuacggaauaauca

SEQ ID NO: 22223 - RNA, 22 nt, Artificial Sequence
  RPE65 RNA guide
uuugaguugcuguaucugaguu

SEQ ID NO: 22224 - RNA, 22 nt, Artificial Sequence
  RPE65 RNA guide
uuugaucaggucuuguugauua

SEQ ID NO: 22225 - RNA, 22 nt, Artificial Sequence
  RPE65 RNA guide
uuugccuucccugacgaagaca

SEQ ID NO: 22226 - RNA, 22 nt, Artificial Sequence
  RPE65 RNA guide
uuuggugucacgauggagcauc

SEQ ID NO: 22227 - RNA, 22 nt, Artificial Sequence
  RPE65 RNA guide
uuuguaauuugaguugcuguau

SEQ ID NO: 22228 - RNA, 22 nt, Artificial Sequence
  RPE65 RNA guide
uuuguucuuucgguaagcuagg

SEQ ID NO: 22229 - RNA, 22 nt, Artificial Sequence
  RPE65 RNA guide
uuuuagaaauaugucuucguca

SEQ ID NO: 22230 - RNA, 22 nt, Artificial Sequence
  RPE65 RNA guide
uuuucaagcccuagcuuaccga

SEQ ID NO: 22231 - RNA, 22 nt, Artificial Sequence
  RPE65 RNA guide
uuuucaucuuuugaucaggucu

SEQ ID NO: 22232 - RNA, 22 nt, Artificial Sequence
  RPE65 RNA guide
uuuucauuuguucuuucgguaa

SEQ ID NO: 22233 - RNA, 22 nt, Artificial Sequence
  RPE65 RNA guide
uuuucuacugguaaucaacaag

SEQ ID NO: 22234 - RNA, 22 nt, Artificial Sequence
  RPE65 RNA guide
uuuucuuccuucucucccucau

SEQ ID NO: 22235 - RNA, 22 nt, Artificial Sequence
  RPE65 RNA guide
uuuugaguauuacggaauaauc

SEQ ID NO: 22236 - RNA, 22 nt, Artificial Sequence
  RPE65 RNA guide
uuuugaucaggucuuguugauu

SEQ ID NO: 22237 - RNA, 22 nt, Artificial Sequence
  RPE65 RNA guide
uuuugccuucccugacgaagac

SEQ ID NO: 22238 - RNA, 22 nt, Artificial Sequence
  RPE65 RNA guide
uuuuuagaaauaugucuucguc

SEQ ID NO: 22239 - RNA, 22 nt, Artificial Sequence
  RPE65 RNA guide
uuuuucaagcccuagcuuaccg

SEQ ID NO: 22240 - RNA, 22 nt, Artificial Sequence
  RPE65 RNA guide
uuuuucuacugguaaucaacaa

SEQ ID NO: 22241 - RNA, 22 nt, Artificial Sequence
  RPE65 RNA guide
uuuuucuuccuucucucccuca

SEQ ID NO: 22242 - RNA, 22 nt, Artificial Sequence
  RPE65 RNA guide
uuuuugccuucccugacgaaga

SEQ ID NO: 22243 - RNA, 22 nt, Artificial Sequence
  RPE65 RNA guide
uuuuuuagaaauaugucuucgu

SEQ ID NO: 22244 - RNA, 22 nt, Artificial Sequence
  RPE65 RNA guide
uuuuuucaagcccuagcuuacc

SEQ ID NO: 22245 - RNA, 22 nt, Artificial Sequence
  RPE65 RNA guide
uuuuuucuacugguaaucaaca

SEQ ID NO: 22246 - RNA, 22 nt, Artificial Sequence
  RPE65 RNA guide
uuuuuucuuccuucucucccuc

SEQ ID NO: 22247 - RNA, 20 nt, Artificial Sequence
  RPE65 RNA guide
aaaaagaagucaggucauau

SEQ ID NO: 22248 - RNA, 20 nt, Artificial Sequence
  RPE65 RNA guide
aaaaccauaugaccugacuu

SEQ ID NO: 22249 - RNA, 20 nt, Artificial Sequence
  RPE65 RNA guide
aaaagaagucaggucauaug

SEQ ID NO: 22250 - RNA, 20 nt, Artificial Sequence
  RPE65 RNA guide
aaaagaccucuuuagguggu

SEQ ID NO: 22251 - RNA, 20 nt, Artificial Sequence
  RPE65 RNA guide
aaaagcccaagcuauagauu

SEQ ID NO: 22252 - RNA, 20 nt, Artificial Sequence
  RPE65 RNA guide
aaaccauaugaccugacuuc

SEQ ID NO: 22253 - RNA, 20 nt, Artificial Sequence
  RPE65 RNA guide
aaacucuuuauguacccuac

SEQ ID NO: 22254 - RNA, 20 nt, Artificial Sequence
  RPE65 RNA guide
aaacugugaugaucacauga

SEQ ID NO: 22255 - RNA, 20 nt, Artificial Sequence
  RPE65 RNA guide
aaagaagucaggucauaugg

SEQ ID NO: 22256 - RNA, 20 nt, Artificial Sequence
  RPE65 RNA guide
aaagaccucuuuaggugguc

SEQ ID NO: 22257 - RNA, 20 nt, Artificial Sequence
  RPE65 RNA guide
aaagcccaagcuauagauug

SEQ ID NO: 22258 - RNA, 20 nt, Artificial Sequence
  RPE65 RNA guide
aaauauagcaccugcuguac

SEQ ID NO: 22259 - RNA, 20 nt, Artificial Sequence
  RPE65 RNA guide
aacagauccauuuauucagu

SEQ ID NO: 22260 - RNA, 20 nt, Artificial Sequence
  RPE65 RNA guide
aacauacaaauauagcaccu

SEQ ID NO: 22261 - RNA, 20 nt, Artificial Sequence
  RPE65 RNA guide
aaccauaugaccugacuucu

SEQ ID NO: 22262 - RNA, 20 nt, Artificial Sequence
  RPE65 RNA guide
aacucuuuauguacccuacc

SEQ ID NO: 22263 - RNA, 20 nt, Artificial Sequence
  RPE65 RNA guide
aacugugaugaucacaugaa

SEQ ID NO: 22264 - RNA, 20 nt, Artificial Sequence
  RPE65 RNA guide
aagaacagauccauuuauuc

SEQ ID NO: 22265 - RNA, 20 nt, Artificial Sequence
  RPE65 RNA guide
aagaagggagagucuugucu

SEQ ID NO: 22266 - RNA, 20 nt, Artificial Sequence
  RPE65 RNA guide
aagaagucaggucauauggu

SEQ ID NO: 22267 - RNA, 20 nt, Artificial Sequence
  RPE65 RNA guide
aagacagacaagacucuccc

SEQ ID NO: 22268 - RNA, 20 nt, Artificial Sequence
  RPE65 RNA guide
aagaccucuuuagguggucu

SEQ ID NO: 22269 - RNA, 20 nt, Artificial Sequence
  RPE65 RNA guide
aagacucucccuucuuagag

SEQ ID NO: 22270 - RNA, 20 nt, Artificial Sequence
  RPE65 RNA guide
aagagucagaaaaagaaguc

SEQ ID NO: 22271 - RNA, 20 nt, Artificial Sequence
  RPE65 RNA guide
aagaguuuaaaagaccucuu

SEQ ID NO: 22272 - RNA, 20 nt, Artificial Sequence
  RPE65 RNA guide
aagaucgaucuggaagcuga

SEQ ID NO: 22273 - RNA, 20 nt, Artificial Sequence
  RPE65 RNA guide
aagcccaagcuauagauuga

SEQ ID NO: 22274 - RNA, 20 nt, Artificial Sequence
  RPE65 RNA guide
aagcucuaagaagggagagu

SEQ ID NO: 22275 - RNA, 20 nt, Artificial Sequence
  RPE65 RNA guide
aagcugacuuccuucgaaca

SEQ ID NO: 22276 - RNA, 20 nt, Artificial Sequence
  RPE65 RNA guide
aaggaagucagcuuccagau

SEQ ID NO: 22277 - RNA, 20 nt, Artificial Sequence
  RPE65 RNA guide
aagggagagucuugucuguc

SEQ ID NO: 22278 - RNA, 20 nt, Artificial Sequence
  RPE65 RNA guide
aagucagcuuccagaucgau

SEQ ID NO: 22279 - RNA, 20 nt, Artificial Sequence
  RPE65 RNA guide
aagucaggucauaugguuuu

SEQ ID NO: 22280 - RNA, 20 nt, Artificial Sequence
  RPE65 RNA guide
aauauagcaccugcuguaca

SEQ ID NO: 22281 - RNA, 20 nt, Artificial Sequence
  RPE65 RNA guide
aauauugagauauagcagug

SEQ ID NO: 22282 - RNA, 20 nt, Artificial Sequence
  RPE65 RNA guide
aaugacauucaaucuauagc

SEQ ID NO: 22283 - RNA, 20 nt, Artificial Sequence
  RPE65 RNA guide
aaugacuacagcguaguagg

SEQ ID NO: 22284 - RNA, 20 nt, Artificial Sequence
  RPE65 RNA guide
aaugaguaccuacuacgcug

SEQ ID NO: 22285 - RNA, 20 nt, Artificial Sequence
  RPE65 RNA guide
aauggaucuguucuuaucug

SEQ ID NO: 22286 - RNA, 20 nt, Artificial Sequence
  RPE65 RNA guide
acaaauauagcaccugcugu

SEQ ID NO: 22287 - RNA, 20 nt, Artificial Sequence
  RPE65 RNA guide
acaagacucucccuucuuag

SEQ ID NO: 22288 - RNA, 20 nt, Artificial Sequence
  RPE65 RNA guide
acaagagucagaaaaagaag

SEQ ID NO: 22289 - RNA, 20 nt, Artificial Sequence
  RPE65 RNA guide
acaaugacuacagcguagua

SEQ ID NO: 22290 - RNA, 20 nt, Artificial Sequence
  RPE65 RNA guide
acacacuuuucaugugauca

SEQ ID NO: 22291 - RNA, 20 nt, Artificial Sequence
  RPE65 RNA guide
acacuguaagcucuaagaag

SEQ ID NO: 22292 - RNA, 20 nt, Artificial Sequence
  RPE65 RNA guide
acacuuuucaugugaucauc

SEQ ID NO: 22293 - RNA, 20 nt, Artificial Sequence
  RPE65 RNA guide
acagacaagacucucccuuc

SEQ ID NO: 22294 - RNA, 20 nt, Artificial Sequence
  RPE65 RNA guide
acagauccauuuauucagug

SEQ ID NO: 22295 - RNA, 20 nt, Artificial Sequence
  RPE65 RNA guide
acagcaggugcuauauuugu

SEQ ID NO: 22296 - RNA, 20 nt, Artificial Sequence
  RPE65 RNA guide
acagcguaguagguacucau

SEQ ID NO: 22297 - RNA, 20 nt, Artificial Sequence
  RPE65 RNA guide
acaguauguacagcaggugc

SEQ ID NO: 22298 - RNA, 20 nt, Artificial Sequence
  RPE65 RNA guide
acaguguagguaggguacau

SEQ ID NO: 22299 - RNA, 20 nt, Artificial Sequence
  RPE65 RNA guide
acaguuuuuacaguauguac

SEQ ID NO: 22300 - RNA, 20 nt, Artificial Sequence
  RPE65 RNA guide
acauacaaauauagcaccug

SEQ ID NO: 22301 - RNA, 20 nt, Artificial Sequence
  RPE65 RNA guide
acauucaaucuauagcuugg

SEQ ID NO: 22302 - RNA, 20 nt, Artificial Sequence
  RPE65 RNA guide
accaccuaaagaggucuuuu

SEQ ID NO: 22303 - RNA, 20 nt, Artificial Sequence
  RPE65 RNA guide
accaccuggcaugagaccac

SEQ ID NO: 22304 - RNA, 20 nt, Artificial Sequence
  RPE65 RNA guide
accauaugaccugacuucuu

SEQ ID NO: 22305 - RNA, 20 nt, Artificial Sequence
  RPE65 RNA guide
acccuaccuacacuguaagc

SEQ ID NO: 22306 - RNA, 20 nt, Artificial Sequence
  RPE65 RNA guide
accuaaagaggucuuuuaaa

SEQ ID NO: 22307 - RNA, 20 nt, Artificial Sequence
  RPE65 RNA guide
accuacacuguaagcucuaa

SEQ ID NO: 22308 - RNA, 20 nt, Artificial Sequence
  RPE65 RNA guide
accuacuacgcuguagucau

SEQ ID NO: 22309 - RNA, 20 nt, Artificial Sequence
  RPE65 RNA guide
accucuuuagguggucucau

SEQ ID NO: 22310 - RNA, 20 nt, Artificial Sequence
  RPE65 RNA guide
accugacuucuuuuucugac

SEQ ID NO: 22311 - RNA, 20 nt, Artificial Sequence
  RPE65 RNA guide
accugcuguacauacuguaa

SEQ ID NO: 22312 - RNA, 20 nt, Artificial Sequence
  RPE65 RNA guide
accuggcaugagaccaccua

SEQ ID NO: 22313 - RNA, 20 nt, Artificial Sequence
  RPE65 RNA guide
acgcuguagucauugucaua

SEQ ID NO: 22314 - RNA, 20 nt, Artificial Sequence
  RPE65 RNA guide
acuacagcguaguagguacu

SEQ ID NO: 22315 - RNA, 20 nt, Artificial Sequence
  RPE65 RNA guide
acuacgcuguagucauuguc

SEQ ID NO: 22316 - RNA, 20 nt, Artificial Sequence
  RPE65 RNA guide
acucacugaauaaauggauc

SEQ ID NO: 22317 - RNA, 20 nt, Artificial Sequence
  RPE65 RNA guide
acucucccuucuuagagcuu

SEQ ID NO: 22318 - RNA, 20 nt, Artificial Sequence
  RPE65 RNA guide
acucuuguaccaccuggcau

SEQ ID NO: 22319 - RNA, 20 nt, Artificial Sequence
  RPE65 RNA guide
acucuuuauguacccuaccu

SEQ ID NO: 22320 - RNA, 20 nt, Artificial Sequence
  RPE65 RNA guide
acuguaaaaacugugaugau

SEQ ID NO: 22321 - RNA, 20 nt, Artificial Sequence
  RPE65 RNA guide
acuguaagcucuaagaaggg

SEQ ID NO: 22322 - RNA, 20 nt, Artificial Sequence
  RPE65 RNA guide
acugugaugaucacaugaaa

SEQ ID NO: 22323 - RNA, 20 nt, Artificial Sequence
  RPE65 RNA guide
acuuccuucgaacaaaauga

SEQ ID NO: 22324 - RNA, 20 nt, Artificial Sequence
  RPE65 RNA guide
acuucuuuuucugacucuug

SEQ ID NO: 22325 - RNA, 20 nt, Artificial Sequence
  RPE65 RNA guide
acuuuucaugugaucaucac

SEQ ID NO: 22326 - RNA, 20 nt, Artificial Sequence
  RPE65 RNA guide
agaaaaagaagucaggucau

SEQ ID NO: 22327 - RNA, 20 nt, Artificial Sequence
  RPE65 RNA guide
agaaaaccauaugaccugac

SEQ ID NO: 22328 - RNA, 20 nt, Artificial Sequence
  RPE65 RNA guide
agaacagauccauuuauuca

SEQ ID NO: 22329 - RNA, 20 nt, Artificial Sequence
  RPE65 RNA guide
agaagggagagucuugucug

SEQ ID NO: 22330 - RNA, 20 nt, Artificial Sequence
  RPE65 RNA guide
agaagucaggucauaugguu

SEQ ID NO: 22331 - RNA, 20 nt, Artificial Sequence
  RPE65 RNA guide
agaauauugagauauagcag

SEQ ID NO: 22332 - RNA, 20 nt, Artificial Sequence
  RPE65 RNA guide
agacaagacucucccuucuu

SEQ ID NO: 22333 - RNA, 20 nt, Artificial Sequence
  RPE65 RNA guide
agacagacaagacucucccu

SEQ ID NO: 22334 - RNA, 20 nt, Artificial Sequence
  RPE65 RNA guide
agaccaccuaaagaggucuu

SEQ ID NO: 22335 - RNA, 20 nt, Artificial Sequence
  RPE65 RNA guide
agaccucuuuagguggucuc

SEQ ID NO: 22336 - RNA, 20 nt, Artificial Sequence
  RPE65 RNA guide
agacucucccuucuuagagc

SEQ ID NO: 22337 - RNA, 20 nt, Artificial Sequence
  RPE65 RNA guide
agagcuuacaguguagguag

SEQ ID NO: 22338 - RNA, 20 nt, Artificial Sequence
  RPE65 RNA guide
agagucagaaaaagaaguca

SEQ ID NO: 22339 - RNA, 20 nt, Artificial Sequence
  RPE65 RNA guide
agagucuugucugucuugcu

SEQ ID NO: 22340 - RNA, 20 nt, Artificial Sequence
  RPE65 RNA guide
agaguuuaaaagaccucuuu

SEQ ID NO: 22341 - RNA, 20 nt, Artificial Sequence
  RPE65 RNA guide
agaucgaucuggaagcugac

SEQ ID NO: 22342 - RNA, 20 nt, Artificial Sequence
  RPE65 RNA guide
agaucgaucuuagaaaccau

SEQ ID NO: 22343 - RNA, 20 nt, Artificial Sequence
  RPE65 RNA guide
agcaagacagacaagacucu

SEQ ID NO: 22344 - RNA, 20 nt, Artificial Sequence
  RPE65 RNA guide
agcaccugcuguacauacug

SEQ ID NO: 22345 - RNA, 20 nt, Artificial Sequence
  RPE65 RNA guide
agcaggugcuauauuuguau

SEQ ID NO: 22346 - RNA, 20 nt, Artificial Sequence
  RPE65 RNA guide
agcagugagcaagacagaca

SEQ ID NO: 22347 - RNA, 20 nt, Artificial Sequence
  RPE65 RNA guide
agcccaagcuauagauugaa

SEQ ID NO: 22348 - RNA, 20 nt, Artificial Sequence
  RPE65 RNA guide
agcguaguagguacucauua

SEQ ID NO: 22349 - RNA, 20 nt, Artificial Sequence
  RPE65 RNA guide
agcucuaagaagggagaguc

SEQ ID NO: 22350 - RNA, 20 nt, Artificial Sequence
  RPE65 RNA guide
agcugacuuccuucgaacaa

SEQ ID NO: 22351 - RNA, 20 nt, Artificial Sequence
  RPE65 RNA guide
agcuuacaguguagguaggg

SEQ ID NO: 22352 - RNA, 20 nt, Artificial Sequence
  RPE65 RNA guide
agcuuccagaucgaucuuag

SEQ ID NO: 22353 - RNA, 20 nt, Artificial Sequence
  RPE65 RNA guide
agcuugggcuuuuaaaaacu

SEQ ID NO: 22354 - RNA, 20 nt, Artificial Sequence
  RPE65 RNA guide
aggaagucagcuuccagauc

SEQ ID NO: 22355 - RNA, 20 nt, Artificial Sequence
  RPE65 RNA guide
agggagagucuugucugucu

SEQ ID NO: 22356 - RNA, 20 nt, Artificial Sequence
  RPE65 RNA guide
agguacucauuaaauacuca

SEQ ID NO: 22357 - RNA, 20 nt, Artificial Sequence
  RPE65 RNA guide
agguaggguacauaaagagu

SEQ ID NO: 22358 - RNA, 20 nt, Artificial Sequence
  RPE65 RNA guide
aggugcuauauuuguauguu

SEQ ID NO: 22359 - RNA, 20 nt, Artificial Sequence
  RPE65 RNA guide
aggugguacaagagucagaa

SEQ ID NO: 22360 - RNA, 20 nt, Artificial Sequence
  RPE65 RNA guide
agguggucucaugccaggug

SEQ ID NO: 22361 - RNA, 20 nt, Artificial Sequence
  RPE65 RNA guide
aguaccuacuacgcuguagu

SEQ ID NO: 22362 - RNA, 20 nt, Artificial Sequence
  RPE65 RNA guide
aguagguacucauuaaauac

SEQ ID NO: 22363 - RNA, 20 nt, Artificial Sequence
  RPE65 RNA guide
aguauguacagcaggugcua

SEQ ID NO: 22364 - RNA, 20 nt, Artificial Sequence
  RPE65 RNA guide
aguauuuaaugaguaccuac

SEQ ID NO: 22365 - RNA, 20 nt, Artificial Sequence
  RPE65 RNA guide
agucagaaaaagaagucagg

SEQ ID NO: 22366 - RNA, 20 nt, Artificial Sequence
  RPE65 RNA guide
agucagcuuccagaucgauc

SEQ ID NO: 22367 - RNA, 20 nt, Artificial Sequence
  RPE65 RNA guide
agucaggucauaugguuuuc

SEQ ID NO: 22368 - RNA, 20 nt, Artificial Sequence
  RPE65 RNA guide
agucuugucugucuugcuca

SEQ ID NO: 22369 - RNA, 20 nt, Artificial Sequence
  RPE65 RNA guide
agugagcaagacagacaaga

SEQ ID NO: 22370 - RNA, 20 nt, Artificial Sequence
  RPE65 RNA guide
agugaguauuuaaugaguac

SEQ ID NO: 22371 - RNA, 20 nt, Artificial Sequence
  RPE65 RNA guide
aguguagguaggguacauaa

SEQ ID NO: 22372 - RNA, 20 nt, Artificial Sequence
  RPE65 RNA guide
aguuuaaaagaccucuuuag

SEQ ID NO: 22373 - RNA, 20 nt, Artificial Sequence
  RPE65 RNA guide
aguuuuuaaaagcccaagcu

SEQ ID NO: 22374 - RNA, 20 nt, Artificial Sequence
  RPE65 RNA guide
aguuuuuacaguauguacag

SEQ ID NO: 22375 - RNA, 20 nt, Artificial Sequence
  RPE65 RNA guide
auacaaauauagcaccugcu

SEQ ID NO: 22376 - RNA, 20 nt, Artificial Sequence
  RPE65 RNA guide
auacacacuuuucaugugau

SEQ ID NO: 22377 - RNA, 20 nt, Artificial Sequence
  RPE65 RNA guide
auacucacugaauaaaugga

SEQ ID NO: 22378 - RNA, 20 nt, Artificial Sequence
  RPE65 RNA guide
auagaaaaccauaugaccug

SEQ ID NO: 22379 - RNA, 20 nt, Artificial Sequence
  RPE65 RNA guide
auagcaccugcuguacauac

SEQ ID NO: 22380 - RNA, 20 nt, Artificial Sequence
  RPE65 RNA guide
auagcuugggcuuuuaaaaa

SEQ ID NO: 22381 - RNA, 20 nt, Artificial Sequence
  RPE65 RNA guide
auauagaaaaccauaugacc

SEQ ID NO: 22382 - RNA, 20 nt, Artificial Sequence
  RPE65 RNA guide
auauagcaccugcuguacau

SEQ ID NO: 22383 - RNA, 20 nt, Artificial Sequence
  RPE65 RNA guide
auauagcagugagcaagaca

SEQ ID NO: 22384 - RNA, 20 nt, Artificial Sequence
  RPE65 RNA guide
auaugaccugacuucuuuuu

SEQ ID NO: 22385 - RNA, 20 nt, Artificial Sequence
  RPE65 RNA guide
auauucuaugacaaugacua

SEQ ID NO: 22386 - RNA, 20 nt, Artificial Sequence
  RPE65 RNA guide
auauugagauauagcaguga

SEQ ID NO: 22387 - RNA, 20 nt, Artificial Sequence
  RPE65 RNA guide
aucgaucuggaagcugacuu

SEQ ID NO: 22388 - RNA, 20 nt, Artificial Sequence
  RPE65 RNA guide
aucuggaagcugacuuccuu

SEQ ID NO: 22389 - RNA, 20 nt, Artificial Sequence
  RPE65 RNA guide
augacaaugacuacagcgua

SEQ ID NO: 22390 - RNA, 20 nt, Artificial Sequence
  RPE65 RNA guide
augacauucaaucuauagcu

SEQ ID NO: 22391 - RNA, 20 nt, Artificial Sequence
  RPE65 RNA guide
augaccugacuucuuuuucu

SEQ ID NO: 22392 - RNA, 20 nt, Artificial Sequence
  RPE65 RNA guide
augacuacagcguaguaggu

SEQ ID NO: 22393 - RNA, 20 nt, Artificial Sequence
  RPE65 RNA guide
augagaccaccuaaagaggu

SEQ ID NO: 22394 - RNA, 20 nt, Artificial Sequence
  RPE65 RNA guide
augaguaccuacuacgcugu

SEQ ID NO: 22395 - RNA, 20 nt, Artificial Sequence
  RPE65 RNA guide
augccaggugguacaagagu

SEQ ID NO: 22396 - RNA, 20 nt, Artificial Sequence
  RPE65 RNA guide
auggaucuguucuuaucugu

SEQ ID NO: 22397 - RNA, 20 nt, Artificial Sequence
  RPE65 RNA guide
augguuucuaagaucgaucu

SEQ ID NO: 22398 - RNA, 20 nt, Artificial Sequence
  RPE65 RNA guide
auguacagcaggugcuauau

SEQ ID NO: 22399 - RNA, 20 nt, Artificial Sequence
  RPE65 RNA guide
auguacccuaccuacacugu

SEQ ID NO: 22400 - RNA, 20 nt, Artificial Sequence
  RPE65 RNA guide
auguaugguuucuaagaucg

SEQ ID NO: 22401 - RNA, 20 nt, Artificial Sequence
  RPE65 RNA guide
augugaucaucacaguuuuu

SEQ ID NO: 22402 - RNA, 20 nt, Artificial Sequence
  RPE65 RNA guide
auguuacagauaagaacaga

SEQ ID NO: 22403 - RNA, 20 nt, Artificial Sequence
  RPE65 RNA guide
auucaaucuauagcuugggc

SEQ ID NO: 22404 - RNA, 20 nt, Artificial Sequence
  RPE65 RNA guide
auucuaugacaaugacuaca

SEQ ID NO: 22405 - RNA, 20 nt, Artificial Sequence
  RPE65 RNA guide
auugagauauagcagugagc

SEQ ID NO: 22406 - RNA, 20 nt, Artificial Sequence
  RPE65 RNA guide
auugaguuuuuaaaagccca

SEQ ID NO: 22407 - RNA, 20 nt, Artificial Sequence
  RPE65 RNA guide
auuuaaugaguaccuacuac

SEQ ID NO: 22408 - RNA, 20 nt, Artificial Sequence
  RPE65 RNA guide
auuuguucucauuuuguucg

SEQ ID NO: 22409 - RNA, 20 nt, Artificial Sequence
  RPE65 RNA guide
auuuuguucgaaggaaguca

SEQ ID NO: 22410 - RNA, 20 nt, Artificial Sequence
  RPE65 RNA guide
caaauauagcaccugcugua

SEQ ID NO: 22411 - RNA, 20 nt, Artificial Sequence
  RPE65 RNA guide
caagacagacaagacucucc

SEQ ID NO: 22412 - RNA, 20 nt, Artificial Sequence
  RPE65 RNA guide
caagacucucccuucuuaga

SEQ ID NO: 22413 - RNA, 20 nt, Artificial Sequence
  RPE65 RNA guide
caagagucagaaaaagaagu

SEQ ID NO: 22414 - RNA, 20 nt, Artificial Sequence
  RPE65 RNA guide
caagcuauagauugaauguc

SEQ ID NO: 22415 - RNA, 20 nt, Artificial Sequence
  RPE65 RNA guide
caaucuauagcuugggcuuu

SEQ ID NO: 22416 - RNA, 20 nt, Artificial Sequence
  RPE65 RNA guide
caaugacauucaaucuauag

SEQ ID NO: 22417 - RNA, 20 nt, Artificial Sequence
  RPE65 RNA guide
caaugacuacagcguaguag

SEQ ID NO: 22418 - RNA, 20 nt, Artificial Sequence
  RPE65 RNA guide
cacacuuuucaugugaucau

SEQ ID NO: 22419 - RNA, 20 nt, Artificial Sequence
  RPE65 RNA guide
cacaguuuuuacaguaugua

SEQ ID NO: 22420 - RNA, 20 nt, Artificial Sequence
  RPE65 RNA guide
caccuaaagaggucuuuuaa

SEQ ID NO: 22421 - RNA, 20 nt, Artificial Sequence
  RPE65 RNA guide
caccugcuguacauacugua

SEQ ID NO: 22422 - RNA, 20 nt, Artificial Sequence
  RPE65 RNA guide
caccuggcaugagaccaccu

SEQ ID NO: 22423 - RNA, 20 nt, Artificial Sequence
  RPE65 RNA guide
cacugaauaaauggaucugu

SEQ ID NO: 22424 - RNA, 20 nt, Artificial Sequence
  RPE65 RNA guide
cacuguaagcucuaagaagg

SEQ ID NO: 22425 - RNA, 20 nt, Artificial Sequence
  RPE65 RNA guide
cacuuuucaugugaucauca

SEQ ID NO: 22426 - RNA, 20 nt, Artificial Sequence
  RPE65 RNA guide
cagaaaaagaagucagguca

SEQ ID NO: 22427 - RNA, 20 nt, Artificial Sequence
  RPE65 RNA guide
cagacaagacucucccuucu

SEQ ID NO: 22428 - RNA, 20 nt, Artificial Sequence
  RPE65 RNA guide
cagauccauuuauucaguga

SEQ ID NO: 22429 - RNA, 20 nt, Artificial Sequence
  RPE65 RNA guide
cagaucgaucuuagaaacca

SEQ ID NO: 22430 - RNA, 20 nt, Artificial Sequence
  RPE65 RNA guide
cagcaggugcuauauuugua

SEQ ID NO: 22431 - RNA, 20 nt, Artificial Sequence
  RPE65 RNA guide
cagcguaguagguacucauu

SEQ ID NO: 22432 - RNA, 20 nt, Artificial Sequence
  RPE65 RNA guide
cagcuuccagaucgaucuua

SEQ ID NO: 22433 - RNA, 20 nt, Artificial Sequence
  RPE65 RNA guide
caggugcuauauuuguaugu

SEQ ID NO: 22434 - RNA, 20 nt, Artificial Sequence
  RPE65 RNA guide
caggugguacaagagucaga

SEQ ID NO: 22435 - RNA, 20 nt, Artificial Sequence
  RPE65 RNA guide
caguauguacagcaggugcu

SEQ ID NO: 22436 - RNA, 20 nt, Artificial Sequence
  RPE65 RNA guide
cagugagcaagacagacaag

SEQ ID NO: 22437 - RNA, 20 nt, Artificial Sequence
  RPE65 RNA guide
cagugaguauuuaaugagua

SEQ ID NO: 22438 - RNA, 20 nt, Artificial Sequence
  RPE65 RNA guide
caguguagguaggguacaua

SEQ ID NO: 22439 - RNA, 20 nt, Artificial Sequence
  RPE65 RNA guide
caguuuuuacaguauguaca

SEQ ID NO: 22440 - RNA, 20 nt, Artificial Sequence
  RPE65 RNA guide
cauacaaauauagcaccugc

SEQ ID NO: 22441 - RNA, 20 nt, Artificial Sequence
  RPE65 RNA guide
cauacuguaaaaacugugau

SEQ ID NO: 22442 - RNA, 20 nt, Artificial Sequence
  RPE65 RNA guide
cauaugaccugacuucuuuu

SEQ ID NO: 22443 - RNA, 20 nt, Artificial Sequence
  RPE65 RNA guide
cauauguaugguuucuaaga

SEQ ID NO: 22444 - RNA, 20 nt, Artificial Sequence
  RPE65 RNA guide
caucacaguuuuuacaguau

SEQ ID NO: 22445 - RNA, 20 nt, Artificial Sequence
  RPE65 RNA guide
caugagaccaccuaaagagg

SEQ ID NO: 22446 - RNA, 20 nt, Artificial Sequence
  RPE65 RNA guide
caugccaggugguacaagag

SEQ ID NO: 22447 - RNA, 20 nt, Artificial Sequence
  RPE65 RNA guide
caugugaucaucacaguuuu

SEQ ID NO: 22448 - RNA, 20 nt, Artificial Sequence
  RPE65 RNA guide
cauucaaucuauagcuuggg

SEQ ID NO: 22449 - RNA, 20 nt, Artificial Sequence
  RPE65 RNA guide
cauuuuguucgaaggaaguc

SEQ ID NO: 22450 - RNA, 20 nt, Artificial Sequence
  RPE65 RNA guide
ccaagcuauagauugaaugu

SEQ ID NO: 22451 - RNA, 20 nt, Artificial Sequence
  RPE65 RNA guide
ccaccuaaagaggucuuuua

SEQ ID NO: 22452 - RNA, 20 nt, Artificial Sequence
  RPE65 RNA guide
ccaccuggcaugagaccacc

SEQ ID NO: 22453 - RNA, 20 nt, Artificial Sequence
  RPE65 RNA guide
ccagaucgaucuuagaaacc

SEQ ID NO: 22454 - RNA, 20 nt, Artificial Sequence
  RPE65 RNA guide
ccaggugguacaagagucag

SEQ ID NO: 22455 - RNA, 20 nt, Artificial Sequence
  RPE65 RNA guide
ccauaugaccugacuucuuu

SEQ ID NO: 22456 - RNA, 20 nt, Artificial Sequence
  RPE65 RNA guide
cccaagcuauagauugaaug

SEQ ID NO: 22457 - RNA, 20 nt, Artificial Sequence
  RPE65 RNA guide
cccuaccuacacuguaagcu

SEQ ID NO: 22458 - RNA, 20 nt, Artificial Sequence
  RPE65 RNA guide
cccuucuuagagcuuacagu

SEQ ID NO: 22459 - RNA, 20 nt, Artificial Sequence
  RPE65 RNA guide
ccuaaagaggucuuuuaaac

SEQ ID NO: 22460 - RNA, 20 nt, Artificial Sequence
  RPE65 RNA guide
ccuacacuguaagcucuaag

SEQ ID NO: 22461 - RNA, 20 nt, Artificial Sequence
  RPE65 RNA guide
ccuaccuacacuguaagcuc

SEQ ID NO: 22462 - RNA, 20 nt, Artificial Sequence
  RPE65 RNA guide
ccuacuacgcuguagucauu

SEQ ID NO: 22463 - RNA, 20 nt, Artificial Sequence
  RPE65 RNA guide
ccucuuuagguggucucaug

SEQ ID NO: 22464 - RNA, 20 nt, Artificial Sequence
  RPE65 RNA guide
ccugacuucuuuuucugacu

SEQ ID NO: 22465 - RNA, 20 nt, Artificial Sequence
  RPE65 RNA guide
ccugcuguacauacuguaaa

SEQ ID NO: 22466 - RNA, 20 nt, Artificial Sequence
  RPE65 RNA guide
ccuggcaugagaccaccuaa

SEQ ID NO: 22467 - RNA, 20 nt, Artificial Sequence
  RPE65 RNA guide
ccuucgaacaaaaugagaac

SEQ ID NO: 22468 - RNA, 20 nt, Artificial Sequence
  RPE65 RNA guide
ccuucuuagagcuuacagug

SEQ ID NO: 22469 - RNA, 20 nt, Artificial Sequence
  RPE65 RNA guide
cgaaggaagucagcuuccag

SEQ ID NO: 22470 - RNA, 20 nt, Artificial Sequence
  RPE65 RNA guide
cgaucuggaagcugacuucc

SEQ ID NO: 22471 - RNA, 20 nt, Artificial Sequence
  RPE65 RNA guide
cgaucuuagaaaccauacau

SEQ ID NO: 22472 - RNA, 20 nt, Artificial Sequence
  RPE65 RNA guide
cgcuguagucauugucauag

SEQ ID NO: 22473 - RNA, 20 nt, Artificial Sequence
  RPE65 RNA guide
cguaguagguacucauuaaa

SEQ ID NO: 22474 - RNA, 20 nt, Artificial Sequence
  RPE65 RNA guide
cuaagaagggagagucuugu

SEQ ID NO: 22475 - RNA, 20 nt, Artificial Sequence
  RPE65 RNA guide
cuaagaucgaucuggaagcu

SEQ ID NO: 22476 - RNA, 20 nt, Artificial Sequence
  RPE65 RNA guide
cuacacuguaagcucuaaga

SEQ ID NO: 22477 - RNA, 20 nt, Artificial Sequence
  RPE65 RNA guide
cuacagcguaguagguacuc

SEQ ID NO: 22478 - RNA, 20 nt, Artificial Sequence
  RPE65 RNA guide
cuaccuacacuguaagcucu

SEQ ID NO: 22479 - RNA, 20 nt, Artificial Sequence
  RPE65 RNA guide
cuacgcuguagucauuguca

SEQ ID NO: 22480 - RNA, 20 nt, Artificial Sequence
  RPE65 RNA guide
cuacuacgcuguagucauug

SEQ ID NO: 22481 - RNA, 20 nt, Artificial Sequence
  RPE65 RNA guide
cuauagcuugggcuuuuaaa

SEQ ID NO: 22482 - RNA, 20 nt, Artificial Sequence
  RPE65 RNA guide
cuaugacaaugacuacagcg

SEQ ID NO: 22483 - RNA, 20 nt, Artificial Sequence
  RPE65 RNA guide
cucacugaauaaauggaucu

SEQ ID NO: 22484 - RNA, 20 nt, Artificial Sequence
  RPE65 RNA guide
cucacugcuauaucucaaua

SEQ ID NO: 22485 - RNA, 20 nt, Artificial Sequence
  RPE65 RNA guide
cucaugccaggugguacaag

SEQ ID NO: 22486 - RNA, 20 nt, Artificial Sequence
  RPE65 RNA guide
cucauuuuguucgaaggaag

SEQ ID NO: 22487 - RNA, 20 nt, Artificial Sequence
  RPE65 RNA guide
cucccuucuuagagcuuaca

SEQ ID NO: 22488 - RNA, 20 nt, Artificial Sequence
  RPE65 RNA guide
cucuaagaagggagagucuu

SEQ ID NO: 22489 - RNA, 20 nt, Artificial Sequence
  RPE65 RNA guide
cucucccuucuuagagcuua

SEQ ID NO: 22490 - RNA, 20 nt, Artificial Sequence
  RPE65 RNA guide
cucuuguaccaccuggcaug

SEQ ID NO: 22491 - RNA, 20 nt, Artificial Sequence
  RPE65 RNA guide
cucuuuagguggucucaugc

SEQ ID NO: 22492 - RNA, 20 nt, Artificial Sequence
  RPE65 RNA guide
cucuuuauguacccuaccua

SEQ ID NO: 22493 - RNA, 20 nt, Artificial Sequence
  RPE65 RNA guide
cugacucuuguaccaccugg

SEQ ID NO: 22494 - RNA, 20 nt, Artificial Sequence
  RPE65 RNA guide
cugacuuccuucgaacaaaa

SEQ ID NO: 22495 - RNA, 20 nt, Artificial Sequence
  RPE65 RNA guide
cugacuucuuuuucugacuc

SEQ ID NO: 22496 - RNA, 20 nt, Artificial Sequence
  RPE65 RNA guide
cugcuguacauacuguaaaa

SEQ ID NO: 22497 - RNA, 20 nt, Artificial Sequence
  RPE65 RNA guide
cuggaagcugacuuccuucg

SEQ ID NO: 22498 - RNA, 20 nt, Artificial Sequence
  RPE65 RNA guide
cuggcaugagaccaccuaaa

SEQ ID NO: 22499 - RNA, 20 nt, Artificial Sequence
  RPE65 RNA guide
cuguaaaaacugugaugauc

SEQ ID NO: 22500 - RNA, 20 nt, Artificial Sequence
  RPE65 RNA guide
cuguaacauacaaauauagc

SEQ ID NO: 22501 - RNA, 20 nt, Artificial Sequence
  RPE65 RNA guide
cuguaagcucuaagaaggga

SEQ ID NO: 22502 - RNA, 20 nt, Artificial Sequence
  RPE65 RNA guide
cuguacauacuguaaaaacu

SEQ ID NO: 22503 - RNA, 20 nt, Artificial Sequence
  RPE65 RNA guide
cugugaugaucacaugaaaa

SEQ ID NO: 22504 - RNA, 20 nt, Artificial Sequence
  RPE65 RNA guide
cuguuuaucagaaguaaauu

SEQ ID NO: 22505 - RNA, 20 nt, Artificial Sequence
  RPE65 RNA guide
cuuacaguguagguagggua

SEQ ID NO: 22506 - RNA, 20 nt, Artificial Sequence
  RPE65 RNA guide
cuuagagcuuacaguguagg

SEQ ID NO: 22507 - RNA, 20 nt, Artificial Sequence
  RPE65 RNA guide
cuuccagaucgaucuuagaa

SEQ ID NO: 22508 - RNA, 20 nt, Artificial Sequence
  RPE65 RNA guide
cuuccuucgaacaaaaugag

SEQ ID NO: 22509 - RNA, 20 nt, Artificial Sequence
  RPE65 RNA guide
cuucgaacaaaaugagaaca

SEQ ID NO: 22510 - RNA, 20 nt, Artificial Sequence
  RPE65 RNA guide
cuucuuagagcuuacagugu

SEQ ID NO: 22511 - RNA, 20 nt, Artificial Sequence
  RPE65 RNA guide
cuucuuuuucugacucuugu

SEQ ID NO: 22512 - RNA, 20 nt, Artificial Sequence
  RPE65 RNA guide
cuugcucacugcuauaucuc

SEQ ID NO: 22513 - RNA, 20 nt, Artificial Sequence
  RPE65 RNA guide
cuuguaccaccuggcaugag

SEQ ID NO: 22514 - RNA, 20 nt, Artificial Sequence
  RPE65 RNA guide
cuuuagguggucucaugcca

SEQ ID NO: 22515 - RNA, 20 nt, Artificial Sequence
  RPE65 RNA guide
cuuuauguacccuaccuaca

SEQ ID NO: 22516 - RNA, 20 nt, Artificial Sequence
  RPE65 RNA guide
cuuuucaugugaucaucaca

SEQ ID NO: 22517 - RNA, 20 nt, Artificial Sequence
  RPE65 RNA guide
cuuuuucugacucuuguacc

SEQ ID NO: 22518 - RNA, 20 nt, Artificial Sequence
  RPE65 RNA guide
gaaaaagaagucaggucaua

SEQ ID NO: 22519 - RNA, 20 nt, Artificial Sequence
  RPE65 RNA guide
gaaaaccauaugaccugacu

SEQ ID NO: 22520 - RNA, 20 nt, Artificial Sequence
  RPE65 RNA guide
gaacagauccauuuauucag

SEQ ID NO: 22521 - RNA, 20 nt, Artificial Sequence
  RPE65 RNA guide
gaagcugacuuccuucgaac

SEQ ID NO: 22522 - RNA, 20 nt, Artificial Sequence
  RPE65 RNA guide
gaaggaagucagcuuccaga

SEQ ID NO: 22523 - RNA, 20 nt, Artificial Sequence
  RPE65 RNA guide
gaagggagagucuugucugu

SEQ ID NO: 22524 - RNA, 20 nt, Artificial Sequence
  RPE65 RNA guide
gaagucagcuuccagaucga

SEQ ID NO: 22525 - RNA, 20 nt, Artificial Sequence
  RPE65 RNA guide
gaagucaggucauaugguuu

SEQ ID NO: 22526 - RNA, 20 nt, Artificial Sequence
  RPE65 RNA guide
gaauauugagauauagcagu

SEQ ID NO: 22527 - RNA, 20 nt, Artificial Sequence
  RPE65 RNA guide
gacaagacucucccuucuua

SEQ ID NO: 22528 - RNA, 20 nt, Artificial Sequence
  RPE65 RNA guide
gacaaugacuacagcguagu

SEQ ID NO: 22529 - RNA, 20 nt, Artificial Sequence
  RPE65 RNA guide
gacagacaagacucucccuu

SEQ ID NO: 22530 - RNA, 20 nt, Artificial Sequence
  RPE65 RNA guide
gacauucaaucuauagcuug

SEQ ID NO: 22531 - RNA, 20 nt, Artificial Sequence
  RPE65 RNA guide
gaccaccuaaagaggucuuu

SEQ ID NO: 22532 - RNA, 20 nt, Artificial Sequence
  RPE65 RNA guide
gaccucuuuagguggucuca

SEQ ID NO: 22533 - RNA, 20 nt, Artificial Sequence
  RPE65 RNA guide
gaccugacuucuuuuucuga

SEQ ID NO: 22534 - RNA, 20 nt, Artificial Sequence
  RPE65 RNA guide
gacuacagcguaguagguac

SEQ ID NO: 22535 - RNA, 20 nt, Artificial Sequence
  RPE65 RNA guide
gacucucccuucuuagagcu

SEQ ID NO: 22536 - RNA, 20 nt, Artificial Sequence
  RPE65 RNA guide
gacucuuguaccaccuggca

SEQ ID NO: 22537 - RNA, 20 nt, Artificial Sequence
  RPE65 RNA guide
gacuuccuucgaacaaaaug

SEQ ID NO: 22538 - RNA, 20 nt, Artificial Sequence
  RPE65 RNA guide
gacuucuuuuucugacucuu

SEQ ID NO: 22539 - RNA, 20 nt, Artificial Sequence
  RPE65 RNA guide
gagaccaccuaaagaggucu

SEQ ID NO: 22540 - RNA, 20 nt, Artificial Sequence
  RPE65 RNA guide
gagagucuugucugucuugc

SEQ ID NO: 22541 - RNA, 20 nt, Artificial Sequence
  RPE65 RNA guide
gagcaagacagacaagacuc

SEQ ID NO: 22542 - RNA, 20 nt, Artificial Sequence
  RPE65 RNA guide
gagcuuacaguguagguagg

SEQ ID NO: 22543 - RNA, 20 nt, Artificial Sequence
  RPE65 RNA guide
gaguaccuacuacgcuguag

SEQ ID NO: 22544 - RNA, 20 nt, Artificial Sequence
  RPE65 RNA guide
gaguauuuaaugaguaccua

SEQ ID NO: 22545 - RNA, 20 nt, Artificial Sequence
  RPE65 RNA guide
gagucagaaaaagaagucag

SEQ ID NO: 22546 - RNA, 20 nt, Artificial Sequence
  RPE65 RNA guide
gagucuugucugucuugcuc

SEQ ID NO: 22547 - RNA, 20 nt, Artificial Sequence
  RPE65 RNA guide
gaguuuaaaagaccucuuua

SEQ ID NO: 22548 - RNA, 20 nt, Artificial Sequence
  RPE65 RNA guide
gaguuuuuaaaagcccaagc

SEQ ID NO: 22549 - RNA, 20 nt, Artificial Sequence
  RPE65 RNA guide
gauauagcagugagcaagac

SEQ ID NO: 22550 - RNA, 20 nt, Artificial Sequence
  RPE65 RNA guide
gaucaucacaguuuuuacag

SEQ ID NO: 22551 - RNA, 20 nt, Artificial Sequence
  RPE65 RNA guide
gaucgaucuggaagcugacu

SEQ ID NO: 22552 - RNA, 20 nt, Artificial Sequence
  RPE65 RNA guide
gaucgaucuuagaaaccaua

SEQ ID NO: 22553 - RNA, 20 nt, Artificial Sequence
  RPE65 RNA guide
gaucuggaagcugacuuccu

SEQ ID NO: 22554 - RNA, 20 nt, Artificial Sequence
  RPE65 RNA guide
gaucuguucuuaucuguaac

SEQ ID NO: 22555 - RNA, 20 nt, Artificial Sequence
  RPE65 RNA guide
gaugaucacaugaaaagugu

SEQ ID NO: 22556 - RNA, 20 nt, Artificial Sequence
  RPE65 RNA guide
gauuuguucucauuuuguuc

SEQ ID NO: 22557 - RNA, 20 nt, Artificial Sequence
  RPE65 RNA guide
gcaagacagacaagacucuc

SEQ ID NO: 22558 - RNA, 20 nt, Artificial Sequence
  RPE65 RNA guide
gcaauauugaguuuuuaaaa

SEQ ID NO: 22559 - RNA, 20 nt, Artificial Sequence
  RPE65 RNA guide
gcaccugcuguacauacugu

SEQ ID NO: 22560 - RNA, 20 nt, Artificial Sequence
  RPE65 RNA guide
gcaggugcuauauuuguaug

SEQ ID NO: 22561 - RNA, 20 nt, Artificial Sequence
  RPE65 RNA guide
gcagugagcaagacagacaa

SEQ ID NO: 22562 - RNA, 20 nt, Artificial Sequence
  RPE65 RNA guide
gcaugagaccaccuaaagag

SEQ ID NO: 22563 - RNA, 20 nt, Artificial Sequence
  RPE65 RNA guide
gccaggugguacaagaguca

SEQ ID NO: 22564 - RNA, 20 nt, Artificial Sequence
  RPE65 RNA guide
gcccaagcuauagauugaau

SEQ ID NO: 22565 - RNA, 20 nt, Artificial Sequence
  RPE65 RNA guide
gccuaauuuacuucugauaa

SEQ ID NO: 22566 - RNA, 20 nt, Artificial Sequence
  RPE65 RNA guide
gcguaguagguacucauuaa

SEQ ID NO: 22567 - RNA, 20 nt, Artificial Sequence
  RPE65 RNA guide
gcucacugcuauaucucaau

SEQ ID NO: 22568 - RNA, 20 nt, Artificial Sequence
  RPE65 RNA guide
gcucuaagaagggagagucu

SEQ ID NO: 22569 - RNA, 20 nt, Artificial Sequence
  RPE65 RNA guide
gcugacuuccuucgaacaaa

SEQ ID NO: 22570 - RNA, 20 nt, Artificial Sequence
  RPE65 RNA guide
gcuguacauacuguaaaaac

SEQ ID NO: 22571 - RNA, 20 nt, Artificial Sequence
  RPE65 RNA guide
gcuguagucauugucauaga

SEQ ID NO: 22572 - RNA, 20 nt, Artificial Sequence
  RPE65 RNA guide
gcuuacaguguagguagggu

SEQ ID NO: 22573 - RNA, 20 nt, Artificial Sequence
  RPE65 RNA guide
gcuuccagaucgaucuuaga

SEQ ID NO: 22574 - RNA, 20 nt, Artificial Sequence
  RPE65 RNA guide
gcuugggcuuuuaaaaacuc

SEQ ID NO: 22575 - RNA, 20 nt, Artificial Sequence
  RPE65 RNA guide
ggaagcugacuuccuucgaa

SEQ ID NO: 22576 - RNA, 20 nt, Artificial Sequence
  RPE65 RNA guide
ggaagucagcuuccagaucg

SEQ ID NO: 22577 - RNA, 20 nt, Artificial Sequence
  RPE65 RNA guide
ggagagucuugucugucuug

SEQ ID NO: 22578 - RNA, 20 nt, Artificial Sequence
  RPE65 RNA guide
ggaucuguucuuaucuguaa

SEQ ID NO: 22579 - RNA, 20 nt, Artificial Sequence
  RPE65 RNA guide
ggcaauauugaguuuuuaaa

SEQ ID NO: 22580 - RNA, 20 nt, Artificial Sequence
  RPE65 RNA guide
ggcaugagaccaccuaaaga

SEQ ID NO: 22581 - RNA, 20 nt, Artificial Sequence
  RPE65 RNA guide
ggcuuuuaaaaacucaauau

SEQ ID NO: 22582 - RNA, 20 nt, Artificial Sequence
  RPE65 RNA guide
gggagagucuugucugucuu

SEQ ID NO: 22583 - RNA, 20 nt, Artificial Sequence
  RPE65 RNA guide
gggcuuuuaaaaacucaaua

SEQ ID NO: 22584 - RNA, 20 nt, Artificial Sequence
  RPE65 RNA guide
ggguacauaaagaguuuaaa

SEQ ID NO: 22585 - RNA, 20 nt, Artificial Sequence
  RPE65 RNA guide
gguacaagagucagaaaaag

SEQ ID NO: 22586 - RNA, 20 nt, Artificial Sequence
  RPE65 RNA guide
gguacauaaagaguuuaaaa

SEQ ID NO: 22587 - RNA, 20 nt, Artificial Sequence
  RPE65 RNA guide
gguacucauuaaauacucac

SEQ ID NO: 22588 - RNA, 20 nt, Artificial Sequence
  RPE65 RNA guide
gguaggguacauaaagaguu

SEQ ID NO: 22589 - RNA, 20 nt, Artificial Sequence
  RPE65 RNA guide
ggucucaugccaggugguac

SEQ ID NO: 22590 - RNA, 20 nt, Artificial Sequence
  RPE65 RNA guide
ggucuuuuaaacucuuuaug

SEQ ID NO: 22591 - RNA, 20 nt, Artificial Sequence
  RPE65 RNA guide
ggugcuauauuuguauguua

SEQ ID NO: 22592 - RNA, 20 nt, Artificial Sequence
  RPE65 RNA guide
ggugguacaagagucagaaa

SEQ ID NO: 22593 - RNA, 20 nt, Artificial Sequence
  RPE65 RNA guide
gguggucucaugccaggugg

SEQ ID NO: 22594 - RNA, 20 nt, Artificial Sequence
  RPE65 RNA guide
gguuucuaagaucgaucugg

SEQ ID NO: 22595 - RNA, 20 nt, Artificial Sequence
  RPE65 RNA guide
guaaaaacugugaugaucac

SEQ ID NO: 22596 - RNA, 20 nt, Artificial Sequence
  RPE65 RNA guide
guaacauacaaauauagcac

SEQ ID NO: 22597 - RNA, 20 nt, Artificial Sequence
  RPE65 RNA guide
guaagcucuaagaagggaga

SEQ ID NO: 22598 - RNA, 20 nt, Artificial Sequence
  RPE65 RNA guide
guacaagagucagaaaaaga

SEQ ID NO: 22599 - RNA, 20 nt, Artificial Sequence
  RPE65 RNA guide
guacagcaggugcuauauuu

SEQ ID NO: 22600 - RNA, 20 nt, Artificial Sequence
  RPE65 RNA guide
guacauacuguaaaaacugu

SEQ ID NO: 22601 - RNA, 20 nt, Artificial Sequence
  RPE65 RNA guide
guaccaccuggcaugagacc

SEQ ID NO: 22602 - RNA, 20 nt, Artificial Sequence
  RPE65 RNA guide
guacccuaccuacacuguaa

SEQ ID NO: 22603 - RNA, 20 nt, Artificial Sequence
  RPE65 RNA guide
guaccuacuacgcuguaguc

SEQ ID NO: 22604 - RNA, 20 nt, Artificial Sequence
  RPE65 RNA guide
guagguacucauuaaauacu

SEQ ID NO: 22605 - RNA, 20 nt, Artificial Sequence
  RPE65 RNA guide
guagguaggguacauaaaga

SEQ ID NO: 22606 - RNA, 20 nt, Artificial Sequence
  RPE65 RNA guide
guaguagguacucauuaaau

SEQ ID NO: 22607 - RNA, 20 nt, Artificial Sequence
  RPE65 RNA guide
guaugguuucuaagaucgau

SEQ ID NO: 22608 - RNA, 20 nt, Artificial Sequence
  RPE65 RNA guide
guauguacagcaggugcuau

SEQ ID NO: 22609 - RNA, 20 nt, Artificial Sequence
  RPE65 RNA guide
guauguuacagauaagaaca

SEQ ID NO: 22610 - RNA, 20 nt, Artificial Sequence
  RPE65 RNA guide
guauuuaaugaguaccuacu

SEQ ID NO: 22611 - RNA, 20 nt, Artificial Sequence
  RPE65 RNA guide
gucagaaaaagaagucaggu

SEQ ID NO: 22612 - RNA, 20 nt, Artificial Sequence
  RPE65 RNA guide
gucagcuuccagaucgaucu

SEQ ID NO: 22613 - RNA, 20 nt, Artificial Sequence
  RPE65 RNA guide
gucaggucauaugguuuucu

SEQ ID NO: 22614 - RNA, 20 nt, Artificial Sequence
  RPE65 RNA guide
gucucaugccaggugguaca

SEQ ID NO: 22615 - RNA, 20 nt, Artificial Sequence
  RPE65 RNA guide
gucugucuugcucacugcua

SEQ ID NO: 22616 - RNA, 20 nt, Artificial Sequence
  RPE65 RNA guide
gucuugcucacugcuauauc

SEQ ID NO: 22617 - RNA, 20 nt, Artificial Sequence
  RPE65 RNA guide
gucuugucugucuugcucac

SEQ ID NO: 22618 - RNA, 20 nt, Artificial Sequence
  RPE65 RNA guide
gucuuuuaaacucuuuaugu

SEQ ID NO: 22619 - RNA, 20 nt, Artificial Sequence
  RPE65 RNA guide
gugagcaagacagacaagac

SEQ ID NO: 22620 - RNA, 20 nt, Artificial Sequence
  RPE65 RNA guide
gugaguauuuaaugaguacc

SEQ ID NO: 22621 - RNA, 20 nt, Artificial Sequence
  RPE65 RNA guide
gugaucaucacaguuuuuac

SEQ ID NO: 22622 - RNA, 20 nt, Artificial Sequence
  RPE65 RNA guide
gugaugaucacaugaaaagu

SEQ ID NO: 22623 - RNA, 20 nt, Artificial Sequence
  RPE65 RNA guide
gugguacaagagucagaaaa

SEQ ID NO: 22624 - RNA, 20 nt, Artificial Sequence
  RPE65 RNA guide
guggucucaugccagguggu

SEQ ID NO: 22625 - RNA, 20 nt, Artificial Sequence
  RPE65 RNA guide
guguagguaggguacauaaa

SEQ ID NO: 22626 - RNA, 20 nt, Artificial Sequence
  RPE65 RNA guide
guuacagauaagaacagauc

SEQ ID NO: 22627 - RNA, 20 nt, Artificial Sequence
  RPE65 RNA guide
guucgaaggaagucagcuuc

SEQ ID NO: 22628 - RNA, 20 nt, Artificial Sequence
  RPE65 RNA guide
guucucauuuuguucgaagg

SEQ ID NO: 22629 - RNA, 20 nt, Artificial Sequence
  RPE65 RNA guide
guuuaaaagaccucuuuagg

SEQ ID NO: 22630 - RNA, 20 nt, Artificial Sequence
  RPE65 RNA guide
guuucuaagaucgaucugga

SEQ ID NO: 22631 - RNA, 20 nt, Artificial Sequence
  RPE65 RNA guide
guuuuuaaaagcccaagcua

SEQ ID NO: 22632 - RNA, 20 nt, Artificial Sequence
  RPE65 RNA guide
guuuuuacaguauguacagc

SEQ ID NO: 22633 - RNA, 20 nt, Artificial Sequence
  RPE65 RNA guide
uaaaagaccucuuuaggugg

SEQ ID NO: 22634 - RNA, 20 nt, Artificial Sequence
  RPE65 RNA guide
uaaaagcccaagcuauagau

SEQ ID NO: 22635 - RNA, 20 nt, Artificial Sequence
  RPE65 RNA guide
uaaacucuuuauguacccua

SEQ ID NO: 22636 - RNA, 20 nt, Artificial Sequence
  RPE65 RNA guide
uaacauacaaauauagcacc

SEQ ID NO: 22637 - RNA, 20 nt, Artificial Sequence
  RPE65 RNA guide
uaagaagggagagucuuguc

SEQ ID NO: 22638 - RNA, 20 nt, Artificial Sequence
  RPE65 RNA guide
uaagaucgaucuggaagcug

SEQ ID NO: 22639 - RNA, 20 nt, Artificial Sequence
  RPE65 RNA guide
uaagcucuaagaagggagag

SEQ ID NO: 22640 - RNA, 20 nt, Artificial Sequence
  RPE65 RNA guide
uaaugaguaccuacuacgcu

SEQ ID NO: 22641 - RNA, 20 nt, Artificial Sequence
  RPE65 RNA guide
uacaaauauagcaccugcug

SEQ ID NO: 22642 - RNA, 20 nt, Artificial Sequence
  RPE65 RNA guide
uacaagagucagaaaaagaa

SEQ ID NO: 22643 - RNA, 20 nt, Artificial Sequence
  RPE65 RNA guide
uacacacuuuucaugugauc

SEQ ID NO: 22644 - RNA, 20 nt, Artificial Sequence
  RPE65 RNA guide
uacacuguaagcucuaagaa

SEQ ID NO: 22645 - RNA, 20 nt, Artificial Sequence
  RPE65 RNA guide
uacagcaggugcuauauuug

SEQ ID NO: 22646 - RNA, 20 nt, Artificial Sequence
  RPE65 RNA guide
uacagcguaguagguacuca

SEQ ID NO: 22647 - RNA, 20 nt, Artificial Sequence
  RPE65 RNA guide
uacaguauguacagcaggug

SEQ ID NO: 22648 - RNA, 20 nt, Artificial Sequence
  RPE65 RNA guide
uacaguguagguaggguaca

SEQ ID NO: 22649 - RNA, 20 nt, Artificial Sequence
  RPE65 RNA guide
uaccaccuggcaugagacca

SEQ ID NO: 22650 - RNA, 20 nt, Artificial Sequence
  RPE65 RNA guide
uacccuaccuacacuguaag

SEQ ID NO: 22651 - RNA, 20 nt, Artificial Sequence
  RPE65 RNA guide
uaccuacacuguaagcucua

SEQ ID NO: 22652 - RNA, 20 nt, Artificial Sequence
  RPE65 RNA guide
uaccuacuacgcuguaguca

SEQ ID NO: 22653 - RNA, 20 nt, Artificial Sequence
  RPE65 RNA guide
uacgcuguagucauugucau

SEQ ID NO: 22654 - RNA, 20 nt, Artificial Sequence
  RPE65 RNA guide
uacuacgcuguagucauugu

SEQ ID NO: 22655 - RNA, 20 nt, Artificial Sequence
  RPE65 RNA guide
uacucacugaauaaauggau

SEQ ID NO: 22656 - RNA, 20 nt, Artificial Sequence
  RPE65 RNA guide
uacuguaaaaacugugauga

SEQ ID NO: 22657 - RNA, 20 nt, Artificial Sequence
  RPE65 RNA guide
uagaaaaccauaugaccuga

SEQ ID NO: 22658 - RNA, 20 nt, Artificial Sequence
  RPE65 RNA guide
uagagcuuacaguguaggua

SEQ ID NO: 22659 - RNA, 20 nt, Artificial Sequence
  RPE65 RNA guide
uagcaccugcuguacauacu

SEQ ID NO: 22660 - RNA, 20 nt, Artificial Sequence
  RPE65 RNA guide
uagcagugagcaagacagac

SEQ ID NO: 22661 - RNA, 20 nt, Artificial Sequence
  RPE65 RNA guide
uagcuugggcuuuuaaaaac

SEQ ID NO: 22662 - RNA, 20 nt, Artificial Sequence
  RPE65 RNA guide
uagguacucauuaaauacuc

SEQ ID NO: 22663 - RNA, 20 nt, Artificial Sequence
  RPE65 RNA guide
uagguaggguacauaaagag

SEQ ID NO: 22664 - RNA, 20 nt, Artificial Sequence
  RPE65 RNA guide
uagguggucucaugccaggu

SEQ ID NO: 22665 - RNA, 20 nt, Artificial Sequence
  RPE65 RNA guide
uauagaaaaccauaugaccu

SEQ ID NO: 22666 - RNA, 20 nt, Artificial Sequence
  RPE65 RNA guide
uauagcaccugcuguacaua

SEQ ID NO: 22667 - RNA, 20 nt, Artificial Sequence
  RPE65 RNA guide
uauagcuugggcuuuuaaaa

SEQ ID NO: 22668 - RNA, 20 nt, Artificial Sequence
  RPE65 RNA guide
uaugacaaugacuacagcgu

SEQ ID NO: 22669 - RNA, 20 nt, Artificial Sequence
  RPE65 RNA guide
uaugaccugacuucuuuuuc

SEQ ID NO: 22670 - RNA, 20 nt, Artificial Sequence
  RPE65 RNA guide
uaugguuucuaagaucgauc

SEQ ID NO: 22671 - RNA, 20 nt, Artificial Sequence
  RPE65 RNA guide
uauguacagcaggugcuaua

SEQ ID NO: 22672 - RNA, 20 nt, Artificial Sequence
  RPE65 RNA guide
uauguacccuaccuacacug

SEQ ID NO: 22673 - RNA, 20 nt, Artificial Sequence
  RPE65 RNA guide
uauguaugguuucuaagauc

SEQ ID NO: 22674 - RNA, 20 nt, Artificial Sequence
  RPE65 RNA guide
uauguuacagauaagaacag

SEQ ID NO: 22675 - RNA, 20 nt, Artificial Sequence
  RPE65 RNA guide
uauucuaugacaaugacuac

SEQ ID NO: 22676 - RNA, 20 nt, Artificial Sequence
  RPE65 RNA guide
uauugagauauagcagugag

SEQ ID NO: 22677 - RNA, 20 nt, Artificial Sequence
  RPE65 RNA guide
uauugaguuuuuaaaagccc

SEQ ID NO: 22678 - RNA, 20 nt, Artificial Sequence
  RPE65 RNA guide
uauuuaaugaguaccuacua

SEQ ID NO: 22679 - RNA, 20 nt, Artificial Sequence
  RPE65 RNA guide
ucaaucuauagcuugggcuu

SEQ ID NO: 22680 - RNA, 20 nt, Artificial Sequence
  RPE65 RNA guide
ucacaguuuuuacaguaugu

SEQ ID NO: 22681 - RNA, 20 nt, Artificial Sequence
  RPE65 RNA guide
ucacugaauaaauggaucug

SEQ ID NO: 22682 - RNA, 20 nt, Artificial Sequence
  RPE65 RNA guide
ucagaaaaagaagucagguc

SEQ ID NO: 22683 - RNA, 20 nt, Artificial Sequence
  RPE65 RNA guide
ucagcuuccagaucgaucuu

SEQ ID NO: 22684 - RNA, 20 nt, Artificial Sequence
  RPE65 RNA guide
ucagugaguauuuaaugagu

SEQ ID NO: 22685 - RNA, 20 nt, Artificial Sequence
  RPE65 RNA guide
ucauauguaugguuucuaag

SEQ ID NO: 22686 - RNA, 20 nt, Artificial Sequence
  RPE65 RNA guide
ucaugccaggugguacaaga

SEQ ID NO: 22687 - RNA, 20 nt, Artificial Sequence
  RPE65 RNA guide
ucaugugaucaucacaguuu

SEQ ID NO: 22688 - RNA, 20 nt, Artificial Sequence
  RPE65 RNA guide
ucauuuuguucgaaggaagu

SEQ ID NO: 22689 - RNA, 20 nt, Artificial Sequence
  RPE65 RNA guide
uccagaucgaucuuagaaac

SEQ ID NO: 22690 - RNA, 20 nt, Artificial Sequence
  RPE65 RNA guide
ucccuucuuagagcuuacag

SEQ ID NO: 22691 - RNA, 20 nt, Artificial Sequence
  RPE65 RNA guide
uccuucgaacaaaaugagaa

SEQ ID NO: 22692 - RNA, 20 nt, Artificial Sequence
  RPE65 RNA guide
ucgaaggaagucagcuucca

SEQ ID NO: 22693 - RNA, 20 nt, Artificial Sequence
  RPE65 RNA guide
ucgaucuggaagcugacuuc

SEQ ID NO: 22694 - RNA, 20 nt, Artificial Sequence
  RPE65 RNA guide
ucgaucuuagaaaccauaca

SEQ ID NO: 22695 - RNA, 20 nt, Artificial Sequence
  RPE65 RNA guide
ucuaagaagggagagucuug

SEQ ID NO: 22696 - RNA, 20 nt, Artificial Sequence
  RPE65 RNA guide
ucuaagaucgaucuggaagc

SEQ ID NO: 22697 - RNA, 20 nt, Artificial Sequence
  RPE65 RNA guide
ucuauagcuugggcuuuuaa

SEQ ID NO: 22698 - RNA, 20 nt, Artificial Sequence
  RPE65 RNA guide
ucuaugacaaugacuacagc

SEQ ID NO: 22699 - RNA, 20 nt, Artificial Sequence
  RPE65 RNA guide
ucucaugccaggugguacaa

SEQ ID NO: 22700 - RNA, 20 nt, Artificial Sequence
  RPE65 RNA guide
ucucauuuuguucgaaggaa

SEQ ID NO: 22701 - RNA, 20 nt, Artificial Sequence
  RPE65 RNA guide
ucucccuucuuagagcuuac

SEQ ID NO: 22702 - RNA, 20 nt, Artificial Sequence
  RPE65 RNA guide
ucugacucuuguaccaccug

SEQ ID NO: 22703 - RNA, 20 nt, Artificial Sequence
  RPE65 RNA guide
ucuggaagcugacuuccuuc

SEQ ID NO: 22704 - RNA, 20 nt, Artificial Sequence
  RPE65 RNA guide
ucuguaacauacaaauauag

SEQ ID NO: 22705 - RNA, 20 nt, Artificial Sequence
  RPE65 RNA guide
ucuuagagcuuacaguguag

SEQ ID NO: 22706 - RNA, 20 nt, Artificial Sequence
  RPE65 RNA guide
ucuugcucacugcuauaucu

SEQ ID NO: 22707 - RNA, 20 nt, Artificial Sequence
  RPE65 RNA guide
ucuuguaccaccuggcauga

SEQ ID NO: 22708 - RNA, 20 nt, Artificial Sequence
  RPE65 RNA guide
ucuugucugucuugcucacu

SEQ ID NO: 22709 - RNA, 20 nt, Artificial Sequence
  RPE65 RNA guide
ucuuuagguggucucaugcc

SEQ ID NO: 22710 - RNA, 20 nt, Artificial Sequence
  RPE65 RNA guide
ucuuuauguacccuaccuac

SEQ ID NO: 22711 - RNA, 20 nt, Artificial Sequence
  RPE65 RNA guide
ucuuuuucugacucuuguac

SEQ ID NO: 22712 - RNA, 20 nt, Artificial Sequence
  RPE65 RNA guide
ugacaaugacuacagcguag

SEQ ID NO: 22713 - RNA, 20 nt, Artificial Sequence
  RPE65 RNA guide
ugacauucaaucuauagcuu

SEQ ID NO: 22714 - RNA, 20 nt, Artificial Sequence
  RPE65 RNA guide
ugaccugacuucuuuuucug

SEQ ID NO: 22715 - RNA, 20 nt, Artificial Sequence
  RPE65 RNA guide
ugacuacagcguaguaggua

SEQ ID NO: 22716 - RNA, 20 nt, Artificial Sequence
  RPE65 RNA guide
ugacucuuguaccaccuggc

SEQ ID NO: 22717 - RNA, 20 nt, Artificial Sequence
  RPE65 RNA guide
ugacuuccuucgaacaaaau

SEQ ID NO: 22718 - RNA, 20 nt, Artificial Sequence
  RPE65 RNA guide
ugacuucuuuuucugacucu

SEQ ID NO: 22719 - RNA, 20 nt, Artificial Sequence
  RPE65 RNA guide
ugagaccaccuaaagagguc

SEQ ID NO: 22720 - RNA, 20 nt, Artificial Sequence
  RPE65 RNA guide
ugagauauagcagugagcaa

SEQ ID NO: 22721 - RNA, 20 nt, Artificial Sequence
  RPE65 RNA guide
ugagcaagacagacaagacu

SEQ ID NO: 22722 - RNA, 20 nt, Artificial Sequence
  RPE65 RNA guide
ugaguaccuacuacgcugua

SEQ ID NO: 22723 - RNA, 20 nt, Artificial Sequence
  RPE65 RNA guide
ugaguuuuuaaaagcccaag

SEQ ID NO: 22724 - RNA, 20 nt, Artificial Sequence
  RPE65 RNA guide
ugaugaucacaugaaaagug

SEQ ID NO: 22725 - RNA, 20 nt, Artificial Sequence
  RPE65 RNA guide
ugccaggugguacaagaguc

SEQ ID NO: 22726 - RNA, 20 nt, Artificial Sequence
  RPE65 RNA guide
ugcucacugcuauaucucaa

SEQ ID NO: 22727 - RNA, 20 nt, Artificial Sequence
  RPE65 RNA guide
ugcuguacauacuguaaaaa

SEQ ID NO: 22728 - RNA, 20 nt, Artificial Sequence
  RPE65 RNA guide
uggaagcugacuuccuucga

SEQ ID NO: 22729 - RNA, 20 nt, Artificial Sequence
  RPE65 RNA guide
uggaucuguucuuaucugua

SEQ ID NO: 22730 - RNA, 20 nt, Artificial Sequence
  RPE65 RNA guide
uggcaugagaccaccuaaag

SEQ ID NO: 22731 - RNA, 20 nt, Artificial Sequence
  RPE65 RNA guide
ugguacaagagucagaaaaa

SEQ ID NO: 22732 - RNA, 20 nt, Artificial Sequence
  RPE65 RNA guide
uggucucaugccagguggua

SEQ ID NO: 22733 - RNA, 20 nt, Artificial Sequence
  RPE65 RNA guide
ugguuucuaagaucgaucug

SEQ ID NO: 22734 - RNA, 20 nt, Artificial Sequence
  RPE65 RNA guide
uguaaaaacugugaugauca

SEQ ID NO: 22735 - RNA, 20 nt, Artificial Sequence
  RPE65 RNA guide
uguaacauacaaauauagca

SEQ ID NO: 22736 - RNA, 20 nt, Artificial Sequence
  RPE65 RNA guide
uguaagcucuaagaagggag

SEQ ID NO: 22737 - RNA, 20 nt, Artificial Sequence
  RPE65 RNA guide
uguacagcaggugcuauauu

SEQ ID NO: 22738 - RNA, 20 nt, Artificial Sequence
  RPE65 RNA guide
uguaccaccuggcaugagac

SEQ ID NO: 22739 - RNA, 20 nt, Artificial Sequence
  RPE65 RNA guide
uguacccuaccuacacugua

SEQ ID NO: 22740 - RNA, 20 nt, Artificial Sequence
  RPE65 RNA guide
uguagguaggguacauaaag

SEQ ID NO: 22741 - RNA, 20 nt, Artificial Sequence
  RPE65 RNA guide
uguaugguuucuaagaucga

SEQ ID NO: 22742 - RNA, 20 nt, Artificial Sequence
  RPE65 RNA guide
ugucugucuugcucacugcu

SEQ ID NO: 22743 - RNA, 20 nt, Artificial Sequence
  RPE65 RNA guide
ugucuugcucacugcuauau

SEQ ID NO: 22744 - RNA, 20 nt, Artificial Sequence
  RPE65 RNA guide
ugugaucaucacaguuuuua

SEQ ID NO: 22745 - RNA, 20 nt, Artificial Sequence
  RPE65 RNA guide
ugugaugaucacaugaaaag

SEQ ID NO: 22746 - RNA, 20 nt, Artificial Sequence
  RPE65 RNA guide
uguuacagauaagaacagau

SEQ ID NO: 22747 - RNA, 20 nt, Artificial Sequence
  RPE65 RNA guide
uguucgaaggaagucagcuu

SEQ ID NO: 22748 - RNA, 20 nt, Artificial Sequence
  RPE65 RNA guide
uguucucauuuuguucgaag

SEQ ID NO: 22749 - RNA, 20 nt, Artificial Sequence
  RPE65 RNA guide
uuaaaagaccucuuuaggug

SEQ ID NO: 22750 - RNA, 20 nt, Artificial Sequence
  RPE65 RNA guide
uuaaaagcccaagcuauaga

SEQ ID NO: 22751 - RNA, 20 nt, Artificial Sequence
  RPE65 RNA guide
uuaaacucuuuauguacccu

SEQ ID NO: 22752 - RNA, 20 nt, Artificial Sequence
  RPE65 RNA guide
uuaaugaguaccuacuacgc

SEQ ID NO: 22753 - RNA, 20 nt, Artificial Sequence
  RPE65 RNA guide
uuacaguauguacagcaggu

SEQ ID NO: 22754 - RNA, 20 nt, Artificial Sequence
  RPE65 RNA guide
uuacaguguagguaggguac

SEQ ID NO: 22755 - RNA, 20 nt, Artificial Sequence
  RPE65 RNA guide
uuagagcuuacaguguaggu

SEQ ID NO: 22756 - RNA, 20 nt, Artificial Sequence
  RPE65 RNA guide
uuagguggucucaugccagg

SEQ ID NO: 22757 - RNA, 20 nt, Artificial Sequence
  RPE65 RNA guide
uuauguacccuaccuacacu

SEQ ID NO: 22758 - RNA, 20 nt, Artificial Sequence
  RPE65 RNA guide
uucaaucuauagcuugggcu

SEQ ID NO: 22759 - RNA, 20 nt, Artificial Sequence
  RPE65 RNA guide
uucagugaguauuuaaugag

SEQ ID NO: 22760 - RNA, 20 nt, Artificial Sequence
  RPE65 RNA guide
uuccagaucgaucuuagaaa

SEQ ID NO: 22761 - RNA, 20 nt, Artificial Sequence
  RPE65 RNA guide
uuccuucgaacaaaaugaga

SEQ ID NO: 22762 - RNA, 20 nt, Artificial Sequence
  RPE65 RNA guide
uucgaaggaagucagcuucc

SEQ ID NO: 22763 - RNA, 20 nt, Artificial Sequence
  RPE65 RNA guide
uucuaagaucgaucuggaag

SEQ ID NO: 22764 - RNA, 20 nt, Artificial Sequence
  RPE65 RNA guide
uucuaugacaaugacuacag

SEQ ID NO: 22765 - RNA, 20 nt, Artificial Sequence
  RPE65 RNA guide
uucucauuuuguucgaagga

SEQ ID NO: 22766 - RNA, 20 nt, Artificial Sequence
  RPE65 RNA guide
uucugacucuuguaccaccu

SEQ ID NO: 22767 - RNA, 20 nt, Artificial Sequence
  RPE65 RNA guide
uucuuagagcuuacagugua

SEQ ID NO: 22768 - RNA, 20 nt, Artificial Sequence
  RPE65 RNA guide
uucuuuuucugacucuugua

SEQ ID NO: 22769 - RNA, 20 nt, Artificial Sequence
  RPE65 RNA guide
uugagauauagcagugagca

SEQ ID NO: 22770 - RNA, 20 nt, Artificial Sequence
  RPE65 RNA guide
uugaguuuuuaaaagcccaa

SEQ ID NO: 22771 - RNA, 20 nt, Artificial Sequence
  RPE65 RNA guide
uugcucacugcuauaucuca

SEQ ID NO: 22772 - RNA, 20 nt, Artificial Sequence
  RPE65 RNA guide
uuguaccaccuggcaugaga

SEQ ID NO: 22773 - RNA, 20 nt, Artificial Sequence
  RPE65 RNA guide
uuguucgaaggaagucagcu

SEQ ID NO: 22774 - RNA, 20 nt, Artificial Sequence
  RPE65 RNA guide
uuguucucauuuuguucgaa

SEQ ID NO: 22775 - RNA, 20 nt, Artificial Sequence
  RPE65 RNA guide
uuuaaaagaccucuuuaggu

SEQ ID NO: 22776 - RNA, 20 nt, Artificial Sequence
  RPE65 RNA guide
uuuaaaagcccaagcuauag

SEQ ID NO: 22777 - RNA, 20 nt, Artificial Sequence
  RPE65 RNA guide
uuuaaacucuuuauguaccc

SEQ ID NO: 22778 - RNA, 20 nt, Artificial Sequence
  RPE65 RNA guide
uuuaaugaguaccuacuacg

SEQ ID NO: 22779 - RNA, 20 nt, Artificial Sequence
  RPE65 RNA guide
uuuacaguauguacagcagg

SEQ ID NO: 22780 - RNA, 20 nt, Artificial Sequence
  RPE65 RNA guide
uuuagguggucucaugccag

SEQ ID NO: 22781 - RNA, 20 nt, Artificial Sequence
  RPE65 RNA guide
uuuauguacccuaccuacac

SEQ ID NO: 22782 - RNA, 20 nt, Artificial Sequence
  RPE65 RNA guide
uuucuaagaucgaucuggaa

SEQ ID NO: 22783 - RNA, 20 nt, Artificial Sequence
  RPE65 RNA guide
uuucugacucuuguaccacc

SEQ ID NO: 22784 - RNA, 20 nt, Artificial Sequence
  RPE65 RNA guide
uuuguucgaaggaagucagc

SEQ ID NO: 22785 - RNA, 20 nt, Artificial Sequence
  RPE65 RNA guide
uuuguucucauuuuguucga

SEQ ID NO: 22786 - RNA, 20 nt, Artificial Sequence
  RPE65 RNA guide
uuuuacaguauguacagcag

SEQ ID NO: 22787 - RNA, 20 nt, Artificial Sequence
  RPE65 RNA guide
uuuucugacucuuguaccac

SEQ ID NO: 22788 - RNA, 20 nt, Artificial Sequence
  RPE65 RNA guide
uuuuguucgaaggaagucag

SEQ ID NO: 22789 - RNA, 20 nt, Artificial Sequence
  RPE65 RNA guide
uuuuuacaguauguacagca

SEQ ID NO: 22790 - RNA, 20 nt, Artificial Sequence
  RPE65 RNA guide
uuuuucugacucuuguacca

SEQ ID NO: 22791 - RNA, 21 nt, Artificial Sequence
  RPE65 RNA guide
aaaaagaagucaggucauaug

SEQ ID NO: 22792 - RNA, 21 nt, Artificial Sequence
  RPE65 RNA guide
aaaaccauaugaccugacuuc

SEQ ID NO: 22793 - RNA, 21 nt, Artificial Sequence
  RPE65 RNA guide
aaaacugugaugaucacauga

SEQ ID NO: 22794 - RNA, 21 nt, Artificial Sequence
  RPE65 RNA guide
aaaagaagucaggucauaugg

SEQ ID NO: 22795 - RNA, 21 nt, Artificial Sequence
  RPE65 RNA guide
aaaagaccucuuuaggugguc

SEQ ID NO: 22796 - RNA, 21 nt, Artificial Sequence
  RPE65 RNA guide
aaaagcccaagcuauagauug

SEQ ID NO: 22797 - RNA, 21 nt, Artificial Sequence
  RPE65 RNA guide
aaaccauaugaccugacuucu

SEQ ID NO: 22798 - RNA, 21 nt, Artificial Sequence
  RPE65 RNA guide
aaacucuuuauguacccuacc

SEQ ID NO: 22799 - RNA, 21 nt, Artificial Sequence
  RPE65 RNA guide
aaacugugaugaucacaugaa

SEQ ID NO: 22800 - RNA, 21 nt, Artificial Sequence
  RPE65 RNA guide
aaagaagucaggucauauggu

SEQ ID NO: 22801 - RNA, 21 nt, Artificial Sequence
  RPE65 RNA guide
aaagaccucuuuagguggucu

SEQ ID NO: 22802 - RNA, 21 nt, Artificial Sequence
  RPE65 RNA guide
aaagaguuuaaaagaccucuu

SEQ ID NO: 22803 - RNA, 21 nt, Artificial Sequence
  RPE65 RNA guide
aaagcccaagcuauagauuga

SEQ ID NO: 22804 - RNA, 21 nt, Artificial Sequence
  RPE65 RNA guide
aaauauagcaccugcuguaca

SEQ ID NO: 22805 - RNA, 21 nt, Artificial Sequence
  RPE65 RNA guide
aaauggaucuguucuuaucug

SEQ ID NO: 22806 - RNA, 21 nt, Artificial Sequence
  RPE65 RNA guide
aacagauccauuuauucagug

SEQ ID NO: 22807 - RNA, 21 nt, Artificial Sequence
  RPE65 RNA guide
aacauacaaauauagcaccug

SEQ ID NO: 22808 - RNA, 21 nt, Artificial Sequence
  RPE65 RNA guide
aaccauaugaccugacuucuu

SEQ ID NO: 22809 - RNA, 21 nt, Artificial Sequence
  RPE65 RNA guide
aacucuuuauguacccuaccu

SEQ ID NO: 22810 - RNA, 21 nt, Artificial Sequence
  RPE65 RNA guide
aacugugaugaucacaugaaa

SEQ ID NO: 22811 - RNA, 21 nt, Artificial Sequence
  RPE65 RNA guide
aagaacagauccauuuauuca

SEQ ID NO: 22812 - RNA, 21 nt, Artificial Sequence
  RPE65 RNA guide
aagaagggagagucuugucug

SEQ ID NO: 22813 - RNA, 21 nt, Artificial Sequence
  RPE65 RNA guide
aagaagucaggucauaugguu

SEQ ID NO: 22814 - RNA, 21 nt, Artificial Sequence
  RPE65 RNA guide
aagacagacaagacucucccu

SEQ ID NO: 22815 - RNA, 21 nt, Artificial Sequence
  RPE65 RNA guide
aagaccucuuuagguggucuc

SEQ ID NO: 22816 - RNA, 21 nt, Artificial Sequence
  RPE65 RNA guide
aagacucucccuucuuagagc

SEQ ID NO: 22817 - RNA, 21 nt, Artificial Sequence
  RPE65 RNA guide
aagagucagaaaaagaaguca

SEQ ID NO: 22818 - RNA, 21 nt, Artificial Sequence
  RPE65 RNA guide
aagaguuuaaaagaccucuuu

SEQ ID NO: 22819 - RNA, 21 nt, Artificial Sequence
  RPE65 RNA guide
aagaucgaucuggaagcugac

SEQ ID NO: 22820 - RNA, 21 nt, Artificial Sequence
  RPE65 RNA guide
aagcccaagcuauagauugaa

SEQ ID NO: 22821 - RNA, 21 nt, Artificial Sequence
  RPE65 RNA guide
aagcucuaagaagggagaguc

SEQ ID NO: 22822 - RNA, 21 nt, Artificial Sequence
  RPE65 RNA guide
aagcugacuuccuucgaacaa

SEQ ID NO: 22823 - RNA, 21 nt, Artificial Sequence
  RPE65 RNA guide
aaggaagucagcuuccagauc

SEQ ID NO: 22824 - RNA, 21 nt, Artificial Sequence
  RPE65 RNA guide
aagggagagucuugucugucu

SEQ ID NO: 22825 - RNA, 21 nt, Artificial Sequence
  RPE65 RNA guide
aagucagcuuccagaucgauc

SEQ ID NO: 22826 - RNA, 21 nt, Artificial Sequence
  RPE65 RNA guide
aagucaggucauaugguuuuc

SEQ ID NO: 22827 - RNA, 21 nt, Artificial Sequence
  RPE65 RNA guide
aauacacacuuuucaugugau

SEQ ID NO: 22828 - RNA, 21 nt, Artificial Sequence
  RPE65 RNA guide
aauacucacugaauaaaugga

SEQ ID NO: 22829 - RNA, 21 nt, Artificial Sequence
  RPE65 RNA guide
aauauagaaaaccauaugacc

SEQ ID NO: 22830 - RNA, 21 nt, Artificial Sequence
  RPE65 RNA guide
aauauagcaccugcuguacau

SEQ ID NO: 22831 - RNA, 21 nt, Artificial Sequence
  RPE65 RNA guide
aauauucuaugacaaugacua

SEQ ID NO: 22832 - RNA, 21 nt, Artificial Sequence
  RPE65 RNA guide
aauauugagauauagcaguga

SEQ ID NO: 22833 - RNA, 21 nt, Artificial Sequence
  RPE65 RNA guide
aaugacauucaaucuauagcu

SEQ ID NO: 22834 - RNA, 21 nt, Artificial Sequence
  RPE65 RNA guide
aaugacuacagcguaguaggu

SEQ ID NO: 22835 - RNA, 21 nt, Artificial Sequence
  RPE65 RNA guide
aaugaguaccuacuacgcugu

SEQ ID NO: 22836 - RNA, 21 nt, Artificial Sequence
  RPE65 RNA guide
aauggaucuguucuuaucugu

SEQ ID NO: 22837 - RNA, 21 nt, Artificial Sequence
  RPE65 RNA guide
acaaauauagcaccugcugua

SEQ ID NO: 22838 - RNA, 21 nt, Artificial Sequence
  RPE65 RNA guide
acaagacucucccuucuuaga

SEQ ID NO: 22839 - RNA, 21 nt, Artificial Sequence
  RPE65 RNA guide
acaagagucagaaaaagaagu

SEQ ID NO: 22840 - RNA, 21 nt, Artificial Sequence
  RPE65 RNA guide
acaaugacuacagcguaguag

SEQ ID NO: 22841 - RNA, 21 nt, Artificial Sequence
  RPE65 RNA guide
acacacuuuucaugugaucau

SEQ ID NO: 22842 - RNA, 21 nt, Artificial Sequence
  RPE65 RNA guide
acacuguaagcucuaagaagg

SEQ ID NO: 22843 - RNA, 21 nt, Artificial Sequence
  RPE65 RNA guide
acacuuuucaugugaucauca

SEQ ID NO: 22844 - RNA, 21 nt, Artificial Sequence
  RPE65 RNA guide
acagacaagacucucccuucu

SEQ ID NO: 22845 - RNA, 21 nt, Artificial Sequence
  RPE65 RNA guide
acagauccauuuauucaguga

SEQ ID NO: 22846 - RNA, 21 nt, Artificial Sequence
  RPE65 RNA guide
acagcaggugcuauauuugua

SEQ ID NO: 22847 - RNA, 21 nt, Artificial Sequence
  RPE65 RNA guide
acagcguaguagguacucauu

SEQ ID NO: 22848 - RNA, 21 nt, Artificial Sequence
  RPE65 RNA guide
acaguauguacagcaggugcu

SEQ ID NO: 22849 - RNA, 21 nt, Artificial Sequence
  RPE65 RNA guide
acaguguagguaggguacaua

SEQ ID NO: 22850 - RNA, 21 nt, Artificial Sequence
  RPE65 RNA guide
acaguuuuuacaguauguaca

SEQ ID NO: 22851 - RNA, 21 nt, Artificial Sequence
  RPE65 RNA guide
acauacaaauauagcaccugc

SEQ ID NO: 22852 - RNA, 21 nt, Artificial Sequence
  RPE65 RNA guide
acauacuguaaaaacugugau

SEQ ID NO: 22853 - RNA, 21 nt, Artificial Sequence
  RPE65 RNA guide
acauucaaucuauagcuuggg

SEQ ID NO: 22854 - RNA, 21 nt, Artificial Sequence
  RPE65 RNA guide
accaccuaaagaggucuuuua

SEQ ID NO: 22855 - RNA, 21 nt, Artificial Sequence
  RPE65 RNA guide
accaccuggcaugagaccacc

SEQ ID NO: 22856 - RNA, 21 nt, Artificial Sequence
  RPE65 RNA guide
accauaugaccugacuucuuu

SEQ ID NO: 22857 - RNA, 21 nt, Artificial Sequence
  RPE65 RNA guide
acccuaccuacacuguaagcu

SEQ ID NO: 22858 - RNA, 21 nt, Artificial Sequence
  RPE65 RNA guide
accuaaagaggucuuuuaaac

SEQ ID NO: 22859 - RNA, 21 nt, Artificial Sequence
  RPE65 RNA guide
accuacacuguaagcucuaag

SEQ ID NO: 22860 - RNA, 21 nt, Artificial Sequence
  RPE65 RNA guide
accuacuacgcuguagucauu

SEQ ID NO: 22861 - RNA, 21 nt, Artificial Sequence
  RPE65 RNA guide
accucuuuagguggucucaug

SEQ ID NO: 22862 - RNA, 21 nt, Artificial Sequence
  RPE65 RNA guide
accugacuucuuuuucugacu

SEQ ID NO: 22863 - RNA, 21 nt, Artificial Sequence
  RPE65 RNA guide
accugcuguacauacuguaaa

SEQ ID NO: 22864 - RNA, 21 nt, Artificial Sequence
  RPE65 RNA guide
accuggcaugagaccaccuaa

SEQ ID NO: 22865 - RNA, 21 nt, Artificial Sequence
  RPE65 RNA guide
acgcuguagucauugucauag

SEQ ID NO: 22866 - RNA, 21 nt, Artificial Sequence
  RPE65 RNA guide
acuacagcguaguagguacuc

SEQ ID NO: 22867 - RNA, 21 nt, Artificial Sequence
  RPE65 RNA guide
acuacgcuguagucauuguca

SEQ ID NO: 22868 - RNA, 21 nt, Artificial Sequence
  RPE65 RNA guide
acucacugaauaaauggaucu

SEQ ID NO: 22869 - RNA, 21 nt, Artificial Sequence
  RPE65 RNA guide
acucucccuucuuagagcuua

SEQ ID NO: 22870 - RNA, 21 nt, Artificial Sequence
  RPE65 RNA guide
acucuuguaccaccuggcaug

SEQ ID NO: 22871 - RNA, 21 nt, Artificial Sequence
  RPE65 RNA guide
acucuuuauguacccuaccua

SEQ ID NO: 22872 - RNA, 21 nt, Artificial Sequence
  RPE65 RNA guide
acuguaaaaacugugaugauc

SEQ ID NO: 22873 - RNA, 21 nt, Artificial Sequence
  RPE65 RNA guide
acuguaagcucuaagaaggga

SEQ ID NO: 22874 - RNA, 21 nt, Artificial Sequence
  RPE65 RNA guide
acugugaugaucacaugaaaa

SEQ ID NO: 22875 - RNA, 21 nt, Artificial Sequence
  RPE65 RNA guide
acuuccuucgaacaaaaugag

SEQ ID NO: 22876 - RNA, 21 nt, Artificial Sequence
  RPE65 RNA guide
acuucuuuuucugacucuugu

SEQ ID NO: 22877 - RNA, 21 nt, Artificial Sequence
  RPE65 RNA guide
acuuuucaugugaucaucaca

SEQ ID NO: 22878 - RNA, 21 nt, Artificial Sequence
  RPE65 RNA guide
agaaaaagaagucaggucaua

SEQ ID NO: 22879 - RNA, 21 nt, Artificial Sequence
  RPE65 RNA guide
agaaaaccauaugaccugacu

SEQ ID NO: 22880 - RNA, 21 nt, Artificial Sequence
  RPE65 RNA guide
agaacagauccauuuauucag

SEQ ID NO: 22881 - RNA, 21 nt, Artificial Sequence
  RPE65 RNA guide
agaagggagagucuugucugu

SEQ ID NO: 22882 - RNA, 21 nt, Artificial Sequence
  RPE65 RNA guide
agaagucaggucauaugguuu

SEQ ID NO: 22883 - RNA, 21 nt, Artificial Sequence
  RPE65 RNA guide
agaauauugagauauagcagu

SEQ ID NO: 22884 - RNA, 21 nt, Artificial Sequence
  RPE65 RNA guide
agacaagacucucccuucuua

SEQ ID NO: 22885 - RNA, 21 nt, Artificial Sequence
  RPE65 RNA guide
agacagacaagacucucccuu

SEQ ID NO: 22886 - RNA, 21 nt, Artificial Sequence
  RPE65 RNA guide
agaccaccuaaagaggucuuu

SEQ ID NO: 22887 - RNA, 21 nt, Artificial Sequence
  RPE65 RNA guide
agaccucuuuagguggucuca

SEQ ID NO: 22888 - RNA, 21 nt, Artificial Sequence
  RPE65 RNA guide
agacucucccuucuuagagcu

SEQ ID NO: 22889 - RNA, 21 nt, Artificial Sequence
  RPE65 RNA guide
agagcuuacaguguagguagg

SEQ ID NO: 22890 - RNA, 21 nt, Artificial Sequence
  RPE65 RNA guide
agagucagaaaaagaagucag

SEQ ID NO: 22891 - RNA, 21 nt, Artificial Sequence
  RPE65 RNA guide
agagucuugucugucuugcuc

SEQ ID NO: 22892 - RNA, 21 nt, Artificial Sequence
  RPE65 RNA guide
agaguuuaaaagaccucuuua

SEQ ID NO: 22893 - RNA, 21 nt, Artificial Sequence
  RPE65 RNA guide
agauauagcagugagcaagac

SEQ ID NO: 22894 - RNA, 21 nt, Artificial Sequence
  RPE65 RNA guide
agaucgaucuggaagcugacu

SEQ ID NO: 22895 - RNA, 21 nt, Artificial Sequence
  RPE65 RNA guide
agaucgaucuuagaaaccaua

SEQ ID NO: 22896 - RNA, 21 nt, Artificial Sequence
  RPE65 RNA guide
agauuuguucucauuuuguuc

SEQ ID NO: 22897 - RNA, 21 nt, Artificial Sequence
  RPE65 RNA guide
agcaagacagacaagacucuc

SEQ ID NO: 22898 - RNA, 21 nt, Artificial Sequence
  RPE65 RNA guide
agcaccugcuguacauacugu

SEQ ID NO: 22899 - RNA, 21 nt, Artificial Sequence
  RPE65 RNA guide
agcaggugcuauauuuguaug

SEQ ID NO: 22900 - RNA, 21 nt, Artificial Sequence
  RPE65 RNA guide
agcagugagcaagacagacaa

SEQ ID NO: 22901 - RNA, 21 nt, Artificial Sequence
  RPE65 RNA guide
agcccaagcuauagauugaau

SEQ ID NO: 22902 - RNA, 21 nt, Artificial Sequence
  RPE65 RNA guide
agcguaguagguacucauuaa

SEQ ID NO: 22903 - RNA, 21 nt, Artificial Sequence
  RPE65 RNA guide
agcucuaagaagggagagucu

SEQ ID NO: 22904 - RNA, 21 nt, Artificial Sequence
  RPE65 RNA guide
agcugacuuccuucgaacaaa

SEQ ID NO: 22905 - RNA, 21 nt, Artificial Sequence
  RPE65 RNA guide
agcuuacaguguagguagggu

SEQ ID NO: 22906 - RNA, 21 nt, Artificial Sequence
  RPE65 RNA guide
agcuuccagaucgaucuuaga

SEQ ID NO: 22907 - RNA, 21 nt, Artificial Sequence
  RPE65 RNA guide
agcuugggcuuuuaaaaacuc

SEQ ID NO: 22908 - RNA, 21 nt, Artificial Sequence
  RPE65 RNA guide
aggaagucagcuuccagaucg

SEQ ID NO: 22909 - RNA, 21 nt, Artificial Sequence
  RPE65 RNA guide
aggcaauauugaguuuuuaaa

SEQ ID NO: 22910 - RNA, 21 nt, Artificial Sequence
  RPE65 RNA guide
agggagagucuugucugucuu

SEQ ID NO: 22911 - RNA, 21 nt, Artificial Sequence
  RPE65 RNA guide
aggguacauaaagaguuuaaa

SEQ ID NO: 22912 - RNA, 21 nt, Artificial Sequence
  RPE65 RNA guide
agguacucauuaaauacucac

SEQ ID NO: 22913 - RNA, 21 nt, Artificial Sequence
  RPE65 RNA guide
agguaggguacauaaagaguu

SEQ ID NO: 22914 - RNA, 21 nt, Artificial Sequence
  RPE65 RNA guide
aggucuuuuaaacucuuuaug

SEQ ID NO: 22915 - RNA, 21 nt, Artificial Sequence
  RPE65 RNA guide
aggugcuauauuuguauguua

SEQ ID NO: 22916 - RNA, 21 nt, Artificial Sequence
  RPE65 RNA guide
aggugguacaagagucagaaa

SEQ ID NO: 22917 - RNA, 21 nt, Artificial Sequence
  RPE65 RNA guide
agguggucucaugccaggugg

SEQ ID NO: 22918 - RNA, 21 nt, Artificial Sequence
  RPE65 RNA guide
aguaccuacuacgcuguaguc

SEQ ID NO: 22919 - RNA, 21 nt, Artificial Sequence
  RPE65 RNA guide
aguagguacucauuaaauacu

SEQ ID NO: 22920 - RNA, 21 nt, Artificial Sequence
  RPE65 RNA guide
aguauguacagcaggugcuau

SEQ ID NO: 22921 - RNA, 21 nt, Artificial Sequence
  RPE65 RNA guide
aguauuuaaugaguaccuacu

SEQ ID NO: 22922 - RNA, 21 nt, Artificial Sequence
  RPE65 RNA guide
agucagaaaaagaagucaggu

SEQ ID NO: 22923 - RNA, 21 nt, Artificial Sequence
  RPE65 RNA guide
agucagcuuccagaucgaucu

SEQ ID NO: 22924 - RNA, 21 nt, Artificial Sequence
  RPE65 RNA guide
agucaggucauaugguuuucu

SEQ ID NO: 22925 - RNA, 21 nt, Artificial Sequence
  RPE65 RNA guide
agucuugucugucuugcucac

SEQ ID NO: 22926 - RNA, 21 nt, Artificial Sequence
  RPE65 RNA guide
agugagcaagacagacaagac

SEQ ID NO: 22927 - RNA, 21 nt, Artificial Sequence
  RPE65 RNA guide
agugaguauuuaaugaguacc

SEQ ID NO: 22928 - RNA, 21 nt, Artificial Sequence
  RPE65 RNA guide
aguguagguaggguacauaaa

SEQ ID NO: 22929 - RNA, 21 nt, Artificial Sequence
  RPE65 RNA guide
aguuuaaaagaccucuuuagg

SEQ ID NO: 22930 - RNA, 21 nt, Artificial Sequence
  RPE65 RNA guide
aguuuuuaaaagcccaagcua

SEQ ID NO: 22931 - RNA, 21 nt, Artificial Sequence
  RPE65 RNA guide
aguuuuuacaguauguacagc

SEQ ID NO: 22932 - RNA, 21 nt, Artificial Sequence
  RPE65 RNA guide
auacaaauauagcaccugcug

SEQ ID NO: 22933 - RNA, 21 nt, Artificial Sequence
  RPE65 RNA guide
auacacacuuuucaugugauc

SEQ ID NO: 22934 - RNA, 21 nt, Artificial Sequence
  RPE65 RNA guide
auacucacugaauaaauggau

SEQ ID NO: 22935 - RNA, 21 nt, Artificial Sequence
  RPE65 RNA guide
auacuguaaaaacugugauga

SEQ ID NO: 22936 - RNA, 21 nt, Artificial Sequence
  RPE65 RNA guide
auagaaaaccauaugaccuga

SEQ ID NO: 22937 - RNA, 21 nt, Artificial Sequence
  RPE65 RNA guide
auagcaccugcuguacauacu

SEQ ID NO: 22938 - RNA, 21 nt, Artificial Sequence
  RPE65 RNA guide
auagcagugagcaagacagac

SEQ ID NO: 22939 - RNA, 21 nt, Artificial Sequence
  RPE65 RNA guide
auagcuugggcuuuuaaaaac

SEQ ID NO: 22940 - RNA, 21 nt, Artificial Sequence
  RPE65 RNA guide
auauagaaaaccauaugaccu

SEQ ID NO: 22941 - RNA, 21 nt, Artificial Sequence
  RPE65 RNA guide
auauagcaccugcuguacaua

SEQ ID NO: 22942 - RNA, 21 nt, Artificial Sequence
  RPE65 RNA guide
auauagcagugagcaagacag

SEQ ID NO: 22943 - RNA, 21 nt, Artificial Sequence
  RPE65 RNA guide
auaugaccugacuucuuuuuc

SEQ ID NO: 22944 - RNA, 21 nt, Artificial Sequence
  RPE65 RNA guide
auauguaugguuucuaagauc

SEQ ID NO: 22945 - RNA, 21 nt, Artificial Sequence
  RPE65 RNA guide
auauucuaugacaaugacuac

SEQ ID NO: 22946 - RNA, 21 nt, Artificial Sequence
  RPE65 RNA guide
auauugagauauagcagugag

SEQ ID NO: 22947 - RNA, 21 nt, Artificial Sequence
  RPE65 RNA guide
auauugaguuuuuaaaagccc

SEQ ID NO: 22948 - RNA, 21 nt, Artificial Sequence
  RPE65 RNA guide
aucacaguuuuuacaguaugu

SEQ ID NO: 22949 - RNA, 21 nt, Artificial Sequence
  RPE65 RNA guide
aucauauguaugguuucuaag

SEQ ID NO: 22950 - RNA, 21 nt, Artificial Sequence
  RPE65 RNA guide
aucgaucuggaagcugacuuc

SEQ ID NO: 22951 - RNA, 21 nt, Artificial Sequence
  RPE65 RNA guide
aucgaucuuagaaaccauaca

SEQ ID NO: 22952 - RNA, 21 nt, Artificial Sequence
  RPE65 RNA guide
aucuauagcuugggcuuuuaa

SEQ ID NO: 22953 - RNA, 21 nt, Artificial Sequence
  RPE65 RNA guide
aucuggaagcugacuuccuuc

SEQ ID NO: 22954 - RNA, 21 nt, Artificial Sequence
  RPE65 RNA guide
aucuguaacauacaaauauag

SEQ ID NO: 22955 - RNA, 21 nt, Artificial Sequence
  RPE65 RNA guide
augacaaugacuacagcguag

SEQ ID NO: 22956 - RNA, 21 nt, Artificial Sequence
  RPE65 RNA guide
augacauucaaucuauagcuu

SEQ ID NO: 22957 - RNA, 21 nt, Artificial Sequence
  RPE65 RNA guide
augaccugacuucuuuuucug

SEQ ID NO: 22958 - RNA, 21 nt, Artificial Sequence
  RPE65 RNA guide
augacuacagcguaguaggua

SEQ ID NO: 22959 - RNA, 21 nt, Artificial Sequence
  RPE65 RNA guide
augagaccaccuaaagagguc

SEQ ID NO: 22960 - RNA, 21 nt, Artificial Sequence
  RPE65 RNA guide
augaguaccuacuacgcugua

SEQ ID NO: 22961 - RNA, 21 nt, Artificial Sequence
  RPE65 RNA guide
augccaggugguacaagaguc

SEQ ID NO: 22962 - RNA, 21 nt, Artificial Sequence
  RPE65 RNA guide
auggaucuguucuuaucugua

SEQ ID NO: 22963 - RNA, 21 nt, Artificial Sequence
  RPE65 RNA guide
augguuucuaagaucgaucug

SEQ ID NO: 22964 - RNA, 21 nt, Artificial Sequence
  RPE65 RNA guide
auguacagcaggugcuauauu

SEQ ID NO: 22965 - RNA, 21 nt, Artificial Sequence
  RPE65 RNA guide
auguacccuaccuacacugua

SEQ ID NO: 22966 - RNA, 21 nt, Artificial Sequence
  RPE65 RNA guide
auguaugguuucuaagaucga

SEQ ID NO: 22967 - RNA, 21 nt, Artificial Sequence
  RPE65 RNA guide
augugaucaucacaguuuuua

SEQ ID NO: 22968 - RNA, 21 nt, Artificial Sequence
  RPE65 RNA guide
auguuacagauaagaacagau

SEQ ID NO: 22969 - RNA, 21 nt, Artificial Sequence
  RPE65 RNA guide
auucaaucuauagcuugggcu

SEQ ID NO: 22970 - RNA, 21 nt, Artificial Sequence
  RPE65 RNA guide
auucagugaguauuuaaugag

SEQ ID NO: 22971 - RNA, 21 nt, Artificial Sequence
  RPE65 RNA guide
auucuaugacaaugacuacag

SEQ ID NO: 22972 - RNA, 21 nt, Artificial Sequence
  RPE65 RNA guide
auugagauauagcagugagca

SEQ ID NO: 22973 - RNA, 21 nt, Artificial Sequence
  RPE65 RNA guide
auugaguuuuuaaaagcccaa

SEQ ID NO: 22974 - RNA, 21 nt, Artificial Sequence
  RPE65 RNA guide
auuuaaugaguaccuacuacg

SEQ ID NO: 22975 - RNA, 21 nt, Artificial Sequence
  RPE65 RNA guide
auuuguucucauuuuguucga

SEQ ID NO: 22976 - RNA, 21 nt, Artificial Sequence
  RPE65 RNA guide
auuuuguucgaaggaagucag

SEQ ID NO: 22977 - RNA, 21 nt, Artificial Sequence
  RPE65 RNA guide
caaauauagaaaaccauauga

SEQ ID NO: 22978 - RNA, 21 nt, Artificial Sequence
  RPE65 RNA guide
caaauauagcaccugcuguac

SEQ ID NO: 22979 - RNA, 21 nt, Artificial Sequence
  RPE65 RNA guide
caagacagacaagacucuccc

SEQ ID NO: 22980 - RNA, 21 nt, Artificial Sequence
  RPE65 RNA guide
caagacucucccuucuuagag

SEQ ID NO: 22981 - RNA, 21 nt, Artificial Sequence
  RPE65 RNA guide
caagagucagaaaaagaaguc

SEQ ID NO: 22982 - RNA, 21 nt, Artificial Sequence
  RPE65 RNA guide
caagcuauagauugaauguca

SEQ ID NO: 22983 - RNA, 21 nt, Artificial Sequence
  RPE65 RNA guide
caauauucuaugacaaugacu

SEQ ID NO: 22984 - RNA, 21 nt, Artificial Sequence
  RPE65 RNA guide
caaucuauagcuugggcuuuu

SEQ ID NO: 22985 - RNA, 21 nt, Artificial Sequence
  RPE65 RNA guide
caaugacauucaaucuauagc

SEQ ID NO: 22986 - RNA, 21 nt, Artificial Sequence
  RPE65 RNA guide
caaugacuacagcguaguagg

SEQ ID NO: 22987 - RNA, 21 nt, Artificial Sequence
  RPE65 RNA guide
cacacuuuucaugugaucauc

SEQ ID NO: 22988 - RNA, 21 nt, Artificial Sequence
  RPE65 RNA guide
cacaguuuuuacaguauguac

SEQ ID NO: 22989 - RNA, 21 nt, Artificial Sequence
  RPE65 RNA guide
caccuaaagaggucuuuuaaa

SEQ ID NO: 22990 - RNA, 21 nt, Artificial Sequence
  RPE65 RNA guide
caccugcuguacauacuguaa

SEQ ID NO: 22991 - RNA, 21 nt, Artificial Sequence
  RPE65 RNA guide
caccuggcaugagaccaccua

SEQ ID NO: 22992 - RNA, 21 nt, Artificial Sequence
  RPE65 RNA guide
cacugaauaaauggaucuguu

SEQ ID NO: 22993 - RNA, 21 nt, Artificial Sequence
  RPE65 RNA guide
cacugcuauaucucaauauuc

SEQ ID NO: 22994 - RNA, 21 nt, Artificial Sequence
  RPE65 RNA guide
cacuguaagcucuaagaaggg

SEQ ID NO: 22995 - RNA, 21 nt, Artificial Sequence
  RPE65 RNA guide
cacuuuucaugugaucaucac

SEQ ID NO: 22996 - RNA, 21 nt, Artificial Sequence
  RPE65 RNA guide
cagaaaaagaagucaggucau

SEQ ID NO: 22997 - RNA, 21 nt, Artificial Sequence
  RPE65 RNA guide
cagaaguaaauuaggcaauau

SEQ ID NO: 22998 - RNA, 21 nt, Artificial Sequence
  RPE65 RNA guide
cagacaagacucucccuucuu

SEQ ID NO: 22999 - RNA, 21 nt, Artificial Sequence
  RPE65 RNA guide
cagauaagaacagauccauuu

SEQ ID NO: 23000 - RNA, 21 nt, Artificial Sequence
  RPE65 RNA guide
cagauccauuuauucagugag

SEQ ID NO: 23001 - RNA, 21 nt, Artificial Sequence
  RPE65 RNA guide
cagaucgaucuuagaaaccau

SEQ ID NO: 23002 - RNA, 21 nt, Artificial Sequence
  RPE65 RNA guide
cagcaggugcuauauuuguau

SEQ ID NO: 23003 - RNA, 21 nt, Artificial Sequence
  RPE65 RNA guide
cagcguaguagguacucauua

SEQ ID NO: 23004 - RNA, 21 nt, Artificial Sequence
  RPE65 RNA guide
cagcuuccagaucgaucuuag

SEQ ID NO: 23005 - RNA, 21 nt, Artificial Sequence
  RPE65 RNA guide
caggucauaugguuuucuaua

SEQ ID NO: 23006 - RNA, 21 nt, Artificial Sequence
  RPE65 RNA guide
caggugcuauauuuguauguu

SEQ ID NO: 23007 - RNA, 21 nt, Artificial Sequence
  RPE65 RNA guide
caggugguacaagagucagaa

SEQ ID NO: 23008 - RNA, 21 nt, Artificial Sequence
  RPE65 RNA guide
caguauguacagcaggugcua

SEQ ID NO: 23009 - RNA, 21 nt, Artificial Sequence
  RPE65 RNA guide
cagugagcaagacagacaaga

SEQ ID NO: 23010 - RNA, 21 nt, Artificial Sequence
  RPE65 RNA guide
cagugaguauuuaaugaguac

SEQ ID NO: 23011 - RNA, 21 nt, Artificial Sequence
  RPE65 RNA guide
caguguagguaggguacauaa

SEQ ID NO: 23012 - RNA, 21 nt, Artificial Sequence
  RPE65 RNA guide
caguuuuuacaguauguacag

SEQ ID NO: 23013 - RNA, 21 nt, Artificial Sequence
  RPE65 RNA guide
cauacaaauauagcaccugcu

SEQ ID NO: 23014 - RNA, 21 nt, Artificial Sequence
  RPE65 RNA guide
cauacuguaaaaacugugaug

SEQ ID NO: 23015 - RNA, 21 nt, Artificial Sequence
  RPE65 RNA guide
cauagaauauugagauauagc

SEQ ID NO: 23016 - RNA, 21 nt, Artificial Sequence
  RPE65 RNA guide
cauaugaccugacuucuuuuu

SEQ ID NO: 23017 - RNA, 21 nt, Artificial Sequence
  RPE65 RNA guide
cauauguaugguuucuaagau

SEQ ID NO: 23018 - RNA, 21 nt, Artificial Sequence
  RPE65 RNA guide
caucacaguuuuuacaguaug

SEQ ID NO: 23019 - RNA, 21 nt, Artificial Sequence
  RPE65 RNA guide
caugagaccaccuaaagaggu

SEQ ID NO: 23020 - RNA, 21 nt, Artificial Sequence
  RPE65 RNA guide
caugccaggugguacaagagu

SEQ ID NO: 23021 - RNA, 21 nt, Artificial Sequence
  RPE65 RNA guide
caugugaucaucacaguuuuu

SEQ ID NO: 23022 - RNA, 21 nt, Artificial Sequence
  RPE65 RNA guide
cauucaaucuauagcuugggc

SEQ ID NO: 23023 - RNA, 21 nt, Artificial Sequence
  RPE65 RNA guide
cauuuuguucgaaggaaguca

SEQ ID NO: 23024 - RNA, 21 nt, Artificial Sequence
  RPE65 RNA guide
ccaagcuauagauugaauguc

SEQ ID NO: 23025 - RNA, 21 nt, Artificial Sequence
  RPE65 RNA guide
ccaccuaaagaggucuuuuaa

SEQ ID NO: 23026 - RNA, 21 nt, Artificial Sequence
  RPE65 RNA guide
ccaccuggcaugagaccaccu

SEQ ID NO: 23027 - RNA, 21 nt, Artificial Sequence
  RPE65 RNA guide
ccagaucgaucuuagaaacca

SEQ ID NO: 23028 - RNA, 21 nt, Artificial Sequence
  RPE65 RNA guide
ccaggugguacaagagucaga

SEQ ID NO: 23029 - RNA, 21 nt, Artificial Sequence
  RPE65 RNA guide
ccauacauaugauauaucuua

SEQ ID NO: 23030 - RNA, 21 nt, Artificial Sequence
  RPE65 RNA guide
ccauaugaccugacuucuuuu

SEQ ID NO: 23031 - RNA, 21 nt, Artificial Sequence
  RPE65 RNA guide
cccaagcuauagauugaaugu

SEQ ID NO: 23032 - RNA, 21 nt, Artificial Sequence
  RPE65 RNA guide
cccuaccuacacuguaagcuc

SEQ ID NO: 23033 - RNA, 21 nt, Artificial Sequence
  RPE65 RNA guide
cccuucuuagagcuuacagug

SEQ ID NO: 23034 - RNA, 21 nt, Artificial Sequence
  RPE65 RNA guide
ccuaaagaggucuuuuaaacu

SEQ ID NO: 23035 - RNA, 21 nt, Artificial Sequence
  RPE65 RNA guide
ccuacacuguaagcucuaaga

SEQ ID NO: 23036 - RNA, 21 nt, Artificial Sequence
  RPE65 RNA guide
ccuaccuacacuguaagcucu

SEQ ID NO: 23037 - RNA, 21 nt, Artificial Sequence
  RPE65 RNA guide
ccuacuacgcuguagucauug

SEQ ID NO: 23038 - RNA, 21 nt, Artificial Sequence
  RPE65 RNA guide
ccucuuuagguggucucaugc

SEQ ID NO: 23039 - RNA, 21 nt, Artificial Sequence
  RPE65 RNA guide
ccugacuucuuuuucugacuc

SEQ ID NO: 23040 - RNA, 21 nt, Artificial Sequence
  RPE65 RNA guide
ccugcuguacauacuguaaaa

SEQ ID NO: 23041 - RNA, 21 nt, Artificial Sequence
  RPE65 RNA guide
ccuggcaugagaccaccuaaa

SEQ ID NO: 23042 - RNA, 21 nt, Artificial Sequence
  RPE65 RNA guide
ccuucgaacaaaaugagaaca

SEQ ID NO: 23043 - RNA, 21 nt, Artificial Sequence
  RPE65 RNA guide
ccuucuuagagcuuacagugu

SEQ ID NO: 23044 - RNA, 21 nt, Artificial Sequence
  RPE65 RNA guide
cgaaggaagucagcuuccaga

SEQ ID NO: 23045 - RNA, 21 nt, Artificial Sequence
  RPE65 RNA guide
cgaucuggaagcugacuuccu

SEQ ID NO: 23046 - RNA, 21 nt, Artificial Sequence
  RPE65 RNA guide
cgaucuuagaaaccauacaua

SEQ ID NO: 23047 - RNA, 21 nt, Artificial Sequence
  RPE65 RNA guide
cgcuguagucauugucauaga

SEQ ID NO: 23048 - RNA, 21 nt, Artificial Sequence
  RPE65 RNA guide
cguaguagguacucauuaaau

SEQ ID NO: 23049 - RNA, 21 nt, Artificial Sequence
  RPE65 RNA guide
cuaagaagggagagucuuguc

SEQ ID NO: 23050 - RNA, 21 nt, Artificial Sequence
  RPE65 RNA guide
cuaagaucgaucuggaagcug

SEQ ID NO: 23051 - RNA, 21 nt, Artificial Sequence
  RPE65 RNA guide
cuacacuguaagcucuaagaa

SEQ ID NO: 23052 - RNA, 21 nt, Artificial Sequence
  RPE65 RNA guide
cuacagcguaguagguacuca

SEQ ID NO: 23053 - RNA, 21 nt, Artificial Sequence
  RPE65 RNA guide
cuaccuacacuguaagcucua

SEQ ID NO: 23054 - RNA, 21 nt, Artificial Sequence
  RPE65 RNA guide
cuacgcuguagucauugucau

SEQ ID NO: 23055 - RNA, 21 nt, Artificial Sequence
  RPE65 RNA guide
cuacuacgcuguagucauugu

SEQ ID NO: 23056 - RNA, 21 nt, Artificial Sequence
  RPE65 RNA guide
cuauagcuugggcuuuuaaaa

SEQ ID NO: 23057 - RNA, 21 nt, Artificial Sequence
  RPE65 RNA guide
cuauauuugucaauguaauac

SEQ ID NO: 23058 - RNA, 21 nt, Artificial Sequence
  RPE65 RNA guide
cuaugacaaugacuacagcgu

SEQ ID NO: 23059 - RNA, 21 nt, Artificial Sequence
  RPE65 RNA guide
cucaauauucuaugacaauga

SEQ ID NO: 23060 - RNA, 21 nt, Artificial Sequence
  RPE65 RNA guide
cucaauauugccuaauuuacu

SEQ ID NO: 23061 - RNA, 21 nt, Artificial Sequence
  RPE65 RNA guide
cucacugaauaaauggaucug

SEQ ID NO: 23062 - RNA, 21 nt, Artificial Sequence
  RPE65 RNA guide
cucacugcuauaucucaauau

SEQ ID NO: 23063 - RNA, 21 nt, Artificial Sequence
  RPE65 RNA guide
cucaugccaggugguacaaga

SEQ ID NO: 23064 - RNA, 21 nt, Artificial Sequence
  RPE65 RNA guide
cucauuuuguucgaaggaagu

SEQ ID NO: 23065 - RNA, 21 nt, Artificial Sequence
  RPE65 RNA guide
cucccuucuuagagcuuacag

SEQ ID NO: 23066 - RNA, 21 nt, Artificial Sequence
  RPE65 RNA guide
cucuaagaagggagagucuug

SEQ ID NO: 23067 - RNA, 21 nt, Artificial Sequence
  RPE65 RNA guide
cucucccuucuuagagcuuac

SEQ ID NO: 23068 - RNA, 21 nt, Artificial Sequence
  RPE65 RNA guide
cucuuguaccaccuggcauga

SEQ ID NO: 23069 - RNA, 21 nt, Artificial Sequence
  RPE65 RNA guide
cucuuuagguggucucaugcc

SEQ ID NO: 23070 - RNA, 21 nt, Artificial Sequence
  RPE65 RNA guide
cucuuuauguacccuaccuac

SEQ ID NO: 23071 - RNA, 21 nt, Artificial Sequence
  RPE65 RNA guide
cugaauaaauggaucuguucu

SEQ ID NO: 23072 - RNA, 21 nt, Artificial Sequence
  RPE65 RNA guide
cugacucuuguaccaccuggc

SEQ ID NO: 23073 - RNA, 21 nt, Artificial Sequence
  RPE65 RNA guide
cugacuuccuucgaacaaaau

SEQ ID NO: 23074 - RNA, 21 nt, Artificial Sequence
  RPE65 RNA guide
cugacuucuuuuucugacucu

SEQ ID NO: 23075 - RNA, 21 nt, Artificial Sequence
  RPE65 RNA guide
cugcuauaucucaauauucua

SEQ ID NO: 23076 - RNA, 21 nt, Artificial Sequence
  RPE65 RNA guide
cugcuguacauacuguaaaaa

SEQ ID NO: 23077 - RNA, 21 nt, Artificial Sequence
  RPE65 RNA guide
cugcuuucaaagucuuuuaau

SEQ ID NO: 23078 - RNA, 21 nt, Artificial Sequence
  RPE65 RNA guide
cuggaagcugacuuccuucga

SEQ ID NO: 23079 - RNA, 21 nt, Artificial Sequence
  RPE65 RNA guide
cuggcaugagaccaccuaaag

SEQ ID NO: 23080 - RNA, 21 nt, Artificial Sequence
  RPE65 RNA guide
cuguaaaaacugugaugauca

SEQ ID NO: 23081 - RNA, 21 nt, Artificial Sequence
  RPE65 RNA guide
cuguaacauacaaauauagca

SEQ ID NO: 23082 - RNA, 21 nt, Artificial Sequence
  RPE65 RNA guide
cuguaagcucuaagaagggag

SEQ ID NO: 23083 - RNA, 21 nt, Artificial Sequence
  RPE65 RNA guide
cuguacauacuguaaaaacug

SEQ ID NO: 23084 - RNA, 21 nt, Artificial Sequence
  RPE65 RNA guide
cuguagucauugucauagaau

SEQ ID NO: 23085 - RNA, 21 nt, Artificial Sequence
  RPE65 RNA guide
cugucuugcucacugcuauau

SEQ ID NO: 23086 - RNA, 21 nt, Artificial Sequence
  RPE65 RNA guide
cugugaugaucacaugaaaag

SEQ ID NO: 23087 - RNA, 21 nt, Artificial Sequence
  RPE65 RNA guide
cuguuuaucagaaguaaauua

SEQ ID NO: 23088 - RNA, 21 nt, Artificial Sequence
  RPE65 RNA guide
cuuacaguguagguaggguac

SEQ ID NO: 23089 - RNA, 21 nt, Artificial Sequence
  RPE65 RNA guide
cuuagagcuuacaguguaggu

SEQ ID NO: 23090 - RNA, 21 nt, Artificial Sequence
  RPE65 RNA guide
cuuccagaucgaucuuagaaa

SEQ ID NO: 23091 - RNA, 21 nt, Artificial Sequence
  RPE65 RNA guide
cuuccuucgaacaaaaugaga

SEQ ID NO: 23092 - RNA, 21 nt, Artificial Sequence
  RPE65 RNA guide
cuucgaacaaaaugagaacaa

SEQ ID NO: 23093 - RNA, 21 nt, Artificial Sequence
  RPE65 RNA guide
cuucuuagagcuuacagugua

SEQ ID NO: 23094 - RNA, 21 nt, Artificial Sequence
  RPE65 RNA guide
cuucuuuuucugacucuugua

SEQ ID NO: 23095 - RNA, 21 nt, Artificial Sequence
  RPE65 RNA guide
cuugcucacugcuauaucuca

SEQ ID NO: 23096 - RNA, 21 nt, Artificial Sequence
  RPE65 RNA guide
cuuguaccaccuggcaugaga

SEQ ID NO: 23097 - RNA, 21 nt, Artificial Sequence
  RPE65 RNA guide
cuuuagguggucucaugccag

SEQ ID NO: 23098 - RNA, 21 nt, Artificial Sequence
  RPE65 RNA guide
cuuuauguacccuaccuacac

SEQ ID NO: 23099 - RNA, 21 nt, Artificial Sequence
  RPE65 RNA guide
cuuuuaaacucuuuauguacc

SEQ ID NO: 23100 - RNA, 21 nt, Artificial Sequence
  RPE65 RNA guide
cuuuucaugugaucaucacag

SEQ ID NO: 23101 - RNA, 21 nt, Artificial Sequence
  RPE65 RNA guide
cuuuuucugacucuuguacca

SEQ ID NO: 23102 - RNA, 21 nt, Artificial Sequence
  RPE65 RNA guide
gaaaaagaagucaggucauau

SEQ ID NO: 23103 - RNA, 21 nt, Artificial Sequence
  RPE65 RNA guide
gaaaaccauaugaccugacuu

SEQ ID NO: 23104 - RNA, 21 nt, Artificial Sequence
  RPE65 RNA guide
gaacagauccauuuauucagu

SEQ ID NO: 23105 - RNA, 21 nt, Artificial Sequence
  RPE65 RNA guide
gaagcugacuuccuucgaaca

SEQ ID NO: 23106 - RNA, 21 nt, Artificial Sequence
  RPE65 RNA guide
gaaggaagucagcuuccagau

SEQ ID NO: 23107 - RNA, 21 nt, Artificial Sequence
  RPE65 RNA guide
gaagggagagucuugucuguc

SEQ ID NO: 23108 - RNA, 21 nt, Artificial Sequence
  RPE65 RNA guide
gaagucagcuuccagaucgau

SEQ ID NO: 23109 - RNA, 21 nt, Artificial Sequence
  RPE65 RNA guide
gaagucaggucauaugguuuu

SEQ ID NO: 23110 - RNA, 21 nt, Artificial Sequence
  RPE65 RNA guide
gaauaaauggaucuguucuua

SEQ ID NO: 23111 - RNA, 21 nt, Artificial Sequence
  RPE65 RNA guide
gaauauugagauauagcagug

SEQ ID NO: 23112 - RNA, 21 nt, Artificial Sequence
  RPE65 RNA guide
gacaaauauagaaaaccauau

SEQ ID NO: 23113 - RNA, 21 nt, Artificial Sequence
  RPE65 RNA guide
gacaagacucucccuucuuag

SEQ ID NO: 23114 - RNA, 21 nt, Artificial Sequence
  RPE65 RNA guide
gacaaugacuacagcguagua

SEQ ID NO: 23115 - RNA, 21 nt, Artificial Sequence
  RPE65 RNA guide
gacagacaagacucucccuuc

SEQ ID NO: 23116 - RNA, 21 nt, Artificial Sequence
  RPE65 RNA guide
gacauucaaucuauagcuugg

SEQ ID NO: 23117 - RNA, 21 nt, Artificial Sequence
  RPE65 RNA guide
gaccaccuaaagaggucuuuu

SEQ ID NO: 23118 - RNA, 21 nt, Artificial Sequence
  RPE65 RNA guide
gaccucuuuagguggucucau

SEQ ID NO: 23119 - RNA, 21 nt, Artificial Sequence
  RPE65 RNA guide
gaccugacuucuuuuucugac

SEQ ID NO: 23120 - RNA, 21 nt, Artificial Sequence
  RPE65 RNA guide
gacuacagcguaguagguacu

SEQ ID NO: 23121 - RNA, 21 nt, Artificial Sequence
  RPE65 RNA guide
gacucucccuucuuagagcuu

SEQ ID NO: 23122 - RNA, 21 nt, Artificial Sequence
  RPE65 RNA guide
gacucuuguaccaccuggcau

SEQ ID NO: 23123 - RNA, 21 nt, Artificial Sequence
  RPE65 RNA guide
gacuuccuucgaacaaaauga

SEQ ID NO: 23124 - RNA, 21 nt, Artificial Sequence
  RPE65 RNA guide
gacuucuuuuucugacucuug

SEQ ID NO: 23125 - RNA, 21 nt, Artificial Sequence
  RPE65 RNA guide
gacuuugaaagcaguaagaua

SEQ ID NO: 23126 - RNA, 21 nt, Artificial Sequence
  RPE65 RNA guide
gagaccaccuaaagaggucuu

SEQ ID NO: 23127 - RNA, 21 nt, Artificial Sequence
  RPE65 RNA guide
gagagucuugucugucuugcu

SEQ ID NO: 23128 - RNA, 21 nt, Artificial Sequence
  RPE65 RNA guide
gagcaagacagacaagacucu

SEQ ID NO: 23129 - RNA, 21 nt, Artificial Sequence
  RPE65 RNA guide
gagcuuacaguguagguaggg

SEQ ID NO: 23130 - RNA, 21 nt, Artificial Sequence
  RPE65 RNA guide
gaggucuuuuaaacucuuuau

SEQ ID NO: 23131 - RNA, 21 nt, Artificial Sequence
  RPE65 RNA guide
gaguaccuacuacgcuguagu

SEQ ID NO: 23132 - RNA, 21 nt, Artificial Sequence
  RPE65 RNA guide
gaguauuuaaugaguaccuac

SEQ ID NO: 23133 - RNA, 21 nt, Artificial Sequence
  RPE65 RNA guide
gagucagaaaaagaagucagg

SEQ ID NO: 23134 - RNA, 21 nt, Artificial Sequence
  RPE65 RNA guide
gagucuugucugucuugcuca

SEQ ID NO: 23135 - RNA, 21 nt, Artificial Sequence
  RPE65 RNA guide
gaguuuaaaagaccucuuuag

SEQ ID NO: 23136 - RNA, 21 nt, Artificial Sequence
  RPE65 RNA guide
gaguuuuuaaaagcccaagcu

SEQ ID NO: 23137 - RNA, 21 nt, Artificial Sequence
  RPE65 RNA guide
gauaagaacagauccauuuau

SEQ ID NO: 23138 - RNA, 21 nt, Artificial Sequence
  RPE65 RNA guide
gauauagcagugagcaagaca

SEQ ID NO: 23139 - RNA, 21 nt, Artificial Sequence
  RPE65 RNA guide
gauauaucuuacugcuuucaa

SEQ ID NO: 23140 - RNA, 21 nt, Artificial Sequence
  RPE65 RNA guide
gaucaucacaguuuuuacagu

SEQ ID NO: 23141 - RNA, 21 nt, Artificial Sequence
  RPE65 RNA guide
gaucgaucuggaagcugacuu

SEQ ID NO: 23142 - RNA, 21 nt, Artificial Sequence
  RPE65 RNA guide
gaucgaucuuagaaaccauac

SEQ ID NO: 23143 - RNA, 21 nt, Artificial Sequence
  RPE65 RNA guide
gaucuggaagcugacuuccuu

SEQ ID NO: 23144 - RNA, 21 nt, Artificial Sequence
  RPE65 RNA guide
gaucuguucuuaucuguaaca

SEQ ID NO: 23145 - RNA, 21 nt, Artificial Sequence
  RPE65 RNA guide
gaugaucacaugaaaagugug

SEQ ID NO: 23146 - RNA, 21 nt, Artificial Sequence
  RPE65 RNA guide
gauuuguucucauuuuguucg

SEQ ID NO: 23147 - RNA, 21 nt, Artificial Sequence
  RPE65 RNA guide
gcaagacagacaagacucucc

SEQ ID NO: 23148 - RNA, 21 nt, Artificial Sequence
  RPE65 RNA guide
gcaauauugaguuuuuaaaag

SEQ ID NO: 23149 - RNA, 21 nt, Artificial Sequence
  RPE65 RNA guide
gcaccugcuguacauacugua

SEQ ID NO: 23150 - RNA, 21 nt, Artificial Sequence
  RPE65 RNA guide
gcaggugcuauauuuguaugu

SEQ ID NO: 23151 - RNA, 21 nt, Artificial Sequence
  RPE65 RNA guide
gcaguaagauauaucauaugu

SEQ ID NO: 23152 - RNA, 21 nt, Artificial Sequence
  RPE65 RNA guide
gcagugagcaagacagacaag

SEQ ID NO: 23153 - RNA, 21 nt, Artificial Sequence
  RPE65 RNA guide
gcaugagaccaccuaaagagg

SEQ ID NO: 23154 - RNA, 21 nt, Artificial Sequence
  RPE65 RNA guide
gccaggugguacaagagucag

SEQ ID NO: 23155 - RNA, 21 nt, Artificial Sequence
  RPE65 RNA guide
gcccaagcuauagauugaaug

SEQ ID NO: 23156 - RNA, 21 nt, Artificial Sequence
  RPE65 RNA guide
gcguaguagguacucauuaaa

SEQ ID NO: 23157 - RNA, 21 nt, Artificial Sequence
  RPE65 RNA guide
gcucacugcuauaucucaaua

SEQ ID NO: 23158 - RNA, 21 nt, Artificial Sequence
  RPE65 RNA guide
gcucuaagaagggagagucuu

SEQ ID NO: 23159 - RNA, 21 nt, Artificial Sequence
  RPE65 RNA guide
gcugacuuccuucgaacaaaa

SEQ ID NO: 23160 - RNA, 21 nt, Artificial Sequence
  RPE65 RNA guide
gcuguacauacuguaaaaacu

SEQ ID NO: 23161 - RNA, 21 nt, Artificial Sequence
  RPE65 RNA guide
gcuguagucauugucauagaa

SEQ ID NO: 23162 - RNA, 21 nt, Artificial Sequence
  RPE65 RNA guide
gcuuacaguguagguagggua

SEQ ID NO: 23163 - RNA, 21 nt, Artificial Sequence
  RPE65 RNA guide
gcuuccagaucgaucuuagaa

SEQ ID NO: 23164 - RNA, 21 nt, Artificial Sequence
  RPE65 RNA guide
gcuugggcuuuuaaaaacuca

SEQ ID NO: 23165 - RNA, 21 nt, Artificial Sequence
  RPE65 RNA guide
gcuuucaaagucuuuuaauac

SEQ ID NO: 23166 - RNA, 21 nt, Artificial Sequence
  RPE65 RNA guide
ggaagcugacuuccuucgaac

SEQ ID NO: 23167 - RNA, 21 nt, Artificial Sequence
  RPE65 RNA guide
ggaagucagcuuccagaucga

SEQ ID NO: 23168 - RNA, 21 nt, Artificial Sequence
  RPE65 RNA guide
ggagagucuugucugucuugc

SEQ ID NO: 23169 - RNA, 21 nt, Artificial Sequence
  RPE65 RNA guide
ggagguauuacauugacaaau

SEQ ID NO: 23170 - RNA, 21 nt, Artificial Sequence
  RPE65 RNA guide
ggaucuguucuuaucuguaac

SEQ ID NO: 23171 - RNA, 21 nt, Artificial Sequence
  RPE65 RNA guide
ggcaauauugaguuuuuaaaa

SEQ ID NO: 23172 - RNA, 21 nt, Artificial Sequence
  RPE65 RNA guide
ggcaugagaccaccuaaagag

SEQ ID NO: 23173 - RNA, 21 nt, Artificial Sequence
  RPE65 RNA guide
ggcuuuuaaaaacucaauauu

SEQ ID NO: 23174 - RNA, 21 nt, Artificial Sequence
  RPE65 RNA guide
gggagagucuugucugucuug

SEQ ID NO: 23175 - RNA, 21 nt, Artificial Sequence
  RPE65 RNA guide
gggcuuuuaaaaacucaauau

SEQ ID NO: 23176 - RNA, 21 nt, Artificial Sequence
  RPE65 RNA guide
ggguacauaaagaguuuaaaa

SEQ ID NO: 23177 - RNA, 21 nt, Artificial Sequence
  RPE65 RNA guide
gguacaagagucagaaaaaga

SEQ ID NO: 23178 - RNA, 21 nt, Artificial Sequence
  RPE65 RNA guide
gguacauaaagaguuuaaaag

SEQ ID NO: 23179 - RNA, 21 nt, Artificial Sequence
  RPE65 RNA guide
gguacucauuaaauacucacu

SEQ ID NO: 23180 - RNA, 21 nt, Artificial Sequence
  RPE65 RNA guide
gguaggguacauaaagaguuu

SEQ ID NO: 23181 - RNA, 21 nt, Artificial Sequence
  RPE65 RNA guide
ggucauaugguuuucuauauu

SEQ ID NO: 23182 - RNA, 21 nt, Artificial Sequence
  RPE65 RNA guide
ggucucaugccaggugguaca

SEQ ID NO: 23183 - RNA, 21 nt, Artificial Sequence
  RPE65 RNA guide
ggucuuuuaaacucuuuaugu

SEQ ID NO: 23184 - RNA, 21 nt, Artificial Sequence
  RPE65 RNA guide
ggugcuauauuuguauguuac

SEQ ID NO: 23185 - RNA, 21 nt, Artificial Sequence
  RPE65 RNA guide
ggugguacaagagucagaaaa

SEQ ID NO: 23186 - RNA, 21 nt, Artificial Sequence
  RPE65 RNA guide
gguggucucaugccagguggu

SEQ ID NO: 23187 - RNA, 21 nt, Artificial Sequence
  RPE65 RNA guide
gguuucuaagaucgaucugga

SEQ ID NO: 23188 - RNA, 21 nt, Artificial Sequence
  RPE65 RNA guide
guaaaaacugugaugaucaca

SEQ ID NO: 23189 - RNA, 21 nt, Artificial Sequence
  RPE65 RNA guide
guaacauacaaauauagcacc

SEQ ID NO: 23190 - RNA, 21 nt, Artificial Sequence
  RPE65 RNA guide
guaagcucuaagaagggagag

SEQ ID NO: 23191 - RNA, 21 nt, Artificial Sequence
  RPE65 RNA guide
guacaagagucagaaaaagaa

SEQ ID NO: 23192 - RNA, 21 nt, Artificial Sequence
  RPE65 RNA guide
guacagcaggugcuauauuug

SEQ ID NO: 23193 - RNA, 21 nt, Artificial Sequence
  RPE65 RNA guide
guacauaaagaguuuaaaaga

SEQ ID NO: 23194 - RNA, 21 nt, Artificial Sequence
  RPE65 RNA guide
guacauacuguaaaaacugug

SEQ ID NO: 23195 - RNA, 21 nt, Artificial Sequence
  RPE65 RNA guide
guaccaccuggcaugagacca

SEQ ID NO: 23196 - RNA, 21 nt, Artificial Sequence
  RPE65 RNA guide
guacccuaccuacacuguaag

SEQ ID NO: 23197 - RNA, 21 nt, Artificial Sequence
  RPE65 RNA guide
guaccuacuacgcuguaguca

SEQ ID NO: 23198 - RNA, 21 nt, Artificial Sequence
  RPE65 RNA guide
guaggguacauaaagaguuua

SEQ ID NO: 23199 - RNA, 21 nt, Artificial Sequence
  RPE65 RNA guide
guagguacucauuaaauacuc

SEQ ID NO: 23200 - RNA, 21 nt, Artificial Sequence
  RPE65 RNA guide
guagguaggguacauaaagag

SEQ ID NO: 23201 - RNA, 21 nt, Artificial Sequence
  RPE65 RNA guide
guaguagguacucauuaaaua

SEQ ID NO: 23202 - RNA, 21 nt, Artificial Sequence
  RPE65 RNA guide
guagucauugucauagaauau

SEQ ID NO: 23203 - RNA, 21 nt, Artificial Sequence
  RPE65 RNA guide
guaugguuucuaagaucgauc

SEQ ID NO: 23204 - RNA, 21 nt, Artificial Sequence
  RPE65 RNA guide
guauguacagcaggugcuaua

SEQ ID NO: 23205 - RNA, 21 nt, Artificial Sequence
  RPE65 RNA guide
guauguuacagauaagaacag

SEQ ID NO: 23206 - RNA, 21 nt, Artificial Sequence
  RPE65 RNA guide
guauuuaaugaguaccuacua

SEQ ID NO: 23207 - RNA, 21 nt, Artificial Sequence
  RPE65 RNA guide
gucagaaaaagaagucagguc

SEQ ID NO: 23208 - RNA, 21 nt, Artificial Sequence
  RPE65 RNA guide
gucagcuuccagaucgaucuu

SEQ ID NO: 23209 - RNA, 21 nt, Artificial Sequence
  RPE65 RNA guide
gucaggucauaugguuuucua

SEQ ID NO: 23210 - RNA, 21 nt, Artificial Sequence
  RPE65 RNA guide
gucauagaauauugagauaua

SEQ ID NO: 23211 - RNA, 21 nt, Artificial Sequence
  RPE65 RNA guide
gucucaugccaggugguacaa

SEQ ID NO: 23212 - RNA, 21 nt, Artificial Sequence
  RPE65 RNA guide
gucugucuugcucacugcuau

SEQ ID NO: 23213 - RNA, 21 nt, Artificial Sequence
  RPE65 RNA guide
gucuugcucacugcuauaucu

SEQ ID NO: 23214 - RNA, 21 nt, Artificial Sequence
  RPE65 RNA guide
gucuugucugucuugcucacu

SEQ ID NO: 23215 - RNA, 21 nt, Artificial Sequence
  RPE65 RNA guide
gucuuuuaaacucuuuaugua

SEQ ID NO: 23216 - RNA, 21 nt, Artificial Sequence
  RPE65 RNA guide
gugagcaagacagacaagacu

SEQ ID NO: 23217 - RNA, 21 nt, Artificial Sequence
  RPE65 RNA guide
gugaguauuuaaugaguaccu

SEQ ID NO: 23218 - RNA, 21 nt, Artificial Sequence
  RPE65 RNA guide
gugaucaucacaguuuuuaca

SEQ ID NO: 23219 - RNA, 21 nt, Artificial Sequence
  RPE65 RNA guide
gugaugaucacaugaaaagug

SEQ ID NO: 23220 - RNA, 21 nt, Artificial Sequence
  RPE65 RNA guide
gugguacaagagucagaaaaa

SEQ ID NO: 23221 - RNA, 21 nt, Artificial Sequence
  RPE65 RNA guide
guggucucaugccagguggua

SEQ ID NO: 23222 - RNA, 21 nt, Artificial Sequence
  RPE65 RNA guide
guguagguaggguacauaaag

SEQ ID NO: 23223 - RNA, 21 nt, Artificial Sequence
  RPE65 RNA guide
guguauuaaaagacuuugaaa

SEQ ID NO: 23224 - RNA, 21 nt, Artificial Sequence
  RPE65 RNA guide
guguguauuaaaagacuuuga

SEQ ID NO: 23225 - RNA, 21 nt, Artificial Sequence
  RPE65 RNA guide
guuacagauaagaacagaucc

SEQ ID NO: 23226 - RNA, 21 nt, Artificial Sequence
  RPE65 RNA guide
guucgaaggaagucagcuucc

SEQ ID NO: 23227 - RNA, 21 nt, Artificial Sequence
  RPE65 RNA guide
guucucauuuuguucgaagga

SEQ ID NO: 23228 - RNA, 21 nt, Artificial Sequence
  RPE65 RNA guide
guuuaaaagaccucuuuaggu

SEQ ID NO: 23229 - RNA, 21 nt, Artificial Sequence
  RPE65 RNA guide
guuucuaagaucgaucuggaa

SEQ ID NO: 23230 - RNA, 21 nt, Artificial Sequence
  RPE65 RNA guide
guuuuuaaaagcccaagcuau

SEQ ID NO: 23231 - RNA, 21 nt, Artificial Sequence
  RPE65 RNA guide
guuuuuacaguauguacagca

SEQ ID NO: 23232 - RNA, 21 nt, Artificial Sequence
  RPE65 RNA guide
uaaaagaccucuuuagguggu

SEQ ID NO: 23233 - RNA, 21 nt, Artificial Sequence
  RPE65 RNA guide
uaaaagcccaagcuauagauu

SEQ ID NO: 23234 - RNA, 21 nt, Artificial Sequence
  RPE65 RNA guide
uaaacucuuuauguacccuac

SEQ ID NO: 23235 - RNA, 21 nt, Artificial Sequence
  RPE65 RNA guide
uaacauacaaauauagcaccu

SEQ ID NO: 23236 - RNA, 21 nt, Artificial Sequence
  RPE65 RNA guide
uaagaacagauccauuuauuc

SEQ ID NO: 23237 - RNA, 21 nt, Artificial Sequence
  RPE65 RNA guide
uaagaagggagagucuugucu

SEQ ID NO: 23238 - RNA, 21 nt, Artificial Sequence
  RPE65 RNA guide
uaagaucgaucuggaagcuga

SEQ ID NO: 23239 - RNA, 21 nt, Artificial Sequence
  RPE65 RNA guide
uaagcucuaagaagggagagu

SEQ ID NO: 23240 - RNA, 21 nt, Artificial Sequence
  RPE65 RNA guide
uaaugaguaccuacuacgcug

SEQ ID NO: 23241 - RNA, 21 nt, Artificial Sequence
  RPE65 RNA guide
uacaaauauagcaccugcugu

SEQ ID NO: 23242 - RNA, 21 nt, Artificial Sequence
  RPE65 RNA guide
uacaagagucagaaaaagaag

SEQ ID NO: 23243 - RNA, 21 nt, Artificial Sequence
  RPE65 RNA guide
uacacacuuuucaugugauca

SEQ ID NO: 23244 - RNA, 21 nt, Artificial Sequence
  RPE65 RNA guide
uacacuguaagcucuaagaag

SEQ ID NO: 23245 - RNA, 21 nt, Artificial Sequence
  RPE65 RNA guide
uacagcaggugcuauauuugu

SEQ ID NO: 23246 - RNA, 21 nt, Artificial Sequence
  RPE65 RNA guide
uacagcguaguagguacucau

SEQ ID NO: 23247 - RNA, 21 nt, Artificial Sequence
  RPE65 RNA guide
uacaguauguacagcaggugc

SEQ ID NO: 23248 - RNA, 21 nt, Artificial Sequence
  RPE65 RNA guide
uacaguguagguaggguacau

SEQ ID NO: 23249 - RNA, 21 nt, Artificial Sequence
  RPE65 RNA guide
uaccaccuggcaugagaccac

SEQ ID NO: 23250 - RNA, 21 nt, Artificial Sequence
  RPE65 RNA guide
uacccuaccuacacuguaagc

SEQ ID NO: 23251 - RNA, 21 nt, Artificial Sequence
  RPE65 RNA guide
uaccuacacuguaagcucuaa

SEQ ID NO: 23252 - RNA, 21 nt, Artificial Sequence
  RPE65 RNA guide
uaccuacuacgcuguagucau

SEQ ID NO: 23253 - RNA, 21 nt, Artificial Sequence
  RPE65 RNA guide
uacgcuguagucauugucaua

SEQ ID NO: 23254 - RNA, 21 nt, Artificial Sequence
  RPE65 RNA guide
uacuacgcuguagucauuguc

SEQ ID NO: 23255 - RNA, 21 nt, Artificial Sequence
  RPE65 RNA guide
uacucacugaauaaauggauc

SEQ ID NO: 23256 - RNA, 21 nt, Artificial Sequence
  RPE65 RNA guide
uacuguaaaaacugugaugau

SEQ ID NO: 23257 - RNA, 21 nt, Artificial Sequence
  RPE65 RNA guide
uagaaaaccauaugaccugac

SEQ ID NO: 23258 - RNA, 21 nt, Artificial Sequence
  RPE65 RNA guide
uagaauauugagauauagcag

SEQ ID NO: 23259 - RNA, 21 nt, Artificial Sequence
  RPE65 RNA guide
uagagcuuacaguguagguag

SEQ ID NO: 23260 - RNA, 21 nt, Artificial Sequence
  RPE65 RNA guide
uagcaccugcuguacauacug

SEQ ID NO: 23261 - RNA, 21 nt, Artificial Sequence
  RPE65 RNA guide
uagcagugagcaagacagaca

SEQ ID NO: 23262 - RNA, 21 nt, Artificial Sequence
  RPE65 RNA guide
uagcuugggcuuuuaaaaacu

SEQ ID NO: 23263 - RNA, 21 nt, Artificial Sequence
  RPE65 RNA guide
uagguacucauuaaauacuca

SEQ ID NO: 23264 - RNA, 21 nt, Artificial Sequence
  RPE65 RNA guide
uagguaggguacauaaagagu

SEQ ID NO: 23265 - RNA, 21 nt, Artificial Sequence
  RPE65 RNA guide
uagguggucucaugccaggug

SEQ ID NO: 23266 - RNA, 21 nt, Artificial Sequence
  RPE65 RNA guide
uaguagguacucauuaaauac

SEQ ID NO: 23267 - RNA, 21 nt, Artificial Sequence
  RPE65 RNA guide
uauagaaaaccauaugaccug

SEQ ID NO: 23268 - RNA, 21 nt, Artificial Sequence
  RPE65 RNA guide
uauagcaccugcuguacauac

SEQ ID NO: 23269 - RNA, 21 nt, Artificial Sequence
  RPE65 RNA guide
uauagcuugggcuuuuaaaaa

SEQ ID NO: 23270 - RNA, 21 nt, Artificial Sequence
  RPE65 RNA guide
uaugacaaugacuacagcgua

SEQ ID NO: 23271 - RNA, 21 nt, Artificial Sequence
  RPE65 RNA guide
uaugaccugacuucuuuuucu

SEQ ID NO: 23272 - RNA, 21 nt, Artificial Sequence
  RPE65 RNA guide
uaugguuucuaagaucgaucu

SEQ ID NO: 23273 - RNA, 21 nt, Artificial Sequence
  RPE65 RNA guide
uauguacagcaggugcuauau

SEQ ID NO: 23274 - RNA, 21 nt, Artificial Sequence
  RPE65 RNA guide
uauguacccuaccuacacugu

SEQ ID NO: 23275 - RNA, 21 nt, Artificial Sequence
  RPE65 RNA guide
uauguaugguuucuaagaucg

SEQ ID NO: 23276 - RNA, 21 nt, Artificial Sequence
  RPE65 RNA guide
uauguuacagauaagaacaga

SEQ ID NO: 23277 - RNA, 21 nt, Artificial Sequence
  RPE65 RNA guide
uauucuaugacaaugacuaca

SEQ ID NO: 23278 - RNA, 21 nt, Artificial Sequence
  RPE65 RNA guide
uauugagauauagcagugagc

SEQ ID NO: 23279 - RNA, 21 nt, Artificial Sequence
  RPE65 RNA guide
uauugaguuuuuaaaagccca

SEQ ID NO: 23280 - RNA, 21 nt, Artificial Sequence
  RPE65 RNA guide
uauuuaaugaguaccuacuac

SEQ ID NO: 23281 - RNA, 21 nt, Artificial Sequence
  RPE65 RNA guide
ucaaucuauagcuugggcuuu

SEQ ID NO: 23282 - RNA, 21 nt, Artificial Sequence
  RPE65 RNA guide
ucaaugacauucaaucuauag

SEQ ID NO: 23283 - RNA, 21 nt, Artificial Sequence
  RPE65 RNA guide
ucacaguuuuuacaguaugua

SEQ ID NO: 23284 - RNA, 21 nt, Artificial Sequence
  RPE65 RNA guide
ucacugaauaaauggaucugu

SEQ ID NO: 23285 - RNA, 21 nt, Artificial Sequence
  RPE65 RNA guide
ucagaaaaagaagucagguca

SEQ ID NO: 23286 - RNA, 21 nt, Artificial Sequence
  RPE65 RNA guide
ucagcuuccagaucgaucuua

SEQ ID NO: 23287 - RNA, 21 nt, Artificial Sequence
  RPE65 RNA guide
ucagugaguauuuaaugagua

SEQ ID NO: 23288 - RNA, 21 nt, Artificial Sequence
  RPE65 RNA guide
ucauauguaugguuucuaaga

SEQ ID NO: 23289 - RNA, 21 nt, Artificial Sequence
  RPE65 RNA guide
ucaucacaguuuuuacaguau

SEQ ID NO: 23290 - RNA, 21 nt, Artificial Sequence
  RPE65 RNA guide
ucaugccaggugguacaagag

SEQ ID NO: 23291 - RNA, 21 nt, Artificial Sequence
  RPE65 RNA guide
ucaugugaucaucacaguuuu

SEQ ID NO: 23292 - RNA, 21 nt, Artificial Sequence
  RPE65 RNA guide
ucauuuuguucgaaggaaguc

SEQ ID NO: 23293 - RNA, 21 nt, Artificial Sequence
  RPE65 RNA guide
uccagaucgaucuuagaaacc

SEQ ID NO: 23294 - RNA, 21 nt, Artificial Sequence
  RPE65 RNA guide
ucccuucuuagagcuuacagu

SEQ ID NO: 23295 - RNA, 21 nt, Artificial Sequence
  RPE65 RNA guide
uccuucgaacaaaaugagaac

SEQ ID NO: 23296 - RNA, 21 nt, Artificial Sequence
  RPE65 RNA guide
ucgaaggaagucagcuuccag

SEQ ID NO: 23297 - RNA, 21 nt, Artificial Sequence
  RPE65 RNA guide
ucgaucuggaagcugacuucc

SEQ ID NO: 23298 - RNA, 21 nt, Artificial Sequence
  RPE65 RNA guide
ucgaucuuagaaaccauacau

SEQ ID NO: 23299 - RNA, 21 nt, Artificial Sequence
  RPE65 RNA guide
ucuaagaagggagagucuugu

SEQ ID NO: 23300 - RNA, 21 nt, Artificial Sequence
  RPE65 RNA guide
ucuaagaucgaucuggaagcu

SEQ ID NO: 23301 - RNA, 21 nt, Artificial Sequence
  RPE65 RNA guide
ucuauagcuugggcuuuuaaa

SEQ ID NO: 23302 - RNA, 21 nt, Artificial Sequence
  RPE65 RNA guide
ucuaugacaaugacuacagcg

SEQ ID NO: 23303 - RNA, 21 nt, Artificial Sequence
  RPE65 RNA guide
ucucaugccaggugguacaag

SEQ ID NO: 23304 - RNA, 21 nt, Artificial Sequence
  RPE65 RNA guide
ucucauuuuguucgaaggaag

SEQ ID NO: 23305 - RNA, 21 nt, Artificial Sequence
  RPE65 RNA guide
ucucccuucuuagagcuuaca

SEQ ID NO: 23306 - RNA, 21 nt, Artificial Sequence
  RPE65 RNA guide
ucugacucuuguaccaccugg

SEQ ID NO: 23307 - RNA, 21 nt, Artificial Sequence
  RPE65 RNA guide
ucuggaagcugacuuccuucg

SEQ ID NO: 23308 - RNA, 21 nt, Artificial Sequence
  RPE65 RNA guide
ucuguaacauacaaauauagc

SEQ ID NO: 23309 - RNA, 21 nt, Artificial Sequence
  RPE65 RNA guide
ucuuagagcuuacaguguagg

SEQ ID NO: 23310 - RNA, 21 nt, Artificial Sequence
  RPE65 RNA guide
ucuugcucacugcuauaucuc

SEQ ID NO: 23311 - RNA, 21 nt, Artificial Sequence
  RPE65 RNA guide
ucuuguaccaccuggcaugag

SEQ ID NO: 23312 - RNA, 21 nt, Artificial Sequence
  RPE65 RNA guide
ucuugucugucuugcucacug

SEQ ID NO: 23313 - RNA, 21 nt, Artificial Sequence
  RPE65 RNA guide
ucuuuagguggucucaugcca

SEQ ID NO: 23314 - RNA, 21 nt, Artificial Sequence
  RPE65 RNA guide
ucuuuauguacccuaccuaca

SEQ ID NO: 23315 - RNA, 21 nt, Artificial Sequence
  RPE65 RNA guide
ucuuuuucugacucuuguacc

SEQ ID NO: 23316 - RNA, 21 nt, Artificial Sequence
  RPE65 RNA guide
ugacaaugacuacagcguagu

SEQ ID NO: 23317 - RNA, 21 nt, Artificial Sequence
  RPE65 RNA guide
ugacauucaaucuauagcuug

SEQ ID NO: 23318 - RNA, 21 nt, Artificial Sequence
  RPE65 RNA guide
ugaccugacuucuuuuucuga

SEQ ID NO: 23319 - RNA, 21 nt, Artificial Sequence
  RPE65 RNA guide
ugacuacagcguaguagguac

SEQ ID NO: 23320 - RNA, 21 nt, Artificial Sequence
  RPE65 RNA guide
ugacucuuguaccaccuggca

SEQ ID NO: 23321 - RNA, 21 nt, Artificial Sequence
  RPE65 RNA guide
ugacuuccuucgaacaaaaug

SEQ ID NO: 23322 - RNA, 21 nt, Artificial Sequence
  RPE65 RNA guide
ugacuucuuuuucugacucuu

SEQ ID NO: 23323 - RNA, 21 nt, Artificial Sequence
  RPE65 RNA guide
ugagaccaccuaaagaggucu

SEQ ID NO: 23324 - RNA, 21 nt, Artificial Sequence
  RPE65 RNA guide
ugagauauagcagugagcaag

SEQ ID NO: 23325 - RNA, 21 nt, Artificial Sequence
  RPE65 RNA guide
ugagcaagacagacaagacuc

SEQ ID NO: 23326 - RNA, 21 nt, Artificial Sequence
  RPE65 RNA guide
ugaguaccuacuacgcuguag

SEQ ID NO: 23327 - RNA, 21 nt, Artificial Sequence
  RPE65 RNA guide
ugaguauuuaaugaguaccua

SEQ ID NO: 23328 - RNA, 21 nt, Artificial Sequence
  RPE65 RNA guide
ugaguuuuuaaaagcccaagc

SEQ ID NO: 23329 - RNA, 21 nt, Artificial Sequence
  RPE65 RNA guide
ugaucaucacaguuuuuacag

SEQ ID NO: 23330 - RNA, 21 nt, Artificial Sequence
  RPE65 RNA guide
ugaugaucacaugaaaagugu

SEQ ID NO: 23331 - RNA, 21 nt, Artificial Sequence
  RPE65 RNA guide
ugccaggugguacaagaguca

SEQ ID NO: 23332 - RNA, 21 nt, Artificial Sequence
  RPE65 RNA guide
ugccuaauuuacuucugauaa

SEQ ID NO: 23333 - RNA, 21 nt, Artificial Sequence
  RPE65 RNA guide
ugcucacugcuauaucucaau

SEQ ID NO: 23334 - RNA, 21 nt, Artificial Sequence
  RPE65 RNA guide
ugcuguacauacuguaaaaac

SEQ ID NO: 23335 - RNA, 21 nt, Artificial Sequence
  RPE65 RNA guide
uggaagcugacuuccuucgaa

SEQ ID NO: 23336 - RNA, 21 nt, Artificial Sequence
  RPE65 RNA guide
uggaucuguucuuaucuguaa

SEQ ID NO: 23337 - RNA, 21 nt, Artificial Sequence
  RPE65 RNA guide
uggcaugagaccaccuaaaga

SEQ ID NO: 23338 - RNA, 21 nt, Artificial Sequence
  RPE65 RNA guide
ugggcuuuuaaaaacucaaua

SEQ ID NO: 23339 - RNA, 21 nt, Artificial Sequence
  RPE65 RNA guide
ugguacaagagucagaaaaag

SEQ ID NO: 23340 - RNA, 21 nt, Artificial Sequence
  RPE65 RNA guide
uggucucaugccaggugguac

SEQ ID NO: 23341 - RNA, 21 nt, Artificial Sequence
  RPE65 RNA guide
ugguuucuaagaucgaucugg

SEQ ID NO: 23342 - RNA, 21 nt, Artificial Sequence
  RPE65 RNA guide
uguaaaaacugugaugaucac

SEQ ID NO: 23343 - RNA, 21 nt, Artificial Sequence
  RPE65 RNA guide
uguaacauacaaauauagcac

SEQ ID NO: 23344 - RNA, 21 nt, Artificial Sequence
  RPE65 RNA guide
uguaagcucuaagaagggaga

SEQ ID NO: 23345 - RNA, 21 nt, Artificial Sequence
  RPE65 RNA guide
uguacagcaggugcuauauuu

SEQ ID NO: 23346 - RNA, 21 nt, Artificial Sequence
  RPE65 RNA guide
uguacauacuguaaaaacugu

SEQ ID NO: 23347 - RNA, 21 nt, Artificial Sequence
  RPE65 RNA guide
uguaccaccuggcaugagacc

SEQ ID NO: 23348 - RNA, 21 nt, Artificial Sequence
  RPE65 RNA guide
uguacccuaccuacacuguaa

SEQ ID NO: 23349 - RNA, 21 nt, Artificial Sequence
  RPE65 RNA guide
uguagguaggguacauaaaga

SEQ ID NO: 23350 - RNA, 21 nt, Artificial Sequence
  RPE65 RNA guide
uguaugguuucuaagaucgau

SEQ ID NO: 23351 - RNA, 21 nt, Artificial Sequence
  RPE65 RNA guide
uguauguuacagauaagaaca

SEQ ID NO: 23352 - RNA, 21 nt, Artificial Sequence
  RPE65 RNA guide
ugucugucuugcucacugcua

SEQ ID NO: 23353 - RNA, 21 nt, Artificial Sequence
  RPE65 RNA guide
ugucuugcucacugcuauauc

SEQ ID NO: 23354 - RNA, 21 nt, Artificial Sequence
  RPE65 RNA guide
ugugaucaucacaguuuuuac

SEQ ID NO: 23355 - RNA, 21 nt, Artificial Sequence
  RPE65 RNA guide
ugugaugaucacaugaaaagu

SEQ ID NO: 23356 - RNA, 21 nt, Artificial Sequence
  RPE65 RNA guide
uguuacagauaagaacagauc

SEQ ID NO: 23357 - RNA, 21 nt, Artificial Sequence
  RPE65 RNA guide
uguucgaaggaagucagcuuc

SEQ ID NO: 23358 - RNA, 21 nt, Artificial Sequence
  RPE65 RNA guide
uguucucauuuuguucgaagg

SEQ ID NO: 23359 - RNA, 21 nt, Artificial Sequence
  RPE65 RNA guide
uuaaaagaccucuuuaggugg

SEQ ID NO: 23360 - RNA, 21 nt, Artificial Sequence
  RPE65 RNA guide
uuaaaagcccaagcuauagau

SEQ ID NO: 23361 - RNA, 21 nt, Artificial Sequence
  RPE65 RNA guide
uuaaacucuuuauguacccua

SEQ ID NO: 23362 - RNA, 21 nt, Artificial Sequence
  RPE65 RNA guide
uuaaugaguaccuacuacgcu

SEQ ID NO: 23363 - RNA, 21 nt, Artificial Sequence
  RPE65 RNA guide
uuacaguauguacagcaggug

SEQ ID NO: 23364 - RNA, 21 nt, Artificial Sequence
  RPE65 RNA guide
uuacaguguagguaggguaca

SEQ ID NO: 23365 - RNA, 21 nt, Artificial Sequence
  RPE65 RNA guide
uuagagcuuacaguguaggua

SEQ ID NO: 23366 - RNA, 21 nt, Artificial Sequence
  RPE65 RNA guide
uuagguggucucaugccaggu

SEQ ID NO: 23367 - RNA, 21 nt, Artificial Sequence
  RPE65 RNA guide
uuauguacccuaccuacacug

SEQ ID NO: 23368 - RNA, 21 nt, Artificial Sequence
  RPE65 RNA guide
uucaaucuauagcuugggcuu

SEQ ID NO: 23369 - RNA, 21 nt, Artificial Sequence
  RPE65 RNA guide
uucagugaguauuuaaugagu

SEQ ID NO: 23370 - RNA, 21 nt, Artificial Sequence
  RPE65 RNA guide
uucaugugaucaucacaguuu

SEQ ID NO: 23371 - RNA, 21 nt, Artificial Sequence
  RPE65 RNA guide
uuccagaucgaucuuagaaac

SEQ ID NO: 23372 - RNA, 21 nt, Artificial Sequence
  RPE65 RNA guide
uuccuucgaacaaaaugagaa

SEQ ID NO: 23373 - RNA, 21 nt, Artificial Sequence
  RPE65 RNA guide
uucgaaggaagucagcuucca

SEQ ID NO: 23374 - RNA, 21 nt, Artificial Sequence
  RPE65 RNA guide
uucuaagaucgaucuggaagc

SEQ ID NO: 23375 - RNA, 21 nt, Artificial Sequence
  RPE65 RNA guide
uucuaugacaaugacuacagc

SEQ ID NO: 23376 - RNA, 21 nt, Artificial Sequence
  RPE65 RNA guide
uucucauuuuguucgaaggaa

SEQ ID NO: 23377 - RNA, 21 nt, Artificial Sequence
  RPE65 RNA guide
uucugacucuuguaccaccug

SEQ ID NO: 23378 - RNA, 21 nt, Artificial Sequence
  RPE65 RNA guide
uucuuagagcuuacaguguag

SEQ ID NO: 23379 - RNA, 21 nt, Artificial Sequence
  RPE65 RNA guide
uucuuuuucugacucuuguac

SEQ ID NO: 23380 - RNA, 21 nt, Artificial Sequence
  RPE65 RNA guide
uugagauauagcagugagcaa

SEQ ID NO: 23381 - RNA, 21 nt, Artificial Sequence
  RPE65 RNA guide
uugaguuuuuaaaagcccaag

SEQ ID NO: 23382 - RNA, 21 nt, Artificial Sequence
  RPE65 RNA guide
uugcucacugcuauaucucaa

SEQ ID NO: 23383 - RNA, 21 nt, Artificial Sequence
  RPE65 RNA guide
uuguaccaccuggcaugagac

SEQ ID NO: 23384 - RNA, 21 nt, Artificial Sequence
  RPE65 RNA guide
uugucugucuugcucacugcu

SEQ ID NO: 23385 - RNA, 21 nt, Artificial Sequence
  RPE65 RNA guide
uuguucgaaggaagucagcuu

SEQ ID NO: 23386 - RNA, 21 nt, Artificial Sequence
  RPE65 RNA guide
uuguucucauuuuguucgaag

SEQ ID NO: 23387 - RNA, 21 nt, Artificial Sequence
  RPE65 RNA guide
uuuaaaagaccucuuuaggug

SEQ ID NO: 23388 - RNA, 21 nt, Artificial Sequence
  RPE65 RNA guide
uuuaaaagcccaagcuauaga

SEQ ID NO: 23389 - RNA, 21 nt, Artificial Sequence
  RPE65 RNA guide
uuuaaacucuuuauguacccu

SEQ ID NO: 23390 - RNA, 21 nt, Artificial Sequence
  RPE65 RNA guide
uuuaaugaguaccuacuacgc

SEQ ID NO: 23391 - RNA, 21 nt, Artificial Sequence
  RPE65 RNA guide
uuuacaguauguacagcaggu

SEQ ID NO: 23392 - RNA, 21 nt, Artificial Sequence
  RPE65 RNA guide
uuuagguggucucaugccagg

SEQ ID NO: 23393 - RNA, 21 nt, Artificial Sequence
  RPE65 RNA guide
uuuauguacccuaccuacacu

SEQ ID NO: 23394 - RNA, 21 nt, Artificial Sequence
  RPE65 RNA guide
uuucuaagaucgaucuggaag

SEQ ID NO: 23395 - RNA, 21 nt, Artificial Sequence
  RPE65 RNA guide
uuucugacucuuguaccaccu

SEQ ID NO: 23396 - RNA, 21 nt, Artificial Sequence
  RPE65 RNA guide
uuuguucgaaggaagucagcu

SEQ ID NO: 23397 - RNA, 21 nt, Artificial Sequence
  RPE65 RNA guide
uuuguucucauuuuguucgaa

SEQ ID NO: 23398 - RNA, 21 nt, Artificial Sequence
  RPE65 RNA guide
uuuuaaaagcccaagcuauag

SEQ ID NO: 23399 - RNA, 21 nt, Artificial Sequence
  RPE65 RNA guide
uuuuaaacucuuuauguaccc

SEQ ID NO: 23400 - RNA, 21 nt, Artificial Sequence
  RPE65 RNA guide
uuuuacaguauguacagcagg

SEQ ID NO: 23401 - RNA, 21 nt, Artificial Sequence
  RPE65 RNA guide
uuuucugacucuuguaccacc

SEQ ID NO: 23402 - RNA, 21 nt, Artificial Sequence
  RPE65 RNA guide
uuuuguucgaaggaagucagc

SEQ ID NO: 23403 - RNA, 21 nt, Artificial Sequence
  RPE65 RNA guide
uuuuuacaguauguacagcag

SEQ ID NO: 23404 - RNA, 21 nt, Artificial Sequence
  RPE65 RNA guide
uuuuucugacucuuguaccac

SEQ ID NO: 23405 - RNA, 22 nt, Artificial Sequence
  RPE65 RNA guide
aaaaacugugaugaucacauga

SEQ ID NO: 23406 - RNA, 22 nt, Artificial Sequence
  RPE65 RNA guide
aaaaagaagucaggucauaugg

SEQ ID NO: 23407 - RNA, 22 nt, Artificial Sequence
  RPE65 RNA guide
aaaaccauaugaccugacuucu

SEQ ID NO: 23408 - RNA, 22 nt, Artificial Sequence
  RPE65 RNA guide
aaaacugugaugaucacaugaa

SEQ ID NO: 23409 - RNA, 22 nt, Artificial Sequence
  RPE65 RNA guide
aaaagaagucaggucauauggu

SEQ ID NO: 23410 - RNA, 22 nt, Artificial Sequence
  RPE65 RNA guide
aaaagaccucuuuagguggucu

SEQ ID NO: 23411 - RNA, 22 nt, Artificial Sequence
  RPE65 RNA guide
aaaagcccaagcuauagauuga

SEQ ID NO: 23412 - RNA, 22 nt, Artificial Sequence
  RPE65 RNA guide
aaaccauaugaccugacuucuu

SEQ ID NO: 23413 - RNA, 22 nt, Artificial Sequence
  RPE65 RNA guide
aaacucuuuauguacccuaccu

SEQ ID NO: 23414 - RNA, 22 nt, Artificial Sequence
  RPE65 RNA guide
aaacugugaugaucacaugaaa

SEQ ID NO: 23415 - RNA, 22 nt, Artificial Sequence
  RPE65 RNA guide
aaagaagucaggucauaugguu

SEQ ID NO: 23416 - RNA, 22 nt, Artificial Sequence
  RPE65 RNA guide
aaagaccucuuuagguggucuc

SEQ ID NO: 23417 - RNA, 22 nt, Artificial Sequence
  RPE65 RNA guide
aaagaguuuaaaagaccucuuu

SEQ ID NO: 23418 - RNA, 22 nt, Artificial Sequence
  RPE65 RNA guide
aaagcccaagcuauagauugaa

SEQ ID NO: 23419 - RNA, 22 nt, Artificial Sequence
  RPE65 RNA guide
aaauacucacugaauaaaugga

SEQ ID NO: 23420 - RNA, 22 nt, Artificial Sequence
  RPE65 RNA guide
aaauauagaaaaccauaugacc

SEQ ID NO: 23421 - RNA, 22 nt, Artificial Sequence
  RPE65 RNA guide
aaauauagcaccugcuguacau

SEQ ID NO: 23422 - RNA, 22 nt, Artificial Sequence
  RPE65 RNA guide
aaauggaucuguucuuaucugu

SEQ ID NO: 23423 - RNA, 22 nt, Artificial Sequence
  RPE65 RNA guide
aacagauccauuuauucaguga

SEQ ID NO: 23424 - RNA, 22 nt, Artificial Sequence
  RPE65 RNA guide
aacauacaaauauagcaccugc

SEQ ID NO: 23425 - RNA, 22 nt, Artificial Sequence
  RPE65 RNA guide
aaccauaugaccugacuucuuu

SEQ ID NO: 23426 - RNA, 22 nt, Artificial Sequence
  RPE65 RNA guide
aacucuuuauguacccuaccua

SEQ ID NO: 23427 - RNA, 22 nt, Artificial Sequence
  RPE65 RNA guide
aacugugaugaucacaugaaaa

SEQ ID NO: 23428 - RNA, 22 nt, Artificial Sequence
  RPE65 RNA guide
aagaacagauccauuuauucag

SEQ ID NO: 23429 - RNA, 22 nt, Artificial Sequence
  RPE65 RNA guide
aagaagggagagucuugucugu

SEQ ID NO: 23430 - RNA, 22 nt, Artificial Sequence
  RPE65 RNA guide
aagaagucaggucauaugguuu

SEQ ID NO: 23431 - RNA, 22 nt, Artificial Sequence
  RPE65 RNA guide
aagacagacaagacucucccuu

SEQ ID NO: 23432 - RNA, 22 nt, Artificial Sequence
  RPE65 RNA guide
aagaccucuuuagguggucuca

SEQ ID NO: 23433 - RNA, 22 nt, Artificial Sequence
  RPE65 RNA guide
aagacucucccuucuuagagcu

SEQ ID NO: 23434 - RNA, 22 nt, Artificial Sequence
  RPE65 RNA guide
aagagucagaaaaagaagucag

SEQ ID NO: 23435 - RNA, 22 nt, Artificial Sequence
  RPE65 RNA guide
aagaguuuaaaagaccucuuua

SEQ ID NO: 23436 - RNA, 22 nt, Artificial Sequence
  RPE65 RNA guide
aagaucgaucuggaagcugacu

SEQ ID NO: 23437 - RNA, 22 nt, Artificial Sequence
  RPE65 RNA guide
aagauuuguucucauuuuguuc

SEQ ID NO: 23438 - RNA, 22 nt, Artificial Sequence
  RPE65 RNA guide
aagcccaagcuauagauugaau

SEQ ID NO: 23439 - RNA, 22 nt, Artificial Sequence
  RPE65 RNA guide
aagcucuaagaagggagagucu

SEQ ID NO: 23440 - RNA, 22 nt, Artificial Sequence
  RPE65 RNA guide
aagcugacuuccuucgaacaaa

SEQ ID NO: 23441 - RNA, 22 nt, Artificial Sequence
  RPE65 RNA guide
aaggaagucagcuuccagaucg

SEQ ID NO: 23442 - RNA, 22 nt, Artificial Sequence
  RPE65 RNA guide
aagggagagucuugucugucuu

SEQ ID NO: 23443 - RNA, 22 nt, Artificial Sequence
  RPE65 RNA guide
aagucagcuuccagaucgaucu

SEQ ID NO: 23444 - RNA, 22 nt, Artificial Sequence
  RPE65 RNA guide
aagucaggucauaugguuuucu

SEQ ID NO: 23445 - RNA, 22 nt, Artificial Sequence
  RPE65 RNA guide
aauacacacuuuucaugugauc

SEQ ID NO: 23446 - RNA, 22 nt, Artificial Sequence
  RPE65 RNA guide
aauacucacugaauaaauggau

SEQ ID NO: 23447 - RNA, 22 nt, Artificial Sequence
  RPE65 RNA guide
aauauagaaaaccauaugaccu

SEQ ID NO: 23448 - RNA, 22 nt, Artificial Sequence
  RPE65 RNA guide
aauauagcaccugcuguacaua

SEQ ID NO: 23449 - RNA, 22 nt, Artificial Sequence
  RPE65 RNA guide
aauauucuaugacaaugacuac

SEQ ID NO: 23450 - RNA, 22 nt, Artificial Sequence
  RPE65 RNA guide
aauauugagauauagcagugag

SEQ ID NO: 23451 - RNA, 22 nt, Artificial Sequence
  RPE65 RNA guide
aauauugaguuuuuaaaagccc

SEQ ID NO: 23452 - RNA, 22 nt, Artificial Sequence
  RPE65 RNA guide
aaucuauagcuugggcuuuuaa

SEQ ID NO: 23453 - RNA, 22 nt, Artificial Sequence
  RPE65 RNA guide
aaugacauucaaucuauagcuu

SEQ ID NO: 23454 - RNA, 22 nt, Artificial Sequence
  RPE65 RNA guide
aaugacuacagcguaguaggua

SEQ ID NO: 23455 - RNA, 22 nt, Artificial Sequence
  RPE65 RNA guide
aaugaguaccuacuacgcugua

SEQ ID NO: 23456 - RNA, 22 nt, Artificial Sequence
  RPE65 RNA guide
aauggaucuguucuuaucugua

SEQ ID NO: 23457 - RNA, 22 nt, Artificial Sequence
  RPE65 RNA guide
acaaauauagaaaaccauauga

SEQ ID NO: 23458 - RNA, 22 nt, Artificial Sequence
  RPE65 RNA guide
acaaauauagcaccugcuguac

SEQ ID NO: 23459 - RNA, 22 nt, Artificial Sequence
  RPE65 RNA guide
acaagacucucccuucuuagag

SEQ ID NO: 23460 - RNA, 22 nt, Artificial Sequence
  RPE65 RNA guide
acaagagucagaaaaagaaguc

SEQ ID NO: 23461 - RNA, 22 nt, Artificial Sequence
  RPE65 RNA guide
acaaugacuacagcguaguagg

SEQ ID NO: 23462 - RNA, 22 nt, Artificial Sequence
  RPE65 RNA guide
acacacuuuucaugugaucauc

SEQ ID NO: 23463 - RNA, 22 nt, Artificial Sequence
  RPE65 RNA guide
acacuguaagcucuaagaaggg

SEQ ID NO: 23464 - RNA, 22 nt, Artificial Sequence
  RPE65 RNA guide
acacuuuucaugugaucaucac

SEQ ID NO: 23465 - RNA, 22 nt, Artificial Sequence
  RPE65 RNA guide
acagacaagacucucccuucuu

SEQ ID NO: 23466 - RNA, 22 nt, Artificial Sequence
  RPE65 RNA guide
acagauaagaacagauccauuu

SEQ ID NO: 23467 - RNA, 22 nt, Artificial Sequence
  RPE65 RNA guide
acagauccauuuauucagugag

SEQ ID NO: 23468 - RNA, 22 nt, Artificial Sequence
  RPE65 RNA guide
acagcaggugcuauauuuguau

SEQ ID NO: 23469 - RNA, 22 nt, Artificial Sequence
  RPE65 RNA guide
acagcguaguagguacucauua

SEQ ID NO: 23470 - RNA, 22 nt, Artificial Sequence
  RPE65 RNA guide
acaguauguacagcaggugcua

SEQ ID NO: 23471 - RNA, 22 nt, Artificial Sequence
  RPE65 RNA guide
acaguguagguaggguacauaa

SEQ ID NO: 23472 - RNA, 22 nt, Artificial Sequence
  RPE65 RNA guide
acaguuuuuacaguauguacag

SEQ ID NO: 23473 - RNA, 22 nt, Artificial Sequence
  RPE65 RNA guide
acauacaaauauagcaccugcu

SEQ ID NO: 23474 - RNA, 22 nt, Artificial Sequence
  RPE65 RNA guide
acauacuguaaaaacugugaug

SEQ ID NO: 23475 - RNA, 22 nt, Artificial Sequence
  RPE65 RNA guide
acauucaaucuauagcuugggc

SEQ ID NO: 23476 - RNA, 22 nt, Artificial Sequence
  RPE65 RNA guide
accaccuaaagaggucuuuuaa

SEQ ID NO: 23477 - RNA, 22 nt, Artificial Sequence
  RPE65 RNA guide
accaccuggcaugagaccaccu

SEQ ID NO: 23478 - RNA, 22 nt, Artificial Sequence
  RPE65 RNA guide
accauacauaugauauaucuua

SEQ ID NO: 23479 - RNA, 22 nt, Artificial Sequence
  RPE65 RNA guide
accauaugaccugacuucuuuu

SEQ ID NO: 23480 - RNA, 22 nt, Artificial Sequence
  RPE65 RNA guide
acccuaccuacacuguaagcuc

SEQ ID NO: 23481 - RNA, 22 nt, Artificial Sequence
  RPE65 RNA guide
accuaaagaggucuuuuaaacu

SEQ ID NO: 23482 - RNA, 22 nt, Artificial Sequence
  RPE65 RNA guide
accuacacuguaagcucuaaga

SEQ ID NO: 23483 - RNA, 22 nt, Artificial Sequence
  RPE65 RNA guide
accuacuacgcuguagucauug

SEQ ID NO: 23484 - RNA, 22 nt, Artificial Sequence
  RPE65 RNA guide
accucuuuagguggucucaugc

SEQ ID NO: 23485 - RNA, 22 nt, Artificial Sequence
  RPE65 RNA guide
accugacuucuuuuucugacuc

SEQ ID NO: 23486 - RNA, 22 nt, Artificial Sequence
  RPE65 RNA guide
accugcuguacauacuguaaaa

SEQ ID NO: 23487 - RNA, 22 nt, Artificial Sequence
  RPE65 RNA guide
accuggcaugagaccaccuaaa

SEQ ID NO: 23488 - RNA, 22 nt, Artificial Sequence
  RPE65 RNA guide
acgcuguagucauugucauaga

SEQ ID NO: 23489 - RNA, 22 nt, Artificial Sequence
  RPE65 RNA guide
acuacagcguaguagguacuca

SEQ ID NO: 23490 - RNA, 22 nt, Artificial Sequence
  RPE65 RNA guide
acuacgcuguagucauugucau

SEQ ID NO: 23491 - RNA, 22 nt, Artificial Sequence
  RPE65 RNA guide
acucaauauugccuaauuuacu

SEQ ID NO: 23492 - RNA, 22 nt, Artificial Sequence
  RPE65 RNA guide
acucacugaauaaauggaucug

SEQ ID NO: 23493 - RNA, 22 nt, Artificial Sequence
  RPE65 RNA guide
acucucccuucuuagagcuuac

SEQ ID NO: 23494 - RNA, 22 nt, Artificial Sequence
  RPE65 RNA guide
acucuuguaccaccuggcauga

SEQ ID NO: 23495 - RNA, 22 nt, Artificial Sequence
  RPE65 RNA guide
acucuuuauguacccuaccuac

SEQ ID NO: 23496 - RNA, 22 nt, Artificial Sequence
  RPE65 RNA guide
acugaauaaauggaucuguucu

SEQ ID NO: 23497 - RNA, 22 nt, Artificial Sequence
  RPE65 RNA guide
acugcuauaucucaauauucua

SEQ ID NO: 23498 - RNA, 22 nt, Artificial Sequence
  RPE65 RNA guide
acugcuuucaaagucuuuuaau

SEQ ID NO: 23499 - RNA, 22 nt, Artificial Sequence
  RPE65 RNA guide
acuguaaaaacugugaugauca

SEQ ID NO: 23500 - RNA, 22 nt, Artificial Sequence
  RPE65 RNA guide
acuguaagcucuaagaagggag

SEQ ID NO: 23501 - RNA, 22 nt, Artificial Sequence
  RPE65 RNA guide
acugugaugaucacaugaaaag

SEQ ID NO: 23502 - RNA, 22 nt, Artificial Sequence
  RPE65 RNA guide
acuuccuucgaacaaaaugaga

SEQ ID NO: 23503 - RNA, 22 nt, Artificial Sequence
  RPE65 RNA guide
acuucuuuuucugacucuugua

SEQ ID NO: 23504 - RNA, 22 nt, Artificial Sequence
  RPE65 RNA guide
acuuuucaugugaucaucacag

SEQ ID NO: 23505 - RNA, 22 nt, Artificial Sequence
  RPE65 RNA guide
agaaaaagaagucaggucauau

SEQ ID NO: 23506 - RNA, 22 nt, Artificial Sequence
  RPE65 RNA guide
agaaaaccauaugaccugacuu

SEQ ID NO: 23507 - RNA, 22 nt, Artificial Sequence
  RPE65 RNA guide
agaacagauccauuuauucagu

SEQ ID NO: 23508 - RNA, 22 nt, Artificial Sequence
  RPE65 RNA guide
agaagggagagucuugucuguc

SEQ ID NO: 23509 - RNA, 22 nt, Artificial Sequence
  RPE65 RNA guide
agaagucaggucauaugguuuu

SEQ ID NO: 23510 - RNA, 22 nt, Artificial Sequence
  RPE65 RNA guide
agaauauugagauauagcagug

SEQ ID NO: 23511 - RNA, 22 nt, Artificial Sequence
  RPE65 RNA guide
agacaagacucucccuucuuag

SEQ ID NO: 23512 - RNA, 22 nt, Artificial Sequence
  RPE65 RNA guide
agacagacaagacucucccuuc

SEQ ID NO: 23513 - RNA, 22 nt, Artificial Sequence
  RPE65 RNA guide
agaccaccuaaagaggucuuuu

SEQ ID NO: 23514 - RNA, 22 nt, Artificial Sequence
  RPE65 RNA guide
agaccucuuuagguggucucau

SEQ ID NO: 23515 - RNA, 22 nt, Artificial Sequence
  RPE65 RNA guide
agacucucccuucuuagagcuu

SEQ ID NO: 23516 - RNA, 22 nt, Artificial Sequence
  RPE65 RNA guide
agacuuugaaagcaguaagaua

SEQ ID NO: 23517 - RNA, 22 nt, Artificial Sequence
  RPE65 RNA guide
agagcuuacaguguagguaggg

SEQ ID NO: 23518 - RNA, 22 nt, Artificial Sequence
  RPE65 RNA guide
agaggucuuuuaaacucuuuau

SEQ ID NO: 23519 - RNA, 22 nt, Artificial Sequence
  RPE65 RNA guide
agagucagaaaaagaagucagg

SEQ ID NO: 23520 - RNA, 22 nt, Artificial Sequence
  RPE65 RNA guide
agagucuugucugucuugcuca

SEQ ID NO: 23521 - RNA, 22 nt, Artificial Sequence
  RPE65 RNA guide
agaguuuaaaagaccucuuuag

SEQ ID NO: 23522 - RNA, 22 nt, Artificial Sequence
  RPE65 RNA guide
agauaagaacagauccauuuau

SEQ ID NO: 23523 - RNA, 22 nt, Artificial Sequence
  RPE65 RNA guide
agauauagcagugagcaagaca

SEQ ID NO: 23524 - RNA, 22 nt, Artificial Sequence
  RPE65 RNA guide
agaucgaucuggaagcugacuu

SEQ ID NO: 23525 - RNA, 22 nt, Artificial Sequence
  RPE65 RNA guide
agaucgaucuuagaaaccauac

SEQ ID NO: 23526 - RNA, 22 nt, Artificial Sequence
  RPE65 RNA guide
agauuuguucucauuuuguucg

SEQ ID NO: 23527 - RNA, 22 nt, Artificial Sequence
  RPE65 RNA guide
agcaagacagacaagacucucc

SEQ ID NO: 23528 - RNA, 22 nt, Artificial Sequence
  RPE65 RNA guide
agcaccugcuguacauacugua

SEQ ID NO: 23529 - RNA, 22 nt, Artificial Sequence
  RPE65 RNA guide
agcaggugcuauauuuguaugu

SEQ ID NO: 23530 - RNA, 22 nt, Artificial Sequence
  RPE65 RNA guide
agcaguaagauauaucauaugu

SEQ ID NO: 23531 - RNA, 22 nt, Artificial Sequence
  RPE65 RNA guide
agcagugagcaagacagacaag

SEQ ID NO: 23532 - RNA, 22 nt, Artificial Sequence
  RPE65 RNA guide
agcccaagcuauagauugaaug

SEQ ID NO: 23533 - RNA, 22 nt, Artificial Sequence
  RPE65 RNA guide
agcguaguagguacucauuaaa

SEQ ID NO: 23534 - RNA, 22 nt, Artificial Sequence
  RPE65 RNA guide
agcucuaagaagggagagucuu

SEQ ID NO: 23535 - RNA, 22 nt, Artificial Sequence
  RPE65 RNA guide
agcugacuuccuucgaacaaaa

SEQ ID NO: 23536 - RNA, 22 nt, Artificial Sequence
  RPE65 RNA guide
agcuuacaguguagguagggua

SEQ ID NO: 23537 - RNA, 22 nt, Artificial Sequence
  RPE65 RNA guide
agcuuccagaucgaucuuagaa

SEQ ID NO: 23538 - RNA, 22 nt, Artificial Sequence
  RPE65 RNA guide
agcuugggcuuuuaaaaacuca

SEQ ID NO: 23539 - RNA, 22 nt, Artificial Sequence
  RPE65 RNA guide
aggaagucagcuuccagaucga

SEQ ID NO: 23540 - RNA, 22 nt, Artificial Sequence
  RPE65 RNA guide
aggagguauuacauugacaaau

SEQ ID NO: 23541 - RNA, 22 nt, Artificial Sequence
  RPE65 RNA guide
aggcaauauugaguuuuuaaaa

SEQ ID NO: 23542 - RNA, 22 nt, Artificial Sequence
  RPE65 RNA guide
agggagagucuugucugucuug

SEQ ID NO: 23543 - RNA, 22 nt, Artificial Sequence
  RPE65 RNA guide
aggguacauaaagaguuuaaaa

SEQ ID NO: 23544 - RNA, 22 nt, Artificial Sequence
  RPE65 RNA guide
agguacucauuaaauacucacu

SEQ ID NO: 23545 - RNA, 22 nt, Artificial Sequence
  RPE65 RNA guide
agguaggguacauaaagaguuu

SEQ ID NO: 23546 - RNA, 22 nt, Artificial Sequence
  RPE65 RNA guide
aggucauaugguuuucuauauu

SEQ ID NO: 23547 - RNA, 22 nt, Artificial Sequence
  RPE65 RNA guide
aggucuuuuaaacucuuuaugu

SEQ ID NO: 23548 - RNA, 22 nt, Artificial Sequence
  RPE65 RNA guide
aggugcuauauuuguauguuac

SEQ ID NO: 23549 - RNA, 22 nt, Artificial Sequence
  RPE65 RNA guide
aggugguacaagagucagaaaa

SEQ ID NO: 23550 - RNA, 22 nt, Artificial Sequence
  RPE65 RNA guide
agguggucucaugccagguggu

SEQ ID NO: 23551 - RNA, 22 nt, Artificial Sequence
  RPE65 RNA guide
aguaccuacuacgcuguaguca

SEQ ID NO: 23552 - RNA, 22 nt, Artificial Sequence
  RPE65 RNA guide
aguagguacucauuaaauacuc

SEQ ID NO: 23553 - RNA, 22 nt, Artificial Sequence
  RPE65 RNA guide
aguauguacagcaggugcuaua

SEQ ID NO: 23554 - RNA, 22 nt, Artificial Sequence
  RPE65 RNA guide
aguauuuaaugaguaccuacua

SEQ ID NO: 23555 - RNA, 22 nt, Artificial Sequence
  RPE65 RNA guide
agucagaaaaagaagucagguc

SEQ ID NO: 23556 - RNA, 22 nt, Artificial Sequence
  RPE65 RNA guide
agucagcuuccagaucgaucuu

SEQ ID NO: 23557 - RNA, 22 nt, Artificial Sequence
  RPE65 RNA guide
agucaggucauaugguuuucua

SEQ ID NO: 23558 - RNA, 22 nt, Artificial Sequence
  RPE65 RNA guide
agucuugucugucuugcucacu

SEQ ID NO: 23559 - RNA, 22 nt, Artificial Sequence
  RPE65 RNA guide
agugagcaagacagacaagacu

SEQ ID NO: 23560 - RNA, 22 nt, Artificial Sequence
  RPE65 RNA guide
agugaguauuuaaugaguaccu

SEQ ID NO: 23561 - RNA, 22 nt, Artificial Sequence
  RPE65 RNA guide
aguguagguaggguacauaaag

SEQ ID NO: 23562 - RNA, 22 nt, Artificial Sequence
  RPE65 RNA guide
aguguguauuaaaagacuuuga

SEQ ID NO: 23563 - RNA, 22 nt, Artificial Sequence
  RPE65 RNA guide
aguuuaaaagaccucuuuaggu

SEQ ID NO: 23564 - RNA, 22 nt, Artificial Sequence
  RPE65 RNA guide
aguuuuuaaaagcccaagcuau

SEQ ID NO: 23565 - RNA, 22 nt, Artificial Sequence
  RPE65 RNA guide
aguuuuuacaguauguacagca

SEQ ID NO: 23566 - RNA, 22 nt, Artificial Sequence
  RPE65 RNA guide
auaagaacagauccauuuauuc

SEQ ID NO: 23567 - RNA, 22 nt, Artificial Sequence
  RPE65 RNA guide
auacaaauauagcaccugcugu

SEQ ID NO: 23568 - RNA, 22 nt, Artificial Sequence
  RPE65 RNA guide
auacacacuuuucaugugauca

SEQ ID NO: 23569 - RNA, 22 nt, Artificial Sequence
  RPE65 RNA guide
auacucacugaauaaauggauc

SEQ ID NO: 23570 - RNA, 22 nt, Artificial Sequence
  RPE65 RNA guide
auacuguaaaaacugugaugau

SEQ ID NO: 23571 - RNA, 22 nt, Artificial Sequence
  RPE65 RNA guide
auagaaaaccauaugaccugac

SEQ ID NO: 23572 - RNA, 22 nt, Artificial Sequence
  RPE65 RNA guide
auagaauauugagauauagcag

SEQ ID NO: 23573 - RNA, 22 nt, Artificial Sequence
  RPE65 RNA guide
auagcaccugcuguacauacug

SEQ ID NO: 23574 - RNA, 22 nt, Artificial Sequence
  RPE65 RNA guide
auagcagugagcaagacagaca

SEQ ID NO: 23575 - RNA, 22 nt, Artificial Sequence
  RPE65 RNA guide
auagcuugggcuuuuaaaaacu

SEQ ID NO: 23576 - RNA, 22 nt, Artificial Sequence
  RPE65 RNA guide
auauagaaaaccauaugaccug

SEQ ID NO: 23577 - RNA, 22 nt, Artificial Sequence
  RPE65 RNA guide
auauagcaccugcuguacauac

SEQ ID NO: 23578 - RNA, 22 nt, Artificial Sequence
  RPE65 RNA guide
auauagcagugagcaagacaga

SEQ ID NO: 23579 - RNA, 22 nt, Artificial Sequence
  RPE65 RNA guide
auaugaccugacuucuuuuucu

SEQ ID NO: 23580 - RNA, 22 nt, Artificial Sequence
  RPE65 RNA guide
auauguaugguuucuaagaucg

SEQ ID NO: 23581 - RNA, 22 nt, Artificial Sequence
  RPE65 RNA guide
auauucuaugacaaugacuaca

SEQ ID NO: 23582 - RNA, 22 nt, Artificial Sequence
  RPE65 RNA guide
auauugagauauagcagugagc

SEQ ID NO: 23583 - RNA, 22 nt, Artificial Sequence
  RPE65 RNA guide
auauugaguuuuuaaaagccca

SEQ ID NO: 23584 - RNA, 22 nt, Artificial Sequence
  RPE65 RNA guide
aucacaguuuuuacaguaugua

SEQ ID NO: 23585 - RNA, 22 nt, Artificial Sequence
  RPE65 RNA guide
aucauauguaugguuucuaaga

SEQ ID NO: 23586 - RNA, 22 nt, Artificial Sequence
  RPE65 RNA guide
aucaucacaguuuuuacaguau

SEQ ID NO: 23587 - RNA, 22 nt, Artificial Sequence
  RPE65 RNA guide
aucgaucuggaagcugacuucc

SEQ ID NO: 23588 - RNA, 22 nt, Artificial Sequence
  RPE65 RNA guide
aucgaucuuagaaaccauacau

SEQ ID NO: 23589 - RNA, 22 nt, Artificial Sequence
  RPE65 RNA guide
aucuauagcuugggcuuuuaaa

SEQ ID NO: 23590 - RNA, 22 nt, Artificial Sequence
  RPE65 RNA guide
aucuggaagcugacuuccuucg

SEQ ID NO: 23591 - RNA, 22 nt, Artificial Sequence
  RPE65 RNA guide
aucuguaacauacaaauauagc

SEQ ID NO: 23592 - RNA, 22 nt, Artificial Sequence
  RPE65 RNA guide
augacaaugacuacagcguagu

SEQ ID NO: 23593 - RNA, 22 nt, Artificial Sequence
  RPE65 RNA guide
augacauucaaucuauagcuug

SEQ ID NO: 23594 - RNA, 22 nt, Artificial Sequence
  RPE65 RNA guide
augaccugacuucuuuuucuga

SEQ ID NO: 23595 - RNA, 22 nt, Artificial Sequence
  RPE65 RNA guide
augacuacagcguaguagguac

SEQ ID NO: 23596 - RNA, 22 nt, Artificial Sequence
  RPE65 RNA guide
augagaccaccuaaagaggucu

SEQ ID NO: 23597 - RNA, 22 nt, Artificial Sequence
  RPE65 RNA guide
augaguaccuacuacgcuguag

SEQ ID NO: 23598 - RNA, 22 nt, Artificial Sequence
  RPE65 RNA guide
augccaggugguacaagaguca

SEQ ID NO: 23599 - RNA, 22 nt, Artificial Sequence
  RPE65 RNA guide
auggaucuguucuuaucuguaa

SEQ ID NO: 23600 - RNA, 22 nt, Artificial Sequence
  RPE65 RNA guide
augguuucuaagaucgaucugg

SEQ ID NO: 23601 - RNA, 22 nt, Artificial Sequence
  RPE65 RNA guide
auguacagcaggugcuauauuu

SEQ ID NO: 23602 - RNA, 22 nt, Artificial Sequence
  RPE65 RNA guide
auguacccuaccuacacuguaa

SEQ ID NO: 23603 - RNA, 22 nt, Artificial Sequence
  RPE65 RNA guide
auguaugguuucuaagaucgau

SEQ ID NO: 23604 - RNA, 22 nt, Artificial Sequence
  RPE65 RNA guide
augugaucaucacaguuuuuac

SEQ ID NO: 23605 - RNA, 22 nt, Artificial Sequence
  RPE65 RNA guide
auguuacagauaagaacagauc

SEQ ID NO: 23606 - RNA, 22 nt, Artificial Sequence
  RPE65 RNA guide
auucaaucuauagcuugggcuu

SEQ ID NO: 23607 - RNA, 22 nt, Artificial Sequence
  RPE65 RNA guide
auucagugaguauuuaaugagu

SEQ ID NO: 23608 - RNA, 22 nt, Artificial Sequence
  RPE65 RNA guide
auucuaugacaaugacuacagc

SEQ ID NO: 23609 - RNA, 22 nt, Artificial Sequence
  RPE65 RNA guide
auugagauauagcagugagcaa

SEQ ID NO: 23610 - RNA, 22 nt, Artificial Sequence
  RPE65 RNA guide
auugaguuuuuaaaagcccaag

SEQ ID NO: 23611 - RNA, 22 nt, Artificial Sequence
  RPE65 RNA guide
auuuaaugaguaccuacuacgc

SEQ ID NO: 23612 - RNA, 22 nt, Artificial Sequence
  RPE65 RNA guide
auuuguucucauuuuguucgaa

SEQ ID NO: 23613 - RNA, 22 nt, Artificial Sequence
  RPE65 RNA guide
auuuuguucgaaggaagucagc

SEQ ID NO: 23614 - RNA, 22 nt, Artificial Sequence
  RPE65 RNA guide
caaauauagaaaaccauaugac

SEQ ID NO: 23615 - RNA, 22 nt, Artificial Sequence
  RPE65 RNA guide
caaauauagcaccugcuguaca

SEQ ID NO: 23616 - RNA, 22 nt, Artificial Sequence
  RPE65 RNA guide
caagacagacaagacucucccu

SEQ ID NO: 23617 - RNA, 22 nt, Artificial Sequence
  RPE65 RNA guide
caagacucucccuucuuagagc

SEQ ID NO: 23618 - RNA, 22 nt, Artificial Sequence
  RPE65 RNA guide
caagagucagaaaaagaaguca

SEQ ID NO: 23619 - RNA, 22 nt, Artificial Sequence
  RPE65 RNA guide
caagcuauagauugaaugucau

SEQ ID NO: 23620 - RNA, 22 nt, Artificial Sequence
  RPE65 RNA guide
caauauucuaugacaaugacua

SEQ ID NO: 23621 - RNA, 22 nt, Artificial Sequence
  RPE65 RNA guide
caauauugaguuuuuaaaagcc

SEQ ID NO: 23622 - RNA, 22 nt, Artificial Sequence
  RPE65 RNA guide
caaucuauagcuugggcuuuua

SEQ ID NO: 23623 - RNA, 22 nt, Artificial Sequence
  RPE65 RNA guide
caaugacauucaaucuauagcu

SEQ ID NO: 23624 - RNA, 22 nt, Artificial Sequence
  RPE65 RNA guide
caaugacuacagcguaguaggu

SEQ ID NO: 23625 - RNA, 22 nt, Artificial Sequence
  RPE65 RNA guide
cacacuuuucaugugaucauca

SEQ ID NO: 23626 - RNA, 22 nt, Artificial Sequence
  RPE65 RNA guide
cacaguuuuuacaguauguaca

SEQ ID NO: 23627 - RNA, 22 nt, Artificial Sequence
  RPE65 RNA guide
cacaugaaaaguguguauuaaa

SEQ ID NO: 23628 - RNA, 22 nt, Artificial Sequence
  RPE65 RNA guide
caccuaaagaggucuuuuaaac

SEQ ID NO: 23629 - RNA, 22 nt, Artificial Sequence
  RPE65 RNA guide
caccugcuguacauacuguaaa

SEQ ID NO: 23630 - RNA, 22 nt, Artificial Sequence
  RPE65 RNA guide
caccuggcaugagaccaccuaa

SEQ ID NO: 23631 - RNA, 22 nt, Artificial Sequence
  RPE65 RNA guide
cacugaauaaauggaucuguuc

SEQ ID NO: 23632 - RNA, 22 nt, Artificial Sequence
  RPE65 RNA guide
cacugcuauaucucaauauucu

SEQ ID NO: 23633 - RNA, 22 nt, Artificial Sequence
  RPE65 RNA guide
cacuguaagcucuaagaaggga

SEQ ID NO: 23634 - RNA, 22 nt, Artificial Sequence
  RPE65 RNA guide
cacuuuucaugugaucaucaca

SEQ ID NO: 23635 - RNA, 22 nt, Artificial Sequence
  RPE65 RNA guide
cagaaaaagaagucaggucaua

SEQ ID NO: 23636 - RNA, 22 nt, Artificial Sequence
  RPE65 RNA guide
cagaaguaaauuaggcaauauu

SEQ ID NO: 23637 - RNA, 22 nt, Artificial Sequence
  RPE65 RNA guide
cagacaagacucucccuucuua

SEQ ID NO: 23638 - RNA, 22 nt, Artificial Sequence
  RPE65 RNA guide
cagauaagaacagauccauuua

SEQ ID NO: 23639 - RNA, 22 nt, Artificial Sequence
  RPE65 RNA guide
cagauccauuuauucagugagu

SEQ ID NO: 23640 - RNA, 22 nt, Artificial Sequence
  RPE65 RNA guide
cagaucgaucuuagaaaccaua

SEQ ID NO: 23641 - RNA, 22 nt, Artificial Sequence
  RPE65 RNA guide
cagcaggugcuauauuuguaug

SEQ ID NO: 23642 - RNA, 22 nt, Artificial Sequence
  RPE65 RNA guide
cagcguaguagguacucauuaa

SEQ ID NO: 23643 - RNA, 22 nt, Artificial Sequence
  RPE65 RNA guide
cagcuuccagaucgaucuuaga

SEQ ID NO: 23644 - RNA, 22 nt, Artificial Sequence
  RPE65 RNA guide
caggucauaugguuuucuauau

SEQ ID NO: 23645 - RNA, 22 nt, Artificial Sequence
  RPE65 RNA guide
caggugcuauauuuguauguua

SEQ ID NO: 23646 - RNA, 22 nt, Artificial Sequence
  RPE65 RNA guide
caggugguacaagagucagaaa

SEQ ID NO: 23647 - RNA, 22 nt, Artificial Sequence
  RPE65 RNA guide
caguauguacagcaggugcuau

SEQ ID NO: 23648 - RNA, 22 nt, Artificial Sequence
  RPE65 RNA guide
cagugagcaagacagacaagac

SEQ ID NO: 23649 - RNA, 22 nt, Artificial Sequence
  RPE65 RNA guide
cagugaguauuuaaugaguacc

SEQ ID NO: 23650 - RNA, 22 nt, Artificial Sequence
  RPE65 RNA guide
caguguagguaggguacauaaa

SEQ ID NO: 23651 - RNA, 22 nt, Artificial Sequence
  RPE65 RNA guide
caguuuuuacaguauguacagc

SEQ ID NO: 23652 - RNA, 22 nt, Artificial Sequence
  RPE65 RNA guide
cauacaaauauagcaccugcug

SEQ ID NO: 23653 - RNA, 22 nt, Artificial Sequence
  RPE65 RNA guide
cauacuguaaaaacugugauga

SEQ ID NO: 23654 - RNA, 22 nt, Artificial Sequence
  RPE65 RNA guide
cauagaauauugagauauagca

SEQ ID NO: 23655 - RNA, 22 nt, Artificial Sequence
  RPE65 RNA guide
cauaugaccugacuucuuuuuc

SEQ ID NO: 23656 - RNA, 22 nt, Artificial Sequence
  RPE65 RNA guide
cauauguaugguuucuaagauc

SEQ ID NO: 23657 - RNA, 22 nt, Artificial Sequence
  RPE65 RNA guide
caucacaguuuuuacaguaugu

SEQ ID NO: 23658 - RNA, 22 nt, Artificial Sequence
  RPE65 RNA guide
caugagaccaccuaaagagguc

SEQ ID NO: 23659 - RNA, 22 nt, Artificial Sequence
  RPE65 RNA guide
caugccaggugguacaagaguc

SEQ ID NO: 23660 - RNA, 22 nt, Artificial Sequence
  RPE65 RNA guide
caugugaucaucacaguuuuua

SEQ ID NO: 23661 - RNA, 22 nt, Artificial Sequence
  RPE65 RNA guide
cauucaaucuauagcuugggcu

SEQ ID NO: 23662 - RNA, 22 nt, Artificial Sequence
  RPE65 RNA guide
cauuuuguucgaaggaagucag

SEQ ID NO: 23663 - RNA, 22 nt, Artificial Sequence
  RPE65 RNA guide
ccaagcuauagauugaauguca

SEQ ID NO: 23664 - RNA, 22 nt, Artificial Sequence
  RPE65 RNA guide
ccaccuaaagaggucuuuuaaa

SEQ ID NO: 23665 - RNA, 22 nt, Artificial Sequence
  RPE65 RNA guide
ccaccuggcaugagaccaccua

SEQ ID NO: 23666 - RNA, 22 nt, Artificial Sequence
  RPE65 RNA guide
ccagaucgaucuuagaaaccau

SEQ ID NO: 23667 - RNA, 22 nt, Artificial Sequence
  RPE65 RNA guide
ccaggugguacaagagucagaa

SEQ ID NO: 23668 - RNA, 22 nt, Artificial Sequence
  RPE65 RNA guide
ccauacauaugauauaucuuac

SEQ ID NO: 23669 - RNA, 22 nt, Artificial Sequence
  RPE65 RNA guide
ccauaugaccugacuucuuuuu

SEQ ID NO: 23670 - RNA, 22 nt, Artificial Sequence
  RPE65 RNA guide
cccaagcuauagauugaauguc

SEQ ID NO: 23671 - RNA, 22 nt, Artificial Sequence
  RPE65 RNA guide
cccuaccuacacuguaagcucu

SEQ ID NO: 23672 - RNA, 22 nt, Artificial Sequence
  RPE65 RNA guide
cccuucuuagagcuuacagugu

SEQ ID NO: 23673 - RNA, 22 nt, Artificial Sequence
  RPE65 RNA guide
ccuaaagaggucuuuuaaacuc

SEQ ID NO: 23674 - RNA, 22 nt, Artificial Sequence
  RPE65 RNA guide
ccuacacuguaagcucuaagaa

SEQ ID NO: 23675 - RNA, 22 nt, Artificial Sequence
  RPE65 RNA guide
ccuaccuacacuguaagcucua

SEQ ID NO: 23676 - RNA, 22 nt, Artificial Sequence
  RPE65 RNA guide
ccuacuacgcuguagucauugu

SEQ ID NO: 23677 - RNA, 22 nt, Artificial Sequence
  RPE65 RNA guide
ccuccuauauuauuucaaugac

SEQ ID NO: 23678 - RNA, 22 nt, Artificial Sequence
  RPE65 RNA guide
ccucuuuagguggucucaugcc

SEQ ID NO: 23679 - RNA, 22 nt, Artificial Sequence
  RPE65 RNA guide
ccugacuucuuuuucugacucu

SEQ ID NO: 23680 - RNA, 22 nt, Artificial Sequence
  RPE65 RNA guide
ccugcuguacauacuguaaaaa

SEQ ID NO: 23681 - RNA, 22 nt, Artificial Sequence
  RPE65 RNA guide
ccuggcaugagaccaccuaaag

SEQ ID NO: 23682 - RNA, 22 nt, Artificial Sequence
  RPE65 RNA guide
ccuucgaacaaaaugagaacaa

SEQ ID NO: 23683 - RNA, 22 nt, Artificial Sequence
  RPE65 RNA guide
ccuucuuagagcuuacagugua

SEQ ID NO: 23684 - RNA, 22 nt, Artificial Sequence
  RPE65 RNA guide
cgaaggaagucagcuuccagau

SEQ ID NO: 23685 - RNA, 22 nt, Artificial Sequence
  RPE65 RNA guide
cgaucuggaagcugacuuccuu

SEQ ID NO: 23686 - RNA, 22 nt, Artificial Sequence
  RPE65 RNA guide
cgaucuuagaaaccauacauau

SEQ ID NO: 23687 - RNA, 22 nt, Artificial Sequence
  RPE65 RNA guide
cgcuguagucauugucauagaa

SEQ ID NO: 23688 - RNA, 22 nt, Artificial Sequence
  RPE65 RNA guide
cguaguagguacucauuaaaua

SEQ ID NO: 23689 - RNA, 22 nt, Artificial Sequence
  RPE65 RNA guide
cuaagaagggagagucuugucu

SEQ ID NO: 23690 - RNA, 22 nt, Artificial Sequence
  RPE65 RNA guide
cuaagaucgaucuggaagcuga

SEQ ID NO: 23691 - RNA, 22 nt, Artificial Sequence
  RPE65 RNA guide
cuacacuguaagcucuaagaag

SEQ ID NO: 23692 - RNA, 22 nt, Artificial Sequence
  RPE65 RNA guide
cuacagcguaguagguacucau

SEQ ID NO: 23693 - RNA, 22 nt, Artificial Sequence
  RPE65 RNA guide
cuaccuacacuguaagcucuaa

SEQ ID NO: 23694 - RNA, 22 nt, Artificial Sequence
  RPE65 RNA guide
cuacgcuguagucauugucaua

SEQ ID NO: 23695 - RNA, 22 nt, Artificial Sequence
  RPE65 RNA guide
cuacuacgcuguagucauuguc

SEQ ID NO: 23696 - RNA, 22 nt, Artificial Sequence
  RPE65 RNA guide
cuauagcuugggcuuuuaaaaa

SEQ ID NO: 23697 - RNA, 22 nt, Artificial Sequence
  RPE65 RNA guide
cuauauuugucaauguaauacc

SEQ ID NO: 23698 - RNA, 22 nt, Artificial Sequence
  RPE65 RNA guide
cuaugacaaugacuacagcgua

SEQ ID NO: 23699 - RNA, 22 nt, Artificial Sequence
  RPE65 RNA guide
cucaauauucuaugacaaugac

SEQ ID NO: 23700 - RNA, 22 nt, Artificial Sequence
  RPE65 RNA guide
cucaauauugccuaauuuacuu

SEQ ID NO: 23701 - RNA, 22 nt, Artificial Sequence
  RPE65 RNA guide
cucacugaauaaauggaucugu

SEQ ID NO: 23702 - RNA, 22 nt, Artificial Sequence
  RPE65 RNA guide
cucacugcuauaucucaauauu

SEQ ID NO: 23703 - RNA, 22 nt, Artificial Sequence
  RPE65 RNA guide
cucaugccaggugguacaagag

SEQ ID NO: 23704 - RNA, 22 nt, Artificial Sequence
  RPE65 RNA guide
cucauuuuguucgaaggaaguc

SEQ ID NO: 23705 - RNA, 22 nt, Artificial Sequence
  RPE65 RNA guide
cucccuucuuagagcuuacagu

SEQ ID NO: 23706 - RNA, 22 nt, Artificial Sequence
  RPE65 RNA guide
cucuaagaagggagagucuugu

SEQ ID NO: 23707 - RNA, 22 nt, Artificial Sequence
  RPE65 RNA guide
cucucccuucuuagagcuuaca

SEQ ID NO: 23708 - RNA, 22 nt, Artificial Sequence
  RPE65 RNA guide
cucuuguaccaccuggcaugag

SEQ ID NO: 23709 - RNA, 22 nt, Artificial Sequence
  RPE65 RNA guide
cucuuuagguggucucaugcca

SEQ ID NO: 23710 - RNA, 22 nt, Artificial Sequence
  RPE65 RNA guide
cucuuuauguacccuaccuaca

SEQ ID NO: 23711 - RNA, 22 nt, Artificial Sequence
  RPE65 RNA guide
cugaauaaauggaucuguucuu

SEQ ID NO: 23712 - RNA, 22 nt, Artificial Sequence
  RPE65 RNA guide
cugacucuuguaccaccuggca

SEQ ID NO: 23713 - RNA, 22 nt, Artificial Sequence
  RPE65 RNA guide
cugacuuccuucgaacaaaaug

SEQ ID NO: 23714 - RNA, 22 nt, Artificial Sequence
  RPE65 RNA guide
cugacuucuuuuucugacucuu

SEQ ID NO: 23715 - RNA, 22 nt, Artificial Sequence
  RPE65 RNA guide
cugcuauaucucaauauucuau

SEQ ID NO: 23716 - RNA, 22 nt, Artificial Sequence
  RPE65 RNA guide
cugcuguacauacuguaaaaac

SEQ ID NO: 23717 - RNA, 22 nt, Artificial Sequence
  RPE65 RNA guide
cugcuuucaaagucuuuuaaua

SEQ ID NO: 23718 - RNA, 22 nt, Artificial Sequence
  RPE65 RNA guide
cuggaagcugacuuccuucgaa

SEQ ID NO: 23719 - RNA, 22 nt, Artificial Sequence
  RPE65 RNA guide
cuggcaugagaccaccuaaaga

SEQ ID NO: 23720 - RNA, 22 nt, Artificial Sequence
  RPE65 RNA guide
cuguaaaaacugugaugaucac

SEQ ID NO: 23721 - RNA, 22 nt, Artificial Sequence
  RPE65 RNA guide
cuguaacauacaaauauagcac

SEQ ID NO: 23722 - RNA, 22 nt, Artificial Sequence
  RPE65 RNA guide
cuguaagcucuaagaagggaga

SEQ ID NO: 23723 - RNA, 22 nt, Artificial Sequence
  RPE65 RNA guide
cuguacauacuguaaaaacugu

SEQ ID NO: 23724 - RNA, 22 nt, Artificial Sequence
  RPE65 RNA guide
cuguagucauugucauagaaua

SEQ ID NO: 23725 - RNA, 22 nt, Artificial Sequence
  RPE65 RNA guide
cugucuugcucacugcuauauc

SEQ ID NO: 23726 - RNA, 22 nt, Artificial Sequence
  RPE65 RNA guide
cugugaugaucacaugaaaagu

SEQ ID NO: 23727 - RNA, 22 nt, Artificial Sequence
  RPE65 RNA guide
cuguuuaucagaaguaaauuag

SEQ ID NO: 23728 - RNA, 22 nt, Artificial Sequence
  RPE65 RNA guide
cuuacaguguagguaggguaca

SEQ ID NO: 23729 - RNA, 22 nt, Artificial Sequence
  RPE65 RNA guide
cuuagagcuuacaguguaggua

SEQ ID NO: 23730 - RNA, 22 nt, Artificial Sequence
  RPE65 RNA guide
cuuccagaucgaucuuagaaac

SEQ ID NO: 23731 - RNA, 22 nt, Artificial Sequence
  RPE65 RNA guide
cuuccuucgaacaaaaugagaa

SEQ ID NO: 23732 - RNA, 22 nt, Artificial Sequence
  RPE65 RNA guide
cuucgaacaaaaugagaacaaa

SEQ ID NO: 23733 - RNA, 22 nt, Artificial Sequence
  RPE65 RNA guide
cuucuuagagcuuacaguguag

SEQ ID NO: 23734 - RNA, 22 nt, Artificial Sequence
  RPE65 RNA guide
cuucuuuuucugacucuuguac

SEQ ID NO: 23735 - RNA, 22 nt, Artificial Sequence
  RPE65 RNA guide
cuugcucacugcuauaucucaa

SEQ ID NO: 23736 - RNA, 22 nt, Artificial Sequence
  RPE65 RNA guide
cuugggcuuuuaaaaacucaau

SEQ ID NO: 23737 - RNA, 22 nt, Artificial Sequence
  RPE65 RNA guide
cuuguaccaccuggcaugagac

SEQ ID NO: 23738 - RNA, 22 nt, Artificial Sequence
  RPE65 RNA guide
cuugucugucuugcucacugcu

SEQ ID NO: 23739 - RNA, 22 nt, Artificial Sequence
  RPE65 RNA guide
cuuuagguggucucaugccagg

SEQ ID NO: 23740 - RNA, 22 nt, Artificial Sequence
  RPE65 RNA guide
cuuuauguacccuaccuacacu

SEQ ID NO: 23741 - RNA, 22 nt, Artificial Sequence
  RPE65 RNA guide
cuuuuaaacucuuuauguaccc

SEQ ID NO: 23742 - RNA, 22 nt, Artificial Sequence
  RPE65 RNA guide
cuuuucaugugaucaucacagu

SEQ ID NO: 23743 - RNA, 22 nt, Artificial Sequence
  RPE65 RNA guide
cuuuuucugacucuuguaccac

SEQ ID NO: 23744 - RNA, 22 nt, Artificial Sequence
  RPE65 RNA guide
gaaaaagaagucaggucauaug

SEQ ID NO: 23745 - RNA, 22 nt, Artificial Sequence
  RPE65 RNA guide
gaaaaccauaugaccugacuuc

SEQ ID NO: 23746 - RNA, 22 nt, Artificial Sequence
  RPE65 RNA guide
gaacagauccauuuauucagug

SEQ ID NO: 23747 - RNA, 22 nt, Artificial Sequence
  RPE65 RNA guide
gaagcugacuuccuucgaacaa

SEQ ID NO: 23748 - RNA, 22 nt, Artificial Sequence
  RPE65 RNA guide
gaaggaagucagcuuccagauc

SEQ ID NO: 23749 - RNA, 22 nt, Artificial Sequence
  RPE65 RNA guide
gaagggagagucuugucugucu

SEQ ID NO: 23750 - RNA, 22 nt, Artificial Sequence
  RPE65 RNA guide
gaagucagcuuccagaucgauc

SEQ ID NO: 23751 - RNA, 22 nt, Artificial Sequence
  RPE65 RNA guide
gaagucaggucauaugguuuuc

SEQ ID NO: 23752 - RNA, 22 nt, Artificial Sequence
  RPE65 RNA guide
gaauaaauggaucuguucuuau

SEQ ID NO: 23753 - RNA, 22 nt, Artificial Sequence
  RPE65 RNA guide
gaauauugagauauagcaguga

SEQ ID NO: 23754 - RNA, 22 nt, Artificial Sequence
  RPE65 RNA guide
gaaugucauugaaauaauauag

SEQ ID NO: 23755 - RNA, 22 nt, Artificial Sequence
  RPE65 RNA guide
gacaaauauagaaaaccauaug

SEQ ID NO: 23756 - RNA, 22 nt, Artificial Sequence
  RPE65 RNA guide
gacaagacucucccuucuuaga

SEQ ID NO: 23757 - RNA, 22 nt, Artificial Sequence
  RPE65 RNA guide
gacaaugacuacagcguaguag

SEQ ID NO: 23758 - RNA, 22 nt, Artificial Sequence
  RPE65 RNA guide
gacagacaagacucucccuucu

SEQ ID NO: 23759 - RNA, 22 nt, Artificial Sequence
  RPE65 RNA guide
gacauucaaucuauagcuuggg

SEQ ID NO: 23760 - RNA, 22 nt, Artificial Sequence
  RPE65 RNA guide
gaccaccuaaagaggucuuuua

SEQ ID NO: 23761 - RNA, 22 nt, Artificial Sequence
  RPE65 RNA guide
gaccucuuuagguggucucaug

SEQ ID NO: 23762 - RNA, 22 nt, Artificial Sequence
  RPE65 RNA guide
gaccugacuucuuuuucugacu

SEQ ID NO: 23763 - RNA, 22 nt, Artificial Sequence
  RPE65 RNA guide
gacuacagcguaguagguacuc

SEQ ID NO: 23764 - RNA, 22 nt, Artificial Sequence
  RPE65 RNA guide
gacucucccuucuuagagcuua

SEQ ID NO: 23765 - RNA, 22 nt, Artificial Sequence
  RPE65 RNA guide
gacucuuguaccaccuggcaug

SEQ ID NO: 23766 - RNA, 22 nt, Artificial Sequence
  RPE65 RNA guide
gacuuccuucgaacaaaaugag

SEQ ID NO: 23767 - RNA, 22 nt, Artificial Sequence
  RPE65 RNA guide
gacuucuuuuucugacucuugu

SEQ ID NO: 23768 - RNA, 22 nt, Artificial Sequence
  RPE65 RNA guide
gacuuugaaagcaguaagauau

SEQ ID NO: 23769 - RNA, 22 nt, Artificial Sequence
  RPE65 RNA guide
gagaccaccuaaagaggucuuu

SEQ ID NO: 23770 - RNA, 22 nt, Artificial Sequence
  RPE65 RNA guide
gagagucuugucugucuugcuc

SEQ ID NO: 23771 - RNA, 22 nt, Artificial Sequence
  RPE65 RNA guide
gagauauagcagugagcaagac

SEQ ID NO: 23772 - RNA, 22 nt, Artificial Sequence
  RPE65 RNA guide
gagcaagacagacaagacucuc

SEQ ID NO: 23773 - RNA, 22 nt, Artificial Sequence
  RPE65 RNA guide
gagcuuacaguguagguagggu

SEQ ID NO: 23774 - RNA, 22 nt, Artificial Sequence
  RPE65 RNA guide
gaggucuuuuaaacucuuuaug

SEQ ID NO: 23775 - RNA, 22 nt, Artificial Sequence
  RPE65 RNA guide
gaguaccuacuacgcuguaguc

SEQ ID NO: 23776 - RNA, 22 nt, Artificial Sequence
  RPE65 RNA guide
gaguauuuaaugaguaccuacu

SEQ ID NO: 23777 - RNA, 22 nt, Artificial Sequence
  RPE65 RNA guide
gagucagaaaaagaagucaggu

SEQ ID NO: 23778 - RNA, 22 nt, Artificial Sequence
  RPE65 RNA guide
gagucuugucugucuugcucac

SEQ ID NO: 23779 - RNA, 22 nt, Artificial Sequence
  RPE65 RNA guide
gaguuuaaaagaccucuuuagg

SEQ ID NO: 23780 - RNA, 22 nt, Artificial Sequence
  RPE65 RNA guide
gaguuuuuaaaagcccaagcua

SEQ ID NO: 23781 - RNA, 22 nt, Artificial Sequence
  RPE65 RNA guide
gauaagaacagauccauuuauu

SEQ ID NO: 23782 - RNA, 22 nt, Artificial Sequence
  RPE65 RNA guide
gauauagcagugagcaagacag

SEQ ID NO: 23783 - RNA, 22 nt, Artificial Sequence
  RPE65 RNA guide
gauauaucuuacugcuuucaaa

SEQ ID NO: 23784 - RNA, 22 nt, Artificial Sequence
  RPE65 RNA guide
gaucaucacaguuuuuacagua

SEQ ID NO: 23785 - RNA, 22 nt, Artificial Sequence
  RPE65 RNA guide
gaucgaucuggaagcugacuuc

SEQ ID NO: 23786 - RNA, 22 nt, Artificial Sequence
  RPE65 RNA guide
gaucgaucuuagaaaccauaca

SEQ ID NO: 23787 - RNA, 22 nt, Artificial Sequence
  RPE65 RNA guide
gaucuggaagcugacuuccuuc

SEQ ID NO: 23788 - RNA, 22 nt, Artificial Sequence
  RPE65 RNA guide
gaucuguucuuaucuguaacau

SEQ ID NO: 23789 - RNA, 22 nt, Artificial Sequence
  RPE65 RNA guide
gaugaucacaugaaaagugugu

SEQ ID NO: 23790 - RNA, 22 nt, Artificial Sequence
  RPE65 RNA guide
gauuuguucucauuuuguucga

SEQ ID NO: 23791 - RNA, 22 nt, Artificial Sequence
  RPE65 RNA guide
gcaagacagacaagacucuccc

SEQ ID NO: 23792 - RNA, 22 nt, Artificial Sequence
  RPE65 RNA guide
gcaauauugaguuuuuaaaagc

SEQ ID NO: 23793 - RNA, 22 nt, Artificial Sequence
  RPE65 RNA guide
gcaccugcuguacauacuguaa

SEQ ID NO: 23794 - RNA, 22 nt, Artificial Sequence
  RPE65 RNA guide
gcaggugcuauauuuguauguu

SEQ ID NO: 23795 - RNA, 22 nt, Artificial Sequence
  RPE65 RNA guide
gcaguaagauauaucauaugua

SEQ ID NO: 23796 - RNA, 22 nt, Artificial Sequence
  RPE65 RNA guide
gcagugagcaagacagacaaga

SEQ ID NO: 23797 - RNA, 22 nt, Artificial Sequence
  RPE65 RNA guide
gcaugagaccaccuaaagaggu

SEQ ID NO: 23798 - RNA, 22 nt, Artificial Sequence
  RPE65 RNA guide
gccaggugguacaagagucaga

SEQ ID NO: 23799 - RNA, 22 nt, Artificial Sequence
  RPE65 RNA guide
gcccaagcuauagauugaaugu

SEQ ID NO: 23800 - RNA, 22 nt, Artificial Sequence
  RPE65 RNA guide
gcguaguagguacucauuaaau

SEQ ID NO: 23801 - RNA, 22 nt, Artificial Sequence
  RPE65 RNA guide
gcucacugcuauaucucaauau

SEQ ID NO: 23802 - RNA, 22 nt, Artificial Sequence
  RPE65 RNA guide
gcucuaagaagggagagucuug

SEQ ID NO: 23803 - RNA, 22 nt, Artificial Sequence
  RPE65 RNA guide
gcugacuuccuucgaacaaaau

SEQ ID NO: 23804 - RNA, 22 nt, Artificial Sequence
  RPE65 RNA guide
gcuguacauacuguaaaaacug

SEQ ID NO: 23805 - RNA, 22 nt, Artificial Sequence
  RPE65 RNA guide
gcuguagucauugucauagaau

SEQ ID NO: 23806 - RNA, 22 nt, Artificial Sequence
  RPE65 RNA guide
gcuuacaguguagguaggguac

SEQ ID NO: 23807 - RNA, 22 nt, Artificial Sequence
  RPE65 RNA guide
gcuuccagaucgaucuuagaaa

SEQ ID NO: 23808 - RNA, 22 nt, Artificial Sequence
  RPE65 RNA guide
gcuugggcuuuuaaaaacucaa

SEQ ID NO: 23809 - RNA, 22 nt, Artificial Sequence
  RPE65 RNA guide
gcuuucaaagucuuuuaauaca

SEQ ID NO: 23810 - RNA, 22 nt, Artificial Sequence
  RPE65 RNA guide
ggaagcugacuuccuucgaaca

SEQ ID NO: 23811 - RNA, 22 nt, Artificial Sequence
  RPE65 RNA guide
ggaagucagcuuccagaucgau

SEQ ID NO: 23812 - RNA, 22 nt, Artificial Sequence
  RPE65 RNA guide
ggagagucuugucugucuugcu

SEQ ID NO: 23813 - RNA, 22 nt, Artificial Sequence
  RPE65 RNA guide
ggagguauuacauugacaaaua

SEQ ID NO: 23814 - RNA, 22 nt, Artificial Sequence
  RPE65 RNA guide
ggaucuguucuuaucuguaaca

SEQ ID NO: 23815 - RNA, 22 nt, Artificial Sequence
  RPE65 RNA guide
ggcaauauugaguuuuuaaaag

SEQ ID NO: 23816 - RNA, 22 nt, Artificial Sequence
  RPE65 RNA guide
ggcaugagaccaccuaaagagg

SEQ ID NO: 23817 - RNA, 22 nt, Artificial Sequence
  RPE65 RNA guide
ggcuuuuaaaaacucaauauug

SEQ ID NO: 23818 - RNA, 22 nt, Artificial Sequence
  RPE65 RNA guide
gggagagucuugucugucuugc

SEQ ID NO: 23819 - RNA, 22 nt, Artificial Sequence
  RPE65 RNA guide
gggcuuuuaaaaacucaauauu

SEQ ID NO: 23820 - RNA, 22 nt, Artificial Sequence
  RPE65 RNA guide
ggguacauaaagaguuuaaaag

SEQ ID NO: 23821 - RNA, 22 nt, Artificial Sequence
  RPE65 RNA guide
gguacaagagucagaaaaagaa

SEQ ID NO: 23822 - RNA, 22 nt, Artificial Sequence
  RPE65 RNA guide
gguacauaaagaguuuaaaaga

SEQ ID NO: 23823 - RNA, 22 nt, Artificial Sequence
  RPE65 RNA guide
gguacucauuaaauacucacug

SEQ ID NO: 23824 - RNA, 22 nt, Artificial Sequence
  RPE65 RNA guide
gguaggguacauaaagaguuua

SEQ ID NO: 23825 - RNA, 22 nt, Artificial Sequence
  RPE65 RNA guide
ggucauaugguuuucuauauuu

SEQ ID NO: 23826 - RNA, 22 nt, Artificial Sequence
  RPE65 RNA guide
ggucucaugccaggugguacaa

SEQ ID NO: 23827 - RNA, 22 nt, Artificial Sequence
  RPE65 RNA guide
ggucuuuuaaacucuuuaugua

SEQ ID NO: 23828 - RNA, 22 nt, Artificial Sequence
  RPE65 RNA guide
ggugcuauauuuguauguuaca

SEQ ID NO: 23829 - RNA, 22 nt, Artificial Sequence
  RPE65 RNA guide
ggugguacaagagucagaaaaa

SEQ ID NO: 23830 - RNA, 22 nt, Artificial Sequence
  RPE65 RNA guide
gguggucucaugccagguggua

SEQ ID NO: 23831 - RNA, 22 nt, Artificial Sequence
  RPE65 RNA guide
gguuucuaagaucgaucuggaa

SEQ ID NO: 23832 - RNA, 22 nt, Artificial Sequence
  RPE65 RNA guide
guaaaaacugugaugaucacau

SEQ ID NO: 23833 - RNA, 22 nt, Artificial Sequence
  RPE65 RNA guide
guaacauacaaauauagcaccu

SEQ ID NO: 23834 - RNA, 22 nt, Artificial Sequence
  RPE65 RNA guide
guaagcucuaagaagggagagu

SEQ ID NO: 23835 - RNA, 22 nt, Artificial Sequence
  RPE65 RNA guide
guacaagagucagaaaaagaag

SEQ ID NO: 23836 - RNA, 22 nt, Artificial Sequence
  RPE65 RNA guide
guacagcaggugcuauauuugu

SEQ ID NO: 23837 - RNA, 22 nt, Artificial Sequence
  RPE65 RNA guide
guacauaaagaguuuaaaagac

SEQ ID NO: 23838 - RNA, 22 nt, Artificial Sequence
  RPE65 RNA guide
guacauacuguaaaaacuguga

SEQ ID NO: 23839 - RNA, 22 nt, Artificial Sequence
  RPE65 RNA guide
guaccaccuggcaugagaccac

SEQ ID NO: 23840 - RNA, 22 nt, Artificial Sequence
  RPE65 RNA guide
guacccuaccuacacuguaagc

SEQ ID NO: 23841 - RNA, 22 nt, Artificial Sequence
  RPE65 RNA guide
guaccuacuacgcuguagucau

SEQ ID NO: 23842 - RNA, 22 nt, Artificial Sequence
  RPE65 RNA guide
guaggguacauaaagaguuuaa

SEQ ID NO: 23843 - RNA, 22 nt, Artificial Sequence
  RPE65 RNA guide
guagguacucauuaaauacuca

SEQ ID NO: 23844 - RNA, 22 nt, Artificial Sequence
  RPE65 RNA guide
guagguaggguacauaaagagu

SEQ ID NO: 23845 - RNA, 22 nt, Artificial Sequence
  RPE65 RNA guide
guaguagguacucauuaaauac

SEQ ID NO: 23846 - RNA, 22 nt, Artificial Sequence
  RPE65 RNA guide
guagucauugucauagaauauu

SEQ ID NO: 23847 - RNA, 22 nt, Artificial Sequence
  RPE65 RNA guide
guaugguuucuaagaucgaucu

SEQ ID NO: 23848 - RNA, 22 nt, Artificial Sequence
  RPE65 RNA guide
guauguacagcaggugcuauau

SEQ ID NO: 23849 - RNA, 22 nt, Artificial Sequence
  RPE65 RNA guide
guauguuacagauaagaacaga

SEQ ID NO: 23850 - RNA, 22 nt, Artificial Sequence
  RPE65 RNA guide
guauuuaaugaguaccuacuac

SEQ ID NO: 23851 - RNA, 22 nt, Artificial Sequence
  RPE65 RNA guide
gucagaaaaagaagucagguca

SEQ ID NO: 23852 - RNA, 22 nt, Artificial Sequence
  RPE65 RNA guide
gucagcuuccagaucgaucuua

SEQ ID NO: 23853 - RNA, 22 nt, Artificial Sequence
  RPE65 RNA guide
gucaggucauaugguuuucuau

SEQ ID NO: 23854 - RNA, 22 nt, Artificial Sequence
  RPE65 RNA guide
gucauagaauauugagauauag

SEQ ID NO: 23855 - RNA, 22 nt, Artificial Sequence
  RPE65 RNA guide
gucucaugccaggugguacaag

SEQ ID NO: 23856 - RNA, 22 nt, Artificial Sequence
  RPE65 RNA guide
gucugucuugcucacugcuaua

SEQ ID NO: 23857 - RNA, 22 nt, Artificial Sequence
  RPE65 RNA guide
gucuugcucacugcuauaucuc

SEQ ID NO: 23858 - RNA, 22 nt, Artificial Sequence
  RPE65 RNA guide
gucuugucugucuugcucacug

SEQ ID NO: 23859 - RNA, 22 nt, Artificial Sequence
  RPE65 RNA guide
gucuuuuaaacucuuuauguac

SEQ ID NO: 23860 - RNA, 22 nt, Artificial Sequence
  RPE65 RNA guide
gucuuuuaauacacacuuuuca

SEQ ID NO: 23861 - RNA, 22 nt, Artificial Sequence
  RPE65 RNA guide
gugagcaagacagacaagacuc

SEQ ID NO: 23862 - RNA, 22 nt, Artificial Sequence
  RPE65 RNA guide
gugaguauuuaaugaguaccua

SEQ ID NO: 23863 - RNA, 22 nt, Artificial Sequence
  RPE65 RNA guide
gugaucaucacaguuuuuacag

SEQ ID NO: 23864 - RNA, 22 nt, Artificial Sequence
  RPE65 RNA guide
gugaugaucacaugaaaagugu

SEQ ID NO: 23865 - RNA, 22 nt, Artificial Sequence
  RPE65 RNA guide
gugguacaagagucagaaaaag

SEQ ID NO: 23866 - RNA, 22 nt, Artificial Sequence
  RPE65 RNA guide
guggucucaugccaggugguac

SEQ ID NO: 23867 - RNA, 22 nt, Artificial Sequence
  RPE65 RNA guide
guguagguaggguacauaaaga

SEQ ID NO: 23868 - RNA, 22 nt, Artificial Sequence
  RPE65 RNA guide
guguauuaaaagacuuugaaag

SEQ ID NO: 23869 - RNA, 22 nt, Artificial Sequence
  RPE65 RNA guide
guguguauuaaaagacuuugaa

SEQ ID NO: 23870 - RNA, 22 nt, Artificial Sequence
  RPE65 RNA guide
guuacagauaagaacagaucca

SEQ ID NO: 23871 - RNA, 22 nt, Artificial Sequence
  RPE65 RNA guide
guucgaaggaagucagcuucca

SEQ ID NO: 23872 - RNA, 22 nt, Artificial Sequence
  RPE65 RNA guide
guucucauuuuguucgaaggaa

SEQ ID NO: 23873 - RNA, 22 nt, Artificial Sequence
  RPE65 RNA guide
guuuaaaagaccucuuuaggug

SEQ ID NO: 23874 - RNA, 22 nt, Artificial Sequence
  RPE65 RNA guide
guuucuaagaucgaucuggaag

SEQ ID NO: 23875 - RNA, 22 nt, Artificial Sequence
  RPE65 RNA guide
guuuuuaaaagcccaagcuaua

SEQ ID NO: 23876 - RNA, 22 nt, Artificial Sequence
  RPE65 RNA guide
guuuuuacaguauguacagcag

SEQ ID NO: 23877 - RNA, 22 nt, Artificial Sequence
  RPE65 RNA guide
uaaaagaccucuuuaggugguc

SEQ ID NO: 23878 - RNA, 22 nt, Artificial Sequence
  RPE65 RNA guide
uaaaagcccaagcuauagauug

SEQ ID NO: 23879 - RNA, 22 nt, Artificial Sequence
  RPE65 RNA guide
uaaacucuuuauguacccuacc

SEQ ID NO: 23880 - RNA, 22 nt, Artificial Sequence
  RPE65 RNA guide
uaaagaguuuaaaagaccucuu

SEQ ID NO: 23881 - RNA, 22 nt, Artificial Sequence
  RPE65 RNA guide
uaaauggaucuguucuuaucug

SEQ ID NO: 23882 - RNA, 22 nt, Artificial Sequence
  RPE65 RNA guide
uaacauacaaauauagcaccug

SEQ ID NO: 23883 - RNA, 22 nt, Artificial Sequence
  RPE65 RNA guide
uaagaacagauccauuuauuca

SEQ ID NO: 23884 - RNA, 22 nt, Artificial Sequence
  RPE65 RNA guide
uaagaagggagagucuugucug

SEQ ID NO: 23885 - RNA, 22 nt, Artificial Sequence
  RPE65 RNA guide
uaagaucgaucuggaagcugac

SEQ ID NO: 23886 - RNA, 22 nt, Artificial Sequence
  RPE65 RNA guide
uaagcucuaagaagggagaguc

SEQ ID NO: 23887 - RNA, 22 nt, Artificial Sequence
  RPE65 RNA guide
uaauacacacuuuucaugugau

SEQ ID NO: 23888 - RNA, 22 nt, Artificial Sequence
  RPE65 RNA guide
uaaugaguaccuacuacgcugu

SEQ ID NO: 23889 - RNA, 22 nt, Artificial Sequence
  RPE65 RNA guide
uacaaauauagcaccugcugua

SEQ ID NO: 23890 - RNA, 22 nt, Artificial Sequence
  RPE65 RNA guide
uacaagagucagaaaaagaagu

SEQ ID NO: 23891 - RNA, 22 nt, Artificial Sequence
  RPE65 RNA guide
uacacacuuuucaugugaucau

SEQ ID NO: 23892 - RNA, 22 nt, Artificial Sequence
  RPE65 RNA guide
uacacuguaagcucuaagaagg

SEQ ID NO: 23893 - RNA, 22 nt, Artificial Sequence
  RPE65 RNA guide
uacagcaggugcuauauuugua

SEQ ID NO: 23894 - RNA, 22 nt, Artificial Sequence
  RPE65 RNA guide
uacagcguaguagguacucauu

SEQ ID NO: 23895 - RNA, 22 nt, Artificial Sequence
  RPE65 RNA guide
uacaguauguacagcaggugcu

SEQ ID NO: 23896 - RNA, 22 nt, Artificial Sequence
  RPE65 RNA guide
uacaguguagguaggguacaua

SEQ ID NO: 23897 - RNA, 22 nt, Artificial Sequence
  RPE65 RNA guide
uacauacuguaaaaacugugau

SEQ ID NO: 23898 - RNA, 22 nt, Artificial Sequence
  RPE65 RNA guide
uaccaccuggcaugagaccacc

SEQ ID NO: 23899 - RNA, 22 nt, Artificial Sequence
  RPE65 RNA guide
uacccuaccuacacuguaagcu

SEQ ID NO: 23900 - RNA, 22 nt, Artificial Sequence
  RPE65 RNA guide
uaccuacacuguaagcucuaag

SEQ ID NO: 23901 - RNA, 22 nt, Artificial Sequence
  RPE65 RNA guide
uaccuacuacgcuguagucauu

SEQ ID NO: 23902 - RNA, 22 nt, Artificial Sequence
  RPE65 RNA guide
uacgcuguagucauugucauag

SEQ ID NO: 23903 - RNA, 22 nt, Artificial Sequence
  RPE65 RNA guide
uacuacgcuguagucauuguca

SEQ ID NO: 23904 - RNA, 22 nt, Artificial Sequence
  RPE65 RNA guide
uacucacugaauaaauggaucu

SEQ ID NO: 23905 - RNA, 22 nt, Artificial Sequence
  RPE65 RNA guide
uacuguaaaaacugugaugauc

SEQ ID NO: 23906 - RNA, 22 nt, Artificial Sequence
  RPE65 RNA guide
uagaaaaccauaugaccugacu

SEQ ID NO: 23907 - RNA, 22 nt, Artificial Sequence
  RPE65 RNA guide
uagaauauugagauauagcagu

SEQ ID NO: 23908 - RNA, 22 nt, Artificial Sequence
  RPE65 RNA guide
uagagcuuacaguguagguagg

SEQ ID NO: 23909 - RNA, 22 nt, Artificial Sequence
  RPE65 RNA guide
uagcaccugcuguacauacugu

SEQ ID NO: 23910 - RNA, 22 nt, Artificial Sequence
  RPE65 RNA guide
uagcagugagcaagacagacaa

SEQ ID NO: 23911 - RNA, 22 nt, Artificial Sequence
  RPE65 RNA guide
uagcuugggcuuuuaaaaacuc

SEQ ID NO: 23912 - RNA, 22 nt, Artificial Sequence
  RPE65 RNA guide
uaggcaauauugaguuuuuaaa

SEQ ID NO: 23913 - RNA, 22 nt, Artificial Sequence
  RPE65 RNA guide
uaggguacauaaagaguuuaaa

SEQ ID NO: 23914 - RNA, 22 nt, Artificial Sequence
  RPE65 RNA guide
uagguacucauuaaauacucac

SEQ ID NO: 23915 - RNA, 22 nt, Artificial Sequence
  RPE65 RNA guide
uagguaggguacauaaagaguu

SEQ ID NO: 23916 - RNA, 22 nt, Artificial Sequence
  RPE65 RNA guide
uagguggucucaugccaggugg

SEQ ID NO: 23917 - RNA, 22 nt, Artificial Sequence
  RPE65 RNA guide
uaguagguacucauuaaauacu

SEQ ID NO: 23918 - RNA, 22 nt, Artificial Sequence
  RPE65 RNA guide
uauagaaaaccauaugaccuga

SEQ ID NO: 23919 - RNA, 22 nt, Artificial Sequence
  RPE65 RNA guide
uauagcaccugcuguacauacu

SEQ ID NO: 23920 - RNA, 22 nt, Artificial Sequence
  RPE65 RNA guide
uauagcagugagcaagacagac

SEQ ID NO: 23921 - RNA, 22 nt, Artificial Sequence
  RPE65 RNA guide
uauagcuugggcuuuuaaaaac

SEQ ID NO: 23922 - RNA, 22 nt, Artificial Sequence
  RPE65 RNA guide
uaucauauguaugguuucuaag

SEQ ID NO: 23923 - RNA, 22 nt, Artificial Sequence
  RPE65 RNA guide
uaucuguaacauacaaauauag

SEQ ID NO: 23924 - RNA, 22 nt, Artificial Sequence
  RPE65 RNA guide
uaugacaaugacuacagcguag

SEQ ID NO: 23925 - RNA, 22 nt, Artificial Sequence
  RPE65 RNA guide
uaugaccugacuucuuuuucug

SEQ ID NO: 23926 - RNA, 22 nt, Artificial Sequence
  RPE65 RNA guide
uaugguuucuaagaucgaucug

SEQ ID NO: 23927 - RNA, 22 nt, Artificial Sequence
  RPE65 RNA guide
uauguacagcaggugcuauauu

SEQ ID NO: 23928 - RNA, 22 nt, Artificial Sequence
  RPE65 RNA guide
uauguacccuaccuacacugua

SEQ ID NO: 23929 - RNA, 22 nt, Artificial Sequence
  RPE65 RNA guide
uauguaugguuucuaagaucga

SEQ ID NO: 23930 - RNA, 22 nt, Artificial Sequence
  RPE65 RNA guide
uauguuacagauaagaacagau

SEQ ID NO: 23931 - RNA, 22 nt, Artificial Sequence
  RPE65 RNA guide
uauucagugaguauuuaaugag

SEQ ID NO: 23932 - RNA, 22 nt, Artificial Sequence
  RPE65 RNA guide
uauucuaugacaaugacuacag

SEQ ID NO: 23933 - RNA, 22 nt, Artificial Sequence
  RPE65 RNA guide
uauugagauauagcagugagca

SEQ ID NO: 23934 - RNA, 22 nt, Artificial Sequence
  RPE65 RNA guide
uauugaguuuuuaaaagcccaa

SEQ ID NO: 23935 - RNA, 22 nt, Artificial Sequence
  RPE65 RNA guide
uauuuaaugaguaccuacuacg

SEQ ID NO: 23936 - RNA, 22 nt, Artificial Sequence
  RPE65 RNA guide
ucaauauucuaugacaaugacu

SEQ ID NO: 23937 - RNA, 22 nt, Artificial Sequence
  RPE65 RNA guide
ucaaucuauagcuugggcuuuu

SEQ ID NO: 23938 - RNA, 22 nt, Artificial Sequence
  RPE65 RNA guide
ucaaugacauucaaucuauagc

SEQ ID NO: 23939 - RNA, 22 nt, Artificial Sequence
  RPE65 RNA guide
ucacaguuuuuacaguauguac

SEQ ID NO: 23940 - RNA, 22 nt, Artificial Sequence
  RPE65 RNA guide
ucacugaauaaauggaucuguu

SEQ ID NO: 23941 - RNA, 22 nt, Artificial Sequence
  RPE65 RNA guide
ucacugcuauaucucaauauuc

SEQ ID NO: 23942 - RNA, 22 nt, Artificial Sequence
  RPE65 RNA guide
ucagaaaaagaagucaggucau

SEQ ID NO: 23943 - RNA, 22 nt, Artificial Sequence
  RPE65 RNA guide
ucagaaguaaauuaggcaauau

SEQ ID NO: 23944 - RNA, 22 nt, Artificial Sequence
  RPE65 RNA guide
ucagcuuccagaucgaucuuag

SEQ ID NO: 23945 - RNA, 22 nt, Artificial Sequence
  RPE65 RNA guide
ucaggucauaugguuuucuaua

SEQ ID NO: 23946 - RNA, 22 nt, Artificial Sequence
  RPE65 RNA guide
ucagugaguauuuaaugaguac

SEQ ID NO: 23947 - RNA, 22 nt, Artificial Sequence
  RPE65 RNA guide
ucauagaauauugagauauagc

SEQ ID NO: 23948 - RNA, 22 nt, Artificial Sequence
  RPE65 RNA guide
ucauauguaugguuucuaagau

SEQ ID NO: 23949 - RNA, 22 nt, Artificial Sequence
  RPE65 RNA guide
ucaucacaguuuuuacaguaug

SEQ ID NO: 23950 - RNA, 22 nt, Artificial Sequence
  RPE65 RNA guide
ucaugccaggugguacaagagu

SEQ ID NO: 23951 - RNA, 22 nt, Artificial Sequence
  RPE65 RNA guide
ucaugugaucaucacaguuuuu

SEQ ID NO: 23952 - RNA, 22 nt, Artificial Sequence
  RPE65 RNA guide
ucauuuuguucgaaggaaguca

SEQ ID NO: 23953 - RNA, 22 nt, Artificial Sequence
  RPE65 RNA guide
uccagaucgaucuuagaaacca

SEQ ID NO: 23954 - RNA, 22 nt, Artificial Sequence
  RPE65 RNA guide
ucccuucuuagagcuuacagug

SEQ ID NO: 23955 - RNA, 22 nt, Artificial Sequence
  RPE65 RNA guide
uccuucgaacaaaaugagaaca

SEQ ID NO: 23956 - RNA, 22 nt, Artificial Sequence
  RPE65 RNA guide
ucgaaggaagucagcuuccaga

SEQ ID NO: 23957 - RNA, 22 nt, Artificial Sequence
  RPE65 RNA guide
ucgaucuggaagcugacuuccu

SEQ ID NO: 23958 - RNA, 22 nt, Artificial Sequence
  RPE65 RNA guide
ucgaucuuagaaaccauacaua

SEQ ID NO: 23959 - RNA, 22 nt, Artificial Sequence
  RPE65 RNA guide
ucuaagaagggagagucuuguc

SEQ ID NO: 23960 - RNA, 22 nt, Artificial Sequence
  RPE65 RNA guide
ucuaagaucgaucuggaagcug

SEQ ID NO: 23961 - RNA, 22 nt, Artificial Sequence
  RPE65 RNA guide
ucuauagcuugggcuuuuaaaa

SEQ ID NO: 23962 - RNA, 22 nt, Artificial Sequence
  RPE65 RNA guide
ucuauauuugucaauguaauac

SEQ ID NO: 23963 - RNA, 22 nt, Artificial Sequence
  RPE65 RNA guide
ucuaugacaaugacuacagcgu

SEQ ID NO: 23964 - RNA, 22 nt, Artificial Sequence
  RPE65 RNA guide
ucucaauauucuaugacaauga

SEQ ID NO: 23965 - RNA, 22 nt, Artificial Sequence
  RPE65 RNA guide
ucucaugccaggugguacaaga

SEQ ID NO: 23966 - RNA, 22 nt, Artificial Sequence
  RPE65 RNA guide
ucucauuuuguucgaaggaagu

SEQ ID NO: 23967 - RNA, 22 nt, Artificial Sequence
  RPE65 RNA guide
ucucccuucuuagagcuuacag

SEQ ID NO: 23968 - RNA, 22 nt, Artificial Sequence
  RPE65 RNA guide
ucugacucuuguaccaccuggc

SEQ ID NO: 23969 - RNA, 22 nt, Artificial Sequence
  RPE65 RNA guide
ucuggaagcugacuuccuucga

SEQ ID NO: 23970 - RNA, 22 nt, Artificial Sequence
  RPE65 RNA guide
ucuguaacauacaaauauagca

SEQ ID NO: 23971 - RNA, 22 nt, Artificial Sequence
  RPE65 RNA guide
ucugucuugcucacugcuauau

SEQ ID NO: 23972 - RNA, 22 nt, Artificial Sequence
  RPE65 RNA guide
ucuuagagcuuacaguguaggu

SEQ ID NO: 23973 - RNA, 22 nt, Artificial Sequence
  RPE65 RNA guide
ucuugcucacugcuauaucuca

SEQ ID NO: 23974 - RNA, 22 nt, Artificial Sequence
  RPE65 RNA guide
ucuuguaccaccuggcaugaga

SEQ ID NO: 23975 - RNA, 22 nt, Artificial Sequence
  RPE65 RNA guide
ucuugucugucuugcucacugc

SEQ ID NO: 23976 - RNA, 22 nt, Artificial Sequence
  RPE65 RNA guide
ucuuuagguggucucaugccag

SEQ ID NO: 23977 - RNA, 22 nt, Artificial Sequence
  RPE65 RNA guide
ucuuuauguacccuaccuacac

SEQ ID NO: 23978 - RNA, 22 nt, Artificial Sequence
  RPE65 RNA guide
ucuuuuaaacucuuuauguacc

SEQ ID NO: 23979 - RNA, 22 nt, Artificial Sequence
  RPE65 RNA guide
ucuuuuucugacucuuguacca

SEQ ID NO: 23980 - RNA, 22 nt, Artificial Sequence
  RPE65 RNA guide
ugaauaaauggaucuguucuua

SEQ ID NO: 23981 - RNA, 22 nt, Artificial Sequence
  RPE65 RNA guide
ugacaaauauagaaaaccauau

SEQ ID NO: 23982 - RNA, 22 nt, Artificial Sequence
  RPE65 RNA guide
ugacaaugacuacagcguagua

SEQ ID NO: 23983 - RNA, 22 nt, Artificial Sequence
  RPE65 RNA guide
ugacauucaaucuauagcuugg

SEQ ID NO: 23984 - RNA, 22 nt, Artificial Sequence
  RPE65 RNA guide
ugaccugacuucuuuuucugac

SEQ ID NO: 23985 - RNA, 22 nt, Artificial Sequence
  RPE65 RNA guide
ugacuacagcguaguagguacu

SEQ ID NO: 23986 - RNA, 22 nt, Artificial Sequence
  RPE65 RNA guide
ugacucuuguaccaccuggcau

SEQ ID NO: 23987 - RNA, 22 nt, Artificial Sequence
  RPE65 RNA guide
ugacuuccuucgaacaaaauga

SEQ ID NO: 23988 - RNA, 22 nt, Artificial Sequence
  RPE65 RNA guide
ugacuucuuuuucugacucuug

SEQ ID NO: 23989 - RNA, 22 nt, Artificial Sequence
  RPE65 RNA guide
ugagaccaccuaaagaggucuu

SEQ ID NO: 23990 - RNA, 22 nt, Artificial Sequence
  RPE65 RNA guide
ugagauauagcagugagcaaga

SEQ ID NO: 23991 - RNA, 22 nt, Artificial Sequence
  RPE65 RNA guide
ugagcaagacagacaagacucu

SEQ ID NO: 23992 - RNA, 22 nt, Artificial Sequence
  RPE65 RNA guide
ugaguaccuacuacgcuguagu

SEQ ID NO: 23993 - RNA, 22 nt, Artificial Sequence
  RPE65 RNA guide
ugaguauuuaaugaguaccuac

SEQ ID NO: 23994 - RNA, 22 nt, Artificial Sequence
  RPE65 RNA guide
ugaguuuuuaaaagcccaagcu

SEQ ID NO: 23995 - RNA, 22 nt, Artificial Sequence
  RPE65 RNA guide
ugauauaucuuacugcuuucaa

SEQ ID NO: 23996 - RNA, 22 nt, Artificial Sequence
  RPE65 RNA guide
ugaucaucacaguuuuuacagu

SEQ ID NO: 23997 - RNA, 22 nt, Artificial Sequence
  RPE65 RNA guide
ugaugaucacaugaaaagugug

SEQ ID NO: 23998 - RNA, 22 nt, Artificial Sequence
  RPE65 RNA guide
ugccaggugguacaagagucag

SEQ ID NO: 23999 - RNA, 22 nt, Artificial Sequence
  RPE65 RNA guide
ugcucacugcuauaucucaaua

SEQ ID NO: 24000 - RNA, 22 nt, Artificial Sequence
  RPE65 RNA guide
ugcuguacauacuguaaaaacu

SEQ ID NO: 24001 - RNA, 22 nt, Artificial Sequence
  RPE65 RNA guide
ugcuuucaaagucuuuuaauac

SEQ ID NO: 24002 - RNA, 22 nt, Artificial Sequence
  RPE65 RNA guide
uggaagcugacuuccuucgaac

SEQ ID NO: 24003 - RNA, 22 nt, Artificial Sequence
  RPE65 RNA guide
uggaucuguucuuaucuguaac

SEQ ID NO: 24004 - RNA, 22 nt, Artificial Sequence
  RPE65 RNA guide
uggcaugagaccaccuaaagag

SEQ ID NO: 24005 - RNA, 22 nt, Artificial Sequence
  RPE65 RNA guide
ugggcuuuuaaaaacucaauau

SEQ ID NO: 24006 - RNA, 22 nt, Artificial Sequence
  RPE65 RNA guide
ugguacaagagucagaaaaaga

SEQ ID NO: 24007 - RNA, 22 nt, Artificial Sequence
  RPE65 RNA guide
uggucucaugccaggugguaca

SEQ ID NO: 24008 - RNA, 22 nt, Artificial Sequence
  RPE65 RNA guide
ugguuucuaagaucgaucugga

SEQ ID NO: 24009 - RNA, 22 nt, Artificial Sequence
  RPE65 RNA guide
uguaaaaacugugaugaucaca

SEQ ID NO: 24010 - RNA, 22 nt, Artificial Sequence
  RPE65 RNA guide
uguaacauacaaauauagcacc

SEQ ID NO: 24011 - RNA, 22 nt, Artificial Sequence
  RPE65 RNA guide
uguaagcucuaagaagggagag

SEQ ID NO: 24012 - RNA, 22 nt, Artificial Sequence
  RPE65 RNA guide
uguacagcaggugcuauauuug

SEQ ID NO: 24013 - RNA, 22 nt, Artificial Sequence
  RPE65 RNA guide
uguacauacuguaaaaacugug

SEQ ID NO: 24014 - RNA, 22 nt, Artificial Sequence
  RPE65 RNA guide
uguaccaccuggcaugagacca

SEQ ID NO: 24015 - RNA, 22 nt, Artificial Sequence
  RPE65 RNA guide
uguacccuaccuacacuguaag

SEQ ID NO: 24016 - RNA, 22 nt, Artificial Sequence
  RPE65 RNA guide
uguagguaggguacauaaagag

SEQ ID NO: 24017 - RNA, 22 nt, Artificial Sequence
  RPE65 RNA guide
uguagucauugucauagaauau

SEQ ID NO: 24018 - RNA, 22 nt, Artificial Sequence
  RPE65 RNA guide
uguaugguuucuaagaucgauc

SEQ ID NO: 24019 - RNA, 22 nt, Artificial Sequence
  RPE65 RNA guide
uguauguuacagauaagaacag

SEQ ID NO: 24020 - RNA, 22 nt, Artificial Sequence
  RPE65 RNA guide
ugucauagaauauugagauaua

SEQ ID NO: 24021 - RNA, 22 nt, Artificial Sequence
  RPE65 RNA guide
ugucugucuugcucacugcuau

SEQ ID NO: 24022 - RNA, 22 nt, Artificial Sequence
  RPE65 RNA guide
ugucuugcucacugcuauaucu

SEQ ID NO: 24023 - RNA, 22 nt, Artificial Sequence
  RPE65 RNA guide
ugugaucaucacaguuuuuaca

SEQ ID NO: 24024 - RNA, 22 nt, Artificial Sequence
  RPE65 RNA guide
ugugaugaucacaugaaaagug

SEQ ID NO: 24025 - RNA, 22 nt, Artificial Sequence
  RPE65 RNA guide
uguguauuaaaagacuuugaaa

SEQ ID NO: 24026 - RNA, 22 nt, Artificial Sequence
  RPE65 RNA guide
uguuacagauaagaacagaucc

SEQ ID NO: 24027 - RNA, 22 nt, Artificial Sequence
  RPE65 RNA guide
uguucgaaggaagucagcuucc

SEQ ID NO: 24028 - RNA, 22 nt, Artificial Sequence
  RPE65 RNA guide
uguucucauuuuguucgaagga

SEQ ID NO: 24029 - RNA, 22 nt, Artificial Sequence
  RPE65 RNA guide
uuaaaagaccucuuuagguggu

SEQ ID NO: 24030 - RNA, 22 nt, Artificial Sequence
  RPE65 RNA guide
uuaaaagcccaagcuauagauu

SEQ ID NO: 24031 - RNA, 22 nt, Artificial Sequence
  RPE65 RNA guide
uuaaacucuuuauguacccuac

SEQ ID NO: 24032 - RNA, 22 nt, Artificial Sequence
  RPE65 RNA guide
uuaaugaguaccuacuacgcug

SEQ ID NO: 24033 - RNA, 22 nt, Artificial Sequence
  RPE65 RNA guide
uuacaguauguacagcaggugc

SEQ ID NO: 24034 - RNA, 22 nt, Artificial Sequence
  RPE65 RNA guide
uuacaguguagguaggguacau

SEQ ID NO: 24035 - RNA, 22 nt, Artificial Sequence
  RPE65 RNA guide
uuagagcuuacaguguagguag

SEQ ID NO: 24036 - RNA, 22 nt, Artificial Sequence
  RPE65 RNA guide
uuagguggucucaugccaggug

SEQ ID NO: 24037 - RNA, 22 nt, Artificial Sequence
  RPE65 RNA guide
uuauguacccuaccuacacugu

SEQ ID NO: 24038 - RNA, 22 nt, Artificial Sequence
  RPE65 RNA guide
uucaaucuauagcuugggcuuu

SEQ ID NO: 24039 - RNA, 22 nt, Artificial Sequence
  RPE65 RNA guide
uucaaugacauucaaucuauag

SEQ ID NO: 24040 - RNA, 22 nt, Artificial Sequence
  RPE65 RNA guide
uucagugaguauuuaaugagua

SEQ ID NO: 24041 - RNA, 22 nt, Artificial Sequence
  RPE65 RNA guide
uucaugugaucaucacaguuuu

SEQ ID NO: 24042 - RNA, 22 nt, Artificial Sequence
  RPE65 RNA guide
uuccagaucgaucuuagaaacc

SEQ ID NO: 24043 - RNA, 22 nt, Artificial Sequence
  RPE65 RNA guide
uuccuucgaacaaaaugagaac

SEQ ID NO: 24044 - RNA, 22 nt, Artificial Sequence
  RPE65 RNA guide
uucgaaggaagucagcuuccag

SEQ ID NO: 24045 - RNA, 22 nt, Artificial Sequence
  RPE65 RNA guide
uucuaagaucgaucuggaagcu

SEQ ID NO: 24046 - RNA, 22 nt, Artificial Sequence
  RPE65 RNA guide
uucuaugacaaugacuacagcg

SEQ ID NO: 24047 - RNA, 22 nt, Artificial Sequence
  RPE65 RNA guide
uucucauuuuguucgaaggaag

SEQ ID NO: 24048 - RNA, 22 nt, Artificial Sequence
  RPE65 RNA guide
uucugacucuuguaccaccugg

SEQ ID NO: 24049 - RNA, 22 nt, Artificial Sequence
  RPE65 RNA guide
uucuuagagcuuacaguguagg

SEQ ID NO: 24050 - RNA, 22 nt, Artificial Sequence
  RPE65 RNA guide
uucuuuuucugacucuuguacc

SEQ ID NO: 24051 - RNA, 22 nt, Artificial Sequence
  RPE65 RNA guide
uugagauauagcagugagcaag

SEQ ID NO: 24052 - RNA, 22 nt, Artificial Sequence
  RPE65 RNA guide
uugaguuuuuaaaagcccaagc

SEQ ID NO: 24053 - RNA, 22 nt, Artificial Sequence
  RPE65 RNA guide
uugccuaauuuacuucugauaa

SEQ ID NO: 24054 - RNA, 22 nt, Artificial Sequence
  RPE65 RNA guide
uugcucacugcuauaucucaau

SEQ ID NO: 24055 - RNA, 22 nt, Artificial Sequence
  RPE65 RNA guide
uugggcuuuuaaaaacucaaua

SEQ ID NO: 24056 - RNA, 22 nt, Artificial Sequence
  RPE65 RNA guide
uuguaccaccuggcaugagacc

SEQ ID NO: 24057 - RNA, 22 nt, Artificial Sequence
  RPE65 RNA guide
uuguauguuacagauaagaaca

SEQ ID NO: 24058 - RNA, 22 nt, Artificial Sequence
  RPE65 RNA guide
uugucugucuugcucacugcua

SEQ ID NO: 24059 - RNA, 22 nt, Artificial Sequence
  RPE65 RNA guide
uuguucgaaggaagucagcuuc

SEQ ID NO: 24060 - RNA, 22 nt, Artificial Sequence
  RPE65 RNA guide
uuguucucauuuuguucgaagg

SEQ ID NO: 24061 - RNA, 22 nt, Artificial Sequence
  RPE65 RNA guide
uuuaaaagaccucuuuaggugg

SEQ ID NO: 24062 - RNA, 22 nt, Artificial Sequence
  RPE65 RNA guide
uuuaaaagcccaagcuauagau

SEQ ID NO: 24063 - RNA, 22 nt, Artificial Sequence
  RPE65 RNA guide
uuuaaacucuuuauguacccua

SEQ ID NO: 24064 - RNA, 22 nt, Artificial Sequence
  RPE65 RNA guide
uuuaaugaguaccuacuacgcu

SEQ ID NO: 24065 - RNA, 22 nt, Artificial Sequence
  RPE65 RNA guide
uuuacaguauguacagcaggug

SEQ ID NO: 24066 - RNA, 22 nt, Artificial Sequence
  RPE65 RNA guide
uuuagguggucucaugccaggu

SEQ ID NO: 24067 - RNA, 22 nt, Artificial Sequence
  RPE65 RNA guide
uuuauguacccuaccuacacug

SEQ ID NO: 24068 - RNA, 22 nt, Artificial Sequence
  RPE65 RNA guide
uuucaugugaucaucacaguuu

SEQ ID NO: 24069 - RNA, 22 nt, Artificial Sequence
  RPE65 RNA guide
uuucuaagaucgaucuggaagc

SEQ ID NO: 24070 - RNA, 22 nt, Artificial Sequence
  RPE65 RNA guide
uuucugacucuuguaccaccug

SEQ ID NO: 24071 - RNA, 22 nt, Artificial Sequence
  RPE65 RNA guide
uuuguucgaaggaagucagcuu

SEQ ID NO: 24072 - RNA, 22 nt, Artificial Sequence
  RPE65 RNA guide
uuuguucucauuuuguucgaag

SEQ ID NO: 24073 - RNA, 22 nt, Artificial Sequence
  RPE65 RNA guide
uuuuaaaagcccaagcuauaga

SEQ ID NO: 24074 - RNA, 22 nt, Artificial Sequence
  RPE65 RNA guide
uuuuaaacucuuuauguacccu

SEQ ID NO: 24075 - RNA, 22 nt, Artificial Sequence
  RPE65 RNA guide
uuuuacaguauguacagcaggu

SEQ ID NO: 24076 - RNA, 22 nt, Artificial Sequence
  RPE65 RNA guide
uuuucugacucuuguaccaccu

SEQ ID NO: 24077 - RNA, 22 nt, Artificial Sequence
  RPE65 RNA guide
uuuuguucgaaggaagucagcu

SEQ ID NO: 24078 - RNA, 22 nt, Artificial Sequence
  RPE65 RNA guide
uuuuuaaaagcccaagcuauag

SEQ ID NO: 24079 - RNA, 22 nt, Artificial Sequence
  RPE65 RNA guide
uuuuuacaguauguacagcagg

SEQ ID NO: 24080 - RNA, 22 nt, Artificial Sequence
  RPE65 RNA guide
uuuuucugacucuuguaccacc

SEQ ID NO: 24081 - RNA, 20 nt, Artificial Sequence
  RPE65 RNA guide
aaaaacugcagaggacagga

SEQ ID NO: 24082 - RNA, 20 nt, Artificial Sequence
  RPE65 RNA guide
aaaacugcagaggacaggau

SEQ ID NO: 24083 - RNA, 20 nt, Artificial Sequence
  RPE65 RNA guide
aaaagagaggucaugucucu

SEQ ID NO: 24084 - RNA, 20 nt, Artificial Sequence
  RPE65 RNA guide
aaaaucaaugaugcugugag

SEQ ID NO: 24085 - RNA, 20 nt, Artificial Sequence
  RPE65 RNA guide
aaacaggguccuucccacag

SEQ ID NO: 24086 - RNA, 20 nt, Artificial Sequence
  RPE65 RNA guide
aaacugcagaggacaggauu

SEQ ID NO: 24087 - RNA, 20 nt, Artificial Sequence
  RPE65 RNA guide
aaagagaggucaugucucuu

SEQ ID NO: 24088 - RNA, 20 nt, Artificial Sequence
  RPE65 RNA guide
aaagccuguucacuccugcc

SEQ ID NO: 24089 - RNA, 20 nt, Artificial Sequence
  RPE65 RNA guide
aaaguccgcagagauagagg

SEQ ID NO: 24090 - RNA, 20 nt, Artificial Sequence
  RPE65 RNA guide
aaaucaaucaauccuacugc

SEQ ID NO: 24091 - RNA, 20 nt, Artificial Sequence
  RPE65 RNA guide
aaaucaaugaugcugugagc

SEQ ID NO: 24092 - RNA, 20 nt, Artificial Sequence
  RPE65 RNA guide
aaaugggucucuccuugagg

SEQ ID NO: 24093 - RNA, 20 nt, Artificial Sequence
  RPE65 RNA guide
aaaugguggaagaauaagga

SEQ ID NO: 24094 - RNA, 20 nt, Artificial Sequence
  RPE65 RNA guide
aaauuucaggaagugaacug

SEQ ID NO: 24095 - RNA, 20 nt, Artificial Sequence
  RPE65 RNA guide
aaauuuguuccuaaacaggg

SEQ ID NO: 24096 - RNA, 20 nt, Artificial Sequence
  RPE65 RNA guide
aacaaauuucaggaagugaa

SEQ ID NO: 24097 - RNA, 20 nt, Artificial Sequence
  RPE65 RNA guide
aacaggcuuugagccagccc

SEQ ID NO: 24098 - RNA, 20 nt, Artificial Sequence
  RPE65 RNA guide
aacaggguccuucccacagu

SEQ ID NO: 24099 - RNA, 20 nt, Artificial Sequence
  RPE65 RNA guide
aacaugcucagcucacagca

SEQ ID NO: 24100 - RNA, 20 nt, Artificial Sequence
  RPE65 RNA guide
aacaugggcuucuuccuuau

SEQ ID NO: 24101 - RNA, 20 nt, Artificial Sequence
  RPE65 RNA guide
aaccccuaggaaggagauaa

SEQ ID NO: 24102 - RNA, 20 nt, Artificial Sequence
  RPE65 RNA guide
aacugauggcaguaggauug

SEQ ID NO: 24103 - RNA, 20 nt, Artificial Sequence
  RPE65 RNA guide
aacugcagaggacaggauua

SEQ ID NO: 24104 - RNA, 20 nt, Artificial Sequence
  RPE65 RNA guide
aacuuaauccuguccucugc

SEQ ID NO: 24105 - RNA, 20 nt, Artificial Sequence
  RPE65 RNA guide
aagaaaaucaaugaugcugu

SEQ ID NO: 24106 - RNA, 20 nt, Artificial Sequence
  RPE65 RNA guide
aagaagcccauguugaugcu

SEQ ID NO: 24107 - RNA, 20 nt, Artificial Sequence
  RPE65 RNA guide
aagaauaaggaagaagccca

SEQ ID NO: 24108 - RNA, 20 nt, Artificial Sequence
  RPE65 RNA guide
aagacaaaucaaucaauccu

SEQ ID NO: 24109 - RNA, 20 nt, Artificial Sequence
  RPE65 RNA guide
aagacuacucagguauggaa

SEQ ID NO: 24110 - RNA, 20 nt, Artificial Sequence
  RPE65 RNA guide
aagagacaugaccucucuuu

SEQ ID NO: 24111 - RNA, 20 nt, Artificial Sequence
  RPE65 RNA guide
aagagaggucaugucucuug

SEQ ID NO: 24112 - RNA, 20 nt, Artificial Sequence
  RPE65 RNA guide
aagcccauguugaugcucaa

SEQ ID NO: 24113 - RNA, 20 nt, Artificial Sequence
  RPE65 RNA guide
aagccuguucacuccugccg

SEQ ID NO: 24114 - RNA, 20 nt, Artificial Sequence
  RPE65 RNA guide
aagcgaaggugagggcggga

SEQ ID NO: 24115 - RNA, 20 nt, Artificial Sequence
  RPE65 RNA guide
aaggaaaaacugcagaggac

SEQ ID NO: 24116 - RNA, 20 nt, Artificial Sequence
  RPE65 RNA guide
aaggaagaagcccauguuga

SEQ ID NO: 24117 - RNA, 20 nt, Artificial Sequence
  RPE65 RNA guide
aaggacccuguuuaggaaca

SEQ ID NO: 24118 - RNA, 20 nt, Artificial Sequence
  RPE65 RNA guide
aaggagagacccauuuaucu

SEQ ID NO: 24119 - RNA, 20 nt, Artificial Sequence
  RPE65 RNA guide
aaggagauaaaugggucucu

SEQ ID NO: 24120 - RNA, 20 nt, Artificial Sequence
  RPE65 RNA guide
aaggcacucuagggcuggcu

SEQ ID NO: 24121 - RNA, 20 nt, Artificial Sequence
  RPE65 RNA guide
aagggggucccagaucacug

SEQ ID NO: 24122 - RNA, 20 nt, Artificial Sequence
  RPE65 RNA guide
aaggugagggcgggaggagc

SEQ ID NO: 24123 - RNA, 20 nt, Artificial Sequence
  RPE65 RNA guide
aaguaaggaaaaacugcaga

SEQ ID NO: 24124 - RNA, 20 nt, Artificial Sequence
  RPE65 RNA guide
aaguccgcagagauagaggc

SEQ ID NO: 24125 - RNA, 20 nt, Artificial Sequence
  RPE65 RNA guide
aagugaacugauggcaguag

SEQ ID NO: 24126 - RNA, 20 nt, Artificial Sequence
  RPE65 RNA guide
aauaaggaagaagcccaugu

SEQ ID NO: 24127 - RNA, 20 nt, Artificial Sequence
  RPE65 RNA guide
aauacugugggaaggacccu

SEQ ID NO: 24128 - RNA, 20 nt, Artificial Sequence
  RPE65 RNA guide
aaucaaucaauccuacugcc

SEQ ID NO: 24129 - RNA, 20 nt, Artificial Sequence
  RPE65 RNA guide
aaucaauccuacugccauca

SEQ ID NO: 24130 - RNA, 20 nt, Artificial Sequence
  RPE65 RNA guide
aaucaaugaugcugugagcu

SEQ ID NO: 24131 - RNA, 20 nt, Artificial Sequence
  RPE65 RNA guide
aauccuacugccaucaguuc

SEQ ID NO: 24132 - RNA, 20 nt, Artificial Sequence
  RPE65 RNA guide
aauccuguccucugcaguuu

SEQ ID NO: 24133 - RNA, 20 nt, Artificial Sequence
  RPE65 RNA guide
aaugaugcugugagcugagc

SEQ ID NO: 24134 - RNA, 20 nt, Artificial Sequence
  RPE65 RNA guide
aaugggucucuccuugaggc

SEQ ID NO: 24135 - RNA, 20 nt, Artificial Sequence
  RPE65 RNA guide
aaugguggaagaauaaggaa

SEQ ID NO: 24136 - RNA, 20 nt, Artificial Sequence
  RPE65 RNA guide
aauuucaggaagugaacuga

SEQ ID NO: 24137 - RNA, 20 nt, Artificial Sequence
  RPE65 RNA guide
aauuuguuccuaaacagggu

SEQ ID NO: 24138 - RNA, 20 nt, Artificial Sequence
  RPE65 RNA guide
acaaaucaaucaauccuacu

SEQ ID NO: 24139 - RNA, 20 nt, Artificial Sequence
  RPE65 RNA guide
acaaauuucaggaagugaac

SEQ ID NO: 24140 - RNA, 20 nt, Artificial Sequence
  RPE65 RNA guide
acagcaucauugauuuucuu

SEQ ID NO: 24141 - RNA, 20 nt, Artificial Sequence
  RPE65 RNA guide
acaggauuaaguucacugua

SEQ ID NO: 24142 - RNA, 20 nt, Artificial Sequence
  RPE65 RNA guide
acaggcuuugagccagcccu

SEQ ID NO: 24143 - RNA, 20 nt, Artificial Sequence
  RPE65 RNA guide
acaggguccuucccacagua

SEQ ID NO: 24144 - RNA, 20 nt, Artificial Sequence
  RPE65 RNA guide
acaguauucucccacccuau

SEQ ID NO: 24145 - RNA, 20 nt, Artificial Sequence
  RPE65 RNA guide
acagugaacuuaauccuguc

SEQ ID NO: 24146 - RNA, 20 nt, Artificial Sequence
  RPE65 RNA guide
acaucagagcagugaucugg

SEQ ID NO: 24147 - RNA, 20 nt, Artificial Sequence
  RPE65 RNA guide
acaugcucagcucacagcau

SEQ ID NO: 24148 - RNA, 20 nt, Artificial Sequence
  RPE65 RNA guide
acaugggcuucuuccuuauu

SEQ ID NO: 24149 - RNA, 20 nt, Artificial Sequence
  RPE65 RNA guide
acauuaaaagagaggucaug

SEQ ID NO: 24150 - RNA, 20 nt, Artificial Sequence
  RPE65 RNA guide
acccagcugagacuagaccg

SEQ ID NO: 24151 - RNA, 20 nt, Artificial Sequence
  RPE65 RNA guide
acccauuuaucuccuuccua

SEQ ID NO: 24152 - RNA, 20 nt, Artificial Sequence
  RPE65 RNA guide
acccccacccagcugagacu

SEQ ID NO: 24153 - RNA, 20 nt, Artificial Sequence
  RPE65 RNA guide
acccccacccccacccagcu

SEQ ID NO: 24154 - RNA, 20 nt, Artificial Sequence
  RPE65 RNA guide
acccccagccucacgugcuc

SEQ ID NO: 24155 - RNA, 20 nt, Artificial Sequence
  RPE65 RNA guide
acccccuuccauaccugagu

SEQ ID NO: 24156 - RNA, 20 nt, Artificial Sequence
  RPE65 RNA guide
accccuaggaaggagauaaa

SEQ ID NO: 24157 - RNA, 20 nt, Artificial Sequence
  RPE65 RNA guide
acccuaucaacaugcucagc

SEQ ID NO: 24158 - RNA, 20 nt, Artificial Sequence
  RPE65 RNA guide
acccuguuuaggaacaaauu

SEQ ID NO: 24159 - RNA, 20 nt, Artificial Sequence
  RPE65 RNA guide
accggcaggagugaacaggc

SEQ ID NO: 24160 - RNA, 20 nt, Artificial Sequence
  RPE65 RNA guide
accugaguagucuuccccac

SEQ ID NO: 24161 - RNA, 20 nt, Artificial Sequence
  RPE65 RNA guide
accuucgcuucuccccccac

SEQ ID NO: 24162 - RNA, 20 nt, Artificial Sequence
  RPE65 RNA guide
acgugaggcugggggugggg

SEQ ID NO: 24163 - RNA, 20 nt, Artificial Sequence
  RPE65 RNA guide
acgugcuccucccgcccuca

SEQ ID NO: 24164 - RNA, 20 nt, Artificial Sequence
  RPE65 RNA guide
acuacucagguauggaaggg

SEQ ID NO: 24165 - RNA, 20 nt, Artificial Sequence
  RPE65 RNA guide
acuagaccggcaggagugaa

SEQ ID NO: 24166 - RNA, 20 nt, Artificial Sequence
  RPE65 RNA guide
acucagguauggaagggggu

SEQ ID NO: 24167 - RNA, 20 nt, Artificial Sequence
  RPE65 RNA guide
acuccugccggucuagucuc

SEQ ID NO: 24168 - RNA, 20 nt, Artificial Sequence
  RPE65 RNA guide
acucuagggcuggcucaaag

SEQ ID NO: 24169 - RNA, 20 nt, Artificial Sequence
  RPE65 RNA guide
acugauggcaguaggauuga

SEQ ID NO: 24170 - RNA, 20 nt, Artificial Sequence
  RPE65 RNA guide
acugcagaggacaggauuaa

SEQ ID NO: 24171 - RNA, 20 nt, Artificial Sequence
  RPE65 RNA guide
acugccaucaguucacuucc

SEQ ID NO: 24172 - RNA, 20 nt, Artificial Sequence
  RPE65 RNA guide
acugcucugaugucaagaga

SEQ ID NO: 24173 - RNA, 20 nt, Artificial Sequence
  RPE65 RNA guide
acugugggaaggacccuguu

SEQ ID NO: 24174 - RNA, 20 nt, Artificial Sequence
  RPE65 RNA guide
acuuaauccuguccucugca

SEQ ID NO: 24175 - RNA, 20 nt, Artificial Sequence
  RPE65 RNA guide
acuuccugaaauuuguuccu

SEQ ID NO: 24176 - RNA, 20 nt, Artificial Sequence
  RPE65 RNA guide
acuucggaagacaaaucaau

SEQ ID NO: 24177 - RNA, 20 nt, Artificial Sequence
  RPE65 RNA guide
acuuugagcaucaacauggg

SEQ ID NO: 24178 - RNA, 20 nt, Artificial Sequence
  RPE65 RNA guide
agaaaaucaaugaugcugug

SEQ ID NO: 24179 - RNA, 20 nt, Artificial Sequence
  RPE65 RNA guide
agaagcccauguugaugcuc

SEQ ID NO: 24180 - RNA, 20 nt, Artificial Sequence
  RPE65 RNA guide
agaagcgaaggugagggcgg

SEQ ID NO: 24181 - RNA, 20 nt, Artificial Sequence
  RPE65 RNA guide
agaaggcacucuagggcugg

SEQ ID NO: 24182 - RNA, 20 nt, Artificial Sequence
  RPE65 RNA guide
agaauaaggaagaagcccau

SEQ ID NO: 24183 - RNA, 20 nt, Artificial Sequence
  RPE65 RNA guide
agaauacugugggaaggacc

SEQ ID NO: 24184 - RNA, 20 nt, Artificial Sequence
  RPE65 RNA guide
agacaaaucaaucaauccua

SEQ ID NO: 24185 - RNA, 20 nt, Artificial Sequence
  RPE65 RNA guide
agacaugaccucucuuuuaa

SEQ ID NO: 24186 - RNA, 20 nt, Artificial Sequence
  RPE65 RNA guide
agacccauuuaucuccuucc

SEQ ID NO: 24187 - RNA, 20 nt, Artificial Sequence
  RPE65 RNA guide
agaccggcaggagugaacag

SEQ ID NO: 24188 - RNA, 20 nt, Artificial Sequence
  RPE65 RNA guide
agacuacucagguauggaag

SEQ ID NO: 24189 - RNA, 20 nt, Artificial Sequence
  RPE65 RNA guide
agacuagaccggcaggagug

SEQ ID NO: 24190 - RNA, 20 nt, Artificial Sequence
  RPE65 RNA guide
agagaaggcacucuagggcu

SEQ ID NO: 24191 - RNA, 20 nt, Artificial Sequence
  RPE65 RNA guide
agagacaugaccucucuuuu

SEQ ID NO: 24192 - RNA, 20 nt, Artificial Sequence
  RPE65 RNA guide
agagacccauuuaucuccuu

SEQ ID NO: 24193 - RNA, 20 nt, Artificial Sequence
  RPE65 RNA guide
agagaggucaugucucuuga

SEQ ID NO: 24194 - RNA, 20 nt, Artificial Sequence
  RPE65 RNA guide
agagauagaggcagagcugc

SEQ ID NO: 24195 - RNA, 20 nt, Artificial Sequence
  RPE65 RNA guide
agagcagugaucugggaccc

SEQ ID NO: 24196 - RNA, 20 nt, Artificial Sequence
  RPE65 RNA guide
agagcugcaggagagaaggc

SEQ ID NO: 24197 - RNA, 20 nt, Artificial Sequence
  RPE65 RNA guide
agaggacaggauuaaguuca

SEQ ID NO: 24198 - RNA, 20 nt, Artificial Sequence
  RPE65 RNA guide
agaggcagagcugcaggaga

SEQ ID NO: 24199 - RNA, 20 nt, Artificial Sequence
  RPE65 RNA guide
agaggucaugucucuugaca

SEQ ID NO: 24200 - RNA, 20 nt, Artificial Sequence
  RPE65 RNA guide
agagugccuucucuccugca

SEQ ID NO: 24201 - RNA, 20 nt, Artificial Sequence
  RPE65 RNA guide
agauaaaugggucucuccuu

SEQ ID NO: 24202 - RNA, 20 nt, Artificial Sequence
  RPE65 RNA guide
agauagaggcagagcugcag

SEQ ID NO: 24203 - RNA, 20 nt, Artificial Sequence
  RPE65 RNA guide
agaucacugcucugauguca

SEQ ID NO: 24204 - RNA, 20 nt, Artificial Sequence
  RPE65 RNA guide
agcacgugaggcugggggug

SEQ ID NO: 24205 - RNA, 20 nt, Artificial Sequence
  RPE65 RNA guide
agcagugaucugggaccccc

SEQ ID NO: 24206 - RNA, 20 nt, Artificial Sequence
  RPE65 RNA guide
agcaucaacaugggcuucuu

SEQ ID NO: 24207 - RNA, 20 nt, Artificial Sequence
  RPE65 RNA guide
agcaucauugauuuucuugc

SEQ ID NO: 24208 - RNA, 20 nt, Artificial Sequence
  RPE65 RNA guide
agcauguugauaggguggga

SEQ ID NO: 24209 - RNA, 20 nt, Artificial Sequence
  RPE65 RNA guide
agccagcccuagagugccuu

SEQ ID NO: 24210 - RNA, 20 nt, Artificial Sequence
  RPE65 RNA guide
agcccauguugaugcucaaa

SEQ ID NO: 24211 - RNA, 20 nt, Artificial Sequence
  RPE65 RNA guide
agcccuagagugccuucucu

SEQ ID NO: 24212 - RNA, 20 nt, Artificial Sequence
  RPE65 RNA guide
agccucacgugcuccucccg

SEQ ID NO: 24213 - RNA, 20 nt, Artificial Sequence
  RPE65 RNA guide
agccuguucacuccugccgg

SEQ ID NO: 24214 - RNA, 20 nt, Artificial Sequence
  RPE65 RNA guide
agcgaaggugagggcgggag

SEQ ID NO: 24215 - RNA, 20 nt, Artificial Sequence
  RPE65 RNA guide
agcucacagcaucauugauu

SEQ ID NO: 24216 - RNA, 20 nt, Artificial Sequence
  RPE65 RNA guide
agcucugccucuaucucugc

SEQ ID NO: 24217 - RNA, 20 nt, Artificial Sequence
  RPE65 RNA guide
agcugagacuagaccggcag

SEQ ID NO: 24218 - RNA, 20 nt, Artificial Sequence
  RPE65 RNA guide
agcugagcauguugauaggg

SEQ ID NO: 24219 - RNA, 20 nt, Artificial Sequence
  RPE65 RNA guide
agcugcaggagagaaggcac

SEQ ID NO: 24220 - RNA, 20 nt, Artificial Sequence
  RPE65 RNA guide
agcugggugggggugggggu

SEQ ID NO: 24221 - RNA, 20 nt, Artificial Sequence
  RPE65 RNA guide
aggaaaaacugcagaggaca

SEQ ID NO: 24222 - RNA, 20 nt, Artificial Sequence
  RPE65 RNA guide
aggaacaaauuucaggaagu

SEQ ID NO: 24223 - RNA, 20 nt, Artificial Sequence
  RPE65 RNA guide
aggaagaagcccauguugau

SEQ ID NO: 24224 - RNA, 20 nt, Artificial Sequence
  RPE65 RNA guide
aggaaggagauaaauggguc

SEQ ID NO: 24225 - RNA, 20 nt, Artificial Sequence
  RPE65 RNA guide
aggaagugaacugauggcag

SEQ ID NO: 24226 - RNA, 20 nt, Artificial Sequence
  RPE65 RNA guide
aggacaggauuaaguucacu

SEQ ID NO: 24227 - RNA, 20 nt, Artificial Sequence
  RPE65 RNA guide
aggacccuguuuaggaacaa

SEQ ID NO: 24228 - RNA, 20 nt, Artificial Sequence
  RPE65 RNA guide
aggagagaaggcacucuagg

SEQ ID NO: 24229 - RNA, 20 nt, Artificial Sequence
  RPE65 RNA guide
aggagagacccauuuaucuc

SEQ ID NO: 24230 - RNA, 20 nt, Artificial Sequence
  RPE65 RNA guide
aggagauaaaugggucucuc

SEQ ID NO: 24231 - RNA, 20 nt, Artificial Sequence
  RPE65 RNA guide
aggagcacgugaggcugggg

SEQ ID NO: 24232 - RNA, 20 nt, Artificial Sequence
  RPE65 RNA guide
aggagugaacaggcuuugag

SEQ ID NO: 24233 - RNA, 20 nt, Artificial Sequence
  RPE65 RNA guide
aggauugauugauuugucuu

SEQ ID NO: 24234 - RNA, 20 nt, Artificial Sequence
  RPE65 RNA guide
aggcaagaaaaucaaugaug

SEQ ID NO: 24235 - RNA, 20 nt, Artificial Sequence
  RPE65 RNA guide
aggcacucuagggcuggcuc

SEQ ID NO: 24236 - RNA, 20 nt, Artificial Sequence
  RPE65 RNA guide
aggcagagcugcaggagaga

SEQ ID NO: 24237 - RNA, 20 nt, Artificial Sequence
  RPE65 RNA guide
aggcuggggguggggaagac

SEQ ID NO: 24238 - RNA, 20 nt, Artificial Sequence
  RPE65 RNA guide
aggcuuugagccagcccuag

SEQ ID NO: 24239 - RNA, 20 nt, Artificial Sequence
  RPE65 RNA guide
agggcgggaggagcacguga

SEQ ID NO: 24240 - RNA, 20 nt, Artificial Sequence
  RPE65 RNA guide
agggcuggcucaaagccugu

SEQ ID NO: 24241 - RNA, 20 nt, Artificial Sequence
  RPE65 RNA guide
agggggucccagaucacugc

SEQ ID NO: 24242 - RNA, 20 nt, Artificial Sequence
  RPE65 RNA guide
aggguccuucccacaguauu

SEQ ID NO: 24243 - RNA, 20 nt, Artificial Sequence
  RPE65 RNA guide
agggugggagaauacugugg

SEQ ID NO: 24244 - RNA, 20 nt, Artificial Sequence
  RPE65 RNA guide
agguauggaaggggguccca

SEQ ID NO: 24245 - RNA, 20 nt, Artificial Sequence
  RPE65 RNA guide
aggucaugucucuugacauc

SEQ ID NO: 24246 - RNA, 20 nt, Artificial Sequence
  RPE65 RNA guide
aggugagggcgggaggagca

SEQ ID NO: 24247 - RNA, 20 nt, Artificial Sequence
  RPE65 RNA guide
aguaaggaaaaacugcagag

SEQ ID NO: 24248 - RNA, 20 nt, Artificial Sequence
  RPE65 RNA guide
aguaggauugauugauuugu

SEQ ID NO: 24249 - RNA, 20 nt, Artificial Sequence
  RPE65 RNA guide
aguagucuuccccaccccca

SEQ ID NO: 24250 - RNA, 20 nt, Artificial Sequence
  RPE65 RNA guide
aguauucucccacccuauca

SEQ ID NO: 24251 - RNA, 20 nt, Artificial Sequence
  RPE65 RNA guide
aguccgcagagauagaggca

SEQ ID NO: 24252 - RNA, 20 nt, Artificial Sequence
  RPE65 RNA guide
agucucagcugggugggggu

SEQ ID NO: 24253 - RNA, 20 nt, Artificial Sequence
  RPE65 RNA guide
agucuuccccacccccagcc

SEQ ID NO: 24254 - RNA, 20 nt, Artificial Sequence
  RPE65 RNA guide
agugaacaggcuuugagcca

SEQ ID NO: 24255 - RNA, 20 nt, Artificial Sequence
  RPE65 RNA guide
agugaacugauggcaguagg

SEQ ID NO: 24256 - RNA, 20 nt, Artificial Sequence
  RPE65 RNA guide
agugaacuuaauccuguccu

SEQ ID NO: 24257 - RNA, 20 nt, Artificial Sequence
  RPE65 RNA guide
agugaucugggacccccuuc

SEQ ID NO: 24258 - RNA, 20 nt, Artificial Sequence
  RPE65 RNA guide
agugccuucucuccugcagc

SEQ ID NO: 24259 - RNA, 20 nt, Artificial Sequence
  RPE65 RNA guide
aguucacuuccugaaauuug

SEQ ID NO: 24260 - RNA, 20 nt, Artificial Sequence
  RPE65 RNA guide
aguuuuuccuuacuucggaa

SEQ ID NO: 24261 - RNA, 20 nt, Artificial Sequence
  RPE65 RNA guide
auaaaugggucucuccuuga

SEQ ID NO: 24262 - RNA, 20 nt, Artificial Sequence
  RPE65 RNA guide
auaaggaagaagcccauguu

SEQ ID NO: 24263 - RNA, 20 nt, Artificial Sequence
  RPE65 RNA guide
auaccugaguagucuucccc

SEQ ID NO: 24264 - RNA, 20 nt, Artificial Sequence
  RPE65 RNA guide
auacugugggaaggacccug

SEQ ID NO: 24265 - RNA, 20 nt, Artificial Sequence
  RPE65 RNA guide
auagaggcagagcugcagga

SEQ ID NO: 24266 - RNA, 20 nt, Artificial Sequence
  RPE65 RNA guide
auagggugggagaauacugu

SEQ ID NO: 24267 - RNA, 20 nt, Artificial Sequence
  RPE65 RNA guide
aucaacaugcucagcucaca

SEQ ID NO: 24268 - RNA, 20 nt, Artificial Sequence
  RPE65 RNA guide
aucaacaugggcuucuuccu

SEQ ID NO: 24269 - RNA, 20 nt, Artificial Sequence
  RPE65 RNA guide
aucaaucaauccuacugcca

SEQ ID NO: 24270 - RNA, 20 nt, Artificial Sequence
  RPE65 RNA guide
aucaauccuacugccaucag

SEQ ID NO: 24271 - RNA, 20 nt, Artificial Sequence
  RPE65 RNA guide
aucaaugaugcugugagcug

SEQ ID NO: 24272 - RNA, 20 nt, Artificial Sequence
  RPE65 RNA guide
aucacugcucugaugucaag

SEQ ID NO: 24273 - RNA, 20 nt, Artificial Sequence
  RPE65 RNA guide
aucagagcagugaucuggga

SEQ ID NO: 24274 - RNA, 20 nt, Artificial Sequence
  RPE65 RNA guide
aucaguucacuuccugaaau

SEQ ID NO: 24275 - RNA, 20 nt, Artificial Sequence
  RPE65 RNA guide
aucauugauuuucuugccuc

SEQ ID NO: 24276 - RNA, 20 nt, Artificial Sequence
  RPE65 RNA guide
auccuacugccaucaguuca

SEQ ID NO: 24277 - RNA, 20 nt, Artificial Sequence
  RPE65 RNA guide
auccuguccucugcaguuuu

SEQ ID NO: 24278 - RNA, 20 nt, Artificial Sequence
  RPE65 RNA guide
aucuccuuccuagggguuga

SEQ ID NO: 24279 - RNA, 20 nt, Artificial Sequence
  RPE65 RNA guide
aucucugcggacuuugagca

SEQ ID NO: 24280 - RNA, 20 nt, Artificial Sequence
  RPE65 RNA guide
aucugggacccccuuccaua

SEQ ID NO: 24281 - RNA, 20 nt, Artificial Sequence
  RPE65 RNA guide
augaugcugugagcugagca

SEQ ID NO: 24282 - RNA, 20 nt, Artificial Sequence
  RPE65 RNA guide
augcucaaaguccgcagaga

SEQ ID NO: 24283 - RNA, 20 nt, Artificial Sequence
  RPE65 RNA guide
augcucagcucacagcauca

SEQ ID NO: 24284 - RNA, 20 nt, Artificial Sequence
  RPE65 RNA guide
augcugugagcugagcaugu

SEQ ID NO: 24285 - RNA, 20 nt, Artificial Sequence
  RPE65 RNA guide
auggaagggggucccagauc

SEQ ID NO: 24286 - RNA, 20 nt, Artificial Sequence
  RPE65 RNA guide
auggcaguaggauugauuga

SEQ ID NO: 24287 - RNA, 20 nt, Artificial Sequence
  RPE65 RNA guide
augggcuucuuccuuauucu

SEQ ID NO: 24288 - RNA, 20 nt, Artificial Sequence
  RPE65 RNA guide
augggucucuccuugaggca

SEQ ID NO: 24289 - RNA, 20 nt, Artificial Sequence
  RPE65 RNA guide
augguggaagaauaaggaag

SEQ ID NO: 24290 - RNA, 20 nt, Artificial Sequence
  RPE65 RNA guide
augguuacagugaacuuaau

SEQ ID NO: 24291 - RNA, 20 nt, Artificial Sequence
  RPE65 RNA guide
augucaagagacaugaccuc

SEQ ID NO: 24292 - RNA, 20 nt, Artificial Sequence
  RPE65 RNA guide
augucucuugacaucagagc

SEQ ID NO: 24293 - RNA, 20 nt, Artificial Sequence
  RPE65 RNA guide
auguugauagggugggagaa

SEQ ID NO: 24294 - RNA, 20 nt, Artificial Sequence
  RPE65 RNA guide
auguugaugcucaaaguccg

SEQ ID NO: 24295 - RNA, 20 nt, Artificial Sequence
  RPE65 RNA guide
auuaaaagagaggucauguc

SEQ ID NO: 24296 - RNA, 20 nt, Artificial Sequence
  RPE65 RNA guide
auucucccacccuaucaaca

SEQ ID NO: 24297 - RNA, 20 nt, Artificial Sequence
  RPE65 RNA guide
auugauugauuugucuuccg

SEQ ID NO: 24298 - RNA, 20 nt, Artificial Sequence
  RPE65 RNA guide
auugauuugucuuccgaagu

SEQ ID NO: 24299 - RNA, 20 nt, Artificial Sequence
  RPE65 RNA guide
auugauuuucuugccucaag

SEQ ID NO: 24300 - RNA, 20 nt, Artificial Sequence
  RPE65 RNA guide
auuuaucuccuuccuagggg

SEQ ID NO: 24301 - RNA, 20 nt, Artificial Sequence
  RPE65 RNA guide
auuucaggaagugaacugau

SEQ ID NO: 24302 - RNA, 20 nt, Artificial Sequence
  RPE65 RNA guide
auuugucuuccgaaguaagg

SEQ ID NO: 24303 - RNA, 20 nt, Artificial Sequence
  RPE65 RNA guide
auuuguuccuaaacaggguc

SEQ ID NO: 24304 - RNA, 20 nt, Artificial Sequence
  RPE65 RNA guide
auuuucuugccucaaggaga

SEQ ID NO: 24305 - RNA, 20 nt, Artificial Sequence
  RPE65 RNA guide
caaagccuguucacuccugc

SEQ ID NO: 24306 - RNA, 20 nt, Artificial Sequence
  RPE65 RNA guide
caaaguccgcagagauagag

SEQ ID NO: 24307 - RNA, 20 nt, Artificial Sequence
  RPE65 RNA guide
caaaucaaucaauccuacug

SEQ ID NO: 24308 - RNA, 20 nt, Artificial Sequence
  RPE65 RNA guide
caaauuucaggaagugaacu

SEQ ID NO: 24309 - RNA, 20 nt, Artificial Sequence
  RPE65 RNA guide
caacaugcucagcucacagc

SEQ ID NO: 24310 - RNA, 20 nt, Artificial Sequence
  RPE65 RNA guide
caacaugggcuucuuccuua

SEQ ID NO: 24311 - RNA, 20 nt, Artificial Sequence
  RPE65 RNA guide
caaccccuaggaaggagaua

SEQ ID NO: 24312 - RNA, 20 nt, Artificial Sequence
  RPE65 RNA guide
caagaaaaucaaugaugcug

SEQ ID NO: 24313 - RNA, 20 nt, Artificial Sequence
  RPE65 RNA guide
caagagacaugaccucucuu

SEQ ID NO: 24314 - RNA, 20 nt, Artificial Sequence
  RPE65 RNA guide
caaggagagacccauuuauc

SEQ ID NO: 24315 - RNA, 20 nt, Artificial Sequence
  RPE65 RNA guide
caaucaauccuacugccauc

SEQ ID NO: 24316 - RNA, 20 nt, Artificial Sequence
  RPE65 RNA guide
caauccuacugccaucaguu

SEQ ID NO: 24317 - RNA, 20 nt, Artificial Sequence
  RPE65 RNA guide
caaugaugcugugagcugag

SEQ ID NO: 24318 - RNA, 20 nt, Artificial Sequence
  RPE65 RNA guide
cacagcaucauugauuuucu

SEQ ID NO: 24319 - RNA, 20 nt, Artificial Sequence
  RPE65 RNA guide
cacaguauucucccacccua

SEQ ID NO: 24320 - RNA, 20 nt, Artificial Sequence
  RPE65 RNA guide
cacccagcugagacuagacc

SEQ ID NO: 24321 - RNA, 20 nt, Artificial Sequence
  RPE65 RNA guide
cacccccacccagcugagac

SEQ ID NO: 24322 - RNA, 20 nt, Artificial Sequence
  RPE65 RNA guide
cacccccacccccacccagc

SEQ ID NO: 24323 - RNA, 20 nt, Artificial Sequence
  RPE65 RNA guide
cacccccagccucacgugcu

SEQ ID NO: 24324 - RNA, 20 nt, Artificial Sequence
  RPE65 RNA guide
cacccuaucaacaugcucag

SEQ ID NO: 24325 - RNA, 20 nt, Artificial Sequence
  RPE65 RNA guide
caccuucgcuucucccccca

SEQ ID NO: 24326 - RNA, 20 nt, Artificial Sequence
  RPE65 RNA guide
cacgugaggcuggggguggg

SEQ ID NO: 24327 - RNA, 20 nt, Artificial Sequence
  RPE65 RNA guide
cacgugcuccucccgcccuc

SEQ ID NO: 24328 - RNA, 20 nt, Artificial Sequence
  RPE65 RNA guide
cacuccugccggucuagucu

SEQ ID NO: 24329 - RNA, 20 nt, Artificial Sequence
  RPE65 RNA guide
cacucuagggcuggcucaaa

SEQ ID NO: 24330 - RNA, 20 nt, Artificial Sequence
  RPE65 RNA guide
cacugcucugaugucaagag

SEQ ID NO: 24331 - RNA, 20 nt, Artificial Sequence
  RPE65 RNA guide
cacuuccugaaauuuguucc

SEQ ID NO: 24332 - RNA, 20 nt, Artificial Sequence
  RPE65 RNA guide
cagagauagaggcagagcug

SEQ ID NO: 24333 - RNA, 20 nt, Artificial Sequence
  RPE65 RNA guide
cagagcagugaucugggacc

SEQ ID NO: 24334 - RNA, 20 nt, Artificial Sequence
  RPE65 RNA guide
cagagcugcaggagagaagg

SEQ ID NO: 24335 - RNA, 20 nt, Artificial Sequence
  RPE65 RNA guide
cagaggacaggauuaaguuc

SEQ ID NO: 24336 - RNA, 20 nt, Artificial Sequence
  RPE65 RNA guide
cagaucacugcucugauguc

SEQ ID NO: 24337 - RNA, 20 nt, Artificial Sequence
  RPE65 RNA guide
cagcaucauugauuuucuug

SEQ ID NO: 24338 - RNA, 20 nt, Artificial Sequence
  RPE65 RNA guide
cagcccuagagugccuucuc

SEQ ID NO: 24339 - RNA, 20 nt, Artificial Sequence
  RPE65 RNA guide
cagccucacgugcuccuccc

SEQ ID NO: 24340 - RNA, 20 nt, Artificial Sequence
  RPE65 RNA guide
cagcucacagcaucauugau

SEQ ID NO: 24341 - RNA, 20 nt, Artificial Sequence
  RPE65 RNA guide
cagcucugccucuaucucug

SEQ ID NO: 24342 - RNA, 20 nt, Artificial Sequence
  RPE65 RNA guide
cagcugagacuagaccggca

SEQ ID NO: 24343 - RNA, 20 nt, Artificial Sequence
  RPE65 RNA guide
cagcuggguggggguggggg

SEQ ID NO: 24344 - RNA, 20 nt, Artificial Sequence
  RPE65 RNA guide
caggaagugaacugauggca

SEQ ID NO: 24345 - RNA, 20 nt, Artificial Sequence
  RPE65 RNA guide
caggagagaaggcacucuag

SEQ ID NO: 24346 - RNA, 20 nt, Artificial Sequence
  RPE65 RNA guide
caggagugaacaggcuuuga

SEQ ID NO: 24347 - RNA, 20 nt, Artificial Sequence
  RPE65 RNA guide
caggcuuugagccagcccua

SEQ ID NO: 24348 - RNA, 20 nt, Artificial Sequence
  RPE65 RNA guide
caggguccuucccacaguau

SEQ ID NO: 24349 - RNA, 20 nt, Artificial Sequence
  RPE65 RNA guide
cagguauggaaggggguccc

SEQ ID NO: 24350 - RNA, 20 nt, Artificial Sequence
  RPE65 RNA guide
caguaggauugauugauuug

SEQ ID NO: 24351 - RNA, 20 nt, Artificial Sequence
  RPE65 RNA guide
caguauucucccacccuauc

SEQ ID NO: 24352 - RNA, 20 nt, Artificial Sequence
  RPE65 RNA guide
cagugaacuuaauccugucc

SEQ ID NO: 24353 - RNA, 20 nt, Artificial Sequence
  RPE65 RNA guide
cagugaucugggacccccuu

SEQ ID NO: 24354 - RNA, 20 nt, Artificial Sequence
  RPE65 RNA guide
caguucacuuccugaaauuu

SEQ ID NO: 24355 - RNA, 20 nt, Artificial Sequence
  RPE65 RNA guide
caguuuuuccuuacuucgga

SEQ ID NO: 24356 - RNA, 20 nt, Artificial Sequence
  RPE65 RNA guide
cauaccugaguagucuuccc

SEQ ID NO: 24357 - RNA, 20 nt, Artificial Sequence
  RPE65 RNA guide
caucaacaugggcuucuucc

SEQ ID NO: 24358 - RNA, 20 nt, Artificial Sequence
  RPE65 RNA guide
caucagagcagugaucuggg

SEQ ID NO: 24359 - RNA, 20 nt, Artificial Sequence
  RPE65 RNA guide
caucaguucacuuccugaaa

SEQ ID NO: 24360 - RNA, 20 nt, Artificial Sequence
  RPE65 RNA guide
caucauugauuuucuugccu

SEQ ID NO: 24361 - RNA, 20 nt, Artificial Sequence
  RPE65 RNA guide
caugcucagcucacagcauc

SEQ ID NO: 24362 - RNA, 20 nt, Artificial Sequence
  RPE65 RNA guide
caugggcuucuuccuuauuc

SEQ ID NO: 24363 - RNA, 20 nt, Artificial Sequence
  RPE65 RNA guide
caugucucuugacaucagag

SEQ ID NO: 24364 - RNA, 20 nt, Artificial Sequence
  RPE65 RNA guide
cauguugauagggugggaga

SEQ ID NO: 24365 - RNA, 20 nt, Artificial Sequence
  RPE65 RNA guide
cauguugaugcucaaagucc

SEQ ID NO: 24366 - RNA, 20 nt, Artificial Sequence
  RPE65 RNA guide
cauuaaaagagaggucaugu

SEQ ID NO: 24367 - RNA, 20 nt, Artificial Sequence
  RPE65 RNA guide
cauugauuuucuugccucaa

SEQ ID NO: 24368 - RNA, 20 nt, Artificial Sequence
  RPE65 RNA guide
cauuuaucuccuuccuaggg

SEQ ID NO: 24369 - RNA, 20 nt, Artificial Sequence
  RPE65 RNA guide
ccacaguauucucccacccu

SEQ ID NO: 24370 - RNA, 20 nt, Artificial Sequence
  RPE65 RNA guide
ccacccagcugagacuagac

SEQ ID NO: 24371 - RNA, 20 nt, Artificial Sequence
  RPE65 RNA guide
ccacccccacccagcugaga

SEQ ID NO: 24372 - RNA, 20 nt, Artificial Sequence
  RPE65 RNA guide
ccacccccacccccacccag

SEQ ID NO: 24373 - RNA, 20 nt, Artificial Sequence
  RPE65 RNA guide
ccacccccagccucacgugc

SEQ ID NO: 24374 - RNA, 20 nt, Artificial Sequence
  RPE65 RNA guide
ccacccuaucaacaugcuca

SEQ ID NO: 24375 - RNA, 20 nt, Artificial Sequence
  RPE65 RNA guide
ccagaucacugcucugaugu

SEQ ID NO: 24376 - RNA, 20 nt, Artificial Sequence
  RPE65 RNA guide
ccagcccuagagugccuucu

SEQ ID NO: 24377 - RNA, 20 nt, Artificial Sequence
  RPE65 RNA guide
ccagccucacgugcuccucc

SEQ ID NO: 24378 - RNA, 20 nt, Artificial Sequence
  RPE65 RNA guide
ccagcugagacuagaccggc

SEQ ID NO: 24379 - RNA, 20 nt, Artificial Sequence
  RPE65 RNA guide
ccauaccugaguagucuucc

SEQ ID NO: 24380 - RNA, 20 nt, Artificial Sequence
  RPE65 RNA guide
ccaucaguucacuuccugaa

SEQ ID NO: 24381 - RNA, 20 nt, Artificial Sequence
  RPE65 RNA guide
ccauguugaugcucaaaguc

SEQ ID NO: 24382 - RNA, 20 nt, Artificial Sequence
  RPE65 RNA guide
ccauuuaucuccuuccuagg

SEQ ID NO: 24383 - RNA, 20 nt, Artificial Sequence
  RPE65 RNA guide
cccacaguauucucccaccc

SEQ ID NO: 24384 - RNA, 20 nt, Artificial Sequence
  RPE65 RNA guide
cccacccagcugagacuaga

SEQ ID NO: 24385 - RNA, 20 nt, Artificial Sequence
  RPE65 RNA guide
cccacccccacccagcugag

SEQ ID NO: 24386 - RNA, 20 nt, Artificial Sequence
  RPE65 RNA guide
cccacccccacccccaccca

SEQ ID NO: 24387 - RNA, 20 nt, Artificial Sequence
  RPE65 RNA guide
cccacccccagccucacgug

SEQ ID NO: 24388 - RNA, 20 nt, Artificial Sequence
  RPE65 RNA guide
cccacccuaucaacaugcuc

SEQ ID NO: 24389 - RNA, 20 nt, Artificial Sequence
  RPE65 RNA guide
cccagaucacugcucugaug

SEQ ID NO: 24390 - RNA, 20 nt, Artificial Sequence
  RPE65 RNA guide
cccagccucacgugcuccuc

SEQ ID NO: 24391 - RNA, 20 nt, Artificial Sequence
  RPE65 RNA guide
cccagcugagacuagaccgg

SEQ ID NO: 24392 - RNA, 20 nt, Artificial Sequence
  RPE65 RNA guide
cccauguugaugcucaaagu

SEQ ID NO: 24393 - RNA, 20 nt, Artificial Sequence
  RPE65 RNA guide
cccauuuaucuccuuccuag

SEQ ID NO: 24394 - RNA, 20 nt, Artificial Sequence
  RPE65 RNA guide
ccccacccagcugagacuag

SEQ ID NO: 24395 - RNA, 20 nt, Artificial Sequence
  RPE65 RNA guide
ccccacccccacccagcuga

SEQ ID NO: 24396 - RNA, 20 nt, Artificial Sequence
  RPE65 RNA guide
ccccacccccacccccaccc

SEQ ID NO: 24397 - RNA, 20 nt, Artificial Sequence
  RPE65 RNA guide
ccccacccccagccucacgu

SEQ ID NO: 24398 - RNA, 20 nt, Artificial Sequence
  RPE65 RNA guide
ccccagccucacgugcuccu

SEQ ID NO: 24399 - RNA, 20 nt, Artificial Sequence
  RPE65 RNA guide
cccccacccagcugagacua

SEQ ID NO: 24400 - RNA, 20 nt, Artificial Sequence
  RPE65 RNA guide
cccccacccccacccagcug

SEQ ID NO: 24401 - RNA, 20 nt, Artificial Sequence
  RPE65 RNA guide
cccccagccucacgugcucc

SEQ ID NO: 24402 - RNA, 20 nt, Artificial Sequence
  RPE65 RNA guide
cccccuuccauaccugagua

SEQ ID NO: 24403 - RNA, 20 nt, Artificial Sequence
  RPE65 RNA guide
ccccuaggaaggagauaaau

SEQ ID NO: 24404 - RNA, 20 nt, Artificial Sequence
  RPE65 RNA guide
ccccuuccauaccugaguag

SEQ ID NO: 24405 - RNA, 20 nt, Artificial Sequence
  RPE65 RNA guide
cccgcccucaccuucgcuuc

SEQ ID NO: 24406 - RNA, 20 nt, Artificial Sequence
  RPE65 RNA guide
cccuagagugccuucucucc

SEQ ID NO: 24407 - RNA, 20 nt, Artificial Sequence
  RPE65 RNA guide
cccuaggaaggagauaaaug

SEQ ID NO: 24408 - RNA, 20 nt, Artificial Sequence
  RPE65 RNA guide
cccuaucaacaugcucagcu

SEQ ID NO: 24409 - RNA, 20 nt, Artificial Sequence
  RPE65 RNA guide
cccucaccuucgcuucuccc

SEQ ID NO: 24410 - RNA, 20 nt, Artificial Sequence
  RPE65 RNA guide
cccuguuuaggaacaaauuu

SEQ ID NO: 24411 - RNA, 20 nt, Artificial Sequence
  RPE65 RNA guide
cccuuccauaccugaguagu

SEQ ID NO: 24412 - RNA, 20 nt, Artificial Sequence
  RPE65 RNA guide
ccgaaguaaggaaaaacugc

SEQ ID NO: 24413 - RNA, 20 nt, Artificial Sequence
  RPE65 RNA guide
ccgcagagauagaggcagag

SEQ ID NO: 24414 - RNA, 20 nt, Artificial Sequence
  RPE65 RNA guide
ccgcccucaccuucgcuucu

SEQ ID NO: 24415 - RNA, 20 nt, Artificial Sequence
  RPE65 RNA guide
ccggcaggagugaacaggcu

SEQ ID NO: 24416 - RNA, 20 nt, Artificial Sequence
  RPE65 RNA guide
ccggucuagucucagcuggg

SEQ ID NO: 24417 - RNA, 20 nt, Artificial Sequence
  RPE65 RNA guide
ccuaaacaggguccuuccca

SEQ ID NO: 24418 - RNA, 20 nt, Artificial Sequence
  RPE65 RNA guide
ccuacugccaucaguucacu

SEQ ID NO: 24419 - RNA, 20 nt, Artificial Sequence
  RPE65 RNA guide
ccuagagugccuucucuccu

SEQ ID NO: 24420 - RNA, 20 nt, Artificial Sequence
  RPE65 RNA guide
ccuaggaaggagauaaaugg

SEQ ID NO: 24421 - RNA, 20 nt, Artificial Sequence
  RPE65 RNA guide
ccuaucaacaugcucagcuc

SEQ ID NO: 24422 - RNA, 20 nt, Artificial Sequence
  RPE65 RNA guide
ccucaaggagagacccauuu

SEQ ID NO: 24423 - RNA, 20 nt, Artificial Sequence
  RPE65 RNA guide
ccucaccuucgcuucucccc

SEQ ID NO: 24424 - RNA, 20 nt, Artificial Sequence
  RPE65 RNA guide
ccucacgugcuccucccgcc

SEQ ID NO: 24425 - RNA, 20 nt, Artificial Sequence
  RPE65 RNA guide
ccucccgcccucaccuucgc

SEQ ID NO: 24426 - RNA, 20 nt, Artificial Sequence
  RPE65 RNA guide
ccucuaucucugcggacuuu

SEQ ID NO: 24427 - RNA, 20 nt, Artificial Sequence
  RPE65 RNA guide
ccucugcaguuuuuccuuac

SEQ ID NO: 24428 - RNA, 20 nt, Artificial Sequence
  RPE65 RNA guide
ccugaaauuuguuccuaaac

SEQ ID NO: 24429 - RNA, 20 nt, Artificial Sequence
  RPE65 RNA guide
ccugaguagucuuccccacc

SEQ ID NO: 24430 - RNA, 20 nt, Artificial Sequence
  RPE65 RNA guide
ccugcagcucugccucuauc

SEQ ID NO: 24431 - RNA, 20 nt, Artificial Sequence
  RPE65 RNA guide
ccugccggucuagucucagc

SEQ ID NO: 24432 - RNA, 20 nt, Artificial Sequence
  RPE65 RNA guide
ccuguccucugcaguuuuuc

SEQ ID NO: 24433 - RNA, 20 nt, Artificial Sequence
  RPE65 RNA guide
ccuguucacuccugccgguc

SEQ ID NO: 24434 - RNA, 20 nt, Artificial Sequence
  RPE65 RNA guide
ccuguuuaggaacaaauuuc

SEQ ID NO: 24435 - RNA, 20 nt, Artificial Sequence
  RPE65 RNA guide
ccuuacuucggaagacaaau

SEQ ID NO: 24436 - RNA, 20 nt, Artificial Sequence
  RPE65 RNA guide
ccuuccauaccugaguaguc

SEQ ID NO: 24437 - RNA, 20 nt, Artificial Sequence
  RPE65 RNA guide
ccuucccacaguauucuccc

SEQ ID NO: 24438 - RNA, 20 nt, Artificial Sequence
  RPE65 RNA guide
ccuucgcuucuccccccacc

SEQ ID NO: 24439 - RNA, 20 nt, Artificial Sequence
  RPE65 RNA guide
ccuucucuccugcagcucug

SEQ ID NO: 24440 - RNA, 20 nt, Artificial Sequence
  RPE65 RNA guide
ccuugaggcaagaaaaucaa

SEQ ID NO: 24441 - RNA, 20 nt, Artificial Sequence
  RPE65 RNA guide
cgaaggugagggcgggagga

SEQ ID NO: 24442 - RNA, 20 nt, Artificial Sequence
  RPE65 RNA guide
cgaaguaaggaaaaacugca

SEQ ID NO: 24443 - RNA, 20 nt, Artificial Sequence
  RPE65 RNA guide
cgcagagauagaggcagagc

SEQ ID NO: 24444 - RNA, 20 nt, Artificial Sequence
  RPE65 RNA guide
cgcccucaccuucgcuucuc

SEQ ID NO: 24445 - RNA, 20 nt, Artificial Sequence
  RPE65 RNA guide
cgcuucuccccccaccccca

SEQ ID NO: 24446 - RNA, 20 nt, Artificial Sequence
  RPE65 RNA guide
cggaagacaaaucaaucaau

SEQ ID NO: 24447 - RNA, 20 nt, Artificial Sequence
  RPE65 RNA guide
cggacuuugagcaucaacau

SEQ ID NO: 24448 - RNA, 20 nt, Artificial Sequence
  RPE65 RNA guide
cggcaggagugaacaggcuu

SEQ ID NO: 24449 - RNA, 20 nt, Artificial Sequence
  RPE65 RNA guide
cgggaggagcacgugaggcu

SEQ ID NO: 24450 - RNA, 20 nt, Artificial Sequence
  RPE65 RNA guide
cggucuagucucagcugggu

SEQ ID NO: 24451 - RNA, 20 nt, Artificial Sequence
  RPE65 RNA guide
cgugaggcugggggugggga

SEQ ID NO: 24452 - RNA, 20 nt, Artificial Sequence
  RPE65 RNA guide
cgugcuccucccgcccucac

SEQ ID NO: 24453 - RNA, 20 nt, Artificial Sequence
  RPE65 RNA guide
cuaaacaggguccuucccac

SEQ ID NO: 24454 - RNA, 20 nt, Artificial Sequence
  RPE65 RNA guide
cuacucagguauggaagggg

SEQ ID NO: 24455 - RNA, 20 nt, Artificial Sequence
  RPE65 RNA guide
cuacugccaucaguucacuu

SEQ ID NO: 24456 - RNA, 20 nt, Artificial Sequence
  RPE65 RNA guide
cuagaccggcaggagugaac

SEQ ID NO: 24457 - RNA, 20 nt, Artificial Sequence
  RPE65 RNA guide
cuagagugccuucucuccug

SEQ ID NO: 24458 - RNA, 20 nt, Artificial Sequence
  RPE65 RNA guide
cuaggaaggagauaaauggg

SEQ ID NO: 24459 - RNA, 20 nt, Artificial Sequence
  RPE65 RNA guide
cuagggcuggcucaaagccu

SEQ ID NO: 24460 - RNA, 20 nt, Artificial Sequence
  RPE65 RNA guide
cuagucucagcugggugggg

SEQ ID NO: 24461 - RNA, 20 nt, Artificial Sequence
  RPE65 RNA guide
cuaucaacaugcucagcuca

SEQ ID NO: 24462 - RNA, 20 nt, Artificial Sequence
  RPE65 RNA guide
cuaucucugcggacuuugag

SEQ ID NO: 24463 - RNA, 20 nt, Artificial Sequence
  RPE65 RNA guide
cucaaagccuguucacuccu

SEQ ID NO: 24464 - RNA, 20 nt, Artificial Sequence
  RPE65 RNA guide
cucaaaguccgcagagauag

SEQ ID NO: 24465 - RNA, 20 nt, Artificial Sequence
  RPE65 RNA guide
cucaaccccuaggaaggaga

SEQ ID NO: 24466 - RNA, 20 nt, Artificial Sequence
  RPE65 RNA guide
cucaaggagagacccauuua

SEQ ID NO: 24467 - RNA, 20 nt, Artificial Sequence
  RPE65 RNA guide
cucacagcaucauugauuuu

SEQ ID NO: 24468 - RNA, 20 nt, Artificial Sequence
  RPE65 RNA guide
cucaccuucgcuucuccccc

SEQ ID NO: 24469 - RNA, 20 nt, Artificial Sequence
  RPE65 RNA guide
cucacgugcuccucccgccc

SEQ ID NO: 24470 - RNA, 20 nt, Artificial Sequence
  RPE65 RNA guide
cucagcucacagcaucauug

SEQ ID NO: 24471 - RNA, 20 nt, Artificial Sequence
  RPE65 RNA guide
cucagcuggguggggguggg

SEQ ID NO: 24472 - RNA, 20 nt, Artificial Sequence
  RPE65 RNA guide
cucagguauggaaggggguc

SEQ ID NO: 24473 - RNA, 20 nt, Artificial Sequence
  RPE65 RNA guide
cucccacccuaucaacaugc

SEQ ID NO: 24474 - RNA, 20 nt, Artificial Sequence
  RPE65 RNA guide
cucccgcccucaccuucgcu

SEQ ID NO: 24475 - RNA, 20 nt, Artificial Sequence
  RPE65 RNA guide
cuccucccgcccucaccuuc

SEQ ID NO: 24476 - RNA, 20 nt, Artificial Sequence
  RPE65 RNA guide
cuccugcagcucugccucua

SEQ ID NO: 24477 - RNA, 20 nt, Artificial Sequence
  RPE65 RNA guide
cuccugccggucuagucuca

SEQ ID NO: 24478 - RNA, 20 nt, Artificial Sequence
  RPE65 RNA guide
cuccuugaggcaagaaaauc

SEQ ID NO: 24479 - RNA, 20 nt, Artificial Sequence
  RPE65 RNA guide
cucuagggcuggcucaaagc

SEQ ID NO: 24480 - RNA, 20 nt, Artificial Sequence
  RPE65 RNA guide
cucuaucucugcggacuuug

SEQ ID NO: 24481 - RNA, 20 nt, Artificial Sequence
  RPE65 RNA guide
cucucaaccccuaggaagga

SEQ ID NO: 24482 - RNA, 20 nt, Artificial Sequence
  RPE65 RNA guide
cucuccugcagcucugccuc

SEQ ID NO: 24483 - RNA, 20 nt, Artificial Sequence
  RPE65 RNA guide
cucuccuugaggcaagaaaa

SEQ ID NO: 24484 - RNA, 20 nt, Artificial Sequence
  RPE65 RNA guide
cucugaugucaagagacaug

SEQ ID NO: 24485 - RNA, 20 nt, Artificial Sequence
  RPE65 RNA guide
cucugcaguuuuuccuuacu

SEQ ID NO: 24486 - RNA, 20 nt, Artificial Sequence
  RPE65 RNA guide
cucugccucuaucucugcgg

SEQ ID NO: 24487 - RNA, 20 nt, Artificial Sequence
  RPE65 RNA guide
cucugcggacuuugagcauc

SEQ ID NO: 24488 - RNA, 20 nt, Artificial Sequence
  RPE65 RNA guide
cucuugacaucagagcagug

SEQ ID NO: 24489 - RNA, 20 nt, Artificial Sequence
  RPE65 RNA guide
cugaaaugguggaagaauaa

SEQ ID NO: 24490 - RNA, 20 nt, Artificial Sequence
  RPE65 RNA guide
cugaaauuuguuccuaaaca

SEQ ID NO: 24491 - RNA, 20 nt, Artificial Sequence
  RPE65 RNA guide
cugagacuagaccggcagga

SEQ ID NO: 24492 - RNA, 20 nt, Artificial Sequence
  RPE65 RNA guide
cugagcauguugauagggug

SEQ ID NO: 24493 - RNA, 20 nt, Artificial Sequence
  RPE65 RNA guide
cugaguagucuuccccaccc

SEQ ID NO: 24494 - RNA, 20 nt, Artificial Sequence
  RPE65 RNA guide
cugauggcaguaggauugau

SEQ ID NO: 24495 - RNA, 20 nt, Artificial Sequence
  RPE65 RNA guide
cugaugucaagagacaugac

SEQ ID NO: 24496 - RNA, 20 nt, Artificial Sequence
  RPE65 RNA guide
cugcagaggacaggauuaag

SEQ ID NO: 24497 - RNA, 20 nt, Artificial Sequence
  RPE65 RNA guide
cugcagcucugccucuaucu

SEQ ID NO: 24498 - RNA, 20 nt, Artificial Sequence
  RPE65 RNA guide
cugcaggagagaaggcacuc

SEQ ID NO: 24499 - RNA, 20 nt, Artificial Sequence
  RPE65 RNA guide
cugcaguuuuuccuuacuuc

SEQ ID NO: 24500 - RNA, 20 nt, Artificial Sequence
  RPE65 RNA guide
cugccaucaguucacuuccu

SEQ ID NO: 24501 - RNA, 20 nt, Artificial Sequence
  RPE65 RNA guide
cugccggucuagucucagcu

SEQ ID NO: 24502 - RNA, 20 nt, Artificial Sequence
  RPE65 RNA guide
cugccucuaucucugcggac

SEQ ID NO: 24503 - RNA, 20 nt, Artificial Sequence
  RPE65 RNA guide
cugcggacuuugagcaucaa

SEQ ID NO: 24504 - RNA, 20 nt, Artificial Sequence
  RPE65 RNA guide
cugcucugaugucaagagac

SEQ ID NO: 24505 - RNA, 20 nt, Artificial Sequence
  RPE65 RNA guide
cuggcucaaagccuguucac

SEQ ID NO: 24506 - RNA, 20 nt, Artificial Sequence
  RPE65 RNA guide
cugggacccccuuccauacc

SEQ ID NO: 24507 - RNA, 20 nt, Artificial Sequence
  RPE65 RNA guide
cuggggguggggaagacuac

SEQ ID NO: 24508 - RNA, 20 nt, Artificial Sequence
  RPE65 RNA guide
cuguccucugcaguuuuucc

SEQ ID NO: 24509 - RNA, 20 nt, Artificial Sequence
  RPE65 RNA guide
cugugagcugagcauguuga

SEQ ID NO: 24510 - RNA, 20 nt, Artificial Sequence
  RPE65 RNA guide
cugugggaaggacccuguuu

SEQ ID NO: 24511 - RNA, 20 nt, Artificial Sequence
  RPE65 RNA guide
cuguucacuccugccggucu

SEQ ID NO: 24512 - RNA, 20 nt, Artificial Sequence
  RPE65 RNA guide
cuguuuaggaacaaauuuca

SEQ ID NO: 24513 - RNA, 20 nt, Artificial Sequence
  RPE65 RNA guide
cuuaauccuguccucugcag

SEQ ID NO: 24514 - RNA, 20 nt, Artificial Sequence
  RPE65 RNA guide
cuuacuucggaagacaaauc

SEQ ID NO: 24515 - RNA, 20 nt, Artificial Sequence
  RPE65 RNA guide
cuuccauaccugaguagucu

SEQ ID NO: 24516 - RNA, 20 nt, Artificial Sequence
  RPE65 RNA guide
cuucccacaguauucuccca

SEQ ID NO: 24517 - RNA, 20 nt, Artificial Sequence
  RPE65 RNA guide
cuuccccacccccagccuca

SEQ ID NO: 24518 - RNA, 20 nt, Artificial Sequence
  RPE65 RNA guide
cuuccgaaguaaggaaaaac

SEQ ID NO: 24519 - RNA, 20 nt, Artificial Sequence
  RPE65 RNA guide
cuuccugaaauuuguuccua

SEQ ID NO: 24520 - RNA, 20 nt, Artificial Sequence
  RPE65 RNA guide
cuuccuuauucuuccaccau

SEQ ID NO: 24521 - RNA, 20 nt, Artificial Sequence
  RPE65 RNA guide
cuucgcuucuccccccaccc

SEQ ID NO: 24522 - RNA, 20 nt, Artificial Sequence
  RPE65 RNA guide
cuucggaagacaaaucaauc

SEQ ID NO: 24523 - RNA, 20 nt, Artificial Sequence
  RPE65 RNA guide
cuucuccccccacccccacc

SEQ ID NO: 24524 - RNA, 20 nt, Artificial Sequence
  RPE65 RNA guide
cuucucuccugcagcucugc

SEQ ID NO: 24525 - RNA, 20 nt, Artificial Sequence
  RPE65 RNA guide
cuucuuccuuauucuuccac

SEQ ID NO: 24526 - RNA, 20 nt, Artificial Sequence
  RPE65 RNA guide
cuugacaucagagcagugau

SEQ ID NO: 24527 - RNA, 20 nt, Artificial Sequence
  RPE65 RNA guide
cuugaggcaagaaaaucaau

SEQ ID NO: 24528 - RNA, 20 nt, Artificial Sequence
  RPE65 RNA guide
cuugccucaaggagagaccc

SEQ ID NO: 24529 - RNA, 20 nt, Artificial Sequence
  RPE65 RNA guide
cuuugagcaucaacaugggc

SEQ ID NO: 24530 - RNA, 20 nt, Artificial Sequence
  RPE65 RNA guide
cuuugagccagcccuagagu

SEQ ID NO: 24531 - RNA, 20 nt, Artificial Sequence
  RPE65 RNA guide
gaaaaacugcagaggacagg

SEQ ID NO: 24532 - RNA, 20 nt, Artificial Sequence
  RPE65 RNA guide
gaaaaucaaugaugcuguga

SEQ ID NO: 24533 - RNA, 20 nt, Artificial Sequence
  RPE65 RNA guide
gaaaugguggaagaauaagg

SEQ ID NO: 24534 - RNA, 20 nt, Artificial Sequence
  RPE65 RNA guide
gaaauuuguuccuaaacagg

SEQ ID NO: 24535 - RNA, 20 nt, Artificial Sequence
  RPE65 RNA guide
gaacaaauuucaggaaguga

SEQ ID NO: 24536 - RNA, 20 nt, Artificial Sequence
  RPE65 RNA guide
gaacaggcuuugagccagcc

SEQ ID NO: 24537 - RNA, 20 nt, Artificial Sequence
  RPE65 RNA guide
gaacugauggcaguaggauu

SEQ ID NO: 24538 - RNA, 20 nt, Artificial Sequence
  RPE65 RNA guide
gaacuuaauccuguccucug

SEQ ID NO: 24539 - RNA, 20 nt, Artificial Sequence
  RPE65 RNA guide
gaagaagcccauguugaugc

SEQ ID NO: 24540 - RNA, 20 nt, Artificial Sequence
  RPE65 RNA guide
gaagaauaaggaagaagccc

SEQ ID NO: 24541 - RNA, 20 nt, Artificial Sequence
  RPE65 RNA guide
gaagacaaaucaaucaaucc

SEQ ID NO: 24542 - RNA, 20 nt, Artificial Sequence
  RPE65 RNA guide
gaagacuacucagguaugga

SEQ ID NO: 24543 - RNA, 20 nt, Artificial Sequence
  RPE65 RNA guide
gaagcccauguugaugcuca

SEQ ID NO: 24544 - RNA, 20 nt, Artificial Sequence
  RPE65 RNA guide
gaagcgaaggugagggcggg

SEQ ID NO: 24545 - RNA, 20 nt, Artificial Sequence
  RPE65 RNA guide
gaaggacccuguuuaggaac

SEQ ID NO: 24546 - RNA, 20 nt, Artificial Sequence
  RPE65 RNA guide
gaaggagauaaaugggucuc

SEQ ID NO: 24547 - RNA, 20 nt, Artificial Sequence
  RPE65 RNA guide
gaaggcacucuagggcuggc

SEQ ID NO: 24548 - RNA, 20 nt, Artificial Sequence
  RPE65 RNA guide
gaagggggucccagaucacu

SEQ ID NO: 24549 - RNA, 20 nt, Artificial Sequence
  RPE65 RNA guide
gaaggugagggcgggaggag

SEQ ID NO: 24550 - RNA, 20 nt, Artificial Sequence
  RPE65 RNA guide
gaaguaaggaaaaacugcag

SEQ ID NO: 24551 - RNA, 20 nt, Artificial Sequence
  RPE65 RNA guide
gaagugaacugauggcagua

SEQ ID NO: 24552 - RNA, 20 nt, Artificial Sequence
  RPE65 RNA guide
gaauaaggaagaagcccaug

SEQ ID NO: 24553 - RNA, 20 nt, Artificial Sequence
  RPE65 RNA guide
gaauacugugggaaggaccc

SEQ ID NO: 24554 - RNA, 20 nt, Artificial Sequence
  RPE65 RNA guide
gacaaaucaaucaauccuac

SEQ ID NO: 24555 - RNA, 20 nt, Artificial Sequence
  RPE65 RNA guide
gacaggauuaaguucacugu

SEQ ID NO: 24556 - RNA, 20 nt, Artificial Sequence
  RPE65 RNA guide
gacaucagagcagugaucug

SEQ ID NO: 24557 - RNA, 20 nt, Artificial Sequence
  RPE65 RNA guide
gacaugaccucucuuuuaau

SEQ ID NO: 24558 - RNA, 20 nt, Artificial Sequence
  RPE65 RNA guide
gacauuaaaagagaggucau

SEQ ID NO: 24559 - RNA, 20 nt, Artificial Sequence
  RPE65 RNA guide
gacccauuuaucuccuuccu

SEQ ID NO: 24560 - RNA, 20 nt, Artificial Sequence
  RPE65 RNA guide
gacccccuuccauaccugag

SEQ ID NO: 24561 - RNA, 20 nt, Artificial Sequence
  RPE65 RNA guide
gacccuguuuaggaacaaau

SEQ ID NO: 24562 - RNA, 20 nt, Artificial Sequence
  RPE65 RNA guide
gaccggcaggagugaacagg

SEQ ID NO: 24563 - RNA, 20 nt, Artificial Sequence
  RPE65 RNA guide
gacuacucagguauggaagg

SEQ ID NO: 24564 - RNA, 20 nt, Artificial Sequence
  RPE65 RNA guide
gacuagaccggcaggaguga

SEQ ID NO: 24565 - RNA, 20 nt, Artificial Sequence
  RPE65 RNA guide
gacuuugagcaucaacaugg

SEQ ID NO: 24566 - RNA, 20 nt, Artificial Sequence
  RPE65 RNA guide
gagaagcgaaggugagggcg

SEQ ID NO: 24567 - RNA, 20 nt, Artificial Sequence
  RPE65 RNA guide
gagaaggcacucuagggcug

SEQ ID NO: 24568 - RNA, 20 nt, Artificial Sequence
  RPE65 RNA guide
gagaauacugugggaaggac

SEQ ID NO: 24569 - RNA, 20 nt, Artificial Sequence
  RPE65 RNA guide
gagacaugaccucucuuuua

SEQ ID NO: 24570 - RNA, 20 nt, Artificial Sequence
  RPE65 RNA guide
gagacccauuuaucuccuuc

SEQ ID NO: 24571 - RNA, 20 nt, Artificial Sequence
  RPE65 RNA guide
gagacuagaccggcaggagu

SEQ ID NO: 24572 - RNA, 20 nt, Artificial Sequence
  RPE65 RNA guide
gagagaaggcacucuagggc

SEQ ID NO: 24573 - RNA, 20 nt, Artificial Sequence
  RPE65 RNA guide
gagagacccauuuaucuccu

SEQ ID NO: 24574 - RNA, 20 nt, Artificial Sequence
  RPE65 RNA guide
gagaggucaugucucuugac

SEQ ID NO: 24575 - RNA, 20 nt, Artificial Sequence
  RPE65 RNA guide
gagauaaaugggucucuccu

SEQ ID NO: 24576 - RNA, 20 nt, Artificial Sequence
  RPE65 RNA guide
gagauagaggcagagcugca

SEQ ID NO: 24577 - RNA, 20 nt, Artificial Sequence
  RPE65 RNA guide
gagcacgugaggcugggggu

SEQ ID NO: 24578 - RNA, 20 nt, Artificial Sequence
  RPE65 RNA guide
gagcagugaucugggacccc

SEQ ID NO: 24579 - RNA, 20 nt, Artificial Sequence
  RPE65 RNA guide
gagcaucaacaugggcuucu

SEQ ID NO: 24580 - RNA, 20 nt, Artificial Sequence
  RPE65 RNA guide
gagcauguugauaggguggg

SEQ ID NO: 24581 - RNA, 20 nt, Artificial Sequence
  RPE65 RNA guide
gagccagcccuagagugccu

SEQ ID NO: 24582 - RNA, 20 nt, Artificial Sequence
  RPE65 RNA guide
gagcugagcauguugauagg

SEQ ID NO: 24583 - RNA, 20 nt, Artificial Sequence
  RPE65 RNA guide
gagcugcaggagagaaggca

SEQ ID NO: 24584 - RNA, 20 nt, Artificial Sequence
  RPE65 RNA guide
gaggacaggauuaaguucac

SEQ ID NO: 24585 - RNA, 20 nt, Artificial Sequence
  RPE65 RNA guide
gaggagcacgugaggcuggg

SEQ ID NO: 24586 - RNA, 20 nt, Artificial Sequence
  RPE65 RNA guide
gaggcaagaaaaucaaugau

SEQ ID NO: 24587 - RNA, 20 nt, Artificial Sequence
  RPE65 RNA guide
gaggcagagcugcaggagag

SEQ ID NO: 24588 - RNA, 20 nt, Artificial Sequence
  RPE65 RNA guide
gaggcuggggguggggaaga

SEQ ID NO: 24589 - RNA, 20 nt, Artificial Sequence
  RPE65 RNA guide
gagggcgggaggagcacgug

SEQ ID NO: 24590 - RNA, 20 nt, Artificial Sequence
  RPE65 RNA guide
gaggucaugucucuugacau

SEQ ID NO: 24591 - RNA, 20 nt, Artificial Sequence
  RPE65 RNA guide
gaguagucuuccccaccccc

SEQ ID NO: 24592 - RNA, 20 nt, Artificial Sequence
  RPE65 RNA guide
gagugaacaggcuuugagcc

SEQ ID NO: 24593 - RNA, 20 nt, Artificial Sequence
  RPE65 RNA guide
gagugccuucucuccugcag

SEQ ID NO: 24594 - RNA, 20 nt, Artificial Sequence
  RPE65 RNA guide
gauaaaugggucucuccuug

SEQ ID NO: 24595 - RNA, 20 nt, Artificial Sequence
  RPE65 RNA guide
gauagaggcagagcugcagg

SEQ ID NO: 24596 - RNA, 20 nt, Artificial Sequence
  RPE65 RNA guide
gauagggugggagaauacug

SEQ ID NO: 24597 - RNA, 20 nt, Artificial Sequence
  RPE65 RNA guide
gaucacugcucugaugucaa

SEQ ID NO: 24598 - RNA, 20 nt, Artificial Sequence
  RPE65 RNA guide
gaucugggacccccuuccau

SEQ ID NO: 24599 - RNA, 20 nt, Artificial Sequence
  RPE65 RNA guide
gaugcucaaaguccgcagag

SEQ ID NO: 24600 - RNA, 20 nt, Artificial Sequence
  RPE65 RNA guide
gaugcugugagcugagcaug

SEQ ID NO: 24601 - RNA, 20 nt, Artificial Sequence
  RPE65 RNA guide
gauggcaguaggauugauug

SEQ ID NO: 24602 - RNA, 20 nt, Artificial Sequence
  RPE65 RNA guide
gaugucaagagacaugaccu

SEQ ID NO: 24603 - RNA, 20 nt, Artificial Sequence
  RPE65 RNA guide
gauugauugauuugucuucc

SEQ ID NO: 24604 - RNA, 20 nt, Artificial Sequence
  RPE65 RNA guide
gauugauuugucuuccgaag

SEQ ID NO: 24605 - RNA, 20 nt, Artificial Sequence
  RPE65 RNA guide
gauuugucuuccgaaguaag

SEQ ID NO: 24606 - RNA, 20 nt, Artificial Sequence
  RPE65 RNA guide
gauuuucuugccucaaggag

SEQ ID NO: 24607 - RNA, 20 nt, Artificial Sequence
  RPE65 RNA guide
gcaagaaaaucaaugaugcu

SEQ ID NO: 24608 - RNA, 20 nt, Artificial Sequence
  RPE65 RNA guide
gcacgugaggcugggggugg

SEQ ID NO: 24609 - RNA, 20 nt, Artificial Sequence
  RPE65 RNA guide
gcacucuagggcuggcucaa

SEQ ID NO: 24610 - RNA, 20 nt, Artificial Sequence
  RPE65 RNA guide
gcagagauagaggcagagcu

SEQ ID NO: 24611 - RNA, 20 nt, Artificial Sequence
  RPE65 RNA guide
gcagagcugcaggagagaag

SEQ ID NO: 24612 - RNA, 20 nt, Artificial Sequence
  RPE65 RNA guide
gcagaggacaggauuaaguu

SEQ ID NO: 24613 - RNA, 20 nt, Artificial Sequence
  RPE65 RNA guide
gcagcucugccucuaucucu

SEQ ID NO: 24614 - RNA, 20 nt, Artificial Sequence
  RPE65 RNA guide
gcaggagagaaggcacucua

SEQ ID NO: 24615 - RNA, 20 nt, Artificial Sequence
  RPE65 RNA guide
gcaggagugaacaggcuuug

SEQ ID NO: 24616 - RNA, 20 nt, Artificial Sequence
  RPE65 RNA guide
gcaguaggauugauugauuu

SEQ ID NO: 24617 - RNA, 20 nt, Artificial Sequence
  RPE65 RNA guide
gcagugaucugggacccccu

SEQ ID NO: 24618 - RNA, 20 nt, Artificial Sequence
  RPE65 RNA guide
gcaguuuuuccuuacuucgg

SEQ ID NO: 24619 - RNA, 20 nt, Artificial Sequence
  RPE65 RNA guide
gcaucaacaugggcuucuuc

SEQ ID NO: 24620 - RNA, 20 nt, Artificial Sequence
  RPE65 RNA guide
gcaucauugauuuucuugcc

SEQ ID NO: 24621 - RNA, 20 nt, Artificial Sequence
  RPE65 RNA guide
gcauguugauagggugggag

SEQ ID NO: 24622 - RNA, 20 nt, Artificial Sequence
  RPE65 RNA guide
gccagcccuagagugccuuc

SEQ ID NO: 24623 - RNA, 20 nt, Artificial Sequence
  RPE65 RNA guide
gccaucaguucacuuccuga

SEQ ID NO: 24624 - RNA, 20 nt, Artificial Sequence
  RPE65 RNA guide
gcccauguugaugcucaaag

SEQ ID NO: 24625 - RNA, 20 nt, Artificial Sequence
  RPE65 RNA guide
gcccuagagugccuucucuc

SEQ ID NO: 24626 - RNA, 20 nt, Artificial Sequence
  RPE65 RNA guide
gcccucaccuucgcuucucc

SEQ ID NO: 24627 - RNA, 20 nt, Artificial Sequence
  RPE65 RNA guide
gccggucuagucucagcugg

SEQ ID NO: 24628 - RNA, 20 nt, Artificial Sequence
  RPE65 RNA guide
gccucaaggagagacccauu

SEQ ID NO: 24629 - RNA, 20 nt, Artificial Sequence
  RPE65 RNA guide
gccucacgugcuccucccgc

SEQ ID NO: 24630 - RNA, 20 nt, Artificial Sequence
  RPE65 RNA guide
gccucuaucucugcggacuu

SEQ ID NO: 24631 - RNA, 20 nt, Artificial Sequence
  RPE65 RNA guide
gccuguucacuccugccggu

SEQ ID NO: 24632 - RNA, 20 nt, Artificial Sequence
  RPE65 RNA guide
gccuucucuccugcagcucu

SEQ ID NO: 24633 - RNA, 20 nt, Artificial Sequence
  RPE65 RNA guide
gcgaaggugagggcgggagg

SEQ ID NO: 24634 - RNA, 20 nt, Artificial Sequence
  RPE65 RNA guide
gcggacuuugagcaucaaca

SEQ ID NO: 24635 - RNA, 20 nt, Artificial Sequence
  RPE65 RNA guide
gcgggaggagcacgugaggc

SEQ ID NO: 24636 - RNA, 20 nt, Artificial Sequence
  RPE65 RNA guide
gcucaaagccuguucacucc

SEQ ID NO: 24637 - RNA, 20 nt, Artificial Sequence
  RPE65 RNA guide
gcucaaaguccgcagagaua

SEQ ID NO: 24638 - RNA, 20 nt, Artificial Sequence
  RPE65 RNA guide
gcucacagcaucauugauuu

SEQ ID NO: 24639 - RNA, 20 nt, Artificial Sequence
  RPE65 RNA guide
gcucagcucacagcaucauu

SEQ ID NO: 24640 - RNA, 20 nt, Artificial Sequence
  RPE65 RNA guide
gcuccucccgcccucaccuu

SEQ ID NO: 24641 - RNA, 20 nt, Artificial Sequence
  RPE65 RNA guide
gcucugaugucaagagacau

SEQ ID NO: 24642 - RNA, 20 nt, Artificial Sequence
  RPE65 RNA guide
gcucugccucuaucucugcg

SEQ ID NO: 24643 - RNA, 20 nt, Artificial Sequence
  RPE65 RNA guide
gcugagacuagaccggcagg

SEQ ID NO: 24644 - RNA, 20 nt, Artificial Sequence
  RPE65 RNA guide
gcugagcauguugauagggu

SEQ ID NO: 24645 - RNA, 20 nt, Artificial Sequence
  RPE65 RNA guide
gcugcaggagagaaggcacu

SEQ ID NO: 24646 - RNA, 20 nt, Artificial Sequence
  RPE65 RNA guide
gcuggcucaaagccuguuca

SEQ ID NO: 24647 - RNA, 20 nt, Artificial Sequence
  RPE65 RNA guide
gcuggggguggggaagacua

SEQ ID NO: 24648 - RNA, 20 nt, Artificial Sequence
  RPE65 RNA guide
gcugugagcugagcauguug

SEQ ID NO: 24649 - RNA, 20 nt, Artificial Sequence
  RPE65 RNA guide
gcuucuccccccacccccac

SEQ ID NO: 24650 - RNA, 20 nt, Artificial Sequence
  RPE65 RNA guide
gcuucuuccuuauucuucca

SEQ ID NO: 24651 - RNA, 20 nt, Artificial Sequence
  RPE65 RNA guide
gcuuugagccagcccuagag

SEQ ID NO: 24652 - RNA, 20 nt, Artificial Sequence
  RPE65 RNA guide
ggaaaaacugcagaggacag

SEQ ID NO: 24653 - RNA, 20 nt, Artificial Sequence
  RPE65 RNA guide
ggaacaaauuucaggaagug

SEQ ID NO: 24654 - RNA, 20 nt, Artificial Sequence
  RPE65 RNA guide
ggaagaagcccauguugaug

SEQ ID NO: 24655 - RNA, 20 nt, Artificial Sequence
  RPE65 RNA guide
ggaagaauaaggaagaagcc

SEQ ID NO: 24656 - RNA, 20 nt, Artificial Sequence
  RPE65 RNA guide
ggaagacaaaucaaucaauc

SEQ ID NO: 24657 - RNA, 20 nt, Artificial Sequence
  RPE65 RNA guide
ggaagacuacucagguaugg

SEQ ID NO: 24658 - RNA, 20 nt, Artificial Sequence
  RPE65 RNA guide
ggaaggacccuguuuaggaa

SEQ ID NO: 24659 - RNA, 20 nt, Artificial Sequence
  RPE65 RNA guide
ggaaggagauaaaugggucu

SEQ ID NO: 24660 - RNA, 20 nt, Artificial Sequence
  RPE65 RNA guide
ggaagggggucccagaucac

SEQ ID NO: 24661 - RNA, 20 nt, Artificial Sequence
  RPE65 RNA guide
ggaagugaacugauggcagu

SEQ ID NO: 24662 - RNA, 20 nt, Artificial Sequence
  RPE65 RNA guide
ggacaggauuaaguucacug

SEQ ID NO: 24663 - RNA, 20 nt, Artificial Sequence
  RPE65 RNA guide
ggacccccuuccauaccuga

SEQ ID NO: 24664 - RNA, 20 nt, Artificial Sequence
  RPE65 RNA guide
ggacccuguuuaggaacaaa

SEQ ID NO: 24665 - RNA, 20 nt, Artificial Sequence
  RPE65 RNA guide
ggacuuugagcaucaacaug

SEQ ID NO: 24666 - RNA, 20 nt, Artificial Sequence
  RPE65 RNA guide
ggagaagcgaaggugagggc

SEQ ID NO: 24667 - RNA, 20 nt, Artificial Sequence
  RPE65 RNA guide
ggagaauacugugggaagga

SEQ ID NO: 24668 - RNA, 20 nt, Artificial Sequence
  RPE65 RNA guide
ggagagaaggcacucuaggg

SEQ ID NO: 24669 - RNA, 20 nt, Artificial Sequence
  RPE65 RNA guide
ggagagacccauuuaucucc

SEQ ID NO: 24670 - RNA, 20 nt, Artificial Sequence
  RPE65 RNA guide
ggagauaaaugggucucucc

SEQ ID NO: 24671 - RNA, 20 nt, Artificial Sequence
  RPE65 RNA guide
ggagcacgugaggcuggggg

SEQ ID NO: 24672 - RNA, 20 nt, Artificial Sequence
  RPE65 RNA guide
ggaggagcacgugaggcugg

SEQ ID NO: 24673 - RNA, 20 nt, Artificial Sequence
  RPE65 RNA guide
ggagugaacaggcuuugagc

SEQ ID NO: 24674 - RNA, 20 nt, Artificial Sequence
  RPE65 RNA guide
ggauugauugauuugucuuc

SEQ ID NO: 24675 - RNA, 20 nt, Artificial Sequence
  RPE65 RNA guide
ggcaagaaaaucaaugaugc

SEQ ID NO: 24676 - RNA, 20 nt, Artificial Sequence
  RPE65 RNA guide
ggcacucuagggcuggcuca

SEQ ID NO: 24677 - RNA, 20 nt, Artificial Sequence
  RPE65 RNA guide
ggcagagcugcaggagagaa

SEQ ID NO: 24678 - RNA, 20 nt, Artificial Sequence
  RPE65 RNA guide
ggcaggagugaacaggcuuu

SEQ ID NO: 24679 - RNA, 20 nt, Artificial Sequence
  RPE65 RNA guide
ggcaguaggauugauugauu

SEQ ID NO: 24680 - RNA, 20 nt, Artificial Sequence
  RPE65 RNA guide
ggcgggaggagcacgugagg

SEQ ID NO: 24681 - RNA, 20 nt, Artificial Sequence
  RPE65 RNA guide
ggcucaaagccuguucacuc

SEQ ID NO: 24682 - RNA, 20 nt, Artificial Sequence
  RPE65 RNA guide
ggcuggcucaaagccuguuc

SEQ ID NO: 24683 - RNA, 20 nt, Artificial Sequence
  RPE65 RNA guide
ggcuggggguggggaagacu

SEQ ID NO: 24684 - RNA, 20 nt, Artificial Sequence
  RPE65 RNA guide
ggcuucuuccuuauucuucc

SEQ ID NO: 24685 - RNA, 20 nt, Artificial Sequence
  RPE65 RNA guide
ggcuuugagccagcccuaga

SEQ ID NO: 24686 - RNA, 20 nt, Artificial Sequence
  RPE65 RNA guide
gggaagacuacucagguaug

SEQ ID NO: 24687 - RNA, 20 nt, Artificial Sequence
  RPE65 RNA guide
gggaaggacccuguuuagga

SEQ ID NO: 24688 - RNA, 20 nt, Artificial Sequence
  RPE65 RNA guide
gggacccccuuccauaccug

SEQ ID NO: 24689 - RNA, 20 nt, Artificial Sequence
  RPE65 RNA guide
gggagaagcgaaggugaggg

SEQ ID NO: 24690 - RNA, 20 nt, Artificial Sequence
  RPE65 RNA guide
gggagaauacugugggaagg

SEQ ID NO: 24691 - RNA, 20 nt, Artificial Sequence
  RPE65 RNA guide
gggaggagcacgugaggcug

SEQ ID NO: 24692 - RNA, 20 nt, Artificial Sequence
  RPE65 RNA guide
gggcgggaggagcacgugag

SEQ ID NO: 24693 - RNA, 20 nt, Artificial Sequence
  RPE65 RNA guide
gggcuggcucaaagccuguu

SEQ ID NO: 24694 - RNA, 20 nt, Artificial Sequence
  RPE65 RNA guide
gggcuucuuccuuauucuuc

SEQ ID NO: 24695 - RNA, 20 nt, Artificial Sequence
  RPE65 RNA guide
ggggaagacuacucagguau

SEQ ID NO: 24696 - RNA, 20 nt, Artificial Sequence
  RPE65 RNA guide
ggggagaagcgaaggugagg

SEQ ID NO: 24697 - RNA, 20 nt, Artificial Sequence
  RPE65 RNA guide
gggggagaagcgaaggugag

SEQ ID NO: 24698 - RNA, 20 nt, Artificial Sequence
  RPE65 RNA guide
ggggggagaagcgaagguga

SEQ ID NO: 24699 - RNA, 20 nt, Artificial Sequence
  RPE65 RNA guide
gggggucccagaucacugcu

SEQ ID NO: 24700 - RNA, 20 nt, Artificial Sequence
  RPE65 RNA guide
ggggguggggaagacuacuc

SEQ ID NO: 24701 - RNA, 20 nt, Artificial Sequence
  RPE65 RNA guide
ggggguggggggagaagcga

SEQ ID NO: 24702 - RNA, 20 nt, Artificial Sequence
  RPE65 RNA guide
ggggguggggguggggggag

SEQ ID NO: 24703 - RNA, 20 nt, Artificial Sequence
  RPE65 RNA guide
ggggucccagaucacugcuc

SEQ ID NO: 24704 - RNA, 20 nt, Artificial Sequence
  RPE65 RNA guide
gggguggggaagacuacuca

SEQ ID NO: 24705 - RNA, 20 nt, Artificial Sequence
  RPE65 RNA guide
gggguggggggagaagcgaa

SEQ ID NO: 24706 - RNA, 20 nt, Artificial Sequence
  RPE65 RNA guide
gggguggggguggggggaga

SEQ ID NO: 24707 - RNA, 20 nt, Artificial Sequence
  RPE65 RNA guide
gggucccagaucacugcucu

SEQ ID NO: 24708 - RNA, 20 nt, Artificial Sequence
  RPE65 RNA guide
ggguccuucccacaguauuc

SEQ ID NO: 24709 - RNA, 20 nt, Artificial Sequence
  RPE65 RNA guide
gggucucuccuugaggcaag

SEQ ID NO: 24710 - RNA, 20 nt, Artificial Sequence
  RPE65 RNA guide
gggugggagaauacuguggg

SEQ ID NO: 24711 - RNA, 20 nt, Artificial Sequence
  RPE65 RNA guide
ggguggggaagacuacucag

SEQ ID NO: 24712 - RNA, 20 nt, Artificial Sequence
  RPE65 RNA guide
ggguggggggagaagcgaag

SEQ ID NO: 24713 - RNA, 20 nt, Artificial Sequence
  RPE65 RNA guide
ggguggggguggggggagaa

SEQ ID NO: 24714 - RNA, 20 nt, Artificial Sequence
  RPE65 RNA guide
gguauggaagggggucccag

SEQ ID NO: 24715 - RNA, 20 nt, Artificial Sequence
  RPE65 RNA guide
ggucaugucucuugacauca

SEQ ID NO: 24716 - RNA, 20 nt, Artificial Sequence
  RPE65 RNA guide
ggucccagaucacugcucug

SEQ ID NO: 24717 - RNA, 20 nt, Artificial Sequence
  RPE65 RNA guide
gguccuucccacaguauucu

SEQ ID NO: 24718 - RNA, 20 nt, Artificial Sequence
  RPE65 RNA guide
ggucuagucucagcugggug

SEQ ID NO: 24719 - RNA, 20 nt, Artificial Sequence
  RPE65 RNA guide
ggucucuccuugaggcaaga

SEQ ID NO: 24720 - RNA, 20 nt, Artificial Sequence
  RPE65 RNA guide
ggugagggcgggaggagcac

SEQ ID NO: 24721 - RNA, 20 nt, Artificial Sequence
  RPE65 RNA guide
gguggaagaauaaggaagaa

SEQ ID NO: 24722 - RNA, 20 nt, Artificial Sequence
  RPE65 RNA guide
ggugggagaauacuguggga

SEQ ID NO: 24723 - RNA, 20 nt, Artificial Sequence
  RPE65 RNA guide
gguggggaagacuacucagg

SEQ ID NO: 24724 - RNA, 20 nt, Artificial Sequence
  RPE65 RNA guide
gguggggggagaagcgaagg

SEQ ID NO: 24725 - RNA, 20 nt, Artificial Sequence
  RPE65 RNA guide
gguggggguggggggagaag

SEQ ID NO: 24726 - RNA, 20 nt, Artificial Sequence
  RPE65 RNA guide
gguggggguggggguggggg

SEQ ID NO: 24727 - RNA, 20 nt, Artificial Sequence
  RPE65 RNA guide
gguuacagugaacuuaaucc

SEQ ID NO: 24728 - RNA, 20 nt, Artificial Sequence
  RPE65 RNA guide
guaaggaaaaacugcagagg

SEQ ID NO: 24729 - RNA, 20 nt, Artificial Sequence
  RPE65 RNA guide
guaggauugauugauuuguc

SEQ ID NO: 24730 - RNA, 20 nt, Artificial Sequence
  RPE65 RNA guide
guagucuuccccacccccag

SEQ ID NO: 24731 - RNA, 20 nt, Artificial Sequence
  RPE65 RNA guide
guauggaagggggucccaga

SEQ ID NO: 24732 - RNA, 20 nt, Artificial Sequence
  RPE65 RNA guide
guauucucccacccuaucaa

SEQ ID NO: 24733 - RNA, 20 nt, Artificial Sequence
  RPE65 RNA guide
gucaagagacaugaccucuc

SEQ ID NO: 24734 - RNA, 20 nt, Artificial Sequence
  RPE65 RNA guide
gucaugucucuugacaucag

SEQ ID NO: 24735 - RNA, 20 nt, Artificial Sequence
  RPE65 RNA guide
gucccagaucacugcucuga

SEQ ID NO: 24736 - RNA, 20 nt, Artificial Sequence
  RPE65 RNA guide
guccgcagagauagaggcag

SEQ ID NO: 24737 - RNA, 20 nt, Artificial Sequence
  RPE65 RNA guide
guccucugcaguuuuuccuu

SEQ ID NO: 24738 - RNA, 20 nt, Artificial Sequence
  RPE65 RNA guide
guccuucccacaguauucuc

SEQ ID NO: 24739 - RNA, 20 nt, Artificial Sequence
  RPE65 RNA guide
gucuagucucagcugggugg

SEQ ID NO: 24740 - RNA, 20 nt, Artificial Sequence
  RPE65 RNA guide
gucucagcugggugggggug

SEQ ID NO: 24741 - RNA, 20 nt, Artificial Sequence
  RPE65 RNA guide
gucucuccuugaggcaagaa

SEQ ID NO: 24742 - RNA, 20 nt, Artificial Sequence
  RPE65 RNA guide
gucucuugacaucagagcag

SEQ ID NO: 24743 - RNA, 20 nt, Artificial Sequence
  RPE65 RNA guide
gucuuccccacccccagccu

SEQ ID NO: 24744 - RNA, 20 nt, Artificial Sequence
  RPE65 RNA guide
gucuuccgaaguaaggaaaa

SEQ ID NO: 24745 - RNA, 20 nt, Artificial Sequence
  RPE65 RNA guide
gugaacaggcuuugagccag

SEQ ID NO: 24746 - RNA, 20 nt, Artificial Sequence
  RPE65 RNA guide
gugaacugauggcaguagga

SEQ ID NO: 24747 - RNA, 20 nt, Artificial Sequence
  RPE65 RNA guide
gugaacuuaauccuguccuc

SEQ ID NO: 24748 - RNA, 20 nt, Artificial Sequence
  RPE65 RNA guide
gugagcugagcauguugaua

SEQ ID NO: 24749 - RNA, 20 nt, Artificial Sequence
  RPE65 RNA guide
gugaggcuggggguggggaa

SEQ ID NO: 24750 - RNA, 20 nt, Artificial Sequence
  RPE65 RNA guide
gugagggcgggaggagcacg

SEQ ID NO: 24751 - RNA, 20 nt, Artificial Sequence
  RPE65 RNA guide
gugaucugggacccccuucc

SEQ ID NO: 24752 - RNA, 20 nt, Artificial Sequence
  RPE65 RNA guide
gugccuucucuccugcagcu

SEQ ID NO: 24753 - RNA, 20 nt, Artificial Sequence
  RPE65 RNA guide
gugcuccucccgcccucacc

SEQ ID NO: 24754 - RNA, 20 nt, Artificial Sequence
  RPE65 RNA guide
guggaagaauaaggaagaag

SEQ ID NO: 24755 - RNA, 20 nt, Artificial Sequence
  RPE65 RNA guide
gugggaaggacccuguuuag

SEQ ID NO: 24756 - RNA, 20 nt, Artificial Sequence
  RPE65 RNA guide
gugggagaauacugugggaa

SEQ ID NO: 24757 - RNA, 20 nt, Artificial Sequence
  RPE65 RNA guide
guggggaagacuacucaggu

SEQ ID NO: 24758 - RNA, 20 nt, Artificial Sequence
  RPE65 RNA guide
guggggggagaagcgaaggu

SEQ ID NO: 24759 - RNA, 20 nt, Artificial Sequence
  RPE65 RNA guide
guggggguggggggagaagc

SEQ ID NO: 24760 - RNA, 20 nt, Artificial Sequence
  RPE65 RNA guide
gugggggugggggugggggg

SEQ ID NO: 24761 - RNA, 20 nt, Artificial Sequence
  RPE65 RNA guide
guuacagugaacuuaauccu

SEQ ID NO: 24762 - RNA, 20 nt, Artificial Sequence
  RPE65 RNA guide
guucacuccugccggucuag

SEQ ID NO: 24763 - RNA, 20 nt, Artificial Sequence
  RPE65 RNA guide
guucacuuccugaaauuugu

SEQ ID NO: 24764 - RNA, 20 nt, Artificial Sequence
  RPE65 RNA guide
guuccuaaacaggguccuuc

SEQ ID NO: 24765 - RNA, 20 nt, Artificial Sequence
  RPE65 RNA guide
guugauagggugggagaaua

SEQ ID NO: 24766 - RNA, 20 nt, Artificial Sequence
  RPE65 RNA guide
guugaugcucaaaguccgca

SEQ ID NO: 24767 - RNA, 20 nt, Artificial Sequence
  RPE65 RNA guide
guuuaggaacaaauuucagg

SEQ ID NO: 24768 - RNA, 20 nt, Artificial Sequence
  RPE65 RNA guide
guuuuuccuuacuucggaag

SEQ ID NO: 24769 - RNA, 20 nt, Artificial Sequence
  RPE65 RNA guide
uaaaagagaggucaugucuc

SEQ ID NO: 24770 - RNA, 20 nt, Artificial Sequence
  RPE65 RNA guide
uaaacaggguccuucccaca

SEQ ID NO: 24771 - RNA, 20 nt, Artificial Sequence
  RPE65 RNA guide
uaaaugggucucuccuugag

SEQ ID NO: 24772 - RNA, 20 nt, Artificial Sequence
  RPE65 RNA guide
uaaccauugacauuaaaaga

SEQ ID NO: 24773 - RNA, 20 nt, Artificial Sequence
  RPE65 RNA guide
uaaggaaaaacugcagagga

SEQ ID NO: 24774 - RNA, 20 nt, Artificial Sequence
  RPE65 RNA guide
uaaggaagaagcccauguug

SEQ ID NO: 24775 - RNA, 20 nt, Artificial Sequence
  RPE65 RNA guide
uaauccuguccucugcaguu

SEQ ID NO: 24776 - RNA, 20 nt, Artificial Sequence
  RPE65 RNA guide
uacagugaacuuaauccugu

SEQ ID NO: 24777 - RNA, 20 nt, Artificial Sequence
  RPE65 RNA guide
uaccugaguagucuucccca

SEQ ID NO: 24778 - RNA, 20 nt, Artificial Sequence
  RPE65 RNA guide
uacucagguauggaaggggg

SEQ ID NO: 24779 - RNA, 20 nt, Artificial Sequence
  RPE65 RNA guide
uacugccaucaguucacuuc

SEQ ID NO: 24780 - RNA, 20 nt, Artificial Sequence
  RPE65 RNA guide
uacugugggaaggacccugu

SEQ ID NO: 24781 - RNA, 20 nt, Artificial Sequence
  RPE65 RNA guide
uacuucggaagacaaaucaa

SEQ ID NO: 24782 - RNA, 20 nt, Artificial Sequence
  RPE65 RNA guide
uagaccggcaggagugaaca

SEQ ID NO: 24783 - RNA, 20 nt, Artificial Sequence
  RPE65 RNA guide
uagaggcagagcugcaggag

SEQ ID NO: 24784 - RNA, 20 nt, Artificial Sequence
  RPE65 RNA guide
uagagugccuucucuccugc

SEQ ID NO: 24785 - RNA, 20 nt, Artificial Sequence
  RPE65 RNA guide
uaggaacaaauuucaggaag

SEQ ID NO: 24786 - RNA, 20 nt, Artificial Sequence
  RPE65 RNA guide
uaggaaggagauaaaugggu

SEQ ID NO: 24787 - RNA, 20 nt, Artificial Sequence
  RPE65 RNA guide
uaggauugauugauuugucu

SEQ ID NO: 24788 - RNA, 20 nt, Artificial Sequence
  RPE65 RNA guide
uagggcuggcucaaagccug

SEQ ID NO: 24789 - RNA, 20 nt, Artificial Sequence
  RPE65 RNA guide
uagggugggagaauacugug

SEQ ID NO: 24790 - RNA, 20 nt, Artificial Sequence
  RPE65 RNA guide
uagucucagcuggguggggg

SEQ ID NO: 24791 - RNA, 20 nt, Artificial Sequence
  RPE65 RNA guide
uagucuuccccacccccagc

SEQ ID NO: 24792 - RNA, 20 nt, Artificial Sequence
  RPE65 RNA guide
uaucaacaugcucagcucac

SEQ ID NO: 24793 - RNA, 20 nt, Artificial Sequence
  RPE65 RNA guide
uaucuccuuccuagggguug

SEQ ID NO: 24794 - RNA, 20 nt, Artificial Sequence
  RPE65 RNA guide
uaucucugcggacuuugagc

SEQ ID NO: 24795 - RNA, 20 nt, Artificial Sequence
  RPE65 RNA guide
uauggaagggggucccagau

SEQ ID NO: 24796 - RNA, 20 nt, Artificial Sequence
  RPE65 RNA guide
uauucucccacccuaucaac

SEQ ID NO: 24797 - RNA, 20 nt, Artificial Sequence
  RPE65 RNA guide
ucaaagccuguucacuccug

SEQ ID NO: 24798 - RNA, 20 nt, Artificial Sequence
  RPE65 RNA guide
ucaaaguccgcagagauaga

SEQ ID NO: 24799 - RNA, 20 nt, Artificial Sequence
  RPE65 RNA guide
ucaacaugcucagcucacag

SEQ ID NO: 24800 - RNA, 20 nt, Artificial Sequence
  RPE65 RNA guide
ucaacaugggcuucuuccuu

SEQ ID NO: 24801 - RNA, 20 nt, Artificial Sequence
  RPE65 RNA guide
ucaaccccuaggaaggagau

SEQ ID NO: 24802 - RNA, 20 nt, Artificial Sequence
  RPE65 RNA guide
ucaagagacaugaccucucu

SEQ ID NO: 24803 - RNA, 20 nt, Artificial Sequence
  RPE65 RNA guide
ucaaggagagacccauuuau

SEQ ID NO: 24804 - RNA, 20 nt, Artificial Sequence
  RPE65 RNA guide
ucaaucaauccuacugccau

SEQ ID NO: 24805 - RNA, 20 nt, Artificial Sequence
  RPE65 RNA guide
ucaauccuacugccaucagu

SEQ ID NO: 24806 - RNA, 20 nt, Artificial Sequence
  RPE65 RNA guide
ucaaugaugcugugagcuga

SEQ ID NO: 24807 - RNA, 20 nt, Artificial Sequence
  RPE65 RNA guide
ucacagcaucauugauuuuc

SEQ ID NO: 24808 - RNA, 20 nt, Artificial Sequence
  RPE65 RNA guide
ucaccuucgcuucucccccc

SEQ ID NO: 24809 - RNA, 20 nt, Artificial Sequence
  RPE65 RNA guide
ucacgugcuccucccgcccu

SEQ ID NO: 24810 - RNA, 20 nt, Artificial Sequence
  RPE65 RNA guide
ucacuccugccggucuaguc

SEQ ID NO: 24811 - RNA, 20 nt, Artificial Sequence
  RPE65 RNA guide
ucacugcucugaugucaaga

SEQ ID NO: 24812 - RNA, 20 nt, Artificial Sequence
  RPE65 RNA guide
ucacuuccugaaauuuguuc

SEQ ID NO: 24813 - RNA, 20 nt, Artificial Sequence
  RPE65 RNA guide
ucagagcagugaucugggac

SEQ ID NO: 24814 - RNA, 20 nt, Artificial Sequence
  RPE65 RNA guide
ucagcucacagcaucauuga

SEQ ID NO: 24815 - RNA, 20 nt, Artificial Sequence
  RPE65 RNA guide
ucagcugggugggggugggg

SEQ ID NO: 24816 - RNA, 20 nt, Artificial Sequence
  RPE65 RNA guide
ucaggaagugaacugauggc

SEQ ID NO: 24817 - RNA, 20 nt, Artificial Sequence
  RPE65 RNA guide
ucagguauggaagggggucc

SEQ ID NO: 24818 - RNA, 20 nt, Artificial Sequence
  RPE65 RNA guide
ucaguucacuuccugaaauu

SEQ ID NO: 24819 - RNA, 20 nt, Artificial Sequence
  RPE65 RNA guide
ucaugucucuugacaucaga

SEQ ID NO: 24820 - RNA, 20 nt, Artificial Sequence
  RPE65 RNA guide
ucauugauuuucuugccuca

SEQ ID NO: 24821 - RNA, 20 nt, Artificial Sequence
  RPE65 RNA guide
uccauaccugaguagucuuc

SEQ ID NO: 24822 - RNA, 20 nt, Artificial Sequence
  RPE65 RNA guide
ucccacaguauucucccacc

SEQ ID NO: 24823 - RNA, 20 nt, Artificial Sequence
  RPE65 RNA guide
ucccacccuaucaacaugcu

SEQ ID NO: 24824 - RNA, 20 nt, Artificial Sequence
  RPE65 RNA guide
ucccagaucacugcucugau

SEQ ID NO: 24825 - RNA, 20 nt, Artificial Sequence
  RPE65 RNA guide
uccccacccccagccucacg

SEQ ID NO: 24826 - RNA, 20 nt, Artificial Sequence
  RPE65 RNA guide
uccccccacccccaccccca

SEQ ID NO: 24827 - RNA, 20 nt, Artificial Sequence
  RPE65 RNA guide
ucccgcccucaccuucgcuu

SEQ ID NO: 24828 - RNA, 20 nt, Artificial Sequence
  RPE65 RNA guide
uccgaaguaaggaaaaacug

SEQ ID NO: 24829 - RNA, 20 nt, Artificial Sequence
  RPE65 RNA guide
uccgcagagauagaggcaga

SEQ ID NO: 24830 - RNA, 20 nt, Artificial Sequence
  RPE65 RNA guide
uccuaaacaggguccuuccc

SEQ ID NO: 24831 - RNA, 20 nt, Artificial Sequence
  RPE65 RNA guide
uccuacugccaucaguucac

SEQ ID NO: 24832 - RNA, 20 nt, Artificial Sequence
  RPE65 RNA guide
uccucccgcccucaccuucg

SEQ ID NO: 24833 - RNA, 20 nt, Artificial Sequence
  RPE65 RNA guide
uccucugcaguuuuuccuua

SEQ ID NO: 24834 - RNA, 20 nt, Artificial Sequence
  RPE65 RNA guide
uccugaaauuuguuccuaaa

SEQ ID NO: 24835 - RNA, 20 nt, Artificial Sequence
  RPE65 RNA guide
uccugcagcucugccucuau

SEQ ID NO: 24836 - RNA, 20 nt, Artificial Sequence
  RPE65 RNA guide
uccugccggucuagucucag

SEQ ID NO: 24837 - RNA, 20 nt, Artificial Sequence
  RPE65 RNA guide
uccuguccucugcaguuuuu

SEQ ID NO: 24838 - RNA, 20 nt, Artificial Sequence
  RPE65 RNA guide
uccuuacuucggaagacaaa

SEQ ID NO: 24839 - RNA, 20 nt, Artificial Sequence
  RPE65 RNA guide
uccuucccacaguauucucc

SEQ ID NO: 24840 - RNA, 20 nt, Artificial Sequence
  RPE65 RNA guide
uccuugaggcaagaaaauca

SEQ ID NO: 24841 - RNA, 20 nt, Artificial Sequence
  RPE65 RNA guide
ucgcuucuccccccaccccc

SEQ ID NO: 24842 - RNA, 20 nt, Artificial Sequence
  RPE65 RNA guide
ucggaagacaaaucaaucaa

SEQ ID NO: 24843 - RNA, 20 nt, Artificial Sequence
  RPE65 RNA guide
ucuagggcuggcucaaagcc

SEQ ID NO: 24844 - RNA, 20 nt, Artificial Sequence
  RPE65 RNA guide
ucuagucucagcuggguggg

SEQ ID NO: 24845 - RNA, 20 nt, Artificial Sequence
  RPE65 RNA guide
ucuaucucugcggacuuuga

SEQ ID NO: 24846 - RNA, 20 nt, Artificial Sequence
  RPE65 RNA guide
ucucaaccccuaggaaggag

SEQ ID NO: 24847 - RNA, 20 nt, Artificial Sequence
  RPE65 RNA guide
ucucagcugggugggggugg

SEQ ID NO: 24848 - RNA, 20 nt, Artificial Sequence
  RPE65 RNA guide
ucucccacccuaucaacaug

SEQ ID NO: 24849 - RNA, 20 nt, Artificial Sequence
  RPE65 RNA guide
ucuccccccacccccacccc

SEQ ID NO: 24850 - RNA, 20 nt, Artificial Sequence
  RPE65 RNA guide
ucuccugcagcucugccucu

SEQ ID NO: 24851 - RNA, 20 nt, Artificial Sequence
  RPE65 RNA guide
ucuccuugaggcaagaaaau

SEQ ID NO: 24852 - RNA, 20 nt, Artificial Sequence
  RPE65 RNA guide
ucucucaaccccuaggaagg

SEQ ID NO: 24853 - RNA, 20 nt, Artificial Sequence
  RPE65 RNA guide
ucucuccugcagcucugccu

SEQ ID NO: 24854 - RNA, 20 nt, Artificial Sequence
  RPE65 RNA guide
ucucuccuugaggcaagaaa

SEQ ID NO: 24855 - RNA, 20 nt, Artificial Sequence
  RPE65 RNA guide
ucucugcggacuuugagcau

SEQ ID NO: 24856 - RNA, 20 nt, Artificial Sequence
  RPE65 RNA guide
ucucuugacaucagagcagu

SEQ ID NO: 24857 - RNA, 20 nt, Artificial Sequence
  RPE65 RNA guide
ucugaugucaagagacauga

SEQ ID NO: 24858 - RNA, 20 nt, Artificial Sequence
  RPE65 RNA guide
ucugcaguuuuuccuuacuu

SEQ ID NO: 24859 - RNA, 20 nt, Artificial Sequence
  RPE65 RNA guide
ucugccucuaucucugcgga

SEQ ID NO: 24860 - RNA, 20 nt, Artificial Sequence
  RPE65 RNA guide
ucugcggacuuugagcauca

SEQ ID NO: 24861 - RNA, 20 nt, Artificial Sequence
  RPE65 RNA guide
ucugggacccccuuccauac

SEQ ID NO: 24862 - RNA, 20 nt, Artificial Sequence
  RPE65 RNA guide
ucuuccccacccccagccuc

SEQ ID NO: 24863 - RNA, 20 nt, Artificial Sequence
  RPE65 RNA guide
ucuuccgaaguaaggaaaaa

SEQ ID NO: 24864 - RNA, 20 nt, Artificial Sequence
  RPE65 RNA guide
ucuuccuuauucuuccacca

SEQ ID NO: 24865 - RNA, 20 nt, Artificial Sequence
  RPE65 RNA guide
ucuugacaucagagcaguga

SEQ ID NO: 24866 - RNA, 20 nt, Artificial Sequence
  RPE65 RNA guide
ucuugccucaaggagagacc

SEQ ID NO: 24867 - RNA, 20 nt, Artificial Sequence
  RPE65 RNA guide
ugaaaugguggaagaauaag

SEQ ID NO: 24868 - RNA, 20 nt, Artificial Sequence
  RPE65 RNA guide
ugaaauuuguuccuaaacag

SEQ ID NO: 24869 - RNA, 20 nt, Artificial Sequence
  RPE65 RNA guide
ugaacaggcuuugagccagc

SEQ ID NO: 24870 - RNA, 20 nt, Artificial Sequence
  RPE65 RNA guide
ugaacugauggcaguaggau

SEQ ID NO: 24871 - RNA, 20 nt, Artificial Sequence
  RPE65 RNA guide
ugaacuuaauccuguccucu

SEQ ID NO: 24872 - RNA, 20 nt, Artificial Sequence
  RPE65 RNA guide
ugacaucagagcagugaucu

SEQ ID NO: 24873 - RNA, 20 nt, Artificial Sequence
  RPE65 RNA guide
ugacauuaaaagagagguca

SEQ ID NO: 24874 - RNA, 20 nt, Artificial Sequence
  RPE65 RNA guide
ugagacuagaccggcaggag

SEQ ID NO: 24875 - RNA, 20 nt, Artificial Sequence
  RPE65 RNA guide
ugagcaucaacaugggcuuc

SEQ ID NO: 24876 - RNA, 20 nt, Artificial Sequence
  RPE65 RNA guide
ugagcauguugauagggugg

SEQ ID NO: 24877 - RNA, 20 nt, Artificial Sequence
  RPE65 RNA guide
ugagccagcccuagagugcc

SEQ ID NO: 24878 - RNA, 20 nt, Artificial Sequence
  RPE65 RNA guide
ugagcugagcauguugauag

SEQ ID NO: 24879 - RNA, 20 nt, Artificial Sequence
  RPE65 RNA guide
ugaggcaagaaaaucaauga

SEQ ID NO: 24880 - RNA, 20 nt, Artificial Sequence
  RPE65 RNA guide
ugaggcuggggguggggaag

SEQ ID NO: 24881 - RNA, 20 nt, Artificial Sequence
  RPE65 RNA guide
ugagggcgggaggagcacgu

SEQ ID NO: 24882 - RNA, 20 nt, Artificial Sequence
  RPE65 RNA guide
ugaguagucuuccccacccc

SEQ ID NO: 24883 - RNA, 20 nt, Artificial Sequence
  RPE65 RNA guide
ugauagggugggagaauacu

SEQ ID NO: 24884 - RNA, 20 nt, Artificial Sequence
  RPE65 RNA guide
ugaucugggacccccuucca

SEQ ID NO: 24885 - RNA, 20 nt, Artificial Sequence
  RPE65 RNA guide
ugaugcucaaaguccgcaga

SEQ ID NO: 24886 - RNA, 20 nt, Artificial Sequence
  RPE65 RNA guide
ugaugcugugagcugagcau

SEQ ID NO: 24887 - RNA, 20 nt, Artificial Sequence
  RPE65 RNA guide
ugauggcaguaggauugauu

SEQ ID NO: 24888 - RNA, 20 nt, Artificial Sequence
  RPE65 RNA guide
ugaugucaagagacaugacc

SEQ ID NO: 24889 - RNA, 20 nt, Artificial Sequence
  RPE65 RNA guide
ugauugauuugucuuccgaa

SEQ ID NO: 24890 - RNA, 20 nt, Artificial Sequence
  RPE65 RNA guide
ugauuugucuuccgaaguaa

SEQ ID NO: 24891 - RNA, 20 nt, Artificial Sequence
  RPE65 RNA guide
ugauuuucuugccucaagga

SEQ ID NO: 24892 - RNA, 20 nt, Artificial Sequence
  RPE65 RNA guide
ugcagaggacaggauuaagu

SEQ ID NO: 24893 - RNA, 20 nt, Artificial Sequence
  RPE65 RNA guide
ugcagcucugccucuaucuc

SEQ ID NO: 24894 - RNA, 20 nt, Artificial Sequence
  RPE65 RNA guide
ugcaggagagaaggcacucu

SEQ ID NO: 24895 - RNA, 20 nt, Artificial Sequence
  RPE65 RNA guide
ugcaguuuuuccuuacuucg

SEQ ID NO: 24896 - RNA, 20 nt, Artificial Sequence
  RPE65 RNA guide
ugccaucaguucacuuccug

SEQ ID NO: 24897 - RNA, 20 nt, Artificial Sequence
  RPE65 RNA guide
ugccggucuagucucagcug

SEQ ID NO: 24898 - RNA, 20 nt, Artificial Sequence
  RPE65 RNA guide
ugccucaaggagagacccau

SEQ ID NO: 24899 - RNA, 20 nt, Artificial Sequence
  RPE65 RNA guide
ugccucuaucucugcggacu

SEQ ID NO: 24900 - RNA, 20 nt, Artificial Sequence
  RPE65 RNA guide
ugccuucucuccugcagcuc

SEQ ID NO: 24901 - RNA, 20 nt, Artificial Sequence
  RPE65 RNA guide
ugcggacuuugagcaucaac

SEQ ID NO: 24902 - RNA, 20 nt, Artificial Sequence
  RPE65 RNA guide
ugcucaaaguccgcagagau

SEQ ID NO: 24903 - RNA, 20 nt, Artificial Sequence
  RPE65 RNA guide
ugcucagcucacagcaucau

SEQ ID NO: 24904 - RNA, 20 nt, Artificial Sequence
  RPE65 RNA guide
ugcuccucccgcccucaccu

SEQ ID NO: 24905 - RNA, 20 nt, Artificial Sequence
  RPE65 RNA guide
ugcucugaugucaagagaca

SEQ ID NO: 24906 - RNA, 20 nt, Artificial Sequence
  RPE65 RNA guide
ugcugugagcugagcauguu

SEQ ID NO: 24907 - RNA, 20 nt, Artificial Sequence
  RPE65 RNA guide
uggaagaauaaggaagaagc

SEQ ID NO: 24908 - RNA, 20 nt, Artificial Sequence
  RPE65 RNA guide
uggaagggggucccagauca

SEQ ID NO: 24909 - RNA, 20 nt, Artificial Sequence
  RPE65 RNA guide
uggcaguaggauugauugau

SEQ ID NO: 24910 - RNA, 20 nt, Artificial Sequence
  RPE65 RNA guide
uggcucaaagccuguucacu

SEQ ID NO: 24911 - RNA, 20 nt, Artificial Sequence
  RPE65 RNA guide
ugggaaggacccuguuuagg

SEQ ID NO: 24912 - RNA, 20 nt, Artificial Sequence
  RPE65 RNA guide
ugggacccccuuccauaccu

SEQ ID NO: 24913 - RNA, 20 nt, Artificial Sequence
  RPE65 RNA guide
ugggagaauacugugggaag

SEQ ID NO: 24914 - RNA, 20 nt, Artificial Sequence
  RPE65 RNA guide
ugggcuucuuccuuauucuu

SEQ ID NO: 24915 - RNA, 20 nt, Artificial Sequence
  RPE65 RNA guide
uggggaagacuacucaggua

SEQ ID NO: 24916 - RNA, 20 nt, Artificial Sequence
  RPE65 RNA guide
uggggggagaagcgaaggug

SEQ ID NO: 24917 - RNA, 20 nt, Artificial Sequence
  RPE65 RNA guide
uggggguggggaagacuacu

SEQ ID NO: 24918 - RNA, 20 nt, Artificial Sequence
  RPE65 RNA guide
uggggguggggggagaagcg

SEQ ID NO: 24919 - RNA, 20 nt, Artificial Sequence
  RPE65 RNA guide
ugggggugggggugggggga

SEQ ID NO: 24920 - RNA, 20 nt, Artificial Sequence
  RPE65 RNA guide
ugggucucuccuugaggcaa

SEQ ID NO: 24921 - RNA, 20 nt, Artificial Sequence
  RPE65 RNA guide
uggguggggguggggguggg

SEQ ID NO: 24922 - RNA, 20 nt, Artificial Sequence
  RPE65 RNA guide
ugguggaagaauaaggaaga

SEQ ID NO: 24923 - RNA, 20 nt, Artificial Sequence
  RPE65 RNA guide
ugguuacagugaacuuaauc

SEQ ID NO: 24924 - RNA, 20 nt, Artificial Sequence
  RPE65 RNA guide
ugucaagagacaugaccucu

SEQ ID NO: 24925 - RNA, 20 nt, Artificial Sequence
  RPE65 RNA guide
uguccucugcaguuuuuccu

SEQ ID NO: 24926 - RNA, 20 nt, Artificial Sequence
  RPE65 RNA guide
ugucucuugacaucagagca

SEQ ID NO: 24927 - RNA, 20 nt, Artificial Sequence
  RPE65 RNA guide
ugucuuccgaaguaaggaaa

SEQ ID NO: 24928 - RNA, 20 nt, Artificial Sequence
  RPE65 RNA guide
ugugagcugagcauguugau

SEQ ID NO: 24929 - RNA, 20 nt, Artificial Sequence
  RPE65 RNA guide
ugugggaaggacccuguuua

SEQ ID NO: 24930 - RNA, 20 nt, Artificial Sequence
  RPE65 RNA guide
uguucacuccugccggucua

SEQ ID NO: 24931 - RNA, 20 nt, Artificial Sequence
  RPE65 RNA guide
uguuccuaaacaggguccuu

SEQ ID NO: 24932 - RNA, 20 nt, Artificial Sequence
  RPE65 RNA guide
uguugauagggugggagaau

SEQ ID NO: 24933 - RNA, 20 nt, Artificial Sequence
  RPE65 RNA guide
uguugaugcucaaaguccgc

SEQ ID NO: 24934 - RNA, 20 nt, Artificial Sequence
  RPE65 RNA guide
uguuuaggaacaaauuucag

SEQ ID NO: 24935 - RNA, 20 nt, Artificial Sequence
  RPE65 RNA guide
uuaaaagagaggucaugucu

SEQ ID NO: 24936 - RNA, 20 nt, Artificial Sequence
  RPE65 RNA guide
uuaauccuguccucugcagu

SEQ ID NO: 24937 - RNA, 20 nt, Artificial Sequence
  RPE65 RNA guide
uuacagugaacuuaauccug

SEQ ID NO: 24938 - RNA, 20 nt, Artificial Sequence
  RPE65 RNA guide
uuacuucggaagacaaauca

SEQ ID NO: 24939 - RNA, 20 nt, Artificial Sequence
  RPE65 RNA guide
uuaggaacaaauuucaggaa

SEQ ID NO: 24940 - RNA, 20 nt, Artificial Sequence
  RPE65 RNA guide
uuaucuccuuccuagggguu

SEQ ID NO: 24941 - RNA, 20 nt, Artificial Sequence
  RPE65 RNA guide
uucacuccugccggucuagu

SEQ ID NO: 24942 - RNA, 20 nt, Artificial Sequence
  RPE65 RNA guide
uucacuuccugaaauuuguu

SEQ ID NO: 24943 - RNA, 20 nt, Artificial Sequence
  RPE65 RNA guide
uucaggaagugaacugaugg

SEQ ID NO: 24944 - RNA, 20 nt, Artificial Sequence
  RPE65 RNA guide
uuccauaccugaguagucuu

SEQ ID NO: 24945 - RNA, 20 nt, Artificial Sequence
  RPE65 RNA guide
uucccacaguauucucccac

SEQ ID NO: 24946 - RNA, 20 nt, Artificial Sequence
  RPE65 RNA guide
uuccccacccccagccucac

SEQ ID NO: 24947 - RNA, 20 nt, Artificial Sequence
  RPE65 RNA guide
uuccgaaguaaggaaaaacu

SEQ ID NO: 24948 - RNA, 20 nt, Artificial Sequence
  RPE65 RNA guide
uuccuaaacaggguccuucc

SEQ ID NO: 24949 - RNA, 20 nt, Artificial Sequence
  RPE65 RNA guide
uuccugaaauuuguuccuaa

SEQ ID NO: 24950 - RNA, 20 nt, Artificial Sequence
  RPE65 RNA guide
uuccuuacuucggaagacaa

SEQ ID NO: 24951 - RNA, 20 nt, Artificial Sequence
  RPE65 RNA guide
uuccuuauucuuccaccauu

SEQ ID NO: 24952 - RNA, 20 nt, Artificial Sequence
  RPE65 RNA guide
uucgcuucuccccccacccc

SEQ ID NO: 24953 - RNA, 20 nt, Artificial Sequence
  RPE65 RNA guide
uucggaagacaaaucaauca

SEQ ID NO: 24954 - RNA, 20 nt, Artificial Sequence
  RPE65 RNA guide
uucucccacccuaucaacau

SEQ ID NO: 24955 - RNA, 20 nt, Artificial Sequence
  RPE65 RNA guide
uucuccccccacccccaccc

SEQ ID NO: 24956 - RNA, 20 nt, Artificial Sequence
  RPE65 RNA guide
uucucuccugcagcucugcc

SEQ ID NO: 24957 - RNA, 20 nt, Artificial Sequence
  RPE65 RNA guide
uucuuccuuauucuuccacc

SEQ ID NO: 24958 - RNA, 20 nt, Artificial Sequence
  RPE65 RNA guide
uucuugccucaaggagagac

SEQ ID NO: 24959 - RNA, 20 nt, Artificial Sequence
  RPE65 RNA guide
uugacaucagagcagugauc

SEQ ID NO: 24960 - RNA, 20 nt, Artificial Sequence
  RPE65 RNA guide
uugacauuaaaagagagguc

SEQ ID NO: 24961 - RNA, 20 nt, Artificial Sequence
  RPE65 RNA guide
uugagcaucaacaugggcuu

SEQ ID NO: 24962 - RNA, 20 nt, Artificial Sequence
  RPE65 RNA guide
uugagccagcccuagagugc

SEQ ID NO: 24963 - RNA, 20 nt, Artificial Sequence
  RPE65 RNA guide
uugaggcaagaaaaucaaug

SEQ ID NO: 24964 - RNA, 20 nt, Artificial Sequence
  RPE65 RNA guide
uugauagggugggagaauac

SEQ ID NO: 24965 - RNA, 20 nt, Artificial Sequence
  RPE65 RNA guide
uugaugcucaaaguccgcag

SEQ ID NO: 24966 - RNA, 20 nt, Artificial Sequence
  RPE65 RNA guide
uugauugauuugucuuccga

SEQ ID NO: 24967 - RNA, 20 nt, Artificial Sequence
  RPE65 RNA guide
uugauuugucuuccgaagua

SEQ ID NO: 24968 - RNA, 20 nt, Artificial Sequence
  RPE65 RNA guide
uugauuuucuugccucaagg

SEQ ID NO: 24969 - RNA, 20 nt, Artificial Sequence
  RPE65 RNA guide
uugccucaaggagagaccca

SEQ ID NO: 24970 - RNA, 20 nt, Artificial Sequence
  RPE65 RNA guide
uugucuuccgaaguaaggaa

SEQ ID NO: 24971 - RNA, 20 nt, Artificial Sequence
  RPE65 RNA guide
uuguuccuaaacaggguccu

SEQ ID NO: 24972 - RNA, 20 nt, Artificial Sequence
  RPE65 RNA guide
uuuaggaacaaauuucagga

SEQ ID NO: 24973 - RNA, 20 nt, Artificial Sequence
  RPE65 RNA guide
uuuaucuccuuccuaggggu

SEQ ID NO: 24974 - RNA, 20 nt, Artificial Sequence
  RPE65 RNA guide
uuucaggaagugaacugaug

SEQ ID NO: 24975 - RNA, 20 nt, Artificial Sequence
  RPE65 RNA guide
uuuccuuacuucggaagaca

SEQ ID NO: 24976 - RNA, 20 nt, Artificial Sequence
  RPE65 RNA guide
uuucuugccucaaggagaga

SEQ ID NO: 24977 - RNA, 20 nt, Artificial Sequence
  RPE65 RNA guide
uuugagcaucaacaugggcu

SEQ ID NO: 24978 - RNA, 20 nt, Artificial Sequence
  RPE65 RNA guide
uuugagccagcccuagagug

SEQ ID NO: 24979 - RNA, 20 nt, Artificial Sequence
  RPE65 RNA guide
uuugucuuccgaaguaagga

SEQ ID NO: 24980 - RNA, 20 nt, Artificial Sequence
  RPE65 RNA guide
uuuguuccuaaacagggucc

SEQ ID NO: 24981 - RNA, 20 nt, Artificial Sequence
  RPE65 RNA guide
uuuuccuuacuucggaagac

SEQ ID NO: 24982 - RNA, 20 nt, Artificial Sequence
  RPE65 RNA guide
uuuucuugccucaaggagag

SEQ ID NO: 24983 - RNA, 20 nt, Artificial Sequence
  RPE65 RNA guide
uuuuuccuuacuucggaaga

SEQ ID NO: 24984 - RNA, 21 nt, Artificial Sequence
  RPE65 RNA guide
aaaaacugcagaggacaggau

SEQ ID NO: 24985 - RNA, 21 nt, Artificial Sequence
  RPE65 RNA guide
aaaacugcagaggacaggauu

SEQ ID NO: 24986 - RNA, 21 nt, Artificial Sequence
  RPE65 RNA guide
aaaagagaggucaugucucuu

SEQ ID NO: 24987 - RNA, 21 nt, Artificial Sequence
  RPE65 RNA guide
aaaaucaaugaugcugugagc

SEQ ID NO: 24988 - RNA, 21 nt, Artificial Sequence
  RPE65 RNA guide
aaacaggguccuucccacagu

SEQ ID NO: 24989 - RNA, 21 nt, Artificial Sequence
  RPE65 RNA guide
aaacugcagaggacaggauua

SEQ ID NO: 24990 - RNA, 21 nt, Artificial Sequence
  RPE65 RNA guide
aaagagaggucaugucucuug

SEQ ID NO: 24991 - RNA, 21 nt, Artificial Sequence
  RPE65 RNA guide
aaagccuguucacuccugccg

SEQ ID NO: 24992 - RNA, 21 nt, Artificial Sequence
  RPE65 RNA guide
aaaguccgcagagauagaggc

SEQ ID NO: 24993 - RNA, 21 nt, Artificial Sequence
  RPE65 RNA guide
aaaucaaucaauccuacugcc

SEQ ID NO: 24994 - RNA, 21 nt, Artificial Sequence
  RPE65 RNA guide
aaaucaaugaugcugugagcu

SEQ ID NO: 24995 - RNA, 21 nt, Artificial Sequence
  RPE65 RNA guide
aaaugggucucuccuugaggc

SEQ ID NO: 24996 - RNA, 21 nt, Artificial Sequence
  RPE65 RNA guide
aaaugguggaagaauaaggaa

SEQ ID NO: 24997 - RNA, 21 nt, Artificial Sequence
  RPE65 RNA guide
aaauuucaggaagugaacuga

SEQ ID NO: 24998 - RNA, 21 nt, Artificial Sequence
  RPE65 RNA guide
aaauuuguuccuaaacagggu

SEQ ID NO: 24999 - RNA, 21 nt, Artificial Sequence
  RPE65 RNA guide
aacaaauuucaggaagugaac

SEQ ID NO: 25000 - RNA, 21 nt, Artificial Sequence
  RPE65 RNA guide
aacaggcuuugagccagcccu

SEQ ID NO: 25001 - RNA, 21 nt, Artificial Sequence
  RPE65 RNA guide
aacaggguccuucccacagua

SEQ ID NO: 25002 - RNA, 21 nt, Artificial Sequence
  RPE65 RNA guide
aacaugcucagcucacagcau

SEQ ID NO: 25003 - RNA, 21 nt, Artificial Sequence
  RPE65 RNA guide
aacaugggcuucuuccuuauu

SEQ ID NO: 25004 - RNA, 21 nt, Artificial Sequence
  RPE65 RNA guide
aaccauugacauuaaaagaga

SEQ ID NO: 25005 - RNA, 21 nt, Artificial Sequence
  RPE65 RNA guide
aaccccuaggaaggagauaaa

SEQ ID NO: 25006 - RNA, 21 nt, Artificial Sequence
  RPE65 RNA guide
aacugauggcaguaggauuga

SEQ ID NO: 25007 - RNA, 21 nt, Artificial Sequence
  RPE65 RNA guide
aacugcagaggacaggauuaa

SEQ ID NO: 25008 - RNA, 21 nt, Artificial Sequence
  RPE65 RNA guide
aacuuaauccuguccucugca

SEQ ID NO: 25009 - RNA, 21 nt, Artificial Sequence
  RPE65 RNA guide
aagaaaaucaaugaugcugug

SEQ ID NO: 25010 - RNA, 21 nt, Artificial Sequence
  RPE65 RNA guide
aagaagcccauguugaugcuc

SEQ ID NO: 25011 - RNA, 21 nt, Artificial Sequence
  RPE65 RNA guide
aagaauaaggaagaagcccau

SEQ ID NO: 25012 - RNA, 21 nt, Artificial Sequence
  RPE65 RNA guide
aagacaaaucaaucaauccua

SEQ ID NO: 25013 - RNA, 21 nt, Artificial Sequence
  RPE65 RNA guide
aagacuacucagguauggaag

SEQ ID NO: 25014 - RNA, 21 nt, Artificial Sequence
  RPE65 RNA guide
aagagacaugaccucucuuuu

SEQ ID NO: 25015 - RNA, 21 nt, Artificial Sequence
  RPE65 RNA guide
aagagaggucaugucucuuga

SEQ ID NO: 25016 - RNA, 21 nt, Artificial Sequence
  RPE65 RNA guide
aagcccauguugaugcucaaa

SEQ ID NO: 25017 - RNA, 21 nt, Artificial Sequence
  RPE65 RNA guide
aagccuguucacuccugccgg

SEQ ID NO: 25018 - RNA, 21 nt, Artificial Sequence
  RPE65 RNA guide
aagcgaaggugagggcgggag

SEQ ID NO: 25019 - RNA, 21 nt, Artificial Sequence
  RPE65 RNA guide
aaggaaaaacugcagaggaca

SEQ ID NO: 25020 - RNA, 21 nt, Artificial Sequence
  RPE65 RNA guide
aaggaagaagcccauguugau

SEQ ID NO: 25021 - RNA, 21 nt, Artificial Sequence
  RPE65 RNA guide
aaggacccuguuuaggaacaa

SEQ ID NO: 25022 - RNA, 21 nt, Artificial Sequence
  RPE65 RNA guide
aaggagagacccauuuaucuc

SEQ ID NO: 25023 - RNA, 21 nt, Artificial Sequence
  RPE65 RNA guide
aaggagauaaaugggucucuc

SEQ ID NO: 25024 - RNA, 21 nt, Artificial Sequence
  RPE65 RNA guide
aaggcacucuagggcuggcuc

SEQ ID NO: 25025 - RNA, 21 nt, Artificial Sequence
  RPE65 RNA guide
aagggggucccagaucacugc

SEQ ID NO: 25026 - RNA, 21 nt, Artificial Sequence
  RPE65 RNA guide
aaggugagggcgggaggagca

SEQ ID NO: 25027 - RNA, 21 nt, Artificial Sequence
  RPE65 RNA guide
aaguaaggaaaaacugcagag

SEQ ID NO: 25028 - RNA, 21 nt, Artificial Sequence
  RPE65 RNA guide
aaguccgcagagauagaggca

SEQ ID NO: 25029 - RNA, 21 nt, Artificial Sequence
  RPE65 RNA guide
aagugaacugauggcaguagg

SEQ ID NO: 25030 - RNA, 21 nt, Artificial Sequence
  RPE65 RNA guide
aauaaggaagaagcccauguu

SEQ ID NO: 25031 - RNA, 21 nt, Artificial Sequence
  RPE65 RNA guide
aauacugugggaaggacccug

SEQ ID NO: 25032 - RNA, 21 nt, Artificial Sequence
  RPE65 RNA guide
aaucaaucaauccuacugcca

SEQ ID NO: 25033 - RNA, 21 nt, Artificial Sequence
  RPE65 RNA guide
aaucaauccuacugccaucag

SEQ ID NO: 25034 - RNA, 21 nt, Artificial Sequence
  RPE65 RNA guide
aaucaaugaugcugugagcug

SEQ ID NO: 25035 - RNA, 21 nt, Artificial Sequence
  RPE65 RNA guide
aauccuacugccaucaguuca

SEQ ID NO: 25036 - RNA, 21 nt, Artificial Sequence
  RPE65 RNA guide
aauccuguccucugcaguuuu

SEQ ID NO: 25037 - RNA, 21 nt, Artificial Sequence
  RPE65 RNA guide
aaugaugcugugagcugagca

SEQ ID NO: 25038 - RNA, 21 nt, Artificial Sequence
  RPE65 RNA guide
aaugggucucuccuugaggca

SEQ ID NO: 25039 - RNA, 21 nt, Artificial Sequence
  RPE65 RNA guide
aaugguggaagaauaaggaag

SEQ ID NO: 25040 - RNA, 21 nt, Artificial Sequence
  RPE65 RNA guide
aaugguuacagugaacuuaau

SEQ ID NO: 25041 - RNA, 21 nt, Artificial Sequence
  RPE65 RNA guide
aauuucaggaagugaacugau

SEQ ID NO: 25042 - RNA, 21 nt, Artificial Sequence
  RPE65 RNA guide
aauuuguuccuaaacaggguc

SEQ ID NO: 25043 - RNA, 21 nt, Artificial Sequence
  RPE65 RNA guide
acaaaucaaucaauccuacug

SEQ ID NO: 25044 - RNA, 21 nt, Artificial Sequence
  RPE65 RNA guide
acaaauuucaggaagugaacu

SEQ ID NO: 25045 - RNA, 21 nt, Artificial Sequence
  RPE65 RNA guide
acagcaucauugauuuucuug

SEQ ID NO: 25046 - RNA, 21 nt, Artificial Sequence
  RPE65 RNA guide
acaggcuuugagccagcccua

SEQ ID NO: 25047 - RNA, 21 nt, Artificial Sequence
  RPE65 RNA guide
acaggguccuucccacaguau

SEQ ID NO: 25048 - RNA, 21 nt, Artificial Sequence
  RPE65 RNA guide
acaguauucucccacccuauc

SEQ ID NO: 25049 - RNA, 21 nt, Artificial Sequence
  RPE65 RNA guide
acagugaacuuaauccugucc

SEQ ID NO: 25050 - RNA, 21 nt, Artificial Sequence
  RPE65 RNA guide
acaucagagcagugaucuggg

SEQ ID NO: 25051 - RNA, 21 nt, Artificial Sequence
  RPE65 RNA guide
acaugcucagcucacagcauc

SEQ ID NO: 25052 - RNA, 21 nt, Artificial Sequence
  RPE65 RNA guide
acaugggcuucuuccuuauuc

SEQ ID NO: 25053 - RNA, 21 nt, Artificial Sequence
  RPE65 RNA guide
acauuaaaagagaggucaugu

SEQ ID NO: 25054 - RNA, 21 nt, Artificial Sequence
  RPE65 RNA guide
acccagcugagacuagaccgg

SEQ ID NO: 25055 - RNA, 21 nt, Artificial Sequence
  RPE65 RNA guide
acccauuuaucuccuuccuag

SEQ ID NO: 25056 - RNA, 21 nt, Artificial Sequence
  RPE65 RNA guide
acccccacccagcugagacua

SEQ ID NO: 25057 - RNA, 21 nt, Artificial Sequence
  RPE65 RNA guide
acccccacccccacccagcug

SEQ ID NO: 25058 - RNA, 21 nt, Artificial Sequence
  RPE65 RNA guide
acccccagccucacgugcucc

SEQ ID NO: 25059 - RNA, 21 nt, Artificial Sequence
  RPE65 RNA guide
acccccuuccauaccugagua

SEQ ID NO: 25060 - RNA, 21 nt, Artificial Sequence
  RPE65 RNA guide
accccuaggaaggagauaaau

SEQ ID NO: 25061 - RNA, 21 nt, Artificial Sequence
  RPE65 RNA guide
acccuaucaacaugcucagcu

SEQ ID NO: 25062 - RNA, 21 nt, Artificial Sequence
  RPE65 RNA guide
acccuguuuaggaacaaauuu

SEQ ID NO: 25063 - RNA, 21 nt, Artificial Sequence
  RPE65 RNA guide
accggcaggagugaacaggcu

SEQ ID NO: 25064 - RNA, 21 nt, Artificial Sequence
  RPE65 RNA guide
accugaguagucuuccccacc

SEQ ID NO: 25065 - RNA, 21 nt, Artificial Sequence
  RPE65 RNA guide
accuucgcuucuccccccacc

SEQ ID NO: 25066 - RNA, 21 nt, Artificial Sequence
  RPE65 RNA guide
acgugaggcugggggugggga

SEQ ID NO: 25067 - RNA, 21 nt, Artificial Sequence
  RPE65 RNA guide
acgugcuccucccgcccucac

SEQ ID NO: 25068 - RNA, 21 nt, Artificial Sequence
  RPE65 RNA guide
acuacucagguauggaagggg

SEQ ID NO: 25069 - RNA, 21 nt, Artificial Sequence
  RPE65 RNA guide
acuagaccggcaggagugaac

SEQ ID NO: 25070 - RNA, 21 nt, Artificial Sequence
  RPE65 RNA guide
acucagguauggaaggggguc

SEQ ID NO: 25071 - RNA, 21 nt, Artificial Sequence
  RPE65 RNA guide
acuccugccggucuagucuca

SEQ ID NO: 25072 - RNA, 21 nt, Artificial Sequence
  RPE65 RNA guide
acucuagggcuggcucaaagc

SEQ ID NO: 25073 - RNA, 21 nt, Artificial Sequence
  RPE65 RNA guide
acugauggcaguaggauugau

SEQ ID NO: 25074 - RNA, 21 nt, Artificial Sequence
  RPE65 RNA guide
acugcagaggacaggauuaag

SEQ ID NO: 25075 - RNA, 21 nt, Artificial Sequence
  RPE65 RNA guide
acugccaucaguucacuuccu

SEQ ID NO: 25076 - RNA, 21 nt, Artificial Sequence
  RPE65 RNA guide
acugcucugaugucaagagac

SEQ ID NO: 25077 - RNA, 21 nt, Artificial Sequence
  RPE65 RNA guide
acuguaaccauugacauuaaa

SEQ ID NO: 25078 - RNA, 21 nt, Artificial Sequence
  RPE65 RNA guide
acugugggaaggacccuguuu

SEQ ID NO: 25079 - RNA, 21 nt, Artificial Sequence
  RPE65 RNA guide
acuuaauccuguccucugcag

SEQ ID NO: 25080 - RNA, 21 nt, Artificial Sequence
  RPE65 RNA guide
acuuccugaaauuuguuccua

SEQ ID NO: 25081 - RNA, 21 nt, Artificial Sequence
  RPE65 RNA guide
acuucggaagacaaaucaauc

SEQ ID NO: 25082 - RNA, 21 nt, Artificial Sequence
  RPE65 RNA guide
acuuugagcaucaacaugggc

SEQ ID NO: 25083 - RNA, 21 nt, Artificial Sequence
  RPE65 RNA guide
agaaaaucaaugaugcuguga

SEQ ID NO: 25084 - RNA, 21 nt, Artificial Sequence
  RPE65 RNA guide
agaagcccauguugaugcuca

SEQ ID NO: 25085 - RNA, 21 nt, Artificial Sequence
  RPE65 RNA guide
agaagcgaaggugagggcggg

SEQ ID NO: 25086 - RNA, 21 nt, Artificial Sequence
  RPE65 RNA guide
agaaggcacucuagggcuggc

SEQ ID NO: 25087 - RNA, 21 nt, Artificial Sequence
  RPE65 RNA guide
agaauaaggaagaagcccaug

SEQ ID NO: 25088 - RNA, 21 nt, Artificial Sequence
  RPE65 RNA guide
agaauacugugggaaggaccc

SEQ ID NO: 25089 - RNA, 21 nt, Artificial Sequence
  RPE65 RNA guide
agacaaaucaaucaauccuac

SEQ ID NO: 25090 - RNA, 21 nt, Artificial Sequence
  RPE65 RNA guide
agacaugaccucucuuuuaau

SEQ ID NO: 25091 - RNA, 21 nt, Artificial Sequence
  RPE65 RNA guide
agacccauuuaucuccuuccu

SEQ ID NO: 25092 - RNA, 21 nt, Artificial Sequence
  RPE65 RNA guide
agaccggcaggagugaacagg

SEQ ID NO: 25093 - RNA, 21 nt, Artificial Sequence
  RPE65 RNA guide
agacuacucagguauggaagg

SEQ ID NO: 25094 - RNA, 21 nt, Artificial Sequence
  RPE65 RNA guide
agacuagaccggcaggaguga

SEQ ID NO: 25095 - RNA, 21 nt, Artificial Sequence
  RPE65 RNA guide
agagaaggcacucuagggcug

SEQ ID NO: 25096 - RNA, 21 nt, Artificial Sequence
  RPE65 RNA guide
agagacaugaccucucuuuua

SEQ ID NO: 25097 - RNA, 21 nt, Artificial Sequence
  RPE65 RNA guide
agagacccauuuaucuccuuc

SEQ ID NO: 25098 - RNA, 21 nt, Artificial Sequence
  RPE65 RNA guide
agagaggucaugucucuugac

SEQ ID NO: 25099 - RNA, 21 nt, Artificial Sequence
  RPE65 RNA guide
agagauagaggcagagcugca

SEQ ID NO: 25100 - RNA, 21 nt, Artificial Sequence
  RPE65 RNA guide
agagcagugaucugggacccc

SEQ ID NO: 25101 - RNA, 21 nt, Artificial Sequence
  RPE65 RNA guide
agagcugcaggagagaaggca

SEQ ID NO: 25102 - RNA, 21 nt, Artificial Sequence
  RPE65 RNA guide
agaggacaggauuaaguucac

SEQ ID NO: 25103 - RNA, 21 nt, Artificial Sequence
  RPE65 RNA guide
agaggcagagcugcaggagag

SEQ ID NO: 25104 - RNA, 21 nt, Artificial Sequence
  RPE65 RNA guide
agaggucaugucucuugacau

SEQ ID NO: 25105 - RNA, 21 nt, Artificial Sequence
  RPE65 RNA guide
agagugccuucucuccugcag

SEQ ID NO: 25106 - RNA, 21 nt, Artificial Sequence
  RPE65 RNA guide
agauaaaugggucucuccuug

SEQ ID NO: 25107 - RNA, 21 nt, Artificial Sequence
  RPE65 RNA guide
agauagaggcagagcugcagg

SEQ ID NO: 25108 - RNA, 21 nt, Artificial Sequence
  RPE65 RNA guide
agaucacugcucugaugucaa

SEQ ID NO: 25109 - RNA, 21 nt, Artificial Sequence
  RPE65 RNA guide
agcacgugaggcugggggugg

SEQ ID NO: 25110 - RNA, 21 nt, Artificial Sequence
  RPE65 RNA guide
agcagugaucugggacccccu

SEQ ID NO: 25111 - RNA, 21 nt, Artificial Sequence
  RPE65 RNA guide
agcaucaacaugggcuucuuc

SEQ ID NO: 25112 - RNA, 21 nt, Artificial Sequence
  RPE65 RNA guide
agcaucauugauuuucuugcc

SEQ ID NO: 25113 - RNA, 21 nt, Artificial Sequence
  RPE65 RNA guide
agcauguugauagggugggag

SEQ ID NO: 25114 - RNA, 21 nt, Artificial Sequence
  RPE65 RNA guide
agccagcccuagagugccuuc

SEQ ID NO: 25115 - RNA, 21 nt, Artificial Sequence
  RPE65 RNA guide
agcccauguugaugcucaaag

SEQ ID NO: 25116 - RNA, 21 nt, Artificial Sequence
  RPE65 RNA guide
agcccuagagugccuucucuc

SEQ ID NO: 25117 - RNA, 21 nt, Artificial Sequence
  RPE65 RNA guide
agccucacgugcuccucccgc

SEQ ID NO: 25118 - RNA, 21 nt, Artificial Sequence
  RPE65 RNA guide
agccuguucacuccugccggu

SEQ ID NO: 25119 - RNA, 21 nt, Artificial Sequence
  RPE65 RNA guide
agcgaaggugagggcgggagg

SEQ ID NO: 25120 - RNA, 21 nt, Artificial Sequence
  RPE65 RNA guide
agcucacagcaucauugauuu

SEQ ID NO: 25121 - RNA, 21 nt, Artificial Sequence
  RPE65 RNA guide
agcucugccucuaucucugcg

SEQ ID NO: 25122 - RNA, 21 nt, Artificial Sequence
  RPE65 RNA guide
agcugagacuagaccggcagg

SEQ ID NO: 25123 - RNA, 21 nt, Artificial Sequence
  RPE65 RNA guide
agcugagcauguugauagggu

SEQ ID NO: 25124 - RNA, 21 nt, Artificial Sequence
  RPE65 RNA guide
agcugcaggagagaaggcacu

SEQ ID NO: 25125 - RNA, 21 nt, Artificial Sequence
  RPE65 RNA guide
agcugggugggggugggggug

SEQ ID NO: 25126 - RNA, 21 nt, Artificial Sequence
  RPE65 RNA guide
aggaaaaacugcagaggacag

SEQ ID NO: 25127 - RNA, 21 nt, Artificial Sequence
  RPE65 RNA guide
aggaacaaauuucaggaagug

SEQ ID NO: 25128 - RNA, 21 nt, Artificial Sequence
  RPE65 RNA guide
aggaagaagcccauguugaug

SEQ ID NO: 25129 - RNA, 21 nt, Artificial Sequence
  RPE65 RNA guide
aggaaggagauaaaugggucu

SEQ ID NO: 25130 - RNA, 21 nt, Artificial Sequence
  RPE65 RNA guide
aggaagugaacugauggcagu

SEQ ID NO: 25131 - RNA, 21 nt, Artificial Sequence
  RPE65 RNA guide
aggacaggauuaaguucacug

SEQ ID NO: 25132 - RNA, 21 nt, Artificial Sequence
  RPE65 RNA guide
aggacccuguuuaggaacaaa

SEQ ID NO: 25133 - RNA, 21 nt, Artificial Sequence
  RPE65 RNA guide
aggagagaaggcacucuaggg

SEQ ID NO: 25134 - RNA, 21 nt, Artificial Sequence
  RPE65 RNA guide
aggagagacccauuuaucucc

SEQ ID NO: 25135 - RNA, 21 nt, Artificial Sequence
  RPE65 RNA guide
aggagauaaaugggucucucc

SEQ ID NO: 25136 - RNA, 21 nt, Artificial Sequence
  RPE65 RNA guide
aggagcacgugaggcuggggg

SEQ ID NO: 25137 - RNA, 21 nt, Artificial Sequence
  RPE65 RNA guide
aggagugaacaggcuuugagc

SEQ ID NO: 25138 - RNA, 21 nt, Artificial Sequence
  RPE65 RNA guide
aggauugauugauuugucuuc

SEQ ID NO: 25139 - RNA, 21 nt, Artificial Sequence
  RPE65 RNA guide
aggcaagaaaaucaaugaugc

SEQ ID NO: 25140 - RNA, 21 nt, Artificial Sequence
  RPE65 RNA guide
aggcacucuagggcuggcuca

SEQ ID NO: 25141 - RNA, 21 nt, Artificial Sequence
  RPE65 RNA guide
aggcagagcugcaggagagaa

SEQ ID NO: 25142 - RNA, 21 nt, Artificial Sequence
  RPE65 RNA guide
aggcuggggguggggaagacu

SEQ ID NO: 25143 - RNA, 21 nt, Artificial Sequence
  RPE65 RNA guide
aggcuuugagccagcccuaga

SEQ ID NO: 25144 - RNA, 21 nt, Artificial Sequence
  RPE65 RNA guide
agggcgggaggagcacgugag

SEQ ID NO: 25145 - RNA, 21 nt, Artificial Sequence
  RPE65 RNA guide
agggcuggcucaaagccuguu

SEQ ID NO: 25146 - RNA, 21 nt, Artificial Sequence
  RPE65 RNA guide
agggggucccagaucacugcu

SEQ ID NO: 25147 - RNA, 21 nt, Artificial Sequence
  RPE65 RNA guide
aggguccuucccacaguauuc

SEQ ID NO: 25148 - RNA, 21 nt, Artificial Sequence
  RPE65 RNA guide
agggugggagaauacuguggg

SEQ ID NO: 25149 - RNA, 21 nt, Artificial Sequence
  RPE65 RNA guide
agguauggaagggggucccag

SEQ ID NO: 25150 - RNA, 21 nt, Artificial Sequence
  RPE65 RNA guide
aggucaugucucuugacauca

SEQ ID NO: 25151 - RNA, 21 nt, Artificial Sequence
  RPE65 RNA guide
aggugagggcgggaggagcac

SEQ ID NO: 25152 - RNA, 21 nt, Artificial Sequence
  RPE65 RNA guide
aguaaggaaaaacugcagagg

SEQ ID NO: 25153 - RNA, 21 nt, Artificial Sequence
  RPE65 RNA guide
aguaggauugauugauuuguc

SEQ ID NO: 25154 - RNA, 21 nt, Artificial Sequence
  RPE65 RNA guide
aguagucuuccccacccccag

SEQ ID NO: 25155 - RNA, 21 nt, Artificial Sequence
  RPE65 RNA guide
aguauucucccacccuaucaa

SEQ ID NO: 25156 - RNA, 21 nt, Artificial Sequence
  RPE65 RNA guide
aguccgcagagauagaggcag

SEQ ID NO: 25157 - RNA, 21 nt, Artificial Sequence
  RPE65 RNA guide
agucucagcugggugggggug

SEQ ID NO: 25158 - RNA, 21 nt, Artificial Sequence
  RPE65 RNA guide
agucuuccccacccccagccu

SEQ ID NO: 25159 - RNA, 21 nt, Artificial Sequence
  RPE65 RNA guide
agugaacaggcuuugagccag

SEQ ID NO: 25160 - RNA, 21 nt, Artificial Sequence
  RPE65 RNA guide
agugaacugauggcaguagga

SEQ ID NO: 25161 - RNA, 21 nt, Artificial Sequence
  RPE65 RNA guide
agugaacuuaauccuguccuc

SEQ ID NO: 25162 - RNA, 21 nt, Artificial Sequence
  RPE65 RNA guide
agugaucugggacccccuucc

SEQ ID NO: 25163 - RNA, 21 nt, Artificial Sequence
  RPE65 RNA guide
agugccuucucuccugcagcu

SEQ ID NO: 25164 - RNA, 21 nt, Artificial Sequence
  RPE65 RNA guide
aguucacuuccugaaauuugu

SEQ ID NO: 25165 - RNA, 21 nt, Artificial Sequence
  RPE65 RNA guide
aguuuuuccuuacuucggaag

SEQ ID NO: 25166 - RNA, 21 nt, Artificial Sequence
  RPE65 RNA guide
auaaaugggucucuccuugag

SEQ ID NO: 25167 - RNA, 21 nt, Artificial Sequence
  RPE65 RNA guide
auaaggaagaagcccauguug

SEQ ID NO: 25168 - RNA, 21 nt, Artificial Sequence
  RPE65 RNA guide
auaccugaguagucuucccca

SEQ ID NO: 25169 - RNA, 21 nt, Artificial Sequence
  RPE65 RNA guide
auacugugggaaggacccugu

SEQ ID NO: 25170 - RNA, 21 nt, Artificial Sequence
  RPE65 RNA guide
auagaggcagagcugcaggag

SEQ ID NO: 25171 - RNA, 21 nt, Artificial Sequence
  RPE65 RNA guide
auagggugggagaauacugug

SEQ ID NO: 25172 - RNA, 21 nt, Artificial Sequence
  RPE65 RNA guide
aucaacaugcucagcucacag

SEQ ID NO: 25173 - RNA, 21 nt, Artificial Sequence
  RPE65 RNA guide
aucaacaugggcuucuuccuu

SEQ ID NO: 25174 - RNA, 21 nt, Artificial Sequence
  RPE65 RNA guide
aucaaucaauccuacugccau

SEQ ID NO: 25175 - RNA, 21 nt, Artificial Sequence
  RPE65 RNA guide
aucaauccuacugccaucagu

SEQ ID NO: 25176 - RNA, 21 nt, Artificial Sequence
  RPE65 RNA guide
aucaaugaugcugugagcuga

SEQ ID NO: 25177 - RNA, 21 nt, Artificial Sequence
  RPE65 RNA guide
aucacugcucugaugucaaga

SEQ ID NO: 25178 - RNA, 21 nt, Artificial Sequence
  RPE65 RNA guide
aucagagcagugaucugggac

SEQ ID NO: 25179 - RNA, 21 nt, Artificial Sequence
  RPE65 RNA guide
aucaguucacuuccugaaauu

SEQ ID NO: 25180 - RNA, 21 nt, Artificial Sequence
  RPE65 RNA guide
aucauugauuuucuugccuca

SEQ ID NO: 25181 - RNA, 21 nt, Artificial Sequence
  RPE65 RNA guide
auccuacugccaucaguucac

SEQ ID NO: 25182 - RNA, 21 nt, Artificial Sequence
  RPE65 RNA guide
auccuguccucugcaguuuuu

SEQ ID NO: 25183 - RNA, 21 nt, Artificial Sequence
  RPE65 RNA guide
aucucugcggacuuugagcau

SEQ ID NO: 25184 - RNA, 21 nt, Artificial Sequence
  RPE65 RNA guide
aucugggacccccuuccauac

SEQ ID NO: 25185 - RNA, 21 nt, Artificial Sequence
  RPE65 RNA guide
augaugcugugagcugagcau

SEQ ID NO: 25186 - RNA, 21 nt, Artificial Sequence
  RPE65 RNA guide
augcucaaaguccgcagagau

SEQ ID NO: 25187 - RNA, 21 nt, Artificial Sequence
  RPE65 RNA guide
augcucagcucacagcaucau

SEQ ID NO: 25188 - RNA, 21 nt, Artificial Sequence
  RPE65 RNA guide
augcugugagcugagcauguu

SEQ ID NO: 25189 - RNA, 21 nt, Artificial Sequence
  RPE65 RNA guide
auggaagggggucccagauca

SEQ ID NO: 25190 - RNA, 21 nt, Artificial Sequence
  RPE65 RNA guide
auggcaguaggauugauugau

SEQ ID NO: 25191 - RNA, 21 nt, Artificial Sequence
  RPE65 RNA guide
augggcuucuuccuuauucuu

SEQ ID NO: 25192 - RNA, 21 nt, Artificial Sequence
  RPE65 RNA guide
augggucucuccuugaggcaa

SEQ ID NO: 25193 - RNA, 21 nt, Artificial Sequence
  RPE65 RNA guide
augguggaagaauaaggaaga

SEQ ID NO: 25194 - RNA, 21 nt, Artificial Sequence
  RPE65 RNA guide
augguuacagugaacuuaauc

SEQ ID NO: 25195 - RNA, 21 nt, Artificial Sequence
  RPE65 RNA guide
augucaagagacaugaccucu

SEQ ID NO: 25196 - RNA, 21 nt, Artificial Sequence
  RPE65 RNA guide
augucucuugacaucagagca

SEQ ID NO: 25197 - RNA, 21 nt, Artificial Sequence
  RPE65 RNA guide
auguugauagggugggagaau

SEQ ID NO: 25198 - RNA, 21 nt, Artificial Sequence
  RPE65 RNA guide
auguugaugcucaaaguccgc

SEQ ID NO: 25199 - RNA, 21 nt, Artificial Sequence
  RPE65 RNA guide
auuaaaagagaggucaugucu

SEQ ID NO: 25200 - RNA, 21 nt, Artificial Sequence
  RPE65 RNA guide
auuaaguucacuguaaccauu

SEQ ID NO: 25201 - RNA, 21 nt, Artificial Sequence
  RPE65 RNA guide
auucucccacccuaucaacau

SEQ ID NO: 25202 - RNA, 21 nt, Artificial Sequence
  RPE65 RNA guide
auugauugauuugucuuccga

SEQ ID NO: 25203 - RNA, 21 nt, Artificial Sequence
  RPE65 RNA guide
auugauuugucuuccgaagua

SEQ ID NO: 25204 - RNA, 21 nt, Artificial Sequence
  RPE65 RNA guide
auugauuuucuugccucaagg

SEQ ID NO: 25205 - RNA, 21 nt, Artificial Sequence
  RPE65 RNA guide
auuuaucuccuuccuaggggu

SEQ ID NO: 25206 - RNA, 21 nt, Artificial Sequence
  RPE65 RNA guide
auuucaggaagugaacugaug

SEQ ID NO: 25207 - RNA, 21 nt, Artificial Sequence
  RPE65 RNA guide
auuugucuuccgaaguaagga

SEQ ID NO: 25208 - RNA, 21 nt, Artificial Sequence
  RPE65 RNA guide
auuuguuccuaaacagggucc

SEQ ID NO: 25209 - RNA, 21 nt, Artificial Sequence
  RPE65 RNA guide
auuuucuugccucaaggagag

SEQ ID NO: 25210 - RNA, 21 nt, Artificial Sequence
  RPE65 RNA guide
caaagccuguucacuccugcc

SEQ ID NO: 25211 - RNA, 21 nt, Artificial Sequence
  RPE65 RNA guide
caaaguccgcagagauagagg

SEQ ID NO: 25212 - RNA, 21 nt, Artificial Sequence
  RPE65 RNA guide
caaaucaaucaauccuacugc

SEQ ID NO: 25213 - RNA, 21 nt, Artificial Sequence
  RPE65 RNA guide
caaauuucaggaagugaacug

SEQ ID NO: 25214 - RNA, 21 nt, Artificial Sequence
  RPE65 RNA guide
caacaugcucagcucacagca

SEQ ID NO: 25215 - RNA, 21 nt, Artificial Sequence
  RPE65 RNA guide
caacaugggcuucuuccuuau

SEQ ID NO: 25216 - RNA, 21 nt, Artificial Sequence
  RPE65 RNA guide
caaccccuaggaaggagauaa

SEQ ID NO: 25217 - RNA, 21 nt, Artificial Sequence
  RPE65 RNA guide
caagaaaaucaaugaugcugu

SEQ ID NO: 25218 - RNA, 21 nt, Artificial Sequence
  RPE65 RNA guide
caagagacaugaccucucuuu

SEQ ID NO: 25219 - RNA, 21 nt, Artificial Sequence
  RPE65 RNA guide
caaggagagacccauuuaucu

SEQ ID NO: 25220 - RNA, 21 nt, Artificial Sequence
  RPE65 RNA guide
caaucaauccuacugccauca

SEQ ID NO: 25221 - RNA, 21 nt, Artificial Sequence
  RPE65 RNA guide
caauccuacugccaucaguuc

SEQ ID NO: 25222 - RNA, 21 nt, Artificial Sequence
  RPE65 RNA guide
caaugaugcugugagcugagc

SEQ ID NO: 25223 - RNA, 21 nt, Artificial Sequence
  RPE65 RNA guide
cacagcaucauugauuuucuu

SEQ ID NO: 25224 - RNA, 21 nt, Artificial Sequence
  RPE65 RNA guide
cacaguauucucccacccuau

SEQ ID NO: 25225 - RNA, 21 nt, Artificial Sequence
  RPE65 RNA guide
cacccagcugagacuagaccg

SEQ ID NO: 25226 - RNA, 21 nt, Artificial Sequence
  RPE65 RNA guide
cacccccacccagcugagacu

SEQ ID NO: 25227 - RNA, 21 nt, Artificial Sequence
  RPE65 RNA guide
cacccccacccccacccagcu

SEQ ID NO: 25228 - RNA, 21 nt, Artificial Sequence
  RPE65 RNA guide
cacccccagccucacgugcuc

SEQ ID NO: 25229 - RNA, 21 nt, Artificial Sequence
  RPE65 RNA guide
cacccuaucaacaugcucagc

SEQ ID NO: 25230 - RNA, 21 nt, Artificial Sequence
  RPE65 RNA guide
caccuucgcuucuccccccac

SEQ ID NO: 25231 - RNA, 21 nt, Artificial Sequence
  RPE65 RNA guide
cacgugaggcugggggugggg

SEQ ID NO: 25232 - RNA, 21 nt, Artificial Sequence
  RPE65 RNA guide
cacgugcuccucccgcccuca

SEQ ID NO: 25233 - RNA, 21 nt, Artificial Sequence
  RPE65 RNA guide
cacuccugccggucuagucuc

SEQ ID NO: 25234 - RNA, 21 nt, Artificial Sequence
  RPE65 RNA guide
cacucuagggcuggcucaaag

SEQ ID NO: 25235 - RNA, 21 nt, Artificial Sequence
  RPE65 RNA guide
cacugcucugaugucaagaga

SEQ ID NO: 25236 - RNA, 21 nt, Artificial Sequence
  RPE65 RNA guide
cacuuccugaaauuuguuccu

SEQ ID NO: 25237 - RNA, 21 nt, Artificial Sequence
  RPE65 RNA guide
cagagauagaggcagagcugc

SEQ ID NO: 25238 - RNA, 21 nt, Artificial Sequence
  RPE65 RNA guide
cagagcagugaucugggaccc

SEQ ID NO: 25239 - RNA, 21 nt, Artificial Sequence
  RPE65 RNA guide
cagagcugcaggagagaaggc

SEQ ID NO: 25240 - RNA, 21 nt, Artificial Sequence
  RPE65 RNA guide
cagaggacaggauuaaguuca

SEQ ID NO: 25241 - RNA, 21 nt, Artificial Sequence
  RPE65 RNA guide
cagaucacugcucugauguca

SEQ ID NO: 25242 - RNA, 21 nt, Artificial Sequence
  RPE65 RNA guide
cagcaucauugauuuucuugc

SEQ ID NO: 25243 - RNA, 21 nt, Artificial Sequence
  RPE65 RNA guide
cagcccuagagugccuucucu

SEQ ID NO: 25244 - RNA, 21 nt, Artificial Sequence
  RPE65 RNA guide
cagccucacgugcuccucccg

SEQ ID NO: 25245 - RNA, 21 nt, Artificial Sequence
  RPE65 RNA guide
cagcucacagcaucauugauu

SEQ ID NO: 25246 - RNA, 21 nt, Artificial Sequence
  RPE65 RNA guide
cagcucugccucuaucucugc

SEQ ID NO: 25247 - RNA, 21 nt, Artificial Sequence
  RPE65 RNA guide
cagcugagacuagaccggcag

SEQ ID NO: 25248 - RNA, 21 nt, Artificial Sequence
  RPE65 RNA guide
cagcugggugggggugggggu

SEQ ID NO: 25249 - RNA, 21 nt, Artificial Sequence
  RPE65 RNA guide
caggaagugaacugauggcag

SEQ ID NO: 25250 - RNA, 21 nt, Artificial Sequence
  RPE65 RNA guide
caggagagaaggcacucuagg

SEQ ID NO: 25251 - RNA, 21 nt, Artificial Sequence
  RPE65 RNA guide
caggagugaacaggcuuugag

SEQ ID NO: 25252 - RNA, 21 nt, Artificial Sequence
  RPE65 RNA guide
caggcuuugagccagcccuag

SEQ ID NO: 25253 - RNA, 21 nt, Artificial Sequence
  RPE65 RNA guide
caggguccuucccacaguauu

SEQ ID NO: 25254 - RNA, 21 nt, Artificial Sequence
  RPE65 RNA guide
cagguauggaaggggguccca

SEQ ID NO: 25255 - RNA, 21 nt, Artificial Sequence
  RPE65 RNA guide
caguaggauugauugauuugu

SEQ ID NO: 25256 - RNA, 21 nt, Artificial Sequence
  RPE65 RNA guide
caguauucucccacccuauca

SEQ ID NO: 25257 - RNA, 21 nt, Artificial Sequence
  RPE65 RNA guide
cagugaacuuaauccuguccu

SEQ ID NO: 25258 - RNA, 21 nt, Artificial Sequence
  RPE65 RNA guide
cagugaucugggacccccuuc

SEQ ID NO: 25259 - RNA, 21 nt, Artificial Sequence
  RPE65 RNA guide
caguucacuuccugaaauuug

SEQ ID NO: 25260 - RNA, 21 nt, Artificial Sequence
  RPE65 RNA guide
caguuuuuccuuacuucggaa

SEQ ID NO: 25261 - RNA, 21 nt, Artificial Sequence
  RPE65 RNA guide
cauaccugaguagucuucccc

SEQ ID NO: 25262 - RNA, 21 nt, Artificial Sequence
  RPE65 RNA guide
caucaacaugggcuucuuccu

SEQ ID NO: 25263 - RNA, 21 nt, Artificial Sequence
  RPE65 RNA guide
caucagagcagugaucuggga

SEQ ID NO: 25264 - RNA, 21 nt, Artificial Sequence
  RPE65 RNA guide
caucaguucacuuccugaaau

SEQ ID NO: 25265 - RNA, 21 nt, Artificial Sequence
  RPE65 RNA guide
caucauugauuuucuugccuc

SEQ ID NO: 25266 - RNA, 21 nt, Artificial Sequence
  RPE65 RNA guide
caugcucagcucacagcauca

SEQ ID NO: 25267 - RNA, 21 nt, Artificial Sequence
  RPE65 RNA guide
caugggcuucuuccuuauucu

SEQ ID NO: 25268 - RNA, 21 nt, Artificial Sequence
  RPE65 RNA guide
caugucucuugacaucagagc

SEQ ID NO: 25269 - RNA, 21 nt, Artificial Sequence
  RPE65 RNA guide
cauguugauagggugggagaa

SEQ ID NO: 25270 - RNA, 21 nt, Artificial Sequence
  RPE65 RNA guide
cauguugaugcucaaaguccg

SEQ ID NO: 25271 - RNA, 21 nt, Artificial Sequence
  RPE65 RNA guide
cauuaaaagagaggucauguc

SEQ ID NO: 25272 - RNA, 21 nt, Artificial Sequence
  RPE65 RNA guide
cauugauuuucuugccucaag

SEQ ID NO: 25273 - RNA, 21 nt, Artificial Sequence
  RPE65 RNA guide
cauuuaucuccuuccuagggg

SEQ ID NO: 25274 - RNA, 21 nt, Artificial Sequence
  RPE65 RNA guide
ccacaguauucucccacccua

SEQ ID NO: 25275 - RNA, 21 nt, Artificial Sequence
  RPE65 RNA guide
ccacccagcugagacuagacc

SEQ ID NO: 25276 - RNA, 21 nt, Artificial Sequence
  RPE65 RNA guide
ccacccccacccagcugagac

SEQ ID NO: 25277 - RNA, 21 nt, Artificial Sequence
  RPE65 RNA guide
ccacccccacccccacccagc

SEQ ID NO: 25278 - RNA, 21 nt, Artificial Sequence
  RPE65 RNA guide
ccacccccagccucacgugcu

SEQ ID NO: 25279 - RNA, 21 nt, Artificial Sequence
  RPE65 RNA guide
ccacccuaucaacaugcucag

SEQ ID NO: 25280 - RNA, 21 nt, Artificial Sequence
  RPE65 RNA guide
ccagaucacugcucugauguc

SEQ ID NO: 25281 - RNA, 21 nt, Artificial Sequence
  RPE65 RNA guide
ccagcccuagagugccuucuc

SEQ ID NO: 25282 - RNA, 21 nt, Artificial Sequence
  RPE65 RNA guide
ccagccucacgugcuccuccc

SEQ ID NO: 25283 - RNA, 21 nt, Artificial Sequence
  RPE65 RNA guide
ccagcugagacuagaccggca

SEQ ID NO: 25284 - RNA, 21 nt, Artificial Sequence
  RPE65 RNA guide
ccauaccugaguagucuuccc

SEQ ID NO: 25285 - RNA, 21 nt, Artificial Sequence
  RPE65 RNA guide
ccaucaguucacuuccugaaa

SEQ ID NO: 25286 - RNA, 21 nt, Artificial Sequence
  RPE65 RNA guide
ccauguugaugcucaaagucc

SEQ ID NO: 25287 - RNA, 21 nt, Artificial Sequence
  RPE65 RNA guide
ccauuuaucuccuuccuaggg

SEQ ID NO: 25288 - RNA, 21 nt, Artificial Sequence
  RPE65 RNA guide
cccacaguauucucccacccu

SEQ ID NO: 25289 - RNA, 21 nt, Artificial Sequence
  RPE65 RNA guide
cccacccagcugagacuagac

SEQ ID NO: 25290 - RNA, 21 nt, Artificial Sequence
  RPE65 RNA guide
cccacccccacccagcugaga

SEQ ID NO: 25291 - RNA, 21 nt, Artificial Sequence
  RPE65 RNA guide
cccacccccacccccacccag

SEQ ID NO: 25292 - RNA, 21 nt, Artificial Sequence
  RPE65 RNA guide
cccacccccagccucacgugc

SEQ ID NO: 25293 - RNA, 21 nt, Artificial Sequence
  RPE65 RNA guide
cccacccuaucaacaugcuca

SEQ ID NO: 25294 - RNA, 21 nt, Artificial Sequence
  RPE65 RNA guide
cccagaucacugcucugaugu

SEQ ID NO: 25295 - RNA, 21 nt, Artificial Sequence
  RPE65 RNA guide
cccagccucacgugcuccucc

SEQ ID NO: 25296 - RNA, 21 nt, Artificial Sequence
  RPE65 RNA guide
cccagcugagacuagaccggc

SEQ ID NO: 25297 - RNA, 21 nt, Artificial Sequence
  RPE65 RNA guide
cccauguugaugcucaaaguc

SEQ ID NO: 25298 - RNA, 21 nt, Artificial Sequence
  RPE65 RNA guide
cccauuuaucuccuuccuagg

SEQ ID NO: 25299 - RNA, 21 nt, Artificial Sequence
  RPE65 RNA guide
ccccacccagcugagacuaga

SEQ ID NO: 25300 - RNA, 21 nt, Artificial Sequence
  RPE65 RNA guide
ccccacccccacccagcugag

SEQ ID NO: 25301 - RNA, 21 nt, Artificial Sequence
  RPE65 RNA guide
ccccacccccacccccaccca

SEQ ID NO: 25302 - RNA, 21 nt, Artificial Sequence
  RPE65 RNA guide
ccccacccccagccucacgug

SEQ ID NO: 25303 - RNA, 21 nt, Artificial Sequence
  RPE65 RNA guide
ccccagccucacgugcuccuc

SEQ ID NO: 25304 - RNA, 21 nt, Artificial Sequence
  RPE65 RNA guide
cccccacccagcugagacuag

SEQ ID NO: 25305 - RNA, 21 nt, Artificial Sequence
  RPE65 RNA guide
cccccacccccacccagcuga

SEQ ID NO: 25306 - RNA, 21 nt, Artificial Sequence
  RPE65 RNA guide
cccccacccccacccccaccc

SEQ ID NO: 25307 - RNA, 21 nt, Artificial Sequence
  RPE65 RNA guide
cccccagccucacgugcuccu

SEQ ID NO: 25308 - RNA, 21 nt, Artificial Sequence
  RPE65 RNA guide
cccccuuccauaccugaguag

SEQ ID NO: 25309 - RNA, 21 nt, Artificial Sequence
  RPE65 RNA guide
ccccuaggaaggagauaaaug

SEQ ID NO: 25310 - RNA, 21 nt, Artificial Sequence
  RPE65 RNA guide
ccccuuccauaccugaguagu

SEQ ID NO: 25311 - RNA, 21 nt, Artificial Sequence
  RPE65 RNA guide
cccgcccucaccuucgcuucu

SEQ ID NO: 25312 - RNA, 21 nt, Artificial Sequence
  RPE65 RNA guide
cccuagagugccuucucuccu

SEQ ID NO: 25313 - RNA, 21 nt, Artificial Sequence
  RPE65 RNA guide
cccuaggaaggagauaaaugg

SEQ ID NO: 25314 - RNA, 21 nt, Artificial Sequence
  RPE65 RNA guide
cccuaucaacaugcucagcuc

SEQ ID NO: 25315 - RNA, 21 nt, Artificial Sequence
  RPE65 RNA guide
cccucaccuucgcuucucccc

SEQ ID NO: 25316 - RNA, 21 nt, Artificial Sequence
  RPE65 RNA guide
cccuguuuaggaacaaauuuc

SEQ ID NO: 25317 - RNA, 21 nt, Artificial Sequence
  RPE65 RNA guide
cccuuccauaccugaguaguc

SEQ ID NO: 25318 - RNA, 21 nt, Artificial Sequence
  RPE65 RNA guide
ccgaaguaaggaaaaacugca

SEQ ID NO: 25319 - RNA, 21 nt, Artificial Sequence
  RPE65 RNA guide
ccgcagagauagaggcagagc

SEQ ID NO: 25320 - RNA, 21 nt, Artificial Sequence
  RPE65 RNA guide
ccgcccucaccuucgcuucuc

SEQ ID NO: 25321 - RNA, 21 nt, Artificial Sequence
  RPE65 RNA guide
ccggcaggagugaacaggcuu

SEQ ID NO: 25322 - RNA, 21 nt, Artificial Sequence
  RPE65 RNA guide
ccggucuagucucagcugggu

SEQ ID NO: 25323 - RNA, 21 nt, Artificial Sequence
  RPE65 RNA guide
ccuaaacaggguccuucccac

SEQ ID NO: 25324 - RNA, 21 nt, Artificial Sequence
  RPE65 RNA guide
ccuacugccaucaguucacuu

SEQ ID NO: 25325 - RNA, 21 nt, Artificial Sequence
  RPE65 RNA guide
ccuagagugccuucucuccug

SEQ ID NO: 25326 - RNA, 21 nt, Artificial Sequence
  RPE65 RNA guide
ccuaggaaggagauaaauggg

SEQ ID NO: 25327 - RNA, 21 nt, Artificial Sequence
  RPE65 RNA guide
ccuaucaacaugcucagcuca

SEQ ID NO: 25328 - RNA, 21 nt, Artificial Sequence
  RPE65 RNA guide
ccucaaggagagacccauuua

SEQ ID NO: 25329 - RNA, 21 nt, Artificial Sequence
  RPE65 RNA guide
ccucaccuucgcuucuccccc

SEQ ID NO: 25330 - RNA, 21 nt, Artificial Sequence
  RPE65 RNA guide
ccucacgugcuccucccgccc

SEQ ID NO: 25331 - RNA, 21 nt, Artificial Sequence
  RPE65 RNA guide
ccucccgcccucaccuucgcu

SEQ ID NO: 25332 - RNA, 21 nt, Artificial Sequence
  RPE65 RNA guide
ccucuaucucugcggacuuug

SEQ ID NO: 25333 - RNA, 21 nt, Artificial Sequence
  RPE65 RNA guide
ccucugcaguuuuuccuuacu

SEQ ID NO: 25334 - RNA, 21 nt, Artificial Sequence
  RPE65 RNA guide
ccugaaauuuguuccuaaaca

SEQ ID NO: 25335 - RNA, 21 nt, Artificial Sequence
  RPE65 RNA guide
ccugaguagucuuccccaccc

SEQ ID NO: 25336 - RNA, 21 nt, Artificial Sequence
  RPE65 RNA guide
ccugcagcucugccucuaucu

SEQ ID NO: 25337 - RNA, 21 nt, Artificial Sequence
  RPE65 RNA guide
ccugccggucuagucucagcu

SEQ ID NO: 25338 - RNA, 21 nt, Artificial Sequence
  RPE65 RNA guide
ccuguccucugcaguuuuucc

SEQ ID NO: 25339 - RNA, 21 nt, Artificial Sequence
  RPE65 RNA guide
ccuguucacuccugccggucu

SEQ ID NO: 25340 - RNA, 21 nt, Artificial Sequence
  RPE65 RNA guide
ccuguuuaggaacaaauuuca

SEQ ID NO: 25341 - RNA, 21 nt, Artificial Sequence
  RPE65 RNA guide
ccuuacuucggaagacaaauc

SEQ ID NO: 25342 - RNA, 21 nt, Artificial Sequence
  RPE65 RNA guide
ccuuccauaccugaguagucu

SEQ ID NO: 25343 - RNA, 21 nt, Artificial Sequence
  RPE65 RNA guide
ccuucccacaguauucuccca

SEQ ID NO: 25344 - RNA, 21 nt, Artificial Sequence
  RPE65 RNA guide
ccuucgcuucuccccccaccc

SEQ ID NO: 25345 - RNA, 21 nt, Artificial Sequence
  RPE65 RNA guide
ccuucucuccugcagcucugc

SEQ ID NO: 25346 - RNA, 21 nt, Artificial Sequence
  RPE65 RNA guide
ccuugaggcaagaaaaucaau

SEQ ID NO: 25347 - RNA, 21 nt, Artificial Sequence
  RPE65 RNA guide
cgaaggugagggcgggaggag

SEQ ID NO: 25348 - RNA, 21 nt, Artificial Sequence
  RPE65 RNA guide
cgaaguaaggaaaaacugcag

SEQ ID NO: 25349 - RNA, 21 nt, Artificial Sequence
  RPE65 RNA guide
cgcagagauagaggcagagcu

SEQ ID NO: 25350 - RNA, 21 nt, Artificial Sequence
  RPE65 RNA guide
cgcccucaccuucgcuucucc

SEQ ID NO: 25351 - RNA, 21 nt, Artificial Sequence
  RPE65 RNA guide
cgcuucuccccccacccccac

SEQ ID NO: 25352 - RNA, 21 nt, Artificial Sequence
  RPE65 RNA guide
cggaagacaaaucaaucaauc

SEQ ID NO: 25353 - RNA, 21 nt, Artificial Sequence
  RPE65 RNA guide
cggacuuugagcaucaacaug

SEQ ID NO: 25354 - RNA, 21 nt, Artificial Sequence
  RPE65 RNA guide
cggcaggagugaacaggcuuu

SEQ ID NO: 25355 - RNA, 21 nt, Artificial Sequence
  RPE65 RNA guide
cgggaggagcacgugaggcug

SEQ ID NO: 25356 - RNA, 21 nt, Artificial Sequence
  RPE65 RNA guide
cggucuagucucagcugggug

SEQ ID NO: 25357 - RNA, 21 nt, Artificial Sequence
  RPE65 RNA guide
cgugaggcuggggguggggaa

SEQ ID NO: 25358 - RNA, 21 nt, Artificial Sequence
  RPE65 RNA guide
cgugcuccucccgcccucacc

SEQ ID NO: 25359 - RNA, 21 nt, Artificial Sequence
  RPE65 RNA guide
cuaaacaggguccuucccaca

SEQ ID NO: 25360 - RNA, 21 nt, Artificial Sequence
  RPE65 RNA guide
cuacucagguauggaaggggg

SEQ ID NO: 25361 - RNA, 21 nt, Artificial Sequence
  RPE65 RNA guide
cuacugccaucaguucacuuc

SEQ ID NO: 25362 - RNA, 21 nt, Artificial Sequence
  RPE65 RNA guide
cuagaccggcaggagugaaca

SEQ ID NO: 25363 - RNA, 21 nt, Artificial Sequence
  RPE65 RNA guide
cuagagugccuucucuccugc

SEQ ID NO: 25364 - RNA, 21 nt, Artificial Sequence
  RPE65 RNA guide
cuaggaaggagauaaaugggu

SEQ ID NO: 25365 - RNA, 21 nt, Artificial Sequence
  RPE65 RNA guide
cuagggcuggcucaaagccug

SEQ ID NO: 25366 - RNA, 21 nt, Artificial Sequence
  RPE65 RNA guide
cuagucucagcuggguggggg

SEQ ID NO: 25367 - RNA, 21 nt, Artificial Sequence
  RPE65 RNA guide
cuaucaacaugcucagcucac

SEQ ID NO: 25368 - RNA, 21 nt, Artificial Sequence
  RPE65 RNA guide
cuaucucugcggacuuugagc

SEQ ID NO: 25369 - RNA, 21 nt, Artificial Sequence
  RPE65 RNA guide
cucaaagccuguucacuccug

SEQ ID NO: 25370 - RNA, 21 nt, Artificial Sequence
  RPE65 RNA guide
cucaaaguccgcagagauaga

SEQ ID NO: 25371 - RNA, 21 nt, Artificial Sequence
  RPE65 RNA guide
cucaaccccuaggaaggagau

SEQ ID NO: 25372 - RNA, 21 nt, Artificial Sequence
  RPE65 RNA guide
cucaaggagagacccauuuau

SEQ ID NO: 25373 - RNA, 21 nt, Artificial Sequence
  RPE65 RNA guide
cucacagcaucauugauuuuc

SEQ ID NO: 25374 - RNA, 21 nt, Artificial Sequence
  RPE65 RNA guide
cucaccuucgcuucucccccc

SEQ ID NO: 25375 - RNA, 21 nt, Artificial Sequence
  RPE65 RNA guide
cucacgugcuccucccgcccu

SEQ ID NO: 25376 - RNA, 21 nt, Artificial Sequence
  RPE65 RNA guide
cucagcucacagcaucauuga

SEQ ID NO: 25377 - RNA, 21 nt, Artificial Sequence
  RPE65 RNA guide
cucagcugggugggggugggg

SEQ ID NO: 25378 - RNA, 21 nt, Artificial Sequence
  RPE65 RNA guide
cucagguauggaagggggucc

SEQ ID NO: 25379 - RNA, 21 nt, Artificial Sequence
  RPE65 RNA guide
cucccacccuaucaacaugcu

SEQ ID NO: 25380 - RNA, 21 nt, Artificial Sequence
  RPE65 RNA guide
cuccccccacccccaccccca

SEQ ID NO: 25381 - RNA, 21 nt, Artificial Sequence
  RPE65 RNA guide
cucccgcccucaccuucgcuu

SEQ ID NO: 25382 - RNA, 21 nt, Artificial Sequence
  RPE65 RNA guide
cuccucccgcccucaccuucg

SEQ ID NO: 25383 - RNA, 21 nt, Artificial Sequence
  RPE65 RNA guide
cuccugcagcucugccucuau

SEQ ID NO: 25384 - RNA, 21 nt, Artificial Sequence
  RPE65 RNA guide
cuccugccggucuagucucag

SEQ ID NO: 25385 - RNA, 21 nt, Artificial Sequence
  RPE65 RNA guide
cuccuugaggcaagaaaauca

SEQ ID NO: 25386 - RNA, 21 nt, Artificial Sequence
  RPE65 RNA guide
cucuagggcuggcucaaagcc

SEQ ID NO: 25387 - RNA, 21 nt, Artificial Sequence
  RPE65 RNA guide
cucuaucucugcggacuuuga

SEQ ID NO: 25388 - RNA, 21 nt, Artificial Sequence
  RPE65 RNA guide
cucucaaccccuaggaaggag

SEQ ID NO: 25389 - RNA, 21 nt, Artificial Sequence
  RPE65 RNA guide
cucuccugcagcucugccucu

SEQ ID NO: 25390 - RNA, 21 nt, Artificial Sequence
  RPE65 RNA guide
cucuccuugaggcaagaaaau

SEQ ID NO: 25391 - RNA, 21 nt, Artificial Sequence
  RPE65 RNA guide
cucugaugucaagagacauga

SEQ ID NO: 25392 - RNA, 21 nt, Artificial Sequence
  RPE65 RNA guide
cucugcaguuuuuccuuacuu

SEQ ID NO: 25393 - RNA, 21 nt, Artificial Sequence
  RPE65 RNA guide
cucugccucuaucucugcgga

SEQ ID NO: 25394 - RNA, 21 nt, Artificial Sequence
  RPE65 RNA guide
cucugcggacuuugagcauca

SEQ ID NO: 25395 - RNA, 21 nt, Artificial Sequence
  RPE65 RNA guide
cucuugacaucagagcaguga

SEQ ID NO: 25396 - RNA, 21 nt, Artificial Sequence
  RPE65 RNA guide
cucuuuuaaugucaaugguua

SEQ ID NO: 25397 - RNA, 21 nt, Artificial Sequence
  RPE65 RNA guide
cugaaaugguggaagaauaag

SEQ ID NO: 25398 - RNA, 21 nt, Artificial Sequence
  RPE65 RNA guide
cugaaauuuguuccuaaacag

SEQ ID NO: 25399 - RNA, 21 nt, Artificial Sequence
  RPE65 RNA guide
cugagacuagaccggcaggag

SEQ ID NO: 25400 - RNA, 21 nt, Artificial Sequence
  RPE65 RNA guide
cugagcauguugauagggugg

SEQ ID NO: 25401 - RNA, 21 nt, Artificial Sequence
  RPE65 RNA guide
cugaguagucuuccccacccc

SEQ ID NO: 25402 - RNA, 21 nt, Artificial Sequence
  RPE65 RNA guide
cugauggcaguaggauugauu

SEQ ID NO: 25403 - RNA, 21 nt, Artificial Sequence
  RPE65 RNA guide
cugaugucaagagacaugacc

SEQ ID NO: 25404 - RNA, 21 nt, Artificial Sequence
  RPE65 RNA guide
cugcagaggacaggauuaagu

SEQ ID NO: 25405 - RNA, 21 nt, Artificial Sequence
  RPE65 RNA guide
cugcagcucugccucuaucuc

SEQ ID NO: 25406 - RNA, 21 nt, Artificial Sequence
  RPE65 RNA guide
cugcaggagagaaggcacucu

SEQ ID NO: 25407 - RNA, 21 nt, Artificial Sequence
  RPE65 RNA guide
cugcaguuuuuccuuacuucg

SEQ ID NO: 25408 - RNA, 21 nt, Artificial Sequence
  RPE65 RNA guide
cugccaucaguucacuuccug

SEQ ID NO: 25409 - RNA, 21 nt, Artificial Sequence
  RPE65 RNA guide
cugccggucuagucucagcug

SEQ ID NO: 25410 - RNA, 21 nt, Artificial Sequence
  RPE65 RNA guide
cugccucuaucucugcggacu

SEQ ID NO: 25411 - RNA, 21 nt, Artificial Sequence
  RPE65 RNA guide
cugcggacuuugagcaucaac

SEQ ID NO: 25412 - RNA, 21 nt, Artificial Sequence
  RPE65 RNA guide
cugcucugaugucaagagaca

SEQ ID NO: 25413 - RNA, 21 nt, Artificial Sequence
  RPE65 RNA guide
cuggcucaaagccuguucacu

SEQ ID NO: 25414 - RNA, 21 nt, Artificial Sequence
  RPE65 RNA guide
cugggacccccuuccauaccu

SEQ ID NO: 25415 - RNA, 21 nt, Artificial Sequence
  RPE65 RNA guide
cuggggguggggaagacuacu

SEQ ID NO: 25416 - RNA, 21 nt, Artificial Sequence
  RPE65 RNA guide
cuggguggggguggggguggg

SEQ ID NO: 25417 - RNA, 21 nt, Artificial Sequence
  RPE65 RNA guide
cuguaaccauugacauuaaaa

SEQ ID NO: 25418 - RNA, 21 nt, Artificial Sequence
  RPE65 RNA guide
cuguccucugcaguuuuuccu

SEQ ID NO: 25419 - RNA, 21 nt, Artificial Sequence
  RPE65 RNA guide
cugugagcugagcauguugau

SEQ ID NO: 25420 - RNA, 21 nt, Artificial Sequence
  RPE65 RNA guide
cugugggaaggacccuguuua

SEQ ID NO: 25421 - RNA, 21 nt, Artificial Sequence
  RPE65 RNA guide
cuguucacuccugccggucua

SEQ ID NO: 25422 - RNA, 21 nt, Artificial Sequence
  RPE65 RNA guide
cuguuuaggaacaaauuucag

SEQ ID NO: 25423 - RNA, 21 nt, Artificial Sequence
  RPE65 RNA guide
cuuaauccuguccucugcagu

SEQ ID NO: 25424 - RNA, 21 nt, Artificial Sequence
  RPE65 RNA guide
cuuacuucggaagacaaauca

SEQ ID NO: 25425 - RNA, 21 nt, Artificial Sequence
  RPE65 RNA guide
cuuccauaccugaguagucuu

SEQ ID NO: 25426 - RNA, 21 nt, Artificial Sequence
  RPE65 RNA guide
cuucccacaguauucucccac

SEQ ID NO: 25427 - RNA, 21 nt, Artificial Sequence
  RPE65 RNA guide
cuuccccacccccagccucac

SEQ ID NO: 25428 - RNA, 21 nt, Artificial Sequence
  RPE65 RNA guide
cuuccgaaguaaggaaaaacu

SEQ ID NO: 25429 - RNA, 21 nt, Artificial Sequence
  RPE65 RNA guide
cuuccugaaauuuguuccuaa

SEQ ID NO: 25430 - RNA, 21 nt, Artificial Sequence
  RPE65 RNA guide
cuuccuuauucuuccaccauu

SEQ ID NO: 25431 - RNA, 21 nt, Artificial Sequence
  RPE65 RNA guide
cuucgcuucuccccccacccc

SEQ ID NO: 25432 - RNA, 21 nt, Artificial Sequence
  RPE65 RNA guide
cuucggaagacaaaucaauca

SEQ ID NO: 25433 - RNA, 21 nt, Artificial Sequence
  RPE65 RNA guide
cuucuccccccacccccaccc

SEQ ID NO: 25434 - RNA, 21 nt, Artificial Sequence
  RPE65 RNA guide
cuucucuccugcagcucugcc

SEQ ID NO: 25435 - RNA, 21 nt, Artificial Sequence
  RPE65 RNA guide
cuucuuccuuauucuuccacc

SEQ ID NO: 25436 - RNA, 21 nt, Artificial Sequence
  RPE65 RNA guide
cuugacaucagagcagugauc

SEQ ID NO: 25437 - RNA, 21 nt, Artificial Sequence
  RPE65 RNA guide
cuugaggcaagaaaaucaaug

SEQ ID NO: 25438 - RNA, 21 nt, Artificial Sequence
  RPE65 RNA guide
cuugccucaaggagagaccca

SEQ ID NO: 25439 - RNA, 21 nt, Artificial Sequence
  RPE65 RNA guide
cuuugagcaucaacaugggcu

SEQ ID NO: 25440 - RNA, 21 nt, Artificial Sequence
  RPE65 RNA guide
cuuugagccagcccuagagug

SEQ ID NO: 25441 - RNA, 21 nt, Artificial Sequence
  RPE65 RNA guide
cuuuuaaugucaaugguuaca

SEQ ID NO: 25442 - RNA, 21 nt, Artificial Sequence
  RPE65 RNA guide
gaaaaacugcagaggacagga

SEQ ID NO: 25443 - RNA, 21 nt, Artificial Sequence
  RPE65 RNA guide
gaaaaucaaugaugcugugag

SEQ ID NO: 25444 - RNA, 21 nt, Artificial Sequence
  RPE65 RNA guide
gaaaugguggaagaauaagga

SEQ ID NO: 25445 - RNA, 21 nt, Artificial Sequence
  RPE65 RNA guide
gaaauuuguuccuaaacaggg

SEQ ID NO: 25446 - RNA, 21 nt, Artificial Sequence
  RPE65 RNA guide
gaacaaauuucaggaagugaa

SEQ ID NO: 25447 - RNA, 21 nt, Artificial Sequence
  RPE65 RNA guide
gaacaggcuuugagccagccc

SEQ ID NO: 25448 - RNA, 21 nt, Artificial Sequence
  RPE65 RNA guide
gaacugauggcaguaggauug

SEQ ID NO: 25449 - RNA, 21 nt, Artificial Sequence
  RPE65 RNA guide
gaacuuaauccuguccucugc

SEQ ID NO: 25450 - RNA, 21 nt, Artificial Sequence
  RPE65 RNA guide
gaagaagcccauguugaugcu

SEQ ID NO: 25451 - RNA, 21 nt, Artificial Sequence
  RPE65 RNA guide
gaagaauaaggaagaagccca

SEQ ID NO: 25452 - RNA, 21 nt, Artificial Sequence
  RPE65 RNA guide
gaagacaaaucaaucaauccu

SEQ ID NO: 25453 - RNA, 21 nt, Artificial Sequence
  RPE65 RNA guide
gaagacuacucagguauggaa

SEQ ID NO: 25454 - RNA, 21 nt, Artificial Sequence
  RPE65 RNA guide
gaagcccauguugaugcucaa

SEQ ID NO: 25455 - RNA, 21 nt, Artificial Sequence
  RPE65 RNA guide
gaagcgaaggugagggcggga

SEQ ID NO: 25456 - RNA, 21 nt, Artificial Sequence
  RPE65 RNA guide
gaaggacccuguuuaggaaca

SEQ ID NO: 25457 - RNA, 21 nt, Artificial Sequence
  RPE65 RNA guide
gaaggagauaaaugggucucu

SEQ ID NO: 25458 - RNA, 21 nt, Artificial Sequence
  RPE65 RNA guide
gaaggcacucuagggcuggcu

SEQ ID NO: 25459 - RNA, 21 nt, Artificial Sequence
  RPE65 RNA guide
gaagggggucccagaucacug

SEQ ID NO: 25460 - RNA, 21 nt, Artificial Sequence
  RPE65 RNA guide
gaaggugagggcgggaggagc

SEQ ID NO: 25461 - RNA, 21 nt, Artificial Sequence
  RPE65 RNA guide
gaaguaaggaaaaacugcaga

SEQ ID NO: 25462 - RNA, 21 nt, Artificial Sequence
  RPE65 RNA guide
gaagugaacugauggcaguag

SEQ ID NO: 25463 - RNA, 21 nt, Artificial Sequence
  RPE65 RNA guide
gaauaaggaagaagcccaugu

SEQ ID NO: 25464 - RNA, 21 nt, Artificial Sequence
  RPE65 RNA guide
gaauacugugggaaggacccu

SEQ ID NO: 25465 - RNA, 21 nt, Artificial Sequence
  RPE65 RNA guide
gacaaaucaaucaauccuacu

SEQ ID NO: 25466 - RNA, 21 nt, Artificial Sequence
  RPE65 RNA guide
gacaggauuaaguucacugua

SEQ ID NO: 25467 - RNA, 21 nt, Artificial Sequence
  RPE65 RNA guide
gacaucagagcagugaucugg

SEQ ID NO: 25468 - RNA, 21 nt, Artificial Sequence
  RPE65 RNA guide
gacauuaaaagagaggucaug

SEQ ID NO: 25469 - RNA, 21 nt, Artificial Sequence
  RPE65 RNA guide
gacccauuuaucuccuuccua

SEQ ID NO: 25470 - RNA, 21 nt, Artificial Sequence
  RPE65 RNA guide
gacccccuuccauaccugagu

SEQ ID NO: 25471 - RNA, 21 nt, Artificial Sequence
  RPE65 RNA guide
gacccuguuuaggaacaaauu

SEQ ID NO: 25472 - RNA, 21 nt, Artificial Sequence
  RPE65 RNA guide
gaccggcaggagugaacaggc

SEQ ID NO: 25473 - RNA, 21 nt, Artificial Sequence
  RPE65 RNA guide
gacuacucagguauggaaggg

SEQ ID NO: 25474 - RNA, 21 nt, Artificial Sequence
  RPE65 RNA guide
gacuagaccggcaggagugaa

SEQ ID NO: 25475 - RNA, 21 nt, Artificial Sequence
  RPE65 RNA guide
gacuuugagcaucaacauggg

SEQ ID NO: 25476 - RNA, 21 nt, Artificial Sequence
  RPE65 RNA guide
gagaagcgaaggugagggcgg

SEQ ID NO: 25477 - RNA, 21 nt, Artificial Sequence
  RPE65 RNA guide
gagaaggcacucuagggcugg

SEQ ID NO: 25478 - RNA, 21 nt, Artificial Sequence
  RPE65 RNA guide
gagaauacugugggaaggacc

SEQ ID NO: 25479 - RNA, 21 nt, Artificial Sequence
  RPE65 RNA guide
gagacaugaccucucuuuuaa

SEQ ID NO: 25480 - RNA, 21 nt, Artificial Sequence
  RPE65 RNA guide
gagacccauuuaucuccuucc

SEQ ID NO: 25481 - RNA, 21 nt, Artificial Sequence
  RPE65 RNA guide
gagacuagaccggcaggagug

SEQ ID NO: 25482 - RNA, 21 nt, Artificial Sequence
  RPE65 RNA guide
gagagaaggcacucuagggcu

SEQ ID NO: 25483 - RNA, 21 nt, Artificial Sequence
  RPE65 RNA guide
gagagacccauuuaucuccuu

SEQ ID NO: 25484 - RNA, 21 nt, Artificial Sequence
  RPE65 RNA guide
gagaggucaugucucuugaca

SEQ ID NO: 25485 - RNA, 21 nt, Artificial Sequence
  RPE65 RNA guide
gagauaaaugggucucuccuu

SEQ ID NO: 25486 - RNA, 21 nt, Artificial Sequence
  RPE65 RNA guide
gagauagaggcagagcugcag

SEQ ID NO: 25487 - RNA, 21 nt, Artificial Sequence
  RPE65 RNA guide
gagcacgugaggcugggggug

SEQ ID NO: 25488 - RNA, 21 nt, Artificial Sequence
  RPE65 RNA guide
gagcagugaucugggaccccc

SEQ ID NO: 25489 - RNA, 21 nt, Artificial Sequence
  RPE65 RNA guide
gagcaucaacaugggcuucuu

SEQ ID NO: 25490 - RNA, 21 nt, Artificial Sequence
  RPE65 RNA guide
gagcauguugauaggguggga

SEQ ID NO: 25491 - RNA, 21 nt, Artificial Sequence
  RPE65 RNA guide
gagccagcccuagagugccuu

SEQ ID NO: 25492 - RNA, 21 nt, Artificial Sequence
  RPE65 RNA guide
gagcugagcauguugauaggg

SEQ ID NO: 25493 - RNA, 21 nt, Artificial Sequence
  RPE65 RNA guide
gagcugcaggagagaaggcac

SEQ ID NO: 25494 - RNA, 21 nt, Artificial Sequence
  RPE65 RNA guide
gaggacaggauuaaguucacu

SEQ ID NO: 25495 - RNA, 21 nt, Artificial Sequence
  RPE65 RNA guide
gaggagcacgugaggcugggg

SEQ ID NO: 25496 - RNA, 21 nt, Artificial Sequence
  RPE65 RNA guide
gaggcaagaaaaucaaugaug

SEQ ID NO: 25497 - RNA, 21 nt, Artificial Sequence
  RPE65 RNA guide
gaggcagagcugcaggagaga

SEQ ID NO: 25498 - RNA, 21 nt, Artificial Sequence
  RPE65 RNA guide
gaggcuggggguggggaagac

SEQ ID NO: 25499 - RNA, 21 nt, Artificial Sequence
  RPE65 RNA guide
gagggcgggaggagcacguga

SEQ ID NO: 25500 - RNA, 21 nt, Artificial Sequence
  RPE65 RNA guide
gaggucaugucucuugacauc

SEQ ID NO: 25501 - RNA, 21 nt, Artificial Sequence
  RPE65 RNA guide
gaguagucuuccccaccccca

SEQ ID NO: 25502 - RNA, 21 nt, Artificial Sequence
  RPE65 RNA guide
gagugaacaggcuuugagcca

SEQ ID NO: 25503 - RNA, 21 nt, Artificial Sequence
  RPE65 RNA guide
gagugccuucucuccugcagc

SEQ ID NO: 25504 - RNA, 21 nt, Artificial Sequence
  RPE65 RNA guide
gauaaaugggucucuccuuga

SEQ ID NO: 25505 - RNA, 21 nt, Artificial Sequence
  RPE65 RNA guide
gauagaggcagagcugcagga

SEQ ID NO: 25506 - RNA, 21 nt, Artificial Sequence
  RPE65 RNA guide
gauagggugggagaauacugu

SEQ ID NO: 25507 - RNA, 21 nt, Artificial Sequence
  RPE65 RNA guide
gaucacugcucugaugucaag

SEQ ID NO: 25508 - RNA, 21 nt, Artificial Sequence
  RPE65 RNA guide
gaucugggacccccuuccaua

SEQ ID NO: 25509 - RNA, 21 nt, Artificial Sequence
  RPE65 RNA guide
gaugcucaaaguccgcagaga

SEQ ID NO: 25510 - RNA, 21 nt, Artificial Sequence
  RPE65 RNA guide
gaugcugugagcugagcaugu

SEQ ID NO: 25511 - RNA, 21 nt, Artificial Sequence
  RPE65 RNA guide
gauggcaguaggauugauuga

SEQ ID NO: 25512 - RNA, 21 nt, Artificial Sequence
  RPE65 RNA guide
gaugucaagagacaugaccuc

SEQ ID NO: 25513 - RNA, 21 nt, Artificial Sequence
  RPE65 RNA guide
gauugauugauuugucuuccg

SEQ ID NO: 25514 - RNA, 21 nt, Artificial Sequence
  RPE65 RNA guide
gauugauuugucuuccgaagu

SEQ ID NO: 25515 - RNA, 21 nt, Artificial Sequence
  RPE65 RNA guide
gauuugucuuccgaaguaagg

SEQ ID NO: 25516 - RNA, 21 nt, Artificial Sequence
  RPE65 RNA guide
gauuuucuugccucaaggaga

SEQ ID NO: 25517 - RNA, 21 nt, Artificial Sequence
  RPE65 RNA guide
gcaagaaaaucaaugaugcug

SEQ ID NO: 25518 - RNA, 21 nt, Artificial Sequence
  RPE65 RNA guide
gcacgugaggcuggggguggg

SEQ ID NO: 25519 - RNA, 21 nt, Artificial Sequence
  RPE65 RNA guide
gcacucuagggcuggcucaaa

SEQ ID NO: 25520 - RNA, 21 nt, Artificial Sequence
  RPE65 RNA guide
gcagagauagaggcagagcug

SEQ ID NO: 25521 - RNA, 21 nt, Artificial Sequence
  RPE65 RNA guide
gcagagcugcaggagagaagg

SEQ ID NO: 25522 - RNA, 21 nt, Artificial Sequence
  RPE65 RNA guide
gcagaggacaggauuaaguuc

SEQ ID NO: 25523 - RNA, 21 nt, Artificial Sequence
  RPE65 RNA guide
gcagcucugccucuaucucug

SEQ ID NO: 25524 - RNA, 21 nt, Artificial Sequence
  RPE65 RNA guide
gcaggagagaaggcacucuag

SEQ ID NO: 25525 - RNA, 21 nt, Artificial Sequence
  RPE65 RNA guide
gcaggagugaacaggcuuuga

SEQ ID NO: 25526 - RNA, 21 nt, Artificial Sequence
  RPE65 RNA guide
gcaguaggauugauugauuug

SEQ ID NO: 25527 - RNA, 21 nt, Artificial Sequence
  RPE65 RNA guide
gcagugaucugggacccccuu

SEQ ID NO: 25528 - RNA, 21 nt, Artificial Sequence
  RPE65 RNA guide
gcaguuuuuccuuacuucgga

SEQ ID NO: 25529 - RNA, 21 nt, Artificial Sequence
  RPE65 RNA guide
gcaucaacaugggcuucuucc

SEQ ID NO: 25530 - RNA, 21 nt, Artificial Sequence
  RPE65 RNA guide
gcaucauugauuuucuugccu

SEQ ID NO: 25531 - RNA, 21 nt, Artificial Sequence
  RPE65 RNA guide
gcauguugauagggugggaga

SEQ ID NO: 25532 - RNA, 21 nt, Artificial Sequence
  RPE65 RNA guide
gccagcccuagagugccuucu

SEQ ID NO: 25533 - RNA, 21 nt, Artificial Sequence
  RPE65 RNA guide
gccaucaguucacuuccugaa

SEQ ID NO: 25534 - RNA, 21 nt, Artificial Sequence
  RPE65 RNA guide
gcccauguugaugcucaaagu

SEQ ID NO: 25535 - RNA, 21 nt, Artificial Sequence
  RPE65 RNA guide
gcccuagagugccuucucucc

SEQ ID NO: 25536 - RNA, 21 nt, Artificial Sequence
  RPE65 RNA guide
gcccucaccuucgcuucuccc

SEQ ID NO: 25537 - RNA, 21 nt, Artificial Sequence
  RPE65 RNA guide
gccggucuagucucagcuggg

SEQ ID NO: 25538 - RNA, 21 nt, Artificial Sequence
  RPE65 RNA guide
gccucaaggagagacccauuu

SEQ ID NO: 25539 - RNA, 21 nt, Artificial Sequence
  RPE65 RNA guide
gccucacgugcuccucccgcc

SEQ ID NO: 25540 - RNA, 21 nt, Artificial Sequence
  RPE65 RNA guide
gccucuaucucugcggacuuu

SEQ ID NO: 25541 - RNA, 21 nt, Artificial Sequence
  RPE65 RNA guide
gccuguucacuccugccgguc

SEQ ID NO: 25542 - RNA, 21 nt, Artificial Sequence
  RPE65 RNA guide
gccuucucuccugcagcucug

SEQ ID NO: 25543 - RNA, 21 nt, Artificial Sequence
  RPE65 RNA guide
gcgaaggugagggcgggagga

SEQ ID NO: 25544 - RNA, 21 nt, Artificial Sequence
  RPE65 RNA guide
gcggacuuugagcaucaacau

SEQ ID NO: 25545 - RNA, 21 nt, Artificial Sequence
  RPE65 RNA guide
gcgggaggagcacgugaggcu

SEQ ID NO: 25546 - RNA, 21 nt, Artificial Sequence
  RPE65 RNA guide
gcucaaagccuguucacuccu

SEQ ID NO: 25547 - RNA, 21 nt, Artificial Sequence
  RPE65 RNA guide
gcucaaaguccgcagagauag

SEQ ID NO: 25548 - RNA, 21 nt, Artificial Sequence
  RPE65 RNA guide
gcucacagcaucauugauuuu

SEQ ID NO: 25549 - RNA, 21 nt, Artificial Sequence
  RPE65 RNA guide
gcucagcucacagcaucauug

SEQ ID NO: 25550 - RNA, 21 nt, Artificial Sequence
  RPE65 RNA guide
gcuccucccgcccucaccuuc

SEQ ID NO: 25551 - RNA, 21 nt, Artificial Sequence
  RPE65 RNA guide
gcucugaugucaagagacaug

SEQ ID NO: 25552 - RNA, 21 nt, Artificial Sequence
  RPE65 RNA guide
gcucugccucuaucucugcgg

SEQ ID NO: 25553 - RNA, 21 nt, Artificial Sequence
  RPE65 RNA guide
gcugagacuagaccggcagga

SEQ ID NO: 25554 - RNA, 21 nt, Artificial Sequence
  RPE65 RNA guide
gcugagcauguugauagggug

SEQ ID NO: 25555 - RNA, 21 nt, Artificial Sequence
  RPE65 RNA guide
gcugcaggagagaaggcacuc

SEQ ID NO: 25556 - RNA, 21 nt, Artificial Sequence
  RPE65 RNA guide
gcuggcucaaagccuguucac

SEQ ID NO: 25557 - RNA, 21 nt, Artificial Sequence
  RPE65 RNA guide
gcuggggguggggaagacuac

SEQ ID NO: 25558 - RNA, 21 nt, Artificial Sequence
  RPE65 RNA guide
gcugugagcugagcauguuga

SEQ ID NO: 25559 - RNA, 21 nt, Artificial Sequence
  RPE65 RNA guide
gcuucuccccccacccccacc

SEQ ID NO: 25560 - RNA, 21 nt, Artificial Sequence
  RPE65 RNA guide
gcuucuuccuuauucuuccac

SEQ ID NO: 25561 - RNA, 21 nt, Artificial Sequence
  RPE65 RNA guide
gcuuugagccagcccuagagu

SEQ ID NO: 25562 - RNA, 21 nt, Artificial Sequence
  RPE65 RNA guide
ggaaaaacugcagaggacagg

SEQ ID NO: 25563 - RNA, 21 nt, Artificial Sequence
  RPE65 RNA guide
ggaacaaauuucaggaaguga

SEQ ID NO: 25564 - RNA, 21 nt, Artificial Sequence
  RPE65 RNA guide
ggaagaagcccauguugaugc

SEQ ID NO: 25565 - RNA, 21 nt, Artificial Sequence
  RPE65 RNA guide
ggaagaauaaggaagaagccc

SEQ ID NO: 25566 - RNA, 21 nt, Artificial Sequence
  RPE65 RNA guide
ggaagacaaaucaaucaaucc

SEQ ID NO: 25567 - RNA, 21 nt, Artificial Sequence
  RPE65 RNA guide
ggaagacuacucagguaugga

SEQ ID NO: 25568 - RNA, 21 nt, Artificial Sequence
  RPE65 RNA guide
ggaaggacccuguuuaggaac

SEQ ID NO: 25569 - RNA, 21 nt, Artificial Sequence
  RPE65 RNA guide
ggaaggagauaaaugggucuc

SEQ ID NO: 25570 - RNA, 21 nt, Artificial Sequence
  RPE65 RNA guide
ggaagggggucccagaucacu

SEQ ID NO: 25571 - RNA, 21 nt, Artificial Sequence
  RPE65 RNA guide
ggaagugaacugauggcagua

SEQ ID NO: 25572 - RNA, 21 nt, Artificial Sequence
  RPE65 RNA guide
ggacaggauuaaguucacugu

SEQ ID NO: 25573 - RNA, 21 nt, Artificial Sequence
  RPE65 RNA guide
ggacccccuuccauaccugag

SEQ ID NO: 25574 - RNA, 21 nt, Artificial Sequence
  RPE65 RNA guide
ggacccuguuuaggaacaaau

SEQ ID NO: 25575 - RNA, 21 nt, Artificial Sequence
  RPE65 RNA guide
ggacuuugagcaucaacaugg

SEQ ID NO: 25576 - RNA, 21 nt, Artificial Sequence
  RPE65 RNA guide
ggagaagcgaaggugagggcg

SEQ ID NO: 25577 - RNA, 21 nt, Artificial Sequence
  RPE65 RNA guide
ggagaauacugugggaaggac

SEQ ID NO: 25578 - RNA, 21 nt, Artificial Sequence
  RPE65 RNA guide
ggagagaaggcacucuagggc

SEQ ID NO: 25579 - RNA, 21 nt, Artificial Sequence
  RPE65 RNA guide
ggagagacccauuuaucuccu

SEQ ID NO: 25580 - RNA, 21 nt, Artificial Sequence
  RPE65 RNA guide
ggagauaaaugggucucuccu

SEQ ID NO: 25581 - RNA, 21 nt, Artificial Sequence
  RPE65 RNA guide
ggagcacgugaggcugggggu

SEQ ID NO: 25582 - RNA, 21 nt, Artificial Sequence
  RPE65 RNA guide
ggaggagcacgugaggcuggg

SEQ ID NO: 25583 - RNA, 21 nt, Artificial Sequence
  RPE65 RNA guide
ggagugaacaggcuuugagcc

SEQ ID NO: 25584 - RNA, 21 nt, Artificial Sequence
  RPE65 RNA guide
ggauugauugauuugucuucc

SEQ ID NO: 25585 - RNA, 21 nt, Artificial Sequence
  RPE65 RNA guide
ggcaagaaaaucaaugaugcu

SEQ ID NO: 25586 - RNA, 21 nt, Artificial Sequence
  RPE65 RNA guide
ggcacucuagggcuggcucaa

SEQ ID NO: 25587 - RNA, 21 nt, Artificial Sequence
  RPE65 RNA guide
ggcagagcugcaggagagaag

SEQ ID NO: 25588 - RNA, 21 nt, Artificial Sequence
  RPE65 RNA guide
ggcaggagugaacaggcuuug

SEQ ID NO: 25589 - RNA, 21 nt, Artificial Sequence
  RPE65 RNA guide
ggcaguaggauugauugauuu

SEQ ID NO: 25590 - RNA, 21 nt, Artificial Sequence
  RPE65 RNA guide
ggcgggaggagcacgugaggc

SEQ ID NO: 25591 - RNA, 21 nt, Artificial Sequence
  RPE65 RNA guide
ggcucaaagccuguucacucc

SEQ ID NO: 25592 - RNA, 21 nt, Artificial Sequence
  RPE65 RNA guide
ggcuggcucaaagccuguuca

SEQ ID NO: 25593 - RNA, 21 nt, Artificial Sequence
  RPE65 RNA guide
ggcuggggguggggaagacua

SEQ ID NO: 25594 - RNA, 21 nt, Artificial Sequence
  RPE65 RNA guide
ggcuucuuccuuauucuucca

SEQ ID NO: 25595 - RNA, 21 nt, Artificial Sequence
  RPE65 RNA guide
ggcuuugagccagcccuagag

SEQ ID NO: 25596 - RNA, 21 nt, Artificial Sequence
  RPE65 RNA guide
gggaagacuacucagguaugg

SEQ ID NO: 25597 - RNA, 21 nt, Artificial Sequence
  RPE65 RNA guide
gggaaggacccuguuuaggaa

SEQ ID NO: 25598 - RNA, 21 nt, Artificial Sequence
  RPE65 RNA guide
gggacccccuuccauaccuga

SEQ ID NO: 25599 - RNA, 21 nt, Artificial Sequence
  RPE65 RNA guide
gggagaagcgaaggugagggc

SEQ ID NO: 25600 - RNA, 21 nt, Artificial Sequence
  RPE65 RNA guide
gggagaauacugugggaagga

SEQ ID NO: 25601 - RNA, 21 nt, Artificial Sequence
  RPE65 RNA guide
gggaggagcacgugaggcugg

SEQ ID NO: 25602 - RNA, 21 nt, Artificial Sequence
  RPE65 RNA guide
gggcgggaggagcacgugagg

SEQ ID NO: 25603 - RNA, 21 nt, Artificial Sequence
  RPE65 RNA guide
gggcuggcucaaagccuguuc

SEQ ID NO: 25604 - RNA, 21 nt, Artificial Sequence
  RPE65 RNA guide
gggcuucuuccuuauucuucc

SEQ ID NO: 25605 - RNA, 21 nt, Artificial Sequence
  RPE65 RNA guide
ggggaagacuacucagguaug

SEQ ID NO: 25606 - RNA, 21 nt, Artificial Sequence
  RPE65 RNA guide
ggggagaagcgaaggugaggg

SEQ ID NO: 25607 - RNA, 21 nt, Artificial Sequence
  RPE65 RNA guide
gggggagaagcgaaggugagg

SEQ ID NO: 25608 - RNA, 21 nt, Artificial Sequence
  RPE65 RNA guide
ggggggagaagcgaaggugag

SEQ ID NO: 25609 - RNA, 21 nt, Artificial Sequence
  RPE65 RNA guide
gggggucccagaucacugcuc

SEQ ID NO: 25610 - RNA, 21 nt, Artificial Sequence
  RPE65 RNA guide
ggggguggggaagacuacuca

SEQ ID NO: 25611 - RNA, 21 nt, Artificial Sequence
  RPE65 RNA guide
ggggguggggggagaagcgaa

SEQ ID NO: 25612 - RNA, 21 nt, Artificial Sequence
  RPE65 RNA guide
ggggguggggguggggggaga

SEQ ID NO: 25613 - RNA, 21 nt, Artificial Sequence
  RPE65 RNA guide
ggggucccagaucacugcucu

SEQ ID NO: 25614 - RNA, 21 nt, Artificial Sequence
  RPE65 RNA guide
gggguggggaagacuacucag

SEQ ID NO: 25615 - RNA, 21 nt, Artificial Sequence
  RPE65 RNA guide
gggguggggggagaagcgaag

SEQ ID NO: 25616 - RNA, 21 nt, Artificial Sequence
  RPE65 RNA guide
gggguggggguggggggagaa

SEQ ID NO: 25617 - RNA, 21 nt, Artificial Sequence
  RPE65 RNA guide
gggucccagaucacugcucug

SEQ ID NO: 25618 - RNA, 21 nt, Artificial Sequence
  RPE65 RNA guide
ggguccuucccacaguauucu

SEQ ID NO: 25619 - RNA, 21 nt, Artificial Sequence
  RPE65 RNA guide
gggucucuccuugaggcaaga

SEQ ID NO: 25620 - RNA, 21 nt, Artificial Sequence
  RPE65 RNA guide
gggugggagaauacuguggga

SEQ ID NO: 25621 - RNA, 21 nt, Artificial Sequence
  RPE65 RNA guide
ggguggggaagacuacucagg

SEQ ID NO: 25622 - RNA, 21 nt, Artificial Sequence
  RPE65 RNA guide
ggguggggggagaagcgaagg

SEQ ID NO: 25623 - RNA, 21 nt, Artificial Sequence
  RPE65 RNA guide
ggguggggguggggggagaag

SEQ ID NO: 25624 - RNA, 21 nt, Artificial Sequence
  RPE65 RNA guide
ggguggggguggggguggggg

SEQ ID NO: 25625 - RNA, 21 nt, Artificial Sequence
  RPE65 RNA guide
gguauggaagggggucccaga

SEQ ID NO: 25626 - RNA, 21 nt, Artificial Sequence
  RPE65 RNA guide
ggucaugucucuugacaucag

SEQ ID NO: 25627 - RNA, 21 nt, Artificial Sequence
  RPE65 RNA guide
ggucccagaucacugcucuga

SEQ ID NO: 25628 - RNA, 21 nt, Artificial Sequence
  RPE65 RNA guide
gguccuucccacaguauucuc

SEQ ID NO: 25629 - RNA, 21 nt, Artificial Sequence
  RPE65 RNA guide
ggucuagucucagcugggugg

SEQ ID NO: 25630 - RNA, 21 nt, Artificial Sequence
  RPE65 RNA guide
ggucucuccuugaggcaagaa

SEQ ID NO: 25631 - RNA, 21 nt, Artificial Sequence
  RPE65 RNA guide
ggugagggcgggaggagcacg

SEQ ID NO: 25632 - RNA, 21 nt, Artificial Sequence
  RPE65 RNA guide
gguggaagaauaaggaagaag

SEQ ID NO: 25633 - RNA, 21 nt, Artificial Sequence
  RPE65 RNA guide
ggugggagaauacugugggaa

SEQ ID NO: 25634 - RNA, 21 nt, Artificial Sequence
  RPE65 RNA guide
gguggggaagacuacucaggu

SEQ ID NO: 25635 - RNA, 21 nt, Artificial Sequence
  RPE65 RNA guide
gguggggggagaagcgaaggu

SEQ ID NO: 25636 - RNA, 21 nt, Artificial Sequence
  RPE65 RNA guide
gguggggguggggggagaagc

SEQ ID NO: 25637 - RNA, 21 nt, Artificial Sequence
  RPE65 RNA guide
ggugggggugggggugggggg

SEQ ID NO: 25638 - RNA, 21 nt, Artificial Sequence
  RPE65 RNA guide
gguuacagugaacuuaauccu

SEQ ID NO: 25639 - RNA, 21 nt, Artificial Sequence
  RPE65 RNA guide
guaaccauugacauuaaaaga

SEQ ID NO: 25640 - RNA, 21 nt, Artificial Sequence
  RPE65 RNA guide
guaaggaaaaacugcagagga

SEQ ID NO: 25641 - RNA, 21 nt, Artificial Sequence
  RPE65 RNA guide
guaggauugauugauuugucu

SEQ ID NO: 25642 - RNA, 21 nt, Artificial Sequence
  RPE65 RNA guide
guagucuuccccacccccagc

SEQ ID NO: 25643 - RNA, 21 nt, Artificial Sequence
  RPE65 RNA guide
guauggaagggggucccagau

SEQ ID NO: 25644 - RNA, 21 nt, Artificial Sequence
  RPE65 RNA guide
guauucucccacccuaucaac

SEQ ID NO: 25645 - RNA, 21 nt, Artificial Sequence
  RPE65 RNA guide
gucaagagacaugaccucucu

SEQ ID NO: 25646 - RNA, 21 nt, Artificial Sequence
  RPE65 RNA guide
gucaugucucuugacaucaga

SEQ ID NO: 25647 - RNA, 21 nt, Artificial Sequence
  RPE65 RNA guide
gucccagaucacugcucugau

SEQ ID NO: 25648 - RNA, 21 nt, Artificial Sequence
  RPE65 RNA guide
guccgcagagauagaggcaga

SEQ ID NO: 25649 - RNA, 21 nt, Artificial Sequence
  RPE65 RNA guide
guccucugcaguuuuuccuua

SEQ ID NO: 25650 - RNA, 21 nt, Artificial Sequence
  RPE65 RNA guide
guccuucccacaguauucucc

SEQ ID NO: 25651 - RNA, 21 nt, Artificial Sequence
  RPE65 RNA guide
gucuagucucagcuggguggg

SEQ ID NO: 25652 - RNA, 21 nt, Artificial Sequence
  RPE65 RNA guide
gucucagcugggugggggugg

SEQ ID NO: 25653 - RNA, 21 nt, Artificial Sequence
  RPE65 RNA guide
gucucuccuugaggcaagaaa

SEQ ID NO: 25654 - RNA, 21 nt, Artificial Sequence
  RPE65 RNA guide
gucucuugacaucagagcagu

SEQ ID NO: 25655 - RNA, 21 nt, Artificial Sequence
  RPE65 RNA guide
gucuuccccacccccagccuc

SEQ ID NO: 25656 - RNA, 21 nt, Artificial Sequence
  RPE65 RNA guide
gucuuccgaaguaaggaaaaa

SEQ ID NO: 25657 - RNA, 21 nt, Artificial Sequence
  RPE65 RNA guide
gugaacaggcuuugagccagc

SEQ ID NO: 25658 - RNA, 21 nt, Artificial Sequence
  RPE65 RNA guide
gugaacugauggcaguaggau

SEQ ID NO: 25659 - RNA, 21 nt, Artificial Sequence
  RPE65 RNA guide
gugaacuuaauccuguccucu

SEQ ID NO: 25660 - RNA, 21 nt, Artificial Sequence
  RPE65 RNA guide
gugagcugagcauguugauag

SEQ ID NO: 25661 - RNA, 21 nt, Artificial Sequence
  RPE65 RNA guide
gugaggcuggggguggggaag

SEQ ID NO: 25662 - RNA, 21 nt, Artificial Sequence
  RPE65 RNA guide
gugagggcgggaggagcacgu

SEQ ID NO: 25663 - RNA, 21 nt, Artificial Sequence
  RPE65 RNA guide
gugaucugggacccccuucca

SEQ ID NO: 25664 - RNA, 21 nt, Artificial Sequence
  RPE65 RNA guide
gugccuucucuccugcagcuc

SEQ ID NO: 25665 - RNA, 21 nt, Artificial Sequence
  RPE65 RNA guide
gugcuccucccgcccucaccu

SEQ ID NO: 25666 - RNA, 21 nt, Artificial Sequence
  RPE65 RNA guide
guggaagaauaaggaagaagc

SEQ ID NO: 25667 - RNA, 21 nt, Artificial Sequence
  RPE65 RNA guide
gugggaaggacccuguuuagg

SEQ ID NO: 25668 - RNA, 21 nt, Artificial Sequence
  RPE65 RNA guide
gugggagaauacugugggaag

SEQ ID NO: 25669 - RNA, 21 nt, Artificial Sequence
  RPE65 RNA guide
guggggaagacuacucaggua

SEQ ID NO: 25670 - RNA, 21 nt, Artificial Sequence
  RPE65 RNA guide
guggggggagaagcgaaggug

SEQ ID NO: 25671 - RNA, 21 nt, Artificial Sequence
  RPE65 RNA guide
guggggguggggggagaagcg

SEQ ID NO: 25672 - RNA, 21 nt, Artificial Sequence
  RPE65 RNA guide
gugggggugggggugggggga

SEQ ID NO: 25673 - RNA, 21 nt, Artificial Sequence
  RPE65 RNA guide
guuacagugaacuuaauccug

SEQ ID NO: 25674 - RNA, 21 nt, Artificial Sequence
  RPE65 RNA guide
guucacuccugccggucuagu

SEQ ID NO: 25675 - RNA, 21 nt, Artificial Sequence
  RPE65 RNA guide
guucacuuccugaaauuuguu

SEQ ID NO: 25676 - RNA, 21 nt, Artificial Sequence
  RPE65 RNA guide
guuccuaaacaggguccuucc

SEQ ID NO: 25677 - RNA, 21 nt, Artificial Sequence
  RPE65 RNA guide
guugauagggugggagaauac

SEQ ID NO: 25678 - RNA, 21 nt, Artificial Sequence
  RPE65 RNA guide
guugaugcucaaaguccgcag

SEQ ID NO: 25679 - RNA, 21 nt, Artificial Sequence
  RPE65 RNA guide
guuuaggaacaaauuucagga

SEQ ID NO: 25680 - RNA, 21 nt, Artificial Sequence
  RPE65 RNA guide
guuuuuccuuacuucggaaga

SEQ ID NO: 25681 - RNA, 21 nt, Artificial Sequence
  RPE65 RNA guide
uaaaagagaggucaugucucu

SEQ ID NO: 25682 - RNA, 21 nt, Artificial Sequence
  RPE65 RNA guide
uaaacaggguccuucccacag

SEQ ID NO: 25683 - RNA, 21 nt, Artificial Sequence
  RPE65 RNA guide
uaaaugggucucuccuugagg

SEQ ID NO: 25684 - RNA, 21 nt, Artificial Sequence
  RPE65 RNA guide
uaaccauugacauuaaaagag

SEQ ID NO: 25685 - RNA, 21 nt, Artificial Sequence
  RPE65 RNA guide
uaaggaaaaacugcagaggac

SEQ ID NO: 25686 - RNA, 21 nt, Artificial Sequence
  RPE65 RNA guide
uaaggaagaagcccauguuga

SEQ ID NO: 25687 - RNA, 21 nt, Artificial Sequence
  RPE65 RNA guide
uaauccuguccucugcaguuu

SEQ ID NO: 25688 - RNA, 21 nt, Artificial Sequence
  RPE65 RNA guide
uacagugaacuuaauccuguc

SEQ ID NO: 25689 - RNA, 21 nt, Artificial Sequence
  RPE65 RNA guide
uaccugaguagucuuccccac

SEQ ID NO: 25690 - RNA, 21 nt, Artificial Sequence
  RPE65 RNA guide
uacucagguauggaagggggu

SEQ ID NO: 25691 - RNA, 21 nt, Artificial Sequence
  RPE65 RNA guide
uacugccaucaguucacuucc

SEQ ID NO: 25692 - RNA, 21 nt, Artificial Sequence
  RPE65 RNA guide
uacugugggaaggacccuguu

SEQ ID NO: 25693 - RNA, 21 nt, Artificial Sequence
  RPE65 RNA guide
uacuucggaagacaaaucaau

SEQ ID NO: 25694 - RNA, 21 nt, Artificial Sequence
  RPE65 RNA guide
uagaccggcaggagugaacag

SEQ ID NO: 25695 - RNA, 21 nt, Artificial Sequence
  RPE65 RNA guide
uagaggcagagcugcaggaga

SEQ ID NO: 25696 - RNA, 21 nt, Artificial Sequence
  RPE65 RNA guide
uagagugccuucucuccugca

SEQ ID NO: 25697 - RNA, 21 nt, Artificial Sequence
  RPE65 RNA guide
uaggaacaaauuucaggaagu

SEQ ID NO: 25698 - RNA, 21 nt, Artificial Sequence
  RPE65 RNA guide
uaggaaggagauaaauggguc

SEQ ID NO: 25699 - RNA, 21 nt, Artificial Sequence
  RPE65 RNA guide
uaggauugauugauuugucuu

SEQ ID NO: 25700 - RNA, 21 nt, Artificial Sequence
  RPE65 RNA guide
uagggcuggcucaaagccugu

SEQ ID NO: 25701 - RNA, 21 nt, Artificial Sequence
  RPE65 RNA guide
uagggugggagaauacugugg

SEQ ID NO: 25702 - RNA, 21 nt, Artificial Sequence
  RPE65 RNA guide
uagucucagcugggugggggu

SEQ ID NO: 25703 - RNA, 21 nt, Artificial Sequence
  RPE65 RNA guide
uagucuuccccacccccagcc

SEQ ID NO: 25704 - RNA, 21 nt, Artificial Sequence
  RPE65 RNA guide
uaucaacaugcucagcucaca

SEQ ID NO: 25705 - RNA, 21 nt, Artificial Sequence
  RPE65 RNA guide
uaucuccuuccuagggguuga

SEQ ID NO: 25706 - RNA, 21 nt, Artificial Sequence
  RPE65 RNA guide
uaucucugcggacuuugagca

SEQ ID NO: 25707 - RNA, 21 nt, Artificial Sequence
  RPE65 RNA guide
uauggaagggggucccagauc

SEQ ID NO: 25708 - RNA, 21 nt, Artificial Sequence
  RPE65 RNA guide
uauucucccacccuaucaaca

SEQ ID NO: 25709 - RNA, 21 nt, Artificial Sequence
  RPE65 RNA guide
ucaaagccuguucacuccugc

SEQ ID NO: 25710 - RNA, 21 nt, Artificial Sequence
  RPE65 RNA guide
ucaaaguccgcagagauagag

SEQ ID NO: 25711 - RNA, 21 nt, Artificial Sequence
  RPE65 RNA guide
ucaacaugcucagcucacagc

SEQ ID NO: 25712 - RNA, 21 nt, Artificial Sequence
  RPE65 RNA guide
ucaacaugggcuucuuccuua

SEQ ID NO: 25713 - RNA, 21 nt, Artificial Sequence
  RPE65 RNA guide
ucaaccccuaggaaggagaua

SEQ ID NO: 25714 - RNA, 21 nt, Artificial Sequence
  RPE65 RNA guide
ucaagagacaugaccucucuu

SEQ ID NO: 25715 - RNA, 21 nt, Artificial Sequence
  RPE65 RNA guide
ucaaggagagacccauuuauc

SEQ ID NO: 25716 - RNA, 21 nt, Artificial Sequence
  RPE65 RNA guide
ucaaucaauccuacugccauc

SEQ ID NO: 25717 - RNA, 21 nt, Artificial Sequence
  RPE65 RNA guide
ucaauccuacugccaucaguu

SEQ ID NO: 25718 - RNA, 21 nt, Artificial Sequence
  RPE65 RNA guide
ucaaugaugcugugagcugag

SEQ ID NO: 25719 - RNA, 21 nt, Artificial Sequence
  RPE65 RNA guide
ucacagcaucauugauuuucu

SEQ ID NO: 25720 - RNA, 21 nt, Artificial Sequence
  RPE65 RNA guide
ucaccuucgcuucucccccca

SEQ ID NO: 25721 - RNA, 21 nt, Artificial Sequence
  RPE65 RNA guide
ucacgugcuccucccgcccuc

SEQ ID NO: 25722 - RNA, 21 nt, Artificial Sequence
  RPE65 RNA guide
ucacuccugccggucuagucu

SEQ ID NO: 25723 - RNA, 21 nt, Artificial Sequence
  RPE65 RNA guide
ucacugcucugaugucaagag

SEQ ID NO: 25724 - RNA, 21 nt, Artificial Sequence
  RPE65 RNA guide
ucacuuccugaaauuuguucc

SEQ ID NO: 25725 - RNA, 21 nt, Artificial Sequence
  RPE65 RNA guide
ucagagcagugaucugggacc

SEQ ID NO: 25726 - RNA, 21 nt, Artificial Sequence
  RPE65 RNA guide
ucagcucacagcaucauugau

SEQ ID NO: 25727 - RNA, 21 nt, Artificial Sequence
  RPE65 RNA guide
ucagcuggguggggguggggg

SEQ ID NO: 25728 - RNA, 21 nt, Artificial Sequence
  RPE65 RNA guide
ucaggaagugaacugauggca

SEQ ID NO: 25729 - RNA, 21 nt, Artificial Sequence
  RPE65 RNA guide
ucagguauggaaggggguccc

SEQ ID NO: 25730 - RNA, 21 nt, Artificial Sequence
  RPE65 RNA guide
ucaguucacuuccugaaauuu

SEQ ID NO: 25731 - RNA, 21 nt, Artificial Sequence
  RPE65 RNA guide
ucaugucucuugacaucagag

SEQ ID NO: 25732 - RNA, 21 nt, Artificial Sequence
  RPE65 RNA guide
ucauugauuuucuugccucaa

SEQ ID NO: 25733 - RNA, 21 nt, Artificial Sequence
  RPE65 RNA guide
uccauaccugaguagucuucc

SEQ ID NO: 25734 - RNA, 21 nt, Artificial Sequence
  RPE65 RNA guide
ucccacaguauucucccaccc

SEQ ID NO: 25735 - RNA, 21 nt, Artificial Sequence
  RPE65 RNA guide
ucccacccuaucaacaugcuc

SEQ ID NO: 25736 - RNA, 21 nt, Artificial Sequence
  RPE65 RNA guide
ucccagaucacugcucugaug

SEQ ID NO: 25737 - RNA, 21 nt, Artificial Sequence
  RPE65 RNA guide
uccccacccccagccucacgu

SEQ ID NO: 25738 - RNA, 21 nt, Artificial Sequence
  RPE65 RNA guide
uccccccacccccacccccac

SEQ ID NO: 25739 - RNA, 21 nt, Artificial Sequence
  RPE65 RNA guide
ucccgcccucaccuucgcuuc

SEQ ID NO: 25740 - RNA, 21 nt, Artificial Sequence
  RPE65 RNA guide
uccgaaguaaggaaaaacugc

SEQ ID NO: 25741 - RNA, 21 nt, Artificial Sequence
  RPE65 RNA guide
uccgcagagauagaggcagag

SEQ ID NO: 25742 - RNA, 21 nt, Artificial Sequence
  RPE65 RNA guide
uccuaaacaggguccuuccca

SEQ ID NO: 25743 - RNA, 21 nt, Artificial Sequence
  RPE65 RNA guide
uccuacugccaucaguucacu

SEQ ID NO: 25744 - RNA, 21 nt, Artificial Sequence
  RPE65 RNA guide
uccucccgcccucaccuucgc

SEQ ID NO: 25745 - RNA, 21 nt, Artificial Sequence
  RPE65 RNA guide
uccucugcaguuuuuccuuac

SEQ ID NO: 25746 - RNA, 21 nt, Artificial Sequence
  RPE65 RNA guide
uccugaaauuuguuccuaaac

SEQ ID NO: 25747 - RNA, 21 nt, Artificial Sequence
  RPE65 RNA guide
uccugcagcucugccucuauc

SEQ ID NO: 25748 - RNA, 21 nt, Artificial Sequence
  RPE65 RNA guide
uccugccggucuagucucagc

SEQ ID NO: 25749 - RNA, 21 nt, Artificial Sequence
  RPE65 RNA guide
uccuguccucugcaguuuuuc

SEQ ID NO: 25750 - RNA, 21 nt, Artificial Sequence
  RPE65 RNA guide
uccuuacuucggaagacaaau

SEQ ID NO: 25751 - RNA, 21 nt, Artificial Sequence
  RPE65 RNA guide
uccuucccacaguauucuccc

SEQ ID NO: 25752 - RNA, 21 nt, Artificial Sequence
  RPE65 RNA guide
uccuugaggcaagaaaaucaa

SEQ ID NO: 25753 - RNA, 21 nt, Artificial Sequence
  RPE65 RNA guide
ucgcuucuccccccaccccca

SEQ ID NO: 25754 - RNA, 21 nt, Artificial Sequence
  RPE65 RNA guide
ucggaagacaaaucaaucaau

SEQ ID NO: 25755 - RNA, 21 nt, Artificial Sequence
  RPE65 RNA guide
ucuagggcuggcucaaagccu

SEQ ID NO: 25756 - RNA, 21 nt, Artificial Sequence
  RPE65 RNA guide
ucuagucucagcugggugggg

SEQ ID NO: 25757 - RNA, 21 nt, Artificial Sequence
  RPE65 RNA guide
ucuaucucugcggacuuugag

SEQ ID NO: 25758 - RNA, 21 nt, Artificial Sequence
  RPE65 RNA guide
ucucaaccccuaggaaggaga

SEQ ID NO: 25759 - RNA, 21 nt, Artificial Sequence
  RPE65 RNA guide
ucucagcuggguggggguggg

SEQ ID NO: 25760 - RNA, 21 nt, Artificial Sequence
  RPE65 RNA guide
ucucccacccuaucaacaugc

SEQ ID NO: 25761 - RNA, 21 nt, Artificial Sequence
  RPE65 RNA guide
ucuccccccacccccaccccc

SEQ ID NO: 25762 - RNA, 21 nt, Artificial Sequence
  RPE65 RNA guide
ucuccugcagcucugccucua

SEQ ID NO: 25763 - RNA, 21 nt, Artificial Sequence
  RPE65 RNA guide
ucuccuugaggcaagaaaauc

SEQ ID NO: 25764 - RNA, 21 nt, Artificial Sequence
  RPE65 RNA guide
ucucucaaccccuaggaagga

SEQ ID NO: 25765 - RNA, 21 nt, Artificial Sequence
  RPE65 RNA guide
ucucuccugcagcucugccuc

SEQ ID NO: 25766 - RNA, 21 nt, Artificial Sequence
  RPE65 RNA guide
ucucuccuugaggcaagaaaa

SEQ ID NO: 25767 - RNA, 21 nt, Artificial Sequence
  RPE65 RNA guide
ucucugcggacuuugagcauc

SEQ ID NO: 25768 - RNA, 21 nt, Artificial Sequence
  RPE65 RNA guide
ucucuugacaucagagcagug

SEQ ID NO: 25769 - RNA, 21 nt, Artificial Sequence
  RPE65 RNA guide
ucucuuuuaaugucaaugguu

SEQ ID NO: 25770 - RNA, 21 nt, Artificial Sequence
  RPE65 RNA guide
ucugaugucaagagacaugac

SEQ ID NO: 25771 - RNA, 21 nt, Artificial Sequence
  RPE65 RNA guide
ucugcaguuuuuccuuacuuc

SEQ ID NO: 25772 - RNA, 21 nt, Artificial Sequence
  RPE65 RNA guide
ucugccucuaucucugcggac

SEQ ID NO: 25773 - RNA, 21 nt, Artificial Sequence
  RPE65 RNA guide
ucugcggacuuugagcaucaa

SEQ ID NO: 25774 - RNA, 21 nt, Artificial Sequence
  RPE65 RNA guide
ucugggacccccuuccauacc

SEQ ID NO: 25775 - RNA, 21 nt, Artificial Sequence
  RPE65 RNA guide
ucuuccccacccccagccuca

SEQ ID NO: 25776 - RNA, 21 nt, Artificial Sequence
  RPE65 RNA guide
ucuuccgaaguaaggaaaaac

SEQ ID NO: 25777 - RNA, 21 nt, Artificial Sequence
  RPE65 RNA guide
ucuuccuuauucuuccaccau

SEQ ID NO: 25778 - RNA, 21 nt, Artificial Sequence
  RPE65 RNA guide
ucuugacaucagagcagugau

SEQ ID NO: 25779 - RNA, 21 nt, Artificial Sequence
  RPE65 RNA guide
ucuugccucaaggagagaccc

SEQ ID NO: 25780 - RNA, 21 nt, Artificial Sequence
  RPE65 RNA guide
ucuuuuaaugucaaugguuac

SEQ ID NO: 25781 - RNA, 21 nt, Artificial Sequence
  RPE65 RNA guide
ugaaaugguggaagaauaagg

SEQ ID NO: 25782 - RNA, 21 nt, Artificial Sequence
  RPE65 RNA guide
ugaaauuuguuccuaaacagg

SEQ ID NO: 25783 - RNA, 21 nt, Artificial Sequence
  RPE65 RNA guide
ugaacaggcuuugagccagcc

SEQ ID NO: 25784 - RNA, 21 nt, Artificial Sequence
  RPE65 RNA guide
ugaacugauggcaguaggauu

SEQ ID NO: 25785 - RNA, 21 nt, Artificial Sequence
  RPE65 RNA guide
ugaacuuaauccuguccucug

SEQ ID NO: 25786 - RNA, 21 nt, Artificial Sequence
  RPE65 RNA guide
ugacaucagagcagugaucug

SEQ ID NO: 25787 - RNA, 21 nt, Artificial Sequence
  RPE65 RNA guide
ugacauuaaaagagaggucau

SEQ ID NO: 25788 - RNA, 21 nt, Artificial Sequence
  RPE65 RNA guide
ugagacuagaccggcaggagu

SEQ ID NO: 25789 - RNA, 21 nt, Artificial Sequence
  RPE65 RNA guide
ugagcaucaacaugggcuucu

SEQ ID NO: 25790 - RNA, 21 nt, Artificial Sequence
  RPE65 RNA guide
ugagcauguugauaggguggg

SEQ ID NO: 25791 - RNA, 21 nt, Artificial Sequence
  RPE65 RNA guide
ugagccagcccuagagugccu

SEQ ID NO: 25792 - RNA, 21 nt, Artificial Sequence
  RPE65 RNA guide
ugagcugagcauguugauagg

SEQ ID NO: 25793 - RNA, 21 nt, Artificial Sequence
  RPE65 RNA guide
ugaggcaagaaaaucaaugau

SEQ ID NO: 25794 - RNA, 21 nt, Artificial Sequence
  RPE65 RNA guide
ugaggcuggggguggggaaga

SEQ ID NO: 25795 - RNA, 21 nt, Artificial Sequence
  RPE65 RNA guide
ugagggcgggaggagcacgug

SEQ ID NO: 25796 - RNA, 21 nt, Artificial Sequence
  RPE65 RNA guide
ugaguagucuuccccaccccc

SEQ ID NO: 25797 - RNA, 21 nt, Artificial Sequence
  RPE65 RNA guide
ugauagggugggagaauacug

SEQ ID NO: 25798 - RNA, 21 nt, Artificial Sequence
  RPE65 RNA guide
ugaucugggacccccuuccau

SEQ ID NO: 25799 - RNA, 21 nt, Artificial Sequence
  RPE65 RNA guide
ugaugcucaaaguccgcagag

SEQ ID NO: 25800 - RNA, 21 nt, Artificial Sequence
  RPE65 RNA guide
ugaugcugugagcugagcaug

SEQ ID NO: 25801 - RNA, 21 nt, Artificial Sequence
  RPE65 RNA guide
ugauggcaguaggauugauug

SEQ ID NO: 25802 - RNA, 21 nt, Artificial Sequence
  RPE65 RNA guide
ugaugucaagagacaugaccu

SEQ ID NO: 25803 - RNA, 21 nt, Artificial Sequence
  RPE65 RNA guide
ugauugauuugucuuccgaag

SEQ ID NO: 25804 - RNA, 21 nt, Artificial Sequence
  RPE65 RNA guide
ugauuugucuuccgaaguaag

SEQ ID NO: 25805 - RNA, 21 nt, Artificial Sequence
  RPE65 RNA guide
ugauuuucuugccucaaggag

SEQ ID NO: 25806 - RNA, 21 nt, Artificial Sequence
  RPE65 RNA guide
ugcagaggacaggauuaaguu

SEQ ID NO: 25807 - RNA, 21 nt, Artificial Sequence
  RPE65 RNA guide
ugcagcucugccucuaucucu

SEQ ID NO: 25808 - RNA, 21 nt, Artificial Sequence
  RPE65 RNA guide
ugcaggagagaaggcacucua

SEQ ID NO: 25809 - RNA, 21 nt, Artificial Sequence
  RPE65 RNA guide
ugcaguuuuuccuuacuucgg

SEQ ID NO: 25810 - RNA, 21 nt, Artificial Sequence
  RPE65 RNA guide
ugccaucaguucacuuccuga

SEQ ID NO: 25811 - RNA, 21 nt, Artificial Sequence
  RPE65 RNA guide
ugccggucuagucucagcugg

SEQ ID NO: 25812 - RNA, 21 nt, Artificial Sequence
  RPE65 RNA guide
ugccucaaggagagacccauu

SEQ ID NO: 25813 - RNA, 21 nt, Artificial Sequence
  RPE65 RNA guide
ugccucuaucucugcggacuu

SEQ ID NO: 25814 - RNA, 21 nt, Artificial Sequence
  RPE65 RNA guide
ugccuucucuccugcagcucu

SEQ ID NO: 25815 - RNA, 21 nt, Artificial Sequence
  RPE65 RNA guide
ugcggacuuugagcaucaaca

SEQ ID NO: 25816 - RNA, 21 nt, Artificial Sequence
  RPE65 RNA guide
ugcucaaaguccgcagagaua

SEQ ID NO: 25817 - RNA, 21 nt, Artificial Sequence
  RPE65 RNA guide
ugcucagcucacagcaucauu

SEQ ID NO: 25818 - RNA, 21 nt, Artificial Sequence
  RPE65 RNA guide
ugcuccucccgcccucaccuu

SEQ ID NO: 25819 - RNA, 21 nt, Artificial Sequence
  RPE65 RNA guide
ugcucugaugucaagagacau

SEQ ID NO: 25820 - RNA, 21 nt, Artificial Sequence
  RPE65 RNA guide
ugcugugagcugagcauguug

SEQ ID NO: 25821 - RNA, 21 nt, Artificial Sequence
  RPE65 RNA guide
uggaagaauaaggaagaagcc

SEQ ID NO: 25822 - RNA, 21 nt, Artificial Sequence
  RPE65 RNA guide
uggaagggggucccagaucac

SEQ ID NO: 25823 - RNA, 21 nt, Artificial Sequence
  RPE65 RNA guide
uggcaguaggauugauugauu

SEQ ID NO: 25824 - RNA, 21 nt, Artificial Sequence
  RPE65 RNA guide
uggcucaaagccuguucacuc

SEQ ID NO: 25825 - RNA, 21 nt, Artificial Sequence
  RPE65 RNA guide
ugggaaggacccuguuuagga

SEQ ID NO: 25826 - RNA, 21 nt, Artificial Sequence
  RPE65 RNA guide
ugggacccccuuccauaccug

SEQ ID NO: 25827 - RNA, 21 nt, Artificial Sequence
  RPE65 RNA guide
ugggagaauacugugggaagg

SEQ ID NO: 25828 - RNA, 21 nt, Artificial Sequence
  RPE65 RNA guide
ugggcuucuuccuuauucuuc

SEQ ID NO: 25829 - RNA, 21 nt, Artificial Sequence
  RPE65 RNA guide
uggggaagacuacucagguau

SEQ ID NO: 25830 - RNA, 21 nt, Artificial Sequence
  RPE65 RNA guide
uggggggagaagcgaagguga

SEQ ID NO: 25831 - RNA, 21 nt, Artificial Sequence
  RPE65 RNA guide
uggggguggggaagacuacuc

SEQ ID NO: 25832 - RNA, 21 nt, Artificial Sequence
  RPE65 RNA guide
uggggguggggggagaagcga

SEQ ID NO: 25833 - RNA, 21 nt, Artificial Sequence
  RPE65 RNA guide
uggggguggggguggggggag

SEQ ID NO: 25834 - RNA, 21 nt, Artificial Sequence
  RPE65 RNA guide
ugggucucuccuugaggcaag

SEQ ID NO: 25835 - RNA, 21 nt, Artificial Sequence
  RPE65 RNA guide
ugggugggggugggggugggg

SEQ ID NO: 25836 - RNA, 21 nt, Artificial Sequence
  RPE65 RNA guide
ugguggaagaauaaggaagaa

SEQ ID NO: 25837 - RNA, 21 nt, Artificial Sequence
  RPE65 RNA guide
ugguuacagugaacuuaaucc

SEQ ID NO: 25838 - RNA, 21 nt, Artificial Sequence
  RPE65 RNA guide
uguaaccauugacauuaaaag

SEQ ID NO: 25839 - RNA, 21 nt, Artificial Sequence
  RPE65 RNA guide
ugucaagagacaugaccucuc

SEQ ID NO: 25840 - RNA, 21 nt, Artificial Sequence
  RPE65 RNA guide
uguccucugcaguuuuuccuu

SEQ ID NO: 25841 - RNA, 21 nt, Artificial Sequence
  RPE65 RNA guide
ugucucuugacaucagagcag

SEQ ID NO: 25842 - RNA, 21 nt, Artificial Sequence
  RPE65 RNA guide
ugucuuccgaaguaaggaaaa

SEQ ID NO: 25843 - RNA, 21 nt, Artificial Sequence
  RPE65 RNA guide
ugugagcugagcauguugaua

SEQ ID NO: 25844 - RNA, 21 nt, Artificial Sequence
  RPE65 RNA guide
ugugggaaggacccuguuuag

SEQ ID NO: 25845 - RNA, 21 nt, Artificial Sequence
  RPE65 RNA guide
uguucacuccugccggucuag

SEQ ID NO: 25846 - RNA, 21 nt, Artificial Sequence
  RPE65 RNA guide
uguuccuaaacaggguccuuc

SEQ ID NO: 25847 - RNA, 21 nt, Artificial Sequence
  RPE65 RNA guide
uguugauagggugggagaaua

SEQ ID NO: 25848 - RNA, 21 nt, Artificial Sequence
  RPE65 RNA guide
uguugaugcucaaaguccgca

SEQ ID NO: 25849 - RNA, 21 nt, Artificial Sequence
  RPE65 RNA guide
uguuuaggaacaaauuucagg

SEQ ID NO: 25850 - RNA, 21 nt, Artificial Sequence
  RPE65 RNA guide
uuaaaagagaggucaugucuc

SEQ ID NO: 25851 - RNA, 21 nt, Artificial Sequence
  RPE65 RNA guide
uuaauccuguccucugcaguu

SEQ ID NO: 25852 - RNA, 21 nt, Artificial Sequence
  RPE65 RNA guide
uuacagugaacuuaauccugu

SEQ ID NO: 25853 - RNA, 21 nt, Artificial Sequence
  RPE65 RNA guide
uuacuucggaagacaaaucaa

SEQ ID NO: 25854 - RNA, 21 nt, Artificial Sequence
  RPE65 RNA guide
uuaggaacaaauuucaggaag

SEQ ID NO: 25855 - RNA, 21 nt, Artificial Sequence
  RPE65 RNA guide
uuaucuccuuccuagggguug

SEQ ID NO: 25856 - RNA, 21 nt, Artificial Sequence
  RPE65 RNA guide
uucacuccugccggucuaguc

SEQ ID NO: 25857 - RNA, 21 nt, Artificial Sequence
  RPE65 RNA guide
uucacuuccugaaauuuguuc

SEQ ID NO: 25858 - RNA, 21 nt, Artificial Sequence
  RPE65 RNA guide
uucaggaagugaacugauggc

SEQ ID NO: 25859 - RNA, 21 nt, Artificial Sequence
  RPE65 RNA guide
uuccauaccugaguagucuuc

SEQ ID NO: 25860 - RNA, 21 nt, Artificial Sequence
  RPE65 RNA guide
uucccacaguauucucccacc

SEQ ID NO: 25861 - RNA, 21 nt, Artificial Sequence
  RPE65 RNA guide
uuccccacccccagccucacg

SEQ ID NO: 25862 - RNA, 21 nt, Artificial Sequence
  RPE65 RNA guide
uuccgaaguaaggaaaaacug

SEQ ID NO: 25863 - RNA, 21 nt, Artificial Sequence
  RPE65 RNA guide
uuccuaaacaggguccuuccc

SEQ ID NO: 25864 - RNA, 21 nt, Artificial Sequence
  RPE65 RNA guide
uuccugaaauuuguuccuaaa

SEQ ID NO: 25865 - RNA, 21 nt, Artificial Sequence
  RPE65 RNA guide
uuccuuacuucggaagacaaa

SEQ ID NO: 25866 - RNA, 21 nt, Artificial Sequence
  RPE65 RNA guide
uucgcuucuccccccaccccc

SEQ ID NO: 25867 - RNA, 21 nt, Artificial Sequence
  RPE65 RNA guide
uucggaagacaaaucaaucaa

SEQ ID NO: 25868 - RNA, 21 nt, Artificial Sequence
  RPE65 RNA guide
uucucccacccuaucaacaug

SEQ ID NO: 25869 - RNA, 21 nt, Artificial Sequence
  RPE65 RNA guide
uucuccccccacccccacccc

SEQ ID NO: 25870 - RNA, 21 nt, Artificial Sequence
  RPE65 RNA guide
uucucuccugcagcucugccu

SEQ ID NO: 25871 - RNA, 21 nt, Artificial Sequence
  RPE65 RNA guide
uucuuccuuauucuuccacca

SEQ ID NO: 25872 - RNA, 21 nt, Artificial Sequence
  RPE65 RNA guide
uucuugccucaaggagagacc

SEQ ID NO: 25873 - RNA, 21 nt, Artificial Sequence
  RPE65 RNA guide
uugacaucagagcagugaucu

SEQ ID NO: 25874 - RNA, 21 nt, Artificial Sequence
  RPE65 RNA guide
uugacauuaaaagagagguca

SEQ ID NO: 25875 - RNA, 21 nt, Artificial Sequence
  RPE65 RNA guide
uugagcaucaacaugggcuuc

SEQ ID NO: 25876 - RNA, 21 nt, Artificial Sequence
  RPE65 RNA guide
uugagccagcccuagagugcc

SEQ ID NO: 25877 - RNA, 21 nt, Artificial Sequence
  RPE65 RNA guide
uugaggcaagaaaaucaauga

SEQ ID NO: 25878 - RNA, 21 nt, Artificial Sequence
  RPE65 RNA guide
uugauagggugggagaauacu

SEQ ID NO: 25879 - RNA, 21 nt, Artificial Sequence
  RPE65 RNA guide
uugaugcucaaaguccgcaga

SEQ ID NO: 25880 - RNA, 21 nt, Artificial Sequence
  RPE65 RNA guide
uugauugauuugucuuccgaa

SEQ ID NO: 25881 - RNA, 21 nt, Artificial Sequence
  RPE65 RNA guide
uugauuugucuuccgaaguaa

SEQ ID NO: 25882 - RNA, 21 nt, Artificial Sequence
  RPE65 RNA guide
uugauuuucuugccucaagga

SEQ ID NO: 25883 - RNA, 21 nt, Artificial Sequence
  RPE65 RNA guide
uugccucaaggagagacccau

SEQ ID NO: 25884 - RNA, 21 nt, Artificial Sequence
  RPE65 RNA guide
uugucuuccgaaguaaggaaa

SEQ ID NO: 25885 - RNA, 21 nt, Artificial Sequence
  RPE65 RNA guide
uuguuccuaaacaggguccuu

SEQ ID NO: 25886 - RNA, 21 nt, Artificial Sequence
  RPE65 RNA guide
uuuaaugucaaugguuacagu

SEQ ID NO: 25887 - RNA, 21 nt, Artificial Sequence
  RPE65 RNA guide
uuuaggaacaaauuucaggaa

SEQ ID NO: 25888 - RNA, 21 nt, Artificial Sequence
  RPE65 RNA guide
uuuaucuccuuccuagggguu

SEQ ID NO: 25889 - RNA, 21 nt, Artificial Sequence
  RPE65 RNA guide
uuucaggaagugaacugaugg

SEQ ID NO: 25890 - RNA, 21 nt, Artificial Sequence
  RPE65 RNA guide
uuuccuuacuucggaagacaa

SEQ ID NO: 25891 - RNA, 21 nt, Artificial Sequence
  RPE65 RNA guide
uuucuugccucaaggagagac

SEQ ID NO: 25892 - RNA, 21 nt, Artificial Sequence
  RPE65 RNA guide
uuugagcaucaacaugggcuu

SEQ ID NO: 25893 - RNA, 21 nt, Artificial Sequence
  RPE65 RNA guide
uuugagccagcccuagagugc

SEQ ID NO: 25894 - RNA, 21 nt, Artificial Sequence
  RPE65 RNA guide
uuugucuuccgaaguaaggaa

SEQ ID NO: 25895 - RNA, 21 nt, Artificial Sequence
  RPE65 RNA guide
uuuguuccuaaacaggguccu

SEQ ID NO: 25896 - RNA, 21 nt, Artificial Sequence
  RPE65 RNA guide
uuuuccuuacuucggaagaca

SEQ ID NO: 25897 - RNA, 21 nt, Artificial Sequence
  RPE65 RNA guide
uuuucuugccucaaggagaga

SEQ ID NO: 25898 - RNA, 21 nt, Artificial Sequence
  RPE65 RNA guide
uuuuuccuuacuucggaagac

SEQ ID NO: 25899 - RNA, 22 nt, Artificial Sequence
  RPE65 RNA guide
aaaaacugcagaggacaggauu

SEQ ID NO: 25900 - RNA, 22 nt, Artificial Sequence
  RPE65 RNA guide
aaaacugcagaggacaggauua

SEQ ID NO: 25901 - RNA, 22 nt, Artificial Sequence
  RPE65 RNA guide
aaaagagaggucaugucucuug

SEQ ID NO: 25902 - RNA, 22 nt, Artificial Sequence
  RPE65 RNA guide
aaaaucaaugaugcugugagcu

SEQ ID NO: 25903 - RNA, 22 nt, Artificial Sequence
  RPE65 RNA guide
aaacaggguccuucccacagua

SEQ ID NO: 25904 - RNA, 22 nt, Artificial Sequence
  RPE65 RNA guide
aaacugcagaggacaggauuaa

SEQ ID NO: 25905 - RNA, 22 nt, Artificial Sequence
  RPE65 RNA guide
aaagagaggucaugucucuuga

SEQ ID NO: 25906 - RNA, 22 nt, Artificial Sequence
  RPE65 RNA guide
aaagccuguucacuccugccgg

SEQ ID NO: 25907 - RNA, 22 nt, Artificial Sequence
  RPE65 RNA guide
aaaguccgcagagauagaggca

SEQ ID NO: 25908 - RNA, 22 nt, Artificial Sequence
  RPE65 RNA guide
aaaucaaucaauccuacugcca

SEQ ID NO: 25909 - RNA, 22 nt, Artificial Sequence
  RPE65 RNA guide
aaaucaaugaugcugugagcug

SEQ ID NO: 25910 - RNA, 22 nt, Artificial Sequence
  RPE65 RNA guide
aaaugggucucuccuugaggca

SEQ ID NO: 25911 - RNA, 22 nt, Artificial Sequence
  RPE65 RNA guide
aaaugguggaagaauaaggaag

SEQ ID NO: 25912 - RNA, 22 nt, Artificial Sequence
  RPE65 RNA guide
aaauuucaggaagugaacugau

SEQ ID NO: 25913 - RNA, 22 nt, Artificial Sequence
  RPE65 RNA guide
aaauuuguuccuaaacaggguc

SEQ ID NO: 25914 - RNA, 22 nt, Artificial Sequence
  RPE65 RNA guide
aacaaauuucaggaagugaacu

SEQ ID NO: 25915 - RNA, 22 nt, Artificial Sequence
  RPE65 RNA guide
aacaggcuuugagccagcccua

SEQ ID NO: 25916 - RNA, 22 nt, Artificial Sequence
  RPE65 RNA guide
aacaggguccuucccacaguau

SEQ ID NO: 25917 - RNA, 22 nt, Artificial Sequence
  RPE65 RNA guide
aacaugcucagcucacagcauc

SEQ ID NO: 25918 - RNA, 22 nt, Artificial Sequence
  RPE65 RNA guide
aacaugggcuucuuccuuauuc

SEQ ID NO: 25919 - RNA, 22 nt, Artificial Sequence
  RPE65 RNA guide
aaccccuaggaaggagauaaau

SEQ ID NO: 25920 - RNA, 22 nt, Artificial Sequence
  RPE65 RNA guide
aacugauggcaguaggauugau

SEQ ID NO: 25921 - RNA, 22 nt, Artificial Sequence
  RPE65 RNA guide
aacugcagaggacaggauuaag

SEQ ID NO: 25922 - RNA, 22 nt, Artificial Sequence
  RPE65 RNA guide
aacuuaauccuguccucugcag

SEQ ID NO: 25923 - RNA, 22 nt, Artificial Sequence
  RPE65 RNA guide
aagaaaaucaaugaugcuguga

SEQ ID NO: 25924 - RNA, 22 nt, Artificial Sequence
  RPE65 RNA guide
aagaagcccauguugaugcuca

SEQ ID NO: 25925 - RNA, 22 nt, Artificial Sequence
  RPE65 RNA guide
aagaauaaggaagaagcccaug

SEQ ID NO: 25926 - RNA, 22 nt, Artificial Sequence
  RPE65 RNA guide
aagacaaaucaaucaauccuac

SEQ ID NO: 25927 - RNA, 22 nt, Artificial Sequence
  RPE65 RNA guide
aagacuacucagguauggaagg

SEQ ID NO: 25928 - RNA, 22 nt, Artificial Sequence
  RPE65 RNA guide
aagagacaugaccucucuuuua

SEQ ID NO: 25929 - RNA, 22 nt, Artificial Sequence
  RPE65 RNA guide
aagagaggucaugucucuugac

SEQ ID NO: 25930 - RNA, 22 nt, Artificial Sequence
  RPE65 RNA guide
aagcccauguugaugcucaaag

SEQ ID NO: 25931 - RNA, 22 nt, Artificial Sequence
  RPE65 RNA guide
aagccuguucacuccugccggu

SEQ ID NO: 25932 - RNA, 22 nt, Artificial Sequence
  RPE65 RNA guide
aagcgaaggugagggcgggagg

SEQ ID NO: 25933 - RNA, 22 nt, Artificial Sequence
  RPE65 RNA guide
aaggaaaaacugcagaggacag

SEQ ID NO: 25934 - RNA, 22 nt, Artificial Sequence
  RPE65 RNA guide
aaggaagaagcccauguugaug

SEQ ID NO: 25935 - RNA, 22 nt, Artificial Sequence
  RPE65 RNA guide
aaggacccuguuuaggaacaaa

SEQ ID NO: 25936 - RNA, 22 nt, Artificial Sequence
  RPE65 RNA guide
aaggagagacccauuuaucucc

SEQ ID NO: 25937 - RNA, 22 nt, Artificial Sequence
  RPE65 RNA guide
aaggagauaaaugggucucucc

SEQ ID NO: 25938 - RNA, 22 nt, Artificial Sequence
  RPE65 RNA guide
aaggcacucuagggcuggcuca

SEQ ID NO: 25939 - RNA, 22 nt, Artificial Sequence
  RPE65 RNA guide
aagggggucccagaucacugcu

SEQ ID NO: 25940 - RNA, 22 nt, Artificial Sequence
  RPE65 RNA guide
aaggugagggcgggaggagcac

SEQ ID NO: 25941 - RNA, 22 nt, Artificial Sequence
  RPE65 RNA guide
aaguaaggaaaaacugcagagg

SEQ ID NO: 25942 - RNA, 22 nt, Artificial Sequence
  RPE65 RNA guide
aaguccgcagagauagaggcag

SEQ ID NO: 25943 - RNA, 22 nt, Artificial Sequence
  RPE65 RNA guide
aagugaacugauggcaguagga

SEQ ID NO: 25944 - RNA, 22 nt, Artificial Sequence
  RPE65 RNA guide
aauaaggaagaagcccauguug

SEQ ID NO: 25945 - RNA, 22 nt, Artificial Sequence
  RPE65 RNA guide
aauacugugggaaggacccugu

SEQ ID NO: 25946 - RNA, 22 nt, Artificial Sequence
  RPE65 RNA guide
aaucaaucaauccuacugccau

SEQ ID NO: 25947 - RNA, 22 nt, Artificial Sequence
  RPE65 RNA guide
aaucaauccuacugccaucagu

SEQ ID NO: 25948 - RNA, 22 nt, Artificial Sequence
  RPE65 RNA guide
aaucaaugaugcugugagcuga

SEQ ID NO: 25949 - RNA, 22 nt, Artificial Sequence
  RPE65 RNA guide
aauccuacugccaucaguucac

SEQ ID NO: 25950 - RNA, 22 nt, Artificial Sequence
  RPE65 RNA guide
aauccuguccucugcaguuuuu

SEQ ID NO: 25951 - RNA, 22 nt, Artificial Sequence
  RPE65 RNA guide
aaugaugcugugagcugagcau

SEQ ID NO: 25952 - RNA, 22 nt, Artificial Sequence
  RPE65 RNA guide
aaugggucucuccuugaggcaa

SEQ ID NO: 25953 - RNA, 22 nt, Artificial Sequence
  RPE65 RNA guide
aaugguggaagaauaaggaaga

SEQ ID NO: 25954 - RNA, 22 nt, Artificial Sequence
  RPE65 RNA guide
aauuucaggaagugaacugaug

SEQ ID NO: 25955 - RNA, 22 nt, Artificial Sequence
  RPE65 RNA guide
aauuuguuccuaaacagggucc

SEQ ID NO: 25956 - RNA, 22 nt, Artificial Sequence
  RPE65 RNA guide
acaaaucaaucaauccuacugc

SEQ ID NO: 25957 - RNA, 22 nt, Artificial Sequence
  RPE65 RNA guide
acaaauuucaggaagugaacug

SEQ ID NO: 25958 - RNA, 22 nt, Artificial Sequence
  RPE65 RNA guide
acagcaucauugauuuucuugc

SEQ ID NO: 25959 - RNA, 22 nt, Artificial Sequence
  RPE65 RNA guide
acaggcuuugagccagcccuag

SEQ ID NO: 25960 - RNA, 22 nt, Artificial Sequence
  RPE65 RNA guide
acaggguccuucccacaguauu

SEQ ID NO: 25961 - RNA, 22 nt, Artificial Sequence
  RPE65 RNA guide
acaguauucucccacccuauca

SEQ ID NO: 25962 - RNA, 22 nt, Artificial Sequence
  RPE65 RNA guide
acagugaacuuaauccuguccu

SEQ ID NO: 25963 - RNA, 22 nt, Artificial Sequence
  RPE65 RNA guide
acaucagagcagugaucuggga

SEQ ID NO: 25964 - RNA, 22 nt, Artificial Sequence
  RPE65 RNA guide
acaugcucagcucacagcauca

SEQ ID NO: 25965 - RNA, 22 nt, Artificial Sequence
  RPE65 RNA guide
acaugggcuucuuccuuauucu

SEQ ID NO: 25966 - RNA, 22 nt, Artificial Sequence
  RPE65 RNA guide
acauuaaaagagaggucauguc

SEQ ID NO: 25967 - RNA, 22 nt, Artificial Sequence
  RPE65 RNA guide
acccagcugagacuagaccggc

SEQ ID NO: 25968 - RNA, 22 nt, Artificial Sequence
  RPE65 RNA guide
acccauuuaucuccuuccuagg

SEQ ID NO: 25969 - RNA, 22 nt, Artificial Sequence
  RPE65 RNA guide
acccccacccagcugagacuag

SEQ ID NO: 25970 - RNA, 22 nt, Artificial Sequence
  RPE65 RNA guide
acccccacccccacccagcuga

SEQ ID NO: 25971 - RNA, 22 nt, Artificial Sequence
  RPE65 RNA guide
acccccagccucacgugcuccu

SEQ ID NO: 25972 - RNA, 22 nt, Artificial Sequence
  RPE65 RNA guide
acccccuuccauaccugaguag

SEQ ID NO: 25973 - RNA, 22 nt, Artificial Sequence
  RPE65 RNA guide
accccuaggaaggagauaaaug

SEQ ID NO: 25974 - RNA, 22 nt, Artificial Sequence
  RPE65 RNA guide
acccuaucaacaugcucagcuc

SEQ ID NO: 25975 - RNA, 22 nt, Artificial Sequence
  RPE65 RNA guide
acccuguuuaggaacaaauuuc

SEQ ID NO: 25976 - RNA, 22 nt, Artificial Sequence
  RPE65 RNA guide
accggcaggagugaacaggcuu

SEQ ID NO: 25977 - RNA, 22 nt, Artificial Sequence
  RPE65 RNA guide
accugaguagucuuccccaccc

SEQ ID NO: 25978 - RNA, 22 nt, Artificial Sequence
  RPE65 RNA guide
accuucgcuucuccccccaccc

SEQ ID NO: 25979 - RNA, 22 nt, Artificial Sequence
  RPE65 RNA guide
acgugaggcuggggguggggaa

SEQ ID NO: 25980 - RNA, 22 nt, Artificial Sequence
  RPE65 RNA guide
acgugcuccucccgcccucacc

SEQ ID NO: 25981 - RNA, 22 nt, Artificial Sequence
  RPE65 RNA guide
acuacucagguauggaaggggg

SEQ ID NO: 25982 - RNA, 22 nt, Artificial Sequence
  RPE65 RNA guide
acuagaccggcaggagugaaca

SEQ ID NO: 25983 - RNA, 22 nt, Artificial Sequence
  RPE65 RNA guide
acucagguauggaagggggucc

SEQ ID NO: 25984 - RNA, 22 nt, Artificial Sequence
  RPE65 RNA guide
acuccugccggucuagucucag

SEQ ID NO: 25985 - RNA, 22 nt, Artificial Sequence
  RPE65 RNA guide
acucuagggcuggcucaaagcc

SEQ ID NO: 25986 - RNA, 22 nt, Artificial Sequence
  RPE65 RNA guide
acugauggcaguaggauugauu

SEQ ID NO: 25987 - RNA, 22 nt, Artificial Sequence
  RPE65 RNA guide
acugcagaggacaggauuaagu

SEQ ID NO: 25988 - RNA, 22 nt, Artificial Sequence
  RPE65 RNA guide
acugccaucaguucacuuccug

SEQ ID NO: 25989 - RNA, 22 nt, Artificial Sequence
  RPE65 RNA guide
acugcucugaugucaagagaca

SEQ ID NO: 25990 - RNA, 22 nt, Artificial Sequence
  RPE65 RNA guide
acuguaaccauugacauuaaaa

SEQ ID NO: 25991 - RNA, 22 nt, Artificial Sequence
  RPE65 RNA guide
acugugggaaggacccuguuua

SEQ ID NO: 25992 - RNA, 22 nt, Artificial Sequence
  RPE65 RNA guide
acuuaauccuguccucugcagu

SEQ ID NO: 25993 - RNA, 22 nt, Artificial Sequence
  RPE65 RNA guide
acuuccugaaauuuguuccuaa

SEQ ID NO: 25994 - RNA, 22 nt, Artificial Sequence
  RPE65 RNA guide
acuucggaagacaaaucaauca

SEQ ID NO: 25995 - RNA, 22 nt, Artificial Sequence
  RPE65 RNA guide
acuuugagcaucaacaugggcu

SEQ ID NO: 25996 - RNA, 22 nt, Artificial Sequence
  RPE65 RNA guide
agaaaaucaaugaugcugugag

SEQ ID NO: 25997 - RNA, 22 nt, Artificial Sequence
  RPE65 RNA guide
agaagcccauguugaugcucaa

SEQ ID NO: 25998 - RNA, 22 nt, Artificial Sequence
  RPE65 RNA guide
agaagcgaaggugagggcggga

SEQ ID NO: 25999 - RNA, 22 nt, Artificial Sequence
  RPE65 RNA guide
agaaggcacucuagggcuggcu

SEQ ID NO: 26000 - RNA, 22 nt, Artificial Sequence
  RPE65 RNA guide
agaauaaggaagaagcccaugu

SEQ ID NO: 26001 - RNA, 22 nt, Artificial Sequence
  RPE65 RNA guide
agaauacugugggaaggacccu

SEQ ID NO: 26002 - RNA, 22 nt, Artificial Sequence
  RPE65 RNA guide
agacaaaucaaucaauccuacu

SEQ ID NO: 26003 - RNA, 22 nt, Artificial Sequence
  RPE65 RNA guide
agacccauuuaucuccuuccua

SEQ ID NO: 26004 - RNA, 22 nt, Artificial Sequence
  RPE65 RNA guide
agaccggcaggagugaacaggc

SEQ ID NO: 26005 - RNA, 22 nt, Artificial Sequence
  RPE65 RNA guide
agacuacucagguauggaaggg

SEQ ID NO: 26006 - RNA, 22 nt, Artificial Sequence
  RPE65 RNA guide
agacuagaccggcaggagugaa

SEQ ID NO: 26007 - RNA, 22 nt, Artificial Sequence
  RPE65 RNA guide
agagaaggcacucuagggcugg

SEQ ID NO: 26008 - RNA, 22 nt, Artificial Sequence
  RPE65 RNA guide
agagacaugaccucucuuuuaa

SEQ ID NO: 26009 - RNA, 22 nt, Artificial Sequence
  RPE65 RNA guide
agagacccauuuaucuccuucc

SEQ ID NO: 26010 - RNA, 22 nt, Artificial Sequence
  RPE65 RNA guide
agagaggucaugucucuugaca

SEQ ID NO: 26011 - RNA, 22 nt, Artificial Sequence
  RPE65 RNA guide
agagauagaggcagagcugcag

SEQ ID NO: 26012 - RNA, 22 nt, Artificial Sequence
  RPE65 RNA guide
agagcagugaucugggaccccc

SEQ ID NO: 26013 - RNA, 22 nt, Artificial Sequence
  RPE65 RNA guide
agagcugcaggagagaaggcac

SEQ ID NO: 26014 - RNA, 22 nt, Artificial Sequence
  RPE65 RNA guide
agaggacaggauuaaguucacu

SEQ ID NO: 26015 - RNA, 22 nt, Artificial Sequence
  RPE65 RNA guide
agaggcagagcugcaggagaga

SEQ ID NO: 26016 - RNA, 22 nt, Artificial Sequence
  RPE65 RNA guide
agaggucaugucucuugacauc

SEQ ID NO: 26017 - RNA, 22 nt, Artificial Sequence
  RPE65 RNA guide
agagugccuucucuccugcagc

SEQ ID NO: 26018 - RNA, 22 nt, Artificial Sequence
  RPE65 RNA guide
agauaaaugggucucuccuuga

SEQ ID NO: 26019 - RNA, 22 nt, Artificial Sequence
  RPE65 RNA guide
agauagaggcagagcugcagga

SEQ ID NO: 26020 - RNA, 22 nt, Artificial Sequence
  RPE65 RNA guide
agaucacugcucugaugucaag

SEQ ID NO: 26021 - RNA, 22 nt, Artificial Sequence
  RPE65 RNA guide
agcacgugaggcuggggguggg

SEQ ID NO: 26022 - RNA, 22 nt, Artificial Sequence
  RPE65 RNA guide
agcagugaucugggacccccuu

SEQ ID NO: 26023 - RNA, 22 nt, Artificial Sequence
  RPE65 RNA guide
agcaucaacaugggcuucuucc

SEQ ID NO: 26024 - RNA, 22 nt, Artificial Sequence
  RPE65 RNA guide
agcaucauugauuuucuugccu

SEQ ID NO: 26025 - RNA, 22 nt, Artificial Sequence
  RPE65 RNA guide
agcauguugauagggugggaga

SEQ ID NO: 26026 - RNA, 22 nt, Artificial Sequence
  RPE65 RNA guide
agccagcccuagagugccuucu

SEQ ID NO: 26027 - RNA, 22 nt, Artificial Sequence
  RPE65 RNA guide
agcccauguugaugcucaaagu

SEQ ID NO: 26028 - RNA, 22 nt, Artificial Sequence
  RPE65 RNA guide
agcccuagagugccuucucucc

SEQ ID NO: 26029 - RNA, 22 nt, Artificial Sequence
  RPE65 RNA guide
agccucacgugcuccucccgcc

SEQ ID NO: 26030 - RNA, 22 nt, Artificial Sequence
  RPE65 RNA guide
agccuguucacuccugccgguc

SEQ ID NO: 26031 - RNA, 22 nt, Artificial Sequence
  RPE65 RNA guide
agcgaaggugagggcgggagga

SEQ ID NO: 26032 - RNA, 22 nt, Artificial Sequence
  RPE65 RNA guide
agcucacagcaucauugauuuu

SEQ ID NO: 26033 - RNA, 22 nt, Artificial Sequence
  RPE65 RNA guide
agcucugccucuaucucugcgg

SEQ ID NO: 26034 - RNA, 22 nt, Artificial Sequence
  RPE65 RNA guide
agcugagacuagaccggcagga

SEQ ID NO: 26035 - RNA, 22 nt, Artificial Sequence
  RPE65 RNA guide
agcugagcauguugauagggug

SEQ ID NO: 26036 - RNA, 22 nt, Artificial Sequence
  RPE65 RNA guide
agcugcaggagagaaggcacuc

SEQ ID NO: 26037 - RNA, 22 nt, Artificial Sequence
  RPE65 RNA guide
aggaaaaacugcagaggacagg

SEQ ID NO: 26038 - RNA, 22 nt, Artificial Sequence
  RPE65 RNA guide
aggaacaaauuucaggaaguga

SEQ ID NO: 26039 - RNA, 22 nt, Artificial Sequence
  RPE65 RNA guide
aggaagaagcccauguugaugc

SEQ ID NO: 26040 - RNA, 22 nt, Artificial Sequence
  RPE65 RNA guide
aggaaggagauaaaugggucuc

SEQ ID NO: 26041 - RNA, 22 nt, Artificial Sequence
  RPE65 RNA guide
aggaagugaacugauggcagua

SEQ ID NO: 26042 - RNA, 22 nt, Artificial Sequence
  RPE65 RNA guide
aggacaggauuaaguucacugu

SEQ ID NO: 26043 - RNA, 22 nt, Artificial Sequence
  RPE65 RNA guide
aggacccuguuuaggaacaaau

SEQ ID NO: 26044 - RNA, 22 nt, Artificial Sequence
  RPE65 RNA guide
aggagagaaggcacucuagggc

SEQ ID NO: 26045 - RNA, 22 nt, Artificial Sequence
  RPE65 RNA guide
aggagagacccauuuaucuccu

SEQ ID NO: 26046 - RNA, 22 nt, Artificial Sequence
  RPE65 RNA guide
aggagauaaaugggucucuccu

SEQ ID NO: 26047 - RNA, 22 nt, Artificial Sequence
  RPE65 RNA guide
aggagcacgugaggcugggggu

SEQ ID NO: 26048 - RNA, 22 nt, Artificial Sequence
  RPE65 RNA guide
aggagugaacaggcuuugagcc

SEQ ID NO: 26049 - RNA, 22 nt, Artificial Sequence
  RPE65 RNA guide
aggauugauugauuugucuucc

SEQ ID NO: 26050 - RNA, 22 nt, Artificial Sequence
  RPE65 RNA guide
aggcaagaaaaucaaugaugcu

SEQ ID NO: 26051 - RNA, 22 nt, Artificial Sequence
  RPE65 RNA guide
aggcacucuagggcuggcucaa

SEQ ID NO: 26052 - RNA, 22 nt, Artificial Sequence
  RPE65 RNA guide
aggcagagcugcaggagagaag

SEQ ID NO: 26053 - RNA, 22 nt, Artificial Sequence
  RPE65 RNA guide
aggcuggggguggggaagacua

SEQ ID NO: 26054 - RNA, 22 nt, Artificial Sequence
  RPE65 RNA guide
aggcuuugagccagcccuagag

SEQ ID NO: 26055 - RNA, 22 nt, Artificial Sequence
  RPE65 RNA guide
agggcgggaggagcacgugagg

SEQ ID NO: 26056 - RNA, 22 nt, Artificial Sequence
  RPE65 RNA guide
agggcuggcucaaagccuguuc

SEQ ID NO: 26057 - RNA, 22 nt, Artificial Sequence
  RPE65 RNA guide
agggggucccagaucacugcuc

SEQ ID NO: 26058 - RNA, 22 nt, Artificial Sequence
  RPE65 RNA guide
aggguccuucccacaguauucu

SEQ ID NO: 26059 - RNA, 22 nt, Artificial Sequence
  RPE65 RNA guide
agggugggagaauacuguggga

SEQ ID NO: 26060 - RNA, 22 nt, Artificial Sequence
  RPE65 RNA guide
agguauggaagggggucccaga

SEQ ID NO: 26061 - RNA, 22 nt, Artificial Sequence
  RPE65 RNA guide
aggucaugucucuugacaucag

SEQ ID NO: 26062 - RNA, 22 nt, Artificial Sequence
  RPE65 RNA guide
aggugagggcgggaggagcacg

SEQ ID NO: 26063 - RNA, 22 nt, Artificial Sequence
  RPE65 RNA guide
aguaaggaaaaacugcagagga

SEQ ID NO: 26064 - RNA, 22 nt, Artificial Sequence
  RPE65 RNA guide
aguaggauugauugauuugucu

SEQ ID NO: 26065 - RNA, 22 nt, Artificial Sequence
  RPE65 RNA guide
aguagucuuccccacccccagc

SEQ ID NO: 26066 - RNA, 22 nt, Artificial Sequence
  RPE65 RNA guide
aguauucucccacccuaucaac

SEQ ID NO: 26067 - RNA, 22 nt, Artificial Sequence
  RPE65 RNA guide
aguccgcagagauagaggcaga

SEQ ID NO: 26068 - RNA, 22 nt, Artificial Sequence
  RPE65 RNA guide
agucucagcugggugggggugg

SEQ ID NO: 26069 - RNA, 22 nt, Artificial Sequence
  RPE65 RNA guide
agucuuccccacccccagccuc

SEQ ID NO: 26070 - RNA, 22 nt, Artificial Sequence
  RPE65 RNA guide
agugaacaggcuuugagccagc

SEQ ID NO: 26071 - RNA, 22 nt, Artificial Sequence
  RPE65 RNA guide
agugaacugauggcaguaggau

SEQ ID NO: 26072 - RNA, 22 nt, Artificial Sequence
  RPE65 RNA guide
agugaacuuaauccuguccucu

SEQ ID NO: 26073 - RNA, 22 nt, Artificial Sequence
  RPE65 RNA guide
agugaucugggacccccuucca

SEQ ID NO: 26074 - RNA, 22 nt, Artificial Sequence
  RPE65 RNA guide
agugccuucucuccugcagcuc

SEQ ID NO: 26075 - RNA, 22 nt, Artificial Sequence
  RPE65 RNA guide
aguucacuuccugaaauuuguu

SEQ ID NO: 26076 - RNA, 22 nt, Artificial Sequence
  RPE65 RNA guide
aguuuuuccuuacuucggaaga

SEQ ID NO: 26077 - RNA, 22 nt, Artificial Sequence
  RPE65 RNA guide
auaaaugggucucuccuugagg

SEQ ID NO: 26078 - RNA, 22 nt, Artificial Sequence
  RPE65 RNA guide
auaaggaagaagcccauguuga

SEQ ID NO: 26079 - RNA, 22 nt, Artificial Sequence
  RPE65 RNA guide
auaccugaguagucuuccccac

SEQ ID NO: 26080 - RNA, 22 nt, Artificial Sequence
  RPE65 RNA guide
auacugugggaaggacccuguu

SEQ ID NO: 26081 - RNA, 22 nt, Artificial Sequence
  RPE65 RNA guide
auagaggcagagcugcaggaga

SEQ ID NO: 26082 - RNA, 22 nt, Artificial Sequence
  RPE65 RNA guide
auagggugggagaauacugugg

SEQ ID NO: 26083 - RNA, 22 nt, Artificial Sequence
  RPE65 RNA guide
aucaacaugcucagcucacagc

SEQ ID NO: 26084 - RNA, 22 nt, Artificial Sequence
  RPE65 RNA guide
aucaacaugggcuucuuccuua

SEQ ID NO: 26085 - RNA, 22 nt, Artificial Sequence
  RPE65 RNA guide
aucaaucaauccuacugccauc

SEQ ID NO: 26086 - RNA, 22 nt, Artificial Sequence
  RPE65 RNA guide
aucaauccuacugccaucaguu

SEQ ID NO: 26087 - RNA, 22 nt, Artificial Sequence
  RPE65 RNA guide
aucaaugaugcugugagcugag

SEQ ID NO: 26088 - RNA, 22 nt, Artificial Sequence
  RPE65 RNA guide
aucacugcucugaugucaagag

SEQ ID NO: 26089 - RNA, 22 nt, Artificial Sequence
  RPE65 RNA guide
aucagagcagugaucugggacc

SEQ ID NO: 26090 - RNA, 22 nt, Artificial Sequence
  RPE65 RNA guide
aucaguucacuuccugaaauuu

SEQ ID NO: 26091 - RNA, 22 nt, Artificial Sequence
  RPE65 RNA guide
aucauugauuuucuugccucaa

SEQ ID NO: 26092 - RNA, 22 nt, Artificial Sequence
  RPE65 RNA guide
auccuacugccaucaguucacu

SEQ ID NO: 26093 - RNA, 22 nt, Artificial Sequence
  RPE65 RNA guide
auccuguccucugcaguuuuuc

SEQ ID NO: 26094 - RNA, 22 nt, Artificial Sequence
  RPE65 RNA guide
aucucugcggacuuugagcauc

SEQ ID NO: 26095 - RNA, 22 nt, Artificial Sequence
  RPE65 RNA guide
aucugggacccccuuccauacc

SEQ ID NO: 26096 - RNA, 22 nt, Artificial Sequence
  RPE65 RNA guide
augaugcugugagcugagcaug

SEQ ID NO: 26097 - RNA, 22 nt, Artificial Sequence
  RPE65 RNA guide
augcucaaaguccgcagagaua

SEQ ID NO: 26098 - RNA, 22 nt, Artificial Sequence
  RPE65 RNA guide
augcucagcucacagcaucauu

SEQ ID NO: 26099 - RNA, 22 nt, Artificial Sequence
  RPE65 RNA guide
augcugugagcugagcauguug

SEQ ID NO: 26100 - RNA, 22 nt, Artificial Sequence
  RPE65 RNA guide
auggaagggggucccagaucac

SEQ ID NO: 26101 - RNA, 22 nt, Artificial Sequence
  RPE65 RNA guide
auggcaguaggauugauugauu

SEQ ID NO: 26102 - RNA, 22 nt, Artificial Sequence
  RPE65 RNA guide
augggcuucuuccuuauucuuc

SEQ ID NO: 26103 - RNA, 22 nt, Artificial Sequence
  RPE65 RNA guide
augggucucuccuugaggcaag

SEQ ID NO: 26104 - RNA, 22 nt, Artificial Sequence
  RPE65 RNA guide
augguggaagaauaaggaagaa

SEQ ID NO: 26105 - RNA, 22 nt, Artificial Sequence
  RPE65 RNA guide
augguuacagugaacuuaaucc

SEQ ID NO: 26106 - RNA, 22 nt, Artificial Sequence
  RPE65 RNA guide
augucaagagacaugaccucuc

SEQ ID NO: 26107 - RNA, 22 nt, Artificial Sequence
  RPE65 RNA guide
augucucuugacaucagagcag

SEQ ID NO: 26108 - RNA, 22 nt, Artificial Sequence
  RPE65 RNA guide
auguugauagggugggagaaua

SEQ ID NO: 26109 - RNA, 22 nt, Artificial Sequence
  RPE65 RNA guide
auguugaugcucaaaguccgca

SEQ ID NO: 26110 - RNA, 22 nt, Artificial Sequence
  RPE65 RNA guide
auuaaaagagaggucaugucuc

SEQ ID NO: 26111 - RNA, 22 nt, Artificial Sequence
  RPE65 RNA guide
auucucccacccuaucaacaug

SEQ ID NO: 26112 - RNA, 22 nt, Artificial Sequence
  RPE65 RNA guide
auugauugauuugucuuccgaa

SEQ ID NO: 26113 - RNA, 22 nt, Artificial Sequence
  RPE65 RNA guide
auugauuugucuuccgaaguaa

SEQ ID NO: 26114 - RNA, 22 nt, Artificial Sequence
  RPE65 RNA guide
auugauuuucuugccucaagga

SEQ ID NO: 26115 - RNA, 22 nt, Artificial Sequence
  RPE65 RNA guide
auuuaucuccuuccuagggguu

SEQ ID NO: 26116 - RNA, 22 nt, Artificial Sequence
  RPE65 RNA guide
auuucaggaagugaacugaugg

SEQ ID NO: 26117 - RNA, 22 nt, Artificial Sequence
  RPE65 RNA guide
auuugucuuccgaaguaaggaa

SEQ ID NO: 26118 - RNA, 22 nt, Artificial Sequence
  RPE65 RNA guide
auuuguuccuaaacaggguccu

SEQ ID NO: 26119 - RNA, 22 nt, Artificial Sequence
  RPE65 RNA guide
auuuucuugccucaaggagaga

SEQ ID NO: 26120 - RNA, 22 nt, Artificial Sequence
  RPE65 RNA guide
caaagccuguucacuccugccg

SEQ ID NO: 26121 - RNA, 22 nt, Artificial Sequence
  RPE65 RNA guide
caaaguccgcagagauagaggc

SEQ ID NO: 26122 - RNA, 22 nt, Artificial Sequence
  RPE65 RNA guide
caaaucaaucaauccuacugcc

SEQ ID NO: 26123 - RNA, 22 nt, Artificial Sequence
  RPE65 RNA guide
caaauuucaggaagugaacuga

SEQ ID NO: 26124 - RNA, 22 nt, Artificial Sequence
  RPE65 RNA guide
caacaugcucagcucacagcau

SEQ ID NO: 26125 - RNA, 22 nt, Artificial Sequence
  RPE65 RNA guide
caacaugggcuucuuccuuauu

SEQ ID NO: 26126 - RNA, 22 nt, Artificial Sequence
  RPE65 RNA guide
caaccccuaggaaggagauaaa

SEQ ID NO: 26127 - RNA, 22 nt, Artificial Sequence
  RPE65 RNA guide
caagaaaaucaaugaugcugug

SEQ ID NO: 26128 - RNA, 22 nt, Artificial Sequence
  RPE65 RNA guide
caagagacaugaccucucuuuu

SEQ ID NO: 26129 - RNA, 22 nt, Artificial Sequence
  RPE65 RNA guide
caaggagagacccauuuaucuc

SEQ ID NO: 26130 - RNA, 22 nt, Artificial Sequence
  RPE65 RNA guide
caaucaauccuacugccaucag

SEQ ID NO: 26131 - RNA, 22 nt, Artificial Sequence
  RPE65 RNA guide
caauccuacugccaucaguuca

SEQ ID NO: 26132 - RNA, 22 nt, Artificial Sequence
  RPE65 RNA guide
caaugaugcugugagcugagca

SEQ ID NO: 26133 - RNA, 22 nt, Artificial Sequence
  RPE65 RNA guide
cacagcaucauugauuuucuug

SEQ ID NO: 26134 - RNA, 22 nt, Artificial Sequence
  RPE65 RNA guide
cacaguauucucccacccuauc

SEQ ID NO: 26135 - RNA, 22 nt, Artificial Sequence
  RPE65 RNA guide
cacccagcugagacuagaccgg

SEQ ID NO: 26136 - RNA, 22 nt, Artificial Sequence
  RPE65 RNA guide
cacccccacccagcugagacua

SEQ ID NO: 26137 - RNA, 22 nt, Artificial Sequence
  RPE65 RNA guide
cacccccacccccacccagcug

SEQ ID NO: 26138 - RNA, 22 nt, Artificial Sequence
  RPE65 RNA guide
cacccccagccucacgugcucc

SEQ ID NO: 26139 - RNA, 22 nt, Artificial Sequence
  RPE65 RNA guide
cacccuaucaacaugcucagcu

SEQ ID NO: 26140 - RNA, 22 nt, Artificial Sequence
  RPE65 RNA guide
caccuucgcuucuccccccacc

SEQ ID NO: 26141 - RNA, 22 nt, Artificial Sequence
  RPE65 RNA guide
cacgugaggcugggggugggga

SEQ ID NO: 26142 - RNA, 22 nt, Artificial Sequence
  RPE65 RNA guide
cacgugcuccucccgcccucac

SEQ ID NO: 26143 - RNA, 22 nt, Artificial Sequence
  RPE65 RNA guide
cacuccugccggucuagucuca

SEQ ID NO: 26144 - RNA, 22 nt, Artificial Sequence
  RPE65 RNA guide
cacucuagggcuggcucaaagc

SEQ ID NO: 26145 - RNA, 22 nt, Artificial Sequence
  RPE65 RNA guide
cacugcucugaugucaagagac

SEQ ID NO: 26146 - RNA, 22 nt, Artificial Sequence
  RPE65 RNA guide
cacuuccugaaauuuguuccua

SEQ ID NO: 26147 - RNA, 22 nt, Artificial Sequence
  RPE65 RNA guide
cagagauagaggcagagcugca

SEQ ID NO: 26148 - RNA, 22 nt, Artificial Sequence
  RPE65 RNA guide
cagagcagugaucugggacccc

SEQ ID NO: 26149 - RNA, 22 nt, Artificial Sequence
  RPE65 RNA guide
cagagcugcaggagagaaggca

SEQ ID NO: 26150 - RNA, 22 nt, Artificial Sequence
  RPE65 RNA guide
cagaggacaggauuaaguucac

SEQ ID NO: 26151 - RNA, 22 nt, Artificial Sequence
  RPE65 RNA guide
cagaucacugcucugaugucaa

SEQ ID NO: 26152 - RNA, 22 nt, Artificial Sequence
  RPE65 RNA guide
cagcaucauugauuuucuugcc

SEQ ID NO: 26153 - RNA, 22 nt, Artificial Sequence
  RPE65 RNA guide
cagcccuagagugccuucucuc

SEQ ID NO: 26154 - RNA, 22 nt, Artificial Sequence
  RPE65 RNA guide
cagccucacgugcuccucccgc

SEQ ID NO: 26155 - RNA, 22 nt, Artificial Sequence
  RPE65 RNA guide
cagcucacagcaucauugauuu

SEQ ID NO: 26156 - RNA, 22 nt, Artificial Sequence
  RPE65 RNA guide
cagcucugccucuaucucugcg

SEQ ID NO: 26157 - RNA, 22 nt, Artificial Sequence
  RPE65 RNA guide
cagcugagacuagaccggcagg

SEQ ID NO: 26158 - RNA, 22 nt, Artificial Sequence
  RPE65 RNA guide
caggaagugaacugauggcagu

SEQ ID NO: 26159 - RNA, 22 nt, Artificial Sequence
  RPE65 RNA guide
caggagagaaggcacucuaggg

SEQ ID NO: 26160 - RNA, 22 nt, Artificial Sequence
  RPE65 RNA guide
caggagugaacaggcuuugagc

SEQ ID NO: 26161 - RNA, 22 nt, Artificial Sequence
  RPE65 RNA guide
caggcuuugagccagcccuaga

SEQ ID NO: 26162 - RNA, 22 nt, Artificial Sequence
  RPE65 RNA guide
caggguccuucccacaguauuc

SEQ ID NO: 26163 - RNA, 22 nt, Artificial Sequence
  RPE65 RNA guide
cagguauggaagggggucccag

SEQ ID NO: 26164 - RNA, 22 nt, Artificial Sequence
  RPE65 RNA guide
caguaggauugauugauuuguc

SEQ ID NO: 26165 - RNA, 22 nt, Artificial Sequence
  RPE65 RNA guide
caguauucucccacccuaucaa

SEQ ID NO: 26166 - RNA, 22 nt, Artificial Sequence
  RPE65 RNA guide
cagugaacuuaauccuguccuc

SEQ ID NO: 26167 - RNA, 22 nt, Artificial Sequence
  RPE65 RNA guide
cagugaucugggacccccuucc

SEQ ID NO: 26168 - RNA, 22 nt, Artificial Sequence
  RPE65 RNA guide
caguucacuuccugaaauuugu

SEQ ID NO: 26169 - RNA, 22 nt, Artificial Sequence
  RPE65 RNA guide
caguuuuuccuuacuucggaag

SEQ ID NO: 26170 - RNA, 22 nt, Artificial Sequence
  RPE65 RNA guide
cauaccugaguagucuucccca

SEQ ID NO: 26171 - RNA, 22 nt, Artificial Sequence
  RPE65 RNA guide
caucaacaugggcuucuuccuu

SEQ ID NO: 26172 - RNA, 22 nt, Artificial Sequence
  RPE65 RNA guide
caucagagcagugaucugggac

SEQ ID NO: 26173 - RNA, 22 nt, Artificial Sequence
  RPE65 RNA guide
caucaguucacuuccugaaauu

SEQ ID NO: 26174 - RNA, 22 nt, Artificial Sequence
  RPE65 RNA guide
caucauugauuuucuugccuca

SEQ ID NO: 26175 - RNA, 22 nt, Artificial Sequence
  RPE65 RNA guide
caugcucagcucacagcaucau

SEQ ID NO: 26176 - RNA, 22 nt, Artificial Sequence
  RPE65 RNA guide
caugggcuucuuccuuauucuu

SEQ ID NO: 26177 - RNA, 22 nt, Artificial Sequence
  RPE65 RNA guide
caugucucuugacaucagagca

SEQ ID NO: 26178 - RNA, 22 nt, Artificial Sequence
  RPE65 RNA guide
cauguugauagggugggagaau

SEQ ID NO: 26179 - RNA, 22 nt, Artificial Sequence
  RPE65 RNA guide
cauguugaugcucaaaguccgc

SEQ ID NO: 26180 - RNA, 22 nt, Artificial Sequence
  RPE65 RNA guide
cauuaaaagagaggucaugucu

SEQ ID NO: 26181 - RNA, 22 nt, Artificial Sequence
  RPE65 RNA guide
cauugauuuucuugccucaagg

SEQ ID NO: 26182 - RNA, 22 nt, Artificial Sequence
  RPE65 RNA guide
cauuuaucuccuuccuaggggu

SEQ ID NO: 26183 - RNA, 22 nt, Artificial Sequence
  RPE65 RNA guide
ccacaguauucucccacccuau

SEQ ID NO: 26184 - RNA, 22 nt, Artificial Sequence
  RPE65 RNA guide
ccacccagcugagacuagaccg

SEQ ID NO: 26185 - RNA, 22 nt, Artificial Sequence
  RPE65 RNA guide
ccacccccacccagcugagacu

SEQ ID NO: 26186 - RNA, 22 nt, Artificial Sequence
  RPE65 RNA guide
ccacccccacccccacccagcu

SEQ ID NO: 26187 - RNA, 22 nt, Artificial Sequence
  RPE65 RNA guide
ccacccccagccucacgugcuc

SEQ ID NO: 26188 - RNA, 22 nt, Artificial Sequence
  RPE65 RNA guide
ccacccuaucaacaugcucagc

SEQ ID NO: 26189 - RNA, 22 nt, Artificial Sequence
  RPE65 RNA guide
ccagaucacugcucugauguca

SEQ ID NO: 26190 - RNA, 22 nt, Artificial Sequence
  RPE65 RNA guide
ccagcccuagagugccuucucu

SEQ ID NO: 26191 - RNA, 22 nt, Artificial Sequence
  RPE65 RNA guide
ccagccucacgugcuccucccg

SEQ ID NO: 26192 - RNA, 22 nt, Artificial Sequence
  RPE65 RNA guide
ccagcugagacuagaccggcag

SEQ ID NO: 26193 - RNA, 22 nt, Artificial Sequence
  RPE65 RNA guide
ccauaccugaguagucuucccc

SEQ ID NO: 26194 - RNA, 22 nt, Artificial Sequence
  RPE65 RNA guide
ccaucaguucacuuccugaaau

SEQ ID NO: 26195 - RNA, 22 nt, Artificial Sequence
  RPE65 RNA guide
ccauguugaugcucaaaguccg

SEQ ID NO: 26196 - RNA, 22 nt, Artificial Sequence
  RPE65 RNA guide
ccauuuaucuccuuccuagggg

SEQ ID NO: 26197 - RNA, 22 nt, Artificial Sequence
  RPE65 RNA guide
cccacaguauucucccacccua

SEQ ID NO: 26198 - RNA, 22 nt, Artificial Sequence
  RPE65 RNA guide
cccacccagcugagacuagacc

SEQ ID NO: 26199 - RNA, 22 nt, Artificial Sequence
  RPE65 RNA guide
cccacccccacccagcugagac

SEQ ID NO: 26200 - RNA, 22 nt, Artificial Sequence
  RPE65 RNA guide
cccacccccacccccacccagc

SEQ ID NO: 26201 - RNA, 22 nt, Artificial Sequence
  RPE65 RNA guide
cccacccccagccucacgugcu

SEQ ID NO: 26202 - RNA, 22 nt, Artificial Sequence
  RPE65 RNA guide
cccacccuaucaacaugcucag

SEQ ID NO: 26203 - RNA, 22 nt, Artificial Sequence
  RPE65 RNA guide
cccagaucacugcucugauguc

SEQ ID NO: 26204 - RNA, 22 nt, Artificial Sequence
  RPE65 RNA guide
cccagccucacgugcuccuccc

SEQ ID NO: 26205 - RNA, 22 nt, Artificial Sequence
  RPE65 RNA guide
cccagcugagacuagaccggca

SEQ ID NO: 26206 - RNA, 22 nt, Artificial Sequence
  RPE65 RNA guide
cccauguugaugcucaaagucc

SEQ ID NO: 26207 - RNA, 22 nt, Artificial Sequence
  RPE65 RNA guide
cccauuuaucuccuuccuaggg

SEQ ID NO: 26208 - RNA, 22 nt, Artificial Sequence
  RPE65 RNA guide
ccccacccagcugagacuagac

SEQ ID NO: 26209 - RNA, 22 nt, Artificial Sequence
  RPE65 RNA guide
ccccacccccacccagcugaga

SEQ ID NO: 26210 - RNA, 22 nt, Artificial Sequence
  RPE65 RNA guide
ccccacccccacccccacccag

SEQ ID NO: 26211 - RNA, 22 nt, Artificial Sequence
  RPE65 RNA guide
ccccacccccagccucacgugc

SEQ ID NO: 26212 - RNA, 22 nt, Artificial Sequence
  RPE65 RNA guide
ccccagccucacgugcuccucc

SEQ ID NO: 26213 - RNA, 22 nt, Artificial Sequence
  RPE65 RNA guide
cccccacccagcugagacuaga

SEQ ID NO: 26214 - RNA, 22 nt, Artificial Sequence
  RPE65 RNA guide
cccccacccccacccagcugag

SEQ ID NO: 26215 - RNA, 22 nt, Artificial Sequence
  RPE65 RNA guide
cccccagccucacgugcuccuc

SEQ ID NO: 26216 - RNA, 22 nt, Artificial Sequence
  RPE65 RNA guide
cccccuuccauaccugaguagu

SEQ ID NO: 26217 - RNA, 22 nt, Artificial Sequence
  RPE65 RNA guide
ccccuaggaaggagauaaaugg

SEQ ID NO: 26218 - RNA, 22 nt, Artificial Sequence
  RPE65 RNA guide
ccccuuccauaccugaguaguc

SEQ ID NO: 26219 - RNA, 22 nt, Artificial Sequence
  RPE65 RNA guide
cccgcccucaccuucgcuucuc

SEQ ID NO: 26220 - RNA, 22 nt, Artificial Sequence
  RPE65 RNA guide
cccuagagugccuucucuccug

SEQ ID NO: 26221 - RNA, 22 nt, Artificial Sequence
  RPE65 RNA guide
cccuaggaaggagauaaauggg

SEQ ID NO: 26222 - RNA, 22 nt, Artificial Sequence
  RPE65 RNA guide
cccuaucaacaugcucagcuca

SEQ ID NO: 26223 - RNA, 22 nt, Artificial Sequence
  RPE65 RNA guide
cccucaccuucgcuucuccccc

SEQ ID NO: 26224 - RNA, 22 nt, Artificial Sequence
  RPE65 RNA guide
cccuguuuaggaacaaauuuca

SEQ ID NO: 26225 - RNA, 22 nt, Artificial Sequence
  RPE65 RNA guide
cccuuccauaccugaguagucu

SEQ ID NO: 26226 - RNA, 22 nt, Artificial Sequence
  RPE65 RNA guide
ccgaaguaaggaaaaacugcag

SEQ ID NO: 26227 - RNA, 22 nt, Artificial Sequence
  RPE65 RNA guide
ccgcagagauagaggcagagcu

SEQ ID NO: 26228 - RNA, 22 nt, Artificial Sequence
  RPE65 RNA guide
ccgcccucaccuucgcuucucc

SEQ ID NO: 26229 - RNA, 22 nt, Artificial Sequence
  RPE65 RNA guide
ccggcaggagugaacaggcuuu

SEQ ID NO: 26230 - RNA, 22 nt, Artificial Sequence
  RPE65 RNA guide
ccggucuagucucagcugggug

SEQ ID NO: 26231 - RNA, 22 nt, Artificial Sequence
  RPE65 RNA guide
ccuaaacaggguccuucccaca

SEQ ID NO: 26232 - RNA, 22 nt, Artificial Sequence
  RPE65 RNA guide
ccuacugccaucaguucacuuc

SEQ ID NO: 26233 - RNA, 22 nt, Artificial Sequence
  RPE65 RNA guide
ccuagagugccuucucuccugc

SEQ ID NO: 26234 - RNA, 22 nt, Artificial Sequence
  RPE65 RNA guide
ccuaggaaggagauaaaugggu

SEQ ID NO: 26235 - RNA, 22 nt, Artificial Sequence
  RPE65 RNA guide
ccuaucaacaugcucagcucac

SEQ ID NO: 26236 - RNA, 22 nt, Artificial Sequence
  RPE65 RNA guide
ccucaaggagagacccauuuau

SEQ ID NO: 26237 - RNA, 22 nt, Artificial Sequence
  RPE65 RNA guide
ccucaccuucgcuucucccccc

SEQ ID NO: 26238 - RNA, 22 nt, Artificial Sequence
  RPE65 RNA guide
ccucacgugcuccucccgcccu

SEQ ID NO: 26239 - RNA, 22 nt, Artificial Sequence
  RPE65 RNA guide
ccucccgcccucaccuucgcuu

SEQ ID NO: 26240 - RNA, 22 nt, Artificial Sequence
  RPE65 RNA guide
ccucuaucucugcggacuuuga

SEQ ID NO: 26241 - RNA, 22 nt, Artificial Sequence
  RPE65 RNA guide
ccucugcaguuuuuccuuacuu

SEQ ID NO: 26242 - RNA, 22 nt, Artificial Sequence
  RPE65 RNA guide
ccugaaauuuguuccuaaacag

SEQ ID NO: 26243 - RNA, 22 nt, Artificial Sequence
  RPE65 RNA guide
ccugaguagucuuccccacccc

SEQ ID NO: 26244 - RNA, 22 nt, Artificial Sequence
  RPE65 RNA guide
ccugcagcucugccucuaucuc

SEQ ID NO: 26245 - RNA, 22 nt, Artificial Sequence
  RPE65 RNA guide
ccugccggucuagucucagcug

SEQ ID NO: 26246 - RNA, 22 nt, Artificial Sequence
  RPE65 RNA guide
ccuguccucugcaguuuuuccu

SEQ ID NO: 26247 - RNA, 22 nt, Artificial Sequence
  RPE65 RNA guide
ccuguucacuccugccggucua

SEQ ID NO: 26248 - RNA, 22 nt, Artificial Sequence
  RPE65 RNA guide
ccuguuuaggaacaaauuucag

SEQ ID NO: 26249 - RNA, 22 nt, Artificial Sequence
  RPE65 RNA guide
ccuuacuucggaagacaaauca

SEQ ID NO: 26250 - RNA, 22 nt, Artificial Sequence
  RPE65 RNA guide
ccuuccauaccugaguagucuu

SEQ ID NO: 26251 - RNA, 22 nt, Artificial Sequence
  RPE65 RNA guide
ccuucccacaguauucucccac

SEQ ID NO: 26252 - RNA, 22 nt, Artificial Sequence
  RPE65 RNA guide
ccuucgcuucuccccccacccc

SEQ ID NO: 26253 - RNA, 22 nt, Artificial Sequence
  RPE65 RNA guide
ccuucucuccugcagcucugcc

SEQ ID NO: 26254 - RNA, 22 nt, Artificial Sequence
  RPE65 RNA guide
ccuugaggcaagaaaaucaaug

SEQ ID NO: 26255 - RNA, 22 nt, Artificial Sequence
  RPE65 RNA guide
cgaaggugagggcgggaggagc

SEQ ID NO: 26256 - RNA, 22 nt, Artificial Sequence
  RPE65 RNA guide
cgaaguaaggaaaaacugcaga

SEQ ID NO: 26257 - RNA, 22 nt, Artificial Sequence
  RPE65 RNA guide
cgcagagauagaggcagagcug

SEQ ID NO: 26258 - RNA, 22 nt, Artificial Sequence
  RPE65 RNA guide
cgcccucaccuucgcuucuccc

SEQ ID NO: 26259 - RNA, 22 nt, Artificial Sequence
  RPE65 RNA guide
cgcuucuccccccacccccacc

SEQ ID NO: 26260 - RNA, 22 nt, Artificial Sequence
  RPE65 RNA guide
cggaagacaaaucaaucaaucc

SEQ ID NO: 26261 - RNA, 22 nt, Artificial Sequence
  RPE65 RNA guide
cggacuuugagcaucaacaugg

SEQ ID NO: 26262 - RNA, 22 nt, Artificial Sequence
  RPE65 RNA guide
cggcaggagugaacaggcuuug

SEQ ID NO: 26263 - RNA, 22 nt, Artificial Sequence
  RPE65 RNA guide
cgggaggagcacgugaggcugg

SEQ ID NO: 26264 - RNA, 22 nt, Artificial Sequence
  RPE65 RNA guide
cggucuagucucagcugggugg

SEQ ID NO: 26265 - RNA, 22 nt, Artificial Sequence
  RPE65 RNA guide
cgugaggcuggggguggggaag

SEQ ID NO: 26266 - RNA, 22 nt, Artificial Sequence
  RPE65 RNA guide
cgugcuccucccgcccucaccu

SEQ ID NO: 26267 - RNA, 22 nt, Artificial Sequence
  RPE65 RNA guide
cuaaacaggguccuucccacag

SEQ ID NO: 26268 - RNA, 22 nt, Artificial Sequence
  RPE65 RNA guide
cuacucagguauggaagggggu

SEQ ID NO: 26269 - RNA, 22 nt, Artificial Sequence
  RPE65 RNA guide
cuacugccaucaguucacuucc

SEQ ID NO: 26270 - RNA, 22 nt, Artificial Sequence
  RPE65 RNA guide
cuagaccggcaggagugaacag

SEQ ID NO: 26271 - RNA, 22 nt, Artificial Sequence
  RPE65 RNA guide
cuagagugccuucucuccugca

SEQ ID NO: 26272 - RNA, 22 nt, Artificial Sequence
  RPE65 RNA guide
cuaggaaggagauaaauggguc

SEQ ID NO: 26273 - RNA, 22 nt, Artificial Sequence
  RPE65 RNA guide
cuagggcuggcucaaagccugu

SEQ ID NO: 26274 - RNA, 22 nt, Artificial Sequence
  RPE65 RNA guide
cuagucucagcugggugggggu

SEQ ID NO: 26275 - RNA, 22 nt, Artificial Sequence
  RPE65 RNA guide
cuaucaacaugcucagcucaca

SEQ ID NO: 26276 - RNA, 22 nt, Artificial Sequence
  RPE65 RNA guide
cuaucucugcggacuuugagca

SEQ ID NO: 26277 - RNA, 22 nt, Artificial Sequence
  RPE65 RNA guide
cucaaagccuguucacuccugc

SEQ ID NO: 26278 - RNA, 22 nt, Artificial Sequence
  RPE65 RNA guide
cucaaaguccgcagagauagag

SEQ ID NO: 26279 - RNA, 22 nt, Artificial Sequence
  RPE65 RNA guide
cucaaccccuaggaaggagaua

SEQ ID NO: 26280 - RNA, 22 nt, Artificial Sequence
  RPE65 RNA guide
cucaaggagagacccauuuauc

SEQ ID NO: 26281 - RNA, 22 nt, Artificial Sequence
  RPE65 RNA guide
cucacagcaucauugauuuucu

SEQ ID NO: 26282 - RNA, 22 nt, Artificial Sequence
  RPE65 RNA guide
cucaccuucgcuucucccccca

SEQ ID NO: 26283 - RNA, 22 nt, Artificial Sequence
  RPE65 RNA guide
cucacgugcuccucccgcccuc

SEQ ID NO: 26284 - RNA, 22 nt, Artificial Sequence
  RPE65 RNA guide
cucagcucacagcaucauugau

SEQ ID NO: 26285 - RNA, 22 nt, Artificial Sequence
  RPE65 RNA guide
cucagcuggguggggguggggg

SEQ ID NO: 26286 - RNA, 22 nt, Artificial Sequence
  RPE65 RNA guide
cucagguauggaaggggguccc

SEQ ID NO: 26287 - RNA, 22 nt, Artificial Sequence
  RPE65 RNA guide
cucccacccuaucaacaugcuc

SEQ ID NO: 26288 - RNA, 22 nt, Artificial Sequence
  RPE65 RNA guide
cucccgcccucaccuucgcuuc

SEQ ID NO: 26289 - RNA, 22 nt, Artificial Sequence
  RPE65 RNA guide
cuccucccgcccucaccuucgc

SEQ ID NO: 26290 - RNA, 22 nt, Artificial Sequence
  RPE65 RNA guide
cuccugcagcucugccucuauc

SEQ ID NO: 26291 - RNA, 22 nt, Artificial Sequence
  RPE65 RNA guide
cuccugccggucuagucucagc

SEQ ID NO: 26292 - RNA, 22 nt, Artificial Sequence
  RPE65 RNA guide
cuccuugaggcaagaaaaucaa

SEQ ID NO: 26293 - RNA, 22 nt, Artificial Sequence
  RPE65 RNA guide
cucuagggcuggcucaaagccu

SEQ ID NO: 26294 - RNA, 22 nt, Artificial Sequence
  RPE65 RNA guide
cucuaucucugcggacuuugag

SEQ ID NO: 26295 - RNA, 22 nt, Artificial Sequence
  RPE65 RNA guide
cucucaaccccuaggaaggaga

SEQ ID NO: 26296 - RNA, 22 nt, Artificial Sequence
  RPE65 RNA guide
cucuccugcagcucugccucua

SEQ ID NO: 26297 - RNA, 22 nt, Artificial Sequence
  RPE65 RNA guide
cucuccuugaggcaagaaaauc

SEQ ID NO: 26298 - RNA, 22 nt, Artificial Sequence
  RPE65 RNA guide
cucugaugucaagagacaugac

SEQ ID NO: 26299 - RNA, 22 nt, Artificial Sequence
  RPE65 RNA guide
cucugcaguuuuuccuuacuuc

SEQ ID NO: 26300 - RNA, 22 nt, Artificial Sequence
  RPE65 RNA guide
cucugccucuaucucugcggac

SEQ ID NO: 26301 - RNA, 22 nt, Artificial Sequence
  RPE65 RNA guide
cucugcggacuuugagcaucaa

SEQ ID NO: 26302 - RNA, 22 nt, Artificial Sequence
  RPE65 RNA guide
cucuugacaucagagcagugau

SEQ ID NO: 26303 - RNA, 22 nt, Artificial Sequence
  RPE65 RNA guide
cugaaaugguggaagaauaagg

SEQ ID NO: 26304 - RNA, 22 nt, Artificial Sequence
  RPE65 RNA guide
cugaaauuuguuccuaaacagg

SEQ ID NO: 26305 - RNA, 22 nt, Artificial Sequence
  RPE65 RNA guide
cugagacuagaccggcaggagu

SEQ ID NO: 26306 - RNA, 22 nt, Artificial Sequence
  RPE65 RNA guide
cugagcauguugauaggguggg

SEQ ID NO: 26307 - RNA, 22 nt, Artificial Sequence
  RPE65 RNA guide
cugaguagucuuccccaccccc

SEQ ID NO: 26308 - RNA, 22 nt, Artificial Sequence
  RPE65 RNA guide
cugauggcaguaggauugauug

SEQ ID NO: 26309 - RNA, 22 nt, Artificial Sequence
  RPE65 RNA guide
cugaugucaagagacaugaccu

SEQ ID NO: 26310 - RNA, 22 nt, Artificial Sequence
  RPE65 RNA guide
cugcagaggacaggauuaaguu

SEQ ID NO: 26311 - RNA, 22 nt, Artificial Sequence
  RPE65 RNA guide
cugcagcucugccucuaucucu

SEQ ID NO: 26312 - RNA, 22 nt, Artificial Sequence
  RPE65 RNA guide
cugcaggagagaaggcacucua

SEQ ID NO: 26313 - RNA, 22 nt, Artificial Sequence
  RPE65 RNA guide
cugcaguuuuuccuuacuucgg

SEQ ID NO: 26314 - RNA, 22 nt, Artificial Sequence
  RPE65 RNA guide
cugccaucaguucacuuccuga

SEQ ID NO: 26315 - RNA, 22 nt, Artificial Sequence
  RPE65 RNA guide
cugccggucuagucucagcugg

SEQ ID NO: 26316 - RNA, 22 nt, Artificial Sequence
  RPE65 RNA guide
cugccucuaucucugcggacuu

SEQ ID NO: 26317 - RNA, 22 nt, Artificial Sequence
  RPE65 RNA guide
cugcggacuuugagcaucaaca

SEQ ID NO: 26318 - RNA, 22 nt, Artificial Sequence
  RPE65 RNA guide
cugcucugaugucaagagacau

SEQ ID NO: 26319 - RNA, 22 nt, Artificial Sequence
  RPE65 RNA guide
cuggcucaaagccuguucacuc

SEQ ID NO: 26320 - RNA, 22 nt, Artificial Sequence
  RPE65 RNA guide
cugggacccccuuccauaccug

SEQ ID NO: 26321 - RNA, 22 nt, Artificial Sequence
  RPE65 RNA guide
cuggggguggggaagacuacuc

SEQ ID NO: 26322 - RNA, 22 nt, Artificial Sequence
  RPE65 RNA guide
cuguccucugcaguuuuuccuu

SEQ ID NO: 26323 - RNA, 22 nt, Artificial Sequence
  RPE65 RNA guide
cugugagcugagcauguugaua

SEQ ID NO: 26324 - RNA, 22 nt, Artificial Sequence
  RPE65 RNA guide
cugugggaaggacccuguuuag

SEQ ID NO: 26325 - RNA, 22 nt, Artificial Sequence
  RPE65 RNA guide
cuguucacuccugccggucuag

SEQ ID NO: 26326 - RNA, 22 nt, Artificial Sequence
  RPE65 RNA guide
cuguuuaggaacaaauuucagg

SEQ ID NO: 26327 - RNA, 22 nt, Artificial Sequence
  RPE65 RNA guide
cuuaauccuguccucugcaguu

SEQ ID NO: 26328 - RNA, 22 nt, Artificial Sequence
  RPE65 RNA guide
cuuacuucggaagacaaaucaa

SEQ ID NO: 26329 - RNA, 22 nt, Artificial Sequence
  RPE65 RNA guide
cuuccauaccugaguagucuuc

SEQ ID NO: 26330 - RNA, 22 nt, Artificial Sequence
  RPE65 RNA guide
cuucccacaguauucucccacc

SEQ ID NO: 26331 - RNA, 22 nt, Artificial Sequence
  RPE65 RNA guide
cuuccccacccccagccucacg

SEQ ID NO: 26332 - RNA, 22 nt, Artificial Sequence
  RPE65 RNA guide
cuuccgaaguaaggaaaaacug

SEQ ID NO: 26333 - RNA, 22 nt, Artificial Sequence
  RPE65 RNA guide
cuuccugaaauuuguuccuaaa

SEQ ID NO: 26334 - RNA, 22 nt, Artificial Sequence
  RPE65 RNA guide
cuucgcuucuccccccaccccc

SEQ ID NO: 26335 - RNA, 22 nt, Artificial Sequence
  RPE65 RNA guide
cuucggaagacaaaucaaucaa

SEQ ID NO: 26336 - RNA, 22 nt, Artificial Sequence
  RPE65 RNA guide
cuucuccccccacccccacccc

SEQ ID NO: 26337 - RNA, 22 nt, Artificial Sequence
  RPE65 RNA guide
cuucucuccugcagcucugccu

SEQ ID NO: 26338 - RNA, 22 nt, Artificial Sequence
  RPE65 RNA guide
cuucuuccuuauucuuccacca

SEQ ID NO: 26339 - RNA, 22 nt, Artificial Sequence
  RPE65 RNA guide
cuugacaucagagcagugaucu

SEQ ID NO: 26340 - RNA, 22 nt, Artificial Sequence
  RPE65 RNA guide
cuugaggcaagaaaaucaauga

SEQ ID NO: 26341 - RNA, 22 nt, Artificial Sequence
  RPE65 RNA guide
cuugccucaaggagagacccau

SEQ ID NO: 26342 - RNA, 22 nt, Artificial Sequence
  RPE65 RNA guide
cuuugagcaucaacaugggcuu

SEQ ID NO: 26343 - RNA, 22 nt, Artificial Sequence
  RPE65 RNA guide
cuuugagccagcccuagagugc

SEQ ID NO: 26344 - RNA, 22 nt, Artificial Sequence
  RPE65 RNA guide
gaaaaacugcagaggacaggau

SEQ ID NO: 26345 - RNA, 22 nt, Artificial Sequence
  RPE65 RNA guide
gaaaaucaaugaugcugugagc

SEQ ID NO: 26346 - RNA, 22 nt, Artificial Sequence
  RPE65 RNA guide
gaaaugguggaagaauaaggaa

SEQ ID NO: 26347 - RNA, 22 nt, Artificial Sequence
  RPE65 RNA guide
gaaauuuguuccuaaacagggu

SEQ ID NO: 26348 - RNA, 22 nt, Artificial Sequence
  RPE65 RNA guide
gaacaaauuucaggaagugaac

SEQ ID NO: 26349 - RNA, 22 nt, Artificial Sequence
  RPE65 RNA guide
gaacaggcuuugagccagcccu

SEQ ID NO: 26350 - RNA, 22 nt, Artificial Sequence
  RPE65 RNA guide
gaacugauggcaguaggauuga

SEQ ID NO: 26351 - RNA, 22 nt, Artificial Sequence
  RPE65 RNA guide
gaacuuaauccuguccucugca

SEQ ID NO: 26352 - RNA, 22 nt, Artificial Sequence
  RPE65 RNA guide
gaagaagcccauguugaugcuc

SEQ ID NO: 26353 - RNA, 22 nt, Artificial Sequence
  RPE65 RNA guide
gaagaauaaggaagaagcccau

SEQ ID NO: 26354 - RNA, 22 nt, Artificial Sequence
  RPE65 RNA guide
gaagacaaaucaaucaauccua

SEQ ID NO: 26355 - RNA, 22 nt, Artificial Sequence
  RPE65 RNA guide
gaagacuacucagguauggaag

SEQ ID NO: 26356 - RNA, 22 nt, Artificial Sequence
  RPE65 RNA guide
gaagcccauguugaugcucaaa

SEQ ID NO: 26357 - RNA, 22 nt, Artificial Sequence
  RPE65 RNA guide
gaagcgaaggugagggcgggag

SEQ ID NO: 26358 - RNA, 22 nt, Artificial Sequence
  RPE65 RNA guide
gaaggacccuguuuaggaacaa

SEQ ID NO: 26359 - RNA, 22 nt, Artificial Sequence
  RPE65 RNA guide
gaaggagauaaaugggucucuc

SEQ ID NO: 26360 - RNA, 22 nt, Artificial Sequence
  RPE65 RNA guide
gaaggcacucuagggcuggcuc

SEQ ID NO: 26361 - RNA, 22 nt, Artificial Sequence
  RPE65 RNA guide
gaagggggucccagaucacugc

SEQ ID NO: 26362 - RNA, 22 nt, Artificial Sequence
  RPE65 RNA guide
gaaggugagggcgggaggagca

SEQ ID NO: 26363 - RNA, 22 nt, Artificial Sequence
  RPE65 RNA guide
gaaguaaggaaaaacugcagag

SEQ ID NO: 26364 - RNA, 22 nt, Artificial Sequence
  RPE65 RNA guide
gaagugaacugauggcaguagg

SEQ ID NO: 26365 - RNA, 22 nt, Artificial Sequence
  RPE65 RNA guide
gaauaaggaagaagcccauguu

SEQ ID NO: 26366 - RNA, 22 nt, Artificial Sequence
  RPE65 RNA guide
gaauacugugggaaggacccug

SEQ ID NO: 26367 - RNA, 22 nt, Artificial Sequence
  RPE65 RNA guide
gacaaaucaaucaauccuacug

SEQ ID NO: 26368 - RNA, 22 nt, Artificial Sequence
  RPE65 RNA guide
gacaucagagcagugaucuggg

SEQ ID NO: 26369 - RNA, 22 nt, Artificial Sequence
  RPE65 RNA guide
gacauuaaaagagaggucaugu

SEQ ID NO: 26370 - RNA, 22 nt, Artificial Sequence
  RPE65 RNA guide
gacccauuuaucuccuuccuag

SEQ ID NO: 26371 - RNA, 22 nt, Artificial Sequence
  RPE65 RNA guide
gacccccuuccauaccugagua

SEQ ID NO: 26372 - RNA, 22 nt, Artificial Sequence
  RPE65 RNA guide
gacccuguuuaggaacaaauuu

SEQ ID NO: 26373 - RNA, 22 nt, Artificial Sequence
  RPE65 RNA guide
gaccggcaggagugaacaggcu

SEQ ID NO: 26374 - RNA, 22 nt, Artificial Sequence
  RPE65 RNA guide
gacuacucagguauggaagggg

SEQ ID NO: 26375 - RNA, 22 nt, Artificial Sequence
  RPE65 RNA guide
gacuagaccggcaggagugaac

SEQ ID NO: 26376 - RNA, 22 nt, Artificial Sequence
  RPE65 RNA guide
gacuuugagcaucaacaugggc

SEQ ID NO: 26377 - RNA, 22 nt, Artificial Sequence
  RPE65 RNA guide
gagaagcgaaggugagggcggg

SEQ ID NO: 26378 - RNA, 22 nt, Artificial Sequence
  RPE65 RNA guide
gagaaggcacucuagggcuggc

SEQ ID NO: 26379 - RNA, 22 nt, Artificial Sequence
  RPE65 RNA guide
gagaauacugugggaaggaccc

SEQ ID NO: 26380 - RNA, 22 nt, Artificial Sequence
  RPE65 RNA guide
gagacaugaccucucuuuuaau

SEQ ID NO: 26381 - RNA, 22 nt, Artificial Sequence
  RPE65 RNA guide
gagacccauuuaucuccuuccu

SEQ ID NO: 26382 - RNA, 22 nt, Artificial Sequence
  RPE65 RNA guide
gagacuagaccggcaggaguga

SEQ ID NO: 26383 - RNA, 22 nt, Artificial Sequence
  RPE65 RNA guide
gagagaaggcacucuagggcug

SEQ ID NO: 26384 - RNA, 22 nt, Artificial Sequence
  RPE65 RNA guide
gagagacccauuuaucuccuuc

SEQ ID NO: 26385 - RNA, 22 nt, Artificial Sequence
  RPE65 RNA guide
gagaggucaugucucuugacau

SEQ ID NO: 26386 - RNA, 22 nt, Artificial Sequence
  RPE65 RNA guide
gagauaaaugggucucuccuug

SEQ ID NO: 26387 - RNA, 22 nt, Artificial Sequence
  RPE65 RNA guide
gagauagaggcagagcugcagg

SEQ ID NO: 26388 - RNA, 22 nt, Artificial Sequence
  RPE65 RNA guide
gagcacgugaggcugggggugg

SEQ ID NO: 26389 - RNA, 22 nt, Artificial Sequence
  RPE65 RNA guide
gagcagugaucugggacccccu

SEQ ID NO: 26390 - RNA, 22 nt, Artificial Sequence
  RPE65 RNA guide
gagcaucaacaugggcuucuuc

SEQ ID NO: 26391 - RNA, 22 nt, Artificial Sequence
  RPE65 RNA guide
gagcauguugauagggugggag

SEQ ID NO: 26392 - RNA, 22 nt, Artificial Sequence
  RPE65 RNA guide
gagccagcccuagagugccuuc

SEQ ID NO: 26393 - RNA, 22 nt, Artificial Sequence
  RPE65 RNA guide
gagcugagcauguugauagggu

SEQ ID NO: 26394 - RNA, 22 nt, Artificial Sequence
  RPE65 RNA guide
gagcugcaggagagaaggcacu

SEQ ID NO: 26395 - RNA, 22 nt, Artificial Sequence
  RPE65 RNA guide
gaggacaggauuaaguucacug

SEQ ID NO: 26396 - RNA, 22 nt, Artificial Sequence
  RPE65 RNA guide
gaggagcacgugaggcuggggg

SEQ ID NO: 26397 - RNA, 22 nt, Artificial Sequence
  RPE65 RNA guide
gaggcaagaaaaucaaugaugc

SEQ ID NO: 26398 - RNA, 22 nt, Artificial Sequence
  RPE65 RNA guide
gaggcagagcugcaggagagaa

SEQ ID NO: 26399 - RNA, 22 nt, Artificial Sequence
  RPE65 RNA guide
gaggcuggggguggggaagacu

SEQ ID NO: 26400 - RNA, 22 nt, Artificial Sequence
  RPE65 RNA guide
gagggcgggaggagcacgugag

SEQ ID NO: 26401 - RNA, 22 nt, Artificial Sequence
  RPE65 RNA guide
gaggucaugucucuugacauca

SEQ ID NO: 26402 - RNA, 22 nt, Artificial Sequence
  RPE65 RNA guide
gaguagucuuccccacccccag

SEQ ID NO: 26403 - RNA, 22 nt, Artificial Sequence
  RPE65 RNA guide
gagugaacaggcuuugagccag

SEQ ID NO: 26404 - RNA, 22 nt, Artificial Sequence
  RPE65 RNA guide
gagugccuucucuccugcagcu

SEQ ID NO: 26405 - RNA, 22 nt, Artificial Sequence
  RPE65 RNA guide
gauaaaugggucucuccuugag

SEQ ID NO: 26406 - RNA, 22 nt, Artificial Sequence
  RPE65 RNA guide
gauagaggcagagcugcaggag

SEQ ID NO: 26407 - RNA, 22 nt, Artificial Sequence
  RPE65 RNA guide
gauagggugggagaauacugug

SEQ ID NO: 26408 - RNA, 22 nt, Artificial Sequence
  RPE65 RNA guide
gaucacugcucugaugucaaga

SEQ ID NO: 26409 - RNA, 22 nt, Artificial Sequence
  RPE65 RNA guide
gaucugggacccccuuccauac

SEQ ID NO: 26410 - RNA, 22 nt, Artificial Sequence
  RPE65 RNA guide
gaugcucaaaguccgcagagau

SEQ ID NO: 26411 - RNA, 22 nt, Artificial Sequence
  RPE65 RNA guide
gaugcugugagcugagcauguu

SEQ ID NO: 26412 - RNA, 22 nt, Artificial Sequence
  RPE65 RNA guide
gauggcaguaggauugauugau

SEQ ID NO: 26413 - RNA, 22 nt, Artificial Sequence
  RPE65 RNA guide
gaugucaagagacaugaccucu

SEQ ID NO: 26414 - RNA, 22 nt, Artificial Sequence
  RPE65 RNA guide
gauugauugauuugucuuccga

SEQ ID NO: 26415 - RNA, 22 nt, Artificial Sequence
  RPE65 RNA guide
gauugauuugucuuccgaagua

SEQ ID NO: 26416 - RNA, 22 nt, Artificial Sequence
  RPE65 RNA guide
gauuugucuuccgaaguaagga

SEQ ID NO: 26417 - RNA, 22 nt, Artificial Sequence
  RPE65 RNA guide
gauuuucuugccucaaggagag

SEQ ID NO: 26418 - RNA, 22 nt, Artificial Sequence
  RPE65 RNA guide
gcaagaaaaucaaugaugcugu

SEQ ID NO: 26419 - RNA, 22 nt, Artificial Sequence
  RPE65 RNA guide
gcacgugaggcugggggugggg

SEQ ID NO: 26420 - RNA, 22 nt, Artificial Sequence
  RPE65 RNA guide
gcacucuagggcuggcucaaag

SEQ ID NO: 26421 - RNA, 22 nt, Artificial Sequence
  RPE65 RNA guide
gcagagauagaggcagagcugc

SEQ ID NO: 26422 - RNA, 22 nt, Artificial Sequence
  RPE65 RNA guide
gcagagcugcaggagagaaggc

SEQ ID NO: 26423 - RNA, 22 nt, Artificial Sequence
  RPE65 RNA guide
gcagaggacaggauuaaguuca

SEQ ID NO: 26424 - RNA, 22 nt, Artificial Sequence
  RPE65 RNA guide
gcagcucugccucuaucucugc

SEQ ID NO: 26425 - RNA, 22 nt, Artificial Sequence
  RPE65 RNA guide
gcaggagagaaggcacucuagg

SEQ ID NO: 26426 - RNA, 22 nt, Artificial Sequence
  RPE65 RNA guide
gcaggagugaacaggcuuugag

SEQ ID NO: 26427 - RNA, 22 nt, Artificial Sequence
  RPE65 RNA guide
gcaguaggauugauugauuugu

SEQ ID NO: 26428 - RNA, 22 nt, Artificial Sequence
  RPE65 RNA guide
gcagugaucugggacccccuuc

SEQ ID NO: 26429 - RNA, 22 nt, Artificial Sequence
  RPE65 RNA guide
gcaguuuuuccuuacuucggaa

SEQ ID NO: 26430 - RNA, 22 nt, Artificial Sequence
  RPE65 RNA guide
gcaucaacaugggcuucuuccu

SEQ ID NO: 26431 - RNA, 22 nt, Artificial Sequence
  RPE65 RNA guide
gcaucauugauuuucuugccuc

SEQ ID NO: 26432 - RNA, 22 nt, Artificial Sequence
  RPE65 RNA guide
gcauguugauagggugggagaa

SEQ ID NO: 26433 - RNA, 22 nt, Artificial Sequence
  RPE65 RNA guide
gccagcccuagagugccuucuc

SEQ ID NO: 26434 - RNA, 22 nt, Artificial Sequence
  RPE65 RNA guide
gccaucaguucacuuccugaaa

SEQ ID NO: 26435 - RNA, 22 nt, Artificial Sequence
  RPE65 RNA guide
gcccauguugaugcucaaaguc

SEQ ID NO: 26436 - RNA, 22 nt, Artificial Sequence
  RPE65 RNA guide
gcccuagagugccuucucuccu

SEQ ID NO: 26437 - RNA, 22 nt, Artificial Sequence
  RPE65 RNA guide
gcccucaccuucgcuucucccc

SEQ ID NO: 26438 - RNA, 22 nt, Artificial Sequence
  RPE65 RNA guide
gccggucuagucucagcugggu

SEQ ID NO: 26439 - RNA, 22 nt, Artificial Sequence
  RPE65 RNA guide
gccucaaggagagacccauuua

SEQ ID NO: 26440 - RNA, 22 nt, Artificial Sequence
  RPE65 RNA guide
gccucacgugcuccucccgccc

SEQ ID NO: 26441 - RNA, 22 nt, Artificial Sequence
  RPE65 RNA guide
gccucuaucucugcggacuuug

SEQ ID NO: 26442 - RNA, 22 nt, Artificial Sequence
  RPE65 RNA guide
gccuguucacuccugccggucu

SEQ ID NO: 26443 - RNA, 22 nt, Artificial Sequence
  RPE65 RNA guide
gccuucucuccugcagcucugc

SEQ ID NO: 26444 - RNA, 22 nt, Artificial Sequence
  RPE65 RNA guide
gcgaaggugagggcgggaggag

SEQ ID NO: 26445 - RNA, 22 nt, Artificial Sequence
  RPE65 RNA guide
gcggacuuugagcaucaacaug

SEQ ID NO: 26446 - RNA, 22 nt, Artificial Sequence
  RPE65 RNA guide
gcgggaggagcacgugaggcug

SEQ ID NO: 26447 - RNA, 22 nt, Artificial Sequence
  RPE65 RNA guide
gcucaaagccuguucacuccug

SEQ ID NO: 26448 - RNA, 22 nt, Artificial Sequence
  RPE65 RNA guide
gcucaaaguccgcagagauaga

SEQ ID NO: 26449 - RNA, 22 nt, Artificial Sequence
  RPE65 RNA guide
gcucacagcaucauugauuuuc

SEQ ID NO: 26450 - RNA, 22 nt, Artificial Sequence
  RPE65 RNA guide
gcucagcucacagcaucauuga

SEQ ID NO: 26451 - RNA, 22 nt, Artificial Sequence
  RPE65 RNA guide
gcuccucccgcccucaccuucg

SEQ ID NO: 26452 - RNA, 22 nt, Artificial Sequence
  RPE65 RNA guide
gcucugaugucaagagacauga

SEQ ID NO: 26453 - RNA, 22 nt, Artificial Sequence
  RPE65 RNA guide
gcucugccucuaucucugcgga

SEQ ID NO: 26454 - RNA, 22 nt, Artificial Sequence
  RPE65 RNA guide
gcugagacuagaccggcaggag

SEQ ID NO: 26455 - RNA, 22 nt, Artificial Sequence
  RPE65 RNA guide
gcugagcauguugauagggugg

SEQ ID NO: 26456 - RNA, 22 nt, Artificial Sequence
  RPE65 RNA guide
gcugcaggagagaaggcacucu

SEQ ID NO: 26457 - RNA, 22 nt, Artificial Sequence
  RPE65 RNA guide
gcuggcucaaagccuguucacu

SEQ ID NO: 26458 - RNA, 22 nt, Artificial Sequence
  RPE65 RNA guide
gcuggggguggggaagacuacu

SEQ ID NO: 26459 - RNA, 22 nt, Artificial Sequence
  RPE65 RNA guide
gcugugagcugagcauguugau

SEQ ID NO: 26460 - RNA, 22 nt, Artificial Sequence
  RPE65 RNA guide
gcuucuccccccacccccaccc

SEQ ID NO: 26461 - RNA, 22 nt, Artificial Sequence
  RPE65 RNA guide
gcuucuuccuuauucuuccacc

SEQ ID NO: 26462 - RNA, 22 nt, Artificial Sequence
  RPE65 RNA guide
gcuuugagccagcccuagagug

SEQ ID NO: 26463 - RNA, 22 nt, Artificial Sequence
  RPE65 RNA guide
ggaaaaacugcagaggacagga

SEQ ID NO: 26464 - RNA, 22 nt, Artificial Sequence
  RPE65 RNA guide
ggaacaaauuucaggaagugaa

SEQ ID NO: 26465 - RNA, 22 nt, Artificial Sequence
  RPE65 RNA guide
ggaagaagcccauguugaugcu

SEQ ID NO: 26466 - RNA, 22 nt, Artificial Sequence
  RPE65 RNA guide
ggaagaauaaggaagaagccca

SEQ ID NO: 26467 - RNA, 22 nt, Artificial Sequence
  RPE65 RNA guide
ggaagacaaaucaaucaauccu

SEQ ID NO: 26468 - RNA, 22 nt, Artificial Sequence
  RPE65 RNA guide
ggaagacuacucagguauggaa

SEQ ID NO: 26469 - RNA, 22 nt, Artificial Sequence
  RPE65 RNA guide
ggaaggacccuguuuaggaaca

SEQ ID NO: 26470 - RNA, 22 nt, Artificial Sequence
  RPE65 RNA guide
ggaaggagauaaaugggucucu

SEQ ID NO: 26471 - RNA, 22 nt, Artificial Sequence
  RPE65 RNA guide
ggaagggggucccagaucacug

SEQ ID NO: 26472 - RNA, 22 nt, Artificial Sequence
  RPE65 RNA guide
ggaagugaacugauggcaguag

SEQ ID NO: 26473 - RNA, 22 nt, Artificial Sequence
  RPE65 RNA guide
ggacaggauuaaguucacugua

SEQ ID NO: 26474 - RNA, 22 nt, Artificial Sequence
  RPE65 RNA guide
ggacccccuuccauaccugagu

SEQ ID NO: 26475 - RNA, 22 nt, Artificial Sequence
  RPE65 RNA guide
ggacccuguuuaggaacaaauu

SEQ ID NO: 26476 - RNA, 22 nt, Artificial Sequence
  RPE65 RNA guide
ggacuuugagcaucaacauggg

SEQ ID NO: 26477 - RNA, 22 nt, Artificial Sequence
  RPE65 RNA guide
ggagaagcgaaggugagggcgg

SEQ ID NO: 26478 - RNA, 22 nt, Artificial Sequence
  RPE65 RNA guide
ggagaauacugugggaaggacc

SEQ ID NO: 26479 - RNA, 22 nt, Artificial Sequence
  RPE65 RNA guide
ggagagaaggcacucuagggcu

SEQ ID NO: 26480 - RNA, 22 nt, Artificial Sequence
  RPE65 RNA guide
ggagagacccauuuaucuccuu

SEQ ID NO: 26481 - RNA, 22 nt, Artificial Sequence
  RPE65 RNA guide
ggagauaaaugggucucuccuu

SEQ ID NO: 26482 - RNA, 22 nt, Artificial Sequence
  RPE65 RNA guide
ggagcacgugaggcugggggug

SEQ ID NO: 26483 - RNA, 22 nt, Artificial Sequence
  RPE65 RNA guide
ggaggagcacgugaggcugggg

SEQ ID NO: 26484 - RNA, 22 nt, Artificial Sequence
  RPE65 RNA guide
ggagugaacaggcuuugagcca

SEQ ID NO: 26485 - RNA, 22 nt, Artificial Sequence
  RPE65 RNA guide
ggauugauugauuugucuuccg

SEQ ID NO: 26486 - RNA, 22 nt, Artificial Sequence
  RPE65 RNA guide
ggcaagaaaaucaaugaugcug

SEQ ID NO: 26487 - RNA, 22 nt, Artificial Sequence
  RPE65 RNA guide
ggcacucuagggcuggcucaaa

SEQ ID NO: 26488 - RNA, 22 nt, Artificial Sequence
  RPE65 RNA guide
ggcagagcugcaggagagaagg

SEQ ID NO: 26489 - RNA, 22 nt, Artificial Sequence
  RPE65 RNA guide
ggcaggagugaacaggcuuuga

SEQ ID NO: 26490 - RNA, 22 nt, Artificial Sequence
  RPE65 RNA guide
ggcaguaggauugauugauuug

SEQ ID NO: 26491 - RNA, 22 nt, Artificial Sequence
  RPE65 RNA guide
ggcgggaggagcacgugaggcu

SEQ ID NO: 26492 - RNA, 22 nt, Artificial Sequence
  RPE65 RNA guide
ggcucaaagccuguucacuccu

SEQ ID NO: 26493 - RNA, 22 nt, Artificial Sequence
  RPE65 RNA guide
ggcuggcucaaagccuguucac

SEQ ID NO: 26494 - RNA, 22 nt, Artificial Sequence
  RPE65 RNA guide
ggcuggggguggggaagacuac

SEQ ID NO: 26495 - RNA, 22 nt, Artificial Sequence
  RPE65 RNA guide
ggcuucuuccuuauucuuccac

SEQ ID NO: 26496 - RNA, 22 nt, Artificial Sequence
  RPE65 RNA guide
ggcuuugagccagcccuagagu

SEQ ID NO: 26497 - RNA, 22 nt, Artificial Sequence
  RPE65 RNA guide
gggaagacuacucagguaugga

SEQ ID NO: 26498 - RNA, 22 nt, Artificial Sequence
  RPE65 RNA guide
gggaaggacccuguuuaggaac

SEQ ID NO: 26499 - RNA, 22 nt, Artificial Sequence
  RPE65 RNA guide
gggacccccuuccauaccugag

SEQ ID NO: 26500 - RNA, 22 nt, Artificial Sequence
  RPE65 RNA guide
gggagaagcgaaggugagggcg

SEQ ID NO: 26501 - RNA, 22 nt, Artificial Sequence
  RPE65 RNA guide
gggagaauacugugggaaggac

SEQ ID NO: 26502 - RNA, 22 nt, Artificial Sequence
  RPE65 RNA guide
gggaggagcacgugaggcuggg

SEQ ID NO: 26503 - RNA, 22 nt, Artificial Sequence
  RPE65 RNA guide
gggcgggaggagcacgugaggc

SEQ ID NO: 26504 - RNA, 22 nt, Artificial Sequence
  RPE65 RNA guide
gggcuggcucaaagccuguuca

SEQ ID NO: 26505 - RNA, 22 nt, Artificial Sequence
  RPE65 RNA guide
gggcuucuuccuuauucuucca

SEQ ID NO: 26506 - RNA, 22 nt, Artificial Sequence
  RPE65 RNA guide
ggggaagacuacucagguaugg

SEQ ID NO: 26507 - RNA, 22 nt, Artificial Sequence
  RPE65 RNA guide
ggggagaagcgaaggugagggc

SEQ ID NO: 26508 - RNA, 22 nt, Artificial Sequence
  RPE65 RNA guide
gggggagaagcgaaggugaggg

SEQ ID NO: 26509 - RNA, 22 nt, Artificial Sequence
  RPE65 RNA guide
ggggggagaagcgaaggugagg

SEQ ID NO: 26510 - RNA, 22 nt, Artificial Sequence
  RPE65 RNA guide
gggggucccagaucacugcucu

SEQ ID NO: 26511 - RNA, 22 nt, Artificial Sequence
  RPE65 RNA guide
ggggguggggaagacuacucag

SEQ ID NO: 26512 - RNA, 22 nt, Artificial Sequence
  RPE65 RNA guide
ggggguggggggagaagcgaag

SEQ ID NO: 26513 - RNA, 22 nt, Artificial Sequence
  RPE65 RNA guide
ggggguggggguggggggagaa

SEQ ID NO: 26514 - RNA, 22 nt, Artificial Sequence
  RPE65 RNA guide
ggggucccagaucacugcucug

SEQ ID NO: 26515 - RNA, 22 nt, Artificial Sequence
  RPE65 RNA guide
gggguggggaagacuacucagg

SEQ ID NO: 26516 - RNA, 22 nt, Artificial Sequence
  RPE65 RNA guide
gggguggggggagaagcgaagg

SEQ ID NO: 26517 - RNA, 22 nt, Artificial Sequence
  RPE65 RNA guide
gggguggggguggggggagaag

SEQ ID NO: 26518 - RNA, 22 nt, Artificial Sequence
  RPE65 RNA guide
gggucccagaucacugcucuga

SEQ ID NO: 26519 - RNA, 22 nt, Artificial Sequence
  RPE65 RNA guide
ggguccuucccacaguauucuc

SEQ ID NO: 26520 - RNA, 22 nt, Artificial Sequence
  RPE65 RNA guide
gggucucuccuugaggcaagaa

SEQ ID NO: 26521 - RNA, 22 nt, Artificial Sequence
  RPE65 RNA guide
gggugggagaauacugugggaa

SEQ ID NO: 26522 - RNA, 22 nt, Artificial Sequence
  RPE65 RNA guide
ggguggggaagacuacucaggu

SEQ ID NO: 26523 - RNA, 22 nt, Artificial Sequence
  RPE65 RNA guide
ggguggggggagaagcgaaggu

SEQ ID NO: 26524 - RNA, 22 nt, Artificial Sequence
  RPE65 RNA guide
ggguggggguggggggagaagc

SEQ ID NO: 26525 - RNA, 22 nt, Artificial Sequence
  RPE65 RNA guide
gggugggggugggggugggggg

SEQ ID NO: 26526 - RNA, 22 nt, Artificial Sequence
  RPE65 RNA guide
gguauggaagggggucccagau

SEQ ID NO: 26527 - RNA, 22 nt, Artificial Sequence
  RPE65 RNA guide
ggucaugucucuugacaucaga

SEQ ID NO: 26528 - RNA, 22 nt, Artificial Sequence
  RPE65 RNA guide
ggucccagaucacugcucugau

SEQ ID NO: 26529 - RNA, 22 nt, Artificial Sequence
  RPE65 RNA guide
gguccuucccacaguauucucc

SEQ ID NO: 26530 - RNA, 22 nt, Artificial Sequence
  RPE65 RNA guide
ggucuagucucagcuggguggg

SEQ ID NO: 26531 - RNA, 22 nt, Artificial Sequence
  RPE65 RNA guide
ggucucuccuugaggcaagaaa

SEQ ID NO: 26532 - RNA, 22 nt, Artificial Sequence
  RPE65 RNA guide
ggugagggcgggaggagcacgu

SEQ ID NO: 26533 - RNA, 22 nt, Artificial Sequence
  RPE65 RNA guide
gguggaagaauaaggaagaagc

SEQ ID NO: 26534 - RNA, 22 nt, Artificial Sequence
  RPE65 RNA guide
ggugggagaauacugugggaag

SEQ ID NO: 26535 - RNA, 22 nt, Artificial Sequence
  RPE65 RNA guide
gguggggaagacuacucaggua

SEQ ID NO: 26536 - RNA, 22 nt, Artificial Sequence
  RPE65 RNA guide
gguggggggagaagcgaaggug

SEQ ID NO: 26537 - RNA, 22 nt, Artificial Sequence
  RPE65 RNA guide
gguggggguggggggagaagcg

SEQ ID NO: 26538 - RNA, 22 nt, Artificial Sequence
  RPE65 RNA guide
ggugggggugggggugggggga

SEQ ID NO: 26539 - RNA, 22 nt, Artificial Sequence
  RPE65 RNA guide
gguuacagugaacuuaauccug

SEQ ID NO: 26540 - RNA, 22 nt, Artificial Sequence
  RPE65 RNA guide
guaaggaaaaacugcagaggac

SEQ ID NO: 26541 - RNA, 22 nt, Artificial Sequence
  RPE65 RNA guide
guaggauugauugauuugucuu

SEQ ID NO: 26542 - RNA, 22 nt, Artificial Sequence
  RPE65 RNA guide
guagucuuccccacccccagcc

SEQ ID NO: 26543 - RNA, 22 nt, Artificial Sequence
  RPE65 RNA guide
guauggaagggggucccagauc

SEQ ID NO: 26544 - RNA, 22 nt, Artificial Sequence
  RPE65 RNA guide
guauucucccacccuaucaaca

SEQ ID NO: 26545 - RNA, 22 nt, Artificial Sequence
  RPE65 RNA guide
gucaagagacaugaccucucuu

SEQ ID NO: 26546 - RNA, 22 nt, Artificial Sequence
  RPE65 RNA guide
gucaugucucuugacaucagag

SEQ ID NO: 26547 - RNA, 22 nt, Artificial Sequence
  RPE65 RNA guide
gucccagaucacugcucugaug

SEQ ID NO: 26548 - RNA, 22 nt, Artificial Sequence
  RPE65 RNA guide
guccgcagagauagaggcagag

SEQ ID NO: 26549 - RNA, 22 nt, Artificial Sequence
  RPE65 RNA guide
guccucugcaguuuuuccuuac

SEQ ID NO: 26550 - RNA, 22 nt, Artificial Sequence
  RPE65 RNA guide
guccuucccacaguauucuccc

SEQ ID NO: 26551 - RNA, 22 nt, Artificial Sequence
  RPE65 RNA guide
gucuagucucagcugggugggg

SEQ ID NO: 26552 - RNA, 22 nt, Artificial Sequence
  RPE65 RNA guide
gucucagcuggguggggguggg

SEQ ID NO: 26553 - RNA, 22 nt, Artificial Sequence
  RPE65 RNA guide
gucucuccuugaggcaagaaaa

SEQ ID NO: 26554 - RNA, 22 nt, Artificial Sequence
  RPE65 RNA guide
gucucuugacaucagagcagug

SEQ ID NO: 26555 - RNA, 22 nt, Artificial Sequence
  RPE65 RNA guide
gucuuccccacccccagccuca

SEQ ID NO: 26556 - RNA, 22 nt, Artificial Sequence
  RPE65 RNA guide
gucuuccgaaguaaggaaaaac

SEQ ID NO: 26557 - RNA, 22 nt, Artificial Sequence
  RPE65 RNA guide
gugaacaggcuuugagccagcc

SEQ ID NO: 26558 - RNA, 22 nt, Artificial Sequence
  RPE65 RNA guide
gugaacugauggcaguaggauu

SEQ ID NO: 26559 - RNA, 22 nt, Artificial Sequence
  RPE65 RNA guide
gugaacuuaauccuguccucug

SEQ ID NO: 26560 - RNA, 22 nt, Artificial Sequence
  RPE65 RNA guide
gugagcugagcauguugauagg

SEQ ID NO: 26561 - RNA, 22 nt, Artificial Sequence
  RPE65 RNA guide
gugaggcuggggguggggaaga

SEQ ID NO: 26562 - RNA, 22 nt, Artificial Sequence
  RPE65 RNA guide
gugagggcgggaggagcacgug

SEQ ID NO: 26563 - RNA, 22 nt, Artificial Sequence
  RPE65 RNA guide
gugaucugggacccccuuccau

SEQ ID NO: 26564 - RNA, 22 nt, Artificial Sequence
  RPE65 RNA guide
gugccuucucuccugcagcucu

SEQ ID NO: 26565 - RNA, 22 nt, Artificial Sequence
  RPE65 RNA guide
gugcuccucccgcccucaccuu

SEQ ID NO: 26566 - RNA, 22 nt, Artificial Sequence
  RPE65 RNA guide
guggaagaauaaggaagaagcc

SEQ ID NO: 26567 - RNA, 22 nt, Artificial Sequence
  RPE65 RNA guide
gugggaaggacccuguuuagga

SEQ ID NO: 26568 - RNA, 22 nt, Artificial Sequence
  RPE65 RNA guide
gugggagaauacugugggaagg

SEQ ID NO: 26569 - RNA, 22 nt, Artificial Sequence
  RPE65 RNA guide
guggggaagacuacucagguau

SEQ ID NO: 26570 - RNA, 22 nt, Artificial Sequence
  RPE65 RNA guide
guggggggagaagcgaagguga

SEQ ID NO: 26571 - RNA, 22 nt, Artificial Sequence
  RPE65 RNA guide
guggggguggggggagaagcga

SEQ ID NO: 26572 - RNA, 22 nt, Artificial Sequence
  RPE65 RNA guide
guggggguggggguggggggag

SEQ ID NO: 26573 - RNA, 22 nt, Artificial Sequence
  RPE65 RNA guide
guuacagugaacuuaauccugu

SEQ ID NO: 26574 - RNA, 22 nt, Artificial Sequence
  RPE65 RNA guide
guucacuccugccggucuaguc

SEQ ID NO: 26575 - RNA, 22 nt, Artificial Sequence
  RPE65 RNA guide
guucacuuccugaaauuuguuc

SEQ ID NO: 26576 - RNA, 22 nt, Artificial Sequence
  RPE65 RNA guide
guuccuaaacaggguccuuccc

SEQ ID NO: 26577 - RNA, 22 nt, Artificial Sequence
  RPE65 RNA guide
guugauagggugggagaauacu

SEQ ID NO: 26578 - RNA, 22 nt, Artificial Sequence
  RPE65 RNA guide
guugaugcucaaaguccgcaga

SEQ ID NO: 26579 - RNA, 22 nt, Artificial Sequence
  RPE65 RNA guide
guuuaggaacaaauuucaggaa

SEQ ID NO: 26580 - RNA, 22 nt, Artificial Sequence
  RPE65 RNA guide
guuuuuccuuacuucggaagac

SEQ ID NO: 26581 - RNA, 22 nt, Artificial Sequence
  RPE65 RNA guide
uaaaagagaggucaugucucuu

SEQ ID NO: 26582 - RNA, 22 nt, Artificial Sequence
  RPE65 RNA guide
uaaacaggguccuucccacagu

SEQ ID NO: 26583 - RNA, 22 nt, Artificial Sequence
  RPE65 RNA guide
uaaaugggucucuccuugaggc

SEQ ID NO: 26584 - RNA, 22 nt, Artificial Sequence
  RPE65 RNA guide
uaaccauugacauuaaaagaga

SEQ ID NO: 26585 - RNA, 22 nt, Artificial Sequence
  RPE65 RNA guide
uaaggaaaaacugcagaggaca

SEQ ID NO: 26586 - RNA, 22 nt, Artificial Sequence
  RPE65 RNA guide
uaaggaagaagcccauguugau

SEQ ID NO: 26587 - RNA, 22 nt, Artificial Sequence
  RPE65 RNA guide
uaauccuguccucugcaguuuu

SEQ ID NO: 26588 - RNA, 22 nt, Artificial Sequence
  RPE65 RNA guide
uacagugaacuuaauccugucc

SEQ ID NO: 26589 - RNA, 22 nt, Artificial Sequence
  RPE65 RNA guide
uaccugaguagucuuccccacc

SEQ ID NO: 26590 - RNA, 22 nt, Artificial Sequence
  RPE65 RNA guide
uacucagguauggaaggggguc

SEQ ID NO: 26591 - RNA, 22 nt, Artificial Sequence
  RPE65 RNA guide
uacugccaucaguucacuuccu

SEQ ID NO: 26592 - RNA, 22 nt, Artificial Sequence
  RPE65 RNA guide
uacugugggaaggacccuguuu

SEQ ID NO: 26593 - RNA, 22 nt, Artificial Sequence
  RPE65 RNA guide
uacuucggaagacaaaucaauc

SEQ ID NO: 26594 - RNA, 22 nt, Artificial Sequence
  RPE65 RNA guide
uagaccggcaggagugaacagg

SEQ ID NO: 26595 - RNA, 22 nt, Artificial Sequence
  RPE65 RNA guide
uagaggcagagcugcaggagag

SEQ ID NO: 26596 - RNA, 22 nt, Artificial Sequence
  RPE65 RNA guide
uagagugccuucucuccugcag

SEQ ID NO: 26597 - RNA, 22 nt, Artificial Sequence
  RPE65 RNA guide
uaggaacaaauuucaggaagug

SEQ ID NO: 26598 - RNA, 22 nt, Artificial Sequence
  RPE65 RNA guide
uaggaaggagauaaaugggucu

SEQ ID NO: 26599 - RNA, 22 nt, Artificial Sequence
  RPE65 RNA guide
uaggauugauugauuugucuuc

SEQ ID NO: 26600 - RNA, 22 nt, Artificial Sequence
  RPE65 RNA guide
uagggcuggcucaaagccuguu

SEQ ID NO: 26601 - RNA, 22 nt, Artificial Sequence
  RPE65 RNA guide
uagggugggagaauacuguggg

SEQ ID NO: 26602 - RNA, 22 nt, Artificial Sequence
  RPE65 RNA guide
uagucucagcugggugggggug

SEQ ID NO: 26603 - RNA, 22 nt, Artificial Sequence
  RPE65 RNA guide
uagucuuccccacccccagccu

SEQ ID NO: 26604 - RNA, 22 nt, Artificial Sequence
  RPE65 RNA guide
uaucaacaugcucagcucacag

SEQ ID NO: 26605 - RNA, 22 nt, Artificial Sequence
  RPE65 RNA guide
uaucucugcggacuuugagcau

SEQ ID NO: 26606 - RNA, 22 nt, Artificial Sequence
  RPE65 RNA guide
uauggaagggggucccagauca

SEQ ID NO: 26607 - RNA, 22 nt, Artificial Sequence
  RPE65 RNA guide
uauucucccacccuaucaacau

SEQ ID NO: 26608 - RNA, 22 nt, Artificial Sequence
  RPE65 RNA guide
ucaaagccuguucacuccugcc

SEQ ID NO: 26609 - RNA, 22 nt, Artificial Sequence
  RPE65 RNA guide
ucaaaguccgcagagauagagg

SEQ ID NO: 26610 - RNA, 22 nt, Artificial Sequence
  RPE65 RNA guide
ucaacaugcucagcucacagca

SEQ ID NO: 26611 - RNA, 22 nt, Artificial Sequence
  RPE65 RNA guide
ucaacaugggcuucuuccuuau

SEQ ID NO: 26612 - RNA, 22 nt, Artificial Sequence
  RPE65 RNA guide
ucaaccccuaggaaggagauaa

SEQ ID NO: 26613 - RNA, 22 nt, Artificial Sequence
  RPE65 RNA guide
ucaagagacaugaccucucuuu

SEQ ID NO: 26614 - RNA, 22 nt, Artificial Sequence
  RPE65 RNA guide
ucaaggagagacccauuuaucu

SEQ ID NO: 26615 - RNA, 22 nt, Artificial Sequence
  RPE65 RNA guide
ucaaucaauccuacugccauca

SEQ ID NO: 26616 - RNA, 22 nt, Artificial Sequence
  RPE65 RNA guide
ucaauccuacugccaucaguuc

SEQ ID NO: 26617 - RNA, 22 nt, Artificial Sequence
  RPE65 RNA guide
ucaaugaugcugugagcugagc

SEQ ID NO: 26618 - RNA, 22 nt, Artificial Sequence
  RPE65 RNA guide
ucacagcaucauugauuuucuu

SEQ ID NO: 26619 - RNA, 22 nt, Artificial Sequence
  RPE65 RNA guide
ucaccuucgcuucuccccccac

SEQ ID NO: 26620 - RNA, 22 nt, Artificial Sequence
  RPE65 RNA guide
ucacgugcuccucccgcccuca

SEQ ID NO: 26621 - RNA, 22 nt, Artificial Sequence
  RPE65 RNA guide
ucacuccugccggucuagucuc

SEQ ID NO: 26622 - RNA, 22 nt, Artificial Sequence
  RPE65 RNA guide
ucacugcucugaugucaagaga

SEQ ID NO: 26623 - RNA, 22 nt, Artificial Sequence
  RPE65 RNA guide
ucacuuccugaaauuuguuccu

SEQ ID NO: 26624 - RNA, 22 nt, Artificial Sequence
  RPE65 RNA guide
ucagagcagugaucugggaccc

SEQ ID NO: 26625 - RNA, 22 nt, Artificial Sequence
  RPE65 RNA guide
ucagcucacagcaucauugauu

SEQ ID NO: 26626 - RNA, 22 nt, Artificial Sequence
  RPE65 RNA guide
ucagcugggugggggugggggu

SEQ ID NO: 26627 - RNA, 22 nt, Artificial Sequence
  RPE65 RNA guide
ucaggaagugaacugauggcag

SEQ ID NO: 26628 - RNA, 22 nt, Artificial Sequence
  RPE65 RNA guide
ucagguauggaaggggguccca

SEQ ID NO: 26629 - RNA, 22 nt, Artificial Sequence
  RPE65 RNA guide
ucaguucacuuccugaaauuug

SEQ ID NO: 26630 - RNA, 22 nt, Artificial Sequence
  RPE65 RNA guide
ucaugucucuugacaucagagc

SEQ ID NO: 26631 - RNA, 22 nt, Artificial Sequence
  RPE65 RNA guide
ucauugauuuucuugccucaag

SEQ ID NO: 26632 - RNA, 22 nt, Artificial Sequence
  RPE65 RNA guide
uccauaccugaguagucuuccc

SEQ ID NO: 26633 - RNA, 22 nt, Artificial Sequence
  RPE65 RNA guide
ucccacaguauucucccacccu

SEQ ID NO: 26634 - RNA, 22 nt, Artificial Sequence
  RPE65 RNA guide
ucccacccuaucaacaugcuca

SEQ ID NO: 26635 - RNA, 22 nt, Artificial Sequence
  RPE65 RNA guide
ucccagaucacugcucugaugu

SEQ ID NO: 26636 - RNA, 22 nt, Artificial Sequence
  RPE65 RNA guide
uccccacccccagccucacgug

SEQ ID NO: 26637 - RNA, 22 nt, Artificial Sequence
  RPE65 RNA guide
ucccgcccucaccuucgcuucu

SEQ ID NO: 26638 - RNA, 22 nt, Artificial Sequence
  RPE65 RNA guide
uccgaaguaaggaaaaacugca

SEQ ID NO: 26639 - RNA, 22 nt, Artificial Sequence
  RPE65 RNA guide
uccgcagagauagaggcagagc

SEQ ID NO: 26640 - RNA, 22 nt, Artificial Sequence
  RPE65 RNA guide
uccuaaacaggguccuucccac

SEQ ID NO: 26641 - RNA, 22 nt, Artificial Sequence
  RPE65 RNA guide
uccuacugccaucaguucacuu

SEQ ID NO: 26642 - RNA, 22 nt, Artificial Sequence
  RPE65 RNA guide
uccucccgcccucaccuucgcu

SEQ ID NO: 26643 - RNA, 22 nt, Artificial Sequence
  RPE65 RNA guide
uccucugcaguuuuuccuuacu

SEQ ID NO: 26644 - RNA, 22 nt, Artificial Sequence
  RPE65 RNA guide
uccugaaauuuguuccuaaaca

SEQ ID NO: 26645 - RNA, 22 nt, Artificial Sequence
  RPE65 RNA guide
uccugcagcucugccucuaucu

SEQ ID NO: 26646 - RNA, 22 nt, Artificial Sequence
  RPE65 RNA guide
uccugccggucuagucucagcu

SEQ ID NO: 26647 - RNA, 22 nt, Artificial Sequence
  RPE65 RNA guide
uccuguccucugcaguuuuucc

SEQ ID NO: 26648 - RNA, 22 nt, Artificial Sequence
  RPE65 RNA guide
uccuuacuucggaagacaaauc

SEQ ID NO: 26649 - RNA, 22 nt, Artificial Sequence
  RPE65 RNA guide
uccuucccacaguauucuccca

SEQ ID NO: 26650 - RNA, 22 nt, Artificial Sequence
  RPE65 RNA guide
uccuugaggcaagaaaaucaau

SEQ ID NO: 26651 - RNA, 22 nt, Artificial Sequence
  RPE65 RNA guide
ucgcuucuccccccacccccac

SEQ ID NO: 26652 - RNA, 22 nt, Artificial Sequence
  RPE65 RNA guide
ucggaagacaaaucaaucaauc

SEQ ID NO: 26653 - RNA, 22 nt, Artificial Sequence
  RPE65 RNA guide
ucuagggcuggcucaaagccug

SEQ ID NO: 26654 - RNA, 22 nt, Artificial Sequence
  RPE65 RNA guide
ucuagucucagcuggguggggg

SEQ ID NO: 26655 - RNA, 22 nt, Artificial Sequence
  RPE65 RNA guide
ucuaucucugcggacuuugagc

SEQ ID NO: 26656 - RNA, 22 nt, Artificial Sequence
  RPE65 RNA guide
ucucaaccccuaggaaggagau

SEQ ID NO: 26657 - RNA, 22 nt, Artificial Sequence
  RPE65 RNA guide
ucucagcugggugggggugggg

SEQ ID NO: 26658 - RNA, 22 nt, Artificial Sequence
  RPE65 RNA guide
ucucccacccuaucaacaugcu

SEQ ID NO: 26659 - RNA, 22 nt, Artificial Sequence
  RPE65 RNA guide
ucuccccccacccccaccccca

SEQ ID NO: 26660 - RNA, 22 nt, Artificial Sequence
  RPE65 RNA guide
ucuccugcagcucugccucuau

SEQ ID NO: 26661 - RNA, 22 nt, Artificial Sequence
  RPE65 RNA guide
ucuccuugaggcaagaaaauca

SEQ ID NO: 26662 - RNA, 22 nt, Artificial Sequence
  RPE65 RNA guide
ucucucaaccccuaggaaggag

SEQ ID NO: 26663 - RNA, 22 nt, Artificial Sequence
  RPE65 RNA guide
ucucuccugcagcucugccucu

SEQ ID NO: 26664 - RNA, 22 nt, Artificial Sequence
  RPE65 RNA guide
ucucuccuugaggcaagaaaau

SEQ ID NO: 26665 - RNA, 22 nt, Artificial Sequence
  RPE65 RNA guide
ucucugcggacuuugagcauca

SEQ ID NO: 26666 - RNA, 22 nt, Artificial Sequence
  RPE65 RNA guide
ucucuugacaucagagcaguga

SEQ ID NO: 26667 - RNA, 22 nt, Artificial Sequence
  RPE65 RNA guide
ucucuuuuaaugucaaugguua

SEQ ID NO: 26668 - RNA, 22 nt, Artificial Sequence
  RPE65 RNA guide
ucugaugucaagagacaugacc

SEQ ID NO: 26669 - RNA, 22 nt, Artificial Sequence
  RPE65 RNA guide
ucugcaguuuuuccuuacuucg

SEQ ID NO: 26670 - RNA, 22 nt, Artificial Sequence
  RPE65 RNA guide
ucugccucuaucucugcggacu

SEQ ID NO: 26671 - RNA, 22 nt, Artificial Sequence
  RPE65 RNA guide
ucugcggacuuugagcaucaac

SEQ ID NO: 26672 - RNA, 22 nt, Artificial Sequence
  RPE65 RNA guide
ucugggacccccuuccauaccu

SEQ ID NO: 26673 - RNA, 22 nt, Artificial Sequence
  RPE65 RNA guide
ucuuccccacccccagccucac

SEQ ID NO: 26674 - RNA, 22 nt, Artificial Sequence
  RPE65 RNA guide
ucuuccgaaguaaggaaaaacu

SEQ ID NO: 26675 - RNA, 22 nt, Artificial Sequence
  RPE65 RNA guide
ucuuccuuauucuuccaccauu

SEQ ID NO: 26676 - RNA, 22 nt, Artificial Sequence
  RPE65 RNA guide
ucuugacaucagagcagugauc

SEQ ID NO: 26677 - RNA, 22 nt, Artificial Sequence
  RPE65 RNA guide
ucuugccucaaggagagaccca

SEQ ID NO: 26678 - RNA, 22 nt, Artificial Sequence
  RPE65 RNA guide
ucuuuuaaugucaaugguuaca

SEQ ID NO: 26679 - RNA, 22 nt, Artificial Sequence
  RPE65 RNA guide
ugaaaugguggaagaauaagga

SEQ ID NO: 26680 - RNA, 22 nt, Artificial Sequence
  RPE65 RNA guide
ugaaauuuguuccuaaacaggg

SEQ ID NO: 26681 - RNA, 22 nt, Artificial Sequence
  RPE65 RNA guide
ugaacaggcuuugagccagccc

SEQ ID NO: 26682 - RNA, 22 nt, Artificial Sequence
  RPE65 RNA guide
ugaacugauggcaguaggauug

SEQ ID NO: 26683 - RNA, 22 nt, Artificial Sequence
  RPE65 RNA guide
ugaacuuaauccuguccucugc

SEQ ID NO: 26684 - RNA, 22 nt, Artificial Sequence
  RPE65 RNA guide
ugacaucagagcagugaucugg

SEQ ID NO: 26685 - RNA, 22 nt, Artificial Sequence
  RPE65 RNA guide
ugacauuaaaagagaggucaug

SEQ ID NO: 26686 - RNA, 22 nt, Artificial Sequence
  RPE65 RNA guide
ugagacuagaccggcaggagug

SEQ ID NO: 26687 - RNA, 22 nt, Artificial Sequence
  RPE65 RNA guide
ugagcaucaacaugggcuucuu

SEQ ID NO: 26688 - RNA, 22 nt, Artificial Sequence
  RPE65 RNA guide
ugagcauguugauaggguggga

SEQ ID NO: 26689 - RNA, 22 nt, Artificial Sequence
  RPE65 RNA guide
ugagccagcccuagagugccuu

SEQ ID NO: 26690 - RNA, 22 nt, Artificial Sequence
  RPE65 RNA guide
ugagcugagcauguugauaggg

SEQ ID NO: 26691 - RNA, 22 nt, Artificial Sequence
  RPE65 RNA guide
ugaggcaagaaaaucaaugaug

SEQ ID NO: 26692 - RNA, 22 nt, Artificial Sequence
  RPE65 RNA guide
ugaggcuggggguggggaagac

SEQ ID NO: 26693 - RNA, 22 nt, Artificial Sequence
  RPE65 RNA guide
ugagggcgggaggagcacguga

SEQ ID NO: 26694 - RNA, 22 nt, Artificial Sequence
  RPE65 RNA guide
ugaguagucuuccccaccccca

SEQ ID NO: 26695 - RNA, 22 nt, Artificial Sequence
  RPE65 RNA guide
ugauagggugggagaauacugu

SEQ ID NO: 26696 - RNA, 22 nt, Artificial Sequence
  RPE65 RNA guide
ugaucugggacccccuuccaua

SEQ ID NO: 26697 - RNA, 22 nt, Artificial Sequence
  RPE65 RNA guide
ugaugcucaaaguccgcagaga

SEQ ID NO: 26698 - RNA, 22 nt, Artificial Sequence
  RPE65 RNA guide
ugaugcugugagcugagcaugu

SEQ ID NO: 26699 - RNA, 22 nt, Artificial Sequence
  RPE65 RNA guide
ugauggcaguaggauugauuga

SEQ ID NO: 26700 - RNA, 22 nt, Artificial Sequence
  RPE65 RNA guide
ugaugucaagagacaugaccuc

SEQ ID NO: 26701 - RNA, 22 nt, Artificial Sequence
  RPE65 RNA guide
ugauugauuugucuuccgaagu

SEQ ID NO: 26702 - RNA, 22 nt, Artificial Sequence
  RPE65 RNA guide
ugauuugucuuccgaaguaagg

SEQ ID NO: 26703 - RNA, 22 nt, Artificial Sequence
  RPE65 RNA guide
ugauuuucuugccucaaggaga

SEQ ID NO: 26704 - RNA, 22 nt, Artificial Sequence
  RPE65 RNA guide
ugcagaggacaggauuaaguuc

SEQ ID NO: 26705 - RNA, 22 nt, Artificial Sequence
  RPE65 RNA guide
ugcagcucugccucuaucucug

SEQ ID NO: 26706 - RNA, 22 nt, Artificial Sequence
  RPE65 RNA guide
ugcaggagagaaggcacucuag

SEQ ID NO: 26707 - RNA, 22 nt, Artificial Sequence
  RPE65 RNA guide
ugcaguuuuuccuuacuucgga

SEQ ID NO: 26708 - RNA, 22 nt, Artificial Sequence
  RPE65 RNA guide
ugccaucaguucacuuccugaa

SEQ ID NO: 26709 - RNA, 22 nt, Artificial Sequence
  RPE65 RNA guide
ugccggucuagucucagcuggg

SEQ ID NO: 26710 - RNA, 22 nt, Artificial Sequence
  RPE65 RNA guide
ugccucaaggagagacccauuu

SEQ ID NO: 26711 - RNA, 22 nt, Artificial Sequence
  RPE65 RNA guide
ugccucuaucucugcggacuuu

SEQ ID NO: 26712 - RNA, 22 nt, Artificial Sequence
  RPE65 RNA guide
ugccuucucuccugcagcucug

SEQ ID NO: 26713 - RNA, 22 nt, Artificial Sequence
  RPE65 RNA guide
ugcggacuuugagcaucaacau

SEQ ID NO: 26714 - RNA, 22 nt, Artificial Sequence
  RPE65 RNA guide
ugcucaaaguccgcagagauag

SEQ ID NO: 26715 - RNA, 22 nt, Artificial Sequence
  RPE65 RNA guide
ugcucagcucacagcaucauug

SEQ ID NO: 26716 - RNA, 22 nt, Artificial Sequence
  RPE65 RNA guide
ugcuccucccgcccucaccuuc

SEQ ID NO: 26717 - RNA, 22 nt, Artificial Sequence
  RPE65 RNA guide
ugcucugaugucaagagacaug

SEQ ID NO: 26718 - RNA, 22 nt, Artificial Sequence
  RPE65 RNA guide
ugcugugagcugagcauguuga

SEQ ID NO: 26719 - RNA, 22 nt, Artificial Sequence
  RPE65 RNA guide
uggaagaauaaggaagaagccc

SEQ ID NO: 26720 - RNA, 22 nt, Artificial Sequence
  RPE65 RNA guide
uggaagggggucccagaucacu

SEQ ID NO: 26721 - RNA, 22 nt, Artificial Sequence
  RPE65 RNA guide
uggcaguaggauugauugauuu

SEQ ID NO: 26722 - RNA, 22 nt, Artificial Sequence
  RPE65 RNA guide
uggcucaaagccuguucacucc

SEQ ID NO: 26723 - RNA, 22 nt, Artificial Sequence
  RPE65 RNA guide
ugggaaggacccuguuuaggaa

SEQ ID NO: 26724 - RNA, 22 nt, Artificial Sequence
  RPE65 RNA guide
ugggacccccuuccauaccuga

SEQ ID NO: 26725 - RNA, 22 nt, Artificial Sequence
  RPE65 RNA guide
ugggagaauacugugggaagga

SEQ ID NO: 26726 - RNA, 22 nt, Artificial Sequence
  RPE65 RNA guide
ugggcuucuuccuuauucuucc

SEQ ID NO: 26727 - RNA, 22 nt, Artificial Sequence
  RPE65 RNA guide
uggggaagacuacucagguaug

SEQ ID NO: 26728 - RNA, 22 nt, Artificial Sequence
  RPE65 RNA guide
uggggggagaagcgaaggugag

SEQ ID NO: 26729 - RNA, 22 nt, Artificial Sequence
  RPE65 RNA guide
uggggguggggaagacuacuca

SEQ ID NO: 26730 - RNA, 22 nt, Artificial Sequence
  RPE65 RNA guide
uggggguggggggagaagcgaa

SEQ ID NO: 26731 - RNA, 22 nt, Artificial Sequence
  RPE65 RNA guide
uggggguggggguggggggaga

SEQ ID NO: 26732 - RNA, 22 nt, Artificial Sequence
  RPE65 RNA guide
ugggucucuccuugaggcaaga

SEQ ID NO: 26733 - RNA, 22 nt, Artificial Sequence
  RPE65 RNA guide
uggguggggguggggguggggg

SEQ ID NO: 26734 - RNA, 22 nt, Artificial Sequence
  RPE65 RNA guide
ugguggaagaauaaggaagaag

SEQ ID NO: 26735 - RNA, 22 nt, Artificial Sequence
  RPE65 RNA guide
ugguuacagugaacuuaauccu

SEQ ID NO: 26736 - RNA, 22 nt, Artificial Sequence
  RPE65 RNA guide
uguaaccauugacauuaaaaga

SEQ ID NO: 26737 - RNA, 22 nt, Artificial Sequence
  RPE65 RNA guide
ugucaagagacaugaccucucu

SEQ ID NO: 26738 - RNA, 22 nt, Artificial Sequence
  RPE65 RNA guide
uguccucugcaguuuuuccuua

SEQ ID NO: 26739 - RNA, 22 nt, Artificial Sequence
  RPE65 RNA guide
ugucucuugacaucagagcagu

SEQ ID NO: 26740 - RNA, 22 nt, Artificial Sequence
  RPE65 RNA guide
ugucuuccgaaguaaggaaaaa

SEQ ID NO: 26741 - RNA, 22 nt, Artificial Sequence
  RPE65 RNA guide
ugugagcugagcauguugauag

SEQ ID NO: 26742 - RNA, 22 nt, Artificial Sequence
  RPE65 RNA guide
ugugggaaggacccuguuuagg

SEQ ID NO: 26743 - RNA, 22 nt, Artificial Sequence
  RPE65 RNA guide
uguucacuccugccggucuagu

SEQ ID NO: 26744 - RNA, 22 nt, Artificial Sequence
  RPE65 RNA guide
uguuccuaaacaggguccuucc

SEQ ID NO: 26745 - RNA, 22 nt, Artificial Sequence
  RPE65 RNA guide
uguugauagggugggagaauac

SEQ ID NO: 26746 - RNA, 22 nt, Artificial Sequence
  RPE65 RNA guide
uguugaugcucaaaguccgcag

SEQ ID NO: 26747 - RNA, 22 nt, Artificial Sequence
  RPE65 RNA guide
uguuuaggaacaaauuucagga

SEQ ID NO: 26748 - RNA, 22 nt, Artificial Sequence
  RPE65 RNA guide
uuaaaagagaggucaugucucu

SEQ ID NO: 26749 - RNA, 22 nt, Artificial Sequence
  RPE65 RNA guide
uuaauccuguccucugcaguuu

SEQ ID NO: 26750 - RNA, 22 nt, Artificial Sequence
  RPE65 RNA guide
uuacagugaacuuaauccuguc

SEQ ID NO: 26751 - RNA, 22 nt, Artificial Sequence
  RPE65 RNA guide
uuacuucggaagacaaaucaau

SEQ ID NO: 26752 - RNA, 22 nt, Artificial Sequence
  RPE65 RNA guide
uuaggaacaaauuucaggaagu

SEQ ID NO: 26753 - RNA, 22 nt, Artificial Sequence
  RPE65 RNA guide
uuaucuccuuccuagggguuga

SEQ ID NO: 26754 - RNA, 22 nt, Artificial Sequence
  RPE65 RNA guide
uucacuccugccggucuagucu

SEQ ID NO: 26755 - RNA, 22 nt, Artificial Sequence
  RPE65 RNA guide
uucacuuccugaaauuuguucc

SEQ ID NO: 26756 - RNA, 22 nt, Artificial Sequence
  RPE65 RNA guide
uucaggaagugaacugauggca

SEQ ID NO: 26757 - RNA, 22 nt, Artificial Sequence
  RPE65 RNA guide
uuccauaccugaguagucuucc

SEQ ID NO: 26758 - RNA, 22 nt, Artificial Sequence
  RPE65 RNA guide
uucccacaguauucucccaccc

SEQ ID NO: 26759 - RNA, 22 nt, Artificial Sequence
  RPE65 RNA guide
uuccccacccccagccucacgu

SEQ ID NO: 26760 - RNA, 22 nt, Artificial Sequence
  RPE65 RNA guide
uuccgaaguaaggaaaaacugc

SEQ ID NO: 26761 - RNA, 22 nt, Artificial Sequence
  RPE65 RNA guide
uuccuaaacaggguccuuccca

SEQ ID NO: 26762 - RNA, 22 nt, Artificial Sequence
  RPE65 RNA guide
uuccugaaauuuguuccuaaac

SEQ ID NO: 26763 - RNA, 22 nt, Artificial Sequence
  RPE65 RNA guide
uuccuuacuucggaagacaaau

SEQ ID NO: 26764 - RNA, 22 nt, Artificial Sequence
  RPE65 RNA guide
uucgcuucuccccccaccccca

SEQ ID NO: 26765 - RNA, 22 nt, Artificial Sequence
  RPE65 RNA guide
uucggaagacaaaucaaucaau

SEQ ID NO: 26766 - RNA, 22 nt, Artificial Sequence
  RPE65 RNA guide
uucucccacccuaucaacaugc

SEQ ID NO: 26767 - RNA, 22 nt, Artificial Sequence
  RPE65 RNA guide
uucuccccccacccccaccccc

SEQ ID NO: 26768 - RNA, 22 nt, Artificial Sequence
  RPE65 RNA guide
uucucuccugcagcucugccuc

SEQ ID NO: 26769 - RNA, 22 nt, Artificial Sequence
  RPE65 RNA guide
uucuuccuuauucuuccaccau

SEQ ID NO: 26770 - RNA, 22 nt, Artificial Sequence
  RPE65 RNA guide
uucuugccucaaggagagaccc

SEQ ID NO: 26771 - RNA, 22 nt, Artificial Sequence
  RPE65 RNA guide
uugacaucagagcagugaucug

SEQ ID NO: 26772 - RNA, 22 nt, Artificial Sequence
  RPE65 RNA guide
uugacauuaaaagagaggucau

SEQ ID NO: 26773 - RNA, 22 nt, Artificial Sequence
  RPE65 RNA guide
uugagcaucaacaugggcuucu

SEQ ID NO: 26774 - RNA, 22 nt, Artificial Sequence
  RPE65 RNA guide
uugagccagcccuagagugccu

SEQ ID NO: 26775 - RNA, 22 nt, Artificial Sequence
  RPE65 RNA guide
uugaggcaagaaaaucaaugau

SEQ ID NO: 26776 - RNA, 22 nt, Artificial Sequence
  RPE65 RNA guide
uugauagggugggagaauacug

SEQ ID NO: 26777 - RNA, 22 nt, Artificial Sequence
  RPE65 RNA guide
uugaugcucaaaguccgcagag

SEQ ID NO: 26778 - RNA, 22 nt, Artificial Sequence
  RPE65 RNA guide
uugauugauuugucuuccgaag

SEQ ID NO: 26779 - RNA, 22 nt, Artificial Sequence
  RPE65 RNA guide
uugauuugucuuccgaaguaag

SEQ ID NO: 26780 - RNA, 22 nt, Artificial Sequence
  RPE65 RNA guide
uugauuuucuugccucaaggag

SEQ ID NO: 26781 - RNA, 22 nt, Artificial Sequence
  RPE65 RNA guide
uugccucaaggagagacccauu

SEQ ID NO: 26782 - RNA, 22 nt, Artificial Sequence
  RPE65 RNA guide
uugucuuccgaaguaaggaaaa

SEQ ID NO: 26783 - RNA, 22 nt, Artificial Sequence
  RPE65 RNA guide
uuguuccuaaacaggguccuuc

SEQ ID NO: 26784 - RNA, 22 nt, Artificial Sequence
  RPE65 RNA guide
uuuaggaacaaauuucaggaag

SEQ ID NO: 26785 - RNA, 22 nt, Artificial Sequence
  RPE65 RNA guide
uuuaucuccuuccuagggguug

SEQ ID NO: 26786 - RNA, 22 nt, Artificial Sequence
  RPE65 RNA guide
uuucaggaagugaacugauggc

SEQ ID NO: 26787 - RNA, 22 nt, Artificial Sequence
  RPE65 RNA guide
uuuccuuacuucggaagacaaa

SEQ ID NO: 26788 - RNA, 22 nt, Artificial Sequence
  RPE65 RNA guide
uuucuugccucaaggagagacc

SEQ ID NO: 26789 - RNA, 22 nt, Artificial Sequence
  RPE65 RNA guide
uuugagcaucaacaugggcuuc

SEQ ID NO: 26790 - RNA, 22 nt, Artificial Sequence
  RPE65 RNA guide
uuugagccagcccuagagugcc

SEQ ID NO: 26791 - RNA, 22 nt, Artificial Sequence
  RPE65 RNA guide
uuugucuuccgaaguaaggaaa

SEQ ID NO: 26792 - RNA, 22 nt, Artificial Sequence
  RPE65 RNA guide
uuuguuccuaaacaggguccuu

SEQ ID NO: 26793 - RNA, 22 nt, Artificial Sequence
  RPE65 RNA guide
uuuuaaugucaaugguuacagu

SEQ ID NO: 26794 - RNA, 22 nt, Artificial Sequence
  RPE65 RNA guide
uuuuccuuacuucggaagacaa

SEQ ID NO: 26795 - RNA, 22 nt, Artificial Sequence
  RPE65 RNA guide
uuuucuugccucaaggagagac

SEQ ID NO: 26796 - RNA, 22 nt, Artificial Sequence
  RPE65 RNA guide
uuuuuccuuacuucggaagaca

SEQ ID NO: 26797 - RNA, 20 nt, Artificial Sequence
  RPE65 RNA guide
aaaaaagucucccagagaua

SEQ ID NO: 26798 - RNA, 20 nt, Artificial Sequence
  RPE65 RNA guide
aaaaagucucccagagauac

SEQ ID NO: 26799 - RNA, 20 nt, Artificial Sequence
  RPE65 RNA guide
aaaacaccuucauggauuca

SEQ ID NO: 26800 - RNA, 20 nt, Artificial Sequence
  RPE65 RNA guide
aaaauucaagggucuuuccu

SEQ ID NO: 26801 - RNA, 20 nt, Artificial Sequence
  RPE65 RNA guide
aaaauuuccccaccaaaauu

SEQ ID NO: 26802 - RNA, 20 nt, Artificial Sequence
  RPE65 RNA guide
aaacaccuucauggauucau

SEQ ID NO: 26803 - RNA, 20 nt, Artificial Sequence
  RPE65 RNA guide
aaaccccccauaauuuggac

SEQ ID NO: 26804 - RNA, 20 nt, Artificial Sequence
  RPE65 RNA guide
aaaccccgggcuaagucaca

SEQ ID NO: 26805 - RNA, 20 nt, Artificial Sequence
  RPE65 RNA guide
aaagacccuugaauuuuggu

SEQ ID NO: 26806 - RNA, 20 nt, Artificial Sequence
  RPE65 RNA guide
aaagaguggaaucucugacc

SEQ ID NO: 26807 - RNA, 20 nt, Artificial Sequence
  RPE65 RNA guide
aaagcaacuagcuagaauuc

SEQ ID NO: 26808 - RNA, 20 nt, Artificial Sequence
  RPE65 RNA guide
aaagucacacacuaggaaau

SEQ ID NO: 26809 - RNA, 20 nt, Artificial Sequence
  RPE65 RNA guide
aaauccccauacucaagacu

SEQ ID NO: 26810 - RNA, 20 nt, Artificial Sequence
  RPE65 RNA guide
aaaucucacaguaacauaau

SEQ ID NO: 26811 - RNA, 20 nt, Artificial Sequence
  RPE65 RNA guide
aaaugacugggcaaggagug

SEQ ID NO: 26812 - RNA, 20 nt, Artificial Sequence
  RPE65 RNA guide
aaaugugcuauuucaagggc

SEQ ID NO: 26813 - RNA, 20 nt, Artificial Sequence
  RPE65 RNA guide
aaauuaugggggguuugugu

SEQ ID NO: 26814 - RNA, 20 nt, Artificial Sequence
  RPE65 RNA guide
aaauuuccccaccaaaauuc

SEQ ID NO: 26815 - RNA, 20 nt, Artificial Sequence
  RPE65 RNA guide
aacaauuacuauguccuaca

SEQ ID NO: 26816 - RNA, 20 nt, Artificial Sequence
  RPE65 RNA guide
aacaccuucauggauucaug

SEQ ID NO: 26817 - RNA, 20 nt, Artificial Sequence
  RPE65 RNA guide
aaccccccauaauuuggacc

SEQ ID NO: 26818 - RNA, 20 nt, Artificial Sequence
  RPE65 RNA guide
aaccccgggcuaagucacac

SEQ ID NO: 26819 - RNA, 20 nt, Artificial Sequence
  RPE65 RNA guide
aacuagcuagaauucagguc

SEQ ID NO: 26820 - RNA, 20 nt, Artificial Sequence
  RPE65 RNA guide
aacuucaaagaguggaaucu

SEQ ID NO: 26821 - RNA, 20 nt, Artificial Sequence
  RPE65 RNA guide
aagaacuuugcaugguauua

SEQ ID NO: 26822 - RNA, 20 nt, Artificial Sequence
  RPE65 RNA guide
aagacccuugaauuuuggug

SEQ ID NO: 26823 - RNA, 20 nt, Artificial Sequence
  RPE65 RNA guide
aagacugcuuccaaaccccg

SEQ ID NO: 26824 - RNA, 20 nt, Artificial Sequence
  RPE65 RNA guide
aagagaaggcauugauuaau

SEQ ID NO: 26825 - RNA, 20 nt, Artificial Sequence
  RPE65 RNA guide
aagagauaauaccaugcaaa

SEQ ID NO: 26826 - RNA, 20 nt, Artificial Sequence
  RPE65 RNA guide
aagaguggaaucucugacca

SEQ ID NO: 26827 - RNA, 20 nt, Artificial Sequence
  RPE65 RNA guide
aagaugucacaauagcuuuu

SEQ ID NO: 26828 - RNA, 20 nt, Artificial Sequence
  RPE65 RNA guide
aagcaacuagcuagaauuca

SEQ ID NO: 26829 - RNA, 20 nt, Artificial Sequence
  RPE65 RNA guide
aagcaggaaaaaauuucccc

SEQ ID NO: 26830 - RNA, 20 nt, Artificial Sequence
  RPE65 RNA guide
aagcagucuugaguaugggg

SEQ ID NO: 26831 - RNA, 20 nt, Artificial Sequence
  RPE65 RNA guide
aaggaguggagcccaagucu

SEQ ID NO: 26832 - RNA, 20 nt, Artificial Sequence
  RPE65 RNA guide
aagggcuccugaagagaagg

SEQ ID NO: 26833 - RNA, 20 nt, Artificial Sequence
  RPE65 RNA guide
aagguguuuuaaaaaagucu

SEQ ID NO: 26834 - RNA, 20 nt, Artificial Sequence
  RPE65 RNA guide
aaguaucucugggagacuuu

SEQ ID NO: 26835 - RNA, 20 nt, Artificial Sequence
  RPE65 RNA guide
aagucacacaaaccccccau

SEQ ID NO: 26836 - RNA, 20 nt, Artificial Sequence
  RPE65 RNA guide
aagucacacacuaggaaaug

SEQ ID NO: 26837 - RNA, 20 nt, Artificial Sequence
  RPE65 RNA guide
aagucuagcuuuuccuguau

SEQ ID NO: 26838 - RNA, 20 nt, Artificial Sequence
  RPE65 RNA guide
aagucugucugaaaucccca

SEQ ID NO: 26839 - RNA, 20 nt, Artificial Sequence
  RPE65 RNA guide
aaguuagguaauuuguccaa

SEQ ID NO: 26840 - RNA, 20 nt, Artificial Sequence
  RPE65 RNA guide
aaucaaugccuucucuucag

SEQ ID NO: 26841 - RNA, 20 nt, Artificial Sequence
  RPE65 RNA guide
aauccccauacucaagacug

SEQ ID NO: 26842 - RNA, 20 nt, Artificial Sequence
  RPE65 RNA guide
aaucucacaguaacauaaug

SEQ ID NO: 26843 - RNA, 20 nt, Artificial Sequence
  RPE65 RNA guide
aaucucugaccagacucaau

SEQ ID NO: 26844 - RNA, 20 nt, Artificial Sequence
  RPE65 RNA guide
aaugacugggcaaggagugg

SEQ ID NO: 26845 - RNA, 20 nt, Artificial Sequence
  RPE65 RNA guide
aaugccuucucuucaggagc

SEQ ID NO: 26846 - RNA, 20 nt, Artificial Sequence
  RPE65 RNA guide
aauggaguaaaagcuauugu

SEQ ID NO: 26847 - RNA, 20 nt, Artificial Sequence
  RPE65 RNA guide
aaugugcuauuucaagggcu

SEQ ID NO: 26848 - RNA, 20 nt, Artificial Sequence
  RPE65 RNA guide
aauuaugggggguuugugug

SEQ ID NO: 26849 - RNA, 20 nt, Artificial Sequence
  RPE65 RNA guide
aauucagguccaaauuaugg

SEQ ID NO: 26850 - RNA, 20 nt, Artificial Sequence
  RPE65 RNA guide
aauugagucuggucagagau

SEQ ID NO: 26851 - RNA, 20 nt, Artificial Sequence
  RPE65 RNA guide
aauuuccccaccaaaauuca

SEQ ID NO: 26852 - RNA, 20 nt, Artificial Sequence
  RPE65 RNA guide
aauuuggaccugaauucuag

SEQ ID NO: 26853 - RNA, 20 nt, Artificial Sequence
  RPE65 RNA guide
aauuuguccaaagucacaca

SEQ ID NO: 26854 - RNA, 20 nt, Artificial Sequence
  RPE65 RNA guide
aauuuugguggggaaauuuu

SEQ ID NO: 26855 - RNA, 20 nt, Artificial Sequence
  RPE65 RNA guide
acaaaccccccauaauuugg

SEQ ID NO: 26856 - RNA, 20 nt, Artificial Sequence
  RPE65 RNA guide
acaauuacuauguccuacau

SEQ ID NO: 26857 - RNA, 20 nt, Artificial Sequence
  RPE65 RNA guide
acacaaaccccccauaauuu

SEQ ID NO: 26858 - RNA, 20 nt, Artificial Sequence
  RPE65 RNA guide
acacacuaggaaaugacugg

SEQ ID NO: 26859 - RNA, 20 nt, Artificial Sequence
  RPE65 RNA guide
acaccuucauggauucauga

SEQ ID NO: 26860 - RNA, 20 nt, Artificial Sequence
  RPE65 RNA guide
acacuaggaaaugacugggc

SEQ ID NO: 26861 - RNA, 20 nt, Artificial Sequence
  RPE65 RNA guide
acagacuugggcuccacucc

SEQ ID NO: 26862 - RNA, 20 nt, Artificial Sequence
  RPE65 RNA guide
acaggaaaagcuagacuuaa

SEQ ID NO: 26863 - RNA, 20 nt, Artificial Sequence
  RPE65 RNA guide
acaguaacauaauggaguaa

SEQ ID NO: 26864 - RNA, 20 nt, Artificial Sequence
  RPE65 RNA guide
acauaagcaggaaaaaauuu

SEQ ID NO: 26865 - RNA, 20 nt, Artificial Sequence
  RPE65 RNA guide
acauuuaucaugaauccaug

SEQ ID NO: 26866 - RNA, 20 nt, Artificial Sequence
  RPE65 RNA guide
accaaaauucaagggucuuu

SEQ ID NO: 26867 - RNA, 20 nt, Artificial Sequence
  RPE65 RNA guide
accauaaaaagaacuuugca

SEQ ID NO: 26868 - RNA, 20 nt, Artificial Sequence
  RPE65 RNA guide
accaugcaaaguucuuuuua

SEQ ID NO: 26869 - RNA, 20 nt, Artificial Sequence
  RPE65 RNA guide
accccccauaauuuggaccu

SEQ ID NO: 26870 - RNA, 20 nt, Artificial Sequence
  RPE65 RNA guide
accccgggcuaagucacaca

SEQ ID NO: 26871 - RNA, 20 nt, Artificial Sequence
  RPE65 RNA guide
acccuugaauuuuggugggg

SEQ ID NO: 26872 - RNA, 20 nt, Artificial Sequence
  RPE65 RNA guide
accugaauucuagcuaguug

SEQ ID NO: 26873 - RNA, 20 nt, Artificial Sequence
  RPE65 RNA guide
accuucauggauucaugaua

SEQ ID NO: 26874 - RNA, 20 nt, Artificial Sequence
  RPE65 RNA guide
acuagcuagaauucaggucc

SEQ ID NO: 26875 - RNA, 20 nt, Artificial Sequence
  RPE65 RNA guide
acuaggaaaugacugggcaa

SEQ ID NO: 26876 - RNA, 20 nt, Artificial Sequence
  RPE65 RNA guide
acucaagacugcuuccaaac

SEQ ID NO: 26877 - RNA, 20 nt, Artificial Sequence
  RPE65 RNA guide
acuccauuauguuacuguga

SEQ ID NO: 26878 - RNA, 20 nt, Artificial Sequence
  RPE65 RNA guide
acuccuugcccagucauuuc

SEQ ID NO: 26879 - RNA, 20 nt, Artificial Sequence
  RPE65 RNA guide
acugcuuccaaaccccgggc

SEQ ID NO: 26880 - RNA, 20 nt, Artificial Sequence
  RPE65 RNA guide
acugggcaaggaguggagcc

SEQ ID NO: 26881 - RNA, 20 nt, Artificial Sequence
  RPE65 RNA guide
acuuagcccgggguuuggaa

SEQ ID NO: 26882 - RNA, 20 nt, Artificial Sequence
  RPE65 RNA guide
acuucaaagaguggaaucuc

SEQ ID NO: 26883 - RNA, 20 nt, Artificial Sequence
  RPE65 RNA guide
acuugggcuccacuccuugc

SEQ ID NO: 26884 - RNA, 20 nt, Artificial Sequence
  RPE65 RNA guide
acuuuuuaagucuagcuuuu

SEQ ID NO: 26885 - RNA, 20 nt, Artificial Sequence
  RPE65 RNA guide
agaacuuugcaugguauuau

SEQ ID NO: 26886 - RNA, 20 nt, Artificial Sequence
  RPE65 RNA guide
agaauucagguccaaauuau

SEQ ID NO: 26887 - RNA, 20 nt, Artificial Sequence
  RPE65 RNA guide
agacagacuugggcuccacu

SEQ ID NO: 26888 - RNA, 20 nt, Artificial Sequence
  RPE65 RNA guide
agacccuugaauuuuggugg

SEQ ID NO: 26889 - RNA, 20 nt, Artificial Sequence
  RPE65 RNA guide
agacugcuuccaaaccccgg

SEQ ID NO: 26890 - RNA, 20 nt, Artificial Sequence
  RPE65 RNA guide
agacuugggcuccacuccuu

SEQ ID NO: 26891 - RNA, 20 nt, Artificial Sequence
  RPE65 RNA guide
agagauaauaccaugcaaag

SEQ ID NO: 26892 - RNA, 20 nt, Artificial Sequence
  RPE65 RNA guide
agaguggaaucucugaccag

SEQ ID NO: 26893 - RNA, 20 nt, Artificial Sequence
  RPE65 RNA guide
agaugucacaauagcuuuua

SEQ ID NO: 26894 - RNA, 20 nt, Artificial Sequence
  RPE65 RNA guide
agcaacuagcuagaauucag

SEQ ID NO: 26895 - RNA, 20 nt, Artificial Sequence
  RPE65 RNA guide
agcacauuuaucaugaaucc

SEQ ID NO: 26896 - RNA, 20 nt, Artificial Sequence
  RPE65 RNA guide
agcaggaaaaaauuucccca

SEQ ID NO: 26897 - RNA, 20 nt, Artificial Sequence
  RPE65 RNA guide
agcagucuugaguaugggga

SEQ ID NO: 26898 - RNA, 20 nt, Artificial Sequence
  RPE65 RNA guide
agcccaagucugucugaaau

SEQ ID NO: 26899 - RNA, 20 nt, Artificial Sequence
  RPE65 RNA guide
agcccgggguuuggaagcag

SEQ ID NO: 26900 - RNA, 20 nt, Artificial Sequence
  RPE65 RNA guide
agcccuugaaauagcacauu

SEQ ID NO: 26901 - RNA, 20 nt, Artificial Sequence
  RPE65 RNA guide
agcuagaauucagguccaaa

SEQ ID NO: 26902 - RNA, 20 nt, Artificial Sequence
  RPE65 RNA guide
agcuaguugcuuuaauacau

SEQ ID NO: 26903 - RNA, 20 nt, Artificial Sequence
  RPE65 RNA guide
agcuuuuacuccauuauguu

SEQ ID NO: 26904 - RNA, 20 nt, Artificial Sequence
  RPE65 RNA guide
aggaaaaaauuuccccacca

SEQ ID NO: 26905 - RNA, 20 nt, Artificial Sequence
  RPE65 RNA guide
aggaaagacccuugaauuuu

SEQ ID NO: 26906 - RNA, 20 nt, Artificial Sequence
  RPE65 RNA guide
aggaaaugacugggcaagga

SEQ ID NO: 26907 - RNA, 20 nt, Artificial Sequence
  RPE65 RNA guide
aggagcccuugaaauagcac

SEQ ID NO: 26908 - RNA, 20 nt, Artificial Sequence
  RPE65 RNA guide
aggaguggagcccaagucug

SEQ ID NO: 26909 - RNA, 20 nt, Artificial Sequence
  RPE65 RNA guide
agggcuccugaagagaaggc

SEQ ID NO: 26910 - RNA, 20 nt, Artificial Sequence
  RPE65 RNA guide
agguaauuuguccaaaguca

SEQ ID NO: 26911 - RNA, 20 nt, Artificial Sequence
  RPE65 RNA guide
aggucauuaaucaaugccuu

SEQ ID NO: 26912 - RNA, 20 nt, Artificial Sequence
  RPE65 RNA guide
agguccaaauuauggggggu

SEQ ID NO: 26913 - RNA, 20 nt, Artificial Sequence
  RPE65 RNA guide
agguguuuuaaaaaagucuc

SEQ ID NO: 26914 - RNA, 20 nt, Artificial Sequence
  RPE65 RNA guide
aguaucucugggagacuuuu

SEQ ID NO: 26915 - RNA, 20 nt, Artificial Sequence
  RPE65 RNA guide
aguauggggauuucagacag

SEQ ID NO: 26916 - RNA, 20 nt, Artificial Sequence
  RPE65 RNA guide
agucacacaaaccccccaua

SEQ ID NO: 26917 - RNA, 20 nt, Artificial Sequence
  RPE65 RNA guide
agucacacacuaggaaauga

SEQ ID NO: 26918 - RNA, 20 nt, Artificial Sequence
  RPE65 RNA guide
agucauuuccuaguguguga

SEQ ID NO: 26919 - RNA, 20 nt, Artificial Sequence
  RPE65 RNA guide
agucuagcuuuuccuguaua

SEQ ID NO: 26920 - RNA, 20 nt, Artificial Sequence
  RPE65 RNA guide
agucuggucagagauuccac

SEQ ID NO: 26921 - RNA, 20 nt, Artificial Sequence
  RPE65 RNA guide
agucugucugaaauccccau

SEQ ID NO: 26922 - RNA, 20 nt, Artificial Sequence
  RPE65 RNA guide
agucuugaguauggggauuu

SEQ ID NO: 26923 - RNA, 20 nt, Artificial Sequence
  RPE65 RNA guide
aguggaaucucugaccagac

SEQ ID NO: 26924 - RNA, 20 nt, Artificial Sequence
  RPE65 RNA guide
aguggagcccaagucugucu

SEQ ID NO: 26925 - RNA, 20 nt, Artificial Sequence
  RPE65 RNA guide
agugugugacuuuggacaaa

SEQ ID NO: 26926 - RNA, 20 nt, Artificial Sequence
  RPE65 RNA guide
aguuagguaauuuguccaaa

SEQ ID NO: 26927 - RNA, 20 nt, Artificial Sequence
  RPE65 RNA guide
aguucuuuuuaugguaugua

SEQ ID NO: 26928 - RNA, 20 nt, Artificial Sequence
  RPE65 RNA guide
aguugcuuuaauacauaagc

SEQ ID NO: 26929 - RNA, 20 nt, Artificial Sequence
  RPE65 RNA guide
auaaaugugcuauuucaagg

SEQ ID NO: 26930 - RNA, 20 nt, Artificial Sequence
  RPE65 RNA guide
auaagcaggaaaaaauuucc

SEQ ID NO: 26931 - RNA, 20 nt, Artificial Sequence
  RPE65 RNA guide
auaauugagucuggucagag

SEQ ID NO: 26932 - RNA, 20 nt, Artificial Sequence
  RPE65 RNA guide
auaauuuggaccugaauucu

SEQ ID NO: 26933 - RNA, 20 nt, Artificial Sequence
  RPE65 RNA guide
auacucaagacugcuuccaa

SEQ ID NO: 26934 - RNA, 20 nt, Artificial Sequence
  RPE65 RNA guide
aucaaugccuucucuucagg

SEQ ID NO: 26935 - RNA, 20 nt, Artificial Sequence
  RPE65 RNA guide
aucaugaauccaugaaggug

SEQ ID NO: 26936 - RNA, 20 nt, Artificial Sequence
  RPE65 RNA guide
auccccauacucaagacugc

SEQ ID NO: 26937 - RNA, 20 nt, Artificial Sequence
  RPE65 RNA guide
aucucacaguaacauaaugg

SEQ ID NO: 26938 - RNA, 20 nt, Artificial Sequence
  RPE65 RNA guide
aucucugaccagacucaauu

SEQ ID NO: 26939 - RNA, 20 nt, Artificial Sequence
  RPE65 RNA guide
aucucugggagacuuuuuua

SEQ ID NO: 26940 - RNA, 20 nt, Artificial Sequence
  RPE65 RNA guide
augacugggcaaggagugga

SEQ ID NO: 26941 - RNA, 20 nt, Artificial Sequence
  RPE65 RNA guide
augauaaaugugcuauuuca

SEQ ID NO: 26942 - RNA, 20 nt, Artificial Sequence
  RPE65 RNA guide
augccuucucuucaggagcc

SEQ ID NO: 26943 - RNA, 20 nt, Artificial Sequence
  RPE65 RNA guide
auggaguaaaagcuauugug

SEQ ID NO: 26944 - RNA, 20 nt, Artificial Sequence
  RPE65 RNA guide
auggggauuucagacagacu

SEQ ID NO: 26945 - RNA, 20 nt, Artificial Sequence
  RPE65 RNA guide
augggggguuugugugacuu

SEQ ID NO: 26946 - RNA, 20 nt, Artificial Sequence
  RPE65 RNA guide
augguauguaggacauagua

SEQ ID NO: 26947 - RNA, 20 nt, Artificial Sequence
  RPE65 RNA guide
augucacaauagcuuuuacu

SEQ ID NO: 26948 - RNA, 20 nt, Artificial Sequence
  RPE65 RNA guide
augugcuauuucaagggcuc

SEQ ID NO: 26949 - RNA, 20 nt, Artificial Sequence
  RPE65 RNA guide
auuaaucaaugccuucucuu

SEQ ID NO: 26950 - RNA, 20 nt, Artificial Sequence
  RPE65 RNA guide
auuauaauugagucugguca

SEQ ID NO: 26951 - RNA, 20 nt, Artificial Sequence
  RPE65 RNA guide
auuaugggggguuuguguga

SEQ ID NO: 26952 - RNA, 20 nt, Artificial Sequence
  RPE65 RNA guide
auucagguccaaauuauggg

SEQ ID NO: 26953 - RNA, 20 nt, Artificial Sequence
  RPE65 RNA guide
auugagucuggucagagauu

SEQ ID NO: 26954 - RNA, 20 nt, Artificial Sequence
  RPE65 RNA guide
auuuaucaugaauccaugaa

SEQ ID NO: 26955 - RNA, 20 nt, Artificial Sequence
  RPE65 RNA guide
auuucaagggcuccugaaga

SEQ ID NO: 26956 - RNA, 20 nt, Artificial Sequence
  RPE65 RNA guide
auuucagacagacuugggcu

SEQ ID NO: 26957 - RNA, 20 nt, Artificial Sequence
  RPE65 RNA guide
auuuccccaccaaaauucaa

SEQ ID NO: 26958 - RNA, 20 nt, Artificial Sequence
  RPE65 RNA guide
auuuccuagugugugacuuu

SEQ ID NO: 26959 - RNA, 20 nt, Artificial Sequence
  RPE65 RNA guide
auuuggaccugaauucuagc

SEQ ID NO: 26960 - RNA, 20 nt, Artificial Sequence
  RPE65 RNA guide
auuuguccaaagucacacac

SEQ ID NO: 26961 - RNA, 20 nt, Artificial Sequence
  RPE65 RNA guide
auuuugguggggaaauuuuu

SEQ ID NO: 26962 - RNA, 20 nt, Artificial Sequence
  RPE65 RNA guide
caaaauucaagggucuuucc

SEQ ID NO: 26963 - RNA, 20 nt, Artificial Sequence
  RPE65 RNA guide
caaaccccccauaauuugga

SEQ ID NO: 26964 - RNA, 20 nt, Artificial Sequence
  RPE65 RNA guide
caaaccccgggcuaagucac

SEQ ID NO: 26965 - RNA, 20 nt, Artificial Sequence
  RPE65 RNA guide
caaagaguggaaucucugac

SEQ ID NO: 26966 - RNA, 20 nt, Artificial Sequence
  RPE65 RNA guide
caaagucacacacuaggaaa

SEQ ID NO: 26967 - RNA, 20 nt, Artificial Sequence
  RPE65 RNA guide
caaauuaugggggguuugug

SEQ ID NO: 26968 - RNA, 20 nt, Artificial Sequence
  RPE65 RNA guide
caacuagcuagaauucaggu

SEQ ID NO: 26969 - RNA, 20 nt, Artificial Sequence
  RPE65 RNA guide
caagacugcuuccaaacccc

SEQ ID NO: 26970 - RNA, 20 nt, Artificial Sequence
  RPE65 RNA guide
caaggaguggagcccaaguc

SEQ ID NO: 26971 - RNA, 20 nt, Artificial Sequence
  RPE65 RNA guide
caagggcuccugaagagaag

SEQ ID NO: 26972 - RNA, 20 nt, Artificial Sequence
  RPE65 RNA guide
caagucugucugaaaucccc

SEQ ID NO: 26973 - RNA, 20 nt, Artificial Sequence
  RPE65 RNA guide
caaugccuucucuucaggag

SEQ ID NO: 26974 - RNA, 20 nt, Artificial Sequence
  RPE65 RNA guide
caauuacuauguccuacaua

SEQ ID NO: 26975 - RNA, 20 nt, Artificial Sequence
  RPE65 RNA guide
cacaaaccccccauaauuug

SEQ ID NO: 26976 - RNA, 20 nt, Artificial Sequence
  RPE65 RNA guide
cacaauagcuuuuacuccau

SEQ ID NO: 26977 - RNA, 20 nt, Artificial Sequence
  RPE65 RNA guide
cacacaaaccccccauaauu

SEQ ID NO: 26978 - RNA, 20 nt, Artificial Sequence
  RPE65 RNA guide
cacacacuaggaaaugacug

SEQ ID NO: 26979 - RNA, 20 nt, Artificial Sequence
  RPE65 RNA guide
cacacuaggaaaugacuggg

SEQ ID NO: 26980 - RNA, 20 nt, Artificial Sequence
  RPE65 RNA guide
cacaguaacauaauggagua

SEQ ID NO: 26981 - RNA, 20 nt, Artificial Sequence
  RPE65 RNA guide
cacauuuaucaugaauccau

SEQ ID NO: 26982 - RNA, 20 nt, Artificial Sequence
  RPE65 RNA guide
caccaaaauucaagggucuu

SEQ ID NO: 26983 - RNA, 20 nt, Artificial Sequence
  RPE65 RNA guide
caccuucauggauucaugau

SEQ ID NO: 26984 - RNA, 20 nt, Artificial Sequence
  RPE65 RNA guide
cacuaggaaaugacugggca

SEQ ID NO: 26985 - RNA, 20 nt, Artificial Sequence
  RPE65 RNA guide
cacuccuugcccagucauuu

SEQ ID NO: 26986 - RNA, 20 nt, Artificial Sequence
  RPE65 RNA guide
cagacagacuugggcuccac

SEQ ID NO: 26987 - RNA, 20 nt, Artificial Sequence
  RPE65 RNA guide
cagacuugggcuccacuccu

SEQ ID NO: 26988 - RNA, 20 nt, Artificial Sequence
  RPE65 RNA guide
cagagauuccacucuuugaa

SEQ ID NO: 26989 - RNA, 20 nt, Artificial Sequence
  RPE65 RNA guide
caggaaaaaauuuccccacc

SEQ ID NO: 26990 - RNA, 20 nt, Artificial Sequence
  RPE65 RNA guide
caggaaaagcuagacuuaaa

SEQ ID NO: 26991 - RNA, 20 nt, Artificial Sequence
  RPE65 RNA guide
caggagcccuugaaauagca

SEQ ID NO: 26992 - RNA, 20 nt, Artificial Sequence
  RPE65 RNA guide
cagguccaaauuaugggggg

SEQ ID NO: 26993 - RNA, 20 nt, Artificial Sequence
  RPE65 RNA guide
caguaacauaauggaguaaa

SEQ ID NO: 26994 - RNA, 20 nt, Artificial Sequence
  RPE65 RNA guide
cagucauuuccuagugugug

SEQ ID NO: 26995 - RNA, 20 nt, Artificial Sequence
  RPE65 RNA guide
cagucuugaguauggggauu

SEQ ID NO: 26996 - RNA, 20 nt, Artificial Sequence
  RPE65 RNA guide
cauaagcaggaaaaaauuuc

SEQ ID NO: 26997 - RNA, 20 nt, Artificial Sequence
  RPE65 RNA guide
cauaauggaguaaaagcuau

SEQ ID NO: 26998 - RNA, 20 nt, Artificial Sequence
  RPE65 RNA guide
cauaauuuggaccugaauuc

SEQ ID NO: 26999 - RNA, 20 nt, Artificial Sequence
  RPE65 RNA guide
cauacucaagacugcuucca

SEQ ID NO: 27000 - RNA, 20 nt, Artificial Sequence
  RPE65 RNA guide
caucuuucuauauacaggaa

SEQ ID NO: 27001 - RNA, 20 nt, Artificial Sequence
  RPE65 RNA guide
caugaauccaugaagguguu

SEQ ID NO: 27002 - RNA, 20 nt, Artificial Sequence
  RPE65 RNA guide
caugauaaaugugcuauuuc

SEQ ID NO: 27003 - RNA, 20 nt, Artificial Sequence
  RPE65 RNA guide
cauggauucaugauaaaugu

SEQ ID NO: 27004 - RNA, 20 nt, Artificial Sequence
  RPE65 RNA guide
cauuaaucaaugccuucucu

SEQ ID NO: 27005 - RNA, 20 nt, Artificial Sequence
  RPE65 RNA guide
cauuuaucaugaauccauga

SEQ ID NO: 27006 - RNA, 20 nt, Artificial Sequence
  RPE65 RNA guide
cauuuccuagugugugacuu

SEQ ID NO: 27007 - RNA, 20 nt, Artificial Sequence
  RPE65 RNA guide
ccaaaauucaagggucuuuc

SEQ ID NO: 27008 - RNA, 20 nt, Artificial Sequence
  RPE65 RNA guide
ccaaaccccgggcuaaguca

SEQ ID NO: 27009 - RNA, 20 nt, Artificial Sequence
  RPE65 RNA guide
ccaaagucacacacuaggaa

SEQ ID NO: 27010 - RNA, 20 nt, Artificial Sequence
  RPE65 RNA guide
ccaaauuaugggggguuugu

SEQ ID NO: 27011 - RNA, 20 nt, Artificial Sequence
  RPE65 RNA guide
ccaagucugucugaaauccc

SEQ ID NO: 27012 - RNA, 20 nt, Artificial Sequence
  RPE65 RNA guide
ccaccaaaauucaagggucu

SEQ ID NO: 27013 - RNA, 20 nt, Artificial Sequence
  RPE65 RNA guide
ccacuccuugcccagucauu

SEQ ID NO: 27014 - RNA, 20 nt, Artificial Sequence
  RPE65 RNA guide
ccagucauuuccuagugugu

SEQ ID NO: 27015 - RNA, 20 nt, Artificial Sequence
  RPE65 RNA guide
ccauaaaaagaacuuugcau

SEQ ID NO: 27016 - RNA, 20 nt, Artificial Sequence
  RPE65 RNA guide
ccauaauuuggaccugaauu

SEQ ID NO: 27017 - RNA, 20 nt, Artificial Sequence
  RPE65 RNA guide
ccauacucaagacugcuucc

SEQ ID NO: 27018 - RNA, 20 nt, Artificial Sequence
  RPE65 RNA guide
ccaugaagguguuuuaaaaa

SEQ ID NO: 27019 - RNA, 20 nt, Artificial Sequence
  RPE65 RNA guide
ccaugcaaaguucuuuuuau

SEQ ID NO: 27020 - RNA, 20 nt, Artificial Sequence
  RPE65 RNA guide
cccaagucugucugaaaucc

SEQ ID NO: 27021 - RNA, 20 nt, Artificial Sequence
  RPE65 RNA guide
cccaccaaaauucaaggguc

SEQ ID NO: 27022 - RNA, 20 nt, Artificial Sequence
  RPE65 RNA guide
cccagucauuuccuagugug

SEQ ID NO: 27023 - RNA, 20 nt, Artificial Sequence
  RPE65 RNA guide
cccauaauuuggaccugaau

SEQ ID NO: 27024 - RNA, 20 nt, Artificial Sequence
  RPE65 RNA guide
cccauacucaagacugcuuc

SEQ ID NO: 27025 - RNA, 20 nt, Artificial Sequence
  RPE65 RNA guide
ccccaccaaaauucaagggu

SEQ ID NO: 27026 - RNA, 20 nt, Artificial Sequence
  RPE65 RNA guide
ccccauaauuuggaccugaa

SEQ ID NO: 27027 - RNA, 20 nt, Artificial Sequence
  RPE65 RNA guide
ccccauacucaagacugcuu

SEQ ID NO: 27028 - RNA, 20 nt, Artificial Sequence
  RPE65 RNA guide
cccccauaauuuggaccuga

SEQ ID NO: 27029 - RNA, 20 nt, Artificial Sequence
  RPE65 RNA guide
ccccccauaauuuggaccug

SEQ ID NO: 27030 - RNA, 20 nt, Artificial Sequence
  RPE65 RNA guide
ccccgggcuaagucacacaa

SEQ ID NO: 27031 - RNA, 20 nt, Artificial Sequence
  RPE65 RNA guide
cccgggcuaagucacacaaa

SEQ ID NO: 27032 - RNA, 20 nt, Artificial Sequence
  RPE65 RNA guide
cccgggguuuggaagcaguc

SEQ ID NO: 27033 - RNA, 20 nt, Artificial Sequence
  RPE65 RNA guide
cccuugaaauagcacauuua

SEQ ID NO: 27034 - RNA, 20 nt, Artificial Sequence
  RPE65 RNA guide
cccuugaauuuuggugggga

SEQ ID NO: 27035 - RNA, 20 nt, Artificial Sequence
  RPE65 RNA guide
ccgggcuaagucacacaaac

SEQ ID NO: 27036 - RNA, 20 nt, Artificial Sequence
  RPE65 RNA guide
ccgggguuuggaagcagucu

SEQ ID NO: 27037 - RNA, 20 nt, Artificial Sequence
  RPE65 RNA guide
ccuagugugugacuuuggac

SEQ ID NO: 27038 - RNA, 20 nt, Artificial Sequence
  RPE65 RNA guide
ccugaagagaaggcauugau

SEQ ID NO: 27039 - RNA, 20 nt, Artificial Sequence
  RPE65 RNA guide
ccugaauucuagcuaguugc

SEQ ID NO: 27040 - RNA, 20 nt, Artificial Sequence
  RPE65 RNA guide
ccugcuuauguauuaaagca

SEQ ID NO: 27041 - RNA, 20 nt, Artificial Sequence
  RPE65 RNA guide
ccuguauauagaaagauguc

SEQ ID NO: 27042 - RNA, 20 nt, Artificial Sequence
  RPE65 RNA guide
ccuucauggauucaugauaa

SEQ ID NO: 27043 - RNA, 20 nt, Artificial Sequence
  RPE65 RNA guide
ccuucucuucaggagcccuu

SEQ ID NO: 27044 - RNA, 20 nt, Artificial Sequence
  RPE65 RNA guide
ccuugaaauagcacauuuau

SEQ ID NO: 27045 - RNA, 20 nt, Artificial Sequence
  RPE65 RNA guide
ccuugaauuuugguggggaa

SEQ ID NO: 27046 - RNA, 20 nt, Artificial Sequence
  RPE65 RNA guide
ccuugcccagucauuuccua

SEQ ID NO: 27047 - RNA, 20 nt, Artificial Sequence
  RPE65 RNA guide
cgggcuaagucacacaaacc

SEQ ID NO: 27048 - RNA, 20 nt, Artificial Sequence
  RPE65 RNA guide
cgggguuuggaagcagucuu

SEQ ID NO: 27049 - RNA, 20 nt, Artificial Sequence
  RPE65 RNA guide
cuaagucacacaaacccccc

SEQ ID NO: 27050 - RNA, 20 nt, Artificial Sequence
  RPE65 RNA guide
cuagaauucagguccaaauu

SEQ ID NO: 27051 - RNA, 20 nt, Artificial Sequence
  RPE65 RNA guide
cuagcuagaauucaggucca

SEQ ID NO: 27052 - RNA, 20 nt, Artificial Sequence
  RPE65 RNA guide
cuagcuuuuccuguauauag

SEQ ID NO: 27053 - RNA, 20 nt, Artificial Sequence
  RPE65 RNA guide
cuaggaaaugacugggcaag

SEQ ID NO: 27054 - RNA, 20 nt, Artificial Sequence
  RPE65 RNA guide
cuagugugugacuuuggaca

SEQ ID NO: 27055 - RNA, 20 nt, Artificial Sequence
  RPE65 RNA guide
cuaguugcuuuaauacauaa

SEQ ID NO: 27056 - RNA, 20 nt, Artificial Sequence
  RPE65 RNA guide
cuauauacaggaaaagcuag

SEQ ID NO: 27057 - RNA, 20 nt, Artificial Sequence
  RPE65 RNA guide
cuauguccuacauaccauaa

SEQ ID NO: 27058 - RNA, 20 nt, Artificial Sequence
  RPE65 RNA guide
cuauuucaagggcuccugaa

SEQ ID NO: 27059 - RNA, 20 nt, Artificial Sequence
  RPE65 RNA guide
cucaagacugcuuccaaacc

SEQ ID NO: 27060 - RNA, 20 nt, Artificial Sequence
  RPE65 RNA guide
cucacaguaacauaauggag

SEQ ID NO: 27061 - RNA, 20 nt, Artificial Sequence
  RPE65 RNA guide
cuccacuccuugcccaguca

SEQ ID NO: 27062 - RNA, 20 nt, Artificial Sequence
  RPE65 RNA guide
cuccauuauguuacugugag

SEQ ID NO: 27063 - RNA, 20 nt, Artificial Sequence
  RPE65 RNA guide
cuccugaagagaaggcauug

SEQ ID NO: 27064 - RNA, 20 nt, Artificial Sequence
  RPE65 RNA guide
cuccuugcccagucauuucc

SEQ ID NO: 27065 - RNA, 20 nt, Artificial Sequence
  RPE65 RNA guide
cucugaccagacucaauuau

SEQ ID NO: 27066 - RNA, 20 nt, Artificial Sequence
  RPE65 RNA guide
cucugggagacuuuuuuaaa

SEQ ID NO: 27067 - RNA, 20 nt, Artificial Sequence
  RPE65 RNA guide
cucuucaggagcccuugaaa

SEQ ID NO: 27068 - RNA, 20 nt, Artificial Sequence
  RPE65 RNA guide
cugaaauccccauacucaag

SEQ ID NO: 27069 - RNA, 20 nt, Artificial Sequence
  RPE65 RNA guide
cugaagagaaggcauugauu

SEQ ID NO: 27070 - RNA, 20 nt, Artificial Sequence
  RPE65 RNA guide
cugaauucuagcuaguugcu

SEQ ID NO: 27071 - RNA, 20 nt, Artificial Sequence
  RPE65 RNA guide
cugcuuauguauuaaagcaa

SEQ ID NO: 27072 - RNA, 20 nt, Artificial Sequence
  RPE65 RNA guide
cugcuuccaaaccccgggcu

SEQ ID NO: 27073 - RNA, 20 nt, Artificial Sequence
  RPE65 RNA guide
cugggagacuuuuuuaaaac

SEQ ID NO: 27074 - RNA, 20 nt, Artificial Sequence
  RPE65 RNA guide
cugggcaaggaguggagccc

SEQ ID NO: 27075 - RNA, 20 nt, Artificial Sequence
  RPE65 RNA guide
cuggucagagauuccacucu

SEQ ID NO: 27076 - RNA, 20 nt, Artificial Sequence
  RPE65 RNA guide
cugucugaaauccccauacu

SEQ ID NO: 27077 - RNA, 20 nt, Artificial Sequence
  RPE65 RNA guide
cuuagcccgggguuuggaag

SEQ ID NO: 27078 - RNA, 20 nt, Artificial Sequence
  RPE65 RNA guide
cuucaaagaguggaaucucu

SEQ ID NO: 27079 - RNA, 20 nt, Artificial Sequence
  RPE65 RNA guide
cuucaggagcccuugaaaua

SEQ ID NO: 27080 - RNA, 20 nt, Artificial Sequence
  RPE65 RNA guide
cuucauggauucaugauaaa

SEQ ID NO: 27081 - RNA, 20 nt, Artificial Sequence
  RPE65 RNA guide
cuuccaaaccccgggcuaag

SEQ ID NO: 27082 - RNA, 20 nt, Artificial Sequence
  RPE65 RNA guide
cuucucuucaggagcccuug

SEQ ID NO: 27083 - RNA, 20 nt, Artificial Sequence
  RPE65 RNA guide
cuugaauuuugguggggaaa

SEQ ID NO: 27084 - RNA, 20 nt, Artificial Sequence
  RPE65 RNA guide
cuugaguauggggauuucag

SEQ ID NO: 27085 - RNA, 20 nt, Artificial Sequence
  RPE65 RNA guide
cuugcccagucauuuccuag

SEQ ID NO: 27086 - RNA, 20 nt, Artificial Sequence
  RPE65 RNA guide
cuugggcuccacuccuugcc

SEQ ID NO: 27087 - RNA, 20 nt, Artificial Sequence
  RPE65 RNA guide
cuuucuauauacaggaaaag

SEQ ID NO: 27088 - RNA, 20 nt, Artificial Sequence
  RPE65 RNA guide
cuuuuacuccauuauguuac

SEQ ID NO: 27089 - RNA, 20 nt, Artificial Sequence
  RPE65 RNA guide
cuuuuuaagucuagcuuuuc

SEQ ID NO: 27090 - RNA, 20 nt, Artificial Sequence
  RPE65 RNA guide
cuuuuuaugguauguaggac

SEQ ID NO: 27091 - RNA, 20 nt, Artificial Sequence
  RPE65 RNA guide
gaaaaaauuuccccaccaaa

SEQ ID NO: 27092 - RNA, 20 nt, Artificial Sequence
  RPE65 RNA guide
gaaagacccuugaauuuugg

SEQ ID NO: 27093 - RNA, 20 nt, Artificial Sequence
  RPE65 RNA guide
gaaagaugucacaauagcuu

SEQ ID NO: 27094 - RNA, 20 nt, Artificial Sequence
  RPE65 RNA guide
gaaauccccauacucaagac

SEQ ID NO: 27095 - RNA, 20 nt, Artificial Sequence
  RPE65 RNA guide
gaaaugacugggcaaggagu

SEQ ID NO: 27096 - RNA, 20 nt, Artificial Sequence
  RPE65 RNA guide
gaacuuugcaugguauuauc

SEQ ID NO: 27097 - RNA, 20 nt, Artificial Sequence
  RPE65 RNA guide
gaagagaaggcauugauuaa

SEQ ID NO: 27098 - RNA, 20 nt, Artificial Sequence
  RPE65 RNA guide
gaagcagucuugaguauggg

SEQ ID NO: 27099 - RNA, 20 nt, Artificial Sequence
  RPE65 RNA guide
gaagguguuuuaaaaaaguc

SEQ ID NO: 27100 - RNA, 20 nt, Artificial Sequence
  RPE65 RNA guide
gaaucucugaccagacucaa

SEQ ID NO: 27101 - RNA, 20 nt, Artificial Sequence
  RPE65 RNA guide
gaauucagguccaaauuaug

SEQ ID NO: 27102 - RNA, 20 nt, Artificial Sequence
  RPE65 RNA guide
gaauuuugguggggaaauuu

SEQ ID NO: 27103 - RNA, 20 nt, Artificial Sequence
  RPE65 RNA guide
gacagacuugggcuccacuc

SEQ ID NO: 27104 - RNA, 20 nt, Artificial Sequence
  RPE65 RNA guide
gacccuugaauuuugguggg

SEQ ID NO: 27105 - RNA, 20 nt, Artificial Sequence
  RPE65 RNA guide
gaccugaauucuagcuaguu

SEQ ID NO: 27106 - RNA, 20 nt, Artificial Sequence
  RPE65 RNA guide
gacugcuuccaaaccccggg

SEQ ID NO: 27107 - RNA, 20 nt, Artificial Sequence
  RPE65 RNA guide
gacugggcaaggaguggagc

SEQ ID NO: 27108 - RNA, 20 nt, Artificial Sequence
  RPE65 RNA guide
gacuuagcccgggguuugga

SEQ ID NO: 27109 - RNA, 20 nt, Artificial Sequence
  RPE65 RNA guide
gacuugggcuccacuccuug

SEQ ID NO: 27110 - RNA, 20 nt, Artificial Sequence
  RPE65 RNA guide
gacuuuggacaaauuaccua

SEQ ID NO: 27111 - RNA, 20 nt, Artificial Sequence
  RPE65 RNA guide
gacuuuuuuaaaacaccuuc

SEQ ID NO: 27112 - RNA, 20 nt, Artificial Sequence
  RPE65 RNA guide
gagauaauaccaugcaaagu

SEQ ID NO: 27113 - RNA, 20 nt, Artificial Sequence
  RPE65 RNA guide
gagcccaagucugucugaaa

SEQ ID NO: 27114 - RNA, 20 nt, Artificial Sequence
  RPE65 RNA guide
gagcccuugaaauagcacau

SEQ ID NO: 27115 - RNA, 20 nt, Artificial Sequence
  RPE65 RNA guide
gaguaaaagcuauugugaca

SEQ ID NO: 27116 - RNA, 20 nt, Artificial Sequence
  RPE65 RNA guide
gaguauggggauuucagaca

SEQ ID NO: 27117 - RNA, 20 nt, Artificial Sequence
  RPE65 RNA guide
gagucuggucagagauucca

SEQ ID NO: 27118 - RNA, 20 nt, Artificial Sequence
  RPE65 RNA guide
gaguggaaucucugaccaga

SEQ ID NO: 27119 - RNA, 20 nt, Artificial Sequence
  RPE65 RNA guide
gaguggagcccaagucuguc

SEQ ID NO: 27120 - RNA, 20 nt, Artificial Sequence
  RPE65 RNA guide
gauaaaugugcuauuucaag

SEQ ID NO: 27121 - RNA, 20 nt, Artificial Sequence
  RPE65 RNA guide
gaugucacaauagcuuuuac

SEQ ID NO: 27122 - RNA, 20 nt, Artificial Sequence
  RPE65 RNA guide
gauuucagacagacuugggc

SEQ ID NO: 27123 - RNA, 20 nt, Artificial Sequence
  RPE65 RNA guide
gcaacuagcuagaauucagg

SEQ ID NO: 27124 - RNA, 20 nt, Artificial Sequence
  RPE65 RNA guide
gcaaggaguggagcccaagu

SEQ ID NO: 27125 - RNA, 20 nt, Artificial Sequence
  RPE65 RNA guide
gcacauuuaucaugaaucca

SEQ ID NO: 27126 - RNA, 20 nt, Artificial Sequence
  RPE65 RNA guide
gcaggaaaaaauuuccccac

SEQ ID NO: 27127 - RNA, 20 nt, Artificial Sequence
  RPE65 RNA guide
gcagucuugaguauggggau

SEQ ID NO: 27128 - RNA, 20 nt, Artificial Sequence
  RPE65 RNA guide
gcccaagucugucugaaauc

SEQ ID NO: 27129 - RNA, 20 nt, Artificial Sequence
  RPE65 RNA guide
gcccagucauuuccuagugu

SEQ ID NO: 27130 - RNA, 20 nt, Artificial Sequence
  RPE65 RNA guide
gcccgggguuuggaagcagu

SEQ ID NO: 27131 - RNA, 20 nt, Artificial Sequence
  RPE65 RNA guide
gcccuugaaauagcacauuu

SEQ ID NO: 27132 - RNA, 20 nt, Artificial Sequence
  RPE65 RNA guide
gccuucucuucaggagcccu

SEQ ID NO: 27133 - RNA, 20 nt, Artificial Sequence
  RPE65 RNA guide
gcuaagucacacaaaccccc

SEQ ID NO: 27134 - RNA, 20 nt, Artificial Sequence
  RPE65 RNA guide
gcuagaauucagguccaaau

SEQ ID NO: 27135 - RNA, 20 nt, Artificial Sequence
  RPE65 RNA guide
gcuaguugcuuuaauacaua

SEQ ID NO: 27136 - RNA, 20 nt, Artificial Sequence
  RPE65 RNA guide
gcuauuucaagggcuccuga

SEQ ID NO: 27137 - RNA, 20 nt, Artificial Sequence
  RPE65 RNA guide
gcuccacuccuugcccaguc

SEQ ID NO: 27138 - RNA, 20 nt, Artificial Sequence
  RPE65 RNA guide
gcuccugaagagaaggcauu

SEQ ID NO: 27139 - RNA, 20 nt, Artificial Sequence
  RPE65 RNA guide
gcuuauguauuaaagcaacu

SEQ ID NO: 27140 - RNA, 20 nt, Artificial Sequence
  RPE65 RNA guide
gcuuccaaaccccgggcuaa

SEQ ID NO: 27141 - RNA, 20 nt, Artificial Sequence
  RPE65 RNA guide
gcuuuuacuccauuauguua

SEQ ID NO: 27142 - RNA, 20 nt, Artificial Sequence
  RPE65 RNA guide
gcuuuuccuguauauagaaa

SEQ ID NO: 27143 - RNA, 20 nt, Artificial Sequence
  RPE65 RNA guide
ggaaaaaauuuccccaccaa

SEQ ID NO: 27144 - RNA, 20 nt, Artificial Sequence
  RPE65 RNA guide
ggaaagacccuugaauuuug

SEQ ID NO: 27145 - RNA, 20 nt, Artificial Sequence
  RPE65 RNA guide
ggaaaugacugggcaaggag

SEQ ID NO: 27146 - RNA, 20 nt, Artificial Sequence
  RPE65 RNA guide
ggaagcagucuugaguaugg

SEQ ID NO: 27147 - RNA, 20 nt, Artificial Sequence
  RPE65 RNA guide
ggaaucucugaccagacuca

SEQ ID NO: 27148 - RNA, 20 nt, Artificial Sequence
  RPE65 RNA guide
ggaccugaauucuagcuagu

SEQ ID NO: 27149 - RNA, 20 nt, Artificial Sequence
  RPE65 RNA guide
ggagacuuuuuuaaaacacc

SEQ ID NO: 27150 - RNA, 20 nt, Artificial Sequence
  RPE65 RNA guide
ggagcccaagucugucugaa

SEQ ID NO: 27151 - RNA, 20 nt, Artificial Sequence
  RPE65 RNA guide
ggagcccuugaaauagcaca

SEQ ID NO: 27152 - RNA, 20 nt, Artificial Sequence
  RPE65 RNA guide
ggaguaaaagcuauugugac

SEQ ID NO: 27153 - RNA, 20 nt, Artificial Sequence
  RPE65 RNA guide
ggaguggagcccaagucugu

SEQ ID NO: 27154 - RNA, 20 nt, Artificial Sequence
  RPE65 RNA guide
ggauuucagacagacuuggg

SEQ ID NO: 27155 - RNA, 20 nt, Artificial Sequence
  RPE65 RNA guide
ggcaaggaguggagcccaag

SEQ ID NO: 27156 - RNA, 20 nt, Artificial Sequence
  RPE65 RNA guide
ggcuaagucacacaaacccc

SEQ ID NO: 27157 - RNA, 20 nt, Artificial Sequence
  RPE65 RNA guide
ggcuccacuccuugcccagu

SEQ ID NO: 27158 - RNA, 20 nt, Artificial Sequence
  RPE65 RNA guide
ggcuccugaagagaaggcau

SEQ ID NO: 27159 - RNA, 20 nt, Artificial Sequence
  RPE65 RNA guide
gggaaauuuuuuccugcuua

SEQ ID NO: 27160 - RNA, 20 nt, Artificial Sequence
  RPE65 RNA guide
gggagacuuuuuuaaaacac

SEQ ID NO: 27161 - RNA, 20 nt, Artificial Sequence
  RPE65 RNA guide
gggauuucagacagacuugg

SEQ ID NO: 27162 - RNA, 20 nt, Artificial Sequence
  RPE65 RNA guide
gggcaaggaguggagcccaa

SEQ ID NO: 27163 - RNA, 20 nt, Artificial Sequence
  RPE65 RNA guide
gggcuaagucacacaaaccc

SEQ ID NO: 27164 - RNA, 20 nt, Artificial Sequence
  RPE65 RNA guide
gggcuccacuccuugcccag

SEQ ID NO: 27165 - RNA, 20 nt, Artificial Sequence
  RPE65 RNA guide
gggcuccugaagagaaggca

SEQ ID NO: 27166 - RNA, 20 nt, Artificial Sequence
  RPE65 RNA guide
ggggaaauuuuuuccugcuu

SEQ ID NO: 27167 - RNA, 20 nt, Artificial Sequence
  RPE65 RNA guide
ggggauuucagacagacuug

SEQ ID NO: 27168 - RNA, 20 nt, Artificial Sequence
  RPE65 RNA guide
gggggguuugugugacuuag

SEQ ID NO: 27169 - RNA, 20 nt, Artificial Sequence
  RPE65 RNA guide
ggggguuugugugacuuagc

SEQ ID NO: 27170 - RNA, 20 nt, Artificial Sequence
  RPE65 RNA guide
gggguuuggaagcagucuug

SEQ ID NO: 27171 - RNA, 20 nt, Artificial Sequence
  RPE65 RNA guide
gggguuugugugacuuagcc

SEQ ID NO: 27172 - RNA, 20 nt, Artificial Sequence
  RPE65 RNA guide
ggguuuggaagcagucuuga

SEQ ID NO: 27173 - RNA, 20 nt, Artificial Sequence
  RPE65 RNA guide
ggguuugugugacuuagccc

SEQ ID NO: 27174 - RNA, 20 nt, Artificial Sequence
  RPE65 RNA guide
gguaauuuguccaaagucac

SEQ ID NO: 27175 - RNA, 20 nt, Artificial Sequence
  RPE65 RNA guide
gguauguaggacauaguaau

SEQ ID NO: 27176 - RNA, 20 nt, Artificial Sequence
  RPE65 RNA guide
ggucagagauuccacucuuu

SEQ ID NO: 27177 - RNA, 20 nt, Artificial Sequence
  RPE65 RNA guide
ggucauuaaucaaugccuuc

SEQ ID NO: 27178 - RNA, 20 nt, Artificial Sequence
  RPE65 RNA guide
gguccaaauuaugggggguu

SEQ ID NO: 27179 - RNA, 20 nt, Artificial Sequence
  RPE65 RNA guide
gguggggaaauuuuuuccug

SEQ ID NO: 27180 - RNA, 20 nt, Artificial Sequence
  RPE65 RNA guide
gguguuuuaaaaaagucucc

SEQ ID NO: 27181 - RNA, 20 nt, Artificial Sequence
  RPE65 RNA guide
gguuuggaagcagucuugag

SEQ ID NO: 27182 - RNA, 20 nt, Artificial Sequence
  RPE65 RNA guide
gguuugugugacuuagcccg

SEQ ID NO: 27183 - RNA, 20 nt, Artificial Sequence
  RPE65 RNA guide
guaaaagcuauugugacauc

SEQ ID NO: 27184 - RNA, 20 nt, Artificial Sequence
  RPE65 RNA guide
guaaguaucucugggagacu

SEQ ID NO: 27185 - RNA, 20 nt, Artificial Sequence
  RPE65 RNA guide
guaauuuguccaaagucaca

SEQ ID NO: 27186 - RNA, 20 nt, Artificial Sequence
  RPE65 RNA guide
guaucucugggagacuuuuu

SEQ ID NO: 27187 - RNA, 20 nt, Artificial Sequence
  RPE65 RNA guide
guauggggauuucagacaga

SEQ ID NO: 27188 - RNA, 20 nt, Artificial Sequence
  RPE65 RNA guide
gucacaauagcuuuuacucc

SEQ ID NO: 27189 - RNA, 20 nt, Artificial Sequence
  RPE65 RNA guide
gucacacaaaccccccauaa

SEQ ID NO: 27190 - RNA, 20 nt, Artificial Sequence
  RPE65 RNA guide
gucacacacuaggaaaugac

SEQ ID NO: 27191 - RNA, 20 nt, Artificial Sequence
  RPE65 RNA guide
gucagagauuccacucuuug

SEQ ID NO: 27192 - RNA, 20 nt, Artificial Sequence
  RPE65 RNA guide
gucauuaaucaaugccuucu

SEQ ID NO: 27193 - RNA, 20 nt, Artificial Sequence
  RPE65 RNA guide
gucauuuccuagugugugac

SEQ ID NO: 27194 - RNA, 20 nt, Artificial Sequence
  RPE65 RNA guide
guccaaagucacacacuagg

SEQ ID NO: 27195 - RNA, 20 nt, Artificial Sequence
  RPE65 RNA guide
guccaaauuaugggggguuu

SEQ ID NO: 27196 - RNA, 20 nt, Artificial Sequence
  RPE65 RNA guide
guccuacauaccauaaaaag

SEQ ID NO: 27197 - RNA, 20 nt, Artificial Sequence
  RPE65 RNA guide
gucuagcuuuuccuguauau

SEQ ID NO: 27198 - RNA, 20 nt, Artificial Sequence
  RPE65 RNA guide
gucugaaauccccauacuca

SEQ ID NO: 27199 - RNA, 20 nt, Artificial Sequence
  RPE65 RNA guide
gucuggucagagauuccacu

SEQ ID NO: 27200 - RNA, 20 nt, Artificial Sequence
  RPE65 RNA guide
gucugucugaaauccccaua

SEQ ID NO: 27201 - RNA, 20 nt, Artificial Sequence
  RPE65 RNA guide
gucuugaguauggggauuuc

SEQ ID NO: 27202 - RNA, 20 nt, Artificial Sequence
  RPE65 RNA guide
gugacaucuuucuauauaca

SEQ ID NO: 27203 - RNA, 20 nt, Artificial Sequence
  RPE65 RNA guide
gugacuuagcccgggguuug

SEQ ID NO: 27204 - RNA, 20 nt, Artificial Sequence
  RPE65 RNA guide
gugacuuuggacaaauuacc

SEQ ID NO: 27205 - RNA, 20 nt, Artificial Sequence
  RPE65 RNA guide
gugcuauuucaagggcuccu

SEQ ID NO: 27206 - RNA, 20 nt, Artificial Sequence
  RPE65 RNA guide
guggaaucucugaccagacu

SEQ ID NO: 27207 - RNA, 20 nt, Artificial Sequence
  RPE65 RNA guide
guggagcccaagucugucug

SEQ ID NO: 27208 - RNA, 20 nt, Artificial Sequence
  RPE65 RNA guide
guggggaaauuuuuuccugc

SEQ ID NO: 27209 - RNA, 20 nt, Artificial Sequence
  RPE65 RNA guide
gugugacuuagcccgggguu

SEQ ID NO: 27210 - RNA, 20 nt, Artificial Sequence
  RPE65 RNA guide
gugugacuuuggacaaauua

SEQ ID NO: 27211 - RNA, 20 nt, Artificial Sequence
  RPE65 RNA guide
gugugugacuuuggacaaau

SEQ ID NO: 27212 - RNA, 20 nt, Artificial Sequence
  RPE65 RNA guide
guguuuuaaaaaagucuccc

SEQ ID NO: 27213 - RNA, 20 nt, Artificial Sequence
  RPE65 RNA guide
guuagguaauuuguccaaag

SEQ ID NO: 27214 - RNA, 20 nt, Artificial Sequence
  RPE65 RNA guide
guucuuuuuaugguauguag

SEQ ID NO: 27215 - RNA, 20 nt, Artificial Sequence
  RPE65 RNA guide
guugcuuuaauacauaagca

SEQ ID NO: 27216 - RNA, 20 nt, Artificial Sequence
  RPE65 RNA guide
guuuaggaaagacccuugaa

SEQ ID NO: 27217 - RNA, 20 nt, Artificial Sequence
  RPE65 RNA guide
guuuggaagcagucuugagu

SEQ ID NO: 27218 - RNA, 20 nt, Artificial Sequence
  RPE65 RNA guide
guuugugugacuuagcccgg

SEQ ID NO: 27219 - RNA, 20 nt, Artificial Sequence
  RPE65 RNA guide
guuuuaaaaaagucucccag

SEQ ID NO: 27220 - RNA, 20 nt, Artificial Sequence
  RPE65 RNA guide
uaaaaaagucucccagagau

SEQ ID NO: 27221 - RNA, 20 nt, Artificial Sequence
  RPE65 RNA guide
uaaaacaccuucauggauuc

SEQ ID NO: 27222 - RNA, 20 nt, Artificial Sequence
  RPE65 RNA guide
uaaacaggucauuaaucaau

SEQ ID NO: 27223 - RNA, 20 nt, Artificial Sequence
  RPE65 RNA guide
uaaagcaacuagcuagaauu

SEQ ID NO: 27224 - RNA, 20 nt, Artificial Sequence
  RPE65 RNA guide
uaaaugugcuauuucaaggg

SEQ ID NO: 27225 - RNA, 20 nt, Artificial Sequence
  RPE65 RNA guide
uaacuucaaagaguggaauc

SEQ ID NO: 27226 - RNA, 20 nt, Artificial Sequence
  RPE65 RNA guide
uaagcaggaaaaaauuuccc

SEQ ID NO: 27227 - RNA, 20 nt, Artificial Sequence
  RPE65 RNA guide
uaaguaucucugggagacuu

SEQ ID NO: 27228 - RNA, 20 nt, Artificial Sequence
  RPE65 RNA guide
uaagucacacaaacccccca

SEQ ID NO: 27229 - RNA, 20 nt, Artificial Sequence
  RPE65 RNA guide
uaaucaaugccuucucuuca

SEQ ID NO: 27230 - RNA, 20 nt, Artificial Sequence
  RPE65 RNA guide
uaauggaguaaaagcuauug

SEQ ID NO: 27231 - RNA, 20 nt, Artificial Sequence
  RPE65 RNA guide
uaauugagucuggucagaga

SEQ ID NO: 27232 - RNA, 20 nt, Artificial Sequence
  RPE65 RNA guide
uaauuuggaccugaauucua

SEQ ID NO: 27233 - RNA, 20 nt, Artificial Sequence
  RPE65 RNA guide
uaauuuguccaaagucacac

SEQ ID NO: 27234 - RNA, 20 nt, Artificial Sequence
  RPE65 RNA guide
uacauaagcaggaaaaaauu

SEQ ID NO: 27235 - RNA, 20 nt, Artificial Sequence
  RPE65 RNA guide
uaccauaaaaagaacuuugc

SEQ ID NO: 27236 - RNA, 20 nt, Artificial Sequence
  RPE65 RNA guide
uaccaugcaaaguucuuuuu

SEQ ID NO: 27237 - RNA, 20 nt, Artificial Sequence
  RPE65 RNA guide
uacucaagacugcuuccaaa

SEQ ID NO: 27238 - RNA, 20 nt, Artificial Sequence
  RPE65 RNA guide
uacuccauuauguuacugug

SEQ ID NO: 27239 - RNA, 20 nt, Artificial Sequence
  RPE65 RNA guide
uagaauucagguccaaauua

SEQ ID NO: 27240 - RNA, 20 nt, Artificial Sequence
  RPE65 RNA guide
uagcacauuuaucaugaauc

SEQ ID NO: 27241 - RNA, 20 nt, Artificial Sequence
  RPE65 RNA guide
uagcccgggguuuggaagca

SEQ ID NO: 27242 - RNA, 20 nt, Artificial Sequence
  RPE65 RNA guide
uagcuagaauucagguccaa

SEQ ID NO: 27243 - RNA, 20 nt, Artificial Sequence
  RPE65 RNA guide
uaggaaagacccuugaauuu

SEQ ID NO: 27244 - RNA, 20 nt, Artificial Sequence
  RPE65 RNA guide
uaggaaaugacugggcaagg

SEQ ID NO: 27245 - RNA, 20 nt, Artificial Sequence
  RPE65 RNA guide
uagguaauuuguccaaaguc

SEQ ID NO: 27246 - RNA, 20 nt, Artificial Sequence
  RPE65 RNA guide
uagugugugacuuuggacaa

SEQ ID NO: 27247 - RNA, 20 nt, Artificial Sequence
  RPE65 RNA guide
uaguugcuuuaauacauaag

SEQ ID NO: 27248 - RNA, 20 nt, Artificial Sequence
  RPE65 RNA guide
uauaauugagucuggucaga

SEQ ID NO: 27249 - RNA, 20 nt, Artificial Sequence
  RPE65 RNA guide
uaucaugaauccaugaaggu

SEQ ID NO: 27250 - RNA, 20 nt, Artificial Sequence
  RPE65 RNA guide
uauggggauuucagacagac

SEQ ID NO: 27251 - RNA, 20 nt, Artificial Sequence
  RPE65 RNA guide
uaugggggguuugugugacu

SEQ ID NO: 27252 - RNA, 20 nt, Artificial Sequence
  RPE65 RNA guide
uauuauaauugagucugguc

SEQ ID NO: 27253 - RNA, 20 nt, Artificial Sequence
  RPE65 RNA guide
uauuucaagggcuccugaag

SEQ ID NO: 27254 - RNA, 20 nt, Artificial Sequence
  RPE65 RNA guide
ucaaagaguggaaucucuga

SEQ ID NO: 27255 - RNA, 20 nt, Artificial Sequence
  RPE65 RNA guide
ucaagacugcuuccaaaccc

SEQ ID NO: 27256 - RNA, 20 nt, Artificial Sequence
  RPE65 RNA guide
ucaagggcuccugaagagaa

SEQ ID NO: 27257 - RNA, 20 nt, Artificial Sequence
  RPE65 RNA guide
ucaaugccuucucuucagga

SEQ ID NO: 27258 - RNA, 20 nt, Artificial Sequence
  RPE65 RNA guide
ucacacaaaccccccauaau

SEQ ID NO: 27259 - RNA, 20 nt, Artificial Sequence
  RPE65 RNA guide
ucacacacuaggaaaugacu

SEQ ID NO: 27260 - RNA, 20 nt, Artificial Sequence
  RPE65 RNA guide
ucagacagacuugggcucca

SEQ ID NO: 27261 - RNA, 20 nt, Artificial Sequence
  RPE65 RNA guide
ucagagauuccacucuuuga

SEQ ID NO: 27262 - RNA, 20 nt, Artificial Sequence
  RPE65 RNA guide
ucaggagcccuugaaauagc

SEQ ID NO: 27263 - RNA, 20 nt, Artificial Sequence
  RPE65 RNA guide
ucagguccaaauuauggggg

SEQ ID NO: 27264 - RNA, 20 nt, Artificial Sequence
  RPE65 RNA guide
ucaugaauccaugaaggugu

SEQ ID NO: 27265 - RNA, 20 nt, Artificial Sequence
  RPE65 RNA guide
ucauggauucaugauaaaug

SEQ ID NO: 27266 - RNA, 20 nt, Artificial Sequence
  RPE65 RNA guide
ucauuaaucaaugccuucuc

SEQ ID NO: 27267 - RNA, 20 nt, Artificial Sequence
  RPE65 RNA guide
ucauuuccuagugugugacu

SEQ ID NO: 27268 - RNA, 20 nt, Artificial Sequence
  RPE65 RNA guide
uccaaaccccgggcuaaguc

SEQ ID NO: 27269 - RNA, 20 nt, Artificial Sequence
  RPE65 RNA guide
uccaaagucacacacuagga

SEQ ID NO: 27270 - RNA, 20 nt, Artificial Sequence
  RPE65 RNA guide
uccaaauuaugggggguuug

SEQ ID NO: 27271 - RNA, 20 nt, Artificial Sequence
  RPE65 RNA guide
uccacuccuugcccagucau

SEQ ID NO: 27272 - RNA, 20 nt, Artificial Sequence
  RPE65 RNA guide
uccccaccaaaauucaaggg

SEQ ID NO: 27273 - RNA, 20 nt, Artificial Sequence
  RPE65 RNA guide
uccccauacucaagacugcu

SEQ ID NO: 27274 - RNA, 20 nt, Artificial Sequence
  RPE65 RNA guide
uccuagugugugacuuugga

SEQ ID NO: 27275 - RNA, 20 nt, Artificial Sequence
  RPE65 RNA guide
uccugaagagaaggcauuga

SEQ ID NO: 27276 - RNA, 20 nt, Artificial Sequence
  RPE65 RNA guide
uccugcuuauguauuaaagc

SEQ ID NO: 27277 - RNA, 20 nt, Artificial Sequence
  RPE65 RNA guide
uccuguauauagaaagaugu

SEQ ID NO: 27278 - RNA, 20 nt, Artificial Sequence
  RPE65 RNA guide
uccuugcccagucauuuccu

SEQ ID NO: 27279 - RNA, 20 nt, Artificial Sequence
  RPE65 RNA guide
ucuauauacaggaaaagcua

SEQ ID NO: 27280 - RNA, 20 nt, Artificial Sequence
  RPE65 RNA guide
ucucacaguaacauaaugga

SEQ ID NO: 27281 - RNA, 20 nt, Artificial Sequence
  RPE65 RNA guide
ucucugaccagacucaauua

SEQ ID NO: 27282 - RNA, 20 nt, Artificial Sequence
  RPE65 RNA guide
ucucugggagacuuuuuuaa

SEQ ID NO: 27283 - RNA, 20 nt, Artificial Sequence
  RPE65 RNA guide
ucucuucaggagcccuugaa

SEQ ID NO: 27284 - RNA, 20 nt, Artificial Sequence
  RPE65 RNA guide
ucugaaauccccauacucaa

SEQ ID NO: 27285 - RNA, 20 nt, Artificial Sequence
  RPE65 RNA guide
ucugggagacuuuuuuaaaa

SEQ ID NO: 27286 - RNA, 20 nt, Artificial Sequence
  RPE65 RNA guide
ucuggucagagauuccacuc

SEQ ID NO: 27287 - RNA, 20 nt, Artificial Sequence
  RPE65 RNA guide
ucugucugaaauccccauac

SEQ ID NO: 27288 - RNA, 20 nt, Artificial Sequence
  RPE65 RNA guide
ucuucaggagcccuugaaau

SEQ ID NO: 27289 - RNA, 20 nt, Artificial Sequence
  RPE65 RNA guide
ucuugaguauggggauuuca

SEQ ID NO: 27290 - RNA, 20 nt, Artificial Sequence
  RPE65 RNA guide
ugaaauccccauacucaaga

SEQ ID NO: 27291 - RNA, 20 nt, Artificial Sequence
  RPE65 RNA guide
ugaagagaaggcauugauua

SEQ ID NO: 27292 - RNA, 20 nt, Artificial Sequence
  RPE65 RNA guide
ugaagguguuuuaaaaaagu

SEQ ID NO: 27293 - RNA, 20 nt, Artificial Sequence
  RPE65 RNA guide
ugacugggcaaggaguggag

SEQ ID NO: 27294 - RNA, 20 nt, Artificial Sequence
  RPE65 RNA guide
ugacuuagcccgggguuugg

SEQ ID NO: 27295 - RNA, 20 nt, Artificial Sequence
  RPE65 RNA guide
ugacuuuggacaaauuaccu

SEQ ID NO: 27296 - RNA, 20 nt, Artificial Sequence
  RPE65 RNA guide
ugaguauggggauuucagac

SEQ ID NO: 27297 - RNA, 20 nt, Artificial Sequence
  RPE65 RNA guide
ugagucuggucagagauucc

SEQ ID NO: 27298 - RNA, 20 nt, Artificial Sequence
  RPE65 RNA guide
ugauaaaugugcuauuucaa

SEQ ID NO: 27299 - RNA, 20 nt, Artificial Sequence
  RPE65 RNA guide
ugcccagucauuuccuagug

SEQ ID NO: 27300 - RNA, 20 nt, Artificial Sequence
  RPE65 RNA guide
ugccuucucuucaggagccc

SEQ ID NO: 27301 - RNA, 20 nt, Artificial Sequence
  RPE65 RNA guide
ugcuauuucaagggcuccug

SEQ ID NO: 27302 - RNA, 20 nt, Artificial Sequence
  RPE65 RNA guide
ugcuuauguauuaaagcaac

SEQ ID NO: 27303 - RNA, 20 nt, Artificial Sequence
  RPE65 RNA guide
ugcuuccaaaccccgggcua

SEQ ID NO: 27304 - RNA, 20 nt, Artificial Sequence
  RPE65 RNA guide
uggaagcagucuugaguaug

SEQ ID NO: 27305 - RNA, 20 nt, Artificial Sequence
  RPE65 RNA guide
uggaaucucugaccagacuc

SEQ ID NO: 27306 - RNA, 20 nt, Artificial Sequence
  RPE65 RNA guide
uggaccugaauucuagcuag

SEQ ID NO: 27307 - RNA, 20 nt, Artificial Sequence
  RPE65 RNA guide
uggagcccaagucugucuga

SEQ ID NO: 27308 - RNA, 20 nt, Artificial Sequence
  RPE65 RNA guide
uggaguaaaagcuauuguga

SEQ ID NO: 27309 - RNA, 20 nt, Artificial Sequence
  RPE65 RNA guide
ugggagacuuuuuuaaaaca

SEQ ID NO: 27310 - RNA, 20 nt, Artificial Sequence
  RPE65 RNA guide
ugggcaaggaguggagccca

SEQ ID NO: 27311 - RNA, 20 nt, Artificial Sequence
  RPE65 RNA guide
ugggcuccacuccuugccca

SEQ ID NO: 27312 - RNA, 20 nt, Artificial Sequence
  RPE65 RNA guide
uggggaaauuuuuuccugcu

SEQ ID NO: 27313 - RNA, 20 nt, Artificial Sequence
  RPE65 RNA guide
uggggauuucagacagacuu

SEQ ID NO: 27314 - RNA, 20 nt, Artificial Sequence
  RPE65 RNA guide
ugggggguuugugugacuua

SEQ ID NO: 27315 - RNA, 20 nt, Artificial Sequence
  RPE65 RNA guide
ugguauguaggacauaguaa

SEQ ID NO: 27316 - RNA, 20 nt, Artificial Sequence
  RPE65 RNA guide
uggucagagauuccacucuu

SEQ ID NO: 27317 - RNA, 20 nt, Artificial Sequence
  RPE65 RNA guide
ugguggggaaauuuuuuccu

SEQ ID NO: 27318 - RNA, 20 nt, Artificial Sequence
  RPE65 RNA guide
ugucacaauagcuuuuacuc

SEQ ID NO: 27319 - RNA, 20 nt, Artificial Sequence
  RPE65 RNA guide
uguccaaagucacacacuag

SEQ ID NO: 27320 - RNA, 20 nt, Artificial Sequence
  RPE65 RNA guide
uguccuacauaccauaaaaa

SEQ ID NO: 27321 - RNA, 20 nt, Artificial Sequence
  RPE65 RNA guide
ugucugaaauccccauacuc

SEQ ID NO: 27322 - RNA, 20 nt, Artificial Sequence
  RPE65 RNA guide
ugugacaucuuucuauauac

SEQ ID NO: 27323 - RNA, 20 nt, Artificial Sequence
  RPE65 RNA guide
ugugacuuagcccgggguuu

SEQ ID NO: 27324 - RNA, 20 nt, Artificial Sequence
  RPE65 RNA guide
ugugacuuuggacaaauuac

SEQ ID NO: 27325 - RNA, 20 nt, Artificial Sequence
  RPE65 RNA guide
ugugcuauuucaagggcucc

SEQ ID NO: 27326 - RNA, 20 nt, Artificial Sequence
  RPE65 RNA guide
ugugugacuuagcccggggu

SEQ ID NO: 27327 - RNA, 20 nt, Artificial Sequence
  RPE65 RNA guide
ugugugacuuuggacaaauu

SEQ ID NO: 27328 - RNA, 20 nt, Artificial Sequence
  RPE65 RNA guide
uguuuaggaaagacccuuga

SEQ ID NO: 27329 - RNA, 20 nt, Artificial Sequence
  RPE65 RNA guide
uguuuuaaaaaagucuccca

SEQ ID NO: 27330 - RNA, 20 nt, Artificial Sequence
  RPE65 RNA guide
uuaaaaaagucucccagaga

SEQ ID NO: 27331 - RNA, 20 nt, Artificial Sequence
  RPE65 RNA guide
uuaaaacaccuucauggauu

SEQ ID NO: 27332 - RNA, 20 nt, Artificial Sequence
  RPE65 RNA guide
uuaaagcaacuagcuagaau

SEQ ID NO: 27333 - RNA, 20 nt, Artificial Sequence
  RPE65 RNA guide
uuaaucaaugccuucucuuc

SEQ ID NO: 27334 - RNA, 20 nt, Artificial Sequence
  RPE65 RNA guide
uuacuccauuauguuacugu

SEQ ID NO: 27335 - RNA, 20 nt, Artificial Sequence
  RPE65 RNA guide
uuagcccgggguuuggaagc

SEQ ID NO: 27336 - RNA, 20 nt, Artificial Sequence
  RPE65 RNA guide
uuaggaaagacccuugaauu

SEQ ID NO: 27337 - RNA, 20 nt, Artificial Sequence
  RPE65 RNA guide
uuagguaauuuguccaaagu

SEQ ID NO: 27338 - RNA, 20 nt, Artificial Sequence
  RPE65 RNA guide
uuauaauugagucuggucag

SEQ ID NO: 27339 - RNA, 20 nt, Artificial Sequence
  RPE65 RNA guide
uuaucaugaauccaugaagg

SEQ ID NO: 27340 - RNA, 20 nt, Artificial Sequence
  RPE65 RNA guide
uuaugggggguuugugugac

SEQ ID NO: 27341 - RNA, 20 nt, Artificial Sequence
  RPE65 RNA guide
uucaaagaguggaaucucug

SEQ ID NO: 27342 - RNA, 20 nt, Artificial Sequence
  RPE65 RNA guide
uucaagggcuccugaagaga

SEQ ID NO: 27343 - RNA, 20 nt, Artificial Sequence
  RPE65 RNA guide
uucagacagacuugggcucc

SEQ ID NO: 27344 - RNA, 20 nt, Artificial Sequence
  RPE65 RNA guide
uucaggagcccuugaaauag

SEQ ID NO: 27345 - RNA, 20 nt, Artificial Sequence
  RPE65 RNA guide
uucagguccaaauuaugggg

SEQ ID NO: 27346 - RNA, 20 nt, Artificial Sequence
  RPE65 RNA guide
uucauggauucaugauaaau

SEQ ID NO: 27347 - RNA, 20 nt, Artificial Sequence
  RPE65 RNA guide
uuccaaaccccgggcuaagu

SEQ ID NO: 27348 - RNA, 20 nt, Artificial Sequence
  RPE65 RNA guide
uuccccaccaaaauucaagg

SEQ ID NO: 27349 - RNA, 20 nt, Artificial Sequence
  RPE65 RNA guide
uuccuagugugugacuuugg

SEQ ID NO: 27350 - RNA, 20 nt, Artificial Sequence
  RPE65 RNA guide
uuccugcuuauguauuaaag

SEQ ID NO: 27351 - RNA, 20 nt, Artificial Sequence
  RPE65 RNA guide
uuccuguauauagaaagaug

SEQ ID NO: 27352 - RNA, 20 nt, Artificial Sequence
  RPE65 RNA guide
uucuauauacaggaaaagcu

SEQ ID NO: 27353 - RNA, 20 nt, Artificial Sequence
  RPE65 RNA guide
uucucuucaggagcccuuga

SEQ ID NO: 27354 - RNA, 20 nt, Artificial Sequence
  RPE65 RNA guide
uugaguauggggauuucaga

SEQ ID NO: 27355 - RNA, 20 nt, Artificial Sequence
  RPE65 RNA guide
uugagucuggucagagauuc

SEQ ID NO: 27356 - RNA, 20 nt, Artificial Sequence
  RPE65 RNA guide
uugcccagucauuuccuagu

SEQ ID NO: 27357 - RNA, 20 nt, Artificial Sequence
  RPE65 RNA guide
uuggaagcagucuugaguau

SEQ ID NO: 27358 - RNA, 20 nt, Artificial Sequence
  RPE65 RNA guide
uuggaccugaauucuagcua

SEQ ID NO: 27359 - RNA, 20 nt, Artificial Sequence
  RPE65 RNA guide
uugggcuccacuccuugccc

SEQ ID NO: 27360 - RNA, 20 nt, Artificial Sequence
  RPE65 RNA guide
uugguggggaaauuuuuucc

SEQ ID NO: 27361 - RNA, 20 nt, Artificial Sequence
  RPE65 RNA guide
uuguccaaagucacacacua

SEQ ID NO: 27362 - RNA, 20 nt, Artificial Sequence
  RPE65 RNA guide
uugugacaucuuucuauaua

SEQ ID NO: 27363 - RNA, 20 nt, Artificial Sequence
  RPE65 RNA guide
uugugugacuuagcccgggg

SEQ ID NO: 27364 - RNA, 20 nt, Artificial Sequence
  RPE65 RNA guide
uuuaaaaaagucucccagag

SEQ ID NO: 27365 - RNA, 20 nt, Artificial Sequence
  RPE65 RNA guide
uuuacuccauuauguuacug

SEQ ID NO: 27366 - RNA, 20 nt, Artificial Sequence
  RPE65 RNA guide
uuuaggaaagacccuugaau

SEQ ID NO: 27367 - RNA, 20 nt, Artificial Sequence
  RPE65 RNA guide
uuuaucaugaauccaugaag

SEQ ID NO: 27368 - RNA, 20 nt, Artificial Sequence
  RPE65 RNA guide
uuucaagggcuccugaagag

SEQ ID NO: 27369 - RNA, 20 nt, Artificial Sequence
  RPE65 RNA guide
uuucagacagacuugggcuc

SEQ ID NO: 27370 - RNA, 20 nt, Artificial Sequence
  RPE65 RNA guide
uuuccccaccaaaauucaag

SEQ ID NO: 27371 - RNA, 20 nt, Artificial Sequence
  RPE65 RNA guide
uuuccuagugugugacuuug

SEQ ID NO: 27372 - RNA, 20 nt, Artificial Sequence
  RPE65 RNA guide
uuuggaagcagucuugagua

SEQ ID NO: 27373 - RNA, 20 nt, Artificial Sequence
  RPE65 RNA guide
uuuggaccugaauucuagcu

SEQ ID NO: 27374 - RNA, 20 nt, Artificial Sequence
  RPE65 RNA guide
uuugguggggaaauuuuuuc

SEQ ID NO: 27375 - RNA, 20 nt, Artificial Sequence
  RPE65 RNA guide
uuuguccaaagucacacacu

SEQ ID NO: 27376 - RNA, 20 nt, Artificial Sequence
  RPE65 RNA guide
uuugugugacuuagcccggg

SEQ ID NO: 27377 - RNA, 20 nt, Artificial Sequence
  RPE65 RNA guide
uuuugguggggaaauuuuuu

SEQ ID NO: 27378 - RNA, 21 nt, Artificial Sequence
  RPE65 RNA guide
aaaaaagucucccagagauac

SEQ ID NO: 27379 - RNA, 21 nt, Artificial Sequence
  RPE65 RNA guide
aaaaauuuccccaccaaaauu

SEQ ID NO: 27380 - RNA, 21 nt, Artificial Sequence
  RPE65 RNA guide
aaaacaccuucauggauucau

SEQ ID NO: 27381 - RNA, 21 nt, Artificial Sequence
  RPE65 RNA guide
aaaauuuccccaccaaaauuc

SEQ ID NO: 27382 - RNA, 21 nt, Artificial Sequence
  RPE65 RNA guide
aaacaauuacuauguccuaca

SEQ ID NO: 27383 - RNA, 21 nt, Artificial Sequence
  RPE65 RNA guide
aaacaccuucauggauucaug

SEQ ID NO: 27384 - RNA, 21 nt, Artificial Sequence
  RPE65 RNA guide
aaaccccccauaauuuggacc

SEQ ID NO: 27385 - RNA, 21 nt, Artificial Sequence
  RPE65 RNA guide
aaaccccgggcuaagucacac

SEQ ID NO: 27386 - RNA, 21 nt, Artificial Sequence
  RPE65 RNA guide
aaagaacuuugcaugguauua

SEQ ID NO: 27387 - RNA, 21 nt, Artificial Sequence
  RPE65 RNA guide
aaagacccuugaauuuuggug

SEQ ID NO: 27388 - RNA, 21 nt, Artificial Sequence
  RPE65 RNA guide
aaagagauaauaccaugcaaa

SEQ ID NO: 27389 - RNA, 21 nt, Artificial Sequence
  RPE65 RNA guide
aaagaguggaaucucugacca

SEQ ID NO: 27390 - RNA, 21 nt, Artificial Sequence
  RPE65 RNA guide
aaagaugucacaauagcuuuu

SEQ ID NO: 27391 - RNA, 21 nt, Artificial Sequence
  RPE65 RNA guide
aaagcaacuagcuagaauuca

SEQ ID NO: 27392 - RNA, 21 nt, Artificial Sequence
  RPE65 RNA guide
aaagucacacacuaggaaaug

SEQ ID NO: 27393 - RNA, 21 nt, Artificial Sequence
  RPE65 RNA guide
aaaguuagguaauuuguccaa

SEQ ID NO: 27394 - RNA, 21 nt, Artificial Sequence
  RPE65 RNA guide
aaauccccauacucaagacug

SEQ ID NO: 27395 - RNA, 21 nt, Artificial Sequence
  RPE65 RNA guide
aaaucucacaguaacauaaug

SEQ ID NO: 27396 - RNA, 21 nt, Artificial Sequence
  RPE65 RNA guide
aaaugacugggcaaggagugg

SEQ ID NO: 27397 - RNA, 21 nt, Artificial Sequence
  RPE65 RNA guide
aaaugugcuauuucaagggcu

SEQ ID NO: 27398 - RNA, 21 nt, Artificial Sequence
  RPE65 RNA guide
aaauuaugggggguuugugug

SEQ ID NO: 27399 - RNA, 21 nt, Artificial Sequence
  RPE65 RNA guide
aaauuuccccaccaaaauuca

SEQ ID NO: 27400 - RNA, 21 nt, Artificial Sequence
  RPE65 RNA guide
aacaauuacuauguccuacau

SEQ ID NO: 27401 - RNA, 21 nt, Artificial Sequence
  RPE65 RNA guide
aacaccuucauggauucauga

SEQ ID NO: 27402 - RNA, 21 nt, Artificial Sequence
  RPE65 RNA guide
aaccccccauaauuuggaccu

SEQ ID NO: 27403 - RNA, 21 nt, Artificial Sequence
  RPE65 RNA guide
aaccccgggcuaagucacaca

SEQ ID NO: 27404 - RNA, 21 nt, Artificial Sequence
  RPE65 RNA guide
aacuagcuagaauucaggucc

SEQ ID NO: 27405 - RNA, 21 nt, Artificial Sequence
  RPE65 RNA guide
aacuucaaagaguggaaucuc

SEQ ID NO: 27406 - RNA, 21 nt, Artificial Sequence
  RPE65 RNA guide
aacuuuuuaagucuagcuuuu

SEQ ID NO: 27407 - RNA, 21 nt, Artificial Sequence
  RPE65 RNA guide
aagaacuuugcaugguauuau

SEQ ID NO: 27408 - RNA, 21 nt, Artificial Sequence
  RPE65 RNA guide
aagacccuugaauuuuggugg

SEQ ID NO: 27409 - RNA, 21 nt, Artificial Sequence
  RPE65 RNA guide
aagacugcuuccaaaccccgg

SEQ ID NO: 27410 - RNA, 21 nt, Artificial Sequence
  RPE65 RNA guide
aagagauaauaccaugcaaag

SEQ ID NO: 27411 - RNA, 21 nt, Artificial Sequence
  RPE65 RNA guide
aagaguggaaucucugaccag

SEQ ID NO: 27412 - RNA, 21 nt, Artificial Sequence
  RPE65 RNA guide
aagaugucacaauagcuuuua

SEQ ID NO: 27413 - RNA, 21 nt, Artificial Sequence
  RPE65 RNA guide
aagcaacuagcuagaauucag

SEQ ID NO: 27414 - RNA, 21 nt, Artificial Sequence
  RPE65 RNA guide
aagcaggaaaaaauuucccca

SEQ ID NO: 27415 - RNA, 21 nt, Artificial Sequence
  RPE65 RNA guide
aagcagucuugaguaugggga

SEQ ID NO: 27416 - RNA, 21 nt, Artificial Sequence
  RPE65 RNA guide
aaggaguggagcccaagucug

SEQ ID NO: 27417 - RNA, 21 nt, Artificial Sequence
  RPE65 RNA guide
aagggcuccugaagagaaggc

SEQ ID NO: 27418 - RNA, 21 nt, Artificial Sequence
  RPE65 RNA guide
aagguguuuuaaaaaagucuc

SEQ ID NO: 27419 - RNA, 21 nt, Artificial Sequence
  RPE65 RNA guide
aaguaucucugggagacuuuu

SEQ ID NO: 27420 - RNA, 21 nt, Artificial Sequence
  RPE65 RNA guide
aagucacacaaaccccccaua

SEQ ID NO: 27421 - RNA, 21 nt, Artificial Sequence
  RPE65 RNA guide
aagucacacacuaggaaauga

SEQ ID NO: 27422 - RNA, 21 nt, Artificial Sequence
  RPE65 RNA guide
aagucuagcuuuuccuguaua

SEQ ID NO: 27423 - RNA, 21 nt, Artificial Sequence
  RPE65 RNA guide
aagucugucugaaauccccau

SEQ ID NO: 27424 - RNA, 21 nt, Artificial Sequence
  RPE65 RNA guide
aaguuagguaauuuguccaaa

SEQ ID NO: 27425 - RNA, 21 nt, Artificial Sequence
  RPE65 RNA guide
aaguucuuuuuaugguaugua

SEQ ID NO: 27426 - RNA, 21 nt, Artificial Sequence
  RPE65 RNA guide
aaucaaugccuucucuucagg

SEQ ID NO: 27427 - RNA, 21 nt, Artificial Sequence
  RPE65 RNA guide
aauccccauacucaagacugc

SEQ ID NO: 27428 - RNA, 21 nt, Artificial Sequence
  RPE65 RNA guide
aaucucacaguaacauaaugg

SEQ ID NO: 27429 - RNA, 21 nt, Artificial Sequence
  RPE65 RNA guide
aaucucugaccagacucaauu

SEQ ID NO: 27430 - RNA, 21 nt, Artificial Sequence
  RPE65 RNA guide
aaugacugggcaaggagugga

SEQ ID NO: 27431 - RNA, 21 nt, Artificial Sequence
  RPE65 RNA guide
aaugccuucucuucaggagcc

SEQ ID NO: 27432 - RNA, 21 nt, Artificial Sequence
  RPE65 RNA guide
aauggaguaaaagcuauugug

SEQ ID NO: 27433 - RNA, 21 nt, Artificial Sequence
  RPE65 RNA guide
aaugugcuauuucaagggcuc

SEQ ID NO: 27434 - RNA, 21 nt, Artificial Sequence
  RPE65 RNA guide
aauuaugggggguuuguguga

SEQ ID NO: 27435 - RNA, 21 nt, Artificial Sequence
  RPE65 RNA guide
aauucagguccaaauuauggg

SEQ ID NO: 27436 - RNA, 21 nt, Artificial Sequence
  RPE65 RNA guide
aauugagucuggucagagauu

SEQ ID NO: 27437 - RNA, 21 nt, Artificial Sequence
  RPE65 RNA guide
aauuuccccaccaaaauucaa

SEQ ID NO: 27438 - RNA, 21 nt, Artificial Sequence
  RPE65 RNA guide
aauuuggaccugaauucuagc

SEQ ID NO: 27439 - RNA, 21 nt, Artificial Sequence
  RPE65 RNA guide
aauuuguccaaagucacacac

SEQ ID NO: 27440 - RNA, 21 nt, Artificial Sequence
  RPE65 RNA guide
aauuuugguggggaaauuuuu

SEQ ID NO: 27441 - RNA, 21 nt, Artificial Sequence
  RPE65 RNA guide
acaaaccccccauaauuugga

SEQ ID NO: 27442 - RNA, 21 nt, Artificial Sequence
  RPE65 RNA guide
acaauuacuauguccuacaua

SEQ ID NO: 27443 - RNA, 21 nt, Artificial Sequence
  RPE65 RNA guide
acacaaaccccccauaauuug

SEQ ID NO: 27444 - RNA, 21 nt, Artificial Sequence
  RPE65 RNA guide
acacacuaggaaaugacuggg

SEQ ID NO: 27445 - RNA, 21 nt, Artificial Sequence
  RPE65 RNA guide
acaccuucauggauucaugau

SEQ ID NO: 27446 - RNA, 21 nt, Artificial Sequence
  RPE65 RNA guide
acacuaggaaaugacugggca

SEQ ID NO: 27447 - RNA, 21 nt, Artificial Sequence
  RPE65 RNA guide
acagacuugggcuccacuccu

SEQ ID NO: 27448 - RNA, 21 nt, Artificial Sequence
  RPE65 RNA guide
acaggaaaagcuagacuuaaa

SEQ ID NO: 27449 - RNA, 21 nt, Artificial Sequence
  RPE65 RNA guide
acaguaacauaauggaguaaa

SEQ ID NO: 27450 - RNA, 21 nt, Artificial Sequence
  RPE65 RNA guide
acauaagcaggaaaaaauuuc

SEQ ID NO: 27451 - RNA, 21 nt, Artificial Sequence
  RPE65 RNA guide
acauaauggaguaaaagcuau

SEQ ID NO: 27452 - RNA, 21 nt, Artificial Sequence
  RPE65 RNA guide
acaucuuucuauauacaggaa

SEQ ID NO: 27453 - RNA, 21 nt, Artificial Sequence
  RPE65 RNA guide
acauuuaucaugaauccauga

SEQ ID NO: 27454 - RNA, 21 nt, Artificial Sequence
  RPE65 RNA guide
accaaaauucaagggucuuuc

SEQ ID NO: 27455 - RNA, 21 nt, Artificial Sequence
  RPE65 RNA guide
accauaaaaagaacuuugcau

SEQ ID NO: 27456 - RNA, 21 nt, Artificial Sequence
  RPE65 RNA guide
accaugcaaaguucuuuuuau

SEQ ID NO: 27457 - RNA, 21 nt, Artificial Sequence
  RPE65 RNA guide
accccccauaauuuggaccug

SEQ ID NO: 27458 - RNA, 21 nt, Artificial Sequence
  RPE65 RNA guide
accccgggcuaagucacacaa

SEQ ID NO: 27459 - RNA, 21 nt, Artificial Sequence
  RPE65 RNA guide
acccuugaauuuuggugggga

SEQ ID NO: 27460 - RNA, 21 nt, Artificial Sequence
  RPE65 RNA guide
accugaauucuagcuaguugc

SEQ ID NO: 27461 - RNA, 21 nt, Artificial Sequence
  RPE65 RNA guide
accuucauggauucaugauaa

SEQ ID NO: 27462 - RNA, 21 nt, Artificial Sequence
  RPE65 RNA guide
acuagcuagaauucaggucca

SEQ ID NO: 27463 - RNA, 21 nt, Artificial Sequence
  RPE65 RNA guide
acuaggaaaugacugggcaag

SEQ ID NO: 27464 - RNA, 21 nt, Artificial Sequence
  RPE65 RNA guide
acuauguccuacauaccauaa

SEQ ID NO: 27465 - RNA, 21 nt, Artificial Sequence
  RPE65 RNA guide
acucaagacugcuuccaaacc

SEQ ID NO: 27466 - RNA, 21 nt, Artificial Sequence
  RPE65 RNA guide
acuccauuauguuacugugag

SEQ ID NO: 27467 - RNA, 21 nt, Artificial Sequence
  RPE65 RNA guide
acuccuugcccagucauuucc

SEQ ID NO: 27468 - RNA, 21 nt, Artificial Sequence
  RPE65 RNA guide
acugcuuccaaaccccgggcu

SEQ ID NO: 27469 - RNA, 21 nt, Artificial Sequence
  RPE65 RNA guide
acugggcaaggaguggagccc

SEQ ID NO: 27470 - RNA, 21 nt, Artificial Sequence
  RPE65 RNA guide
acuuagcccgggguuuggaag

SEQ ID NO: 27471 - RNA, 21 nt, Artificial Sequence
  RPE65 RNA guide
acuucaaagaguggaaucucu

SEQ ID NO: 27472 - RNA, 21 nt, Artificial Sequence
  RPE65 RNA guide
acuugggcuccacuccuugcc

SEQ ID NO: 27473 - RNA, 21 nt, Artificial Sequence
  RPE65 RNA guide
acuuuuuaagucuagcuuuuc

SEQ ID NO: 27474 - RNA, 21 nt, Artificial Sequence
  RPE65 RNA guide
agaaagaugucacaauagcuu

SEQ ID NO: 27475 - RNA, 21 nt, Artificial Sequence
  RPE65 RNA guide
agaacuuugcaugguauuauc

SEQ ID NO: 27476 - RNA, 21 nt, Artificial Sequence
  RPE65 RNA guide
agaauucagguccaaauuaug

SEQ ID NO: 27477 - RNA, 21 nt, Artificial Sequence
  RPE65 RNA guide
agacagacuugggcuccacuc

SEQ ID NO: 27478 - RNA, 21 nt, Artificial Sequence
  RPE65 RNA guide
agacccuugaauuuugguggg

SEQ ID NO: 27479 - RNA, 21 nt, Artificial Sequence
  RPE65 RNA guide
agacugcuuccaaaccccggg

SEQ ID NO: 27480 - RNA, 21 nt, Artificial Sequence
  RPE65 RNA guide
agacuugggcuccacuccuug

SEQ ID NO: 27481 - RNA, 21 nt, Artificial Sequence
  RPE65 RNA guide
agacuuuuuuaaaacaccuuc

SEQ ID NO: 27482 - RNA, 21 nt, Artificial Sequence
  RPE65 RNA guide
agagauaauaccaugcaaagu

SEQ ID NO: 27483 - RNA, 21 nt, Artificial Sequence
  RPE65 RNA guide
agaguggaaucucugaccaga

SEQ ID NO: 27484 - RNA, 21 nt, Artificial Sequence
  RPE65 RNA guide
agaugucacaauagcuuuuac

SEQ ID NO: 27485 - RNA, 21 nt, Artificial Sequence
  RPE65 RNA guide
agcaacuagcuagaauucagg

SEQ ID NO: 27486 - RNA, 21 nt, Artificial Sequence
  RPE65 RNA guide
agcacauuuaucaugaaucca

SEQ ID NO: 27487 - RNA, 21 nt, Artificial Sequence
  RPE65 RNA guide
agcaggaaaaaauuuccccac

SEQ ID NO: 27488 - RNA, 21 nt, Artificial Sequence
  RPE65 RNA guide
agcagucuugaguauggggau

SEQ ID NO: 27489 - RNA, 21 nt, Artificial Sequence
  RPE65 RNA guide
agcccaagucugucugaaauc

SEQ ID NO: 27490 - RNA, 21 nt, Artificial Sequence
  RPE65 RNA guide
agcccgggguuuggaagcagu

SEQ ID NO: 27491 - RNA, 21 nt, Artificial Sequence
  RPE65 RNA guide
agcccuugaaauagcacauuu

SEQ ID NO: 27492 - RNA, 21 nt, Artificial Sequence
  RPE65 RNA guide
agcuagaauucagguccaaau

SEQ ID NO: 27493 - RNA, 21 nt, Artificial Sequence
  RPE65 RNA guide
agcuaguugcuuuaauacaua

SEQ ID NO: 27494 - RNA, 21 nt, Artificial Sequence
  RPE65 RNA guide
agcuuuuacuccauuauguua

SEQ ID NO: 27495 - RNA, 21 nt, Artificial Sequence
  RPE65 RNA guide
agcuuuuccuguauauagaaa

SEQ ID NO: 27496 - RNA, 21 nt, Artificial Sequence
  RPE65 RNA guide
aggaaaaaauuuccccaccaa

SEQ ID NO: 27497 - RNA, 21 nt, Artificial Sequence
  RPE65 RNA guide
aggaaagacccuugaauuuug

SEQ ID NO: 27498 - RNA, 21 nt, Artificial Sequence
  RPE65 RNA guide
aggaaaugacugggcaaggag

SEQ ID NO: 27499 - RNA, 21 nt, Artificial Sequence
  RPE65 RNA guide
aggagcccuugaaauagcaca

SEQ ID NO: 27500 - RNA, 21 nt, Artificial Sequence
  RPE65 RNA guide
aggaguggagcccaagucugu

SEQ ID NO: 27501 - RNA, 21 nt, Artificial Sequence
  RPE65 RNA guide
agggcuccugaagagaaggca

SEQ ID NO: 27502 - RNA, 21 nt, Artificial Sequence
  RPE65 RNA guide
agguaauuuguccaaagucac

SEQ ID NO: 27503 - RNA, 21 nt, Artificial Sequence
  RPE65 RNA guide
aggucauuaaucaaugccuuc

SEQ ID NO: 27504 - RNA, 21 nt, Artificial Sequence
  RPE65 RNA guide
agguccaaauuaugggggguu

SEQ ID NO: 27505 - RNA, 21 nt, Artificial Sequence
  RPE65 RNA guide
agguguuuuaaaaaagucucc

SEQ ID NO: 27506 - RNA, 21 nt, Artificial Sequence
  RPE65 RNA guide
aguaaaagcuauugugacauc

SEQ ID NO: 27507 - RNA, 21 nt, Artificial Sequence
  RPE65 RNA guide
aguaucucugggagacuuuuu

SEQ ID NO: 27508 - RNA, 21 nt, Artificial Sequence
  RPE65 RNA guide
aguauggggauuucagacaga

SEQ ID NO: 27509 - RNA, 21 nt, Artificial Sequence
  RPE65 RNA guide
agucacacaaaccccccauaa

SEQ ID NO: 27510 - RNA, 21 nt, Artificial Sequence
  RPE65 RNA guide
agucacacacuaggaaaugac

SEQ ID NO: 27511 - RNA, 21 nt, Artificial Sequence
  RPE65 RNA guide
agucauuuccuagugugugac

SEQ ID NO: 27512 - RNA, 21 nt, Artificial Sequence
  RPE65 RNA guide
agucuagcuuuuccuguauau

SEQ ID NO: 27513 - RNA, 21 nt, Artificial Sequence
  RPE65 RNA guide
agucuggucagagauuccacu

SEQ ID NO: 27514 - RNA, 21 nt, Artificial Sequence
  RPE65 RNA guide
agucugucugaaauccccaua

SEQ ID NO: 27515 - RNA, 21 nt, Artificial Sequence
  RPE65 RNA guide
agucuugaguauggggauuuc

SEQ ID NO: 27516 - RNA, 21 nt, Artificial Sequence
  RPE65 RNA guide
aguggaaucucugaccagacu

SEQ ID NO: 27517 - RNA, 21 nt, Artificial Sequence
  RPE65 RNA guide
aguggagcccaagucugucug

SEQ ID NO: 27518 - RNA, 21 nt, Artificial Sequence
  RPE65 RNA guide
agugugugacuuuggacaaau

SEQ ID NO: 27519 - RNA, 21 nt, Artificial Sequence
  RPE65 RNA guide
aguuagguaauuuguccaaag

SEQ ID NO: 27520 - RNA, 21 nt, Artificial Sequence
  RPE65 RNA guide
aguucuuuuuaugguauguag

SEQ ID NO: 27521 - RNA, 21 nt, Artificial Sequence
  RPE65 RNA guide
aguugcuuuaauacauaagca

SEQ ID NO: 27522 - RNA, 21 nt, Artificial Sequence
  RPE65 RNA guide
auaaaugugcuauuucaaggg

SEQ ID NO: 27523 - RNA, 21 nt, Artificial Sequence
  RPE65 RNA guide
auaagcaggaaaaaauuuccc

SEQ ID NO: 27524 - RNA, 21 nt, Artificial Sequence
  RPE65 RNA guide
auaauggaguaaaagcuauug

SEQ ID NO: 27525 - RNA, 21 nt, Artificial Sequence
  RPE65 RNA guide
auaauugagucuggucagaga

SEQ ID NO: 27526 - RNA, 21 nt, Artificial Sequence
  RPE65 RNA guide
auaauuuggaccugaauucua

SEQ ID NO: 27527 - RNA, 21 nt, Artificial Sequence
  RPE65 RNA guide
auacauaagcaggaaaaaauu

SEQ ID NO: 27528 - RNA, 21 nt, Artificial Sequence
  RPE65 RNA guide
auaccauaaaaagaacuuugc

SEQ ID NO: 27529 - RNA, 21 nt, Artificial Sequence
  RPE65 RNA guide
auaccaugcaaaguucuuuuu

SEQ ID NO: 27530 - RNA, 21 nt, Artificial Sequence
  RPE65 RNA guide
auacucaagacugcuuccaaa

SEQ ID NO: 27531 - RNA, 21 nt, Artificial Sequence
  RPE65 RNA guide
auagcacauuuaucaugaauc

SEQ ID NO: 27532 - RNA, 21 nt, Artificial Sequence
  RPE65 RNA guide
aucaaugccuucucuucagga

SEQ ID NO: 27533 - RNA, 21 nt, Artificial Sequence
  RPE65 RNA guide
aucaugaauccaugaaggugu

SEQ ID NO: 27534 - RNA, 21 nt, Artificial Sequence
  RPE65 RNA guide
auccccauacucaagacugcu

SEQ ID NO: 27535 - RNA, 21 nt, Artificial Sequence
  RPE65 RNA guide
aucucacaguaacauaaugga

SEQ ID NO: 27536 - RNA, 21 nt, Artificial Sequence
  RPE65 RNA guide
aucucugaccagacucaauua

SEQ ID NO: 27537 - RNA, 21 nt, Artificial Sequence
  RPE65 RNA guide
aucucugggagacuuuuuuaa

SEQ ID NO: 27538 - RNA, 21 nt, Artificial Sequence
  RPE65 RNA guide
augaagguguuuuaaaaaagu

SEQ ID NO: 27539 - RNA, 21 nt, Artificial Sequence
  RPE65 RNA guide
augacugggcaaggaguggag

SEQ ID NO: 27540 - RNA, 21 nt, Artificial Sequence
  RPE65 RNA guide
augauaaaugugcuauuucaa

SEQ ID NO: 27541 - RNA, 21 nt, Artificial Sequence
  RPE65 RNA guide
augccuucucuucaggagccc

SEQ ID NO: 27542 - RNA, 21 nt, Artificial Sequence
  RPE65 RNA guide
auggaguaaaagcuauuguga

SEQ ID NO: 27543 - RNA, 21 nt, Artificial Sequence
  RPE65 RNA guide
auggggauuucagacagacuu

SEQ ID NO: 27544 - RNA, 21 nt, Artificial Sequence
  RPE65 RNA guide
augggggguuugugugacuua

SEQ ID NO: 27545 - RNA, 21 nt, Artificial Sequence
  RPE65 RNA guide
augguauguaggacauaguaa

SEQ ID NO: 27546 - RNA, 21 nt, Artificial Sequence
  RPE65 RNA guide
augucacaauagcuuuuacuc

SEQ ID NO: 27547 - RNA, 21 nt, Artificial Sequence
  RPE65 RNA guide
auguccuacauaccauaaaaa

SEQ ID NO: 27548 - RNA, 21 nt, Artificial Sequence
  RPE65 RNA guide
augugcuauuucaagggcucc

SEQ ID NO: 27549 - RNA, 21 nt, Artificial Sequence
  RPE65 RNA guide
auuaaagcaacuagcuagaau

SEQ ID NO: 27550 - RNA, 21 nt, Artificial Sequence
  RPE65 RNA guide
auuaaucaaugccuucucuuc

SEQ ID NO: 27551 - RNA, 21 nt, Artificial Sequence
  RPE65 RNA guide
auuaaugaccuguuuaggaaa

SEQ ID NO: 27552 - RNA, 21 nt, Artificial Sequence
  RPE65 RNA guide
auuauaauugagucuggucag

SEQ ID NO: 27553 - RNA, 21 nt, Artificial Sequence
  RPE65 RNA guide
auuaugggggguuugugugac

SEQ ID NO: 27554 - RNA, 21 nt, Artificial Sequence
  RPE65 RNA guide
auucagguccaaauuaugggg

SEQ ID NO: 27555 - RNA, 21 nt, Artificial Sequence
  RPE65 RNA guide
auugagucuggucagagauuc

SEQ ID NO: 27556 - RNA, 21 nt, Artificial Sequence
  RPE65 RNA guide
auugugacaucuuucuauaua

SEQ ID NO: 27557 - RNA, 21 nt, Artificial Sequence
  RPE65 RNA guide
auuuaucaugaauccaugaag

SEQ ID NO: 27558 - RNA, 21 nt, Artificial Sequence
  RPE65 RNA guide
auuucaagggcuccugaagag

SEQ ID NO: 27559 - RNA, 21 nt, Artificial Sequence
  RPE65 RNA guide
auuucagacagacuugggcuc

SEQ ID NO: 27560 - RNA, 21 nt, Artificial Sequence
  RPE65 RNA guide
auuuccccaccaaaauucaag

SEQ ID NO: 27561 - RNA, 21 nt, Artificial Sequence
  RPE65 RNA guide
auuuccuagugugugacuuug

SEQ ID NO: 27562 - RNA, 21 nt, Artificial Sequence
  RPE65 RNA guide
auuuggaccugaauucuagcu

SEQ ID NO: 27563 - RNA, 21 nt, Artificial Sequence
  RPE65 RNA guide
auuuguccaaagucacacacu

SEQ ID NO: 27564 - RNA, 21 nt, Artificial Sequence
  RPE65 RNA guide
auuuugguggggaaauuuuuu

SEQ ID NO: 27565 - RNA, 21 nt, Artificial Sequence
  RPE65 RNA guide
caaaauucaagggucuuuccu

SEQ ID NO: 27566 - RNA, 21 nt, Artificial Sequence
  RPE65 RNA guide
caaaccccccauaauuuggac

SEQ ID NO: 27567 - RNA, 21 nt, Artificial Sequence
  RPE65 RNA guide
caaaccccgggcuaagucaca

SEQ ID NO: 27568 - RNA, 21 nt, Artificial Sequence
  RPE65 RNA guide
caaagaguggaaucucugacc

SEQ ID NO: 27569 - RNA, 21 nt, Artificial Sequence
  RPE65 RNA guide
caaagucacacacuaggaaau

SEQ ID NO: 27570 - RNA, 21 nt, Artificial Sequence
  RPE65 RNA guide
caaaguucuuuuuaugguaug

SEQ ID NO: 27571 - RNA, 21 nt, Artificial Sequence
  RPE65 RNA guide
caaauuaugggggguuugugu

SEQ ID NO: 27572 - RNA, 21 nt, Artificial Sequence
  RPE65 RNA guide
caacuagcuagaauucagguc

SEQ ID NO: 27573 - RNA, 21 nt, Artificial Sequence
  RPE65 RNA guide
caagacugcuuccaaaccccg

SEQ ID NO: 27574 - RNA, 21 nt, Artificial Sequence
  RPE65 RNA guide
caaggaguggagcccaagucu

SEQ ID NO: 27575 - RNA, 21 nt, Artificial Sequence
  RPE65 RNA guide
caagggcuccugaagagaagg

SEQ ID NO: 27576 - RNA, 21 nt, Artificial Sequence
  RPE65 RNA guide
caagucugucugaaaucccca

SEQ ID NO: 27577 - RNA, 21 nt, Artificial Sequence
  RPE65 RNA guide
caaugccuucucuucaggagc

SEQ ID NO: 27578 - RNA, 21 nt, Artificial Sequence
  RPE65 RNA guide
caauuacuauguccuacauac

SEQ ID NO: 27579 - RNA, 21 nt, Artificial Sequence
  RPE65 RNA guide
cacaaaccccccauaauuugg

SEQ ID NO: 27580 - RNA, 21 nt, Artificial Sequence
  RPE65 RNA guide
cacaauagcuuuuacuccauu

SEQ ID NO: 27581 - RNA, 21 nt, Artificial Sequence
  RPE65 RNA guide
cacacaaaccccccauaauuu

SEQ ID NO: 27582 - RNA, 21 nt, Artificial Sequence
  RPE65 RNA guide
cacacacuaggaaaugacugg

SEQ ID NO: 27583 - RNA, 21 nt, Artificial Sequence
  RPE65 RNA guide
cacacuaggaaaugacugggc

SEQ ID NO: 27584 - RNA, 21 nt, Artificial Sequence
  RPE65 RNA guide
cacaguaacauaauggaguaa

SEQ ID NO: 27585 - RNA, 21 nt, Artificial Sequence
  RPE65 RNA guide
cacauuuaucaugaauccaug

SEQ ID NO: 27586 - RNA, 21 nt, Artificial Sequence
  RPE65 RNA guide
caccaaaauucaagggucuuu

SEQ ID NO: 27587 - RNA, 21 nt, Artificial Sequence
  RPE65 RNA guide
caccuucauggauucaugaua

SEQ ID NO: 27588 - RNA, 21 nt, Artificial Sequence
  RPE65 RNA guide
cacuaggaaaugacugggcaa

SEQ ID NO: 27589 - RNA, 21 nt, Artificial Sequence
  RPE65 RNA guide
cacuccuugcccagucauuuc

SEQ ID NO: 27590 - RNA, 21 nt, Artificial Sequence
  RPE65 RNA guide
cagacagacuugggcuccacu

SEQ ID NO: 27591 - RNA, 21 nt, Artificial Sequence
  RPE65 RNA guide
cagacuugggcuccacuccuu

SEQ ID NO: 27592 - RNA, 21 nt, Artificial Sequence
  RPE65 RNA guide
caggaaaaaauuuccccacca

SEQ ID NO: 27593 - RNA, 21 nt, Artificial Sequence
  RPE65 RNA guide
caggaaaagcuagacuuaaaa

SEQ ID NO: 27594 - RNA, 21 nt, Artificial Sequence
  RPE65 RNA guide
caggagcccuugaaauagcac

SEQ ID NO: 27595 - RNA, 21 nt, Artificial Sequence
  RPE65 RNA guide
cagguccaaauuauggggggu

SEQ ID NO: 27596 - RNA, 21 nt, Artificial Sequence
  RPE65 RNA guide
caguaacauaauggaguaaaa

SEQ ID NO: 27597 - RNA, 21 nt, Artificial Sequence
  RPE65 RNA guide
cagucauuuccuaguguguga

SEQ ID NO: 27598 - RNA, 21 nt, Artificial Sequence
  RPE65 RNA guide
cagucuugaguauggggauuu

SEQ ID NO: 27599 - RNA, 21 nt, Artificial Sequence
  RPE65 RNA guide
cauaagcaggaaaaaauuucc

SEQ ID NO: 27600 - RNA, 21 nt, Artificial Sequence
  RPE65 RNA guide
cauaauggaguaaaagcuauu

SEQ ID NO: 27601 - RNA, 21 nt, Artificial Sequence
  RPE65 RNA guide
cauaauuuggaccugaauucu

SEQ ID NO: 27602 - RNA, 21 nt, Artificial Sequence
  RPE65 RNA guide
cauaccauaaaaagaacuuug

SEQ ID NO: 27603 - RNA, 21 nt, Artificial Sequence
  RPE65 RNA guide
cauacucaagacugcuuccaa

SEQ ID NO: 27604 - RNA, 21 nt, Artificial Sequence
  RPE65 RNA guide
caucuuucuauauacaggaaa

SEQ ID NO: 27605 - RNA, 21 nt, Artificial Sequence
  RPE65 RNA guide
caugaagguguuuuaaaaaag

SEQ ID NO: 27606 - RNA, 21 nt, Artificial Sequence
  RPE65 RNA guide
caugaauccaugaagguguuu

SEQ ID NO: 27607 - RNA, 21 nt, Artificial Sequence
  RPE65 RNA guide
caugauaaaugugcuauuuca

SEQ ID NO: 27608 - RNA, 21 nt, Artificial Sequence
  RPE65 RNA guide
caugcaaaguucuuuuuaugg

SEQ ID NO: 27609 - RNA, 21 nt, Artificial Sequence
  RPE65 RNA guide
cauggauucaugauaaaugug

SEQ ID NO: 27610 - RNA, 21 nt, Artificial Sequence
  RPE65 RNA guide
cauuaaucaaugccuucucuu

SEQ ID NO: 27611 - RNA, 21 nt, Artificial Sequence
  RPE65 RNA guide
cauugauuaaugaccuguuua

SEQ ID NO: 27612 - RNA, 21 nt, Artificial Sequence
  RPE65 RNA guide
cauuuaucaugaauccaugaa

SEQ ID NO: 27613 - RNA, 21 nt, Artificial Sequence
  RPE65 RNA guide
cauuuccuagugugugacuuu

SEQ ID NO: 27614 - RNA, 21 nt, Artificial Sequence
  RPE65 RNA guide
ccaaaauucaagggucuuucc

SEQ ID NO: 27615 - RNA, 21 nt, Artificial Sequence
  RPE65 RNA guide
ccaaaccccgggcuaagucac

SEQ ID NO: 27616 - RNA, 21 nt, Artificial Sequence
  RPE65 RNA guide
ccaaagucacacacuaggaaa

SEQ ID NO: 27617 - RNA, 21 nt, Artificial Sequence
  RPE65 RNA guide
ccaaauuaugggggguuugug

SEQ ID NO: 27618 - RNA, 21 nt, Artificial Sequence
  RPE65 RNA guide
ccaagucugucugaaaucccc

SEQ ID NO: 27619 - RNA, 21 nt, Artificial Sequence
  RPE65 RNA guide
ccaccaaaauucaagggucuu

SEQ ID NO: 27620 - RNA, 21 nt, Artificial Sequence
  RPE65 RNA guide
ccacuccuugcccagucauuu

SEQ ID NO: 27621 - RNA, 21 nt, Artificial Sequence
  RPE65 RNA guide
ccagucauuuccuagugugug

SEQ ID NO: 27622 - RNA, 21 nt, Artificial Sequence
  RPE65 RNA guide
ccauaaaaagaacuuugcaug

SEQ ID NO: 27623 - RNA, 21 nt, Artificial Sequence
  RPE65 RNA guide
ccauaauuuggaccugaauuc

SEQ ID NO: 27624 - RNA, 21 nt, Artificial Sequence
  RPE65 RNA guide
ccauacucaagacugcuucca

SEQ ID NO: 27625 - RNA, 21 nt, Artificial Sequence
  RPE65 RNA guide
ccaugaagguguuuuaaaaaa

SEQ ID NO: 27626 - RNA, 21 nt, Artificial Sequence
  RPE65 RNA guide
ccaugcaaaguucuuuuuaug

SEQ ID NO: 27627 - RNA, 21 nt, Artificial Sequence
  RPE65 RNA guide
cccaagucugucugaaauccc

SEQ ID NO: 27628 - RNA, 21 nt, Artificial Sequence
  RPE65 RNA guide
cccaccaaaauucaagggucu

SEQ ID NO: 27629 - RNA, 21 nt, Artificial Sequence
  RPE65 RNA guide
cccagucauuuccuagugugu

SEQ ID NO: 27630 - RNA, 21 nt, Artificial Sequence
  RPE65 RNA guide
cccauaauuuggaccugaauu

SEQ ID NO: 27631 - RNA, 21 nt, Artificial Sequence
  RPE65 RNA guide
cccauacucaagacugcuucc

SEQ ID NO: 27632 - RNA, 21 nt, Artificial Sequence
  RPE65 RNA guide
ccccaccaaaauucaaggguc

SEQ ID NO: 27633 - RNA, 21 nt, Artificial Sequence
  RPE65 RNA guide
ccccauaauuuggaccugaau

SEQ ID NO: 27634 - RNA, 21 nt, Artificial Sequence
  RPE65 RNA guide
ccccauacucaagacugcuuc

SEQ ID NO: 27635 - RNA, 21 nt, Artificial Sequence
  RPE65 RNA guide
cccccauaauuuggaccugaa

SEQ ID NO: 27636 - RNA, 21 nt, Artificial Sequence
  RPE65 RNA guide
ccccccauaauuuggaccuga

SEQ ID NO: 27637 - RNA, 21 nt, Artificial Sequence
  RPE65 RNA guide
ccccgggcuaagucacacaaa

SEQ ID NO: 27638 - RNA, 21 nt, Artificial Sequence
  RPE65 RNA guide
cccgggcuaagucacacaaac

SEQ ID NO: 27639 - RNA, 21 nt, Artificial Sequence
  RPE65 RNA guide
cccgggguuuggaagcagucu

SEQ ID NO: 27640 - RNA, 21 nt, Artificial Sequence
  RPE65 RNA guide
cccuugaaauagcacauuuau

SEQ ID NO: 27641 - RNA, 21 nt, Artificial Sequence
  RPE65 RNA guide
cccuugaauuuugguggggaa

SEQ ID NO: 27642 - RNA, 21 nt, Artificial Sequence
  RPE65 RNA guide
ccgggcuaagucacacaaacc

SEQ ID NO: 27643 - RNA, 21 nt, Artificial Sequence
  RPE65 RNA guide
ccgggguuuggaagcagucuu

SEQ ID NO: 27644 - RNA, 21 nt, Artificial Sequence
  RPE65 RNA guide
ccuaacuuuuuaagucuagcu

SEQ ID NO: 27645 - RNA, 21 nt, Artificial Sequence
  RPE65 RNA guide
ccuacauaccauaaaaagaac

SEQ ID NO: 27646 - RNA, 21 nt, Artificial Sequence
  RPE65 RNA guide
ccuagugugugacuuuggaca

SEQ ID NO: 27647 - RNA, 21 nt, Artificial Sequence
  RPE65 RNA guide
ccugaagagaaggcauugauu

SEQ ID NO: 27648 - RNA, 21 nt, Artificial Sequence
  RPE65 RNA guide
ccugaauucuagcuaguugcu

SEQ ID NO: 27649 - RNA, 21 nt, Artificial Sequence
  RPE65 RNA guide
ccugcuuauguauuaaagcaa

SEQ ID NO: 27650 - RNA, 21 nt, Artificial Sequence
  RPE65 RNA guide
ccuguauauagaaagauguca

SEQ ID NO: 27651 - RNA, 21 nt, Artificial Sequence
  RPE65 RNA guide
ccuucauggauucaugauaaa

SEQ ID NO: 27652 - RNA, 21 nt, Artificial Sequence
  RPE65 RNA guide
ccuucucuucaggagcccuug

SEQ ID NO: 27653 - RNA, 21 nt, Artificial Sequence
  RPE65 RNA guide
ccuugaaauagcacauuuauc

SEQ ID NO: 27654 - RNA, 21 nt, Artificial Sequence
  RPE65 RNA guide
ccuugaauuuugguggggaaa

SEQ ID NO: 27655 - RNA, 21 nt, Artificial Sequence
  RPE65 RNA guide
ccuugcccagucauuuccuag

SEQ ID NO: 27656 - RNA, 21 nt, Artificial Sequence
  RPE65 RNA guide
cgggcuaagucacacaaaccc

SEQ ID NO: 27657 - RNA, 21 nt, Artificial Sequence
  RPE65 RNA guide
cgggguuuggaagcagucuug

SEQ ID NO: 27658 - RNA, 21 nt, Artificial Sequence
  RPE65 RNA guide
cuaaacaggucauuaaucaau

SEQ ID NO: 27659 - RNA, 21 nt, Artificial Sequence
  RPE65 RNA guide
cuaacuuuuuaagucuagcuu

SEQ ID NO: 27660 - RNA, 21 nt, Artificial Sequence
  RPE65 RNA guide
cuaagucacacaaacccccca

SEQ ID NO: 27661 - RNA, 21 nt, Artificial Sequence
  RPE65 RNA guide
cuacauaccauaaaaagaacu

SEQ ID NO: 27662 - RNA, 21 nt, Artificial Sequence
  RPE65 RNA guide
cuagaauucagguccaaauua

SEQ ID NO: 27663 - RNA, 21 nt, Artificial Sequence
  RPE65 RNA guide
cuagcuagaauucagguccaa

SEQ ID NO: 27664 - RNA, 21 nt, Artificial Sequence
  RPE65 RNA guide
cuagcuaguugcuuuaauaca

SEQ ID NO: 27665 - RNA, 21 nt, Artificial Sequence
  RPE65 RNA guide
cuagcuuuuccuguauauaga

SEQ ID NO: 27666 - RNA, 21 nt, Artificial Sequence
  RPE65 RNA guide
cuaggaaaugacugggcaagg

SEQ ID NO: 27667 - RNA, 21 nt, Artificial Sequence
  RPE65 RNA guide
cuagugugugacuuuggacaa

SEQ ID NO: 27668 - RNA, 21 nt, Artificial Sequence
  RPE65 RNA guide
cuaguugcuuuaauacauaag

SEQ ID NO: 27669 - RNA, 21 nt, Artificial Sequence
  RPE65 RNA guide
cuauauacaggaaaagcuaga

SEQ ID NO: 27670 - RNA, 21 nt, Artificial Sequence
  RPE65 RNA guide
cuauguccuacauaccauaaa

SEQ ID NO: 27671 - RNA, 21 nt, Artificial Sequence
  RPE65 RNA guide
cuauuucaagggcuccugaag

SEQ ID NO: 27672 - RNA, 21 nt, Artificial Sequence
  RPE65 RNA guide
cucaagacugcuuccaaaccc

SEQ ID NO: 27673 - RNA, 21 nt, Artificial Sequence
  RPE65 RNA guide
cucacaguaacauaauggagu

SEQ ID NO: 27674 - RNA, 21 nt, Artificial Sequence
  RPE65 RNA guide
cuccacuccuugcccagucau

SEQ ID NO: 27675 - RNA, 21 nt, Artificial Sequence
  RPE65 RNA guide
cuccauuauguuacugugaga

SEQ ID NO: 27676 - RNA, 21 nt, Artificial Sequence
  RPE65 RNA guide
cuccugaagagaaggcauuga

SEQ ID NO: 27677 - RNA, 21 nt, Artificial Sequence
  RPE65 RNA guide
cuccuugcccagucauuuccu

SEQ ID NO: 27678 - RNA, 21 nt, Artificial Sequence
  RPE65 RNA guide
cucugaccagacucaauuaua

SEQ ID NO: 27679 - RNA, 21 nt, Artificial Sequence
  RPE65 RNA guide
cucugggagacuuuuuuaaaa

SEQ ID NO: 27680 - RNA, 21 nt, Artificial Sequence
  RPE65 RNA guide
cucuucaggagcccuugaaau

SEQ ID NO: 27681 - RNA, 21 nt, Artificial Sequence
  RPE65 RNA guide
cugaaauccccauacucaaga

SEQ ID NO: 27682 - RNA, 21 nt, Artificial Sequence
  RPE65 RNA guide
cugaagagaaggcauugauua

SEQ ID NO: 27683 - RNA, 21 nt, Artificial Sequence
  RPE65 RNA guide
cugaauucuagcuaguugcuu

SEQ ID NO: 27684 - RNA, 21 nt, Artificial Sequence
  RPE65 RNA guide
cugcuuauguauuaaagcaac

SEQ ID NO: 27685 - RNA, 21 nt, Artificial Sequence
  RPE65 RNA guide
cugcuuccaaaccccgggcua

SEQ ID NO: 27686 - RNA, 21 nt, Artificial Sequence
  RPE65 RNA guide
cugggagacuuuuuuaaaaca

SEQ ID NO: 27687 - RNA, 21 nt, Artificial Sequence
  RPE65 RNA guide
cugggcaaggaguggagccca

SEQ ID NO: 27688 - RNA, 21 nt, Artificial Sequence
  RPE65 RNA guide
cuggucagagauuccacucuu

SEQ ID NO: 27689 - RNA, 21 nt, Artificial Sequence
  RPE65 RNA guide
cugucugaaauccccauacuc

SEQ ID NO: 27690 - RNA, 21 nt, Artificial Sequence
  RPE65 RNA guide
cuuagcccgggguuuggaagc

SEQ ID NO: 27691 - RNA, 21 nt, Artificial Sequence
  RPE65 RNA guide
cuuauguauuaaagcaacuag

SEQ ID NO: 27692 - RNA, 21 nt, Artificial Sequence
  RPE65 RNA guide
cuucaaagaguggaaucucug

SEQ ID NO: 27693 - RNA, 21 nt, Artificial Sequence
  RPE65 RNA guide
cuucaggagcccuugaaauag

SEQ ID NO: 27694 - RNA, 21 nt, Artificial Sequence
  RPE65 RNA guide
cuucauggauucaugauaaau

SEQ ID NO: 27695 - RNA, 21 nt, Artificial Sequence
  RPE65 RNA guide
cuuccaaaccccgggcuaagu

SEQ ID NO: 27696 - RNA, 21 nt, Artificial Sequence
  RPE65 RNA guide
cuucucuucaggagcccuuga

SEQ ID NO: 27697 - RNA, 21 nt, Artificial Sequence
  RPE65 RNA guide
cuugaauuuugguggggaaau

SEQ ID NO: 27698 - RNA, 21 nt, Artificial Sequence
  RPE65 RNA guide
cuugaguauggggauuucaga

SEQ ID NO: 27699 - RNA, 21 nt, Artificial Sequence
  RPE65 RNA guide
cuugcccagucauuuccuagu

SEQ ID NO: 27700 - RNA, 21 nt, Artificial Sequence
  RPE65 RNA guide
cuugggcuccacuccuugccc

SEQ ID NO: 27701 - RNA, 21 nt, Artificial Sequence
  RPE65 RNA guide
cuuucuauauacaggaaaagc

SEQ ID NO: 27702 - RNA, 21 nt, Artificial Sequence
  RPE65 RNA guide
cuuuuacuccauuauguuacu

SEQ ID NO: 27703 - RNA, 21 nt, Artificial Sequence
  RPE65 RNA guide
cuuuuccuguauauagaaaga

SEQ ID NO: 27704 - RNA, 21 nt, Artificial Sequence
  RPE65 RNA guide
cuuuuuaagucuagcuuuucc

SEQ ID NO: 27705 - RNA, 21 nt, Artificial Sequence
  RPE65 RNA guide
cuuuuuaugguauguaggaca

SEQ ID NO: 27706 - RNA, 21 nt, Artificial Sequence
  RPE65 RNA guide
gaaaaaauuuccccaccaaaa

SEQ ID NO: 27707 - RNA, 21 nt, Artificial Sequence
  RPE65 RNA guide
gaaaagcuagacuuaaaaagu

SEQ ID NO: 27708 - RNA, 21 nt, Artificial Sequence
  RPE65 RNA guide
gaaagacccuugaauuuuggu

SEQ ID NO: 27709 - RNA, 21 nt, Artificial Sequence
  RPE65 RNA guide
gaaagaugucacaauagcuuu

SEQ ID NO: 27710 - RNA, 21 nt, Artificial Sequence
  RPE65 RNA guide
gaaauagcacauuuaucauga

SEQ ID NO: 27711 - RNA, 21 nt, Artificial Sequence
  RPE65 RNA guide
gaaauccccauacucaagacu

SEQ ID NO: 27712 - RNA, 21 nt, Artificial Sequence
  RPE65 RNA guide
gaaaugacugggcaaggagug

SEQ ID NO: 27713 - RNA, 21 nt, Artificial Sequence
  RPE65 RNA guide
gaacuuugcaugguauuaucu

SEQ ID NO: 27714 - RNA, 21 nt, Artificial Sequence
  RPE65 RNA guide
gaagagaaggcauugauuaau

SEQ ID NO: 27715 - RNA, 21 nt, Artificial Sequence
  RPE65 RNA guide
gaagcagucuugaguaugggg

SEQ ID NO: 27716 - RNA, 21 nt, Artificial Sequence
  RPE65 RNA guide
gaagguguuuuaaaaaagucu

SEQ ID NO: 27717 - RNA, 21 nt, Artificial Sequence
  RPE65 RNA guide
gaaucucugaccagacucaau

SEQ ID NO: 27718 - RNA, 21 nt, Artificial Sequence
  RPE65 RNA guide
gaauucagguccaaauuaugg

SEQ ID NO: 27719 - RNA, 21 nt, Artificial Sequence
  RPE65 RNA guide
gaauucuagcuaguugcuuua

SEQ ID NO: 27720 - RNA, 21 nt, Artificial Sequence
  RPE65 RNA guide
gaauuuugguggggaaauuuu

SEQ ID NO: 27721 - RNA, 21 nt, Artificial Sequence
  RPE65 RNA guide
gacagacuugggcuccacucc

SEQ ID NO: 27722 - RNA, 21 nt, Artificial Sequence
  RPE65 RNA guide
gacaucuuucuauauacagga

SEQ ID NO: 27723 - RNA, 21 nt, Artificial Sequence
  RPE65 RNA guide
gacccuugaauuuuggugggg

SEQ ID NO: 27724 - RNA, 21 nt, Artificial Sequence
  RPE65 RNA guide
gaccugaauucuagcuaguug

SEQ ID NO: 27725 - RNA, 21 nt, Artificial Sequence
  RPE65 RNA guide
gacugcuuccaaaccccgggc

SEQ ID NO: 27726 - RNA, 21 nt, Artificial Sequence
  RPE65 RNA guide
gacugggcaaggaguggagcc

SEQ ID NO: 27727 - RNA, 21 nt, Artificial Sequence
  RPE65 RNA guide
gacuuagcccgggguuuggaa

SEQ ID NO: 27728 - RNA, 21 nt, Artificial Sequence
  RPE65 RNA guide
gacuugggcuccacuccuugc

SEQ ID NO: 27729 - RNA, 21 nt, Artificial Sequence
  RPE65 RNA guide
gacuuuggacaaauuaccuaa

SEQ ID NO: 27730 - RNA, 21 nt, Artificial Sequence
  RPE65 RNA guide
gacuuuuuuaaaacaccuuca

SEQ ID NO: 27731 - RNA, 21 nt, Artificial Sequence
  RPE65 RNA guide
gagacuuuuuuaaaacaccuu

SEQ ID NO: 27732 - RNA, 21 nt, Artificial Sequence
  RPE65 RNA guide
gagauaauaccaugcaaaguu

SEQ ID NO: 27733 - RNA, 21 nt, Artificial Sequence
  RPE65 RNA guide
gagcccaagucugucugaaau

SEQ ID NO: 27734 - RNA, 21 nt, Artificial Sequence
  RPE65 RNA guide
gagcccuugaaauagcacauu

SEQ ID NO: 27735 - RNA, 21 nt, Artificial Sequence
  RPE65 RNA guide
gaguaaaagcuauugugacau

SEQ ID NO: 27736 - RNA, 21 nt, Artificial Sequence
  RPE65 RNA guide
gaguauggggauuucagacag

SEQ ID NO: 27737 - RNA, 21 nt, Artificial Sequence
  RPE65 RNA guide
gagucuggucagagauuccac

SEQ ID NO: 27738 - RNA, 21 nt, Artificial Sequence
  RPE65 RNA guide
gaguggaaucucugaccagac

SEQ ID NO: 27739 - RNA, 21 nt, Artificial Sequence
  RPE65 RNA guide
gaguggagcccaagucugucu

SEQ ID NO: 27740 - RNA, 21 nt, Artificial Sequence
  RPE65 RNA guide
gauaaaugugcuauuucaagg

SEQ ID NO: 27741 - RNA, 21 nt, Artificial Sequence
  RPE65 RNA guide
gaugucacaauagcuuuuacu

SEQ ID NO: 27742 - RNA, 21 nt, Artificial Sequence
  RPE65 RNA guide
gauuucagacagacuugggcu

SEQ ID NO: 27743 - RNA, 21 nt, Artificial Sequence
  RPE65 RNA guide
gcaaaguucuuuuuaugguau

SEQ ID NO: 27744 - RNA, 21 nt, Artificial Sequence
  RPE65 RNA guide
gcaacuagcuagaauucaggu

SEQ ID NO: 27745 - RNA, 21 nt, Artificial Sequence
  RPE65 RNA guide
gcaaggaguggagcccaaguc

SEQ ID NO: 27746 - RNA, 21 nt, Artificial Sequence
  RPE65 RNA guide
gcacauuuaucaugaauccau

SEQ ID NO: 27747 - RNA, 21 nt, Artificial Sequence
  RPE65 RNA guide
gcaggaaaaaauuuccccacc

SEQ ID NO: 27748 - RNA, 21 nt, Artificial Sequence
  RPE65 RNA guide
gcagucuugaguauggggauu

SEQ ID NO: 27749 - RNA, 21 nt, Artificial Sequence
  RPE65 RNA guide
gcccaagucugucugaaaucc

SEQ ID NO: 27750 - RNA, 21 nt, Artificial Sequence
  RPE65 RNA guide
gcccagucauuuccuagugug

SEQ ID NO: 27751 - RNA, 21 nt, Artificial Sequence
  RPE65 RNA guide
gcccgggguuuggaagcaguc

SEQ ID NO: 27752 - RNA, 21 nt, Artificial Sequence
  RPE65 RNA guide
gcccuugaaauagcacauuua

SEQ ID NO: 27753 - RNA, 21 nt, Artificial Sequence
  RPE65 RNA guide
gccuucucuucaggagcccuu

SEQ ID NO: 27754 - RNA, 21 nt, Artificial Sequence
  RPE65 RNA guide
gcuaagucacacaaacccccc

SEQ ID NO: 27755 - RNA, 21 nt, Artificial Sequence
  RPE65 RNA guide
gcuagaauucagguccaaauu

SEQ ID NO: 27756 - RNA, 21 nt, Artificial Sequence
  RPE65 RNA guide
gcuaguugcuuuaauacauaa

SEQ ID NO: 27757 - RNA, 21 nt, Artificial Sequence
  RPE65 RNA guide
gcuauugugacaucuuucuau

SEQ ID NO: 27758 - RNA, 21 nt, Artificial Sequence
  RPE65 RNA guide
gcuauuucaagggcuccugaa

SEQ ID NO: 27759 - RNA, 21 nt, Artificial Sequence
  RPE65 RNA guide
gcuccacuccuugcccaguca

SEQ ID NO: 27760 - RNA, 21 nt, Artificial Sequence
  RPE65 RNA guide
gcuccugaagagaaggcauug

SEQ ID NO: 27761 - RNA, 21 nt, Artificial Sequence
  RPE65 RNA guide
gcuuauguauuaaagcaacua

SEQ ID NO: 27762 - RNA, 21 nt, Artificial Sequence
  RPE65 RNA guide
gcuuccaaaccccgggcuaag

SEQ ID NO: 27763 - RNA, 21 nt, Artificial Sequence
  RPE65 RNA guide
gcuuuuacuccauuauguuac

SEQ ID NO: 27764 - RNA, 21 nt, Artificial Sequence
  RPE65 RNA guide
gcuuuuccuguauauagaaag

SEQ ID NO: 27765 - RNA, 21 nt, Artificial Sequence
  RPE65 RNA guide
ggaaaaaauuuccccaccaaa

SEQ ID NO: 27766 - RNA, 21 nt, Artificial Sequence
  RPE65 RNA guide
ggaaaagcuagacuuaaaaag

SEQ ID NO: 27767 - RNA, 21 nt, Artificial Sequence
  RPE65 RNA guide
ggaaagacccuugaauuuugg

SEQ ID NO: 27768 - RNA, 21 nt, Artificial Sequence
  RPE65 RNA guide
ggaaaugacugggcaaggagu

SEQ ID NO: 27769 - RNA, 21 nt, Artificial Sequence
  RPE65 RNA guide
ggaagcagucuugaguauggg

SEQ ID NO: 27770 - RNA, 21 nt, Artificial Sequence
  RPE65 RNA guide
ggaaucucugaccagacucaa

SEQ ID NO: 27771 - RNA, 21 nt, Artificial Sequence
  RPE65 RNA guide
ggaccugaauucuagcuaguu

SEQ ID NO: 27772 - RNA, 21 nt, Artificial Sequence
  RPE65 RNA guide
ggagacuuuuuuaaaacaccu

SEQ ID NO: 27773 - RNA, 21 nt, Artificial Sequence
  RPE65 RNA guide
ggagcccaagucugucugaaa

SEQ ID NO: 27774 - RNA, 21 nt, Artificial Sequence
  RPE65 RNA guide
ggagcccuugaaauagcacau

SEQ ID NO: 27775 - RNA, 21 nt, Artificial Sequence
  RPE65 RNA guide
ggaguaaaagcuauugugaca

SEQ ID NO: 27776 - RNA, 21 nt, Artificial Sequence
  RPE65 RNA guide
ggaguggagcccaagucuguc

SEQ ID NO: 27777 - RNA, 21 nt, Artificial Sequence
  RPE65 RNA guide
ggauucaugauaaaugugcua

SEQ ID NO: 27778 - RNA, 21 nt, Artificial Sequence
  RPE65 RNA guide
ggauuucagacagacuugggc

SEQ ID NO: 27779 - RNA, 21 nt, Artificial Sequence
  RPE65 RNA guide
ggcaaggaguggagcccaagu

SEQ ID NO: 27780 - RNA, 21 nt, Artificial Sequence
  RPE65 RNA guide
ggcuaagucacacaaaccccc

SEQ ID NO: 27781 - RNA, 21 nt, Artificial Sequence
  RPE65 RNA guide
ggcuccacuccuugcccaguc

SEQ ID NO: 27782 - RNA, 21 nt, Artificial Sequence
  RPE65 RNA guide
ggcuccugaagagaaggcauu

SEQ ID NO: 27783 - RNA, 21 nt, Artificial Sequence
  RPE65 RNA guide
gggaaauuuuuuccugcuuau

SEQ ID NO: 27784 - RNA, 21 nt, Artificial Sequence
  RPE65 RNA guide
gggagacuuuuuuaaaacacc

SEQ ID NO: 27785 - RNA, 21 nt, Artificial Sequence
  RPE65 RNA guide
gggauuucagacagacuuggg

SEQ ID NO: 27786 - RNA, 21 nt, Artificial Sequence
  RPE65 RNA guide
gggcaaggaguggagcccaag

SEQ ID NO: 27787 - RNA, 21 nt, Artificial Sequence
  RPE65 RNA guide
gggcuaagucacacaaacccc

SEQ ID NO: 27788 - RNA, 21 nt, Artificial Sequence
  RPE65 RNA guide
gggcuccacuccuugcccagu

SEQ ID NO: 27789 - RNA, 21 nt, Artificial Sequence
  RPE65 RNA guide
gggcuccugaagagaaggcau

SEQ ID NO: 27790 - RNA, 21 nt, Artificial Sequence
  RPE65 RNA guide
ggggaaauuuuuuccugcuua

SEQ ID NO: 27791 - RNA, 21 nt, Artificial Sequence
  RPE65 RNA guide
ggggauuucagacagacuugg

SEQ ID NO: 27792 - RNA, 21 nt, Artificial Sequence
  RPE65 RNA guide
gggggguuugugugacuuagc

SEQ ID NO: 27793 - RNA, 21 nt, Artificial Sequence
  RPE65 RNA guide
ggggguuugugugacuuagcc

SEQ ID NO: 27794 - RNA, 21 nt, Artificial Sequence
  RPE65 RNA guide
gggguuuggaagcagucuuga

SEQ ID NO: 27795 - RNA, 21 nt, Artificial Sequence
  RPE65 RNA guide
gggguuugugugacuuagccc

SEQ ID NO: 27796 - RNA, 21 nt, Artificial Sequence
  RPE65 RNA guide
ggguuuggaagcagucuugag

SEQ ID NO: 27797 - RNA, 21 nt, Artificial Sequence
  RPE65 RNA guide
ggguuugugugacuuagcccg

SEQ ID NO: 27798 - RNA, 21 nt, Artificial Sequence
  RPE65 RNA guide
gguaauuuguccaaagucaca

SEQ ID NO: 27799 - RNA, 21 nt, Artificial Sequence
  RPE65 RNA guide
gguauguaggacauaguaauu

SEQ ID NO: 27800 - RNA, 21 nt, Artificial Sequence
  RPE65 RNA guide
ggucagagauuccacucuuug

SEQ ID NO: 27801 - RNA, 21 nt, Artificial Sequence
  RPE65 RNA guide
ggucauuaaucaaugccuucu

SEQ ID NO: 27802 - RNA, 21 nt, Artificial Sequence
  RPE65 RNA guide
gguccaaauuaugggggguuu

SEQ ID NO: 27803 - RNA, 21 nt, Artificial Sequence
  RPE65 RNA guide
gguggggaaauuuuuuccugc

SEQ ID NO: 27804 - RNA, 21 nt, Artificial Sequence
  RPE65 RNA guide
gguguuuuaaaaaagucuccc

SEQ ID NO: 27805 - RNA, 21 nt, Artificial Sequence
  RPE65 RNA guide
gguuuggaagcagucuugagu

SEQ ID NO: 27806 - RNA, 21 nt, Artificial Sequence
  RPE65 RNA guide
gguuugugugacuuagcccgg

SEQ ID NO: 27807 - RNA, 21 nt, Artificial Sequence
  RPE65 RNA guide
guaaaagcuauugugacaucu

SEQ ID NO: 27808 - RNA, 21 nt, Artificial Sequence
  RPE65 RNA guide
guaaguaucucugggagacuu

SEQ ID NO: 27809 - RNA, 21 nt, Artificial Sequence
  RPE65 RNA guide
guaauuuguccaaagucacac

SEQ ID NO: 27810 - RNA, 21 nt, Artificial Sequence
  RPE65 RNA guide
guauauagaaagaugucacaa

SEQ ID NO: 27811 - RNA, 21 nt, Artificial Sequence
  RPE65 RNA guide
guaucucugggagacuuuuuu

SEQ ID NO: 27812 - RNA, 21 nt, Artificial Sequence
  RPE65 RNA guide
guauggggauuucagacagac

SEQ ID NO: 27813 - RNA, 21 nt, Artificial Sequence
  RPE65 RNA guide
guauuaaagcaacuagcuaga

SEQ ID NO: 27814 - RNA, 21 nt, Artificial Sequence
  RPE65 RNA guide
gucacaauagcuuuuacucca

SEQ ID NO: 27815 - RNA, 21 nt, Artificial Sequence
  RPE65 RNA guide
gucacacaaaccccccauaau

SEQ ID NO: 27816 - RNA, 21 nt, Artificial Sequence
  RPE65 RNA guide
gucacacacuaggaaaugacu

SEQ ID NO: 27817 - RNA, 21 nt, Artificial Sequence
  RPE65 RNA guide
gucagagauuccacucuuuga

SEQ ID NO: 27818 - RNA, 21 nt, Artificial Sequence
  RPE65 RNA guide
gucauuaaucaaugccuucuc

SEQ ID NO: 27819 - RNA, 21 nt, Artificial Sequence
  RPE65 RNA guide
gucauuuccuagugugugacu

SEQ ID NO: 27820 - RNA, 21 nt, Artificial Sequence
  RPE65 RNA guide
guccaaagucacacacuagga

SEQ ID NO: 27821 - RNA, 21 nt, Artificial Sequence
  RPE65 RNA guide
guccaaauuaugggggguuug

SEQ ID NO: 27822 - RNA, 21 nt, Artificial Sequence
  RPE65 RNA guide
guccuacauaccauaaaaaga

SEQ ID NO: 27823 - RNA, 21 nt, Artificial Sequence
  RPE65 RNA guide
gucuagcuuuuccuguauaua

SEQ ID NO: 27824 - RNA, 21 nt, Artificial Sequence
  RPE65 RNA guide
gucugaaauccccauacucaa

SEQ ID NO: 27825 - RNA, 21 nt, Artificial Sequence
  RPE65 RNA guide
gucuggucagagauuccacuc

SEQ ID NO: 27826 - RNA, 21 nt, Artificial Sequence
  RPE65 RNA guide
gucugucugaaauccccauac

SEQ ID NO: 27827 - RNA, 21 nt, Artificial Sequence
  RPE65 RNA guide
gucuugaguauggggauuuca

SEQ ID NO: 27828 - RNA, 21 nt, Artificial Sequence
  RPE65 RNA guide
gugacaucuuucuauauacag

SEQ ID NO: 27829 - RNA, 21 nt, Artificial Sequence
  RPE65 RNA guide
gugacuuagcccgggguuugg

SEQ ID NO: 27830 - RNA, 21 nt, Artificial Sequence
  RPE65 RNA guide
gugacuuuggacaaauuaccu

SEQ ID NO: 27831 - RNA, 21 nt, Artificial Sequence
  RPE65 RNA guide
gugcuauuucaagggcuccug

SEQ ID NO: 27832 - RNA, 21 nt, Artificial Sequence
  RPE65 RNA guide
guggaaucucugaccagacuc

SEQ ID NO: 27833 - RNA, 21 nt, Artificial Sequence
  RPE65 RNA guide
guggagcccaagucugucuga

SEQ ID NO: 27834 - RNA, 21 nt, Artificial Sequence
  RPE65 RNA guide
guggggaaauuuuuuccugcu

SEQ ID NO: 27835 - RNA, 21 nt, Artificial Sequence
  RPE65 RNA guide
gugugacuuagcccgggguuu

SEQ ID NO: 27836 - RNA, 21 nt, Artificial Sequence
  RPE65 RNA guide
gugugacuuuggacaaauuac

SEQ ID NO: 27837 - RNA, 21 nt, Artificial Sequence
  RPE65 RNA guide
gugugugacuuuggacaaauu

SEQ ID NO: 27838 - RNA, 21 nt, Artificial Sequence
  RPE65 RNA guide
guguuuuaaaaaagucuccca

SEQ ID NO: 27839 - RNA, 21 nt, Artificial Sequence
  RPE65 RNA guide
guuagguaauuuguccaaagu

SEQ ID NO: 27840 - RNA, 21 nt, Artificial Sequence
  RPE65 RNA guide
guucuuuuuaugguauguagg

SEQ ID NO: 27841 - RNA, 21 nt, Artificial Sequence
  RPE65 RNA guide
guugcuuuaauacauaagcag

SEQ ID NO: 27842 - RNA, 21 nt, Artificial Sequence
  RPE65 RNA guide
guuuaggaaagacccuugaau

SEQ ID NO: 27843 - RNA, 21 nt, Artificial Sequence
  RPE65 RNA guide
guuuggaagcagucuugagua

SEQ ID NO: 27844 - RNA, 21 nt, Artificial Sequence
  RPE65 RNA guide
guuugugugacuuagcccggg

SEQ ID NO: 27845 - RNA, 21 nt, Artificial Sequence
  RPE65 RNA guide
guuuuaaaaaagucucccaga

SEQ ID NO: 27846 - RNA, 21 nt, Artificial Sequence
  RPE65 RNA guide
uaaaaaagucucccagagaua

SEQ ID NO: 27847 - RNA, 21 nt, Artificial Sequence
  RPE65 RNA guide
uaaaacaccuucauggauuca

SEQ ID NO: 27848 - RNA, 21 nt, Artificial Sequence
  RPE65 RNA guide
uaaacaggucauuaaucaaug

SEQ ID NO: 27849 - RNA, 21 nt, Artificial Sequence
  RPE65 RNA guide
uaaagcaacuagcuagaauuc

SEQ ID NO: 27850 - RNA, 21 nt, Artificial Sequence
  RPE65 RNA guide
uaaaucucacaguaacauaau

SEQ ID NO: 27851 - RNA, 21 nt, Artificial Sequence
  RPE65 RNA guide
uaaaugugcuauuucaagggc

SEQ ID NO: 27852 - RNA, 21 nt, Artificial Sequence
  RPE65 RNA guide
uaacuucaaagaguggaaucu

SEQ ID NO: 27853 - RNA, 21 nt, Artificial Sequence
  RPE65 RNA guide
uaagcaggaaaaaauuucccc

SEQ ID NO: 27854 - RNA, 21 nt, Artificial Sequence
  RPE65 RNA guide
uaaguaucucugggagacuuu

SEQ ID NO: 27855 - RNA, 21 nt, Artificial Sequence
  RPE65 RNA guide
uaagucacacaaaccccccau

SEQ ID NO: 27856 - RNA, 21 nt, Artificial Sequence
  RPE65 RNA guide
uaagucuagcuuuuccuguau

SEQ ID NO: 27857 - RNA, 21 nt, Artificial Sequence
  RPE65 RNA guide
uaaucaaugccuucucuucag

SEQ ID NO: 27858 - RNA, 21 nt, Artificial Sequence
  RPE65 RNA guide
uaauggaguaaaagcuauugu

SEQ ID NO: 27859 - RNA, 21 nt, Artificial Sequence
  RPE65 RNA guide
uaauugagucuggucagagau

SEQ ID NO: 27860 - RNA, 21 nt, Artificial Sequence
  RPE65 RNA guide
uaauuuggaccugaauucuag

SEQ ID NO: 27861 - RNA, 21 nt, Artificial Sequence
  RPE65 RNA guide
uaauuuguccaaagucacaca

SEQ ID NO: 27862 - RNA, 21 nt, Artificial Sequence
  RPE65 RNA guide
uacaggaaaagcuagacuuaa

SEQ ID NO: 27863 - RNA, 21 nt, Artificial Sequence
  RPE65 RNA guide
uacauaagcaggaaaaaauuu

SEQ ID NO: 27864 - RNA, 21 nt, Artificial Sequence
  RPE65 RNA guide
uaccauaaaaagaacuuugca

SEQ ID NO: 27865 - RNA, 21 nt, Artificial Sequence
  RPE65 RNA guide
uaccaugcaaaguucuuuuua

SEQ ID NO: 27866 - RNA, 21 nt, Artificial Sequence
  RPE65 RNA guide
uacucaagacugcuuccaaac

SEQ ID NO: 27867 - RNA, 21 nt, Artificial Sequence
  RPE65 RNA guide
uacuccauuauguuacuguga

SEQ ID NO: 27868 - RNA, 21 nt, Artificial Sequence
  RPE65 RNA guide
uagaauucagguccaaauuau

SEQ ID NO: 27869 - RNA, 21 nt, Artificial Sequence
  RPE65 RNA guide
uagcacauuuaucaugaaucc

SEQ ID NO: 27870 - RNA, 21 nt, Artificial Sequence
  RPE65 RNA guide
uagcccgggguuuggaagcag

SEQ ID NO: 27871 - RNA, 21 nt, Artificial Sequence
  RPE65 RNA guide
uagcuagaauucagguccaaa

SEQ ID NO: 27872 - RNA, 21 nt, Artificial Sequence
  RPE65 RNA guide
uagcuaguugcuuuaauacau

SEQ ID NO: 27873 - RNA, 21 nt, Artificial Sequence
  RPE65 RNA guide
uagcuuuuacuccauuauguu

SEQ ID NO: 27874 - RNA, 21 nt, Artificial Sequence
  RPE65 RNA guide
uaggaaagacccuugaauuuu

SEQ ID NO: 27875 - RNA, 21 nt, Artificial Sequence
  RPE65 RNA guide
uaggaaaugacugggcaagga

SEQ ID NO: 27876 - RNA, 21 nt, Artificial Sequence
  RPE65 RNA guide
uagguaauuuguccaaaguca

SEQ ID NO: 27877 - RNA, 21 nt, Artificial Sequence
  RPE65 RNA guide
uagugugugacuuuggacaaa

SEQ ID NO: 27878 - RNA, 21 nt, Artificial Sequence
  RPE65 RNA guide
uaguugcuuuaauacauaagc

SEQ ID NO: 27879 - RNA, 21 nt, Artificial Sequence
  RPE65 RNA guide
uauaauugagucuggucagag

SEQ ID NO: 27880 - RNA, 21 nt, Artificial Sequence
  RPE65 RNA guide
uaucaugaauccaugaaggug

SEQ ID NO: 27881 - RNA, 21 nt, Artificial Sequence
  RPE65 RNA guide
uaucucugggagacuuuuuua

SEQ ID NO: 27882 - RNA, 21 nt, Artificial Sequence
  RPE65 RNA guide
uauggggauuucagacagacu

SEQ ID NO: 27883 - RNA, 21 nt, Artificial Sequence
  RPE65 RNA guide
uaugggggguuugugugacuu

SEQ ID NO: 27884 - RNA, 21 nt, Artificial Sequence
  RPE65 RNA guide
uaugguauguaggacauagua

SEQ ID NO: 27885 - RNA, 21 nt, Artificial Sequence
  RPE65 RNA guide
uauuauaauugagucugguca

SEQ ID NO: 27886 - RNA, 21 nt, Artificial Sequence
  RPE65 RNA guide
uauuucaagggcuccugaaga

SEQ ID NO: 27887 - RNA, 21 nt, Artificial Sequence
  RPE65 RNA guide
ucaaagaguggaaucucugac

SEQ ID NO: 27888 - RNA, 21 nt, Artificial Sequence
  RPE65 RNA guide
ucaagacugcuuccaaacccc

SEQ ID NO: 27889 - RNA, 21 nt, Artificial Sequence
  RPE65 RNA guide
ucaagggcuccugaagagaag

SEQ ID NO: 27890 - RNA, 21 nt, Artificial Sequence
  RPE65 RNA guide
ucaaugccuucucuucaggag

SEQ ID NO: 27891 - RNA, 21 nt, Artificial Sequence
  RPE65 RNA guide
ucacaauagcuuuuacuccau

SEQ ID NO: 27892 - RNA, 21 nt, Artificial Sequence
  RPE65 RNA guide
ucacacaaaccccccauaauu

SEQ ID NO: 27893 - RNA, 21 nt, Artificial Sequence
  RPE65 RNA guide
ucacacacuaggaaaugacug

SEQ ID NO: 27894 - RNA, 21 nt, Artificial Sequence
  RPE65 RNA guide
ucacaguaacauaauggagua

SEQ ID NO: 27895 - RNA, 21 nt, Artificial Sequence
  RPE65 RNA guide
ucagacagacuugggcuccac

SEQ ID NO: 27896 - RNA, 21 nt, Artificial Sequence
  RPE65 RNA guide
ucagagauuccacucuuugaa

SEQ ID NO: 27897 - RNA, 21 nt, Artificial Sequence
  RPE65 RNA guide
ucaggagcccuugaaauagca

SEQ ID NO: 27898 - RNA, 21 nt, Artificial Sequence
  RPE65 RNA guide
ucagguccaaauuaugggggg

SEQ ID NO: 27899 - RNA, 21 nt, Artificial Sequence
  RPE65 RNA guide
ucaugaauccaugaagguguu

SEQ ID NO: 27900 - RNA, 21 nt, Artificial Sequence
  RPE65 RNA guide
ucaugauaaaugugcuauuuc

SEQ ID NO: 27901 - RNA, 21 nt, Artificial Sequence
  RPE65 RNA guide
ucauggauucaugauaaaugu

SEQ ID NO: 27902 - RNA, 21 nt, Artificial Sequence
  RPE65 RNA guide
ucauuaaucaaugccuucucu

SEQ ID NO: 27903 - RNA, 21 nt, Artificial Sequence
  RPE65 RNA guide
ucauuuccuagugugugacuu

SEQ ID NO: 27904 - RNA, 21 nt, Artificial Sequence
  RPE65 RNA guide
uccaaaccccgggcuaaguca

SEQ ID NO: 27905 - RNA, 21 nt, Artificial Sequence
  RPE65 RNA guide
uccaaagucacacacuaggaa

SEQ ID NO: 27906 - RNA, 21 nt, Artificial Sequence
  RPE65 RNA guide
uccaaauuaugggggguuugu

SEQ ID NO: 27907 - RNA, 21 nt, Artificial Sequence
  RPE65 RNA guide
uccacuccuugcccagucauu

SEQ ID NO: 27908 - RNA, 21 nt, Artificial Sequence
  RPE65 RNA guide
uccaugaagguguuuuaaaaa

SEQ ID NO: 27909 - RNA, 21 nt, Artificial Sequence
  RPE65 RNA guide
uccccaccaaaauucaagggu

SEQ ID NO: 27910 - RNA, 21 nt, Artificial Sequence
  RPE65 RNA guide
uccccauacucaagacugcuu

SEQ ID NO: 27911 - RNA, 21 nt, Artificial Sequence
  RPE65 RNA guide
uccuagugugugacuuuggac

SEQ ID NO: 27912 - RNA, 21 nt, Artificial Sequence
  RPE65 RNA guide
uccugaagagaaggcauugau

SEQ ID NO: 27913 - RNA, 21 nt, Artificial Sequence
  RPE65 RNA guide
uccugcuuauguauuaaagca

SEQ ID NO: 27914 - RNA, 21 nt, Artificial Sequence
  RPE65 RNA guide
uccuguauauagaaagauguc

SEQ ID NO: 27915 - RNA, 21 nt, Artificial Sequence
  RPE65 RNA guide
uccuugcccagucauuuccua

SEQ ID NO: 27916 - RNA, 21 nt, Artificial Sequence
  RPE65 RNA guide
ucuagcuuuuccuguauauag

SEQ ID NO: 27917 - RNA, 21 nt, Artificial Sequence
  RPE65 RNA guide
ucuauauacaggaaaagcuag

SEQ ID NO: 27918 - RNA, 21 nt, Artificial Sequence
  RPE65 RNA guide
ucucacaguaacauaauggag

SEQ ID NO: 27919 - RNA, 21 nt, Artificial Sequence
  RPE65 RNA guide
ucucugaccagacucaauuau

SEQ ID NO: 27920 - RNA, 21 nt, Artificial Sequence
  RPE65 RNA guide
ucucugggagacuuuuuuaaa

SEQ ID NO: 27921 - RNA, 21 nt, Artificial Sequence
  RPE65 RNA guide
ucucuucaggagcccuugaaa

SEQ ID NO: 27922 - RNA, 21 nt, Artificial Sequence
  RPE65 RNA guide
ucugaaauccccauacucaag

SEQ ID NO: 27923 - RNA, 21 nt, Artificial Sequence
  RPE65 RNA guide
ucugggagacuuuuuuaaaac

SEQ ID NO: 27924 - RNA, 21 nt, Artificial Sequence
  RPE65 RNA guide
ucuggucagagauuccacucu

SEQ ID NO: 27925 - RNA, 21 nt, Artificial Sequence
  RPE65 RNA guide
ucugucugaaauccccauacu

SEQ ID NO: 27926 - RNA, 21 nt, Artificial Sequence
  RPE65 RNA guide
ucuucaggagcccuugaaaua

SEQ ID NO: 27927 - RNA, 21 nt, Artificial Sequence
  RPE65 RNA guide
ucuugaguauggggauuucag

SEQ ID NO: 27928 - RNA, 21 nt, Artificial Sequence
  RPE65 RNA guide
ucuuucuauauacaggaaaag

SEQ ID NO: 27929 - RNA, 21 nt, Artificial Sequence
  RPE65 RNA guide
ucuuuuuaugguauguaggac

SEQ ID NO: 27930 - RNA, 21 nt, Artificial Sequence
  RPE65 RNA guide
ugaaauccccauacucaagac

SEQ ID NO: 27931 - RNA, 21 nt, Artificial Sequence
  RPE65 RNA guide
ugaagagaaggcauugauuaa

SEQ ID NO: 27932 - RNA, 21 nt, Artificial Sequence
  RPE65 RNA guide
ugaagguguuuuaaaaaaguc

SEQ ID NO: 27933 - RNA, 21 nt, Artificial Sequence
  RPE65 RNA guide
ugaauuuugguggggaaauuu

SEQ ID NO: 27934 - RNA, 21 nt, Artificial Sequence
  RPE65 RNA guide
ugacugggcaaggaguggagc

SEQ ID NO: 27935 - RNA, 21 nt, Artificial Sequence
  RPE65 RNA guide
ugacuuagcccgggguuugga

SEQ ID NO: 27936 - RNA, 21 nt, Artificial Sequence
  RPE65 RNA guide
ugacuuuggacaaauuaccua

SEQ ID NO: 27937 - RNA, 21 nt, Artificial Sequence
  RPE65 RNA guide
ugaguauggggauuucagaca

SEQ ID NO: 27938 - RNA, 21 nt, Artificial Sequence
  RPE65 RNA guide
ugagucuggucagagauucca

SEQ ID NO: 27939 - RNA, 21 nt, Artificial Sequence
  RPE65 RNA guide
ugauaaaugugcuauuucaag

SEQ ID NO: 27940 - RNA, 21 nt, Artificial Sequence
  RPE65 RNA guide
ugcccagucauuuccuagugu

SEQ ID NO: 27941 - RNA, 21 nt, Artificial Sequence
  RPE65 RNA guide
ugccuucucuucaggagcccu

SEQ ID NO: 27942 - RNA, 21 nt, Artificial Sequence
  RPE65 RNA guide
ugcuauuucaagggcuccuga

SEQ ID NO: 27943 - RNA, 21 nt, Artificial Sequence
  RPE65 RNA guide
ugcuuauguauuaaagcaacu

SEQ ID NO: 27944 - RNA, 21 nt, Artificial Sequence
  RPE65 RNA guide
ugcuuccaaaccccgggcuaa

SEQ ID NO: 27945 - RNA, 21 nt, Artificial Sequence
  RPE65 RNA guide
uggaagcagucuugaguaugg

SEQ ID NO: 27946 - RNA, 21 nt, Artificial Sequence
  RPE65 RNA guide
uggaaucucugaccagacuca

SEQ ID NO: 27947 - RNA, 21 nt, Artificial Sequence
  RPE65 RNA guide
uggaccugaauucuagcuagu

SEQ ID NO: 27948 - RNA, 21 nt, Artificial Sequence
  RPE65 RNA guide
uggagcccaagucugucugaa

SEQ ID NO: 27949 - RNA, 21 nt, Artificial Sequence
  RPE65 RNA guide
uggaguaaaagcuauugugac

SEQ ID NO: 27950 - RNA, 21 nt, Artificial Sequence
  RPE65 RNA guide
ugggagacuuuuuuaaaacac

SEQ ID NO: 27951 - RNA, 21 nt, Artificial Sequence
  RPE65 RNA guide
ugggcaaggaguggagcccaa

SEQ ID NO: 27952 - RNA, 21 nt, Artificial Sequence
  RPE65 RNA guide
ugggcuccacuccuugcccag

SEQ ID NO: 27953 - RNA, 21 nt, Artificial Sequence
  RPE65 RNA guide
uggggaaauuuuuuccugcuu

SEQ ID NO: 27954 - RNA, 21 nt, Artificial Sequence
  RPE65 RNA guide
uggggauuucagacagacuug

SEQ ID NO: 27955 - RNA, 21 nt, Artificial Sequence
  RPE65 RNA guide
ugggggguuugugugacuuag

SEQ ID NO: 27956 - RNA, 21 nt, Artificial Sequence
  RPE65 RNA guide
ugguauguaggacauaguaau

SEQ ID NO: 27957 - RNA, 21 nt, Artificial Sequence
  RPE65 RNA guide
uggucagagauuccacucuuu

SEQ ID NO: 27958 - RNA, 21 nt, Artificial Sequence
  RPE65 RNA guide
ugguggggaaauuuuuuccug

SEQ ID NO: 27959 - RNA, 21 nt, Artificial Sequence
  RPE65 RNA guide
ugucacaauagcuuuuacucc

SEQ ID NO: 27960 - RNA, 21 nt, Artificial Sequence
  RPE65 RNA guide
uguccaaagucacacacuagg

SEQ ID NO: 27961 - RNA, 21 nt, Artificial Sequence
  RPE65 RNA guide
uguccuacauaccauaaaaag

SEQ ID NO: 27962 - RNA, 21 nt, Artificial Sequence
  RPE65 RNA guide
ugucugaaauccccauacuca

SEQ ID NO: 27963 - RNA, 21 nt, Artificial Sequence
  RPE65 RNA guide
ugugacaucuuucuauauaca

SEQ ID NO: 27964 - RNA, 21 nt, Artificial Sequence
  RPE65 RNA guide
ugugacuuagcccgggguuug

SEQ ID NO: 27965 - RNA, 21 nt, Artificial Sequence
  RPE65 RNA guide
ugugacuuuggacaaauuacc

SEQ ID NO: 27966 - RNA, 21 nt, Artificial Sequence
  RPE65 RNA guide
ugugcuauuucaagggcuccu

SEQ ID NO: 27967 - RNA, 21 nt, Artificial Sequence
  RPE65 RNA guide
ugugugacuuagcccgggguu

SEQ ID NO: 27968 - RNA, 21 nt, Artificial Sequence
  RPE65 RNA guide
ugugugacuuuggacaaauua

SEQ ID NO: 27969 - RNA, 21 nt, Artificial Sequence
  RPE65 RNA guide
uguuuaggaaagacccuugaa

SEQ ID NO: 27970 - RNA, 21 nt, Artificial Sequence
  RPE65 RNA guide
uguuuuaaaaaagucucccag

SEQ ID NO: 27971 - RNA, 21 nt, Artificial Sequence
  RPE65 RNA guide
uuaaaaaagucucccagagau

SEQ ID NO: 27972 - RNA, 21 nt, Artificial Sequence
  RPE65 RNA guide
uuaaaacaccuucauggauuc

SEQ ID NO: 27973 - RNA, 21 nt, Artificial Sequence
  RPE65 RNA guide
uuaaagcaacuagcuagaauu

SEQ ID NO: 27974 - RNA, 21 nt, Artificial Sequence
  RPE65 RNA guide
uuaaucaaugccuucucuuca

SEQ ID NO: 27975 - RNA, 21 nt, Artificial Sequence
  RPE65 RNA guide
uuacuccauuauguuacugug

SEQ ID NO: 27976 - RNA, 21 nt, Artificial Sequence
  RPE65 RNA guide
uuagcccgggguuuggaagca

SEQ ID NO: 27977 - RNA, 21 nt, Artificial Sequence
  RPE65 RNA guide
uuaggaaagacccuugaauuu

SEQ ID NO: 27978 - RNA, 21 nt, Artificial Sequence
  RPE65 RNA guide
uuagguaauuuguccaaaguc

SEQ ID NO: 27979 - RNA, 21 nt, Artificial Sequence
  RPE65 RNA guide
uuauaauugagucuggucaga

SEQ ID NO: 27980 - RNA, 21 nt, Artificial Sequence
  RPE65 RNA guide
uuaucaugaauccaugaaggu

SEQ ID NO: 27981 - RNA, 21 nt, Artificial Sequence
  RPE65 RNA guide
uuaugggggguuugugugacu

SEQ ID NO: 27982 - RNA, 21 nt, Artificial Sequence
  RPE65 RNA guide
uuauuauaauugagucugguc

SEQ ID NO: 27983 - RNA, 21 nt, Artificial Sequence
  RPE65 RNA guide
uucaaagaguggaaucucuga

SEQ ID NO: 27984 - RNA, 21 nt, Artificial Sequence
  RPE65 RNA guide
uucaagggcuccugaagagaa

SEQ ID NO: 27985 - RNA, 21 nt, Artificial Sequence
  RPE65 RNA guide
uucagacagacuugggcucca

SEQ ID NO: 27986 - RNA, 21 nt, Artificial Sequence
  RPE65 RNA guide
uucaggagcccuugaaauagc

SEQ ID NO: 27987 - RNA, 21 nt, Artificial Sequence
  RPE65 RNA guide
uucagguccaaauuauggggg

SEQ ID NO: 27988 - RNA, 21 nt, Artificial Sequence
  RPE65 RNA guide
uucauggauucaugauaaaug

SEQ ID NO: 27989 - RNA, 21 nt, Artificial Sequence
  RPE65 RNA guide
uuccaaaccccgggcuaaguc

SEQ ID NO: 27990 - RNA, 21 nt, Artificial Sequence
  RPE65 RNA guide
uuccccaccaaaauucaaggg

SEQ ID NO: 27991 - RNA, 21 nt, Artificial Sequence
  RPE65 RNA guide
uuccuagugugugacuuugga

SEQ ID NO: 27992 - RNA, 21 nt, Artificial Sequence
  RPE65 RNA guide
uuccugcuuauguauuaaagc

SEQ ID NO: 27993 - RNA, 21 nt, Artificial Sequence
  RPE65 RNA guide
uuccuguauauagaaagaugu

SEQ ID NO: 27994 - RNA, 21 nt, Artificial Sequence
  RPE65 RNA guide
uucuauauacaggaaaagcua

SEQ ID NO: 27995 - RNA, 21 nt, Artificial Sequence
  RPE65 RNA guide
uucucuucaggagcccuugaa

SEQ ID NO: 27996 - RNA, 21 nt, Artificial Sequence
  RPE65 RNA guide
uugaguauggggauuucagac

SEQ ID NO: 27997 - RNA, 21 nt, Artificial Sequence
  RPE65 RNA guide
uugagucuggucagagauucc

SEQ ID NO: 27998 - RNA, 21 nt, Artificial Sequence
  RPE65 RNA guide
uugcccagucauuuccuagug

SEQ ID NO: 27999 - RNA, 21 nt, Artificial Sequence
  RPE65 RNA guide
uuggaagcagucuugaguaug

SEQ ID NO: 28000 - RNA, 21 nt, Artificial Sequence
  RPE65 RNA guide
uuggaccugaauucuagcuag

SEQ ID NO: 28001 - RNA, 21 nt, Artificial Sequence
  RPE65 RNA guide
uugggcuccacuccuugccca

SEQ ID NO: 28002 - RNA, 21 nt, Artificial Sequence
  RPE65 RNA guide
uugguggggaaauuuuuuccu

SEQ ID NO: 28003 - RNA, 21 nt, Artificial Sequence
  RPE65 RNA guide
uuguccaaagucacacacuag

SEQ ID NO: 28004 - RNA, 21 nt, Artificial Sequence
  RPE65 RNA guide
uugugacaucuuucuauauac

SEQ ID NO: 28005 - RNA, 21 nt, Artificial Sequence
  RPE65 RNA guide
uugugugacuuagcccggggu

SEQ ID NO: 28006 - RNA, 21 nt, Artificial Sequence
  RPE65 RNA guide
uuuaaaaaagucucccagaga

SEQ ID NO: 28007 - RNA, 21 nt, Artificial Sequence
  RPE65 RNA guide
uuuaaaacaccuucauggauu

SEQ ID NO: 28008 - RNA, 21 nt, Artificial Sequence
  RPE65 RNA guide
uuuacuccauuauguuacugu

SEQ ID NO: 28009 - RNA, 21 nt, Artificial Sequence
  RPE65 RNA guide
uuuaggaaagacccuugaauu

SEQ ID NO: 28010 - RNA, 21 nt, Artificial Sequence
  RPE65 RNA guide
uuuaucaugaauccaugaagg

SEQ ID NO: 28011 - RNA, 21 nt, Artificial Sequence
  RPE65 RNA guide
uuucaagggcuccugaagaga

SEQ ID NO: 28012 - RNA, 21 nt, Artificial Sequence
  RPE65 RNA guide
uuucagacagacuugggcucc

SEQ ID NO: 28013 - RNA, 21 nt, Artificial Sequence
  RPE65 RNA guide
uuuccccaccaaaauucaagg

SEQ ID NO: 28014 - RNA, 21 nt, Artificial Sequence
  RPE65 RNA guide
uuuccuagugugugacuuugg

SEQ ID NO: 28015 - RNA, 21 nt, Artificial Sequence
  RPE65 RNA guide
uuuccugcuuauguauuaaag

SEQ ID NO: 28016 - RNA, 21 nt, Artificial Sequence
  RPE65 RNA guide
uuuccuguauauagaaagaug

SEQ ID NO: 28017 - RNA, 21 nt, Artificial Sequence
  RPE65 RNA guide
uuucuauauacaggaaaagcu

SEQ ID NO: 28018 - RNA, 21 nt, Artificial Sequence
  RPE65 RNA guide
uuuggaagcagucuugaguau

SEQ ID NO: 28019 - RNA, 21 nt, Artificial Sequence
  RPE65 RNA guide
uuuggaccugaauucuagcua

SEQ ID NO: 28020 - RNA, 21 nt, Artificial Sequence
  RPE65 RNA guide
uuugguggggaaauuuuuucc

SEQ ID NO: 28021 - RNA, 21 nt, Artificial Sequence
  RPE65 RNA guide
uuuguccaaagucacacacua

SEQ ID NO: 28022 - RNA, 21 nt, Artificial Sequence
  RPE65 RNA guide
uuugugugacuuagcccgggg

SEQ ID NO: 28023 - RNA, 21 nt, Artificial Sequence
  RPE65 RNA guide
uuuuaaaaaagucucccagag

SEQ ID NO: 28024 - RNA, 21 nt, Artificial Sequence
  RPE65 RNA guide
uuuuacuccauuauguuacug

SEQ ID NO: 28025 - RNA, 21 nt, Artificial Sequence
  RPE65 RNA guide
uuuugguggggaaauuuuuuc

SEQ ID NO: 28026 - RNA, 22 nt, Artificial Sequence
  RPE65 RNA guide
aaaaaauuuccccaccaaaauu

SEQ ID NO: 28027 - RNA, 22 nt, Artificial Sequence
  RPE65 RNA guide
aaaaauuuccccaccaaaauuc

SEQ ID NO: 28028 - RNA, 22 nt, Artificial Sequence
  RPE65 RNA guide
aaaacaccuucauggauucaug

SEQ ID NO: 28029 - RNA, 22 nt, Artificial Sequence
  RPE65 RNA guide
aaaagaacuuugcaugguauua

SEQ ID NO: 28030 - RNA, 22 nt, Artificial Sequence
  RPE65 RNA guide
aaaagagauaauaccaugcaaa

SEQ ID NO: 28031 - RNA, 22 nt, Artificial Sequence
  RPE65 RNA guide
aaaaguuagguaauuuguccaa

SEQ ID NO: 28032 - RNA, 22 nt, Artificial Sequence
  RPE65 RNA guide
aaaauuuccccaccaaaauuca

SEQ ID NO: 28033 - RNA, 22 nt, Artificial Sequence
  RPE65 RNA guide
aaacaauuacuauguccuacau

SEQ ID NO: 28034 - RNA, 22 nt, Artificial Sequence
  RPE65 RNA guide
aaacaccuucauggauucauga

SEQ ID NO: 28035 - RNA, 22 nt, Artificial Sequence
  RPE65 RNA guide
aaaccccccauaauuuggaccu

SEQ ID NO: 28036 - RNA, 22 nt, Artificial Sequence
  RPE65 RNA guide
aaaccccgggcuaagucacaca

SEQ ID NO: 28037 - RNA, 22 nt, Artificial Sequence
  RPE65 RNA guide
aaagaacuuugcaugguauuau

SEQ ID NO: 28038 - RNA, 22 nt, Artificial Sequence
  RPE65 RNA guide
aaagacccuugaauuuuggugg

SEQ ID NO: 28039 - RNA, 22 nt, Artificial Sequence
  RPE65 RNA guide
aaagagauaauaccaugcaaag

SEQ ID NO: 28040 - RNA, 22 nt, Artificial Sequence
  RPE65 RNA guide
aaagaguggaaucucugaccag

SEQ ID NO: 28041 - RNA, 22 nt, Artificial Sequence
  RPE65 RNA guide
aaagaugucacaauagcuuuua

SEQ ID NO: 28042 - RNA, 22 nt, Artificial Sequence
  RPE65 RNA guide
aaagcaacuagcuagaauucag

SEQ ID NO: 28043 - RNA, 22 nt, Artificial Sequence
  RPE65 RNA guide
aaagucacacacuaggaaauga

SEQ ID NO: 28044 - RNA, 22 nt, Artificial Sequence
  RPE65 RNA guide
aaaguuagguaauuuguccaaa

SEQ ID NO: 28045 - RNA, 22 nt, Artificial Sequence
  RPE65 RNA guide
aaaguucuuuuuaugguaugua

SEQ ID NO: 28046 - RNA, 22 nt, Artificial Sequence
  RPE65 RNA guide
aaauccccauacucaagacugc

SEQ ID NO: 28047 - RNA, 22 nt, Artificial Sequence
  RPE65 RNA guide
aaaucucacaguaacauaaugg

SEQ ID NO: 28048 - RNA, 22 nt, Artificial Sequence
  RPE65 RNA guide
aaaugacugggcaaggagugga

SEQ ID NO: 28049 - RNA, 22 nt, Artificial Sequence
  RPE65 RNA guide
aaaugugcuauuucaagggcuc

SEQ ID NO: 28050 - RNA, 22 nt, Artificial Sequence
  RPE65 RNA guide
aaauuaugggggguuuguguga

SEQ ID NO: 28051 - RNA, 22 nt, Artificial Sequence
  RPE65 RNA guide
aaauuuccccaccaaaauucaa

SEQ ID NO: 28052 - RNA, 22 nt, Artificial Sequence
  RPE65 RNA guide
aacaauuacuauguccuacaua

SEQ ID NO: 28053 - RNA, 22 nt, Artificial Sequence
  RPE65 RNA guide
aacaccuucauggauucaugau

SEQ ID NO: 28054 - RNA, 22 nt, Artificial Sequence
  RPE65 RNA guide
aacauaauggaguaaaagcuau

SEQ ID NO: 28055 - RNA, 22 nt, Artificial Sequence
  RPE65 RNA guide
aaccccccauaauuuggaccug

SEQ ID NO: 28056 - RNA, 22 nt, Artificial Sequence
  RPE65 RNA guide
aaccccgggcuaagucacacaa

SEQ ID NO: 28057 - RNA, 22 nt, Artificial Sequence
  RPE65 RNA guide
aacuagcuagaauucaggucca

SEQ ID NO: 28058 - RNA, 22 nt, Artificial Sequence
  RPE65 RNA guide
aacuucaaagaguggaaucucu

SEQ ID NO: 28059 - RNA, 22 nt, Artificial Sequence
  RPE65 RNA guide
aacuuuuuaagucuagcuuuuc

SEQ ID NO: 28060 - RNA, 22 nt, Artificial Sequence
  RPE65 RNA guide
aagaacuuugcaugguauuauc

SEQ ID NO: 28061 - RNA, 22 nt, Artificial Sequence
  RPE65 RNA guide
aagacccuugaauuuugguggg

SEQ ID NO: 28062 - RNA, 22 nt, Artificial Sequence
  RPE65 RNA guide
aagacugcuuccaaaccccggg

SEQ ID NO: 28063 - RNA, 22 nt, Artificial Sequence
  RPE65 RNA guide
aagagauaauaccaugcaaagu

SEQ ID NO: 28064 - RNA, 22 nt, Artificial Sequence
  RPE65 RNA guide
aagaguggaaucucugaccaga

SEQ ID NO: 28065 - RNA, 22 nt, Artificial Sequence
  RPE65 RNA guide
aagaugucacaauagcuuuuac

SEQ ID NO: 28066 - RNA, 22 nt, Artificial Sequence
  RPE65 RNA guide
aagcaacuagcuagaauucagg

SEQ ID NO: 28067 - RNA, 22 nt, Artificial Sequence
  RPE65 RNA guide
aagcaggaaaaaauuuccccac

SEQ ID NO: 28068 - RNA, 22 nt, Artificial Sequence
  RPE65 RNA guide
aagcagucuugaguauggggau

SEQ ID NO: 28069 - RNA, 22 nt, Artificial Sequence
  RPE65 RNA guide
aaggaguggagcccaagucugu

SEQ ID NO: 28070 - RNA, 22 nt, Artificial Sequence
  RPE65 RNA guide
aagggcuccugaagagaaggca

SEQ ID NO: 28071 - RNA, 22 nt, Artificial Sequence
  RPE65 RNA guide
aagguguuuuaaaaaagucucc

SEQ ID NO: 28072 - RNA, 22 nt, Artificial Sequence
  RPE65 RNA guide
aaguaucucugggagacuuuuu

SEQ ID NO: 28073 - RNA, 22 nt, Artificial Sequence
  RPE65 RNA guide
aagucacacaaaccccccauaa

SEQ ID NO: 28074 - RNA, 22 nt, Artificial Sequence
  RPE65 RNA guide
aagucacacacuaggaaaugac

SEQ ID NO: 28075 - RNA, 22 nt, Artificial Sequence
  RPE65 RNA guide
aagucuagcuuuuccuguauau

SEQ ID NO: 28076 - RNA, 22 nt, Artificial Sequence
  RPE65 RNA guide
aagucugucugaaauccccaua

SEQ ID NO: 28077 - RNA, 22 nt, Artificial Sequence
  RPE65 RNA guide
aaguuagguaauuuguccaaag

SEQ ID NO: 28078 - RNA, 22 nt, Artificial Sequence
  RPE65 RNA guide
aaguucuuuuuaugguauguag

SEQ ID NO: 28079 - RNA, 22 nt, Artificial Sequence
  RPE65 RNA guide
aauacauaagcaggaaaaaauu

SEQ ID NO: 28080 - RNA, 22 nt, Artificial Sequence
  RPE65 RNA guide
aauaccaugcaaaguucuuuuu

SEQ ID NO: 28081 - RNA, 22 nt, Artificial Sequence
  RPE65 RNA guide
aauagcacauuuaucaugaauc

SEQ ID NO: 28082 - RNA, 22 nt, Artificial Sequence
  RPE65 RNA guide
aaucaaugccuucucuucagga

SEQ ID NO: 28083 - RNA, 22 nt, Artificial Sequence
  RPE65 RNA guide
aauccccauacucaagacugcu

SEQ ID NO: 28084 - RNA, 22 nt, Artificial Sequence
  RPE65 RNA guide
aaucucacaguaacauaaugga

SEQ ID NO: 28085 - RNA, 22 nt, Artificial Sequence
  RPE65 RNA guide
aaucucugaccagacucaauua

SEQ ID NO: 28086 - RNA, 22 nt, Artificial Sequence
  RPE65 RNA guide
aaugacugggcaaggaguggag

SEQ ID NO: 28087 - RNA, 22 nt, Artificial Sequence
  RPE65 RNA guide
aaugccuucucuucaggagccc

SEQ ID NO: 28088 - RNA, 22 nt, Artificial Sequence
  RPE65 RNA guide
aauggaguaaaagcuauuguga

SEQ ID NO: 28089 - RNA, 22 nt, Artificial Sequence
  RPE65 RNA guide
aaugugcuauuucaagggcucc

SEQ ID NO: 28090 - RNA, 22 nt, Artificial Sequence
  RPE65 RNA guide
aauuaugggggguuugugugac

SEQ ID NO: 28091 - RNA, 22 nt, Artificial Sequence
  RPE65 RNA guide
aauucagguccaaauuaugggg

SEQ ID NO: 28092 - RNA, 22 nt, Artificial Sequence
  RPE65 RNA guide
aauugagucuggucagagauuc

SEQ ID NO: 28093 - RNA, 22 nt, Artificial Sequence
  RPE65 RNA guide
aauuuccccaccaaaauucaag

SEQ ID NO: 28094 - RNA, 22 nt, Artificial Sequence
  RPE65 RNA guide
aauuuggaccugaauucuagcu

SEQ ID NO: 28095 - RNA, 22 nt, Artificial Sequence
  RPE65 RNA guide
aauuuguccaaagucacacacu

SEQ ID NO: 28096 - RNA, 22 nt, Artificial Sequence
  RPE65 RNA guide
aauuuugguggggaaauuuuuu

SEQ ID NO: 28097 - RNA, 22 nt, Artificial Sequence
  RPE65 RNA guide
acaaaccccccauaauuuggac

SEQ ID NO: 28098 - RNA, 22 nt, Artificial Sequence
  RPE65 RNA guide
acaauuacuauguccuacauac

SEQ ID NO: 28099 - RNA, 22 nt, Artificial Sequence
  RPE65 RNA guide
acacaaaccccccauaauuugg

SEQ ID NO: 28100 - RNA, 22 nt, Artificial Sequence
  RPE65 RNA guide
acacacuaggaaaugacugggc

SEQ ID NO: 28101 - RNA, 22 nt, Artificial Sequence
  RPE65 RNA guide
acaccuucauggauucaugaua

SEQ ID NO: 28102 - RNA, 22 nt, Artificial Sequence
  RPE65 RNA guide
acacuaggaaaugacugggcaa

SEQ ID NO: 28103 - RNA, 22 nt, Artificial Sequence
  RPE65 RNA guide
acagacuugggcuccacuccuu

SEQ ID NO: 28104 - RNA, 22 nt, Artificial Sequence
  RPE65 RNA guide
acaggaaaagcuagacuuaaaa

SEQ ID NO: 28105 - RNA, 22 nt, Artificial Sequence
  RPE65 RNA guide
acaguaacauaauggaguaaaa

SEQ ID NO: 28106 - RNA, 22 nt, Artificial Sequence
  RPE65 RNA guide
acauaagcaggaaaaaauuucc

SEQ ID NO: 28107 - RNA, 22 nt, Artificial Sequence
  RPE65 RNA guide
acauaauggaguaaaagcuauu

SEQ ID NO: 28108 - RNA, 22 nt, Artificial Sequence
  RPE65 RNA guide
acauaccauaaaaagaacuuug

SEQ ID NO: 28109 - RNA, 22 nt, Artificial Sequence
  RPE65 RNA guide
acaucuuucuauauacaggaaa

SEQ ID NO: 28110 - RNA, 22 nt, Artificial Sequence
  RPE65 RNA guide
acauuuaucaugaauccaugaa

SEQ ID NO: 28111 - RNA, 22 nt, Artificial Sequence
  RPE65 RNA guide
accaaaauucaagggucuuucc

SEQ ID NO: 28112 - RNA, 22 nt, Artificial Sequence
  RPE65 RNA guide
accauaaaaagaacuuugcaug

SEQ ID NO: 28113 - RNA, 22 nt, Artificial Sequence
  RPE65 RNA guide
accaugcaaaguucuuuuuaug

SEQ ID NO: 28114 - RNA, 22 nt, Artificial Sequence
  RPE65 RNA guide
accccccauaauuuggaccuga

SEQ ID NO: 28115 - RNA, 22 nt, Artificial Sequence
  RPE65 RNA guide
accccgggcuaagucacacaaa

SEQ ID NO: 28116 - RNA, 22 nt, Artificial Sequence
  RPE65 RNA guide
acccuugaauuuugguggggaa

SEQ ID NO: 28117 - RNA, 22 nt, Artificial Sequence
  RPE65 RNA guide
accuaacuuuuuaagucuagcu

SEQ ID NO: 28118 - RNA, 22 nt, Artificial Sequence
  RPE65 RNA guide
accugaauucuagcuaguugcu

SEQ ID NO: 28119 - RNA, 22 nt, Artificial Sequence
  RPE65 RNA guide
accuucauggauucaugauaaa

SEQ ID NO: 28120 - RNA, 22 nt, Artificial Sequence
  RPE65 RNA guide
acuagcuagaauucagguccaa

SEQ ID NO: 28121 - RNA, 22 nt, Artificial Sequence
  RPE65 RNA guide
acuaggaaaugacugggcaagg

SEQ ID NO: 28122 - RNA, 22 nt, Artificial Sequence
  RPE65 RNA guide
acuauguccuacauaccauaaa

SEQ ID NO: 28123 - RNA, 22 nt, Artificial Sequence
  RPE65 RNA guide
acucaagacugcuuccaaaccc

SEQ ID NO: 28124 - RNA, 22 nt, Artificial Sequence
  RPE65 RNA guide
acuccauuauguuacugugaga

SEQ ID NO: 28125 - RNA, 22 nt, Artificial Sequence
  RPE65 RNA guide
acuccuugcccagucauuuccu

SEQ ID NO: 28126 - RNA, 22 nt, Artificial Sequence
  RPE65 RNA guide
acugcuuccaaaccccgggcua

SEQ ID NO: 28127 - RNA, 22 nt, Artificial Sequence
  RPE65 RNA guide
acugggcaaggaguggagccca

SEQ ID NO: 28128 - RNA, 22 nt, Artificial Sequence
  RPE65 RNA guide
acuuagcccgggguuuggaagc

SEQ ID NO: 28129 - RNA, 22 nt, Artificial Sequence
  RPE65 RNA guide
acuucaaagaguggaaucucug

SEQ ID NO: 28130 - RNA, 22 nt, Artificial Sequence
  RPE65 RNA guide
acuugggcuccacuccuugccc

SEQ ID NO: 28131 - RNA, 22 nt, Artificial Sequence
  RPE65 RNA guide
acuuuuuaagucuagcuuuucc

SEQ ID NO: 28132 - RNA, 22 nt, Artificial Sequence
  RPE65 RNA guide
agaaagaugucacaauagcuuu

SEQ ID NO: 28133 - RNA, 22 nt, Artificial Sequence
  RPE65 RNA guide
agaacuuugcaugguauuaucu

SEQ ID NO: 28134 - RNA, 22 nt, Artificial Sequence
  RPE65 RNA guide
agaauucagguccaaauuaugg

SEQ ID NO: 28135 - RNA, 22 nt, Artificial Sequence
  RPE65 RNA guide
agacagacuugggcuccacucc

SEQ ID NO: 28136 - RNA, 22 nt, Artificial Sequence
  RPE65 RNA guide
agacccuugaauuuuggugggg

SEQ ID NO: 28137 - RNA, 22 nt, Artificial Sequence
  RPE65 RNA guide
agacugcuuccaaaccccgggc

SEQ ID NO: 28138 - RNA, 22 nt, Artificial Sequence
  RPE65 RNA guide
agacuugggcuccacuccuugc

SEQ ID NO: 28139 - RNA, 22 nt, Artificial Sequence
  RPE65 RNA guide
agacuuuuuuaaaacaccuuca

SEQ ID NO: 28140 - RNA, 22 nt, Artificial Sequence
  RPE65 RNA guide
agagauaauaccaugcaaaguu

SEQ ID NO: 28141 - RNA, 22 nt, Artificial Sequence
  RPE65 RNA guide
agaguggaaucucugaccagac

SEQ ID NO: 28142 - RNA, 22 nt, Artificial Sequence
  RPE65 RNA guide
agaugucacaauagcuuuuacu

SEQ ID NO: 28143 - RNA, 22 nt, Artificial Sequence
  RPE65 RNA guide
agcaacuagcuagaauucaggu

SEQ ID NO: 28144 - RNA, 22 nt, Artificial Sequence
  RPE65 RNA guide
agcacauuuaucaugaauccau

SEQ ID NO: 28145 - RNA, 22 nt, Artificial Sequence
  RPE65 RNA guide
agcaggaaaaaauuuccccacc

SEQ ID NO: 28146 - RNA, 22 nt, Artificial Sequence
  RPE65 RNA guide
agcagucuugaguauggggauu

SEQ ID NO: 28147 - RNA, 22 nt, Artificial Sequence
  RPE65 RNA guide
agcccaagucugucugaaaucc

SEQ ID NO: 28148 - RNA, 22 nt, Artificial Sequence
  RPE65 RNA guide
agcccgggguuuggaagcaguc

SEQ ID NO: 28149 - RNA, 22 nt, Artificial Sequence
  RPE65 RNA guide
agcccuugaaauagcacauuua

SEQ ID NO: 28150 - RNA, 22 nt, Artificial Sequence
  RPE65 RNA guide
agcuagaauucagguccaaauu

SEQ ID NO: 28151 - RNA, 22 nt, Artificial Sequence
  RPE65 RNA guide
agcuaguugcuuuaauacauaa

SEQ ID NO: 28152 - RNA, 22 nt, Artificial Sequence
  RPE65 RNA guide
agcuauugugacaucuuucuau

SEQ ID NO: 28153 - RNA, 22 nt, Artificial Sequence
  RPE65 RNA guide
agcuuuuacuccauuauguuac

SEQ ID NO: 28154 - RNA, 22 nt, Artificial Sequence
  RPE65 RNA guide
agcuuuuccuguauauagaaag

SEQ ID NO: 28155 - RNA, 22 nt, Artificial Sequence
  RPE65 RNA guide
aggaaaaaauuuccccaccaaa

SEQ ID NO: 28156 - RNA, 22 nt, Artificial Sequence
  RPE65 RNA guide
aggaaaagcuagacuuaaaaag

SEQ ID NO: 28157 - RNA, 22 nt, Artificial Sequence
  RPE65 RNA guide
aggaaagacccuugaauuuugg

SEQ ID NO: 28158 - RNA, 22 nt, Artificial Sequence
  RPE65 RNA guide
aggaaaugacugggcaaggagu

SEQ ID NO: 28159 - RNA, 22 nt, Artificial Sequence
  RPE65 RNA guide
aggagcccuugaaauagcacau

SEQ ID NO: 28160 - RNA, 22 nt, Artificial Sequence
  RPE65 RNA guide
aggaguggagcccaagucuguc

SEQ ID NO: 28161 - RNA, 22 nt, Artificial Sequence
  RPE65 RNA guide
agggcuccugaagagaaggcau

SEQ ID NO: 28162 - RNA, 22 nt, Artificial Sequence
  RPE65 RNA guide
agguaauuuguccaaagucaca

SEQ ID NO: 28163 - RNA, 22 nt, Artificial Sequence
  RPE65 RNA guide
aggucauuaaucaaugccuucu

SEQ ID NO: 28164 - RNA, 22 nt, Artificial Sequence
  RPE65 RNA guide
agguccaaauuaugggggguuu

SEQ ID NO: 28165 - RNA, 22 nt, Artificial Sequence
  RPE65 RNA guide
agguguuuuaaaaaagucuccc

SEQ ID NO: 28166 - RNA, 22 nt, Artificial Sequence
  RPE65 RNA guide
aguaaaagcuauugugacaucu

SEQ ID NO: 28167 - RNA, 22 nt, Artificial Sequence
  RPE65 RNA guide
aguaucucugggagacuuuuuu

SEQ ID NO: 28168 - RNA, 22 nt, Artificial Sequence
  RPE65 RNA guide
aguauggggauuucagacagac

SEQ ID NO: 28169 - RNA, 22 nt, Artificial Sequence
  RPE65 RNA guide
agucacacaaaccccccauaau

SEQ ID NO: 28170 - RNA, 22 nt, Artificial Sequence
  RPE65 RNA guide
agucacacacuaggaaaugacu

SEQ ID NO: 28171 - RNA, 22 nt, Artificial Sequence
  RPE65 RNA guide
agucauuuccuagugugugacu

SEQ ID NO: 28172 - RNA, 22 nt, Artificial Sequence
  RPE65 RNA guide
agucuagcuuuuccuguauaua

SEQ ID NO: 28173 - RNA, 22 nt, Artificial Sequence
  RPE65 RNA guide
agucuggucagagauuccacuc

SEQ ID NO: 28174 - RNA, 22 nt, Artificial Sequence
  RPE65 RNA guide
agucugucugaaauccccauac

SEQ ID NO: 28175 - RNA, 22 nt, Artificial Sequence
  RPE65 RNA guide
agucuugaguauggggauuuca

SEQ ID NO: 28176 - RNA, 22 nt, Artificial Sequence
  RPE65 RNA guide
aguggaaucucugaccagacuc

SEQ ID NO: 28177 - RNA, 22 nt, Artificial Sequence
  RPE65 RNA guide
aguggagcccaagucugucuga

SEQ ID NO: 28178 - RNA, 22 nt, Artificial Sequence
  RPE65 RNA guide
agugugugacuuuggacaaauu

SEQ ID NO: 28179 - RNA, 22 nt, Artificial Sequence
  RPE65 RNA guide
aguuagguaauuuguccaaagu

SEQ ID NO: 28180 - RNA, 22 nt, Artificial Sequence
  RPE65 RNA guide
aguucuuuuuaugguauguagg

SEQ ID NO: 28181 - RNA, 22 nt, Artificial Sequence
  RPE65 RNA guide
aguugcuuuaauacauaagcag

SEQ ID NO: 28182 - RNA, 22 nt, Artificial Sequence
  RPE65 RNA guide
auaaaugugcuauuucaagggc

SEQ ID NO: 28183 - RNA, 22 nt, Artificial Sequence
  RPE65 RNA guide
auaagcaggaaaaaauuucccc

SEQ ID NO: 28184 - RNA, 22 nt, Artificial Sequence
  RPE65 RNA guide
auaauggaguaaaagcuauugu

SEQ ID NO: 28185 - RNA, 22 nt, Artificial Sequence
  RPE65 RNA guide
auaauugagucuggucagagau

SEQ ID NO: 28186 - RNA, 22 nt, Artificial Sequence
  RPE65 RNA guide
auaauuuggaccugaauucuag

SEQ ID NO: 28187 - RNA, 22 nt, Artificial Sequence
  RPE65 RNA guide
auacaggaaaagcuagacuuaa

SEQ ID NO: 28188 - RNA, 22 nt, Artificial Sequence
  RPE65 RNA guide
auacauaagcaggaaaaaauuu

SEQ ID NO: 28189 - RNA, 22 nt, Artificial Sequence
  RPE65 RNA guide
auaccauaaaaagaacuuugca

SEQ ID NO: 28190 - RNA, 22 nt, Artificial Sequence
  RPE65 RNA guide
auaccaugcaaaguucuuuuua

SEQ ID NO: 28191 - RNA, 22 nt, Artificial Sequence
  RPE65 RNA guide
auacucaagacugcuuccaaac

SEQ ID NO: 28192 - RNA, 22 nt, Artificial Sequence
  RPE65 RNA guide
auagcacauuuaucaugaaucc

SEQ ID NO: 28193 - RNA, 22 nt, Artificial Sequence
  RPE65 RNA guide
auagcuuuuacuccauuauguu

SEQ ID NO: 28194 - RNA, 22 nt, Artificial Sequence
  RPE65 RNA guide
aucaaugccuucucuucaggag

SEQ ID NO: 28195 - RNA, 22 nt, Artificial Sequence
  RPE65 RNA guide
aucaugaauccaugaagguguu

SEQ ID NO: 28196 - RNA, 22 nt, Artificial Sequence
  RPE65 RNA guide
auccaugaagguguuuuaaaaa

SEQ ID NO: 28197 - RNA, 22 nt, Artificial Sequence
  RPE65 RNA guide
auccccauacucaagacugcuu

SEQ ID NO: 28198 - RNA, 22 nt, Artificial Sequence
  RPE65 RNA guide
aucucacaguaacauaauggag

SEQ ID NO: 28199 - RNA, 22 nt, Artificial Sequence
  RPE65 RNA guide
aucucugaccagacucaauuau

SEQ ID NO: 28200 - RNA, 22 nt, Artificial Sequence
  RPE65 RNA guide
aucucugggagacuuuuuuaaa

SEQ ID NO: 28201 - RNA, 22 nt, Artificial Sequence
  RPE65 RNA guide
aucuuucuauauacaggaaaag

SEQ ID NO: 28202 - RNA, 22 nt, Artificial Sequence
  RPE65 RNA guide
augaagguguuuuaaaaaaguc

SEQ ID NO: 28203 - RNA, 22 nt, Artificial Sequence
  RPE65 RNA guide
augacugggcaaggaguggagc

SEQ ID NO: 28204 - RNA, 22 nt, Artificial Sequence
  RPE65 RNA guide
augauaaaugugcuauuucaag

SEQ ID NO: 28205 - RNA, 22 nt, Artificial Sequence
  RPE65 RNA guide
augccuucucuucaggagcccu

SEQ ID NO: 28206 - RNA, 22 nt, Artificial Sequence
  RPE65 RNA guide
auggaguaaaagcuauugugac

SEQ ID NO: 28207 - RNA, 22 nt, Artificial Sequence
  RPE65 RNA guide
auggggauuucagacagacuug

SEQ ID NO: 28208 - RNA, 22 nt, Artificial Sequence
  RPE65 RNA guide
augggggguuugugugacuuag

SEQ ID NO: 28209 - RNA, 22 nt, Artificial Sequence
  RPE65 RNA guide
augguauguaggacauaguaau

SEQ ID NO: 28210 - RNA, 22 nt, Artificial Sequence
  RPE65 RNA guide
augucacaauagcuuuuacucc

SEQ ID NO: 28211 - RNA, 22 nt, Artificial Sequence
  RPE65 RNA guide
auguccuacauaccauaaaaag

SEQ ID NO: 28212 - RNA, 22 nt, Artificial Sequence
  RPE65 RNA guide
augugcuauuucaagggcuccu

SEQ ID NO: 28213 - RNA, 22 nt, Artificial Sequence
  RPE65 RNA guide
auuaaagcaacuagcuagaauu

SEQ ID NO: 28214 - RNA, 22 nt, Artificial Sequence
  RPE65 RNA guide
auuaaucaaugccuucucuuca

SEQ ID NO: 28215 - RNA, 22 nt, Artificial Sequence
  RPE65 RNA guide
auuauaauugagucuggucaga

SEQ ID NO: 28216 - RNA, 22 nt, Artificial Sequence
  RPE65 RNA guide
auuaugggggguuugugugacu

SEQ ID NO: 28217 - RNA, 22 nt, Artificial Sequence
  RPE65 RNA guide
auuauuauaauugagucugguc

SEQ ID NO: 28218 - RNA, 22 nt, Artificial Sequence
  RPE65 RNA guide
auucagguccaaauuauggggg

SEQ ID NO: 28219 - RNA, 22 nt, Artificial Sequence
  RPE65 RNA guide
auugagucuggucagagauucc

SEQ ID NO: 28220 - RNA, 22 nt, Artificial Sequence
  RPE65 RNA guide
auugugacaucuuucuauauac

SEQ ID NO: 28221 - RNA, 22 nt, Artificial Sequence
  RPE65 RNA guide
auuuaucaugaauccaugaagg

SEQ ID NO: 28222 - RNA, 22 nt, Artificial Sequence
  RPE65 RNA guide
auuucaagggcuccugaagaga

SEQ ID NO: 28223 - RNA, 22 nt, Artificial Sequence
  RPE65 RNA guide
auuucagacagacuugggcucc

SEQ ID NO: 28224 - RNA, 22 nt, Artificial Sequence
  RPE65 RNA guide
auuuccccaccaaaauucaagg

SEQ ID NO: 28225 - RNA, 22 nt, Artificial Sequence
  RPE65 RNA guide
auuuccuagugugugacuuugg

SEQ ID NO: 28226 - RNA, 22 nt, Artificial Sequence
  RPE65 RNA guide
auuuggaccugaauucuagcua

SEQ ID NO: 28227 - RNA, 22 nt, Artificial Sequence
  RPE65 RNA guide
auuuguccaaagucacacacua

SEQ ID NO: 28228 - RNA, 22 nt, Artificial Sequence
  RPE65 RNA guide
auuuugguggggaaauuuuuuc

SEQ ID NO: 28229 - RNA, 22 nt, Artificial Sequence
  RPE65 RNA guide
caaaccccccauaauuuggacc

SEQ ID NO: 28230 - RNA, 22 nt, Artificial Sequence
  RPE65 RNA guide
caaaccccgggcuaagucacac

SEQ ID NO: 28231 - RNA, 22 nt, Artificial Sequence
  RPE65 RNA guide
caaagaguggaaucucugacca

SEQ ID NO: 28232 - RNA, 22 nt, Artificial Sequence
  RPE65 RNA guide
caaagucacacacuaggaaaug

SEQ ID NO: 28233 - RNA, 22 nt, Artificial Sequence
  RPE65 RNA guide
caaaguucuuuuuaugguaugu

SEQ ID NO: 28234 - RNA, 22 nt, Artificial Sequence
  RPE65 RNA guide
caaauuaugggggguuugugug

SEQ ID NO: 28235 - RNA, 22 nt, Artificial Sequence
  RPE65 RNA guide
caacuagcuagaauucaggucc

SEQ ID NO: 28236 - RNA, 22 nt, Artificial Sequence
  RPE65 RNA guide
caagacugcuuccaaaccccgg

SEQ ID NO: 28237 - RNA, 22 nt, Artificial Sequence
  RPE65 RNA guide
caaggaguggagcccaagucug

SEQ ID NO: 28238 - RNA, 22 nt, Artificial Sequence
  RPE65 RNA guide
caagggcuccugaagagaaggc

SEQ ID NO: 28239 - RNA, 22 nt, Artificial Sequence
  RPE65 RNA guide
caagucugucugaaauccccau

SEQ ID NO: 28240 - RNA, 22 nt, Artificial Sequence
  RPE65 RNA guide
caauagcuuuuacuccauuaug

SEQ ID NO: 28241 - RNA, 22 nt, Artificial Sequence
  RPE65 RNA guide
caaugccuucucuucaggagcc

SEQ ID NO: 28242 - RNA, 22 nt, Artificial Sequence
  RPE65 RNA guide
caauuacuauguccuacauacc

SEQ ID NO: 28243 - RNA, 22 nt, Artificial Sequence
  RPE65 RNA guide
cacaaaccccccauaauuugga

SEQ ID NO: 28244 - RNA, 22 nt, Artificial Sequence
  RPE65 RNA guide
cacaauagcuuuuacuccauua

SEQ ID NO: 28245 - RNA, 22 nt, Artificial Sequence
  RPE65 RNA guide
cacacaaaccccccauaauuug

SEQ ID NO: 28246 - RNA, 22 nt, Artificial Sequence
  RPE65 RNA guide
cacacacuaggaaaugacuggg

SEQ ID NO: 28247 - RNA, 22 nt, Artificial Sequence
  RPE65 RNA guide
cacacuaggaaaugacugggca

SEQ ID NO: 28248 - RNA, 22 nt, Artificial Sequence
  RPE65 RNA guide
cacaguaacauaauggaguaaa

SEQ ID NO: 28249 - RNA, 22 nt, Artificial Sequence
  RPE65 RNA guide
cacauuuaucaugaauccauga

SEQ ID NO: 28250 - RNA, 22 nt, Artificial Sequence
  RPE65 RNA guide
caccaaaauucaagggucuuuc

SEQ ID NO: 28251 - RNA, 22 nt, Artificial Sequence
  RPE65 RNA guide
caccuucauggauucaugauaa

SEQ ID NO: 28252 - RNA, 22 nt, Artificial Sequence
  RPE65 RNA guide
cacuaggaaaugacugggcaag

SEQ ID NO: 28253 - RNA, 22 nt, Artificial Sequence
  RPE65 RNA guide
cacuccuugcccagucauuucc

SEQ ID NO: 28254 - RNA, 22 nt, Artificial Sequence
  RPE65 RNA guide
cagacagacuugggcuccacuc

SEQ ID NO: 28255 - RNA, 22 nt, Artificial Sequence
  RPE65 RNA guide
cagacuugggcuccacuccuug

SEQ ID NO: 28256 - RNA, 22 nt, Artificial Sequence
  RPE65 RNA guide
caggaaaaaauuuccccaccaa

SEQ ID NO: 28257 - RNA, 22 nt, Artificial Sequence
  RPE65 RNA guide
caggaaaagcuagacuuaaaaa

SEQ ID NO: 28258 - RNA, 22 nt, Artificial Sequence
  RPE65 RNA guide
caggagcccuugaaauagcaca

SEQ ID NO: 28259 - RNA, 22 nt, Artificial Sequence
  RPE65 RNA guide
cagguccaaauuaugggggguu

SEQ ID NO: 28260 - RNA, 22 nt, Artificial Sequence
  RPE65 RNA guide
caguaacauaauggaguaaaag

SEQ ID NO: 28261 - RNA, 22 nt, Artificial Sequence
  RPE65 RNA guide
cagucauuuccuagugugugac

SEQ ID NO: 28262 - RNA, 22 nt, Artificial Sequence
  RPE65 RNA guide
cagucuugaguauggggauuuc

SEQ ID NO: 28263 - RNA, 22 nt, Artificial Sequence
  RPE65 RNA guide
cauaagcaggaaaaaauuuccc

SEQ ID NO: 28264 - RNA, 22 nt, Artificial Sequence
  RPE65 RNA guide
cauaauggaguaaaagcuauug

SEQ ID NO: 28265 - RNA, 22 nt, Artificial Sequence
  RPE65 RNA guide
cauaauuuggaccugaauucua

SEQ ID NO: 28266 - RNA, 22 nt, Artificial Sequence
  RPE65 RNA guide
cauaccauaaaaagaacuuugc

SEQ ID NO: 28267 - RNA, 22 nt, Artificial Sequence
  RPE65 RNA guide
cauacucaagacugcuuccaaa

SEQ ID NO: 28268 - RNA, 22 nt, Artificial Sequence
  RPE65 RNA guide
caucuuucuauauacaggaaaa

SEQ ID NO: 28269 - RNA, 22 nt, Artificial Sequence
  RPE65 RNA guide
caugaagguguuuuaaaaaagu

SEQ ID NO: 28270 - RNA, 22 nt, Artificial Sequence
  RPE65 RNA guide
caugaauccaugaagguguuuu

SEQ ID NO: 28271 - RNA, 22 nt, Artificial Sequence
  RPE65 RNA guide
caugauaaaugugcuauuucaa

SEQ ID NO: 28272 - RNA, 22 nt, Artificial Sequence
  RPE65 RNA guide
caugcaaaguucuuuuuauggu

SEQ ID NO: 28273 - RNA, 22 nt, Artificial Sequence
  RPE65 RNA guide
cauggauucaugauaaaugugc

SEQ ID NO: 28274 - RNA, 22 nt, Artificial Sequence
  RPE65 RNA guide
cauuaaucaaugccuucucuuc

SEQ ID NO: 28275 - RNA, 22 nt, Artificial Sequence
  RPE65 RNA guide
cauuuaucaugaauccaugaag

SEQ ID NO: 28276 - RNA, 22 nt, Artificial Sequence
  RPE65 RNA guide
cauuuccuagugugugacuuug

SEQ ID NO: 28277 - RNA, 22 nt, Artificial Sequence
  RPE65 RNA guide
ccaaaauucaagggucuuuccu

SEQ ID NO: 28278 - RNA, 22 nt, Artificial Sequence
  RPE65 RNA guide
ccaaaccccgggcuaagucaca

SEQ ID NO: 28279 - RNA, 22 nt, Artificial Sequence
  RPE65 RNA guide
ccaaagucacacacuaggaaau

SEQ ID NO: 28280 - RNA, 22 nt, Artificial Sequence
  RPE65 RNA guide
ccaaauuaugggggguuugugu

SEQ ID NO: 28281 - RNA, 22 nt, Artificial Sequence
  RPE65 RNA guide
ccaagucugucugaaaucccca

SEQ ID NO: 28282 - RNA, 22 nt, Artificial Sequence
  RPE65 RNA guide
ccaccaaaauucaagggucuuu

SEQ ID NO: 28283 - RNA, 22 nt, Artificial Sequence
  RPE65 RNA guide
ccacuccuugcccagucauuuc

SEQ ID NO: 28284 - RNA, 22 nt, Artificial Sequence
  RPE65 RNA guide
ccagucauuuccuaguguguga

SEQ ID NO: 28285 - RNA, 22 nt, Artificial Sequence
  RPE65 RNA guide
ccauaaaaagaacuuugcaugg

SEQ ID NO: 28286 - RNA, 22 nt, Artificial Sequence
  RPE65 RNA guide
ccauaauuuggaccugaauucu

SEQ ID NO: 28287 - RNA, 22 nt, Artificial Sequence
  RPE65 RNA guide
ccauacucaagacugcuuccaa

SEQ ID NO: 28288 - RNA, 22 nt, Artificial Sequence
  RPE65 RNA guide
ccaugaagguguuuuaaaaaag

SEQ ID NO: 28289 - RNA, 22 nt, Artificial Sequence
  RPE65 RNA guide
ccaugcaaaguucuuuuuaugg

SEQ ID NO: 28290 - RNA, 22 nt, Artificial Sequence
  RPE65 RNA guide
cccaagucugucugaaaucccc

SEQ ID NO: 28291 - RNA, 22 nt, Artificial Sequence
  RPE65 RNA guide
cccaccaaaauucaagggucuu

SEQ ID NO: 28292 - RNA, 22 nt, Artificial Sequence
  RPE65 RNA guide
cccagucauuuccuagugugug

SEQ ID NO: 28293 - RNA, 22 nt, Artificial Sequence
  RPE65 RNA guide
cccauaauuuggaccugaauuc

SEQ ID NO: 28294 - RNA, 22 nt, Artificial Sequence
  RPE65 RNA guide
cccauacucaagacugcuucca

SEQ ID NO: 28295 - RNA, 22 nt, Artificial Sequence
  RPE65 RNA guide
ccccaccaaaauucaagggucu

SEQ ID NO: 28296 - RNA, 22 nt, Artificial Sequence
  RPE65 RNA guide
ccccauaauuuggaccugaauu

SEQ ID NO: 28297 - RNA, 22 nt, Artificial Sequence
  RPE65 RNA guide
ccccauacucaagacugcuucc

SEQ ID NO: 28298 - RNA, 22 nt, Artificial Sequence
  RPE65 RNA guide
cccccauaauuuggaccugaau

SEQ ID NO: 28299 - RNA, 22 nt, Artificial Sequence
  RPE65 RNA guide
ccccccauaauuuggaccugaa

SEQ ID NO: 28300 - RNA, 22 nt, Artificial Sequence
  RPE65 RNA guide
ccccgggcuaagucacacaaac

SEQ ID NO: 28301 - RNA, 22 nt, Artificial Sequence
  RPE65 RNA guide
cccgggcuaagucacacaaacc

SEQ ID NO: 28302 - RNA, 22 nt, Artificial Sequence
  RPE65 RNA guide
cccgggguuuggaagcagucuu

SEQ ID NO: 28303 - RNA, 22 nt, Artificial Sequence
  RPE65 RNA guide
cccuugaaauagcacauuuauc

SEQ ID NO: 28304 - RNA, 22 nt, Artificial Sequence
  RPE65 RNA guide
cccuugaauuuugguggggaaa

SEQ ID NO: 28305 - RNA, 22 nt, Artificial Sequence
  RPE65 RNA guide
ccgggcuaagucacacaaaccc

SEQ ID NO: 28306 - RNA, 22 nt, Artificial Sequence
  RPE65 RNA guide
ccgggguuuggaagcagucuug

SEQ ID NO: 28307 - RNA, 22 nt, Artificial Sequence
  RPE65 RNA guide
ccuaacuuuuuaagucuagcuu

SEQ ID NO: 28308 - RNA, 22 nt, Artificial Sequence
  RPE65 RNA guide
ccuacauaccauaaaaagaacu

SEQ ID NO: 28309 - RNA, 22 nt, Artificial Sequence
  RPE65 RNA guide
ccuagugugugacuuuggacaa

SEQ ID NO: 28310 - RNA, 22 nt, Artificial Sequence
  RPE65 RNA guide
ccugaagagaaggcauugauua

SEQ ID NO: 28311 - RNA, 22 nt, Artificial Sequence
  RPE65 RNA guide
ccugaauucuagcuaguugcuu

SEQ ID NO: 28312 - RNA, 22 nt, Artificial Sequence
  RPE65 RNA guide
ccugcuuauguauuaaagcaac

SEQ ID NO: 28313 - RNA, 22 nt, Artificial Sequence
  RPE65 RNA guide
ccuguauauagaaagaugucac

SEQ ID NO: 28314 - RNA, 22 nt, Artificial Sequence
  RPE65 RNA guide
ccuucauggauucaugauaaau

SEQ ID NO: 28315 - RNA, 22 nt, Artificial Sequence
  RPE65 RNA guide
ccuucucuucaggagcccuuga

SEQ ID NO: 28316 - RNA, 22 nt, Artificial Sequence
  RPE65 RNA guide
ccuugaaauagcacauuuauca

SEQ ID NO: 28317 - RNA, 22 nt, Artificial Sequence
  RPE65 RNA guide
ccuugaauuuugguggggaaau

SEQ ID NO: 28318 - RNA, 22 nt, Artificial Sequence
  RPE65 RNA guide
ccuugcccagucauuuccuagu

SEQ ID NO: 28319 - RNA, 22 nt, Artificial Sequence
  RPE65 RNA guide
ccuuuuacuaaacaauuacuau

SEQ ID NO: 28320 - RNA, 22 nt, Artificial Sequence
  RPE65 RNA guide
cgggcuaagucacacaaacccc

SEQ ID NO: 28321 - RNA, 22 nt, Artificial Sequence
  RPE65 RNA guide
cgggguuuggaagcagucuuga

SEQ ID NO: 28322 - RNA, 22 nt, Artificial Sequence
  RPE65 RNA guide
cuaaacaauuacuauguccuac

SEQ ID NO: 28323 - RNA, 22 nt, Artificial Sequence
  RPE65 RNA guide
cuaacuuuuuaagucuagcuuu

SEQ ID NO: 28324 - RNA, 22 nt, Artificial Sequence
  RPE65 RNA guide
cuaagucacacaaaccccccau

SEQ ID NO: 28325 - RNA, 22 nt, Artificial Sequence
  RPE65 RNA guide
cuacauaccauaaaaagaacuu

SEQ ID NO: 28326 - RNA, 22 nt, Artificial Sequence
  RPE65 RNA guide
cuagaauucagguccaaauuau

SEQ ID NO: 28327 - RNA, 22 nt, Artificial Sequence
  RPE65 RNA guide
cuagcuagaauucagguccaaa

SEQ ID NO: 28328 - RNA, 22 nt, Artificial Sequence
  RPE65 RNA guide
cuagcuaguugcuuuaauacau

SEQ ID NO: 28329 - RNA, 22 nt, Artificial Sequence
  RPE65 RNA guide
cuagcuuuuccuguauauagaa

SEQ ID NO: 28330 - RNA, 22 nt, Artificial Sequence
  RPE65 RNA guide
cuaggaaaugacugggcaagga

SEQ ID NO: 28331 - RNA, 22 nt, Artificial Sequence
  RPE65 RNA guide
cuagugugugacuuuggacaaa

SEQ ID NO: 28332 - RNA, 22 nt, Artificial Sequence
  RPE65 RNA guide
cuaguugcuuuaauacauaagc

SEQ ID NO: 28333 - RNA, 22 nt, Artificial Sequence
  RPE65 RNA guide
cuauauacaggaaaagcuagac

SEQ ID NO: 28334 - RNA, 22 nt, Artificial Sequence
  RPE65 RNA guide
cuauguccuacauaccauaaaa

SEQ ID NO: 28335 - RNA, 22 nt, Artificial Sequence
  RPE65 RNA guide
cuauugugacaucuuucuauau

SEQ ID NO: 28336 - RNA, 22 nt, Artificial Sequence
  RPE65 RNA guide
cuauuucaagggcuccugaaga

SEQ ID NO: 28337 - RNA, 22 nt, Artificial Sequence
  RPE65 RNA guide
cucaagacugcuuccaaacccc

SEQ ID NO: 28338 - RNA, 22 nt, Artificial Sequence
  RPE65 RNA guide
cucacaguaacauaauggagua

SEQ ID NO: 28339 - RNA, 22 nt, Artificial Sequence
  RPE65 RNA guide
cuccacuccuugcccagucauu

SEQ ID NO: 28340 - RNA, 22 nt, Artificial Sequence
  RPE65 RNA guide
cuccauuauguuacugugagau

SEQ ID NO: 28341 - RNA, 22 nt, Artificial Sequence
  RPE65 RNA guide
cuccugaagagaaggcauugau

SEQ ID NO: 28342 - RNA, 22 nt, Artificial Sequence
  RPE65 RNA guide
cuccuugcccagucauuuccua

SEQ ID NO: 28343 - RNA, 22 nt, Artificial Sequence
  RPE65 RNA guide
cucugaccagacucaauuauaa

SEQ ID NO: 28344 - RNA, 22 nt, Artificial Sequence
  RPE65 RNA guide
cucugggagacuuuuuuaaaac

SEQ ID NO: 28345 - RNA, 22 nt, Artificial Sequence
  RPE65 RNA guide
cucuucaggagcccuugaaaua

SEQ ID NO: 28346 - RNA, 22 nt, Artificial Sequence
  RPE65 RNA guide
cugaaauccccauacucaagac

SEQ ID NO: 28347 - RNA, 22 nt, Artificial Sequence
  RPE65 RNA guide
cugaagagaaggcauugauuaa

SEQ ID NO: 28348 - RNA, 22 nt, Artificial Sequence
  RPE65 RNA guide
cugaauucuagcuaguugcuuu

SEQ ID NO: 28349 - RNA, 22 nt, Artificial Sequence
  RPE65 RNA guide
cugcuuauguauuaaagcaacu

SEQ ID NO: 28350 - RNA, 22 nt, Artificial Sequence
  RPE65 RNA guide
cugcuuccaaaccccgggcuaa

SEQ ID NO: 28351 - RNA, 22 nt, Artificial Sequence
  RPE65 RNA guide
cugggagacuuuuuuaaaacac

SEQ ID NO: 28352 - RNA, 22 nt, Artificial Sequence
  RPE65 RNA guide
cugggcaaggaguggagcccaa

SEQ ID NO: 28353 - RNA, 22 nt, Artificial Sequence
  RPE65 RNA guide
cuggucagagauuccacucuuu

SEQ ID NO: 28354 - RNA, 22 nt, Artificial Sequence
  RPE65 RNA guide
cuguauauagaaagaugucaca

SEQ ID NO: 28355 - RNA, 22 nt, Artificial Sequence
  RPE65 RNA guide
cugucugaaauccccauacuca

SEQ ID NO: 28356 - RNA, 22 nt, Artificial Sequence
  RPE65 RNA guide
cugugagauuuaaaagagauaa

SEQ ID NO: 28357 - RNA, 22 nt, Artificial Sequence
  RPE65 RNA guide
cuuagcccgggguuuggaagca

SEQ ID NO: 28358 - RNA, 22 nt, Artificial Sequence
  RPE65 RNA guide
cuuauguauuaaagcaacuagc

SEQ ID NO: 28359 - RNA, 22 nt, Artificial Sequence
  RPE65 RNA guide
cuucaaagaguggaaucucuga

SEQ ID NO: 28360 - RNA, 22 nt, Artificial Sequence
  RPE65 RNA guide
cuucaggagcccuugaaauagc

SEQ ID NO: 28361 - RNA, 22 nt, Artificial Sequence
  RPE65 RNA guide
cuucauggauucaugauaaaug

SEQ ID NO: 28362 - RNA, 22 nt, Artificial Sequence
  RPE65 RNA guide
cuuccaaaccccgggcuaaguc

SEQ ID NO: 28363 - RNA, 22 nt, Artificial Sequence
  RPE65 RNA guide
cuucucuucaggagcccuugaa

SEQ ID NO: 28364 - RNA, 22 nt, Artificial Sequence
  RPE65 RNA guide
cuugaauuuugguggggaaauu

SEQ ID NO: 28365 - RNA, 22 nt, Artificial Sequence
  RPE65 RNA guide
cuugaguauggggauuucagac

SEQ ID NO: 28366 - RNA, 22 nt, Artificial Sequence
  RPE65 RNA guide
cuugcccagucauuuccuagug

SEQ ID NO: 28367 - RNA, 22 nt, Artificial Sequence
  RPE65 RNA guide
cuugggcuccacuccuugccca

SEQ ID NO: 28368 - RNA, 22 nt, Artificial Sequence
  RPE65 RNA guide
cuuucuauauacaggaaaagcu

SEQ ID NO: 28369 - RNA, 22 nt, Artificial Sequence
  RPE65 RNA guide
cuuuuacuccauuauguuacug

SEQ ID NO: 28370 - RNA, 22 nt, Artificial Sequence
  RPE65 RNA guide
cuuuuccuguauauagaaagau

SEQ ID NO: 28371 - RNA, 22 nt, Artificial Sequence
  RPE65 RNA guide
cuuuuuaagucuagcuuuuccu

SEQ ID NO: 28372 - RNA, 22 nt, Artificial Sequence
  RPE65 RNA guide
cuuuuuaugguauguaggacau

SEQ ID NO: 28373 - RNA, 22 nt, Artificial Sequence
  RPE65 RNA guide
cuuuuuuaaaacaccuucaugg

SEQ ID NO: 28374 - RNA, 22 nt, Artificial Sequence
  RPE65 RNA guide
gaaaaaauuuccccaccaaaau

SEQ ID NO: 28375 - RNA, 22 nt, Artificial Sequence
  RPE65 RNA guide
gaaaagcuagacuuaaaaaguu

SEQ ID NO: 28376 - RNA, 22 nt, Artificial Sequence
  RPE65 RNA guide
gaaagacccuugaauuuuggug

SEQ ID NO: 28377 - RNA, 22 nt, Artificial Sequence
  RPE65 RNA guide
gaaagaugucacaauagcuuuu

SEQ ID NO: 28378 - RNA, 22 nt, Artificial Sequence
  RPE65 RNA guide
gaaauagcacauuuaucaugaa

SEQ ID NO: 28379 - RNA, 22 nt, Artificial Sequence
  RPE65 RNA guide
gaaauccccauacucaagacug

SEQ ID NO: 28380 - RNA, 22 nt, Artificial Sequence
  RPE65 RNA guide
gaaaugacugggcaaggagugg

SEQ ID NO: 28381 - RNA, 22 nt, Artificial Sequence
  RPE65 RNA guide
gaacuuugcaugguauuaucuc

SEQ ID NO: 28382 - RNA, 22 nt, Artificial Sequence
  RPE65 RNA guide
gaagcagucuugaguaugggga

SEQ ID NO: 28383 - RNA, 22 nt, Artificial Sequence
  RPE65 RNA guide
gaagguguuuuaaaaaagucuc

SEQ ID NO: 28384 - RNA, 22 nt, Artificial Sequence
  RPE65 RNA guide
gaauccaugaagguguuuuaaa

SEQ ID NO: 28385 - RNA, 22 nt, Artificial Sequence
  RPE65 RNA guide
gaaucucugaccagacucaauu

SEQ ID NO: 28386 - RNA, 22 nt, Artificial Sequence
  RPE65 RNA guide
gaauucagguccaaauuauggg

SEQ ID NO: 28387 - RNA, 22 nt, Artificial Sequence
  RPE65 RNA guide
gaauucuagcuaguugcuuuaa

SEQ ID NO: 28388 - RNA, 22 nt, Artificial Sequence
  RPE65 RNA guide
gaauuuugguggggaaauuuuu

SEQ ID NO: 28389 - RNA, 22 nt, Artificial Sequence
  RPE65 RNA guide
gacagacuugggcuccacuccu

SEQ ID NO: 28390 - RNA, 22 nt, Artificial Sequence
  RPE65 RNA guide
gacaucuuucuauauacaggaa

SEQ ID NO: 28391 - RNA, 22 nt, Artificial Sequence
  RPE65 RNA guide
gaccagacucaauuauaauaau

SEQ ID NO: 28392 - RNA, 22 nt, Artificial Sequence
  RPE65 RNA guide
gacccuugaauuuuggugggga

SEQ ID NO: 28393 - RNA, 22 nt, Artificial Sequence
  RPE65 RNA guide
gaccugaauucuagcuaguugc

SEQ ID NO: 28394 - RNA, 22 nt, Artificial Sequence
  RPE65 RNA guide
gacugcuuccaaaccccgggcu

SEQ ID NO: 28395 - RNA, 22 nt, Artificial Sequence
  RPE65 RNA guide
gacugggcaaggaguggagccc

SEQ ID NO: 28396 - RNA, 22 nt, Artificial Sequence
  RPE65 RNA guide
gacuuaaaaaguuagguaauuu

SEQ ID NO: 28397 - RNA, 22 nt, Artificial Sequence
  RPE65 RNA guide
gacuuagcccgggguuuggaag

SEQ ID NO: 28398 - RNA, 22 nt, Artificial Sequence
  RPE65 RNA guide
gacuugggcuccacuccuugcc

SEQ ID NO: 28399 - RNA, 22 nt, Artificial Sequence
  RPE65 RNA guide
gacuuuggacaaauuaccuaac

SEQ ID NO: 28400 - RNA, 22 nt, Artificial Sequence
  RPE65 RNA guide
gacuuuuuuaaaacaccuucau

SEQ ID NO: 28401 - RNA, 22 nt, Artificial Sequence
  RPE65 RNA guide
gagacuuuuuuaaaacaccuuc

SEQ ID NO: 28402 - RNA, 22 nt, Artificial Sequence
  RPE65 RNA guide
gagauaauaccaugcaaaguuc

SEQ ID NO: 28403 - RNA, 22 nt, Artificial Sequence
  RPE65 RNA guide
gagauuuaaaagagauaauacc

SEQ ID NO: 28404 - RNA, 22 nt, Artificial Sequence
  RPE65 RNA guide
gagcccaagucugucugaaauc

SEQ ID NO: 28405 - RNA, 22 nt, Artificial Sequence
  RPE65 RNA guide
gagcccuugaaauagcacauuu

SEQ ID NO: 28406 - RNA, 22 nt, Artificial Sequence
  RPE65 RNA guide
gaguaaaagcuauugugacauc

SEQ ID NO: 28407 - RNA, 22 nt, Artificial Sequence
  RPE65 RNA guide
gaguauggggauuucagacaga

SEQ ID NO: 28408 - RNA, 22 nt, Artificial Sequence
  RPE65 RNA guide
gagucuggucagagauuccacu

SEQ ID NO: 28409 - RNA, 22 nt, Artificial Sequence
  RPE65 RNA guide
gaguggaaucucugaccagacu

SEQ ID NO: 28410 - RNA, 22 nt, Artificial Sequence
  RPE65 RNA guide
gaguggagcccaagucugucug

SEQ ID NO: 28411 - RNA, 22 nt, Artificial Sequence
  RPE65 RNA guide
gauaaaugugcuauuucaaggg

SEQ ID NO: 28412 - RNA, 22 nt, Artificial Sequence
  RPE65 RNA guide
gaugucacaauagcuuuuacuc

SEQ ID NO: 28413 - RNA, 22 nt, Artificial Sequence
  RPE65 RNA guide
gauuucagacagacuugggcuc

SEQ ID NO: 28414 - RNA, 22 nt, Artificial Sequence
  RPE65 RNA guide
gcaaaguucuuuuuaugguaug

SEQ ID NO: 28415 - RNA, 22 nt, Artificial Sequence
  RPE65 RNA guide
gcaacuagcuagaauucagguc

SEQ ID NO: 28416 - RNA, 22 nt, Artificial Sequence
  RPE65 RNA guide
gcaaggaguggagcccaagucu

SEQ ID NO: 28417 - RNA, 22 nt, Artificial Sequence
  RPE65 RNA guide
gcacauuuaucaugaauccaug

SEQ ID NO: 28418 - RNA, 22 nt, Artificial Sequence
  RPE65 RNA guide
gcaggaaaaaauuuccccacca

SEQ ID NO: 28419 - RNA, 22 nt, Artificial Sequence
  RPE65 RNA guide
gcagucuugaguauggggauuu

SEQ ID NO: 28420 - RNA, 22 nt, Artificial Sequence
  RPE65 RNA guide
gcaugguauuaucucuuuuaaa

SEQ ID NO: 28421 - RNA, 22 nt, Artificial Sequence
  RPE65 RNA guide
gcccaagucugucugaaauccc

SEQ ID NO: 28422 - RNA, 22 nt, Artificial Sequence
  RPE65 RNA guide
gcccagucauuuccuagugugu

SEQ ID NO: 28423 - RNA, 22 nt, Artificial Sequence
  RPE65 RNA guide
gcccgggguuuggaagcagucu

SEQ ID NO: 28424 - RNA, 22 nt, Artificial Sequence
  RPE65 RNA guide
gcccuugaaauagcacauuuau

SEQ ID NO: 28425 - RNA, 22 nt, Artificial Sequence
  RPE65 RNA guide
gccuucucuucaggagcccuug

SEQ ID NO: 28426 - RNA, 22 nt, Artificial Sequence
  RPE65 RNA guide
gcuaagucacacaaacccccca

SEQ ID NO: 28427 - RNA, 22 nt, Artificial Sequence
  RPE65 RNA guide
gcuagaauucagguccaaauua

SEQ ID NO: 28428 - RNA, 22 nt, Artificial Sequence
  RPE65 RNA guide
gcuaguugcuuuaauacauaag

SEQ ID NO: 28429 - RNA, 22 nt, Artificial Sequence
  RPE65 RNA guide
gcuauugugacaucuuucuaua

SEQ ID NO: 28430 - RNA, 22 nt, Artificial Sequence
  RPE65 RNA guide
gcuauuucaagggcuccugaag

SEQ ID NO: 28431 - RNA, 22 nt, Artificial Sequence
  RPE65 RNA guide
gcuccacuccuugcccagucau

SEQ ID NO: 28432 - RNA, 22 nt, Artificial Sequence
  RPE65 RNA guide
gcuccugaagagaaggcauuga

SEQ ID NO: 28433 - RNA, 22 nt, Artificial Sequence
  RPE65 RNA guide
gcuuauguauuaaagcaacuag

SEQ ID NO: 28434 - RNA, 22 nt, Artificial Sequence
  RPE65 RNA guide
gcuuccaaaccccgggcuaagu

SEQ ID NO: 28435 - RNA, 22 nt, Artificial Sequence
  RPE65 RNA guide
gcuuuuacuccauuauguuacu

SEQ ID NO: 28436 - RNA, 22 nt, Artificial Sequence
  RPE65 RNA guide
gcuuuuccuguauauagaaaga

SEQ ID NO: 28437 - RNA, 22 nt, Artificial Sequence
  RPE65 RNA guide
ggaaaaaauuuccccaccaaaa

SEQ ID NO: 28438 - RNA, 22 nt, Artificial Sequence
  RPE65 RNA guide
ggaaaagcuagacuuaaaaagu

SEQ ID NO: 28439 - RNA, 22 nt, Artificial Sequence
  RPE65 RNA guide
ggaaagacccuugaauuuuggu

SEQ ID NO: 28440 - RNA, 22 nt, Artificial Sequence
  RPE65 RNA guide
ggaaaugacugggcaaggagug

SEQ ID NO: 28441 - RNA, 22 nt, Artificial Sequence
  RPE65 RNA guide
ggaagcagucuugaguaugggg

SEQ ID NO: 28442 - RNA, 22 nt, Artificial Sequence
  RPE65 RNA guide
ggaaucucugaccagacucaau

SEQ ID NO: 28443 - RNA, 22 nt, Artificial Sequence
  RPE65 RNA guide
ggacaaauuaccuaacuuuuua

SEQ ID NO: 28444 - RNA, 22 nt, Artificial Sequence
  RPE65 RNA guide
ggacauaguaauuguuuaguaa

SEQ ID NO: 28445 - RNA, 22 nt, Artificial Sequence
  RPE65 RNA guide
ggaccugaauucuagcuaguug

SEQ ID NO: 28446 - RNA, 22 nt, Artificial Sequence
  RPE65 RNA guide
ggagacuuuuuuaaaacaccuu

SEQ ID NO: 28447 - RNA, 22 nt, Artificial Sequence
  RPE65 RNA guide
ggagcccaagucugucugaaau

SEQ ID NO: 28448 - RNA, 22 nt, Artificial Sequence
  RPE65 RNA guide
ggagcccuugaaauagcacauu

SEQ ID NO: 28449 - RNA, 22 nt, Artificial Sequence
  RPE65 RNA guide
ggaguaaaagcuauugugacau

SEQ ID NO: 28450 - RNA, 22 nt, Artificial Sequence
  RPE65 RNA guide
ggaguggagcccaagucugucu

SEQ ID NO: 28451 - RNA, 22 nt, Artificial Sequence
  RPE65 RNA guide
ggauucaugauaaaugugcuau

SEQ ID NO: 28452 - RNA, 22 nt, Artificial Sequence
  RPE65 RNA guide
ggauuucagacagacuugggcu

SEQ ID NO: 28453 - RNA, 22 nt, Artificial Sequence
  RPE65 RNA guide
ggcaaggaguggagcccaaguc

SEQ ID NO: 28454 - RNA, 22 nt, Artificial Sequence
  RPE65 RNA guide
ggcuaagucacacaaacccccc

SEQ ID NO: 28455 - RNA, 22 nt, Artificial Sequence
  RPE65 RNA guide
ggcuccacuccuugcccaguca

SEQ ID NO: 28456 - RNA, 22 nt, Artificial Sequence
  RPE65 RNA guide
ggcuccugaagagaaggcauug

SEQ ID NO: 28457 - RNA, 22 nt, Artificial Sequence
  RPE65 RNA guide
gggaaauuuuuuccugcuuaug

SEQ ID NO: 28458 - RNA, 22 nt, Artificial Sequence
  RPE65 RNA guide
gggagacuuuuuuaaaacaccu

SEQ ID NO: 28459 - RNA, 22 nt, Artificial Sequence
  RPE65 RNA guide
gggauuucagacagacuugggc

SEQ ID NO: 28460 - RNA, 22 nt, Artificial Sequence
  RPE65 RNA guide
gggcaaggaguggagcccaagu

SEQ ID NO: 28461 - RNA, 22 nt, Artificial Sequence
  RPE65 RNA guide
gggcuaagucacacaaaccccc

SEQ ID NO: 28462 - RNA, 22 nt, Artificial Sequence
  RPE65 RNA guide
gggcuccacuccuugcccaguc

SEQ ID NO: 28463 - RNA, 22 nt, Artificial Sequence
  RPE65 RNA guide
gggcuccugaagagaaggcauu

SEQ ID NO: 28464 - RNA, 22 nt, Artificial Sequence
  RPE65 RNA guide
ggggaaauuuuuuccugcuuau

SEQ ID NO: 28465 - RNA, 22 nt, Artificial Sequence
  RPE65 RNA guide
ggggauuucagacagacuuggg

SEQ ID NO: 28466 - RNA, 22 nt, Artificial Sequence
  RPE65 RNA guide
gggggguuugugugacuuagcc

SEQ ID NO: 28467 - RNA, 22 nt, Artificial Sequence
  RPE65 RNA guide
ggggguuugugugacuuagccc

SEQ ID NO: 28468 - RNA, 22 nt, Artificial Sequence
  RPE65 RNA guide
gggguuuggaagcagucuugag

SEQ ID NO: 28469 - RNA, 22 nt, Artificial Sequence
  RPE65 RNA guide
gggguuugugugacuuagcccg

SEQ ID NO: 28470 - RNA, 22 nt, Artificial Sequence
  RPE65 RNA guide
ggguuuggaagcagucuugagu

SEQ ID NO: 28471 - RNA, 22 nt, Artificial Sequence
  RPE65 RNA guide
ggguuugugugacuuagcccgg

SEQ ID NO: 28472 - RNA, 22 nt, Artificial Sequence
  RPE65 RNA guide
gguaauuauuauaauugagucu

SEQ ID NO: 28473 - RNA, 22 nt, Artificial Sequence
  RPE65 RNA guide
gguaauuuguccaaagucacac

SEQ ID NO: 28474 - RNA, 22 nt, Artificial Sequence
  RPE65 RNA guide
gguauguaggacauaguaauug

SEQ ID NO: 28475 - RNA, 22 nt, Artificial Sequence
  RPE65 RNA guide
gguauuaucucuuuuaaaucuc

SEQ ID NO: 28476 - RNA, 22 nt, Artificial Sequence
  RPE65 RNA guide
ggucagagauuccacucuuuga

SEQ ID NO: 28477 - RNA, 22 nt, Artificial Sequence
  RPE65 RNA guide
ggucauuaaucaaugccuucuc

SEQ ID NO: 28478 - RNA, 22 nt, Artificial Sequence
  RPE65 RNA guide
gguccaaauuaugggggguuug

SEQ ID NO: 28479 - RNA, 22 nt, Artificial Sequence
  RPE65 RNA guide
gguggggaaauuuuuuccugcu

SEQ ID NO: 28480 - RNA, 22 nt, Artificial Sequence
  RPE65 RNA guide
gguguuuuaaaaaagucuccca

SEQ ID NO: 28481 - RNA, 22 nt, Artificial Sequence
  RPE65 RNA guide
gguuuggaagcagucuugagua

SEQ ID NO: 28482 - RNA, 22 nt, Artificial Sequence
  RPE65 RNA guide
gguuugugugacuuagcccggg

SEQ ID NO: 28483 - RNA, 22 nt, Artificial Sequence
  RPE65 RNA guide
guaaaagcuauugugacaucuu

SEQ ID NO: 28484 - RNA, 22 nt, Artificial Sequence
  RPE65 RNA guide
guaacauaauggaguaaaagcu

SEQ ID NO: 28485 - RNA, 22 nt, Artificial Sequence
  RPE65 RNA guide
guaaguaucucugggagacuuu

SEQ ID NO: 28486 - RNA, 22 nt, Artificial Sequence
  RPE65 RNA guide
guaauuuguccaaagucacaca

SEQ ID NO: 28487 - RNA, 22 nt, Artificial Sequence
  RPE65 RNA guide
guauauagaaagaugucacaau

SEQ ID NO: 28488 - RNA, 22 nt, Artificial Sequence
  RPE65 RNA guide
guaucucugggagacuuuuuua

SEQ ID NO: 28489 - RNA, 22 nt, Artificial Sequence
  RPE65 RNA guide
guauggggauuucagacagacu

SEQ ID NO: 28490 - RNA, 22 nt, Artificial Sequence
  RPE65 RNA guide
guauguaggacauaguaauugu

SEQ ID NO: 28491 - RNA, 22 nt, Artificial Sequence
  RPE65 RNA guide
guauuaaagcaacuagcuagaa

SEQ ID NO: 28492 - RNA, 22 nt, Artificial Sequence
  RPE65 RNA guide
gucacaauagcuuuuacuccau

SEQ ID NO: 28493 - RNA, 22 nt, Artificial Sequence
  RPE65 RNA guide
gucacacaaaccccccauaauu

SEQ ID NO: 28494 - RNA, 22 nt, Artificial Sequence
  RPE65 RNA guide
gucacacacuaggaaaugacug

SEQ ID NO: 28495 - RNA, 22 nt, Artificial Sequence
  RPE65 RNA guide
gucagagauuccacucuuugaa

SEQ ID NO: 28496 - RNA, 22 nt, Artificial Sequence
  RPE65 RNA guide
gucauuaaucaaugccuucucu

SEQ ID NO: 28497 - RNA, 22 nt, Artificial Sequence
  RPE65 RNA guide
gucauuuccuagugugugacuu

SEQ ID NO: 28498 - RNA, 22 nt, Artificial Sequence
  RPE65 RNA guide
guccaaagucacacacuaggaa

SEQ ID NO: 28499 - RNA, 22 nt, Artificial Sequence
  RPE65 RNA guide
guccaaauuaugggggguuugu

SEQ ID NO: 28500 - RNA, 22 nt, Artificial Sequence
  RPE65 RNA guide
guccuacauaccauaaaaagaa

SEQ ID NO: 28501 - RNA, 22 nt, Artificial Sequence
  RPE65 RNA guide
gucuagcuuuuccuguauauag

SEQ ID NO: 28502 - RNA, 22 nt, Artificial Sequence
  RPE65 RNA guide
gucugaaauccccauacucaag

SEQ ID NO: 28503 - RNA, 22 nt, Artificial Sequence
  RPE65 RNA guide
gucuggucagagauuccacucu

SEQ ID NO: 28504 - RNA, 22 nt, Artificial Sequence
  RPE65 RNA guide
gucugucugaaauccccauacu

SEQ ID NO: 28505 - RNA, 22 nt, Artificial Sequence
  RPE65 RNA guide
gucuugaguauggggauuucag

SEQ ID NO: 28506 - RNA, 22 nt, Artificial Sequence
  RPE65 RNA guide
gugacaucuuucuauauacagg

SEQ ID NO: 28507 - RNA, 22 nt, Artificial Sequence
  RPE65 RNA guide
gugacuuagcccgggguuugga

SEQ ID NO: 28508 - RNA, 22 nt, Artificial Sequence
  RPE65 RNA guide
gugacuuuggacaaauuaccua

SEQ ID NO: 28509 - RNA, 22 nt, Artificial Sequence
  RPE65 RNA guide
gugcuauuucaagggcuccuga

SEQ ID NO: 28510 - RNA, 22 nt, Artificial Sequence
  RPE65 RNA guide
guggaaucucugaccagacuca

SEQ ID NO: 28511 - RNA, 22 nt, Artificial Sequence
  RPE65 RNA guide
guggagcccaagucugucugaa

SEQ ID NO: 28512 - RNA, 22 nt, Artificial Sequence
  RPE65 RNA guide
guggggaaauuuuuuccugcuu

SEQ ID NO: 28513 - RNA, 22 nt, Artificial Sequence
  RPE65 RNA guide
gugugacuuagcccgggguuug

SEQ ID NO: 28514 - RNA, 22 nt, Artificial Sequence
  RPE65 RNA guide
gugugacuuuggacaaauuacc

SEQ ID NO: 28515 - RNA, 22 nt, Artificial Sequence
  RPE65 RNA guide
gugugugacuuuggacaaauua

SEQ ID NO: 28516 - RNA, 22 nt, Artificial Sequence
  RPE65 RNA guide
guguuuuaaaaaagucucccag

SEQ ID NO: 28517 - RNA, 22 nt, Artificial Sequence
  RPE65 RNA guide
guuagguaauuuguccaaaguc

SEQ ID NO: 28518 - RNA, 22 nt, Artificial Sequence
  RPE65 RNA guide
guucuuuuuaugguauguagga

SEQ ID NO: 28519 - RNA, 22 nt, Artificial Sequence
  RPE65 RNA guide
guugcuuuaauacauaagcagg

SEQ ID NO: 28520 - RNA, 22 nt, Artificial Sequence
  RPE65 RNA guide
guuuaggaaagacccuugaauu

SEQ ID NO: 28521 - RNA, 22 nt, Artificial Sequence
  RPE65 RNA guide
guuuggaagcagucuugaguau

SEQ ID NO: 28522 - RNA, 22 nt, Artificial Sequence
  RPE65 RNA guide
guuugugugacuuagcccgggg

SEQ ID NO: 28523 - RNA, 22 nt, Artificial Sequence
  RPE65 RNA guide
guuuuaaaaaagucucccagag

SEQ ID NO: 28524 - RNA, 22 nt, Artificial Sequence
  RPE65 RNA guide
uaaaaaagucucccagagauac

SEQ ID NO: 28525 - RNA, 22 nt, Artificial Sequence
  RPE65 RNA guide
uaaaacaccuucauggauucau

SEQ ID NO: 28526 - RNA, 22 nt, Artificial Sequence
  RPE65 RNA guide
uaaacaauuacuauguccuaca

SEQ ID NO: 28527 - RNA, 22 nt, Artificial Sequence
  RPE65 RNA guide
uaaagcaacuagcuagaauuca

SEQ ID NO: 28528 - RNA, 22 nt, Artificial Sequence
  RPE65 RNA guide
uaaaucucacaguaacauaaug

SEQ ID NO: 28529 - RNA, 22 nt, Artificial Sequence
  RPE65 RNA guide
uaaaugugcuauuucaagggcu

SEQ ID NO: 28530 - RNA, 22 nt, Artificial Sequence
  RPE65 RNA guide
uaacuucaaagaguggaaucuc

SEQ ID NO: 28531 - RNA, 22 nt, Artificial Sequence
  RPE65 RNA guide
uaacuuuuuaagucuagcuuuu

SEQ ID NO: 28532 - RNA, 22 nt, Artificial Sequence
  RPE65 RNA guide
uaagcaggaaaaaauuucccca

SEQ ID NO: 28533 - RNA, 22 nt, Artificial Sequence
  RPE65 RNA guide
uaaguaucucugggagacuuuu

SEQ ID NO: 28534 - RNA, 22 nt, Artificial Sequence
  RPE65 RNA guide
uaagucacacaaaccccccaua

SEQ ID NO: 28535 - RNA, 22 nt, Artificial Sequence
  RPE65 RNA guide
uaagucuagcuuuuccuguaua

SEQ ID NO: 28536 - RNA, 22 nt, Artificial Sequence
  RPE65 RNA guide
uaaucaaugccuucucuucagg

SEQ ID NO: 28537 - RNA, 22 nt, Artificial Sequence
  RPE65 RNA guide
uaauggaguaaaagcuauugug

SEQ ID NO: 28538 - RNA, 22 nt, Artificial Sequence
  RPE65 RNA guide
uaauugagucuggucagagauu

SEQ ID NO: 28539 - RNA, 22 nt, Artificial Sequence
  RPE65 RNA guide
uaauuuggaccugaauucuagc

SEQ ID NO: 28540 - RNA, 22 nt, Artificial Sequence
  RPE65 RNA guide
uaauuuguccaaagucacacac

SEQ ID NO: 28541 - RNA, 22 nt, Artificial Sequence
  RPE65 RNA guide
uacaggaaaagcuagacuuaaa

SEQ ID NO: 28542 - RNA, 22 nt, Artificial Sequence
  RPE65 RNA guide
uacauaagcaggaaaaaauuuc

SEQ ID NO: 28543 - RNA, 22 nt, Artificial Sequence
  RPE65 RNA guide
uaccauaaaaagaacuuugcau

SEQ ID NO: 28544 - RNA, 22 nt, Artificial Sequence
  RPE65 RNA guide
uaccaugcaaaguucuuuuuau

SEQ ID NO: 28545 - RNA, 22 nt, Artificial Sequence
  RPE65 RNA guide
uacuauguccuacauaccauaa

SEQ ID NO: 28546 - RNA, 22 nt, Artificial Sequence
  RPE65 RNA guide
uacucaagacugcuuccaaacc

SEQ ID NO: 28547 - RNA, 22 nt, Artificial Sequence
  RPE65 RNA guide
uacuccauuauguuacugugag

SEQ ID NO: 28548 - RNA, 22 nt, Artificial Sequence
  RPE65 RNA guide
uagaaagaugucacaauagcuu

SEQ ID NO: 28549 - RNA, 22 nt, Artificial Sequence
  RPE65 RNA guide
uagaauucagguccaaauuaug

SEQ ID NO: 28550 - RNA, 22 nt, Artificial Sequence
  RPE65 RNA guide
uagcacauuuaucaugaaucca

SEQ ID NO: 28551 - RNA, 22 nt, Artificial Sequence
  RPE65 RNA guide
uagcccgggguuuggaagcagu

SEQ ID NO: 28552 - RNA, 22 nt, Artificial Sequence
  RPE65 RNA guide
uagcuagaauucagguccaaau

SEQ ID NO: 28553 - RNA, 22 nt, Artificial Sequence
  RPE65 RNA guide
uagcuaguugcuuuaauacaua

SEQ ID NO: 28554 - RNA, 22 nt, Artificial Sequence
  RPE65 RNA guide
uagcuuuuacuccauuauguua

SEQ ID NO: 28555 - RNA, 22 nt, Artificial Sequence
  RPE65 RNA guide
uagcuuuuccuguauauagaaa

SEQ ID NO: 28556 - RNA, 22 nt, Artificial Sequence
  RPE65 RNA guide
uaggaaagacccuugaauuuug

SEQ ID NO: 28557 - RNA, 22 nt, Artificial Sequence
  RPE65 RNA guide
uaggaaaugacugggcaaggag

SEQ ID NO: 28558 - RNA, 22 nt, Artificial Sequence
  RPE65 RNA guide
uagguaauuuguccaaagucac

SEQ ID NO: 28559 - RNA, 22 nt, Artificial Sequence
  RPE65 RNA guide
uagugugugacuuuggacaaau

SEQ ID NO: 28560 - RNA, 22 nt, Artificial Sequence
  RPE65 RNA guide
uaguugcuuuaauacauaagca

SEQ ID NO: 28561 - RNA, 22 nt, Artificial Sequence
  RPE65 RNA guide
uauaauugagucuggucagaga

SEQ ID NO: 28562 - RNA, 22 nt, Artificial Sequence
  RPE65 RNA guide
uaucaugaauccaugaaggugu

SEQ ID NO: 28563 - RNA, 22 nt, Artificial Sequence
  RPE65 RNA guide
uaucucugggagacuuuuuuaa

SEQ ID NO: 28564 - RNA, 22 nt, Artificial Sequence
  RPE65 RNA guide
uauggggauuucagacagacuu

SEQ ID NO: 28565 - RNA, 22 nt, Artificial Sequence
  RPE65 RNA guide
uaugggggguuugugugacuua

SEQ ID NO: 28566 - RNA, 22 nt, Artificial Sequence
  RPE65 RNA guide
uaugguauguaggacauaguaa

SEQ ID NO: 28567 - RNA, 22 nt, Artificial Sequence
  RPE65 RNA guide
uauguccuacauaccauaaaaa

SEQ ID NO: 28568 - RNA, 22 nt, Artificial Sequence
  RPE65 RNA guide
uauuaaagcaacuagcuagaau

SEQ ID NO: 28569 - RNA, 22 nt, Artificial Sequence
  RPE65 RNA guide
uauuauaauugagucuggucag

SEQ ID NO: 28570 - RNA, 22 nt, Artificial Sequence
  RPE65 RNA guide
uauugugacaucuuucuauaua

SEQ ID NO: 28571 - RNA, 22 nt, Artificial Sequence
  RPE65 RNA guide
uauuucaagggcuccugaagag

SEQ ID NO: 28572 - RNA, 22 nt, Artificial Sequence
  RPE65 RNA guide
ucaaagaguggaaucucugacc

SEQ ID NO: 28573 - RNA, 22 nt, Artificial Sequence
  RPE65 RNA guide
ucaagacugcuuccaaaccccg

SEQ ID NO: 28574 - RNA, 22 nt, Artificial Sequence
  RPE65 RNA guide
ucaagggcuccugaagagaagg

SEQ ID NO: 28575 - RNA, 22 nt, Artificial Sequence
  RPE65 RNA guide
ucaaugccuucucuucaggagc

SEQ ID NO: 28576 - RNA, 22 nt, Artificial Sequence
  RPE65 RNA guide
ucacaauagcuuuuacuccauu

SEQ ID NO: 28577 - RNA, 22 nt, Artificial Sequence
  RPE65 RNA guide
ucacacaaaccccccauaauuu

SEQ ID NO: 28578 - RNA, 22 nt, Artificial Sequence
  RPE65 RNA guide
ucacacacuaggaaaugacugg

SEQ ID NO: 28579 - RNA, 22 nt, Artificial Sequence
  RPE65 RNA guide
ucacaguaacauaauggaguaa

SEQ ID NO: 28580 - RNA, 22 nt, Artificial Sequence
  RPE65 RNA guide
ucagacagacuugggcuccacu

SEQ ID NO: 28581 - RNA, 22 nt, Artificial Sequence
  RPE65 RNA guide
ucaggagcccuugaaauagcac

SEQ ID NO: 28582 - RNA, 22 nt, Artificial Sequence
  RPE65 RNA guide
ucagguccaaauuauggggggu

SEQ ID NO: 28583 - RNA, 22 nt, Artificial Sequence
  RPE65 RNA guide
ucaugaauccaugaagguguuu

SEQ ID NO: 28584 - RNA, 22 nt, Artificial Sequence
  RPE65 RNA guide
ucaugauaaaugugcuauuuca

SEQ ID NO: 28585 - RNA, 22 nt, Artificial Sequence
  RPE65 RNA guide
ucauggauucaugauaaaugug

SEQ ID NO: 28586 - RNA, 22 nt, Artificial Sequence
  RPE65 RNA guide
ucauuaaucaaugccuucucuu

SEQ ID NO: 28587 - RNA, 22 nt, Artificial Sequence
  RPE65 RNA guide
ucauuuccuagugugugacuuu

SEQ ID NO: 28588 - RNA, 22 nt, Artificial Sequence
  RPE65 RNA guide
uccaaaccccgggcuaagucac

SEQ ID NO: 28589 - RNA, 22 nt, Artificial Sequence
  RPE65 RNA guide
uccaaagucacacacuaggaaa

SEQ ID NO: 28590 - RNA, 22 nt, Artificial Sequence
  RPE65 RNA guide
uccaaauuaugggggguuugug

SEQ ID NO: 28591 - RNA, 22 nt, Artificial Sequence
  RPE65 RNA guide
uccacuccuugcccagucauuu

SEQ ID NO: 28592 - RNA, 22 nt, Artificial Sequence
  RPE65 RNA guide
uccaugaagguguuuuaaaaaa

SEQ ID NO: 28593 - RNA, 22 nt, Artificial Sequence
  RPE65 RNA guide
uccccaccaaaauucaaggguc

SEQ ID NO: 28594 - RNA, 22 nt, Artificial Sequence
  RPE65 RNA guide
uccccauacucaagacugcuuc

SEQ ID NO: 28595 - RNA, 22 nt, Artificial Sequence
  RPE65 RNA guide
uccuacauaccauaaaaagaac

SEQ ID NO: 28596 - RNA, 22 nt, Artificial Sequence
  RPE65 RNA guide
uccuagugugugacuuuggaca

SEQ ID NO: 28597 - RNA, 22 nt, Artificial Sequence
  RPE65 RNA guide
uccugaagagaaggcauugauu

SEQ ID NO: 28598 - RNA, 22 nt, Artificial Sequence
  RPE65 RNA guide
uccugcuuauguauuaaagcaa

SEQ ID NO: 28599 - RNA, 22 nt, Artificial Sequence
  RPE65 RNA guide
uccuguauauagaaagauguca

SEQ ID NO: 28600 - RNA, 22 nt, Artificial Sequence
  RPE65 RNA guide
uccuugcccagucauuuccuag

SEQ ID NO: 28601 - RNA, 22 nt, Artificial Sequence
  RPE65 RNA guide
ucuagcuaguugcuuuaauaca

SEQ ID NO: 28602 - RNA, 22 nt, Artificial Sequence
  RPE65 RNA guide
ucuagcuuuuccuguauauaga

SEQ ID NO: 28603 - RNA, 22 nt, Artificial Sequence
  RPE65 RNA guide
ucuauauacaggaaaagcuaga

SEQ ID NO: 28604 - RNA, 22 nt, Artificial Sequence
  RPE65 RNA guide
ucucacaguaacauaauggagu

SEQ ID NO: 28605 - RNA, 22 nt, Artificial Sequence
  RPE65 RNA guide
ucucugaccagacucaauuaua

SEQ ID NO: 28606 - RNA, 22 nt, Artificial Sequence
  RPE65 RNA guide
ucucugggagacuuuuuuaaaa

SEQ ID NO: 28607 - RNA, 22 nt, Artificial Sequence
  RPE65 RNA guide
ucucuucaggagcccuugaaau

SEQ ID NO: 28608 - RNA, 22 nt, Artificial Sequence
  RPE65 RNA guide
ucugaaauccccauacucaaga

SEQ ID NO: 28609 - RNA, 22 nt, Artificial Sequence
  RPE65 RNA guide
ucugggagacuuuuuuaaaaca

SEQ ID NO: 28610 - RNA, 22 nt, Artificial Sequence
  RPE65 RNA guide
ucuggucagagauuccacucuu

SEQ ID NO: 28611 - RNA, 22 nt, Artificial Sequence
  RPE65 RNA guide
ucugucugaaauccccauacuc

SEQ ID NO: 28612 - RNA, 22 nt, Artificial Sequence
  RPE65 RNA guide
ucuucaggagcccuugaaauag

SEQ ID NO: 28613 - RNA, 22 nt, Artificial Sequence
  RPE65 RNA guide
ucuugaguauggggauuucaga

SEQ ID NO: 28614 - RNA, 22 nt, Artificial Sequence
  RPE65 RNA guide
ucuuucuauauacaggaaaagc

SEQ ID NO: 28615 - RNA, 22 nt, Artificial Sequence
  RPE65 RNA guide
ucuuuuuaugguauguaggaca

SEQ ID NO: 28616 - RNA, 22 nt, Artificial Sequence
  RPE65 RNA guide
ugaaauagcacauuuaucauga

SEQ ID NO: 28617 - RNA, 22 nt, Artificial Sequence
  RPE65 RNA guide
ugaaauccccauacucaagacu

SEQ ID NO: 28618 - RNA, 22 nt, Artificial Sequence
  RPE65 RNA guide
ugaagagaaggcauugauuaau

SEQ ID NO: 28619 - RNA, 22 nt, Artificial Sequence
  RPE65 RNA guide
ugaagguguuuuaaaaaagucu

SEQ ID NO: 28620 - RNA, 22 nt, Artificial Sequence
  RPE65 RNA guide
ugaauucuagcuaguugcuuua

SEQ ID NO: 28621 - RNA, 22 nt, Artificial Sequence
  RPE65 RNA guide
ugaauuuugguggggaaauuuu

SEQ ID NO: 28622 - RNA, 22 nt, Artificial Sequence
  RPE65 RNA guide
ugacaucuuucuauauacagga

SEQ ID NO: 28623 - RNA, 22 nt, Artificial Sequence
  RPE65 RNA guide
ugacugggcaaggaguggagcc

SEQ ID NO: 28624 - RNA, 22 nt, Artificial Sequence
  RPE65 RNA guide
ugacuuagcccgggguuuggaa

SEQ ID NO: 28625 - RNA, 22 nt, Artificial Sequence
  RPE65 RNA guide
ugacuuuggacaaauuaccuaa

SEQ ID NO: 28626 - RNA, 22 nt, Artificial Sequence
  RPE65 RNA guide
ugaguauggggauuucagacag

SEQ ID NO: 28627 - RNA, 22 nt, Artificial Sequence
  RPE65 RNA guide
ugagucuggucagagauuccac

SEQ ID NO: 28628 - RNA, 22 nt, Artificial Sequence
  RPE65 RNA guide
ugauaaaugugcuauuucaagg

SEQ ID NO: 28629 - RNA, 22 nt, Artificial Sequence
  RPE65 RNA guide
ugcaaaguucuuuuuaugguau

SEQ ID NO: 28630 - RNA, 22 nt, Artificial Sequence
  RPE65 RNA guide
ugcccagucauuuccuagugug

SEQ ID NO: 28631 - RNA, 22 nt, Artificial Sequence
  RPE65 RNA guide
ugccuucucuucaggagcccuu

SEQ ID NO: 28632 - RNA, 22 nt, Artificial Sequence
  RPE65 RNA guide
ugcuauuucaagggcuccugaa

SEQ ID NO: 28633 - RNA, 22 nt, Artificial Sequence
  RPE65 RNA guide
ugcuuauguauuaaagcaacua

SEQ ID NO: 28634 - RNA, 22 nt, Artificial Sequence
  RPE65 RNA guide
ugcuuccaaaccccgggcuaag

SEQ ID NO: 28635 - RNA, 22 nt, Artificial Sequence
  RPE65 RNA guide
uggaagcagucuugaguauggg

SEQ ID NO: 28636 - RNA, 22 nt, Artificial Sequence
  RPE65 RNA guide
uggaaucucugaccagacucaa

SEQ ID NO: 28637 - RNA, 22 nt, Artificial Sequence
  RPE65 RNA guide
uggaccugaauucuagcuaguu

SEQ ID NO: 28638 - RNA, 22 nt, Artificial Sequence
  RPE65 RNA guide
uggagcccaagucugucugaaa

SEQ ID NO: 28639 - RNA, 22 nt, Artificial Sequence
  RPE65 RNA guide
uggaguaaaagcuauugugaca

SEQ ID NO: 28640 - RNA, 22 nt, Artificial Sequence
  RPE65 RNA guide
uggauucaugauaaaugugcua

SEQ ID NO: 28641 - RNA, 22 nt, Artificial Sequence
  RPE65 RNA guide
ugggagacuuuuuuaaaacacc

SEQ ID NO: 28642 - RNA, 22 nt, Artificial Sequence
  RPE65 RNA guide
ugggcaaggaguggagcccaag

SEQ ID NO: 28643 - RNA, 22 nt, Artificial Sequence
  RPE65 RNA guide
ugggcuccacuccuugcccagu

SEQ ID NO: 28644 - RNA, 22 nt, Artificial Sequence
  RPE65 RNA guide
uggggaaauuuuuuccugcuua

SEQ ID NO: 28645 - RNA, 22 nt, Artificial Sequence
  RPE65 RNA guide
uggggauuucagacagacuugg

SEQ ID NO: 28646 - RNA, 22 nt, Artificial Sequence
  RPE65 RNA guide
ugggggguuugugugacuuagc

SEQ ID NO: 28647 - RNA, 22 nt, Artificial Sequence
  RPE65 RNA guide
ugguauguaggacauaguaauu

SEQ ID NO: 28648 - RNA, 22 nt, Artificial Sequence
  RPE65 RNA guide
uggucagagauuccacucuuug

SEQ ID NO: 28649 - RNA, 22 nt, Artificial Sequence
  RPE65 RNA guide
ugguggggaaauuuuuuccugc

SEQ ID NO: 28650 - RNA, 22 nt, Artificial Sequence
  RPE65 RNA guide
uguauauagaaagaugucacaa

SEQ ID NO: 28651 - RNA, 22 nt, Artificial Sequence
  RPE65 RNA guide
uguauuaaagcaacuagcuaga

SEQ ID NO: 28652 - RNA, 22 nt, Artificial Sequence
  RPE65 RNA guide
ugucacaauagcuuuuacucca

SEQ ID NO: 28653 - RNA, 22 nt, Artificial Sequence
  RPE65 RNA guide
uguccaaagucacacacuagga

SEQ ID NO: 28654 - RNA, 22 nt, Artificial Sequence
  RPE65 RNA guide
uguccuacauaccauaaaaaga

SEQ ID NO: 28655 - RNA, 22 nt, Artificial Sequence
  RPE65 RNA guide
ugucugaaauccccauacucaa

SEQ ID NO: 28656 - RNA, 22 nt, Artificial Sequence
  RPE65 RNA guide
ugugacaucuuucuauauacag

SEQ ID NO: 28657 - RNA, 22 nt, Artificial Sequence
  RPE65 RNA guide
ugugacuuagcccgggguuugg

SEQ ID NO: 28658 - RNA, 22 nt, Artificial Sequence
  RPE65 RNA guide
ugugacuuuggacaaauuaccu

SEQ ID NO: 28659 - RNA, 22 nt, Artificial Sequence
  RPE65 RNA guide
ugugcuauuucaagggcuccug

SEQ ID NO: 28660 - RNA, 22 nt, Artificial Sequence
  RPE65 RNA guide
ugugugacuuagcccgggguuu

SEQ ID NO: 28661 - RNA, 22 nt, Artificial Sequence
  RPE65 RNA guide
ugugugacuuuggacaaauuac

SEQ ID NO: 28662 - RNA, 22 nt, Artificial Sequence
  RPE65 RNA guide
uguuuaggaaagacccuugaau

SEQ ID NO: 28663 - RNA, 22 nt, Artificial Sequence
  RPE65 RNA guide
uguuuuaaaaaagucucccaga

SEQ ID NO: 28664 - RNA, 22 nt, Artificial Sequence
  RPE65 RNA guide
uuaaaaaagucucccagagaua

SEQ ID NO: 28665 - RNA, 22 nt, Artificial Sequence
  RPE65 RNA guide
uuaaaacaccuucauggauuca

SEQ ID NO: 28666 - RNA, 22 nt, Artificial Sequence
  RPE65 RNA guide
uuaaagcaacuagcuagaauuc

SEQ ID NO: 28667 - RNA, 22 nt, Artificial Sequence
  RPE65 RNA guide
uuaaaucucacaguaacauaau

SEQ ID NO: 28668 - RNA, 22 nt, Artificial Sequence
  RPE65 RNA guide
uuaagucuagcuuuuccuguau

SEQ ID NO: 28669 - RNA, 22 nt, Artificial Sequence
  RPE65 RNA guide
uuaaucaaugccuucucuucag

SEQ ID NO: 28670 - RNA, 22 nt, Artificial Sequence
  RPE65 RNA guide
uuacuccauuauguuacuguga

SEQ ID NO: 28671 - RNA, 22 nt, Artificial Sequence
  RPE65 RNA guide
uuagcccgggguuuggaagcag

SEQ ID NO: 28672 - RNA, 22 nt, Artificial Sequence
  RPE65 RNA guide
uuaggaaagacccuugaauuuu

SEQ ID NO: 28673 - RNA, 22 nt, Artificial Sequence
  RPE65 RNA guide
uuagguaauuuguccaaaguca

SEQ ID NO: 28674 - RNA, 22 nt, Artificial Sequence
  RPE65 RNA guide
uuauaauugagucuggucagag

SEQ ID NO: 28675 - RNA, 22 nt, Artificial Sequence
  RPE65 RNA guide
uuaucaugaauccaugaaggug

SEQ ID NO: 28676 - RNA, 22 nt, Artificial Sequence
  RPE65 RNA guide
uuaugggggguuugugugacuu

SEQ ID NO: 28677 - RNA, 22 nt, Artificial Sequence
  RPE65 RNA guide
uuaugguauguaggacauagua

SEQ ID NO: 28678 - RNA, 22 nt, Artificial Sequence
  RPE65 RNA guide
uuauuauaauugagucugguca

SEQ ID NO: 28679 - RNA, 22 nt, Artificial Sequence
  RPE65 RNA guide
uucaaagaguggaaucucugac

SEQ ID NO: 28680 - RNA, 22 nt, Artificial Sequence
  RPE65 RNA guide
uucaagggcuccugaagagaag

SEQ ID NO: 28681 - RNA, 22 nt, Artificial Sequence
  RPE65 RNA guide
uucagacagacuugggcuccac

SEQ ID NO: 28682 - RNA, 22 nt, Artificial Sequence
  RPE65 RNA guide
uucaggagcccuugaaauagca

SEQ ID NO: 28683 - RNA, 22 nt, Artificial Sequence
  RPE65 RNA guide
uucagguccaaauuaugggggg

SEQ ID NO: 28684 - RNA, 22 nt, Artificial Sequence
  RPE65 RNA guide
uucaugauaaaugugcuauuuc

SEQ ID NO: 28685 - RNA, 22 nt, Artificial Sequence
  RPE65 RNA guide
uucauggauucaugauaaaugu

SEQ ID NO: 28686 - RNA, 22 nt, Artificial Sequence
  RPE65 RNA guide
uuccaaaccccgggcuaaguca

SEQ ID NO: 28687 - RNA, 22 nt, Artificial Sequence
  RPE65 RNA guide
uuccccaccaaaauucaagggu

SEQ ID NO: 28688 - RNA, 22 nt, Artificial Sequence
  RPE65 RNA guide
uuccuagugugugacuuuggac

SEQ ID NO: 28689 - RNA, 22 nt, Artificial Sequence
  RPE65 RNA guide
uuccugcuuauguauuaaagca

SEQ ID NO: 28690 - RNA, 22 nt, Artificial Sequence
  RPE65 RNA guide
uuccuguauauagaaagauguc

SEQ ID NO: 28691 - RNA, 22 nt, Artificial Sequence
  RPE65 RNA guide
uucuauauacaggaaaagcuag

SEQ ID NO: 28692 - RNA, 22 nt, Artificial Sequence
  RPE65 RNA guide
uucucuucaggagcccuugaaa

SEQ ID NO: 28693 - RNA, 22 nt, Artificial Sequence
  RPE65 RNA guide
uucuuuuuaugguauguaggac

SEQ ID NO: 28694 - RNA, 22 nt, Artificial Sequence
  RPE65 RNA guide
uugaauuuugguggggaaauuu

SEQ ID NO: 28695 - RNA, 22 nt, Artificial Sequence
  RPE65 RNA guide
uugaguauggggauuucagaca

SEQ ID NO: 28696 - RNA, 22 nt, Artificial Sequence
  RPE65 RNA guide
uugagucuggucagagauucca

SEQ ID NO: 28697 - RNA, 22 nt, Artificial Sequence
  RPE65 RNA guide
uugcccagucauuuccuagugu

SEQ ID NO: 28698 - RNA, 22 nt, Artificial Sequence
  RPE65 RNA guide
uuggaagcagucuugaguaugg

SEQ ID NO: 28699 - RNA, 22 nt, Artificial Sequence
  RPE65 RNA guide
uuggaccugaauucuagcuagu

SEQ ID NO: 28700 - RNA, 22 nt, Artificial Sequence
  RPE65 RNA guide
uugggcuccacuccuugcccag

SEQ ID NO: 28701 - RNA, 22 nt, Artificial Sequence
  RPE65 RNA guide
uugguggggaaauuuuuuccug

SEQ ID NO: 28702 - RNA, 22 nt, Artificial Sequence
  RPE65 RNA guide
uuguccaaagucacacacuagg

SEQ ID NO: 28703 - RNA, 22 nt, Artificial Sequence
  RPE65 RNA guide
uugugacaucuuucuauauaca

SEQ ID NO: 28704 - RNA, 22 nt, Artificial Sequence
  RPE65 RNA guide
uugugugacuuagcccgggguu

SEQ ID NO: 28705 - RNA, 22 nt, Artificial Sequence
  RPE65 RNA guide
uuuaaaaaagucucccagagau

SEQ ID NO: 28706 - RNA, 22 nt, Artificial Sequence
  RPE65 RNA guide
uuuaaaacaccuucauggauuc

SEQ ID NO: 28707 - RNA, 22 nt, Artificial Sequence
  RPE65 RNA guide
uuuacuccauuauguuacugug

SEQ ID NO: 28708 - RNA, 22 nt, Artificial Sequence
  RPE65 RNA guide
uuuaggaaagacccuugaauuu

SEQ ID NO: 28709 - RNA, 22 nt, Artificial Sequence
  RPE65 RNA guide
uuuaucaugaauccaugaaggu

SEQ ID NO: 28710 - RNA, 22 nt, Artificial Sequence
  RPE65 RNA guide
uuucaagggcuccugaagagaa

SEQ ID NO: 28711 - RNA, 22 nt, Artificial Sequence
  RPE65 RNA guide
uuucagacagacuugggcucca

SEQ ID NO: 28712 - RNA, 22 nt, Artificial Sequence
  RPE65 RNA guide
uuuccccaccaaaauucaaggg

SEQ ID NO: 28713 - RNA, 22 nt, Artificial Sequence
  RPE65 RNA guide
uuuccuagugugugacuuugga

SEQ ID NO: 28714 - RNA, 22 nt, Artificial Sequence
  RPE65 RNA guide
uuuccugcuuauguauuaaagc

SEQ ID NO: 28715 - RNA, 22 nt, Artificial Sequence
  RPE65 RNA guide
uuuccuguauauagaaagaugu

SEQ ID NO: 28716 - RNA, 22 nt, Artificial Sequence
  RPE65 RNA guide
uuucuauauacaggaaaagcua

SEQ ID NO: 28717 - RNA, 22 nt, Artificial Sequence
  RPE65 RNA guide
uuuggaagcagucuugaguaug

SEQ ID NO: 28718 - RNA, 22 nt, Artificial Sequence
  RPE65 RNA guide
uuuggaccugaauucuagcuag

SEQ ID NO: 28719 - RNA, 22 nt, Artificial Sequence
  RPE65 RNA guide
uuugguggggaaauuuuuuccu

SEQ ID NO: 28720 - RNA, 22 nt, Artificial Sequence
  RPE65 RNA guide
uuuguccaaagucacacacuag

SEQ ID NO: 28721 - RNA, 22 nt, Artificial Sequence
  RPE65 RNA guide
uuugugugacuuagcccggggu

SEQ ID NO: 28722 - RNA, 22 nt, Artificial Sequence
  RPE65 RNA guide
uuuuaaaaaagucucccagaga

SEQ ID NO: 28723 - RNA, 22 nt, Artificial Sequence
  RPE65 RNA guide
uuuuaaaacaccuucauggauu

SEQ ID NO: 28724 - RNA, 22 nt, Artificial Sequence
  RPE65 RNA guide
uuuuacuccauuauguuacugu

SEQ ID NO: 28725 - RNA, 22 nt, Artificial Sequence
  RPE65 RNA guide
uuuuccugcuuauguauuaaag

SEQ ID NO: 28726 - RNA, 22 nt, Artificial Sequence
  RPE65 RNA guide
uuuuccuguauauagaaagaug

SEQ ID NO: 28727 - RNA, 22 nt, Artificial Sequence
  RPE65 RNA guide
uuuugguggggaaauuuuuucc

SEQ ID NO: 28728 - RNA, 20 nt, Artificial Sequence
  RPE65 RNA guide
aaaaacgcuaccuaauugga

SEQ ID NO: 28729 - RNA, 20 nt, Artificial Sequence
  RPE65 RNA guide
aaaaagcccaaaccaccuga

SEQ ID NO: 28730 - RNA, 20 nt, Artificial Sequence
  RPE65 RNA guide
aaaacgcuaccuaauuggaa

SEQ ID NO: 28731 - RNA, 20 nt, Artificial Sequence
  RPE65 RNA guide
aaaagaggauggcuucaaga

SEQ ID NO: 28732 - RNA, 20 nt, Artificial Sequence
  RPE65 RNA guide
aaaagcccaaaccaccugau

SEQ ID NO: 28733 - RNA, 20 nt, Artificial Sequence
  RPE65 RNA guide
aaaaugggcaugaaacccac

SEQ ID NO: 28734 - RNA, 20 nt, Artificial Sequence
  RPE65 RNA guide
aaaccaccugaucccucucc

SEQ ID NO: 28735 - RNA, 20 nt, Artificial Sequence
  RPE65 RNA guide
aaacccaccacccuuuaaua

SEQ ID NO: 28736 - RNA, 20 nt, Artificial Sequence
  RPE65 RNA guide
aaacgcuaccuaauuggaau

SEQ ID NO: 28737 - RNA, 20 nt, Artificial Sequence
  RPE65 RNA guide
aaacguucugagccucaauu

SEQ ID NO: 28738 - RNA, 20 nt, Artificial Sequence
  RPE65 RNA guide
aaacugucagugccuagcuc

SEQ ID NO: 28739 - RNA, 20 nt, Artificial Sequence
  RPE65 RNA guide
aaagaggauggcuucaagau

SEQ ID NO: 28740 - RNA, 20 nt, Artificial Sequence
  RPE65 RNA guide
aaagcccaaaccaccugauc

SEQ ID NO: 28741 - RNA, 20 nt, Artificial Sequence
  RPE65 RNA guide
aaaggcgaaugaaagaaaau

SEQ ID NO: 28742 - RNA, 20 nt, Artificial Sequence
  RPE65 RNA guide
aaagggugguggguuucaug

SEQ ID NO: 28743 - RNA, 20 nt, Artificial Sequence
  RPE65 RNA guide
aaagguguaauccugauccu

SEQ ID NO: 28744 - RNA, 20 nt, Artificial Sequence
  RPE65 RNA guide
aaaugaaggcccagugacaa

SEQ ID NO: 28745 - RNA, 20 nt, Artificial Sequence
  RPE65 RNA guide
aaaugauagagcuagguuag

SEQ ID NO: 28746 - RNA, 20 nt, Artificial Sequence
  RPE65 RNA guide
aaaugggcaugaaacccacc

SEQ ID NO: 28747 - RNA, 20 nt, Artificial Sequence
  RPE65 RNA guide
aaauggguucuugcuauaaa

SEQ ID NO: 28748 - RNA, 20 nt, Artificial Sequence
  RPE65 RNA guide
aacauuccucuaauaaaaug

SEQ ID NO: 28749 - RNA, 20 nt, Artificial Sequence
  RPE65 RNA guide
aaccaccugaucccucuccc

SEQ ID NO: 28750 - RNA, 20 nt, Artificial Sequence
  RPE65 RNA guide
aacccaccacccuuuaauac

SEQ ID NO: 28751 - RNA, 20 nt, Artificial Sequence
  RPE65 RNA guide
aacccauuuucuuucauucg

SEQ ID NO: 28752 - RNA, 20 nt, Artificial Sequence
  RPE65 RNA guide
aaccuagcucuaucauuuca

SEQ ID NO: 28753 - RNA, 20 nt, Artificial Sequence
  RPE65 RNA guide
aacgcuaccuaauuggaauu

SEQ ID NO: 28754 - RNA, 20 nt, Artificial Sequence
  RPE65 RNA guide
aacguucugagccucaauuc

SEQ ID NO: 28755 - RNA, 20 nt, Artificial Sequence
  RPE65 RNA guide
aacugucagugccuagcuca

SEQ ID NO: 28756 - RNA, 20 nt, Artificial Sequence
  RPE65 RNA guide
aacuuagaggauucacagac

SEQ ID NO: 28757 - RNA, 20 nt, Artificial Sequence
  RPE65 RNA guide
aagaacccauuuucuuucau

SEQ ID NO: 28758 - RNA, 20 nt, Artificial Sequence
  RPE65 RNA guide
aagagagacugacauaaaag

SEQ ID NO: 28759 - RNA, 20 nt, Artificial Sequence
  RPE65 RNA guide
aagaggauggcuucaagaug

SEQ ID NO: 28760 - RNA, 20 nt, Artificial Sequence
  RPE65 RNA guide
aagaugacaaagguguaauc

SEQ ID NO: 28761 - RNA, 20 nt, Artificial Sequence
  RPE65 RNA guide
aagcaccugggaguauuaaa

SEQ ID NO: 28762 - RNA, 20 nt, Artificial Sequence
  RPE65 RNA guide
aagccagagaagagagacug

SEQ ID NO: 28763 - RNA, 20 nt, Artificial Sequence
  RPE65 RNA guide
aagccauccucuuuuauguc

SEQ ID NO: 28764 - RNA, 20 nt, Artificial Sequence
  RPE65 RNA guide
aagcccaaaccaccugaucc

SEQ ID NO: 28765 - RNA, 20 nt, Artificial Sequence
  RPE65 RNA guide
aaggaauaggaagccagaga

SEQ ID NO: 28766 - RNA, 20 nt, Artificial Sequence
  RPE65 RNA guide
aaggaucaggauuacaccuu

SEQ ID NO: 28767 - RNA, 20 nt, Artificial Sequence
  RPE65 RNA guide
aaggcccagugacaagcacc

SEQ ID NO: 28768 - RNA, 20 nt, Artificial Sequence
  RPE65 RNA guide
aaggcgaaugaaagaaaaug

SEQ ID NO: 28769 - RNA, 20 nt, Artificial Sequence
  RPE65 RNA guide
aagggaauugaggcucagaa

SEQ ID NO: 28770 - RNA, 20 nt, Artificial Sequence
  RPE65 RNA guide
aagggugguggguuucaugc

SEQ ID NO: 28771 - RNA, 20 nt, Artificial Sequence
  RPE65 RNA guide
aagguguaauccugauccuu

SEQ ID NO: 28772 - RNA, 20 nt, Artificial Sequence
  RPE65 RNA guide
aaguaacuuagaggauucac

SEQ ID NO: 28773 - RNA, 20 nt, Artificial Sequence
  RPE65 RNA guide
aaguuacuuaaacguucuga

SEQ ID NO: 28774 - RNA, 20 nt, Artificial Sequence
  RPE65 RNA guide
aauaaaaugggcaugaaacc

SEQ ID NO: 28775 - RNA, 20 nt, Artificial Sequence
  RPE65 RNA guide
aauaaaugaaggcccaguga

SEQ ID NO: 28776 - RNA, 20 nt, Artificial Sequence
  RPE65 RNA guide
aauacucccaggugcuuguc

SEQ ID NO: 28777 - RNA, 20 nt, Artificial Sequence
  RPE65 RNA guide
aauaggaagccagagaagag

SEQ ID NO: 28778 - RNA, 20 nt, Artificial Sequence
  RPE65 RNA guide
aauccugauccuuagggaau

SEQ ID NO: 28779 - RNA, 20 nt, Artificial Sequence
  RPE65 RNA guide
aaugaaagaaaauggguucu

SEQ ID NO: 28780 - RNA, 20 nt, Artificial Sequence
  RPE65 RNA guide
aaugaaggcccagugacaag

SEQ ID NO: 28781 - RNA, 20 nt, Artificial Sequence
  RPE65 RNA guide
aaugauagagcuagguuagc

SEQ ID NO: 28782 - RNA, 20 nt, Artificial Sequence
  RPE65 RNA guide
aaugcagaaaaacgcuaccu

SEQ ID NO: 28783 - RNA, 20 nt, Artificial Sequence
  RPE65 RNA guide
aaugggcaugaaacccacca

SEQ ID NO: 28784 - RNA, 20 nt, Artificial Sequence
  RPE65 RNA guide
aauggguucuugcuauaaaa

SEQ ID NO: 28785 - RNA, 20 nt, Artificial Sequence
  RPE65 RNA guide
aauguugguucugcugggag

SEQ ID NO: 28786 - RNA, 20 nt, Artificial Sequence
  RPE65 RNA guide
aauuagguagcguuuuucug

SEQ ID NO: 28787 - RNA, 20 nt, Artificial Sequence
  RPE65 RNA guide
aauuccaauuagguagcguu

SEQ ID NO: 28788 - RNA, 20 nt, Artificial Sequence
  RPE65 RNA guide
aauucccuaaggaucaggau

SEQ ID NO: 28789 - RNA, 20 nt, Artificial Sequence
  RPE65 RNA guide
aauugaggcucagaacguuu

SEQ ID NO: 28790 - RNA, 20 nt, Artificial Sequence
  RPE65 RNA guide
aauuggaauucccuaaggau

SEQ ID NO: 28791 - RNA, 20 nt, Artificial Sequence
  RPE65 RNA guide
acaaagguguaauccugauc

SEQ ID NO: 28792 - RNA, 20 nt, Artificial Sequence
  RPE65 RNA guide
acaagcaccugggaguauua

SEQ ID NO: 28793 - RNA, 20 nt, Artificial Sequence
  RPE65 RNA guide
acaccuuugucaucuucaaa

SEQ ID NO: 28794 - RNA, 20 nt, Artificial Sequence
  RPE65 RNA guide
acagacagugaaaugauaga

SEQ ID NO: 28795 - RNA, 20 nt, Artificial Sequence
  RPE65 RNA guide
acagggagagggaucaggug

SEQ ID NO: 28796 - RNA, 20 nt, Artificial Sequence
  RPE65 RNA guide
acagggggagucugcacuga

SEQ ID NO: 28797 - RNA, 20 nt, Artificial Sequence
  RPE65 RNA guide
acagugaaaugauagagcua

SEQ ID NO: 28798 - RNA, 20 nt, Artificial Sequence
  RPE65 RNA guide
acaguuugaagaugacaaag

SEQ ID NO: 28799 - RNA, 20 nt, Artificial Sequence
  RPE65 RNA guide
acauaaaagaggauggcuuc

SEQ ID NO: 28800 - RNA, 20 nt, Artificial Sequence
  RPE65 RNA guide
acaucugccucccagcagaa

SEQ ID NO: 28801 - RNA, 20 nt, Artificial Sequence
  RPE65 RNA guide
acauuccucuaauaaaaugg

SEQ ID NO: 28802 - RNA, 20 nt, Artificial Sequence
  RPE65 RNA guide
accaacauuccucuaauaaa

SEQ ID NO: 28803 - RNA, 20 nt, Artificial Sequence
  RPE65 RNA guide
accacccuuuaauacuccca

SEQ ID NO: 28804 - RNA, 20 nt, Artificial Sequence
  RPE65 RNA guide
accaccugaucccucucccu

SEQ ID NO: 28805 - RNA, 20 nt, Artificial Sequence
  RPE65 RNA guide
acccacagggggagucugca

SEQ ID NO: 28806 - RNA, 20 nt, Artificial Sequence
  RPE65 RNA guide
acccaccacccuuuaauacu

SEQ ID NO: 28807 - RNA, 20 nt, Artificial Sequence
  RPE65 RNA guide
acccauuuucuuucauucgc

SEQ ID NO: 28808 - RNA, 20 nt, Artificial Sequence
  RPE65 RNA guide
acccuuuaauacucccaggu

SEQ ID NO: 28809 - RNA, 20 nt, Artificial Sequence
  RPE65 RNA guide
accuaauuggaauucccuaa

SEQ ID NO: 28810 - RNA, 20 nt, Artificial Sequence
  RPE65 RNA guide
accuagcucuaucauuucac

SEQ ID NO: 28811 - RNA, 20 nt, Artificial Sequence
  RPE65 RNA guide
accugaucccucucccugug

SEQ ID NO: 28812 - RNA, 20 nt, Artificial Sequence
  RPE65 RNA guide
accugggaguauuaaagggu

SEQ ID NO: 28813 - RNA, 20 nt, Artificial Sequence
  RPE65 RNA guide
accuuugucaucuucaaacu

SEQ ID NO: 28814 - RNA, 20 nt, Artificial Sequence
  RPE65 RNA guide
acgccaaggaauaggaagcc

SEQ ID NO: 28815 - RNA, 20 nt, Artificial Sequence
  RPE65 RNA guide
acgcuaccuaauuggaauuc

SEQ ID NO: 28816 - RNA, 20 nt, Artificial Sequence
  RPE65 RNA guide
acguucugagccucaauucc

SEQ ID NO: 28817 - RNA, 20 nt, Artificial Sequence
  RPE65 RNA guide
acguuuaaguaacuuagagg

SEQ ID NO: 28818 - RNA, 20 nt, Artificial Sequence
  RPE65 RNA guide
acucccaggugcuugucacu

SEQ ID NO: 28819 - RNA, 20 nt, Artificial Sequence
  RPE65 RNA guide
acucccccugugggucacag

SEQ ID NO: 28820 - RNA, 20 nt, Artificial Sequence
  RPE65 RNA guide
acugacaguuugaagaugac

SEQ ID NO: 28821 - RNA, 20 nt, Artificial Sequence
  RPE65 RNA guide
acugacauaaaagaggaugg

SEQ ID NO: 28822 - RNA, 20 nt, Artificial Sequence
  RPE65 RNA guide
acugagagacgccaaggaau

SEQ ID NO: 28823 - RNA, 20 nt, Artificial Sequence
  RPE65 RNA guide
acugagcuaggcacugacag

SEQ ID NO: 28824 - RNA, 20 nt, Artificial Sequence
  RPE65 RNA guide
acugggccuucauuuauuca

SEQ ID NO: 28825 - RNA, 20 nt, Artificial Sequence
  RPE65 RNA guide
acugucagugccuagcucag

SEQ ID NO: 28826 - RNA, 20 nt, Artificial Sequence
  RPE65 RNA guide
acugucugugaauccucuaa

SEQ ID NO: 28827 - RNA, 20 nt, Artificial Sequence
  RPE65 RNA guide
acuuaaacguucugagccuc

SEQ ID NO: 28828 - RNA, 20 nt, Artificial Sequence
  RPE65 RNA guide
acuuagaggauucacagaca

SEQ ID NO: 28829 - RNA, 20 nt, Artificial Sequence
  RPE65 RNA guide
agaaaaacgcuaccuaauug

SEQ ID NO: 28830 - RNA, 20 nt, Artificial Sequence
  RPE65 RNA guide
agaacccauuuucuuucauu

SEQ ID NO: 28831 - RNA, 20 nt, Artificial Sequence
  RPE65 RNA guide
agaacguuuaaguaacuuag

SEQ ID NO: 28832 - RNA, 20 nt, Artificial Sequence
  RPE65 RNA guide
agaagagagacugacauaaa

SEQ ID NO: 28833 - RNA, 20 nt, Artificial Sequence
  RPE65 RNA guide
agacagugaaaugauagagc

SEQ ID NO: 28834 - RNA, 20 nt, Artificial Sequence
  RPE65 RNA guide
agacgccaaggaauaggaag

SEQ ID NO: 28835 - RNA, 20 nt, Artificial Sequence
  RPE65 RNA guide
agacucccccugugggucac

SEQ ID NO: 28836 - RNA, 20 nt, Artificial Sequence
  RPE65 RNA guide
agacugacauaaaagaggau

SEQ ID NO: 28837 - RNA, 20 nt, Artificial Sequence
  RPE65 RNA guide
agagaaauaaaguaaaggcg

SEQ ID NO: 28838 - RNA, 20 nt, Artificial Sequence
  RPE65 RNA guide
agagaagagagacugacaua

SEQ ID NO: 28839 - RNA, 20 nt, Artificial Sequence
  RPE65 RNA guide
agagacgccaaggaauagga

SEQ ID NO: 28840 - RNA, 20 nt, Artificial Sequence
  RPE65 RNA guide
agagacugacauaaaagagg

SEQ ID NO: 28841 - RNA, 20 nt, Artificial Sequence
  RPE65 RNA guide
agagagacugacauaaaaga

SEQ ID NO: 28842 - RNA, 20 nt, Artificial Sequence
  RPE65 RNA guide
agagcuagguuagcaucuac

SEQ ID NO: 28843 - RNA, 20 nt, Artificial Sequence
  RPE65 RNA guide
agaggaauguugguucugcu

SEQ ID NO: 28844 - RNA, 20 nt, Artificial Sequence
  RPE65 RNA guide
agaggauggcuucaagaugg

SEQ ID NO: 28845 - RNA, 20 nt, Artificial Sequence
  RPE65 RNA guide
agaggauucacagacaguga

SEQ ID NO: 28846 - RNA, 20 nt, Artificial Sequence
  RPE65 RNA guide
agagggaucaggugguuugg

SEQ ID NO: 28847 - RNA, 20 nt, Artificial Sequence
  RPE65 RNA guide
agaugacaaagguguaaucc

SEQ ID NO: 28848 - RNA, 20 nt, Artificial Sequence
  RPE65 RNA guide
agaugcuaaccuagcucuau

SEQ ID NO: 28849 - RNA, 20 nt, Artificial Sequence
  RPE65 RNA guide
agauguagaugcuaaccuag

SEQ ID NO: 28850 - RNA, 20 nt, Artificial Sequence
  RPE65 RNA guide
agcaagaacccauuuucuuu

SEQ ID NO: 28851 - RNA, 20 nt, Artificial Sequence
  RPE65 RNA guide
agcaccugggaguauuaaag

SEQ ID NO: 28852 - RNA, 20 nt, Artificial Sequence
  RPE65 RNA guide
agcagaaccaacauuccucu

SEQ ID NO: 28853 - RNA, 20 nt, Artificial Sequence
  RPE65 RNA guide
agcaucuacaucugccuccc

SEQ ID NO: 28854 - RNA, 20 nt, Artificial Sequence
  RPE65 RNA guide
agccagagaagagagacuga

SEQ ID NO: 28855 - RNA, 20 nt, Artificial Sequence
  RPE65 RNA guide
agccauccucuuuuauguca

SEQ ID NO: 28856 - RNA, 20 nt, Artificial Sequence
  RPE65 RNA guide
agcccaaaccaccugauccc

SEQ ID NO: 28857 - RNA, 20 nt, Artificial Sequence
  RPE65 RNA guide
agcguuuuucugcauuagag

SEQ ID NO: 28858 - RNA, 20 nt, Artificial Sequence
  RPE65 RNA guide
agcuaggcacugacaguuug

SEQ ID NO: 28859 - RNA, 20 nt, Artificial Sequence
  RPE65 RNA guide
agcuagguuagcaucuacau

SEQ ID NO: 28860 - RNA, 20 nt, Artificial Sequence
  RPE65 RNA guide
agcucuaucauuucacuguc

SEQ ID NO: 28861 - RNA, 20 nt, Artificial Sequence
  RPE65 RNA guide
aggaagccagagaagagaga

SEQ ID NO: 28862 - RNA, 20 nt, Artificial Sequence
  RPE65 RNA guide
aggaauaggaagccagagaa

SEQ ID NO: 28863 - RNA, 20 nt, Artificial Sequence
  RPE65 RNA guide
aggaauguugguucugcugg

SEQ ID NO: 28864 - RNA, 20 nt, Artificial Sequence
  RPE65 RNA guide
aggacauuuacuaugugcca

SEQ ID NO: 28865 - RNA, 20 nt, Artificial Sequence
  RPE65 RNA guide
aggaucaggauuacaccuuu

SEQ ID NO: 28866 - RNA, 20 nt, Artificial Sequence
  RPE65 RNA guide
aggauggcuucaagaugggc

SEQ ID NO: 28867 - RNA, 20 nt, Artificial Sequence
  RPE65 RNA guide
aggauuacaccuuugucauc

SEQ ID NO: 28868 - RNA, 20 nt, Artificial Sequence
  RPE65 RNA guide
aggauucacagacagugaaa

SEQ ID NO: 28869 - RNA, 20 nt, Artificial Sequence
  RPE65 RNA guide
aggcacugacaguuugaaga

SEQ ID NO: 28870 - RNA, 20 nt, Artificial Sequence
  RPE65 RNA guide
aggcacugagcuaggcacug

SEQ ID NO: 28871 - RNA, 20 nt, Artificial Sequence
  RPE65 RNA guide
aggcagauguagaugcuaac

SEQ ID NO: 28872 - RNA, 20 nt, Artificial Sequence
  RPE65 RNA guide
aggcccagugacaagcaccu

SEQ ID NO: 28873 - RNA, 20 nt, Artificial Sequence
  RPE65 RNA guide
aggcgaaugaaagaaaaugg

SEQ ID NO: 28874 - RNA, 20 nt, Artificial Sequence
  RPE65 RNA guide
aggcucagaacguuuaagua

SEQ ID NO: 28875 - RNA, 20 nt, Artificial Sequence
  RPE65 RNA guide
agggaauuccaauuagguag

SEQ ID NO: 28876 - RNA, 20 nt, Artificial Sequence
  RPE65 RNA guide
agggaauugaggcucagaac

SEQ ID NO: 28877 - RNA, 20 nt, Artificial Sequence
  RPE65 RNA guide
agggagagggaucagguggu

SEQ ID NO: 28878 - RNA, 20 nt, Artificial Sequence
  RPE65 RNA guide
agggaucaggugguuugggc

SEQ ID NO: 28879 - RNA, 20 nt, Artificial Sequence
  RPE65 RNA guide
agggggagucugcacugaga

SEQ ID NO: 28880 - RNA, 20 nt, Artificial Sequence
  RPE65 RNA guide
agggugguggguuucaugcc

SEQ ID NO: 28881 - RNA, 20 nt, Artificial Sequence
  RPE65 RNA guide
agguaagggaauugaggcuc

SEQ ID NO: 28882 - RNA, 20 nt, Artificial Sequence
  RPE65 RNA guide
agguagcguuuuucugcauu

SEQ ID NO: 28883 - RNA, 20 nt, Artificial Sequence
  RPE65 RNA guide
aggugcuugucacugggccu

SEQ ID NO: 28884 - RNA, 20 nt, Artificial Sequence
  RPE65 RNA guide
aggugguuugggcuuuuuau

SEQ ID NO: 28885 - RNA, 20 nt, Artificial Sequence
  RPE65 RNA guide
agguguaauccugauccuua

SEQ ID NO: 28886 - RNA, 20 nt, Artificial Sequence
  RPE65 RNA guide
agguuagcaucuacaucugc

SEQ ID NO: 28887 - RNA, 20 nt, Artificial Sequence
  RPE65 RNA guide
aguaaaggcgaaugaaagaa

SEQ ID NO: 28888 - RNA, 20 nt, Artificial Sequence
  RPE65 RNA guide
aguaacuuagaggauucaca

SEQ ID NO: 28889 - RNA, 20 nt, Artificial Sequence
  RPE65 RNA guide
aguauuaaaggguggugggu

SEQ ID NO: 28890 - RNA, 20 nt, Artificial Sequence
  RPE65 RNA guide
agucucucuucucuggcuuc

SEQ ID NO: 28891 - RNA, 20 nt, Artificial Sequence
  RPE65 RNA guide
agucugcacugagagacgcc

SEQ ID NO: 28892 - RNA, 20 nt, Artificial Sequence
  RPE65 RNA guide
agugaaaugauagagcuagg

SEQ ID NO: 28893 - RNA, 20 nt, Artificial Sequence
  RPE65 RNA guide
agugacaagcaccugggagu

SEQ ID NO: 28894 - RNA, 20 nt, Artificial Sequence
  RPE65 RNA guide
agugcagacucccccugugg

SEQ ID NO: 28895 - RNA, 20 nt, Artificial Sequence
  RPE65 RNA guide
agugccuggcacauaguaaa

SEQ ID NO: 28896 - RNA, 20 nt, Artificial Sequence
  RPE65 RNA guide
aguuacuuaaacguucugag

SEQ ID NO: 28897 - RNA, 20 nt, Artificial Sequence
  RPE65 RNA guide
aguuugaagaugacaaaggu

SEQ ID NO: 28898 - RNA, 20 nt, Artificial Sequence
  RPE65 RNA guide
auaaaaagcccaaaccaccu

SEQ ID NO: 28899 - RNA, 20 nt, Artificial Sequence
  RPE65 RNA guide
auaaaagaggauggcuucaa

SEQ ID NO: 28900 - RNA, 20 nt, Artificial Sequence
  RPE65 RNA guide
auaaaaugggcaugaaaccc

SEQ ID NO: 28901 - RNA, 20 nt, Artificial Sequence
  RPE65 RNA guide
auaaaugaaggcccagugac

SEQ ID NO: 28902 - RNA, 20 nt, Artificial Sequence
  RPE65 RNA guide
auacucccaggugcuuguca

SEQ ID NO: 28903 - RNA, 20 nt, Artificial Sequence
  RPE65 RNA guide
auagagcuagguuagcaucu

SEQ ID NO: 28904 - RNA, 20 nt, Artificial Sequence
  RPE65 RNA guide
auagcaagaacccauuuucu

SEQ ID NO: 28905 - RNA, 20 nt, Artificial Sequence
  RPE65 RNA guide
auaggaagccagagaagaga

SEQ ID NO: 28906 - RNA, 20 nt, Artificial Sequence
  RPE65 RNA guide
auaggacauuuacuaugugc

SEQ ID NO: 28907 - RNA, 20 nt, Artificial Sequence
  RPE65 RNA guide
aucaggauuacaccuuuguc

SEQ ID NO: 28908 - RNA, 20 nt, Artificial Sequence
  RPE65 RNA guide
aucaggugguuugggcuuuu

SEQ ID NO: 28909 - RNA, 20 nt, Artificial Sequence
  RPE65 RNA guide
aucauuucacugucugugaa

SEQ ID NO: 28910 - RNA, 20 nt, Artificial Sequence
  RPE65 RNA guide
aucccucucccugugaccca

SEQ ID NO: 28911 - RNA, 20 nt, Artificial Sequence
  RPE65 RNA guide
auccucuaaguuacuuaaac

SEQ ID NO: 28912 - RNA, 20 nt, Artificial Sequence
  RPE65 RNA guide
auccucuuuuaugucagucu

SEQ ID NO: 28913 - RNA, 20 nt, Artificial Sequence
  RPE65 RNA guide
auccugauccuuagggaauu

SEQ ID NO: 28914 - RNA, 20 nt, Artificial Sequence
  RPE65 RNA guide
auccuuagggaauuccaauu

SEQ ID NO: 28915 - RNA, 20 nt, Artificial Sequence
  RPE65 RNA guide
aucuacaucugccucccagc

SEQ ID NO: 28916 - RNA, 20 nt, Artificial Sequence
  RPE65 RNA guide
aucugccucccagcagaacc

SEQ ID NO: 28917 - RNA, 20 nt, Artificial Sequence
  RPE65 RNA guide
aucuucaaacugucagugcc

SEQ ID NO: 28918 - RNA, 20 nt, Artificial Sequence
  RPE65 RNA guide
aucuugaagccauccucuuu

SEQ ID NO: 28919 - RNA, 20 nt, Artificial Sequence
  RPE65 RNA guide
augaaacccaccacccuuua

SEQ ID NO: 28920 - RNA, 20 nt, Artificial Sequence
  RPE65 RNA guide
augaaagaaaauggguucuu

SEQ ID NO: 28921 - RNA, 20 nt, Artificial Sequence
  RPE65 RNA guide
augaaggcccagugacaagc

SEQ ID NO: 28922 - RNA, 20 nt, Artificial Sequence
  RPE65 RNA guide
augacaaagguguaauccug

SEQ ID NO: 28923 - RNA, 20 nt, Artificial Sequence
  RPE65 RNA guide
augauagagcuagguuagca

SEQ ID NO: 28924 - RNA, 20 nt, Artificial Sequence
  RPE65 RNA guide
augcagaaaaacgcuaccua

SEQ ID NO: 28925 - RNA, 20 nt, Artificial Sequence
  RPE65 RNA guide
augcccauuuuauuagagga

SEQ ID NO: 28926 - RNA, 20 nt, Artificial Sequence
  RPE65 RNA guide
augcuaaccuagcucuauca

SEQ ID NO: 28927 - RNA, 20 nt, Artificial Sequence
  RPE65 RNA guide
auggcuucaagaugggcgag

SEQ ID NO: 28928 - RNA, 20 nt, Artificial Sequence
  RPE65 RNA guide
augggcaugaaacccaccac

SEQ ID NO: 28929 - RNA, 20 nt, Artificial Sequence
  RPE65 RNA guide
auggguucuugcuauaaaaa

SEQ ID NO: 28930 - RNA, 20 nt, Artificial Sequence
  RPE65 RNA guide
auguagaugcuaaccuagcu

SEQ ID NO: 28931 - RNA, 20 nt, Artificial Sequence
  RPE65 RNA guide
augucagucucucuucucug

SEQ ID NO: 28932 - RNA, 20 nt, Artificial Sequence
  RPE65 RNA guide
auguugguucugcugggagg

SEQ ID NO: 28933 - RNA, 20 nt, Artificial Sequence
  RPE65 RNA guide
auuaaagggugguggguuuc

SEQ ID NO: 28934 - RNA, 20 nt, Artificial Sequence
  RPE65 RNA guide
auuacaccuuugucaucuuc

SEQ ID NO: 28935 - RNA, 20 nt, Artificial Sequence
  RPE65 RNA guide
auuagaggaauguugguucu

SEQ ID NO: 28936 - RNA, 20 nt, Artificial Sequence
  RPE65 RNA guide
auuagguagcguuuuucugc

SEQ ID NO: 28937 - RNA, 20 nt, Artificial Sequence
  RPE65 RNA guide
auucacagacagugaaauga

SEQ ID NO: 28938 - RNA, 20 nt, Artificial Sequence
  RPE65 RNA guide
auuccaauuagguagcguuu

SEQ ID NO: 28939 - RNA, 20 nt, Artificial Sequence
  RPE65 RNA guide
auucccuaaggaucaggauu

SEQ ID NO: 28940 - RNA, 20 nt, Artificial Sequence
  RPE65 RNA guide
auuccucuaauaaaaugggc

SEQ ID NO: 28941 - RNA, 20 nt, Artificial Sequence
  RPE65 RNA guide
auuccuuggcgucucucagu

SEQ ID NO: 28942 - RNA, 20 nt, Artificial Sequence
  RPE65 RNA guide
auugaggcucagaacguuua

SEQ ID NO: 28943 - RNA, 20 nt, Artificial Sequence
  RPE65 RNA guide
auuggaauucccuaaggauc

SEQ ID NO: 28944 - RNA, 20 nt, Artificial Sequence
  RPE65 RNA guide
auuggugucugaauaaauga

SEQ ID NO: 28945 - RNA, 20 nt, Artificial Sequence
  RPE65 RNA guide
auuucacugucugugaaucc

SEQ ID NO: 28946 - RNA, 20 nt, Artificial Sequence
  RPE65 RNA guide
auuucucuaaugcagaaaaa

SEQ ID NO: 28947 - RNA, 20 nt, Artificial Sequence
  RPE65 RNA guide
caaaccaccugaucccucuc

SEQ ID NO: 28948 - RNA, 20 nt, Artificial Sequence
  RPE65 RNA guide
caaacugucagugccuagcu

SEQ ID NO: 28949 - RNA, 20 nt, Artificial Sequence
  RPE65 RNA guide
caaagguguaauccugaucc

SEQ ID NO: 28950 - RNA, 20 nt, Artificial Sequence
  RPE65 RNA guide
caacauuccucuaauaaaau

SEQ ID NO: 28951 - RNA, 20 nt, Artificial Sequence
  RPE65 RNA guide
caagaacccauuuucuuuca

SEQ ID NO: 28952 - RNA, 20 nt, Artificial Sequence
  RPE65 RNA guide
caagcaccugggaguauuaa

SEQ ID NO: 28953 - RNA, 20 nt, Artificial Sequence
  RPE65 RNA guide
caaggaauaggaagccagag

SEQ ID NO: 28954 - RNA, 20 nt, Artificial Sequence
  RPE65 RNA guide
caauuagguagcguuuuucu

SEQ ID NO: 28955 - RNA, 20 nt, Artificial Sequence
  RPE65 RNA guide
cacagacagugaaaugauag

SEQ ID NO: 28956 - RNA, 20 nt, Artificial Sequence
  RPE65 RNA guide
cacagggagagggaucaggu

SEQ ID NO: 28957 - RNA, 20 nt, Artificial Sequence
  RPE65 RNA guide
cacagggggagucugcacug

SEQ ID NO: 28958 - RNA, 20 nt, Artificial Sequence
  RPE65 RNA guide
caccacccuuuaauacuccc

SEQ ID NO: 28959 - RNA, 20 nt, Artificial Sequence
  RPE65 RNA guide
cacccuuuaauacucccagg

SEQ ID NO: 28960 - RNA, 20 nt, Artificial Sequence
  RPE65 RNA guide
caccugaucccucucccugu

SEQ ID NO: 28961 - RNA, 20 nt, Artificial Sequence
  RPE65 RNA guide
caccugggaguauuaaaggg

SEQ ID NO: 28962 - RNA, 20 nt, Artificial Sequence
  RPE65 RNA guide
caccuuugucaucuucaaac

SEQ ID NO: 28963 - RNA, 20 nt, Artificial Sequence
  RPE65 RNA guide
cacugacaguuugaagauga

SEQ ID NO: 28964 - RNA, 20 nt, Artificial Sequence
  RPE65 RNA guide
cacugagagacgccaaggaa

SEQ ID NO: 28965 - RNA, 20 nt, Artificial Sequence
  RPE65 RNA guide
cacugagcuaggcacugaca

SEQ ID NO: 28966 - RNA, 20 nt, Artificial Sequence
  RPE65 RNA guide
cacugggccuucauuuauuc

SEQ ID NO: 28967 - RNA, 20 nt, Artificial Sequence
  RPE65 RNA guide
cacugucugugaauccucua

SEQ ID NO: 28968 - RNA, 20 nt, Artificial Sequence
  RPE65 RNA guide
cagaaaaacgcuaccuaauu

SEQ ID NO: 28969 - RNA, 20 nt, Artificial Sequence
  RPE65 RNA guide
cagaaccaacauuccucuaa

SEQ ID NO: 28970 - RNA, 20 nt, Artificial Sequence
  RPE65 RNA guide
cagaacguuuaaguaacuua

SEQ ID NO: 28971 - RNA, 20 nt, Artificial Sequence
  RPE65 RNA guide
cagacagugaaaugauagag

SEQ ID NO: 28972 - RNA, 20 nt, Artificial Sequence
  RPE65 RNA guide
cagacucccccuguggguca

SEQ ID NO: 28973 - RNA, 20 nt, Artificial Sequence
  RPE65 RNA guide
cagagaagagagacugacau

SEQ ID NO: 28974 - RNA, 20 nt, Artificial Sequence
  RPE65 RNA guide
cagauguagaugcuaaccua

SEQ ID NO: 28975 - RNA, 20 nt, Artificial Sequence
  RPE65 RNA guide
cagcagaaccaacauuccuc

SEQ ID NO: 28976 - RNA, 20 nt, Artificial Sequence
  RPE65 RNA guide
caggauuacaccuuugucau

SEQ ID NO: 28977 - RNA, 20 nt, Artificial Sequence
  RPE65 RNA guide
caggcacugagcuaggcacu

SEQ ID NO: 28978 - RNA, 20 nt, Artificial Sequence
  RPE65 RNA guide
cagggagagggaucaggugg

SEQ ID NO: 28979 - RNA, 20 nt, Artificial Sequence
  RPE65 RNA guide
cagggggagucugcacugag

SEQ ID NO: 28980 - RNA, 20 nt, Artificial Sequence
  RPE65 RNA guide
caggugcuugucacugggcc

SEQ ID NO: 28981 - RNA, 20 nt, Artificial Sequence
  RPE65 RNA guide
caggugguuugggcuuuuua

SEQ ID NO: 28982 - RNA, 20 nt, Artificial Sequence
  RPE65 RNA guide
cagucucucuucucuggcuu

SEQ ID NO: 28983 - RNA, 20 nt, Artificial Sequence
  RPE65 RNA guide
cagugaaaugauagagcuag

SEQ ID NO: 28984 - RNA, 20 nt, Artificial Sequence
  RPE65 RNA guide
cagugacaagcaccugggag

SEQ ID NO: 28985 - RNA, 20 nt, Artificial Sequence
  RPE65 RNA guide
cagugcagacucccccugug

SEQ ID NO: 28986 - RNA, 20 nt, Artificial Sequence
  RPE65 RNA guide
caguuugaagaugacaaagg

SEQ ID NO: 28987 - RNA, 20 nt, Artificial Sequence
  RPE65 RNA guide
cauaaaagaggauggcuuca

SEQ ID NO: 28988 - RNA, 20 nt, Artificial Sequence
  RPE65 RNA guide
cauccucuuuuaugucaguc

SEQ ID NO: 28989 - RNA, 20 nt, Artificial Sequence
  RPE65 RNA guide
caucuacaucugccucccag

SEQ ID NO: 28990 - RNA, 20 nt, Artificial Sequence
  RPE65 RNA guide
caucugccucccagcagaac

SEQ ID NO: 28991 - RNA, 20 nt, Artificial Sequence
  RPE65 RNA guide
caucuucaaacugucagugc

SEQ ID NO: 28992 - RNA, 20 nt, Artificial Sequence
  RPE65 RNA guide
caucuugaagccauccucuu

SEQ ID NO: 28993 - RNA, 20 nt, Artificial Sequence
  RPE65 RNA guide
caugaaacccaccacccuuu

SEQ ID NO: 28994 - RNA, 20 nt, Artificial Sequence
  RPE65 RNA guide
caugcccauuuuauuagagg

SEQ ID NO: 28995 - RNA, 20 nt, Artificial Sequence
  RPE65 RNA guide
cauuagagaaauaaaguaaa

SEQ ID NO: 28996 - RNA, 20 nt, Artificial Sequence
  RPE65 RNA guide
cauuccucuaauaaaauggg

SEQ ID NO: 28997 - RNA, 20 nt, Artificial Sequence
  RPE65 RNA guide
cauucgccuuuacuuuauuu

SEQ ID NO: 28998 - RNA, 20 nt, Artificial Sequence
  RPE65 RNA guide
cauuggugucugaauaaaug

SEQ ID NO: 28999 - RNA, 20 nt, Artificial Sequence
  RPE65 RNA guide
cauuuacuaugugccaggca

SEQ ID NO: 29000 - RNA, 20 nt, Artificial Sequence
  RPE65 RNA guide
cauuucacugucugugaauc

SEQ ID NO: 29001 - RNA, 20 nt, Artificial Sequence
  RPE65 RNA guide
cauuuucuuucauucgccuu

SEQ ID NO: 29002 - RNA, 20 nt, Artificial Sequence
  RPE65 RNA guide
ccaaaccaccugaucccucu

SEQ ID NO: 29003 - RNA, 20 nt, Artificial Sequence
  RPE65 RNA guide
ccaacauuccucuaauaaaa

SEQ ID NO: 29004 - RNA, 20 nt, Artificial Sequence
  RPE65 RNA guide
ccaaggaauaggaagccaga

SEQ ID NO: 29005 - RNA, 20 nt, Artificial Sequence
  RPE65 RNA guide
ccaauuagguagcguuuuuc

SEQ ID NO: 29006 - RNA, 20 nt, Artificial Sequence
  RPE65 RNA guide
ccacagggggagucugcacu

SEQ ID NO: 29007 - RNA, 20 nt, Artificial Sequence
  RPE65 RNA guide
ccaccacccuuuaauacucc

SEQ ID NO: 29008 - RNA, 20 nt, Artificial Sequence
  RPE65 RNA guide
ccacccuuuaauacucccag

SEQ ID NO: 29009 - RNA, 20 nt, Artificial Sequence
  RPE65 RNA guide
ccaccugaucccucucccug

SEQ ID NO: 29010 - RNA, 20 nt, Artificial Sequence
  RPE65 RNA guide
ccagagaagagagacugaca

SEQ ID NO: 29011 - RNA, 20 nt, Artificial Sequence
  RPE65 RNA guide
ccagcagaaccaacauuccu

SEQ ID NO: 29012 - RNA, 20 nt, Artificial Sequence
  RPE65 RNA guide
ccaggcacugagcuaggcac

SEQ ID NO: 29013 - RNA, 20 nt, Artificial Sequence
  RPE65 RNA guide
ccaggugcuugucacugggc

SEQ ID NO: 29014 - RNA, 20 nt, Artificial Sequence
  RPE65 RNA guide
ccagugacaagcaccuggga

SEQ ID NO: 29015 - RNA, 20 nt, Artificial Sequence
  RPE65 RNA guide
ccauccucuuuuaugucagu

SEQ ID NO: 29016 - RNA, 20 nt, Artificial Sequence
  RPE65 RNA guide
ccaucuugaagccauccucu

SEQ ID NO: 29017 - RNA, 20 nt, Artificial Sequence
  RPE65 RNA guide
ccauuggugucugaauaaau

SEQ ID NO: 29018 - RNA, 20 nt, Artificial Sequence
  RPE65 RNA guide
ccauuuuauuagaggaaugu

SEQ ID NO: 29019 - RNA, 20 nt, Artificial Sequence
  RPE65 RNA guide
ccauuuucuuucauucgccu

SEQ ID NO: 29020 - RNA, 20 nt, Artificial Sequence
  RPE65 RNA guide
cccaaaccaccugaucccuc

SEQ ID NO: 29021 - RNA, 20 nt, Artificial Sequence
  RPE65 RNA guide
cccacagggggagucugcac

SEQ ID NO: 29022 - RNA, 20 nt, Artificial Sequence
  RPE65 RNA guide
cccaccacccuuuaauacuc

SEQ ID NO: 29023 - RNA, 20 nt, Artificial Sequence
  RPE65 RNA guide
cccagcagaaccaacauucc

SEQ ID NO: 29024 - RNA, 20 nt, Artificial Sequence
  RPE65 RNA guide
cccaggugcuugucacuggg

SEQ ID NO: 29025 - RNA, 20 nt, Artificial Sequence
  RPE65 RNA guide
cccagugacaagcaccuggg

SEQ ID NO: 29026 - RNA, 20 nt, Artificial Sequence
  RPE65 RNA guide
cccaucuugaagccauccuc

SEQ ID NO: 29027 - RNA, 20 nt, Artificial Sequence
  RPE65 RNA guide
cccauuuuauuagaggaaug

SEQ ID NO: 29028 - RNA, 20 nt, Artificial Sequence
  RPE65 RNA guide
cccauuuucuuucauucgcc

SEQ ID NO: 29029 - RNA, 20 nt, Artificial Sequence
  RPE65 RNA guide
cccccugugggucacaggga

SEQ ID NO: 29030 - RNA, 20 nt, Artificial Sequence
  RPE65 RNA guide
ccccugugggucacagggag

SEQ ID NO: 29031 - RNA, 20 nt, Artificial Sequence
  RPE65 RNA guide
cccuaaggaucaggauuaca

SEQ ID NO: 29032 - RNA, 20 nt, Artificial Sequence
  RPE65 RNA guide
cccucucccugugacccaca

SEQ ID NO: 29033 - RNA, 20 nt, Artificial Sequence
  RPE65 RNA guide
cccugugacccacaggggga

SEQ ID NO: 29034 - RNA, 20 nt, Artificial Sequence
  RPE65 RNA guide
cccugugggucacagggaga

SEQ ID NO: 29035 - RNA, 20 nt, Artificial Sequence
  RPE65 RNA guide
cccuuuaauacucccaggug

SEQ ID NO: 29036 - RNA, 20 nt, Artificial Sequence
  RPE65 RNA guide
ccuaaggaucaggauuacac

SEQ ID NO: 29037 - RNA, 20 nt, Artificial Sequence
  RPE65 RNA guide
ccuaauuggaauucccuaag

SEQ ID NO: 29038 - RNA, 20 nt, Artificial Sequence
  RPE65 RNA guide
ccuagcucuaucauuucacu

SEQ ID NO: 29039 - RNA, 20 nt, Artificial Sequence
  RPE65 RNA guide
ccuauuccuuggcgucucuc

SEQ ID NO: 29040 - RNA, 20 nt, Artificial Sequence
  RPE65 RNA guide
ccucccagcagaaccaacau

SEQ ID NO: 29041 - RNA, 20 nt, Artificial Sequence
  RPE65 RNA guide
ccucuaaguuacuuaaacgu

SEQ ID NO: 29042 - RNA, 20 nt, Artificial Sequence
  RPE65 RNA guide
ccucuaauaaaaugggcaug

SEQ ID NO: 29043 - RNA, 20 nt, Artificial Sequence
  RPE65 RNA guide
ccucucccugugacccacag

SEQ ID NO: 29044 - RNA, 20 nt, Artificial Sequence
  RPE65 RNA guide
ccucuuuuaugucagucucu

SEQ ID NO: 29045 - RNA, 20 nt, Artificial Sequence
  RPE65 RNA guide
ccugaucccucucccuguga

SEQ ID NO: 29046 - RNA, 20 nt, Artificial Sequence
  RPE65 RNA guide
ccugauccuuagggaauucc

SEQ ID NO: 29047 - RNA, 20 nt, Artificial Sequence
  RPE65 RNA guide
ccuggcacauaguaaauguc

SEQ ID NO: 29048 - RNA, 20 nt, Artificial Sequence
  RPE65 RNA guide
ccugggaguauuaaagggug

SEQ ID NO: 29049 - RNA, 20 nt, Artificial Sequence
  RPE65 RNA guide
ccugugacccacagggggag

SEQ ID NO: 29050 - RNA, 20 nt, Artificial Sequence
  RPE65 RNA guide
ccugugggucacagggagag

SEQ ID NO: 29051 - RNA, 20 nt, Artificial Sequence
  RPE65 RNA guide
ccuuagggaauuccaauuag

SEQ ID NO: 29052 - RNA, 20 nt, Artificial Sequence
  RPE65 RNA guide
ccuucauuuauucagacacc

SEQ ID NO: 29053 - RNA, 20 nt, Artificial Sequence
  RPE65 RNA guide
ccuuggcgucucucagugca

SEQ ID NO: 29054 - RNA, 20 nt, Artificial Sequence
  RPE65 RNA guide
ccuuuaauacucccaggugc

SEQ ID NO: 29055 - RNA, 20 nt, Artificial Sequence
  RPE65 RNA guide
ccuuugucaucuucaaacug

SEQ ID NO: 29056 - RNA, 20 nt, Artificial Sequence
  RPE65 RNA guide
cgaaugaaagaaaauggguu

SEQ ID NO: 29057 - RNA, 20 nt, Artificial Sequence
  RPE65 RNA guide
cgccaaggaauaggaagcca

SEQ ID NO: 29058 - RNA, 20 nt, Artificial Sequence
  RPE65 RNA guide
cgcccaucuugaagccaucc

SEQ ID NO: 29059 - RNA, 20 nt, Artificial Sequence
  RPE65 RNA guide
cgccuuuacuuuauuucucu

SEQ ID NO: 29060 - RNA, 20 nt, Artificial Sequence
  RPE65 RNA guide
cgcuaccuaauuggaauucc

SEQ ID NO: 29061 - RNA, 20 nt, Artificial Sequence
  RPE65 RNA guide
cgucucucagugcagacucc

SEQ ID NO: 29062 - RNA, 20 nt, Artificial Sequence
  RPE65 RNA guide
cguucugagccucaauuccc

SEQ ID NO: 29063 - RNA, 20 nt, Artificial Sequence
  RPE65 RNA guide
cguuuaaguaacuuagagga

SEQ ID NO: 29064 - RNA, 20 nt, Artificial Sequence
  RPE65 RNA guide
cuaaccuagcucuaucauuu

SEQ ID NO: 29065 - RNA, 20 nt, Artificial Sequence
  RPE65 RNA guide
cuaaggaucaggauuacacc

SEQ ID NO: 29066 - RNA, 20 nt, Artificial Sequence
  RPE65 RNA guide
cuaaguuacuuaaacguucu

SEQ ID NO: 29067 - RNA, 20 nt, Artificial Sequence
  RPE65 RNA guide
cuaauaaaaugggcaugaaa

SEQ ID NO: 29068 - RNA, 20 nt, Artificial Sequence
  RPE65 RNA guide
cuaaugcagaaaaacgcuac

SEQ ID NO: 29069 - RNA, 20 nt, Artificial Sequence
  RPE65 RNA guide
cuaauuggaauucccuaagg

SEQ ID NO: 29070 - RNA, 20 nt, Artificial Sequence
  RPE65 RNA guide
cuacaucugccucccagcag

SEQ ID NO: 29071 - RNA, 20 nt, Artificial Sequence
  RPE65 RNA guide
cuaccuaauuggaauucccu

SEQ ID NO: 29072 - RNA, 20 nt, Artificial Sequence
  RPE65 RNA guide
cuagcucuaucauuucacug

SEQ ID NO: 29073 - RNA, 20 nt, Artificial Sequence
  RPE65 RNA guide
cuaggcacugacaguuugaa

SEQ ID NO: 29074 - RNA, 20 nt, Artificial Sequence
  RPE65 RNA guide
cuagguuagcaucuacaucu

SEQ ID NO: 29075 - RNA, 20 nt, Artificial Sequence
  RPE65 RNA guide
cuauaaaaagcccaaaccac

SEQ ID NO: 29076 - RNA, 20 nt, Artificial Sequence
  RPE65 RNA guide
cuaucauuucacugucugug

SEQ ID NO: 29077 - RNA, 20 nt, Artificial Sequence
  RPE65 RNA guide
cuauuccuuggcgucucuca

SEQ ID NO: 29078 - RNA, 20 nt, Artificial Sequence
  RPE65 RNA guide
cucagaacguuuaaguaacu

SEQ ID NO: 29079 - RNA, 20 nt, Artificial Sequence
  RPE65 RNA guide
cucagugcagacucccccug

SEQ ID NO: 29080 - RNA, 20 nt, Artificial Sequence
  RPE65 RNA guide
cucccagcagaaccaacauu

SEQ ID NO: 29081 - RNA, 20 nt, Artificial Sequence
  RPE65 RNA guide
cucccaggugcuugucacug

SEQ ID NO: 29082 - RNA, 20 nt, Artificial Sequence
  RPE65 RNA guide
cucccccugugggucacagg

SEQ ID NO: 29083 - RNA, 20 nt, Artificial Sequence
  RPE65 RNA guide
cucccugugacccacagggg

SEQ ID NO: 29084 - RNA, 20 nt, Artificial Sequence
  RPE65 RNA guide
cucgcccaucuugaagccau

SEQ ID NO: 29085 - RNA, 20 nt, Artificial Sequence
  RPE65 RNA guide
cucuaaguuacuuaaacguu

SEQ ID NO: 29086 - RNA, 20 nt, Artificial Sequence
  RPE65 RNA guide
cucuaauaaaaugggcauga

SEQ ID NO: 29087 - RNA, 20 nt, Artificial Sequence
  RPE65 RNA guide
cucuaaugcagaaaaacgcu

SEQ ID NO: 29088 - RNA, 20 nt, Artificial Sequence
  RPE65 RNA guide
cucuaucauuucacugucug

SEQ ID NO: 29089 - RNA, 20 nt, Artificial Sequence
  RPE65 RNA guide
cucucagugcagacuccccc

SEQ ID NO: 29090 - RNA, 20 nt, Artificial Sequence
  RPE65 RNA guide
cucucccugugacccacagg

SEQ ID NO: 29091 - RNA, 20 nt, Artificial Sequence
  RPE65 RNA guide
cucucuucucuggcuuccua

SEQ ID NO: 29092 - RNA, 20 nt, Artificial Sequence
  RPE65 RNA guide
cucuggcuuccuauuccuug

SEQ ID NO: 29093 - RNA, 20 nt, Artificial Sequence
  RPE65 RNA guide
cucuucucuggcuuccuauu

SEQ ID NO: 29094 - RNA, 20 nt, Artificial Sequence
  RPE65 RNA guide
cucuuuuaugucagucucuc

SEQ ID NO: 29095 - RNA, 20 nt, Artificial Sequence
  RPE65 RNA guide
cugaauaaaugaaggcccag

SEQ ID NO: 29096 - RNA, 20 nt, Artificial Sequence
  RPE65 RNA guide
cugacaguuugaagaugaca

SEQ ID NO: 29097 - RNA, 20 nt, Artificial Sequence
  RPE65 RNA guide
cugacauaaaagaggauggc

SEQ ID NO: 29098 - RNA, 20 nt, Artificial Sequence
  RPE65 RNA guide
cugagagacgccaaggaaua

SEQ ID NO: 29099 - RNA, 20 nt, Artificial Sequence
  RPE65 RNA guide
cugagcuaggcacugacagu

SEQ ID NO: 29100 - RNA, 20 nt, Artificial Sequence
  RPE65 RNA guide
cugaucccucucccugugac

SEQ ID NO: 29101 - RNA, 20 nt, Artificial Sequence
  RPE65 RNA guide
cugauccuuagggaauucca

SEQ ID NO: 29102 - RNA, 20 nt, Artificial Sequence
  RPE65 RNA guide
cugcacugagagacgccaag

SEQ ID NO: 29103 - RNA, 20 nt, Artificial Sequence
  RPE65 RNA guide
cugccucccagcagaaccaa

SEQ ID NO: 29104 - RNA, 20 nt, Artificial Sequence
  RPE65 RNA guide
cugcugggaggcagauguag

SEQ ID NO: 29105 - RNA, 20 nt, Artificial Sequence
  RPE65 RNA guide
cuggcacauaguaaaugucc

SEQ ID NO: 29106 - RNA, 20 nt, Artificial Sequence
  RPE65 RNA guide
cuggcuuccuauuccuuggc

SEQ ID NO: 29107 - RNA, 20 nt, Artificial Sequence
  RPE65 RNA guide
cugggaggcagauguagaug

SEQ ID NO: 29108 - RNA, 20 nt, Artificial Sequence
  RPE65 RNA guide
cugggaguauuaaagggugg

SEQ ID NO: 29109 - RNA, 20 nt, Artificial Sequence
  RPE65 RNA guide
cugggccuucauuuauucag

SEQ ID NO: 29110 - RNA, 20 nt, Artificial Sequence
  RPE65 RNA guide
cugucagugccuagcucagu

SEQ ID NO: 29111 - RNA, 20 nt, Artificial Sequence
  RPE65 RNA guide
cugucugugaauccucuaag

SEQ ID NO: 29112 - RNA, 20 nt, Artificial Sequence
  RPE65 RNA guide
cugugaauccucuaaguuac

SEQ ID NO: 29113 - RNA, 20 nt, Artificial Sequence
  RPE65 RNA guide
cugugacccacagggggagu

SEQ ID NO: 29114 - RNA, 20 nt, Artificial Sequence
  RPE65 RNA guide
cugugggucacagggagagg

SEQ ID NO: 29115 - RNA, 20 nt, Artificial Sequence
  RPE65 RNA guide
cuuaaacguucugagccuca

SEQ ID NO: 29116 - RNA, 20 nt, Artificial Sequence
  RPE65 RNA guide
cuuagaggauucacagacag

SEQ ID NO: 29117 - RNA, 20 nt, Artificial Sequence
  RPE65 RNA guide
cuuagggaauuccaauuagg

SEQ ID NO: 29118 - RNA, 20 nt, Artificial Sequence
  RPE65 RNA guide
cuucaaacugucagugccua

SEQ ID NO: 29119 - RNA, 20 nt, Artificial Sequence
  RPE65 RNA guide
cuucauuuauucagacacca

SEQ ID NO: 29120 - RNA, 20 nt, Artificial Sequence
  RPE65 RNA guide
cuuccuauuccuuggcgucu

SEQ ID NO: 29121 - RNA, 20 nt, Artificial Sequence
  RPE65 RNA guide
cuucucuggcuuccuauucc

SEQ ID NO: 29122 - RNA, 20 nt, Artificial Sequence
  RPE65 RNA guide
cuugaagccauccucuuuua

SEQ ID NO: 29123 - RNA, 20 nt, Artificial Sequence
  RPE65 RNA guide
cuugcuauaaaaagcccaaa

SEQ ID NO: 29124 - RNA, 20 nt, Artificial Sequence
  RPE65 RNA guide
cuuggcgucucucagugcag

SEQ ID NO: 29125 - RNA, 20 nt, Artificial Sequence
  RPE65 RNA guide
cuugucacugggccuucauu

SEQ ID NO: 29126 - RNA, 20 nt, Artificial Sequence
  RPE65 RNA guide
cuuuaauacucccaggugcu

SEQ ID NO: 29127 - RNA, 20 nt, Artificial Sequence
  RPE65 RNA guide
cuuugucaucuucaaacugu

SEQ ID NO: 29128 - RNA, 20 nt, Artificial Sequence
  RPE65 RNA guide
cuuuuaugucagucucucuu

SEQ ID NO: 29129 - RNA, 20 nt, Artificial Sequence
  RPE65 RNA guide
gaaaaacgcuaccuaauugg

SEQ ID NO: 29130 - RNA, 20 nt, Artificial Sequence
  RPE65 RNA guide
gaaacccaccacccuuuaau

SEQ ID NO: 29131 - RNA, 20 nt, Artificial Sequence
  RPE65 RNA guide
gaaagaaaauggguucuugc

SEQ ID NO: 29132 - RNA, 20 nt, Artificial Sequence
  RPE65 RNA guide
gaaaugauagagcuagguua

SEQ ID NO: 29133 - RNA, 20 nt, Artificial Sequence
  RPE65 RNA guide
gaacccauuuucuuucauuc

SEQ ID NO: 29134 - RNA, 20 nt, Artificial Sequence
  RPE65 RNA guide
gaacguuuaaguaacuuaga

SEQ ID NO: 29135 - RNA, 20 nt, Artificial Sequence
  RPE65 RNA guide
gaagagagacugacauaaaa

SEQ ID NO: 29136 - RNA, 20 nt, Artificial Sequence
  RPE65 RNA guide
gaagaugacaaagguguaau

SEQ ID NO: 29137 - RNA, 20 nt, Artificial Sequence
  RPE65 RNA guide
gaagccagagaagagagacu

SEQ ID NO: 29138 - RNA, 20 nt, Artificial Sequence
  RPE65 RNA guide
gaagccauccucuuuuaugu

SEQ ID NO: 29139 - RNA, 20 nt, Artificial Sequence
  RPE65 RNA guide
gaaggcccagugacaagcac

SEQ ID NO: 29140 - RNA, 20 nt, Artificial Sequence
  RPE65 RNA guide
gaauaaaugaaggcccagug

SEQ ID NO: 29141 - RNA, 20 nt, Artificial Sequence
  RPE65 RNA guide
gaauaggaagccagagaaga

SEQ ID NO: 29142 - RNA, 20 nt, Artificial Sequence
  RPE65 RNA guide
gaauccucuaaguuacuuaa

SEQ ID NO: 29143 - RNA, 20 nt, Artificial Sequence
  RPE65 RNA guide
gaaugaaagaaaauggguuc

SEQ ID NO: 29144 - RNA, 20 nt, Artificial Sequence
  RPE65 RNA guide
gaauguugguucugcuggga

SEQ ID NO: 29145 - RNA, 20 nt, Artificial Sequence
  RPE65 RNA guide
gaauuccaauuagguagcgu

SEQ ID NO: 29146 - RNA, 20 nt, Artificial Sequence
  RPE65 RNA guide
gaauucccuaaggaucagga

SEQ ID NO: 29147 - RNA, 20 nt, Artificial Sequence
  RPE65 RNA guide
gaauugaggcucagaacguu

SEQ ID NO: 29148 - RNA, 20 nt, Artificial Sequence
  RPE65 RNA guide
gacaaagguguaauccugau

SEQ ID NO: 29149 - RNA, 20 nt, Artificial Sequence
  RPE65 RNA guide
gacaagcaccugggaguauu

SEQ ID NO: 29150 - RNA, 20 nt, Artificial Sequence
  RPE65 RNA guide
gacagugaaaugauagagcu

SEQ ID NO: 29151 - RNA, 20 nt, Artificial Sequence
  RPE65 RNA guide
gacaguuugaagaugacaaa

SEQ ID NO: 29152 - RNA, 20 nt, Artificial Sequence
  RPE65 RNA guide
gacauaaaagaggauggcuu

SEQ ID NO: 29153 - RNA, 20 nt, Artificial Sequence
  RPE65 RNA guide
gacauuuacuaugugccagg

SEQ ID NO: 29154 - RNA, 20 nt, Artificial Sequence
  RPE65 RNA guide
gacccacagggggagucugc

SEQ ID NO: 29155 - RNA, 20 nt, Artificial Sequence
  RPE65 RNA guide
gacgccaaggaauaggaagc

SEQ ID NO: 29156 - RNA, 20 nt, Artificial Sequence
  RPE65 RNA guide
gacucccccugugggucaca

SEQ ID NO: 29157 - RNA, 20 nt, Artificial Sequence
  RPE65 RNA guide
gacugacauaaaagaggaug

SEQ ID NO: 29158 - RNA, 20 nt, Artificial Sequence
  RPE65 RNA guide
gagaaauaaaguaaaggcga

SEQ ID NO: 29159 - RNA, 20 nt, Artificial Sequence
  RPE65 RNA guide
gagaagagagacugacauaa

SEQ ID NO: 29160 - RNA, 20 nt, Artificial Sequence
  RPE65 RNA guide
gagacgccaaggaauaggaa

SEQ ID NO: 29161 - RNA, 20 nt, Artificial Sequence
  RPE65 RNA guide
gagacugacauaaaagagga

SEQ ID NO: 29162 - RNA, 20 nt, Artificial Sequence
  RPE65 RNA guide
gagagacgccaaggaauagg

SEQ ID NO: 29163 - RNA, 20 nt, Artificial Sequence
  RPE65 RNA guide
gagagacugacauaaaagag

SEQ ID NO: 29164 - RNA, 20 nt, Artificial Sequence
  RPE65 RNA guide
gagagggaucaggugguuug

SEQ ID NO: 29165 - RNA, 20 nt, Artificial Sequence
  RPE65 RNA guide
gagcuaggcacugacaguuu

SEQ ID NO: 29166 - RNA, 20 nt, Artificial Sequence
  RPE65 RNA guide
gagcuagguuagcaucuaca

SEQ ID NO: 29167 - RNA, 20 nt, Artificial Sequence
  RPE65 RNA guide
gaggaauguugguucugcug

SEQ ID NO: 29168 - RNA, 20 nt, Artificial Sequence
  RPE65 RNA guide
gaggauggcuucaagauggg

SEQ ID NO: 29169 - RNA, 20 nt, Artificial Sequence
  RPE65 RNA guide
gaggauucacagacagugaa

SEQ ID NO: 29170 - RNA, 20 nt, Artificial Sequence
  RPE65 RNA guide
gaggcagauguagaugcuaa

SEQ ID NO: 29171 - RNA, 20 nt, Artificial Sequence
  RPE65 RNA guide
gaggcucagaacguuuaagu

SEQ ID NO: 29172 - RNA, 20 nt, Artificial Sequence
  RPE65 RNA guide
gagggaucaggugguuuggg

SEQ ID NO: 29173 - RNA, 20 nt, Artificial Sequence
  RPE65 RNA guide
gaguauuaaagggugguggg

SEQ ID NO: 29174 - RNA, 20 nt, Artificial Sequence
  RPE65 RNA guide
gagucugcacugagagacgc

SEQ ID NO: 29175 - RNA, 20 nt, Artificial Sequence
  RPE65 RNA guide
gauagagcuagguuagcauc

SEQ ID NO: 29176 - RNA, 20 nt, Artificial Sequence
  RPE65 RNA guide
gaucaggauuacaccuuugu

SEQ ID NO: 29177 - RNA, 20 nt, Artificial Sequence
  RPE65 RNA guide
gaucaggugguuugggcuuu

SEQ ID NO: 29178 - RNA, 20 nt, Artificial Sequence
  RPE65 RNA guide
gaucccucucccugugaccc

SEQ ID NO: 29179 - RNA, 20 nt, Artificial Sequence
  RPE65 RNA guide
gauccuuagggaauuccaau

SEQ ID NO: 29180 - RNA, 20 nt, Artificial Sequence
  RPE65 RNA guide
gaugacaaagguguaauccu

SEQ ID NO: 29181 - RNA, 20 nt, Artificial Sequence
  RPE65 RNA guide
gaugcuaaccuagcucuauc

SEQ ID NO: 29182 - RNA, 20 nt, Artificial Sequence
  RPE65 RNA guide
gauggcuucaagaugggcga

SEQ ID NO: 29183 - RNA, 20 nt, Artificial Sequence
  RPE65 RNA guide
gauguagaugcuaaccuagc

SEQ ID NO: 29184 - RNA, 20 nt, Artificial Sequence
  RPE65 RNA guide
gauuacaccuuugucaucuu

SEQ ID NO: 29185 - RNA, 20 nt, Artificial Sequence
  RPE65 RNA guide
gauucacagacagugaaaug

SEQ ID NO: 29186 - RNA, 20 nt, Artificial Sequence
  RPE65 RNA guide
gcaagaacccauuuucuuuc

SEQ ID NO: 29187 - RNA, 20 nt, Artificial Sequence
  RPE65 RNA guide
gcaccugggaguauuaaagg

SEQ ID NO: 29188 - RNA, 20 nt, Artificial Sequence
  RPE65 RNA guide
gcacugacaguuugaagaug

SEQ ID NO: 29189 - RNA, 20 nt, Artificial Sequence
  RPE65 RNA guide
gcacugagagacgccaagga

SEQ ID NO: 29190 - RNA, 20 nt, Artificial Sequence
  RPE65 RNA guide
gcacugagcuaggcacugac

SEQ ID NO: 29191 - RNA, 20 nt, Artificial Sequence
  RPE65 RNA guide
gcagaaaaacgcuaccuaau

SEQ ID NO: 29192 - RNA, 20 nt, Artificial Sequence
  RPE65 RNA guide
gcagaaccaacauuccucua

SEQ ID NO: 29193 - RNA, 20 nt, Artificial Sequence
  RPE65 RNA guide
gcagacucccccuguggguc

SEQ ID NO: 29194 - RNA, 20 nt, Artificial Sequence
  RPE65 RNA guide
gcagauguagaugcuaaccu

SEQ ID NO: 29195 - RNA, 20 nt, Artificial Sequence
  RPE65 RNA guide
gcaucuacaucugccuccca

SEQ ID NO: 29196 - RNA, 20 nt, Artificial Sequence
  RPE65 RNA guide
gcaugaaacccaccacccuu

SEQ ID NO: 29197 - RNA, 20 nt, Artificial Sequence
  RPE65 RNA guide
gcauuagagaaauaaaguaa

SEQ ID NO: 29198 - RNA, 20 nt, Artificial Sequence
  RPE65 RNA guide
gccaaggaauaggaagccag

SEQ ID NO: 29199 - RNA, 20 nt, Artificial Sequence
  RPE65 RNA guide
gccagagaagagagacugac

SEQ ID NO: 29200 - RNA, 20 nt, Artificial Sequence
  RPE65 RNA guide
gccaggcacugagcuaggca

SEQ ID NO: 29201 - RNA, 20 nt, Artificial Sequence
  RPE65 RNA guide
gccauccucuuuuaugucag

SEQ ID NO: 29202 - RNA, 20 nt, Artificial Sequence
  RPE65 RNA guide
gcccaaaccaccugaucccu

SEQ ID NO: 29203 - RNA, 20 nt, Artificial Sequence
  RPE65 RNA guide
gcccagugacaagcaccugg

SEQ ID NO: 29204 - RNA, 20 nt, Artificial Sequence
  RPE65 RNA guide
gcccaucuugaagccauccu

SEQ ID NO: 29205 - RNA, 20 nt, Artificial Sequence
  RPE65 RNA guide
gcccauuuuauuagaggaau

SEQ ID NO: 29206 - RNA, 20 nt, Artificial Sequence
  RPE65 RNA guide
gccucccagcagaaccaaca

SEQ ID NO: 29207 - RNA, 20 nt, Artificial Sequence
  RPE65 RNA guide
gccuggcacauaguaaaugu

SEQ ID NO: 29208 - RNA, 20 nt, Artificial Sequence
  RPE65 RNA guide
gccuucauuuauucagacac

SEQ ID NO: 29209 - RNA, 20 nt, Artificial Sequence
  RPE65 RNA guide
gccuuuacuuuauuucucua

SEQ ID NO: 29210 - RNA, 20 nt, Artificial Sequence
  RPE65 RNA guide
gcgaaugaaagaaaaugggu

SEQ ID NO: 29211 - RNA, 20 nt, Artificial Sequence
  RPE65 RNA guide
gcgucucucagugcagacuc

SEQ ID NO: 29212 - RNA, 20 nt, Artificial Sequence
  RPE65 RNA guide
gcguuuuucugcauuagaga

SEQ ID NO: 29213 - RNA, 20 nt, Artificial Sequence
  RPE65 RNA guide
gcuaaccuagcucuaucauu

SEQ ID NO: 29214 - RNA, 20 nt, Artificial Sequence
  RPE65 RNA guide
gcuaccuaauuggaauuccc

SEQ ID NO: 29215 - RNA, 20 nt, Artificial Sequence
  RPE65 RNA guide
gcuaggcacugacaguuuga

SEQ ID NO: 29216 - RNA, 20 nt, Artificial Sequence
  RPE65 RNA guide
gcuagguuagcaucuacauc

SEQ ID NO: 29217 - RNA, 20 nt, Artificial Sequence
  RPE65 RNA guide
gcuauaaaaagcccaaacca

SEQ ID NO: 29218 - RNA, 20 nt, Artificial Sequence
  RPE65 RNA guide
gcucagaacguuuaaguaac

SEQ ID NO: 29219 - RNA, 20 nt, Artificial Sequence
  RPE65 RNA guide
gcucuaucauuucacugucu

SEQ ID NO: 29220 - RNA, 20 nt, Artificial Sequence
  RPE65 RNA guide
gcugggaggcagauguagau

SEQ ID NO: 29221 - RNA, 20 nt, Artificial Sequence
  RPE65 RNA guide
gcuuccuauuccuuggcguc

SEQ ID NO: 29222 - RNA, 20 nt, Artificial Sequence
  RPE65 RNA guide
gcuugucacugggccuucau

SEQ ID NO: 29223 - RNA, 20 nt, Artificial Sequence
  RPE65 RNA guide
gcuuuuuauagcaagaaccc

SEQ ID NO: 29224 - RNA, 20 nt, Artificial Sequence
  RPE65 RNA guide
ggaagccagagaagagagac

SEQ ID NO: 29225 - RNA, 20 nt, Artificial Sequence
  RPE65 RNA guide
ggaauaggaagccagagaag

SEQ ID NO: 29226 - RNA, 20 nt, Artificial Sequence
  RPE65 RNA guide
ggaauguugguucugcuggg

SEQ ID NO: 29227 - RNA, 20 nt, Artificial Sequence
  RPE65 RNA guide
ggaauuccaauuagguagcg

SEQ ID NO: 29228 - RNA, 20 nt, Artificial Sequence
  RPE65 RNA guide
ggaauucccuaaggaucagg

SEQ ID NO: 29229 - RNA, 20 nt, Artificial Sequence
  RPE65 RNA guide
ggaauugaggcucagaacgu

SEQ ID NO: 29230 - RNA, 20 nt, Artificial Sequence
  RPE65 RNA guide
ggacauuuacuaugugccag

SEQ ID NO: 29231 - RNA, 20 nt, Artificial Sequence
  RPE65 RNA guide
ggagagggaucaggugguuu

SEQ ID NO: 29232 - RNA, 20 nt, Artificial Sequence
  RPE65 RNA guide
ggaggcagauguagaugcua

SEQ ID NO: 29233 - RNA, 20 nt, Artificial Sequence
  RPE65 RNA guide
ggaguauuaaaggguggugg

SEQ ID NO: 29234 - RNA, 20 nt, Artificial Sequence
  RPE65 RNA guide
ggagucugcacugagagacg

SEQ ID NO: 29235 - RNA, 20 nt, Artificial Sequence
  RPE65 RNA guide
ggaucaggauuacaccuuug

SEQ ID NO: 29236 - RNA, 20 nt, Artificial Sequence
  RPE65 RNA guide
ggaucaggugguuugggcuu

SEQ ID NO: 29237 - RNA, 20 nt, Artificial Sequence
  RPE65 RNA guide
ggauggcuucaagaugggcg

SEQ ID NO: 29238 - RNA, 20 nt, Artificial Sequence
  RPE65 RNA guide
ggauuacaccuuugucaucu

SEQ ID NO: 29239 - RNA, 20 nt, Artificial Sequence
  RPE65 RNA guide
ggauucacagacagugaaau

SEQ ID NO: 29240 - RNA, 20 nt, Artificial Sequence
  RPE65 RNA guide
ggcacauaguaaauguccua

SEQ ID NO: 29241 - RNA, 20 nt, Artificial Sequence
  RPE65 RNA guide
ggcacugacaguuugaagau

SEQ ID NO: 29242 - RNA, 20 nt, Artificial Sequence
  RPE65 RNA guide
ggcacugagcuaggcacuga

SEQ ID NO: 29243 - RNA, 20 nt, Artificial Sequence
  RPE65 RNA guide
ggcagauguagaugcuaacc

SEQ ID NO: 29244 - RNA, 20 nt, Artificial Sequence
  RPE65 RNA guide
ggcaugaaacccaccacccu

SEQ ID NO: 29245 - RNA, 20 nt, Artificial Sequence
  RPE65 RNA guide
ggcccagugacaagcaccug

SEQ ID NO: 29246 - RNA, 20 nt, Artificial Sequence
  RPE65 RNA guide
ggccuucauuuauucagaca

SEQ ID NO: 29247 - RNA, 20 nt, Artificial Sequence
  RPE65 RNA guide
ggcgaaugaaagaaaauggg

SEQ ID NO: 29248 - RNA, 20 nt, Artificial Sequence
  RPE65 RNA guide
ggcgucucucagugcagacu

SEQ ID NO: 29249 - RNA, 20 nt, Artificial Sequence
  RPE65 RNA guide
ggcucagaacguuuaaguaa

SEQ ID NO: 29250 - RNA, 20 nt, Artificial Sequence
  RPE65 RNA guide
ggcuucaagaugggcgagac

SEQ ID NO: 29251 - RNA, 20 nt, Artificial Sequence
  RPE65 RNA guide
ggcuuccuauuccuuggcgu

SEQ ID NO: 29252 - RNA, 20 nt, Artificial Sequence
  RPE65 RNA guide
ggcuuuuuauagcaagaacc

SEQ ID NO: 29253 - RNA, 20 nt, Artificial Sequence
  RPE65 RNA guide
gggaauuccaauuagguagc

SEQ ID NO: 29254 - RNA, 20 nt, Artificial Sequence
  RPE65 RNA guide
gggaauugaggcucagaacg

SEQ ID NO: 29255 - RNA, 20 nt, Artificial Sequence
  RPE65 RNA guide
gggagagggaucaggugguu

SEQ ID NO: 29256 - RNA, 20 nt, Artificial Sequence
  RPE65 RNA guide
gggaggcagauguagaugcu

SEQ ID NO: 29257 - RNA, 20 nt, Artificial Sequence
  RPE65 RNA guide
gggaguauuaaaggguggug

SEQ ID NO: 29258 - RNA, 20 nt, Artificial Sequence
  RPE65 RNA guide
gggagucugcacugagagac

SEQ ID NO: 29259 - RNA, 20 nt, Artificial Sequence
  RPE65 RNA guide
gggaucaggugguuugggcu

SEQ ID NO: 29260 - RNA, 20 nt, Artificial Sequence
  RPE65 RNA guide
gggcaugaaacccaccaccc

SEQ ID NO: 29261 - RNA, 20 nt, Artificial Sequence
  RPE65 RNA guide
gggccuucauuuauucagac

SEQ ID NO: 29262 - RNA, 20 nt, Artificial Sequence
  RPE65 RNA guide
gggcuuuuuauagcaagaac

SEQ ID NO: 29263 - RNA, 20 nt, Artificial Sequence
  RPE65 RNA guide
ggggagucugcacugagaga

SEQ ID NO: 29264 - RNA, 20 nt, Artificial Sequence
  RPE65 RNA guide
gggggagucugcacugagag

SEQ ID NO: 29265 - RNA, 20 nt, Artificial Sequence
  RPE65 RNA guide
gggucacagggagagggauc

SEQ ID NO: 29266 - RNA, 20 nt, Artificial Sequence
  RPE65 RNA guide
gggugguggguuucaugccc

SEQ ID NO: 29267 - RNA, 20 nt, Artificial Sequence
  RPE65 RNA guide
ggguucuugcuauaaaaagc

SEQ ID NO: 29268 - RNA, 20 nt, Artificial Sequence
  RPE65 RNA guide
ggguuucaugcccauuuuau

SEQ ID NO: 29269 - RNA, 20 nt, Artificial Sequence
  RPE65 RNA guide
gguaagggaauugaggcuca

SEQ ID NO: 29270 - RNA, 20 nt, Artificial Sequence
  RPE65 RNA guide
gguagcguuuuucugcauua

SEQ ID NO: 29271 - RNA, 20 nt, Artificial Sequence
  RPE65 RNA guide
ggucacagggagagggauca

SEQ ID NO: 29272 - RNA, 20 nt, Artificial Sequence
  RPE65 RNA guide
ggucucgcccaucuugaagc

SEQ ID NO: 29273 - RNA, 20 nt, Artificial Sequence
  RPE65 RNA guide
ggugcuugucacugggccuu

SEQ ID NO: 29274 - RNA, 20 nt, Artificial Sequence
  RPE65 RNA guide
gguggguuucaugcccauuu

SEQ ID NO: 29275 - RNA, 20 nt, Artificial Sequence
  RPE65 RNA guide
ggugguggguuucaugccca

SEQ ID NO: 29276 - RNA, 20 nt, Artificial Sequence
  RPE65 RNA guide
ggugguuugggcuuuuuaua

SEQ ID NO: 29277 - RNA, 20 nt, Artificial Sequence
  RPE65 RNA guide
gguguaauccugauccuuag

SEQ ID NO: 29278 - RNA, 20 nt, Artificial Sequence
  RPE65 RNA guide
ggugucugaauaaaugaagg

SEQ ID NO: 29279 - RNA, 20 nt, Artificial Sequence
  RPE65 RNA guide
gguuagcaucuacaucugcc

SEQ ID NO: 29280 - RNA, 20 nt, Artificial Sequence
  RPE65 RNA guide
gguucugcugggaggcagau

SEQ ID NO: 29281 - RNA, 20 nt, Artificial Sequence
  RPE65 RNA guide
gguucuugcuauaaaaagcc

SEQ ID NO: 29282 - RNA, 20 nt, Artificial Sequence
  RPE65 RNA guide
gguuucaugcccauuuuauu

SEQ ID NO: 29283 - RNA, 20 nt, Artificial Sequence
  RPE65 RNA guide
gguuugggcuuuuuauagca

SEQ ID NO: 29284 - RNA, 20 nt, Artificial Sequence
  RPE65 RNA guide
guaaaggcgaaugaaagaaa

SEQ ID NO: 29285 - RNA, 20 nt, Artificial Sequence
  RPE65 RNA guide
guaacuuagaggauucacag

SEQ ID NO: 29286 - RNA, 20 nt, Artificial Sequence
  RPE65 RNA guide
guaagggaauugaggcucag

SEQ ID NO: 29287 - RNA, 20 nt, Artificial Sequence
  RPE65 RNA guide
guaauccugauccuuaggga

SEQ ID NO: 29288 - RNA, 20 nt, Artificial Sequence
  RPE65 RNA guide
guagaugcuaaccuagcucu

SEQ ID NO: 29289 - RNA, 20 nt, Artificial Sequence
  RPE65 RNA guide
guagcguuuuucugcauuag

SEQ ID NO: 29290 - RNA, 20 nt, Artificial Sequence
  RPE65 RNA guide
guauuaaagggugguggguu

SEQ ID NO: 29291 - RNA, 20 nt, Artificial Sequence
  RPE65 RNA guide
gucacagggagagggaucag

SEQ ID NO: 29292 - RNA, 20 nt, Artificial Sequence
  RPE65 RNA guide
gucacugggccuucauuuau

SEQ ID NO: 29293 - RNA, 20 nt, Artificial Sequence
  RPE65 RNA guide
gucagucucucuucucuggc

SEQ ID NO: 29294 - RNA, 20 nt, Artificial Sequence
  RPE65 RNA guide
gucagugccuagcucagugc

SEQ ID NO: 29295 - RNA, 20 nt, Artificial Sequence
  RPE65 RNA guide
gucaucuucaaacugucagu

SEQ ID NO: 29296 - RNA, 20 nt, Artificial Sequence
  RPE65 RNA guide
gucucgcccaucuugaagcc

SEQ ID NO: 29297 - RNA, 20 nt, Artificial Sequence
  RPE65 RNA guide
gucucucagugcagacuccc

SEQ ID NO: 29298 - RNA, 20 nt, Artificial Sequence
  RPE65 RNA guide
gucucucuucucuggcuucc

SEQ ID NO: 29299 - RNA, 20 nt, Artificial Sequence
  RPE65 RNA guide
gucugaauaaaugaaggccc

SEQ ID NO: 29300 - RNA, 20 nt, Artificial Sequence
  RPE65 RNA guide
gucugcacugagagacgcca

SEQ ID NO: 29301 - RNA, 20 nt, Artificial Sequence
  RPE65 RNA guide
gucugugaauccucuaaguu

SEQ ID NO: 29302 - RNA, 20 nt, Artificial Sequence
  RPE65 RNA guide
gugaaaugauagagcuaggu

SEQ ID NO: 29303 - RNA, 20 nt, Artificial Sequence
  RPE65 RNA guide
gugaauccucuaaguuacuu

SEQ ID NO: 29304 - RNA, 20 nt, Artificial Sequence
  RPE65 RNA guide
gugacaagcaccugggagua

SEQ ID NO: 29305 - RNA, 20 nt, Artificial Sequence
  RPE65 RNA guide
gugacccacagggggagucu

SEQ ID NO: 29306 - RNA, 20 nt, Artificial Sequence
  RPE65 RNA guide
gugcagacucccccuguggg

SEQ ID NO: 29307 - RNA, 20 nt, Artificial Sequence
  RPE65 RNA guide
gugccuggcacauaguaaau

SEQ ID NO: 29308 - RNA, 20 nt, Artificial Sequence
  RPE65 RNA guide
gugcuugucacugggccuuc

SEQ ID NO: 29309 - RNA, 20 nt, Artificial Sequence
  RPE65 RNA guide
gugggucacagggagaggga

SEQ ID NO: 29310 - RNA, 20 nt, Artificial Sequence
  RPE65 RNA guide
guggguuucaugcccauuuu

SEQ ID NO: 29311 - RNA, 20 nt, Artificial Sequence
  RPE65 RNA guide
gugguggguuucaugcccau

SEQ ID NO: 29312 - RNA, 20 nt, Artificial Sequence
  RPE65 RNA guide
gugguuugggcuuuuuauag

SEQ ID NO: 29313 - RNA, 20 nt, Artificial Sequence
  RPE65 RNA guide
guguaauccugauccuuagg

SEQ ID NO: 29314 - RNA, 20 nt, Artificial Sequence
  RPE65 RNA guide
gugucugaauaaaugaaggc

SEQ ID NO: 29315 - RNA, 20 nt, Artificial Sequence
  RPE65 RNA guide
guuacuuaaacguucugagc

SEQ ID NO: 29316 - RNA, 20 nt, Artificial Sequence
  RPE65 RNA guide
guuagcaucuacaucugccu

SEQ ID NO: 29317 - RNA, 20 nt, Artificial Sequence
  RPE65 RNA guide
guuccauuggugucugaaua

SEQ ID NO: 29318 - RNA, 20 nt, Artificial Sequence
  RPE65 RNA guide
guucugagccucaauucccu

SEQ ID NO: 29319 - RNA, 20 nt, Artificial Sequence
  RPE65 RNA guide
guucugcugggaggcagaug

SEQ ID NO: 29320 - RNA, 20 nt, Artificial Sequence
  RPE65 RNA guide
guucuugcuauaaaaagccc

SEQ ID NO: 29321 - RNA, 20 nt, Artificial Sequence
  RPE65 RNA guide
guuggucucgcccaucuuga

SEQ ID NO: 29322 - RNA, 20 nt, Artificial Sequence
  RPE65 RNA guide
guugguucugcugggaggca

SEQ ID NO: 29323 - RNA, 20 nt, Artificial Sequence
  RPE65 RNA guide
guuuaaguaacuuagaggau

SEQ ID NO: 29324 - RNA, 20 nt, Artificial Sequence
  RPE65 RNA guide
guuucaugcccauuuuauua

SEQ ID NO: 29325 - RNA, 20 nt, Artificial Sequence
  RPE65 RNA guide
guuugaagaugacaaaggug

SEQ ID NO: 29326 - RNA, 20 nt, Artificial Sequence
  RPE65 RNA guide
guuugggcuuuuuauagcaa

SEQ ID NO: 29327 - RNA, 20 nt, Artificial Sequence
  RPE65 RNA guide
uaaaaagcccaaaccaccug

SEQ ID NO: 29328 - RNA, 20 nt, Artificial Sequence
  RPE65 RNA guide
uaaaagaggauggcuucaag

SEQ ID NO: 29329 - RNA, 20 nt, Artificial Sequence
  RPE65 RNA guide
uaaaaugggcaugaaaccca

SEQ ID NO: 29330 - RNA, 20 nt, Artificial Sequence
  RPE65 RNA guide
uaaacguucugagccucaau

SEQ ID NO: 29331 - RNA, 20 nt, Artificial Sequence
  RPE65 RNA guide
uaaaggcgaaugaaagaaaa

SEQ ID NO: 29332 - RNA, 20 nt, Artificial Sequence
  RPE65 RNA guide
uaaagggugguggguuucau

SEQ ID NO: 29333 - RNA, 20 nt, Artificial Sequence
  RPE65 RNA guide
uaaaugaaggcccagugaca

SEQ ID NO: 29334 - RNA, 20 nt, Artificial Sequence
  RPE65 RNA guide
uaaccuagcucuaucauuuc

SEQ ID NO: 29335 - RNA, 20 nt, Artificial Sequence
  RPE65 RNA guide
uaacuuagaggauucacaga

SEQ ID NO: 29336 - RNA, 20 nt, Artificial Sequence
  RPE65 RNA guide
uaaggaucaggauuacaccu

SEQ ID NO: 29337 - RNA, 20 nt, Artificial Sequence
  RPE65 RNA guide
uaagggaauugaggcucaga

SEQ ID NO: 29338 - RNA, 20 nt, Artificial Sequence
  RPE65 RNA guide
uaaguaacuuagaggauuca

SEQ ID NO: 29339 - RNA, 20 nt, Artificial Sequence
  RPE65 RNA guide
uaaguuacuuaaacguucug

SEQ ID NO: 29340 - RNA, 20 nt, Artificial Sequence
  RPE65 RNA guide
uaauaaaaugggcaugaaac

SEQ ID NO: 29341 - RNA, 20 nt, Artificial Sequence
  RPE65 RNA guide
uaauacucccaggugcuugu

SEQ ID NO: 29342 - RNA, 20 nt, Artificial Sequence
  RPE65 RNA guide
uaauccugauccuuagggaa

SEQ ID NO: 29343 - RNA, 20 nt, Artificial Sequence
  RPE65 RNA guide
uaaugcagaaaaacgcuacc

SEQ ID NO: 29344 - RNA, 20 nt, Artificial Sequence
  RPE65 RNA guide
uaauuggaauucccuaagga

SEQ ID NO: 29345 - RNA, 20 nt, Artificial Sequence
  RPE65 RNA guide
uacaccuuugucaucuucaa

SEQ ID NO: 29346 - RNA, 20 nt, Artificial Sequence
  RPE65 RNA guide
uacaucugccucccagcaga

SEQ ID NO: 29347 - RNA, 20 nt, Artificial Sequence
  RPE65 RNA guide
uaccuaauuggaauucccua

SEQ ID NO: 29348 - RNA, 20 nt, Artificial Sequence
  RPE65 RNA guide
uacucccaggugcuugucac

SEQ ID NO: 29349 - RNA, 20 nt, Artificial Sequence
  RPE65 RNA guide
uacuuaaacguucugagccu

SEQ ID NO: 29350 - RNA, 20 nt, Artificial Sequence
  RPE65 RNA guide
uagagcuagguuagcaucua

SEQ ID NO: 29351 - RNA, 20 nt, Artificial Sequence
  RPE65 RNA guide
uagaggaauguugguucugc

SEQ ID NO: 29352 - RNA, 20 nt, Artificial Sequence
  RPE65 RNA guide
uagaggauucacagacagug

SEQ ID NO: 29353 - RNA, 20 nt, Artificial Sequence
  RPE65 RNA guide
uagaugcuaaccuagcucua

SEQ ID NO: 29354 - RNA, 20 nt, Artificial Sequence
  RPE65 RNA guide
uagcaagaacccauuuucuu

SEQ ID NO: 29355 - RNA, 20 nt, Artificial Sequence
  RPE65 RNA guide
uagcaucuacaucugccucc

SEQ ID NO: 29356 - RNA, 20 nt, Artificial Sequence
  RPE65 RNA guide
uagcguuuuucugcauuaga

SEQ ID NO: 29357 - RNA, 20 nt, Artificial Sequence
  RPE65 RNA guide
uagcucuaucauuucacugu

SEQ ID NO: 29358 - RNA, 20 nt, Artificial Sequence
  RPE65 RNA guide
uaggaagccagagaagagag

SEQ ID NO: 29359 - RNA, 20 nt, Artificial Sequence
  RPE65 RNA guide
uaggacauuuacuaugugcc

SEQ ID NO: 29360 - RNA, 20 nt, Artificial Sequence
  RPE65 RNA guide
uaggcacugacaguuugaag

SEQ ID NO: 29361 - RNA, 20 nt, Artificial Sequence
  RPE65 RNA guide
uagggaauuccaauuaggua

SEQ ID NO: 29362 - RNA, 20 nt, Artificial Sequence
  RPE65 RNA guide
uagguagcguuuuucugcau

SEQ ID NO: 29363 - RNA, 20 nt, Artificial Sequence
  RPE65 RNA guide
uagguuagcaucuacaucug

SEQ ID NO: 29364 - RNA, 20 nt, Artificial Sequence
  RPE65 RNA guide
uauaaaaagcccaaaccacc

SEQ ID NO: 29365 - RNA, 20 nt, Artificial Sequence
  RPE65 RNA guide
uauagcaagaacccauuuuc

SEQ ID NO: 29366 - RNA, 20 nt, Artificial Sequence
  RPE65 RNA guide
uauaggacauuuacuaugug

SEQ ID NO: 29367 - RNA, 20 nt, Artificial Sequence
  RPE65 RNA guide
uaucauuucacugucuguga

SEQ ID NO: 29368 - RNA, 20 nt, Artificial Sequence
  RPE65 RNA guide
uaugucagucucucuucucu

SEQ ID NO: 29369 - RNA, 20 nt, Artificial Sequence
  RPE65 RNA guide
uauuaaagggugguggguuu

SEQ ID NO: 29370 - RNA, 20 nt, Artificial Sequence
  RPE65 RNA guide
uauuagaggaauguugguuc

SEQ ID NO: 29371 - RNA, 20 nt, Artificial Sequence
  RPE65 RNA guide
uauuccuuggcgucucucag

SEQ ID NO: 29372 - RNA, 20 nt, Artificial Sequence
  RPE65 RNA guide
uauuucucuaaugcagaaaa

SEQ ID NO: 29373 - RNA, 20 nt, Artificial Sequence
  RPE65 RNA guide
ucaaacugucagugccuagc

SEQ ID NO: 29374 - RNA, 20 nt, Artificial Sequence
  RPE65 RNA guide
ucacagacagugaaaugaua

SEQ ID NO: 29375 - RNA, 20 nt, Artificial Sequence
  RPE65 RNA guide
ucacagggagagggaucagg

SEQ ID NO: 29376 - RNA, 20 nt, Artificial Sequence
  RPE65 RNA guide
ucacugggccuucauuuauu

SEQ ID NO: 29377 - RNA, 20 nt, Artificial Sequence
  RPE65 RNA guide
ucacugucugugaauccucu

SEQ ID NO: 29378 - RNA, 20 nt, Artificial Sequence
  RPE65 RNA guide
ucagaacguuuaaguaacuu

SEQ ID NO: 29379 - RNA, 20 nt, Artificial Sequence
  RPE65 RNA guide
ucaggauuacaccuuuguca

SEQ ID NO: 29380 - RNA, 20 nt, Artificial Sequence
  RPE65 RNA guide
ucaggugguuugggcuuuuu

SEQ ID NO: 29381 - RNA, 20 nt, Artificial Sequence
  RPE65 RNA guide
ucagucucucuucucuggcu

SEQ ID NO: 29382 - RNA, 20 nt, Artificial Sequence
  RPE65 RNA guide
ucagugcagacucccccugu

SEQ ID NO: 29383 - RNA, 20 nt, Artificial Sequence
  RPE65 RNA guide
ucagugccuagcucagugcc

SEQ ID NO: 29384 - RNA, 20 nt, Artificial Sequence
  RPE65 RNA guide
ucagugccuggcacauagua

SEQ ID NO: 29385 - RNA, 20 nt, Artificial Sequence
  RPE65 RNA guide
ucaucuucaaacugucagug

SEQ ID NO: 29386 - RNA, 20 nt, Artificial Sequence
  RPE65 RNA guide
ucaugcccauuuuauuagag

SEQ ID NO: 29387 - RNA, 20 nt, Artificial Sequence
  RPE65 RNA guide
ucauucgccuuuacuuuauu

SEQ ID NO: 29388 - RNA, 20 nt, Artificial Sequence
  RPE65 RNA guide
ucauuuauucagacaccaau

SEQ ID NO: 29389 - RNA, 20 nt, Artificial Sequence
  RPE65 RNA guide
ucauuucacugucugugaau

SEQ ID NO: 29390 - RNA, 20 nt, Artificial Sequence
  RPE65 RNA guide
uccaauuagguagcguuuuu

SEQ ID NO: 29391 - RNA, 20 nt, Artificial Sequence
  RPE65 RNA guide
uccauuggugucugaauaaa

SEQ ID NO: 29392 - RNA, 20 nt, Artificial Sequence
  RPE65 RNA guide
ucccagcagaaccaacauuc

SEQ ID NO: 29393 - RNA, 20 nt, Artificial Sequence
  RPE65 RNA guide
ucccaggugcuugucacugg

SEQ ID NO: 29394 - RNA, 20 nt, Artificial Sequence
  RPE65 RNA guide
ucccccugugggucacaggg

SEQ ID NO: 29395 - RNA, 20 nt, Artificial Sequence
  RPE65 RNA guide
ucccuaaggaucaggauuac

SEQ ID NO: 29396 - RNA, 20 nt, Artificial Sequence
  RPE65 RNA guide
ucccucucccugugacccac

SEQ ID NO: 29397 - RNA, 20 nt, Artificial Sequence
  RPE65 RNA guide
ucccugugacccacaggggg

SEQ ID NO: 29398 - RNA, 20 nt, Artificial Sequence
  RPE65 RNA guide
uccuauuccuuggcgucucu

SEQ ID NO: 29399 - RNA, 20 nt, Artificial Sequence
  RPE65 RNA guide
uccucuaaguuacuuaaacg

SEQ ID NO: 29400 - RNA, 20 nt, Artificial Sequence
  RPE65 RNA guide
uccucuaauaaaaugggcau

SEQ ID NO: 29401 - RNA, 20 nt, Artificial Sequence
  RPE65 RNA guide
uccucuuuuaugucagucuc

SEQ ID NO: 29402 - RNA, 20 nt, Artificial Sequence
  RPE65 RNA guide
uccugauccuuagggaauuc

SEQ ID NO: 29403 - RNA, 20 nt, Artificial Sequence
  RPE65 RNA guide
uccuuagggaauuccaauua

SEQ ID NO: 29404 - RNA, 20 nt, Artificial Sequence
  RPE65 RNA guide
uccuuggcgucucucagugc

SEQ ID NO: 29405 - RNA, 20 nt, Artificial Sequence
  RPE65 RNA guide
ucgcccaucuugaagccauc

SEQ ID NO: 29406 - RNA, 20 nt, Artificial Sequence
  RPE65 RNA guide
ucuaaguuacuuaaacguuc

SEQ ID NO: 29407 - RNA, 20 nt, Artificial Sequence
  RPE65 RNA guide
ucuaauaaaaugggcaugaa

SEQ ID NO: 29408 - RNA, 20 nt, Artificial Sequence
  RPE65 RNA guide
ucuaaugcagaaaaacgcua

SEQ ID NO: 29409 - RNA, 20 nt, Artificial Sequence
  RPE65 RNA guide
ucuacaucugccucccagca

SEQ ID NO: 29410 - RNA, 20 nt, Artificial Sequence
  RPE65 RNA guide
ucuaucauuucacugucugu

SEQ ID NO: 29411 - RNA, 20 nt, Artificial Sequence
  RPE65 RNA guide
ucucagugcagacucccccu

SEQ ID NO: 29412 - RNA, 20 nt, Artificial Sequence
  RPE65 RNA guide
ucucccugugacccacaggg

SEQ ID NO: 29413 - RNA, 20 nt, Artificial Sequence
  RPE65 RNA guide
ucucgcccaucuugaagcca

SEQ ID NO: 29414 - RNA, 20 nt, Artificial Sequence
  RPE65 RNA guide
ucucuaaugcagaaaaacgc

SEQ ID NO: 29415 - RNA, 20 nt, Artificial Sequence
  RPE65 RNA guide
ucucucagugcagacucccc

SEQ ID NO: 29416 - RNA, 20 nt, Artificial Sequence
  RPE65 RNA guide
ucucucuucucuggcuuccu

SEQ ID NO: 29417 - RNA, 20 nt, Artificial Sequence
  RPE65 RNA guide
ucucuggcuuccuauuccuu

SEQ ID NO: 29418 - RNA, 20 nt, Artificial Sequence
  RPE65 RNA guide
ucucuucucuggcuuccuau

SEQ ID NO: 29419 - RNA, 20 nt, Artificial Sequence
  RPE65 RNA guide
ucugaauaaaugaaggccca

SEQ ID NO: 29420 - RNA, 20 nt, Artificial Sequence
  RPE65 RNA guide
ucugcacugagagacgccaa

SEQ ID NO: 29421 - RNA, 20 nt, Artificial Sequence
  RPE65 RNA guide
ucugccucccagcagaacca

SEQ ID NO: 29422 - RNA, 20 nt, Artificial Sequence
  RPE65 RNA guide
ucugcugggaggcagaugua

SEQ ID NO: 29423 - RNA, 20 nt, Artificial Sequence
  RPE65 RNA guide
ucuggcuuccuauuccuugg

SEQ ID NO: 29424 - RNA, 20 nt, Artificial Sequence
  RPE65 RNA guide
ucugugaauccucuaaguua

SEQ ID NO: 29425 - RNA, 20 nt, Artificial Sequence
  RPE65 RNA guide
ucuucaaacugucagugccu

SEQ ID NO: 29426 - RNA, 20 nt, Artificial Sequence
  RPE65 RNA guide
ucuucucuggcuuccuauuc

SEQ ID NO: 29427 - RNA, 20 nt, Artificial Sequence
  RPE65 RNA guide
ucuugaagccauccucuuuu

SEQ ID NO: 29428 - RNA, 20 nt, Artificial Sequence
  RPE65 RNA guide
ucuugcuauaaaaagcccaa

SEQ ID NO: 29429 - RNA, 20 nt, Artificial Sequence
  RPE65 RNA guide
ucuuuuaugucagucucucu

SEQ ID NO: 29430 - RNA, 20 nt, Artificial Sequence
  RPE65 RNA guide
ugaaacccaccacccuuuaa

SEQ ID NO: 29431 - RNA, 20 nt, Artificial Sequence
  RPE65 RNA guide
ugaaagaaaauggguucuug

SEQ ID NO: 29432 - RNA, 20 nt, Artificial Sequence
  RPE65 RNA guide
ugaaaugauagagcuagguu

SEQ ID NO: 29433 - RNA, 20 nt, Artificial Sequence
  RPE65 RNA guide
ugaagaugacaaagguguaa

SEQ ID NO: 29434 - RNA, 20 nt, Artificial Sequence
  RPE65 RNA guide
ugaagccauccucuuuuaug

SEQ ID NO: 29435 - RNA, 20 nt, Artificial Sequence
  RPE65 RNA guide
ugaaggcccagugacaagca

SEQ ID NO: 29436 - RNA, 20 nt, Artificial Sequence
  RPE65 RNA guide
ugaauaaaugaaggcccagu

SEQ ID NO: 29437 - RNA, 20 nt, Artificial Sequence
  RPE65 RNA guide
ugaauccucuaaguuacuua

SEQ ID NO: 29438 - RNA, 20 nt, Artificial Sequence
  RPE65 RNA guide
ugacaaagguguaauccuga

SEQ ID NO: 29439 - RNA, 20 nt, Artificial Sequence
  RPE65 RNA guide
ugacaagcaccugggaguau

SEQ ID NO: 29440 - RNA, 20 nt, Artificial Sequence
  RPE65 RNA guide
ugacaguuugaagaugacaa

SEQ ID NO: 29441 - RNA, 20 nt, Artificial Sequence
  RPE65 RNA guide
ugacauaaaagaggauggcu

SEQ ID NO: 29442 - RNA, 20 nt, Artificial Sequence
  RPE65 RNA guide
ugacccacagggggagucug

SEQ ID NO: 29443 - RNA, 20 nt, Artificial Sequence
  RPE65 RNA guide
ugagagacgccaaggaauag

SEQ ID NO: 29444 - RNA, 20 nt, Artificial Sequence
  RPE65 RNA guide
ugagcuaggcacugacaguu

SEQ ID NO: 29445 - RNA, 20 nt, Artificial Sequence
  RPE65 RNA guide
ugaggcucagaacguuuaag

SEQ ID NO: 29446 - RNA, 20 nt, Artificial Sequence
  RPE65 RNA guide
ugauagagcuagguuagcau

SEQ ID NO: 29447 - RNA, 20 nt, Artificial Sequence
  RPE65 RNA guide
ugaucccucucccugugacc

SEQ ID NO: 29448 - RNA, 20 nt, Artificial Sequence
  RPE65 RNA guide
ugauccuuagggaauuccaa

SEQ ID NO: 29449 - RNA, 20 nt, Artificial Sequence
  RPE65 RNA guide
ugcacugagagacgccaagg

SEQ ID NO: 29450 - RNA, 20 nt, Artificial Sequence
  RPE65 RNA guide
ugcagaaaaacgcuaccuaa

SEQ ID NO: 29451 - RNA, 20 nt, Artificial Sequence
  RPE65 RNA guide
ugcagacucccccugugggu

SEQ ID NO: 29452 - RNA, 20 nt, Artificial Sequence
  RPE65 RNA guide
ugcccauuuuauuagaggaa

SEQ ID NO: 29453 - RNA, 20 nt, Artificial Sequence
  RPE65 RNA guide
ugccucccagcagaaccaac

SEQ ID NO: 29454 - RNA, 20 nt, Artificial Sequence
  RPE65 RNA guide
ugccuggcacauaguaaaug

SEQ ID NO: 29455 - RNA, 20 nt, Artificial Sequence
  RPE65 RNA guide
ugcuaaccuagcucuaucau

SEQ ID NO: 29456 - RNA, 20 nt, Artificial Sequence
  RPE65 RNA guide
ugcuauaaaaagcccaaacc

SEQ ID NO: 29457 - RNA, 20 nt, Artificial Sequence
  RPE65 RNA guide
ugcugggaggcagauguaga

SEQ ID NO: 29458 - RNA, 20 nt, Artificial Sequence
  RPE65 RNA guide
ugcuugucacugggccuuca

SEQ ID NO: 29459 - RNA, 20 nt, Artificial Sequence
  RPE65 RNA guide
uggaauucccuaaggaucag

SEQ ID NO: 29460 - RNA, 20 nt, Artificial Sequence
  RPE65 RNA guide
uggcacauaguaaauguccu

SEQ ID NO: 29461 - RNA, 20 nt, Artificial Sequence
  RPE65 RNA guide
uggcgucucucagugcagac

SEQ ID NO: 29462 - RNA, 20 nt, Artificial Sequence
  RPE65 RNA guide
uggcuucaagaugggcgaga

SEQ ID NO: 29463 - RNA, 20 nt, Artificial Sequence
  RPE65 RNA guide
uggcuuccuauuccuuggcg

SEQ ID NO: 29464 - RNA, 20 nt, Artificial Sequence
  RPE65 RNA guide
ugggaggcagauguagaugc

SEQ ID NO: 29465 - RNA, 20 nt, Artificial Sequence
  RPE65 RNA guide
ugggaguauuaaaggguggu

SEQ ID NO: 29466 - RNA, 20 nt, Artificial Sequence
  RPE65 RNA guide
ugggcaugaaacccaccacc

SEQ ID NO: 29467 - RNA, 20 nt, Artificial Sequence
  RPE65 RNA guide
ugggccuucauuuauucaga

SEQ ID NO: 29468 - RNA, 20 nt, Artificial Sequence
  RPE65 RNA guide
ugggcuuuuuauagcaagaa

SEQ ID NO: 29469 - RNA, 20 nt, Artificial Sequence
  RPE65 RNA guide
ugggucacagggagagggau

SEQ ID NO: 29470 - RNA, 20 nt, Artificial Sequence
  RPE65 RNA guide
uggguucuugcuauaaaaag

SEQ ID NO: 29471 - RNA, 20 nt, Artificial Sequence
  RPE65 RNA guide
uggguuucaugcccauuuua

SEQ ID NO: 29472 - RNA, 20 nt, Artificial Sequence
  RPE65 RNA guide
uggucucgcccaucuugaag

SEQ ID NO: 29473 - RNA, 20 nt, Artificial Sequence
  RPE65 RNA guide
ugguggguuucaugcccauu

SEQ ID NO: 29474 - RNA, 20 nt, Artificial Sequence
  RPE65 RNA guide
uggugucugaauaaaugaag

SEQ ID NO: 29475 - RNA, 20 nt, Artificial Sequence
  RPE65 RNA guide
ugguucugcugggaggcaga

SEQ ID NO: 29476 - RNA, 20 nt, Artificial Sequence
  RPE65 RNA guide
ugguuugggcuuuuuauagc

SEQ ID NO: 29477 - RNA, 20 nt, Artificial Sequence
  RPE65 RNA guide
uguaauccugauccuuaggg

SEQ ID NO: 29478 - RNA, 20 nt, Artificial Sequence
  RPE65 RNA guide
uguagaugcuaaccuagcuc

SEQ ID NO: 29479 - RNA, 20 nt, Artificial Sequence
  RPE65 RNA guide
ugucacugggccuucauuua

SEQ ID NO: 29480 - RNA, 20 nt, Artificial Sequence
  RPE65 RNA guide
ugucagucucucuucucugg

SEQ ID NO: 29481 - RNA, 20 nt, Artificial Sequence
  RPE65 RNA guide
ugucagugccuagcucagug

SEQ ID NO: 29482 - RNA, 20 nt, Artificial Sequence
  RPE65 RNA guide
ugucaucuucaaacugucag

SEQ ID NO: 29483 - RNA, 20 nt, Artificial Sequence
  RPE65 RNA guide
ugucugaauaaaugaaggcc

SEQ ID NO: 29484 - RNA, 20 nt, Artificial Sequence
  RPE65 RNA guide
ugucugugaauccucuaagu

SEQ ID NO: 29485 - RNA, 20 nt, Artificial Sequence
  RPE65 RNA guide
ugugacccacagggggaguc

SEQ ID NO: 29486 - RNA, 20 nt, Artificial Sequence
  RPE65 RNA guide
ugugggucacagggagaggg

SEQ ID NO: 29487 - RNA, 20 nt, Artificial Sequence
  RPE65 RNA guide
uguugguucugcugggaggc

SEQ ID NO: 29488 - RNA, 20 nt, Artificial Sequence
  RPE65 RNA guide
uuaaacguucugagccucaa

SEQ ID NO: 29489 - RNA, 20 nt, Artificial Sequence
  RPE65 RNA guide
uuaaagggugguggguuuca

SEQ ID NO: 29490 - RNA, 20 nt, Artificial Sequence
  RPE65 RNA guide
uuaaguaacuuagaggauuc

SEQ ID NO: 29491 - RNA, 20 nt, Artificial Sequence
  RPE65 RNA guide
uuaauacucccaggugcuug

SEQ ID NO: 29492 - RNA, 20 nt, Artificial Sequence
  RPE65 RNA guide
uuacaccuuugucaucuuca

SEQ ID NO: 29493 - RNA, 20 nt, Artificial Sequence
  RPE65 RNA guide
uuacuuaaacguucugagcc

SEQ ID NO: 29494 - RNA, 20 nt, Artificial Sequence
  RPE65 RNA guide
uuagaggaauguugguucug

SEQ ID NO: 29495 - RNA, 20 nt, Artificial Sequence
  RPE65 RNA guide
uuagaggauucacagacagu

SEQ ID NO: 29496 - RNA, 20 nt, Artificial Sequence
  RPE65 RNA guide
uuagcaucuacaucugccuc

SEQ ID NO: 29497 - RNA, 20 nt, Artificial Sequence
  RPE65 RNA guide
uuagggaauuccaauuaggu

SEQ ID NO: 29498 - RNA, 20 nt, Artificial Sequence
  RPE65 RNA guide
uuagguagcguuuuucugca

SEQ ID NO: 29499 - RNA, 20 nt, Artificial Sequence
  RPE65 RNA guide
uuauaggacauuuacuaugu

SEQ ID NO: 29500 - RNA, 20 nt, Artificial Sequence
  RPE65 RNA guide
uuaugucagucucucuucuc

SEQ ID NO: 29501 - RNA, 20 nt, Artificial Sequence
  RPE65 RNA guide
uuauuagaggaauguugguu

SEQ ID NO: 29502 - RNA, 20 nt, Artificial Sequence
  RPE65 RNA guide
uucaaacugucagugccuag

SEQ ID NO: 29503 - RNA, 20 nt, Artificial Sequence
  RPE65 RNA guide
uucacagacagugaaaugau

SEQ ID NO: 29504 - RNA, 20 nt, Artificial Sequence
  RPE65 RNA guide
uucacugucugugaauccuc

SEQ ID NO: 29505 - RNA, 20 nt, Artificial Sequence
  RPE65 RNA guide
uucaugcccauuuuauuaga

SEQ ID NO: 29506 - RNA, 20 nt, Artificial Sequence
  RPE65 RNA guide
uucauuuauucagacaccaa

SEQ ID NO: 29507 - RNA, 20 nt, Artificial Sequence
  RPE65 RNA guide
uuccaauuagguagcguuuu

SEQ ID NO: 29508 - RNA, 20 nt, Artificial Sequence
  RPE65 RNA guide
uuccauuggugucugaauaa

SEQ ID NO: 29509 - RNA, 20 nt, Artificial Sequence
  RPE65 RNA guide
uucccuaaggaucaggauua

SEQ ID NO: 29510 - RNA, 20 nt, Artificial Sequence
  RPE65 RNA guide
uuccuauuccuuggcgucuc

SEQ ID NO: 29511 - RNA, 20 nt, Artificial Sequence
  RPE65 RNA guide
uuccucuaauaaaaugggca

SEQ ID NO: 29512 - RNA, 20 nt, Artificial Sequence
  RPE65 RNA guide
uuccuuggcgucucucagug

SEQ ID NO: 29513 - RNA, 20 nt, Artificial Sequence
  RPE65 RNA guide
uucucuaaugcagaaaaacg

SEQ ID NO: 29514 - RNA, 20 nt, Artificial Sequence
  RPE65 RNA guide
uucucuggcuuccuauuccu

SEQ ID NO: 29515 - RNA, 20 nt, Artificial Sequence
  RPE65 RNA guide
uucugagccucaauucccuu

SEQ ID NO: 29516 - RNA, 20 nt, Artificial Sequence
  RPE65 RNA guide
uucugcugggaggcagaugu

SEQ ID NO: 29517 - RNA, 20 nt, Artificial Sequence
  RPE65 RNA guide
uucuugcuauaaaaagccca

SEQ ID NO: 29518 - RNA, 20 nt, Artificial Sequence
  RPE65 RNA guide
uugaagaugacaaaggugua

SEQ ID NO: 29519 - RNA, 20 nt, Artificial Sequence
  RPE65 RNA guide
uugaagccauccucuuuuau

SEQ ID NO: 29520 - RNA, 20 nt, Artificial Sequence
  RPE65 RNA guide
uugaggcucagaacguuuaa

SEQ ID NO: 29521 - RNA, 20 nt, Artificial Sequence
  RPE65 RNA guide
uugcuauaaaaagcccaaac

SEQ ID NO: 29522 - RNA, 20 nt, Artificial Sequence
  RPE65 RNA guide
uuggaauucccuaaggauca

SEQ ID NO: 29523 - RNA, 20 nt, Artificial Sequence
  RPE65 RNA guide
uuggcgucucucagugcaga

SEQ ID NO: 29524 - RNA, 20 nt, Artificial Sequence
  RPE65 RNA guide
uugggcuuuuuauagcaaga

SEQ ID NO: 29525 - RNA, 20 nt, Artificial Sequence
  RPE65 RNA guide
uuggucucgcccaucuugaa

SEQ ID NO: 29526 - RNA, 20 nt, Artificial Sequence
  RPE65 RNA guide
uuggugucugaauaaaugaa

SEQ ID NO: 29527 - RNA, 20 nt, Artificial Sequence
  RPE65 RNA guide
uugguucugcugggaggcag

SEQ ID NO: 29528 - RNA, 20 nt, Artificial Sequence
  RPE65 RNA guide
uugucacugggccuucauuu

SEQ ID NO: 29529 - RNA, 20 nt, Artificial Sequence
  RPE65 RNA guide
uugucaucuucaaacuguca

SEQ ID NO: 29530 - RNA, 20 nt, Artificial Sequence
  RPE65 RNA guide
uuuaauacucccaggugcuu

SEQ ID NO: 29531 - RNA, 20 nt, Artificial Sequence
  RPE65 RNA guide
uuuauaggacauuuacuaug

SEQ ID NO: 29532 - RNA, 20 nt, Artificial Sequence
  RPE65 RNA guide
uuuaugucagucucucuucu

SEQ ID NO: 29533 - RNA, 20 nt, Artificial Sequence
  RPE65 RNA guide
uuuauuagaggaauguuggu

SEQ ID NO: 29534 - RNA, 20 nt, Artificial Sequence
  RPE65 RNA guide
uuucacugucugugaauccu

SEQ ID NO: 29535 - RNA, 20 nt, Artificial Sequence
  RPE65 RNA guide
uuucaugcccauuuuauuag

SEQ ID NO: 29536 - RNA, 20 nt, Artificial Sequence
  RPE65 RNA guide
uuucucuaaugcagaaaaac

SEQ ID NO: 29537 - RNA, 20 nt, Artificial Sequence
  RPE65 RNA guide
uuugaagaugacaaaggugu

SEQ ID NO: 29538 - RNA, 20 nt, Artificial Sequence
  RPE65 RNA guide
uuugggcuuuuuauagcaag

SEQ ID NO: 29539 - RNA, 20 nt, Artificial Sequence
  RPE65 RNA guide
uuugucaucuucaaacuguc

SEQ ID NO: 29540 - RNA, 20 nt, Artificial Sequence
  RPE65 RNA guide
uuuuaugucagucucucuuc

SEQ ID NO: 29541 - RNA, 21 nt, Artificial Sequence
  RPE65 RNA guide
aaaaacgcuaccuaauuggaa

SEQ ID NO: 29542 - RNA, 21 nt, Artificial Sequence
  RPE65 RNA guide
aaaaagcccaaaccaccugau

SEQ ID NO: 29543 - RNA, 21 nt, Artificial Sequence
  RPE65 RNA guide
aaaacgcuaccuaauuggaau

SEQ ID NO: 29544 - RNA, 21 nt, Artificial Sequence
  RPE65 RNA guide
aaaagaggauggcuucaagau

SEQ ID NO: 29545 - RNA, 21 nt, Artificial Sequence
  RPE65 RNA guide
aaaagcccaaaccaccugauc

SEQ ID NO: 29546 - RNA, 21 nt, Artificial Sequence
  RPE65 RNA guide
aaaaugggcaugaaacccacc

SEQ ID NO: 29547 - RNA, 21 nt, Artificial Sequence
  RPE65 RNA guide
aaaauggguucuugcuauaaa

SEQ ID NO: 29548 - RNA, 21 nt, Artificial Sequence
  RPE65 RNA guide
aaaccaccugaucccucuccc

SEQ ID NO: 29549 - RNA, 21 nt, Artificial Sequence
  RPE65 RNA guide
aaacccaccacccuuuaauac

SEQ ID NO: 29550 - RNA, 21 nt, Artificial Sequence
  RPE65 RNA guide
aaacgcuaccuaauuggaauu

SEQ ID NO: 29551 - RNA, 21 nt, Artificial Sequence
  RPE65 RNA guide
aaacguucugagccucaauuc

SEQ ID NO: 29552 - RNA, 21 nt, Artificial Sequence
  RPE65 RNA guide
aaacugucagugccuagcuca

SEQ ID NO: 29553 - RNA, 21 nt, Artificial Sequence
  RPE65 RNA guide
aaagaggauggcuucaagaug

SEQ ID NO: 29554 - RNA, 21 nt, Artificial Sequence
  RPE65 RNA guide
aaagcccaaaccaccugaucc

SEQ ID NO: 29555 - RNA, 21 nt, Artificial Sequence
  RPE65 RNA guide
aaaggcgaaugaaagaaaaug

SEQ ID NO: 29556 - RNA, 21 nt, Artificial Sequence
  RPE65 RNA guide
aaagggugguggguuucaugc

SEQ ID NO: 29557 - RNA, 21 nt, Artificial Sequence
  RPE65 RNA guide
aaagguguaauccugauccuu

SEQ ID NO: 29558 - RNA, 21 nt, Artificial Sequence
  RPE65 RNA guide
aaaugaaggcccagugacaag

SEQ ID NO: 29559 - RNA, 21 nt, Artificial Sequence
  RPE65 RNA guide
aaaugauagagcuagguuagc

SEQ ID NO: 29560 - RNA, 21 nt, Artificial Sequence
  RPE65 RNA guide
aaaugggcaugaaacccacca

SEQ ID NO: 29561 - RNA, 21 nt, Artificial Sequence
  RPE65 RNA guide
aaauggguucuugcuauaaaa

SEQ ID NO: 29562 - RNA, 21 nt, Artificial Sequence
  RPE65 RNA guide
aaauguccuauaaaugucugu

SEQ ID NO: 29563 - RNA, 21 nt, Artificial Sequence
  RPE65 RNA guide
aacauuccucuaauaaaaugg

SEQ ID NO: 29564 - RNA, 21 nt, Artificial Sequence
  RPE65 RNA guide
aaccaacauuccucuaauaaa

SEQ ID NO: 29565 - RNA, 21 nt, Artificial Sequence
  RPE65 RNA guide
aaccaccugaucccucucccu

SEQ ID NO: 29566 - RNA, 21 nt, Artificial Sequence
  RPE65 RNA guide
aacccaccacccuuuaauacu

SEQ ID NO: 29567 - RNA, 21 nt, Artificial Sequence
  RPE65 RNA guide
aacccauuuucuuucauucgc

SEQ ID NO: 29568 - RNA, 21 nt, Artificial Sequence
  RPE65 RNA guide
aaccuagcucuaucauuucac

SEQ ID NO: 29569 - RNA, 21 nt, Artificial Sequence
  RPE65 RNA guide
aacgcuaccuaauuggaauuc

SEQ ID NO: 29570 - RNA, 21 nt, Artificial Sequence
  RPE65 RNA guide
aacguucugagccucaauucc

SEQ ID NO: 29571 - RNA, 21 nt, Artificial Sequence
  RPE65 RNA guide
aacguuuaaguaacuuagagg

SEQ ID NO: 29572 - RNA, 21 nt, Artificial Sequence
  RPE65 RNA guide
aacugucagugccuagcucag

SEQ ID NO: 29573 - RNA, 21 nt, Artificial Sequence
  RPE65 RNA guide
aacuuagaggauucacagaca

SEQ ID NO: 29574 - RNA, 21 nt, Artificial Sequence
  RPE65 RNA guide
aagaacccauuuucuuucauu

SEQ ID NO: 29575 - RNA, 21 nt, Artificial Sequence
  RPE65 RNA guide
aagagagacugacauaaaaga

SEQ ID NO: 29576 - RNA, 21 nt, Artificial Sequence
  RPE65 RNA guide
aagaggauggcuucaagaugg

SEQ ID NO: 29577 - RNA, 21 nt, Artificial Sequence
  RPE65 RNA guide
aagaugacaaagguguaaucc

SEQ ID NO: 29578 - RNA, 21 nt, Artificial Sequence
  RPE65 RNA guide
aagcaccugggaguauuaaag

SEQ ID NO: 29579 - RNA, 21 nt, Artificial Sequence
  RPE65 RNA guide
aagccagagaagagagacuga

SEQ ID NO: 29580 - RNA, 21 nt, Artificial Sequence
  RPE65 RNA guide
aagccauccucuuuuauguca

SEQ ID NO: 29581 - RNA, 21 nt, Artificial Sequence
  RPE65 RNA guide
aagcccaaaccaccugauccc

SEQ ID NO: 29582 - RNA, 21 nt, Artificial Sequence
  RPE65 RNA guide
aaggaauaggaagccagagaa

SEQ ID NO: 29583 - RNA, 21 nt, Artificial Sequence
  RPE65 RNA guide
aaggaucaggauuacaccuuu

SEQ ID NO: 29584 - RNA, 21 nt, Artificial Sequence
  RPE65 RNA guide
aaggcccagugacaagcaccu

SEQ ID NO: 29585 - RNA, 21 nt, Artificial Sequence
  RPE65 RNA guide
aaggcgaaugaaagaaaaugg

SEQ ID NO: 29586 - RNA, 21 nt, Artificial Sequence
  RPE65 RNA guide
aagggaauugaggcucagaac

SEQ ID NO: 29587 - RNA, 21 nt, Artificial Sequence
  RPE65 RNA guide
aagggugguggguuucaugcc

SEQ ID NO: 29588 - RNA, 21 nt, Artificial Sequence
  RPE65 RNA guide
aagguguaauccugauccuua

SEQ ID NO: 29589 - RNA, 21 nt, Artificial Sequence
  RPE65 RNA guide
aaguaaaggcgaaugaaagaa

SEQ ID NO: 29590 - RNA, 21 nt, Artificial Sequence
  RPE65 RNA guide
aaguaacuuagaggauucaca

SEQ ID NO: 29591 - RNA, 21 nt, Artificial Sequence
  RPE65 RNA guide
aaguuacuuaaacguucugag

SEQ ID NO: 29592 - RNA, 21 nt, Artificial Sequence
  RPE65 RNA guide
aauaaaaugggcaugaaaccc

SEQ ID NO: 29593 - RNA, 21 nt, Artificial Sequence
  RPE65 RNA guide
aauaaaugaaggcccagugac

SEQ ID NO: 29594 - RNA, 21 nt, Artificial Sequence
  RPE65 RNA guide
aauacucccaggugcuuguca

SEQ ID NO: 29595 - RNA, 21 nt, Artificial Sequence
  RPE65 RNA guide
aauaggaagccagagaagaga

SEQ ID NO: 29596 - RNA, 21 nt, Artificial Sequence
  RPE65 RNA guide
aauccucuaaguuacuuaaac

SEQ ID NO: 29597 - RNA, 21 nt, Artificial Sequence
  RPE65 RNA guide
aauccugauccuuagggaauu

SEQ ID NO: 29598 - RNA, 21 nt, Artificial Sequence
  RPE65 RNA guide
aaugaaagaaaauggguucuu

SEQ ID NO: 29599 - RNA, 21 nt, Artificial Sequence
  RPE65 RNA guide
aaugaaggcccagugacaagc

SEQ ID NO: 29600 - RNA, 21 nt, Artificial Sequence
  RPE65 RNA guide
aaugauagagcuagguuagca

SEQ ID NO: 29601 - RNA, 21 nt, Artificial Sequence
  RPE65 RNA guide
aaugcagaaaaacgcuaccua

SEQ ID NO: 29602 - RNA, 21 nt, Artificial Sequence
  RPE65 RNA guide
aaugggcaugaaacccaccac

SEQ ID NO: 29603 - RNA, 21 nt, Artificial Sequence
  RPE65 RNA guide
aauggguucuugcuauaaaaa

SEQ ID NO: 29604 - RNA, 21 nt, Artificial Sequence
  RPE65 RNA guide
aauguccuauaaaugucuguu

SEQ ID NO: 29605 - RNA, 21 nt, Artificial Sequence
  RPE65 RNA guide
aauguugguucugcugggagg

SEQ ID NO: 29606 - RNA, 21 nt, Artificial Sequence
  RPE65 RNA guide
aauuagguagcguuuuucugc

SEQ ID NO: 29607 - RNA, 21 nt, Artificial Sequence
  RPE65 RNA guide
aauuccaauuagguagcguuu

SEQ ID NO: 29608 - RNA, 21 nt, Artificial Sequence
  RPE65 RNA guide
aauucccuaaggaucaggauu

SEQ ID NO: 29609 - RNA, 21 nt, Artificial Sequence
  RPE65 RNA guide
aauugaggcucagaacguuua

SEQ ID NO: 29610 - RNA, 21 nt, Artificial Sequence
  RPE65 RNA guide
aauuggaauucccuaaggauc

SEQ ID NO: 29611 - RNA, 21 nt, Artificial Sequence
  RPE65 RNA guide
acaaagguguaauccugaucc

SEQ ID NO: 29612 - RNA, 21 nt, Artificial Sequence
  RPE65 RNA guide
acaagcaccugggaguauuaa

SEQ ID NO: 29613 - RNA, 21 nt, Artificial Sequence
  RPE65 RNA guide
acaccuuugucaucuucaaac

SEQ ID NO: 29614 - RNA, 21 nt, Artificial Sequence
  RPE65 RNA guide
acagacagugaaaugauagag

SEQ ID NO: 29615 - RNA, 21 nt, Artificial Sequence
  RPE65 RNA guide
acagggagagggaucaggugg

SEQ ID NO: 29616 - RNA, 21 nt, Artificial Sequence
  RPE65 RNA guide
acagggggagucugcacugag

SEQ ID NO: 29617 - RNA, 21 nt, Artificial Sequence
  RPE65 RNA guide
acagugaaaugauagagcuag

SEQ ID NO: 29618 - RNA, 21 nt, Artificial Sequence
  RPE65 RNA guide
acaguuugaagaugacaaagg

SEQ ID NO: 29619 - RNA, 21 nt, Artificial Sequence
  RPE65 RNA guide
acauaaaagaggauggcuuca

SEQ ID NO: 29620 - RNA, 21 nt, Artificial Sequence
  RPE65 RNA guide
acaucugccucccagcagaac

SEQ ID NO: 29621 - RNA, 21 nt, Artificial Sequence
  RPE65 RNA guide
acauuccucuaauaaaauggg

SEQ ID NO: 29622 - RNA, 21 nt, Artificial Sequence
  RPE65 RNA guide
acauuuacuaugugccaggca

SEQ ID NO: 29623 - RNA, 21 nt, Artificial Sequence
  RPE65 RNA guide
accaacauuccucuaauaaaa

SEQ ID NO: 29624 - RNA, 21 nt, Artificial Sequence
  RPE65 RNA guide
accacccuuuaauacucccag

SEQ ID NO: 29625 - RNA, 21 nt, Artificial Sequence
  RPE65 RNA guide
accaccugaucccucucccug

SEQ ID NO: 29626 - RNA, 21 nt, Artificial Sequence
  RPE65 RNA guide
acccacagggggagucugcac

SEQ ID NO: 29627 - RNA, 21 nt, Artificial Sequence
  RPE65 RNA guide
acccaccacccuuuaauacuc

SEQ ID NO: 29628 - RNA, 21 nt, Artificial Sequence
  RPE65 RNA guide
acccauuuucuuucauucgcc

SEQ ID NO: 29629 - RNA, 21 nt, Artificial Sequence
  RPE65 RNA guide
acccuuuaauacucccaggug

SEQ ID NO: 29630 - RNA, 21 nt, Artificial Sequence
  RPE65 RNA guide
accuaauuggaauucccuaag

SEQ ID NO: 29631 - RNA, 21 nt, Artificial Sequence
  RPE65 RNA guide
accuagcucuaucauuucacu

SEQ ID NO: 29632 - RNA, 21 nt, Artificial Sequence
  RPE65 RNA guide
accugaucccucucccuguga

SEQ ID NO: 29633 - RNA, 21 nt, Artificial Sequence
  RPE65 RNA guide
accugggaguauuaaagggug

SEQ ID NO: 29634 - RNA, 21 nt, Artificial Sequence
  RPE65 RNA guide
accuuugucaucuucaaacug

SEQ ID NO: 29635 - RNA, 21 nt, Artificial Sequence
  RPE65 RNA guide
acgccaaggaauaggaagcca

SEQ ID NO: 29636 - RNA, 21 nt, Artificial Sequence
  RPE65 RNA guide
acgcuaccuaauuggaauucc

SEQ ID NO: 29637 - RNA, 21 nt, Artificial Sequence
  RPE65 RNA guide
acguucugagccucaauuccc

SEQ ID NO: 29638 - RNA, 21 nt, Artificial Sequence
  RPE65 RNA guide
acguuuaaguaacuuagagga

SEQ ID NO: 29639 - RNA, 21 nt, Artificial Sequence
  RPE65 RNA guide
acucccaggugcuugucacug

SEQ ID NO: 29640 - RNA, 21 nt, Artificial Sequence
  RPE65 RNA guide
acucccccugugggucacagg

SEQ ID NO: 29641 - RNA, 21 nt, Artificial Sequence
  RPE65 RNA guide
acugacaguuugaagaugaca

SEQ ID NO: 29642 - RNA, 21 nt, Artificial Sequence
  RPE65 RNA guide
acugacauaaaagaggauggc

SEQ ID NO: 29643 - RNA, 21 nt, Artificial Sequence
  RPE65 RNA guide
acugagagacgccaaggaaua

SEQ ID NO: 29644 - RNA, 21 nt, Artificial Sequence
  RPE65 RNA guide
acugagcuaggcacugacagu

SEQ ID NO: 29645 - RNA, 21 nt, Artificial Sequence
  RPE65 RNA guide
acugggccuucauuuauucag

SEQ ID NO: 29646 - RNA, 21 nt, Artificial Sequence
  RPE65 RNA guide
acugucagugccuagcucagu

SEQ ID NO: 29647 - RNA, 21 nt, Artificial Sequence
  RPE65 RNA guide
acugucugugaauccucuaag

SEQ ID NO: 29648 - RNA, 21 nt, Artificial Sequence
  RPE65 RNA guide
acuuaaacguucugagccuca

SEQ ID NO: 29649 - RNA, 21 nt, Artificial Sequence
  RPE65 RNA guide
acuuagaggauucacagacag

SEQ ID NO: 29650 - RNA, 21 nt, Artificial Sequence
  RPE65 RNA guide
agaaaaacgcuaccuaauugg

SEQ ID NO: 29651 - RNA, 21 nt, Artificial Sequence
  RPE65 RNA guide
agaacccauuuucuuucauuc

SEQ ID NO: 29652 - RNA, 21 nt, Artificial Sequence
  RPE65 RNA guide
agaacguuuaaguaacuuaga

SEQ ID NO: 29653 - RNA, 21 nt, Artificial Sequence
  RPE65 RNA guide
agaagagagacugacauaaaa

SEQ ID NO: 29654 - RNA, 21 nt, Artificial Sequence
  RPE65 RNA guide
agacagugaaaugauagagcu

SEQ ID NO: 29655 - RNA, 21 nt, Artificial Sequence
  RPE65 RNA guide
agacgccaaggaauaggaagc

SEQ ID NO: 29656 - RNA, 21 nt, Artificial Sequence
  RPE65 RNA guide
agacucccccugugggucaca

SEQ ID NO: 29657 - RNA, 21 nt, Artificial Sequence
  RPE65 RNA guide
agacugacauaaaagaggaug

SEQ ID NO: 29658 - RNA, 21 nt, Artificial Sequence
  RPE65 RNA guide
agagaaauaaaguaaaggcga

SEQ ID NO: 29659 - RNA, 21 nt, Artificial Sequence
  RPE65 RNA guide
agagaagagagacugacauaa

SEQ ID NO: 29660 - RNA, 21 nt, Artificial Sequence
  RPE65 RNA guide
agagacgccaaggaauaggaa

SEQ ID NO: 29661 - RNA, 21 nt, Artificial Sequence
  RPE65 RNA guide
agagacugacauaaaagagga

SEQ ID NO: 29662 - RNA, 21 nt, Artificial Sequence
  RPE65 RNA guide
agagagacugacauaaaagag

SEQ ID NO: 29663 - RNA, 21 nt, Artificial Sequence
  RPE65 RNA guide
agagcuagguuagcaucuaca

SEQ ID NO: 29664 - RNA, 21 nt, Artificial Sequence
  RPE65 RNA guide
agaggaauguugguucugcug

SEQ ID NO: 29665 - RNA, 21 nt, Artificial Sequence
  RPE65 RNA guide
agaggauggcuucaagauggg

SEQ ID NO: 29666 - RNA, 21 nt, Artificial Sequence
  RPE65 RNA guide
agaggauucacagacagugaa

SEQ ID NO: 29667 - RNA, 21 nt, Artificial Sequence
  RPE65 RNA guide
agagggaucaggugguuuggg

SEQ ID NO: 29668 - RNA, 21 nt, Artificial Sequence
  RPE65 RNA guide
agaugacaaagguguaauccu

SEQ ID NO: 29669 - RNA, 21 nt, Artificial Sequence
  RPE65 RNA guide
agaugcuaaccuagcucuauc

SEQ ID NO: 29670 - RNA, 21 nt, Artificial Sequence
  RPE65 RNA guide
agauguagaugcuaaccuagc

SEQ ID NO: 29671 - RNA, 21 nt, Artificial Sequence
  RPE65 RNA guide
agcaagaacccauuuucuuuc

SEQ ID NO: 29672 - RNA, 21 nt, Artificial Sequence
  RPE65 RNA guide
agcaccugggaguauuaaagg

SEQ ID NO: 29673 - RNA, 21 nt, Artificial Sequence
  RPE65 RNA guide
agcagaaccaacauuccucua

SEQ ID NO: 29674 - RNA, 21 nt, Artificial Sequence
  RPE65 RNA guide
agcaucuacaucugccuccca

SEQ ID NO: 29675 - RNA, 21 nt, Artificial Sequence
  RPE65 RNA guide
agccagagaagagagacugac

SEQ ID NO: 29676 - RNA, 21 nt, Artificial Sequence
  RPE65 RNA guide
agccauccucuuuuaugucag

SEQ ID NO: 29677 - RNA, 21 nt, Artificial Sequence
  RPE65 RNA guide
agcccaaaccaccugaucccu

SEQ ID NO: 29678 - RNA, 21 nt, Artificial Sequence
  RPE65 RNA guide
agcguuuuucugcauuagaga

SEQ ID NO: 29679 - RNA, 21 nt, Artificial Sequence
  RPE65 RNA guide
agcuaggcacugacaguuuga

SEQ ID NO: 29680 - RNA, 21 nt, Artificial Sequence
  RPE65 RNA guide
agcuagguuagcaucuacauc

SEQ ID NO: 29681 - RNA, 21 nt, Artificial Sequence
  RPE65 RNA guide
agcucuaucauuucacugucu

SEQ ID NO: 29682 - RNA, 21 nt, Artificial Sequence
  RPE65 RNA guide
aggaagccagagaagagagac

SEQ ID NO: 29683 - RNA, 21 nt, Artificial Sequence
  RPE65 RNA guide
aggaauaggaagccagagaag

SEQ ID NO: 29684 - RNA, 21 nt, Artificial Sequence
  RPE65 RNA guide
aggaauguugguucugcuggg

SEQ ID NO: 29685 - RNA, 21 nt, Artificial Sequence
  RPE65 RNA guide
aggacauuuacuaugugccag

SEQ ID NO: 29686 - RNA, 21 nt, Artificial Sequence
  RPE65 RNA guide
aggaucaggauuacaccuuug

SEQ ID NO: 29687 - RNA, 21 nt, Artificial Sequence
  RPE65 RNA guide
aggauggcuucaagaugggcg

SEQ ID NO: 29688 - RNA, 21 nt, Artificial Sequence
  RPE65 RNA guide
aggauuacaccuuugucaucu

SEQ ID NO: 29689 - RNA, 21 nt, Artificial Sequence
  RPE65 RNA guide
aggauucacagacagugaaau

SEQ ID NO: 29690 - RNA, 21 nt, Artificial Sequence
  RPE65 RNA guide
aggcacugacaguuugaagau

SEQ ID NO: 29691 - RNA, 21 nt, Artificial Sequence
  RPE65 RNA guide
aggcacugagcuaggcacuga

SEQ ID NO: 29692 - RNA, 21 nt, Artificial Sequence
  RPE65 RNA guide
aggcagauguagaugcuaacc

SEQ ID NO: 29693 - RNA, 21 nt, Artificial Sequence
  RPE65 RNA guide
aggcccagugacaagcaccug

SEQ ID NO: 29694 - RNA, 21 nt, Artificial Sequence
  RPE65 RNA guide
aggcgaaugaaagaaaauggg

SEQ ID NO: 29695 - RNA, 21 nt, Artificial Sequence
  RPE65 RNA guide
aggcucagaacguuuaaguaa

SEQ ID NO: 29696 - RNA, 21 nt, Artificial Sequence
  RPE65 RNA guide
agggaauuccaauuagguagc

SEQ ID NO: 29697 - RNA, 21 nt, Artificial Sequence
  RPE65 RNA guide
agggaauugaggcucagaacg

SEQ ID NO: 29698 - RNA, 21 nt, Artificial Sequence
  RPE65 RNA guide
agggagagggaucaggugguu

SEQ ID NO: 29699 - RNA, 21 nt, Artificial Sequence
  RPE65 RNA guide
agggaucaggugguuugggcu

SEQ ID NO: 29700 - RNA, 21 nt, Artificial Sequence
  RPE65 RNA guide
agggggagucugcacugagag

SEQ ID NO: 29701 - RNA, 21 nt, Artificial Sequence
  RPE65 RNA guide
agggugguggguuucaugccc

SEQ ID NO: 29702 - RNA, 21 nt, Artificial Sequence
  RPE65 RNA guide
agguaagggaauugaggcuca

SEQ ID NO: 29703 - RNA, 21 nt, Artificial Sequence
  RPE65 RNA guide
agguagcguuuuucugcauua

SEQ ID NO: 29704 - RNA, 21 nt, Artificial Sequence
  RPE65 RNA guide
aggugcuugucacugggccuu

SEQ ID NO: 29705 - RNA, 21 nt, Artificial Sequence
  RPE65 RNA guide
aggugguuugggcuuuuuaua

SEQ ID NO: 29706 - RNA, 21 nt, Artificial Sequence
  RPE65 RNA guide
agguguaauccugauccuuag

SEQ ID NO: 29707 - RNA, 21 nt, Artificial Sequence
  RPE65 RNA guide
agguuagcaucuacaucugcc

SEQ ID NO: 29708 - RNA, 21 nt, Artificial Sequence
  RPE65 RNA guide
aguaaaggcgaaugaaagaaa

SEQ ID NO: 29709 - RNA, 21 nt, Artificial Sequence
  RPE65 RNA guide
aguaacuuagaggauucacag

SEQ ID NO: 29710 - RNA, 21 nt, Artificial Sequence
  RPE65 RNA guide
aguauuaaagggugguggguu

SEQ ID NO: 29711 - RNA, 21 nt, Artificial Sequence
  RPE65 RNA guide
agucucucuucucuggcuucc

SEQ ID NO: 29712 - RNA, 21 nt, Artificial Sequence
  RPE65 RNA guide
agucugcacugagagacgcca

SEQ ID NO: 29713 - RNA, 21 nt, Artificial Sequence
  RPE65 RNA guide
agugaaaugauagagcuaggu

SEQ ID NO: 29714 - RNA, 21 nt, Artificial Sequence
  RPE65 RNA guide
agugacaagcaccugggagua

SEQ ID NO: 29715 - RNA, 21 nt, Artificial Sequence
  RPE65 RNA guide
agugcagacucccccuguggg

SEQ ID NO: 29716 - RNA, 21 nt, Artificial Sequence
  RPE65 RNA guide
agugccuggcacauaguaaau

SEQ ID NO: 29717 - RNA, 21 nt, Artificial Sequence
  RPE65 RNA guide
aguuacuuaaacguucugagc

SEQ ID NO: 29718 - RNA, 21 nt, Artificial Sequence
  RPE65 RNA guide
aguuugaagaugacaaaggug

SEQ ID NO: 29719 - RNA, 21 nt, Artificial Sequence
  RPE65 RNA guide
auaaaaagcccaaaccaccug

SEQ ID NO: 29720 - RNA, 21 nt, Artificial Sequence
  RPE65 RNA guide
auaaaagaggauggcuucaag

SEQ ID NO: 29721 - RNA, 21 nt, Artificial Sequence
  RPE65 RNA guide
auaaaaugggcaugaaaccca

SEQ ID NO: 29722 - RNA, 21 nt, Artificial Sequence
  RPE65 RNA guide
auaaaugaaggcccagugaca

SEQ ID NO: 29723 - RNA, 21 nt, Artificial Sequence
  RPE65 RNA guide
auacucccaggugcuugucac

SEQ ID NO: 29724 - RNA, 21 nt, Artificial Sequence
  RPE65 RNA guide
auagagcuagguuagcaucua

SEQ ID NO: 29725 - RNA, 21 nt, Artificial Sequence
  RPE65 RNA guide
auagcaagaacccauuuucuu

SEQ ID NO: 29726 - RNA, 21 nt, Artificial Sequence
  RPE65 RNA guide
auaggaagccagagaagagag

SEQ ID NO: 29727 - RNA, 21 nt, Artificial Sequence
  RPE65 RNA guide
auaggacauuuacuaugugcc

SEQ ID NO: 29728 - RNA, 21 nt, Artificial Sequence
  RPE65 RNA guide
aucaggauuacaccuuuguca

SEQ ID NO: 29729 - RNA, 21 nt, Artificial Sequence
  RPE65 RNA guide
aucaggugguuugggcuuuuu

SEQ ID NO: 29730 - RNA, 21 nt, Artificial Sequence
  RPE65 RNA guide
aucauuucacugucugugaau

SEQ ID NO: 29731 - RNA, 21 nt, Artificial Sequence
  RPE65 RNA guide
aucccucucccugugacccac

SEQ ID NO: 29732 - RNA, 21 nt, Artificial Sequence
  RPE65 RNA guide
auccucuaaguuacuuaaacg

SEQ ID NO: 29733 - RNA, 21 nt, Artificial Sequence
  RPE65 RNA guide
auccucuuuuaugucagucuc

SEQ ID NO: 29734 - RNA, 21 nt, Artificial Sequence
  RPE65 RNA guide
auccugauccuuagggaauuc

SEQ ID NO: 29735 - RNA, 21 nt, Artificial Sequence
  RPE65 RNA guide
auccuuagggaauuccaauua

SEQ ID NO: 29736 - RNA, 21 nt, Artificial Sequence
  RPE65 RNA guide
aucuacaucugccucccagca

SEQ ID NO: 29737 - RNA, 21 nt, Artificial Sequence
  RPE65 RNA guide
aucugccucccagcagaacca

SEQ ID NO: 29738 - RNA, 21 nt, Artificial Sequence
  RPE65 RNA guide
aucuucaaacugucagugccu

SEQ ID NO: 29739 - RNA, 21 nt, Artificial Sequence
  RPE65 RNA guide
aucuugaagccauccucuuuu

SEQ ID NO: 29740 - RNA, 21 nt, Artificial Sequence
  RPE65 RNA guide
augaaacccaccacccuuuaa

SEQ ID NO: 29741 - RNA, 21 nt, Artificial Sequence
  RPE65 RNA guide
augaaagaaaauggguucuug

SEQ ID NO: 29742 - RNA, 21 nt, Artificial Sequence
  RPE65 RNA guide
augaaggcccagugacaagca

SEQ ID NO: 29743 - RNA, 21 nt, Artificial Sequence
  RPE65 RNA guide
augacaaagguguaauccuga

SEQ ID NO: 29744 - RNA, 21 nt, Artificial Sequence
  RPE65 RNA guide
augauagagcuagguuagcau

SEQ ID NO: 29745 - RNA, 21 nt, Artificial Sequence
  RPE65 RNA guide
augcagaaaaacgcuaccuaa

SEQ ID NO: 29746 - RNA, 21 nt, Artificial Sequence
  RPE65 RNA guide
augcccauuuuauuagaggaa

SEQ ID NO: 29747 - RNA, 21 nt, Artificial Sequence
  RPE65 RNA guide
augcuaaccuagcucuaucau

SEQ ID NO: 29748 - RNA, 21 nt, Artificial Sequence
  RPE65 RNA guide
auggcuucaagaugggcgaga

SEQ ID NO: 29749 - RNA, 21 nt, Artificial Sequence
  RPE65 RNA guide
augggcaugaaacccaccacc

SEQ ID NO: 29750 - RNA, 21 nt, Artificial Sequence
  RPE65 RNA guide
auggguucuugcuauaaaaag

SEQ ID NO: 29751 - RNA, 21 nt, Artificial Sequence
  RPE65 RNA guide
auguagaugcuaaccuagcuc

SEQ ID NO: 29752 - RNA, 21 nt, Artificial Sequence
  RPE65 RNA guide
augucagucucucuucucugg

SEQ ID NO: 29753 - RNA, 21 nt, Artificial Sequence
  RPE65 RNA guide
auguugguucugcugggaggc

SEQ ID NO: 29754 - RNA, 21 nt, Artificial Sequence
  RPE65 RNA guide
auuaaagggugguggguuuca

SEQ ID NO: 29755 - RNA, 21 nt, Artificial Sequence
  RPE65 RNA guide
auuacaccuuugucaucuuca

SEQ ID NO: 29756 - RNA, 21 nt, Artificial Sequence
  RPE65 RNA guide
auuagaggaauguugguucug

SEQ ID NO: 29757 - RNA, 21 nt, Artificial Sequence
  RPE65 RNA guide
auuagguagcguuuuucugca

SEQ ID NO: 29758 - RNA, 21 nt, Artificial Sequence
  RPE65 RNA guide
auucacagacagugaaaugau

SEQ ID NO: 29759 - RNA, 21 nt, Artificial Sequence
  RPE65 RNA guide
auuccaauuagguagcguuuu

SEQ ID NO: 29760 - RNA, 21 nt, Artificial Sequence
  RPE65 RNA guide
auucccuaaggaucaggauua

SEQ ID NO: 29761 - RNA, 21 nt, Artificial Sequence
  RPE65 RNA guide
auuccucuaauaaaaugggca

SEQ ID NO: 29762 - RNA, 21 nt, Artificial Sequence
  RPE65 RNA guide
auuccuuggcgucucucagug

SEQ ID NO: 29763 - RNA, 21 nt, Artificial Sequence
  RPE65 RNA guide
auugaggcucagaacguuuaa

SEQ ID NO: 29764 - RNA, 21 nt, Artificial Sequence
  RPE65 RNA guide
auuggaauucccuaaggauca

SEQ ID NO: 29765 - RNA, 21 nt, Artificial Sequence
  RPE65 RNA guide
auuggugucugaauaaaugaa

SEQ ID NO: 29766 - RNA, 21 nt, Artificial Sequence
  RPE65 RNA guide
auuuauaggacauuuacuaug

SEQ ID NO: 29767 - RNA, 21 nt, Artificial Sequence
  RPE65 RNA guide
auuucacugucugugaauccu

SEQ ID NO: 29768 - RNA, 21 nt, Artificial Sequence
  RPE65 RNA guide
auuucucuaaugcagaaaaac

SEQ ID NO: 29769 - RNA, 21 nt, Artificial Sequence
  RPE65 RNA guide
caaaccaccugaucccucucc

SEQ ID NO: 29770 - RNA, 21 nt, Artificial Sequence
  RPE65 RNA guide
caaacugucagugccuagcuc

SEQ ID NO: 29771 - RNA, 21 nt, Artificial Sequence
  RPE65 RNA guide
caaagguguaauccugauccu

SEQ ID NO: 29772 - RNA, 21 nt, Artificial Sequence
  RPE65 RNA guide
caacauuccucuaauaaaaug

SEQ ID NO: 29773 - RNA, 21 nt, Artificial Sequence
  RPE65 RNA guide
caagaacccauuuucuuucau

SEQ ID NO: 29774 - RNA, 21 nt, Artificial Sequence
  RPE65 RNA guide
caagcaccugggaguauuaaa

SEQ ID NO: 29775 - RNA, 21 nt, Artificial Sequence
  RPE65 RNA guide
caaggaauaggaagccagaga

SEQ ID NO: 29776 - RNA, 21 nt, Artificial Sequence
  RPE65 RNA guide
caauuagguagcguuuuucug

SEQ ID NO: 29777 - RNA, 21 nt, Artificial Sequence
  RPE65 RNA guide
cacagacagugaaaugauaga

SEQ ID NO: 29778 - RNA, 21 nt, Artificial Sequence
  RPE65 RNA guide
cacagggagagggaucaggug

SEQ ID NO: 29779 - RNA, 21 nt, Artificial Sequence
  RPE65 RNA guide
cacagggggagucugcacuga

SEQ ID NO: 29780 - RNA, 21 nt, Artificial Sequence
  RPE65 RNA guide
caccacccuuuaauacuccca

SEQ ID NO: 29781 - RNA, 21 nt, Artificial Sequence
  RPE65 RNA guide
cacccuuuaauacucccaggu

SEQ ID NO: 29782 - RNA, 21 nt, Artificial Sequence
  RPE65 RNA guide
caccugaucccucucccugug

SEQ ID NO: 29783 - RNA, 21 nt, Artificial Sequence
  RPE65 RNA guide
caccugggaguauuaaagggu

SEQ ID NO: 29784 - RNA, 21 nt, Artificial Sequence
  RPE65 RNA guide
caccuuugucaucuucaaacu

SEQ ID NO: 29785 - RNA, 21 nt, Artificial Sequence
  RPE65 RNA guide
cacugacaguuugaagaugac

SEQ ID NO: 29786 - RNA, 21 nt, Artificial Sequence
  RPE65 RNA guide
cacugagagacgccaaggaau

SEQ ID NO: 29787 - RNA, 21 nt, Artificial Sequence
  RPE65 RNA guide
cacugagcuaggcacugacag

SEQ ID NO: 29788 - RNA, 21 nt, Artificial Sequence
  RPE65 RNA guide
cacugggccuucauuuauuca

SEQ ID NO: 29789 - RNA, 21 nt, Artificial Sequence
  RPE65 RNA guide
cacugucugugaauccucuaa

SEQ ID NO: 29790 - RNA, 21 nt, Artificial Sequence
  RPE65 RNA guide
cagaaaaacgcuaccuaauug

SEQ ID NO: 29791 - RNA, 21 nt, Artificial Sequence
  RPE65 RNA guide
cagaaccaacauuccucuaau

SEQ ID NO: 29792 - RNA, 21 nt, Artificial Sequence
  RPE65 RNA guide
cagaacguuuaaguaacuuag

SEQ ID NO: 29793 - RNA, 21 nt, Artificial Sequence
  RPE65 RNA guide
cagacagugaaaugauagagc

SEQ ID NO: 29794 - RNA, 21 nt, Artificial Sequence
  RPE65 RNA guide
cagacucccccugugggucac

SEQ ID NO: 29795 - RNA, 21 nt, Artificial Sequence
  RPE65 RNA guide
cagagaagagagacugacaua

SEQ ID NO: 29796 - RNA, 21 nt, Artificial Sequence
  RPE65 RNA guide
cagauguagaugcuaaccuag

SEQ ID NO: 29797 - RNA, 21 nt, Artificial Sequence
  RPE65 RNA guide
cagcagaaccaacauuccucu

SEQ ID NO: 29798 - RNA, 21 nt, Artificial Sequence
  RPE65 RNA guide
caggauuacaccuuugucauc

SEQ ID NO: 29799 - RNA, 21 nt, Artificial Sequence
  RPE65 RNA guide
caggcacugagcuaggcacug

SEQ ID NO: 29800 - RNA, 21 nt, Artificial Sequence
  RPE65 RNA guide
cagggagagggaucagguggu

SEQ ID NO: 29801 - RNA, 21 nt, Artificial Sequence
  RPE65 RNA guide
cagggggagucugcacugaga

SEQ ID NO: 29802 - RNA, 21 nt, Artificial Sequence
  RPE65 RNA guide
caggugcuugucacugggccu

SEQ ID NO: 29803 - RNA, 21 nt, Artificial Sequence
  RPE65 RNA guide
caggugguuugggcuuuuuau

SEQ ID NO: 29804 - RNA, 21 nt, Artificial Sequence
  RPE65 RNA guide
cagucucucuucucuggcuuc

SEQ ID NO: 29805 - RNA, 21 nt, Artificial Sequence
  RPE65 RNA guide
cagugaaaugauagagcuagg

SEQ ID NO: 29806 - RNA, 21 nt, Artificial Sequence
  RPE65 RNA guide
cagugacaagcaccugggagu

SEQ ID NO: 29807 - RNA, 21 nt, Artificial Sequence
  RPE65 RNA guide
cagugcagacucccccugugg

SEQ ID NO: 29808 - RNA, 21 nt, Artificial Sequence
  RPE65 RNA guide
cagugccuagcucagugccug

SEQ ID NO: 29809 - RNA, 21 nt, Artificial Sequence
  RPE65 RNA guide
cagugccuggcacauaguaaa

SEQ ID NO: 29810 - RNA, 21 nt, Artificial Sequence
  RPE65 RNA guide
caguuugaagaugacaaaggu

SEQ ID NO: 29811 - RNA, 21 nt, Artificial Sequence
  RPE65 RNA guide
cauaaaagaggauggcuucaa

SEQ ID NO: 29812 - RNA, 21 nt, Artificial Sequence
  RPE65 RNA guide
cauccucuuuuaugucagucu

SEQ ID NO: 29813 - RNA, 21 nt, Artificial Sequence
  RPE65 RNA guide
caucuacaucugccucccagc

SEQ ID NO: 29814 - RNA, 21 nt, Artificial Sequence
  RPE65 RNA guide
caucugccucccagcagaacc

SEQ ID NO: 29815 - RNA, 21 nt, Artificial Sequence
  RPE65 RNA guide
caucuucaaacugucagugcc

SEQ ID NO: 29816 - RNA, 21 nt, Artificial Sequence
  RPE65 RNA guide
caucuugaagccauccucuuu

SEQ ID NO: 29817 - RNA, 21 nt, Artificial Sequence
  RPE65 RNA guide
caugaaacccaccacccuuua

SEQ ID NO: 29818 - RNA, 21 nt, Artificial Sequence
  RPE65 RNA guide
caugcccauuuuauuagagga

SEQ ID NO: 29819 - RNA, 21 nt, Artificial Sequence
  RPE65 RNA guide
cauuagagaaauaaaguaaag

SEQ ID NO: 29820 - RNA, 21 nt, Artificial Sequence
  RPE65 RNA guide
cauuccucuaauaaaaugggc

SEQ ID NO: 29821 - RNA, 21 nt, Artificial Sequence
  RPE65 RNA guide
cauucgccuuuacuuuauuuc

SEQ ID NO: 29822 - RNA, 21 nt, Artificial Sequence
  RPE65 RNA guide
cauuggugucugaauaaauga

SEQ ID NO: 29823 - RNA, 21 nt, Artificial Sequence
  RPE65 RNA guide
cauuuacuaugugccaggcac

SEQ ID NO: 29824 - RNA, 21 nt, Artificial Sequence
  RPE65 RNA guide
cauuuauaggacauuuacuau

SEQ ID NO: 29825 - RNA, 21 nt, Artificial Sequence
  RPE65 RNA guide
cauuucacugucugugaaucc

SEQ ID NO: 29826 - RNA, 21 nt, Artificial Sequence
  RPE65 RNA guide
cauuuuauuagaggaauguug

SEQ ID NO: 29827 - RNA, 21 nt, Artificial Sequence
  RPE65 RNA guide
cauuuucuuucauucgccuuu

SEQ ID NO: 29828 - RNA, 21 nt, Artificial Sequence
  RPE65 RNA guide
ccaaaccaccugaucccucuc

SEQ ID NO: 29829 - RNA, 21 nt, Artificial Sequence
  RPE65 RNA guide
ccaacauuccucuaauaaaau

SEQ ID NO: 29830 - RNA, 21 nt, Artificial Sequence
  RPE65 RNA guide
ccaaggaauaggaagccagag

SEQ ID NO: 29831 - RNA, 21 nt, Artificial Sequence
  RPE65 RNA guide
ccaauuagguagcguuuuucu

SEQ ID NO: 29832 - RNA, 21 nt, Artificial Sequence
  RPE65 RNA guide
ccacagggggagucugcacug

SEQ ID NO: 29833 - RNA, 21 nt, Artificial Sequence
  RPE65 RNA guide
ccaccacccuuuaauacuccc

SEQ ID NO: 29834 - RNA, 21 nt, Artificial Sequence
  RPE65 RNA guide
ccacccuuuaauacucccagg

SEQ ID NO: 29835 - RNA, 21 nt, Artificial Sequence
  RPE65 RNA guide
ccaccugaucccucucccugu

SEQ ID NO: 29836 - RNA, 21 nt, Artificial Sequence
  RPE65 RNA guide
ccagagaagagagacugacau

SEQ ID NO: 29837 - RNA, 21 nt, Artificial Sequence
  RPE65 RNA guide
ccagcagaaccaacauuccuc

SEQ ID NO: 29838 - RNA, 21 nt, Artificial Sequence
  RPE65 RNA guide
ccaggcacugagcuaggcacu

SEQ ID NO: 29839 - RNA, 21 nt, Artificial Sequence
  RPE65 RNA guide
ccaggugcuugucacugggcc

SEQ ID NO: 29840 - RNA, 21 nt, Artificial Sequence
  RPE65 RNA guide
ccagugacaagcaccugggag

SEQ ID NO: 29841 - RNA, 21 nt, Artificial Sequence
  RPE65 RNA guide
ccauccucuuuuaugucaguc

SEQ ID NO: 29842 - RNA, 21 nt, Artificial Sequence
  RPE65 RNA guide
ccaucuugaagccauccucuu

SEQ ID NO: 29843 - RNA, 21 nt, Artificial Sequence
  RPE65 RNA guide
ccauuggugucugaauaaaug

SEQ ID NO: 29844 - RNA, 21 nt, Artificial Sequence
  RPE65 RNA guide
ccauuuuauuagaggaauguu

SEQ ID NO: 29845 - RNA, 21 nt, Artificial Sequence
  RPE65 RNA guide
ccauuuucuuucauucgccuu

SEQ ID NO: 29846 - RNA, 21 nt, Artificial Sequence
  RPE65 RNA guide
cccaaaccaccugaucccucu

SEQ ID NO: 29847 - RNA, 21 nt, Artificial Sequence
  RPE65 RNA guide
cccacagggggagucugcacu

SEQ ID NO: 29848 - RNA, 21 nt, Artificial Sequence
  RPE65 RNA guide
cccaccacccuuuaauacucc

SEQ ID NO: 29849 - RNA, 21 nt, Artificial Sequence
  RPE65 RNA guide
cccagcagaaccaacauuccu

SEQ ID NO: 29850 - RNA, 21 nt, Artificial Sequence
  RPE65 RNA guide
cccaggugcuugucacugggc

SEQ ID NO: 29851 - RNA, 21 nt, Artificial Sequence
  RPE65 RNA guide
cccagugacaagcaccuggga

SEQ ID NO: 29852 - RNA, 21 nt, Artificial Sequence
  RPE65 RNA guide
cccaucuugaagccauccucu

SEQ ID NO: 29853 - RNA, 21 nt, Artificial Sequence
  RPE65 RNA guide
cccauuuuauuagaggaaugu

SEQ ID NO: 29854 - RNA, 21 nt, Artificial Sequence
  RPE65 RNA guide
cccauuuucuuucauucgccu

SEQ ID NO: 29855 - RNA, 21 nt, Artificial Sequence
  RPE65 RNA guide
cccccugugggucacagggag

SEQ ID NO: 29856 - RNA, 21 nt, Artificial Sequence
  RPE65 RNA guide
ccccugugggucacagggaga

SEQ ID NO: 29857 - RNA, 21 nt, Artificial Sequence
  RPE65 RNA guide
cccuaaggaucaggauuacac

SEQ ID NO: 29858 - RNA, 21 nt, Artificial Sequence
  RPE65 RNA guide
cccucucccugugacccacag

SEQ ID NO: 29859 - RNA, 21 nt, Artificial Sequence
  RPE65 RNA guide
cccugugacccacagggggag

SEQ ID NO: 29860 - RNA, 21 nt, Artificial Sequence
  RPE65 RNA guide
cccugugggucacagggagag

SEQ ID NO: 29861 - RNA, 21 nt, Artificial Sequence
  RPE65 RNA guide
cccuuuaauacucccaggugc

SEQ ID NO: 29862 - RNA, 21 nt, Artificial Sequence
  RPE65 RNA guide
ccuaaggaucaggauuacacc

SEQ ID NO: 29863 - RNA, 21 nt, Artificial Sequence
  RPE65 RNA guide
ccuaauuggaauucccuaagg

SEQ ID NO: 29864 - RNA, 21 nt, Artificial Sequence
  RPE65 RNA guide
ccuagcucuaucauuucacug

SEQ ID NO: 29865 - RNA, 21 nt, Artificial Sequence
  RPE65 RNA guide
ccuauuccuuggcgucucuca

SEQ ID NO: 29866 - RNA, 21 nt, Artificial Sequence
  RPE65 RNA guide
ccucccagcagaaccaacauu

SEQ ID NO: 29867 - RNA, 21 nt, Artificial Sequence
  RPE65 RNA guide
ccucuaaguuacuuaaacguu

SEQ ID NO: 29868 - RNA, 21 nt, Artificial Sequence
  RPE65 RNA guide
ccucuaauaaaaugggcauga

SEQ ID NO: 29869 - RNA, 21 nt, Artificial Sequence
  RPE65 RNA guide
ccucucccugugacccacagg

SEQ ID NO: 29870 - RNA, 21 nt, Artificial Sequence
  RPE65 RNA guide
ccucuuuuaugucagucucuc

SEQ ID NO: 29871 - RNA, 21 nt, Artificial Sequence
  RPE65 RNA guide
ccugaucccucucccugugac

SEQ ID NO: 29872 - RNA, 21 nt, Artificial Sequence
  RPE65 RNA guide
ccugauccuuagggaauucca

SEQ ID NO: 29873 - RNA, 21 nt, Artificial Sequence
  RPE65 RNA guide
ccuggcacauaguaaaugucc

SEQ ID NO: 29874 - RNA, 21 nt, Artificial Sequence
  RPE65 RNA guide
ccugggaguauuaaagggugg

SEQ ID NO: 29875 - RNA, 21 nt, Artificial Sequence
  RPE65 RNA guide
ccugugacccacagggggagu

SEQ ID NO: 29876 - RNA, 21 nt, Artificial Sequence
  RPE65 RNA guide
ccugugggucacagggagagg

SEQ ID NO: 29877 - RNA, 21 nt, Artificial Sequence
  RPE65 RNA guide
ccuuagggaauuccaauuagg

SEQ ID NO: 29878 - RNA, 21 nt, Artificial Sequence
  RPE65 RNA guide
ccuucauuuauucagacacca

SEQ ID NO: 29879 - RNA, 21 nt, Artificial Sequence
  RPE65 RNA guide
ccuuggcgucucucagugcag

SEQ ID NO: 29880 - RNA, 21 nt, Artificial Sequence
  RPE65 RNA guide
ccuuuaauacucccaggugcu

SEQ ID NO: 29881 - RNA, 21 nt, Artificial Sequence
  RPE65 RNA guide
ccuuuacuuuauuucucuaau

SEQ ID NO: 29882 - RNA, 21 nt, Artificial Sequence
  RPE65 RNA guide
ccuuugucaucuucaaacugu

SEQ ID NO: 29883 - RNA, 21 nt, Artificial Sequence
  RPE65 RNA guide
cgaaugaaagaaaauggguuc

SEQ ID NO: 29884 - RNA, 21 nt, Artificial Sequence
  RPE65 RNA guide
cgccaaggaauaggaagccag

SEQ ID NO: 29885 - RNA, 21 nt, Artificial Sequence
  RPE65 RNA guide
cgcccaucuugaagccauccu

SEQ ID NO: 29886 - RNA, 21 nt, Artificial Sequence
  RPE65 RNA guide
cgccuuuacuuuauuucucua

SEQ ID NO: 29887 - RNA, 21 nt, Artificial Sequence
  RPE65 RNA guide
cgcuaccuaauuggaauuccc

SEQ ID NO: 29888 - RNA, 21 nt, Artificial Sequence
  RPE65 RNA guide
cgucucucagugcagacuccc

SEQ ID NO: 29889 - RNA, 21 nt, Artificial Sequence
  RPE65 RNA guide
cguucugagccucaauucccu

SEQ ID NO: 29890 - RNA, 21 nt, Artificial Sequence
  RPE65 RNA guide
cguuuaaguaacuuagaggau

SEQ ID NO: 29891 - RNA, 21 nt, Artificial Sequence
  RPE65 RNA guide
cuaaccuagcucuaucauuuc

SEQ ID NO: 29892 - RNA, 21 nt, Artificial Sequence
  RPE65 RNA guide
cuaaggaucaggauuacaccu

SEQ ID NO: 29893 - RNA, 21 nt, Artificial Sequence
  RPE65 RNA guide
cuaaguuacuuaaacguucug

SEQ ID NO: 29894 - RNA, 21 nt, Artificial Sequence
  RPE65 RNA guide
cuaauaaaaugggcaugaaac

SEQ ID NO: 29895 - RNA, 21 nt, Artificial Sequence
  RPE65 RNA guide
cuaaugcagaaaaacgcuacc

SEQ ID NO: 29896 - RNA, 21 nt, Artificial Sequence
  RPE65 RNA guide
cuaauuggaauucccuaagga

SEQ ID NO: 29897 - RNA, 21 nt, Artificial Sequence
  RPE65 RNA guide
cuacaucugccucccagcaga

SEQ ID NO: 29898 - RNA, 21 nt, Artificial Sequence
  RPE65 RNA guide
cuaccuaauuggaauucccua

SEQ ID NO: 29899 - RNA, 21 nt, Artificial Sequence
  RPE65 RNA guide
cuagcucuaucauuucacugu

SEQ ID NO: 29900 - RNA, 21 nt, Artificial Sequence
  RPE65 RNA guide
cuaggcacugacaguuugaag

SEQ ID NO: 29901 - RNA, 21 nt, Artificial Sequence
  RPE65 RNA guide
cuagguuagcaucuacaucug

SEQ ID NO: 29902 - RNA, 21 nt, Artificial Sequence
  RPE65 RNA guide
cuauaaaaagcccaaaccacc

SEQ ID NO: 29903 - RNA, 21 nt, Artificial Sequence
  RPE65 RNA guide
cuaucauuucacugucuguga

SEQ ID NO: 29904 - RNA, 21 nt, Artificial Sequence
  RPE65 RNA guide
cuauuccuuggcgucucucag

SEQ ID NO: 29905 - RNA, 21 nt, Artificial Sequence
  RPE65 RNA guide
cucagaacguuuaaguaacuu

SEQ ID NO: 29906 - RNA, 21 nt, Artificial Sequence
  RPE65 RNA guide
cucagugcagacucccccugu

SEQ ID NO: 29907 - RNA, 21 nt, Artificial Sequence
  RPE65 RNA guide
cucagugccuggcacauagua

SEQ ID NO: 29908 - RNA, 21 nt, Artificial Sequence
  RPE65 RNA guide
cucccagcagaaccaacauuc

SEQ ID NO: 29909 - RNA, 21 nt, Artificial Sequence
  RPE65 RNA guide
cucccaggugcuugucacugg

SEQ ID NO: 29910 - RNA, 21 nt, Artificial Sequence
  RPE65 RNA guide
cucccccugugggucacaggg

SEQ ID NO: 29911 - RNA, 21 nt, Artificial Sequence
  RPE65 RNA guide
cucccugugacccacaggggg

SEQ ID NO: 29912 - RNA, 21 nt, Artificial Sequence
  RPE65 RNA guide
cucgcccaucuugaagccauc

SEQ ID NO: 29913 - RNA, 21 nt, Artificial Sequence
  RPE65 RNA guide
cucuaaguuacuuaaacguuc

SEQ ID NO: 29914 - RNA, 21 nt, Artificial Sequence
  RPE65 RNA guide
cucuaauaaaaugggcaugaa

SEQ ID NO: 29915 - RNA, 21 nt, Artificial Sequence
  RPE65 RNA guide
cucuaaugcagaaaaacgcua

SEQ ID NO: 29916 - RNA, 21 nt, Artificial Sequence
  RPE65 RNA guide
cucuaucauuucacugucugu

SEQ ID NO: 29917 - RNA, 21 nt, Artificial Sequence
  RPE65 RNA guide
cucucagugcagacucccccu

SEQ ID NO: 29918 - RNA, 21 nt, Artificial Sequence
  RPE65 RNA guide
cucucccugugacccacaggg

SEQ ID NO: 29919 - RNA, 21 nt, Artificial Sequence
  RPE65 RNA guide
cucucuucucuggcuuccuau

SEQ ID NO: 29920 - RNA, 21 nt, Artificial Sequence
  RPE65 RNA guide
cucuggcuuccuauuccuugg

SEQ ID NO: 29921 - RNA, 21 nt, Artificial Sequence
  RPE65 RNA guide
cucuucucuggcuuccuauuc

SEQ ID NO: 29922 - RNA, 21 nt, Artificial Sequence
  RPE65 RNA guide
cucuuuuaugucagucucucu

SEQ ID NO: 29923 - RNA, 21 nt, Artificial Sequence
  RPE65 RNA guide
cugaauaaaugaaggcccagu

SEQ ID NO: 29924 - RNA, 21 nt, Artificial Sequence
  RPE65 RNA guide
cugacaguuugaagaugacaa

SEQ ID NO: 29925 - RNA, 21 nt, Artificial Sequence
  RPE65 RNA guide
cugacauaaaagaggauggcu

SEQ ID NO: 29926 - RNA, 21 nt, Artificial Sequence
  RPE65 RNA guide
cugagagacgccaaggaauag

SEQ ID NO: 29927 - RNA, 21 nt, Artificial Sequence
  RPE65 RNA guide
cugagcuaggcacugacaguu

SEQ ID NO: 29928 - RNA, 21 nt, Artificial Sequence
  RPE65 RNA guide
cugaucccucucccugugacc

SEQ ID NO: 29929 - RNA, 21 nt, Artificial Sequence
  RPE65 RNA guide
cugauccuuagggaauuccaa

SEQ ID NO: 29930 - RNA, 21 nt, Artificial Sequence
  RPE65 RNA guide
cugcacugagagacgccaagg

SEQ ID NO: 29931 - RNA, 21 nt, Artificial Sequence
  RPE65 RNA guide
cugcauuagagaaauaaagua

SEQ ID NO: 29932 - RNA, 21 nt, Artificial Sequence
  RPE65 RNA guide
cugccucccagcagaaccaac

SEQ ID NO: 29933 - RNA, 21 nt, Artificial Sequence
  RPE65 RNA guide
cugcugggaggcagauguaga

SEQ ID NO: 29934 - RNA, 21 nt, Artificial Sequence
  RPE65 RNA guide
cuggcacauaguaaauguccu

SEQ ID NO: 29935 - RNA, 21 nt, Artificial Sequence
  RPE65 RNA guide
cuggcuuccuauuccuuggcg

SEQ ID NO: 29936 - RNA, 21 nt, Artificial Sequence
  RPE65 RNA guide
cugggaggcagauguagaugc

SEQ ID NO: 29937 - RNA, 21 nt, Artificial Sequence
  RPE65 RNA guide
cugggaguauuaaaggguggu

SEQ ID NO: 29938 - RNA, 21 nt, Artificial Sequence
  RPE65 RNA guide
cugggccuucauuuauucaga

SEQ ID NO: 29939 - RNA, 21 nt, Artificial Sequence
  RPE65 RNA guide
cugucagugccuagcucagug

SEQ ID NO: 29940 - RNA, 21 nt, Artificial Sequence
  RPE65 RNA guide
cugucugugaauccucuaagu

SEQ ID NO: 29941 - RNA, 21 nt, Artificial Sequence
  RPE65 RNA guide
cugugaauccucuaaguuacu

SEQ ID NO: 29942 - RNA, 21 nt, Artificial Sequence
  RPE65 RNA guide
cugugacccacagggggaguc

SEQ ID NO: 29943 - RNA, 21 nt, Artificial Sequence
  RPE65 RNA guide
cugugggucacagggagaggg

SEQ ID NO: 29944 - RNA, 21 nt, Artificial Sequence
  RPE65 RNA guide
cuuaaacguucugagccucaa

SEQ ID NO: 29945 - RNA, 21 nt, Artificial Sequence
  RPE65 RNA guide
cuuagaggauucacagacagu

SEQ ID NO: 29946 - RNA, 21 nt, Artificial Sequence
  RPE65 RNA guide
cuuagggaauuccaauuaggu

SEQ ID NO: 29947 - RNA, 21 nt, Artificial Sequence
  RPE65 RNA guide
cuucaaacugucagugccuag

SEQ ID NO: 29948 - RNA, 21 nt, Artificial Sequence
  RPE65 RNA guide
cuucauuuauucagacaccaa

SEQ ID NO: 29949 - RNA, 21 nt, Artificial Sequence
  RPE65 RNA guide
cuuccuauuccuuggcgucuc

SEQ ID NO: 29950 - RNA, 21 nt, Artificial Sequence
  RPE65 RNA guide
cuucucuggcuuccuauuccu

SEQ ID NO: 29951 - RNA, 21 nt, Artificial Sequence
  RPE65 RNA guide
cuugaagccauccucuuuuau

SEQ ID NO: 29952 - RNA, 21 nt, Artificial Sequence
  RPE65 RNA guide
cuugcuauaaaaagcccaaac

SEQ ID NO: 29953 - RNA, 21 nt, Artificial Sequence
  RPE65 RNA guide
cuuggcgucucucagugcaga

SEQ ID NO: 29954 - RNA, 21 nt, Artificial Sequence
  RPE65 RNA guide
cuugucacugggccuucauuu

SEQ ID NO: 29955 - RNA, 21 nt, Artificial Sequence
  RPE65 RNA guide
cuuuaauacucccaggugcuu

SEQ ID NO: 29956 - RNA, 21 nt, Artificial Sequence
  RPE65 RNA guide
cuuucauucgccuuuacuuua

SEQ ID NO: 29957 - RNA, 21 nt, Artificial Sequence
  RPE65 RNA guide
cuuugucaucuucaaacuguc

SEQ ID NO: 29958 - RNA, 21 nt, Artificial Sequence
  RPE65 RNA guide
cuuuuaugucagucucucuuc

SEQ ID NO: 29959 - RNA, 21 nt, Artificial Sequence
  RPE65 RNA guide
cuuuuuauagcaagaacccau

SEQ ID NO: 29960 - RNA, 21 nt, Artificial Sequence
  RPE65 RNA guide
gaaaaacgcuaccuaauugga

SEQ ID NO: 29961 - RNA, 21 nt, Artificial Sequence
  RPE65 RNA guide
gaaaauggguucuugcuauaa

SEQ ID NO: 29962 - RNA, 21 nt, Artificial Sequence
  RPE65 RNA guide
gaaacccaccacccuuuaaua

SEQ ID NO: 29963 - RNA, 21 nt, Artificial Sequence
  RPE65 RNA guide
gaaagaaaauggguucuugcu

SEQ ID NO: 29964 - RNA, 21 nt, Artificial Sequence
  RPE65 RNA guide
gaaauaaaguaaaggcgaaug

SEQ ID NO: 29965 - RNA, 21 nt, Artificial Sequence
  RPE65 RNA guide
gaaaugauagagcuagguuag

SEQ ID NO: 29966 - RNA, 21 nt, Artificial Sequence
  RPE65 RNA guide
gaaccaacauuccucuaauaa

SEQ ID NO: 29967 - RNA, 21 nt, Artificial Sequence
  RPE65 RNA guide
gaacccauuuucuuucauucg

SEQ ID NO: 29968 - RNA, 21 nt, Artificial Sequence
  RPE65 RNA guide
gaacguuuaaguaacuuagag

SEQ ID NO: 29969 - RNA, 21 nt, Artificial Sequence
  RPE65 RNA guide
gaagagagacugacauaaaag

SEQ ID NO: 29970 - RNA, 21 nt, Artificial Sequence
  RPE65 RNA guide
gaagaugacaaagguguaauc

SEQ ID NO: 29971 - RNA, 21 nt, Artificial Sequence
  RPE65 RNA guide
gaagccagagaagagagacug

SEQ ID NO: 29972 - RNA, 21 nt, Artificial Sequence
  RPE65 RNA guide
gaagccauccucuuuuauguc

SEQ ID NO: 29973 - RNA, 21 nt, Artificial Sequence
  RPE65 RNA guide
gaaggcccagugacaagcacc

SEQ ID NO: 29974 - RNA, 21 nt, Artificial Sequence
  RPE65 RNA guide
gaauaaaugaaggcccaguga

SEQ ID NO: 29975 - RNA, 21 nt, Artificial Sequence
  RPE65 RNA guide
gaauaggaagccagagaagag

SEQ ID NO: 29976 - RNA, 21 nt, Artificial Sequence
  RPE65 RNA guide
gaauccucuaaguuacuuaaa

SEQ ID NO: 29977 - RNA, 21 nt, Artificial Sequence
  RPE65 RNA guide
gaaugaaagaaaauggguucu

SEQ ID NO: 29978 - RNA, 21 nt, Artificial Sequence
  RPE65 RNA guide
gaauguugguucugcugggag

SEQ ID NO: 29979 - RNA, 21 nt, Artificial Sequence
  RPE65 RNA guide
gaauuccaauuagguagcguu

SEQ ID NO: 29980 - RNA, 21 nt, Artificial Sequence
  RPE65 RNA guide
gaauucccuaaggaucaggau

SEQ ID NO: 29981 - RNA, 21 nt, Artificial Sequence
  RPE65 RNA guide
gaauugaggcucagaacguuu

SEQ ID NO: 29982 - RNA, 21 nt, Artificial Sequence
  RPE65 RNA guide
gacaaagguguaauccugauc

SEQ ID NO: 29983 - RNA, 21 nt, Artificial Sequence
  RPE65 RNA guide
gacaagcaccugggaguauua

SEQ ID NO: 29984 - RNA, 21 nt, Artificial Sequence
  RPE65 RNA guide
gacagugaaaugauagagcua

SEQ ID NO: 29985 - RNA, 21 nt, Artificial Sequence
  RPE65 RNA guide
gacaguuugaagaugacaaag

SEQ ID NO: 29986 - RNA, 21 nt, Artificial Sequence
  RPE65 RNA guide
gacauaaaagaggauggcuuc

SEQ ID NO: 29987 - RNA, 21 nt, Artificial Sequence
  RPE65 RNA guide
gacauuuacuaugugccaggc

SEQ ID NO: 29988 - RNA, 21 nt, Artificial Sequence
  RPE65 RNA guide
gacccacagggggagucugca

SEQ ID NO: 29989 - RNA, 21 nt, Artificial Sequence
  RPE65 RNA guide
gacgccaaggaauaggaagcc

SEQ ID NO: 29990 - RNA, 21 nt, Artificial Sequence
  RPE65 RNA guide
gacucccccugugggucacag

SEQ ID NO: 29991 - RNA, 21 nt, Artificial Sequence
  RPE65 RNA guide
gacugacauaaaagaggaugg

SEQ ID NO: 29992 - RNA, 21 nt, Artificial Sequence
  RPE65 RNA guide
gagaaauaaaguaaaggcgaa

SEQ ID NO: 29993 - RNA, 21 nt, Artificial Sequence
  RPE65 RNA guide
gagaagagagacugacauaaa

SEQ ID NO: 29994 - RNA, 21 nt, Artificial Sequence
  RPE65 RNA guide
gagacgccaaggaauaggaag

SEQ ID NO: 29995 - RNA, 21 nt, Artificial Sequence
  RPE65 RNA guide
gagacugacauaaaagaggau

SEQ ID NO: 29996 - RNA, 21 nt, Artificial Sequence
  RPE65 RNA guide
gagagacgccaaggaauagga

SEQ ID NO: 29997 - RNA, 21 nt, Artificial Sequence
  RPE65 RNA guide
gagagacugacauaaaagagg

SEQ ID NO: 29998 - RNA, 21 nt, Artificial Sequence
  RPE65 RNA guide
gagagggaucaggugguuugg

SEQ ID NO: 29999 - RNA, 21 nt, Artificial Sequence
  RPE65 RNA guide
gagcuaggcacugacaguuug

SEQ ID NO: 30000 - RNA, 21 nt, Artificial Sequence
  RPE65 RNA guide
gagcuagguuagcaucuacau

SEQ ID NO: 30001 - RNA, 21 nt, Artificial Sequence
  RPE65 RNA guide
gaggaauguugguucugcugg

SEQ ID NO: 30002 - RNA, 21 nt, Artificial Sequence
  RPE65 RNA guide
gaggauggcuucaagaugggc

SEQ ID NO: 30003 - RNA, 21 nt, Artificial Sequence
  RPE65 RNA guide
gaggauucacagacagugaaa

SEQ ID NO: 30004 - RNA, 21 nt, Artificial Sequence
  RPE65 RNA guide
gaggcagauguagaugcuaac

SEQ ID NO: 30005 - RNA, 21 nt, Artificial Sequence
  RPE65 RNA guide
gaggcucagaacguuuaagua

SEQ ID NO: 30006 - RNA, 21 nt, Artificial Sequence
  RPE65 RNA guide
gagggaucaggugguuugggc

SEQ ID NO: 30007 - RNA, 21 nt, Artificial Sequence
  RPE65 RNA guide
gaguauuaaaggguggugggu

SEQ ID NO: 30008 - RNA, 21 nt, Artificial Sequence
  RPE65 RNA guide
gagucugcacugagagacgcc

SEQ ID NO: 30009 - RNA, 21 nt, Artificial Sequence
  RPE65 RNA guide
gauagagcuagguuagcaucu

SEQ ID NO: 30010 - RNA, 21 nt, Artificial Sequence
  RPE65 RNA guide
gaucaggauuacaccuuuguc

SEQ ID NO: 30011 - RNA, 21 nt, Artificial Sequence
  RPE65 RNA guide
gaucaggugguuugggcuuuu

SEQ ID NO: 30012 - RNA, 21 nt, Artificial Sequence
  RPE65 RNA guide
gaucccucucccugugaccca

SEQ ID NO: 30013 - RNA, 21 nt, Artificial Sequence
  RPE65 RNA guide
gauccuuagggaauuccaauu

SEQ ID NO: 30014 - RNA, 21 nt, Artificial Sequence
  RPE65 RNA guide
gaugacaaagguguaauccug

SEQ ID NO: 30015 - RNA, 21 nt, Artificial Sequence
  RPE65 RNA guide
gaugcuaaccuagcucuauca

SEQ ID NO: 30016 - RNA, 21 nt, Artificial Sequence
  RPE65 RNA guide
gauggcuucaagaugggcgag

SEQ ID NO: 30017 - RNA, 21 nt, Artificial Sequence
  RPE65 RNA guide
gauguagaugcuaaccuagcu

SEQ ID NO: 30018 - RNA, 21 nt, Artificial Sequence
  RPE65 RNA guide
gauuacaccuuugucaucuuc

SEQ ID NO: 30019 - RNA, 21 nt, Artificial Sequence
  RPE65 RNA guide
gauucacagacagugaaauga

SEQ ID NO: 30020 - RNA, 21 nt, Artificial Sequence
  RPE65 RNA guide
gcaagaacccauuuucuuuca

SEQ ID NO: 30021 - RNA, 21 nt, Artificial Sequence
  RPE65 RNA guide
gcacauaguaaauguccuaua

SEQ ID NO: 30022 - RNA, 21 nt, Artificial Sequence
  RPE65 RNA guide
gcaccugggaguauuaaaggg

SEQ ID NO: 30023 - RNA, 21 nt, Artificial Sequence
  RPE65 RNA guide
gcacugacaguuugaagauga

SEQ ID NO: 30024 - RNA, 21 nt, Artificial Sequence
  RPE65 RNA guide
gcacugagagacgccaaggaa

SEQ ID NO: 30025 - RNA, 21 nt, Artificial Sequence
  RPE65 RNA guide
gcacugagcuaggcacugaca

SEQ ID NO: 30026 - RNA, 21 nt, Artificial Sequence
  RPE65 RNA guide
gcagaaaaacgcuaccuaauu

SEQ ID NO: 30027 - RNA, 21 nt, Artificial Sequence
  RPE65 RNA guide
gcagaaccaacauuccucuaa

SEQ ID NO: 30028 - RNA, 21 nt, Artificial Sequence
  RPE65 RNA guide
gcagacucccccuguggguca

SEQ ID NO: 30029 - RNA, 21 nt, Artificial Sequence
  RPE65 RNA guide
gcagauguagaugcuaaccua

SEQ ID NO: 30030 - RNA, 21 nt, Artificial Sequence
  RPE65 RNA guide
gcaucuacaucugccucccag

SEQ ID NO: 30031 - RNA, 21 nt, Artificial Sequence
  RPE65 RNA guide
gcaugaaacccaccacccuuu

SEQ ID NO: 30032 - RNA, 21 nt, Artificial Sequence
  RPE65 RNA guide
gcauuagagaaauaaaguaaa

SEQ ID NO: 30033 - RNA, 21 nt, Artificial Sequence
  RPE65 RNA guide
gccaaggaauaggaagccaga

SEQ ID NO: 30034 - RNA, 21 nt, Artificial Sequence
  RPE65 RNA guide
gccagagaagagagacugaca

SEQ ID NO: 30035 - RNA, 21 nt, Artificial Sequence
  RPE65 RNA guide
gccaggcacugagcuaggcac

SEQ ID NO: 30036 - RNA, 21 nt, Artificial Sequence
  RPE65 RNA guide
gccauccucuuuuaugucagu

SEQ ID NO: 30037 - RNA, 21 nt, Artificial Sequence
  RPE65 RNA guide
gcccaaaccaccugaucccuc

SEQ ID NO: 30038 - RNA, 21 nt, Artificial Sequence
  RPE65 RNA guide
gcccagugacaagcaccuggg

SEQ ID NO: 30039 - RNA, 21 nt, Artificial Sequence
  RPE65 RNA guide
gcccaucuugaagccauccuc

SEQ ID NO: 30040 - RNA, 21 nt, Artificial Sequence
  RPE65 RNA guide
gcccauuuuauuagaggaaug

SEQ ID NO: 30041 - RNA, 21 nt, Artificial Sequence
  RPE65 RNA guide
gccucccagcagaaccaacau

SEQ ID NO: 30042 - RNA, 21 nt, Artificial Sequence
  RPE65 RNA guide
gccuggcacauaguaaauguc

SEQ ID NO: 30043 - RNA, 21 nt, Artificial Sequence
  RPE65 RNA guide
gccuucauuuauucagacacc

SEQ ID NO: 30044 - RNA, 21 nt, Artificial Sequence
  RPE65 RNA guide
gccuuuacuuuauuucucuaa

SEQ ID NO: 30045 - RNA, 21 nt, Artificial Sequence
  RPE65 RNA guide
gcgaaugaaagaaaauggguu

SEQ ID NO: 30046 - RNA, 21 nt, Artificial Sequence
  RPE65 RNA guide
gcgucucucagugcagacucc

SEQ ID NO: 30047 - RNA, 21 nt, Artificial Sequence
  RPE65 RNA guide
gcguuuuucugcauuagagaa

SEQ ID NO: 30048 - RNA, 21 nt, Artificial Sequence
  RPE65 RNA guide
gcuaaccuagcucuaucauuu

SEQ ID NO: 30049 - RNA, 21 nt, Artificial Sequence
  RPE65 RNA guide
gcuaccuaauuggaauucccu

SEQ ID NO: 30050 - RNA, 21 nt, Artificial Sequence
  RPE65 RNA guide
gcuaggcacugacaguuugaa

SEQ ID NO: 30051 - RNA, 21 nt, Artificial Sequence
  RPE65 RNA guide
gcuagguuagcaucuacaucu

SEQ ID NO: 30052 - RNA, 21 nt, Artificial Sequence
  RPE65 RNA guide
gcuauaaaaagcccaaaccac

SEQ ID NO: 30053 - RNA, 21 nt, Artificial Sequence
  RPE65 RNA guide
gcucagaacguuuaaguaacu

SEQ ID NO: 30054 - RNA, 21 nt, Artificial Sequence
  RPE65 RNA guide
gcucuaucauuucacugucug

SEQ ID NO: 30055 - RNA, 21 nt, Artificial Sequence
  RPE65 RNA guide
gcugggaggcagauguagaug

SEQ ID NO: 30056 - RNA, 21 nt, Artificial Sequence
  RPE65 RNA guide
gcuuccuauuccuuggcgucu

SEQ ID NO: 30057 - RNA, 21 nt, Artificial Sequence
  RPE65 RNA guide
gcuugucacugggccuucauu

SEQ ID NO: 30058 - RNA, 21 nt, Artificial Sequence
  RPE65 RNA guide
gcuuuuuauagcaagaaccca

SEQ ID NO: 30059 - RNA, 21 nt, Artificial Sequence
  RPE65 RNA guide
ggaagccagagaagagagacu

SEQ ID NO: 30060 - RNA, 21 nt, Artificial Sequence
  RPE65 RNA guide
ggaauaggaagccagagaaga

SEQ ID NO: 30061 - RNA, 21 nt, Artificial Sequence
  RPE65 RNA guide
ggaauguugguucugcuggga

SEQ ID NO: 30062 - RNA, 21 nt, Artificial Sequence
  RPE65 RNA guide
ggaauuccaauuagguagcgu

SEQ ID NO: 30063 - RNA, 21 nt, Artificial Sequence
  RPE65 RNA guide
ggaauucccuaaggaucagga

SEQ ID NO: 30064 - RNA, 21 nt, Artificial Sequence
  RPE65 RNA guide
ggaauugaggcucagaacguu

SEQ ID NO: 30065 - RNA, 21 nt, Artificial Sequence
  RPE65 RNA guide
ggacauuuacuaugugccagg

SEQ ID NO: 30066 - RNA, 21 nt, Artificial Sequence
  RPE65 RNA guide
ggagagggaucaggugguuug

SEQ ID NO: 30067 - RNA, 21 nt, Artificial Sequence
  RPE65 RNA guide
ggaggcagauguagaugcuaa

SEQ ID NO: 30068 - RNA, 21 nt, Artificial Sequence
  RPE65 RNA guide
ggaguauuaaagggugguggg

SEQ ID NO: 30069 - RNA, 21 nt, Artificial Sequence
  RPE65 RNA guide
ggagucugcacugagagacgc

SEQ ID NO: 30070 - RNA, 21 nt, Artificial Sequence
  RPE65 RNA guide
ggaucaggauuacaccuuugu

SEQ ID NO: 30071 - RNA, 21 nt, Artificial Sequence
  RPE65 RNA guide
ggaucaggugguuugggcuuu

SEQ ID NO: 30072 - RNA, 21 nt, Artificial Sequence
  RPE65 RNA guide
ggauggcuucaagaugggcga

SEQ ID NO: 30073 - RNA, 21 nt, Artificial Sequence
  RPE65 RNA guide
ggauuacaccuuugucaucuu

SEQ ID NO: 30074 - RNA, 21 nt, Artificial Sequence
  RPE65 RNA guide
ggauucacagacagugaaaug

SEQ ID NO: 30075 - RNA, 21 nt, Artificial Sequence
  RPE65 RNA guide
ggcacauaguaaauguccuau

SEQ ID NO: 30076 - RNA, 21 nt, Artificial Sequence
  RPE65 RNA guide
ggcacugacaguuugaagaug

SEQ ID NO: 30077 - RNA, 21 nt, Artificial Sequence
  RPE65 RNA guide
ggcacugagcuaggcacugac

SEQ ID NO: 30078 - RNA, 21 nt, Artificial Sequence
  RPE65 RNA guide
ggcagauguagaugcuaaccu

SEQ ID NO: 30079 - RNA, 21 nt, Artificial Sequence
  RPE65 RNA guide
ggcaugaaacccaccacccuu

SEQ ID NO: 30080 - RNA, 21 nt, Artificial Sequence
  RPE65 RNA guide
ggcccagugacaagcaccugg

SEQ ID NO: 30081 - RNA, 21 nt, Artificial Sequence
  RPE65 RNA guide
ggccuucauuuauucagacac

SEQ ID NO: 30082 - RNA, 21 nt, Artificial Sequence
  RPE65 RNA guide
ggcgaaugaaagaaaaugggu

SEQ ID NO: 30083 - RNA, 21 nt, Artificial Sequence
  RPE65 RNA guide
ggcgucucucagugcagacuc

SEQ ID NO: 30084 - RNA, 21 nt, Artificial Sequence
  RPE65 RNA guide
ggcucagaacguuuaaguaac

SEQ ID NO: 30085 - RNA, 21 nt, Artificial Sequence
  RPE65 RNA guide
ggcuuccuauuccuuggcguc

SEQ ID NO: 30086 - RNA, 21 nt, Artificial Sequence
  RPE65 RNA guide
ggcuuuuuauagcaagaaccc

SEQ ID NO: 30087 - RNA, 21 nt, Artificial Sequence
  RPE65 RNA guide
gggaauuccaauuagguagcg

SEQ ID NO: 30088 - RNA, 21 nt, Artificial Sequence
  RPE65 RNA guide
gggaauugaggcucagaacgu

SEQ ID NO: 30089 - RNA, 21 nt, Artificial Sequence
  RPE65 RNA guide
gggagagggaucaggugguuu

SEQ ID NO: 30090 - RNA, 21 nt, Artificial Sequence
  RPE65 RNA guide
gggaggcagauguagaugcua

SEQ ID NO: 30091 - RNA, 21 nt, Artificial Sequence
  RPE65 RNA guide
gggaguauuaaaggguggugg

SEQ ID NO: 30092 - RNA, 21 nt, Artificial Sequence
  RPE65 RNA guide
gggagucugcacugagagacg

SEQ ID NO: 30093 - RNA, 21 nt, Artificial Sequence
  RPE65 RNA guide
gggaucaggugguuugggcuu

SEQ ID NO: 30094 - RNA, 21 nt, Artificial Sequence
  RPE65 RNA guide
gggcaugaaacccaccacccu

SEQ ID NO: 30095 - RNA, 21 nt, Artificial Sequence
  RPE65 RNA guide
gggccuucauuuauucagaca

SEQ ID NO: 30096 - RNA, 21 nt, Artificial Sequence
  RPE65 RNA guide
gggcuuuuuauagcaagaacc

SEQ ID NO: 30097 - RNA, 21 nt, Artificial Sequence
  RPE65 RNA guide
ggggagucugcacugagagac

SEQ ID NO: 30098 - RNA, 21 nt, Artificial Sequence
  RPE65 RNA guide
gggggagucugcacugagaga

SEQ ID NO: 30099 - RNA, 21 nt, Artificial Sequence
  RPE65 RNA guide
gggucacagggagagggauca

SEQ ID NO: 30100 - RNA, 21 nt, Artificial Sequence
  RPE65 RNA guide
gggugguggguuucaugccca

SEQ ID NO: 30101 - RNA, 21 nt, Artificial Sequence
  RPE65 RNA guide
ggguucuugcuauaaaaagcc

SEQ ID NO: 30102 - RNA, 21 nt, Artificial Sequence
  RPE65 RNA guide
ggguuucaugcccauuuuauu

SEQ ID NO: 30103 - RNA, 21 nt, Artificial Sequence
  RPE65 RNA guide
gguaagggaauugaggcucag

SEQ ID NO: 30104 - RNA, 21 nt, Artificial Sequence
  RPE65 RNA guide
gguagcguuuuucugcauuag

SEQ ID NO: 30105 - RNA, 21 nt, Artificial Sequence
  RPE65 RNA guide
ggucacagggagagggaucag

SEQ ID NO: 30106 - RNA, 21 nt, Artificial Sequence
  RPE65 RNA guide
ggucucgcccaucuugaagcc

SEQ ID NO: 30107 - RNA, 21 nt, Artificial Sequence
  RPE65 RNA guide
ggugcuugucacugggccuuc

SEQ ID NO: 30108 - RNA, 21 nt, Artificial Sequence
  RPE65 RNA guide
gguggguuucaugcccauuuu

SEQ ID NO: 30109 - RNA, 21 nt, Artificial Sequence
  RPE65 RNA guide
ggugguggguuucaugcccau

SEQ ID NO: 30110 - RNA, 21 nt, Artificial Sequence
  RPE65 RNA guide
ggugguuugggcuuuuuauag

SEQ ID NO: 30111 - RNA, 21 nt, Artificial Sequence
  RPE65 RNA guide
gguguaauccugauccuuagg

SEQ ID NO: 30112 - RNA, 21 nt, Artificial Sequence
  RPE65 RNA guide
ggugucugaauaaaugaaggc

SEQ ID NO: 30113 - RNA, 21 nt, Artificial Sequence
  RPE65 RNA guide
gguuagcaucuacaucugccu

SEQ ID NO: 30114 - RNA, 21 nt, Artificial Sequence
  RPE65 RNA guide
gguucugcugggaggcagaug

SEQ ID NO: 30115 - RNA, 21 nt, Artificial Sequence
  RPE65 RNA guide
gguucuugcuauaaaaagccc

SEQ ID NO: 30116 - RNA, 21 nt, Artificial Sequence
  RPE65 RNA guide
gguuucaugcccauuuuauua

SEQ ID NO: 30117 - RNA, 21 nt, Artificial Sequence
  RPE65 RNA guide
gguuugggcuuuuuauagcaa

SEQ ID NO: 30118 - RNA, 21 nt, Artificial Sequence
  RPE65 RNA guide
guaaaggcgaaugaaagaaaa

SEQ ID NO: 30119 - RNA, 21 nt, Artificial Sequence
  RPE65 RNA guide
guaaauguccuauaaaugucu

SEQ ID NO: 30120 - RNA, 21 nt, Artificial Sequence
  RPE65 RNA guide
guaacuuagaggauucacaga

SEQ ID NO: 30121 - RNA, 21 nt, Artificial Sequence
  RPE65 RNA guide
guaagggaauugaggcucaga

SEQ ID NO: 30122 - RNA, 21 nt, Artificial Sequence
  RPE65 RNA guide
guaauccugauccuuagggaa

SEQ ID NO: 30123 - RNA, 21 nt, Artificial Sequence
  RPE65 RNA guide
guagaugcuaaccuagcucua

SEQ ID NO: 30124 - RNA, 21 nt, Artificial Sequence
  RPE65 RNA guide
guagcguuuuucugcauuaga

SEQ ID NO: 30125 - RNA, 21 nt, Artificial Sequence
  RPE65 RNA guide
guauuaaagggugguggguuu

SEQ ID NO: 30126 - RNA, 21 nt, Artificial Sequence
  RPE65 RNA guide
gucacagggagagggaucagg

SEQ ID NO: 30127 - RNA, 21 nt, Artificial Sequence
  RPE65 RNA guide
gucacugggccuucauuuauu

SEQ ID NO: 30128 - RNA, 21 nt, Artificial Sequence
  RPE65 RNA guide
gucagucucucuucucuggcu

SEQ ID NO: 30129 - RNA, 21 nt, Artificial Sequence
  RPE65 RNA guide
gucagugccuagcucagugcc

SEQ ID NO: 30130 - RNA, 21 nt, Artificial Sequence
  RPE65 RNA guide
gucaucuucaaacugucagug

SEQ ID NO: 30131 - RNA, 21 nt, Artificial Sequence
  RPE65 RNA guide
gucucgcccaucuugaagcca

SEQ ID NO: 30132 - RNA, 21 nt, Artificial Sequence
  RPE65 RNA guide
gucucucagugcagacucccc

SEQ ID NO: 30133 - RNA, 21 nt, Artificial Sequence
  RPE65 RNA guide
gucucucuucucuggcuuccu

SEQ ID NO: 30134 - RNA, 21 nt, Artificial Sequence
  RPE65 RNA guide
gucugaauaaaugaaggccca

SEQ ID NO: 30135 - RNA, 21 nt, Artificial Sequence
  RPE65 RNA guide
gucugcacugagagacgccaa

SEQ ID NO: 30136 - RNA, 21 nt, Artificial Sequence
  RPE65 RNA guide
gucugugaauccucuaaguua

SEQ ID NO: 30137 - RNA, 21 nt, Artificial Sequence
  RPE65 RNA guide
gugaaaugauagagcuagguu

SEQ ID NO: 30138 - RNA, 21 nt, Artificial Sequence
  RPE65 RNA guide
gugaauccucuaaguuacuua

SEQ ID NO: 30139 - RNA, 21 nt, Artificial Sequence
  RPE65 RNA guide
gugacaagcaccugggaguau

SEQ ID NO: 30140 - RNA, 21 nt, Artificial Sequence
  RPE65 RNA guide
gugacccacagggggagucug

SEQ ID NO: 30141 - RNA, 21 nt, Artificial Sequence
  RPE65 RNA guide
gugcagacucccccugugggu

SEQ ID NO: 30142 - RNA, 21 nt, Artificial Sequence
  RPE65 RNA guide
gugccaggcacugagcuaggc

SEQ ID NO: 30143 - RNA, 21 nt, Artificial Sequence
  RPE65 RNA guide
gugccuggcacauaguaaaug

SEQ ID NO: 30144 - RNA, 21 nt, Artificial Sequence
  RPE65 RNA guide
gugcuugucacugggccuuca

SEQ ID NO: 30145 - RNA, 21 nt, Artificial Sequence
  RPE65 RNA guide
gugggucacagggagagggau

SEQ ID NO: 30146 - RNA, 21 nt, Artificial Sequence
  RPE65 RNA guide
guggguuucaugcccauuuua

SEQ ID NO: 30147 - RNA, 21 nt, Artificial Sequence
  RPE65 RNA guide
gugguggguuucaugcccauu

SEQ ID NO: 30148 - RNA, 21 nt, Artificial Sequence
  RPE65 RNA guide
gugguuugggcuuuuuauagc

SEQ ID NO: 30149 - RNA, 21 nt, Artificial Sequence
  RPE65 RNA guide
guguaauccugauccuuaggg

SEQ ID NO: 30150 - RNA, 21 nt, Artificial Sequence
  RPE65 RNA guide
gugucugaauaaaugaaggcc

SEQ ID NO: 30151 - RNA, 21 nt, Artificial Sequence
  RPE65 RNA guide
guuacuuaaacguucugagcc

SEQ ID NO: 30152 - RNA, 21 nt, Artificial Sequence
  RPE65 RNA guide
guuagcaucuacaucugccuc

SEQ ID NO: 30153 - RNA, 21 nt, Artificial Sequence
  RPE65 RNA guide
guuccauuggugucugaauaa

SEQ ID NO: 30154 - RNA, 21 nt, Artificial Sequence
  RPE65 RNA guide
guucugagccucaauucccuu

SEQ ID NO: 30155 - RNA, 21 nt, Artificial Sequence
  RPE65 RNA guide
guucugcugggaggcagaugu

SEQ ID NO: 30156 - RNA, 21 nt, Artificial Sequence
  RPE65 RNA guide
guucuugcuauaaaaagccca

SEQ ID NO: 30157 - RNA, 21 nt, Artificial Sequence
  RPE65 RNA guide
guuggucucgcccaucuugaa

SEQ ID NO: 30158 - RNA, 21 nt, Artificial Sequence
  RPE65 RNA guide
guugguucugcugggaggcag

SEQ ID NO: 30159 - RNA, 21 nt, Artificial Sequence
  RPE65 RNA guide
guuuaaguaacuuagaggauu

SEQ ID NO: 30160 - RNA, 21 nt, Artificial Sequence
  RPE65 RNA guide
guuucaugcccauuuuauuag

SEQ ID NO: 30161 - RNA, 21 nt, Artificial Sequence
  RPE65 RNA guide
guuugaagaugacaaaggugu

SEQ ID NO: 30162 - RNA, 21 nt, Artificial Sequence
  RPE65 RNA guide
guuugggcuuuuuauagcaag

SEQ ID NO: 30163 - RNA, 21 nt, Artificial Sequence
  RPE65 RNA guide
uaaaaagcccaaaccaccuga

SEQ ID NO: 30164 - RNA, 21 nt, Artificial Sequence
  RPE65 RNA guide
uaaaagaggauggcuucaaga

SEQ ID NO: 30165 - RNA, 21 nt, Artificial Sequence
  RPE65 RNA guide
uaaaaugggcaugaaacccac

SEQ ID NO: 30166 - RNA, 21 nt, Artificial Sequence
  RPE65 RNA guide
uaaacguucugagccucaauu

SEQ ID NO: 30167 - RNA, 21 nt, Artificial Sequence
  RPE65 RNA guide
uaaaggcgaaugaaagaaaau

SEQ ID NO: 30168 - RNA, 21 nt, Artificial Sequence
  RPE65 RNA guide
uaaagggugguggguuucaug

SEQ ID NO: 30169 - RNA, 21 nt, Artificial Sequence
  RPE65 RNA guide
uaaaugaaggcccagugacaa

SEQ ID NO: 30170 - RNA, 21 nt, Artificial Sequence
  RPE65 RNA guide
uaaauguccuauaaaugucug

SEQ ID NO: 30171 - RNA, 21 nt, Artificial Sequence
  RPE65 RNA guide
uaaccuagcucuaucauuuca

SEQ ID NO: 30172 - RNA, 21 nt, Artificial Sequence
  RPE65 RNA guide
uaacuuagaggauucacagac

SEQ ID NO: 30173 - RNA, 21 nt, Artificial Sequence
  RPE65 RNA guide
uaaggaucaggauuacaccuu

SEQ ID NO: 30174 - RNA, 21 nt, Artificial Sequence
  RPE65 RNA guide
uaagggaauugaggcucagaa

SEQ ID NO: 30175 - RNA, 21 nt, Artificial Sequence
  RPE65 RNA guide
uaaguaacuuagaggauucac

SEQ ID NO: 30176 - RNA, 21 nt, Artificial Sequence
  RPE65 RNA guide
uaaguuacuuaaacguucuga

SEQ ID NO: 30177 - RNA, 21 nt, Artificial Sequence
  RPE65 RNA guide
uaauaaaaugggcaugaaacc

SEQ ID NO: 30178 - RNA, 21 nt, Artificial Sequence
  RPE65 RNA guide
uaauacucccaggugcuuguc

SEQ ID NO: 30179 - RNA, 21 nt, Artificial Sequence
  RPE65 RNA guide
uaauccugauccuuagggaau

SEQ ID NO: 30180 - RNA, 21 nt, Artificial Sequence
  RPE65 RNA guide
uaaugcagaaaaacgcuaccu

SEQ ID NO: 30181 - RNA, 21 nt, Artificial Sequence
  RPE65 RNA guide
uaauuggaauucccuaaggau

SEQ ID NO: 30182 - RNA, 21 nt, Artificial Sequence
  RPE65 RNA guide
uacaccuuugucaucuucaaa

SEQ ID NO: 30183 - RNA, 21 nt, Artificial Sequence
  RPE65 RNA guide
uacaucugccucccagcagaa

SEQ ID NO: 30184 - RNA, 21 nt, Artificial Sequence
  RPE65 RNA guide
uaccuaauuggaauucccuaa

SEQ ID NO: 30185 - RNA, 21 nt, Artificial Sequence
  RPE65 RNA guide
uacucccaggugcuugucacu

SEQ ID NO: 30186 - RNA, 21 nt, Artificial Sequence
  RPE65 RNA guide
uacuuaaacguucugagccuc

SEQ ID NO: 30187 - RNA, 21 nt, Artificial Sequence
  RPE65 RNA guide
uagagaaauaaaguaaaggcg

SEQ ID NO: 30188 - RNA, 21 nt, Artificial Sequence
  RPE65 RNA guide
uagagcuagguuagcaucuac

SEQ ID NO: 30189 - RNA, 21 nt, Artificial Sequence
  RPE65 RNA guide
uagaggaauguugguucugcu

SEQ ID NO: 30190 - RNA, 21 nt, Artificial Sequence
  RPE65 RNA guide
uagaggauucacagacaguga

SEQ ID NO: 30191 - RNA, 21 nt, Artificial Sequence
  RPE65 RNA guide
uagaugcuaaccuagcucuau

SEQ ID NO: 30192 - RNA, 21 nt, Artificial Sequence
  RPE65 RNA guide
uagcaagaacccauuuucuuu

SEQ ID NO: 30193 - RNA, 21 nt, Artificial Sequence
  RPE65 RNA guide
uagcaucuacaucugccuccc

SEQ ID NO: 30194 - RNA, 21 nt, Artificial Sequence
  RPE65 RNA guide
uagcguuuuucugcauuagag

SEQ ID NO: 30195 - RNA, 21 nt, Artificial Sequence
  RPE65 RNA guide
uagcucuaucauuucacuguc

SEQ ID NO: 30196 - RNA, 21 nt, Artificial Sequence
  RPE65 RNA guide
uaggaagccagagaagagaga

SEQ ID NO: 30197 - RNA, 21 nt, Artificial Sequence
  RPE65 RNA guide
uaggacauuuacuaugugcca

SEQ ID NO: 30198 - RNA, 21 nt, Artificial Sequence
  RPE65 RNA guide
uaggcacugacaguuugaaga

SEQ ID NO: 30199 - RNA, 21 nt, Artificial Sequence
  RPE65 RNA guide
uagggaauuccaauuagguag

SEQ ID NO: 30200 - RNA, 21 nt, Artificial Sequence
  RPE65 RNA guide
uagguagcguuuuucugcauu

SEQ ID NO: 30201 - RNA, 21 nt, Artificial Sequence
  RPE65 RNA guide
uagguuagcaucuacaucugc

SEQ ID NO: 30202 - RNA, 21 nt, Artificial Sequence
  RPE65 RNA guide
uauaaaaagcccaaaccaccu

SEQ ID NO: 30203 - RNA, 21 nt, Artificial Sequence
  RPE65 RNA guide
uauagcaagaacccauuuucu

SEQ ID NO: 30204 - RNA, 21 nt, Artificial Sequence
  RPE65 RNA guide
uauaggacauuuacuaugugc

SEQ ID NO: 30205 - RNA, 21 nt, Artificial Sequence
  RPE65 RNA guide
uaucauuucacugucugugaa

SEQ ID NO: 30206 - RNA, 21 nt, Artificial Sequence
  RPE65 RNA guide
uaugucagucucucuucucug

SEQ ID NO: 30207 - RNA, 21 nt, Artificial Sequence
  RPE65 RNA guide
uauuaaagggugguggguuuc

SEQ ID NO: 30208 - RNA, 21 nt, Artificial Sequence
  RPE65 RNA guide
uauuagaggaauguugguucu

SEQ ID NO: 30209 - RNA, 21 nt, Artificial Sequence
  RPE65 RNA guide
uauuccuuggcgucucucagu

SEQ ID NO: 30210 - RNA, 21 nt, Artificial Sequence
  RPE65 RNA guide
uauuucucuaaugcagaaaaa

SEQ ID NO: 30211 - RNA, 21 nt, Artificial Sequence
  RPE65 RNA guide
ucaaacugucagugccuagcu

SEQ ID NO: 30212 - RNA, 21 nt, Artificial Sequence
  RPE65 RNA guide
ucacagacagugaaaugauag

SEQ ID NO: 30213 - RNA, 21 nt, Artificial Sequence
  RPE65 RNA guide
ucacagggagagggaucaggu

SEQ ID NO: 30214 - RNA, 21 nt, Artificial Sequence
  RPE65 RNA guide
ucacugggccuucauuuauuc

SEQ ID NO: 30215 - RNA, 21 nt, Artificial Sequence
  RPE65 RNA guide
ucacugucugugaauccucua

SEQ ID NO: 30216 - RNA, 21 nt, Artificial Sequence
  RPE65 RNA guide
ucagaacguuuaaguaacuua

SEQ ID NO: 30217 - RNA, 21 nt, Artificial Sequence
  RPE65 RNA guide
ucaggauuacaccuuugucau

SEQ ID NO: 30218 - RNA, 21 nt, Artificial Sequence
  RPE65 RNA guide
ucaggugguuugggcuuuuua

SEQ ID NO: 30219 - RNA, 21 nt, Artificial Sequence
  RPE65 RNA guide
ucagucucucuucucuggcuu

SEQ ID NO: 30220 - RNA, 21 nt, Artificial Sequence
  RPE65 RNA guide
ucagugcagacucccccugug

SEQ ID NO: 30221 - RNA, 21 nt, Artificial Sequence
  RPE65 RNA guide
ucagugccuagcucagugccu

SEQ ID NO: 30222 - RNA, 21 nt, Artificial Sequence
  RPE65 RNA guide
ucagugccuggcacauaguaa

SEQ ID NO: 30223 - RNA, 21 nt, Artificial Sequence
  RPE65 RNA guide
ucaucuucaaacugucagugc

SEQ ID NO: 30224 - RNA, 21 nt, Artificial Sequence
  RPE65 RNA guide
ucaugcccauuuuauuagagg

SEQ ID NO: 30225 - RNA, 21 nt, Artificial Sequence
  RPE65 RNA guide
ucauucgccuuuacuuuauuu

SEQ ID NO: 30226 - RNA, 21 nt, Artificial Sequence
  RPE65 RNA guide
ucauuucacugucugugaauc

SEQ ID NO: 30227 - RNA, 21 nt, Artificial Sequence
  RPE65 RNA guide
uccaauuagguagcguuuuuc

SEQ ID NO: 30228 - RNA, 21 nt, Artificial Sequence
  RPE65 RNA guide
uccauuggugucugaauaaau

SEQ ID NO: 30229 - RNA, 21 nt, Artificial Sequence
  RPE65 RNA guide
ucccagcagaaccaacauucc

SEQ ID NO: 30230 - RNA, 21 nt, Artificial Sequence
  RPE65 RNA guide
ucccaggugcuugucacuggg

SEQ ID NO: 30231 - RNA, 21 nt, Artificial Sequence
  RPE65 RNA guide
ucccccugugggucacaggga

SEQ ID NO: 30232 - RNA, 21 nt, Artificial Sequence
  RPE65 RNA guide
ucccuaaggaucaggauuaca

SEQ ID NO: 30233 - RNA, 21 nt, Artificial Sequence
  RPE65 RNA guide
ucccucucccugugacccaca

SEQ ID NO: 30234 - RNA, 21 nt, Artificial Sequence
  RPE65 RNA guide
ucccugugacccacaggggga

SEQ ID NO: 30235 - RNA, 21 nt, Artificial Sequence
  RPE65 RNA guide
uccuauuccuuggcgucucuc

SEQ ID NO: 30236 - RNA, 21 nt, Artificial Sequence
  RPE65 RNA guide
uccucuaaguuacuuaaacgu

SEQ ID NO: 30237 - RNA, 21 nt, Artificial Sequence
  RPE65 RNA guide
uccucuaauaaaaugggcaug

SEQ ID NO: 30238 - RNA, 21 nt, Artificial Sequence
  RPE65 RNA guide
uccucuuuuaugucagucucu

SEQ ID NO: 30239 - RNA, 21 nt, Artificial Sequence
  RPE65 RNA guide
uccugauccuuagggaauucc

SEQ ID NO: 30240 - RNA, 21 nt, Artificial Sequence
  RPE65 RNA guide
uccuuagggaauuccaauuag

SEQ ID NO: 30241 - RNA, 21 nt, Artificial Sequence
  RPE65 RNA guide
uccuuggcgucucucagugca

SEQ ID NO: 30242 - RNA, 21 nt, Artificial Sequence
  RPE65 RNA guide
ucgcccaucuugaagccaucc

SEQ ID NO: 30243 - RNA, 21 nt, Artificial Sequence
  RPE65 RNA guide
ucgccuuuacuuuauuucucu

SEQ ID NO: 30244 - RNA, 21 nt, Artificial Sequence
  RPE65 RNA guide
ucuaaguuacuuaaacguucu

SEQ ID NO: 30245 - RNA, 21 nt, Artificial Sequence
  RPE65 RNA guide
ucuaauaaaaugggcaugaaa

SEQ ID NO: 30246 - RNA, 21 nt, Artificial Sequence
  RPE65 RNA guide
ucuaaugcagaaaaacgcuac

SEQ ID NO: 30247 - RNA, 21 nt, Artificial Sequence
  RPE65 RNA guide
ucuacaucugccucccagcag

SEQ ID NO: 30248 - RNA, 21 nt, Artificial Sequence
  RPE65 RNA guide
ucuaucauuucacugucugug

SEQ ID NO: 30249 - RNA, 21 nt, Artificial Sequence
  RPE65 RNA guide
ucucagugcagacucccccug

SEQ ID NO: 30250 - RNA, 21 nt, Artificial Sequence
  RPE65 RNA guide
ucucccugugacccacagggg

SEQ ID NO: 30251 - RNA, 21 nt, Artificial Sequence
  RPE65 RNA guide
ucucgcccaucuugaagccau

SEQ ID NO: 30252 - RNA, 21 nt, Artificial Sequence
  RPE65 RNA guide
ucucuaaugcagaaaaacgcu

SEQ ID NO: 30253 - RNA, 21 nt, Artificial Sequence
  RPE65 RNA guide
ucucucagugcagacuccccc

SEQ ID NO: 30254 - RNA, 21 nt, Artificial Sequence
  RPE65 RNA guide
ucucucuucucuggcuuccua

SEQ ID NO: 30255 - RNA, 21 nt, Artificial Sequence
  RPE65 RNA guide
ucucuggcuuccuauuccuug

SEQ ID NO: 30256 - RNA, 21 nt, Artificial Sequence
  RPE65 RNA guide
ucucuucucuggcuuccuauu

SEQ ID NO: 30257 - RNA, 21 nt, Artificial Sequence
  RPE65 RNA guide
ucugaauaaaugaaggcccag

SEQ ID NO: 30258 - RNA, 21 nt, Artificial Sequence
  RPE65 RNA guide
ucugcacugagagacgccaag

SEQ ID NO: 30259 - RNA, 21 nt, Artificial Sequence
  RPE65 RNA guide
ucugccucccagcagaaccaa

SEQ ID NO: 30260 - RNA, 21 nt, Artificial Sequence
  RPE65 RNA guide
ucugcugggaggcagauguag

SEQ ID NO: 30261 - RNA, 21 nt, Artificial Sequence
  RPE65 RNA guide
ucuggcuuccuauuccuuggc

SEQ ID NO: 30262 - RNA, 21 nt, Artificial Sequence
  RPE65 RNA guide
ucugugaauccucuaaguuac

SEQ ID NO: 30263 - RNA, 21 nt, Artificial Sequence
  RPE65 RNA guide
ucuucaaacugucagugccua

SEQ ID NO: 30264 - RNA, 21 nt, Artificial Sequence
  RPE65 RNA guide
ucuucucuggcuuccuauucc

SEQ ID NO: 30265 - RNA, 21 nt, Artificial Sequence
  RPE65 RNA guide
ucuugaagccauccucuuuua

SEQ ID NO: 30266 - RNA, 21 nt, Artificial Sequence
  RPE65 RNA guide
ucuugcuauaaaaagcccaaa

SEQ ID NO: 30267 - RNA, 21 nt, Artificial Sequence
  RPE65 RNA guide
ucuuuuaugucagucucucuu

SEQ ID NO: 30268 - RNA, 21 nt, Artificial Sequence
  RPE65 RNA guide
ugaaacccaccacccuuuaau

SEQ ID NO: 30269 - RNA, 21 nt, Artificial Sequence
  RPE65 RNA guide
ugaaagaaaauggguucuugc

SEQ ID NO: 30270 - RNA, 21 nt, Artificial Sequence
  RPE65 RNA guide
ugaaaugauagagcuagguua

SEQ ID NO: 30271 - RNA, 21 nt, Artificial Sequence
  RPE65 RNA guide
ugaagaugacaaagguguaau

SEQ ID NO: 30272 - RNA, 21 nt, Artificial Sequence
  RPE65 RNA guide
ugaagccauccucuuuuaugu

SEQ ID NO: 30273 - RNA, 21 nt, Artificial Sequence
  RPE65 RNA guide
ugaaggcccagugacaagcac

SEQ ID NO: 30274 - RNA, 21 nt, Artificial Sequence
  RPE65 RNA guide
ugaauaaaugaaggcccagug

SEQ ID NO: 30275 - RNA, 21 nt, Artificial Sequence
  RPE65 RNA guide
ugaauccucuaaguuacuuaa

SEQ ID NO: 30276 - RNA, 21 nt, Artificial Sequence
  RPE65 RNA guide
ugacaaagguguaauccugau

SEQ ID NO: 30277 - RNA, 21 nt, Artificial Sequence
  RPE65 RNA guide
ugacaagcaccugggaguauu

SEQ ID NO: 30278 - RNA, 21 nt, Artificial Sequence
  RPE65 RNA guide
ugacaguuugaagaugacaaa

SEQ ID NO: 30279 - RNA, 21 nt, Artificial Sequence
  RPE65 RNA guide
ugacauaaaagaggauggcuu

SEQ ID NO: 30280 - RNA, 21 nt, Artificial Sequence
  RPE65 RNA guide
ugacccacagggggagucugc

SEQ ID NO: 30281 - RNA, 21 nt, Artificial Sequence
  RPE65 RNA guide
ugagagacgccaaggaauagg

SEQ ID NO: 30282 - RNA, 21 nt, Artificial Sequence
  RPE65 RNA guide
ugagcuaggcacugacaguuu

SEQ ID NO: 30283 - RNA, 21 nt, Artificial Sequence
  RPE65 RNA guide
ugaggcucagaacguuuaagu

SEQ ID NO: 30284 - RNA, 21 nt, Artificial Sequence
  RPE65 RNA guide
ugauagagcuagguuagcauc

SEQ ID NO: 30285 - RNA, 21 nt, Artificial Sequence
  RPE65 RNA guide
ugaucccucucccugugaccc

SEQ ID NO: 30286 - RNA, 21 nt, Artificial Sequence
  RPE65 RNA guide
ugauccuuagggaauuccaau

SEQ ID NO: 30287 - RNA, 21 nt, Artificial Sequence
  RPE65 RNA guide
ugcacugagagacgccaagga

SEQ ID NO: 30288 - RNA, 21 nt, Artificial Sequence
  RPE65 RNA guide
ugcagaaaaacgcuaccuaau

SEQ ID NO: 30289 - RNA, 21 nt, Artificial Sequence
  RPE65 RNA guide
ugcagacucccccuguggguc

SEQ ID NO: 30290 - RNA, 21 nt, Artificial Sequence
  RPE65 RNA guide
ugcauuagagaaauaaaguaa

SEQ ID NO: 30291 - RNA, 21 nt, Artificial Sequence
  RPE65 RNA guide
ugccaggcacugagcuaggca

SEQ ID NO: 30292 - RNA, 21 nt, Artificial Sequence
  RPE65 RNA guide
ugcccauuuuauuagaggaau

SEQ ID NO: 30293 - RNA, 21 nt, Artificial Sequence
  RPE65 RNA guide
ugccucccagcagaaccaaca

SEQ ID NO: 30294 - RNA, 21 nt, Artificial Sequence
  RPE65 RNA guide
ugccuggcacauaguaaaugu

SEQ ID NO: 30295 - RNA, 21 nt, Artificial Sequence
  RPE65 RNA guide
ugcuaaccuagcucuaucauu

SEQ ID NO: 30296 - RNA, 21 nt, Artificial Sequence
  RPE65 RNA guide
ugcuauaaaaagcccaaacca

SEQ ID NO: 30297 - RNA, 21 nt, Artificial Sequence
  RPE65 RNA guide
ugcugggaggcagauguagau

SEQ ID NO: 30298 - RNA, 21 nt, Artificial Sequence
  RPE65 RNA guide
ugcuugucacugggccuucau

SEQ ID NO: 30299 - RNA, 21 nt, Artificial Sequence
  RPE65 RNA guide
uggaauucccuaaggaucagg

SEQ ID NO: 30300 - RNA, 21 nt, Artificial Sequence
  RPE65 RNA guide
uggcacauaguaaauguccua

SEQ ID NO: 30301 - RNA, 21 nt, Artificial Sequence
  RPE65 RNA guide
uggcgucucucagugcagacu

SEQ ID NO: 30302 - RNA, 21 nt, Artificial Sequence
  RPE65 RNA guide
uggcuucaagaugggcgagac

SEQ ID NO: 30303 - RNA, 21 nt, Artificial Sequence
  RPE65 RNA guide
uggcuuccuauuccuuggcgu

SEQ ID NO: 30304 - RNA, 21 nt, Artificial Sequence
  RPE65 RNA guide
ugggaggcagauguagaugcu

SEQ ID NO: 30305 - RNA, 21 nt, Artificial Sequence
  RPE65 RNA guide
ugggaguauuaaaggguggug

SEQ ID NO: 30306 - RNA, 21 nt, Artificial Sequence
  RPE65 RNA guide
ugggcaugaaacccaccaccc

SEQ ID NO: 30307 - RNA, 21 nt, Artificial Sequence
  RPE65 RNA guide
ugggccuucauuuauucagac

SEQ ID NO: 30308 - RNA, 21 nt, Artificial Sequence
  RPE65 RNA guide
ugggcuuuuuauagcaagaac

SEQ ID NO: 30309 - RNA, 21 nt, Artificial Sequence
  RPE65 RNA guide
ugggucacagggagagggauc

SEQ ID NO: 30310 - RNA, 21 nt, Artificial Sequence
  RPE65 RNA guide
uggguucuugcuauaaaaagc

SEQ ID NO: 30311 - RNA, 21 nt, Artificial Sequence
  RPE65 RNA guide
uggguuucaugcccauuuuau

SEQ ID NO: 30312 - RNA, 21 nt, Artificial Sequence
  RPE65 RNA guide
uggucucgcccaucuugaagc

SEQ ID NO: 30313 - RNA, 21 nt, Artificial Sequence
  RPE65 RNA guide
ugguggguuucaugcccauuu

SEQ ID NO: 30314 - RNA, 21 nt, Artificial Sequence
  RPE65 RNA guide
uggugucugaauaaaugaagg

SEQ ID NO: 30315 - RNA, 21 nt, Artificial Sequence
  RPE65 RNA guide
ugguucugcugggaggcagau

SEQ ID NO: 30316 - RNA, 21 nt, Artificial Sequence
  RPE65 RNA guide
ugguuugggcuuuuuauagca

SEQ ID NO: 30317 - RNA, 21 nt, Artificial Sequence
  RPE65 RNA guide
uguaauccugauccuuaggga

SEQ ID NO: 30318 - RNA, 21 nt, Artificial Sequence
  RPE65 RNA guide
uguagaugcuaaccuagcucu

SEQ ID NO: 30319 - RNA, 21 nt, Artificial Sequence
  RPE65 RNA guide
ugucacugggccuucauuuau

SEQ ID NO: 30320 - RNA, 21 nt, Artificial Sequence
  RPE65 RNA guide
ugucagucucucuucucuggc

SEQ ID NO: 30321 - RNA, 21 nt, Artificial Sequence
  RPE65 RNA guide
ugucagugccuagcucagugc

SEQ ID NO: 30322 - RNA, 21 nt, Artificial Sequence
  RPE65 RNA guide
ugucaucuucaaacugucagu

SEQ ID NO: 30323 - RNA, 21 nt, Artificial Sequence
  RPE65 RNA guide
ugucugaauaaaugaaggccc

SEQ ID NO: 30324 - RNA, 21 nt, Artificial Sequence
  RPE65 RNA guide
ugucugugaauccucuaaguu

SEQ ID NO: 30325 - RNA, 21 nt, Artificial Sequence
  RPE65 RNA guide
ugugaauccucuaaguuacuu

SEQ ID NO: 30326 - RNA, 21 nt, Artificial Sequence
  RPE65 RNA guide
ugugacccacagggggagucu

SEQ ID NO: 30327 - RNA, 21 nt, Artificial Sequence
  RPE65 RNA guide
ugugggucacagggagaggga

SEQ ID NO: 30328 - RNA, 21 nt, Artificial Sequence
  RPE65 RNA guide
uguugguucugcugggaggca

SEQ ID NO: 30329 - RNA, 21 nt, Artificial Sequence
  RPE65 RNA guide
uuaaacguucugagccucaau

SEQ ID NO: 30330 - RNA, 21 nt, Artificial Sequence
  RPE65 RNA guide
uuaaagggugguggguuucau

SEQ ID NO: 30331 - RNA, 21 nt, Artificial Sequence
  RPE65 RNA guide
uuaaguaacuuagaggauuca

SEQ ID NO: 30332 - RNA, 21 nt, Artificial Sequence
  RPE65 RNA guide
uuaauacucccaggugcuugu

SEQ ID NO: 30333 - RNA, 21 nt, Artificial Sequence
  RPE65 RNA guide
uuacaccuuugucaucuucaa

SEQ ID NO: 30334 - RNA, 21 nt, Artificial Sequence
  RPE65 RNA guide
uuacuuaaacguucugagccu

SEQ ID NO: 30335 - RNA, 21 nt, Artificial Sequence
  RPE65 RNA guide
uuagaggaauguugguucugc

SEQ ID NO: 30336 - RNA, 21 nt, Artificial Sequence
  RPE65 RNA guide
uuagaggauucacagacagug

SEQ ID NO: 30337 - RNA, 21 nt, Artificial Sequence
  RPE65 RNA guide
uuagcaucuacaucugccucc

SEQ ID NO: 30338 - RNA, 21 nt, Artificial Sequence
  RPE65 RNA guide
uuagggaauuccaauuaggua

SEQ ID NO: 30339 - RNA, 21 nt, Artificial Sequence
  RPE65 RNA guide
uuagguagcguuuuucugcau

SEQ ID NO: 30340 - RNA, 21 nt, Artificial Sequence
  RPE65 RNA guide
uuauagcaagaacccauuuuc

SEQ ID NO: 30341 - RNA, 21 nt, Artificial Sequence
  RPE65 RNA guide
uuauaggacauuuacuaugug

SEQ ID NO: 30342 - RNA, 21 nt, Artificial Sequence
  RPE65 RNA guide
uuaugucagucucucuucucu

SEQ ID NO: 30343 - RNA, 21 nt, Artificial Sequence
  RPE65 RNA guide
uuauuagaggaauguugguuc

SEQ ID NO: 30344 - RNA, 21 nt, Artificial Sequence
  RPE65 RNA guide
uuauuucucuaaugcagaaaa

SEQ ID NO: 30345 - RNA, 21 nt, Artificial Sequence
  RPE65 RNA guide
uucaaacugucagugccuagc

SEQ ID NO: 30346 - RNA, 21 nt, Artificial Sequence
  RPE65 RNA guide
uucacagacagugaaaugaua

SEQ ID NO: 30347 - RNA, 21 nt, Artificial Sequence
  RPE65 RNA guide
uucacugucugugaauccucu

SEQ ID NO: 30348 - RNA, 21 nt, Artificial Sequence
  RPE65 RNA guide
uucaugcccauuuuauuagag

SEQ ID NO: 30349 - RNA, 21 nt, Artificial Sequence
  RPE65 RNA guide
uucauucgccuuuacuuuauu

SEQ ID NO: 30350 - RNA, 21 nt, Artificial Sequence
  RPE65 RNA guide
uucauuuauucagacaccaau

SEQ ID NO: 30351 - RNA, 21 nt, Artificial Sequence
  RPE65 RNA guide
uuccaauuagguagcguuuuu

SEQ ID NO: 30352 - RNA, 21 nt, Artificial Sequence
  RPE65 RNA guide
uuccauuggugucugaauaaa

SEQ ID NO: 30353 - RNA, 21 nt, Artificial Sequence
  RPE65 RNA guide
uucccuaaggaucaggauuac

SEQ ID NO: 30354 - RNA, 21 nt, Artificial Sequence
  RPE65 RNA guide
uuccuauuccuuggcgucucu

SEQ ID NO: 30355 - RNA, 21 nt, Artificial Sequence
  RPE65 RNA guide
uuccucuaauaaaaugggcau

SEQ ID NO: 30356 - RNA, 21 nt, Artificial Sequence
  RPE65 RNA guide
uuccuuggcgucucucagugc

SEQ ID NO: 30357 - RNA, 21 nt, Artificial Sequence
  RPE65 RNA guide
uucucuaaugcagaaaaacgc

SEQ ID NO: 30358 - RNA, 21 nt, Artificial Sequence
  RPE65 RNA guide
uucucuggcuuccuauuccuu

SEQ ID NO: 30359 - RNA, 21 nt, Artificial Sequence
  RPE65 RNA guide
uucugcugggaggcagaugua

SEQ ID NO: 30360 - RNA, 21 nt, Artificial Sequence
  RPE65 RNA guide
uucuugcuauaaaaagcccaa

SEQ ID NO: 30361 - RNA, 21 nt, Artificial Sequence
  RPE65 RNA guide
uugaagaugacaaagguguaa

SEQ ID NO: 30362 - RNA, 21 nt, Artificial Sequence
  RPE65 RNA guide
uugaagccauccucuuuuaug

SEQ ID NO: 30363 - RNA, 21 nt, Artificial Sequence
  RPE65 RNA guide
uugaggcucagaacguuuaag

SEQ ID NO: 30364 - RNA, 21 nt, Artificial Sequence
  RPE65 RNA guide
uugcuauaaaaagcccaaacc

SEQ ID NO: 30365 - RNA, 21 nt, Artificial Sequence
  RPE65 RNA guide
uuggaauucccuaaggaucag

SEQ ID NO: 30366 - RNA, 21 nt, Artificial Sequence
  RPE65 RNA guide
uuggcgucucucagugcagac

SEQ ID NO: 30367 - RNA, 21 nt, Artificial Sequence
  RPE65 RNA guide
uugggcuuuuuauagcaagaa

SEQ ID NO: 30368 - RNA, 21 nt, Artificial Sequence
  RPE65 RNA guide
uuggucucgcccaucuugaag

SEQ ID NO: 30369 - RNA, 21 nt, Artificial Sequence
  RPE65 RNA guide
uuggugucugaauaaaugaag

SEQ ID NO: 30370 - RNA, 21 nt, Artificial Sequence
  RPE65 RNA guide
uugguucugcugggaggcaga

SEQ ID NO: 30371 - RNA, 21 nt, Artificial Sequence
  RPE65 RNA guide
uugucacugggccuucauuua

SEQ ID NO: 30372 - RNA, 21 nt, Artificial Sequence
  RPE65 RNA guide
uugucaucuucaaacugucag

SEQ ID NO: 30373 - RNA, 21 nt, Artificial Sequence
  RPE65 RNA guide
uuuaaguaacuuagaggauuc

SEQ ID NO: 30374 - RNA, 21 nt, Artificial Sequence
  RPE65 RNA guide
uuuaauacucccaggugcuug

SEQ ID NO: 30375 - RNA, 21 nt, Artificial Sequence
  RPE65 RNA guide
uuuauaggacauuuacuaugu

SEQ ID NO: 30376 - RNA, 21 nt, Artificial Sequence
  RPE65 RNA guide
uuuaugucagucucucuucuc

SEQ ID NO: 30377 - RNA, 21 nt, Artificial Sequence
  RPE65 RNA guide
uuuauuagaggaauguugguu

SEQ ID NO: 30378 - RNA, 21 nt, Artificial Sequence
  RPE65 RNA guide
uuucacugucugugaauccuc

SEQ ID NO: 30379 - RNA, 21 nt, Artificial Sequence
  RPE65 RNA guide
uuucaugcccauuuuauuaga

SEQ ID NO: 30380 - RNA, 21 nt, Artificial Sequence
  RPE65 RNA guide
uuucucuaaugcagaaaaacg

SEQ ID NO: 30381 - RNA, 21 nt, Artificial Sequence
  RPE65 RNA guide
uuugaagaugacaaaggugua

SEQ ID NO: 30382 - RNA, 21 nt, Artificial Sequence
  RPE65 RNA guide
uuugggcuuuuuauagcaaga

SEQ ID NO: 30383 - RNA, 21 nt, Artificial Sequence
  RPE65 RNA guide
uuugucaucuucaaacuguca

SEQ ID NO: 30384 - RNA, 21 nt, Artificial Sequence
  RPE65 RNA guide
uuuuaugucagucucucuucu

SEQ ID NO: 30385 - RNA, 21 nt, Artificial Sequence
  RPE65 RNA guide
uuuuauuagaggaauguuggu

SEQ ID NO: 30386 - RNA, 22 nt, Artificial Sequence
  RPE65 RNA guide
aaaaacgcuaccuaauuggaau

SEQ ID NO: 30387 - RNA, 22 nt, Artificial Sequence
  RPE65 RNA guide
aaaaagcccaaaccaccugauc

SEQ ID NO: 30388 - RNA, 22 nt, Artificial Sequence
  RPE65 RNA guide
aaaacgcuaccuaauuggaauu

SEQ ID NO: 30389 - RNA, 22 nt, Artificial Sequence
  RPE65 RNA guide
aaaagaggauggcuucaagaug

SEQ ID NO: 30390 - RNA, 22 nt, Artificial Sequence
  RPE65 RNA guide
aaaagcccaaaccaccugaucc

SEQ ID NO: 30391 - RNA, 22 nt, Artificial Sequence
  RPE65 RNA guide
aaaaugggcaugaaacccacca

SEQ ID NO: 30392 - RNA, 22 nt, Artificial Sequence
  RPE65 RNA guide
aaaauggguucuugcuauaaaa

SEQ ID NO: 30393 - RNA, 22 nt, Artificial Sequence
  RPE65 RNA guide
aaaccaccugaucccucucccu

SEQ ID NO: 30394 - RNA, 22 nt, Artificial Sequence
  RPE65 RNA guide
aaacccaccacccuuuaauacu

SEQ ID NO: 30395 - RNA, 22 nt, Artificial Sequence
  RPE65 RNA guide
aaacgcuaccuaauuggaauuc

SEQ ID NO: 30396 - RNA, 22 nt, Artificial Sequence
  RPE65 RNA guide
aaacguucugagccucaauucc

SEQ ID NO: 30397 - RNA, 22 nt, Artificial Sequence
  RPE65 RNA guide
aaacugucagugccuagcucag

SEQ ID NO: 30398 - RNA, 22 nt, Artificial Sequence
  RPE65 RNA guide
aaagaggauggcuucaagaugg

SEQ ID NO: 30399 - RNA, 22 nt, Artificial Sequence
  RPE65 RNA guide
aaagcccaaaccaccugauccc

SEQ ID NO: 30400 - RNA, 22 nt, Artificial Sequence
  RPE65 RNA guide
aaaggcgaaugaaagaaaaugg

SEQ ID NO: 30401 - RNA, 22 nt, Artificial Sequence
  RPE65 RNA guide
aaagggugguggguuucaugcc

SEQ ID NO: 30402 - RNA, 22 nt, Artificial Sequence
  RPE65 RNA guide
aaagguguaauccugauccuua

SEQ ID NO: 30403 - RNA, 22 nt, Artificial Sequence
  RPE65 RNA guide
aaaguaaaggcgaaugaaagaa

SEQ ID NO: 30404 - RNA, 22 nt, Artificial Sequence
  RPE65 RNA guide
aaaugaaggcccagugacaagc

SEQ ID NO: 30405 - RNA, 22 nt, Artificial Sequence
  RPE65 RNA guide
aaaugauagagcuagguuagca

SEQ ID NO: 30406 - RNA, 22 nt, Artificial Sequence
  RPE65 RNA guide
aaaugggcaugaaacccaccac

SEQ ID NO: 30407 - RNA, 22 nt, Artificial Sequence
  RPE65 RNA guide
aaauggguucuugcuauaaaaa

SEQ ID NO: 30408 - RNA, 22 nt, Artificial Sequence
  RPE65 RNA guide
aaauguccuauaaaugucuguu

SEQ ID NO: 30409 - RNA, 22 nt, Artificial Sequence
  RPE65 RNA guide
aacauuccucuaauaaaauggg

SEQ ID NO: 30410 - RNA, 22 nt, Artificial Sequence
  RPE65 RNA guide
aaccaacauuccucuaauaaaa

SEQ ID NO: 30411 - RNA, 22 nt, Artificial Sequence
  RPE65 RNA guide
aaccaccugaucccucucccug

SEQ ID NO: 30412 - RNA, 22 nt, Artificial Sequence
  RPE65 RNA guide
aacccaccacccuuuaauacuc

SEQ ID NO: 30413 - RNA, 22 nt, Artificial Sequence
  RPE65 RNA guide
aacccauuuucuuucauucgcc

SEQ ID NO: 30414 - RNA, 22 nt, Artificial Sequence
  RPE65 RNA guide
aaccuagcucuaucauuucacu

SEQ ID NO: 30415 - RNA, 22 nt, Artificial Sequence
  RPE65 RNA guide
aacgcuaccuaauuggaauucc

SEQ ID NO: 30416 - RNA, 22 nt, Artificial Sequence
  RPE65 RNA guide
aacguucugagccucaauuccc

SEQ ID NO: 30417 - RNA, 22 nt, Artificial Sequence
  RPE65 RNA guide
aacguuuaaguaacuuagagga

SEQ ID NO: 30418 - RNA, 22 nt, Artificial Sequence
  RPE65 RNA guide
aacugucagugccuagcucagu

SEQ ID NO: 30419 - RNA, 22 nt, Artificial Sequence
  RPE65 RNA guide
aacuuagaggauucacagacag

SEQ ID NO: 30420 - RNA, 22 nt, Artificial Sequence
  RPE65 RNA guide
aagaacccauuuucuuucauuc

SEQ ID NO: 30421 - RNA, 22 nt, Artificial Sequence
  RPE65 RNA guide
aagagagacugacauaaaagag

SEQ ID NO: 30422 - RNA, 22 nt, Artificial Sequence
  RPE65 RNA guide
aagaggauggcuucaagauggg

SEQ ID NO: 30423 - RNA, 22 nt, Artificial Sequence
  RPE65 RNA guide
aagaugacaaagguguaauccu

SEQ ID NO: 30424 - RNA, 22 nt, Artificial Sequence
  RPE65 RNA guide
aagcaccugggaguauuaaagg

SEQ ID NO: 30425 - RNA, 22 nt, Artificial Sequence
  RPE65 RNA guide
aagccagagaagagagacugac

SEQ ID NO: 30426 - RNA, 22 nt, Artificial Sequence
  RPE65 RNA guide
aagccauccucuuuuaugucag

SEQ ID NO: 30427 - RNA, 22 nt, Artificial Sequence
  RPE65 RNA guide
aagcccaaaccaccugaucccu

SEQ ID NO: 30428 - RNA, 22 nt, Artificial Sequence
  RPE65 RNA guide
aaggaauaggaagccagagaag

SEQ ID NO: 30429 - RNA, 22 nt, Artificial Sequence
  RPE65 RNA guide
aaggaucaggauuacaccuuug

SEQ ID NO: 30430 - RNA, 22 nt, Artificial Sequence
  RPE65 RNA guide
aaggcccagugacaagcaccug

SEQ ID NO: 30431 - RNA, 22 nt, Artificial Sequence
  RPE65 RNA guide
aaggcgaaugaaagaaaauggg

SEQ ID NO: 30432 - RNA, 22 nt, Artificial Sequence
  RPE65 RNA guide
aagggaauugaggcucagaacg

SEQ ID NO: 30433 - RNA, 22 nt, Artificial Sequence
  RPE65 RNA guide
aagggugguggguuucaugccc

SEQ ID NO: 30434 - RNA, 22 nt, Artificial Sequence
  RPE65 RNA guide
aagguguaauccugauccuuag

SEQ ID NO: 30435 - RNA, 22 nt, Artificial Sequence
  RPE65 RNA guide
aaguaaaggcgaaugaaagaaa

SEQ ID NO: 30436 - RNA, 22 nt, Artificial Sequence
  RPE65 RNA guide
aaguaacuuagaggauucacag

SEQ ID NO: 30437 - RNA, 22 nt, Artificial Sequence
  RPE65 RNA guide
aaguuacuuaaacguucugagc

SEQ ID NO: 30438 - RNA, 22 nt, Artificial Sequence
  RPE65 RNA guide
aauaaaaugggcaugaaaccca

SEQ ID NO: 30439 - RNA, 22 nt, Artificial Sequence
  RPE65 RNA guide
aauaaaugaaggcccagugaca

SEQ ID NO: 30440 - RNA, 22 nt, Artificial Sequence
  RPE65 RNA guide
aauacucccaggugcuugucac

SEQ ID NO: 30441 - RNA, 22 nt, Artificial Sequence
  RPE65 RNA guide
aauaggaagccagagaagagag

SEQ ID NO: 30442 - RNA, 22 nt, Artificial Sequence
  RPE65 RNA guide
aauccucuaaguuacuuaaacg

SEQ ID NO: 30443 - RNA, 22 nt, Artificial Sequence
  RPE65 RNA guide
aauccugauccuuagggaauuc

SEQ ID NO: 30444 - RNA, 22 nt, Artificial Sequence
  RPE65 RNA guide
aaugaaagaaaauggguucuug

SEQ ID NO: 30445 - RNA, 22 nt, Artificial Sequence
  RPE65 RNA guide
aaugaaggcccagugacaagca

SEQ ID NO: 30446 - RNA, 22 nt, Artificial Sequence
  RPE65 RNA guide
aaugauagagcuagguuagcau

SEQ ID NO: 30447 - RNA, 22 nt, Artificial Sequence
  RPE65 RNA guide
aaugcagaaaaacgcuaccuaa

SEQ ID NO: 30448 - RNA, 22 nt, Artificial Sequence
  RPE65 RNA guide
aaugggcaugaaacccaccacc

SEQ ID NO: 30449 - RNA, 22 nt, Artificial Sequence
  RPE65 RNA guide
aauggguucuugcuauaaaaag

SEQ ID NO: 30450 - RNA, 22 nt, Artificial Sequence
  RPE65 RNA guide
aauguugguucugcugggaggc

SEQ ID NO: 30451 - RNA, 22 nt, Artificial Sequence
  RPE65 RNA guide
aauuagguagcguuuuucugca

SEQ ID NO: 30452 - RNA, 22 nt, Artificial Sequence
  RPE65 RNA guide
aauuccaauuagguagcguuuu

SEQ ID NO: 30453 - RNA, 22 nt, Artificial Sequence
  RPE65 RNA guide
aauucccuaaggaucaggauua

SEQ ID NO: 30454 - RNA, 22 nt, Artificial Sequence
  RPE65 RNA guide
aauugaggcucagaacguuuaa

SEQ ID NO: 30455 - RNA, 22 nt, Artificial Sequence
  RPE65 RNA guide
aauuggaauucccuaaggauca

SEQ ID NO: 30456 - RNA, 22 nt, Artificial Sequence
  RPE65 RNA guide
acaaagguguaauccugauccu

SEQ ID NO: 30457 - RNA, 22 nt, Artificial Sequence
  RPE65 RNA guide
acaagcaccugggaguauuaaa

SEQ ID NO: 30458 - RNA, 22 nt, Artificial Sequence
  RPE65 RNA guide
acaccuuugucaucuucaaacu

SEQ ID NO: 30459 - RNA, 22 nt, Artificial Sequence
  RPE65 RNA guide
acagacagugaaaugauagagc

SEQ ID NO: 30460 - RNA, 22 nt, Artificial Sequence
  RPE65 RNA guide
acagggagagggaucagguggu

SEQ ID NO: 30461 - RNA, 22 nt, Artificial Sequence
  RPE65 RNA guide
acagggggagucugcacugaga

SEQ ID NO: 30462 - RNA, 22 nt, Artificial Sequence
  RPE65 RNA guide
acagugaaaugauagagcuagg

SEQ ID NO: 30463 - RNA, 22 nt, Artificial Sequence
  RPE65 RNA guide
acaguuugaagaugacaaaggu

SEQ ID NO: 30464 - RNA, 22 nt, Artificial Sequence
  RPE65 RNA guide
acauaaaagaggauggcuucaa

SEQ ID NO: 30465 - RNA, 22 nt, Artificial Sequence
  RPE65 RNA guide
acaucugccucccagcagaacc

SEQ ID NO: 30466 - RNA, 22 nt, Artificial Sequence
  RPE65 RNA guide
acauuccucuaauaaaaugggc

SEQ ID NO: 30467 - RNA, 22 nt, Artificial Sequence
  RPE65 RNA guide
acauuuacuaugugccaggcac

SEQ ID NO: 30468 - RNA, 22 nt, Artificial Sequence
  RPE65 RNA guide
acauuuauaggacauuuacuau

SEQ ID NO: 30469 - RNA, 22 nt, Artificial Sequence
  RPE65 RNA guide
accaacauuccucuaauaaaau

SEQ ID NO: 30470 - RNA, 22 nt, Artificial Sequence
  RPE65 RNA guide
accacccuuuaauacucccagg

SEQ ID NO: 30471 - RNA, 22 nt, Artificial Sequence
  RPE65 RNA guide
accaccugaucccucucccugu

SEQ ID NO: 30472 - RNA, 22 nt, Artificial Sequence
  RPE65 RNA guide
acccacagggggagucugcacu

SEQ ID NO: 30473 - RNA, 22 nt, Artificial Sequence
  RPE65 RNA guide
acccaccacccuuuaauacucc

SEQ ID NO: 30474 - RNA, 22 nt, Artificial Sequence
  RPE65 RNA guide
acccauuuucuuucauucgccu

SEQ ID NO: 30475 - RNA, 22 nt, Artificial Sequence
  RPE65 RNA guide
acccuuuaauacucccaggugc

SEQ ID NO: 30476 - RNA, 22 nt, Artificial Sequence
  RPE65 RNA guide
accuaauuggaauucccuaagg

SEQ ID NO: 30477 - RNA, 22 nt, Artificial Sequence
  RPE65 RNA guide
accuagcucuaucauuucacug

SEQ ID NO: 30478 - RNA, 22 nt, Artificial Sequence
  RPE65 RNA guide
accugaucccucucccugugac

SEQ ID NO: 30479 - RNA, 22 nt, Artificial Sequence
  RPE65 RNA guide
accugggaguauuaaagggugg

SEQ ID NO: 30480 - RNA, 22 nt, Artificial Sequence
  RPE65 RNA guide
accuuugucaucuucaaacugu

SEQ ID NO: 30481 - RNA, 22 nt, Artificial Sequence
  RPE65 RNA guide
acgccaaggaauaggaagccag

SEQ ID NO: 30482 - RNA, 22 nt, Artificial Sequence
  RPE65 RNA guide
acgcuaccuaauuggaauuccc

SEQ ID NO: 30483 - RNA, 22 nt, Artificial Sequence
  RPE65 RNA guide
acguucugagccucaauucccu

SEQ ID NO: 30484 - RNA, 22 nt, Artificial Sequence
  RPE65 RNA guide
acguuuaaguaacuuagaggau

SEQ ID NO: 30485 - RNA, 22 nt, Artificial Sequence
  RPE65 RNA guide
acucccaggugcuugucacugg

SEQ ID NO: 30486 - RNA, 22 nt, Artificial Sequence
  RPE65 RNA guide
acucccccugugggucacaggg

SEQ ID NO: 30487 - RNA, 22 nt, Artificial Sequence
  RPE65 RNA guide
acugacaguuugaagaugacaa

SEQ ID NO: 30488 - RNA, 22 nt, Artificial Sequence
  RPE65 RNA guide
acugacauaaaagaggauggcu

SEQ ID NO: 30489 - RNA, 22 nt, Artificial Sequence
  RPE65 RNA guide
acugagagacgccaaggaauag

SEQ ID NO: 30490 - RNA, 22 nt, Artificial Sequence
  RPE65 RNA guide
acugagcuaggcacugacaguu

SEQ ID NO: 30491 - RNA, 22 nt, Artificial Sequence
  RPE65 RNA guide
acugggccuucauuuauucaga

SEQ ID NO: 30492 - RNA, 22 nt, Artificial Sequence
  RPE65 RNA guide
acugucagugccuagcucagug

SEQ ID NO: 30493 - RNA, 22 nt, Artificial Sequence
  RPE65 RNA guide
acugucugugaauccucuaagu

SEQ ID NO: 30494 - RNA, 22 nt, Artificial Sequence
  RPE65 RNA guide
acuuaaacguucugagccucaa

SEQ ID NO: 30495 - RNA, 22 nt, Artificial Sequence
  RPE65 RNA guide
acuuagaggauucacagacagu

SEQ ID NO: 30496 - RNA, 22 nt, Artificial Sequence
  RPE65 RNA guide
agaaaaacgcuaccuaauugga

SEQ ID NO: 30497 - RNA, 22 nt, Artificial Sequence
  RPE65 RNA guide
agaaaauggguucuugcuauaa

SEQ ID NO: 30498 - RNA, 22 nt, Artificial Sequence
  RPE65 RNA guide
agaaauaaaguaaaggcgaaug

SEQ ID NO: 30499 - RNA, 22 nt, Artificial Sequence
  RPE65 RNA guide
agaaccaacauuccucuaauaa

SEQ ID NO: 30500 - RNA, 22 nt, Artificial Sequence
  RPE65 RNA guide
agaacccauuuucuuucauucg

SEQ ID NO: 30501 - RNA, 22 nt, Artificial Sequence
  RPE65 RNA guide
agaacguuuaaguaacuuagag

SEQ ID NO: 30502 - RNA, 22 nt, Artificial Sequence
  RPE65 RNA guide
agaagagagacugacauaaaag

SEQ ID NO: 30503 - RNA, 22 nt, Artificial Sequence
  RPE65 RNA guide
agacagugaaaugauagagcua

SEQ ID NO: 30504 - RNA, 22 nt, Artificial Sequence
  RPE65 RNA guide
agacgccaaggaauaggaagcc

SEQ ID NO: 30505 - RNA, 22 nt, Artificial Sequence
  RPE65 RNA guide
agacucccccugugggucacag

SEQ ID NO: 30506 - RNA, 22 nt, Artificial Sequence
  RPE65 RNA guide
agacugacauaaaagaggaugg

SEQ ID NO: 30507 - RNA, 22 nt, Artificial Sequence
  RPE65 RNA guide
agagaaauaaaguaaaggcgaa

SEQ ID NO: 30508 - RNA, 22 nt, Artificial Sequence
  RPE65 RNA guide
agagaagagagacugacauaaa

SEQ ID NO: 30509 - RNA, 22 nt, Artificial Sequence
  RPE65 RNA guide
agagacgccaaggaauaggaag

SEQ ID NO: 30510 - RNA, 22 nt, Artificial Sequence
  RPE65 RNA guide
agagacugacauaaaagaggau

SEQ ID NO: 30511 - RNA, 22 nt, Artificial Sequence
  RPE65 RNA guide
agagagacugacauaaaagagg

SEQ ID NO: 30512 - RNA, 22 nt, Artificial Sequence
  RPE65 RNA guide
agagcuagguuagcaucuacau

SEQ ID NO: 30513 - RNA, 22 nt, Artificial Sequence
  RPE65 RNA guide
agaggaauguugguucugcugg

SEQ ID NO: 30514 - RNA, 22 nt, Artificial Sequence
  RPE65 RNA guide
agaggauggcuucaagaugggc

SEQ ID NO: 30515 - RNA, 22 nt, Artificial Sequence
  RPE65 RNA guide
agaggauucacagacagugaaa

SEQ ID NO: 30516 - RNA, 22 nt, Artificial Sequence
  RPE65 RNA guide
agagggaucaggugguuugggc

SEQ ID NO: 30517 - RNA, 22 nt, Artificial Sequence
  RPE65 RNA guide
agaugacaaagguguaauccug

SEQ ID NO: 30518 - RNA, 22 nt, Artificial Sequence
  RPE65 RNA guide
agaugcuaaccuagcucuauca

SEQ ID NO: 30519 - RNA, 22 nt, Artificial Sequence
  RPE65 RNA guide
agauguagaugcuaaccuagcu

SEQ ID NO: 30520 - RNA, 22 nt, Artificial Sequence
  RPE65 RNA guide
agcaagaacccauuuucuuuca

SEQ ID NO: 30521 - RNA, 22 nt, Artificial Sequence
  RPE65 RNA guide
agcaccugggaguauuaaaggg

SEQ ID NO: 30522 - RNA, 22 nt, Artificial Sequence
  RPE65 RNA guide
agcagaaccaacauuccucuaa

SEQ ID NO: 30523 - RNA, 22 nt, Artificial Sequence
  RPE65 RNA guide
agcaucuacaucugccucccag

SEQ ID NO: 30524 - RNA, 22 nt, Artificial Sequence
  RPE65 RNA guide
agccagagaagagagacugaca

SEQ ID NO: 30525 - RNA, 22 nt, Artificial Sequence
  RPE65 RNA guide
agccauccucuuuuaugucagu

SEQ ID NO: 30526 - RNA, 22 nt, Artificial Sequence
  RPE65 RNA guide
agcccaaaccaccugaucccuc

SEQ ID NO: 30527 - RNA, 22 nt, Artificial Sequence
  RPE65 RNA guide
agcguuuuucugcauuagagaa

SEQ ID NO: 30528 - RNA, 22 nt, Artificial Sequence
  RPE65 RNA guide
agcuaggcacugacaguuugaa

SEQ ID NO: 30529 - RNA, 22 nt, Artificial Sequence
  RPE65 RNA guide
agcuagguuagcaucuacaucu

SEQ ID NO: 30530 - RNA, 22 nt, Artificial Sequence
  RPE65 RNA guide
agcucuaucauuucacugucug

SEQ ID NO: 30531 - RNA, 22 nt, Artificial Sequence
  RPE65 RNA guide
aggaagccagagaagagagacu

SEQ ID NO: 30532 - RNA, 22 nt, Artificial Sequence
  RPE65 RNA guide
aggaauaggaagccagagaaga

SEQ ID NO: 30533 - RNA, 22 nt, Artificial Sequence
  RPE65 RNA guide
aggaauguugguucugcuggga

SEQ ID NO: 30534 - RNA, 22 nt, Artificial Sequence
  RPE65 RNA guide
aggacauuuacuaugugccagg

SEQ ID NO: 30535 - RNA, 22 nt, Artificial Sequence
  RPE65 RNA guide
aggaucaggauuacaccuuugu

SEQ ID NO: 30536 - RNA, 22 nt, Artificial Sequence
  RPE65 RNA guide
aggauggcuucaagaugggcga

SEQ ID NO: 30537 - RNA, 22 nt, Artificial Sequence
  RPE65 RNA guide
aggauuacaccuuugucaucuu

SEQ ID NO: 30538 - RNA, 22 nt, Artificial Sequence
  RPE65 RNA guide
aggauucacagacagugaaaug

SEQ ID NO: 30539 - RNA, 22 nt, Artificial Sequence
  RPE65 RNA guide
aggcacugacaguuugaagaug

SEQ ID NO: 30540 - RNA, 22 nt, Artificial Sequence
  RPE65 RNA guide
aggcacugagcuaggcacugac

SEQ ID NO: 30541 - RNA, 22 nt, Artificial Sequence
  RPE65 RNA guide
aggcagauguagaugcuaaccu

SEQ ID NO: 30542 - RNA, 22 nt, Artificial Sequence
  RPE65 RNA guide
aggcccagugacaagcaccugg

SEQ ID NO: 30543 - RNA, 22 nt, Artificial Sequence
  RPE65 RNA guide
aggcgaaugaaagaaaaugggu

SEQ ID NO: 30544 - RNA, 22 nt, Artificial Sequence
  RPE65 RNA guide
aggcucagaacguuuaaguaac

SEQ ID NO: 30545 - RNA, 22 nt, Artificial Sequence
  RPE65 RNA guide
agggaauuccaauuagguagcg

SEQ ID NO: 30546 - RNA, 22 nt, Artificial Sequence
  RPE65 RNA guide
agggaauugaggcucagaacgu

SEQ ID NO: 30547 - RNA, 22 nt, Artificial Sequence
  RPE65 RNA guide
agggagagggaucaggugguuu

SEQ ID NO: 30548 - RNA, 22 nt, Artificial Sequence
  RPE65 RNA guide
agggaucaggugguuugggcuu

SEQ ID NO: 30549 - RNA, 22 nt, Artificial Sequence
  RPE65 RNA guide
agggggagucugcacugagaga

SEQ ID NO: 30550 - RNA, 22 nt, Artificial Sequence
  RPE65 RNA guide
agggugguggguuucaugccca

SEQ ID NO: 30551 - RNA, 22 nt, Artificial Sequence
  RPE65 RNA guide
agguaagggaauugaggcucag

SEQ ID NO: 30552 - RNA, 22 nt, Artificial Sequence
  RPE65 RNA guide
agguagcguuuuucugcauuag

SEQ ID NO: 30553 - RNA, 22 nt, Artificial Sequence
  RPE65 RNA guide
aggugcuugucacugggccuuc

SEQ ID NO: 30554 - RNA, 22 nt, Artificial Sequence
  RPE65 RNA guide
aggugguuugggcuuuuuauag

SEQ ID NO: 30555 - RNA, 22 nt, Artificial Sequence
  RPE65 RNA guide
agguguaauccugauccuuagg

SEQ ID NO: 30556 - RNA, 22 nt, Artificial Sequence
  RPE65 RNA guide
agguuagcaucuacaucugccu

SEQ ID NO: 30557 - RNA, 22 nt, Artificial Sequence
  RPE65 RNA guide
aguaaaggcgaaugaaagaaaa

SEQ ID NO: 30558 - RNA, 22 nt, Artificial Sequence
  RPE65 RNA guide
aguaaauguccuauaaaugucu

SEQ ID NO: 30559 - RNA, 22 nt, Artificial Sequence
  RPE65 RNA guide
aguaacuuagaggauucacaga

SEQ ID NO: 30560 - RNA, 22 nt, Artificial Sequence
  RPE65 RNA guide
aguauuaaagggugguggguuu

SEQ ID NO: 30561 - RNA, 22 nt, Artificial Sequence
  RPE65 RNA guide
agucucucuucucuggcuuccu

SEQ ID NO: 30562 - RNA, 22 nt, Artificial Sequence
  RPE65 RNA guide
agucugcacugagagacgccaa

SEQ ID NO: 30563 - RNA, 22 nt, Artificial Sequence
  RPE65 RNA guide
agugaaaugauagagcuagguu

SEQ ID NO: 30564 - RNA, 22 nt, Artificial Sequence
  RPE65 RNA guide
agugacaagcaccugggaguau

SEQ ID NO: 30565 - RNA, 22 nt, Artificial Sequence
  RPE65 RNA guide
agugcagacucccccugugggu

SEQ ID NO: 30566 - RNA, 22 nt, Artificial Sequence
  RPE65 RNA guide
agugccuagcucagugccuggc

SEQ ID NO: 30567 - RNA, 22 nt, Artificial Sequence
  RPE65 RNA guide
agugccuggcacauaguaaaug

SEQ ID NO: 30568 - RNA, 22 nt, Artificial Sequence
  RPE65 RNA guide
aguuacuuaaacguucugagcc

SEQ ID NO: 30569 - RNA, 22 nt, Artificial Sequence
  RPE65 RNA guide
aguuugaagaugacaaaggugu

SEQ ID NO: 30570 - RNA, 22 nt, Artificial Sequence
  RPE65 RNA guide
auaaaaagcccaaaccaccuga

SEQ ID NO: 30571 - RNA, 22 nt, Artificial Sequence
  RPE65 RNA guide
auaaaagaggauggcuucaaga

SEQ ID NO: 30572 - RNA, 22 nt, Artificial Sequence
  RPE65 RNA guide
auaaaaugggcaugaaacccac

SEQ ID NO: 30573 - RNA, 22 nt, Artificial Sequence
  RPE65 RNA guide
auaaaugaaggcccagugacaa

SEQ ID NO: 30574 - RNA, 22 nt, Artificial Sequence
  RPE65 RNA guide
auacucccaggugcuugucacu

SEQ ID NO: 30575 - RNA, 22 nt, Artificial Sequence
  RPE65 RNA guide
auagagcuagguuagcaucuac

SEQ ID NO: 30576 - RNA, 22 nt, Artificial Sequence
  RPE65 RNA guide
auagcaagaacccauuuucuuu

SEQ ID NO: 30577 - RNA, 22 nt, Artificial Sequence
  RPE65 RNA guide
auaggaagccagagaagagaga

SEQ ID NO: 30578 - RNA, 22 nt, Artificial Sequence
  RPE65 RNA guide
auaggacauuuacuaugugcca

SEQ ID NO: 30579 - RNA, 22 nt, Artificial Sequence
  RPE65 RNA guide
aucaggauuacaccuuugucau

SEQ ID NO: 30580 - RNA, 22 nt, Artificial Sequence
  RPE65 RNA guide
aucaggugguuugggcuuuuua

SEQ ID NO: 30581 - RNA, 22 nt, Artificial Sequence
  RPE65 RNA guide
aucauuucacugucugugaauc

SEQ ID NO: 30582 - RNA, 22 nt, Artificial Sequence
  RPE65 RNA guide
aucccucucccugugacccaca

SEQ ID NO: 30583 - RNA, 22 nt, Artificial Sequence
  RPE65 RNA guide
auccucuaaguuacuuaaacgu

SEQ ID NO: 30584 - RNA, 22 nt, Artificial Sequence
  RPE65 RNA guide
auccucuuuuaugucagucucu

SEQ ID NO: 30585 - RNA, 22 nt, Artificial Sequence
  RPE65 RNA guide
auccugauccuuagggaauucc

SEQ ID NO: 30586 - RNA, 22 nt, Artificial Sequence
  RPE65 RNA guide
auccuuagggaauuccaauuag

SEQ ID NO: 30587 - RNA, 22 nt, Artificial Sequence
  RPE65 RNA guide
aucuacaucugccucccagcag

SEQ ID NO: 30588 - RNA, 22 nt, Artificial Sequence
  RPE65 RNA guide
aucugccucccagcagaaccaa

SEQ ID NO: 30589 - RNA, 22 nt, Artificial Sequence
  RPE65 RNA guide
aucuucaaacugucagugccua

SEQ ID NO: 30590 - RNA, 22 nt, Artificial Sequence
  RPE65 RNA guide
aucuugaagccauccucuuuua

SEQ ID NO: 30591 - RNA, 22 nt, Artificial Sequence
  RPE65 RNA guide
augaaacccaccacccuuuaau

SEQ ID NO: 30592 - RNA, 22 nt, Artificial Sequence
  RPE65 RNA guide
augaaagaaaauggguucuugc

SEQ ID NO: 30593 - RNA, 22 nt, Artificial Sequence
  RPE65 RNA guide
augaaggcccagugacaagcac

SEQ ID NO: 30594 - RNA, 22 nt, Artificial Sequence
  RPE65 RNA guide
augacaaagguguaauccugau

SEQ ID NO: 30595 - RNA, 22 nt, Artificial Sequence
  RPE65 RNA guide
augauagagcuagguuagcauc

SEQ ID NO: 30596 - RNA, 22 nt, Artificial Sequence
  RPE65 RNA guide
augcagaaaaacgcuaccuaau

SEQ ID NO: 30597 - RNA, 22 nt, Artificial Sequence
  RPE65 RNA guide
augcccauuuuauuagaggaau

SEQ ID NO: 30598 - RNA, 22 nt, Artificial Sequence
  RPE65 RNA guide
augcuaaccuagcucuaucauu

SEQ ID NO: 30599 - RNA, 22 nt, Artificial Sequence
  RPE65 RNA guide
auggcuucaagaugggcgagac

SEQ ID NO: 30600 - RNA, 22 nt, Artificial Sequence
  RPE65 RNA guide
augggcaugaaacccaccaccc

SEQ ID NO: 30601 - RNA, 22 nt, Artificial Sequence
  RPE65 RNA guide
auggguucuugcuauaaaaagc

SEQ ID NO: 30602 - RNA, 22 nt, Artificial Sequence
  RPE65 RNA guide
auguagaugcuaaccuagcucu

SEQ ID NO: 30603 - RNA, 22 nt, Artificial Sequence
  RPE65 RNA guide
augucagucucucuucucuggc

SEQ ID NO: 30604 - RNA, 22 nt, Artificial Sequence
  RPE65 RNA guide
augugccaggcacugagcuagg

SEQ ID NO: 30605 - RNA, 22 nt, Artificial Sequence
  RPE65 RNA guide
auguugguucugcugggaggca

SEQ ID NO: 30606 - RNA, 22 nt, Artificial Sequence
  RPE65 RNA guide
auuaaagggugguggguuucau

SEQ ID NO: 30607 - RNA, 22 nt, Artificial Sequence
  RPE65 RNA guide
auuacaccuuugucaucuucaa

SEQ ID NO: 30608 - RNA, 22 nt, Artificial Sequence
  RPE65 RNA guide
auuagaggaauguugguucugc

SEQ ID NO: 30609 - RNA, 22 nt, Artificial Sequence
  RPE65 RNA guide
auuagguagcguuuuucugcau

SEQ ID NO: 30610 - RNA, 22 nt, Artificial Sequence
  RPE65 RNA guide
auucacagacagugaaaugaua

SEQ ID NO: 30611 - RNA, 22 nt, Artificial Sequence
  RPE65 RNA guide
auuccaauuagguagcguuuuu

SEQ ID NO: 30612 - RNA, 22 nt, Artificial Sequence
  RPE65 RNA guide
auucccuaaggaucaggauuac

SEQ ID NO: 30613 - RNA, 22 nt, Artificial Sequence
  RPE65 RNA guide
auuccucuaauaaaaugggcau

SEQ ID NO: 30614 - RNA, 22 nt, Artificial Sequence
  RPE65 RNA guide
auuccuuggcgucucucagugc

SEQ ID NO: 30615 - RNA, 22 nt, Artificial Sequence
  RPE65 RNA guide
auugaggcucagaacguuuaag

SEQ ID NO: 30616 - RNA, 22 nt, Artificial Sequence
  RPE65 RNA guide
auuggaauucccuaaggaucag

SEQ ID NO: 30617 - RNA, 22 nt, Artificial Sequence
  RPE65 RNA guide
auuggugucugaauaaaugaag

SEQ ID NO: 30618 - RNA, 22 nt, Artificial Sequence
  RPE65 RNA guide
auuuauaggacauuuacuaugu

SEQ ID NO: 30619 - RNA, 22 nt, Artificial Sequence
  RPE65 RNA guide
auuucacugucugugaauccuc

SEQ ID NO: 30620 - RNA, 22 nt, Artificial Sequence
  RPE65 RNA guide
auuucucuaaugcagaaaaacg

SEQ ID NO: 30621 - RNA, 22 nt, Artificial Sequence
  RPE65 RNA guide
auuuuauuagaggaauguuggu

SEQ ID NO: 30622 - RNA, 22 nt, Artificial Sequence
  RPE65 RNA guide
caaaccaccugaucccucuccc

SEQ ID NO: 30623 - RNA, 22 nt, Artificial Sequence
  RPE65 RNA guide
caaacugucagugccuagcuca

SEQ ID NO: 30624 - RNA, 22 nt, Artificial Sequence
  RPE65 RNA guide
caaagguguaauccugauccuu

SEQ ID NO: 30625 - RNA, 22 nt, Artificial Sequence
  RPE65 RNA guide
caacauuccucuaauaaaaugg

SEQ ID NO: 30626 - RNA, 22 nt, Artificial Sequence
  RPE65 RNA guide
caagaacccauuuucuuucauu

SEQ ID NO: 30627 - RNA, 22 nt, Artificial Sequence
  RPE65 RNA guide
caagcaccugggaguauuaaag

SEQ ID NO: 30628 - RNA, 22 nt, Artificial Sequence
  RPE65 RNA guide
caaggaauaggaagccagagaa

SEQ ID NO: 30629 - RNA, 22 nt, Artificial Sequence
  RPE65 RNA guide
caauuagguagcguuuuucugc

SEQ ID NO: 30630 - RNA, 22 nt, Artificial Sequence
  RPE65 RNA guide
cacagacagugaaaugauagag

SEQ ID NO: 30631 - RNA, 22 nt, Artificial Sequence
  RPE65 RNA guide
cacagggagagggaucaggugg

SEQ ID NO: 30632 - RNA, 22 nt, Artificial Sequence
  RPE65 RNA guide
cacagggggagucugcacugag

SEQ ID NO: 30633 - RNA, 22 nt, Artificial Sequence
  RPE65 RNA guide
cacauaguaaauguccuauaaa

SEQ ID NO: 30634 - RNA, 22 nt, Artificial Sequence
  RPE65 RNA guide
caccacccuuuaauacucccag

SEQ ID NO: 30635 - RNA, 22 nt, Artificial Sequence
  RPE65 RNA guide
cacccuuuaauacucccaggug

SEQ ID NO: 30636 - RNA, 22 nt, Artificial Sequence
  RPE65 RNA guide
caccugaucccucucccuguga

SEQ ID NO: 30637 - RNA, 22 nt, Artificial Sequence
  RPE65 RNA guide
caccugggaguauuaaagggug

SEQ ID NO: 30638 - RNA, 22 nt, Artificial Sequence
  RPE65 RNA guide
caccuuugucaucuucaaacug

SEQ ID NO: 30639 - RNA, 22 nt, Artificial Sequence
  RPE65 RNA guide
cacugacaguuugaagaugaca

SEQ ID NO: 30640 - RNA, 22 nt, Artificial Sequence
  RPE65 RNA guide
cacugagagacgccaaggaaua

SEQ ID NO: 30641 - RNA, 22 nt, Artificial Sequence
  RPE65 RNA guide
cacugagcuaggcacugacagu

SEQ ID NO: 30642 - RNA, 22 nt, Artificial Sequence
  RPE65 RNA guide
cacugggccuucauuuauucag

SEQ ID NO: 30643 - RNA, 22 nt, Artificial Sequence
  RPE65 RNA guide
cacugucugugaauccucuaag

SEQ ID NO: 30644 - RNA, 22 nt, Artificial Sequence
  RPE65 RNA guide
cagaaaaacgcuaccuaauugg

SEQ ID NO: 30645 - RNA, 22 nt, Artificial Sequence
  RPE65 RNA guide
cagaaccaacauuccucuaaua

SEQ ID NO: 30646 - RNA, 22 nt, Artificial Sequence
  RPE65 RNA guide
cagaacguuuaaguaacuuaga

SEQ ID NO: 30647 - RNA, 22 nt, Artificial Sequence
  RPE65 RNA guide
cagacagugaaaugauagagcu

SEQ ID NO: 30648 - RNA, 22 nt, Artificial Sequence
  RPE65 RNA guide
cagacauuuauaggacauuuac

SEQ ID NO: 30649 - RNA, 22 nt, Artificial Sequence
  RPE65 RNA guide
cagacucccccugugggucaca

SEQ ID NO: 30650 - RNA, 22 nt, Artificial Sequence
  RPE65 RNA guide
cagagaagagagacugacauaa

SEQ ID NO: 30651 - RNA, 22 nt, Artificial Sequence
  RPE65 RNA guide
cagauguagaugcuaaccuagc

SEQ ID NO: 30652 - RNA, 22 nt, Artificial Sequence
  RPE65 RNA guide
cagcagaaccaacauuccucua

SEQ ID NO: 30653 - RNA, 22 nt, Artificial Sequence
  RPE65 RNA guide
caggauuacaccuuugucaucu

SEQ ID NO: 30654 - RNA, 22 nt, Artificial Sequence
  RPE65 RNA guide
caggcacugagcuaggcacuga

SEQ ID NO: 30655 - RNA, 22 nt, Artificial Sequence
  RPE65 RNA guide
cagggagagggaucaggugguu

SEQ ID NO: 30656 - RNA, 22 nt, Artificial Sequence
  RPE65 RNA guide
cagggggagucugcacugagag

SEQ ID NO: 30657 - RNA, 22 nt, Artificial Sequence
  RPE65 RNA guide
caggugcuugucacugggccuu

SEQ ID NO: 30658 - RNA, 22 nt, Artificial Sequence
  RPE65 RNA guide
caggugguuugggcuuuuuaua

SEQ ID NO: 30659 - RNA, 22 nt, Artificial Sequence
  RPE65 RNA guide
cagucucucuucucuggcuucc

SEQ ID NO: 30660 - RNA, 22 nt, Artificial Sequence
  RPE65 RNA guide
cagugaaaugauagagcuaggu

SEQ ID NO: 30661 - RNA, 22 nt, Artificial Sequence
  RPE65 RNA guide
cagugacaagcaccugggagua

SEQ ID NO: 30662 - RNA, 22 nt, Artificial Sequence
  RPE65 RNA guide
cagugcagacucccccuguggg

SEQ ID NO: 30663 - RNA, 22 nt, Artificial Sequence
  RPE65 RNA guide
cagugccuagcucagugccugg

SEQ ID NO: 30664 - RNA, 22 nt, Artificial Sequence
  RPE65 RNA guide
cagugccuggcacauaguaaau

SEQ ID NO: 30665 - RNA, 22 nt, Artificial Sequence
  RPE65 RNA guide
caguuugaagaugacaaaggug

SEQ ID NO: 30666 - RNA, 22 nt, Artificial Sequence
  RPE65 RNA guide
cauaaaagaggauggcuucaag

SEQ ID NO: 30667 - RNA, 22 nt, Artificial Sequence
  RPE65 RNA guide
cauaguaaauguccuauaaaug

SEQ ID NO: 30668 - RNA, 22 nt, Artificial Sequence
  RPE65 RNA guide
cauccucuuuuaugucagucuc

SEQ ID NO: 30669 - RNA, 22 nt, Artificial Sequence
  RPE65 RNA guide
caucuacaucugccucccagca

SEQ ID NO: 30670 - RNA, 22 nt, Artificial Sequence
  RPE65 RNA guide
caucugccucccagcagaacca

SEQ ID NO: 30671 - RNA, 22 nt, Artificial Sequence
  RPE65 RNA guide
caucuucaaacugucagugccu

SEQ ID NO: 30672 - RNA, 22 nt, Artificial Sequence
  RPE65 RNA guide
caucuugaagccauccucuuuu

SEQ ID NO: 30673 - RNA, 22 nt, Artificial Sequence
  RPE65 RNA guide
caugaaacccaccacccuuuaa

SEQ ID NO: 30674 - RNA, 22 nt, Artificial Sequence
  RPE65 RNA guide
caugcccauuuuauuagaggaa

SEQ ID NO: 30675 - RNA, 22 nt, Artificial Sequence
  RPE65 RNA guide
cauuagagaaauaaaguaaagg

SEQ ID NO: 30676 - RNA, 22 nt, Artificial Sequence
  RPE65 RNA guide
cauuccucuaauaaaaugggca

SEQ ID NO: 30677 - RNA, 22 nt, Artificial Sequence
  RPE65 RNA guide
cauucgccuuuacuuuauuucu

SEQ ID NO: 30678 - RNA, 22 nt, Artificial Sequence
  RPE65 RNA guide
cauuggugucugaauaaaugaa

SEQ ID NO: 30679 - RNA, 22 nt, Artificial Sequence
  RPE65 RNA guide
cauuuacuaugugccaggcacu

SEQ ID NO: 30680 - RNA, 22 nt, Artificial Sequence
  RPE65 RNA guide
cauuuauaggacauuuacuaug

SEQ ID NO: 30681 - RNA, 22 nt, Artificial Sequence
  RPE65 RNA guide
cauuucacugucugugaauccu

SEQ ID NO: 30682 - RNA, 22 nt, Artificial Sequence
  RPE65 RNA guide
cauuuuauuagaggaauguugg

SEQ ID NO: 30683 - RNA, 22 nt, Artificial Sequence
  RPE65 RNA guide
cauuuucuuucauucgccuuua

SEQ ID NO: 30684 - RNA, 22 nt, Artificial Sequence
  RPE65 RNA guide
ccaaaccaccugaucccucucc

SEQ ID NO: 30685 - RNA, 22 nt, Artificial Sequence
  RPE65 RNA guide
ccaacauuccucuaauaaaaug

SEQ ID NO: 30686 - RNA, 22 nt, Artificial Sequence
  RPE65 RNA guide
ccaaggaauaggaagccagaga

SEQ ID NO: 30687 - RNA, 22 nt, Artificial Sequence
  RPE65 RNA guide
ccaauuagguagcguuuuucug

SEQ ID NO: 30688 - RNA, 22 nt, Artificial Sequence
  RPE65 RNA guide
ccacagggggagucugcacuga

SEQ ID NO: 30689 - RNA, 22 nt, Artificial Sequence
  RPE65 RNA guide
ccaccacccuuuaauacuccca

SEQ ID NO: 30690 - RNA, 22 nt, Artificial Sequence
  RPE65 RNA guide
ccacccuuuaauacucccaggu

SEQ ID NO: 30691 - RNA, 22 nt, Artificial Sequence
  RPE65 RNA guide
ccaccugaucccucucccugug

SEQ ID NO: 30692 - RNA, 22 nt, Artificial Sequence
  RPE65 RNA guide
ccagagaagagagacugacaua

SEQ ID NO: 30693 - RNA, 22 nt, Artificial Sequence
  RPE65 RNA guide
ccagcagaaccaacauuccucu

SEQ ID NO: 30694 - RNA, 22 nt, Artificial Sequence
  RPE65 RNA guide
ccaggcacugagcuaggcacug

SEQ ID NO: 30695 - RNA, 22 nt, Artificial Sequence
  RPE65 RNA guide
ccaggugcuugucacugggccu

SEQ ID NO: 30696 - RNA, 22 nt, Artificial Sequence
  RPE65 RNA guide
ccagugacaagcaccugggagu

SEQ ID NO: 30697 - RNA, 22 nt, Artificial Sequence
  RPE65 RNA guide
ccauccucuuuuaugucagucu

SEQ ID NO: 30698 - RNA, 22 nt, Artificial Sequence
  RPE65 RNA guide
ccaucuugaagccauccucuuu

SEQ ID NO: 30699 - RNA, 22 nt, Artificial Sequence
  RPE65 RNA guide
ccauuggugucugaauaaauga

SEQ ID NO: 30700 - RNA, 22 nt, Artificial Sequence
  RPE65 RNA guide
ccauuuuauuagaggaauguug

SEQ ID NO: 30701 - RNA, 22 nt, Artificial Sequence
  RPE65 RNA guide
ccauuuucuuucauucgccuuu

SEQ ID NO: 30702 - RNA, 22 nt, Artificial Sequence
  RPE65 RNA guide
cccaaaccaccugaucccucuc

SEQ ID NO: 30703 - RNA, 22 nt, Artificial Sequence
  RPE65 RNA guide
cccacagggggagucugcacug

SEQ ID NO: 30704 - RNA, 22 nt, Artificial Sequence
  RPE65 RNA guide
cccaccacccuuuaauacuccc

SEQ ID NO: 30705 - RNA, 22 nt, Artificial Sequence
  RPE65 RNA guide
cccagcagaaccaacauuccuc

SEQ ID NO: 30706 - RNA, 22 nt, Artificial Sequence
  RPE65 RNA guide
cccaggugcuugucacugggcc

SEQ ID NO: 30707 - RNA, 22 nt, Artificial Sequence
  RPE65 RNA guide
cccagugacaagcaccugggag

SEQ ID NO: 30708 - RNA, 22 nt, Artificial Sequence
  RPE65 RNA guide
cccaucuugaagccauccucuu

SEQ ID NO: 30709 - RNA, 22 nt, Artificial Sequence
  RPE65 RNA guide
cccauuuuauuagaggaauguu

SEQ ID NO: 30710 - RNA, 22 nt, Artificial Sequence
  RPE65 RNA guide
cccauuuucuuucauucgccuu

SEQ ID NO: 30711 - RNA, 22 nt, Artificial Sequence
  RPE65 RNA guide
cccccugugggucacagggaga

SEQ ID NO: 30712 - RNA, 22 nt, Artificial Sequence
  RPE65 RNA guide
ccccugugggucacagggagag

SEQ ID NO: 30713 - RNA, 22 nt, Artificial Sequence
  RPE65 RNA guide
cccuaaggaucaggauuacacc

SEQ ID NO: 30714 - RNA, 22 nt, Artificial Sequence
  RPE65 RNA guide
cccucucccugugacccacagg

SEQ ID NO: 30715 - RNA, 22 nt, Artificial Sequence
  RPE65 RNA guide
cccugugacccacagggggagu

SEQ ID NO: 30716 - RNA, 22 nt, Artificial Sequence
  RPE65 RNA guide
cccugugggucacagggagagg

SEQ ID NO: 30717 - RNA, 22 nt, Artificial Sequence
  RPE65 RNA guide
cccuuuaauacucccaggugcu

SEQ ID NO: 30718 - RNA, 22 nt, Artificial Sequence
  RPE65 RNA guide
ccuaaggaucaggauuacaccu

SEQ ID NO: 30719 - RNA, 22 nt, Artificial Sequence
  RPE65 RNA guide
ccuaauuggaauucccuaagga

SEQ ID NO: 30720 - RNA, 22 nt, Artificial Sequence
  RPE65 RNA guide
ccuagcucuaucauuucacugu

SEQ ID NO: 30721 - RNA, 22 nt, Artificial Sequence
  RPE65 RNA guide
ccuauuccuuggcgucucucag

SEQ ID NO: 30722 - RNA, 22 nt, Artificial Sequence
  RPE65 RNA guide
ccucccagcagaaccaacauuc

SEQ ID NO: 30723 - RNA, 22 nt, Artificial Sequence
  RPE65 RNA guide
ccucuaaguuacuuaaacguuc

SEQ ID NO: 30724 - RNA, 22 nt, Artificial Sequence
  RPE65 RNA guide
ccucuaauaaaaugggcaugaa

SEQ ID NO: 30725 - RNA, 22 nt, Artificial Sequence
  RPE65 RNA guide
ccucucccugugacccacaggg

SEQ ID NO: 30726 - RNA, 22 nt, Artificial Sequence
  RPE65 RNA guide
ccucuuuuaugucagucucucu

SEQ ID NO: 30727 - RNA, 22 nt, Artificial Sequence
  RPE65 RNA guide
ccugaucccucucccugugacc

SEQ ID NO: 30728 - RNA, 22 nt, Artificial Sequence
  RPE65 RNA guide
ccugauccuuagggaauuccaa

SEQ ID NO: 30729 - RNA, 22 nt, Artificial Sequence
  RPE65 RNA guide
ccuggcacauaguaaauguccu

SEQ ID NO: 30730 - RNA, 22 nt, Artificial Sequence
  RPE65 RNA guide
ccugggaguauuaaaggguggu

SEQ ID NO: 30731 - RNA, 22 nt, Artificial Sequence
  RPE65 RNA guide
ccugugacccacagggggaguc

SEQ ID NO: 30732 - RNA, 22 nt, Artificial Sequence
  RPE65 RNA guide
ccugugggucacagggagaggg

SEQ ID NO: 30733 - RNA, 22 nt, Artificial Sequence
  RPE65 RNA guide
ccuuagggaauuccaauuaggu

SEQ ID NO: 30734 - RNA, 22 nt, Artificial Sequence
  RPE65 RNA guide
ccuucauuuauucagacaccaa

SEQ ID NO: 30735 - RNA, 22 nt, Artificial Sequence
  RPE65 RNA guide
ccuuggcgucucucagugcaga

SEQ ID NO: 30736 - RNA, 22 nt, Artificial Sequence
  RPE65 RNA guide
ccuuuaauacucccaggugcuu

SEQ ID NO: 30737 - RNA, 22 nt, Artificial Sequence
  RPE65 RNA guide
ccuuuacuuuauuucucuaaug

SEQ ID NO: 30738 - RNA, 22 nt, Artificial Sequence
  RPE65 RNA guide
ccuuugucaucuucaaacuguc

SEQ ID NO: 30739 - RNA, 22 nt, Artificial Sequence
  RPE65 RNA guide
cgaaugaaagaaaauggguucu

SEQ ID NO: 30740 - RNA, 22 nt, Artificial Sequence
  RPE65 RNA guide
cgccaaggaauaggaagccaga

SEQ ID NO: 30741 - RNA, 22 nt, Artificial Sequence
  RPE65 RNA guide
cgcccaucuugaagccauccuc

SEQ ID NO: 30742 - RNA, 22 nt, Artificial Sequence
  RPE65 RNA guide
cgccuuuacuuuauuucucuaa

SEQ ID NO: 30743 - RNA, 22 nt, Artificial Sequence
  RPE65 RNA guide
cgcuaccuaauuggaauucccu

SEQ ID NO: 30744 - RNA, 22 nt, Artificial Sequence
  RPE65 RNA guide
cgucucucagugcagacucccc

SEQ ID NO: 30745 - RNA, 22 nt, Artificial Sequence
  RPE65 RNA guide
cguucugagccucaauucccuu

SEQ ID NO: 30746 - RNA, 22 nt, Artificial Sequence
  RPE65 RNA guide
cguuuaaguaacuuagaggauu

SEQ ID NO: 30747 - RNA, 22 nt, Artificial Sequence
  RPE65 RNA guide
cguuuuucugcauuagagaaau

SEQ ID NO: 30748 - RNA, 22 nt, Artificial Sequence
  RPE65 RNA guide
cuaaccuagcucuaucauuuca

SEQ ID NO: 30749 - RNA, 22 nt, Artificial Sequence
  RPE65 RNA guide
cuaaggaucaggauuacaccuu

SEQ ID NO: 30750 - RNA, 22 nt, Artificial Sequence
  RPE65 RNA guide
cuaaguuacuuaaacguucuga

SEQ ID NO: 30751 - RNA, 22 nt, Artificial Sequence
  RPE65 RNA guide
cuaauaaaaugggcaugaaacc

SEQ ID NO: 30752 - RNA, 22 nt, Artificial Sequence
  RPE65 RNA guide
cuaaugcagaaaaacgcuaccu

SEQ ID NO: 30753 - RNA, 22 nt, Artificial Sequence
  RPE65 RNA guide
cuaauuggaauucccuaaggau

SEQ ID NO: 30754 - RNA, 22 nt, Artificial Sequence
  RPE65 RNA guide
cuacaucugccucccagcagaa

SEQ ID NO: 30755 - RNA, 22 nt, Artificial Sequence
  RPE65 RNA guide
cuaccuaauuggaauucccuaa

SEQ ID NO: 30756 - RNA, 22 nt, Artificial Sequence
  RPE65 RNA guide
cuagcucuaucauuucacuguc

SEQ ID NO: 30757 - RNA, 22 nt, Artificial Sequence
  RPE65 RNA guide
cuaggcacugacaguuugaaga

SEQ ID NO: 30758 - RNA, 22 nt, Artificial Sequence
  RPE65 RNA guide
cuagguuagcaucuacaucugc

SEQ ID NO: 30759 - RNA, 22 nt, Artificial Sequence
  RPE65 RNA guide
cuauaaaaagcccaaaccaccu

SEQ ID NO: 30760 - RNA, 22 nt, Artificial Sequence
  RPE65 RNA guide
cuaucauuucacugucugugaa

SEQ ID NO: 30761 - RNA, 22 nt, Artificial Sequence
  RPE65 RNA guide
cuauuccuuggcgucucucagu

SEQ ID NO: 30762 - RNA, 22 nt, Artificial Sequence
  RPE65 RNA guide
cucagaacguuuaaguaacuua

SEQ ID NO: 30763 - RNA, 22 nt, Artificial Sequence
  RPE65 RNA guide
cucagugcagacucccccugug

SEQ ID NO: 30764 - RNA, 22 nt, Artificial Sequence
  RPE65 RNA guide
cucagugccuggcacauaguaa

SEQ ID NO: 30765 - RNA, 22 nt, Artificial Sequence
  RPE65 RNA guide
cucccagcagaaccaacauucc

SEQ ID NO: 30766 - RNA, 22 nt, Artificial Sequence
  RPE65 RNA guide
cucccaggugcuugucacuggg

SEQ ID NO: 30767 - RNA, 22 nt, Artificial Sequence
  RPE65 RNA guide
cucccccugugggucacaggga

SEQ ID NO: 30768 - RNA, 22 nt, Artificial Sequence
  RPE65 RNA guide
cucccugugacccacaggggga

SEQ ID NO: 30769 - RNA, 22 nt, Artificial Sequence
  RPE65 RNA guide
cucgcccaucuugaagccaucc

SEQ ID NO: 30770 - RNA, 22 nt, Artificial Sequence
  RPE65 RNA guide
cucuaaguuacuuaaacguucu

SEQ ID NO: 30771 - RNA, 22 nt, Artificial Sequence
  RPE65 RNA guide
cucuaauaaaaugggcaugaaa

SEQ ID NO: 30772 - RNA, 22 nt, Artificial Sequence
  RPE65 RNA guide
cucuaaugcagaaaaacgcuac

SEQ ID NO: 30773 - RNA, 22 nt, Artificial Sequence
  RPE65 RNA guide
cucuaucauuucacugucugug

SEQ ID NO: 30774 - RNA, 22 nt, Artificial Sequence
  RPE65 RNA guide
cucucagugcagacucccccug

SEQ ID NO: 30775 - RNA, 22 nt, Artificial Sequence
  RPE65 RNA guide
cucucccugugacccacagggg

SEQ ID NO: 30776 - RNA, 22 nt, Artificial Sequence
  RPE65 RNA guide
cucucuucucuggcuuccuauu

SEQ ID NO: 30777 - RNA, 22 nt, Artificial Sequence
  RPE65 RNA guide
cucuggcuuccuauuccuuggc

SEQ ID NO: 30778 - RNA, 22 nt, Artificial Sequence
  RPE65 RNA guide
cucuucucuggcuuccuauucc

SEQ ID NO: 30779 - RNA, 22 nt, Artificial Sequence
  RPE65 RNA guide
cucuuuuaugucagucucucuu

SEQ ID NO: 30780 - RNA, 22 nt, Artificial Sequence
  RPE65 RNA guide
cugaauaaaugaaggcccagug

SEQ ID NO: 30781 - RNA, 22 nt, Artificial Sequence
  RPE65 RNA guide
cugacaguuugaagaugacaaa

SEQ ID NO: 30782 - RNA, 22 nt, Artificial Sequence
  RPE65 RNA guide
cugacauaaaagaggauggcuu

SEQ ID NO: 30783 - RNA, 22 nt, Artificial Sequence
  RPE65 RNA guide
cugagagacgccaaggaauagg

SEQ ID NO: 30784 - RNA, 22 nt, Artificial Sequence
  RPE65 RNA guide
cugagcuaggcacugacaguuu

SEQ ID NO: 30785 - RNA, 22 nt, Artificial Sequence
  RPE65 RNA guide
cugaucccucucccugugaccc

SEQ ID NO: 30786 - RNA, 22 nt, Artificial Sequence
  RPE65 RNA guide
cugauccuuagggaauuccaau

SEQ ID NO: 30787 - RNA, 22 nt, Artificial Sequence
  RPE65 RNA guide
cugcacugagagacgccaagga

SEQ ID NO: 30788 - RNA, 22 nt, Artificial Sequence
  RPE65 RNA guide
cugcauuagagaaauaaaguaa

SEQ ID NO: 30789 - RNA, 22 nt, Artificial Sequence
  RPE65 RNA guide
cugccucccagcagaaccaaca

SEQ ID NO: 30790 - RNA, 22 nt, Artificial Sequence
  RPE65 RNA guide
cugcugggaggcagauguagau

SEQ ID NO: 30791 - RNA, 22 nt, Artificial Sequence
  RPE65 RNA guide
cuggcacauaguaaauguccua

SEQ ID NO: 30792 - RNA, 22 nt, Artificial Sequence
  RPE65 RNA guide
cuggcuuccuauuccuuggcgu

SEQ ID NO: 30793 - RNA, 22 nt, Artificial Sequence
  RPE65 RNA guide
cugggaggcagauguagaugcu

SEQ ID NO: 30794 - RNA, 22 nt, Artificial Sequence
  RPE65 RNA guide
cugggaguauuaaaggguggug

SEQ ID NO: 30795 - RNA, 22 nt, Artificial Sequence
  RPE65 RNA guide
cugggccuucauuuauucagac

SEQ ID NO: 30796 - RNA, 22 nt, Artificial Sequence
  RPE65 RNA guide
cugucagugccuagcucagugc

SEQ ID NO: 30797 - RNA, 22 nt, Artificial Sequence
  RPE65 RNA guide
cugucugugaauccucuaaguu

SEQ ID NO: 30798 - RNA, 22 nt, Artificial Sequence
  RPE65 RNA guide
cugugaauccucuaaguuacuu

SEQ ID NO: 30799 - RNA, 22 nt, Artificial Sequence
  RPE65 RNA guide
cugugacccacagggggagucu

SEQ ID NO: 30800 - RNA, 22 nt, Artificial Sequence
  RPE65 RNA guide
cugugggucacagggagaggga

SEQ ID NO: 30801 - RNA, 22 nt, Artificial Sequence
  RPE65 RNA guide
cuuaaacguucugagccucaau

SEQ ID NO: 30802 - RNA, 22 nt, Artificial Sequence
  RPE65 RNA guide
cuuagaggauucacagacagug

SEQ ID NO: 30803 - RNA, 22 nt, Artificial Sequence
  RPE65 RNA guide
cuuagggaauuccaauuaggua

SEQ ID NO: 30804 - RNA, 22 nt, Artificial Sequence
  RPE65 RNA guide
cuucaaacugucagugccuagc

SEQ ID NO: 30805 - RNA, 22 nt, Artificial Sequence
  RPE65 RNA guide
cuucauuuauucagacaccaau

SEQ ID NO: 30806 - RNA, 22 nt, Artificial Sequence
  RPE65 RNA guide
cuuccuauuccuuggcgucucu

SEQ ID NO: 30807 - RNA, 22 nt, Artificial Sequence
  RPE65 RNA guide
cuucucuggcuuccuauuccuu

SEQ ID NO: 30808 - RNA, 22 nt, Artificial Sequence
  RPE65 RNA guide
cuugaagccauccucuuuuaug

SEQ ID NO: 30809 - RNA, 22 nt, Artificial Sequence
  RPE65 RNA guide
cuugcuauaaaaagcccaaacc

SEQ ID NO: 30810 - RNA, 22 nt, Artificial Sequence
  RPE65 RNA guide
cuuggcgucucucagugcagac

SEQ ID NO: 30811 - RNA, 22 nt, Artificial Sequence
  RPE65 RNA guide
cuugucacugggccuucauuua

SEQ ID NO: 30812 - RNA, 22 nt, Artificial Sequence
  RPE65 RNA guide
cuuuaauacucccaggugcuug

SEQ ID NO: 30813 - RNA, 22 nt, Artificial Sequence
  RPE65 RNA guide
cuuuauuucucuaaugcagaaa

SEQ ID NO: 30814 - RNA, 22 nt, Artificial Sequence
  RPE65 RNA guide
cuuucauucgccuuuacuuuau

SEQ ID NO: 30815 - RNA, 22 nt, Artificial Sequence
  RPE65 RNA guide
cuuugucaucuucaaacuguca

SEQ ID NO: 30816 - RNA, 22 nt, Artificial Sequence
  RPE65 RNA guide
cuuuuaugucagucucucuucu

SEQ ID NO: 30817 - RNA, 22 nt, Artificial Sequence
  RPE65 RNA guide
cuuuuuauagcaagaacccauu

SEQ ID NO: 30818 - RNA, 22 nt, Artificial Sequence
  RPE65 RNA guide
gaaaaacgcuaccuaauuggaa

SEQ ID NO: 30819 - RNA, 22 nt, Artificial Sequence
  RPE65 RNA guide
gaaaauggguucuugcuauaaa

SEQ ID NO: 30820 - RNA, 22 nt, Artificial Sequence
  RPE65 RNA guide
gaaacccaccacccuuuaauac

SEQ ID NO: 30821 - RNA, 22 nt, Artificial Sequence
  RPE65 RNA guide
gaaagaaaauggguucuugcua

SEQ ID NO: 30822 - RNA, 22 nt, Artificial Sequence
  RPE65 RNA guide
gaaauaaaguaaaggcgaauga

SEQ ID NO: 30823 - RNA, 22 nt, Artificial Sequence
  RPE65 RNA guide
gaaaugauagagcuagguuagc

SEQ ID NO: 30824 - RNA, 22 nt, Artificial Sequence
  RPE65 RNA guide
gaaccaacauuccucuaauaaa

SEQ ID NO: 30825 - RNA, 22 nt, Artificial Sequence
  RPE65 RNA guide
gaacccauuuucuuucauucgc

SEQ ID NO: 30826 - RNA, 22 nt, Artificial Sequence
  RPE65 RNA guide
gaacguuuaaguaacuuagagg

SEQ ID NO: 30827 - RNA, 22 nt, Artificial Sequence
  RPE65 RNA guide
gaagagagacugacauaaaaga

SEQ ID NO: 30828 - RNA, 22 nt, Artificial Sequence
  RPE65 RNA guide
gaagaugacaaagguguaaucc

SEQ ID NO: 30829 - RNA, 22 nt, Artificial Sequence
  RPE65 RNA guide
gaagccagagaagagagacuga

SEQ ID NO: 30830 - RNA, 22 nt, Artificial Sequence
  RPE65 RNA guide
gaagccauccucuuuuauguca

SEQ ID NO: 30831 - RNA, 22 nt, Artificial Sequence
  RPE65 RNA guide
gaaggcccagugacaagcaccu

SEQ ID NO: 30832 - RNA, 22 nt, Artificial Sequence
  RPE65 RNA guide
gaauaaaugaaggcccagugac

SEQ ID NO: 30833 - RNA, 22 nt, Artificial Sequence
  RPE65 RNA guide
gaauaggaagccagagaagaga

SEQ ID NO: 30834 - RNA, 22 nt, Artificial Sequence
  RPE65 RNA guide
gaauccucuaaguuacuuaaac

SEQ ID NO: 30835 - RNA, 22 nt, Artificial Sequence
  RPE65 RNA guide
gaaugaaagaaaauggguucuu

SEQ ID NO: 30836 - RNA, 22 nt, Artificial Sequence
  RPE65 RNA guide
gaauguugguucugcugggagg

SEQ ID NO: 30837 - RNA, 22 nt, Artificial Sequence
  RPE65 RNA guide
gaauuccaauuagguagcguuu

SEQ ID NO: 30838 - RNA, 22 nt, Artificial Sequence
  RPE65 RNA guide
gaauucccuaaggaucaggauu

SEQ ID NO: 30839 - RNA, 22 nt, Artificial Sequence
  RPE65 RNA guide
gaauugaggcucagaacguuua

SEQ ID NO: 30840 - RNA, 22 nt, Artificial Sequence
  RPE65 RNA guide
gacaaagguguaauccugaucc

SEQ ID NO: 30841 - RNA, 22 nt, Artificial Sequence
  RPE65 RNA guide
gacaagcaccugggaguauuaa

SEQ ID NO: 30842 - RNA, 22 nt, Artificial Sequence
  RPE65 RNA guide
gacagugaaaugauagagcuag

SEQ ID NO: 30843 - RNA, 22 nt, Artificial Sequence
  RPE65 RNA guide
gacaguuugaagaugacaaagg

SEQ ID NO: 30844 - RNA, 22 nt, Artificial Sequence
  RPE65 RNA guide
gacauaaaagaggauggcuuca

SEQ ID NO: 30845 - RNA, 22 nt, Artificial Sequence
  RPE65 RNA guide
gacauuuacuaugugccaggca

SEQ ID NO: 30846 - RNA, 22 nt, Artificial Sequence
  RPE65 RNA guide
gacauuuauaggacauuuacua

SEQ ID NO: 30847 - RNA, 22 nt, Artificial Sequence
  RPE65 RNA guide
gacccacagggggagucugcac

SEQ ID NO: 30848 - RNA, 22 nt, Artificial Sequence
  RPE65 RNA guide
gacgccaaggaauaggaagcca

SEQ ID NO: 30849 - RNA, 22 nt, Artificial Sequence
  RPE65 RNA guide
gacucccccugugggucacagg

SEQ ID NO: 30850 - RNA, 22 nt, Artificial Sequence
  RPE65 RNA guide
gacugacauaaaagaggauggc

SEQ ID NO: 30851 - RNA, 22 nt, Artificial Sequence
  RPE65 RNA guide
gagaaauaaaguaaaggcgaau

SEQ ID NO: 30852 - RNA, 22 nt, Artificial Sequence
  RPE65 RNA guide
gagaagagagacugacauaaaa

SEQ ID NO: 30853 - RNA, 22 nt, Artificial Sequence
  RPE65 RNA guide
gagacgccaaggaauaggaagc

SEQ ID NO: 30854 - RNA, 22 nt, Artificial Sequence
  RPE65 RNA guide
gagacugacauaaaagaggaug

SEQ ID NO: 30855 - RNA, 22 nt, Artificial Sequence
  RPE65 RNA guide
gagagacgccaaggaauaggaa

SEQ ID NO: 30856 - RNA, 22 nt, Artificial Sequence
  RPE65 RNA guide
gagagacugacauaaaagagga

SEQ ID NO: 30857 - RNA, 22 nt, Artificial Sequence
  RPE65 RNA guide
gagagggaucaggugguuuggg

SEQ ID NO: 30858 - RNA, 22 nt, Artificial Sequence
  RPE65 RNA guide
gagcuaggcacugacaguuuga

SEQ ID NO: 30859 - RNA, 22 nt, Artificial Sequence
  RPE65 RNA guide
gagcuagguuagcaucuacauc

SEQ ID NO: 30860 - RNA, 22 nt, Artificial Sequence
  RPE65 RNA guide
gaggaauguugguucugcuggg

SEQ ID NO: 30861 - RNA, 22 nt, Artificial Sequence
  RPE65 RNA guide
gaggauggcuucaagaugggcg

SEQ ID NO: 30862 - RNA, 22 nt, Artificial Sequence
  RPE65 RNA guide
gaggauucacagacagugaaau

SEQ ID NO: 30863 - RNA, 22 nt, Artificial Sequence
  RPE65 RNA guide
gaggcagauguagaugcuaacc

SEQ ID NO: 30864 - RNA, 22 nt, Artificial Sequence
  RPE65 RNA guide
gaggcucagaacguuuaaguaa

SEQ ID NO: 30865 - RNA, 22 nt, Artificial Sequence
  RPE65 RNA guide
gagggaucaggugguuugggcu

SEQ ID NO: 30866 - RNA, 22 nt, Artificial Sequence
  RPE65 RNA guide
gaguauuaaagggugguggguu

SEQ ID NO: 30867 - RNA, 22 nt, Artificial Sequence
  RPE65 RNA guide
gagucugcacugagagacgcca

SEQ ID NO: 30868 - RNA, 22 nt, Artificial Sequence
  RPE65 RNA guide
gauagagcuagguuagcaucua

SEQ ID NO: 30869 - RNA, 22 nt, Artificial Sequence
  RPE65 RNA guide
gaucaggauuacaccuuuguca

SEQ ID NO: 30870 - RNA, 22 nt, Artificial Sequence
  RPE65 RNA guide
gaucaggugguuugggcuuuuu

SEQ ID NO: 30871 - RNA, 22 nt, Artificial Sequence
  RPE65 RNA guide
gaucccucucccugugacccac

SEQ ID NO: 30872 - RNA, 22 nt, Artificial Sequence
  RPE65 RNA guide
gauccuuagggaauuccaauua

SEQ ID NO: 30873 - RNA, 22 nt, Artificial Sequence
  RPE65 RNA guide
gaugacaaagguguaauccuga

SEQ ID NO: 30874 - RNA, 22 nt, Artificial Sequence
  RPE65 RNA guide
gaugcuaaccuagcucuaucau

SEQ ID NO: 30875 - RNA, 22 nt, Artificial Sequence
  RPE65 RNA guide
gauggcuucaagaugggcgaga

SEQ ID NO: 30876 - RNA, 22 nt, Artificial Sequence
  RPE65 RNA guide
gauguagaugcuaaccuagcuc

SEQ ID NO: 30877 - RNA, 22 nt, Artificial Sequence
  RPE65 RNA guide
gauuacaccuuugucaucuuca

SEQ ID NO: 30878 - RNA, 22 nt, Artificial Sequence
  RPE65 RNA guide
gauucacagacagugaaaugau

SEQ ID NO: 30879 - RNA, 22 nt, Artificial Sequence
  RPE65 RNA guide
gcaagaacccauuuucuuucau

SEQ ID NO: 30880 - RNA, 22 nt, Artificial Sequence
  RPE65 RNA guide
gcacauaguaaauguccuauaa

SEQ ID NO: 30881 - RNA, 22 nt, Artificial Sequence
  RPE65 RNA guide
gcaccugggaguauuaaagggu

SEQ ID NO: 30882 - RNA, 22 nt, Artificial Sequence
  RPE65 RNA guide
gcacugacaguuugaagaugac

SEQ ID NO: 30883 - RNA, 22 nt, Artificial Sequence
  RPE65 RNA guide
gcacugagagacgccaaggaau

SEQ ID NO: 30884 - RNA, 22 nt, Artificial Sequence
  RPE65 RNA guide
gcacugagcuaggcacugacag

SEQ ID NO: 30885 - RNA, 22 nt, Artificial Sequence
  RPE65 RNA guide
gcagaaaaacgcuaccuaauug

SEQ ID NO: 30886 - RNA, 22 nt, Artificial Sequence
  RPE65 RNA guide
gcagaaccaacauuccucuaau

SEQ ID NO: 30887 - RNA, 22 nt, Artificial Sequence
  RPE65 RNA guide
gcagacucccccugugggucac

SEQ ID NO: 30888 - RNA, 22 nt, Artificial Sequence
  RPE65 RNA guide
gcagauguagaugcuaaccuag

SEQ ID NO: 30889 - RNA, 22 nt, Artificial Sequence
  RPE65 RNA guide
gcaucuacaucugccucccagc

SEQ ID NO: 30890 - RNA, 22 nt, Artificial Sequence
  RPE65 RNA guide
gcaugaaacccaccacccuuua

SEQ ID NO: 30891 - RNA, 22 nt, Artificial Sequence
  RPE65 RNA guide
gcauuagagaaauaaaguaaag

SEQ ID NO: 30892 - RNA, 22 nt, Artificial Sequence
  RPE65 RNA guide
gccaaggaauaggaagccagag

SEQ ID NO: 30893 - RNA, 22 nt, Artificial Sequence
  RPE65 RNA guide
gccagagaagagagacugacau

SEQ ID NO: 30894 - RNA, 22 nt, Artificial Sequence
  RPE65 RNA guide
gccaggcacugagcuaggcacu

SEQ ID NO: 30895 - RNA, 22 nt, Artificial Sequence
  RPE65 RNA guide
gccauccucuuuuaugucaguc

SEQ ID NO: 30896 - RNA, 22 nt, Artificial Sequence
  RPE65 RNA guide
gcccaaaccaccugaucccucu

SEQ ID NO: 30897 - RNA, 22 nt, Artificial Sequence
  RPE65 RNA guide
gcccagugacaagcaccuggga

SEQ ID NO: 30898 - RNA, 22 nt, Artificial Sequence
  RPE65 RNA guide
gcccaucuugaagccauccucu

SEQ ID NO: 30899 - RNA, 22 nt, Artificial Sequence
  RPE65 RNA guide
gcccauuuuauuagaggaaugu

SEQ ID NO: 30900 - RNA, 22 nt, Artificial Sequence
  RPE65 RNA guide
gccucccagcagaaccaacauu

SEQ ID NO: 30901 - RNA, 22 nt, Artificial Sequence
  RPE65 RNA guide
gccuggcacauaguaaaugucc

SEQ ID NO: 30902 - RNA, 22 nt, Artificial Sequence
  RPE65 RNA guide
gccuucauuuauucagacacca

SEQ ID NO: 30903 - RNA, 22 nt, Artificial Sequence
  RPE65 RNA guide
gccuuuacuuuauuucucuaau

SEQ ID NO: 30904 - RNA, 22 nt, Artificial Sequence
  RPE65 RNA guide
gcgaaugaaagaaaauggguuc

SEQ ID NO: 30905 - RNA, 22 nt, Artificial Sequence
  RPE65 RNA guide
gcgucucucagugcagacuccc

SEQ ID NO: 30906 - RNA, 22 nt, Artificial Sequence
  RPE65 RNA guide
gcguuuuucugcauuagagaaa

SEQ ID NO: 30907 - RNA, 22 nt, Artificial Sequence
  RPE65 RNA guide
gcuaaccuagcucuaucauuuc

SEQ ID NO: 30908 - RNA, 22 nt, Artificial Sequence
  RPE65 RNA guide
gcuaccuaauuggaauucccua

SEQ ID NO: 30909 - RNA, 22 nt, Artificial Sequence
  RPE65 RNA guide
gcuaggcacugacaguuugaag

SEQ ID NO: 30910 - RNA, 22 nt, Artificial Sequence
  RPE65 RNA guide
gcuagguuagcaucuacaucug

SEQ ID NO: 30911 - RNA, 22 nt, Artificial Sequence
  RPE65 RNA guide
gcuauaaaaagcccaaaccacc

SEQ ID NO: 30912 - RNA, 22 nt, Artificial Sequence
  RPE65 RNA guide
gcucagaacguuuaaguaacuu

SEQ ID NO: 30913 - RNA, 22 nt, Artificial Sequence
  RPE65 RNA guide
gcucagugccuggcacauagua

SEQ ID NO: 30914 - RNA, 22 nt, Artificial Sequence
  RPE65 RNA guide
gcucuaucauuucacugucugu

SEQ ID NO: 30915 - RNA, 22 nt, Artificial Sequence
  RPE65 RNA guide
gcugggaggcagauguagaugc

SEQ ID NO: 30916 - RNA, 22 nt, Artificial Sequence
  RPE65 RNA guide
gcuuccuauuccuuggcgucuc

SEQ ID NO: 30917 - RNA, 22 nt, Artificial Sequence
  RPE65 RNA guide
gcuugucacugggccuucauuu

SEQ ID NO: 30918 - RNA, 22 nt, Artificial Sequence
  RPE65 RNA guide
gcuuuuuauagcaagaacccau

SEQ ID NO: 30919 - RNA, 22 nt, Artificial Sequence
  RPE65 RNA guide
ggaagccagagaagagagacug

SEQ ID NO: 30920 - RNA, 22 nt, Artificial Sequence
  RPE65 RNA guide
ggaauaggaagccagagaagag

SEQ ID NO: 30921 - RNA, 22 nt, Artificial Sequence
  RPE65 RNA guide
ggaauguugguucugcugggag

SEQ ID NO: 30922 - RNA, 22 nt, Artificial Sequence
  RPE65 RNA guide
ggaauuccaauuagguagcguu

SEQ ID NO: 30923 - RNA, 22 nt, Artificial Sequence
  RPE65 RNA guide
ggaauucccuaaggaucaggau

SEQ ID NO: 30924 - RNA, 22 nt, Artificial Sequence
  RPE65 RNA guide
ggaauugaggcucagaacguuu

SEQ ID NO: 30925 - RNA, 22 nt, Artificial Sequence
  RPE65 RNA guide
ggacauuuacuaugugccaggc

SEQ ID NO: 30926 - RNA, 22 nt, Artificial Sequence
  RPE65 RNA guide
ggagagggaucaggugguuugg

SEQ ID NO: 30927 - RNA, 22 nt, Artificial Sequence
  RPE65 RNA guide
ggaggcagauguagaugcuaac

SEQ ID NO: 30928 - RNA, 22 nt, Artificial Sequence
  RPE65 RNA guide
ggaguauuaaaggguggugggu

SEQ ID NO: 30929 - RNA, 22 nt, Artificial Sequence
  RPE65 RNA guide
ggagucugcacugagagacgcc

SEQ ID NO: 30930 - RNA, 22 nt, Artificial Sequence
  RPE65 RNA guide
ggaucaggauuacaccuuuguc

SEQ ID NO: 30931 - RNA, 22 nt, Artificial Sequence
  RPE65 RNA guide
ggaucaggugguuugggcuuuu

SEQ ID NO: 30932 - RNA, 22 nt, Artificial Sequence
  RPE65 RNA guide
ggauggcuucaagaugggcgag

SEQ ID NO: 30933 - RNA, 22 nt, Artificial Sequence
  RPE65 RNA guide
ggauuacaccuuugucaucuuc

SEQ ID NO: 30934 - RNA, 22 nt, Artificial Sequence
  RPE65 RNA guide
ggauucacagacagugaaauga

SEQ ID NO: 30935 - RNA, 22 nt, Artificial Sequence
  RPE65 RNA guide
ggcacauaguaaauguccuaua

SEQ ID NO: 30936 - RNA, 22 nt, Artificial Sequence
  RPE65 RNA guide
ggcacugacaguuugaagauga

SEQ ID NO: 30937 - RNA, 22 nt, Artificial Sequence
  RPE65 RNA guide
ggcacugagcuaggcacugaca

SEQ ID NO: 30938 - RNA, 22 nt, Artificial Sequence
  RPE65 RNA guide
ggcagauguagaugcuaaccua

SEQ ID NO: 30939 - RNA, 22 nt, Artificial Sequence
  RPE65 RNA guide
ggcaugaaacccaccacccuuu

SEQ ID NO: 30940 - RNA, 22 nt, Artificial Sequence
  RPE65 RNA guide
ggcccagugacaagcaccuggg

SEQ ID NO: 30941 - RNA, 22 nt, Artificial Sequence
  RPE65 RNA guide
ggccuucauuuauucagacacc

SEQ ID NO: 30942 - RNA, 22 nt, Artificial Sequence
  RPE65 RNA guide
ggcgaaugaaagaaaauggguu

SEQ ID NO: 30943 - RNA, 22 nt, Artificial Sequence
  RPE65 RNA guide
ggcgucucucagugcagacucc

SEQ ID NO: 30944 - RNA, 22 nt, Artificial Sequence
  RPE65 RNA guide
ggcucagaacguuuaaguaacu

SEQ ID NO: 30945 - RNA, 22 nt, Artificial Sequence
  RPE65 RNA guide
ggcuuccuauuccuuggcgucu

SEQ ID NO: 30946 - RNA, 22 nt, Artificial Sequence
  RPE65 RNA guide
ggcuuuuuauagcaagaaccca

SEQ ID NO: 30947 - RNA, 22 nt, Artificial Sequence
  RPE65 RNA guide
gggaauuccaauuagguagcgu

SEQ ID NO: 30948 - RNA, 22 nt, Artificial Sequence
  RPE65 RNA guide
gggaauugaggcucagaacguu

SEQ ID NO: 30949 - RNA, 22 nt, Artificial Sequence
  RPE65 RNA guide
gggagagggaucaggugguuug

SEQ ID NO: 30950 - RNA, 22 nt, Artificial Sequence
  RPE65 RNA guide
gggaggcagauguagaugcuaa

SEQ ID NO: 30951 - RNA, 22 nt, Artificial Sequence
  RPE65 RNA guide
gggaguauuaaagggugguggg

SEQ ID NO: 30952 - RNA, 22 nt, Artificial Sequence
  RPE65 RNA guide
gggagucugcacugagagacgc

SEQ ID NO: 30953 - RNA, 22 nt, Artificial Sequence
  RPE65 RNA guide
gggaucaggugguuugggcuuu

SEQ ID NO: 30954 - RNA, 22 nt, Artificial Sequence
  RPE65 RNA guide
gggcaugaaacccaccacccuu

SEQ ID NO: 30955 - RNA, 22 nt, Artificial Sequence
  RPE65 RNA guide
gggccuucauuuauucagacac

SEQ ID NO: 30956 - RNA, 22 nt, Artificial Sequence
  RPE65 RNA guide
gggcuuuuuauagcaagaaccc

SEQ ID NO: 30957 - RNA, 22 nt, Artificial Sequence
  RPE65 RNA guide
ggggagucugcacugagagacg

SEQ ID NO: 30958 - RNA, 22 nt, Artificial Sequence
  RPE65 RNA guide
gggggagucugcacugagagac

SEQ ID NO: 30959 - RNA, 22 nt, Artificial Sequence
  RPE65 RNA guide
gggucacagggagagggaucag

SEQ ID NO: 30960 - RNA, 22 nt, Artificial Sequence
  RPE65 RNA guide
gggugguggguuucaugcccau

SEQ ID NO: 30961 - RNA, 22 nt, Artificial Sequence
  RPE65 RNA guide
ggguucuugcuauaaaaagccc

SEQ ID NO: 30962 - RNA, 22 nt, Artificial Sequence
  RPE65 RNA guide
ggguuucaugcccauuuuauua

SEQ ID NO: 30963 - RNA, 22 nt, Artificial Sequence
  RPE65 RNA guide
gguaagggaauugaggcucaga

SEQ ID NO: 30964 - RNA, 22 nt, Artificial Sequence
  RPE65 RNA guide
gguagcguuuuucugcauuaga

SEQ ID NO: 30965 - RNA, 22 nt, Artificial Sequence
  RPE65 RNA guide
ggucacagggagagggaucagg

SEQ ID NO: 30966 - RNA, 22 nt, Artificial Sequence
  RPE65 RNA guide
ggucucgcccaucuugaagcca

SEQ ID NO: 30967 - RNA, 22 nt, Artificial Sequence
  RPE65 RNA guide
ggugcuugucacugggccuuca

SEQ ID NO: 30968 - RNA, 22 nt, Artificial Sequence
  RPE65 RNA guide
gguggguuucaugcccauuuua

SEQ ID NO: 30969 - RNA, 22 nt, Artificial Sequence
  RPE65 RNA guide
ggugguggguuucaugcccauu

SEQ ID NO: 30970 - RNA, 22 nt, Artificial Sequence
  RPE65 RNA guide
ggugguuugggcuuuuuauagc

SEQ ID NO: 30971 - RNA, 22 nt, Artificial Sequence
  RPE65 RNA guide
gguguaauccugauccuuaggg

SEQ ID NO: 30972 - RNA, 22 nt, Artificial Sequence
  RPE65 RNA guide
ggugucugaauaaaugaaggcc

SEQ ID NO: 30973 - RNA, 22 nt, Artificial Sequence
  RPE65 RNA guide
gguuagcaucuacaucugccuc

SEQ ID NO: 30974 - RNA, 22 nt, Artificial Sequence
  RPE65 RNA guide
gguucugcugggaggcagaugu

SEQ ID NO: 30975 - RNA, 22 nt, Artificial Sequence
  RPE65 RNA guide
gguucuugcuauaaaaagccca

SEQ ID NO: 30976 - RNA, 22 nt, Artificial Sequence
  RPE65 RNA guide
gguuucaugcccauuuuauuag

SEQ ID NO: 30977 - RNA, 22 nt, Artificial Sequence
  RPE65 RNA guide
gguuugggcuuuuuauagcaag

SEQ ID NO: 30978 - RNA, 22 nt, Artificial Sequence
  RPE65 RNA guide
guaaaggcgaaugaaagaaaau

SEQ ID NO: 30979 - RNA, 22 nt, Artificial Sequence
  RPE65 RNA guide
guaacuuagaggauucacagac

SEQ ID NO: 30980 - RNA, 22 nt, Artificial Sequence
  RPE65 RNA guide
guaagggaauugaggcucagaa

SEQ ID NO: 30981 - RNA, 22 nt, Artificial Sequence
  RPE65 RNA guide
guaauccugauccuuagggaau

SEQ ID NO: 30982 - RNA, 22 nt, Artificial Sequence
  RPE65 RNA guide
guagaugcuaaccuagcucuau

SEQ ID NO: 30983 - RNA, 22 nt, Artificial Sequence
  RPE65 RNA guide
guagcguuuuucugcauuagag

SEQ ID NO: 30984 - RNA, 22 nt, Artificial Sequence
  RPE65 RNA guide
guauuaaagggugguggguuuc

SEQ ID NO: 30985 - RNA, 22 nt, Artificial Sequence
  RPE65 RNA guide
gucacagggagagggaucaggu

SEQ ID NO: 30986 - RNA, 22 nt, Artificial Sequence
  RPE65 RNA guide
gucacugggccuucauuuauuc

SEQ ID NO: 30987 - RNA, 22 nt, Artificial Sequence
  RPE65 RNA guide
gucagucucucuucucuggcuu

SEQ ID NO: 30988 - RNA, 22 nt, Artificial Sequence
  RPE65 RNA guide
gucagugccuagcucagugccu

SEQ ID NO: 30989 - RNA, 22 nt, Artificial Sequence
  RPE65 RNA guide
gucaucuucaaacugucagugc

SEQ ID NO: 30990 - RNA, 22 nt, Artificial Sequence
  RPE65 RNA guide
gucucgcccaucuugaagccau

SEQ ID NO: 30991 - RNA, 22 nt, Artificial Sequence
  RPE65 RNA guide
gucucucagugcagacuccccc

SEQ ID NO: 30992 - RNA, 22 nt, Artificial Sequence
  RPE65 RNA guide
gucucucuucucuggcuuccua

SEQ ID NO: 30993 - RNA, 22 nt, Artificial Sequence
  RPE65 RNA guide
gucugaauaaaugaaggcccag

SEQ ID NO: 30994 - RNA, 22 nt, Artificial Sequence
  RPE65 RNA guide
gucugcacugagagacgccaag

SEQ ID NO: 30995 - RNA, 22 nt, Artificial Sequence
  RPE65 RNA guide
gucugugaauccucuaaguuac

SEQ ID NO: 30996 - RNA, 22 nt, Artificial Sequence
  RPE65 RNA guide
gugaaaugauagagcuagguua

SEQ ID NO: 30997 - RNA, 22 nt, Artificial Sequence
  RPE65 RNA guide
gugaauccucuaaguuacuuaa

SEQ ID NO: 30998 - RNA, 22 nt, Artificial Sequence
  RPE65 RNA guide
gugacaagcaccugggaguauu

SEQ ID NO: 30999 - RNA, 22 nt, Artificial Sequence
  RPE65 RNA guide
gugacccacagggggagucugc

SEQ ID NO: 31000 - RNA, 22 nt, Artificial Sequence
  RPE65 RNA guide
gugcagacucccccuguggguc

SEQ ID NO: 31001 - RNA, 22 nt, Artificial Sequence
  RPE65 RNA guide
gugccaggcacugagcuaggca

SEQ ID NO: 31002 - RNA, 22 nt, Artificial Sequence
  RPE65 RNA guide
gugccuggcacauaguaaaugu

SEQ ID NO: 31003 - RNA, 22 nt, Artificial Sequence
  RPE65 RNA guide
gugcuugucacugggccuucau

SEQ ID NO: 31004 - RNA, 22 nt, Artificial Sequence
  RPE65 RNA guide
gugggucacagggagagggauc

SEQ ID NO: 31005 - RNA, 22 nt, Artificial Sequence
  RPE65 RNA guide
guggguuucaugcccauuuuau

SEQ ID NO: 31006 - RNA, 22 nt, Artificial Sequence
  RPE65 RNA guide
gugguggguuucaugcccauuu

SEQ ID NO: 31007 - RNA, 22 nt, Artificial Sequence
  RPE65 RNA guide
gugguuugggcuuuuuauagca

SEQ ID NO: 31008 - RNA, 22 nt, Artificial Sequence
  RPE65 RNA guide
guguaauccugauccuuaggga

SEQ ID NO: 31009 - RNA, 22 nt, Artificial Sequence
  RPE65 RNA guide
gugucugaauaaaugaaggccc

SEQ ID NO: 31010 - RNA, 22 nt, Artificial Sequence
  RPE65 RNA guide
guuacuuaaacguucugagccu

SEQ ID NO: 31011 - RNA, 22 nt, Artificial Sequence
  RPE65 RNA guide
guuagcaucuacaucugccucc

SEQ ID NO: 31012 - RNA, 22 nt, Artificial Sequence
  RPE65 RNA guide
guuccauuggugucugaauaaa

SEQ ID NO: 31013 - RNA, 22 nt, Artificial Sequence
  RPE65 RNA guide
guucugcugggaggcagaugua

SEQ ID NO: 31014 - RNA, 22 nt, Artificial Sequence
  RPE65 RNA guide
guucuugcuauaaaaagcccaa

SEQ ID NO: 31015 - RNA, 22 nt, Artificial Sequence
  RPE65 RNA guide
guuggucucgcccaucuugaag

SEQ ID NO: 31016 - RNA, 22 nt, Artificial Sequence
  RPE65 RNA guide
guugguucugcugggaggcaga

SEQ ID NO: 31017 - RNA, 22 nt, Artificial Sequence
  RPE65 RNA guide
guuuaaguaacuuagaggauuc

SEQ ID NO: 31018 - RNA, 22 nt, Artificial Sequence
  RPE65 RNA guide
guuucaugcccauuuuauuaga

SEQ ID NO: 31019 - RNA, 22 nt, Artificial Sequence
  RPE65 RNA guide
guuugaagaugacaaaggugua

SEQ ID NO: 31020 - RNA, 22 nt, Artificial Sequence
  RPE65 RNA guide
guuugggcuuuuuauagcaaga

SEQ ID NO: 31021 - RNA, 22 nt, Artificial Sequence
  RPE65 RNA guide
uaaaaagcccaaaccaccugau

SEQ ID NO: 31022 - RNA, 22 nt, Artificial Sequence
  RPE65 RNA guide
uaaaagaggauggcuucaagau

SEQ ID NO: 31023 - RNA, 22 nt, Artificial Sequence
  RPE65 RNA guide
uaaaaugggcaugaaacccacc

SEQ ID NO: 31024 - RNA, 22 nt, Artificial Sequence
  RPE65 RNA guide
uaaacguucugagccucaauuc

SEQ ID NO: 31025 - RNA, 22 nt, Artificial Sequence
  RPE65 RNA guide
uaaaggcgaaugaaagaaaaug

SEQ ID NO: 31026 - RNA, 22 nt, Artificial Sequence
  RPE65 RNA guide
uaaagggugguggguuucaugc

SEQ ID NO: 31027 - RNA, 22 nt, Artificial Sequence
  RPE65 RNA guide
uaaaugaaggcccagugacaag

SEQ ID NO: 31028 - RNA, 22 nt, Artificial Sequence
  RPE65 RNA guide
uaaauguccuauaaaugucugu

SEQ ID NO: 31029 - RNA, 22 nt, Artificial Sequence
  RPE65 RNA guide
uaaccuagcucuaucauuucac

SEQ ID NO: 31030 - RNA, 22 nt, Artificial Sequence
  RPE65 RNA guide
uaacuuagaggauucacagaca

SEQ ID NO: 31031 - RNA, 22 nt, Artificial Sequence
  RPE65 RNA guide
uaaggaucaggauuacaccuuu

SEQ ID NO: 31032 - RNA, 22 nt, Artificial Sequence
  RPE65 RNA guide
uaagggaauugaggcucagaac

SEQ ID NO: 31033 - RNA, 22 nt, Artificial Sequence
  RPE65 RNA guide
uaaguaacuuagaggauucaca

SEQ ID NO: 31034 - RNA, 22 nt, Artificial Sequence
  RPE65 RNA guide
uaaguuacuuaaacguucugag

SEQ ID NO: 31035 - RNA, 22 nt, Artificial Sequence
  RPE65 RNA guide
uaauaaaaugggcaugaaaccc

SEQ ID NO: 31036 - RNA, 22 nt, Artificial Sequence
  RPE65 RNA guide
uaauacucccaggugcuuguca

SEQ ID NO: 31037 - RNA, 22 nt, Artificial Sequence
  RPE65 RNA guide
uaauccugauccuuagggaauu

SEQ ID NO: 31038 - RNA, 22 nt, Artificial Sequence
  RPE65 RNA guide
uaaugcagaaaaacgcuaccua

SEQ ID NO: 31039 - RNA, 22 nt, Artificial Sequence
  RPE65 RNA guide
uaauuggaauucccuaaggauc

SEQ ID NO: 31040 - RNA, 22 nt, Artificial Sequence
  RPE65 RNA guide
uacaccuuugucaucuucaaac

SEQ ID NO: 31041 - RNA, 22 nt, Artificial Sequence
  RPE65 RNA guide
uacaucugccucccagcagaac

SEQ ID NO: 31042 - RNA, 22 nt, Artificial Sequence
  RPE65 RNA guide
uaccuaauuggaauucccuaag

SEQ ID NO: 31043 - RNA, 22 nt, Artificial Sequence
  RPE65 RNA guide
uacucccaggugcuugucacug

SEQ ID NO: 31044 - RNA, 22 nt, Artificial Sequence
  RPE65 RNA guide
uacuuaaacguucugagccuca

SEQ ID NO: 31045 - RNA, 22 nt, Artificial Sequence
  RPE65 RNA guide
uagagaaauaaaguaaaggcga

SEQ ID NO: 31046 - RNA, 22 nt, Artificial Sequence
  RPE65 RNA guide
uagagcuagguuagcaucuaca

SEQ ID NO: 31047 - RNA, 22 nt, Artificial Sequence
  RPE65 RNA guide
uagaggaauguugguucugcug

SEQ ID NO: 31048 - RNA, 22 nt, Artificial Sequence
  RPE65 RNA guide
uagaggauucacagacagugaa

SEQ ID NO: 31049 - RNA, 22 nt, Artificial Sequence
  RPE65 RNA guide
uagaugcuaaccuagcucuauc

SEQ ID NO: 31050 - RNA, 22 nt, Artificial Sequence
  RPE65 RNA guide
uagcaagaacccauuuucuuuc

SEQ ID NO: 31051 - RNA, 22 nt, Artificial Sequence
  RPE65 RNA guide
uagcaucuacaucugccuccca

SEQ ID NO: 31052 - RNA, 22 nt, Artificial Sequence
  RPE65 RNA guide
uagcguuuuucugcauuagaga

SEQ ID NO: 31053 - RNA, 22 nt, Artificial Sequence
  RPE65 RNA guide
uagcucagugccuggcacauag

SEQ ID NO: 31054 - RNA, 22 nt, Artificial Sequence
  RPE65 RNA guide
uagcucuaucauuucacugucu

SEQ ID NO: 31055 - RNA, 22 nt, Artificial Sequence
  RPE65 RNA guide
uaggaagccagagaagagagac

SEQ ID NO: 31056 - RNA, 22 nt, Artificial Sequence
  RPE65 RNA guide
uaggacauuuacuaugugccag

SEQ ID NO: 31057 - RNA, 22 nt, Artificial Sequence
  RPE65 RNA guide
uaggcacugacaguuugaagau

SEQ ID NO: 31058 - RNA, 22 nt, Artificial Sequence
  RPE65 RNA guide
uagggaauuccaauuagguagc

SEQ ID NO: 31059 - RNA, 22 nt, Artificial Sequence
  RPE65 RNA guide
uagguagcguuuuucugcauua

SEQ ID NO: 31060 - RNA, 22 nt, Artificial Sequence
  RPE65 RNA guide
uagguuagcaucuacaucugcc

SEQ ID NO: 31061 - RNA, 22 nt, Artificial Sequence
  RPE65 RNA guide
uauaaaaagcccaaaccaccug

SEQ ID NO: 31062 - RNA, 22 nt, Artificial Sequence
  RPE65 RNA guide
uauagcaagaacccauuuucuu

SEQ ID NO: 31063 - RNA, 22 nt, Artificial Sequence
  RPE65 RNA guide
uauaggacauuuacuaugugcc

SEQ ID NO: 31064 - RNA, 22 nt, Artificial Sequence
  RPE65 RNA guide
uaucauuucacugucugugaau

SEQ ID NO: 31065 - RNA, 22 nt, Artificial Sequence
  RPE65 RNA guide
uaugucagucucucuucucugg

SEQ ID NO: 31066 - RNA, 22 nt, Artificial Sequence
  RPE65 RNA guide
uauuaaagggugguggguuuca

SEQ ID NO: 31067 - RNA, 22 nt, Artificial Sequence
  RPE65 RNA guide
uauuagaggaauguugguucug

SEQ ID NO: 31068 - RNA, 22 nt, Artificial Sequence
  RPE65 RNA guide
uauuccuuggcgucucucagug

SEQ ID NO: 31069 - RNA, 22 nt, Artificial Sequence
  RPE65 RNA guide
uauuucucuaaugcagaaaaac

SEQ ID NO: 31070 - RNA, 22 nt, Artificial Sequence
  RPE65 RNA guide
ucaaacugucagugccuagcuc

SEQ ID NO: 31071 - RNA, 22 nt, Artificial Sequence
  RPE65 RNA guide
ucacagacagugaaaugauaga

SEQ ID NO: 31072 - RNA, 22 nt, Artificial Sequence
  RPE65 RNA guide
ucacagggagagggaucaggug

SEQ ID NO: 31073 - RNA, 22 nt, Artificial Sequence
  RPE65 RNA guide
ucacugggccuucauuuauuca

SEQ ID NO: 31074 - RNA, 22 nt, Artificial Sequence
  RPE65 RNA guide
ucacugucugugaauccucuaa

SEQ ID NO: 31075 - RNA, 22 nt, Artificial Sequence
  RPE65 RNA guide
ucagaacguuuaaguaacuuag

SEQ ID NO: 31076 - RNA, 22 nt, Artificial Sequence
  RPE65 RNA guide
ucaggauuacaccuuugucauc

SEQ ID NO: 31077 - RNA, 22 nt, Artificial Sequence
  RPE65 RNA guide
ucaggugguuugggcuuuuuau

SEQ ID NO: 31078 - RNA, 22 nt, Artificial Sequence
  RPE65 RNA guide
ucagucucucuucucuggcuuc

SEQ ID NO: 31079 - RNA, 22 nt, Artificial Sequence
  RPE65 RNA guide
ucagugcagacucccccugugg

SEQ ID NO: 31080 - RNA, 22 nt, Artificial Sequence
  RPE65 RNA guide
ucagugccuagcucagugccug

SEQ ID NO: 31081 - RNA, 22 nt, Artificial Sequence
  RPE65 RNA guide
ucagugccuggcacauaguaaa

SEQ ID NO: 31082 - RNA, 22 nt, Artificial Sequence
  RPE65 RNA guide
ucaucuucaaacugucagugcc

SEQ ID NO: 31083 - RNA, 22 nt, Artificial Sequence
  RPE65 RNA guide
ucaugcccauuuuauuagagga

SEQ ID NO: 31084 - RNA, 22 nt, Artificial Sequence
  RPE65 RNA guide
ucauucgccuuuacuuuauuuc

SEQ ID NO: 31085 - RNA, 22 nt, Artificial Sequence
  RPE65 RNA guide
ucauuucacugucugugaaucc

SEQ ID NO: 31086 - RNA, 22 nt, Artificial Sequence
  RPE65 RNA guide
uccaauuagguagcguuuuucu

SEQ ID NO: 31087 - RNA, 22 nt, Artificial Sequence
  RPE65 RNA guide
uccauuggugucugaauaaaug

SEQ ID NO: 31088 - RNA, 22 nt, Artificial Sequence
  RPE65 RNA guide
ucccagcagaaccaacauuccu

SEQ ID NO: 31089 - RNA, 22 nt, Artificial Sequence
  RPE65 RNA guide
ucccaggugcuugucacugggc

SEQ ID NO: 31090 - RNA, 22 nt, Artificial Sequence
  RPE65 RNA guide
ucccccugugggucacagggag

SEQ ID NO: 31091 - RNA, 22 nt, Artificial Sequence
  RPE65 RNA guide
ucccuaaggaucaggauuacac

SEQ ID NO: 31092 - RNA, 22 nt, Artificial Sequence
  RPE65 RNA guide
ucccucucccugugacccacag

SEQ ID NO: 31093 - RNA, 22 nt, Artificial Sequence
  RPE65 RNA guide
ucccugugacccacagggggag

SEQ ID NO: 31094 - RNA, 22 nt, Artificial Sequence
  RPE65 RNA guide
uccuauuccuuggcgucucuca

SEQ ID NO: 31095 - RNA, 22 nt, Artificial Sequence
  RPE65 RNA guide
uccucuaaguuacuuaaacguu

SEQ ID NO: 31096 - RNA, 22 nt, Artificial Sequence
  RPE65 RNA guide
uccucuaauaaaaugggcauga

SEQ ID NO: 31097 - RNA, 22 nt, Artificial Sequence
  RPE65 RNA guide
uccucuuuuaugucagucucuc

SEQ ID NO: 31098 - RNA, 22 nt, Artificial Sequence
  RPE65 RNA guide
uccugauccuuagggaauucca

SEQ ID NO: 31099 - RNA, 22 nt, Artificial Sequence
  RPE65 RNA guide
uccuuagggaauuccaauuagg

SEQ ID NO: 31100 - RNA, 22 nt, Artificial Sequence
  RPE65 RNA guide
uccuuggcgucucucagugcag

SEQ ID NO: 31101 - RNA, 22 nt, Artificial Sequence
  RPE65 RNA guide
ucgcccaucuugaagccauccu

SEQ ID NO: 31102 - RNA, 22 nt, Artificial Sequence
  RPE65 RNA guide
ucgccuuuacuuuauuucucua

SEQ ID NO: 31103 - RNA, 22 nt, Artificial Sequence
  RPE65 RNA guide
ucuaaguuacuuaaacguucug

SEQ ID NO: 31104 - RNA, 22 nt, Artificial Sequence
  RPE65 RNA guide
ucuaauaaaaugggcaugaaac

SEQ ID NO: 31105 - RNA, 22 nt, Artificial Sequence
  RPE65 RNA guide
ucuaaugcagaaaaacgcuacc

SEQ ID NO: 31106 - RNA, 22 nt, Artificial Sequence
  RPE65 RNA guide
ucuacaucugccucccagcaga

SEQ ID NO: 31107 - RNA, 22 nt, Artificial Sequence
  RPE65 RNA guide
ucuaucauuucacugucuguga

SEQ ID NO: 31108 - RNA, 22 nt, Artificial Sequence
  RPE65 RNA guide
ucucagugcagacucccccugu

SEQ ID NO: 31109 - RNA, 22 nt, Artificial Sequence
  RPE65 RNA guide
ucucccugugacccacaggggg

SEQ ID NO: 31110 - RNA, 22 nt, Artificial Sequence
  RPE65 RNA guide
ucucgcccaucuugaagccauc

SEQ ID NO: 31111 - RNA, 22 nt, Artificial Sequence
  RPE65 RNA guide
ucucuaaugcagaaaaacgcua

SEQ ID NO: 31112 - RNA, 22 nt, Artificial Sequence
  RPE65 RNA guide
ucucucagugcagacucccccu

SEQ ID NO: 31113 - RNA, 22 nt, Artificial Sequence
  RPE65 RNA guide
ucucucuucucuggcuuccuau

SEQ ID NO: 31114 - RNA, 22 nt, Artificial Sequence
  RPE65 RNA guide
ucucuggcuuccuauuccuugg

SEQ ID NO: 31115 - RNA, 22 nt, Artificial Sequence
  RPE65 RNA guide
ucucuucucuggcuuccuauuc

SEQ ID NO: 31116 - RNA, 22 nt, Artificial Sequence
  RPE65 RNA guide
ucugaauaaaugaaggcccagu

SEQ ID NO: 31117 - RNA, 22 nt, Artificial Sequence
  RPE65 RNA guide
ucugcacugagagacgccaagg

SEQ ID NO: 31118 - RNA, 22 nt, Artificial Sequence
  RPE65 RNA guide
ucugcauuagagaaauaaagua

SEQ ID NO: 31119 - RNA, 22 nt, Artificial Sequence
  RPE65 RNA guide
ucugccucccagcagaaccaac

SEQ ID NO: 31120 - RNA, 22 nt, Artificial Sequence
  RPE65 RNA guide
ucugcugggaggcagauguaga

SEQ ID NO: 31121 - RNA, 22 nt, Artificial Sequence
  RPE65 RNA guide
ucuggcuuccuauuccuuggcg

SEQ ID NO: 31122 - RNA, 22 nt, Artificial Sequence
  RPE65 RNA guide
ucugugaauccucuaaguuacu

SEQ ID NO: 31123 - RNA, 22 nt, Artificial Sequence
  RPE65 RNA guide
ucuucaaacugucagugccuag

SEQ ID NO: 31124 - RNA, 22 nt, Artificial Sequence
  RPE65 RNA guide
ucuucucuggcuuccuauuccu

SEQ ID NO: 31125 - RNA, 22 nt, Artificial Sequence
  RPE65 RNA guide
ucuugaagccauccucuuuuau

SEQ ID NO: 31126 - RNA, 22 nt, Artificial Sequence
  RPE65 RNA guide
ucuugcuauaaaaagcccaaac

SEQ ID NO: 31127 - RNA, 22 nt, Artificial Sequence
  RPE65 RNA guide
ucuuucauucgccuuuacuuua

SEQ ID NO: 31128 - RNA, 22 nt, Artificial Sequence
  RPE65 RNA guide
ucuuuuaugucagucucucuuc

SEQ ID NO: 31129 - RNA, 22 nt, Artificial Sequence
  RPE65 RNA guide
ugaaacccaccacccuuuaaua

SEQ ID NO: 31130 - RNA, 22 nt, Artificial Sequence
  RPE65 RNA guide
ugaaagaaaauggguucuugcu

SEQ ID NO: 31131 - RNA, 22 nt, Artificial Sequence
  RPE65 RNA guide
ugaaaugauagagcuagguuag

SEQ ID NO: 31132 - RNA, 22 nt, Artificial Sequence
  RPE65 RNA guide
ugaagaugacaaagguguaauc

SEQ ID NO: 31133 - RNA, 22 nt, Artificial Sequence
  RPE65 RNA guide
ugaagccauccucuuuuauguc

SEQ ID NO: 31134 - RNA, 22 nt, Artificial Sequence
  RPE65 RNA guide
ugaaggcccagugacaagcacc

SEQ ID NO: 31135 - RNA, 22 nt, Artificial Sequence
  RPE65 RNA guide
ugaauaaaugaaggcccaguga

SEQ ID NO: 31136 - RNA, 22 nt, Artificial Sequence
  RPE65 RNA guide
ugaauccucuaaguuacuuaaa

SEQ ID NO: 31137 - RNA, 22 nt, Artificial Sequence
  RPE65 RNA guide
ugacaaagguguaauccugauc

SEQ ID NO: 31138 - RNA, 22 nt, Artificial Sequence
  RPE65 RNA guide
ugacaagcaccugggaguauua

SEQ ID NO: 31139 - RNA, 22 nt, Artificial Sequence
  RPE65 RNA guide
ugacaguuugaagaugacaaag

SEQ ID NO: 31140 - RNA, 22 nt, Artificial Sequence
  RPE65 RNA guide
ugacauaaaagaggauggcuuc

SEQ ID NO: 31141 - RNA, 22 nt, Artificial Sequence
  RPE65 RNA guide
ugacccacagggggagucugca

SEQ ID NO: 31142 - RNA, 22 nt, Artificial Sequence
  RPE65 RNA guide
ugagagacgccaaggaauagga

SEQ ID NO: 31143 - RNA, 22 nt, Artificial Sequence
  RPE65 RNA guide
ugagcuaggcacugacaguuug

SEQ ID NO: 31144 - RNA, 22 nt, Artificial Sequence
  RPE65 RNA guide
ugaggcucagaacguuuaagua

SEQ ID NO: 31145 - RNA, 22 nt, Artificial Sequence
  RPE65 RNA guide
ugauagagcuagguuagcaucu

SEQ ID NO: 31146 - RNA, 22 nt, Artificial Sequence
  RPE65 RNA guide
ugaucccucucccugugaccca

SEQ ID NO: 31147 - RNA, 22 nt, Artificial Sequence
  RPE65 RNA guide
ugauccuuagggaauuccaauu

SEQ ID NO: 31148 - RNA, 22 nt, Artificial Sequence
  RPE65 RNA guide
ugcacugagagacgccaaggaa

SEQ ID NO: 31149 - RNA, 22 nt, Artificial Sequence
  RPE65 RNA guide
ugcagaaaaacgcuaccuaauu

SEQ ID NO: 31150 - RNA, 22 nt, Artificial Sequence
  RPE65 RNA guide
ugcagacucccccuguggguca

SEQ ID NO: 31151 - RNA, 22 nt, Artificial Sequence
  RPE65 RNA guide
ugcauuagagaaauaaaguaaa

SEQ ID NO: 31152 - RNA, 22 nt, Artificial Sequence
  RPE65 RNA guide
ugccaggcacugagcuaggcac

SEQ ID NO: 31153 - RNA, 22 nt, Artificial Sequence
  RPE65 RNA guide
ugcccauuuuauuagaggaaug

SEQ ID NO: 31154 - RNA, 22 nt, Artificial Sequence
  RPE65 RNA guide
ugccucccagcagaaccaacau

SEQ ID NO: 31155 - RNA, 22 nt, Artificial Sequence
  RPE65 RNA guide
ugccuggcacauaguaaauguc

SEQ ID NO: 31156 - RNA, 22 nt, Artificial Sequence
  RPE65 RNA guide
ugcuaaccuagcucuaucauuu

SEQ ID NO: 31157 - RNA, 22 nt, Artificial Sequence
  RPE65 RNA guide
ugcuauaaaaagcccaaaccac

SEQ ID NO: 31158 - RNA, 22 nt, Artificial Sequence
  RPE65 RNA guide
ugcugggaggcagauguagaug

SEQ ID NO: 31159 - RNA, 22 nt, Artificial Sequence
  RPE65 RNA guide
ugcuugucacugggccuucauu

SEQ ID NO: 31160 - RNA, 22 nt, Artificial Sequence
  RPE65 RNA guide
uggaauucccuaaggaucagga

SEQ ID NO: 31161 - RNA, 22 nt, Artificial Sequence
  RPE65 RNA guide
uggcacauaguaaauguccuau

SEQ ID NO: 31162 - RNA, 22 nt, Artificial Sequence
  RPE65 RNA guide
uggcgucucucagugcagacuc

SEQ ID NO: 31163 - RNA, 22 nt, Artificial Sequence
  RPE65 RNA guide
uggcuuccuauuccuuggcguc

SEQ ID NO: 31164 - RNA, 22 nt, Artificial Sequence
  RPE65 RNA guide
ugggaggcagauguagaugcua

SEQ ID NO: 31165 - RNA, 22 nt, Artificial Sequence
  RPE65 RNA guide
ugggaguauuaaaggguggugg

SEQ ID NO: 31166 - RNA, 22 nt, Artificial Sequence
  RPE65 RNA guide
ugggcaugaaacccaccacccu

SEQ ID NO: 31167 - RNA, 22 nt, Artificial Sequence
  RPE65 RNA guide
ugggccuucauuuauucagaca

SEQ ID NO: 31168 - RNA, 22 nt, Artificial Sequence
  RPE65 RNA guide
ugggcuuuuuauagcaagaacc

SEQ ID NO: 31169 - RNA, 22 nt, Artificial Sequence
  RPE65 RNA guide
ugggucacagggagagggauca

SEQ ID NO: 31170 - RNA, 22 nt, Artificial Sequence
  RPE65 RNA guide
uggguucuugcuauaaaaagcc

SEQ ID NO: 31171 - RNA, 22 nt, Artificial Sequence
  RPE65 RNA guide
uggguuucaugcccauuuuauu

SEQ ID NO: 31172 - RNA, 22 nt, Artificial Sequence
  RPE65 RNA guide
uggucucgcccaucuugaagcc

SEQ ID NO: 31173 - RNA, 22 nt, Artificial Sequence
  RPE65 RNA guide
ugguggguuucaugcccauuuu

SEQ ID NO: 31174 - RNA, 22 nt, Artificial Sequence
  RPE65 RNA guide
uggugucugaauaaaugaaggc

SEQ ID NO: 31175 - RNA, 22 nt, Artificial Sequence
  RPE65 RNA guide
ugguucugcugggaggcagaug

SEQ ID NO: 31176 - RNA, 22 nt, Artificial Sequence
  RPE65 RNA guide
ugguuugggcuuuuuauagcaa

SEQ ID NO: 31177 - RNA, 22 nt, Artificial Sequence
  RPE65 RNA guide
uguaauccugauccuuagggaa

SEQ ID NO: 31178 - RNA, 22 nt, Artificial Sequence
  RPE65 RNA guide
uguagaugcuaaccuagcucua

SEQ ID NO: 31179 - RNA, 22 nt, Artificial Sequence
  RPE65 RNA guide
ugucacugggccuucauuuauu

SEQ ID NO: 31180 - RNA, 22 nt, Artificial Sequence
  RPE65 RNA guide
ugucagucucucuucucuggcu

SEQ ID NO: 31181 - RNA, 22 nt, Artificial Sequence
  RPE65 RNA guide
ugucagugccuagcucagugcc

SEQ ID NO: 31182 - RNA, 22 nt, Artificial Sequence
  RPE65 RNA guide
ugucaucuucaaacugucagug

SEQ ID NO: 31183 - RNA, 22 nt, Artificial Sequence
  RPE65 RNA guide
ugucugaauaaaugaaggccca

SEQ ID NO: 31184 - RNA, 22 nt, Artificial Sequence
  RPE65 RNA guide
ugucugugaauccucuaaguua

SEQ ID NO: 31185 - RNA, 22 nt, Artificial Sequence
  RPE65 RNA guide
ugugaauccucuaaguuacuua

SEQ ID NO: 31186 - RNA, 22 nt, Artificial Sequence
  RPE65 RNA guide
ugugacccacagggggagucug

SEQ ID NO: 31187 - RNA, 22 nt, Artificial Sequence
  RPE65 RNA guide
ugugccaggcacugagcuaggc

SEQ ID NO: 31188 - RNA, 22 nt, Artificial Sequence
  RPE65 RNA guide
ugugggucacagggagagggau

SEQ ID NO: 31189 - RNA, 22 nt, Artificial Sequence
  RPE65 RNA guide
uguugguucugcugggaggcag

SEQ ID NO: 31190 - RNA, 22 nt, Artificial Sequence
  RPE65 RNA guide
uuaaacguucugagccucaauu

SEQ ID NO: 31191 - RNA, 22 nt, Artificial Sequence
  RPE65 RNA guide
uuaaagggugguggguuucaug

SEQ ID NO: 31192 - RNA, 22 nt, Artificial Sequence
  RPE65 RNA guide
uuaaguaacuuagaggauucac

SEQ ID NO: 31193 - RNA, 22 nt, Artificial Sequence
  RPE65 RNA guide
uuaauacucccaggugcuuguc

SEQ ID NO: 31194 - RNA, 22 nt, Artificial Sequence
  RPE65 RNA guide
uuacaccuuugucaucuucaaa

SEQ ID NO: 31195 - RNA, 22 nt, Artificial Sequence
  RPE65 RNA guide
uuacuuaaacguucugagccuc

SEQ ID NO: 31196 - RNA, 22 nt, Artificial Sequence
  RPE65 RNA guide
uuagagaaauaaaguaaaggcg

SEQ ID NO: 31197 - RNA, 22 nt, Artificial Sequence
  RPE65 RNA guide
uuagaggaauguugguucugcu

SEQ ID NO: 31198 - RNA, 22 nt, Artificial Sequence
  RPE65 RNA guide
uuagaggauucacagacaguga

SEQ ID NO: 31199 - RNA, 22 nt, Artificial Sequence
  RPE65 RNA guide
uuagcaucuacaucugccuccc

SEQ ID NO: 31200 - RNA, 22 nt, Artificial Sequence
  RPE65 RNA guide
uuagggaauuccaauuagguag

SEQ ID NO: 31201 - RNA, 22 nt, Artificial Sequence
  RPE65 RNA guide
uuagguagcguuuuucugcauu

SEQ ID NO: 31202 - RNA, 22 nt, Artificial Sequence
  RPE65 RNA guide
uuauagcaagaacccauuuucu

SEQ ID NO: 31203 - RNA, 22 nt, Artificial Sequence
  RPE65 RNA guide
uuauaggacauuuacuaugugc

SEQ ID NO: 31204 - RNA, 22 nt, Artificial Sequence
  RPE65 RNA guide
uuaugucagucucucuucucug

SEQ ID NO: 31205 - RNA, 22 nt, Artificial Sequence
  RPE65 RNA guide
uuauuagaggaauguugguucu

SEQ ID NO: 31206 - RNA, 22 nt, Artificial Sequence
  RPE65 RNA guide
uuauuucucuaaugcagaaaaa

SEQ ID NO: 31207 - RNA, 22 nt, Artificial Sequence
  RPE65 RNA guide
uucaaacugucagugccuagcu

SEQ ID NO: 31208 - RNA, 22 nt, Artificial Sequence
  RPE65 RNA guide
uucacagacagugaaaugauag

SEQ ID NO: 31209 - RNA, 22 nt, Artificial Sequence
  RPE65 RNA guide
uucacugucugugaauccucua

SEQ ID NO: 31210 - RNA, 22 nt, Artificial Sequence
  RPE65 RNA guide
uucaugcccauuuuauuagagg

SEQ ID NO: 31211 - RNA, 22 nt, Artificial Sequence
  RPE65 RNA guide
uucauucgccuuuacuuuauuu

SEQ ID NO: 31212 - RNA, 22 nt, Artificial Sequence
  RPE65 RNA guide
uuccaauuagguagcguuuuuc

SEQ ID NO: 31213 - RNA, 22 nt, Artificial Sequence
  RPE65 RNA guide
uuccauuggugucugaauaaau

SEQ ID NO: 31214 - RNA, 22 nt, Artificial Sequence
  RPE65 RNA guide
uucccuaaggaucaggauuaca

SEQ ID NO: 31215 - RNA, 22 nt, Artificial Sequence
  RPE65 RNA guide
uuccuauuccuuggcgucucuc

SEQ ID NO: 31216 - RNA, 22 nt, Artificial Sequence
  RPE65 RNA guide
uuccucuaauaaaaugggcaug

SEQ ID NO: 31217 - RNA, 22 nt, Artificial Sequence
  RPE65 RNA guide
uuccuuggcgucucucagugca

SEQ ID NO: 31218 - RNA, 22 nt, Artificial Sequence
  RPE65 RNA guide
uucgccuuuacuuuauuucucu

SEQ ID NO: 31219 - RNA, 22 nt, Artificial Sequence
  RPE65 RNA guide
uucucuaaugcagaaaaacgcu

SEQ ID NO: 31220 - RNA, 22 nt, Artificial Sequence
  RPE65 RNA guide
uucucuggcuuccuauuccuug

SEQ ID NO: 31221 - RNA, 22 nt, Artificial Sequence
  RPE65 RNA guide
uucugcugggaggcagauguag

SEQ ID NO: 31222 - RNA, 22 nt, Artificial Sequence
  RPE65 RNA guide
uucuugcuauaaaaagcccaaa

SEQ ID NO: 31223 - RNA, 22 nt, Artificial Sequence
  RPE65 RNA guide
uugaagaugacaaagguguaau

SEQ ID NO: 31224 - RNA, 22 nt, Artificial Sequence
  RPE65 RNA guide
uugaagccauccucuuuuaugu

SEQ ID NO: 31225 - RNA, 22 nt, Artificial Sequence
  RPE65 RNA guide
uugaggcucagaacguuuaagu

SEQ ID NO: 31226 - RNA, 22 nt, Artificial Sequence
  RPE65 RNA guide
uugcuauaaaaagcccaaacca

SEQ ID NO: 31227 - RNA, 22 nt, Artificial Sequence
  RPE65 RNA guide
uuggaauucccuaaggaucagg

SEQ ID NO: 31228 - RNA, 22 nt, Artificial Sequence
  RPE65 RNA guide
uuggcgucucucagugcagacu

SEQ ID NO: 31229 - RNA, 22 nt, Artificial Sequence
  RPE65 RNA guide
uugggcuuuuuauagcaagaac

SEQ ID NO: 31230 - RNA, 22 nt, Artificial Sequence
  RPE65 RNA guide
uuggucucgcccaucuugaagc

SEQ ID NO: 31231 - RNA, 22 nt, Artificial Sequence
  RPE65 RNA guide
uuggugucugaauaaaugaagg

SEQ ID NO: 31232 - RNA, 22 nt, Artificial Sequence
  RPE65 RNA guide
uugguucugcugggaggcagau

SEQ ID NO: 31233 - RNA, 22 nt, Artificial Sequence
  RPE65 RNA guide
uugucacugggccuucauuuau

SEQ ID NO: 31234 - RNA, 22 nt, Artificial Sequence
  RPE65 RNA guide
uugucaucuucaaacugucagu

SEQ ID NO: 31235 - RNA, 22 nt, Artificial Sequence
  RPE65 RNA guide
uuuaaguaacuuagaggauuca

SEQ ID NO: 31236 - RNA, 22 nt, Artificial Sequence
  RPE65 RNA guide
uuuaauacucccaggugcuugu

SEQ ID NO: 31237 - RNA, 22 nt, Artificial Sequence
  RPE65 RNA guide
uuuacuaugugccaggcacuga

SEQ ID NO: 31238 - RNA, 22 nt, Artificial Sequence
  RPE65 RNA guide
uuuauagcaagaacccauuuuc

SEQ ID NO: 31239 - RNA, 22 nt, Artificial Sequence
  RPE65 RNA guide
uuuauaggacauuuacuaugug

SEQ ID NO: 31240 - RNA, 22 nt, Artificial Sequence
  RPE65 RNA guide
uuuaugucagucucucuucucu

(The sequence listing continues in the following parts.)

1. A method for modifying in a cell a mutant allele of the retinal pigment epithelium-specific 65 kDa protein (RPE65) gene having a mutation associated with a dominant RPE65 gene disorder, the method comprising
introducing to the cell a composition comprising:
at least one CRISPR nuclease or a sequence encoding a CRISPR nuclease; and
a first RNA molecule comprising a guide sequence portion having 17-25 nucleotides or a nucleotide sequence encoding the same,
wherein a complex of the CRISPR nuclease and the first RNA molecule affects a double strand break in the mutant allele of the RPE65 gene.

2. The method of claim 1, wherein the first RNA molecule targets the CRISPR nuclease to the mutation associated with a dominant RPE65 gene disorder, wherein the mutation associated with a dominant RPE65 gene disorder is any one of 1:68431085T>C and 1:68446825G>A (hg38), and
wherein the guide sequence portion of the first RNA molecule comprises 17-25 contiguous nucleotides containing nucleotides in the sequence set forth in any one of SEQ ID NOs: 1-49516 that targets a mutation associated with a dominant RPE65 gene disorder.

3. (canceled)

4. (canceled)

5. The method of claim 1, wherein the first RNA molecule targets the CRISPR nuclease to a SNP position of the mutant allele, wherein the SNP position is any one of rs60701104, rs9436400, rs868541802, rs3125890, rs75159457, rs1205919238, rs11209300, rs4264030, rs2419988, rs3118415, rs3118416, rs149739986, rs2182315, rs3118418, rs932783, rs12124063, rs77585943, rs1886906, rs3125891, rs11581095, rs12030710, rs1003041423, rs3118419, rs5774935, rs150459448, rs1555845, rs1555846, rs11269074, rs3790469, rs3125894, rs3125895, rs3125896, rs3125897, rs3125898, rs17130688, rs938759267, rs34194247, rs3125900, rs79716012, rs75711879, rs12145904, rs3125902, rs3118420, rs12138573, rs1925955, rs17130691, rs3125904, rs78507000, rs150774295, rs3125905, rs2038900, rs2038901, rs147665807, rs17130694, rs12408546, rs12077372, rs3790472, rs3790473, rs147893529, rs2012235, rs3118423, rs2986125, rs2986124, rs72926973, rs2277874, rs3125906, rs3118426, rs3125907, rs382422, rs3118427, rs3125908, rs12759602, rs2477974, rs3125909, rs3118428, rs12407140, rs72674322, rs72674323, rs3125910, and rs1318744874, and
wherein the guide sequence portion of the first RNA molecule comprises 17-25 contiguous nucleotides containing nucleotides in the sequence set forth in any one of SEQ ID NOs: 1-49516 that targets a SNP position of the mutant allele.

6. (canceled)

7. (canceled)

8. The method of claim 5, wherein the SNP position is in an exon or intron of the RPE65 mutant allele.

9. The method of claim 5, wherein the SNP position contains a heterozygous SNP.

10. The method of claim 1, further comprising introducing to the cell a second RNA molecule comprising a guide sequence portion having 17-25 nucleotides or a nucleotide sequence encoding the same, wherein a complex of the second RNA molecule and a CRISPR nuclease affects a second double strand break in the RPE65 gene.

11. The method of claim 10, wherein the guide sequence portion of the second RNA molecule comprises 17-25 contiguous nucleotides containing nucleotides in the sequence set forth in any one of SEQ ID NOs: 1-49516 other than the sequence of the first RNA molecule.

12. The method of claim 10, wherein the second RNA molecule comprises a non-discriminatory guide portion that targets both functional and mutated RPE65 alleles.

13. The method of a claim 10, wherein the second RNA molecule comprises a non-discriminatory guide portion that targets any one a region upstream to the RPE65 transcriptional start site, an intron of RPE65, and an intergenic region downstream of RPE65.

14. The method of claim 10, wherein the second RNA molecule comprises a non-discriminatory guide portion that targets a sequence that is located within a genomic range selected from any one of 1:68450655-1:68451154, 1:68428322-1:68428821, 1:68437687-1:68438186, 1:68431586-1:68432085, 1:68431377-1:68431469, 1:68431177-1:68431281, 1:68430565-1:68431064, 1:68429928-1:68430427, 1:68448707-1:68449206, 1:68449395-1:68449894, 1:68448124-1:68448623, 1:68446861-1:68447360, 1:68446210-1:68446709, 1:68444884-1:68445383, 1:68444673-1:68444775, 1:68444031-1:68444530, 1:68441001-1:68441500, 1:68440353-1:68440852, 1:68439643-1:68440142, 1:68439324-1:68439560, 1:68439082-1:68439190, and 1:68438317-1:68438941.

15. The method of claim 10, wherein the second RNA molecule comprises a non-discriminatory guide portion that targets a sequence that is located up to 500 base pairs from an exon that is excised by the first and second RNA molecules.

16. The method of claim 10, wherein an exon or a portion thereof is excised from the mutant allele of the RPE65 gene.

17. A modified cell obtained by the method of claim 1.

18. The method of claim 17, wherein the modified cell is a stem cell or a retinal pigment epithelium cell.

19. A first RNA molecule comprising a guide sequence portion having 17-25 contiguous nucleotides containing nucleotides in the sequence set forth in any one of SEQ ID NOs: 1-49516.

20. A composition comprising the first RNA molecule of claim 19 and at least one CRISPR nuclease.

21. The composition of claim 20, further comprising a second RNA molecule comprising a guide sequence portion having 17-25 contiguous nucleotides, wherein the second RNA molecule targets a RPE65 allele, and wherein the guide sequence portion of the second RNA molecule is a different sequence from the sequence of the guide sequence portion of the first RNA molecule.

22. The composition of claim 21, wherein the guide sequence portion of the second RNA molecule comprises 17-25 contiguous nucleotides containing nucleotides in the sequence set forth in any one of SEQ ID NOs: 1-49516 other than the sequence of the first RNA molecule.

23. A method for inactivating a mutant RPE65 allele in a cell, the method comprising delivering to the cell the composition of claim 20.

24. A method for treating a dominant RPE65 gene disorder, the method comprising delivering to a cell of a subject having a dominant RPE65 gene disorder the composition of claim 20.

25-28. (canceled)
